United States Patent Application Publication US 2019/0048337 A1 - sequence listing, part 14

SEQ ID NO: 449043 - RNA, 19 nt, Artificial Sequence
  Synthetic
agaccuaaauauuuuggaa

SEQ ID NO: 449044 - RNA, 20 nt, Artificial Sequence
  Synthetic
gagaccuaaauauuuuggaa

SEQ ID NO: 449045 - RNA, 21 nt, Artificial Sequence
  Synthetic
ggagaccuaaauauuuuggaa

SEQ ID NO: 449046 - RNA, 22 nt, Artificial Sequence
  Synthetic
aggagaccuaaauauuuuggaa

SEQ ID NO: 449047 - RNA, 23 nt, Artificial Sequence
  Synthetic
aaggagaccuaaauauuuuggaa

SEQ ID NO: 449048 - RNA, 24 nt, Artificial Sequence
  Synthetic
caaggagaccuaaauauuuuggaa

SEQ ID NO: 449049 - RNA, 18 nt, Artificial Sequence
  Synthetic
acggaaaagaaaaaugaa

SEQ ID NO: 449050 - RNA, 19 nt, Artificial Sequence
  Synthetic
uacggaaaagaaaaaugaa

SEQ ID NO: 449051 - RNA, 20 nt, Artificial Sequence
  Synthetic
cuacggaaaagaaaaaugaa

SEQ ID NO: 449052 - RNA, 21 nt, Artificial Sequence
  Synthetic
gcuacggaaaagaaaaaugaa

SEQ ID NO: 449053 - RNA, 22 nt, Artificial Sequence
  Synthetic
ugcuacggaaaagaaaaaugaa

SEQ ID NO: 449054 - RNA, 23 nt, Artificial Sequence
  Synthetic
uugcuacggaaaagaaaaaugaa

SEQ ID NO: 449055 - RNA, 24 nt, Artificial Sequence
  Synthetic
uuugcuacggaaaagaaaaaugaa

SEQ ID NO: 449056 - RNA, 18 nt, Artificial Sequence
  Synthetic
aaaucaacucaaaaugaa

SEQ ID NO: 449057 - RNA, 19 nt, Artificial Sequence
  Synthetic
aaaaucaacucaaaaugaa

SEQ ID NO: 449058 - RNA, 20 nt, Artificial Sequence
  Synthetic
aaaaaucaacucaaaaugaa

SEQ ID NO: 449059 - RNA, 21 nt, Artificial Sequence
  Synthetic
uaaaaaucaacucaaaaugaa

SEQ ID NO: 449060 - RNA, 22 nt, Artificial Sequence
  Synthetic
auaaaaaucaacucaaaaugaa

SEQ ID NO: 449061 - RNA, 23 nt, Artificial Sequence
  Synthetic
cauaaaaaucaacucaaaaugaa

SEQ ID NO: 449062 - RNA, 24 nt, Artificial Sequence
  Synthetic
acauaaaaaucaacucaaaaugaa

SEQ ID NO: 449063 - RNA, 18 nt, Artificial Sequence
  Synthetic
gccuacuuucaaaaugaa

SEQ ID NO: 449064 - RNA, 19 nt, Artificial Sequence
  Synthetic
ugccuacuuucaaaaugaa

SEQ ID NO: 449065 - RNA, 20 nt, Artificial Sequence
  Synthetic
uugccuacuuucaaaaugaa

SEQ ID NO: 449066 - RNA, 21 nt, Artificial Sequence
  Synthetic
uuugccuacuuucaaaaugaa

SEQ ID NO: 449067 - RNA, 22 nt, Artificial Sequence
  Synthetic
uuuugccuacuuucaaaaugaa

SEQ ID NO: 449068 - RNA, 23 nt, Artificial Sequence
  Synthetic
uuuuugccuacuuucaaaaugaa

SEQ ID NO: 449069 - RNA, 24 nt, Artificial Sequence
  Synthetic
uuuuuugccuacuuucaaaaugaa

SEQ ID NO: 449070 - RNA, 18 nt, Artificial Sequence
  Synthetic
guaccuuuagaaaaugaa

SEQ ID NO: 449071 - RNA, 19 nt, Artificial Sequence
  Synthetic
uguaccuuuagaaaaugaa

SEQ ID NO: 449072 - RNA, 20 nt, Artificial Sequence
  Synthetic
cuguaccuuuagaaaaugaa

SEQ ID NO: 449073 - RNA, 21 nt, Artificial Sequence
  Synthetic
ucuguaccuuuagaaaaugaa

SEQ ID NO: 449074 - RNA, 22 nt, Artificial Sequence
  Synthetic
uucuguaccuuuagaaaaugaa

SEQ ID NO: 449075 - RNA, 23 nt, Artificial Sequence
  Synthetic
auucuguaccuuuagaaaaugaa

SEQ ID NO: 449076 - RNA, 24 nt, Artificial Sequence
  Synthetic
aauucuguaccuuuagaaaaugaa

SEQ ID NO: 449077 - RNA, 18 nt, Artificial Sequence
  Synthetic
cugguaagggaaaaugaa

SEQ ID NO: 449078 - RNA, 19 nt, Artificial Sequence
  Synthetic
acugguaagggaaaaugaa

SEQ ID NO: 449079 - RNA, 20 nt, Artificial Sequence
  Synthetic
cacugguaagggaaaaugaa

SEQ ID NO: 449080 - RNA, 21 nt, Artificial Sequence
  Synthetic
acacugguaagggaaaaugaa

SEQ ID NO: 449081 - RNA, 22 nt, Artificial Sequence
  Synthetic
aacacugguaagggaaaaugaa

SEQ ID NO: 449082 - RNA, 23 nt, Artificial Sequence
  Synthetic
aaacacugguaagggaaaaugaa

SEQ ID NO: 449083 - RNA, 24 nt, Artificial Sequence
  Synthetic
gaaacacugguaagggaaaaugaa

SEQ ID NO: 449084 - RNA, 18 nt, Artificial Sequence
  Synthetic
acugcuggugaaaaugaa

SEQ ID NO: 449085 - RNA, 19 nt, Artificial Sequence
  Synthetic
uacugcuggugaaaaugaa

SEQ ID NO: 449086 - RNA, 20 nt, Artificial Sequence
  Synthetic
auacugcuggugaaaaugaa

SEQ ID NO: 449087 - RNA, 21 nt, Artificial Sequence
  Synthetic
uauacugcuggugaaaaugaa

SEQ ID NO: 449088 - RNA, 22 nt, Artificial Sequence
  Synthetic
auauacugcuggugaaaaugaa

SEQ ID NO: 449089 - RNA, 23 nt, Artificial Sequence
  Synthetic
uauauacugcuggugaaaaugaa

SEQ ID NO: 449090 - RNA, 24 nt, Artificial Sequence
  Synthetic
uuauauacugcuggugaaaaugaa

SEQ ID NO: 449091 - RNA, 18 nt, Artificial Sequence
  Synthetic
cugcuguaguaaaaugaa

SEQ ID NO: 449092 - RNA, 19 nt, Artificial Sequence
  Synthetic
gcugcuguaguaaaaugaa

SEQ ID NO: 449093 - RNA, 20 nt, Artificial Sequence
  Synthetic
agcugcuguaguaaaaugaa

SEQ ID NO: 449094 - RNA, 21 nt, Artificial Sequence
  Synthetic
gagcugcuguaguaaaaugaa

SEQ ID NO: 449095 - RNA, 22 nt, Artificial Sequence
  Synthetic
agagcugcuguaguaaaaugaa

SEQ ID NO: 449096 - RNA, 23 nt, Artificial Sequence
  Synthetic
cagagcugcuguaguaaaaugaa

SEQ ID NO: 449097 - RNA, 24 nt, Artificial Sequence
  Synthetic
gcagagcugcuguaguaaaaugaa

SEQ ID NO: 449098 - RNA, 18 nt, Artificial Sequence
  Synthetic
gugaguaaaacaaaugaa

SEQ ID NO: 449099 - RNA, 19 nt, Artificial Sequence
  Synthetic
ggugaguaaaacaaaugaa

SEQ ID NO: 449100 - RNA, 20 nt, Artificial Sequence
  Synthetic
aggugaguaaaacaaaugaa

SEQ ID NO: 449101 - RNA, 21 nt, Artificial Sequence
  Synthetic
aaggugaguaaaacaaaugaa

SEQ ID NO: 449102 - RNA, 22 nt, Artificial Sequence
  Synthetic
caaggugaguaaaacaaaugaa

SEQ ID NO: 449103 - RNA, 23 nt, Artificial Sequence
  Synthetic
acaaggugaguaaaacaaaugaa

SEQ ID NO: 449104 - RNA, 24 nt, Artificial Sequence
  Synthetic
aacaaggugaguaaaacaaaugaa

SEQ ID NO: 449105 - RNA, 18 nt, Artificial Sequence
  Synthetic
auuaaauuuccaaaugaa

SEQ ID NO: 449106 - RNA, 19 nt, Artificial Sequence
  Synthetic
cauuaaauuuccaaaugaa

SEQ ID NO: 449107 - RNA, 20 nt, Artificial Sequence
  Synthetic
acauuaaauuuccaaaugaa

SEQ ID NO: 449108 - RNA, 21 nt, Artificial Sequence
  Synthetic
gacauuaaauuuccaaaugaa

SEQ ID NO: 449109 - RNA, 22 nt, Artificial Sequence
  Synthetic
ugacauuaaauuuccaaaugaa

SEQ ID NO: 449110 - RNA, 23 nt, Artificial Sequence
  Synthetic
cugacauuaaauuuccaaaugaa

SEQ ID NO: 449111 - RNA, 24 nt, Artificial Sequence
  Synthetic
acugacauuaaauuuccaaaugaa

SEQ ID NO: 449112 - RNA, 18 nt, Artificial Sequence
  Synthetic
ccagcuucuucaaaugaa

SEQ ID NO: 449113 - RNA, 19 nt, Artificial Sequence
  Synthetic
accagcuucuucaaaugaa

SEQ ID NO: 449114 - RNA, 20 nt, Artificial Sequence
  Synthetic
uaccagcuucuucaaaugaa

SEQ ID NO: 449115 - RNA, 21 nt, Artificial Sequence
  Synthetic
cuaccagcuucuucaaaugaa

SEQ ID NO: 449116 - RNA, 22 nt, Artificial Sequence
  Synthetic
gcuaccagcuucuucaaaugaa

SEQ ID NO: 449117 - RNA, 23 nt, Artificial Sequence
  Synthetic
ugcuaccagcuucuucaaaugaa

SEQ ID NO: 449118 - RNA, 24 nt, Artificial Sequence
  Synthetic
augcuaccagcuucuucaaaugaa

SEQ ID NO: 449119 - RNA, 18 nt, Artificial Sequence
  Synthetic
acaaagugaagaaaugaa

SEQ ID NO: 449120 - RNA, 19 nt, Artificial Sequence
  Synthetic
gacaaagugaagaaaugaa

SEQ ID NO: 449121 - RNA, 20 nt, Artificial Sequence
  Synthetic
agacaaagugaagaaaugaa

SEQ ID NO: 449122 - RNA, 21 nt, Artificial Sequence
  Synthetic
aagacaaagugaagaaaugaa

SEQ ID NO: 449123 - RNA, 22 nt, Artificial Sequence
  Synthetic
gaagacaaagugaagaaaugaa

SEQ ID NO: 449124 - RNA, 23 nt, Artificial Sequence
  Synthetic
agaagacaaagugaagaaaugaa

SEQ ID NO: 449125 - RNA, 24 nt, Artificial Sequence
  Synthetic
cagaagacaaagugaagaaaugaa

SEQ ID NO: 449126 - RNA, 18 nt, Artificial Sequence
  Synthetic
uuaguauagcgaaaugaa

SEQ ID NO: 449127 - RNA, 19 nt, Artificial Sequence
  Synthetic
cuuaguauagcgaaaugaa

SEQ ID NO: 449128 - RNA, 20 nt, Artificial Sequence
  Synthetic
ccuuaguauagcgaaaugaa

SEQ ID NO: 449129 - RNA, 21 nt, Artificial Sequence
  Synthetic
accuuaguauagcgaaaugaa

SEQ ID NO: 449130 - RNA, 22 nt, Artificial Sequence
  Synthetic
gaccuuaguauagcgaaaugaa

SEQ ID NO: 449131 - RNA, 23 nt, Artificial Sequence
  Synthetic
ugaccuuaguauagcgaaaugaa

SEQ ID NO: 449132 - RNA, 24 nt, Artificial Sequence
  Synthetic
uugaccuuaguauagcgaaaugaa

SEQ ID NO: 449133 - RNA, 18 nt, Artificial Sequence
  Synthetic
ugaaaugaaugaaaugaa

SEQ ID NO: 449134 - RNA, 19 nt, Artificial Sequence
  Synthetic
augaaaugaaugaaaugaa

SEQ ID NO: 449135 - RNA, 20 nt, Artificial Sequence
  Synthetic
gaugaaaugaaugaaaugaa

SEQ ID NO: 449136 - RNA, 21 nt, Artificial Sequence
  Synthetic
agaugaaaugaaugaaaugaa

SEQ ID NO: 449137 - RNA, 22 nt, Artificial Sequence
  Synthetic
aagaugaaaugaaugaaaugaa

SEQ ID NO: 449138 - RNA, 23 nt, Artificial Sequence
  Synthetic
gaagaugaaaugaaugaaaugaa

SEQ ID NO: 449139 - RNA, 24 nt, Artificial Sequence
  Synthetic
ggaagaugaaaugaaugaaaugaa

SEQ ID NO: 449140 - RNA, 18 nt, Artificial Sequence
  Synthetic
aggaaaaaaguaaaugaa

SEQ ID NO: 449141 - RNA, 19 nt, Artificial Sequence
  Synthetic
uaggaaaaaaguaaaugaa

SEQ ID NO: 449142 - RNA, 20 nt, Artificial Sequence
  Synthetic
guaggaaaaaaguaaaugaa

SEQ ID NO: 449143 - RNA, 21 nt, Artificial Sequence
  Synthetic
aguaggaaaaaaguaaaugaa

SEQ ID NO: 449144 - RNA, 22 nt, Artificial Sequence
  Synthetic
gaguaggaaaaaaguaaaugaa

SEQ ID NO: 449145 - RNA, 23 nt, Artificial Sequence
  Synthetic
agaguaggaaaaaaguaaaugaa

SEQ ID NO: 449146 - RNA, 24 nt, Artificial Sequence
  Synthetic
aagaguaggaaaaaaguaaaugaa

SEQ ID NO: 449147 - RNA, 18 nt, Artificial Sequence
  Synthetic
uucugccuacacaaugaa

SEQ ID NO: 449148 - RNA, 19 nt, Artificial Sequence
  Synthetic
uuucugccuacacaaugaa

SEQ ID NO: 449149 - RNA, 20 nt, Artificial Sequence
  Synthetic
cuuucugccuacacaaugaa

SEQ ID NO: 449150 - RNA, 21 nt, Artificial Sequence
  Synthetic
ccuuucugccuacacaaugaa

SEQ ID NO: 449151 - RNA, 22 nt, Artificial Sequence
  Synthetic
uccuuucugccuacacaaugaa

SEQ ID NO: 449152 - RNA, 23 nt, Artificial Sequence
  Synthetic
uuccuuucugccuacacaaugaa

SEQ ID NO: 449153 - RNA, 24 nt, Artificial Sequence
  Synthetic
auuccuuucugccuacacaaugaa

SEQ ID NO: 449154 - RNA, 18 nt, Artificial Sequence
  Synthetic
aucacugacuacaaugaa

SEQ ID NO: 449155 - RNA, 19 nt, Artificial Sequence
  Synthetic
aaucacugacuacaaugaa

SEQ ID NO: 449156 - RNA, 20 nt, Artificial Sequence
  Synthetic
aaaucacugacuacaaugaa

SEQ ID NO: 449157 - RNA, 21 nt, Artificial Sequence
  Synthetic
caaaucacugacuacaaugaa

SEQ ID NO: 449158 - RNA, 22 nt, Artificial Sequence
  Synthetic
ccaaaucacugacuacaaugaa

SEQ ID NO: 449159 - RNA, 23 nt, Artificial Sequence
  Synthetic
accaaaucacugacuacaaugaa

SEQ ID NO: 449160 - RNA, 24 nt, Artificial Sequence
  Synthetic
gaccaaaucacugacuacaaugaa

SEQ ID NO: 449161 - RNA, 18 nt, Artificial Sequence
  Synthetic
aauuuuaggaccaaugaa

SEQ ID NO: 449162 - RNA, 19 nt, Artificial Sequence
  Synthetic
caauuuuaggaccaaugaa

SEQ ID NO: 449163 - RNA, 20 nt, Artificial Sequence
  Synthetic
gcaauuuuaggaccaaugaa

SEQ ID NO: 449164 - RNA, 21 nt, Artificial Sequence
  Synthetic
ugcaauuuuaggaccaaugaa

SEQ ID NO: 449165 - RNA, 22 nt, Artificial Sequence
  Synthetic
gugcaauuuuaggaccaaugaa

SEQ ID NO: 449166 - RNA, 23 nt, Artificial Sequence
  Synthetic
agugcaauuuuaggaccaaugaa

SEQ ID NO: 449167 - RNA, 24 nt, Artificial Sequence
  Synthetic
cagugcaauuuuaggaccaaugaa

SEQ ID NO: 449168 - RNA, 18 nt, Artificial Sequence
  Synthetic
gucaaaauagccaaugaa

SEQ ID NO: 449169 - RNA, 19 nt, Artificial Sequence
  Synthetic
ugucaaaauagccaaugaa

SEQ ID NO: 449170 - RNA, 20 nt, Artificial Sequence
  Synthetic
uugucaaaauagccaaugaa

SEQ ID NO: 449171 - RNA, 21 nt, Artificial Sequence
  Synthetic
auugucaaaauagccaaugaa

SEQ ID NO: 449172 - RNA, 22 nt, Artificial Sequence
  Synthetic
cauugucaaaauagccaaugaa

SEQ ID NO: 449173 - RNA, 23 nt, Artificial Sequence
  Synthetic
gcauugucaaaauagccaaugaa

SEQ ID NO: 449174 - RNA, 24 nt, Artificial Sequence
  Synthetic
agcauugucaaaauagccaaugaa

SEQ ID NO: 449175 - RNA, 18 nt, Artificial Sequence
  Synthetic
aaacauccugccaaugaa

SEQ ID NO: 449176 - RNA, 19 nt, Artificial Sequence
  Synthetic
caaacauccugccaaugaa

SEQ ID NO: 449177 - RNA, 20 nt, Artificial Sequence
  Synthetic
gcaaacauccugccaaugaa

SEQ ID NO: 449178 - RNA, 21 nt, Artificial Sequence
  Synthetic
agcaaacauccugccaaugaa

SEQ ID NO: 449179 - RNA, 22 nt, Artificial Sequence
  Synthetic
aagcaaacauccugccaaugaa

SEQ ID NO: 449180 - RNA, 23 nt, Artificial Sequence
  Synthetic
aaagcaaacauccugccaaugaa

SEQ ID NO: 449181 - RNA, 24 nt, Artificial Sequence
  Synthetic
caaagcaaacauccugccaaugaa

SEQ ID NO: 449182 - RNA, 18 nt, Artificial Sequence
  Synthetic
auuaaaccggucaaugaa

SEQ ID NO: 449183 - RNA, 19 nt, Artificial Sequence
  Synthetic
cauuaaaccggucaaugaa

SEQ ID NO: 449184 - RNA, 20 nt, Artificial Sequence
  Synthetic
gcauuaaaccggucaaugaa

SEQ ID NO: 449185 - RNA, 21 nt, Artificial Sequence
  Synthetic
agcauuaaaccggucaaugaa

SEQ ID NO: 449186 - RNA, 22 nt, Artificial Sequence
  Synthetic
gagcauuaaaccggucaaugaa

SEQ ID NO: 449187 - RNA, 23 nt, Artificial Sequence
  Synthetic
agagcauuaaaccggucaaugaa

SEQ ID NO: 449188 - RNA, 24 nt, Artificial Sequence
  Synthetic
gagagcauuaaaccggucaaugaa

SEQ ID NO: 449189 - RNA, 18 nt, Artificial Sequence
  Synthetic
auaauauuugucaaugaa

SEQ ID NO: 449190 - RNA, 19 nt, Artificial Sequence
  Synthetic
uauaauauuugucaaugaa

SEQ ID NO: 449191 - RNA, 20 nt, Artificial Sequence
  Synthetic
uuauaauauuugucaaugaa

SEQ ID NO: 449192 - RNA, 21 nt, Artificial Sequence
  Synthetic
uuuauaauauuugucaaugaa

SEQ ID NO: 449193 - RNA, 22 nt, Artificial Sequence
  Synthetic
cuuuauaauauuugucaaugaa

SEQ ID NO: 449194 - RNA, 23 nt, Artificial Sequence
  Synthetic
ucuuuauaauauuugucaaugaa

SEQ ID NO: 449195 - RNA, 24 nt, Artificial Sequence
  Synthetic
aucuuuauaauauuugucaaugaa

SEQ ID NO: 449196 - RNA, 18 nt, Artificial Sequence
  Synthetic
agcuagacuaagaaugaa

SEQ ID NO: 449197 - RNA, 19 nt, Artificial Sequence
  Synthetic
uagcuagacuaagaaugaa

SEQ ID NO: 449198 - RNA, 20 nt, Artificial Sequence
  Synthetic
uuagcuagacuaagaaugaa

SEQ ID NO: 449199 - RNA, 21 nt, Artificial Sequence
  Synthetic
cuuagcuagacuaagaaugaa

SEQ ID NO: 449200 - RNA, 22 nt, Artificial Sequence
  Synthetic
ccuuagcuagacuaagaaugaa

SEQ ID NO: 449201 - RNA, 23 nt, Artificial Sequence
  Synthetic
uccuuagcuagacuaagaaugaa

SEQ ID NO: 449202 - RNA, 24 nt, Artificial Sequence
  Synthetic
auccuuagcuagacuaagaaugaa

SEQ ID NO: 449203 - RNA, 18 nt, Artificial Sequence
  Synthetic
gauguccaggagaaugaa

SEQ ID NO: 449204 - RNA, 19 nt, Artificial Sequence
  Synthetic
ugauguccaggagaaugaa

SEQ ID NO: 449205 - RNA, 20 nt, Artificial Sequence
  Synthetic
uugauguccaggagaaugaa

SEQ ID NO: 449206 - RNA, 21 nt, Artificial Sequence
  Synthetic
auugauguccaggagaaugaa

SEQ ID NO: 449207 - RNA, 22 nt, Artificial Sequence
  Synthetic
gauugauguccaggagaaugaa

SEQ ID NO: 449208 - RNA, 23 nt, Artificial Sequence
  Synthetic
cgauugauguccaggagaaugaa

SEQ ID NO: 449209 - RNA, 24 nt, Artificial Sequence
  Synthetic
gcgauugauguccaggagaaugaa

SEQ ID NO: 449210 - RNA, 18 nt, Artificial Sequence
  Synthetic
aaggagcaugagaaugaa

SEQ ID NO: 449211 - RNA, 19 nt, Artificial Sequence
  Synthetic
caaggagcaugagaaugaa

SEQ ID NO: 449212 - RNA, 20 nt, Artificial Sequence
  Synthetic
ucaaggagcaugagaaugaa

SEQ ID NO: 449213 - RNA, 21 nt, Artificial Sequence
  Synthetic
aucaaggagcaugagaaugaa

SEQ ID NO: 449214 - RNA, 22 nt, Artificial Sequence
  Synthetic
caucaaggagcaugagaaugaa

SEQ ID NO: 449215 - RNA, 23 nt, Artificial Sequence
  Synthetic
ccaucaaggagcaugagaaugaa

SEQ ID NO: 449216 - RNA, 24 nt, Artificial Sequence
  Synthetic
gccaucaaggagcaugagaaugaa

SEQ ID NO: 449217 - RNA, 18 nt, Artificial Sequence
  Synthetic
uucaggaaauggaaugaa

SEQ ID NO: 449218 - RNA, 19 nt, Artificial Sequence
  Synthetic
cuucaggaaauggaaugaa

SEQ ID NO: 449219 - RNA, 20 nt, Artificial Sequence
  Synthetic
ucuucaggaaauggaaugaa

SEQ ID NO: 449220 - RNA, 21 nt, Artificial Sequence
  Synthetic
cucuucaggaaauggaaugaa

SEQ ID NO: 449221 - RNA, 22 nt, Artificial Sequence
  Synthetic
ucucuucaggaaauggaaugaa

SEQ ID NO: 449222 - RNA, 23 nt, Artificial Sequence
  Synthetic
cucucuucaggaaauggaaugaa

SEQ ID NO: 449223 - RNA, 24 nt, Artificial Sequence
  Synthetic
ccucucuucaggaaauggaaugaa

SEQ ID NO: 449224 - RNA, 18 nt, Artificial Sequence
  Synthetic
agcugagcuuggaaugaa

SEQ ID NO: 449225 - RNA, 19 nt, Artificial Sequence
  Synthetic
aagcugagcuuggaaugaa

SEQ ID NO: 449226 - RNA, 20 nt, Artificial Sequence
  Synthetic
aaagcugagcuuggaaugaa

SEQ ID NO: 449227 - RNA, 21 nt, Artificial Sequence
  Synthetic
aaaagcugagcuuggaaugaa

SEQ ID NO: 449228 - RNA, 22 nt, Artificial Sequence
  Synthetic
gaaaagcugagcuuggaaugaa

SEQ ID NO: 449229 - RNA, 23 nt, Artificial Sequence
  Synthetic
ggaaaagcugagcuuggaaugaa

SEQ ID NO: 449230 - RNA, 24 nt, Artificial Sequence
  Synthetic
aggaaaagcugagcuuggaaugaa

SEQ ID NO: 449231 - RNA, 18 nt, Artificial Sequence
  Synthetic
gaagaugaaaugaaugaa

SEQ ID NO: 449232 - RNA, 19 nt, Artificial Sequence
  Synthetic
ggaagaugaaaugaaugaa

SEQ ID NO: 449233 - RNA, 20 nt, Artificial Sequence
  Synthetic
uggaagaugaaaugaaugaa

SEQ ID NO: 449234 - RNA, 21 nt, Artificial Sequence
  Synthetic
auggaagaugaaaugaaugaa

SEQ ID NO: 449235 - RNA, 22 nt, Artificial Sequence
  Synthetic
aauggaagaugaaaugaaugaa

SEQ ID NO: 449236 - RNA, 23 nt, Artificial Sequence
  Synthetic
caauggaagaugaaaugaaugaa

SEQ ID NO: 449237 - RNA, 24 nt, Artificial Sequence
  Synthetic
gcaauggaagaugaaaugaaugaa

SEQ ID NO: 449238 - RNA, 18 nt, Artificial Sequence
  Synthetic
uggagccccuugaaugaa

SEQ ID NO: 449239 - RNA, 19 nt, Artificial Sequence
  Synthetic
uuggagccccuugaaugaa

SEQ ID NO: 449240 - RNA, 20 nt, Artificial Sequence
  Synthetic
guuggagccccuugaaugaa

SEQ ID NO: 449241 - RNA, 21 nt, Artificial Sequence
  Synthetic
gguuggagccccuugaaugaa

SEQ ID NO: 449242 - RNA, 22 nt, Artificial Sequence
  Synthetic
ugguuggagccccuugaaugaa

SEQ ID NO: 449243 - RNA, 23 nt, Artificial Sequence
  Synthetic
augguuggagccccuugaaugaa

SEQ ID NO: 449244 - RNA, 24 nt, Artificial Sequence
  Synthetic
aaugguuggagccccuugaaugaa

SEQ ID NO: 449245 - RNA, 18 nt, Artificial Sequence
  Synthetic
cuucacaaguugaaugaa

SEQ ID NO: 449246 - RNA, 19 nt, Artificial Sequence
  Synthetic
gcuucacaaguugaaugaa

SEQ ID NO: 449247 - RNA, 20 nt, Artificial Sequence
  Synthetic
cgcuucacaaguugaaugaa

SEQ ID NO: 449248 - RNA, 21 nt, Artificial Sequence
  Synthetic
acgcuucacaaguugaaugaa

SEQ ID NO: 449249 - RNA, 22 nt, Artificial Sequence
  Synthetic
aacgcuucacaaguugaaugaa

SEQ ID NO: 449250 - RNA, 23 nt, Artificial Sequence
  Synthetic
caacgcuucacaaguugaaugaa

SEQ ID NO: 449251 - RNA, 24 nt, Artificial Sequence
  Synthetic
ccaacgcuucacaaguugaaugaa

SEQ ID NO: 449252 - RNA, 18 nt, Artificial Sequence
  Synthetic
uacuucuugucuaaugaa

SEQ ID NO: 449253 - RNA, 19 nt, Artificial Sequence
  Synthetic
uuacuucuugucuaaugaa

SEQ ID NO: 449254 - RNA, 20 nt, Artificial Sequence
  Synthetic
uuuacuucuugucuaaugaa

SEQ ID NO: 449255 - RNA, 21 nt, Artificial Sequence
  Synthetic
uuuuacuucuugucuaaugaa

SEQ ID NO: 449256 - RNA, 22 nt, Artificial Sequence
  Synthetic
auuuuacuucuugucuaaugaa

SEQ ID NO: 449257 - RNA, 23 nt, Artificial Sequence
  Synthetic
uauuuuacuucuugucuaaugaa

SEQ ID NO: 449258 - RNA, 24 nt, Artificial Sequence
  Synthetic
guauuuuacuucuugucuaaugaa

SEQ ID NO: 449259 - RNA, 18 nt, Artificial Sequence
  Synthetic
auauuugaaaguaaugaa

SEQ ID NO: 449260 - RNA, 19 nt, Artificial Sequence
  Synthetic
cauauuugaaaguaaugaa

SEQ ID NO: 449261 - RNA, 20 nt, Artificial Sequence
  Synthetic
acauauuugaaaguaaugaa

SEQ ID NO: 449262 - RNA, 21 nt, Artificial Sequence
  Synthetic
aacauauuugaaaguaaugaa

SEQ ID NO: 449263 - RNA, 22 nt, Artificial Sequence
  Synthetic
aaacauauuugaaaguaaugaa

SEQ ID NO: 449264 - RNA, 23 nt, Artificial Sequence
  Synthetic
aaaacauauuugaaaguaaugaa

SEQ ID NO: 449265 - RNA, 24 nt, Artificial Sequence
  Synthetic
caaaacauauuugaaaguaaugaa

SEQ ID NO: 449266 - RNA, 18 nt, Artificial Sequence
  Synthetic
aagugaccucguaaugaa

SEQ ID NO: 449267 - RNA, 19 nt, Artificial Sequence
  Synthetic
uaagugaccucguaaugaa

SEQ ID NO: 449268 - RNA, 20 nt, Artificial Sequence
  Synthetic
auaagugaccucguaaugaa

SEQ ID NO: 449269 - RNA, 21 nt, Artificial Sequence
  Synthetic
cauaagugaccucguaaugaa

SEQ ID NO: 449270 - RNA, 22 nt, Artificial Sequence
  Synthetic
gcauaagugaccucguaaugaa

SEQ ID NO: 449271 - RNA, 23 nt, Artificial Sequence
  Synthetic
agcauaagugaccucguaaugaa

SEQ ID NO: 449272 - RNA, 24 nt, Artificial Sequence
  Synthetic
uagcauaagugaccucguaaugaa

SEQ ID NO: 449273 - RNA, 18 nt, Artificial Sequence
  Synthetic
uucagggaaaaacaugaa

SEQ ID NO: 449274 - RNA, 19 nt, Artificial Sequence
  Synthetic
uuucagggaaaaacaugaa

SEQ ID NO: 449275 - RNA, 20 nt, Artificial Sequence
  Synthetic
uuuucagggaaaaacaugaa

SEQ ID NO: 449276 - RNA, 21 nt, Artificial Sequence
  Synthetic
auuuucagggaaaaacaugaa

SEQ ID NO: 449277 - RNA, 22 nt, Artificial Sequence
  Synthetic
uauuuucagggaaaaacaugaa

SEQ ID NO: 449278 - RNA, 23 nt, Artificial Sequence
  Synthetic
guauuuucagggaaaaacaugaa

SEQ ID NO: 449279 - RNA, 24 nt, Artificial Sequence
  Synthetic
gguauuuucagggaaaaacaugaa

SEQ ID NO: 449280 - RNA, 18 nt, Artificial Sequence
  Synthetic
ccuaggcugaaacaugaa

SEQ ID NO: 449281 - RNA, 19 nt, Artificial Sequence
  Synthetic
gccuaggcugaaacaugaa

SEQ ID NO: 449282 - RNA, 20 nt, Artificial Sequence
  Synthetic
ggccuaggcugaaacaugaa

SEQ ID NO: 449283 - RNA, 21 nt, Artificial Sequence
  Synthetic
aggccuaggcugaaacaugaa

SEQ ID NO: 449284 - RNA, 22 nt, Artificial Sequence
  Synthetic
gaggccuaggcugaaacaugaa

SEQ ID NO: 449285 - RNA, 23 nt, Artificial Sequence
  Synthetic
ugaggccuaggcugaaacaugaa

SEQ ID NO: 449286 - RNA, 24 nt, Artificial Sequence
  Synthetic
augaggccuaggcugaaacaugaa

SEQ ID NO: 449287 - RNA, 18 nt, Artificial Sequence
  Synthetic
gacuggagaagacaugaa

SEQ ID NO: 449288 - RNA, 19 nt, Artificial Sequence
  Synthetic
ugacuggagaagacaugaa

SEQ ID NO: 449289 - RNA, 20 nt, Artificial Sequence
  Synthetic
augacuggagaagacaugaa

SEQ ID NO: 449290 - RNA, 21 nt, Artificial Sequence
  Synthetic
caugacuggagaagacaugaa

SEQ ID NO: 449291 - RNA, 22 nt, Artificial Sequence
  Synthetic
ucaugacuggagaagacaugaa

SEQ ID NO: 449292 - RNA, 23 nt, Artificial Sequence
  Synthetic
uucaugacuggagaagacaugaa

SEQ ID NO: 449293 - RNA, 24 nt, Artificial Sequence
  Synthetic
guucaugacuggagaagacaugaa

SEQ ID NO: 449294 - RNA, 18 nt, Artificial Sequence
  Synthetic
ucccaaggcagacaugaa

SEQ ID NO: 449295 - RNA, 19 nt, Artificial Sequence
  Synthetic
cucccaaggcagacaugaa

SEQ ID NO: 449296 - RNA, 20 nt, Artificial Sequence
  Synthetic
gcucccaaggcagacaugaa

SEQ ID NO: 449297 - RNA, 21 nt, Artificial Sequence
  Synthetic
agcucccaaggcagacaugaa

SEQ ID NO: 449298 - RNA, 22 nt, Artificial Sequence
  Synthetic
uagcucccaaggcagacaugaa

SEQ ID NO: 449299 - RNA, 23 nt, Artificial Sequence
  Synthetic
cuagcucccaaggcagacaugaa

SEQ ID NO: 449300 - RNA, 24 nt, Artificial Sequence
  Synthetic
ccuagcucccaaggcagacaugaa

SEQ ID NO: 449301 - RNA, 18 nt, Artificial Sequence
  Synthetic
uuugcccuucaccaugaa

SEQ ID NO: 449302 - RNA, 19 nt, Artificial Sequence
  Synthetic
cuuugcccuucaccaugaa

SEQ ID NO: 449303 - RNA, 20 nt, Artificial Sequence
  Synthetic
ccuuugcccuucaccaugaa

SEQ ID NO: 449304 - RNA, 21 nt, Artificial Sequence
  Synthetic
cccuuugcccuucaccaugaa

SEQ ID NO: 449305 - RNA, 22 nt, Artificial Sequence
  Synthetic
ccccuuugcccuucaccaugaa

SEQ ID NO: 449306 - RNA, 23 nt, Artificial Sequence
  Synthetic
uccccuuugcccuucaccaugaa

SEQ ID NO: 449307 - RNA, 24 nt, Artificial Sequence
  Synthetic
cuccccuuugcccuucaccaugaa

SEQ ID NO: 449308 - RNA, 18 nt, Artificial Sequence
  Synthetic
ggauuuuaaaagcaugaa

SEQ ID NO: 449309 - RNA, 19 nt, Artificial Sequence
  Synthetic
aggauuuuaaaagcaugaa

SEQ ID NO: 449310 - RNA, 20 nt, Artificial Sequence
  Synthetic
aaggauuuuaaaagcaugaa

SEQ ID NO: 449311 - RNA, 21 nt, Artificial Sequence
  Synthetic
aaaggauuuuaaaagcaugaa

SEQ ID NO: 449312 - RNA, 22 nt, Artificial Sequence
  Synthetic
caaaggauuuuaaaagcaugaa

SEQ ID NO: 449313 - RNA, 23 nt, Artificial Sequence
  Synthetic
acaaaggauuuuaaaagcaugaa

SEQ ID NO: 449314 - RNA, 24 nt, Artificial Sequence
  Synthetic
uacaaaggauuuuaaaagcaugaa

SEQ ID NO: 449315 - RNA, 18 nt, Artificial Sequence
  Synthetic
ucucauuaucagcaugaa

SEQ ID NO: 449316 - RNA, 19 nt, Artificial Sequence
  Synthetic
uucucauuaucagcaugaa

SEQ ID NO: 449317 - RNA, 20 nt, Artificial Sequence
  Synthetic
guucucauuaucagcaugaa

SEQ ID NO: 449318 - RNA, 21 nt, Artificial Sequence
  Synthetic
aguucucauuaucagcaugaa

SEQ ID NO: 449319 - RNA, 22 nt, Artificial Sequence
  Synthetic
uaguucucauuaucagcaugaa

SEQ ID NO: 449320 - RNA, 23 nt, Artificial Sequence
  Synthetic
guaguucucauuaucagcaugaa

SEQ ID NO: 449321 - RNA, 24 nt, Artificial Sequence
  Synthetic
uguaguucucauuaucagcaugaa

SEQ ID NO: 449322 - RNA, 18 nt, Artificial Sequence
  Synthetic
caguuucuuuagcaugaa

SEQ ID NO: 449323 - RNA, 19 nt, Artificial Sequence
  Synthetic
acaguuucuuuagcaugaa

SEQ ID NO: 449324 - RNA, 20 nt, Artificial Sequence
  Synthetic
uacaguuucuuuagcaugaa

SEQ ID NO: 449325 - RNA, 21 nt, Artificial Sequence
  Synthetic
auacaguuucuuuagcaugaa

SEQ ID NO: 449326 - RNA, 22 nt, Artificial Sequence
  Synthetic
cauacaguuucuuuagcaugaa

SEQ ID NO: 449327 - RNA, 23 nt, Artificial Sequence
  Synthetic
ccauacaguuucuuuagcaugaa

SEQ ID NO: 449328 - RNA, 24 nt, Artificial Sequence
  Synthetic
cccauacaguuucuuuagcaugaa

SEQ ID NO: 449329 - RNA, 18 nt, Artificial Sequence
  Synthetic
cuugcacugcggcaugaa

SEQ ID NO: 449330 - RNA, 19 nt, Artificial Sequence
  Synthetic
acuugcacugcggcaugaa

SEQ ID NO: 449331 - RNA, 20 nt, Artificial Sequence
  Synthetic
cacuugcacugcggcaugaa

SEQ ID NO: 449332 - RNA, 21 nt, Artificial Sequence
  Synthetic
acacuugcacugcggcaugaa

SEQ ID NO: 449333 - RNA, 22 nt, Artificial Sequence
  Synthetic
cacacuugcacugcggcaugaa

SEQ ID NO: 449334 - RNA, 23 nt, Artificial Sequence
  Synthetic
acacacuugcacugcggcaugaa

SEQ ID NO: 449335 - RNA, 24 nt, Artificial Sequence
  Synthetic
cacacacuugcacugcggcaugaa

SEQ ID NO: 449336 - RNA, 18 nt, Artificial Sequence
  Synthetic
ccccaguaauggcaugaa

SEQ ID NO: 449337 - RNA, 19 nt, Artificial Sequence
  Synthetic
gccccaguaauggcaugaa

SEQ ID NO: 449338 - RNA, 20 nt, Artificial Sequence
  Synthetic
agccccaguaauggcaugaa

SEQ ID NO: 449339 - RNA, 21 nt, Artificial Sequence
  Synthetic
aagccccaguaauggcaugaa

SEQ ID NO: 449340 - RNA, 22 nt, Artificial Sequence
  Synthetic
caagccccaguaauggcaugaa

SEQ ID NO: 449341 - RNA, 23 nt, Artificial Sequence
  Synthetic
ucaagccccaguaauggcaugaa

SEQ ID NO: 449342 - RNA, 24 nt, Artificial Sequence
  Synthetic
gucaagccccaguaauggcaugaa

SEQ ID NO: 449343 - RNA, 18 nt, Artificial Sequence
  Synthetic
uguucuuuauugcaugaa

SEQ ID NO: 449344 - RNA, 19 nt, Artificial Sequence
  Synthetic
guguucuuuauugcaugaa

SEQ ID NO: 449345 - RNA, 20 nt, Artificial Sequence
  Synthetic
gguguucuuuauugcaugaa

SEQ ID NO: 449346 - RNA, 21 nt, Artificial Sequence
  Synthetic
agguguucuuuauugcaugaa

SEQ ID NO: 449347 - RNA, 22 nt, Artificial Sequence
  Synthetic
gagguguucuuuauugcaugaa

SEQ ID NO: 449348 - RNA, 23 nt, Artificial Sequence
  Synthetic
agagguguucuuuauugcaugaa

SEQ ID NO: 449349 - RNA, 24 nt, Artificial Sequence
  Synthetic
cagagguguucuuuauugcaugaa

SEQ ID NO: 449350 - RNA, 18 nt, Artificial Sequence
  Synthetic
uuguaaaguuugcaugaa

SEQ ID NO: 449351 - RNA, 19 nt, Artificial Sequence
  Synthetic
uuuguaaaguuugcaugaa

SEQ ID NO: 449352 - RNA, 20 nt, Artificial Sequence
  Synthetic
uuuuguaaaguuugcaugaa

SEQ ID NO: 449353 - RNA, 21 nt, Artificial Sequence
  Synthetic
uuuuuguaaaguuugcaugaa

SEQ ID NO: 449354 - RNA, 22 nt, Artificial Sequence
  Synthetic
auuuuuguaaaguuugcaugaa

SEQ ID NO: 449355 - RNA, 23 nt, Artificial Sequence
  Synthetic
aauuuuuguaaaguuugcaugaa

SEQ ID NO: 449356 - RNA, 24 nt, Artificial Sequence
  Synthetic
aaauuuuuguaaaguuugcaugaa

SEQ ID NO: 449357 - RNA, 18 nt, Artificial Sequence
  Synthetic
auguccaugaaucaugaa

SEQ ID NO: 449358 - RNA, 19 nt, Artificial Sequence
  Synthetic
aauguccaugaaucaugaa

SEQ ID NO: 449359 - RNA, 20 nt, Artificial Sequence
  Synthetic
gaauguccaugaaucaugaa

SEQ ID NO: 449360 - RNA, 21 nt, Artificial Sequence
  Synthetic
agaauguccaugaaucaugaa

SEQ ID NO: 449361 - RNA, 22 nt, Artificial Sequence
  Synthetic
cagaauguccaugaaucaugaa

SEQ ID NO: 449362 - RNA, 23 nt, Artificial Sequence
  Synthetic
acagaauguccaugaaucaugaa

SEQ ID NO: 449363 - RNA, 24 nt, Artificial Sequence
  Synthetic
cacagaauguccaugaaucaugaa

SEQ ID NO: 449364 - RNA, 18 nt, Artificial Sequence
  Synthetic
uuuuaaauccaucaugaa

SEQ ID NO: 449365 - RNA, 19 nt, Artificial Sequence
  Synthetic
auuuuaaauccaucaugaa

SEQ ID NO: 449366 - RNA, 20 nt, Artificial Sequence
  Synthetic
cauuuuaaauccaucaugaa

SEQ ID NO: 449367 - RNA, 21 nt, Artificial Sequence
  Synthetic
ucauuuuaaauccaucaugaa

SEQ ID NO: 449368 - RNA, 22 nt, Artificial Sequence
  Synthetic
aucauuuuaaauccaucaugaa

SEQ ID NO: 449369 - RNA, 23 nt, Artificial Sequence
  Synthetic
caucauuuuaaauccaucaugaa

SEQ ID NO: 449370 - RNA, 24 nt, Artificial Sequence
  Synthetic
ucaucauuuuaaauccaucaugaa

SEQ ID NO: 449371 - RNA, 18 nt, Artificial Sequence
  Synthetic
uugguagcaaaagaugaa

SEQ ID NO: 449372 - RNA, 19 nt, Artificial Sequence
  Synthetic
auugguagcaaaagaugaa

SEQ ID NO: 449373 - RNA, 20 nt, Artificial Sequence
  Synthetic
aauugguagcaaaagaugaa

SEQ ID NO: 449374 - RNA, 21 nt, Artificial Sequence
  Synthetic
uaauugguagcaaaagaugaa

SEQ ID NO: 449375 - RNA, 22 nt, Artificial Sequence
  Synthetic
auaauugguagcaaaagaugaa

SEQ ID NO: 449376 - RNA, 23 nt, Artificial Sequence
  Synthetic
cauaauugguagcaaaagaugaa

SEQ ID NO: 449377 - RNA, 24 nt, Artificial Sequence
  Synthetic
acauaauugguagcaaaagaugaa

SEQ ID NO: 449378 - RNA, 18 nt, Artificial Sequence
  Synthetic
gcagaggaagaagaugaa

SEQ ID NO: 449379 - RNA, 19 nt, Artificial Sequence
  Synthetic
ggcagaggaagaagaugaa

SEQ ID NO: 449380 - RNA, 20 nt, Artificial Sequence
  Synthetic
aggcagaggaagaagaugaa

SEQ ID NO: 449381 - RNA, 21 nt, Artificial Sequence
  Synthetic
caggcagaggaagaagaugaa

SEQ ID NO: 449382 - RNA, 22 nt, Artificial Sequence
  Synthetic
gcaggcagaggaagaagaugaa

SEQ ID NO: 449383 - RNA, 23 nt, Artificial Sequence
  Synthetic
ggcaggcagaggaagaagaugaa

SEQ ID NO: 449384 - RNA, 24 nt, Artificial Sequence
  Synthetic
uggcaggcagaggaagaagaugaa

SEQ ID NO: 449385 - RNA, 18 nt, Artificial Sequence
  Synthetic
cacuaacuuuaagaugaa

SEQ ID NO: 449386 - RNA, 19 nt, Artificial Sequence
  Synthetic
acacuaacuuuaagaugaa

SEQ ID NO: 449387 - RNA, 20 nt, Artificial Sequence
  Synthetic
aacacuaacuuuaagaugaa

SEQ ID NO: 449388 - RNA, 21 nt, Artificial Sequence
  Synthetic
aaacacuaacuuuaagaugaa

SEQ ID NO: 449389 - RNA, 22 nt, Artificial Sequence
  Synthetic
gaaacacuaacuuuaagaugaa

SEQ ID NO: 449390 - RNA, 23 nt, Artificial Sequence
  Synthetic
ggaaacacuaacuuuaagaugaa

SEQ ID NO: 449391 - RNA, 24 nt, Artificial Sequence
  Synthetic
uggaaacacuaacuuuaagaugaa

SEQ ID NO: 449392 - RNA, 18 nt, Artificial Sequence
  Synthetic
ccugugaaaugagaugaa

SEQ ID NO: 449393 - RNA, 19 nt, Artificial Sequence
  Synthetic
gccugugaaaugagaugaa

SEQ ID NO: 449394 - RNA, 20 nt, Artificial Sequence
  Synthetic
ggccugugaaaugagaugaa

SEQ ID NO: 449395 - RNA, 21 nt, Artificial Sequence
  Synthetic
aggccugugaaaugagaugaa

SEQ ID NO: 449396 - RNA, 22 nt, Artificial Sequence
  Synthetic
aaggccugugaaaugagaugaa

SEQ ID NO: 449397 - RNA, 23 nt, Artificial Sequence
  Synthetic
gaaggccugugaaaugagaugaa

SEQ ID NO: 449398 - RNA, 24 nt, Artificial Sequence
  Synthetic
ugaaggccugugaaaugagaugaa

SEQ ID NO: 449399 - RNA, 18 nt, Artificial Sequence
  Synthetic
acucacuguguagaugaa

SEQ ID NO: 449400 - RNA, 19 nt, Artificial Sequence
  Synthetic
cacucacuguguagaugaa

SEQ ID NO: 449401 - RNA, 20 nt, Artificial Sequence
  Synthetic
ccacucacuguguagaugaa

SEQ ID NO: 449402 - RNA, 21 nt, Artificial Sequence
  Synthetic
accacucacuguguagaugaa

SEQ ID NO: 449403 - RNA, 22 nt, Artificial Sequence
  Synthetic
aaccacucacuguguagaugaa

SEQ ID NO: 449404 - RNA, 23 nt, Artificial Sequence
  Synthetic
uaaccacucacuguguagaugaa

SEQ ID NO: 449405 - RNA, 24 nt, Artificial Sequence
  Synthetic
cuaaccacucacuguguagaugaa

SEQ ID NO: 449406 - RNA, 18 nt, Artificial Sequence
  Synthetic
ugcaugugugaggaugaa

SEQ ID NO: 449407 - RNA, 19 nt, Artificial Sequence
  Synthetic
augcaugugugaggaugaa

SEQ ID NO: 449408 - RNA, 20 nt, Artificial Sequence
  Synthetic
gaugcaugugugaggaugaa

SEQ ID NO: 449409 - RNA, 21 nt, Artificial Sequence
  Synthetic
ggaugcaugugugaggaugaa

SEQ ID NO: 449410 - RNA, 22 nt, Artificial Sequence
  Synthetic
aggaugcaugugugaggaugaa

SEQ ID NO: 449411 - RNA, 23 nt, Artificial Sequence
  Synthetic
gaggaugcaugugugaggaugaa

SEQ ID NO: 449412 - RNA, 24 nt, Artificial Sequence
  Synthetic
agaggaugcaugugugaggaugaa

SEQ ID NO: 449413 - RNA, 18 nt, Artificial Sequence
  Synthetic
uucugucuuuaggaugaa

SEQ ID NO: 449414 - RNA, 19 nt, Artificial Sequence
  Synthetic
auucugucuuuaggaugaa

SEQ ID NO: 449415 - RNA, 20 nt, Artificial Sequence
  Synthetic
aauucugucuuuaggaugaa

SEQ ID NO: 449416 - RNA, 21 nt, Artificial Sequence
  Synthetic
caauucugucuuuaggaugaa

SEQ ID NO: 449417 - RNA, 22 nt, Artificial Sequence
  Synthetic
acaauucugucuuuaggaugaa

SEQ ID NO: 449418 - RNA, 23 nt, Artificial Sequence
  Synthetic
gacaauucugucuuuaggaugaa

SEQ ID NO: 449419 - RNA, 24 nt, Artificial Sequence
  Synthetic
ugacaauucugucuuuaggaugaa

SEQ ID NO: 449420 - RNA, 18 nt, Artificial Sequence
  Synthetic
agaaagacaugggaugaa

SEQ ID NO: 449421 - RNA, 19 nt, Artificial Sequence
  Synthetic
aagaaagacaugggaugaa

SEQ ID NO: 449422 - RNA, 20 nt, Artificial Sequence
  Synthetic
uaagaaagacaugggaugaa

SEQ ID NO: 449423 - RNA, 21 nt, Artificial Sequence
  Synthetic
uuaagaaagacaugggaugaa

SEQ ID NO: 449424 - RNA, 22 nt, Artificial Sequence
  Synthetic
uuuaagaaagacaugggaugaa

SEQ ID NO: 449425 - RNA, 23 nt, Artificial Sequence
  Synthetic
cuuuaagaaagacaugggaugaa

SEQ ID NO: 449426 - RNA, 24 nt, Artificial Sequence
  Synthetic
ccuuuaagaaagacaugggaugaa

SEQ ID NO: 449427 - RNA, 18 nt, Artificial Sequence
  Synthetic
augacauauaaugaugaa

SEQ ID NO: 449428 - RNA, 19 nt, Artificial Sequence
  Synthetic
caugacauauaaugaugaa

SEQ ID NO: 449429 - RNA, 20 nt, Artificial Sequence
  Synthetic
gcaugacauauaaugaugaa

SEQ ID NO: 449430 - RNA, 21 nt, Artificial Sequence
  Synthetic
ugcaugacauauaaugaugaa

SEQ ID NO: 449431 - RNA, 22 nt, Artificial Sequence
  Synthetic
uugcaugacauauaaugaugaa

SEQ ID NO: 449432 - RNA, 23 nt, Artificial Sequence
  Synthetic
guugcaugacauauaaugaugaa

SEQ ID NO: 449433 - RNA, 24 nt, Artificial Sequence
  Synthetic
aguugcaugacauauaaugaugaa

SEQ ID NO: 449434 - RNA, 18 nt, Artificial Sequence
  Synthetic
ugguauaaggaugaugaa

SEQ ID NO: 449435 - RNA, 19 nt, Artificial Sequence
  Synthetic
cugguauaaggaugaugaa

SEQ ID NO: 449436 - RNA, 20 nt, Artificial Sequence
  Synthetic
ucugguauaaggaugaugaa

SEQ ID NO: 449437 - RNA, 21 nt, Artificial Sequence
  Synthetic
aucugguauaaggaugaugaa

SEQ ID NO: 449438 - RNA, 22 nt, Artificial Sequence
  Synthetic
uaucugguauaaggaugaugaa

SEQ ID NO: 449439 - RNA, 23 nt, Artificial Sequence
  Synthetic
guaucugguauaaggaugaugaa

SEQ ID NO: 449440 - RNA, 24 nt, Artificial Sequence
  Synthetic
aguaucugguauaaggaugaugaa

SEQ ID NO: 449441 - RNA, 18 nt, Artificial Sequence
  Synthetic
cuuccuuuggaugaugaa

SEQ ID NO: 449442 - RNA, 19 nt, Artificial Sequence
  Synthetic
acuuccuuuggaugaugaa

SEQ ID NO: 449443 - RNA, 20 nt, Artificial Sequence
  Synthetic
gacuuccuuuggaugaugaa

SEQ ID NO: 449444 - RNA, 21 nt, Artificial Sequence
  Synthetic
ugacuuccuuuggaugaugaa

SEQ ID NO: 449445 - RNA, 22 nt, Artificial Sequence
  Synthetic
gugacuuccuuuggaugaugaa

SEQ ID NO: 449446 - RNA, 23 nt, Artificial Sequence
  Synthetic
cgugacuuccuuuggaugaugaa

SEQ ID NO: 449447 - RNA, 24 nt, Artificial Sequence
  Synthetic
acgugacuuccuuuggaugaugaa

SEQ ID NO: 449448 - RNA, 18 nt, Artificial Sequence
  Synthetic
gcaaagauuagugaugaa

SEQ ID NO: 449449 - RNA, 19 nt, Artificial Sequence
  Synthetic
agcaaagauuagugaugaa

SEQ ID NO: 449450 - RNA, 20 nt, Artificial Sequence
  Synthetic
aagcaaagauuagugaugaa

SEQ ID NO: 449451 - RNA, 21 nt, Artificial Sequence
  Synthetic
gaagcaaagauuagugaugaa

SEQ ID NO: 449452 - RNA, 22 nt, Artificial Sequence
  Synthetic
ugaagcaaagauuagugaugaa

SEQ ID NO: 449453 - RNA, 23 nt, Artificial Sequence
  Synthetic
gugaagcaaagauuagugaugaa

SEQ ID NO: 449454 - RNA, 24 nt, Artificial Sequence
  Synthetic
agugaagcaaagauuagugaugaa

SEQ ID NO: 449455 - RNA, 18 nt, Artificial Sequence
  Synthetic
uguauacaaugugaugaa

SEQ ID NO: 449456 - RNA, 19 nt, Artificial Sequence
  Synthetic
cuguauacaaugugaugaa

SEQ ID NO: 449457 - RNA, 20 nt, Artificial Sequence
  Synthetic
ucuguauacaaugugaugaa

SEQ ID NO: 449458 - RNA, 21 nt, Artificial Sequence
  Synthetic
aucuguauacaaugugaugaa

SEQ ID NO: 449459 - RNA, 22 nt, Artificial Sequence
  Synthetic
caucuguauacaaugugaugaa

SEQ ID NO: 449460 - RNA, 23 nt, Artificial Sequence
  Synthetic
gcaucuguauacaaugugaugaa

SEQ ID NO: 449461 - RNA, 24 nt, Artificial Sequence
  Synthetic
agcaucuguauacaaugugaugaa

SEQ ID NO: 449462 - RNA, 18 nt, Artificial Sequence
  Synthetic
caagaaacaaaauaugaa

SEQ ID NO: 449463 - RNA, 19 nt, Artificial Sequence
  Synthetic
gcaagaaacaaaauaugaa

SEQ ID NO: 449464 - RNA, 20 nt, Artificial Sequence
  Synthetic
agcaagaaacaaaauaugaa

SEQ ID NO: 449465 - RNA, 21 nt, Artificial Sequence
  Synthetic
uagcaagaaacaaaauaugaa

SEQ ID NO: 449466 - RNA, 22 nt, Artificial Sequence
  Synthetic
guagcaagaaacaaaauaugaa

SEQ ID NO: 449467 - RNA, 23 nt, Artificial Sequence
  Synthetic
uguagcaagaaacaaaauaugaa

SEQ ID NO: 449468 - RNA, 24 nt, Artificial Sequence
  Synthetic
guguagcaagaaacaaaauaugaa

SEQ ID NO: 449469 - RNA, 18 nt, Artificial Sequence
  Synthetic
aauacaaagaaauaugaa

SEQ ID NO: 449470 - RNA, 19 nt, Artificial Sequence
  Synthetic
aaauacaaagaaauaugaa

SEQ ID NO: 449471 - RNA, 20 nt, Artificial Sequence
  Synthetic
aaaauacaaagaaauaugaa

SEQ ID NO: 449472 - RNA, 21 nt, Artificial Sequence
  Synthetic
gaaaauacaaagaaauaugaa

SEQ ID NO: 449473 - RNA, 22 nt, Artificial Sequence
  Synthetic
agaaaauacaaagaaauaugaa

SEQ ID NO: 449474 - RNA, 23 nt, Artificial Sequence
  Synthetic
gagaaaauacaaagaaauaugaa

SEQ ID NO: 449475 - RNA, 24 nt, Artificial Sequence
  Synthetic
agagaaaauacaaagaaauaugaa

SEQ ID NO: 449476 - RNA, 18 nt, Artificial Sequence
  Synthetic
cuagguugccaauaugaa

SEQ ID NO: 449477 - RNA, 19 nt, Artificial Sequence
  Synthetic
ucuagguugccaauaugaa

SEQ ID NO: 449478 - RNA, 20 nt, Artificial Sequence
  Synthetic
cucuagguugccaauaugaa

SEQ ID NO: 449479 - RNA, 21 nt, Artificial Sequence
  Synthetic
ucucuagguugccaauaugaa

SEQ ID NO: 449480 - RNA, 22 nt, Artificial Sequence
  Synthetic
cucucuagguugccaauaugaa

SEQ ID NO: 449481 - RNA, 23 nt, Artificial Sequence
  Synthetic
gcucucuagguugccaauaugaa

SEQ ID NO: 449482 - RNA, 24 nt, Artificial Sequence
  Synthetic
ugcucucuagguugccaauaugaa

SEQ ID NO: 449483 - RNA, 18 nt, Artificial Sequence
  Synthetic
ugcugaaaugaauaugaa

SEQ ID NO: 449484 - RNA, 19 nt, Artificial Sequence
  Synthetic
uugcugaaaugaauaugaa

SEQ ID NO: 449485 - RNA, 20 nt, Artificial Sequence
  Synthetic
auugcugaaaugaauaugaa

SEQ ID NO: 449486 - RNA, 21 nt, Artificial Sequence
  Synthetic
uauugcugaaaugaauaugaa

SEQ ID NO: 449487 - RNA, 22 nt, Artificial Sequence
  Synthetic
cuauugcugaaaugaauaugaa

SEQ ID NO: 449488 - RNA, 23 nt, Artificial Sequence
  Synthetic
acuauugcugaaaugaauaugaa

SEQ ID NO: 449489 - RNA, 24 nt, Artificial Sequence
  Synthetic
uacuauugcugaaaugaauaugaa

SEQ ID NO: 449490 - RNA, 18 nt, Artificial Sequence
  Synthetic
aagggacagggauaugaa

SEQ ID NO: 449491 - RNA, 19 nt, Artificial Sequence
  Synthetic
aaagggacagggauaugaa

SEQ ID NO: 449492 - RNA, 20 nt, Artificial Sequence
  Synthetic
uaaagggacagggauaugaa

SEQ ID NO: 449493 - RNA, 21 nt, Artificial Sequence
  Synthetic
auaaagggacagggauaugaa

SEQ ID NO: 449494 - RNA, 22 nt, Artificial Sequence
  Synthetic
gauaaagggacagggauaugaa

SEQ ID NO: 449495 - RNA, 23 nt, Artificial Sequence
  Synthetic
ggauaaagggacagggauaugaa

SEQ ID NO: 449496 - RNA, 24 nt, Artificial Sequence
  Synthetic
uggauaaagggacagggauaugaa

SEQ ID NO: 449497 - RNA, 18 nt, Artificial Sequence
  Synthetic
aaaauggacugauaugaa

SEQ ID NO: 449498 - RNA, 19 nt, Artificial Sequence
  Synthetic
caaaauggacugauaugaa

SEQ ID NO: 449499 - RNA, 20 nt, Artificial Sequence
  Synthetic
gcaaaauggacugauaugaa

SEQ ID NO: 449500 - RNA, 21 nt, Artificial Sequence
  Synthetic
agcaaaauggacugauaugaa

SEQ ID NO: 449501 - RNA, 22 nt, Artificial Sequence
  Synthetic
cagcaaaauggacugauaugaa

SEQ ID NO: 449502 - RNA, 23 nt, Artificial Sequence
  Synthetic
gcagcaaaauggacugauaugaa

SEQ ID NO: 449503 - RNA, 24 nt, Artificial Sequence
  Synthetic
ugcagcaaaauggacugauaugaa

SEQ ID NO: 449504 - RNA, 18 nt, Artificial Sequence
  Synthetic
gggaggccaauauaugaa

SEQ ID NO: 449505 - RNA, 19 nt, Artificial Sequence
  Synthetic
agggaggccaauauaugaa

SEQ ID NO: 449506 - RNA, 20 nt, Artificial Sequence
  Synthetic
uagggaggccaauauaugaa

SEQ ID NO: 449507 - RNA, 21 nt, Artificial Sequence
  Synthetic
uuagggaggccaauauaugaa

SEQ ID NO: 449508 - RNA, 22 nt, Artificial Sequence
  Synthetic
auuagggaggccaauauaugaa

SEQ ID NO: 449509 - RNA, 23 nt, Artificial Sequence
  Synthetic
cauuagggaggccaauauaugaa

SEQ ID NO: 449510 - RNA, 24 nt, Artificial Sequence
  Synthetic
ccauuagggaggccaauauaugaa

SEQ ID NO: 449511 - RNA, 18 nt, Artificial Sequence
  Synthetic
aggagagaauuauaugaa

SEQ ID NO: 449512 - RNA, 19 nt, Artificial Sequence
  Synthetic
gaggagagaauuauaugaa

SEQ ID NO: 449513 - RNA, 20 nt, Artificial Sequence
  Synthetic
ugaggagagaauuauaugaa

SEQ ID NO: 449514 - RNA, 21 nt, Artificial Sequence
  Synthetic
gugaggagagaauuauaugaa

SEQ ID NO: 449515 - RNA, 22 nt, Artificial Sequence
  Synthetic
agugaggagagaauuauaugaa

SEQ ID NO: 449516 - RNA, 23 nt, Artificial Sequence
  Synthetic
aagugaggagagaauuauaugaa

SEQ ID NO: 449517 - RNA, 24 nt, Artificial Sequence
  Synthetic
gaagugaggagagaauuauaugaa

SEQ ID NO: 449518 - RNA, 18 nt, Artificial Sequence
  Synthetic
uugagagccuacuaugaa

SEQ ID NO: 449519 - RNA, 19 nt, Artificial Sequence
  Synthetic
guugagagccuacuaugaa

SEQ ID NO: 449520 - RNA, 20 nt, Artificial Sequence
  Synthetic
uguugagagccuacuaugaa

SEQ ID NO: 449521 - RNA, 21 nt, Artificial Sequence
  Synthetic
uuguugagagccuacuaugaa

SEQ ID NO: 449522 - RNA, 22 nt, Artificial Sequence
  Synthetic
uuuguugagagccuacuaugaa

SEQ ID NO: 449523 - RNA, 23 nt, Artificial Sequence
  Synthetic
auuuguugagagccuacuaugaa

SEQ ID NO: 449524 - RNA, 24 nt, Artificial Sequence
  Synthetic
uauuuguugagagccuacuaugaa

SEQ ID NO: 449525 - RNA, 18 nt, Artificial Sequence
  Synthetic
guauuggugcaguaugaa

SEQ ID NO: 449526 - RNA, 19 nt, Artificial Sequence
  Synthetic
uguauuggugcaguaugaa

SEQ ID NO: 449527 - RNA, 20 nt, Artificial Sequence
  Synthetic
auguauuggugcaguaugaa

SEQ ID NO: 449528 - RNA, 21 nt, Artificial Sequence
  Synthetic
aauguauuggugcaguaugaa

SEQ ID NO: 449529 - RNA, 22 nt, Artificial Sequence
  Synthetic
aaauguauuggugcaguaugaa

SEQ ID NO: 449530 - RNA, 23 nt, Artificial Sequence
  Synthetic
gaaauguauuggugcaguaugaa

SEQ ID NO: 449531 - RNA, 24 nt, Artificial Sequence
  Synthetic
agaaauguauuggugcaguaugaa

SEQ ID NO: 449532 - RNA, 18 nt, Artificial Sequence
  Synthetic
uuuuaaggaggguaugaa

SEQ ID NO: 449533 - RNA, 19 nt, Artificial Sequence
  Synthetic
auuuuaaggaggguaugaa

SEQ ID NO: 449534 - RNA, 20 nt, Artificial Sequence
  Synthetic
uauuuuaaggaggguaugaa

SEQ ID NO: 449535 - RNA, 21 nt, Artificial Sequence
  Synthetic
guauuuuaaggaggguaugaa

SEQ ID NO: 449536 - RNA, 22 nt, Artificial Sequence
  Synthetic
aguauuuuaaggaggguaugaa

SEQ ID NO: 449537 - RNA, 23 nt, Artificial Sequence
  Synthetic
caguauuuuaaggaggguaugaa

SEQ ID NO: 449538 - RNA, 24 nt, Artificial Sequence
  Synthetic
acaguauuuuaaggaggguaugaa

SEQ ID NO: 449539 - RNA, 18 nt, Artificial Sequence
  Synthetic
uucaaugauauguaugaa

SEQ ID NO: 449540 - RNA, 19 nt, Artificial Sequence
  Synthetic
cuucaaugauauguaugaa

SEQ ID NO: 449541 - RNA, 20 nt, Artificial Sequence
  Synthetic
ucuucaaugauauguaugaa

SEQ ID NO: 449542 - RNA, 21 nt, Artificial Sequence
  Synthetic
cucuucaaugauauguaugaa

SEQ ID NO: 449543 - RNA, 22 nt, Artificial Sequence
  Synthetic
ucucuucaaugauauguaugaa

SEQ ID NO: 449544 - RNA, 23 nt, Artificial Sequence
  Synthetic
uucucuucaaugauauguaugaa

SEQ ID NO: 449545 - RNA, 24 nt, Artificial Sequence
  Synthetic
uuucucuucaaugauauguaugaa

SEQ ID NO: 449546 - RNA, 18 nt, Artificial Sequence
  Synthetic
guuggucaaguguaugaa

SEQ ID NO: 449547 - RNA, 19 nt, Artificial Sequence
  Synthetic
gguuggucaaguguaugaa

SEQ ID NO: 449548 - RNA, 20 nt, Artificial Sequence
  Synthetic
agguuggucaaguguaugaa

SEQ ID NO: 449549 - RNA, 21 nt, Artificial Sequence
  Synthetic
aagguuggucaaguguaugaa

SEQ ID NO: 449550 - RNA, 22 nt, Artificial Sequence
  Synthetic
aaagguuggucaaguguaugaa

SEQ ID NO: 449551 - RNA, 23 nt, Artificial Sequence
  Synthetic
aaaagguuggucaaguguaugaa

SEQ ID NO: 449552 - RNA, 24 nt, Artificial Sequence
  Synthetic
uaaaagguuggucaaguguaugaa

SEQ ID NO: 449553 - RNA, 18 nt, Artificial Sequence
  Synthetic
uuguaauguuuguaugaa

SEQ ID NO: 449554 - RNA, 19 nt, Artificial Sequence
  Synthetic
uuuguaauguuuguaugaa

SEQ ID NO: 449555 - RNA, 20 nt, Artificial Sequence
  Synthetic
cuuuguaauguuuguaugaa

SEQ ID NO: 449556 - RNA, 21 nt, Artificial Sequence
  Synthetic
acuuuguaauguuuguaugaa

SEQ ID NO: 449557 - RNA, 22 nt, Artificial Sequence
  Synthetic
gacuuuguaauguuuguaugaa

SEQ ID NO: 449558 - RNA, 23 nt, Artificial Sequence
  Synthetic
cgacuuuguaauguuuguaugaa

SEQ ID NO: 449559 - RNA, 24 nt, Artificial Sequence
  Synthetic
gcgacuuuguaauguuuguaugaa

SEQ ID NO: 449560 - RNA, 18 nt, Artificial Sequence
  Synthetic
auuguuuacaauuaugaa

SEQ ID NO: 449561 - RNA, 19 nt, Artificial Sequence
  Synthetic
cauuguuuacaauuaugaa

SEQ ID NO: 449562 - RNA, 20 nt, Artificial Sequence
  Synthetic
gcauuguuuacaauuaugaa

SEQ ID NO: 449563 - RNA, 21 nt, Artificial Sequence
  Synthetic
ugcauuguuuacaauuaugaa

SEQ ID NO: 449564 - RNA, 22 nt, Artificial Sequence
  Synthetic
augcauuguuuacaauuaugaa

SEQ ID NO: 449565 - RNA, 23 nt, Artificial Sequence
  Synthetic
gaugcauuguuuacaauuaugaa

SEQ ID NO: 449566 - RNA, 24 nt, Artificial Sequence
  Synthetic
ugaugcauuguuuacaauuaugaa

SEQ ID NO: 449567 - RNA, 18 nt, Artificial Sequence
  Synthetic
cccaccucacauuaugaa

SEQ ID NO: 449568 - RNA, 19 nt, Artificial Sequence
  Synthetic
ucccaccucacauuaugaa

SEQ ID NO: 449569 - RNA, 20 nt, Artificial Sequence
  Synthetic
uucccaccucacauuaugaa

SEQ ID NO: 449570 - RNA, 21 nt, Artificial Sequence
  Synthetic
uuucccaccucacauuaugaa

SEQ ID NO: 449571 - RNA, 22 nt, Artificial Sequence
  Synthetic
uuuucccaccucacauuaugaa

SEQ ID NO: 449572 - RNA, 23 nt, Artificial Sequence
  Synthetic
uuuuucccaccucacauuaugaa

SEQ ID NO: 449573 - RNA, 24 nt, Artificial Sequence
  Synthetic
cuuuuucccaccucacauuaugaa

SEQ ID NO: 449574 - RNA, 18 nt, Artificial Sequence
  Synthetic
gaaaugguaccuuaugaa

SEQ ID NO: 449575 - RNA, 19 nt, Artificial Sequence
  Synthetic
ggaaaugguaccuuaugaa

SEQ ID NO: 449576 - RNA, 20 nt, Artificial Sequence
  Synthetic
gggaaaugguaccuuaugaa

SEQ ID NO: 449577 - RNA, 21 nt, Artificial Sequence
  Synthetic
ugggaaaugguaccuuaugaa

SEQ ID NO: 449578 - RNA, 22 nt, Artificial Sequence
  Synthetic
gugggaaaugguaccuuaugaa

SEQ ID NO: 449579 - RNA, 23 nt, Artificial Sequence
  Synthetic
ggugggaaaugguaccuuaugaa

SEQ ID NO: 449580 - RNA, 24 nt, Artificial Sequence
  Synthetic
gggugggaaaugguaccuuaugaa

SEQ ID NO: 449581 - RNA, 18 nt, Artificial Sequence
  Synthetic
auaaacugaucuuaugaa

SEQ ID NO: 449582 - RNA, 19 nt, Artificial Sequence
  Synthetic
gauaaacugaucuuaugaa

SEQ ID NO: 449583 - RNA, 20 nt, Artificial Sequence
  Synthetic
ggauaaacugaucuuaugaa

SEQ ID NO: 449584 - RNA, 21 nt, Artificial Sequence
  Synthetic
uggauaaacugaucuuaugaa

SEQ ID NO: 449585 - RNA, 22 nt, Artificial Sequence
  Synthetic
guggauaaacugaucuuaugaa

SEQ ID NO: 449586 - RNA, 23 nt, Artificial Sequence
  Synthetic
gguggauaaacugaucuuaugaa

SEQ ID NO: 449587 - RNA, 24 nt, Artificial Sequence
  Synthetic
agguggauaaacugaucuuaugaa

SEQ ID NO: 449588 - RNA, 18 nt, Artificial Sequence
  Synthetic
acuguucaaaguuaugaa

SEQ ID NO: 449589 - RNA, 19 nt, Artificial Sequence
  Synthetic
aacuguucaaaguuaugaa

SEQ ID NO: 449590 - RNA, 20 nt, Artificial Sequence
  Synthetic
caacuguucaaaguuaugaa

SEQ ID NO: 449591 - RNA, 21 nt, Artificial Sequence
  Synthetic
ccaacuguucaaaguuaugaa

SEQ ID NO: 449592 - RNA, 22 nt, Artificial Sequence
  Synthetic
cccaacuguucaaaguuaugaa

SEQ ID NO: 449593 - RNA, 23 nt, Artificial Sequence
  Synthetic
ucccaacuguucaaaguuaugaa

SEQ ID NO: 449594 - RNA, 24 nt, Artificial Sequence
  Synthetic
uucccaacuguucaaaguuaugaa

SEQ ID NO: 449595 - RNA, 18 nt, Artificial Sequence
  Synthetic
cucuauacaaguuaugaa

SEQ ID NO: 449596 - RNA, 19 nt, Artificial Sequence
  Synthetic
ucucuauacaaguuaugaa

SEQ ID NO: 449597 - RNA, 20 nt, Artificial Sequence
  Synthetic
uucucuauacaaguuaugaa

SEQ ID NO: 449598 - RNA, 21 nt, Artificial Sequence
  Synthetic
cuucucuauacaaguuaugaa

SEQ ID NO: 449599 - RNA, 22 nt, Artificial Sequence
  Synthetic
ucuucucuauacaaguuaugaa

SEQ ID NO: 449600 - RNA, 23 nt, Artificial Sequence
  Synthetic
uucuucucuauacaaguuaugaa

SEQ ID NO: 449601 - RNA, 24 nt, Artificial Sequence
  Synthetic
auucuucucuauacaaguuaugaa

SEQ ID NO: 449602 - RNA, 18 nt, Artificial Sequence
  Synthetic
auuugaagguuuuaugaa

SEQ ID NO: 449603 - RNA, 19 nt, Artificial Sequence
  Synthetic
gauuugaagguuuuaugaa

SEQ ID NO: 449604 - RNA, 20 nt, Artificial Sequence
  Synthetic
ugauuugaagguuuuaugaa

SEQ ID NO: 449605 - RNA, 21 nt, Artificial Sequence
  Synthetic
uugauuugaagguuuuaugaa

SEQ ID NO: 449606 - RNA, 22 nt, Artificial Sequence
  Synthetic
auugauuugaagguuuuaugaa

SEQ ID NO: 449607 - RNA, 23 nt, Artificial Sequence
  Synthetic
cauugauuugaagguuuuaugaa

SEQ ID NO: 449608 - RNA, 24 nt, Artificial Sequence
  Synthetic
acauugauuugaagguuuuaugaa

SEQ ID NO: 449609 - RNA, 18 nt, Artificial Sequence
  Synthetic
caauauauguuuuaugaa

SEQ ID NO: 449610 - RNA, 19 nt, Artificial Sequence
  Synthetic
acaauauauguuuuaugaa

SEQ ID NO: 449611 - RNA, 20 nt, Artificial Sequence
  Synthetic
uacaauauauguuuuaugaa

SEQ ID NO: 449612 - RNA, 21 nt, Artificial Sequence
  Synthetic
uuacaauauauguuuuaugaa

SEQ ID NO: 449613 - RNA, 22 nt, Artificial Sequence
  Synthetic
auuacaauauauguuuuaugaa

SEQ ID NO: 449614 - RNA, 23 nt, Artificial Sequence
  Synthetic
aauuacaauauauguuuuaugaa

SEQ ID NO: 449615 - RNA, 24 nt, Artificial Sequence
  Synthetic
caauuacaauauauguuuuaugaa

SEQ ID NO: 449616 - RNA, 18 nt, Artificial Sequence
  Synthetic
aggaggacaaaaacugaa

SEQ ID NO: 449617 - RNA, 19 nt, Artificial Sequence
  Synthetic
uaggaggacaaaaacugaa

SEQ ID NO: 449618 - RNA, 20 nt, Artificial Sequence
  Synthetic
auaggaggacaaaaacugaa

SEQ ID NO: 449619 - RNA, 21 nt, Artificial Sequence
  Synthetic
gauaggaggacaaaaacugaa

SEQ ID NO: 449620 - RNA, 22 nt, Artificial Sequence
  Synthetic
ugauaggaggacaaaaacugaa

SEQ ID NO: 449621 - RNA, 23 nt, Artificial Sequence
  Synthetic
gugauaggaggacaaaaacugaa

SEQ ID NO: 449622 - RNA, 24 nt, Artificial Sequence
  Synthetic
ugugauaggaggacaaaaacugaa

SEQ ID NO: 449623 - RNA, 18 nt, Artificial Sequence
  Synthetic
gcggauauuaaaacugaa

SEQ ID NO: 449624 - RNA, 19 nt, Artificial Sequence
  Synthetic
cgcggauauuaaaacugaa

SEQ ID NO: 449625 - RNA, 20 nt, Artificial Sequence
  Synthetic
ucgcggauauuaaaacugaa

SEQ ID NO: 449626 - RNA, 21 nt, Artificial Sequence
  Synthetic
aucgcggauauuaaaacugaa

SEQ ID NO: 449627 - RNA, 22 nt, Artificial Sequence
  Synthetic
gaucgcggauauuaaaacugaa

SEQ ID NO: 449628 - RNA, 23 nt, Artificial Sequence
  Synthetic
agaucgcggauauuaaaacugaa

SEQ ID NO: 449629 - RNA, 24 nt, Artificial Sequence
  Synthetic
aagaucgcggauauuaaaacugaa

SEQ ID NO: 449630 - RNA, 18 nt, Artificial Sequence
  Synthetic
aggugaagguaaacugaa

SEQ ID NO: 449631 - RNA, 19 nt, Artificial Sequence
  Synthetic
aaggugaagguaaacugaa

SEQ ID NO: 449632 - RNA, 20 nt, Artificial Sequence
  Synthetic
uaaggugaagguaaacugaa

SEQ ID NO: 449633 - RNA, 21 nt, Artificial Sequence
  Synthetic
cuaaggugaagguaaacugaa

SEQ ID NO: 449634 - RNA, 22 nt, Artificial Sequence
  Synthetic
ucuaaggugaagguaaacugaa

SEQ ID NO: 449635 - RNA, 23 nt, Artificial Sequence
  Synthetic
gucuaaggugaagguaaacugaa

SEQ ID NO: 449636 - RNA, 24 nt, Artificial Sequence
  Synthetic
agucuaaggugaagguaaacugaa

SEQ ID NO: 449637 - RNA, 18 nt, Artificial Sequence
  Synthetic
cuucuaucaacaacugaa

SEQ ID NO: 449638 - RNA, 19 nt, Artificial Sequence
  Synthetic
ccuucuaucaacaacugaa

SEQ ID NO: 449639 - RNA, 20 nt, Artificial Sequence
  Synthetic
accuucuaucaacaacugaa

SEQ ID NO: 449640 - RNA, 21 nt, Artificial Sequence
  Synthetic
uaccuucuaucaacaacugaa

SEQ ID NO: 449641 - RNA, 22 nt, Artificial Sequence
  Synthetic
auaccuucuaucaacaacugaa

SEQ ID NO: 449642 - RNA, 23 nt, Artificial Sequence
  Synthetic
aauaccuucuaucaacaacugaa

SEQ ID NO: 449643 - RNA, 24 nt, Artificial Sequence
  Synthetic
gaauaccuucuaucaacaacugaa

SEQ ID NO: 449644 - RNA, 18 nt, Artificial Sequence
  Synthetic
guaguucuaucaacugaa

SEQ ID NO: 449645 - RNA, 19 nt, Artificial Sequence
  Synthetic
aguaguucuaucaacugaa

SEQ ID NO: 449646 - RNA, 20 nt, Artificial Sequence
  Synthetic
uaguaguucuaucaacugaa

SEQ ID NO: 449647 - RNA, 21 nt, Artificial Sequence
  Synthetic
uuaguaguucuaucaacugaa

SEQ ID NO: 449648 - RNA, 22 nt, Artificial Sequence
  Synthetic
uuuaguaguucuaucaacugaa

SEQ ID NO: 449649 - RNA, 23 nt, Artificial Sequence
  Synthetic
auuuaguaguucuaucaacugaa

SEQ ID NO: 449650 - RNA, 24 nt, Artificial Sequence
  Synthetic
cauuuaguaguucuaucaacugaa

SEQ ID NO: 449651 - RNA, 18 nt, Artificial Sequence
  Synthetic
aacguucgcugaacugaa

SEQ ID NO: 449652 - RNA, 19 nt, Artificial Sequence
  Synthetic
aaacguucgcugaacugaa

SEQ ID NO: 449653 - RNA, 20 nt, Artificial Sequence
  Synthetic
caaacguucgcugaacugaa

SEQ ID NO: 449654 - RNA, 21 nt, Artificial Sequence
  Synthetic
ucaaacguucgcugaacugaa

SEQ ID NO: 449655 - RNA, 22 nt, Artificial Sequence
  Synthetic
uucaaacguucgcugaacugaa

SEQ ID NO: 449656 - RNA, 23 nt, Artificial Sequence
  Synthetic
auucaaacguucgcugaacugaa

SEQ ID NO: 449657 - RNA, 24 nt, Artificial Sequence
  Synthetic
cauucaaacguucgcugaacugaa

SEQ ID NO: 449658 - RNA, 18 nt, Artificial Sequence
  Synthetic
ggugauauuaacacugaa

SEQ ID NO: 449659 - RNA, 19 nt, Artificial Sequence
  Synthetic
aggugauauuaacacugaa

SEQ ID NO: 449660 - RNA, 20 nt, Artificial Sequence
  Synthetic
caggugauauuaacacugaa

SEQ ID NO: 449661 - RNA, 21 nt, Artificial Sequence
  Synthetic
ccaggugauauuaacacugaa

SEQ ID NO: 449662 - RNA, 22 nt, Artificial Sequence
  Synthetic
uccaggugauauuaacacugaa

SEQ ID NO: 449663 - RNA, 23 nt, Artificial Sequence
  Synthetic
uuccaggugauauuaacacugaa

SEQ ID NO: 449664 - RNA, 24 nt, Artificial Sequence
  Synthetic
cuuccaggugauauuaacacugaa

SEQ ID NO: 449665 - RNA, 18 nt, Artificial Sequence
  Synthetic
gaaaaccaccacacugaa

SEQ ID NO: 449666 - RNA, 19 nt, Artificial Sequence
  Synthetic
agaaaaccaccacacugaa

SEQ ID NO: 449667 - RNA, 20 nt, Artificial Sequence
  Synthetic
uagaaaaccaccacacugaa

SEQ ID NO: 449668 - RNA, 21 nt, Artificial Sequence
  Synthetic
auagaaaaccaccacacugaa

SEQ ID NO: 449669 - RNA, 22 nt, Artificial Sequence
  Synthetic
aauagaaaaccaccacacugaa

SEQ ID NO: 449670 - RNA, 23 nt, Artificial Sequence
  Synthetic
aaauagaaaaccaccacacugaa

SEQ ID NO: 449671 - RNA, 24 nt, Artificial Sequence
  Synthetic
aaaauagaaaaccaccacacugaa

SEQ ID NO: 449672 - RNA, 18 nt, Artificial Sequence
  Synthetic
uggcuagggggcacugaa

SEQ ID NO: 449673 - RNA, 19 nt, Artificial Sequence
  Synthetic
guggcuagggggcacugaa

SEQ ID NO: 449674 - RNA, 20 nt, Artificial Sequence
  Synthetic
uguggcuagggggcacugaa

SEQ ID NO: 449675 - RNA, 21 nt, Artificial Sequence
  Synthetic
auguggcuagggggcacugaa

SEQ ID NO: 449676 - RNA, 22 nt, Artificial Sequence
  Synthetic
uauguggcuagggggcacugaa

SEQ ID NO: 449677 - RNA, 23 nt, Artificial Sequence
  Synthetic
uuauguggcuagggggcacugaa

SEQ ID NO: 449678 - RNA, 24 nt, Artificial Sequence
  Synthetic
cuuauguggcuagggggcacugaa

SEQ ID NO: 449679 - RNA, 18 nt, Artificial Sequence
  Synthetic
uucuuuuucuucacugaa

SEQ ID NO: 449680 - RNA, 19 nt, Artificial Sequence
  Synthetic
uuucuuuuucuucacugaa

SEQ ID NO: 449681 - RNA, 20 nt, Artificial Sequence
  Synthetic
auuucuuuuucuucacugaa

SEQ ID NO: 449682 - RNA, 21 nt, Artificial Sequence
  Synthetic
cauuucuuuuucuucacugaa

SEQ ID NO: 449683 - RNA, 22 nt, Artificial Sequence
  Synthetic
acauuucuuuuucuucacugaa

SEQ ID NO: 449684 - RNA, 23 nt, Artificial Sequence
  Synthetic
gacauuucuuuuucuucacugaa

SEQ ID NO: 449685 - RNA, 24 nt, Artificial Sequence
  Synthetic
ggacauuucuuuuucuucacugaa

SEQ ID NO: 449686 - RNA, 18 nt, Artificial Sequence
  Synthetic
uagcacggagagacugaa

SEQ ID NO: 449687 - RNA, 19 nt, Artificial Sequence
  Synthetic
guagcacggagagacugaa

SEQ ID NO: 449688 - RNA, 20 nt, Artificial Sequence
  Synthetic
gguagcacggagagacugaa

SEQ ID NO: 449689 - RNA, 21 nt, Artificial Sequence
  Synthetic
ggguagcacggagagacugaa

SEQ ID NO: 449690 - RNA, 22 nt, Artificial Sequence
  Synthetic
gggguagcacggagagacugaa

SEQ ID NO: 449691 - RNA, 23 nt, Artificial Sequence
  Synthetic
ggggguagcacggagagacugaa

SEQ ID NO: 449692 - RNA, 24 nt, Artificial Sequence
  Synthetic
uggggguagcacggagagacugaa

SEQ ID NO: 449693 - RNA, 18 nt, Artificial Sequence
  Synthetic
uguccuuuggugacugaa

SEQ ID NO: 449694 - RNA, 19 nt, Artificial Sequence
  Synthetic
uuguccuuuggugacugaa

SEQ ID NO: 449695 - RNA, 20 nt, Artificial Sequence
  Synthetic
auuguccuuuggugacugaa

SEQ ID NO: 449696 - RNA, 21 nt, Artificial Sequence
  Synthetic
gauuguccuuuggugacugaa

SEQ ID NO: 449697 - RNA, 22 nt, Artificial Sequence
  Synthetic
ggauuguccuuuggugacugaa

SEQ ID NO: 449698 - RNA, 23 nt, Artificial Sequence
  Synthetic
aggauuguccuuuggugacugaa

SEQ ID NO: 449699 - RNA, 24 nt, Artificial Sequence
  Synthetic
gaggauuguccuuuggugacugaa

SEQ ID NO: 449700 - RNA, 18 nt, Artificial Sequence
  Synthetic
uuccaguacaauacugaa

SEQ ID NO: 449701 - RNA, 19 nt, Artificial Sequence
  Synthetic
cuuccaguacaauacugaa

SEQ ID NO: 449702 - RNA, 20 nt, Artificial Sequence
  Synthetic
acuuccaguacaauacugaa

SEQ ID NO: 449703 - RNA, 21 nt, Artificial Sequence
  Synthetic
aacuuccaguacaauacugaa

SEQ ID NO: 449704 - RNA, 22 nt, Artificial Sequence
  Synthetic
gaacuuccaguacaauacugaa

SEQ ID NO: 449705 - RNA, 23 nt, Artificial Sequence
  Synthetic
ugaacuuccaguacaauacugaa

SEQ ID NO: 449706 - RNA, 24 nt, Artificial Sequence
  Synthetic
cugaacuuccaguacaauacugaa

SEQ ID NO: 449707 - RNA, 18 nt, Artificial Sequence
  Synthetic
auauaugagaauacugaa

SEQ ID NO: 449708 - RNA, 19 nt, Artificial Sequence
  Synthetic
gauauaugagaauacugaa

SEQ ID NO: 449709 - RNA, 20 nt, Artificial Sequence
  Synthetic
agauauaugagaauacugaa

SEQ ID NO: 449710 - RNA, 21 nt, Artificial Sequence
  Synthetic
gagauauaugagaauacugaa

SEQ ID NO: 449711 - RNA, 22 nt, Artificial Sequence
  Synthetic
ugagauauaugagaauacugaa

SEQ ID NO: 449712 - RNA, 23 nt, Artificial Sequence
  Synthetic
uugagauauaugagaauacugaa

SEQ ID NO: 449713 - RNA, 24 nt, Artificial Sequence
  Synthetic
guugagauauaugagaauacugaa

SEQ ID NO: 449714 - RNA, 18 nt, Artificial Sequence
  Synthetic
gcaucagugacuacugaa

SEQ ID NO: 449715 - RNA, 19 nt, Artificial Sequence
  Synthetic
agcaucagugacuacugaa

SEQ ID NO: 449716 - RNA, 20 nt, Artificial Sequence
  Synthetic
aagcaucagugacuacugaa

SEQ ID NO: 449717 - RNA, 21 nt, Artificial Sequence
  Synthetic
caagcaucagugacuacugaa

SEQ ID NO: 449718 - RNA, 22 nt, Artificial Sequence
  Synthetic
gcaagcaucagugacuacugaa

SEQ ID NO: 449719 - RNA, 23 nt, Artificial Sequence
  Synthetic
ugcaagcaucagugacuacugaa

SEQ ID NO: 449720 - RNA, 24 nt, Artificial Sequence
  Synthetic
gugcaagcaucagugacuacugaa

SEQ ID NO: 449721 - RNA, 18 nt, Artificial Sequence
  Synthetic
aaauaccaagcuacugaa

SEQ ID NO: 449722 - RNA, 19 nt, Artificial Sequence
  Synthetic
aaaauaccaagcuacugaa

SEQ ID NO: 449723 - RNA, 20 nt, Artificial Sequence
  Synthetic
caaaauaccaagcuacugaa

SEQ ID NO: 449724 - RNA, 21 nt, Artificial Sequence
  Synthetic
ccaaaauaccaagcuacugaa

SEQ ID NO: 449725 - RNA, 22 nt, Artificial Sequence
  Synthetic
accaaaauaccaagcuacugaa

SEQ ID NO: 449726 - RNA, 23 nt, Artificial Sequence
  Synthetic
uaccaaaauaccaagcuacugaa

SEQ ID NO: 449727 - RNA, 24 nt, Artificial Sequence
  Synthetic
uuaccaaaauaccaagcuacugaa

SEQ ID NO: 449728 - RNA, 18 nt, Artificial Sequence
  Synthetic
uuuuuuugugguacugaa

SEQ ID NO: 449729 - RNA, 19 nt, Artificial Sequence
  Synthetic
guuuuuuugugguacugaa

SEQ ID NO: 449730 - RNA, 20 nt, Artificial Sequence
  Synthetic
aguuuuuuugugguacugaa

SEQ ID NO: 449731 - RNA, 21 nt, Artificial Sequence
  Synthetic
uaguuuuuuugugguacugaa

SEQ ID NO: 449732 - RNA, 22 nt, Artificial Sequence
  Synthetic
uuaguuuuuuugugguacugaa

SEQ ID NO: 449733 - RNA, 23 nt, Artificial Sequence
  Synthetic
guuaguuuuuuugugguacugaa

SEQ ID NO: 449734 - RNA, 24 nt, Artificial Sequence
  Synthetic
uguuaguuuuuuugugguacugaa

SEQ ID NO: 449735 - RNA, 18 nt, Artificial Sequence
  Synthetic
uucuaaacucuuacugaa

SEQ ID NO: 449736 - RNA, 19 nt, Artificial Sequence
  Synthetic
uuucuaaacucuuacugaa

SEQ ID NO: 449737 - RNA, 20 nt, Artificial Sequence
  Synthetic
uuuucuaaacucuuacugaa

SEQ ID NO: 449738 - RNA, 21 nt, Artificial Sequence
  Synthetic
uuuuucuaaacucuuacugaa

SEQ ID NO: 449739 - RNA, 22 nt, Artificial Sequence
  Synthetic
uuuuuucuaaacucuuacugaa

SEQ ID NO: 449740 - RNA, 23 nt, Artificial Sequence
  Synthetic
auuuuuucuaaacucuuacugaa

SEQ ID NO: 449741 - RNA, 24 nt, Artificial Sequence
  Synthetic
uauuuuuucuaaacucuuacugaa

SEQ ID NO: 449742 - RNA, 18 nt, Artificial Sequence
  Synthetic
ggagaugaaguuacugaa

SEQ ID NO: 449743 - RNA, 19 nt, Artificial Sequence
  Synthetic
uggagaugaaguuacugaa

SEQ ID NO: 449744 - RNA, 20 nt, Artificial Sequence
  Synthetic
uuggagaugaaguuacugaa

SEQ ID NO: 449745 - RNA, 21 nt, Artificial Sequence
  Synthetic
uuuggagaugaaguuacugaa

SEQ ID NO: 449746 - RNA, 22 nt, Artificial Sequence
  Synthetic
cuuuggagaugaaguuacugaa

SEQ ID NO: 449747 - RNA, 23 nt, Artificial Sequence
  Synthetic
gcuuuggagaugaaguuacugaa

SEQ ID NO: 449748 - RNA, 24 nt, Artificial Sequence
  Synthetic
ggcuuuggagaugaaguuacugaa

SEQ ID NO: 449749 - RNA, 18 nt, Artificial Sequence
  Synthetic
cacugcaaauuuacugaa

SEQ ID NO: 449750 - RNA, 19 nt, Artificial Sequence
  Synthetic
ucacugcaaauuuacugaa

SEQ ID NO: 449751 - RNA, 20 nt, Artificial Sequence
  Synthetic
uucacugcaaauuuacugaa

SEQ ID NO: 449752 - RNA, 21 nt, Artificial Sequence
  Synthetic
cuucacugcaaauuuacugaa

SEQ ID NO: 449753 - RNA, 22 nt, Artificial Sequence
  Synthetic
acuucacugcaaauuuacugaa

SEQ ID NO: 449754 - RNA, 23 nt, Artificial Sequence
  Synthetic
aacuucacugcaaauuuacugaa

SEQ ID NO: 449755 - RNA, 24 nt, Artificial Sequence
  Synthetic
caacuucacugcaaauuuacugaa

SEQ ID NO: 449756 - RNA, 18 nt, Artificial Sequence
  Synthetic
ccagcaccauuuacugaa

SEQ ID NO: 449757 - RNA, 19 nt, Artificial Sequence
  Synthetic
cccagcaccauuuacugaa

SEQ ID NO: 449758 - RNA, 20 nt, Artificial Sequence
  Synthetic
acccagcaccauuuacugaa

SEQ ID NO: 449759 - RNA, 21 nt, Artificial Sequence
  Synthetic
uacccagcaccauuuacugaa

SEQ ID NO: 449760 - RNA, 22 nt, Artificial Sequence
  Synthetic
uuacccagcaccauuuacugaa

SEQ ID NO: 449761 - RNA, 23 nt, Artificial Sequence
  Synthetic
uuuacccagcaccauuuacugaa

SEQ ID NO: 449762 - RNA, 24 nt, Artificial Sequence
  Synthetic
guuuacccagcaccauuuacugaa

SEQ ID NO: 449763 - RNA, 18 nt, Artificial Sequence
  Synthetic
gcacaaugcuuuacugaa

SEQ ID NO: 449764 - RNA, 19 nt, Artificial Sequence
  Synthetic
agcacaaugcuuuacugaa

SEQ ID NO: 449765 - RNA, 20 nt, Artificial Sequence
  Synthetic
gagcacaaugcuuuacugaa

SEQ ID NO: 449766 - RNA, 21 nt, Artificial Sequence
  Synthetic
agagcacaaugcuuuacugaa

SEQ ID NO: 449767 - RNA, 22 nt, Artificial Sequence
  Synthetic
aagagcacaaugcuuuacugaa

SEQ ID NO: 449768 - RNA, 23 nt, Artificial Sequence
  Synthetic
gaagagcacaaugcuuuacugaa

SEQ ID NO: 449769 - RNA, 24 nt, Artificial Sequence
  Synthetic
ugaagagcacaaugcuuuacugaa

SEQ ID NO: 449770 - RNA, 18 nt, Artificial Sequence
  Synthetic
aagcucuggaaaccugaa

SEQ ID NO: 449771 - RNA, 19 nt, Artificial Sequence
  Synthetic
aaagcucuggaaaccugaa

SEQ ID NO: 449772 - RNA, 20 nt, Artificial Sequence
  Synthetic
uaaagcucuggaaaccugaa

SEQ ID NO: 449773 - RNA, 21 nt, Artificial Sequence
  Synthetic
guaaagcucuggaaaccugaa

SEQ ID NO: 449774 - RNA, 22 nt, Artificial Sequence
  Synthetic
gguaaagcucuggaaaccugaa

SEQ ID NO: 449775 - RNA, 23 nt, Artificial Sequence
  Synthetic
agguaaagcucuggaaaccugaa

SEQ ID NO: 449776 - RNA, 24 nt, Artificial Sequence
  Synthetic
cagguaaagcucuggaaaccugaa

SEQ ID NO: 449777 - RNA, 18 nt, Artificial Sequence
  Synthetic
gauauugcagaaccugaa

SEQ ID NO: 449778 - RNA, 19 nt, Artificial Sequence
  Synthetic
agauauugcagaaccugaa

SEQ ID NO: 449779 - RNA, 20 nt, Artificial Sequence
  Synthetic
uagauauugcagaaccugaa

SEQ ID NO: 449780 - RNA, 21 nt, Artificial Sequence
  Synthetic
guagauauugcagaaccugaa

SEQ ID NO: 449781 - RNA, 22 nt, Artificial Sequence
  Synthetic
aguagauauugcagaaccugaa

SEQ ID NO: 449782 - RNA, 23 nt, Artificial Sequence
  Synthetic
aaguagauauugcagaaccugaa

SEQ ID NO: 449783 - RNA, 24 nt, Artificial Sequence
  Synthetic
aaaguagauauugcagaaccugaa

SEQ ID NO: 449784 - RNA, 18 nt, Artificial Sequence
  Synthetic
ucucuguuuggaccugaa

SEQ ID NO: 449785 - RNA, 19 nt, Artificial Sequence
  Synthetic
uucucuguuuggaccugaa

SEQ ID NO: 449786 - RNA, 20 nt, Artificial Sequence
  Synthetic
uuucucuguuuggaccugaa

SEQ ID NO: 449787 - RNA, 21 nt, Artificial Sequence
  Synthetic
guuucucuguuuggaccugaa

SEQ ID NO: 449788 - RNA, 22 nt, Artificial Sequence
  Synthetic
aguuucucuguuuggaccugaa

SEQ ID NO: 449789 - RNA, 23 nt, Artificial Sequence
  Synthetic
uaguuucucuguuuggaccugaa

SEQ ID NO: 449790 - RNA, 24 nt, Artificial Sequence
  Synthetic
cuaguuucucuguuuggaccugaa

SEQ ID NO: 449791 - RNA, 18 nt, Artificial Sequence
  Synthetic
cucauuuaccacccugaa

SEQ ID NO: 449792 - RNA, 19 nt, Artificial Sequence
  Synthetic
ccucauuuaccacccugaa

SEQ ID NO: 449793 - RNA, 20 nt, Artificial Sequence
  Synthetic
cccucauuuaccacccugaa

SEQ ID NO: 449794 - RNA, 21 nt, Artificial Sequence
  Synthetic
acccucauuuaccacccugaa

SEQ ID NO: 449795 - RNA, 22 nt, Artificial Sequence
  Synthetic
cacccucauuuaccacccugaa

SEQ ID NO: 449796 - RNA, 23 nt, Artificial Sequence
  Synthetic
acacccucauuuaccacccugaa

SEQ ID NO: 449797 - RNA, 24 nt, Artificial Sequence
  Synthetic
aacacccucauuuaccacccugaa

SEQ ID NO: 449798 - RNA, 18 nt, Artificial Sequence
  Synthetic
gaauguaaugagccugaa

SEQ ID NO: 449799 - RNA, 19 nt, Artificial Sequence
  Synthetic
ggaauguaaugagccugaa

SEQ ID NO: 449800 - RNA, 20 nt, Artificial Sequence
  Synthetic
uggaauguaaugagccugaa

SEQ ID NO: 449801 - RNA, 21 nt, Artificial Sequence
  Synthetic
uuggaauguaaugagccugaa

SEQ ID NO: 449802 - RNA, 22 nt, Artificial Sequence
  Synthetic
cuuggaauguaaugagccugaa

SEQ ID NO: 449803 - RNA, 23 nt, Artificial Sequence
  Synthetic
acuuggaauguaaugagccugaa

SEQ ID NO: 449804 - RNA, 24 nt, Artificial Sequence
  Synthetic
uacuuggaauguaaugagccugaa

SEQ ID NO: 449805 - RNA, 18 nt, Artificial Sequence
  Synthetic
uguuaauuccauccugaa

SEQ ID NO: 449806 - RNA, 19 nt, Artificial Sequence
  Synthetic
uuguuaauuccauccugaa

SEQ ID NO: 449807 - RNA, 20 nt, Artificial Sequence
  Synthetic
uuuguuaauuccauccugaa

SEQ ID NO: 449808 - RNA, 21 nt, Artificial Sequence
  Synthetic
auuuguuaauuccauccugaa

SEQ ID NO: 449809 - RNA, 22 nt, Artificial Sequence
  Synthetic
aauuuguuaauuccauccugaa

SEQ ID NO: 449810 - RNA, 23 nt, Artificial Sequence
  Synthetic
aaauuuguuaauuccauccugaa

SEQ ID NO: 449811 - RNA, 24 nt, Artificial Sequence
  Synthetic
caaauuuguuaauuccauccugaa

SEQ ID NO: 449812 - RNA, 18 nt, Artificial Sequence
  Synthetic
uauuaauguuauccugaa

SEQ ID NO: 449813 - RNA, 19 nt, Artificial Sequence
  Synthetic
uuauuaauguuauccugaa

SEQ ID NO: 449814 - RNA, 20 nt, Artificial Sequence
  Synthetic
auuauuaauguuauccugaa

SEQ ID NO: 449815 - RNA, 21 nt, Artificial Sequence
  Synthetic
aauuauuaauguuauccugaa

SEQ ID NO: 449816 - RNA, 22 nt, Artificial Sequence
  Synthetic
uaauuauuaauguuauccugaa

SEQ ID NO: 449817 - RNA, 23 nt, Artificial Sequence
  Synthetic
auaauuauuaauguuauccugaa

SEQ ID NO: 449818 - RNA, 24 nt, Artificial Sequence
  Synthetic
gauaauuauuaauguuauccugaa

SEQ ID NO: 449819 - RNA, 18 nt, Artificial Sequence
  Synthetic
gcagagauaacuccugaa

SEQ ID NO: 449820 - RNA, 19 nt, Artificial Sequence
  Synthetic
agcagagauaacuccugaa

SEQ ID NO: 449821 - RNA, 20 nt, Artificial Sequence
  Synthetic
cagcagagauaacuccugaa

SEQ ID NO: 449822 - RNA, 21 nt, Artificial Sequence
  Synthetic
acagcagagauaacuccugaa

SEQ ID NO: 449823 - RNA, 22 nt, Artificial Sequence
  Synthetic
gacagcagagauaacuccugaa

SEQ ID NO: 449824 - RNA, 23 nt, Artificial Sequence
  Synthetic
agacagcagagauaacuccugaa

SEQ ID NO: 449825 - RNA, 24 nt, Artificial Sequence
  Synthetic
gagacagcagagauaacuccugaa

SEQ ID NO: 449826 - RNA, 18 nt, Artificial Sequence
  Synthetic
uuugcaggauuuccugaa

SEQ ID NO: 449827 - RNA, 19 nt, Artificial Sequence
  Synthetic
auuugcaggauuuccugaa

SEQ ID NO: 449828 - RNA, 20 nt, Artificial Sequence
  Synthetic
uauuugcaggauuuccugaa

SEQ ID NO: 449829 - RNA, 21 nt, Artificial Sequence
  Synthetic
cuauuugcaggauuuccugaa

SEQ ID NO: 449830 - RNA, 22 nt, Artificial Sequence
  Synthetic
gcuauuugcaggauuuccugaa

SEQ ID NO: 449831 - RNA, 23 nt, Artificial Sequence
  Synthetic
ugcuauuugcaggauuuccugaa

SEQ ID NO: 449832 - RNA, 24 nt, Artificial Sequence
  Synthetic
uugcuauuugcaggauuuccugaa

SEQ ID NO: 449833 - RNA, 18 nt, Artificial Sequence
  Synthetic
gccucaggaaaagcugaa

SEQ ID NO: 449834 - RNA, 19 nt, Artificial Sequence
  Synthetic
ggccucaggaaaagcugaa

SEQ ID NO: 449835 - RNA, 20 nt, Artificial Sequence
  Synthetic
uggccucaggaaaagcugaa

SEQ ID NO: 449836 - RNA, 21 nt, Artificial Sequence
  Synthetic
cuggccucaggaaaagcugaa

SEQ ID NO: 449837 - RNA, 22 nt, Artificial Sequence
  Synthetic
ucuggccucaggaaaagcugaa

SEQ ID NO: 449838 - RNA, 23 nt, Artificial Sequence
  Synthetic
aucuggccucaggaaaagcugaa

SEQ ID NO: 449839 - RNA, 24 nt, Artificial Sequence
  Synthetic
aaucuggccucaggaaaagcugaa

SEQ ID NO: 449840 - RNA, 18 nt, Artificial Sequence
  Synthetic
cuagcagaaacagcugaa

SEQ ID NO: 449841 - RNA, 19 nt, Artificial Sequence
  Synthetic
gcuagcagaaacagcugaa

SEQ ID NO: 449842 - RNA, 20 nt, Artificial Sequence
  Synthetic
agcuagcagaaacagcugaa

SEQ ID NO: 449843 - RNA, 21 nt, Artificial Sequence
  Synthetic
gagcuagcagaaacagcugaa

SEQ ID NO: 449844 - RNA, 22 nt, Artificial Sequence
  Synthetic
ggagcuagcagaaacagcugaa

SEQ ID NO: 449845 - RNA, 23 nt, Artificial Sequence
  Synthetic
aggagcuagcagaaacagcugaa

SEQ ID NO: 449846 - RNA, 24 nt, Artificial Sequence
  Synthetic
gaggagcuagcagaaacagcugaa

SEQ ID NO: 449847 - RNA, 18 nt, Artificial Sequence
  Synthetic
uguagggcagcagcugaa

SEQ ID NO: 449848 - RNA, 19 nt, Artificial Sequence
  Synthetic
uuguagggcagcagcugaa

SEQ ID NO: 449849 - RNA, 20 nt, Artificial Sequence
  Synthetic
auuguagggcagcagcugaa

SEQ ID NO: 449850 - RNA, 21 nt, Artificial Sequence
  Synthetic
cauuguagggcagcagcugaa

SEQ ID NO: 449851 - RNA, 22 nt, Artificial Sequence
  Synthetic
ccauuguagggcagcagcugaa

SEQ ID NO: 449852 - RNA, 23 nt, Artificial Sequence
  Synthetic
uccauuguagggcagcagcugaa

SEQ ID NO: 449853 - RNA, 24 nt, Artificial Sequence
  Synthetic
uuccauuguagggcagcagcugaa

SEQ ID NO: 449854 - RNA, 18 nt, Artificial Sequence
  Synthetic
aggagaauggcagcugaa

SEQ ID NO: 449855 - RNA, 19 nt, Artificial Sequence
  Synthetic
aaggagaauggcagcugaa

SEQ ID NO: 449856 - RNA, 20 nt, Artificial Sequence
  Synthetic
uaaggagaauggcagcugaa

SEQ ID NO: 449857 - RNA, 21 nt, Artificial Sequence
  Synthetic
uuaaggagaauggcagcugaa

SEQ ID NO: 449858 - RNA, 22 nt, Artificial Sequence
  Synthetic
auuaaggagaauggcagcugaa

SEQ ID NO: 449859 - RNA, 23 nt, Artificial Sequence
  Synthetic
uauuaaggagaauggcagcugaa

SEQ ID NO: 449860 - RNA, 24 nt, Artificial Sequence
  Synthetic
guauuaaggagaauggcagcugaa

SEQ ID NO: 449861 - RNA, 18 nt, Artificial Sequence
  Synthetic
gugggaaggggagcugaa

SEQ ID NO: 449862 - RNA, 19 nt, Artificial Sequence
  Synthetic
agugggaaggggagcugaa

SEQ ID NO: 449863 - RNA, 20 nt, Artificial Sequence
  Synthetic
cagugggaaggggagcugaa

SEQ ID NO: 449864 - RNA, 21 nt, Artificial Sequence
  Synthetic
ucagugggaaggggagcugaa

SEQ ID NO: 449865 - RNA, 22 nt, Artificial Sequence
  Synthetic
cucagugggaaggggagcugaa

SEQ ID NO: 449866 - RNA, 23 nt, Artificial Sequence
  Synthetic
ucucagugggaaggggagcugaa

SEQ ID NO: 449867 - RNA, 24 nt, Artificial Sequence
  Synthetic
cucucagugggaaggggagcugaa

SEQ ID NO: 449868 - RNA, 18 nt, Artificial Sequence
  Synthetic
auucacauuugagcugaa

SEQ ID NO: 449869 - RNA, 19 nt, Artificial Sequence
  Synthetic
uauucacauuugagcugaa

SEQ ID NO: 449870 - RNA, 20 nt, Artificial Sequence
  Synthetic
cuauucacauuugagcugaa

SEQ ID NO: 449871 - RNA, 21 nt, Artificial Sequence
  Synthetic
gcuauucacauuugagcugaa

SEQ ID NO: 449872 - RNA, 22 nt, Artificial Sequence
  Synthetic
ugcuauucacauuugagcugaa

SEQ ID NO: 449873 - RNA, 23 nt, Artificial Sequence
  Synthetic
uugcuauucacauuugagcugaa

SEQ ID NO: 449874 - RNA, 24 nt, Artificial Sequence
  Synthetic
guugcuauucacauuugagcugaa

SEQ ID NO: 449875 - RNA, 18 nt, Artificial Sequence
  Synthetic
auucaaacguucgcugaa

SEQ ID NO: 449876 - RNA, 19 nt, Artificial Sequence
  Synthetic
cauucaaacguucgcugaa

SEQ ID NO: 449877 - RNA, 20 nt, Artificial Sequence
  Synthetic
gcauucaaacguucgcugaa

SEQ ID NO: 449878 - RNA, 21 nt, Artificial Sequence
  Synthetic
ggcauucaaacguucgcugaa

SEQ ID NO: 449879 - RNA, 22 nt, Artificial Sequence
  Synthetic
aggcauucaaacguucgcugaa

SEQ ID NO: 449880 - RNA, 23 nt, Artificial Sequence
  Synthetic
uaggcauucaaacguucgcugaa

SEQ ID NO: 449881 - RNA, 24 nt, Artificial Sequence
  Synthetic
guaggcauucaaacguucgcugaa

SEQ ID NO: 449882 - RNA, 18 nt, Artificial Sequence
  Synthetic
gcacuuugggaggcugaa

SEQ ID NO: 449883 - RNA, 19 nt, Artificial Sequence
  Synthetic
agcacuuugggaggcugaa

SEQ ID NO: 449884 - RNA, 20 nt, Artificial Sequence
  Synthetic
cagcacuuugggaggcugaa

SEQ ID NO: 449885 - RNA, 21 nt, Artificial Sequence
  Synthetic
ccagcacuuugggaggcugaa

SEQ ID NO: 449886 - RNA, 22 nt, Artificial Sequence
  Synthetic
cccagcacuuugggaggcugaa

SEQ ID NO: 449887 - RNA, 23 nt, Artificial Sequence
  Synthetic
ucccagcacuuugggaggcugaa

SEQ ID NO: 449888 - RNA, 24 nt, Artificial Sequence
  Synthetic
aucccagcacuuugggaggcugaa

SEQ ID NO: 449889 - RNA, 18 nt, Artificial Sequence
  Synthetic
ucauauucugaggcugaa

SEQ ID NO: 449890 - RNA, 19 nt, Artificial Sequence
  Synthetic
aucauauucugaggcugaa

SEQ ID NO: 449891 - RNA, 20 nt, Artificial Sequence
  Synthetic
caucauauucugaggcugaa

SEQ ID NO: 449892 - RNA, 21 nt, Artificial Sequence
  Synthetic
ucaucauauucugaggcugaa

SEQ ID NO: 449893 - RNA, 22 nt, Artificial Sequence
  Synthetic
uucaucauauucugaggcugaa

SEQ ID NO: 449894 - RNA, 23 nt, Artificial Sequence
  Synthetic
uuucaucauauucugaggcugaa

SEQ ID NO: 449895 - RNA, 24 nt, Artificial Sequence
  Synthetic
uuuucaucauauucugaggcugaa

SEQ ID NO: 449896 - RNA, 18 nt, Artificial Sequence
  Synthetic
ugccuagggugggcugaa

SEQ ID NO: 449897 - RNA, 19 nt, Artificial Sequence
  Synthetic
augccuagggugggcugaa

SEQ ID NO: 449898 - RNA, 20 nt, Artificial Sequence
  Synthetic
aaugccuagggugggcugaa

SEQ ID NO: 449899 - RNA, 21 nt, Artificial Sequence
  Synthetic
aaaugccuagggugggcugaa

SEQ ID NO: 449900 - RNA, 22 nt, Artificial Sequence
  Synthetic
caaaugccuagggugggcugaa

SEQ ID NO: 449901 - RNA, 23 nt, Artificial Sequence
  Synthetic
acaaaugccuagggugggcugaa

SEQ ID NO: 449902 - RNA, 24 nt, Artificial Sequence
  Synthetic
aacaaaugccuagggugggcugaa

SEQ ID NO: 449903 - RNA, 18 nt, Artificial Sequence
  Synthetic
caacugaaaauggcugaa

SEQ ID NO: 449904 - RNA, 19 nt, Artificial Sequence
  Synthetic
gcaacugaaaauggcugaa

SEQ ID NO: 449905 - RNA, 20 nt, Artificial Sequence
  Synthetic
ugcaacugaaaauggcugaa

SEQ ID NO: 449906 - RNA, 21 nt, Artificial Sequence
  Synthetic
augcaacugaaaauggcugaa

SEQ ID NO: 449907 - RNA, 22 nt, Artificial Sequence
  Synthetic
aaugcaacugaaaauggcugaa

SEQ ID NO: 449908 - RNA, 23 nt, Artificial Sequence
  Synthetic
aaaugcaacugaaaauggcugaa

SEQ ID NO: 449909 - RNA, 24 nt, Artificial Sequence
  Synthetic
aaaaugcaacugaaaauggcugaa

SEQ ID NO: 449910 - RNA, 18 nt, Artificial Sequence
  Synthetic
cagaugcguuuggcugaa

SEQ ID NO: 449911 - RNA, 19 nt, Artificial Sequence
  Synthetic
acagaugcguuuggcugaa

SEQ ID NO: 449912 - RNA, 20 nt, Artificial Sequence
  Synthetic
aacagaugcguuuggcugaa

SEQ ID NO: 449913 - RNA, 21 nt, Artificial Sequence
  Synthetic
aaacagaugcguuuggcugaa

SEQ ID NO: 449914 - RNA, 22 nt, Artificial Sequence
  Synthetic
gaaacagaugcguuuggcugaa

SEQ ID NO: 449915 - RNA, 23 nt, Artificial Sequence
  Synthetic
ugaaacagaugcguuuggcugaa

SEQ ID NO: 449916 - RNA, 24 nt, Artificial Sequence
  Synthetic
cugaaacagaugcguuuggcugaa

SEQ ID NO: 449917 - RNA, 18 nt, Artificial Sequence
  Synthetic
ucuagggaaaaugcugaa

SEQ ID NO: 449918 - RNA, 19 nt, Artificial Sequence
  Synthetic
gucuagggaaaaugcugaa

SEQ ID NO: 449919 - RNA, 20 nt, Artificial Sequence
  Synthetic
ugucuagggaaaaugcugaa

SEQ ID NO: 449920 - RNA, 21 nt, Artificial Sequence
  Synthetic
uugucuagggaaaaugcugaa

SEQ ID NO: 449921 - RNA, 22 nt, Artificial Sequence
  Synthetic
auugucuagggaaaaugcugaa

SEQ ID NO: 449922 - RNA, 23 nt, Artificial Sequence
  Synthetic
gauugucuagggaaaaugcugaa

SEQ ID NO: 449923 - RNA, 24 nt, Artificial Sequence
  Synthetic
agauugucuagggaaaaugcugaa

SEQ ID NO: 449924 - RNA, 18 nt, Artificial Sequence
  Synthetic
caacagaaaccugcugaa

SEQ ID NO: 449925 - RNA, 19 nt, Artificial Sequence
  Synthetic
acaacagaaaccugcugaa

SEQ ID NO: 449926 - RNA, 20 nt, Artificial Sequence
  Synthetic
aacaacagaaaccugcugaa

SEQ ID NO: 449927 - RNA, 21 nt, Artificial Sequence
  Synthetic
caacaacagaaaccugcugaa

SEQ ID NO: 449928 - RNA, 22 nt, Artificial Sequence
  Synthetic
ucaacaacagaaaccugcugaa

SEQ ID NO: 449929 - RNA, 23 nt, Artificial Sequence
  Synthetic
uucaacaacagaaaccugcugaa

SEQ ID NO: 449930 - RNA, 24 nt, Artificial Sequence
  Synthetic
cuucaacaacagaaaccugcugaa

SEQ ID NO: 449931 - RNA, 18 nt, Artificial Sequence
  Synthetic
aaaaagacaacaucugaa

SEQ ID NO: 449932 - RNA, 19 nt, Artificial Sequence
  Synthetic
gaaaaagacaacaucugaa

SEQ ID NO: 449933 - RNA, 20 nt, Artificial Sequence
  Synthetic
agaaaaagacaacaucugaa

SEQ ID NO: 449934 - RNA, 21 nt, Artificial Sequence
  Synthetic
uagaaaaagacaacaucugaa

SEQ ID NO: 449935 - RNA, 22 nt, Artificial Sequence
  Synthetic
cuagaaaaagacaacaucugaa

SEQ ID NO: 449936 - RNA, 23 nt, Artificial Sequence
  Synthetic
ucuagaaaaagacaacaucugaa

SEQ ID NO: 449937 - RNA, 24 nt, Artificial Sequence
  Synthetic
uucuagaaaaagacaacaucugaa

SEQ ID NO: 449938 - RNA, 18 nt, Artificial Sequence
  Synthetic
aacauuaagggaucugaa

SEQ ID NO: 449939 - RNA, 19 nt, Artificial Sequence
  Synthetic
aaacauuaagggaucugaa

SEQ ID NO: 449940 - RNA, 20 nt, Artificial Sequence
  Synthetic
caaacauuaagggaucugaa

SEQ ID NO: 449941 - RNA, 21 nt, Artificial Sequence
  Synthetic
gcaaacauuaagggaucugaa

SEQ ID NO: 449942 - RNA, 22 nt, Artificial Sequence
  Synthetic
agcaaacauuaagggaucugaa

SEQ ID NO: 449943 - RNA, 23 nt, Artificial Sequence
  Synthetic
aagcaaacauuaagggaucugaa

SEQ ID NO: 449944 - RNA, 24 nt, Artificial Sequence
  Synthetic
aaagcaaacauuaagggaucugaa

SEQ ID NO: 449945 - RNA, 18 nt, Artificial Sequence
  Synthetic
caauugagauccucugaa

SEQ ID NO: 449946 - RNA, 19 nt, Artificial Sequence
  Synthetic
gcaauugagauccucugaa

SEQ ID NO: 449947 - RNA, 20 nt, Artificial Sequence
  Synthetic
agcaauugagauccucugaa

SEQ ID NO: 449948 - RNA, 21 nt, Artificial Sequence
  Synthetic
gagcaauugagauccucugaa

SEQ ID NO: 449949 - RNA, 22 nt, Artificial Sequence
  Synthetic
agagcaauugagauccucugaa

SEQ ID NO: 449950 - RNA, 23 nt, Artificial Sequence
  Synthetic
gagagcaauugagauccucugaa

SEQ ID NO: 449951 - RNA, 24 nt, Artificial Sequence
  Synthetic
ugagagcaauugagauccucugaa

SEQ ID NO: 449952 - RNA, 18 nt, Artificial Sequence
  Synthetic
gggcaagauuccucugaa

SEQ ID NO: 449953 - RNA, 19 nt, Artificial Sequence
  Synthetic
ggggcaagauuccucugaa

SEQ ID NO: 449954 - RNA, 20 nt, Artificial Sequence
  Synthetic
cggggcaagauuccucugaa

SEQ ID NO: 449955 - RNA, 21 nt, Artificial Sequence
  Synthetic
ccggggcaagauuccucugaa

SEQ ID NO: 449956 - RNA, 22 nt, Artificial Sequence
  Synthetic
accggggcaagauuccucugaa

SEQ ID NO: 449957 - RNA, 23 nt, Artificial Sequence
  Synthetic
aaccggggcaagauuccucugaa

SEQ ID NO: 449958 - RNA, 24 nt, Artificial Sequence
  Synthetic
uaaccggggcaagauuccucugaa

SEQ ID NO: 449959 - RNA, 18 nt, Artificial Sequence
  Synthetic
acaacuguuagcucugaa

SEQ ID NO: 449960 - RNA, 19 nt, Artificial Sequence
  Synthetic
aacaacuguuagcucugaa

SEQ ID NO: 449961 - RNA, 20 nt, Artificial Sequence
  Synthetic
caacaacuguuagcucugaa

SEQ ID NO: 449962 - RNA, 21 nt, Artificial Sequence
  Synthetic
acaacaacuguuagcucugaa

SEQ ID NO: 449963 - RNA, 22 nt, Artificial Sequence
  Synthetic
gacaacaacuguuagcucugaa

SEQ ID NO: 449964 - RNA, 23 nt, Artificial Sequence
  Synthetic
ugacaacaacuguuagcucugaa

SEQ ID NO: 449965 - RNA, 24 nt, Artificial Sequence
  Synthetic
cugacaacaacuguuagcucugaa

SEQ ID NO: 449966 - RNA, 18 nt, Artificial Sequence
  Synthetic
agcauggcugggucugaa

SEQ ID NO: 449967 - RNA, 19 nt, Artificial Sequence
  Synthetic
aagcauggcugggucugaa

SEQ ID NO: 449968 - RNA, 20 nt, Artificial Sequence
  Synthetic
gaagcauggcugggucugaa

SEQ ID NO: 449969 - RNA, 21 nt, Artificial Sequence
  Synthetic
ugaagcauggcugggucugaa

SEQ ID NO: 449970 - RNA, 22 nt, Artificial Sequence
  Synthetic
gugaagcauggcugggucugaa

SEQ ID NO: 449971 - RNA, 23 nt, Artificial Sequence
  Synthetic
agugaagcauggcugggucugaa

SEQ ID NO: 449972 - RNA, 24 nt, Artificial Sequence
  Synthetic
cagugaagcauggcugggucugaa

SEQ ID NO: 449973 - RNA, 18 nt, Artificial Sequence
  Synthetic
uaugaggugcugucugaa

SEQ ID NO: 449974 - RNA, 19 nt, Artificial Sequence
  Synthetic
uuaugaggugcugucugaa

SEQ ID NO: 449975 - RNA, 20 nt, Artificial Sequence
  Synthetic
uuuaugaggugcugucugaa

SEQ ID NO: 449976 - RNA, 21 nt, Artificial Sequence
  Synthetic
auuuaugaggugcugucugaa

SEQ ID NO: 449977 - RNA, 22 nt, Artificial Sequence
  Synthetic
uauuuaugaggugcugucugaa

SEQ ID NO: 449978 - RNA, 23 nt, Artificial Sequence
  Synthetic
cuauuuaugaggugcugucugaa

SEQ ID NO: 449979 - RNA, 24 nt, Artificial Sequence
  Synthetic
ucuauuuaugaggugcugucugaa

SEQ ID NO: 449980 - RNA, 18 nt, Artificial Sequence
  Synthetic
ucuugaggguauucugaa

SEQ ID NO: 449981 - RNA, 19 nt, Artificial Sequence
  Synthetic
cucuugaggguauucugaa

SEQ ID NO: 449982 - RNA, 20 nt, Artificial Sequence
  Synthetic
ucucuugaggguauucugaa

SEQ ID NO: 449983 - RNA, 21 nt, Artificial Sequence
  Synthetic
uucucuugaggguauucugaa

SEQ ID NO: 449984 - RNA, 22 nt, Artificial Sequence
  Synthetic
uuucucuugaggguauucugaa

SEQ ID NO: 449985 - RNA, 23 nt, Artificial Sequence
  Synthetic
uuuucucuugaggguauucugaa

SEQ ID NO: 449986 - RNA, 24 nt, Artificial Sequence
  Synthetic
cuuuucucuugaggguauucugaa

SEQ ID NO: 449987 - RNA, 18 nt, Artificial Sequence
  Synthetic
augaguauaccuucugaa

SEQ ID NO: 449988 - RNA, 19 nt, Artificial Sequence
  Synthetic
aaugaguauaccuucugaa

SEQ ID NO: 449989 - RNA, 20 nt, Artificial Sequence
  Synthetic
aaaugaguauaccuucugaa

SEQ ID NO: 449990 - RNA, 21 nt, Artificial Sequence
  Synthetic
caaaugaguauaccuucugaa

SEQ ID NO: 449991 - RNA, 22 nt, Artificial Sequence
  Synthetic
ucaaaugaguauaccuucugaa

SEQ ID NO: 449992 - RNA, 23 nt, Artificial Sequence
  Synthetic
uucaaaugaguauaccuucugaa

SEQ ID NO: 449993 - RNA, 24 nt, Artificial Sequence
  Synthetic
cuucaaaugaguauaccuucugaa

SEQ ID NO: 449994 - RNA, 18 nt, Artificial Sequence
  Synthetic
ugauucaacaguucugaa

SEQ ID NO: 449995 - RNA, 19 nt, Artificial Sequence
  Synthetic
cugauucaacaguucugaa

SEQ ID NO: 449996 - RNA, 20 nt, Artificial Sequence
  Synthetic
ucugauucaacaguucugaa

SEQ ID NO: 449997 - RNA, 21 nt, Artificial Sequence
  Synthetic
uucugauucaacaguucugaa

SEQ ID NO: 449998 - RNA, 22 nt, Artificial Sequence
  Synthetic
auucugauucaacaguucugaa

SEQ ID NO: 449999 - RNA, 23 nt, Artificial Sequence
  Synthetic
gauucugauucaacaguucugaa

SEQ ID NO: 450000 - RNA, 24 nt, Artificial Sequence
  Synthetic
ggauucugauucaacaguucugaa

SEQ ID NO: 450001 - RNA, 18 nt, Artificial Sequence
  Synthetic
ucaguaguccuuucugaa

SEQ ID NO: 450002 - RNA, 19 nt, Artificial Sequence
  Synthetic
aucaguaguccuuucugaa

SEQ ID NO: 450003 - RNA, 20 nt, Artificial Sequence
  Synthetic
aaucaguaguccuuucugaa

SEQ ID NO: 450004 - RNA, 21 nt, Artificial Sequence
  Synthetic
aaaucaguaguccuuucugaa

SEQ ID NO: 450005 - RNA, 22 nt, Artificial Sequence
  Synthetic
caaaucaguaguccuuucugaa

SEQ ID NO: 450006 - RNA, 23 nt, Artificial Sequence
  Synthetic
ucaaaucaguaguccuuucugaa

SEQ ID NO: 450007 - RNA, 24 nt, Artificial Sequence
  Synthetic
aucaaaucaguaguccuuucugaa

SEQ ID NO: 450008 - RNA, 18 nt, Artificial Sequence
  Synthetic
cccugcagcuuuucugaa

SEQ ID NO: 450009 - RNA, 19 nt, Artificial Sequence
  Synthetic
acccugcagcuuuucugaa

SEQ ID NO: 450010 - RNA, 20 nt, Artificial Sequence
  Synthetic
aacccugcagcuuuucugaa

SEQ ID NO: 450011 - RNA, 21 nt, Artificial Sequence
  Synthetic
caacccugcagcuuuucugaa

SEQ ID NO: 450012 - RNA, 22 nt, Artificial Sequence
  Synthetic
acaacccugcagcuuuucugaa

SEQ ID NO: 450013 - RNA, 23 nt, Artificial Sequence
  Synthetic
aacaacccugcagcuuuucugaa

SEQ ID NO: 450014 - RNA, 24 nt, Artificial Sequence
  Synthetic
caacaacccugcagcuuuucugaa

SEQ ID NO: 450015 - RNA, 18 nt, Artificial Sequence
  Synthetic
cucuggcgaaaaagugaa

SEQ ID NO: 450016 - RNA, 19 nt, Artificial Sequence
  Synthetic
acucuggcgaaaaagugaa

SEQ ID NO: 450017 - RNA, 20 nt, Artificial Sequence
  Synthetic
cacucuggcgaaaaagugaa

SEQ ID NO: 450018 - RNA, 21 nt, Artificial Sequence
  Synthetic
ucacucuggcgaaaaagugaa

SEQ ID NO: 450019 - RNA, 22 nt, Artificial Sequence
  Synthetic
gucacucuggcgaaaaagugaa

SEQ ID NO: 450020 - RNA, 23 nt, Artificial Sequence
  Synthetic
ugucacucuggcgaaaaagugaa

SEQ ID NO: 450021 - RNA, 24 nt, Artificial Sequence
  Synthetic
augucacucuggcgaaaaagugaa

SEQ ID NO: 450022 - RNA, 18 nt, Artificial Sequence
  Synthetic
aacaagugagaaagugaa

SEQ ID NO: 450023 - RNA, 19 nt, Artificial Sequence
  Synthetic
gaacaagugagaaagugaa

SEQ ID NO: 450024 - RNA, 20 nt, Artificial Sequence
  Synthetic
agaacaagugagaaagugaa

SEQ ID NO: 450025 - RNA, 21 nt, Artificial Sequence
  Synthetic
aagaacaagugagaaagugaa

SEQ ID NO: 450026 - RNA, 22 nt, Artificial Sequence
  Synthetic
gaagaacaagugagaaagugaa

SEQ ID NO: 450027 - RNA, 23 nt, Artificial Sequence
  Synthetic
ugaagaacaagugagaaagugaa

SEQ ID NO: 450028 - RNA, 24 nt, Artificial Sequence
  Synthetic
augaagaacaagugagaaagugaa

SEQ ID NO: 450029 - RNA, 18 nt, Artificial Sequence
  Synthetic
cuguagaugggaagugaa

SEQ ID NO: 450030 - RNA, 19 nt, Artificial Sequence
  Synthetic
ccuguagaugggaagugaa

SEQ ID NO: 450031 - RNA, 20 nt, Artificial Sequence
  Synthetic
accuguagaugggaagugaa

SEQ ID NO: 450032 - RNA, 21 nt, Artificial Sequence
  Synthetic
uaccuguagaugggaagugaa

SEQ ID NO: 450033 - RNA, 22 nt, Artificial Sequence
  Synthetic
cuaccuguagaugggaagugaa

SEQ ID NO: 450034 - RNA, 23 nt, Artificial Sequence
  Synthetic
acuaccuguagaugggaagugaa

SEQ ID NO: 450035 - RNA, 24 nt, Artificial Sequence
  Synthetic
uacuaccuguagaugggaagugaa

SEQ ID NO: 450036 - RNA, 18 nt, Artificial Sequence
  Synthetic
cuugucuaaugaagugaa

SEQ ID NO: 450037 - RNA, 19 nt, Artificial Sequence
  Synthetic
ucuugucuaaugaagugaa

SEQ ID NO: 450038 - RNA, 20 nt, Artificial Sequence
  Synthetic
uucuugucuaaugaagugaa

SEQ ID NO: 450039 - RNA, 21 nt, Artificial Sequence
  Synthetic
cuucuugucuaaugaagugaa

SEQ ID NO: 450040 - RNA, 22 nt, Artificial Sequence
  Synthetic
acuucuugucuaaugaagugaa

SEQ ID NO: 450041 - RNA, 23 nt, Artificial Sequence
  Synthetic
uacuucuugucuaaugaagugaa

SEQ ID NO: 450042 - RNA, 24 nt, Artificial Sequence
  Synthetic
uuacuucuugucuaaugaagugaa

SEQ ID NO: 450043 - RNA, 18 nt, Artificial Sequence
  Synthetic
uuuggaugaugaagugaa

SEQ ID NO: 450044 - RNA, 19 nt, Artificial Sequence
  Synthetic
cuuuggaugaugaagugaa

SEQ ID NO: 450045 - RNA, 20 nt, Artificial Sequence
  Synthetic
ccuuuggaugaugaagugaa

SEQ ID NO: 450046 - RNA, 21 nt, Artificial Sequence
  Synthetic
uccuuuggaugaugaagugaa

SEQ ID NO: 450047 - RNA, 22 nt, Artificial Sequence
  Synthetic
uuccuuuggaugaugaagugaa

SEQ ID NO: 450048 - RNA, 23 nt, Artificial Sequence
  Synthetic
cuuccuuuggaugaugaagugaa

SEQ ID NO: 450049 - RNA, 24 nt, Artificial Sequence
  Synthetic
acuuccuuuggaugaugaagugaa

SEQ ID NO: 450050 - RNA, 18 nt, Artificial Sequence
  Synthetic
cguccuucuugaagugaa

SEQ ID NO: 450051 - RNA, 19 nt, Artificial Sequence
  Synthetic
ccguccuucuugaagugaa

SEQ ID NO: 450052 - RNA, 20 nt, Artificial Sequence
  Synthetic
gccguccuucuugaagugaa

SEQ ID NO: 450053 - RNA, 21 nt, Artificial Sequence
  Synthetic
ugccguccuucuugaagugaa

SEQ ID NO: 450054 - RNA, 22 nt, Artificial Sequence
  Synthetic
cugccguccuucuugaagugaa

SEQ ID NO: 450055 - RNA, 23 nt, Artificial Sequence
  Synthetic
gcugccguccuucuugaagugaa

SEQ ID NO: 450056 - RNA, 24 nt, Artificial Sequence
  Synthetic
ugcugccguccuucuugaagugaa

SEQ ID NO: 450057 - RNA, 18 nt, Artificial Sequence
  Synthetic
uucuuauuggacagugaa

SEQ ID NO: 450058 - RNA, 19 nt, Artificial Sequence
  Synthetic
auucuuauuggacagugaa

SEQ ID NO: 450059 - RNA, 20 nt, Artificial Sequence
  Synthetic
aauucuuauuggacagugaa

SEQ ID NO: 450060 - RNA, 21 nt, Artificial Sequence
  Synthetic
aaauucuuauuggacagugaa

SEQ ID NO: 450061 - RNA, 22 nt, Artificial Sequence
  Synthetic
gaaauucuuauuggacagugaa

SEQ ID NO: 450062 - RNA, 23 nt, Artificial Sequence
  Synthetic
agaaauucuuauuggacagugaa

SEQ ID NO: 450063 - RNA, 24 nt, Artificial Sequence
  Synthetic
cagaaauucuuauuggacagugaa

SEQ ID NO: 450064 - RNA, 18 nt, Artificial Sequence
  Synthetic
ccauuagacagcagugaa

SEQ ID NO: 450065 - RNA, 19 nt, Artificial Sequence
  Synthetic
uccauuagacagcagugaa

SEQ ID NO: 450066 - RNA, 20 nt, Artificial Sequence
  Synthetic
auccauuagacagcagugaa

SEQ ID NO: 450067 - RNA, 21 nt, Artificial Sequence
  Synthetic
uauccauuagacagcagugaa

SEQ ID NO: 450068 - RNA, 22 nt, Artificial Sequence
  Synthetic
guauccauuagacagcagugaa

SEQ ID NO: 450069 - RNA, 23 nt, Artificial Sequence
  Synthetic
gguauccauuagacagcagugaa

SEQ ID NO: 450070 - RNA, 24 nt, Artificial Sequence
  Synthetic
agguauccauuagacagcagugaa

SEQ ID NO: 450071 - RNA, 18 nt, Artificial Sequence
  Synthetic
cuaaagcucaagagugaa

SEQ ID NO: 450072 - RNA, 19 nt, Artificial Sequence
  Synthetic
ccuaaagcucaagagugaa

SEQ ID NO: 450073 - RNA, 20 nt, Artificial Sequence
  Synthetic
uccuaaagcucaagagugaa

SEQ ID NO: 450074 - RNA, 21 nt, Artificial Sequence
  Synthetic
cuccuaaagcucaagagugaa

SEQ ID NO: 450075 - RNA, 22 nt, Artificial Sequence
  Synthetic
ucuccuaaagcucaagagugaa

SEQ ID NO: 450076 - RNA, 23 nt, Artificial Sequence
  Synthetic
cucuccuaaagcucaagagugaa

SEQ ID NO: 450077 - RNA, 24 nt, Artificial Sequence
  Synthetic
ccucuccuaaagcucaagagugaa

SEQ ID NO: 450078 - RNA, 18 nt, Artificial Sequence
  Synthetic
agcagccuacagagugaa

SEQ ID NO: 450079 - RNA, 19 nt, Artificial Sequence
  Synthetic
uagcagccuacagagugaa

SEQ ID NO: 450080 - RNA, 20 nt, Artificial Sequence
  Synthetic
auagcagccuacagagugaa

SEQ ID NO: 450081 - RNA, 21 nt, Artificial Sequence
  Synthetic
aauagcagccuacagagugaa

SEQ ID NO: 450082 - RNA, 22 nt, Artificial Sequence
  Synthetic
gaauagcagccuacagagugaa

SEQ ID NO: 450083 - RNA, 23 nt, Artificial Sequence
  Synthetic
ggaauagcagccuacagagugaa

SEQ ID NO: 450084 - RNA, 24 nt, Artificial Sequence
  Synthetic
gggaauagcagccuacagagugaa

SEQ ID NO: 450085 - RNA, 18 nt, Artificial Sequence
  Synthetic
ggucccuuugagagugaa

SEQ ID NO: 450086 - RNA, 19 nt, Artificial Sequence
  Synthetic
uggucccuuugagagugaa

SEQ ID NO: 450087 - RNA, 20 nt, Artificial Sequence
  Synthetic
uuggucccuuugagagugaa

SEQ ID NO: 450088 - RNA, 21 nt, Artificial Sequence
  Synthetic
cuuggucccuuugagagugaa

SEQ ID NO: 450089 - RNA, 22 nt, Artificial Sequence
  Synthetic
gcuuggucccuuugagagugaa

SEQ ID NO: 450090 - RNA, 23 nt, Artificial Sequence
  Synthetic
agcuuggucccuuugagagugaa

SEQ ID NO: 450091 - RNA, 24 nt, Artificial Sequence
  Synthetic
cagcuuggucccuuugagagugaa

SEQ ID NO: 450092 - RNA, 18 nt, Artificial Sequence
  Synthetic
ggaguacaguggagugaa

SEQ ID NO: 450093 - RNA, 19 nt, Artificial Sequence
  Synthetic
uggaguacaguggagugaa

SEQ ID NO: 450094 - RNA, 20 nt, Artificial Sequence
  Synthetic
cuggaguacaguggagugaa

SEQ ID NO: 450095 - RNA, 21 nt, Artificial Sequence
  Synthetic
ccuggaguacaguggagugaa

SEQ ID NO: 450096 - RNA, 22 nt, Artificial Sequence
  Synthetic
gccuggaguacaguggagugaa

SEQ ID NO: 450097 - RNA, 23 nt, Artificial Sequence
  Synthetic
agccuggaguacaguggagugaa

SEQ ID NO: 450098 - RNA, 24 nt, Artificial Sequence
  Synthetic
cagccuggaguacaguggagugaa

SEQ ID NO: 450099 - RNA, 18 nt, Artificial Sequence
  Synthetic
guuuauaaaacuagugaa

SEQ ID NO: 450100 - RNA, 19 nt, Artificial Sequence
  Synthetic
aguuuauaaaacuagugaa

SEQ ID NO: 450101 - RNA, 20 nt, Artificial Sequence
  Synthetic
caguuuauaaaacuagugaa

SEQ ID NO: 450102 - RNA, 21 nt, Artificial Sequence
  Synthetic
ucaguuuauaaaacuagugaa

SEQ ID NO: 450103 - RNA, 22 nt, Artificial Sequence
  Synthetic
aucaguuuauaaaacuagugaa

SEQ ID NO: 450104 - RNA, 23 nt, Artificial Sequence
  Synthetic
caucaguuuauaaaacuagugaa

SEQ ID NO: 450105 - RNA, 24 nt, Artificial Sequence
  Synthetic
ucaucaguuuauaaaacuagugaa

SEQ ID NO: 450106 - RNA, 18 nt, Artificial Sequence
  Synthetic
cauaaaagaaguagugaa

SEQ ID NO: 450107 - RNA, 19 nt, Artificial Sequence
  Synthetic
acauaaaagaaguagugaa

SEQ ID NO: 450108 - RNA, 20 nt, Artificial Sequence
  Synthetic
aacauaaaagaaguagugaa

SEQ ID NO: 450109 - RNA, 21 nt, Artificial Sequence
  Synthetic
uaacauaaaagaaguagugaa

SEQ ID NO: 450110 - RNA, 22 nt, Artificial Sequence
  Synthetic
uuaacauaaaagaaguagugaa

SEQ ID NO: 450111 - RNA, 23 nt, Artificial Sequence
  Synthetic
guuaacauaaaagaaguagugaa

SEQ ID NO: 450112 - RNA, 24 nt, Artificial Sequence
  Synthetic
uguuaacauaaaagaaguagugaa

SEQ ID NO: 450113 - RNA, 18 nt, Artificial Sequence
  Synthetic
ggaauacaagaacgugaa

SEQ ID NO: 450114 - RNA, 19 nt, Artificial Sequence
  Synthetic
uggaauacaagaacgugaa

SEQ ID NO: 450115 - RNA, 20 nt, Artificial Sequence
  Synthetic
guggaauacaagaacgugaa

SEQ ID NO: 450116 - RNA, 21 nt, Artificial Sequence
  Synthetic
uguggaauacaagaacgugaa

SEQ ID NO: 450117 - RNA, 22 nt, Artificial Sequence
  Synthetic
cuguggaauacaagaacgugaa

SEQ ID NO: 450118 - RNA, 23 nt, Artificial Sequence
  Synthetic
ucuguggaauacaagaacgugaa

SEQ ID NO: 450119 - RNA, 24 nt, Artificial Sequence
  Synthetic
uucuguggaauacaagaacgugaa

SEQ ID NO: 450120 - RNA, 18 nt, Artificial Sequence
  Synthetic
auuuuauggguccgugaa

SEQ ID NO: 450121 - RNA, 19 nt, Artificial Sequence
  Synthetic
cauuuuauggguccgugaa

SEQ ID NO: 450122 - RNA, 20 nt, Artificial Sequence
  Synthetic
ucauuuuauggguccgugaa

SEQ ID NO: 450123 - RNA, 21 nt, Artificial Sequence
  Synthetic
aucauuuuauggguccgugaa

SEQ ID NO: 450124 - RNA, 22 nt, Artificial Sequence
  Synthetic
aaucauuuuauggguccgugaa

SEQ ID NO: 450125 - RNA, 23 nt, Artificial Sequence
  Synthetic
uaaucauuuuauggguccgugaa

SEQ ID NO: 450126 - RNA, 24 nt, Artificial Sequence
  Synthetic
auaaucauuuuauggguccgugaa

SEQ ID NO: 450127 - RNA, 18 nt, Artificial Sequence
  Synthetic
augauauauauucgugaa

SEQ ID NO: 450128 - RNA, 19 nt, Artificial Sequence
  Synthetic
aaugauauauauucgugaa

SEQ ID NO: 450129 - RNA, 20 nt, Artificial Sequence
  Synthetic
uaaugauauauauucgugaa

SEQ ID NO: 450130 - RNA, 21 nt, Artificial Sequence
  Synthetic
auaaugauauauauucgugaa

SEQ ID NO: 450131 - RNA, 22 nt, Artificial Sequence
  Synthetic
uauaaugauauauauucgugaa

SEQ ID NO: 450132 - RNA, 23 nt, Artificial Sequence
  Synthetic
auauaaugauauauauucgugaa

SEQ ID NO: 450133 - RNA, 24 nt, Artificial Sequence
  Synthetic
uauauaaugauauauauucgugaa

SEQ ID NO: 450134 - RNA, 18 nt, Artificial Sequence
  Synthetic
ugacccaaacaaggugaa

SEQ ID NO: 450135 - RNA, 19 nt, Artificial Sequence
  Synthetic
gugacccaaacaaggugaa

SEQ ID NO: 450136 - RNA, 20 nt, Artificial Sequence
  Synthetic
ugugacccaaacaaggugaa

SEQ ID NO: 450137 - RNA, 21 nt, Artificial Sequence
  Synthetic
augugacccaaacaaggugaa

SEQ ID NO: 450138 - RNA, 22 nt, Artificial Sequence
  Synthetic
caugugacccaaacaaggugaa

SEQ ID NO: 450139 - RNA, 23 nt, Artificial Sequence
  Synthetic
acaugugacccaaacaaggugaa

SEQ ID NO: 450140 - RNA, 24 nt, Artificial Sequence
  Synthetic
aacaugugacccaaacaaggugaa

SEQ ID NO: 450141 - RNA, 18 nt, Artificial Sequence
  Synthetic
aagagccaagaaggugaa

SEQ ID NO: 450142 - RNA, 19 nt, Artificial Sequence
  Synthetic
uaagagccaagaaggugaa

SEQ ID NO: 450143 - RNA, 20 nt, Artificial Sequence
  Synthetic
uuaagagccaagaaggugaa

SEQ ID NO: 450144 - RNA, 21 nt, Artificial Sequence
  Synthetic
cuuaagagccaagaaggugaa

SEQ ID NO: 450145 - RNA, 22 nt, Artificial Sequence
  Synthetic
acuuaagagccaagaaggugaa

SEQ ID NO: 450146 - RNA, 23 nt, Artificial Sequence
  Synthetic
aacuuaagagccaagaaggugaa

SEQ ID NO: 450147 - RNA, 24 nt, Artificial Sequence
  Synthetic
aaacuuaagagccaagaaggugaa

SEQ ID NO: 450148 - RNA, 18 nt, Artificial Sequence
  Synthetic
caaaugccagcaggugaa

SEQ ID NO: 450149 - RNA, 19 nt, Artificial Sequence
  Synthetic
ucaaaugccagcaggugaa

SEQ ID NO: 450150 - RNA, 20 nt, Artificial Sequence
  Synthetic
uucaaaugccagcaggugaa

SEQ ID NO: 450151 - RNA, 21 nt, Artificial Sequence
  Synthetic
uuucaaaugccagcaggugaa

SEQ ID NO: 450152 - RNA, 22 nt, Artificial Sequence
  Synthetic
uuuucaaaugccagcaggugaa

SEQ ID NO: 450153 - RNA, 23 nt, Artificial Sequence
  Synthetic
auuuucaaaugccagcaggugaa

SEQ ID NO: 450154 - RNA, 24 nt, Artificial Sequence
  Synthetic
cauuuucaaaugccagcaggugaa

SEQ ID NO: 450155 - RNA, 18 nt, Artificial Sequence
  Synthetic
aaaaaaauugcaggugaa

SEQ ID NO: 450156 - RNA, 19 nt, Artificial Sequence
  Synthetic
aaaaaaaauugcaggugaa

SEQ ID NO: 450157 - RNA, 20 nt, Artificial Sequence
  Synthetic
aaaaaaaaauugcaggugaa

SEQ ID NO: 450158 - RNA, 21 nt, Artificial Sequence
  Synthetic
gaaaaaaaaauugcaggugaa

SEQ ID NO: 450159 - RNA, 22 nt, Artificial Sequence
  Synthetic
ggaaaaaaaaauugcaggugaa

SEQ ID NO: 450160 - RNA, 23 nt, Artificial Sequence
  Synthetic
uggaaaaaaaaauugcaggugaa

SEQ ID NO: 450161 - RNA, 24 nt, Artificial Sequence
  Synthetic
auggaaaaaaaaauugcaggugaa

SEQ ID NO: 450162 - RNA, 18 nt, Artificial Sequence
  Synthetic
gcugugacuaucggugaa

SEQ ID NO: 450163 - RNA, 19 nt, Artificial Sequence
  Synthetic
agcugugacuaucggugaa

SEQ ID NO: 450164 - RNA, 20 nt, Artificial Sequence
  Synthetic
cagcugugacuaucggugaa

SEQ ID NO: 450165 - RNA, 21 nt, Artificial Sequence
  Synthetic
ccagcugugacuaucggugaa

SEQ ID NO: 450166 - RNA, 22 nt, Artificial Sequence
  Synthetic
accagcugugacuaucggugaa

SEQ ID NO: 450167 - RNA, 23 nt, Artificial Sequence
  Synthetic
aaccagcugugacuaucggugaa

SEQ ID NO: 450168 - RNA, 24 nt, Artificial Sequence
  Synthetic
caaccagcugugacuaucggugaa

SEQ ID NO: 450169 - RNA, 18 nt, Artificial Sequence
  Synthetic
guuucccuacggggugaa

SEQ ID NO: 450170 - RNA, 19 nt, Artificial Sequence
  Synthetic
gguuucccuacggggugaa

SEQ ID NO: 450171 - RNA, 20 nt, Artificial Sequence
  Synthetic
agguuucccuacggggugaa

SEQ ID NO: 450172 - RNA, 21 nt, Artificial Sequence
  Synthetic
cagguuucccuacggggugaa

SEQ ID NO: 450173 - RNA, 22 nt, Artificial Sequence
  Synthetic
ucagguuucccuacggggugaa

SEQ ID NO: 450174 - RNA, 23 nt, Artificial Sequence
  Synthetic
aucagguuucccuacggggugaa

SEQ ID NO: 450175 - RNA, 24 nt, Artificial Sequence
  Synthetic
uaucagguuucccuacggggugaa

SEQ ID NO: 450176 - RNA, 18 nt, Artificial Sequence
  Synthetic
gugggcggaaugggugaa

SEQ ID NO: 450177 - RNA, 19 nt, Artificial Sequence
  Synthetic
ggugggcggaaugggugaa

SEQ ID NO: 450178 - RNA, 20 nt, Artificial Sequence
  Synthetic
aggugggcggaaugggugaa

SEQ ID NO: 450179 - RNA, 21 nt, Artificial Sequence
  Synthetic
uaggugggcggaaugggugaa

SEQ ID NO: 450180 - RNA, 22 nt, Artificial Sequence
  Synthetic
guaggugggcggaaugggugaa

SEQ ID NO: 450181 - RNA, 23 nt, Artificial Sequence
  Synthetic
uguaggugggcggaaugggugaa

SEQ ID NO: 450182 - RNA, 24 nt, Artificial Sequence
  Synthetic
guguaggugggcggaaugggugaa

SEQ ID NO: 450183 - RNA, 18 nt, Artificial Sequence
  Synthetic
accaaaaguuauggugaa

SEQ ID NO: 450184 - RNA, 19 nt, Artificial Sequence
  Synthetic
gaccaaaaguuauggugaa

SEQ ID NO: 450185 - RNA, 20 nt, Artificial Sequence
  Synthetic
ggaccaaaaguuauggugaa

SEQ ID NO: 450186 - RNA, 21 nt, Artificial Sequence
  Synthetic
aggaccaaaaguuauggugaa

SEQ ID NO: 450187 - RNA, 22 nt, Artificial Sequence
  Synthetic
aaggaccaaaaguuauggugaa

SEQ ID NO: 450188 - RNA, 23 nt, Artificial Sequence
  Synthetic
uaaggaccaaaaguuauggugaa

SEQ ID NO: 450189 - RNA, 24 nt, Artificial Sequence
  Synthetic
uuaaggaccaaaaguuauggugaa

SEQ ID NO: 450190 - RNA, 18 nt, Artificial Sequence
  Synthetic
uguaauuguacuggugaa

SEQ ID NO: 450191 - RNA, 19 nt, Artificial Sequence
  Synthetic
auguaauuguacuggugaa

SEQ ID NO: 450192 - RNA, 20 nt, Artificial Sequence
  Synthetic
gauguaauuguacuggugaa

SEQ ID NO: 450193 - RNA, 21 nt, Artificial Sequence
  Synthetic
agauguaauuguacuggugaa

SEQ ID NO: 450194 - RNA, 22 nt, Artificial Sequence
  Synthetic
gagauguaauuguacuggugaa

SEQ ID NO: 450195 - RNA, 23 nt, Artificial Sequence
  Synthetic
ugagauguaauuguacuggugaa

SEQ ID NO: 450196 - RNA, 24 nt, Artificial Sequence
  Synthetic
augagauguaauuguacuggugaa

SEQ ID NO: 450197 - RNA, 18 nt, Artificial Sequence
  Synthetic
uuugaaacaaguggugaa

SEQ ID NO: 450198 - RNA, 19 nt, Artificial Sequence
  Synthetic
guuugaaacaaguggugaa

SEQ ID NO: 450199 - RNA, 20 nt, Artificial Sequence
  Synthetic
aguuugaaacaaguggugaa

SEQ ID NO: 450200 - RNA, 21 nt, Artificial Sequence
  Synthetic
gaguuugaaacaaguggugaa

SEQ ID NO: 450201 - RNA, 22 nt, Artificial Sequence
  Synthetic
ggaguuugaaacaaguggugaa

SEQ ID NO: 450202 - RNA, 23 nt, Artificial Sequence
  Synthetic
uggaguuugaaacaaguggugaa

SEQ ID NO: 450203 - RNA, 24 nt, Artificial Sequence
  Synthetic
uuggaguuugaaacaaguggugaa

SEQ ID NO: 450204 - RNA, 18 nt, Artificial Sequence
  Synthetic
gcaggcugaaguggugaa

SEQ ID NO: 450205 - RNA, 19 nt, Artificial Sequence
  Synthetic
ggcaggcugaaguggugaa

SEQ ID NO: 450206 - RNA, 20 nt, Artificial Sequence
  Synthetic
aggcaggcugaaguggugaa

SEQ ID NO: 450207 - RNA, 21 nt, Artificial Sequence
  Synthetic
gaggcaggcugaaguggugaa

SEQ ID NO: 450208 - RNA, 22 nt, Artificial Sequence
  Synthetic
ggaggcaggcugaaguggugaa

SEQ ID NO: 450209 - RNA, 23 nt, Artificial Sequence
  Synthetic
gggaggcaggcugaaguggugaa

SEQ ID NO: 450210 - RNA, 24 nt, Artificial Sequence
  Synthetic
ugggaggcaggcugaaguggugaa

SEQ ID NO: 450211 - RNA, 18 nt, Artificial Sequence
  Synthetic
ugguauaauauuggugaa

SEQ ID NO: 450212 - RNA, 19 nt, Artificial Sequence
  Synthetic
augguauaauauuggugaa

SEQ ID NO: 450213 - RNA, 20 nt, Artificial Sequence
  Synthetic
aaugguauaauauuggugaa

SEQ ID NO: 450214 - RNA, 21 nt, Artificial Sequence
  Synthetic
aaaugguauaauauuggugaa

SEQ ID NO: 450215 - RNA, 22 nt, Artificial Sequence
  Synthetic
aaaaugguauaauauuggugaa

SEQ ID NO: 450216 - RNA, 23 nt, Artificial Sequence
  Synthetic
gaaaaugguauaauauuggugaa

SEQ ID NO: 450217 - RNA, 24 nt, Artificial Sequence
  Synthetic
agaaaaugguauaauauuggugaa

SEQ ID NO: 450218 - RNA, 18 nt, Artificial Sequence
  Synthetic
uuuuucuuauuuggugaa

SEQ ID NO: 450219 - RNA, 19 nt, Artificial Sequence
  Synthetic
auuuuucuuauuuggugaa

SEQ ID NO: 450220 - RNA, 20 nt, Artificial Sequence
  Synthetic
cauuuuucuuauuuggugaa

SEQ ID NO: 450221 - RNA, 21 nt, Artificial Sequence
  Synthetic
ucauuuuucuuauuuggugaa

SEQ ID NO: 450222 - RNA, 22 nt, Artificial Sequence
  Synthetic
uucauuuuucuuauuuggugaa

SEQ ID NO: 450223 - RNA, 23 nt, Artificial Sequence
  Synthetic
uuucauuuuucuuauuuggugaa

SEQ ID NO: 450224 - RNA, 24 nt, Artificial Sequence
  Synthetic
auuucauuuuucuuauuuggugaa

SEQ ID NO: 450225 - RNA, 18 nt, Artificial Sequence
  Synthetic
gccaaugacaaaugugaa

SEQ ID NO: 450226 - RNA, 19 nt, Artificial Sequence
  Synthetic
agccaaugacaaaugugaa

SEQ ID NO: 450227 - RNA, 20 nt, Artificial Sequence
  Synthetic
aagccaaugacaaaugugaa

SEQ ID NO: 450228 - RNA, 21 nt, Artificial Sequence
  Synthetic
uaagccaaugacaaaugugaa

SEQ ID NO: 450229 - RNA, 22 nt, Artificial Sequence
  Synthetic
auaagccaaugacaaaugugaa

SEQ ID NO: 450230 - RNA, 23 nt, Artificial Sequence
  Synthetic
aauaagccaaugacaaaugugaa

SEQ ID NO: 450231 - RNA, 24 nt, Artificial Sequence
  Synthetic
aaauaagccaaugacaaaugugaa

SEQ ID NO: 450232 - RNA, 18 nt, Artificial Sequence
  Synthetic
uugguuuugaaaugugaa

SEQ ID NO: 450233 - RNA, 19 nt, Artificial Sequence
  Synthetic
auugguuuugaaaugugaa

SEQ ID NO: 450234 - RNA, 20 nt, Artificial Sequence
  Synthetic
gauugguuuugaaaugugaa

SEQ ID NO: 450235 - RNA, 21 nt, Artificial Sequence
  Synthetic
ugauugguuuugaaaugugaa

SEQ ID NO: 450236 - RNA, 22 nt, Artificial Sequence
  Synthetic
augauugguuuugaaaugugaa

SEQ ID NO: 450237 - RNA, 23 nt, Artificial Sequence
  Synthetic
caugauugguuuugaaaugugaa

SEQ ID NO: 450238 - RNA, 24 nt, Artificial Sequence
  Synthetic
gcaugauugguuuugaaaugugaa

SEQ ID NO: 450239 - RNA, 18 nt, Artificial Sequence
  Synthetic
ucacacugucaaugugaa

SEQ ID NO: 450240 - RNA, 19 nt, Artificial Sequence
  Synthetic
aucacacugucaaugugaa

SEQ ID NO: 450241 - RNA, 20 nt, Artificial Sequence
  Synthetic
uaucacacugucaaugugaa

SEQ ID NO: 450242 - RNA, 21 nt, Artificial Sequence
  Synthetic
auaucacacugucaaugugaa

SEQ ID NO: 450243 - RNA, 22 nt, Artificial Sequence
  Synthetic
aauaucacacugucaaugugaa

SEQ ID NO: 450244 - RNA, 23 nt, Artificial Sequence
  Synthetic
aaauaucacacugucaaugugaa

SEQ ID NO: 450245 - RNA, 24 nt, Artificial Sequence
  Synthetic
gaaauaucacacugucaaugugaa

SEQ ID NO: 450246 - RNA, 18 nt, Artificial Sequence
  Synthetic
gacaggaaaacaugugaa

SEQ ID NO: 450247 - RNA, 19 nt, Artificial Sequence
  Synthetic
ggacaggaaaacaugugaa

SEQ ID NO: 450248 - RNA, 20 nt, Artificial Sequence
  Synthetic
gggacaggaaaacaugugaa

SEQ ID NO: 450249 - RNA, 21 nt, Artificial Sequence
  Synthetic
ggggacaggaaaacaugugaa

SEQ ID NO: 450250 - RNA, 22 nt, Artificial Sequence
  Synthetic
uggggacaggaaaacaugugaa

SEQ ID NO: 450251 - RNA, 23 nt, Artificial Sequence
  Synthetic
cuggggacaggaaaacaugugaa

SEQ ID NO: 450252 - RNA, 24 nt, Artificial Sequence
  Synthetic
acuggggacaggaaaacaugugaa

SEQ ID NO: 450253 - RNA, 18 nt, Artificial Sequence
  Synthetic
gcaaagaguacaugugaa

SEQ ID NO: 450254 - RNA, 19 nt, Artificial Sequence
  Synthetic
ugcaaagaguacaugugaa

SEQ ID NO: 450255 - RNA, 20 nt, Artificial Sequence
  Synthetic
uugcaaagaguacaugugaa

SEQ ID NO: 450256 - RNA, 21 nt, Artificial Sequence
  Synthetic
cuugcaaagaguacaugugaa

SEQ ID NO: 450257 - RNA, 22 nt, Artificial Sequence
  Synthetic
ucuugcaaagaguacaugugaa

SEQ ID NO: 450258 - RNA, 23 nt, Artificial Sequence
  Synthetic
uucuugcaaagaguacaugugaa

SEQ ID NO: 450259 - RNA, 24 nt, Artificial Sequence
  Synthetic
auucuugcaaagaguacaugugaa

SEQ ID NO: 450260 - RNA, 18 nt, Artificial Sequence
  Synthetic
aguaagaagggaugugaa

SEQ ID NO: 450261 - RNA, 19 nt, Artificial Sequence
  Synthetic
caguaagaagggaugugaa

SEQ ID NO: 450262 - RNA, 20 nt, Artificial Sequence
  Synthetic
acaguaagaagggaugugaa

SEQ ID NO: 450263 - RNA, 21 nt, Artificial Sequence
  Synthetic
aacaguaagaagggaugugaa

SEQ ID NO: 450264 - RNA, 22 nt, Artificial Sequence
  Synthetic
gaacaguaagaagggaugugaa

SEQ ID NO: 450265 - RNA, 23 nt, Artificial Sequence
  Synthetic
ggaacaguaagaagggaugugaa

SEQ ID NO: 450266 - RNA, 24 nt, Artificial Sequence
  Synthetic
gggaacaguaagaagggaugugaa

SEQ ID NO: 450267 - RNA, 18 nt, Artificial Sequence
  Synthetic
gggggaaaaugaugugaa

SEQ ID NO: 450268 - RNA, 19 nt, Artificial Sequence
  Synthetic
ggggggaaaaugaugugaa

SEQ ID NO: 450269 - RNA, 20 nt, Artificial Sequence
  Synthetic
aggggggaaaaugaugugaa

SEQ ID NO: 450270 - RNA, 21 nt, Artificial Sequence
  Synthetic
uaggggggaaaaugaugugaa

SEQ ID NO: 450271 - RNA, 22 nt, Artificial Sequence
  Synthetic
auaggggggaaaaugaugugaa

SEQ ID NO: 450272 - RNA, 23 nt, Artificial Sequence
  Synthetic
aauaggggggaaaaugaugugaa

SEQ ID NO: 450273 - RNA, 24 nt, Artificial Sequence
  Synthetic
gaauaggggggaaaaugaugugaa

SEQ ID NO: 450274 - RNA, 18 nt, Artificial Sequence
  Synthetic
aaggaugagguaugugaa

SEQ ID NO: 450275 - RNA, 19 nt, Artificial Sequence
  Synthetic
caaggaugagguaugugaa

SEQ ID NO: 450276 - RNA, 20 nt, Artificial Sequence
  Synthetic
gcaaggaugagguaugugaa

SEQ ID NO: 450277 - RNA, 21 nt, Artificial Sequence
  Synthetic
ugcaaggaugagguaugugaa

SEQ ID NO: 450278 - RNA, 22 nt, Artificial Sequence
  Synthetic
cugcaaggaugagguaugugaa

SEQ ID NO: 450279 - RNA, 23 nt, Artificial Sequence
  Synthetic
ucugcaaggaugagguaugugaa

SEQ ID NO: 450280 - RNA, 24 nt, Artificial Sequence
  Synthetic
uucugcaaggaugagguaugugaa

SEQ ID NO: 450281 - RNA, 18 nt, Artificial Sequence
  Synthetic
gagacuguauuaugugaa

SEQ ID NO: 450282 - RNA, 19 nt, Artificial Sequence
  Synthetic
ugagacuguauuaugugaa

SEQ ID NO: 450283 - RNA, 20 nt, Artificial Sequence
  Synthetic
uugagacuguauuaugugaa

SEQ ID NO: 450284 - RNA, 21 nt, Artificial Sequence
  Synthetic
uuugagacuguauuaugugaa

SEQ ID NO: 450285 - RNA, 22 nt, Artificial Sequence
  Synthetic
uuuugagacuguauuaugugaa

SEQ ID NO: 450286 - RNA, 23 nt, Artificial Sequence
  Synthetic
cuuuugagacuguauuaugugaa

SEQ ID NO: 450287 - RNA, 24 nt, Artificial Sequence
  Synthetic
ccuuuugagacuguauuaugugaa

SEQ ID NO: 450288 - RNA, 18 nt, Artificial Sequence
  Synthetic
cauuuccagcacugugaa

SEQ ID NO: 450289 - RNA, 19 nt, Artificial Sequence
  Synthetic
ucauuuccagcacugugaa

SEQ ID NO: 450290 - RNA, 20 nt, Artificial Sequence
  Synthetic
aucauuuccagcacugugaa

SEQ ID NO: 450291 - RNA, 21 nt, Artificial Sequence
  Synthetic
uaucauuuccagcacugugaa

SEQ ID NO: 450292 - RNA, 22 nt, Artificial Sequence
  Synthetic
guaucauuuccagcacugugaa

SEQ ID NO: 450293 - RNA, 23 nt, Artificial Sequence
  Synthetic
uguaucauuuccagcacugugaa

SEQ ID NO: 450294 - RNA, 24 nt, Artificial Sequence
  Synthetic
cuguaucauuuccagcacugugaa

SEQ ID NO: 450295 - RNA, 18 nt, Artificial Sequence
  Synthetic
cugauuaugcacugugaa

SEQ ID NO: 450296 - RNA, 19 nt, Artificial Sequence
  Synthetic
ccugauuaugcacugugaa

SEQ ID NO: 450297 - RNA, 20 nt, Artificial Sequence
  Synthetic
cccugauuaugcacugugaa

SEQ ID NO: 450298 - RNA, 21 nt, Artificial Sequence
  Synthetic
acccugauuaugcacugugaa

SEQ ID NO: 450299 - RNA, 22 nt, Artificial Sequence
  Synthetic
gacccugauuaugcacugugaa

SEQ ID NO: 450300 - RNA, 23 nt, Artificial Sequence
  Synthetic
agacccugauuaugcacugugaa

SEQ ID NO: 450301 - RNA, 24 nt, Artificial Sequence
  Synthetic
aagacccugauuaugcacugugaa

SEQ ID NO: 450302 - RNA, 22 nt, Artificial Sequence
  Synthetic
agcuuuuugagauuacugugaa

SEQ ID NO: 450303 - RNA, 23 nt, Artificial Sequence
  Synthetic
aagcuuuuugagauuacugugaa

SEQ ID NO: 450304 - RNA, 24 nt, Artificial Sequence
  Synthetic
aaagcuuuuugagauuacugugaa

SEQ ID NO: 450305 - RNA, 18 nt, Artificial Sequence
  Synthetic
cucuugaaggccugugaa

SEQ ID NO: 450306 - RNA, 19 nt, Artificial Sequence
  Synthetic
ccucuugaaggccugugaa

SEQ ID NO: 450307 - RNA, 20 nt, Artificial Sequence
  Synthetic
cccucuugaaggccugugaa

SEQ ID NO: 450308 - RNA, 21 nt, Artificial Sequence
  Synthetic
ucccucuugaaggccugugaa

SEQ ID NO: 450309 - RNA, 22 nt, Artificial Sequence
  Synthetic
uucccucuugaaggccugugaa

SEQ ID NO: 450310 - RNA, 23 nt, Artificial Sequence
  Synthetic
auucccucuugaaggccugugaa

SEQ ID NO: 450311 - RNA, 24 nt, Artificial Sequence
  Synthetic
aauucccucuugaaggccugugaa

SEQ ID NO: 450312 - RNA, 18 nt, Artificial Sequence
  Synthetic
aacuugacuuccugugaa

SEQ ID NO: 450313 - RNA, 19 nt, Artificial Sequence
  Synthetic
gaacuugacuuccugugaa

SEQ ID NO: 450314 - RNA, 20 nt, Artificial Sequence
  Synthetic
ugaacuugacuuccugugaa

SEQ ID NO: 450315 - RNA, 21 nt, Artificial Sequence
  Synthetic
augaacuugacuuccugugaa

SEQ ID NO: 450316 - RNA, 22 nt, Artificial Sequence
  Synthetic
aaugaacuugacuuccugugaa

SEQ ID NO: 450317 - RNA, 23 nt, Artificial Sequence
  Synthetic
gaaugaacuugacuuccugugaa

SEQ ID NO: 450318 - RNA, 24 nt, Artificial Sequence
  Synthetic
agaaugaacuugacuuccugugaa

SEQ ID NO: 450319 - RNA, 18 nt, Artificial Sequence
  Synthetic
ucuuuauagcagugugaa

SEQ ID NO: 450320 - RNA, 19 nt, Artificial Sequence
  Synthetic
uucuuuauagcagugugaa

SEQ ID NO: 450321 - RNA, 20 nt, Artificial Sequence
  Synthetic
guucuuuauagcagugugaa

SEQ ID NO: 450322 - RNA, 21 nt, Artificial Sequence
  Synthetic
aguucuuuauagcagugugaa

SEQ ID NO: 450323 - RNA, 22 nt, Artificial Sequence
  Synthetic
aaguucuuuauagcagugugaa

SEQ ID NO: 450324 - RNA, 23 nt, Artificial Sequence
  Synthetic
gaaguucuuuauagcagugugaa

SEQ ID NO: 450325 - RNA, 24 nt, Artificial Sequence
  Synthetic
ggaaguucuuuauagcagugugaa

SEQ ID NO: 450326 - RNA, 18 nt, Artificial Sequence
  Synthetic
ugccauugcuagugugaa

SEQ ID NO: 450327 - RNA, 19 nt, Artificial Sequence
  Synthetic
uugccauugcuagugugaa

SEQ ID NO: 450328 - RNA, 20 nt, Artificial Sequence
  Synthetic
uuugccauugcuagugugaa

SEQ ID NO: 450329 - RNA, 21 nt, Artificial Sequence
  Synthetic
cuuugccauugcuagugugaa

SEQ ID NO: 450330 - RNA, 22 nt, Artificial Sequence
  Synthetic
gcuuugccauugcuagugugaa

SEQ ID NO: 450331 - RNA, 23 nt, Artificial Sequence
  Synthetic
agcuuugccauugcuagugugaa

SEQ ID NO: 450332 - RNA, 24 nt, Artificial Sequence
  Synthetic
aagcuuugccauugcuagugugaa

SEQ ID NO: 450333 - RNA, 18 nt, Artificial Sequence
  Synthetic
aagggggaggggugugaa

SEQ ID NO: 450334 - RNA, 19 nt, Artificial Sequence
  Synthetic
gaagggggaggggugugaa

SEQ ID NO: 450335 - RNA, 20 nt, Artificial Sequence
  Synthetic
ggaagggggaggggugugaa

SEQ ID NO: 450336 - RNA, 21 nt, Artificial Sequence
  Synthetic
gggaagggggaggggugugaa

SEQ ID NO: 450337 - RNA, 22 nt, Artificial Sequence
  Synthetic
ggggaagggggaggggugugaa

SEQ ID NO: 450338 - RNA, 23 nt, Artificial Sequence
  Synthetic
uggggaagggggaggggugugaa

SEQ ID NO: 450339 - RNA, 24 nt, Artificial Sequence
  Synthetic
uuggggaagggggaggggugugaa

SEQ ID NO: 450340 - RNA, 18 nt, Artificial Sequence
  Synthetic
uguguauauaugugugaa

SEQ ID NO: 450341 - RNA, 19 nt, Artificial Sequence
  Synthetic
guguguauauaugugugaa

SEQ ID NO: 450342 - RNA, 20 nt, Artificial Sequence
  Synthetic
uguguguauauaugugugaa

SEQ ID NO: 450343 - RNA, 21 nt, Artificial Sequence
  Synthetic
auguguguauauaugugugaa

SEQ ID NO: 450344 - RNA, 22 nt, Artificial Sequence
  Synthetic
uauguguguauauaugugugaa

SEQ ID NO: 450345 - RNA, 23 nt, Artificial Sequence
  Synthetic
guauguguguauauaugugugaa

SEQ ID NO: 450346 - RNA, 24 nt, Artificial Sequence
  Synthetic
gguauguguguauauaugugugaa

SEQ ID NO: 450347 - RNA, 18 nt, Artificial Sequence
  Synthetic
guaugugaagugugugaa

SEQ ID NO: 450348 - RNA, 19 nt, Artificial Sequence
  Synthetic
gguaugugaagugugugaa

SEQ ID NO: 450349 - RNA, 20 nt, Artificial Sequence
  Synthetic
agguaugugaagugugugaa

SEQ ID NO: 450350 - RNA, 21 nt, Artificial Sequence
  Synthetic
aagguaugugaagugugugaa

SEQ ID NO: 450351 - RNA, 22 nt, Artificial Sequence
  Synthetic
uaagguaugugaagugugugaa

SEQ ID NO: 450352 - RNA, 23 nt, Artificial Sequence
  Synthetic
cuaagguaugugaagugugugaa

SEQ ID NO: 450353 - RNA, 24 nt, Artificial Sequence
  Synthetic
ucuaagguaugugaagugugugaa

SEQ ID NO: 450354 - RNA, 18 nt, Artificial Sequence
  Synthetic
uauaugcacgugugugaa

SEQ ID NO: 450355 - RNA, 19 nt, Artificial Sequence
  Synthetic
cuauaugcacgugugugaa

SEQ ID NO: 450356 - RNA, 20 nt, Artificial Sequence
  Synthetic
ccuauaugcacgugugugaa

SEQ ID NO: 450357 - RNA, 21 nt, Artificial Sequence
  Synthetic
gccuauaugcacgugugugaa

SEQ ID NO: 450358 - RNA, 22 nt, Artificial Sequence
  Synthetic
ugccuauaugcacgugugugaa

SEQ ID NO: 450359 - RNA, 23 nt, Artificial Sequence
  Synthetic
gugccuauaugcacgugugugaa

SEQ ID NO: 450360 - RNA, 24 nt, Artificial Sequence
  Synthetic
ugugccuauaugcacgugugugaa

SEQ ID NO: 450361 - RNA, 21 nt, Artificial Sequence
  Synthetic
ucucuuugaagcaauugugaa

SEQ ID NO: 450362 - RNA, 22 nt, Artificial Sequence
  Synthetic
uucucuuugaagcaauugugaa

SEQ ID NO: 450363 - RNA, 23 nt, Artificial Sequence
  Synthetic
auucucuuugaagcaauugugaa

SEQ ID NO: 450364 - RNA, 24 nt, Artificial Sequence
  Synthetic
uauucucuuugaagcaauugugaa

SEQ ID NO: 450365 - RNA, 18 nt, Artificial Sequence
  Synthetic
aaacuucuguguugugaa

SEQ ID NO: 450366 - RNA, 19 nt, Artificial Sequence
  Synthetic
aaaacuucuguguugugaa

SEQ ID NO: 450367 - RNA, 20 nt, Artificial Sequence
  Synthetic
gaaaacuucuguguugugaa

SEQ ID NO: 450368 - RNA, 21 nt, Artificial Sequence
  Synthetic
agaaaacuucuguguugugaa

SEQ ID NO: 450369 - RNA, 22 nt, Artificial Sequence
  Synthetic
aagaaaacuucuguguugugaa

SEQ ID NO: 450370 - RNA, 23 nt, Artificial Sequence
  Synthetic
aaagaaaacuucuguguugugaa

SEQ ID NO: 450371 - RNA, 24 nt, Artificial Sequence
  Synthetic
aaaagaaaacuucuguguugugaa

SEQ ID NO: 450372 - RNA, 18 nt, Artificial Sequence
  Synthetic
uagagaauuuaaauugaa

SEQ ID NO: 450373 - RNA, 19 nt, Artificial Sequence
  Synthetic
auagagaauuuaaauugaa

SEQ ID NO: 450374 - RNA, 20 nt, Artificial Sequence
  Synthetic
aauagagaauuuaaauugaa

SEQ ID NO: 450375 - RNA, 21 nt, Artificial Sequence
  Synthetic
caauagagaauuuaaauugaa

SEQ ID NO: 450376 - RNA, 22 nt, Artificial Sequence
  Synthetic
acaauagagaauuuaaauugaa

SEQ ID NO: 450377 - RNA, 23 nt, Artificial Sequence
  Synthetic
cacaauagagaauuuaaauugaa

SEQ ID NO: 450378 - RNA, 24 nt, Artificial Sequence
  Synthetic
acacaauagagaauuuaaauugaa

SEQ ID NO: 450379 - RNA, 18 nt, Artificial Sequence
  Synthetic
aaaaauagcucaauugaa

SEQ ID NO: 450380 - RNA, 19 nt, Artificial Sequence
  Synthetic
gaaaaauagcucaauugaa

SEQ ID NO: 450381 - RNA, 20 nt, Artificial Sequence
  Synthetic
agaaaaauagcucaauugaa

SEQ ID NO: 450382 - RNA, 21 nt, Artificial Sequence
  Synthetic
cagaaaaauagcucaauugaa

SEQ ID NO: 450383 - RNA, 22 nt, Artificial Sequence
  Synthetic
ucagaaaaauagcucaauugaa

SEQ ID NO: 450384 - RNA, 23 nt, Artificial Sequence
  Synthetic
aucagaaaaauagcucaauugaa

SEQ ID NO: 450385 - RNA, 24 nt, Artificial Sequence
  Synthetic
uaucagaaaaauagcucaauugaa

SEQ ID NO: 450386 - RNA, 18 nt, Artificial Sequence
  Synthetic
uugauguuaagaauugaa

SEQ ID NO: 450387 - RNA, 19 nt, Artificial Sequence
  Synthetic
uuugauguuaagaauugaa

SEQ ID NO: 450388 - RNA, 20 nt, Artificial Sequence
  Synthetic
uuuugauguuaagaauugaa

SEQ ID NO: 450389 - RNA, 21 nt, Artificial Sequence
  Synthetic
uuuuugauguuaagaauugaa

SEQ ID NO: 450390 - RNA, 22 nt, Artificial Sequence
  Synthetic
guuuuugauguuaagaauugaa

SEQ ID NO: 450391 - RNA, 23 nt, Artificial Sequence
  Synthetic
gguuuuugauguuaagaauugaa

SEQ ID NO: 450392 - RNA, 24 nt, Artificial Sequence
  Synthetic
agguuuuugauguuaagaauugaa

SEQ ID NO: 450393 - RNA, 18 nt, Artificial Sequence
  Synthetic
uaugaguuuggaauugaa

SEQ ID NO: 450394 - RNA, 19 nt, Artificial Sequence
  Synthetic
auaugaguuuggaauugaa

SEQ ID NO: 450395 - RNA, 20 nt, Artificial Sequence
  Synthetic
aauaugaguuuggaauugaa

SEQ ID NO: 450396 - RNA, 21 nt, Artificial Sequence
  Synthetic
aaauaugaguuuggaauugaa

SEQ ID NO: 450397 - RNA, 22 nt, Artificial Sequence
  Synthetic
aaaauaugaguuuggaauugaa

SEQ ID NO: 450398 - RNA, 23 nt, Artificial Sequence
  Synthetic
gaaaauaugaguuuggaauugaa

SEQ ID NO: 450399 - RNA, 24 nt, Artificial Sequence
  Synthetic
ugaaaauaugaguuuggaauugaa

SEQ ID NO: 450400 - RNA, 18 nt, Artificial Sequence
  Synthetic
uuugcuuccauaauugaa

SEQ ID NO: 450401 - RNA, 19 nt, Artificial Sequence
  Synthetic
uuuugcuuccauaauugaa

SEQ ID NO: 450402 - RNA, 20 nt, Artificial Sequence
  Synthetic
auuuugcuuccauaauugaa

SEQ ID NO: 450403 - RNA, 21 nt, Artificial Sequence
  Synthetic
uauuuugcuuccauaauugaa

SEQ ID NO: 450404 - RNA, 22 nt, Artificial Sequence
  Synthetic
uuauuuugcuuccauaauugaa

SEQ ID NO: 450405 - RNA, 23 nt, Artificial Sequence
  Synthetic
uuuauuuugcuuccauaauugaa

SEQ ID NO: 450406 - RNA, 24 nt, Artificial Sequence
  Synthetic
guuuauuuugcuuccauaauugaa

SEQ ID NO: 450407 - RNA, 18 nt, Artificial Sequence
  Synthetic
aaugguuuacacauugaa

SEQ ID NO: 450408 - RNA, 19 nt, Artificial Sequence
  Synthetic
uaaugguuuacacauugaa

SEQ ID NO: 450409 - RNA, 20 nt, Artificial Sequence
  Synthetic
uuaaugguuuacacauugaa

SEQ ID NO: 450410 - RNA, 21 nt, Artificial Sequence
  Synthetic
uuuaaugguuuacacauugaa

SEQ ID NO: 450411 - RNA, 22 nt, Artificial Sequence
  Synthetic
cuuuaaugguuuacacauugaa

SEQ ID NO: 450412 - RNA, 23 nt, Artificial Sequence
  Synthetic
ucuuuaaugguuuacacauugaa

SEQ ID NO: 450413 - RNA, 24 nt, Artificial Sequence
  Synthetic
uucuuuaaugguuuacacauugaa

SEQ ID NO: 450414 - RNA, 18 nt, Artificial Sequence
  Synthetic
gaggaacaaagcauugaa

SEQ ID NO: 450415 - RNA, 19 nt, Artificial Sequence
  Synthetic
agaggaacaaagcauugaa

SEQ ID NO: 450416 - RNA, 20 nt, Artificial Sequence
  Synthetic
gagaggaacaaagcauugaa

SEQ ID NO: 450417 - RNA, 21 nt, Artificial Sequence
  Synthetic
ggagaggaacaaagcauugaa

SEQ ID NO: 450418 - RNA, 22 nt, Artificial Sequence
  Synthetic
uggagaggaacaaagcauugaa

SEQ ID NO: 450419 - RNA, 23 nt, Artificial Sequence
  Synthetic
cuggagaggaacaaagcauugaa

SEQ ID NO: 450420 - RNA, 24 nt, Artificial Sequence
  Synthetic
acuggagaggaacaaagcauugaa

SEQ ID NO: 450421 - RNA, 18 nt, Artificial Sequence
  Synthetic
ugguaugauggcauugaa

SEQ ID NO: 450422 - RNA, 19 nt, Artificial Sequence
  Synthetic
uugguaugauggcauugaa

SEQ ID NO: 450423 - RNA, 20 nt, Artificial Sequence
  Synthetic
uuugguaugauggcauugaa

SEQ ID NO: 450424 - RNA, 21 nt, Artificial Sequence
  Synthetic
uuuugguaugauggcauugaa

SEQ ID NO: 450425 - RNA, 22 nt, Artificial Sequence
  Synthetic
cuuuugguaugauggcauugaa

SEQ ID NO: 450426 - RNA, 23 nt, Artificial Sequence
  Synthetic
ccuuuugguaugauggcauugaa

SEQ ID NO: 450427 - RNA, 24 nt, Artificial Sequence
  Synthetic
uccuuuugguaugauggcauugaa

SEQ ID NO: 450428 - RNA, 18 nt, Artificial Sequence
  Synthetic
uuuccuagacucauugaa

SEQ ID NO: 450429 - RNA, 19 nt, Artificial Sequence
  Synthetic
guuuccuagacucauugaa

SEQ ID NO: 450430 - RNA, 20 nt, Artificial Sequence
  Synthetic
uguuuccuagacucauugaa

SEQ ID NO: 450431 - RNA, 21 nt, Artificial Sequence
  Synthetic
guguuuccuagacucauugaa

SEQ ID NO: 450432 - RNA, 22 nt, Artificial Sequence
  Synthetic
uguguuuccuagacucauugaa

SEQ ID NO: 450433 - RNA, 23 nt, Artificial Sequence
  Synthetic
guguguuuccuagacucauugaa

SEQ ID NO: 450434 - RNA, 24 nt, Artificial Sequence
  Synthetic
aguguguuuccuagacucauugaa

SEQ ID NO: 450435 - RNA, 18 nt, Artificial Sequence
  Synthetic
uuccaaacauucauugaa

SEQ ID NO: 450436 - RNA, 19 nt, Artificial Sequence
  Synthetic
auuccaaacauucauugaa

SEQ ID NO: 450437 - RNA, 20 nt, Artificial Sequence
  Synthetic
gauuccaaacauucauugaa

SEQ ID NO: 450438 - RNA, 21 nt, Artificial Sequence
  Synthetic
agauuccaaacauucauugaa

SEQ ID NO: 450439 - RNA, 22 nt, Artificial Sequence
  Synthetic
cagauuccaaacauucauugaa

SEQ ID NO: 450440 - RNA, 23 nt, Artificial Sequence
  Synthetic
gcagauuccaaacauucauugaa

SEQ ID NO: 450441 - RNA, 24 nt, Artificial Sequence
  Synthetic
ugcagauuccaaacauucauugaa

SEQ ID NO: 450442 - RNA, 18 nt, Artificial Sequence
  Synthetic
aaauccuucacgauugaa

SEQ ID NO: 450443 - RNA, 19 nt, Artificial Sequence
  Synthetic
aaaauccuucacgauugaa

SEQ ID NO: 450444 - RNA, 20 nt, Artificial Sequence
  Synthetic
uaaaauccuucacgauugaa

SEQ ID NO: 450445 - RNA, 21 nt, Artificial Sequence
  Synthetic
uuaaaauccuucacgauugaa

SEQ ID NO: 450446 - RNA, 22 nt, Artificial Sequence
  Synthetic
uuuaaaauccuucacgauugaa

SEQ ID NO: 450447 - RNA, 23 nt, Artificial Sequence
  Synthetic
uuuuaaaauccuucacgauugaa

SEQ ID NO: 450448 - RNA, 24 nt, Artificial Sequence
  Synthetic
uuuuuaaaauccuucacgauugaa

SEQ ID NO: 450449 - RNA, 18 nt, Artificial Sequence
  Synthetic
cugcgguguaggauugaa

SEQ ID NO: 450450 - RNA, 19 nt, Artificial Sequence
  Synthetic
gcugcgguguaggauugaa

SEQ ID NO: 450451 - RNA, 20 nt, Artificial Sequence
  Synthetic
ugcugcgguguaggauugaa

SEQ ID NO: 450452 - RNA, 21 nt, Artificial Sequence
  Synthetic
uugcugcgguguaggauugaa

SEQ ID NO: 450453 - RNA, 22 nt, Artificial Sequence
  Synthetic
uuugcugcgguguaggauugaa

SEQ ID NO: 450454 - RNA, 23 nt, Artificial Sequence
  Synthetic
uuuugcugcgguguaggauugaa

SEQ ID NO: 450455 - RNA, 24 nt, Artificial Sequence
  Synthetic
auuuugcugcgguguaggauugaa

SEQ ID NO: 450456 - RNA, 18 nt, Artificial Sequence
  Synthetic
gcaacaacacggauugaa

SEQ ID NO: 450457 - RNA, 19 nt, Artificial Sequence
  Synthetic
ugcaacaacacggauugaa

SEQ ID NO: 450458 - RNA, 20 nt, Artificial Sequence
  Synthetic
uugcaacaacacggauugaa

SEQ ID NO: 450459 - RNA, 21 nt, Artificial Sequence
  Synthetic
uuugcaacaacacggauugaa

SEQ ID NO: 450460 - RNA, 22 nt, Artificial Sequence
  Synthetic
auuugcaacaacacggauugaa

SEQ ID NO: 450461 - RNA, 23 nt, Artificial Sequence
  Synthetic
cauuugcaacaacacggauugaa

SEQ ID NO: 450462 - RNA, 24 nt, Artificial Sequence
  Synthetic
ucauuugcaacaacacggauugaa

SEQ ID NO: 450463 - RNA, 18 nt, Artificial Sequence
  Synthetic
agccugugugggauugaa

SEQ ID NO: 450464 - RNA, 19 nt, Artificial Sequence
  Synthetic
aagccugugugggauugaa

SEQ ID NO: 450465 - RNA, 20 nt, Artificial Sequence
  Synthetic
uaagccugugugggauugaa

SEQ ID NO: 450466 - RNA, 21 nt, Artificial Sequence
  Synthetic
uuaagccugugugggauugaa

SEQ ID NO: 450467 - RNA, 22 nt, Artificial Sequence
  Synthetic
auuaagccugugugggauugaa

SEQ ID NO: 450468 - RNA, 23 nt, Artificial Sequence
  Synthetic
aauuaagccugugugggauugaa

SEQ ID NO: 450469 - RNA, 24 nt, Artificial Sequence
  Synthetic
uaauuaagccugugugggauugaa

SEQ ID NO: 450470 - RNA, 18 nt, Artificial Sequence
  Synthetic
ggcccuauauugauugaa

SEQ ID NO: 450471 - RNA, 19 nt, Artificial Sequence
  Synthetic
uggcccuauauugauugaa

SEQ ID NO: 450472 - RNA, 20 nt, Artificial Sequence
  Synthetic
guggcccuauauugauugaa

SEQ ID NO: 450473 - RNA, 21 nt, Artificial Sequence
  Synthetic
uguggcccuauauugauugaa

SEQ ID NO: 450474 - RNA, 22 nt, Artificial Sequence
  Synthetic
guguggcccuauauugauugaa

SEQ ID NO: 450475 - RNA, 23 nt, Artificial Sequence
  Synthetic
uguguggcccuauauugauugaa

SEQ ID NO: 450476 - RNA, 24 nt, Artificial Sequence
  Synthetic
guguguggcccuauauugauugaa

SEQ ID NO: 450477 - RNA, 18 nt, Artificial Sequence
  Synthetic
acugaugaaaauauugaa

SEQ ID NO: 450478 - RNA, 19 nt, Artificial Sequence
  Synthetic
cacugaugaaaauauugaa

SEQ ID NO: 450479 - RNA, 20 nt, Artificial Sequence
  Synthetic
ccacugaugaaaauauugaa

SEQ ID NO: 450480 - RNA, 21 nt, Artificial Sequence
  Synthetic
gccacugaugaaaauauugaa

SEQ ID NO: 450481 - RNA, 22 nt, Artificial Sequence
  Synthetic
agccacugaugaaaauauugaa

SEQ ID NO: 450482 - RNA, 23 nt, Artificial Sequence
  Synthetic
aagccacugaugaaaauauugaa

SEQ ID NO: 450483 - RNA, 24 nt, Artificial Sequence
  Synthetic
caagccacugaugaaaauauugaa

SEQ ID NO: 450484 - RNA, 18 nt, Artificial Sequence
  Synthetic
uagaaacugauuauugaa

SEQ ID NO: 450485 - RNA, 19 nt, Artificial Sequence
  Synthetic
uuagaaacugauuauugaa

SEQ ID NO: 450486 - RNA, 20 nt, Artificial Sequence
  Synthetic
auuagaaacugauuauugaa

SEQ ID NO: 450487 - RNA, 21 nt, Artificial Sequence
  Synthetic
gauuagaaacugauuauugaa

SEQ ID NO: 450488 - RNA, 22 nt, Artificial Sequence
  Synthetic
ggauuagaaacugauuauugaa

SEQ ID NO: 450489 - RNA, 23 nt, Artificial Sequence
  Synthetic
uggauuagaaacugauuauugaa

SEQ ID NO: 450490 - RNA, 24 nt, Artificial Sequence
  Synthetic
uuggauuagaaacugauuauugaa

SEQ ID NO: 450491 - RNA, 18 nt, Artificial Sequence
  Synthetic
auuuaaaguauuauugaa

SEQ ID NO: 450492 - RNA, 19 nt, Artificial Sequence
  Synthetic
uauuuaaaguauuauugaa

SEQ ID NO: 450493 - RNA, 20 nt, Artificial Sequence
  Synthetic
auauuuaaaguauuauugaa

SEQ ID NO: 450494 - RNA, 21 nt, Artificial Sequence
  Synthetic
gauauuuaaaguauuauugaa

SEQ ID NO: 450495 - RNA, 22 nt, Artificial Sequence
  Synthetic
agauauuuaaaguauuauugaa

SEQ ID NO: 450496 - RNA, 23 nt, Artificial Sequence
  Synthetic
uagauauuuaaaguauuauugaa

SEQ ID NO: 450497 - RNA, 24 nt, Artificial Sequence
  Synthetic
cuagauauuuaaaguauuauugaa

SEQ ID NO: 450498 - RNA, 18 nt, Artificial Sequence
  Synthetic
cuuuugcagcaacuugaa

SEQ ID NO: 450499 - RNA, 19 nt, Artificial Sequence
  Synthetic
ucuuuugcagcaacuugaa

SEQ ID NO: 450500 - RNA, 20 nt, Artificial Sequence
  Synthetic
cucuuuugcagcaacuugaa

SEQ ID NO: 450501 - RNA, 21 nt, Artificial Sequence
  Synthetic
ucucuuuugcagcaacuugaa

SEQ ID NO: 450502 - RNA, 22 nt, Artificial Sequence
  Synthetic
aucucuuuugcagcaacuugaa

SEQ ID NO: 450503 - RNA, 23 nt, Artificial Sequence
  Synthetic
aaucucuuuugcagcaacuugaa

SEQ ID NO: 450504 - RNA, 24 nt, Artificial Sequence
  Synthetic
gaaucucuuuugcagcaacuugaa

SEQ ID NO: 450505 - RNA, 18 nt, Artificial Sequence
  Synthetic
uuccuucacuaacuugaa

SEQ ID NO: 450506 - RNA, 19 nt, Artificial Sequence
  Synthetic
cuuccuucacuaacuugaa

SEQ ID NO: 450507 - RNA, 20 nt, Artificial Sequence
  Synthetic
ccuuccuucacuaacuugaa

SEQ ID NO: 450508 - RNA, 21 nt, Artificial Sequence
  Synthetic
uccuuccuucacuaacuugaa

SEQ ID NO: 450509 - RNA, 22 nt, Artificial Sequence
  Synthetic
auccuuccuucacuaacuugaa

SEQ ID NO: 450510 - RNA, 23 nt, Artificial Sequence
  Synthetic
uauccuuccuucacuaacuugaa

SEQ ID NO: 450511 - RNA, 24 nt, Artificial Sequence
  Synthetic
auauccuuccuucacuaacuugaa

SEQ ID NO: 450512 - RNA, 18 nt, Artificial Sequence
  Synthetic
gaaacauaaacacuugaa

SEQ ID NO: 450513 - RNA, 19 nt, Artificial Sequence
  Synthetic
agaaacauaaacacuugaa

SEQ ID NO: 450514 - RNA, 20 nt, Artificial Sequence
  Synthetic
cagaaacauaaacacuugaa

SEQ ID NO: 450515 - RNA, 21 nt, Artificial Sequence
  Synthetic
gcagaaacauaaacacuugaa

SEQ ID NO: 450516 - RNA, 22 nt, Artificial Sequence
  Synthetic
agcagaaacauaaacacuugaa

SEQ ID NO: 450517 - RNA, 23 nt, Artificial Sequence
  Synthetic
cagcagaaacauaaacacuugaa

SEQ ID NO: 450518 - RNA, 24 nt, Artificial Sequence
  Synthetic
ucagcagaaacauaaacacuugaa

SEQ ID NO: 450519 - RNA, 18 nt, Artificial Sequence
  Synthetic
aguugaaagucacuugaa

SEQ ID NO: 450520 - RNA, 19 nt, Artificial Sequence
  Synthetic
uaguugaaagucacuugaa

SEQ ID NO: 450521 - RNA, 20 nt, Artificial Sequence
  Synthetic
uuaguugaaagucacuugaa

SEQ ID NO: 450522 - RNA, 21 nt, Artificial Sequence
  Synthetic
cuuaguugaaagucacuugaa

SEQ ID NO: 450523 - RNA, 22 nt, Artificial Sequence
  Synthetic
acuuaguugaaagucacuugaa

SEQ ID NO: 450524 - RNA, 23 nt, Artificial Sequence
  Synthetic
uacuuaguugaaagucacuugaa

SEQ ID NO: 450525 - RNA, 24 nt, Artificial Sequence
  Synthetic
cuacuuaguugaaagucacuugaa

SEQ ID NO: 450526 - RNA, 18 nt, Artificial Sequence
  Synthetic
uuacauaacauacuugaa

SEQ ID NO: 450527 - RNA, 19 nt, Artificial Sequence
  Synthetic
guuacauaacauacuugaa

SEQ ID NO: 450528 - RNA, 20 nt, Artificial Sequence
  Synthetic
uguuacauaacauacuugaa

SEQ ID NO: 450529 - RNA, 21 nt, Artificial Sequence
  Synthetic
uuguuacauaacauacuugaa

SEQ ID NO: 450530 - RNA, 22 nt, Artificial Sequence
  Synthetic
guuguuacauaacauacuugaa

SEQ ID NO: 450531 - RNA, 23 nt, Artificial Sequence
  Synthetic
gguuguuacauaacauacuugaa

SEQ ID NO: 450532 - RNA, 24 nt, Artificial Sequence
  Synthetic
ugguuguuacauaacauacuugaa

SEQ ID NO: 450533 - RNA, 18 nt, Artificial Sequence
  Synthetic
acauucuaauuacuugaa

SEQ ID NO: 450534 - RNA, 19 nt, Artificial Sequence
  Synthetic
aacauucuaauuacuugaa

SEQ ID NO: 450535 - RNA, 20 nt, Artificial Sequence
  Synthetic
aaacauucuaauuacuugaa

SEQ ID NO: 450536 - RNA, 21 nt, Artificial Sequence
  Synthetic
gaaacauucuaauuacuugaa

SEQ ID NO: 450537 - RNA, 22 nt, Artificial Sequence
  Synthetic
agaaacauucuaauuacuugaa

SEQ ID NO: 450538 - RNA, 23 nt, Artificial Sequence
  Synthetic
uagaaacauucuaauuacuugaa

SEQ ID NO: 450539 - RNA, 24 nt, Artificial Sequence
  Synthetic
cuagaaacauucuaauuacuugaa

SEQ ID NO: 450540 - RNA, 18 nt, Artificial Sequence
  Synthetic
auuuaaaauucccuugaa

SEQ ID NO: 450541 - RNA, 19 nt, Artificial Sequence
  Synthetic
gauuuaaaauucccuugaa

SEQ ID NO: 450542 - RNA, 20 nt, Artificial Sequence
  Synthetic
ugauuuaaaauucccuugaa

SEQ ID NO: 450543 - RNA, 21 nt, Artificial Sequence
  Synthetic
cugauuuaaaauucccuugaa

SEQ ID NO: 450544 - RNA, 22 nt, Artificial Sequence
  Synthetic
ucugauuuaaaauucccuugaa

SEQ ID NO: 450545 - RNA, 23 nt, Artificial Sequence
  Synthetic
uucugauuuaaaauucccuugaa

SEQ ID NO: 450546 - RNA, 24 nt, Artificial Sequence
  Synthetic
uuucugauuuaaaauucccuugaa

SEQ ID NO: 450547 - RNA, 18 nt, Artificial Sequence
  Synthetic
gcucacugcagccuugaa

SEQ ID NO: 450548 - RNA, 19 nt, Artificial Sequence
  Synthetic
agcucacugcagccuugaa

SEQ ID NO: 450549 - RNA, 20 nt, Artificial Sequence
  Synthetic
uagcucacugcagccuugaa

SEQ ID NO: 450550 - RNA, 21 nt, Artificial Sequence
  Synthetic
auagcucacugcagccuugaa

SEQ ID NO: 450551 - RNA, 22 nt, Artificial Sequence
  Synthetic
cauagcucacugcagccuugaa

SEQ ID NO: 450552 - RNA, 23 nt, Artificial Sequence
  Synthetic
ucauagcucacugcagccuugaa

SEQ ID NO: 450553 - RNA, 24 nt, Artificial Sequence
  Synthetic
aucauagcucacugcagccuugaa

SEQ ID NO: 450554 - RNA, 18 nt, Artificial Sequence
  Synthetic
guucauuuucgccuugaa

SEQ ID NO: 450555 - RNA, 19 nt, Artificial Sequence
  Synthetic
aguucauuuucgccuugaa

SEQ ID NO: 450556 - RNA, 20 nt, Artificial Sequence
  Synthetic
uaguucauuuucgccuugaa

SEQ ID NO: 450557 - RNA, 21 nt, Artificial Sequence
  Synthetic
auaguucauuuucgccuugaa

SEQ ID NO: 450558 - RNA, 22 nt, Artificial Sequence
  Synthetic
uauaguucauuuucgccuugaa

SEQ ID NO: 450559 - RNA, 23 nt, Artificial Sequence
  Synthetic
uuauaguucauuuucgccuugaa

SEQ ID NO: 450560 - RNA, 24 nt, Artificial Sequence
  Synthetic
auuauaguucauuuucgccuugaa

SEQ ID NO: 450561 - RNA, 18 nt, Artificial Sequence
  Synthetic
uggaauagauuccuugaa

SEQ ID NO: 450562 - RNA, 19 nt, Artificial Sequence
  Synthetic
uuggaauagauuccuugaa

SEQ ID NO: 450563 - RNA, 20 nt, Artificial Sequence
  Synthetic
uuuggaauagauuccuugaa

SEQ ID NO: 450564 - RNA, 21 nt, Artificial Sequence
  Synthetic
cuuuggaauagauuccuugaa

SEQ ID NO: 450565 - RNA, 22 nt, Artificial Sequence
  Synthetic
ucuuuggaauagauuccuugaa

SEQ ID NO: 450566 - RNA, 23 nt, Artificial Sequence
  Synthetic
aucuuuggaauagauuccuugaa

SEQ ID NO: 450567 - RNA, 24 nt, Artificial Sequence
  Synthetic
aaucuuuggaauagauuccuugaa

SEQ ID NO: 450568 - RNA, 18 nt, Artificial Sequence
  Synthetic
uaacauuuucagcuugaa

SEQ ID NO: 450569 - RNA, 19 nt, Artificial Sequence
  Synthetic
guaacauuuucagcuugaa

SEQ ID NO: 450570 - RNA, 20 nt, Artificial Sequence
  Synthetic
uguaacauuuucagcuugaa

SEQ ID NO: 450571 - RNA, 21 nt, Artificial Sequence
  Synthetic
guguaacauuuucagcuugaa

SEQ ID NO: 450572 - RNA, 22 nt, Artificial Sequence
  Synthetic
uguguaacauuuucagcuugaa

SEQ ID NO: 450573 - RNA, 23 nt, Artificial Sequence
  Synthetic
cuguguaacauuuucagcuugaa

SEQ ID NO: 450574 - RNA, 24 nt, Artificial Sequence
  Synthetic
ccuguguaacauuuucagcuugaa

SEQ ID NO: 450575 - RNA, 18 nt, Artificial Sequence
  Synthetic
agccaaggcaaucuugaa

SEQ ID NO: 450576 - RNA, 19 nt, Artificial Sequence
  Synthetic
uagccaaggcaaucuugaa

SEQ ID NO: 450577 - RNA, 20 nt, Artificial Sequence
  Synthetic
guagccaaggcaaucuugaa

SEQ ID NO: 450578 - RNA, 21 nt, Artificial Sequence
  Synthetic
aguagccaaggcaaucuugaa

SEQ ID NO: 450579 - RNA, 22 nt, Artificial Sequence
  Synthetic
aaguagccaaggcaaucuugaa

SEQ ID NO: 450580 - RNA, 23 nt, Artificial Sequence
  Synthetic
aaaguagccaaggcaaucuugaa

SEQ ID NO: 450581 - RNA, 24 nt, Artificial Sequence
  Synthetic
aaaaguagccaaggcaaucuugaa

SEQ ID NO: 450582 - RNA, 18 nt, Artificial Sequence
  Synthetic
gaacaacuccaucuugaa

SEQ ID NO: 450583 - RNA, 19 nt, Artificial Sequence
  Synthetic
agaacaacuccaucuugaa

SEQ ID NO: 450584 - RNA, 20 nt, Artificial Sequence
  Synthetic
uagaacaacuccaucuugaa

SEQ ID NO: 450585 - RNA, 21 nt, Artificial Sequence
  Synthetic
cuagaacaacuccaucuugaa

SEQ ID NO: 450586 - RNA, 22 nt, Artificial Sequence
  Synthetic
acuagaacaacuccaucuugaa

SEQ ID NO: 450587 - RNA, 23 nt, Artificial Sequence
  Synthetic
aacuagaacaacuccaucuugaa

SEQ ID NO: 450588 - RNA, 24 nt, Artificial Sequence
  Synthetic
gaacuagaacaacuccaucuugaa

SEQ ID NO: 450589 - RNA, 18 nt, Artificial Sequence
  Synthetic
uuagcuguaacucuugaa

SEQ ID NO: 450590 - RNA, 19 nt, Artificial Sequence
  Synthetic
uuuagcuguaacucuugaa

SEQ ID NO: 450591 - RNA, 20 nt, Artificial Sequence
  Synthetic
auuuagcuguaacucuugaa

SEQ ID NO: 450592 - RNA, 21 nt, Artificial Sequence
  Synthetic
cauuuagcuguaacucuugaa

SEQ ID NO: 450593 - RNA, 22 nt, Artificial Sequence
  Synthetic
acauuuagcuguaacucuugaa

SEQ ID NO: 450594 - RNA, 23 nt, Artificial Sequence
  Synthetic
gacauuuagcuguaacucuugaa

SEQ ID NO: 450595 - RNA, 24 nt, Artificial Sequence
  Synthetic
ggacauuuagcuguaacucuugaa

SEQ ID NO: 450596 - RNA, 18 nt, Artificial Sequence
  Synthetic
gggcuuucuucucuugaa

SEQ ID NO: 450597 - RNA, 19 nt, Artificial Sequence
  Synthetic
agggcuuucuucucuugaa

SEQ ID NO: 450598 - RNA, 20 nt, Artificial Sequence
  Synthetic
gagggcuuucuucucuugaa

SEQ ID NO: 450599 - RNA, 21 nt, Artificial Sequence
  Synthetic
ugagggcuuucuucucuugaa

SEQ ID NO: 450600 - RNA, 22 nt, Artificial Sequence
  Synthetic
augagggcuuucuucucuugaa

SEQ ID NO: 450601 - RNA, 23 nt, Artificial Sequence
  Synthetic
aaugagggcuuucuucucuugaa

SEQ ID NO: 450602 - RNA, 24 nt, Artificial Sequence
  Synthetic
gaaugagggcuuucuucucuugaa

SEQ ID NO: 450603 - RNA, 18 nt, Artificial Sequence
  Synthetic
gcugccguccuucuugaa

SEQ ID NO: 450604 - RNA, 19 nt, Artificial Sequence
  Synthetic
ugcugccguccuucuugaa

SEQ ID NO: 450605 - RNA, 20 nt, Artificial Sequence
  Synthetic
uugcugccguccuucuugaa

SEQ ID NO: 450606 - RNA, 21 nt, Artificial Sequence
  Synthetic
guugcugccguccuucuugaa

SEQ ID NO: 450607 - RNA, 22 nt, Artificial Sequence
  Synthetic
aguugcugccguccuucuugaa

SEQ ID NO: 450608 - RNA, 23 nt, Artificial Sequence
  Synthetic
aaguugcugccguccuucuugaa

SEQ ID NO: 450609 - RNA, 24 nt, Artificial Sequence
  Synthetic
aaaguugcugccguccuucuugaa

SEQ ID NO: 450610 - RNA, 18 nt, Artificial Sequence
  Synthetic
ggaaaacaauuucuugaa

SEQ ID NO: 450611 - RNA, 19 nt, Artificial Sequence
  Synthetic
uggaaaacaauuucuugaa

SEQ ID NO: 450612 - RNA, 20 nt, Artificial Sequence
  Synthetic
auggaaaacaauuucuugaa

SEQ ID NO: 450613 - RNA, 21 nt, Artificial Sequence
  Synthetic
aauggaaaacaauuucuugaa

SEQ ID NO: 450614 - RNA, 22 nt, Artificial Sequence
  Synthetic
aaauggaaaacaauuucuugaa

SEQ ID NO: 450615 - RNA, 23 nt, Artificial Sequence
  Synthetic
uaaauggaaaacaauuucuugaa

SEQ ID NO: 450616 - RNA, 24 nt, Artificial Sequence
  Synthetic
auaaauggaaaacaauuucuugaa

SEQ ID NO: 450617 - RNA, 18 nt, Artificial Sequence
  Synthetic
auuuucccauuucuugaa

SEQ ID NO: 450618 - RNA, 19 nt, Artificial Sequence
  Synthetic
aauuuucccauuucuugaa

SEQ ID NO: 450619 - RNA, 20 nt, Artificial Sequence
  Synthetic
uaauuuucccauuucuugaa

SEQ ID NO: 450620 - RNA, 21 nt, Artificial Sequence
  Synthetic
cuaauuuucccauuucuugaa

SEQ ID NO: 450621 - RNA, 22 nt, Artificial Sequence
  Synthetic
ucuaauuuucccauuucuugaa

SEQ ID NO: 450622 - RNA, 23 nt, Artificial Sequence
  Synthetic
uucuaauuuucccauuucuugaa

SEQ ID NO: 450623 - RNA, 24 nt, Artificial Sequence
  Synthetic
uuucuaauuuucccauuucuugaa

SEQ ID NO: 450624 - RNA, 18 nt, Artificial Sequence
  Synthetic
cgugagcauaaaguugaa

SEQ ID NO: 450625 - RNA, 19 nt, Artificial Sequence
  Synthetic
ucgugagcauaaaguugaa

SEQ ID NO: 450626 - RNA, 20 nt, Artificial Sequence
  Synthetic
uucgugagcauaaaguugaa

SEQ ID NO: 450627 - RNA, 21 nt, Artificial Sequence
  Synthetic
auucgugagcauaaaguugaa

SEQ ID NO: 450628 - RNA, 22 nt, Artificial Sequence
  Synthetic
cauucgugagcauaaaguugaa

SEQ ID NO: 450629 - RNA, 23 nt, Artificial Sequence
  Synthetic
acauucgugagcauaaaguugaa

SEQ ID NO: 450630 - RNA, 24 nt, Artificial Sequence
  Synthetic
cacauucgugagcauaaaguugaa

SEQ ID NO: 450631 - RNA, 18 nt, Artificial Sequence
  Synthetic
cagauucaccaaguugaa

SEQ ID NO: 450632 - RNA, 19 nt, Artificial Sequence
  Synthetic
ucagauucaccaaguugaa

SEQ ID NO: 450633 - RNA, 20 nt, Artificial Sequence
  Synthetic
gucagauucaccaaguugaa

SEQ ID NO: 450634 - RNA, 21 nt, Artificial Sequence
  Synthetic
ugucagauucaccaaguugaa

SEQ ID NO: 450635 - RNA, 22 nt, Artificial Sequence
  Synthetic
uugucagauucaccaaguugaa

SEQ ID NO: 450636 - RNA, 23 nt, Artificial Sequence
  Synthetic
auugucagauucaccaaguugaa

SEQ ID NO: 450637 - RNA, 24 nt, Artificial Sequence
  Synthetic
aauugucagauucaccaaguugaa

SEQ ID NO: 450638 - RNA, 18 nt, Artificial Sequence
  Synthetic
uauucucuacuaguugaa

SEQ ID NO: 450639 - RNA, 19 nt, Artificial Sequence
  Synthetic
auauucucuacuaguugaa

SEQ ID NO: 450640 - RNA, 20 nt, Artificial Sequence
  Synthetic
gauauucucuacuaguugaa

SEQ ID NO: 450641 - RNA, 21 nt, Artificial Sequence
  Synthetic
agauauucucuacuaguugaa

SEQ ID NO: 450642 - RNA, 22 nt, Artificial Sequence
  Synthetic
uagauauucucuacuaguugaa

SEQ ID NO: 450643 - RNA, 23 nt, Artificial Sequence
  Synthetic
uuagauauucucuacuaguugaa

SEQ ID NO: 450644 - RNA, 24 nt, Artificial Sequence
  Synthetic
auuagauauucucuacuaguugaa

SEQ ID NO: 450645 - RNA, 18 nt, Artificial Sequence
  Synthetic
uaaaaacacaagguugaa

SEQ ID NO: 450646 - RNA, 19 nt, Artificial Sequence
  Synthetic
auaaaaacacaagguugaa

SEQ ID NO: 450647 - RNA, 20 nt, Artificial Sequence
  Synthetic
uauaaaaacacaagguugaa

SEQ ID NO: 450648 - RNA, 21 nt, Artificial Sequence
  Synthetic
cuauaaaaacacaagguugaa

SEQ ID NO: 450649 - RNA, 22 nt, Artificial Sequence
  Synthetic
ucuauaaaaacacaagguugaa

SEQ ID NO: 450650 - RNA, 23 nt, Artificial Sequence
  Synthetic
cucuauaaaaacacaagguugaa

SEQ ID NO: 450651 - RNA, 24 nt, Artificial Sequence
  Synthetic
ucucuauaaaaacacaagguugaa

SEQ ID NO: 450652 - RNA, 18 nt, Artificial Sequence
  Synthetic
cauuuguaugggguugaa

SEQ ID NO: 450653 - RNA, 19 nt, Artificial Sequence
  Synthetic
acauuuguaugggguugaa

SEQ ID NO: 450654 - RNA, 20 nt, Artificial Sequence
  Synthetic
gacauuuguaugggguugaa

SEQ ID NO: 450655 - RNA, 21 nt, Artificial Sequence
  Synthetic
ggacauuuguaugggguugaa

SEQ ID NO: 450656 - RNA, 22 nt, Artificial Sequence
  Synthetic
gggacauuuguaugggguugaa

SEQ ID NO: 450657 - RNA, 23 nt, Artificial Sequence
  Synthetic
ggggacauuuguaugggguugaa

SEQ ID NO: 450658 - RNA, 24 nt, Artificial Sequence
  Synthetic
uggggacauuuguaugggguugaa

SEQ ID NO: 450659 - RNA, 18 nt, Artificial Sequence
  Synthetic
aacuaggagcugguugaa

SEQ ID NO: 450660 - RNA, 19 nt, Artificial Sequence
  Synthetic
caacuaggagcugguugaa

SEQ ID NO: 450661 - RNA, 20 nt, Artificial Sequence
  Synthetic
ucaacuaggagcugguugaa

SEQ ID NO: 450662 - RNA, 21 nt, Artificial Sequence
  Synthetic
cucaacuaggagcugguugaa

SEQ ID NO: 450663 - RNA, 22 nt, Artificial Sequence
  Synthetic
ccucaacuaggagcugguugaa

SEQ ID NO: 450664 - RNA, 23 nt, Artificial Sequence
  Synthetic
accucaacuaggagcugguugaa

SEQ ID NO: 450665 - RNA, 24 nt, Artificial Sequence
  Synthetic
caccucaacuaggagcugguugaa

SEQ ID NO: 450666 - RNA, 18 nt, Artificial Sequence
  Synthetic
gaugggacagugguugaa

SEQ ID NO: 450667 - RNA, 19 nt, Artificial Sequence
  Synthetic
ggaugggacagugguugaa

SEQ ID NO: 450668 - RNA, 20 nt, Artificial Sequence
  Synthetic
aggaugggacagugguugaa

SEQ ID NO: 450669 - RNA, 21 nt, Artificial Sequence
  Synthetic
caggaugggacagugguugaa

SEQ ID NO: 450670 - RNA, 22 nt, Artificial Sequence
  Synthetic
acaggaugggacagugguugaa

SEQ ID NO: 450671 - RNA, 23 nt, Artificial Sequence
  Synthetic
cacaggaugggacagugguugaa

SEQ ID NO: 450672 - RNA, 24 nt, Artificial Sequence
  Synthetic
acacaggaugggacagugguugaa

SEQ ID NO: 450673 - RNA, 21 nt, Artificial Sequence
  Synthetic
aacuuccaacacuauguugaa

SEQ ID NO: 450674 - RNA, 22 nt, Artificial Sequence
  Synthetic
gaacuuccaacacuauguugaa

SEQ ID NO: 450675 - RNA, 23 nt, Artificial Sequence
  Synthetic
agaacuuccaacacuauguugaa

SEQ ID NO: 450676 - RNA, 24 nt, Artificial Sequence
  Synthetic
cagaacuuccaacacuauguugaa

SEQ ID NO: 450677 - RNA, 18 nt, Artificial Sequence
  Synthetic
gacucucccuguguugaa

SEQ ID NO: 450678 - RNA, 19 nt, Artificial Sequence
  Synthetic
ggacucucccuguguugaa

SEQ ID NO: 450679 - RNA, 20 nt, Artificial Sequence
  Synthetic
aggacucucccuguguugaa

SEQ ID NO: 450680 - RNA, 21 nt, Artificial Sequence
  Synthetic
aaggacucucccuguguugaa

SEQ ID NO: 450681 - RNA, 22 nt, Artificial Sequence
  Synthetic
uaaggacucucccuguguugaa

SEQ ID NO: 450682 - RNA, 23 nt, Artificial Sequence
  Synthetic
cuaaggacucucccuguguugaa

SEQ ID NO: 450683 - RNA, 24 nt, Artificial Sequence
  Synthetic
ucuaaggacucucccuguguugaa

SEQ ID NO: 450684 - RNA, 18 nt, Artificial Sequence
  Synthetic
caauauugaauuguugaa

SEQ ID NO: 450685 - RNA, 19 nt, Artificial Sequence
  Synthetic
ccaauauugaauuguugaa

SEQ ID NO: 450686 - RNA, 20 nt, Artificial Sequence
  Synthetic
uccaauauugaauuguugaa

SEQ ID NO: 450687 - RNA, 21 nt, Artificial Sequence
  Synthetic
auccaauauugaauuguugaa

SEQ ID NO: 450688 - RNA, 22 nt, Artificial Sequence
  Synthetic
aauccaauauugaauuguugaa

SEQ ID NO: 450689 - RNA, 23 nt, Artificial Sequence
  Synthetic
uaauccaauauugaauuguugaa

SEQ ID NO: 450690 - RNA, 24 nt, Artificial Sequence
  Synthetic
uuaauccaauauugaauuguugaa

SEQ ID NO: 450691 - RNA, 18 nt, Artificial Sequence
  Synthetic
cuauuuuucuuuguugaa

SEQ ID NO: 450692 - RNA, 19 nt, Artificial Sequence
  Synthetic
ucuauuuuucuuuguugaa

SEQ ID NO: 450693 - RNA, 20 nt, Artificial Sequence
  Synthetic
aucuauuuuucuuuguugaa

SEQ ID NO: 450694 - RNA, 21 nt, Artificial Sequence
  Synthetic
uaucuauuuuucuuuguugaa

SEQ ID NO: 450695 - RNA, 22 nt, Artificial Sequence
  Synthetic
uuaucuauuuuucuuuguugaa

SEQ ID NO: 450696 - RNA, 23 nt, Artificial Sequence
  Synthetic
uuuaucuauuuuucuuuguugaa

SEQ ID NO: 450697 - RNA, 24 nt, Artificial Sequence
  Synthetic
cuuuaucuauuuuucuuuguugaa

SEQ ID NO: 450698 - RNA, 18 nt, Artificial Sequence
  Synthetic
ugacaacauacauuugaa

SEQ ID NO: 450699 - RNA, 19 nt, Artificial Sequence
  Synthetic
augacaacauacauuugaa

SEQ ID NO: 450700 - RNA, 20 nt, Artificial Sequence
  Synthetic
aaugacaacauacauuugaa

SEQ ID NO: 450701 - RNA, 21 nt, Artificial Sequence
  Synthetic
aaaugacaacauacauuugaa

SEQ ID NO: 450702 - RNA, 22 nt, Artificial Sequence
  Synthetic
caaaugacaacauacauuugaa

SEQ ID NO: 450703 - RNA, 23 nt, Artificial Sequence
  Synthetic
ucaaaugacaacauacauuugaa

SEQ ID NO: 450704 - RNA, 24 nt, Artificial Sequence
  Synthetic
gucaaaugacaacauacauuugaa

SEQ ID NO: 450705 - RNA, 18 nt, Artificial Sequence
  Synthetic
accaaaagaccauuugaa

SEQ ID NO: 450706 - RNA, 19 nt, Artificial Sequence
  Synthetic
aaccaaaagaccauuugaa

SEQ ID NO: 450707 - RNA, 20 nt, Artificial Sequence
  Synthetic
uaaccaaaagaccauuugaa

SEQ ID NO: 450708 - RNA, 21 nt, Artificial Sequence
  Synthetic
guaaccaaaagaccauuugaa

SEQ ID NO: 450709 - RNA, 22 nt, Artificial Sequence
  Synthetic
uguaaccaaaagaccauuugaa

SEQ ID NO: 450710 - RNA, 23 nt, Artificial Sequence
  Synthetic
cuguaaccaaaagaccauuugaa

SEQ ID NO: 450711 - RNA, 24 nt, Artificial Sequence
  Synthetic
ccuguaaccaaaagaccauuugaa

SEQ ID NO: 450712 - RNA, 18 nt, Artificial Sequence
  Synthetic
agugaguagccauuugaa

SEQ ID NO: 450713 - RNA, 19 nt, Artificial Sequence
  Synthetic
uagugaguagccauuugaa

SEQ ID NO: 450714 - RNA, 20 nt, Artificial Sequence
  Synthetic
auagugaguagccauuugaa

SEQ ID NO: 450715 - RNA, 21 nt, Artificial Sequence
  Synthetic
uauagugaguagccauuugaa

SEQ ID NO: 450716 - RNA, 22 nt, Artificial Sequence
  Synthetic
guauagugaguagccauuugaa

SEQ ID NO: 450717 - RNA, 23 nt, Artificial Sequence
  Synthetic
uguauagugaguagccauuugaa

SEQ ID NO: 450718 - RNA, 24 nt, Artificial Sequence
  Synthetic
uuguauagugaguagccauuugaa

SEQ ID NO: 450719 - RNA, 18 nt, Artificial Sequence
  Synthetic
aauuuccacgcauuugaa

SEQ ID NO: 450720 - RNA, 19 nt, Artificial Sequence
  Synthetic
gaauuuccacgcauuugaa

SEQ ID NO: 450721 - RNA, 20 nt, Artificial Sequence
  Synthetic
agaauuuccacgcauuugaa

SEQ ID NO: 450722 - RNA, 21 nt, Artificial Sequence
  Synthetic
cagaauuuccacgcauuugaa

SEQ ID NO: 450723 - RNA, 22 nt, Artificial Sequence
  Synthetic
ucagaauuuccacgcauuugaa

SEQ ID NO: 450724 - RNA, 23 nt, Artificial Sequence
  Synthetic
uucagaauuuccacgcauuugaa

SEQ ID NO: 450725 - RNA, 24 nt, Artificial Sequence
  Synthetic
auucagaauuuccacgcauuugaa

SEQ ID NO: 450726 - RNA, 18 nt, Artificial Sequence
  Synthetic
gaauuguggagcuuugaa

SEQ ID NO: 450727 - RNA, 19 nt, Artificial Sequence
  Synthetic
agaauuguggagcuuugaa

SEQ ID NO: 450728 - RNA, 20 nt, Artificial Sequence
  Synthetic
cagaauuguggagcuuugaa

SEQ ID NO: 450729 - RNA, 21 nt, Artificial Sequence
  Synthetic
acagaauuguggagcuuugaa

SEQ ID NO: 450730 - RNA, 22 nt, Artificial Sequence
  Synthetic
uacagaauuguggagcuuugaa

SEQ ID NO: 450731 - RNA, 23 nt, Artificial Sequence
  Synthetic
auacagaauuguggagcuuugaa

SEQ ID NO: 450732 - RNA, 24 nt, Artificial Sequence
  Synthetic
aauacagaauuguggagcuuugaa

SEQ ID NO: 450733 - RNA, 18 nt, Artificial Sequence
  Synthetic
cacaacuacugcuuugaa

SEQ ID NO: 450734 - RNA, 19 nt, Artificial Sequence
  Synthetic
acacaacuacugcuuugaa

SEQ ID NO: 450735 - RNA, 20 nt, Artificial Sequence
  Synthetic
cacacaacuacugcuuugaa

SEQ ID NO: 450736 - RNA, 21 nt, Artificial Sequence
  Synthetic
acacacaacuacugcuuugaa

SEQ ID NO: 450737 - RNA, 22 nt, Artificial Sequence
  Synthetic
aacacacaacuacugcuuugaa

SEQ ID NO: 450738 - RNA, 23 nt, Artificial Sequence
  Synthetic
aaacacacaacuacugcuuugaa

SEQ ID NO: 450739 - RNA, 24 nt, Artificial Sequence
  Synthetic
gaaacacacaacuacugcuuugaa

SEQ ID NO: 450740 - RNA, 18 nt, Artificial Sequence
  Synthetic
aguuauuuuugcuuugaa

SEQ ID NO: 450741 - RNA, 19 nt, Artificial Sequence
  Synthetic
aaguuauuuuugcuuugaa

SEQ ID NO: 450742 - RNA, 20 nt, Artificial Sequence
  Synthetic
aaaguuauuuuugcuuugaa

SEQ ID NO: 450743 - RNA, 21 nt, Artificial Sequence
  Synthetic
caaaguuauuuuugcuuugaa

SEQ ID NO: 450744 - RNA, 22 nt, Artificial Sequence
  Synthetic
gcaaaguuauuuuugcuuugaa

SEQ ID NO: 450745 - RNA, 23 nt, Artificial Sequence
  Synthetic
ugcaaaguuauuuuugcuuugaa

SEQ ID NO: 450746 - RNA, 24 nt, Artificial Sequence
  Synthetic
augcaaaguuauuuuugcuuugaa

SEQ ID NO: 450747 - RNA, 18 nt, Artificial Sequence
  Synthetic
uacuacauauucuuugaa

SEQ ID NO: 450748 - RNA, 19 nt, Artificial Sequence
  Synthetic
guacuacauauucuuugaa

SEQ ID NO: 450749 - RNA, 20 nt, Artificial Sequence
  Synthetic
uguacuacauauucuuugaa

SEQ ID NO: 450750 - RNA, 21 nt, Artificial Sequence
  Synthetic
uuguacuacauauucuuugaa

SEQ ID NO: 450751 - RNA, 22 nt, Artificial Sequence
  Synthetic
uuuguacuacauauucuuugaa

SEQ ID NO: 450752 - RNA, 23 nt, Artificial Sequence
  Synthetic
uuuuguacuacauauucuuugaa

SEQ ID NO: 450753 - RNA, 24 nt, Artificial Sequence
  Synthetic
uuuuuguacuacauauucuuugaa

SEQ ID NO: 450754 - RNA, 18 nt, Artificial Sequence
  Synthetic
agucccaaggaguuugaa

SEQ ID NO: 450755 - RNA, 19 nt, Artificial Sequence
  Synthetic
cagucccaaggaguuugaa

SEQ ID NO: 450756 - RNA, 20 nt, Artificial Sequence
  Synthetic
acagucccaaggaguuugaa

SEQ ID NO: 450757 - RNA, 21 nt, Artificial Sequence
  Synthetic
aacagucccaaggaguuugaa

SEQ ID NO: 450758 - RNA, 22 nt, Artificial Sequence
  Synthetic
aaacagucccaaggaguuugaa

SEQ ID NO: 450759 - RNA, 23 nt, Artificial Sequence
  Synthetic
aaaacagucccaaggaguuugaa

SEQ ID NO: 450760 - RNA, 24 nt, Artificial Sequence
  Synthetic
aaaaacagucccaaggaguuugaa

SEQ ID NO: 450761 - RNA, 18 nt, Artificial Sequence
  Synthetic
aaugcugccugguuugaa

SEQ ID NO: 450762 - RNA, 19 nt, Artificial Sequence
  Synthetic
aaaugcugccugguuugaa

SEQ ID NO: 450763 - RNA, 20 nt, Artificial Sequence
  Synthetic
uaaaugcugccugguuugaa

SEQ ID NO: 450764 - RNA, 21 nt, Artificial Sequence
  Synthetic
auaaaugcugccugguuugaa

SEQ ID NO: 450765 - RNA, 22 nt, Artificial Sequence
  Synthetic
aauaaaugcugccugguuugaa

SEQ ID NO: 450766 - RNA, 23 nt, Artificial Sequence
  Synthetic
uaauaaaugcugccugguuugaa

SEQ ID NO: 450767 - RNA, 24 nt, Artificial Sequence
  Synthetic
guaauaaaugcugccugguuugaa

SEQ ID NO: 450768 - RNA, 18 nt, Artificial Sequence
  Synthetic
ucaaaaaagguguuugaa

SEQ ID NO: 450769 - RNA, 19 nt, Artificial Sequence
  Synthetic
gucaaaaaagguguuugaa

SEQ ID NO: 450770 - RNA, 20 nt, Artificial Sequence
  Synthetic
agucaaaaaagguguuugaa

SEQ ID NO: 450771 - RNA, 21 nt, Artificial Sequence
  Synthetic
aagucaaaaaagguguuugaa

SEQ ID NO: 450772 - RNA, 22 nt, Artificial Sequence
  Synthetic
gaagucaaaaaagguguuugaa

SEQ ID NO: 450773 - RNA, 23 nt, Artificial Sequence
  Synthetic
ugaagucaaaaaagguguuugaa

SEQ ID NO: 450774 - RNA, 24 nt, Artificial Sequence
  Synthetic
uugaagucaaaaaagguguuugaa

SEQ ID NO: 450775 - RNA, 18 nt, Artificial Sequence
  Synthetic
cuagaaguauauuuugaa

SEQ ID NO: 450776 - RNA, 19 nt, Artificial Sequence
  Synthetic
ucuagaaguauauuuugaa

SEQ ID NO: 450777 - RNA, 20 nt, Artificial Sequence
  Synthetic
uucuagaaguauauuuugaa

SEQ ID NO: 450778 - RNA, 21 nt, Artificial Sequence
  Synthetic
uuucuagaaguauauuuugaa

SEQ ID NO: 450779 - RNA, 22 nt, Artificial Sequence
  Synthetic
guuucuagaaguauauuuugaa

SEQ ID NO: 450780 - RNA, 23 nt, Artificial Sequence
  Synthetic
aguuucuagaaguauauuuugaa

SEQ ID NO: 450781 - RNA, 24 nt, Artificial Sequence
  Synthetic
caguuucuagaaguauauuuugaa

SEQ ID NO: 450782 - RNA, 18 nt, Artificial Sequence
  Synthetic
gaccuugaaacuuuugaa

SEQ ID NO: 450783 - RNA, 19 nt, Artificial Sequence
  Synthetic
ugaccuugaaacuuuugaa

SEQ ID NO: 450784 - RNA, 20 nt, Artificial Sequence
  Synthetic
augaccuugaaacuuuugaa

SEQ ID NO: 450785 - RNA, 21 nt, Artificial Sequence
  Synthetic
caugaccuugaaacuuuugaa

SEQ ID NO: 450786 - RNA, 22 nt, Artificial Sequence
  Synthetic
ucaugaccuugaaacuuuugaa

SEQ ID NO: 450787 - RNA, 23 nt, Artificial Sequence
  Synthetic
uucaugaccuugaaacuuuugaa

SEQ ID NO: 450788 - RNA, 24 nt, Artificial Sequence
  Synthetic
cuucaugaccuugaaacuuuugaa

SEQ ID NO: 450789 - RNA, 18 nt, Artificial Sequence
  Synthetic
gaacucugcacuuuugaa

SEQ ID NO: 450790 - RNA, 19 nt, Artificial Sequence
  Synthetic
ugaacucugcacuuuugaa

SEQ ID NO: 450791 - RNA, 20 nt, Artificial Sequence
  Synthetic
gugaacucugcacuuuugaa

SEQ ID NO: 450792 - RNA, 21 nt, Artificial Sequence
  Synthetic
ugugaacucugcacuuuugaa

SEQ ID NO: 450793 - RNA, 22 nt, Artificial Sequence
  Synthetic
cugugaacucugcacuuuugaa

SEQ ID NO: 450794 - RNA, 23 nt, Artificial Sequence
  Synthetic
acugugaacucugcacuuuugaa

SEQ ID NO: 450795 - RNA, 24 nt, Artificial Sequence
  Synthetic
aacugugaacucugcacuuuugaa

SEQ ID NO: 450796 - RNA, 18 nt, Artificial Sequence
  Synthetic
aucuaucggucuuuugaa

SEQ ID NO: 450797 - RNA, 19 nt, Artificial Sequence
  Synthetic
uaucuaucggucuuuugaa

SEQ ID NO: 450798 - RNA, 20 nt, Artificial Sequence
  Synthetic
auaucuaucggucuuuugaa

SEQ ID NO: 450799 - RNA, 21 nt, Artificial Sequence
  Synthetic
aauaucuaucggucuuuugaa

SEQ ID NO: 450800 - RNA, 22 nt, Artificial Sequence
  Synthetic
gaauaucuaucggucuuuugaa

SEQ ID NO: 450801 - RNA, 23 nt, Artificial Sequence
  Synthetic
ugaauaucuaucggucuuuugaa

SEQ ID NO: 450802 - RNA, 24 nt, Artificial Sequence
  Synthetic
cugaauaucuaucggucuuuugaa

SEQ ID NO: 450803 - RNA, 18 nt, Artificial Sequence
  Synthetic
ugauucaacaguuuugaa

SEQ ID NO: 450804 - RNA, 19 nt, Artificial Sequence
  Synthetic
cugauucaacaguuuugaa

SEQ ID NO: 450805 - RNA, 20 nt, Artificial Sequence
  Synthetic
ucugauucaacaguuuugaa

SEQ ID NO: 450806 - RNA, 21 nt, Artificial Sequence
  Synthetic
uucugauucaacaguuuugaa

SEQ ID NO: 450807 - RNA, 22 nt, Artificial Sequence
  Synthetic
auucugauucaacaguuuugaa

SEQ ID NO: 450808 - RNA, 23 nt, Artificial Sequence
  Synthetic
gauucugauucaacaguuuugaa

SEQ ID NO: 450809 - RNA, 24 nt, Artificial Sequence
  Synthetic
agauucugauucaacaguuuugaa

SEQ ID NO: 450810 - RNA, 18 nt, Artificial Sequence
  Synthetic
agcauuggggguuuugaa

SEQ ID NO: 450811 - RNA, 19 nt, Artificial Sequence
  Synthetic
gagcauuggggguuuugaa

SEQ ID NO: 450812 - RNA, 20 nt, Artificial Sequence
  Synthetic
ggagcauuggggguuuugaa

SEQ ID NO: 450813 - RNA, 21 nt, Artificial Sequence
  Synthetic
gggagcauuggggguuuugaa

SEQ ID NO: 450814 - RNA, 22 nt, Artificial Sequence
  Synthetic
ggggagcauuggggguuuugaa

SEQ ID NO: 450815 - RNA, 23 nt, Artificial Sequence
  Synthetic
uggggagcauuggggguuuugaa

SEQ ID NO: 450816 - RNA, 24 nt, Artificial Sequence
  Synthetic
auggggagcauuggggguuuugaa

SEQ ID NO: 450817 - RNA, 18 nt, Artificial Sequence
  Synthetic
cccugauagguuuuugaa

SEQ ID NO: 450818 - RNA, 19 nt, Artificial Sequence
  Synthetic
gcccugauagguuuuugaa

SEQ ID NO: 450819 - RNA, 20 nt, Artificial Sequence
  Synthetic
agcccugauagguuuuugaa

SEQ ID NO: 450820 - RNA, 21 nt, Artificial Sequence
  Synthetic
cagcccugauagguuuuugaa

SEQ ID NO: 450821 - RNA, 22 nt, Artificial Sequence
  Synthetic
ccagcccugauagguuuuugaa

SEQ ID NO: 450822 - RNA, 23 nt, Artificial Sequence
  Synthetic
uccagcccugauagguuuuugaa

SEQ ID NO: 450823 - RNA, 24 nt, Artificial Sequence
  Synthetic
auccagcccugauagguuuuugaa

SEQ ID NO: 450824 - RNA, 18 nt, Artificial Sequence
  Synthetic
uaagaagugguuuuugaa

SEQ ID NO: 450825 - RNA, 19 nt, Artificial Sequence
  Synthetic
auaagaagugguuuuugaa

SEQ ID NO: 450826 - RNA, 20 nt, Artificial Sequence
  Synthetic
gauaagaagugguuuuugaa

SEQ ID NO: 450827 - RNA, 21 nt, Artificial Sequence
  Synthetic
agauaagaagugguuuuugaa

SEQ ID NO: 450828 - RNA, 22 nt, Artificial Sequence
  Synthetic
gagauaagaagugguuuuugaa

SEQ ID NO: 450829 - RNA, 23 nt, Artificial Sequence
  Synthetic
agagauaagaagugguuuuugaa

SEQ ID NO: 450830 - RNA, 24 nt, Artificial Sequence
  Synthetic
uagagauaagaagugguuuuugaa

SEQ ID NO: 450831 - RNA, 18 nt, Artificial Sequence
  Synthetic
uuuugggaaaaaaaauaa

SEQ ID NO: 450832 - RNA, 19 nt, Artificial Sequence
  Synthetic
auuuugggaaaaaaaauaa

SEQ ID NO: 450833 - RNA, 20 nt, Artificial Sequence
  Synthetic
gauuuugggaaaaaaaauaa

SEQ ID NO: 450834 - RNA, 21 nt, Artificial Sequence
  Synthetic
agauuuugggaaaaaaaauaa

SEQ ID NO: 450835 - RNA, 22 nt, Artificial Sequence
  Synthetic
aagauuuugggaaaaaaaauaa

SEQ ID NO: 450836 - RNA, 23 nt, Artificial Sequence
  Synthetic
uaagauuuugggaaaaaaaauaa

SEQ ID NO: 450837 - RNA, 24 nt, Artificial Sequence
  Synthetic
guaagauuuugggaaaaaaaauaa

SEQ ID NO: 450838 - RNA, 18 nt, Artificial Sequence
  Synthetic
guacuacuaaaaaaauaa

SEQ ID NO: 450839 - RNA, 19 nt, Artificial Sequence
  Synthetic
gguacuacuaaaaaaauaa

SEQ ID NO: 450840 - RNA, 20 nt, Artificial Sequence
  Synthetic
agguacuacuaaaaaaauaa

SEQ ID NO: 450841 - RNA, 21 nt, Artificial Sequence
  Synthetic
uagguacuacuaaaaaaauaa

SEQ ID NO: 450842 - RNA, 22 nt, Artificial Sequence
  Synthetic
cuagguacuacuaaaaaaauaa

SEQ ID NO: 450843 - RNA, 23 nt, Artificial Sequence
  Synthetic
acuagguacuacuaaaaaaauaa

SEQ ID NO: 450844 - RNA, 24 nt, Artificial Sequence
  Synthetic
aacuagguacuacuaaaaaaauaa

SEQ ID NO: 450845 - RNA, 18 nt, Artificial Sequence
  Synthetic
ugacaggggaaaaaauaa

SEQ ID NO: 450846 - RNA, 19 nt, Artificial Sequence
  Synthetic
cugacaggggaaaaaauaa

SEQ ID NO: 450847 - RNA, 20 nt, Artificial Sequence
  Synthetic
acugacaggggaaaaaauaa

SEQ ID NO: 450848 - RNA, 21 nt, Artificial Sequence
  Synthetic
aacugacaggggaaaaaauaa

SEQ ID NO: 450849 - RNA, 22 nt, Artificial Sequence
  Synthetic
aaacugacaggggaaaaaauaa

SEQ ID NO: 450850 - RNA, 23 nt, Artificial Sequence
  Synthetic
aaaacugacaggggaaaaaauaa

SEQ ID NO: 450851 - RNA, 24 nt, Artificial Sequence
  Synthetic
aaaaacugacaggggaaaaaauaa

SEQ ID NO: 450852 - RNA, 18 nt, Artificial Sequence
  Synthetic
auacuuuugaaaaaauaa

SEQ ID NO: 450853 - RNA, 19 nt, Artificial Sequence
  Synthetic
aauacuuuugaaaaaauaa

SEQ ID NO: 450854 - RNA, 20 nt, Artificial Sequence
  Synthetic
caauacuuuugaaaaaauaa

SEQ ID NO: 450855 - RNA, 21 nt, Artificial Sequence
  Synthetic
acaauacuuuugaaaaaauaa

SEQ ID NO: 450856 - RNA, 22 nt, Artificial Sequence
  Synthetic
cacaauacuuuugaaaaaauaa

SEQ ID NO: 450857 - RNA, 23 nt, Artificial Sequence
  Synthetic
ccacaauacuuuugaaaaaauaa

SEQ ID NO: 450858 - RNA, 24 nt, Artificial Sequence
  Synthetic
gccacaauacuuuugaaaaaauaa

SEQ ID NO: 450859 - RNA, 18 nt, Artificial Sequence
  Synthetic
ugaagaugacaaaaauaa

SEQ ID NO: 450860 - RNA, 19 nt, Artificial Sequence
  Synthetic
uugaagaugacaaaaauaa

SEQ ID NO: 450861 - RNA, 20 nt, Artificial Sequence
  Synthetic
auugaagaugacaaaaauaa

SEQ ID NO: 450862 - RNA, 21 nt, Artificial Sequence
  Synthetic
aauugaagaugacaaaaauaa

SEQ ID NO: 450863 - RNA, 22 nt, Artificial Sequence
  Synthetic
aaauugaagaugacaaaaauaa

SEQ ID NO: 450864 - RNA, 23 nt, Artificial Sequence
  Synthetic
gaaauugaagaugacaaaaauaa

SEQ ID NO: 450865 - RNA, 24 nt, Artificial Sequence
  Synthetic
agaaauugaagaugacaaaaauaa

SEQ ID NO: 450866 - RNA, 18 nt, Artificial Sequence
  Synthetic
uuuacuuuucaaaaauaa

SEQ ID NO: 450867 - RNA, 19 nt, Artificial Sequence
  Synthetic
uuuuacuuuucaaaaauaa

SEQ ID NO: 450868 - RNA, 20 nt, Artificial Sequence
  Synthetic
cuuuuacuuuucaaaaauaa

SEQ ID NO: 450869 - RNA, 21 nt, Artificial Sequence
  Synthetic
ucuuuuacuuuucaaaaauaa

SEQ ID NO: 450870 - RNA, 22 nt, Artificial Sequence
  Synthetic
aucuuuuacuuuucaaaaauaa

SEQ ID NO: 450871 - RNA, 23 nt, Artificial Sequence
  Synthetic
aaucuuuuacuuuucaaaaauaa

SEQ ID NO: 450872 - RNA, 24 nt, Artificial Sequence
  Synthetic
uaaucuuuuacuuuucaaaaauaa

SEQ ID NO: 450873 - RNA, 18 nt, Artificial Sequence
  Synthetic
auggcagaagaaaaauaa

SEQ ID NO: 450874 - RNA, 19 nt, Artificial Sequence
  Synthetic
uauggcagaagaaaaauaa

SEQ ID NO: 450875 - RNA, 20 nt, Artificial Sequence
  Synthetic
guauggcagaagaaaaauaa

SEQ ID NO: 450876 - RNA, 21 nt, Artificial Sequence
  Synthetic
uguauggcagaagaaaaauaa

SEQ ID NO: 450877 - RNA, 22 nt, Artificial Sequence
  Synthetic
auguauggcagaagaaaaauaa

SEQ ID NO: 450878 - RNA, 23 nt, Artificial Sequence
  Synthetic
gauguauggcagaagaaaaauaa

SEQ ID NO: 450879 - RNA, 24 nt, Artificial Sequence
  Synthetic
agauguauggcagaagaaaaauaa

SEQ ID NO: 450880 - RNA, 18 nt, Artificial Sequence
  Synthetic
cuuuauugagaaaaauaa

SEQ ID NO: 450881 - RNA, 19 nt, Artificial Sequence
  Synthetic
acuuuauugagaaaaauaa

SEQ ID NO: 450882 - RNA, 20 nt, Artificial Sequence
  Synthetic
cacuuuauugagaaaaauaa

SEQ ID NO: 450883 - RNA, 21 nt, Artificial Sequence
  Synthetic
gcacuuuauugagaaaaauaa

SEQ ID NO: 450884 - RNA, 22 nt, Artificial Sequence
  Synthetic
ugcacuuuauugagaaaaauaa

SEQ ID NO: 450885 - RNA, 23 nt, Artificial Sequence
  Synthetic
augcacuuuauugagaaaaauaa

SEQ ID NO: 450886 - RNA, 24 nt, Artificial Sequence
  Synthetic
caugcacuuuauugagaaaaauaa

SEQ ID NO: 450887 - RNA, 18 nt, Artificial Sequence
  Synthetic
guuaagaaauaaaaauaa

SEQ ID NO: 450888 - RNA, 19 nt, Artificial Sequence
  Synthetic
aguuaagaaauaaaaauaa

SEQ ID NO: 450889 - RNA, 20 nt, Artificial Sequence
  Synthetic
aaguuaagaaauaaaaauaa

SEQ ID NO: 450890 - RNA, 21 nt, Artificial Sequence
  Synthetic
caaguuaagaaauaaaaauaa

SEQ ID NO: 450891 - RNA, 22 nt, Artificial Sequence
  Synthetic
ucaaguuaagaaauaaaaauaa

SEQ ID NO: 450892 - RNA, 23 nt, Artificial Sequence
  Synthetic
uucaaguuaagaaauaaaaauaa

SEQ ID NO: 450893 - RNA, 24 nt, Artificial Sequence
  Synthetic
auucaaguuaagaaauaaaaauaa

SEQ ID NO: 450894 - RNA, 18 nt, Artificial Sequence
  Synthetic
aaucaacaauaaaaauaa

SEQ ID NO: 450895 - RNA, 19 nt, Artificial Sequence
  Synthetic
gaaucaacaauaaaaauaa

SEQ ID NO: 450896 - RNA, 20 nt, Artificial Sequence
  Synthetic
agaaucaacaauaaaaauaa

SEQ ID NO: 450897 - RNA, 21 nt, Artificial Sequence
  Synthetic
aagaaucaacaauaaaaauaa

SEQ ID NO: 450898 - RNA, 22 nt, Artificial Sequence
  Synthetic
uaagaaucaacaauaaaaauaa

SEQ ID NO: 450899 - RNA, 23 nt, Artificial Sequence
  Synthetic
auaagaaucaacaauaaaaauaa

SEQ ID NO: 450900 - RNA, 24 nt, Artificial Sequence
  Synthetic
aauaagaaucaacaauaaaaauaa

SEQ ID NO: 450901 - RNA, 18 nt, Artificial Sequence
  Synthetic
gcuuacaaagcaaaauaa

SEQ ID NO: 450902 - RNA, 19 nt, Artificial Sequence
  Synthetic
agcuuacaaagcaaaauaa

SEQ ID NO: 450903 - RNA, 20 nt, Artificial Sequence
  Synthetic
uagcuuacaaagcaaaauaa

SEQ ID NO: 450904 - RNA, 21 nt, Artificial Sequence
  Synthetic
guagcuuacaaagcaaaauaa

SEQ ID NO: 450905 - RNA, 22 nt, Artificial Sequence
  Synthetic
gguagcuuacaaagcaaaauaa

SEQ ID NO: 450906 - RNA, 23 nt, Artificial Sequence
  Synthetic
agguagcuuacaaagcaaaauaa

SEQ ID NO: 450907 - RNA, 24 nt, Artificial Sequence
  Synthetic
gagguagcuuacaaagcaaaauaa

SEQ ID NO: 450908 - RNA, 18 nt, Artificial Sequence
  Synthetic
uaagagagagcaaaauaa

SEQ ID NO: 450909 - RNA, 19 nt, Artificial Sequence
  Synthetic
cuaagagagagcaaaauaa

SEQ ID NO: 450910 - RNA, 20 nt, Artificial Sequence
  Synthetic
ccuaagagagagcaaaauaa

SEQ ID NO: 450911 - RNA, 21 nt, Artificial Sequence
  Synthetic
cccuaagagagagcaaaauaa

SEQ ID NO: 450912 - RNA, 22 nt, Artificial Sequence
  Synthetic
ccccuaagagagagcaaaauaa

SEQ ID NO: 450913 - RNA, 23 nt, Artificial Sequence
  Synthetic
uccccuaagagagagcaaaauaa

SEQ ID NO: 450914 - RNA, 24 nt, Artificial Sequence
  Synthetic
guccccuaagagagagcaaaauaa

SEQ ID NO: 450915 - RNA, 18 nt, Artificial Sequence
  Synthetic
aagggcaucagaaaauaa

SEQ ID NO: 450916 - RNA, 19 nt, Artificial Sequence
  Synthetic
gaagggcaucagaaaauaa

SEQ ID NO: 450917 - RNA, 20 nt, Artificial Sequence
  Synthetic
ugaagggcaucagaaaauaa

SEQ ID NO: 450918 - RNA, 21 nt, Artificial Sequence
  Synthetic
uugaagggcaucagaaaauaa

SEQ ID NO: 450919 - RNA, 22 nt, Artificial Sequence
  Synthetic
uuugaagggcaucagaaaauaa

SEQ ID NO: 450920 - RNA, 23 nt, Artificial Sequence
  Synthetic
cuuugaagggcaucagaaaauaa

SEQ ID NO: 450921 - RNA, 24 nt, Artificial Sequence
  Synthetic
acuuugaagggcaucagaaaauaa

SEQ ID NO: 450922 - RNA, 18 nt, Artificial Sequence
  Synthetic
ccacucaacggaaaauaa

SEQ ID NO: 450923 - RNA, 19 nt, Artificial Sequence
  Synthetic
cccacucaacggaaaauaa

SEQ ID NO: 450924 - RNA, 20 nt, Artificial Sequence
  Synthetic
acccacucaacggaaaauaa

SEQ ID NO: 450925 - RNA, 21 nt, Artificial Sequence
  Synthetic
uacccacucaacggaaaauaa

SEQ ID NO: 450926 - RNA, 22 nt, Artificial Sequence
  Synthetic
cuacccacucaacggaaaauaa

SEQ ID NO: 450927 - RNA, 23 nt, Artificial Sequence
  Synthetic
ccuacccacucaacggaaaauaa

SEQ ID NO: 450928 - RNA, 24 nt, Artificial Sequence
  Synthetic
uccuacccacucaacggaaaauaa

SEQ ID NO: 450929 - RNA, 18 nt, Artificial Sequence
  Synthetic
uaucauuaaugaaaauaa

SEQ ID NO: 450930 - RNA, 19 nt, Artificial Sequence
  Synthetic
uuaucauuaaugaaaauaa

SEQ ID NO: 450931 - RNA, 20 nt, Artificial Sequence
  Synthetic
cuuaucauuaaugaaaauaa

SEQ ID NO: 450932 - RNA, 21 nt, Artificial Sequence
  Synthetic
acuuaucauuaaugaaaauaa

SEQ ID NO: 450933 - RNA, 22 nt, Artificial Sequence
  Synthetic
aacuuaucauuaaugaaaauaa

SEQ ID NO: 450934 - RNA, 23 nt, Artificial Sequence
  Synthetic
uaacuuaucauuaaugaaaauaa

SEQ ID NO: 450935 - RNA, 24 nt, Artificial Sequence
  Synthetic
uuaacuuaucauuaaugaaaauaa

SEQ ID NO: 450936 - RNA, 18 nt, Artificial Sequence
  Synthetic
aaggauaacugaaaauaa

SEQ ID NO: 450937 - RNA, 19 nt, Artificial Sequence
  Synthetic
gaaggauaacugaaaauaa

SEQ ID NO: 450938 - RNA, 20 nt, Artificial Sequence
  Synthetic
ugaaggauaacugaaaauaa

SEQ ID NO: 450939 - RNA, 21 nt, Artificial Sequence
  Synthetic
cugaaggauaacugaaaauaa

SEQ ID NO: 450940 - RNA, 22 nt, Artificial Sequence
  Synthetic
ucugaaggauaacugaaaauaa

SEQ ID NO: 450941 - RNA, 23 nt, Artificial Sequence
  Synthetic
gucugaaggauaacugaaaauaa

SEQ ID NO: 450942 - RNA, 24 nt, Artificial Sequence
  Synthetic
ugucugaaggauaacugaaaauaa

SEQ ID NO: 450943 - RNA, 18 nt, Artificial Sequence
  Synthetic
uaccaucuuugaaaauaa

SEQ ID NO: 450944 - RNA, 19 nt, Artificial Sequence
  Synthetic
auaccaucuuugaaaauaa

SEQ ID NO: 450945 - RNA, 20 nt, Artificial Sequence
  Synthetic
uauaccaucuuugaaaauaa

SEQ ID NO: 450946 - RNA, 21 nt, Artificial Sequence
  Synthetic
auauaccaucuuugaaaauaa

SEQ ID NO: 450947 - RNA, 22 nt, Artificial Sequence
  Synthetic
aauauaccaucuuugaaaauaa

SEQ ID NO: 450948 - RNA, 23 nt, Artificial Sequence
  Synthetic
aaauauaccaucuuugaaaauaa

SEQ ID NO: 450949 - RNA, 24 nt, Artificial Sequence
  Synthetic
gaaauauaccaucuuugaaaauaa

SEQ ID NO: 450950 - RNA, 18 nt, Artificial Sequence
  Synthetic
ucuuuaaauauaaaauaa

SEQ ID NO: 450951 - RNA, 19 nt, Artificial Sequence
  Synthetic
aucuuuaaauauaaaauaa

SEQ ID NO: 450952 - RNA, 20 nt, Artificial Sequence
  Synthetic
uaucuuuaaauauaaaauaa

SEQ ID NO: 450953 - RNA, 21 nt, Artificial Sequence
  Synthetic
guaucuuuaaauauaaaauaa

SEQ ID NO: 450954 - RNA, 22 nt, Artificial Sequence
  Synthetic
aguaucuuuaaauauaaaauaa

SEQ ID NO: 450955 - RNA, 23 nt, Artificial Sequence
  Synthetic
caguaucuuuaaauauaaaauaa

SEQ ID NO: 450956 - RNA, 24 nt, Artificial Sequence
  Synthetic
ucaguaucuuuaaauauaaaauaa

SEQ ID NO: 450957 - RNA, 18 nt, Artificial Sequence
  Synthetic
gaaucugcauuaaaauaa

SEQ ID NO: 450958 - RNA, 19 nt, Artificial Sequence
  Synthetic
agaaucugcauuaaaauaa

SEQ ID NO: 450959 - RNA, 20 nt, Artificial Sequence
  Synthetic
uagaaucugcauuaaaauaa

SEQ ID NO: 450960 - RNA, 21 nt, Artificial Sequence
  Synthetic
guagaaucugcauuaaaauaa

SEQ ID NO: 450961 - RNA, 22 nt, Artificial Sequence
  Synthetic
uguagaaucugcauuaaaauaa

SEQ ID NO: 450962 - RNA, 23 nt, Artificial Sequence
  Synthetic
auguagaaucugcauuaaaauaa

SEQ ID NO: 450963 - RNA, 24 nt, Artificial Sequence
  Synthetic
aauguagaaucugcauuaaaauaa

SEQ ID NO: 450964 - RNA, 18 nt, Artificial Sequence
  Synthetic
uguuugugcuuaaaauaa

SEQ ID NO: 450965 - RNA, 19 nt, Artificial Sequence
  Synthetic
uuguuugugcuuaaaauaa

SEQ ID NO: 450966 - RNA, 20 nt, Artificial Sequence
  Synthetic
auuguuugugcuuaaaauaa

SEQ ID NO: 450967 - RNA, 21 nt, Artificial Sequence
  Synthetic
aauuguuugugcuuaaaauaa

SEQ ID NO: 450968 - RNA, 22 nt, Artificial Sequence
  Synthetic
aaauuguuugugcuuaaaauaa

SEQ ID NO: 450969 - RNA, 23 nt, Artificial Sequence
  Synthetic
aaaauuguuugugcuuaaaauaa

SEQ ID NO: 450970 - RNA, 24 nt, Artificial Sequence
  Synthetic
caaaauuguuugugcuuaaaauaa

SEQ ID NO: 450971 - RNA, 18 nt, Artificial Sequence
  Synthetic
uuaucaaccaacaaauaa

SEQ ID NO: 450972 - RNA, 19 nt, Artificial Sequence
  Synthetic
auuaucaaccaacaaauaa

SEQ ID NO: 450973 - RNA, 20 nt, Artificial Sequence
  Synthetic
cauuaucaaccaacaaauaa

SEQ ID NO: 450974 - RNA, 21 nt, Artificial Sequence
  Synthetic
ccauuaucaaccaacaaauaa

SEQ ID NO: 450975 - RNA, 22 nt, Artificial Sequence
  Synthetic
cccauuaucaaccaacaaauaa

SEQ ID NO: 450976 - RNA, 23 nt, Artificial Sequence
  Synthetic
gcccauuaucaaccaacaaauaa

SEQ ID NO: 450977 - RNA, 24 nt, Artificial Sequence
  Synthetic
agcccauuaucaaccaacaaauaa

SEQ ID NO: 450978 - RNA, 18 nt, Artificial Sequence
  Synthetic
uugggaaguaacaaauaa

SEQ ID NO: 450979 - RNA, 19 nt, Artificial Sequence
  Synthetic
cuugggaaguaacaaauaa

SEQ ID NO: 450980 - RNA, 20 nt, Artificial Sequence
  Synthetic
acuugggaaguaacaaauaa

SEQ ID NO: 450981 - RNA, 21 nt, Artificial Sequence
  Synthetic
cacuugggaaguaacaaauaa

SEQ ID NO: 450982 - RNA, 22 nt, Artificial Sequence
  Synthetic
ucacuugggaaguaacaaauaa

SEQ ID NO: 450983 - RNA, 23 nt, Artificial Sequence
  Synthetic
uucacuugggaaguaacaaauaa

SEQ ID NO: 450984 - RNA, 24 nt, Artificial Sequence
  Synthetic
auucacuugggaaguaacaaauaa

SEQ ID NO: 450985 - RNA, 18 nt, Artificial Sequence
  Synthetic
ugaagaugacacaaauaa

SEQ ID NO: 450986 - RNA, 19 nt, Artificial Sequence
  Synthetic
uugaagaugacacaaauaa

SEQ ID NO: 450987 - RNA, 20 nt, Artificial Sequence
  Synthetic
auugaagaugacacaaauaa

SEQ ID NO: 450988 - RNA, 21 nt, Artificial Sequence
  Synthetic
aauugaagaugacacaaauaa

SEQ ID NO: 450989 - RNA, 22 nt, Artificial Sequence
  Synthetic
aaauugaagaugacacaaauaa

SEQ ID NO: 450990 - RNA, 23 nt, Artificial Sequence
  Synthetic
gaaauugaagaugacacaaauaa

SEQ ID NO: 450991 - RNA, 24 nt, Artificial Sequence
  Synthetic
agaaauugaagaugacacaaauaa

SEQ ID NO: 450992 - RNA, 18 nt, Artificial Sequence
  Synthetic
uccucccacuccaaauaa

SEQ ID NO: 450993 - RNA, 19 nt, Artificial Sequence
  Synthetic
uuccucccacuccaaauaa

SEQ ID NO: 450994 - RNA, 20 nt, Artificial Sequence
  Synthetic
uuuccucccacuccaaauaa

SEQ ID NO: 450995 - RNA, 21 nt, Artificial Sequence
  Synthetic
auuuccucccacuccaaauaa

SEQ ID NO: 450996 - RNA, 22 nt, Artificial Sequence
  Synthetic
cauuuccucccacuccaaauaa

SEQ ID NO: 450997 - RNA, 23 nt, Artificial Sequence
  Synthetic
gcauuuccucccacuccaaauaa

SEQ ID NO: 450998 - RNA, 24 nt, Artificial Sequence
  Synthetic
ugcauuuccucccacuccaaauaa

SEQ ID NO: 450999 - RNA, 18 nt, Artificial Sequence
  Synthetic
ccugguuacuccaaauaa

SEQ ID NO: 451000 - RNA, 19 nt, Artificial Sequence
  Synthetic
cccugguuacuccaaauaa

SEQ ID NO: 451001 - RNA, 20 nt, Artificial Sequence
  Synthetic
acccugguuacuccaaauaa

SEQ ID NO: 451002 - RNA, 21 nt, Artificial Sequence
  Synthetic
aacccugguuacuccaaauaa

SEQ ID NO: 451003 - RNA, 22 nt, Artificial Sequence
  Synthetic
aaacccugguuacuccaaauaa

SEQ ID NO: 451004 - RNA, 23 nt, Artificial Sequence
  Synthetic
aaaacccugguuacuccaaauaa

SEQ ID NO: 451005 - RNA, 24 nt, Artificial Sequence
  Synthetic
uaaaacccugguuacuccaaauaa

SEQ ID NO: 451006 - RNA, 18 nt, Artificial Sequence
  Synthetic
aaagucuuaagcaaauaa

SEQ ID NO: 451007 - RNA, 19 nt, Artificial Sequence
  Synthetic
aaaagucuuaagcaaauaa

SEQ ID NO: 451008 - RNA, 20 nt, Artificial Sequence
  Synthetic
aaaaagucuuaagcaaauaa

SEQ ID NO: 451009 - RNA, 21 nt, Artificial Sequence
  Synthetic
gaaaaagucuuaagcaaauaa

SEQ ID NO: 451010 - RNA, 22 nt, Artificial Sequence
  Synthetic
ugaaaaagucuuaagcaaauaa

SEQ ID NO: 451011 - RNA, 23 nt, Artificial Sequence
  Synthetic
cugaaaaagucuuaagcaaauaa

SEQ ID NO: 451012 - RNA, 24 nt, Artificial Sequence
  Synthetic
ucugaaaaagucuuaagcaaauaa

SEQ ID NO: 451013 - RNA, 18 nt, Artificial Sequence
  Synthetic
uaacuugagagcaaauaa

SEQ ID NO: 451014 - RNA, 19 nt, Artificial Sequence
  Synthetic
uuaacuugagagcaaauaa

SEQ ID NO: 451015 - RNA, 20 nt, Artificial Sequence
  Synthetic
uuuaacuugagagcaaauaa

SEQ ID NO: 451016 - RNA, 21 nt, Artificial Sequence
  Synthetic
guuuaacuugagagcaaauaa

SEQ ID NO: 451017 - RNA, 22 nt, Artificial Sequence
  Synthetic
gguuuaacuugagagcaaauaa

SEQ ID NO: 451018 - RNA, 23 nt, Artificial Sequence
  Synthetic
ugguuuaacuugagagcaaauaa

SEQ ID NO: 451019 - RNA, 24 nt, Artificial Sequence
  Synthetic
augguuuaacuugagagcaaauaa

SEQ ID NO: 451020 - RNA, 18 nt, Artificial Sequence
  Synthetic
cauaacuugaucaaauaa

SEQ ID NO: 451021 - RNA, 19 nt, Artificial Sequence
  Synthetic
gcauaacuugaucaaauaa

SEQ ID NO: 451022 - RNA, 20 nt, Artificial Sequence
  Synthetic
ugcauaacuugaucaaauaa

SEQ ID NO: 451023 - RNA, 21 nt, Artificial Sequence
  Synthetic
uugcauaacuugaucaaauaa

SEQ ID NO: 451024 - RNA, 22 nt, Artificial Sequence
  Synthetic
guugcauaacuugaucaaauaa

SEQ ID NO: 451025 - RNA, 23 nt, Artificial Sequence
  Synthetic
cguugcauaacuugaucaaauaa

SEQ ID NO: 451026 - RNA, 24 nt, Artificial Sequence
  Synthetic
ucguugcauaacuugaucaaauaa

SEQ ID NO: 451027 - RNA, 18 nt, Artificial Sequence
  Synthetic
agaucagagcagaaauaa

SEQ ID NO: 451028 - RNA, 19 nt, Artificial Sequence
  Synthetic
aagaucagagcagaaauaa

SEQ ID NO: 451029 - RNA, 20 nt, Artificial Sequence
  Synthetic
aaagaucagagcagaaauaa

SEQ ID NO: 451030 - RNA, 21 nt, Artificial Sequence
  Synthetic
caaagaucagagcagaaauaa

SEQ ID NO: 451031 - RNA, 22 nt, Artificial Sequence
  Synthetic
acaaagaucagagcagaaauaa

SEQ ID NO: 451032 - RNA, 23 nt, Artificial Sequence
  Synthetic
aacaaagaucagagcagaaauaa

SEQ ID NO: 451033 - RNA, 24 nt, Artificial Sequence
  Synthetic
uaacaaagaucagagcagaaauaa

SEQ ID NO: 451034 - RNA, 18 nt, Artificial Sequence
  Synthetic
auggaaaaagagaaauaa

SEQ ID NO: 451035 - RNA, 19 nt, Artificial Sequence
  Synthetic
aauggaaaaagagaaauaa

SEQ ID NO: 451036 - RNA, 20 nt, Artificial Sequence
  Synthetic
aaauggaaaaagagaaauaa

SEQ ID NO: 451037 - RNA, 21 nt, Artificial Sequence
  Synthetic
aaaauggaaaaagagaaauaa

SEQ ID NO: 451038 - RNA, 22 nt, Artificial Sequence
  Synthetic
uaaaauggaaaaagagaaauaa

SEQ ID NO: 451039 - RNA, 23 nt, Artificial Sequence
  Synthetic
uuaaaauggaaaaagagaaauaa

SEQ ID NO: 451040 - RNA, 24 nt, Artificial Sequence
  Synthetic
cuuaaaauggaaaaagagaaauaa

SEQ ID NO: 451041 - RNA, 18 nt, Artificial Sequence
  Synthetic
uaagcaagggagaaauaa

SEQ ID NO: 451042 - RNA, 19 nt, Artificial Sequence
  Synthetic
auaagcaagggagaaauaa

SEQ ID NO: 451043 - RNA, 20 nt, Artificial Sequence
  Synthetic
aauaagcaagggagaaauaa

SEQ ID NO: 451044 - RNA, 21 nt, Artificial Sequence
  Synthetic
gaauaagcaagggagaaauaa

SEQ ID NO: 451045 - RNA, 22 nt, Artificial Sequence
  Synthetic
ggaauaagcaagggagaaauaa

SEQ ID NO: 451046 - RNA, 23 nt, Artificial Sequence
  Synthetic
gggaauaagcaagggagaaauaa

SEQ ID NO: 451047 - RNA, 24 nt, Artificial Sequence
  Synthetic
ggggaauaagcaagggagaaauaa

SEQ ID NO: 451048 - RNA, 18 nt, Artificial Sequence
  Synthetic
aagaucacugagaaauaa

SEQ ID NO: 451049 - RNA, 19 nt, Artificial Sequence
  Synthetic
gaagaucacugagaaauaa

SEQ ID NO: 451050 - RNA, 20 nt, Artificial Sequence
  Synthetic
ugaagaucacugagaaauaa

SEQ ID NO: 451051 - RNA, 21 nt, Artificial Sequence
  Synthetic
augaagaucacugagaaauaa

SEQ ID NO: 451052 - RNA, 22 nt, Artificial Sequence
  Synthetic
uaugaagaucacugagaaauaa

SEQ ID NO: 451053 - RNA, 23 nt, Artificial Sequence
  Synthetic
uuaugaagaucacugagaaauaa

SEQ ID NO: 451054 - RNA, 24 nt, Artificial Sequence
  Synthetic
guuaugaagaucacugagaaauaa

SEQ ID NO: 451055 - RNA, 18 nt, Artificial Sequence
  Synthetic
aaaaauuacuagaaauaa

SEQ ID NO: 451056 - RNA, 19 nt, Artificial Sequence
  Synthetic
uaaaaauuacuagaaauaa

SEQ ID NO: 451057 - RNA, 20 nt, Artificial Sequence
  Synthetic
guaaaaauuacuagaaauaa

SEQ ID NO: 451058 - RNA, 21 nt, Artificial Sequence
  Synthetic
gguaaaaauuacuagaaauaa

SEQ ID NO: 451059 - RNA, 22 nt, Artificial Sequence
  Synthetic
agguaaaaauuacuagaaauaa

SEQ ID NO: 451060 - RNA, 23 nt, Artificial Sequence
  Synthetic
aagguaaaaauuacuagaaauaa

SEQ ID NO: 451061 - RNA, 24 nt, Artificial Sequence
  Synthetic
uaagguaaaaauuacuagaaauaa

SEQ ID NO: 451062 - RNA, 18 nt, Artificial Sequence
  Synthetic
aaaagaaauaggaaauaa

SEQ ID NO: 451063 - RNA, 19 nt, Artificial Sequence
  Synthetic
aaaaagaaauaggaaauaa

SEQ ID NO: 451064 - RNA, 20 nt, Artificial Sequence
  Synthetic
gaaaaagaaauaggaaauaa

SEQ ID NO: 451065 - RNA, 21 nt, Artificial Sequence
  Synthetic
agaaaaagaaauaggaaauaa

SEQ ID NO: 451066 - RNA, 22 nt, Artificial Sequence
  Synthetic
aagaaaaagaaauaggaaauaa

SEQ ID NO: 451067 - RNA, 23 nt, Artificial Sequence
  Synthetic
aaagaaaaagaaauaggaaauaa

SEQ ID NO: 451068 - RNA, 24 nt, Artificial Sequence
  Synthetic
aaaagaaaaagaaauaggaaauaa

SEQ ID NO: 451069 - RNA, 18 nt, Artificial Sequence
  Synthetic
ugcuuaagagggaaauaa

SEQ ID NO: 451070 - RNA, 19 nt, Artificial Sequence
  Synthetic
uugcuuaagagggaaauaa

SEQ ID NO: 451071 - RNA, 20 nt, Artificial Sequence
  Synthetic
auugcuuaagagggaaauaa

SEQ ID NO: 451072 - RNA, 21 nt, Artificial Sequence
  Synthetic
cauugcuuaagagggaaauaa

SEQ ID NO: 451073 - RNA, 22 nt, Artificial Sequence
  Synthetic
acauugcuuaagagggaaauaa

SEQ ID NO: 451074 - RNA, 23 nt, Artificial Sequence
  Synthetic
aacauugcuuaagagggaaauaa

SEQ ID NO: 451075 - RNA, 24 nt, Artificial Sequence
  Synthetic
gaacauugcuuaagagggaaauaa

SEQ ID NO: 451076 - RNA, 18 nt, Artificial Sequence
  Synthetic
cguauuguagggaaauaa

SEQ ID NO: 451077 - RNA, 19 nt, Artificial Sequence
  Synthetic
acguauuguagggaaauaa

SEQ ID NO: 451078 - RNA, 20 nt, Artificial Sequence
  Synthetic
gacguauuguagggaaauaa

SEQ ID NO: 451079 - RNA, 21 nt, Artificial Sequence
  Synthetic
agacguauuguagggaaauaa

SEQ ID NO: 451080 - RNA, 22 nt, Artificial Sequence
  Synthetic
cagacguauuguagggaaauaa

SEQ ID NO: 451081 - RNA, 23 nt, Artificial Sequence
  Synthetic
acagacguauuguagggaaauaa

SEQ ID NO: 451082 - RNA, 24 nt, Artificial Sequence
  Synthetic
gacagacguauuguagggaaauaa

SEQ ID NO: 451083 - RNA, 18 nt, Artificial Sequence
  Synthetic
aaaugaaaauggaaauaa

SEQ ID NO: 451084 - RNA, 19 nt, Artificial Sequence
  Synthetic
caaaugaaaauggaaauaa

SEQ ID NO: 451085 - RNA, 20 nt, Artificial Sequence
  Synthetic
ucaaaugaaaauggaaauaa

SEQ ID NO: 451086 - RNA, 21 nt, Artificial Sequence
  Synthetic
cucaaaugaaaauggaaauaa

SEQ ID NO: 451087 - RNA, 22 nt, Artificial Sequence
  Synthetic
ucucaaaugaaaauggaaauaa

SEQ ID NO: 451088 - RNA, 23 nt, Artificial Sequence
  Synthetic
uucucaaaugaaaauggaaauaa

SEQ ID NO: 451089 - RNA, 24 nt, Artificial Sequence
  Synthetic
cuucucaaaugaaaauggaaauaa

SEQ ID NO: 451090 - RNA, 18 nt, Artificial Sequence
  Synthetic
aguucuaaguggaaauaa

SEQ ID NO: 451091 - RNA, 19 nt, Artificial Sequence
  Synthetic
caguucuaaguggaaauaa

SEQ ID NO: 451092 - RNA, 20 nt, Artificial Sequence
  Synthetic
acaguucuaaguggaaauaa

SEQ ID NO: 451093 - RNA, 21 nt, Artificial Sequence
  Synthetic
gacaguucuaaguggaaauaa

SEQ ID NO: 451094 - RNA, 22 nt, Artificial Sequence
  Synthetic
agacaguucuaaguggaaauaa

SEQ ID NO: 451095 - RNA, 23 nt, Artificial Sequence
  Synthetic
gagacaguucuaaguggaaauaa

SEQ ID NO: 451096 - RNA, 24 nt, Artificial Sequence
  Synthetic
agagacaguucuaaguggaaauaa

SEQ ID NO: 451097 - RNA, 18 nt, Artificial Sequence
  Synthetic
gacucucuagugaaauaa

SEQ ID NO: 451098 - RNA, 19 nt, Artificial Sequence
  Synthetic
agacucucuagugaaauaa

SEQ ID NO: 451099 - RNA, 20 nt, Artificial Sequence
  Synthetic
gagacucucuagugaaauaa

SEQ ID NO: 451100 - RNA, 21 nt, Artificial Sequence
  Synthetic
agagacucucuagugaaauaa

SEQ ID NO: 451101 - RNA, 22 nt, Artificial Sequence
  Synthetic
aagagacucucuagugaaauaa

SEQ ID NO: 451102 - RNA, 23 nt, Artificial Sequence
  Synthetic
aaagagacucucuagugaaauaa

SEQ ID NO: 451103 - RNA, 24 nt, Artificial Sequence
  Synthetic
gaaagagacucucuagugaaauaa

SEQ ID NO: 451104 - RNA, 18 nt, Artificial Sequence
  Synthetic
caaaguaacuugaaauaa

SEQ ID NO: 451105 - RNA, 19 nt, Artificial Sequence
  Synthetic
ucaaaguaacuugaaauaa

SEQ ID NO: 451106 - RNA, 20 nt, Artificial Sequence
  Synthetic
aucaaaguaacuugaaauaa

SEQ ID NO: 451107 - RNA, 21 nt, Artificial Sequence
  Synthetic
gaucaaaguaacuugaaauaa

SEQ ID NO: 451108 - RNA, 22 nt, Artificial Sequence
  Synthetic
ggaucaaaguaacuugaaauaa

SEQ ID NO: 451109 - RNA, 23 nt, Artificial Sequence
  Synthetic
gggaucaaaguaacuugaaauaa

SEQ ID NO: 451110 - RNA, 24 nt, Artificial Sequence
  Synthetic
ugggaucaaaguaacuugaaauaa

SEQ ID NO: 451111 - RNA, 18 nt, Artificial Sequence
  Synthetic
gaaaaaauaaauaaauaa

SEQ ID NO: 451112 - RNA, 19 nt, Artificial Sequence
  Synthetic
agaaaaaauaaauaaauaa

SEQ ID NO: 451113 - RNA, 20 nt, Artificial Sequence
  Synthetic
uagaaaaaauaaauaaauaa

SEQ ID NO: 451114 - RNA, 21 nt, Artificial Sequence
  Synthetic
uuagaaaaaauaaauaaauaa

SEQ ID NO: 451115 - RNA, 22 nt, Artificial Sequence
  Synthetic
auuagaaaaaauaaauaaauaa

SEQ ID NO: 451116 - RNA, 23 nt, Artificial Sequence
  Synthetic
cauuagaaaaaauaaauaaauaa

SEQ ID NO: 451117 - RNA, 24 nt, Artificial Sequence
  Synthetic
ucauuagaaaaaauaaauaaauaa

SEQ ID NO: 451118 - RNA, 18 nt, Artificial Sequence
  Synthetic
cucaacaucaauaaauaa

SEQ ID NO: 451119 - RNA, 19 nt, Artificial Sequence
  Synthetic
gcucaacaucaauaaauaa

SEQ ID NO: 451120 - RNA, 20 nt, Artificial Sequence
  Synthetic
agcucaacaucaauaaauaa

SEQ ID NO: 451121 - RNA, 21 nt, Artificial Sequence
  Synthetic
aagcucaacaucaauaaauaa

SEQ ID NO: 451122 - RNA, 22 nt, Artificial Sequence
  Synthetic
aaagcucaacaucaauaaauaa

SEQ ID NO: 451123 - RNA, 23 nt, Artificial Sequence
  Synthetic
gaaagcucaacaucaauaaauaa

SEQ ID NO: 451124 - RNA, 24 nt, Artificial Sequence
  Synthetic
ugaaagcucaacaucaauaaauaa

SEQ ID NO: 451125 - RNA, 18 nt, Artificial Sequence
  Synthetic
ccuccaaaauauaaauaa

SEQ ID NO: 451126 - RNA, 19 nt, Artificial Sequence
  Synthetic
cccuccaaaauauaaauaa

SEQ ID NO: 451127 - RNA, 20 nt, Artificial Sequence
  Synthetic
acccuccaaaauauaaauaa

SEQ ID NO: 451128 - RNA, 21 nt, Artificial Sequence
  Synthetic
cacccuccaaaauauaaauaa

SEQ ID NO: 451129 - RNA, 22 nt, Artificial Sequence
  Synthetic
ucacccuccaaaauauaaauaa

SEQ ID NO: 451130 - RNA, 23 nt, Artificial Sequence
  Synthetic
gucacccuccaaaauauaaauaa

SEQ ID NO: 451131 - RNA, 24 nt, Artificial Sequence
  Synthetic
ugucacccuccaaaauauaaauaa

SEQ ID NO: 451132 - RNA, 18 nt, Artificial Sequence
  Synthetic
cauagaguuccuaaauaa

SEQ ID NO: 451133 - RNA, 19 nt, Artificial Sequence
  Synthetic
acauagaguuccuaaauaa

SEQ ID NO: 451134 - RNA, 20 nt, Artificial Sequence
  Synthetic
gacauagaguuccuaaauaa

SEQ ID NO: 451135 - RNA, 21 nt, Artificial Sequence
  Synthetic
ugacauagaguuccuaaauaa

SEQ ID NO: 451136 - RNA, 22 nt, Artificial Sequence
  Synthetic
cugacauagaguuccuaaauaa

SEQ ID NO: 451137 - RNA, 23 nt, Artificial Sequence
  Synthetic
ccugacauagaguuccuaaauaa

SEQ ID NO: 451138 - RNA, 24 nt, Artificial Sequence
  Synthetic
accugacauagaguuccuaaauaa

SEQ ID NO: 451139 - RNA, 18 nt, Artificial Sequence
  Synthetic
ccaucauaagcuaaauaa

SEQ ID NO: 451140 - RNA, 19 nt, Artificial Sequence
  Synthetic
gccaucauaagcuaaauaa

SEQ ID NO: 451141 - RNA, 20 nt, Artificial Sequence
  Synthetic
ugccaucauaagcuaaauaa

SEQ ID NO: 451142 - RNA, 21 nt, Artificial Sequence
  Synthetic
uugccaucauaagcuaaauaa

SEQ ID NO: 451143 - RNA, 22 nt, Artificial Sequence
  Synthetic
uuugccaucauaagcuaaauaa

SEQ ID NO: 451144 - RNA, 23 nt, Artificial Sequence
  Synthetic
uuuugccaucauaagcuaaauaa

SEQ ID NO: 451145 - RNA, 24 nt, Artificial Sequence
  Synthetic
uuuuugccaucauaagcuaaauaa

SEQ ID NO: 451146 - RNA, 18 nt, Artificial Sequence
  Synthetic
agugagaccucuaaauaa

SEQ ID NO: 451147 - RNA, 19 nt, Artificial Sequence
  Synthetic
gagugagaccucuaaauaa

SEQ ID NO: 451148 - RNA, 20 nt, Artificial Sequence
  Synthetic
ugagugagaccucuaaauaa

SEQ ID NO: 451149 - RNA, 21 nt, Artificial Sequence
  Synthetic
uugagugagaccucuaaauaa

SEQ ID NO: 451150 - RNA, 22 nt, Artificial Sequence
  Synthetic
uuugagugagaccucuaaauaa

SEQ ID NO: 451151 - RNA, 23 nt, Artificial Sequence
  Synthetic
auuugagugagaccucuaaauaa

SEQ ID NO: 451152 - RNA, 24 nt, Artificial Sequence
  Synthetic
cauuugagugagaccucuaaauaa

SEQ ID NO: 451153 - RNA, 18 nt, Artificial Sequence
  Synthetic
uucuuuuuuucuaaauaa

SEQ ID NO: 451154 - RNA, 19 nt, Artificial Sequence
  Synthetic
auucuuuuuuucuaaauaa

SEQ ID NO: 451155 - RNA, 20 nt, Artificial Sequence
  Synthetic
cauucuuuuuuucuaaauaa

SEQ ID NO: 451156 - RNA, 21 nt, Artificial Sequence
  Synthetic
ccauucuuuuuuucuaaauaa

SEQ ID NO: 451157 - RNA, 22 nt, Artificial Sequence
  Synthetic
accauucuuuuuuucuaaauaa

SEQ ID NO: 451158 - RNA, 23 nt, Artificial Sequence
  Synthetic
caccauucuuuuuuucuaaauaa

SEQ ID NO: 451159 - RNA, 24 nt, Artificial Sequence
  Synthetic
ucaccauucuuuuuuucuaaauaa

SEQ ID NO: 451160 - RNA, 18 nt, Artificial Sequence
  Synthetic
ucagaaauuuguaaauaa

SEQ ID NO: 451161 - RNA, 19 nt, Artificial Sequence
  Synthetic
aucagaaauuuguaaauaa

SEQ ID NO: 451162 - RNA, 20 nt, Artificial Sequence
  Synthetic
caucagaaauuuguaaauaa

SEQ ID NO: 451163 - RNA, 21 nt, Artificial Sequence
  Synthetic
ucaucagaaauuuguaaauaa

SEQ ID NO: 451164 - RNA, 22 nt, Artificial Sequence
  Synthetic
aucaucagaaauuuguaaauaa

SEQ ID NO: 451165 - RNA, 23 nt, Artificial Sequence
  Synthetic
caucaucagaaauuuguaaauaa

SEQ ID NO: 451166 - RNA, 24 nt, Artificial Sequence
  Synthetic
ucaucaucagaaauuuguaaauaa

SEQ ID NO: 451167 - RNA, 18 nt, Artificial Sequence
  Synthetic
uuaaagucaauuaaauaa

SEQ ID NO: 451168 - RNA, 19 nt, Artificial Sequence
  Synthetic
auuaaagucaauuaaauaa

SEQ ID NO: 451169 - RNA, 20 nt, Artificial Sequence
  Synthetic
aauuaaagucaauuaaauaa

SEQ ID NO: 451170 - RNA, 21 nt, Artificial Sequence
  Synthetic
caauuaaagucaauuaaauaa

SEQ ID NO: 451171 - RNA, 22 nt, Artificial Sequence
  Synthetic
acaauuaaagucaauuaaauaa

SEQ ID NO: 451172 - RNA, 23 nt, Artificial Sequence
  Synthetic
aacaauuaaagucaauuaaauaa

SEQ ID NO: 451173 - RNA, 24 nt, Artificial Sequence
  Synthetic
uaacaauuaaagucaauuaaauaa

SEQ ID NO: 451174 - RNA, 18 nt, Artificial Sequence
  Synthetic
ugcauguccuuuaaauaa

SEQ ID NO: 451175 - RNA, 19 nt, Artificial Sequence
  Synthetic
augcauguccuuuaaauaa

SEQ ID NO: 451176 - RNA, 20 nt, Artificial Sequence
  Synthetic
uaugcauguccuuuaaauaa

SEQ ID NO: 451177 - RNA, 21 nt, Artificial Sequence
  Synthetic
uuaugcauguccuuuaaauaa

SEQ ID NO: 451178 - RNA, 22 nt, Artificial Sequence
  Synthetic
auuaugcauguccuuuaaauaa

SEQ ID NO: 451179 - RNA, 23 nt, Artificial Sequence
  Synthetic
aauuaugcauguccuuuaaauaa

SEQ ID NO: 451180 - RNA, 24 nt, Artificial Sequence
  Synthetic
aaauuaugcauguccuuuaaauaa

SEQ ID NO: 451181 - RNA, 18 nt, Artificial Sequence
  Synthetic
ugaagcuuguuuaaauaa

SEQ ID NO: 451182 - RNA, 19 nt, Artificial Sequence
  Synthetic
augaagcuuguuuaaauaa

SEQ ID NO: 451183 - RNA, 20 nt, Artificial Sequence
  Synthetic
aaugaagcuuguuuaaauaa

SEQ ID NO: 451184 - RNA, 21 nt, Artificial Sequence
  Synthetic
aaaugaagcuuguuuaaauaa

SEQ ID NO: 451185 - RNA, 22 nt, Artificial Sequence
  Synthetic
aaaaugaagcuuguuuaaauaa

SEQ ID NO: 451186 - RNA, 23 nt, Artificial Sequence
  Synthetic
aaaaaugaagcuuguuuaaauaa

SEQ ID NO: 451187 - RNA, 24 nt, Artificial Sequence
  Synthetic
aaaaaaugaagcuuguuuaaauaa

SEQ ID NO: 451188 - RNA, 18 nt, Artificial Sequence
  Synthetic
auaauuauuuuuaaauaa

SEQ ID NO: 451189 - RNA, 19 nt, Artificial Sequence
  Synthetic
aauaauuauuuuuaaauaa

SEQ ID NO: 451190 - RNA, 20 nt, Artificial Sequence
  Synthetic
gaauaauuauuuuuaaauaa

SEQ ID NO: 451191 - RNA, 21 nt, Artificial Sequence
  Synthetic
ugaauaauuauuuuuaaauaa

SEQ ID NO: 451192 - RNA, 22 nt, Artificial Sequence
  Synthetic
cugaauaauuauuuuuaaauaa

SEQ ID NO: 451193 - RNA, 23 nt, Artificial Sequence
  Synthetic
ucugaauaauuauuuuuaaauaa

SEQ ID NO: 451194 - RNA, 24 nt, Artificial Sequence
  Synthetic
cucugaauaauuauuuuuaaauaa

SEQ ID NO: 451195 - RNA, 18 nt, Artificial Sequence
  Synthetic
gugggaaguaaacaauaa

SEQ ID NO: 451196 - RNA, 19 nt, Artificial Sequence
  Synthetic
agugggaaguaaacaauaa

SEQ ID NO: 451197 - RNA, 20 nt, Artificial Sequence
  Synthetic
cagugggaaguaaacaauaa

SEQ ID NO: 451198 - RNA, 21 nt, Artificial Sequence
  Synthetic
ccagugggaaguaaacaauaa

SEQ ID NO: 451199 - RNA, 22 nt, Artificial Sequence
  Synthetic
uccagugggaaguaaacaauaa

SEQ ID NO: 451200 - RNA, 23 nt, Artificial Sequence
  Synthetic
uuccagugggaaguaaacaauaa

SEQ ID NO: 451201 - RNA, 24 nt, Artificial Sequence
  Synthetic
cuuccagugggaaguaaacaauaa

SEQ ID NO: 451202 - RNA, 18 nt, Artificial Sequence
  Synthetic
uuuuaacaauaacaauaa

SEQ ID NO: 451203 - RNA, 19 nt, Artificial Sequence
  Synthetic
guuuuaacaauaacaauaa

SEQ ID NO: 451204 - RNA, 20 nt, Artificial Sequence
  Synthetic
aguuuuaacaauaacaauaa

SEQ ID NO: 451205 - RNA, 21 nt, Artificial Sequence
  Synthetic
aaguuuuaacaauaacaauaa

SEQ ID NO: 451206 - RNA, 22 nt, Artificial Sequence
  Synthetic
aaaguuuuaacaauaacaauaa

SEQ ID NO: 451207 - RNA, 23 nt, Artificial Sequence
  Synthetic
aaaaguuuuaacaauaacaauaa

SEQ ID NO: 451208 - RNA, 24 nt, Artificial Sequence
  Synthetic
uaaaaguuuuaacaauaacaauaa

SEQ ID NO: 451209 - RNA, 18 nt, Artificial Sequence
  Synthetic
ggucauauguaacaauaa

SEQ ID NO: 451210 - RNA, 19 nt, Artificial Sequence
  Synthetic
uggucauauguaacaauaa

SEQ ID NO: 451211 - RNA, 20 nt, Artificial Sequence
  Synthetic
auggucauauguaacaauaa

SEQ ID NO: 451212 - RNA, 21 nt, Artificial Sequence
  Synthetic
uauggucauauguaacaauaa

SEQ ID NO: 451213 - RNA, 22 nt, Artificial Sequence
  Synthetic
auauggucauauguaacaauaa

SEQ ID NO: 451214 - RNA, 23 nt, Artificial Sequence
  Synthetic
gauauggucauauguaacaauaa

SEQ ID NO: 451215 - RNA, 24 nt, Artificial Sequence
  Synthetic
agauauggucauauguaacaauaa

SEQ ID NO: 451216 - RNA, 18 nt, Artificial Sequence
  Synthetic
cacgcaguuacccaauaa

SEQ ID NO: 451217 - RNA, 19 nt, Artificial Sequence
  Synthetic
acacgcaguuacccaauaa

SEQ ID NO: 451218 - RNA, 20 nt, Artificial Sequence
  Synthetic
cacacgcaguuacccaauaa

SEQ ID NO: 451219 - RNA, 21 nt, Artificial Sequence
  Synthetic
gcacacgcaguuacccaauaa

SEQ ID NO: 451220 - RNA, 22 nt, Artificial Sequence
  Synthetic
cgcacacgcaguuacccaauaa

SEQ ID NO: 451221 - RNA, 23 nt, Artificial Sequence
  Synthetic
ucgcacacgcaguuacccaauaa

SEQ ID NO: 451222 - RNA, 24 nt, Artificial Sequence
  Synthetic
cucgcacacgcaguuacccaauaa

SEQ ID NO: 451223 - RNA, 18 nt, Artificial Sequence
  Synthetic
agucccaaugcccaauaa

SEQ ID NO: 451224 - RNA, 19 nt, Artificial Sequence
  Synthetic
cagucccaaugcccaauaa

SEQ ID NO: 451225 - RNA, 20 nt, Artificial Sequence
  Synthetic
gcagucccaaugcccaauaa

SEQ ID NO: 451226 - RNA, 21 nt, Artificial Sequence
  Synthetic
agcagucccaaugcccaauaa

SEQ ID NO: 451227 - RNA, 22 nt, Artificial Sequence
  Synthetic
aagcagucccaaugcccaauaa

SEQ ID NO: 451228 - RNA, 23 nt, Artificial Sequence
  Synthetic
gaagcagucccaaugcccaauaa

SEQ ID NO: 451229 - RNA, 24 nt, Artificial Sequence
  Synthetic
ggaagcagucccaaugcccaauaa

SEQ ID NO: 451230 - RNA, 18 nt, Artificial Sequence
  Synthetic
ugcuuaguauuccaauaa

SEQ ID NO: 451231 - RNA, 19 nt, Artificial Sequence
  Synthetic
augcuuaguauuccaauaa

SEQ ID NO: 451232 - RNA, 20 nt, Artificial Sequence
  Synthetic
caugcuuaguauuccaauaa

SEQ ID NO: 451233 - RNA, 21 nt, Artificial Sequence
  Synthetic
acaugcuuaguauuccaauaa

SEQ ID NO: 451234 - RNA, 22 nt, Artificial Sequence
  Synthetic
cacaugcuuaguauuccaauaa

SEQ ID NO: 451235 - RNA, 23 nt, Artificial Sequence
  Synthetic
ccacaugcuuaguauuccaauaa

SEQ ID NO: 451236 - RNA, 24 nt, Artificial Sequence
  Synthetic
cccacaugcuuaguauuccaauaa

SEQ ID NO: 451237 - RNA, 18 nt, Artificial Sequence
  Synthetic
agaagagaaaagcaauaa

SEQ ID NO: 451238 - RNA, 19 nt, Artificial Sequence
  Synthetic
aagaagagaaaagcaauaa

SEQ ID NO: 451239 - RNA, 20 nt, Artificial Sequence
  Synthetic
uaagaagagaaaagcaauaa

SEQ ID NO: 451240 - RNA, 21 nt, Artificial Sequence
  Synthetic
uuaagaagagaaaagcaauaa

SEQ ID NO: 451241 - RNA, 22 nt, Artificial Sequence
  Synthetic
guuaagaagagaaaagcaauaa

SEQ ID NO: 451242 - RNA, 23 nt, Artificial Sequence
  Synthetic
gguuaagaagagaaaagcaauaa

SEQ ID NO: 451243 - RNA, 24 nt, Artificial Sequence
  Synthetic
agguuaagaagagaaaagcaauaa

SEQ ID NO: 451244 - RNA, 18 nt, Artificial Sequence
  Synthetic
gacaaagcaaggcaauaa

SEQ ID NO: 451245 - RNA, 19 nt, Artificial Sequence
  Synthetic
agacaaagcaaggcaauaa

SEQ ID NO: 451246 - RNA, 20 nt, Artificial Sequence
  Synthetic
gagacaaagcaaggcaauaa

SEQ ID NO: 451247 - RNA, 21 nt, Artificial Sequence
  Synthetic
agagacaaagcaaggcaauaa

SEQ ID NO: 451248 - RNA, 22 nt, Artificial Sequence
  Synthetic
aagagacaaagcaaggcaauaa

SEQ ID NO: 451249 - RNA, 23 nt, Artificial Sequence
  Synthetic
uaagagacaaagcaaggcaauaa

SEQ ID NO: 451250 - RNA, 24 nt, Artificial Sequence
  Synthetic
uuaagagacaaagcaaggcaauaa

SEQ ID NO: 451251 - RNA, 18 nt, Artificial Sequence
  Synthetic
aauuuuaacaugcaauaa

SEQ ID NO: 451252 - RNA, 19 nt, Artificial Sequence
  Synthetic
uaauuuuaacaugcaauaa

SEQ ID NO: 451253 - RNA, 20 nt, Artificial Sequence
  Synthetic
auaauuuuaacaugcaauaa

SEQ ID NO: 451254 - RNA, 21 nt, Artificial Sequence
  Synthetic
cauaauuuuaacaugcaauaa

SEQ ID NO: 451255 - RNA, 22 nt, Artificial Sequence
  Synthetic
ccauaauuuuaacaugcaauaa

SEQ ID NO: 451256 - RNA, 23 nt, Artificial Sequence
  Synthetic
accauaauuuuaacaugcaauaa

SEQ ID NO: 451257 - RNA, 24 nt, Artificial Sequence
  Synthetic
aaccauaauuuuaacaugcaauaa

SEQ ID NO: 451258 - RNA, 18 nt, Artificial Sequence
  Synthetic
cuuuggguacugcaauaa

SEQ ID NO: 451259 - RNA, 19 nt, Artificial Sequence
  Synthetic
acuuuggguacugcaauaa

SEQ ID NO: 451260 - RNA, 20 nt, Artificial Sequence
  Synthetic
cacuuuggguacugcaauaa

SEQ ID NO: 451261 - RNA, 21 nt, Artificial Sequence
  Synthetic
ucacuuuggguacugcaauaa

SEQ ID NO: 451262 - RNA, 22 nt, Artificial Sequence
  Synthetic
uucacuuuggguacugcaauaa

SEQ ID NO: 451263 - RNA, 23 nt, Artificial Sequence
  Synthetic
auucacuuuggguacugcaauaa

SEQ ID NO: 451264 - RNA, 24 nt, Artificial Sequence
  Synthetic
aauucacuuuggguacugcaauaa

SEQ ID NO: 451265 - RNA, 18 nt, Artificial Sequence
  Synthetic
cuaaauguccaucaauaa

SEQ ID NO: 451266 - RNA, 19 nt, Artificial Sequence
  Synthetic
ccuaaauguccaucaauaa

SEQ ID NO: 451267 - RNA, 20 nt, Artificial Sequence
  Synthetic
accuaaauguccaucaauaa

SEQ ID NO: 451268 - RNA, 21 nt, Artificial Sequence
  Synthetic
aaccuaaauguccaucaauaa

SEQ ID NO: 451269 - RNA, 22 nt, Artificial Sequence
  Synthetic
caaccuaaauguccaucaauaa

SEQ ID NO: 451270 - RNA, 23 nt, Artificial Sequence
  Synthetic
ucaaccuaaauguccaucaauaa

SEQ ID NO: 451271 - RNA, 24 nt, Artificial Sequence
  Synthetic
aucaaccuaaauguccaucaauaa

SEQ ID NO: 451272 - RNA, 18 nt, Artificial Sequence
  Synthetic
ugaaugcuugcucaauaa

SEQ ID NO: 451273 - RNA, 19 nt, Artificial Sequence
  Synthetic
uugaaugcuugcucaauaa

SEQ ID NO: 451274 - RNA, 20 nt, Artificial Sequence
  Synthetic
uuugaaugcuugcucaauaa

SEQ ID NO: 451275 - RNA, 21 nt, Artificial Sequence
  Synthetic
auuugaaugcuugcucaauaa

SEQ ID NO: 451276 - RNA, 22 nt, Artificial Sequence
  Synthetic
gauuugaaugcuugcucaauaa

SEQ ID NO: 451277 - RNA, 23 nt, Artificial Sequence
  Synthetic
ggauuugaaugcuugcucaauaa

SEQ ID NO: 451278 - RNA, 24 nt, Artificial Sequence
  Synthetic
gggauuugaaugcuugcucaauaa

SEQ ID NO: 451279 - RNA, 18 nt, Artificial Sequence
  Synthetic
gguuucacuuuucaauaa

SEQ ID NO: 451280 - RNA, 19 nt, Artificial Sequence
  Synthetic
agguuucacuuuucaauaa

SEQ ID NO: 451281 - RNA, 20 nt, Artificial Sequence
  Synthetic
cagguuucacuuuucaauaa

SEQ ID NO: 451282 - RNA, 21 nt, Artificial Sequence
  Synthetic
gcagguuucacuuuucaauaa

SEQ ID NO: 451283 - RNA, 22 nt, Artificial Sequence
  Synthetic
agcagguuucacuuuucaauaa

SEQ ID NO: 451284 - RNA, 23 nt, Artificial Sequence
  Synthetic
uagcagguuucacuuuucaauaa

SEQ ID NO: 451285 - RNA, 24 nt, Artificial Sequence
  Synthetic
guagcagguuucacuuuucaauaa

SEQ ID NO: 451286 - RNA, 18 nt, Artificial Sequence
  Synthetic
ucuauuuuuuuucaauaa

SEQ ID NO: 451287 - RNA, 19 nt, Artificial Sequence
  Synthetic
gucuauuuuuuuucaauaa

SEQ ID NO: 451288 - RNA, 20 nt, Artificial Sequence
  Synthetic
ugucuauuuuuuuucaauaa

SEQ ID NO: 451289 - RNA, 21 nt, Artificial Sequence
  Synthetic
augucuauuuuuuuucaauaa

SEQ ID NO: 451290 - RNA, 22 nt, Artificial Sequence
  Synthetic
uaugucuauuuuuuuucaauaa

SEQ ID NO: 451291 - RNA, 23 nt, Artificial Sequence
  Synthetic
auaugucuauuuuuuuucaauaa

SEQ ID NO: 451292 - RNA, 24 nt, Artificial Sequence
  Synthetic
uauaugucuauuuuuuuucaauaa

SEQ ID NO: 451293 - RNA, 18 nt, Artificial Sequence
  Synthetic
aaaguaacacaagaauaa

SEQ ID NO: 451294 - RNA, 19 nt, Artificial Sequence
  Synthetic
uaaaguaacacaagaauaa

SEQ ID NO: 451295 - RNA, 20 nt, Artificial Sequence
  Synthetic
guaaaguaacacaagaauaa

SEQ ID NO: 451296 - RNA, 21 nt, Artificial Sequence
  Synthetic
aguaaaguaacacaagaauaa

SEQ ID NO: 451297 - RNA, 22 nt, Artificial Sequence
  Synthetic
aaguaaaguaacacaagaauaa

SEQ ID NO: 451298 - RNA, 23 nt, Artificial Sequence
  Synthetic
aaaguaaaguaacacaagaauaa

SEQ ID NO: 451299 - RNA, 24 nt, Artificial Sequence
  Synthetic
uaaaguaaaguaacacaagaauaa

SEQ ID NO: 451300 - RNA, 18 nt, Artificial Sequence
  Synthetic
auuguauguucagaauaa

SEQ ID NO: 451301 - RNA, 19 nt, Artificial Sequence
  Synthetic
cauuguauguucagaauaa

SEQ ID NO: 451302 - RNA, 20 nt, Artificial Sequence
  Synthetic
ucauuguauguucagaauaa

SEQ ID NO: 451303 - RNA, 21 nt, Artificial Sequence
  Synthetic
cucauuguauguucagaauaa

SEQ ID NO: 451304 - RNA, 22 nt, Artificial Sequence
  Synthetic
ucucauuguauguucagaauaa

SEQ ID NO: 451305 - RNA, 23 nt, Artificial Sequence
  Synthetic
uucucauuguauguucagaauaa

SEQ ID NO: 451306 - RNA, 24 nt, Artificial Sequence
  Synthetic
cuucucauuguauguucagaauaa

SEQ ID NO: 451307 - RNA, 18 nt, Artificial Sequence
  Synthetic
ugcuuucacagagaauaa

SEQ ID NO: 451308 - RNA, 19 nt, Artificial Sequence
  Synthetic
augcuuucacagagaauaa

SEQ ID NO: 451309 - RNA, 20 nt, Artificial Sequence
  Synthetic
gaugcuuucacagagaauaa

SEQ ID NO: 451310 - RNA, 21 nt, Artificial Sequence
  Synthetic
ggaugcuuucacagagaauaa

SEQ ID NO: 451311 - RNA, 22 nt, Artificial Sequence
  Synthetic
gggaugcuuucacagagaauaa

SEQ ID NO: 451312 - RNA, 23 nt, Artificial Sequence
  Synthetic
cgggaugcuuucacagagaauaa

SEQ ID NO: 451313 - RNA, 24 nt, Artificial Sequence
  Synthetic
acgggaugcuuucacagagaauaa

SEQ ID NO: 451314 - RNA, 18 nt, Artificial Sequence
  Synthetic
ucaaaauuuggagaauaa

SEQ ID NO: 451315 - RNA, 19 nt, Artificial Sequence
  Synthetic
aucaaaauuuggagaauaa

SEQ ID NO: 451316 - RNA, 20 nt, Artificial Sequence
  Synthetic
aaucaaaauuuggagaauaa

SEQ ID NO: 451317 - RNA, 21 nt, Artificial Sequence
  Synthetic
gaaucaaaauuuggagaauaa

SEQ ID NO: 451318 - RNA, 22 nt, Artificial Sequence
  Synthetic
ugaaucaaaauuuggagaauaa

SEQ ID NO: 451319 - RNA, 23 nt, Artificial Sequence
  Synthetic
augaaucaaaauuuggagaauaa

SEQ ID NO: 451320 - RNA, 24 nt, Artificial Sequence
  Synthetic
uaugaaucaaaauuuggagaauaa

SEQ ID NO: 451321 - RNA, 18 nt, Artificial Sequence
  Synthetic
guaucaauaugagaauaa

SEQ ID NO: 451322 - RNA, 19 nt, Artificial Sequence
  Synthetic
aguaucaauaugagaauaa

SEQ ID NO: 451323 - RNA, 20 nt, Artificial Sequence
  Synthetic
uaguaucaauaugagaauaa

SEQ ID NO: 451324 - RNA, 21 nt, Artificial Sequence
  Synthetic
auaguaucaauaugagaauaa

SEQ ID NO: 451325 - RNA, 22 nt, Artificial Sequence
  Synthetic
uauaguaucaauaugagaauaa

SEQ ID NO: 451326 - RNA, 23 nt, Artificial Sequence
  Synthetic
uuauaguaucaauaugagaauaa

SEQ ID NO: 451327 - RNA, 24 nt, Artificial Sequence
  Synthetic
uuuauaguaucaauaugagaauaa

SEQ ID NO: 451328 - RNA, 18 nt, Artificial Sequence
  Synthetic
uucuuucaacuagaauaa

SEQ ID NO: 451329 - RNA, 19 nt, Artificial Sequence
  Synthetic
auucuuucaacuagaauaa

SEQ ID NO: 451330 - RNA, 20 nt, Artificial Sequence
  Synthetic
aauucuuucaacuagaauaa

SEQ ID NO: 451331 - RNA, 21 nt, Artificial Sequence
  Synthetic
gaauucuuucaacuagaauaa

SEQ ID NO: 451332 - RNA, 22 nt, Artificial Sequence
  Synthetic
ugaauucuuucaacuagaauaa

SEQ ID NO: 451333 - RNA, 23 nt, Artificial Sequence
  Synthetic
cugaauucuuucaacuagaauaa

SEQ ID NO: 451334 - RNA, 24 nt, Artificial Sequence
  Synthetic
ucugaauucuuucaacuagaauaa

SEQ ID NO: 451335 - RNA, 18 nt, Artificial Sequence
  Synthetic
aaaaggauuuuagaauaa

SEQ ID NO: 451336 - RNA, 19 nt, Artificial Sequence
  Synthetic
aaaaaggauuuuagaauaa

SEQ ID NO: 451337 - RNA, 20 nt, Artificial Sequence
  Synthetic
uaaaaaggauuuuagaauaa

SEQ ID NO: 451338 - RNA, 21 nt, Artificial Sequence
  Synthetic
guaaaaaggauuuuagaauaa

SEQ ID NO: 451339 - RNA, 22 nt, Artificial Sequence
  Synthetic
aguaaaaaggauuuuagaauaa

SEQ ID NO: 451340 - RNA, 23 nt, Artificial Sequence
  Synthetic
aaguaaaaaggauuuuagaauaa

SEQ ID NO: 451341 - RNA, 24 nt, Artificial Sequence
  Synthetic
uaaguaaaaaggauuuuagaauaa

SEQ ID NO: 451342 - RNA, 18 nt, Artificial Sequence
  Synthetic
cagaagaauagcgaauaa

SEQ ID NO: 451343 - RNA, 19 nt, Artificial Sequence
  Synthetic
acagaagaauagcgaauaa

SEQ ID NO: 451344 - RNA, 20 nt, Artificial Sequence
  Synthetic
uacagaagaauagcgaauaa

SEQ ID NO: 451345 - RNA, 21 nt, Artificial Sequence
  Synthetic
auacagaagaauagcgaauaa

SEQ ID NO: 451346 - RNA, 22 nt, Artificial Sequence
  Synthetic
gauacagaagaauagcgaauaa

SEQ ID NO: 451347 - RNA, 23 nt, Artificial Sequence
  Synthetic
ugauacagaagaauagcgaauaa

SEQ ID NO: 451348 - RNA, 24 nt, Artificial Sequence
  Synthetic
cugauacagaagaauagcgaauaa

SEQ ID NO: 451349 - RNA, 18 nt, Artificial Sequence
  Synthetic
aaaagcuagggggaauaa

SEQ ID NO: 451350 - RNA, 19 nt, Artificial Sequence
  Synthetic
caaaagcuagggggaauaa

SEQ ID NO: 451351 - RNA, 20 nt, Artificial Sequence
  Synthetic
gcaaaagcuagggggaauaa

SEQ ID NO: 451352 - RNA, 21 nt, Artificial Sequence
  Synthetic
ugcaaaagcuagggggaauaa

SEQ ID NO: 451353 - RNA, 22 nt, Artificial Sequence
  Synthetic
augcaaaagcuagggggaauaa

SEQ ID NO: 451354 - RNA, 23 nt, Artificial Sequence
  Synthetic
aaugcaaaagcuagggggaauaa

SEQ ID NO: 451355 - RNA, 24 nt, Artificial Sequence
  Synthetic
caaugcaaaagcuagggggaauaa

SEQ ID NO: 451356 - RNA, 18 nt, Artificial Sequence
  Synthetic
caaauaucuguggaauaa

SEQ ID NO: 451357 - RNA, 19 nt, Artificial Sequence
  Synthetic
acaaauaucuguggaauaa

SEQ ID NO: 451358 - RNA, 20 nt, Artificial Sequence
  Synthetic
cacaaauaucuguggaauaa

SEQ ID NO: 451359 - RNA, 21 nt, Artificial Sequence
  Synthetic
ucacaaauaucuguggaauaa

SEQ ID NO: 451360 - RNA, 22 nt, Artificial Sequence
  Synthetic
uucacaaauaucuguggaauaa

SEQ ID NO: 451361 - RNA, 23 nt, Artificial Sequence
  Synthetic
cuucacaaauaucuguggaauaa

SEQ ID NO: 451362 - RNA, 24 nt, Artificial Sequence
  Synthetic
acuucacaaauaucuguggaauaa

SEQ ID NO: 451363 - RNA, 18 nt, Artificial Sequence
  Synthetic
uuuacuuuccaugaauaa

SEQ ID NO: 451364 - RNA, 19 nt, Artificial Sequence
  Synthetic
uuuuacuuuccaugaauaa

SEQ ID NO: 451365 - RNA, 20 nt, Artificial Sequence
  Synthetic
auuuuacuuuccaugaauaa

SEQ ID NO: 451366 - RNA, 21 nt, Artificial Sequence
  Synthetic
aauuuuacuuuccaugaauaa

SEQ ID NO: 451367 - RNA, 22 nt, Artificial Sequence
  Synthetic
aaauuuuacuuuccaugaauaa

SEQ ID NO: 451368 - RNA, 23 nt, Artificial Sequence
  Synthetic
caaauuuuacuuuccaugaauaa

SEQ ID NO: 451369 - RNA, 24 nt, Artificial Sequence
  Synthetic
ucaaauuuuacuuuccaugaauaa

SEQ ID NO: 451370 - RNA, 18 nt, Artificial Sequence
  Synthetic
ucauauagugaugaauaa

SEQ ID NO: 451371 - RNA, 19 nt, Artificial Sequence
  Synthetic
uucauauagugaugaauaa

SEQ ID NO: 451372 - RNA, 20 nt, Artificial Sequence
  Synthetic
auucauauagugaugaauaa

SEQ ID NO: 451373 - RNA, 21 nt, Artificial Sequence
  Synthetic
cauucauauagugaugaauaa

SEQ ID NO: 451374 - RNA, 22 nt, Artificial Sequence
  Synthetic
ucauucauauagugaugaauaa

SEQ ID NO: 451375 - RNA, 23 nt, Artificial Sequence
  Synthetic
gucauucauauagugaugaauaa

SEQ ID NO: 451376 - RNA, 24 nt, Artificial Sequence
  Synthetic
ugucauucauauagugaugaauaa

SEQ ID NO: 451377 - RNA, 18 nt, Artificial Sequence
  Synthetic
gcaugaaucuaugaauaa

SEQ ID NO: 451378 - RNA, 19 nt, Artificial Sequence
  Synthetic
cgcaugaaucuaugaauaa

SEQ ID NO: 451379 - RNA, 20 nt, Artificial Sequence
  Synthetic
acgcaugaaucuaugaauaa

SEQ ID NO: 451380 - RNA, 21 nt, Artificial Sequence
  Synthetic
aacgcaugaaucuaugaauaa

SEQ ID NO: 451381 - RNA, 22 nt, Artificial Sequence
  Synthetic
gaacgcaugaaucuaugaauaa

SEQ ID NO: 451382 - RNA, 23 nt, Artificial Sequence
  Synthetic
ugaacgcaugaaucuaugaauaa

SEQ ID NO: 451383 - RNA, 24 nt, Artificial Sequence
  Synthetic
gugaacgcaugaaucuaugaauaa

SEQ ID NO: 451384 - RNA, 18 nt, Artificial Sequence
  Synthetic
uaacauuuuuaugaauaa

SEQ ID NO: 451385 - RNA, 19 nt, Artificial Sequence
  Synthetic
auaacauuuuuaugaauaa

SEQ ID NO: 451386 - RNA, 20 nt, Artificial Sequence
  Synthetic
aauaacauuuuuaugaauaa

SEQ ID NO: 451387 - RNA, 21 nt, Artificial Sequence
  Synthetic
aaauaacauuuuuaugaauaa

SEQ ID NO: 451388 - RNA, 22 nt, Artificial Sequence
  Synthetic
uaaauaacauuuuuaugaauaa

SEQ ID NO: 451389 - RNA, 23 nt, Artificial Sequence
  Synthetic
cuaaauaacauuuuuaugaauaa

SEQ ID NO: 451390 - RNA, 24 nt, Artificial Sequence
  Synthetic
acuaaauaacauuuuuaugaauaa

SEQ ID NO: 451391 - RNA, 18 nt, Artificial Sequence
  Synthetic
accuaccccagugaauaa

SEQ ID NO: 451392 - RNA, 19 nt, Artificial Sequence
  Synthetic
gaccuaccccagugaauaa

SEQ ID NO: 451393 - RNA, 20 nt, Artificial Sequence
  Synthetic
agaccuaccccagugaauaa

SEQ ID NO: 451394 - RNA, 21 nt, Artificial Sequence
  Synthetic
uagaccuaccccagugaauaa

SEQ ID NO: 451395 - RNA, 22 nt, Artificial Sequence
  Synthetic
auagaccuaccccagugaauaa

SEQ ID NO: 451396 - RNA, 23 nt, Artificial Sequence
  Synthetic
cauagaccuaccccagugaauaa

SEQ ID NO: 451397 - RNA, 24 nt, Artificial Sequence
  Synthetic
ucauagaccuaccccagugaauaa

SEQ ID NO: 451398 - RNA, 18 nt, Artificial Sequence
  Synthetic
caguuguugagugaauaa

SEQ ID NO: 451399 - RNA, 19 nt, Artificial Sequence
  Synthetic
acaguuguugagugaauaa

SEQ ID NO: 451400 - RNA, 20 nt, Artificial Sequence
  Synthetic
aacaguuguugagugaauaa

SEQ ID NO: 451401 - RNA, 21 nt, Artificial Sequence
  Synthetic
aaacaguuguugagugaauaa

SEQ ID NO: 451402 - RNA, 22 nt, Artificial Sequence
  Synthetic
uaaacaguuguugagugaauaa

SEQ ID NO: 451403 - RNA, 23 nt, Artificial Sequence
  Synthetic
auaaacaguuguugagugaauaa

SEQ ID NO: 451404 - RNA, 24 nt, Artificial Sequence
  Synthetic
cauaaacaguuguugagugaauaa

SEQ ID NO: 451405 - RNA, 18 nt, Artificial Sequence
  Synthetic
ucaaccguuugugaauaa

SEQ ID NO: 451406 - RNA, 19 nt, Artificial Sequence
  Synthetic
uucaaccguuugugaauaa

SEQ ID NO: 451407 - RNA, 20 nt, Artificial Sequence
  Synthetic
cuucaaccguuugugaauaa

SEQ ID NO: 451408 - RNA, 21 nt, Artificial Sequence
  Synthetic
gcuucaaccguuugugaauaa

SEQ ID NO: 451409 - RNA, 22 nt, Artificial Sequence
  Synthetic
agcuucaaccguuugugaauaa

SEQ ID NO: 451410 - RNA, 23 nt, Artificial Sequence
  Synthetic
cagcuucaaccguuugugaauaa

SEQ ID NO: 451411 - RNA, 24 nt, Artificial Sequence
  Synthetic
acagcuucaaccguuugugaauaa

SEQ ID NO: 451412 - RNA, 18 nt, Artificial Sequence
  Synthetic
aaauugcuacuugaauaa

SEQ ID NO: 451413 - RNA, 19 nt, Artificial Sequence
  Synthetic
aaaauugcuacuugaauaa

SEQ ID NO: 451414 - RNA, 20 nt, Artificial Sequence
  Synthetic
gaaaauugcuacuugaauaa

SEQ ID NO: 451415 - RNA, 21 nt, Artificial Sequence
  Synthetic
ugaaaauugcuacuugaauaa

SEQ ID NO: 451416 - RNA, 22 nt, Artificial Sequence
  Synthetic
augaaaauugcuacuugaauaa

SEQ ID NO: 451417 - RNA, 23 nt, Artificial Sequence
  Synthetic
aaugaaaauugcuacuugaauaa

SEQ ID NO: 451418 - RNA, 24 nt, Artificial Sequence
  Synthetic
aaaugaaaauugcuacuugaauaa

SEQ ID NO: 451419 - RNA, 18 nt, Artificial Sequence
  Synthetic
cucucauuuguugaauaa

SEQ ID NO: 451420 - RNA, 19 nt, Artificial Sequence
  Synthetic
ucucucauuuguugaauaa

SEQ ID NO: 451421 - RNA, 20 nt, Artificial Sequence
  Synthetic
uucucucauuuguugaauaa

SEQ ID NO: 451422 - RNA, 21 nt, Artificial Sequence
  Synthetic
cuucucucauuuguugaauaa

SEQ ID NO: 451423 - RNA, 22 nt, Artificial Sequence
  Synthetic
acuucucucauuuguugaauaa

SEQ ID NO: 451424 - RNA, 23 nt, Artificial Sequence
  Synthetic
aacuucucucauuuguugaauaa

SEQ ID NO: 451425 - RNA, 24 nt, Artificial Sequence
  Synthetic
uaacuucucucauuuguugaauaa

SEQ ID NO: 451426 - RNA, 18 nt, Artificial Sequence
  Synthetic
aaagauuaaaaauaauaa

SEQ ID NO: 451427 - RNA, 19 nt, Artificial Sequence
  Synthetic
uaaagauuaaaaauaauaa

SEQ ID NO: 451428 - RNA, 20 nt, Artificial Sequence
  Synthetic
auaaagauuaaaaauaauaa

SEQ ID NO: 451429 - RNA, 21 nt, Artificial Sequence
  Synthetic
uauaaagauuaaaaauaauaa

SEQ ID NO: 451430 - RNA, 22 nt, Artificial Sequence
  Synthetic
uuauaaagauuaaaaauaauaa

SEQ ID NO: 451431 - RNA, 23 nt, Artificial Sequence
  Synthetic
guuauaaagauuaaaaauaauaa

SEQ ID NO: 451432 - RNA, 24 nt, Artificial Sequence
  Synthetic
uguuauaaagauuaaaaauaauaa

SEQ ID NO: 451433 - RNA, 18 nt, Artificial Sequence
  Synthetic
aaaaguguaaaauaauaa

SEQ ID NO: 451434 - RNA, 19 nt, Artificial Sequence
  Synthetic
aaaaaguguaaaauaauaa

SEQ ID NO: 451435 - RNA, 20 nt, Artificial Sequence
  Synthetic
uaaaaaguguaaaauaauaa

SEQ ID NO: 451436 - RNA, 21 nt, Artificial Sequence
  Synthetic
auaaaaaguguaaaauaauaa

SEQ ID NO: 451437 - RNA, 22 nt, Artificial Sequence
  Synthetic
aauaaaaaguguaaaauaauaa

SEQ ID NO: 451438 - RNA, 23 nt, Artificial Sequence
  Synthetic
aaauaaaaaguguaaaauaauaa

SEQ ID NO: 451439 - RNA, 24 nt, Artificial Sequence
  Synthetic
aaaauaaaaaguguaaaauaauaa

SEQ ID NO: 451440 - RNA, 18 nt, Artificial Sequence
  Synthetic
uaauuuuuccaauaauaa

SEQ ID NO: 451441 - RNA, 19 nt, Artificial Sequence
  Synthetic
guaauuuuuccaauaauaa

SEQ ID NO: 451442 - RNA, 20 nt, Artificial Sequence
  Synthetic
aguaauuuuuccaauaauaa

SEQ ID NO: 451443 - RNA, 21 nt, Artificial Sequence
  Synthetic
aaguaauuuuuccaauaauaa

SEQ ID NO: 451444 - RNA, 22 nt, Artificial Sequence
  Synthetic
gaaguaauuuuuccaauaauaa

SEQ ID NO: 451445 - RNA, 23 nt, Artificial Sequence
  Synthetic
ugaaguaauuuuuccaauaauaa

SEQ ID NO: 451446 - RNA, 24 nt, Artificial Sequence
  Synthetic
augaaguaauuuuuccaauaauaa

SEQ ID NO: 451447 - RNA, 18 nt, Artificial Sequence
  Synthetic
auauauuaugaauaauaa

SEQ ID NO: 451448 - RNA, 19 nt, Artificial Sequence
  Synthetic
aauauauuaugaauaauaa

SEQ ID NO: 451449 - RNA, 20 nt, Artificial Sequence
  Synthetic
uaauauauuaugaauaauaa

SEQ ID NO: 451450 - RNA, 21 nt, Artificial Sequence
  Synthetic
auaauauauuaugaauaauaa

SEQ ID NO: 451451 - RNA, 22 nt, Artificial Sequence
  Synthetic
aauaauauauuaugaauaauaa

SEQ ID NO: 451452 - RNA, 23 nt, Artificial Sequence
  Synthetic
uaauaauauauuaugaauaauaa

SEQ ID NO: 451453 - RNA, 24 nt, Artificial Sequence
  Synthetic
auaauaauauauuaugaauaauaa

SEQ ID NO: 451454 - RNA, 18 nt, Artificial Sequence
  Synthetic
augagacucugauaauaa

SEQ ID NO: 451455 - RNA, 19 nt, Artificial Sequence
  Synthetic
aaugagacucugauaauaa

SEQ ID NO: 451456 - RNA, 20 nt, Artificial Sequence
  Synthetic
uaaugagacucugauaauaa

SEQ ID NO: 451457 - RNA, 21 nt, Artificial Sequence
  Synthetic
cuaaugagacucugauaauaa

SEQ ID NO: 451458 - RNA, 22 nt, Artificial Sequence
  Synthetic
ucuaaugagacucugauaauaa

SEQ ID NO: 451459 - RNA, 23 nt, Artificial Sequence
  Synthetic
aucuaaugagacucugauaauaa

SEQ ID NO: 451460 - RNA, 24 nt, Artificial Sequence
  Synthetic
uaucuaaugagacucugauaauaa

SEQ ID NO: 451461 - RNA, 18 nt, Artificial Sequence
  Synthetic
uaugagagcauauaauaa

SEQ ID NO: 451462 - RNA, 19 nt, Artificial Sequence
  Synthetic
cuaugagagcauauaauaa

SEQ ID NO: 451463 - RNA, 20 nt, Artificial Sequence
  Synthetic
acuaugagagcauauaauaa

SEQ ID NO: 451464 - RNA, 21 nt, Artificial Sequence
  Synthetic
aacuaugagagcauauaauaa

SEQ ID NO: 451465 - RNA, 22 nt, Artificial Sequence
  Synthetic
aaacuaugagagcauauaauaa

SEQ ID NO: 451466 - RNA, 23 nt, Artificial Sequence
  Synthetic
gaaacuaugagagcauauaauaa

SEQ ID NO: 451467 - RNA, 24 nt, Artificial Sequence
  Synthetic
ugaaacuaugagagcauauaauaa

SEQ ID NO: 451468 - RNA, 18 nt, Artificial Sequence
  Synthetic
uugcaggugauauaauaa

SEQ ID NO: 451469 - RNA, 19 nt, Artificial Sequence
  Synthetic
uuugcaggugauauaauaa

SEQ ID NO: 451470 - RNA, 20 nt, Artificial Sequence
  Synthetic
cuuugcaggugauauaauaa

SEQ ID NO: 451471 - RNA, 21 nt, Artificial Sequence
  Synthetic
gcuuugcaggugauauaauaa

SEQ ID NO: 451472 - RNA, 22 nt, Artificial Sequence
  Synthetic
ggcuuugcaggugauauaauaa

SEQ ID NO: 451473 - RNA, 23 nt, Artificial Sequence
  Synthetic
uggcuuugcaggugauauaauaa

SEQ ID NO: 451474 - RNA, 24 nt, Artificial Sequence
  Synthetic
uuggcuuugcaggugauauaauaa

SEQ ID NO: 451475 - RNA, 18 nt, Artificial Sequence
  Synthetic
cacuugaaauuauaauaa

SEQ ID NO: 451476 - RNA, 19 nt, Artificial Sequence
  Synthetic
acacuugaaauuauaauaa

SEQ ID NO: 451477 - RNA, 20 nt, Artificial Sequence
  Synthetic
uacacuugaaauuauaauaa

SEQ ID NO: 451478 - RNA, 21 nt, Artificial Sequence
  Synthetic
auacacuugaaauuauaauaa

SEQ ID NO: 451479 - RNA, 22 nt, Artificial Sequence
  Synthetic
aauacacuugaaauuauaauaa

SEQ ID NO: 451480 - RNA, 23 nt, Artificial Sequence
  Synthetic
aaauacacuugaaauuauaauaa

SEQ ID NO: 451481 - RNA, 24 nt, Artificial Sequence
  Synthetic
aaaauacacuugaaauuauaauaa

SEQ ID NO: 451482 - RNA, 18 nt, Artificial Sequence
  Synthetic
ucuagugcuuccuaauaa

SEQ ID NO: 451483 - RNA, 19 nt, Artificial Sequence
  Synthetic
gucuagugcuuccuaauaa

SEQ ID NO: 451484 - RNA, 20 nt, Artificial Sequence
  Synthetic
agucuagugcuuccuaauaa

SEQ ID NO: 451485 - RNA, 21 nt, Artificial Sequence
  Synthetic
cagucuagugcuuccuaauaa

SEQ ID NO: 451486 - RNA, 22 nt, Artificial Sequence
  Synthetic
ccagucuagugcuuccuaauaa

SEQ ID NO: 451487 - RNA, 23 nt, Artificial Sequence
  Synthetic
uccagucuagugcuuccuaauaa

SEQ ID NO: 451488 - RNA, 24 nt, Artificial Sequence
  Synthetic
auccagucuagugcuuccuaauaa

SEQ ID NO: 451489 - RNA, 18 nt, Artificial Sequence
  Synthetic
ugaaaaguaugcuaauaa

SEQ ID NO: 451490 - RNA, 19 nt, Artificial Sequence
  Synthetic
augaaaaguaugcuaauaa

SEQ ID NO: 451491 - RNA, 20 nt, Artificial Sequence
  Synthetic
uaugaaaaguaugcuaauaa

SEQ ID NO: 451492 - RNA, 21 nt, Artificial Sequence
  Synthetic
uuaugaaaaguaugcuaauaa

SEQ ID NO: 451493 - RNA, 22 nt, Artificial Sequence
  Synthetic
guuaugaaaaguaugcuaauaa

SEQ ID NO: 451494 - RNA, 23 nt, Artificial Sequence
  Synthetic
aguuaugaaaaguaugcuaauaa

SEQ ID NO: 451495 - RNA, 24 nt, Artificial Sequence
  Synthetic
uaguuaugaaaaguaugcuaauaa

SEQ ID NO: 451496 - RNA, 18 nt, Artificial Sequence
  Synthetic
ucuuagauucucuaauaa

SEQ ID NO: 451497 - RNA, 19 nt, Artificial Sequence
  Synthetic
aucuuagauucucuaauaa

SEQ ID NO: 451498 - RNA, 20 nt, Artificial Sequence
  Synthetic
aaucuuagauucucuaauaa

SEQ ID NO: 451499 - RNA, 21 nt, Artificial Sequence
  Synthetic
uaaucuuagauucucuaauaa

SEQ ID NO: 451500 - RNA, 22 nt, Artificial Sequence
  Synthetic
uuaaucuuagauucucuaauaa

SEQ ID NO: 451501 - RNA, 23 nt, Artificial Sequence
  Synthetic
cuuaaucuuagauucucuaauaa

SEQ ID NO: 451502 - RNA, 24 nt, Artificial Sequence
  Synthetic
ucuuaaucuuagauucucuaauaa

SEQ ID NO: 451503 - RNA, 18 nt, Artificial Sequence
  Synthetic
aagucucauuucuaauaa

SEQ ID NO: 451504 - RNA, 19 nt, Artificial Sequence
  Synthetic
aaagucucauuucuaauaa

SEQ ID NO: 451505 - RNA, 20 nt, Artificial Sequence
  Synthetic
aaaagucucauuucuaauaa

SEQ ID NO: 451506 - RNA, 21 nt, Artificial Sequence
  Synthetic
aaaaagucucauuucuaauaa

SEQ ID NO: 451507 - RNA, 22 nt, Artificial Sequence
  Synthetic
caaaaagucucauuucuaauaa

SEQ ID NO: 451508 - RNA, 23 nt, Artificial Sequence
  Synthetic
ccaaaaagucucauuucuaauaa

SEQ ID NO: 451509 - RNA, 24 nt, Artificial Sequence
  Synthetic
accaaaaagucucauuucuaauaa

SEQ ID NO: 451510 - RNA, 18 nt, Artificial Sequence
  Synthetic
auuuacacuaaguaauaa

SEQ ID NO: 451511 - RNA, 19 nt, Artificial Sequence
  Synthetic
cauuuacacuaaguaauaa

SEQ ID NO: 451512 - RNA, 20 nt, Artificial Sequence
  Synthetic
gcauuuacacuaaguaauaa

SEQ ID NO: 451513 - RNA, 21 nt, Artificial Sequence
  Synthetic
ugcauuuacacuaaguaauaa

SEQ ID NO: 451514 - RNA, 22 nt, Artificial Sequence
  Synthetic
augcauuuacacuaaguaauaa

SEQ ID NO: 451515 - RNA, 23 nt, Artificial Sequence
  Synthetic
aaugcauuuacacuaaguaauaa

SEQ ID NO: 451516 - RNA, 24 nt, Artificial Sequence
  Synthetic
gaaugcauuuacacuaaguaauaa

SEQ ID NO: 451517 - RNA, 18 nt, Artificial Sequence
  Synthetic
auagauguuggguaauaa

SEQ ID NO: 451518 - RNA, 19 nt, Artificial Sequence
  Synthetic
aauagauguuggguaauaa

SEQ ID NO: 451519 - RNA, 20 nt, Artificial Sequence
  Synthetic
aaauagauguuggguaauaa

SEQ ID NO: 451520 - RNA, 21 nt, Artificial Sequence
  Synthetic
uaaauagauguuggguaauaa

SEQ ID NO: 451521 - RNA, 22 nt, Artificial Sequence
  Synthetic
guaaauagauguuggguaauaa

SEQ ID NO: 451522 - RNA, 23 nt, Artificial Sequence
  Synthetic
aguaaauagauguuggguaauaa

SEQ ID NO: 451523 - RNA, 24 nt, Artificial Sequence
  Synthetic
caguaaauagauguuggguaauaa

SEQ ID NO: 451524 - RNA, 18 nt, Artificial Sequence
  Synthetic
aaauaauaaaauuaauaa

SEQ ID NO: 451525 - RNA, 19 nt, Artificial Sequence
  Synthetic
aaaauaauaaaauuaauaa

SEQ ID NO: 451526 - RNA, 20 nt, Artificial Sequence
  Synthetic
gaaaauaauaaaauuaauaa

SEQ ID NO: 451527 - RNA, 21 nt, Artificial Sequence
  Synthetic
ggaaaauaauaaaauuaauaa

SEQ ID NO: 451528 - RNA, 22 nt, Artificial Sequence
  Synthetic
uggaaaauaauaaaauuaauaa

SEQ ID NO: 451529 - RNA, 23 nt, Artificial Sequence
  Synthetic
cuggaaaauaauaaaauuaauaa

SEQ ID NO: 451530 - RNA, 24 nt, Artificial Sequence
  Synthetic
ccuggaaaauaauaaaauuaauaa

SEQ ID NO: 451531 - RNA, 18 nt, Artificial Sequence
  Synthetic
aaggcggggaauuaauaa

SEQ ID NO: 451532 - RNA, 19 nt, Artificial Sequence
  Synthetic
gaaggcggggaauuaauaa

SEQ ID NO: 451533 - RNA, 20 nt, Artificial Sequence
  Synthetic
ggaaggcggggaauuaauaa

SEQ ID NO: 451534 - RNA, 21 nt, Artificial Sequence
  Synthetic
cggaaggcggggaauuaauaa

SEQ ID NO: 451535 - RNA, 22 nt, Artificial Sequence
  Synthetic
ucggaaggcggggaauuaauaa

SEQ ID NO: 451536 - RNA, 23 nt, Artificial Sequence
  Synthetic
cucggaaggcggggaauuaauaa

SEQ ID NO: 451537 - RNA, 24 nt, Artificial Sequence
  Synthetic
ucucggaaggcggggaauuaauaa

SEQ ID NO: 451538 - RNA, 18 nt, Artificial Sequence
  Synthetic
acucccacacauuaauaa

SEQ ID NO: 451539 - RNA, 19 nt, Artificial Sequence
  Synthetic
gacucccacacauuaauaa

SEQ ID NO: 451540 - RNA, 20 nt, Artificial Sequence
  Synthetic
agacucccacacauuaauaa

SEQ ID NO: 451541 - RNA, 21 nt, Artificial Sequence
  Synthetic
uagacucccacacauuaauaa

SEQ ID NO: 451542 - RNA, 22 nt, Artificial Sequence
  Synthetic
uuagacucccacacauuaauaa

SEQ ID NO: 451543 - RNA, 23 nt, Artificial Sequence
  Synthetic
cuuagacucccacacauuaauaa

SEQ ID NO: 451544 - RNA, 24 nt, Artificial Sequence
  Synthetic
acuuagacucccacacauuaauaa

SEQ ID NO: 451545 - RNA, 18 nt, Artificial Sequence
  Synthetic
uauuaccccccuuaauaa

SEQ ID NO: 451546 - RNA, 19 nt, Artificial Sequence
  Synthetic
uuauuaccccccuuaauaa

SEQ ID NO: 451547 - RNA, 20 nt, Artificial Sequence
  Synthetic
auuauuaccccccuuaauaa

SEQ ID NO: 451548 - RNA, 21 nt, Artificial Sequence
  Synthetic
uauuauuaccccccuuaauaa

SEQ ID NO: 451549 - RNA, 22 nt, Artificial Sequence
  Synthetic
uuauuauuaccccccuuaauaa

SEQ ID NO: 451550 - RNA, 23 nt, Artificial Sequence
  Synthetic
auuauuauuaccccccuuaauaa

SEQ ID NO: 451551 - RNA, 24 nt, Artificial Sequence
  Synthetic
uauuauuauuaccccccuuaauaa

SEQ ID NO: 451552 - RNA, 18 nt, Artificial Sequence
  Synthetic
ggcaaugcugcuuaauaa

SEQ ID NO: 451553 - RNA, 19 nt, Artificial Sequence
  Synthetic
aggcaaugcugcuuaauaa

SEQ ID NO: 451554 - RNA, 20 nt, Artificial Sequence
  Synthetic
aaggcaaugcugcuuaauaa

SEQ ID NO: 451555 - RNA, 21 nt, Artificial Sequence
  Synthetic
uaaggcaaugcugcuuaauaa

SEQ ID NO: 451556 - RNA, 22 nt, Artificial Sequence
  Synthetic
auaaggcaaugcugcuuaauaa

SEQ ID NO: 451557 - RNA, 23 nt, Artificial Sequence
  Synthetic
cauaaggcaaugcugcuuaauaa

SEQ ID NO: 451558 - RNA, 24 nt, Artificial Sequence
  Synthetic
gcauaaggcaaugcugcuuaauaa

SEQ ID NO: 451559 - RNA, 18 nt, Artificial Sequence
  Synthetic
ccgaaauaauguuaauaa

SEQ ID NO: 451560 - RNA, 19 nt, Artificial Sequence
  Synthetic
cccgaaauaauguuaauaa

SEQ ID NO: 451561 - RNA, 20 nt, Artificial Sequence
  Synthetic
ucccgaaauaauguuaauaa

SEQ ID NO: 451562 - RNA, 21 nt, Artificial Sequence
  Synthetic
cucccgaaauaauguuaauaa

SEQ ID NO: 451563 - RNA, 22 nt, Artificial Sequence
  Synthetic
ucucccgaaauaauguuaauaa

SEQ ID NO: 451564 - RNA, 23 nt, Artificial Sequence
  Synthetic
uucucccgaaauaauguuaauaa

SEQ ID NO: 451565 - RNA, 24 nt, Artificial Sequence
  Synthetic
uuucucccgaaauaauguuaauaa

SEQ ID NO: 451566 - RNA, 18 nt, Artificial Sequence
  Synthetic
ucuuacaaguguuaauaa

SEQ ID NO: 451567 - RNA, 19 nt, Artificial Sequence
  Synthetic
aucuuacaaguguuaauaa

SEQ ID NO: 451568 - RNA, 20 nt, Artificial Sequence
  Synthetic
caucuuacaaguguuaauaa

SEQ ID NO: 451569 - RNA, 21 nt, Artificial Sequence
  Synthetic
ucaucuuacaaguguuaauaa

SEQ ID NO: 451570 - RNA, 22 nt, Artificial Sequence
  Synthetic
uucaucuuacaaguguuaauaa

SEQ ID NO: 451571 - RNA, 23 nt, Artificial Sequence
  Synthetic
cuucaucuuacaaguguuaauaa

SEQ ID NO: 451572 - RNA, 24 nt, Artificial Sequence
  Synthetic
ucuucaucuuacaaguguuaauaa

SEQ ID NO: 451573 - RNA, 18 nt, Artificial Sequence
  Synthetic
uauucugcuauuuaauaa

SEQ ID NO: 451574 - RNA, 19 nt, Artificial Sequence
  Synthetic
cuauucugcuauuuaauaa

SEQ ID NO: 451575 - RNA, 20 nt, Artificial Sequence
  Synthetic
gcuauucugcuauuuaauaa

SEQ ID NO: 451576 - RNA, 21 nt, Artificial Sequence
  Synthetic
agcuauucugcuauuuaauaa

SEQ ID NO: 451577 - RNA, 22 nt, Artificial Sequence
  Synthetic
cagcuauucugcuauuuaauaa

SEQ ID NO: 451578 - RNA, 23 nt, Artificial Sequence
  Synthetic
gcagcuauucugcuauuuaauaa

SEQ ID NO: 451579 - RNA, 24 nt, Artificial Sequence
  Synthetic
agcagcuauucugcuauuuaauaa

SEQ ID NO: 451580 - RNA, 18 nt, Artificial Sequence
  Synthetic
aaaacuacaaaaacauaa

SEQ ID NO: 451581 - RNA, 19 nt, Artificial Sequence
  Synthetic
aaaaacuacaaaaacauaa

SEQ ID NO: 451582 - RNA, 20 nt, Artificial Sequence
  Synthetic
uaaaaacuacaaaaacauaa

SEQ ID NO: 451583 - RNA, 21 nt, Artificial Sequence
  Synthetic
cuaaaaacuacaaaaacauaa

SEQ ID NO: 451584 - RNA, 22 nt, Artificial Sequence
  Synthetic
acuaaaaacuacaaaaacauaa

SEQ ID NO: 451585 - RNA, 23 nt, Artificial Sequence
  Synthetic
aacuaaaaacuacaaaaacauaa

SEQ ID NO: 451586 - RNA, 24 nt, Artificial Sequence
  Synthetic
aaacuaaaaacuacaaaaacauaa

SEQ ID NO: 451587 - RNA, 18 nt, Artificial Sequence
  Synthetic
ucauagaagaaaacauaa

SEQ ID NO: 451588 - RNA, 19 nt, Artificial Sequence
  Synthetic
cucauagaagaaaacauaa

SEQ ID NO: 451589 - RNA, 20 nt, Artificial Sequence
  Synthetic
acucauagaagaaaacauaa

SEQ ID NO: 451590 - RNA, 21 nt, Artificial Sequence
  Synthetic
aacucauagaagaaaacauaa

SEQ ID NO: 451591 - RNA, 22 nt, Artificial Sequence
  Synthetic
aaacucauagaagaaaacauaa

SEQ ID NO: 451592 - RNA, 23 nt, Artificial Sequence
  Synthetic
gaaacucauagaagaaaacauaa

SEQ ID NO: 451593 - RNA, 24 nt, Artificial Sequence
  Synthetic
ugaaacucauagaagaaaacauaa

SEQ ID NO: 451594 - RNA, 18 nt, Artificial Sequence
  Synthetic
gauucuuuuaaaacauaa

SEQ ID NO: 451595 - RNA, 19 nt, Artificial Sequence
  Synthetic
agauucuuuuaaaacauaa

SEQ ID NO: 451596 - RNA, 20 nt, Artificial Sequence
  Synthetic
aagauucuuuuaaaacauaa

SEQ ID NO: 451597 - RNA, 21 nt, Artificial Sequence
  Synthetic
aaagauucuuuuaaaacauaa

SEQ ID NO: 451598 - RNA, 22 nt, Artificial Sequence
  Synthetic
aaaagauucuuuuaaaacauaa

SEQ ID NO: 451599 - RNA, 23 nt, Artificial Sequence
  Synthetic
gaaaagauucuuuuaaaacauaa

SEQ ID NO: 451600 - RNA, 24 nt, Artificial Sequence
  Synthetic
cgaaaagauucuuuuaaaacauaa

SEQ ID NO: 451601 - RNA, 18 nt, Artificial Sequence
  Synthetic
aacccugaaagaacauaa

SEQ ID NO: 451602 - RNA, 19 nt, Artificial Sequence
  Synthetic
gaacccugaaagaacauaa

SEQ ID NO: 451603 - RNA, 20 nt, Artificial Sequence
  Synthetic
agaacccugaaagaacauaa

SEQ ID NO: 451604 - RNA, 21 nt, Artificial Sequence
  Synthetic
aagaacccugaaagaacauaa

SEQ ID NO: 451605 - RNA, 22 nt, Artificial Sequence
  Synthetic
gaagaacccugaaagaacauaa

SEQ ID NO: 451606 - RNA, 23 nt, Artificial Sequence
  Synthetic
cgaagaacccugaaagaacauaa

SEQ ID NO: 451607 - RNA, 24 nt, Artificial Sequence
  Synthetic
acgaagaacccugaaagaacauaa

SEQ ID NO: 451608 - RNA, 18 nt, Artificial Sequence
  Synthetic
uggauauccagaacauaa

SEQ ID NO: 451609 - RNA, 19 nt, Artificial Sequence
  Synthetic
guggauauccagaacauaa

SEQ ID NO: 451610 - RNA, 20 nt, Artificial Sequence
  Synthetic
aguggauauccagaacauaa

SEQ ID NO: 451611 - RNA, 21 nt, Artificial Sequence
  Synthetic
uaguggauauccagaacauaa

SEQ ID NO: 451612 - RNA, 22 nt, Artificial Sequence
  Synthetic
auaguggauauccagaacauaa

SEQ ID NO: 451613 - RNA, 23 nt, Artificial Sequence
  Synthetic
aauaguggauauccagaacauaa

SEQ ID NO: 451614 - RNA, 24 nt, Artificial Sequence
  Synthetic
aaauaguggauauccagaacauaa

SEQ ID NO: 451615 - RNA, 18 nt, Artificial Sequence
  Synthetic
aaaugguagagaacauaa

SEQ ID NO: 451616 - RNA, 19 nt, Artificial Sequence
  Synthetic
aaaaugguagagaacauaa

SEQ ID NO: 451617 - RNA, 20 nt, Artificial Sequence
  Synthetic
aaaaaugguagagaacauaa

SEQ ID NO: 451618 - RNA, 21 nt, Artificial Sequence
  Synthetic
aaaaaaugguagagaacauaa

SEQ ID NO: 451619 - RNA, 22 nt, Artificial Sequence
  Synthetic
aaaaaaaugguagagaacauaa

SEQ ID NO: 451620 - RNA, 23 nt, Artificial Sequence
  Synthetic
aaaaaaaaugguagagaacauaa

SEQ ID NO: 451621 - RNA, 24 nt, Artificial Sequence
  Synthetic
caaaaaaaaugguagagaacauaa

SEQ ID NO: 451622 - RNA, 18 nt, Artificial Sequence
  Synthetic
aauaucgcuagaacauaa

SEQ ID NO: 451623 - RNA, 19 nt, Artificial Sequence
  Synthetic
uaauaucgcuagaacauaa

SEQ ID NO: 451624 - RNA, 20 nt, Artificial Sequence
  Synthetic
uuaauaucgcuagaacauaa

SEQ ID NO: 451625 - RNA, 21 nt, Artificial Sequence
  Synthetic
uuuaauaucgcuagaacauaa

SEQ ID NO: 451626 - RNA, 22 nt, Artificial Sequence
  Synthetic
auuuaauaucgcuagaacauaa

SEQ ID NO: 451627 - RNA, 23 nt, Artificial Sequence
  Synthetic
gauuuaauaucgcuagaacauaa

SEQ ID NO: 451628 - RNA, 24 nt, Artificial Sequence
  Synthetic
ugauuuaauaucgcuagaacauaa

SEQ ID NO: 451629 - RNA, 18 nt, Artificial Sequence
  Synthetic
auugaguucuuaacauaa

SEQ ID NO: 451630 - RNA, 19 nt, Artificial Sequence
  Synthetic
uauugaguucuuaacauaa

SEQ ID NO: 451631 - RNA, 20 nt, Artificial Sequence
  Synthetic
auauugaguucuuaacauaa

SEQ ID NO: 451632 - RNA, 21 nt, Artificial Sequence
  Synthetic
aauauugaguucuuaacauaa

SEQ ID NO: 451633 - RNA, 22 nt, Artificial Sequence
  Synthetic
caauauugaguucuuaacauaa

SEQ ID NO: 451634 - RNA, 23 nt, Artificial Sequence
  Synthetic
ucaauauugaguucuuaacauaa

SEQ ID NO: 451635 - RNA, 24 nt, Artificial Sequence
  Synthetic
uucaauauugaguucuuaacauaa

SEQ ID NO: 451636 - RNA, 18 nt, Artificial Sequence
  Synthetic
auugugauguuaacauaa

SEQ ID NO: 451637 - RNA, 19 nt, Artificial Sequence
  Synthetic
cauugugauguuaacauaa

SEQ ID NO: 451638 - RNA, 20 nt, Artificial Sequence
  Synthetic
acauugugauguuaacauaa

SEQ ID NO: 451639 - RNA, 21 nt, Artificial Sequence
  Synthetic
uacauugugauguuaacauaa

SEQ ID NO: 451640 - RNA, 22 nt, Artificial Sequence
  Synthetic
guacauugugauguuaacauaa

SEQ ID NO: 451641 - RNA, 23 nt, Artificial Sequence
  Synthetic
gguacauugugauguuaacauaa

SEQ ID NO: 451642 - RNA, 24 nt, Artificial Sequence
  Synthetic
cgguacauugugauguuaacauaa

SEQ ID NO: 451643 - RNA, 18 nt, Artificial Sequence
  Synthetic
uuuagauuccacacauaa

SEQ ID NO: 451644 - RNA, 19 nt, Artificial Sequence
  Synthetic
uuuuagauuccacacauaa

SEQ ID NO: 451645 - RNA, 20 nt, Artificial Sequence
  Synthetic
uuuuuagauuccacacauaa

SEQ ID NO: 451646 - RNA, 21 nt, Artificial Sequence
  Synthetic
uuuuuuagauuccacacauaa

SEQ ID NO: 451647 - RNA, 22 nt, Artificial Sequence
  Synthetic
cuuuuuuagauuccacacauaa

SEQ ID NO: 451648 - RNA, 23 nt, Artificial Sequence
  Synthetic
acuuuuuuagauuccacacauaa

SEQ ID NO: 451649 - RNA, 24 nt, Artificial Sequence
  Synthetic
gacuuuuuuagauuccacacauaa

SEQ ID NO: 451650 - RNA, 18 nt, Artificial Sequence
  Synthetic
acaaauaccuacacauaa

SEQ ID NO: 451651 - RNA, 19 nt, Artificial Sequence
  Synthetic
uacaaauaccuacacauaa

SEQ ID NO: 451652 - RNA, 20 nt, Artificial Sequence
  Synthetic
auacaaauaccuacacauaa

SEQ ID NO: 451653 - RNA, 21 nt, Artificial Sequence
  Synthetic
cauacaaauaccuacacauaa

SEQ ID NO: 451654 - RNA, 22 nt, Artificial Sequence
  Synthetic
acauacaaauaccuacacauaa

SEQ ID NO: 451655 - RNA, 23 nt, Artificial Sequence
  Synthetic
aacauacaaauaccuacacauaa

SEQ ID NO: 451656 - RNA, 24 nt, Artificial Sequence
  Synthetic
aaacauacaaauaccuacacauaa

SEQ ID NO: 451657 - RNA, 18 nt, Artificial Sequence
  Synthetic
ugaaauuaaaccacauaa

SEQ ID NO: 451658 - RNA, 19 nt, Artificial Sequence
  Synthetic
augaaauuaaaccacauaa

SEQ ID NO: 451659 - RNA, 20 nt, Artificial Sequence
  Synthetic
caugaaauuaaaccacauaa

SEQ ID NO: 451660 - RNA, 21 nt, Artificial Sequence
  Synthetic
gcaugaaauuaaaccacauaa

SEQ ID NO: 451661 - RNA, 22 nt, Artificial Sequence
  Synthetic
ugcaugaaauuaaaccacauaa

SEQ ID NO: 451662 - RNA, 23 nt, Artificial Sequence
  Synthetic
uugcaugaaauuaaaccacauaa

SEQ ID NO: 451663 - RNA, 24 nt, Artificial Sequence
  Synthetic
auugcaugaaauuaaaccacauaa

SEQ ID NO: 451664 - RNA, 18 nt, Artificial Sequence
  Synthetic
auuuaaagccccacauaa

SEQ ID NO: 451665 - RNA, 19 nt, Artificial Sequence
  Synthetic
uauuuaaagccccacauaa

SEQ ID NO: 451666 - RNA, 20 nt, Artificial Sequence
  Synthetic
auauuuaaagccccacauaa

SEQ ID NO: 451667 - RNA, 21 nt, Artificial Sequence
  Synthetic
cauauuuaaagccccacauaa

SEQ ID NO: 451668 - RNA, 22 nt, Artificial Sequence
  Synthetic
acauauuuaaagccccacauaa

SEQ ID NO: 451669 - RNA, 23 nt, Artificial Sequence
  Synthetic
aacauauuuaaagccccacauaa

SEQ ID NO: 451670 - RNA, 24 nt, Artificial Sequence
  Synthetic
caacauauuuaaagccccacauaa

SEQ ID NO: 451671 - RNA, 18 nt, Artificial Sequence
  Synthetic
aauuuggaagccacauaa

SEQ ID NO: 451672 - RNA, 19 nt, Artificial Sequence
  Synthetic
uaauuuggaagccacauaa

SEQ ID NO: 451673 - RNA, 20 nt, Artificial Sequence
  Synthetic
auaauuuggaagccacauaa

SEQ ID NO: 451674 - RNA, 21 nt, Artificial Sequence
  Synthetic
aauaauuuggaagccacauaa

SEQ ID NO: 451675 - RNA, 22 nt, Artificial Sequence
  Synthetic
gaauaauuuggaagccacauaa

SEQ ID NO: 451676 - RNA, 23 nt, Artificial Sequence
  Synthetic
agaauaauuuggaagccacauaa

SEQ ID NO: 451677 - RNA, 24 nt, Artificial Sequence
  Synthetic
uagaauaauuuggaagccacauaa

SEQ ID NO: 451678 - RNA, 18 nt, Artificial Sequence
  Synthetic
cuaauacuuggcacauaa

SEQ ID NO: 451679 - RNA, 19 nt, Artificial Sequence
  Synthetic
ucuaauacuuggcacauaa

SEQ ID NO: 451680 - RNA, 20 nt, Artificial Sequence
  Synthetic
aucuaauacuuggcacauaa

SEQ ID NO: 451681 - RNA, 21 nt, Artificial Sequence
  Synthetic
uaucuaauacuuggcacauaa

SEQ ID NO: 451682 - RNA, 22 nt, Artificial Sequence
  Synthetic
guaucuaauacuuggcacauaa

SEQ ID NO: 451683 - RNA, 23 nt, Artificial Sequence
  Synthetic
uguaucuaauacuuggcacauaa

SEQ ID NO: 451684 - RNA, 24 nt, Artificial Sequence
  Synthetic
auguaucuaauacuuggcacauaa

SEQ ID NO: 451685 - RNA, 18 nt, Artificial Sequence
  Synthetic
uuagguaacaagacauaa

SEQ ID NO: 451686 - RNA, 19 nt, Artificial Sequence
  Synthetic
uuuagguaacaagacauaa

SEQ ID NO: 451687 - RNA, 20 nt, Artificial Sequence
  Synthetic
auuuagguaacaagacauaa

SEQ ID NO: 451688 - RNA, 21 nt, Artificial Sequence
  Synthetic
uauuuagguaacaagacauaa

SEQ ID NO: 451689 - RNA, 22 nt, Artificial Sequence
  Synthetic
auauuuagguaacaagacauaa

SEQ ID NO: 451690 - RNA, 23 nt, Artificial Sequence
  Synthetic
uauauuuagguaacaagacauaa

SEQ ID NO: 451691 - RNA, 24 nt, Artificial Sequence
  Synthetic
auauauuuagguaacaagacauaa

SEQ ID NO: 451692 - RNA, 18 nt, Artificial Sequence
  Synthetic
acuuuuccuuagacauaa

SEQ ID NO: 451693 - RNA, 19 nt, Artificial Sequence
  Synthetic
uacuuuuccuuagacauaa

SEQ ID NO: 451694 - RNA, 20 nt, Artificial Sequence
  Synthetic
guacuuuuccuuagacauaa

SEQ ID NO: 451695 - RNA, 21 nt, Artificial Sequence
  Synthetic
aguacuuuuccuuagacauaa

SEQ ID NO: 451696 - RNA, 22 nt, Artificial Sequence
  Synthetic
uaguacuuuuccuuagacauaa

SEQ ID NO: 451697 - RNA, 23 nt, Artificial Sequence
  Synthetic
auaguacuuuuccuuagacauaa

SEQ ID NO: 451698 - RNA, 24 nt, Artificial Sequence
  Synthetic
uauaguacuuuuccuuagacauaa

SEQ ID NO: 451699 - RNA, 18 nt, Artificial Sequence
  Synthetic
uauauuaugaauacauaa

SEQ ID NO: 451700 - RNA, 19 nt, Artificial Sequence
  Synthetic
uuauauuaugaauacauaa

SEQ ID NO: 451701 - RNA, 20 nt, Artificial Sequence
  Synthetic
uuuauauuaugaauacauaa

SEQ ID NO: 451702 - RNA, 21 nt, Artificial Sequence
  Synthetic
cuuuauauuaugaauacauaa

SEQ ID NO: 451703 - RNA, 22 nt, Artificial Sequence
  Synthetic
ucuuuauauuaugaauacauaa

SEQ ID NO: 451704 - RNA, 23 nt, Artificial Sequence
  Synthetic
uucuuuauauuaugaauacauaa

SEQ ID NO: 451705 - RNA, 24 nt, Artificial Sequence
  Synthetic
uuucuuuauauuaugaauacauaa

SEQ ID NO: 451706 - RNA, 18 nt, Artificial Sequence
  Synthetic
uauacaauuacuacauaa

SEQ ID NO: 451707 - RNA, 19 nt, Artificial Sequence
  Synthetic
uuauacaauuacuacauaa

SEQ ID NO: 451708 - RNA, 20 nt, Artificial Sequence
  Synthetic
guuauacaauuacuacauaa

SEQ ID NO: 451709 - RNA, 21 nt, Artificial Sequence
  Synthetic
gguuauacaauuacuacauaa

SEQ ID NO: 451710 - RNA, 22 nt, Artificial Sequence
  Synthetic
agguuauacaauuacuacauaa

SEQ ID NO: 451711 - RNA, 23 nt, Artificial Sequence
  Synthetic
uagguuauacaauuacuacauaa

SEQ ID NO: 451712 - RNA, 24 nt, Artificial Sequence
  Synthetic
cuagguuauacaauuacuacauaa

SEQ ID NO: 451713 - RNA, 18 nt, Artificial Sequence
  Synthetic
aacaagcaaccuacauaa

SEQ ID NO: 451714 - RNA, 19 nt, Artificial Sequence
  Synthetic
gaacaagcaaccuacauaa

SEQ ID NO: 451715 - RNA, 20 nt, Artificial Sequence
  Synthetic
ugaacaagcaaccuacauaa

SEQ ID NO: 451716 - RNA, 21 nt, Artificial Sequence
  Synthetic
gugaacaagcaaccuacauaa

SEQ ID NO: 451717 - RNA, 22 nt, Artificial Sequence
  Synthetic
agugaacaagcaaccuacauaa

SEQ ID NO: 451718 - RNA, 23 nt, Artificial Sequence
  Synthetic
gagugaacaagcaaccuacauaa

SEQ ID NO: 451719 - RNA, 24 nt, Artificial Sequence
  Synthetic
agagugaacaagcaaccuacauaa

SEQ ID NO: 451720 - RNA, 18 nt, Artificial Sequence
  Synthetic
aguucuucuguuacauaa

SEQ ID NO: 451721 - RNA, 19 nt, Artificial Sequence
  Synthetic
caguucuucuguuacauaa

SEQ ID NO: 451722 - RNA, 20 nt, Artificial Sequence
  Synthetic
ccaguucuucuguuacauaa

SEQ ID NO: 451723 - RNA, 21 nt, Artificial Sequence
  Synthetic
uccaguucuucuguuacauaa

SEQ ID NO: 451724 - RNA, 22 nt, Artificial Sequence
  Synthetic
auccaguucuucuguuacauaa

SEQ ID NO: 451725 - RNA, 23 nt, Artificial Sequence
  Synthetic
uauccaguucuucuguuacauaa

SEQ ID NO: 451726 - RNA, 24 nt, Artificial Sequence
  Synthetic
guauccaguucuucuguuacauaa

SEQ ID NO: 451727 - RNA, 18 nt, Artificial Sequence
  Synthetic
cuuguaagcacaccauaa

SEQ ID NO: 451728 - RNA, 19 nt, Artificial Sequence
  Synthetic
ccuuguaagcacaccauaa

SEQ ID NO: 451729 - RNA, 20 nt, Artificial Sequence
  Synthetic
uccuuguaagcacaccauaa

SEQ ID NO: 451730 - RNA, 21 nt, Artificial Sequence
  Synthetic
guccuuguaagcacaccauaa

SEQ ID NO: 451731 - RNA, 22 nt, Artificial Sequence
  Synthetic
gguccuuguaagcacaccauaa

SEQ ID NO: 451732 - RNA, 23 nt, Artificial Sequence
  Synthetic
ugguccuuguaagcacaccauaa

SEQ ID NO: 451733 - RNA, 24 nt, Artificial Sequence
  Synthetic
uugguccuuguaagcacaccauaa

SEQ ID NO: 451734 - RNA, 18 nt, Artificial Sequence
  Synthetic
uagcuaaaaccaccauaa

SEQ ID NO: 451735 - RNA, 19 nt, Artificial Sequence
  Synthetic
uuagcuaaaaccaccauaa

SEQ ID NO: 451736 - RNA, 20 nt, Artificial Sequence
  Synthetic
cuuagcuaaaaccaccauaa

SEQ ID NO: 451737 - RNA, 21 nt, Artificial Sequence
  Synthetic
ucuuagcuaaaaccaccauaa

SEQ ID NO: 451738 - RNA, 22 nt, Artificial Sequence
  Synthetic
uucuuagcuaaaaccaccauaa

SEQ ID NO: 451739 - RNA, 23 nt, Artificial Sequence
  Synthetic
guucuuagcuaaaaccaccauaa

SEQ ID NO: 451740 - RNA, 24 nt, Artificial Sequence
  Synthetic
uguucuuagcuaaaaccaccauaa

SEQ ID NO: 451741 - RNA, 18 nt, Artificial Sequence
  Synthetic
ugccuaucuugaccauaa

SEQ ID NO: 451742 - RNA, 19 nt, Artificial Sequence
  Synthetic
cugccuaucuugaccauaa

SEQ ID NO: 451743 - RNA, 20 nt, Artificial Sequence
  Synthetic
ccugccuaucuugaccauaa

SEQ ID NO: 451744 - RNA, 21 nt, Artificial Sequence
  Synthetic
accugccuaucuugaccauaa

SEQ ID NO: 451745 - RNA, 22 nt, Artificial Sequence
  Synthetic
aaccugccuaucuugaccauaa

SEQ ID NO: 451746 - RNA, 23 nt, Artificial Sequence
  Synthetic
gaaccugccuaucuugaccauaa

SEQ ID NO: 451747 - RNA, 24 nt, Artificial Sequence
  Synthetic
agaaccugccuaucuugaccauaa

SEQ ID NO: 451748 - RNA, 18 nt, Artificial Sequence
  Synthetic
acauauucucacccauaa

SEQ ID NO: 451749 - RNA, 19 nt, Artificial Sequence
  Synthetic
cacauauucucacccauaa

SEQ ID NO: 451750 - RNA, 20 nt, Artificial Sequence
  Synthetic
ccacauauucucacccauaa

SEQ ID NO: 451751 - RNA, 21 nt, Artificial Sequence
  Synthetic
accacauauucucacccauaa

SEQ ID NO: 451752 - RNA, 22 nt, Artificial Sequence
  Synthetic
caccacauauucucacccauaa

SEQ ID NO: 451753 - RNA, 23 nt, Artificial Sequence
  Synthetic
acaccacauauucucacccauaa

SEQ ID NO: 451754 - RNA, 24 nt, Artificial Sequence
  Synthetic
aacaccacauauucucacccauaa

SEQ ID NO: 451755 - RNA, 18 nt, Artificial Sequence
  Synthetic
uaauguguguccccauaa

SEQ ID NO: 451756 - RNA, 19 nt, Artificial Sequence
  Synthetic
auaauguguguccccauaa

SEQ ID NO: 451757 - RNA, 20 nt, Artificial Sequence
  Synthetic
aauaauguguguccccauaa

SEQ ID NO: 451758 - RNA, 21 nt, Artificial Sequence
  Synthetic
aaauaauguguguccccauaa

SEQ ID NO: 451759 - RNA, 22 nt, Artificial Sequence
  Synthetic
caaauaauguguguccccauaa

SEQ ID NO: 451760 - RNA, 23 nt, Artificial Sequence
  Synthetic
acaaauaauguguguccccauaa

SEQ ID NO: 451761 - RNA, 24 nt, Artificial Sequence
  Synthetic
aacaaauaauguguguccccauaa

SEQ ID NO: 451762 - RNA, 18 nt, Artificial Sequence
  Synthetic
uuaaagccccagccauaa

SEQ ID NO: 451763 - RNA, 19 nt, Artificial Sequence
  Synthetic
cuuaaagccccagccauaa

SEQ ID NO: 451764 - RNA, 20 nt, Artificial Sequence
  Synthetic
gcuuaaagccccagccauaa

SEQ ID NO: 451765 - RNA, 21 nt, Artificial Sequence
  Synthetic
ugcuuaaagccccagccauaa

SEQ ID NO: 451766 - RNA, 22 nt, Artificial Sequence
  Synthetic
gugcuuaaagccccagccauaa

SEQ ID NO: 451767 - RNA, 23 nt, Artificial Sequence
  Synthetic
ugugcuuaaagccccagccauaa

SEQ ID NO: 451768 - RNA, 24 nt, Artificial Sequence
  Synthetic
uugugcuuaaagccccagccauaa

SEQ ID NO: 451769 - RNA, 18 nt, Artificial Sequence
  Synthetic
aaaaagcauuagccauaa

SEQ ID NO: 451770 - RNA, 19 nt, Artificial Sequence
  Synthetic
uaaaaagcauuagccauaa

SEQ ID NO: 451771 - RNA, 20 nt, Artificial Sequence
  Synthetic
auaaaaagcauuagccauaa

SEQ ID NO: 451772 - RNA, 21 nt, Artificial Sequence
  Synthetic
cauaaaaagcauuagccauaa

SEQ ID NO: 451773 - RNA, 22 nt, Artificial Sequence
  Synthetic
acauaaaaagcauuagccauaa

SEQ ID NO: 451774 - RNA, 23 nt, Artificial Sequence
  Synthetic
gacauaaaaagcauuagccauaa

SEQ ID NO: 451775 - RNA, 24 nt, Artificial Sequence
  Synthetic
agacauaaaaagcauuagccauaa

SEQ ID NO: 451776 - RNA, 18 nt, Artificial Sequence
  Synthetic
guugugcucuggccauaa

SEQ ID NO: 451777 - RNA, 19 nt, Artificial Sequence
  Synthetic
uguugugcucuggccauaa

SEQ ID NO: 451778 - RNA, 20 nt, Artificial Sequence
  Synthetic
auguugugcucuggccauaa

SEQ ID NO: 451779 - RNA, 21 nt, Artificial Sequence
  Synthetic
aauguugugcucuggccauaa

SEQ ID NO: 451780 - RNA, 22 nt, Artificial Sequence
  Synthetic
caauguugugcucuggccauaa

SEQ ID NO: 451781 - RNA, 23 nt, Artificial Sequence
  Synthetic
acaauguugugcucuggccauaa

SEQ ID NO: 451782 - RNA, 24 nt, Artificial Sequence
  Synthetic
gacaauguugugcucuggccauaa

SEQ ID NO: 451783 - RNA, 18 nt, Artificial Sequence
  Synthetic
caacuuccacauccauaa

SEQ ID NO: 451784 - RNA, 19 nt, Artificial Sequence
  Synthetic
ucaacuuccacauccauaa

SEQ ID NO: 451785 - RNA, 20 nt, Artificial Sequence
  Synthetic
uucaacuuccacauccauaa

SEQ ID NO: 451786 - RNA, 21 nt, Artificial Sequence
  Synthetic
cuucaacuuccacauccauaa

SEQ ID NO: 451787 - RNA, 22 nt, Artificial Sequence
  Synthetic
gcuucaacuuccacauccauaa

SEQ ID NO: 451788 - RNA, 23 nt, Artificial Sequence
  Synthetic
ggcuucaacuuccacauccauaa

SEQ ID NO: 451789 - RNA, 24 nt, Artificial Sequence
  Synthetic
uggcuucaacuuccacauccauaa

SEQ ID NO: 451790 - RNA, 18 nt, Artificial Sequence
  Synthetic
cugcugcuuaguccauaa

SEQ ID NO: 451791 - RNA, 19 nt, Artificial Sequence
  Synthetic
acugcugcuuaguccauaa

SEQ ID NO: 451792 - RNA, 20 nt, Artificial Sequence
  Synthetic
aacugcugcuuaguccauaa

SEQ ID NO: 451793 - RNA, 21 nt, Artificial Sequence
  Synthetic
caacugcugcuuaguccauaa

SEQ ID NO: 451794 - RNA, 22 nt, Artificial Sequence
  Synthetic
ucaacugcugcuuaguccauaa

SEQ ID NO: 451795 - RNA, 23 nt, Artificial Sequence
  Synthetic
cucaacugcugcuuaguccauaa

SEQ ID NO: 451796 - RNA, 24 nt, Artificial Sequence
  Synthetic
ccucaacugcugcuuaguccauaa

SEQ ID NO: 451797 - RNA, 18 nt, Artificial Sequence
  Synthetic
ccugguaauuguccauaa

SEQ ID NO: 451798 - RNA, 19 nt, Artificial Sequence
  Synthetic
accugguaauuguccauaa

SEQ ID NO: 451799 - RNA, 20 nt, Artificial Sequence
  Synthetic
gaccugguaauuguccauaa

SEQ ID NO: 451800 - RNA, 21 nt, Artificial Sequence
  Synthetic
agaccugguaauuguccauaa

SEQ ID NO: 451801 - RNA, 22 nt, Artificial Sequence
  Synthetic
uagaccugguaauuguccauaa

SEQ ID NO: 451802 - RNA, 23 nt, Artificial Sequence
  Synthetic
auagaccugguaauuguccauaa

SEQ ID NO: 451803 - RNA, 24 nt, Artificial Sequence
  Synthetic
uauagaccugguaauuguccauaa

SEQ ID NO: 451804 - RNA, 18 nt, Artificial Sequence
  Synthetic
uuuauuuugcuuccauaa

SEQ ID NO: 451805 - RNA, 19 nt, Artificial Sequence
  Synthetic
guuuauuuugcuuccauaa

SEQ ID NO: 451806 - RNA, 20 nt, Artificial Sequence
  Synthetic
aguuuauuuugcuuccauaa

SEQ ID NO: 451807 - RNA, 21 nt, Artificial Sequence
  Synthetic
caguuuauuuugcuuccauaa

SEQ ID NO: 451808 - RNA, 22 nt, Artificial Sequence
  Synthetic
acaguuuauuuugcuuccauaa

SEQ ID NO: 451809 - RNA, 23 nt, Artificial Sequence
  Synthetic
uacaguuuauuuugcuuccauaa

SEQ ID NO: 451810 - RNA, 24 nt, Artificial Sequence
  Synthetic
uuacaguuuauuuugcuuccauaa

SEQ ID NO: 451811 - RNA, 18 nt, Artificial Sequence
  Synthetic
gaauuuuaucuuccauaa

SEQ ID NO: 451812 - RNA, 19 nt, Artificial Sequence
  Synthetic
agaauuuuaucuuccauaa

SEQ ID NO: 451813 - RNA, 20 nt, Artificial Sequence
  Synthetic
cagaauuuuaucuuccauaa

SEQ ID NO: 451814 - RNA, 21 nt, Artificial Sequence
  Synthetic
ccagaauuuuaucuuccauaa

SEQ ID NO: 451815 - RNA, 22 nt, Artificial Sequence
  Synthetic
uccagaauuuuaucuuccauaa

SEQ ID NO: 451816 - RNA, 23 nt, Artificial Sequence
  Synthetic
cuccagaauuuuaucuuccauaa

SEQ ID NO: 451817 - RNA, 24 nt, Artificial Sequence
  Synthetic
ucuccagaauuuuaucuuccauaa

SEQ ID NO: 451818 - RNA, 18 nt, Artificial Sequence
  Synthetic
ggucauaacaaagcauaa

SEQ ID NO: 451819 - RNA, 19 nt, Artificial Sequence
  Synthetic
uggucauaacaaagcauaa

SEQ ID NO: 451820 - RNA, 20 nt, Artificial Sequence
  Synthetic
cuggucauaacaaagcauaa

SEQ ID NO: 451821 - RNA, 21 nt, Artificial Sequence
  Synthetic
ucuggucauaacaaagcauaa

SEQ ID NO: 451822 - RNA, 22 nt, Artificial Sequence
  Synthetic
uucuggucauaacaaagcauaa

SEQ ID NO: 451823 - RNA, 23 nt, Artificial Sequence
  Synthetic
guucuggucauaacaaagcauaa

SEQ ID NO: 451824 - RNA, 24 nt, Artificial Sequence
  Synthetic
uguucuggucauaacaaagcauaa

SEQ ID NO: 451825 - RNA, 18 nt, Artificial Sequence
  Synthetic
aagguacauuucgcauaa

SEQ ID NO: 451826 - RNA, 19 nt, Artificial Sequence
  Synthetic
caagguacauuucgcauaa

SEQ ID NO: 451827 - RNA, 20 nt, Artificial Sequence
  Synthetic
acaagguacauuucgcauaa

SEQ ID NO: 451828 - RNA, 21 nt, Artificial Sequence
  Synthetic
uacaagguacauuucgcauaa

SEQ ID NO: 451829 - RNA, 22 nt, Artificial Sequence
  Synthetic
cuacaagguacauuucgcauaa

SEQ ID NO: 451830 - RNA, 23 nt, Artificial Sequence
  Synthetic
acuacaagguacauuucgcauaa

SEQ ID NO: 451831 - RNA, 24 nt, Artificial Sequence
  Synthetic
gacuacaagguacauuucgcauaa

SEQ ID NO: 451832 - RNA, 18 nt, Artificial Sequence
  Synthetic
guguagacauaugcauaa

SEQ ID NO: 451833 - RNA, 19 nt, Artificial Sequence
  Synthetic
aguguagacauaugcauaa

SEQ ID NO: 451834 - RNA, 20 nt, Artificial Sequence
  Synthetic
caguguagacauaugcauaa

SEQ ID NO: 451835 - RNA, 21 nt, Artificial Sequence
  Synthetic
ucaguguagacauaugcauaa

SEQ ID NO: 451836 - RNA, 22 nt, Artificial Sequence
  Synthetic
gucaguguagacauaugcauaa

SEQ ID NO: 451837 - RNA, 23 nt, Artificial Sequence
  Synthetic
ugucaguguagacauaugcauaa

SEQ ID NO: 451838 - RNA, 24 nt, Artificial Sequence
  Synthetic
gugucaguguagacauaugcauaa

SEQ ID NO: 451839 - RNA, 18 nt, Artificial Sequence
  Synthetic
cuuuguggaugugcauaa

SEQ ID NO: 451840 - RNA, 19 nt, Artificial Sequence
  Synthetic
ucuuuguggaugugcauaa

SEQ ID NO: 451841 - RNA, 20 nt, Artificial Sequence
  Synthetic
aucuuuguggaugugcauaa

SEQ ID NO: 451842 - RNA, 21 nt, Artificial Sequence
  Synthetic
aaucuuuguggaugugcauaa

SEQ ID NO: 451843 - RNA, 22 nt, Artificial Sequence
  Synthetic
aaaucuuuguggaugugcauaa

SEQ ID NO: 451844 - RNA, 23 nt, Artificial Sequence
  Synthetic
caaaucuuuguggaugugcauaa

SEQ ID NO: 451845 - RNA, 24 nt, Artificial Sequence
  Synthetic
ccaaaucuuuguggaugugcauaa

SEQ ID NO: 451846 - RNA, 18 nt, Artificial Sequence
  Synthetic
uguaacaauauugcauaa

SEQ ID NO: 451847 - RNA, 19 nt, Artificial Sequence
  Synthetic
auguaacaauauugcauaa

SEQ ID NO: 451848 - RNA, 20 nt, Artificial Sequence
  Synthetic
uauguaacaauauugcauaa

SEQ ID NO: 451849 - RNA, 21 nt, Artificial Sequence
  Synthetic
cuauguaacaauauugcauaa

SEQ ID NO: 451850 - RNA, 22 nt, Artificial Sequence
  Synthetic
ucuauguaacaauauugcauaa

SEQ ID NO: 451851 - RNA, 23 nt, Artificial Sequence
  Synthetic
aucuauguaacaauauugcauaa

SEQ ID NO: 451852 - RNA, 24 nt, Artificial Sequence
  Synthetic
aaucuauguaacaauauugcauaa

SEQ ID NO: 451853 - RNA, 18 nt, Artificial Sequence
  Synthetic
cuuuuucaucuugcauaa

SEQ ID NO: 451854 - RNA, 19 nt, Artificial Sequence
  Synthetic
acuuuuucaucuugcauaa

SEQ ID NO: 451855 - RNA, 20 nt, Artificial Sequence
  Synthetic
aacuuuuucaucuugcauaa

SEQ ID NO: 451856 - RNA, 21 nt, Artificial Sequence
  Synthetic
gaacuuuuucaucuugcauaa

SEQ ID NO: 451857 - RNA, 22 nt, Artificial Sequence
  Synthetic
agaacuuuuucaucuugcauaa

SEQ ID NO: 451858 - RNA, 23 nt, Artificial Sequence
  Synthetic
uagaacuuuuucaucuugcauaa

SEQ ID NO: 451859 - RNA, 24 nt, Artificial Sequence
  Synthetic
cuagaacuuuuucaucuugcauaa

SEQ ID NO: 451860 - RNA, 18 nt, Artificial Sequence
  Synthetic
accccuacucuugcauaa

SEQ ID NO: 451861 - RNA, 19 nt, Artificial Sequence
  Synthetic
caccccuacucuugcauaa

SEQ ID NO: 451862 - RNA, 20 nt, Artificial Sequence
  Synthetic
acaccccuacucuugcauaa

SEQ ID NO: 451863 - RNA, 21 nt, Artificial Sequence
  Synthetic
cacaccccuacucuugcauaa

SEQ ID NO: 451864 - RNA, 22 nt, Artificial Sequence
  Synthetic
ucacaccccuacucuugcauaa

SEQ ID NO: 451865 - RNA, 23 nt, Artificial Sequence
  Synthetic
aucacaccccuacucuugcauaa

SEQ ID NO: 451866 - RNA, 24 nt, Artificial Sequence
  Synthetic
aaucacaccccuacucuugcauaa

SEQ ID NO: 451867 - RNA, 18 nt, Artificial Sequence
  Synthetic
acauuaggauuugcauaa

SEQ ID NO: 451868 - RNA, 19 nt, Artificial Sequence
  Synthetic
uacauuaggauuugcauaa

SEQ ID NO: 451869 - RNA, 20 nt, Artificial Sequence
  Synthetic
uuacauuaggauuugcauaa

SEQ ID NO: 451870 - RNA, 21 nt, Artificial Sequence
  Synthetic
uuuacauuaggauuugcauaa

SEQ ID NO: 451871 - RNA, 22 nt, Artificial Sequence
  Synthetic
uuuuacauuaggauuugcauaa

SEQ ID NO: 451872 - RNA, 23 nt, Artificial Sequence
  Synthetic
auuuuacauuaggauuugcauaa

SEQ ID NO: 451873 - RNA, 24 nt, Artificial Sequence
  Synthetic
uauuuuacauuaggauuugcauaa

SEQ ID NO: 451874 - RNA, 18 nt, Artificial Sequence
  Synthetic
uaauuuuguuuugcauaa

SEQ ID NO: 451875 - RNA, 19 nt, Artificial Sequence
  Synthetic
uuaauuuuguuuugcauaa

SEQ ID NO: 451876 - RNA, 20 nt, Artificial Sequence
  Synthetic
auuaauuuuguuuugcauaa

SEQ ID NO: 451877 - RNA, 21 nt, Artificial Sequence
  Synthetic
uauuaauuuuguuuugcauaa

SEQ ID NO: 451878 - RNA, 22 nt, Artificial Sequence
  Synthetic
auauuaauuuuguuuugcauaa

SEQ ID NO: 451879 - RNA, 23 nt, Artificial Sequence
  Synthetic
cauauuaauuuuguuuugcauaa

SEQ ID NO: 451880 - RNA, 24 nt, Artificial Sequence
  Synthetic
ccauauuaauuuuguuuugcauaa

SEQ ID NO: 451881 - RNA, 18 nt, Artificial Sequence
  Synthetic
aaaaggaggaaaucauaa

SEQ ID NO: 451882 - RNA, 19 nt, Artificial Sequence
  Synthetic
aaaaaggaggaaaucauaa

SEQ ID NO: 451883 - RNA, 20 nt, Artificial Sequence
  Synthetic
caaaaaggaggaaaucauaa

SEQ ID NO: 451884 - RNA, 21 nt, Artificial Sequence
  Synthetic
ccaaaaaggaggaaaucauaa

SEQ ID NO: 451885 - RNA, 22 nt, Artificial Sequence
  Synthetic
gccaaaaaggaggaaaucauaa

SEQ ID NO: 451886 - RNA, 23 nt, Artificial Sequence
  Synthetic
ugccaaaaaggaggaaaucauaa

SEQ ID NO: 451887 - RNA, 24 nt, Artificial Sequence
  Synthetic
augccaaaaaggaggaaaucauaa

SEQ ID NO: 451888 - RNA, 18 nt, Artificial Sequence
  Synthetic
uaauuaaaacaaucauaa

SEQ ID NO: 451889 - RNA, 19 nt, Artificial Sequence
  Synthetic
auaauuaaaacaaucauaa

SEQ ID NO: 451890 - RNA, 20 nt, Artificial Sequence
  Synthetic
aauaauuaaaacaaucauaa

SEQ ID NO: 451891 - RNA, 21 nt, Artificial Sequence
  Synthetic
uaauaauuaaaacaaucauaa

SEQ ID NO: 451892 - RNA, 22 nt, Artificial Sequence
  Synthetic
guaauaauuaaaacaaucauaa

SEQ ID NO: 451893 - RNA, 23 nt, Artificial Sequence
  Synthetic
uguaauaauuaaaacaaucauaa

SEQ ID NO: 451894 - RNA, 24 nt, Artificial Sequence
  Synthetic
uuguaauaauuaaaacaaucauaa

SEQ ID NO: 451895 - RNA, 18 nt, Artificial Sequence
  Synthetic
uggacucaugaaucauaa

SEQ ID NO: 451896 - RNA, 19 nt, Artificial Sequence
  Synthetic
cuggacucaugaaucauaa

SEQ ID NO: 451897 - RNA, 20 nt, Artificial Sequence
  Synthetic
ccuggacucaugaaucauaa

SEQ ID NO: 451898 - RNA, 21 nt, Artificial Sequence
  Synthetic
gccuggacucaugaaucauaa

SEQ ID NO: 451899 - RNA, 22 nt, Artificial Sequence
  Synthetic
agccuggacucaugaaucauaa

SEQ ID NO: 451900 - RNA, 23 nt, Artificial Sequence
  Synthetic
aagccuggacucaugaaucauaa

SEQ ID NO: 451901 - RNA, 24 nt, Artificial Sequence
  Synthetic
aaagccuggacucaugaaucauaa

SEQ ID NO: 451902 - RNA, 18 nt, Artificial Sequence
  Synthetic
gaaaguauauaaucauaa

SEQ ID NO: 451903 - RNA, 19 nt, Artificial Sequence
  Synthetic
ugaaaguauauaaucauaa

SEQ ID NO: 451904 - RNA, 20 nt, Artificial Sequence
  Synthetic
uugaaaguauauaaucauaa

SEQ ID NO: 451905 - RNA, 21 nt, Artificial Sequence
  Synthetic
uuugaaaguauauaaucauaa

SEQ ID NO: 451906 - RNA, 22 nt, Artificial Sequence
  Synthetic
uuuugaaaguauauaaucauaa

SEQ ID NO: 451907 - RNA, 23 nt, Artificial Sequence
  Synthetic
uuuuugaaaguauauaaucauaa

SEQ ID NO: 451908 - RNA, 24 nt, Artificial Sequence
  Synthetic
uuuuuugaaaguauauaaucauaa

SEQ ID NO: 451909 - RNA, 18 nt, Artificial Sequence
  Synthetic
caggaaccuucaucauaa

SEQ ID NO: 451910 - RNA, 19 nt, Artificial Sequence
  Synthetic
ucaggaaccuucaucauaa

SEQ ID NO: 451911 - RNA, 20 nt, Artificial Sequence
  Synthetic
cucaggaaccuucaucauaa

SEQ ID NO: 451912 - RNA, 21 nt, Artificial Sequence
  Synthetic
ucucaggaaccuucaucauaa

SEQ ID NO: 451913 - RNA, 22 nt, Artificial Sequence
  Synthetic
aucucaggaaccuucaucauaa

SEQ ID NO: 451914 - RNA, 23 nt, Artificial Sequence
  Synthetic
gaucucaggaaccuucaucauaa

SEQ ID NO: 451915 - RNA, 24 nt, Artificial Sequence
  Synthetic
ggaucucaggaaccuucaucauaa

SEQ ID NO: 451916 - RNA, 18 nt, Artificial Sequence
  Synthetic
aaagcaacuggaucauaa

SEQ ID NO: 451917 - RNA, 19 nt, Artificial Sequence
  Synthetic
aaaagcaacuggaucauaa

SEQ ID NO: 451918 - RNA, 20 nt, Artificial Sequence
  Synthetic
caaaagcaacuggaucauaa

SEQ ID NO: 451919 - RNA, 21 nt, Artificial Sequence
  Synthetic
ucaaaagcaacuggaucauaa

SEQ ID NO: 451920 - RNA, 22 nt, Artificial Sequence
  Synthetic
uucaaaagcaacuggaucauaa

SEQ ID NO: 451921 - RNA, 23 nt, Artificial Sequence
  Synthetic
uuucaaaagcaacuggaucauaa

SEQ ID NO: 451922 - RNA, 24 nt, Artificial Sequence
  Synthetic
auuucaaaagcaacuggaucauaa

SEQ ID NO: 451923 - RNA, 18 nt, Artificial Sequence
  Synthetic
gcauggucucacucauaa

SEQ ID NO: 451924 - RNA, 19 nt, Artificial Sequence
  Synthetic
ugcauggucucacucauaa

SEQ ID NO: 451925 - RNA, 20 nt, Artificial Sequence
  Synthetic
cugcauggucucacucauaa

SEQ ID NO: 451926 - RNA, 21 nt, Artificial Sequence
  Synthetic
acugcauggucucacucauaa

SEQ ID NO: 451927 - RNA, 22 nt, Artificial Sequence
  Synthetic
cacugcauggucucacucauaa

SEQ ID NO: 451928 - RNA, 23 nt, Artificial Sequence
  Synthetic
acacugcauggucucacucauaa

SEQ ID NO: 451929 - RNA, 24 nt, Artificial Sequence
  Synthetic
aacacugcauggucucacucauaa

SEQ ID NO: 451930 - RNA, 18 nt, Artificial Sequence
  Synthetic
agucuaauguccucauaa

SEQ ID NO: 451931 - RNA, 19 nt, Artificial Sequence
  Synthetic
aagucuaauguccucauaa

SEQ ID NO: 451932 - RNA, 20 nt, Artificial Sequence
  Synthetic
uaagucuaauguccucauaa

SEQ ID NO: 451933 - RNA, 21 nt, Artificial Sequence
  Synthetic
auaagucuaauguccucauaa

SEQ ID NO: 451934 - RNA, 22 nt, Artificial Sequence
  Synthetic
aauaagucuaauguccucauaa

SEQ ID NO: 451935 - RNA, 23 nt, Artificial Sequence
  Synthetic
caauaagucuaauguccucauaa

SEQ ID NO: 451936 - RNA, 24 nt, Artificial Sequence
  Synthetic
ccaauaagucuaauguccucauaa

SEQ ID NO: 451937 - RNA, 18 nt, Artificial Sequence
  Synthetic
caggggagaggcucauaa

SEQ ID NO: 451938 - RNA, 19 nt, Artificial Sequence
  Synthetic
gcaggggagaggcucauaa

SEQ ID NO: 451939 - RNA, 20 nt, Artificial Sequence
  Synthetic
ggcaggggagaggcucauaa

SEQ ID NO: 451940 - RNA, 21 nt, Artificial Sequence
  Synthetic
uggcaggggagaggcucauaa

SEQ ID NO: 451941 - RNA, 22 nt, Artificial Sequence
  Synthetic
guggcaggggagaggcucauaa

SEQ ID NO: 451942 - RNA, 23 nt, Artificial Sequence
  Synthetic
gguggcaggggagaggcucauaa

SEQ ID NO: 451943 - RNA, 24 nt, Artificial Sequence
  Synthetic
ugguggcaggggagaggcucauaa

SEQ ID NO: 451944 - RNA, 18 nt, Artificial Sequence
  Synthetic
gucaccuuccagucauaa

SEQ ID NO: 451945 - RNA, 19 nt, Artificial Sequence
  Synthetic
ggucaccuuccagucauaa

SEQ ID NO: 451946 - RNA, 20 nt, Artificial Sequence
  Synthetic
uggucaccuuccagucauaa

SEQ ID NO: 451947 - RNA, 21 nt, Artificial Sequence
  Synthetic
uuggucaccuuccagucauaa

SEQ ID NO: 451948 - RNA, 22 nt, Artificial Sequence
  Synthetic
uuuggucaccuuccagucauaa

SEQ ID NO: 451949 - RNA, 23 nt, Artificial Sequence
  Synthetic
auuuggucaccuuccagucauaa

SEQ ID NO: 451950 - RNA, 24 nt, Artificial Sequence
  Synthetic
cauuuggucaccuuccagucauaa

SEQ ID NO: 451951 - RNA, 18 nt, Artificial Sequence
  Synthetic
acacuagcaucgucauaa

SEQ ID NO: 451952 - RNA, 19 nt, Artificial Sequence
  Synthetic
aacacuagcaucgucauaa

SEQ ID NO: 451953 - RNA, 20 nt, Artificial Sequence
  Synthetic
aaacacuagcaucgucauaa

SEQ ID NO: 451954 - RNA, 21 nt, Artificial Sequence
  Synthetic
uaaacacuagcaucgucauaa

SEQ ID NO: 451955 - RNA, 22 nt, Artificial Sequence
  Synthetic
auaaacacuagcaucgucauaa

SEQ ID NO: 451956 - RNA, 23 nt, Artificial Sequence
  Synthetic
cauaaacacuagcaucgucauaa

SEQ ID NO: 451957 - RNA, 24 nt, Artificial Sequence
  Synthetic
ucauaaacacuagcaucgucauaa

SEQ ID NO: 451958 - RNA, 18 nt, Artificial Sequence
  Synthetic
gguucugaugggucauaa

SEQ ID NO: 451959 - RNA, 19 nt, Artificial Sequence
  Synthetic
agguucugaugggucauaa

SEQ ID NO: 451960 - RNA, 20 nt, Artificial Sequence
  Synthetic
uagguucugaugggucauaa

SEQ ID NO: 451961 - RNA, 21 nt, Artificial Sequence
  Synthetic
guagguucugaugggucauaa

SEQ ID NO: 451962 - RNA, 22 nt, Artificial Sequence
  Synthetic
aguagguucugaugggucauaa

SEQ ID NO: 451963 - RNA, 23 nt, Artificial Sequence
  Synthetic
aaguagguucugaugggucauaa

SEQ ID NO: 451964 - RNA, 24 nt, Artificial Sequence
  Synthetic
uaaguagguucugaugggucauaa

SEQ ID NO: 451965 - RNA, 18 nt, Artificial Sequence
  Synthetic
gggaaaaaaaugucauaa

SEQ ID NO: 451966 - RNA, 19 nt, Artificial Sequence
  Synthetic
cgggaaaaaaaugucauaa

SEQ ID NO: 451967 - RNA, 20 nt, Artificial Sequence
  Synthetic
ccgggaaaaaaaugucauaa

SEQ ID NO: 451968 - RNA, 21 nt, Artificial Sequence
  Synthetic
gccgggaaaaaaaugucauaa

SEQ ID NO: 451969 - RNA, 22 nt, Artificial Sequence
  Synthetic
ugccgggaaaaaaaugucauaa

SEQ ID NO: 451970 - RNA, 23 nt, Artificial Sequence
  Synthetic
uugccgggaaaaaaaugucauaa

SEQ ID NO: 451971 - RNA, 24 nt, Artificial Sequence
  Synthetic
uuugccgggaaaaaaaugucauaa

SEQ ID NO: 451972 - RNA, 18 nt, Artificial Sequence
  Synthetic
agaaguguaaauucauaa

SEQ ID NO: 451973 - RNA, 19 nt, Artificial Sequence
  Synthetic
gagaaguguaaauucauaa

SEQ ID NO: 451974 - RNA, 20 nt, Artificial Sequence
  Synthetic
ugagaaguguaaauucauaa

SEQ ID NO: 451975 - RNA, 21 nt, Artificial Sequence
  Synthetic
cugagaaguguaaauucauaa

SEQ ID NO: 451976 - RNA, 22 nt, Artificial Sequence
  Synthetic
ucugagaaguguaaauucauaa

SEQ ID NO: 451977 - RNA, 23 nt, Artificial Sequence
  Synthetic
cucugagaaguguaaauucauaa

SEQ ID NO: 451978 - RNA, 24 nt, Artificial Sequence
  Synthetic
acucugagaaguguaaauucauaa

SEQ ID NO: 451979 - RNA, 18 nt, Artificial Sequence
  Synthetic
guggaaaagaauucauaa

SEQ ID NO: 451980 - RNA, 19 nt, Artificial Sequence
  Synthetic
aguggaaaagaauucauaa

SEQ ID NO: 451981 - RNA, 20 nt, Artificial Sequence
  Synthetic
uaguggaaaagaauucauaa

SEQ ID NO: 451982 - RNA, 21 nt, Artificial Sequence
  Synthetic
guaguggaaaagaauucauaa

SEQ ID NO: 451983 - RNA, 22 nt, Artificial Sequence
  Synthetic
uguaguggaaaagaauucauaa

SEQ ID NO: 451984 - RNA, 23 nt, Artificial Sequence
  Synthetic
auguaguggaaaagaauucauaa

SEQ ID NO: 451985 - RNA, 24 nt, Artificial Sequence
  Synthetic
uauguaguggaaaagaauucauaa

SEQ ID NO: 451986 - RNA, 18 nt, Artificial Sequence
  Synthetic
guuaauacuacuucauaa

SEQ ID NO: 451987 - RNA, 19 nt, Artificial Sequence
  Synthetic
aguuaauacuacuucauaa

SEQ ID NO: 451988 - RNA, 20 nt, Artificial Sequence
  Synthetic
caguuaauacuacuucauaa

SEQ ID NO: 451989 - RNA, 21 nt, Artificial Sequence
  Synthetic
gcaguuaauacuacuucauaa

SEQ ID NO: 451990 - RNA, 22 nt, Artificial Sequence
  Synthetic
agcaguuaauacuacuucauaa

SEQ ID NO: 451991 - RNA, 23 nt, Artificial Sequence
  Synthetic
aagcaguuaauacuacuucauaa

SEQ ID NO: 451992 - RNA, 24 nt, Artificial Sequence
  Synthetic
caagcaguuaauacuacuucauaa

SEQ ID NO: 451993 - RNA, 18 nt, Artificial Sequence
  Synthetic
ccaaacuaagcuucauaa

SEQ ID NO: 451994 - RNA, 19 nt, Artificial Sequence
  Synthetic
gccaaacuaagcuucauaa

SEQ ID NO: 451995 - RNA, 20 nt, Artificial Sequence
  Synthetic
agccaaacuaagcuucauaa

SEQ ID NO: 451996 - RNA, 21 nt, Artificial Sequence
  Synthetic
cagccaaacuaagcuucauaa

SEQ ID NO: 451997 - RNA, 22 nt, Artificial Sequence
  Synthetic
ccagccaaacuaagcuucauaa

SEQ ID NO: 451998 - RNA, 23 nt, Artificial Sequence
  Synthetic
uccagccaaacuaagcuucauaa

SEQ ID NO: 451999 - RNA, 24 nt, Artificial Sequence
  Synthetic
auccagccaaacuaagcuucauaa

SEQ ID NO: 452000 - RNA, 18 nt, Artificial Sequence
  Synthetic
aaucucugcuuuucauaa

SEQ ID NO: 452001 - RNA, 19 nt, Artificial Sequence
  Synthetic
aaaucucugcuuuucauaa

SEQ ID NO: 452002 - RNA, 20 nt, Artificial Sequence
  Synthetic
aaaaucucugcuuuucauaa

SEQ ID NO: 452003 - RNA, 21 nt, Artificial Sequence
  Synthetic
uaaaaucucugcuuuucauaa

SEQ ID NO: 452004 - RNA, 22 nt, Artificial Sequence
  Synthetic
uuaaaaucucugcuuuucauaa

SEQ ID NO: 452005 - RNA, 23 nt, Artificial Sequence
  Synthetic
uuuaaaaucucugcuuuucauaa

SEQ ID NO: 452006 - RNA, 24 nt, Artificial Sequence
  Synthetic
uuuuaaaaucucugcuuuucauaa

SEQ ID NO: 452007 - RNA, 18 nt, Artificial Sequence
  Synthetic
aauaaucuagaaagauaa

SEQ ID NO: 452008 - RNA, 19 nt, Artificial Sequence
  Synthetic
uaauaaucuagaaagauaa

SEQ ID NO: 452009 - RNA, 20 nt, Artificial Sequence
  Synthetic
uuaauaaucuagaaagauaa

SEQ ID NO: 452010 - RNA, 21 nt, Artificial Sequence
  Synthetic
auuaauaaucuagaaagauaa

SEQ ID NO: 452011 - RNA, 22 nt, Artificial Sequence
  Synthetic
aauuaauaaucuagaaagauaa

SEQ ID NO: 452012 - RNA, 23 nt, Artificial Sequence
  Synthetic
aaauuaauaaucuagaaagauaa

SEQ ID NO: 452013 - RNA, 24 nt, Artificial Sequence
  Synthetic
aaaauuaauaaucuagaaagauaa

SEQ ID NO: 452014 - RNA, 18 nt, Artificial Sequence
  Synthetic
auuuucacgagaagauaa

SEQ ID NO: 452015 - RNA, 19 nt, Artificial Sequence
  Synthetic
uauuuucacgagaagauaa

SEQ ID NO: 452016 - RNA, 20 nt, Artificial Sequence
  Synthetic
cuauuuucacgagaagauaa

SEQ ID NO: 452017 - RNA, 21 nt, Artificial Sequence
  Synthetic
gcuauuuucacgagaagauaa

SEQ ID NO: 452018 - RNA, 22 nt, Artificial Sequence
  Synthetic
agcuauuuucacgagaagauaa

SEQ ID NO: 452019 - RNA, 23 nt, Artificial Sequence
  Synthetic
uagcuauuuucacgagaagauaa

SEQ ID NO: 452020 - RNA, 24 nt, Artificial Sequence
  Synthetic
uuagcuauuuucacgagaagauaa

SEQ ID NO: 452021 - RNA, 18 nt, Artificial Sequence
  Synthetic
auacuggauauaagauaa

SEQ ID NO: 452022 - RNA, 19 nt, Artificial Sequence
  Synthetic
uauacuggauauaagauaa

SEQ ID NO: 452023 - RNA, 20 nt, Artificial Sequence
  Synthetic
auauacuggauauaagauaa

SEQ ID NO: 452024 - RNA, 21 nt, Artificial Sequence
  Synthetic
aauauacuggauauaagauaa

SEQ ID NO: 452025 - RNA, 22 nt, Artificial Sequence
  Synthetic
gaauauacuggauauaagauaa

SEQ ID NO: 452026 - RNA, 23 nt, Artificial Sequence
  Synthetic
agaauauacuggauauaagauaa

SEQ ID NO: 452027 - RNA, 24 nt, Artificial Sequence
  Synthetic
aagaauauacuggauauaagauaa

SEQ ID NO: 452028 - RNA, 18 nt, Artificial Sequence
  Synthetic
acuuuguguguaagauaa

SEQ ID NO: 452029 - RNA, 19 nt, Artificial Sequence
  Synthetic
uacuuuguguguaagauaa

SEQ ID NO: 452030 - RNA, 20 nt, Artificial Sequence
  Synthetic
auacuuuguguguaagauaa

SEQ ID NO: 452031 - RNA, 21 nt, Artificial Sequence
  Synthetic
uauacuuuguguguaagauaa

SEQ ID NO: 452032 - RNA, 22 nt, Artificial Sequence
  Synthetic
uuauacuuuguguguaagauaa

SEQ ID NO: 452033 - RNA, 23 nt, Artificial Sequence
  Synthetic
auuauacuuuguguguaagauaa

SEQ ID NO: 452034 - RNA, 24 nt, Artificial Sequence
  Synthetic
uauuauacuuuguguguaagauaa

SEQ ID NO: 452035 - RNA, 18 nt, Artificial Sequence
  Synthetic
ucuaugcuguuaagauaa

SEQ ID NO: 452036 - RNA, 19 nt, Artificial Sequence
  Synthetic
uucuaugcuguuaagauaa

SEQ ID NO: 452037 - RNA, 20 nt, Artificial Sequence
  Synthetic
cuucuaugcuguuaagauaa

SEQ ID NO: 452038 - RNA, 21 nt, Artificial Sequence
  Synthetic
ucuucuaugcuguuaagauaa

SEQ ID NO: 452039 - RNA, 22 nt, Artificial Sequence
  Synthetic
gucuucuaugcuguuaagauaa

SEQ ID NO: 452040 - RNA, 23 nt, Artificial Sequence
  Synthetic
ugucuucuaugcuguuaagauaa

SEQ ID NO: 452041 - RNA, 24 nt, Artificial Sequence
  Synthetic
augucuucuaugcuguuaagauaa

SEQ ID NO: 452042 - RNA, 18 nt, Artificial Sequence
  Synthetic
aauacacaaaacagauaa

SEQ ID NO: 452043 - RNA, 19 nt, Artificial Sequence
  Synthetic
caauacacaaaacagauaa

SEQ ID NO: 452044 - RNA, 20 nt, Artificial Sequence
  Synthetic
ucaauacacaaaacagauaa

SEQ ID NO: 452045 - RNA, 21 nt, Artificial Sequence
  Synthetic
cucaauacacaaaacagauaa

SEQ ID NO: 452046 - RNA, 22 nt, Artificial Sequence
  Synthetic
ucucaauacacaaaacagauaa

SEQ ID NO: 452047 - RNA, 23 nt, Artificial Sequence
  Synthetic
aucucaauacacaaaacagauaa

SEQ ID NO: 452048 - RNA, 24 nt, Artificial Sequence
  Synthetic
uaucucaauacacaaaacagauaa

SEQ ID NO: 452049 - RNA, 18 nt, Artificial Sequence
  Synthetic
aacugaacaaacagauaa

SEQ ID NO: 452050 - RNA, 19 nt, Artificial Sequence
  Synthetic
gaacugaacaaacagauaa

SEQ ID NO: 452051 - RNA, 20 nt, Artificial Sequence
  Synthetic
agaacugaacaaacagauaa

SEQ ID NO: 452052 - RNA, 21 nt, Artificial Sequence
  Synthetic
aagaacugaacaaacagauaa

SEQ ID NO: 452053 - RNA, 22 nt, Artificial Sequence
  Synthetic
aaagaacugaacaaacagauaa

SEQ ID NO: 452054 - RNA, 23 nt, Artificial Sequence
  Synthetic
uaaagaacugaacaaacagauaa

SEQ ID NO: 452055 - RNA, 24 nt, Artificial Sequence
  Synthetic
uuaaagaacugaacaaacagauaa

SEQ ID NO: 452056 - RNA, 18 nt, Artificial Sequence
  Synthetic
caguugauaaacagauaa

SEQ ID NO: 452057 - RNA, 19 nt, Artificial Sequence
  Synthetic
ucaguugauaaacagauaa

SEQ ID NO: 452058 - RNA, 20 nt, Artificial Sequence
  Synthetic
gucaguugauaaacagauaa

SEQ ID NO: 452059 - RNA, 21 nt, Artificial Sequence
  Synthetic
ggucaguugauaaacagauaa

SEQ ID NO: 452060 - RNA, 22 nt, Artificial Sequence
  Synthetic
aggucaguugauaaacagauaa

SEQ ID NO: 452061 - RNA, 23 nt, Artificial Sequence
  Synthetic
gaggucaguugauaaacagauaa

SEQ ID NO: 452062 - RNA, 24 nt, Artificial Sequence
  Synthetic
ugaggucaguugauaaacagauaa

SEQ ID NO: 452063 - RNA, 18 nt, Artificial Sequence
  Synthetic
uuguucugugacagauaa

SEQ ID NO: 452064 - RNA, 19 nt, Artificial Sequence
  Synthetic
auuguucugugacagauaa

SEQ ID NO: 452065 - RNA, 20 nt, Artificial Sequence
  Synthetic
uauuguucugugacagauaa

SEQ ID NO: 452066 - RNA, 21 nt, Artificial Sequence
  Synthetic
auauuguucugugacagauaa

SEQ ID NO: 452067 - RNA, 22 nt, Artificial Sequence
  Synthetic
uauauuguucugugacagauaa

SEQ ID NO: 452068 - RNA, 23 nt, Artificial Sequence
  Synthetic
uuauauuguucugugacagauaa

SEQ ID NO: 452069 - RNA, 24 nt, Artificial Sequence
  Synthetic
uuuauauuguucugugacagauaa

SEQ ID NO: 452070 - RNA, 18 nt, Artificial Sequence
  Synthetic
ggaguaauagccagauaa

SEQ ID NO: 452071 - RNA, 19 nt, Artificial Sequence
  Synthetic
aggaguaauagccagauaa

SEQ ID NO: 452072 - RNA, 20 nt, Artificial Sequence
  Synthetic
uaggaguaauagccagauaa

SEQ ID NO: 452073 - RNA, 21 nt, Artificial Sequence
  Synthetic
guaggaguaauagccagauaa

SEQ ID NO: 452074 - RNA, 22 nt, Artificial Sequence
  Synthetic
gguaggaguaauagccagauaa

SEQ ID NO: 452075 - RNA, 23 nt, Artificial Sequence
  Synthetic
cgguaggaguaauagccagauaa

SEQ ID NO: 452076 - RNA, 24 nt, Artificial Sequence
  Synthetic
acgguaggaguaauagccagauaa

SEQ ID NO: 452077 - RNA, 18 nt, Artificial Sequence
  Synthetic
uuccuuugcugcagauaa

SEQ ID NO: 452078 - RNA, 19 nt, Artificial Sequence
  Synthetic
uuuccuuugcugcagauaa

SEQ ID NO: 452079 - RNA, 20 nt, Artificial Sequence
  Synthetic
uuuuccuuugcugcagauaa

SEQ ID NO: 452080 - RNA, 21 nt, Artificial Sequence
  Synthetic
uuuuuccuuugcugcagauaa

SEQ ID NO: 452081 - RNA, 22 nt, Artificial Sequence
  Synthetic
cuuuuuccuuugcugcagauaa

SEQ ID NO: 452082 - RNA, 23 nt, Artificial Sequence
  Synthetic
ucuuuuuccuuugcugcagauaa

SEQ ID NO: 452083 - RNA, 24 nt, Artificial Sequence
  Synthetic
cucuuuuuccuuugcugcagauaa

SEQ ID NO: 452084 - RNA, 18 nt, Artificial Sequence
  Synthetic
aaaaaaaaggucagauaa

SEQ ID NO: 452085 - RNA, 19 nt, Artificial Sequence
  Synthetic
gaaaaaaaaggucagauaa

SEQ ID NO: 452086 - RNA, 20 nt, Artificial Sequence
  Synthetic
ggaaaaaaaaggucagauaa

SEQ ID NO: 452087 - RNA, 21 nt, Artificial Sequence
  Synthetic
aggaaaaaaaaggucagauaa

SEQ ID NO: 452088 - RNA, 22 nt, Artificial Sequence
  Synthetic
caggaaaaaaaaggucagauaa

SEQ ID NO: 452089 - RNA, 23 nt, Artificial Sequence
  Synthetic
acaggaaaaaaaaggucagauaa

SEQ ID NO: 452090 - RNA, 24 nt, Artificial Sequence
  Synthetic
aacaggaaaaaaaaggucagauaa

SEQ ID NO: 452091 - RNA, 18 nt, Artificial Sequence
  Synthetic
ucugcaacacagagauaa

SEQ ID NO: 452092 - RNA, 19 nt, Artificial Sequence
  Synthetic
aucugcaacacagagauaa

SEQ ID NO: 452093 - RNA, 20 nt, Artificial Sequence
  Synthetic
caucugcaacacagagauaa

SEQ ID NO: 452094 - RNA, 21 nt, Artificial Sequence
  Synthetic
ucaucugcaacacagagauaa

SEQ ID NO: 452095 - RNA, 22 nt, Artificial Sequence
  Synthetic
aucaucugcaacacagagauaa

SEQ ID NO: 452096 - RNA, 23 nt, Artificial Sequence
  Synthetic
caucaucugcaacacagagauaa

SEQ ID NO: 452097 - RNA, 24 nt, Artificial Sequence
  Synthetic
ccaucaucugcaacacagagauaa

SEQ ID NO: 452098 - RNA, 18 nt, Artificial Sequence
  Synthetic
cuugacaaaaggagauaa

SEQ ID NO: 452099 - RNA, 19 nt, Artificial Sequence
  Synthetic
ccuugacaaaaggagauaa

SEQ ID NO: 452100 - RNA, 20 nt, Artificial Sequence
  Synthetic
cccuugacaaaaggagauaa

SEQ ID NO: 452101 - RNA, 21 nt, Artificial Sequence
  Synthetic
gcccuugacaaaaggagauaa

SEQ ID NO: 452102 - RNA, 22 nt, Artificial Sequence
  Synthetic
ggcccuugacaaaaggagauaa

SEQ ID NO: 452103 - RNA, 23 nt, Artificial Sequence
  Synthetic
aggcccuugacaaaaggagauaa

SEQ ID NO: 452104 - RNA, 24 nt, Artificial Sequence
  Synthetic
caggcccuugacaaaaggagauaa

SEQ ID NO: 452105 - RNA, 18 nt, Artificial Sequence
  Synthetic
ccaagguaagggagauaa

SEQ ID NO: 452106 - RNA, 19 nt, Artificial Sequence
  Synthetic
gccaagguaagggagauaa

SEQ ID NO: 452107 - RNA, 20 nt, Artificial Sequence
  Synthetic
ggccaagguaagggagauaa

SEQ ID NO: 452108 - RNA, 21 nt, Artificial Sequence
  Synthetic
gggccaagguaagggagauaa

SEQ ID NO: 452109 - RNA, 22 nt, Artificial Sequence
  Synthetic
ggggccaagguaagggagauaa

SEQ ID NO: 452110 - RNA, 23 nt, Artificial Sequence
  Synthetic
aggggccaagguaagggagauaa

SEQ ID NO: 452111 - RNA, 24 nt, Artificial Sequence
  Synthetic
aaggggccaagguaagggagauaa

SEQ ID NO: 452112 - RNA, 18 nt, Artificial Sequence
  Synthetic
cugaaauuaaugagauaa

SEQ ID NO: 452113 - RNA, 19 nt, Artificial Sequence
  Synthetic
ccugaaauuaaugagauaa

SEQ ID NO: 452114 - RNA, 20 nt, Artificial Sequence
  Synthetic
gccugaaauuaaugagauaa

SEQ ID NO: 452115 - RNA, 21 nt, Artificial Sequence
  Synthetic
ggccugaaauuaaugagauaa

SEQ ID NO: 452116 - RNA, 22 nt, Artificial Sequence
  Synthetic
uggccugaaauuaaugagauaa

SEQ ID NO: 452117 - RNA, 23 nt, Artificial Sequence
  Synthetic
auggccugaaauuaaugagauaa

SEQ ID NO: 452118 - RNA, 24 nt, Artificial Sequence
  Synthetic
cauggccugaaauuaaugagauaa

SEQ ID NO: 452119 - RNA, 18 nt, Artificial Sequence
  Synthetic
ugguauauaccuagauaa

SEQ ID NO: 452120 - RNA, 19 nt, Artificial Sequence
  Synthetic
uugguauauaccuagauaa

SEQ ID NO: 452121 - RNA, 20 nt, Artificial Sequence
  Synthetic
cuugguauauaccuagauaa

SEQ ID NO: 452122 - RNA, 21 nt, Artificial Sequence
  Synthetic
ccuugguauauaccuagauaa

SEQ ID NO: 452123 - RNA, 22 nt, Artificial Sequence
  Synthetic
accuugguauauaccuagauaa

SEQ ID NO: 452124 - RNA, 23 nt, Artificial Sequence
  Synthetic
aaccuugguauauaccuagauaa

SEQ ID NO: 452125 - RNA, 24 nt, Artificial Sequence
  Synthetic
uaaccuugguauauaccuagauaa

SEQ ID NO: 452126 - RNA, 18 nt, Artificial Sequence
  Synthetic
acaaggaauccuagauaa

SEQ ID NO: 452127 - RNA, 19 nt, Artificial Sequence
  Synthetic
aacaaggaauccuagauaa

SEQ ID NO: 452128 - RNA, 20 nt, Artificial Sequence
  Synthetic
aaacaaggaauccuagauaa

SEQ ID NO: 452129 - RNA, 21 nt, Artificial Sequence
  Synthetic
uaaacaaggaauccuagauaa

SEQ ID NO: 452130 - RNA, 22 nt, Artificial Sequence
  Synthetic
auaaacaaggaauccuagauaa

SEQ ID NO: 452131 - RNA, 23 nt, Artificial Sequence
  Synthetic
gauaaacaaggaauccuagauaa

SEQ ID NO: 452132 - RNA, 24 nt, Artificial Sequence
  Synthetic
agauaaacaaggaauccuagauaa

SEQ ID NO: 452133 - RNA, 18 nt, Artificial Sequence
  Synthetic
ugaaauugcuuuagauaa

SEQ ID NO: 452134 - RNA, 19 nt, Artificial Sequence
  Synthetic
cugaaauugcuuuagauaa

SEQ ID NO: 452135 - RNA, 20 nt, Artificial Sequence
  Synthetic
gcugaaauugcuuuagauaa

SEQ ID NO: 452136 - RNA, 21 nt, Artificial Sequence
  Synthetic
agcugaaauugcuuuagauaa

SEQ ID NO: 452137 - RNA, 22 nt, Artificial Sequence
  Synthetic
aagcugaaauugcuuuagauaa

SEQ ID NO: 452138 - RNA, 23 nt, Artificial Sequence
  Synthetic
uaagcugaaauugcuuuagauaa

SEQ ID NO: 452139 - RNA, 24 nt, Artificial Sequence
  Synthetic
auaagcugaaauugcuuuagauaa

SEQ ID NO: 452140 - RNA, 18 nt, Artificial Sequence
  Synthetic
uauauaugcuaacgauaa

SEQ ID NO: 452141 - RNA, 19 nt, Artificial Sequence
  Synthetic
auauauaugcuaacgauaa

SEQ ID NO: 452142 - RNA, 20 nt, Artificial Sequence
  Synthetic
uauauauaugcuaacgauaa

SEQ ID NO: 452143 - RNA, 21 nt, Artificial Sequence
  Synthetic
uuauauauaugcuaacgauaa

SEQ ID NO: 452144 - RNA, 22 nt, Artificial Sequence
  Synthetic
auuauauauaugcuaacgauaa

SEQ ID NO: 452145 - RNA, 23 nt, Artificial Sequence
  Synthetic
cauuauauauaugcuaacgauaa

SEQ ID NO: 452146 - RNA, 24 nt, Artificial Sequence
  Synthetic
ucauuauauauaugcuaacgauaa

SEQ ID NO: 452147 - RNA, 18 nt, Artificial Sequence
  Synthetic
uguggaugucaaggauaa

SEQ ID NO: 452148 - RNA, 19 nt, Artificial Sequence
  Synthetic
guguggaugucaaggauaa

SEQ ID NO: 452149 - RNA, 20 nt, Artificial Sequence
  Synthetic
aguguggaugucaaggauaa

SEQ ID NO: 452150 - RNA, 21 nt, Artificial Sequence
  Synthetic
aaguguggaugucaaggauaa

SEQ ID NO: 452151 - RNA, 22 nt, Artificial Sequence
  Synthetic
uaaguguggaugucaaggauaa

SEQ ID NO: 452152 - RNA, 23 nt, Artificial Sequence
  Synthetic
uuaaguguggaugucaaggauaa

SEQ ID NO: 452153 - RNA, 24 nt, Artificial Sequence
  Synthetic
uuuaaguguggaugucaaggauaa

SEQ ID NO: 452154 - RNA, 18 nt, Artificial Sequence
  Synthetic
aaagugucugaaggauaa

SEQ ID NO: 452155 - RNA, 19 nt, Artificial Sequence
  Synthetic
aaaagugucugaaggauaa

SEQ ID NO: 452156 - RNA, 20 nt, Artificial Sequence
  Synthetic
caaaagugucugaaggauaa

SEQ ID NO: 452157 - RNA, 21 nt, Artificial Sequence
  Synthetic
ucaaaagugucugaaggauaa

SEQ ID NO: 452158 - RNA, 22 nt, Artificial Sequence
  Synthetic
gucaaaagugucugaaggauaa

SEQ ID NO: 452159 - RNA, 23 nt, Artificial Sequence
  Synthetic
ggucaaaagugucugaaggauaa

SEQ ID NO: 452160 - RNA, 24 nt, Artificial Sequence
  Synthetic
aggucaaaagugucugaaggauaa

SEQ ID NO: 452161 - RNA, 18 nt, Artificial Sequence
  Synthetic
uuucacccuuaaggauaa

SEQ ID NO: 452162 - RNA, 19 nt, Artificial Sequence
  Synthetic
uuuucacccuuaaggauaa

SEQ ID NO: 452163 - RNA, 20 nt, Artificial Sequence
  Synthetic
guuuucacccuuaaggauaa

SEQ ID NO: 452164 - RNA, 21 nt, Artificial Sequence
  Synthetic
gguuuucacccuuaaggauaa

SEQ ID NO: 452165 - RNA, 22 nt, Artificial Sequence
  Synthetic
agguuuucacccuuaaggauaa

SEQ ID NO: 452166 - RNA, 23 nt, Artificial Sequence
  Synthetic
cagguuuucacccuuaaggauaa

SEQ ID NO: 452167 - RNA, 24 nt, Artificial Sequence
  Synthetic
ccagguuuucacccuuaaggauaa

SEQ ID NO: 452168 - RNA, 18 nt, Artificial Sequence
  Synthetic
gugucuuuaacaggauaa

SEQ ID NO: 452169 - RNA, 19 nt, Artificial Sequence
  Synthetic
ugugucuuuaacaggauaa

SEQ ID NO: 452170 - RNA, 20 nt, Artificial Sequence
  Synthetic
augugucuuuaacaggauaa

SEQ ID NO: 452171 - RNA, 21 nt, Artificial Sequence
  Synthetic
uaugugucuuuaacaggauaa

SEQ ID NO: 452172 - RNA, 22 nt, Artificial Sequence
  Synthetic
guaugugucuuuaacaggauaa

SEQ ID NO: 452173 - RNA, 23 nt, Artificial Sequence
  Synthetic
aguaugugucuuuaacaggauaa

SEQ ID NO: 452174 - RNA, 24 nt, Artificial Sequence
  Synthetic
gaguaugugucuuuaacaggauaa

SEQ ID NO: 452175 - RNA, 18 nt, Artificial Sequence
  Synthetic
uucgccuccacaggauaa

SEQ ID NO: 452176 - RNA, 19 nt, Artificial Sequence
  Synthetic
auucgccuccacaggauaa

SEQ ID NO: 452177 - RNA, 20 nt, Artificial Sequence
  Synthetic
uauucgccuccacaggauaa

SEQ ID NO: 452178 - RNA, 21 nt, Artificial Sequence
  Synthetic
guauucgccuccacaggauaa

SEQ ID NO: 452179 - RNA, 22 nt, Artificial Sequence
  Synthetic
gguauucgccuccacaggauaa

SEQ ID NO: 452180 - RNA, 23 nt, Artificial Sequence
  Synthetic
agguauucgccuccacaggauaa

SEQ ID NO: 452181 - RNA, 24 nt, Artificial Sequence
  Synthetic
uagguauucgccuccacaggauaa

SEQ ID NO: 452182 - RNA, 18 nt, Artificial Sequence
  Synthetic
ucuucuccuucaggauaa

SEQ ID NO: 452183 - RNA, 19 nt, Artificial Sequence
  Synthetic
aucuucuccuucaggauaa

SEQ ID NO: 452184 - RNA, 20 nt, Artificial Sequence
  Synthetic
caucuucuccuucaggauaa

SEQ ID NO: 452185 - RNA, 21 nt, Artificial Sequence
  Synthetic
ucaucuucuccuucaggauaa

SEQ ID NO: 452186 - RNA, 22 nt, Artificial Sequence
  Synthetic
uucaucuucuccuucaggauaa

SEQ ID NO: 452187 - RNA, 23 nt, Artificial Sequence
  Synthetic
auucaucuucuccuucaggauaa

SEQ ID NO: 452188 - RNA, 24 nt, Artificial Sequence
  Synthetic
cauucaucuucuccuucaggauaa

SEQ ID NO: 452189 - RNA, 18 nt, Artificial Sequence
  Synthetic
gcugugggcugaggauaa

SEQ ID NO: 452190 - RNA, 19 nt, Artificial Sequence
  Synthetic
ugcugugggcugaggauaa

SEQ ID NO: 452191 - RNA, 20 nt, Artificial Sequence
  Synthetic
cugcugugggcugaggauaa

SEQ ID NO: 452192 - RNA, 21 nt, Artificial Sequence
  Synthetic
acugcugugggcugaggauaa

SEQ ID NO: 452193 - RNA, 22 nt, Artificial Sequence
  Synthetic
uacugcugugggcugaggauaa

SEQ ID NO: 452194 - RNA, 23 nt, Artificial Sequence
  Synthetic
auacugcugugggcugaggauaa

SEQ ID NO: 452195 - RNA, 24 nt, Artificial Sequence
  Synthetic
aauacugcugugggcugaggauaa

SEQ ID NO: 452196 - RNA, 18 nt, Artificial Sequence
  Synthetic
gcaauuacaauaggauaa

SEQ ID NO: 452197 - RNA, 19 nt, Artificial Sequence
  Synthetic
ugcaauuacaauaggauaa

SEQ ID NO: 452198 - RNA, 20 nt, Artificial Sequence
  Synthetic
cugcaauuacaauaggauaa

SEQ ID NO: 452199 - RNA, 21 nt, Artificial Sequence
  Synthetic
ucugcaauuacaauaggauaa

SEQ ID NO: 452200 - RNA, 22 nt, Artificial Sequence
  Synthetic
uucugcaauuacaauaggauaa

SEQ ID NO: 452201 - RNA, 23 nt, Artificial Sequence
  Synthetic
cuucugcaauuacaauaggauaa

SEQ ID NO: 452202 - RNA, 24 nt, Artificial Sequence
  Synthetic
ucuucugcaauuacaauaggauaa

SEQ ID NO: 452203 - RNA, 18 nt, Artificial Sequence
  Synthetic
ucccagauucuaggauaa

SEQ ID NO: 452204 - RNA, 19 nt, Artificial Sequence
  Synthetic
cucccagauucuaggauaa

SEQ ID NO: 452205 - RNA, 20 nt, Artificial Sequence
  Synthetic
ucucccagauucuaggauaa

SEQ ID NO: 452206 - RNA, 21 nt, Artificial Sequence
  Synthetic
cucucccagauucuaggauaa

SEQ ID NO: 452207 - RNA, 22 nt, Artificial Sequence
  Synthetic
ccucucccagauucuaggauaa

SEQ ID NO: 452208 - RNA, 23 nt, Artificial Sequence
  Synthetic
uccucucccagauucuaggauaa

SEQ ID NO: 452209 - RNA, 24 nt, Artificial Sequence
  Synthetic
cuccucucccagauucuaggauaa

SEQ ID NO: 452210 - RNA, 18 nt, Artificial Sequence
  Synthetic
cacauggccuacggauaa

SEQ ID NO: 452211 - RNA, 19 nt, Artificial Sequence
  Synthetic
gcacauggccuacggauaa

SEQ ID NO: 452212 - RNA, 20 nt, Artificial Sequence
  Synthetic
ggcacauggccuacggauaa

SEQ ID NO: 452213 - RNA, 21 nt, Artificial Sequence
  Synthetic
uggcacauggccuacggauaa

SEQ ID NO: 452214 - RNA, 22 nt, Artificial Sequence
  Synthetic
auggcacauggccuacggauaa

SEQ ID NO: 452215 - RNA, 23 nt, Artificial Sequence
  Synthetic
aauggcacauggccuacggauaa

SEQ ID NO: 452216 - RNA, 24 nt, Artificial Sequence
  Synthetic
uaauggcacauggccuacggauaa

SEQ ID NO: 452217 - RNA, 18 nt, Artificial Sequence
  Synthetic
aaaaaaugcaggggauaa

SEQ ID NO: 452218 - RNA, 19 nt, Artificial Sequence
  Synthetic
aaaaaaaugcaggggauaa

SEQ ID NO: 452219 - RNA, 20 nt, Artificial Sequence
  Synthetic
aaaaaaaaugcaggggauaa

SEQ ID NO: 452220 - RNA, 21 nt, Artificial Sequence
  Synthetic
aaaaaaaaaugcaggggauaa

SEQ ID NO: 452221 - RNA, 22 nt, Artificial Sequence
  Synthetic
gaaaaaaaaaugcaggggauaa

SEQ ID NO: 452222 - RNA, 23 nt, Artificial Sequence
  Synthetic
ugaaaaaaaaaugcaggggauaa

SEQ ID NO: 452223 - RNA, 24 nt, Artificial Sequence
  Synthetic
augaaaaaaaaaugcaggggauaa

SEQ ID NO: 452224 - RNA, 18 nt, Artificial Sequence
  Synthetic
aagguguuuuggggauaa

SEQ ID NO: 452225 - RNA, 19 nt, Artificial Sequence
  Synthetic
caagguguuuuggggauaa

SEQ ID NO: 452226 - RNA, 20 nt, Artificial Sequence
  Synthetic
ucaagguguuuuggggauaa

SEQ ID NO: 452227 - RNA, 21 nt, Artificial Sequence
  Synthetic
aucaagguguuuuggggauaa

SEQ ID NO: 452228 - RNA, 22 nt, Artificial Sequence
  Synthetic
caucaagguguuuuggggauaa

SEQ ID NO: 452229 - RNA, 23 nt, Artificial Sequence
  Synthetic
acaucaagguguuuuggggauaa

SEQ ID NO: 452230 - RNA, 24 nt, Artificial Sequence
  Synthetic
uacaucaagguguuuuggggauaa

SEQ ID NO: 452231 - RNA, 18 nt, Artificial Sequence
  Synthetic
agagcgauaaauggauaa

SEQ ID NO: 452232 - RNA, 19 nt, Artificial Sequence
  Synthetic
cagagcgauaaauggauaa

SEQ ID NO: 452233 - RNA, 20 nt, Artificial Sequence
  Synthetic
acagagcgauaaauggauaa

SEQ ID NO: 452234 - RNA, 21 nt, Artificial Sequence
  Synthetic
uacagagcgauaaauggauaa

SEQ ID NO: 452235 - RNA, 22 nt, Artificial Sequence
  Synthetic
guacagagcgauaaauggauaa

SEQ ID NO: 452236 - RNA, 23 nt, Artificial Sequence
  Synthetic
uguacagagcgauaaauggauaa

SEQ ID NO: 452237 - RNA, 24 nt, Artificial Sequence
  Synthetic
auguacagagcgauaaauggauaa

SEQ ID NO: 452238 - RNA, 18 nt, Artificial Sequence
  Synthetic
uaauauaggaauggauaa

SEQ ID NO: 452239 - RNA, 19 nt, Artificial Sequence
  Synthetic
auaauauaggaauggauaa

SEQ ID NO: 452240 - RNA, 20 nt, Artificial Sequence
  Synthetic
uauaauauaggaauggauaa

SEQ ID NO: 452241 - RNA, 21 nt, Artificial Sequence
  Synthetic
auauaauauaggaauggauaa

SEQ ID NO: 452242 - RNA, 22 nt, Artificial Sequence
  Synthetic
gauauaauauaggaauggauaa

SEQ ID NO: 452243 - RNA, 23 nt, Artificial Sequence
  Synthetic
ugauauaauauaggaauggauaa

SEQ ID NO: 452244 - RNA, 24 nt, Artificial Sequence
  Synthetic
augauauaauauaggaauggauaa

SEQ ID NO: 452245 - RNA, 18 nt, Artificial Sequence
  Synthetic
cacuccagccauggauaa

SEQ ID NO: 452246 - RNA, 19 nt, Artificial Sequence
  Synthetic
ccacuccagccauggauaa

SEQ ID NO: 452247 - RNA, 20 nt, Artificial Sequence
  Synthetic
gccacuccagccauggauaa

SEQ ID NO: 452248 - RNA, 21 nt, Artificial Sequence
  Synthetic
agccacuccagccauggauaa

SEQ ID NO: 452249 - RNA, 22 nt, Artificial Sequence
  Synthetic
cagccacuccagccauggauaa

SEQ ID NO: 452250 - RNA, 23 nt, Artificial Sequence
  Synthetic
ccagccacuccagccauggauaa

SEQ ID NO: 452251 - RNA, 24 nt, Artificial Sequence
  Synthetic
cccagccacuccagccauggauaa

SEQ ID NO: 452252 - RNA, 18 nt, Artificial Sequence
  Synthetic
gaaccauaagguggauaa

SEQ ID NO: 452253 - RNA, 19 nt, Artificial Sequence
  Synthetic
cgaaccauaagguggauaa

SEQ ID NO: 452254 - RNA, 20 nt, Artificial Sequence
  Synthetic
ccgaaccauaagguggauaa

SEQ ID NO: 452255 - RNA, 21 nt, Artificial Sequence
  Synthetic
cccgaaccauaagguggauaa

SEQ ID NO: 452256 - RNA, 22 nt, Artificial Sequence
  Synthetic
ccccgaaccauaagguggauaa

SEQ ID NO: 452257 - RNA, 23 nt, Artificial Sequence
  Synthetic
gccccgaaccauaagguggauaa

SEQ ID NO: 452258 - RNA, 24 nt, Artificial Sequence
  Synthetic
ugccccgaaccauaagguggauaa

SEQ ID NO: 452259 - RNA, 18 nt, Artificial Sequence
  Synthetic
aaccuuuuuuuuggauaa

SEQ ID NO: 452260 - RNA, 19 nt, Artificial Sequence
  Synthetic
aaaccuuuuuuuuggauaa

SEQ ID NO: 452261 - RNA, 20 nt, Artificial Sequence
  Synthetic
aaaaccuuuuuuuuggauaa

SEQ ID NO: 452262 - RNA, 21 nt, Artificial Sequence
  Synthetic
aaaaaccuuuuuuuuggauaa

SEQ ID NO: 452263 - RNA, 22 nt, Artificial Sequence
  Synthetic
aaaaaaccuuuuuuuuggauaa

SEQ ID NO: 452264 - RNA, 23 nt, Artificial Sequence
  Synthetic
aaaaaaaccuuuuuuuuggauaa

SEQ ID NO: 452265 - RNA, 24 nt, Artificial Sequence
  Synthetic
aaaaaaaaccuuuuuuuuggauaa

SEQ ID NO: 452266 - RNA, 18 nt, Artificial Sequence
  Synthetic
cacaauaaaaaaugauaa

SEQ ID NO: 452267 - RNA, 19 nt, Artificial Sequence
  Synthetic
acacaauaaaaaaugauaa

SEQ ID NO: 452268 - RNA, 20 nt, Artificial Sequence
  Synthetic
gacacaauaaaaaaugauaa

SEQ ID NO: 452269 - RNA, 21 nt, Artificial Sequence
  Synthetic
agacacaauaaaaaaugauaa

SEQ ID NO: 452270 - RNA, 22 nt, Artificial Sequence
  Synthetic
uagacacaauaaaaaaugauaa

SEQ ID NO: 452271 - RNA, 23 nt, Artificial Sequence
  Synthetic
auagacacaauaaaaaaugauaa

SEQ ID NO: 452272 - RNA, 24 nt, Artificial Sequence
  Synthetic
aauagacacaauaaaaaaugauaa

SEQ ID NO: 452273 - RNA, 19 nt, Artificial Sequence
  Synthetic
gcacaauaaaaaaugauaa

SEQ ID NO: 452274 - RNA, 20 nt, Artificial Sequence
  Synthetic
ggcacaauaaaaaaugauaa

SEQ ID NO: 452275 - RNA, 21 nt, Artificial Sequence
  Synthetic
aggcacaauaaaaaaugauaa

SEQ ID NO: 452276 - RNA, 22 nt, Artificial Sequence
  Synthetic
gaggcacaauaaaaaaugauaa

SEQ ID NO: 452277 - RNA, 23 nt, Artificial Sequence
  Synthetic
agaggcacaauaaaaaaugauaa

SEQ ID NO: 452278 - RNA, 24 nt, Artificial Sequence
  Synthetic
aagaggcacaauaaaaaaugauaa

SEQ ID NO: 452279 - RNA, 18 nt, Artificial Sequence
  Synthetic
ugcaauaaaaaaugauaa

SEQ ID NO: 452280 - RNA, 19 nt, Artificial Sequence
  Synthetic
augcaauaaaaaaugauaa

SEQ ID NO: 452281 - RNA, 20 nt, Artificial Sequence
  Synthetic
gaugcaauaaaaaaugauaa

SEQ ID NO: 452282 - RNA, 21 nt, Artificial Sequence
  Synthetic
agaugcaauaaaaaaugauaa

SEQ ID NO: 452283 - RNA, 22 nt, Artificial Sequence
  Synthetic
uagaugcaauaaaaaaugauaa

SEQ ID NO: 452284 - RNA, 23 nt, Artificial Sequence
  Synthetic
auagaugcaauaaaaaaugauaa

SEQ ID NO: 452285 - RNA, 24 nt, Artificial Sequence
  Synthetic
aauagaugcaauaaaaaaugauaa

SEQ ID NO: 452286 - RNA, 18 nt, Artificial Sequence
  Synthetic
ugaucagauaaaugauaa

SEQ ID NO: 452287 - RNA, 19 nt, Artificial Sequence
  Synthetic
augaucagauaaaugauaa

SEQ ID NO: 452288 - RNA, 20 nt, Artificial Sequence
  Synthetic
aaugaucagauaaaugauaa

SEQ ID NO: 452289 - RNA, 21 nt, Artificial Sequence
  Synthetic
aaaugaucagauaaaugauaa

SEQ ID NO: 452290 - RNA, 22 nt, Artificial Sequence
  Synthetic
caaaugaucagauaaaugauaa

SEQ ID NO: 452291 - RNA, 23 nt, Artificial Sequence
  Synthetic
ucaaaugaucagauaaaugauaa

SEQ ID NO: 452292 - RNA, 24 nt, Artificial Sequence
  Synthetic
gucaaaugaucagauaaaugauaa

SEQ ID NO: 452293 - RNA, 18 nt, Artificial Sequence
  Synthetic
cgaagcaaccaaugauaa

SEQ ID NO: 452294 - RNA, 19 nt, Artificial Sequence
  Synthetic
acgaagcaaccaaugauaa

SEQ ID NO: 452295 - RNA, 20 nt, Artificial Sequence
  Synthetic
uacgaagcaaccaaugauaa

SEQ ID NO: 452296 - RNA, 21 nt, Artificial Sequence
  Synthetic
cuacgaagcaaccaaugauaa

SEQ ID NO: 452297 - RNA, 22 nt, Artificial Sequence
  Synthetic
ccuacgaagcaaccaaugauaa

SEQ ID NO: 452298 - RNA, 23 nt, Artificial Sequence
  Synthetic
accuacgaagcaaccaaugauaa

SEQ ID NO: 452299 - RNA, 24 nt, Artificial Sequence
  Synthetic
uaccuacgaagcaaccaaugauaa

SEQ ID NO: 452300 - RNA, 18 nt, Artificial Sequence
  Synthetic
aaauaaacagaaugauaa

SEQ ID NO: 452301 - RNA, 19 nt, Artificial Sequence
  Synthetic
gaaauaaacagaaugauaa

SEQ ID NO: 452302 - RNA, 20 nt, Artificial Sequence
  Synthetic
ugaaauaaacagaaugauaa

SEQ ID NO: 452303 - RNA, 21 nt, Artificial Sequence
  Synthetic
gugaaauaaacagaaugauaa

SEQ ID NO: 452304 - RNA, 22 nt, Artificial Sequence
  Synthetic
ugugaaauaaacagaaugauaa

SEQ ID NO: 452305 - RNA, 23 nt, Artificial Sequence
  Synthetic
uugugaaauaaacagaaugauaa

SEQ ID NO: 452306 - RNA, 24 nt, Artificial Sequence
  Synthetic
uuugugaaauaaacagaaugauaa

SEQ ID NO: 452307 - RNA, 18 nt, Artificial Sequence
  Synthetic
aauggagaauaaugauaa

SEQ ID NO: 452308 - RNA, 19 nt, Artificial Sequence
  Synthetic
uaauggagaauaaugauaa

SEQ ID NO: 452309 - RNA, 20 nt, Artificial Sequence
  Synthetic
auaauggagaauaaugauaa

SEQ ID NO: 452310 - RNA, 21 nt, Artificial Sequence
  Synthetic
aauaauggagaauaaugauaa

SEQ ID NO: 452311 - RNA, 22 nt, Artificial Sequence
  Synthetic
gaauaauggagaauaaugauaa

SEQ ID NO: 452312 - RNA, 23 nt, Artificial Sequence
  Synthetic
agaauaauggagaauaaugauaa

SEQ ID NO: 452313 - RNA, 24 nt, Artificial Sequence
  Synthetic
gagaauaauggagaauaaugauaa

SEQ ID NO: 452314 - RNA, 18 nt, Artificial Sequence
  Synthetic
aagguauuugcaugauaa

SEQ ID NO: 452315 - RNA, 19 nt, Artificial Sequence
  Synthetic
gaagguauuugcaugauaa

SEQ ID NO: 452316 - RNA, 20 nt, Artificial Sequence
  Synthetic
ugaagguauuugcaugauaa

SEQ ID NO: 452317 - RNA, 21 nt, Artificial Sequence
  Synthetic
uugaagguauuugcaugauaa

SEQ ID NO: 452318 - RNA, 22 nt, Artificial Sequence
  Synthetic
cuugaagguauuugcaugauaa

SEQ ID NO: 452319 - RNA, 23 nt, Artificial Sequence
  Synthetic
acuugaagguauuugcaugauaa

SEQ ID NO: 452320 - RNA, 24 nt, Artificial Sequence
  Synthetic
aacuugaagguauuugcaugauaa

SEQ ID NO: 452321 - RNA, 18 nt, Artificial Sequence
  Synthetic
gcauguucucacugauaa

SEQ ID NO: 452322 - RNA, 19 nt, Artificial Sequence
  Synthetic
ugcauguucucacugauaa

SEQ ID NO: 452323 - RNA, 20 nt, Artificial Sequence
  Synthetic
cugcauguucucacugauaa

SEQ ID NO: 452324 - RNA, 21 nt, Artificial Sequence
  Synthetic
acugcauguucucacugauaa

SEQ ID NO: 452325 - RNA, 22 nt, Artificial Sequence
  Synthetic
cacugcauguucucacugauaa

SEQ ID NO: 452326 - RNA, 23 nt, Artificial Sequence
  Synthetic
acacugcauguucucacugauaa

SEQ ID NO: 452327 - RNA, 24 nt, Artificial Sequence
  Synthetic
aacacugcauguucucacugauaa

SEQ ID NO: 452328 - RNA, 18 nt, Artificial Sequence
  Synthetic
uuugguaggaccugauaa

SEQ ID NO: 452329 - RNA, 19 nt, Artificial Sequence
  Synthetic
auuugguaggaccugauaa

SEQ ID NO: 452330 - RNA, 20 nt, Artificial Sequence
  Synthetic
gauuugguaggaccugauaa

SEQ ID NO: 452331 - RNA, 21 nt, Artificial Sequence
  Synthetic
agauuugguaggaccugauaa

SEQ ID NO: 452332 - RNA, 22 nt, Artificial Sequence
  Synthetic
uagauuugguaggaccugauaa

SEQ ID NO: 452333 - RNA, 23 nt, Artificial Sequence
  Synthetic
guagauuugguaggaccugauaa

SEQ ID NO: 452334 - RNA, 24 nt, Artificial Sequence
  Synthetic
uguagauuugguaggaccugauaa

SEQ ID NO: 452335 - RNA, 18 nt, Artificial Sequence
  Synthetic
cuguaauaaugcugauaa

SEQ ID NO: 452336 - RNA, 19 nt, Artificial Sequence
  Synthetic
acuguaauaaugcugauaa

SEQ ID NO: 452337 - RNA, 20 nt, Artificial Sequence
  Synthetic
cacuguaauaaugcugauaa

SEQ ID NO: 452338 - RNA, 21 nt, Artificial Sequence
  Synthetic
ucacuguaauaaugcugauaa

SEQ ID NO: 452339 - RNA, 22 nt, Artificial Sequence
  Synthetic
aucacuguaauaaugcugauaa

SEQ ID NO: 452340 - RNA, 23 nt, Artificial Sequence
  Synthetic
aaucacuguaauaaugcugauaa

SEQ ID NO: 452341 - RNA, 24 nt, Artificial Sequence
  Synthetic
aaaucacuguaauaaugcugauaa

SEQ ID NO: 452342 - RNA, 18 nt, Artificial Sequence
  Synthetic
gcccuaccucucugauaa

SEQ ID NO: 452343 - RNA, 19 nt, Artificial Sequence
  Synthetic
ugcccuaccucucugauaa

SEQ ID NO: 452344 - RNA, 20 nt, Artificial Sequence
  Synthetic
augcccuaccucucugauaa

SEQ ID NO: 452345 - RNA, 21 nt, Artificial Sequence
  Synthetic
caugcccuaccucucugauaa

SEQ ID NO: 452346 - RNA, 22 nt, Artificial Sequence
  Synthetic
acaugcccuaccucucugauaa

SEQ ID NO: 452347 - RNA, 23 nt, Artificial Sequence
  Synthetic
aacaugcccuaccucucugauaa

SEQ ID NO: 452348 - RNA, 24 nt, Artificial Sequence
  Synthetic
aaacaugcccuaccucucugauaa

SEQ ID NO: 452349 - RNA, 18 nt, Artificial Sequence
  Synthetic
aaguaaucauucugauaa

SEQ ID NO: 452350 - RNA, 19 nt, Artificial Sequence
  Synthetic
gaaguaaucauucugauaa

SEQ ID NO: 452351 - RNA, 20 nt, Artificial Sequence
  Synthetic
agaaguaaucauucugauaa

SEQ ID NO: 452352 - RNA, 21 nt, Artificial Sequence
  Synthetic
gagaaguaaucauucugauaa

SEQ ID NO: 452353 - RNA, 22 nt, Artificial Sequence
  Synthetic
ugagaaguaaucauucugauaa

SEQ ID NO: 452354 - RNA, 23 nt, Artificial Sequence
  Synthetic
augagaaguaaucauucugauaa

SEQ ID NO: 452355 - RNA, 24 nt, Artificial Sequence
  Synthetic
aaugagaaguaaucauucugauaa

SEQ ID NO: 452356 - RNA, 18 nt, Artificial Sequence
  Synthetic
ccaaaccuaaagugauaa

SEQ ID NO: 452357 - RNA, 19 nt, Artificial Sequence
  Synthetic
gccaaaccuaaagugauaa

SEQ ID NO: 452358 - RNA, 20 nt, Artificial Sequence
  Synthetic
agccaaaccuaaagugauaa

SEQ ID NO: 452359 - RNA, 21 nt, Artificial Sequence
  Synthetic
aagccaaaccuaaagugauaa

SEQ ID NO: 452360 - RNA, 22 nt, Artificial Sequence
  Synthetic
uaagccaaaccuaaagugauaa

SEQ ID NO: 452361 - RNA, 23 nt, Artificial Sequence
  Synthetic
uuaagccaaaccuaaagugauaa

SEQ ID NO: 452362 - RNA, 24 nt, Artificial Sequence
  Synthetic
cuuaagccaaaccuaaagugauaa

SEQ ID NO: 452363 - RNA, 18 nt, Artificial Sequence
  Synthetic
uuuagaaucuagugauaa

SEQ ID NO: 452364 - RNA, 19 nt, Artificial Sequence
  Synthetic
auuuagaaucuagugauaa

SEQ ID NO: 452365 - RNA, 20 nt, Artificial Sequence
  Synthetic
uauuuagaaucuagugauaa

SEQ ID NO: 452366 - RNA, 21 nt, Artificial Sequence
  Synthetic
auauuuagaaucuagugauaa

SEQ ID NO: 452367 - RNA, 22 nt, Artificial Sequence
  Synthetic
gauauuuagaaucuagugauaa

SEQ ID NO: 452368 - RNA, 23 nt, Artificial Sequence
  Synthetic
ugauauuuagaaucuagugauaa

SEQ ID NO: 452369 - RNA, 24 nt, Artificial Sequence
  Synthetic
augauauuuagaaucuagugauaa

SEQ ID NO: 452370 - RNA, 18 nt, Artificial Sequence
  Synthetic
uacuugucccggugauaa

SEQ ID NO: 452371 - RNA, 19 nt, Artificial Sequence
  Synthetic
auacuugucccggugauaa

SEQ ID NO: 452372 - RNA, 20 nt, Artificial Sequence
  Synthetic
uauacuugucccggugauaa

SEQ ID NO: 452373 - RNA, 21 nt, Artificial Sequence
  Synthetic
cuauacuugucccggugauaa

SEQ ID NO: 452374 - RNA, 22 nt, Artificial Sequence
  Synthetic
acuauacuugucccggugauaa

SEQ ID NO: 452375 - RNA, 23 nt, Artificial Sequence
  Synthetic
gacuauacuugucccggugauaa

SEQ ID NO: 452376 - RNA, 24 nt, Artificial Sequence
  Synthetic
ggacuauacuugucccggugauaa

SEQ ID NO: 452377 - RNA, 18 nt, Artificial Sequence
  Synthetic
gagagggaaaugugauaa

SEQ ID NO: 452378 - RNA, 19 nt, Artificial Sequence
  Synthetic
ggagagggaaaugugauaa

SEQ ID NO: 452379 - RNA, 20 nt, Artificial Sequence
  Synthetic
aggagagggaaaugugauaa

SEQ ID NO: 452380 - RNA, 21 nt, Artificial Sequence
  Synthetic
gaggagagggaaaugugauaa

SEQ ID NO: 452381 - RNA, 22 nt, Artificial Sequence
  Synthetic
agaggagagggaaaugugauaa

SEQ ID NO: 452382 - RNA, 23 nt, Artificial Sequence
  Synthetic
gagaggagagggaaaugugauaa

SEQ ID NO: 452383 - RNA, 24 nt, Artificial Sequence
  Synthetic
agagaggagagggaaaugugauaa

SEQ ID NO: 452384 - RNA, 18 nt, Artificial Sequence
  Synthetic
ggaagggagcauugauaa

SEQ ID NO: 452385 - RNA, 19 nt, Artificial Sequence
  Synthetic
gggaagggagcauugauaa

SEQ ID NO: 452386 - RNA, 20 nt, Artificial Sequence
  Synthetic
agggaagggagcauugauaa

SEQ ID NO: 452387 - RNA, 21 nt, Artificial Sequence
  Synthetic
aagggaagggagcauugauaa

SEQ ID NO: 452388 - RNA, 22 nt, Artificial Sequence
  Synthetic
aaagggaagggagcauugauaa

SEQ ID NO: 452389 - RNA, 23 nt, Artificial Sequence
  Synthetic
gaaagggaagggagcauugauaa

SEQ ID NO: 452390 - RNA, 24 nt, Artificial Sequence
  Synthetic
ugaaagggaagggagcauugauaa

SEQ ID NO: 452391 - RNA, 18 nt, Artificial Sequence
  Synthetic
ggguuaagucauugauaa

SEQ ID NO: 452392 - RNA, 19 nt, Artificial Sequence
  Synthetic
uggguuaagucauugauaa

SEQ ID NO: 452393 - RNA, 20 nt, Artificial Sequence
  Synthetic
auggguuaagucauugauaa

SEQ ID NO: 452394 - RNA, 21 nt, Artificial Sequence
  Synthetic
gauggguuaagucauugauaa

SEQ ID NO: 452395 - RNA, 22 nt, Artificial Sequence
  Synthetic
ggauggguuaagucauugauaa

SEQ ID NO: 452396 - RNA, 23 nt, Artificial Sequence
  Synthetic
aggauggguuaagucauugauaa

SEQ ID NO: 452397 - RNA, 24 nt, Artificial Sequence
  Synthetic
uaggauggguuaagucauugauaa

SEQ ID NO: 452398 - RNA, 18 nt, Artificial Sequence
  Synthetic
cuagaaggcccuugauaa

SEQ ID NO: 452399 - RNA, 19 nt, Artificial Sequence
  Synthetic
ucuagaaggcccuugauaa

SEQ ID NO: 452400 - RNA, 20 nt, Artificial Sequence
  Synthetic
aucuagaaggcccuugauaa

SEQ ID NO: 452401 - RNA, 21 nt, Artificial Sequence
  Synthetic
aaucuagaaggcccuugauaa

SEQ ID NO: 452402 - RNA, 22 nt, Artificial Sequence
  Synthetic
uaaucuagaaggcccuugauaa

SEQ ID NO: 452403 - RNA, 23 nt, Artificial Sequence
  Synthetic
auaaucuagaaggcccuugauaa

SEQ ID NO: 452404 - RNA, 24 nt, Artificial Sequence
  Synthetic
uauaaucuagaaggcccuugauaa

SEQ ID NO: 452405 - RNA, 18 nt, Artificial Sequence
  Synthetic
aagagaaauucuugauaa

SEQ ID NO: 452406 - RNA, 19 nt, Artificial Sequence
  Synthetic
aaagagaaauucuugauaa

SEQ ID NO: 452407 - RNA, 20 nt, Artificial Sequence
  Synthetic
uaaagagaaauucuugauaa

SEQ ID NO: 452408 - RNA, 21 nt, Artificial Sequence
  Synthetic
auaaagagaaauucuugauaa

SEQ ID NO: 452409 - RNA, 22 nt, Artificial Sequence
  Synthetic
aauaaagagaaauucuugauaa

SEQ ID NO: 452410 - RNA, 23 nt, Artificial Sequence
  Synthetic
gaauaaagagaaauucuugauaa

SEQ ID NO: 452411 - RNA, 24 nt, Artificial Sequence
  Synthetic
ugaauaaagagaaauucuugauaa

SEQ ID NO: 452412 - RNA, 18 nt, Artificial Sequence
  Synthetic
uaaguagaucuuugauaa

SEQ ID NO: 452413 - RNA, 19 nt, Artificial Sequence
  Synthetic
uuaaguagaucuuugauaa

SEQ ID NO: 452414 - RNA, 20 nt, Artificial Sequence
  Synthetic
uuuaaguagaucuuugauaa

SEQ ID NO: 452415 - RNA, 21 nt, Artificial Sequence
  Synthetic
uuuuaaguagaucuuugauaa

SEQ ID NO: 452416 - RNA, 22 nt, Artificial Sequence
  Synthetic
cuuuuaaguagaucuuugauaa

SEQ ID NO: 452417 - RNA, 23 nt, Artificial Sequence
  Synthetic
ccuuuuaaguagaucuuugauaa

SEQ ID NO: 452418 - RNA, 24 nt, Artificial Sequence
  Synthetic
cccuuuuaaguagaucuuugauaa

SEQ ID NO: 452419 - RNA, 18 nt, Artificial Sequence
  Synthetic
aucuuauuauuuugauaa

SEQ ID NO: 452420 - RNA, 19 nt, Artificial Sequence
  Synthetic
caucuuauuauuuugauaa

SEQ ID NO: 452421 - RNA, 20 nt, Artificial Sequence
  Synthetic
gcaucuuauuauuuugauaa

SEQ ID NO: 452422 - RNA, 21 nt, Artificial Sequence
  Synthetic
agcaucuuauuauuuugauaa

SEQ ID NO: 452423 - RNA, 22 nt, Artificial Sequence
  Synthetic
gagcaucuuauuauuuugauaa

SEQ ID NO: 452424 - RNA, 23 nt, Artificial Sequence
  Synthetic
ugagcaucuuauuauuuugauaa

SEQ ID NO: 452425 - RNA, 24 nt, Artificial Sequence
  Synthetic
augagcaucuuauuauuuugauaa

SEQ ID NO: 452426 - RNA, 18 nt, Artificial Sequence
  Synthetic
aaaaaauacaaaauauaa

SEQ ID NO: 452427 - RNA, 19 nt, Artificial Sequence
  Synthetic
aaaaaaauacaaaauauaa

SEQ ID NO: 452428 - RNA, 20 nt, Artificial Sequence
  Synthetic
caaaaaaauacaaaauauaa

SEQ ID NO: 452429 - RNA, 21 nt, Artificial Sequence
  Synthetic
acaaaaaaauacaaaauauaa

SEQ ID NO: 452430 - RNA, 22 nt, Artificial Sequence
  Synthetic
aacaaaaaaauacaaaauauaa

SEQ ID NO: 452431 - RNA, 23 nt, Artificial Sequence
  Synthetic
aaacaaaaaaauacaaaauauaa

SEQ ID NO: 452432 - RNA, 24 nt, Artificial Sequence
  Synthetic
gaaacaaaaaaauacaaaauauaa

SEQ ID NO: 452433 - RNA, 18 nt, Artificial Sequence
  Synthetic
acagguaccaaaauauaa

SEQ ID NO: 452434 - RNA, 19 nt, Artificial Sequence
  Synthetic
cacagguaccaaaauauaa

SEQ ID NO: 452435 - RNA, 20 nt, Artificial Sequence
  Synthetic
ccacagguaccaaaauauaa

SEQ ID NO: 452436 - RNA, 21 nt, Artificial Sequence
  Synthetic
cccacagguaccaaaauauaa

SEQ ID NO: 452437 - RNA, 22 nt, Artificial Sequence
  Synthetic
gcccacagguaccaaaauauaa

SEQ ID NO: 452438 - RNA, 23 nt, Artificial Sequence
  Synthetic
ugcccacagguaccaaaauauaa

SEQ ID NO: 452439 - RNA, 24 nt, Artificial Sequence
  Synthetic
augcccacagguaccaaaauauaa

SEQ ID NO: 452440 - RNA, 18 nt, Artificial Sequence
  Synthetic
uuaggacugaaaauauaa

SEQ ID NO: 452441 - RNA, 19 nt, Artificial Sequence
  Synthetic
auuaggacugaaaauauaa

SEQ ID NO: 452442 - RNA, 20 nt, Artificial Sequence
  Synthetic
uauuaggacugaaaauauaa

SEQ ID NO: 452443 - RNA, 21 nt, Artificial Sequence
  Synthetic
auauuaggacugaaaauauaa

SEQ ID NO: 452444 - RNA, 22 nt, Artificial Sequence
  Synthetic
aauauuaggacugaaaauauaa

SEQ ID NO: 452445 - RNA, 23 nt, Artificial Sequence
  Synthetic
aaauauuaggacugaaaauauaa

SEQ ID NO: 452446 - RNA, 24 nt, Artificial Sequence
  Synthetic
gaaauauuaggacugaaaauauaa

SEQ ID NO: 452447 - RNA, 18 nt, Artificial Sequence
  Synthetic
gauuuguauaaaauauaa

SEQ ID NO: 452448 - RNA, 19 nt, Artificial Sequence
  Synthetic
agauuuguauaaaauauaa

SEQ ID NO: 452449 - RNA, 20 nt, Artificial Sequence
  Synthetic
gagauuuguauaaaauauaa

SEQ ID NO: 452450 - RNA, 21 nt, Artificial Sequence
  Synthetic
agagauuuguauaaaauauaa

SEQ ID NO: 452451 - RNA, 22 nt, Artificial Sequence
  Synthetic
gagagauuuguauaaaauauaa

SEQ ID NO: 452452 - RNA, 23 nt, Artificial Sequence
  Synthetic
agagagauuuguauaaaauauaa

SEQ ID NO: 452453 - RNA, 24 nt, Artificial Sequence
  Synthetic
aagagagauuuguauaaaauauaa

SEQ ID NO: 452454 - RNA, 18 nt, Artificial Sequence
  Synthetic
ggauauugauaaauauaa

SEQ ID NO: 452455 - RNA, 19 nt, Artificial Sequence
  Synthetic
uggauauugauaaauauaa

SEQ ID NO: 452456 - RNA, 20 nt, Artificial Sequence
  Synthetic
cuggauauugauaaauauaa

SEQ ID NO: 452457 - RNA, 21 nt, Artificial Sequence
  Synthetic
ucuggauauugauaaauauaa

SEQ ID NO: 452458 - RNA, 22 nt, Artificial Sequence
  Synthetic
uucuggauauugauaaauauaa

SEQ ID NO: 452459 - RNA, 23 nt, Artificial Sequence
  Synthetic
cuucuggauauugauaaauauaa

SEQ ID NO: 452460 - RNA, 24 nt, Artificial Sequence
  Synthetic
ucuucuggauauugauaaauauaa

SEQ ID NO: 452461 - RNA, 18 nt, Artificial Sequence
  Synthetic
augaaaauauaaauauaa

SEQ ID NO: 452462 - RNA, 19 nt, Artificial Sequence
  Synthetic
aaugaaaauauaaauauaa

SEQ ID NO: 452463 - RNA, 20 nt, Artificial Sequence
  Synthetic
aaaugaaaauauaaauauaa

SEQ ID NO: 452464 - RNA, 21 nt, Artificial Sequence
  Synthetic
aaaaugaaaauauaaauauaa

SEQ ID NO: 452465 - RNA, 22 nt, Artificial Sequence
  Synthetic
uaaaaugaaaauauaaauauaa

SEQ ID NO: 452466 - RNA, 23 nt, Artificial Sequence
  Synthetic
auaaaaugaaaauauaaauauaa

SEQ ID NO: 452467 - RNA, 24 nt, Artificial Sequence
  Synthetic
aauaaaaugaaaauauaaauauaa

SEQ ID NO: 452468 - RNA, 18 nt, Artificial Sequence
  Synthetic
gaaauaaguuaaauauaa

SEQ ID NO: 452469 - RNA, 19 nt, Artificial Sequence
  Synthetic
ugaaauaaguuaaauauaa

SEQ ID NO: 452470 - RNA, 20 nt, Artificial Sequence
  Synthetic
augaaauaaguuaaauauaa

SEQ ID NO: 452471 - RNA, 21 nt, Artificial Sequence
  Synthetic
uaugaaauaaguuaaauauaa

SEQ ID NO: 452472 - RNA, 22 nt, Artificial Sequence
  Synthetic
guaugaaauaaguuaaauauaa

SEQ ID NO: 452473 - RNA, 23 nt, Artificial Sequence
  Synthetic
aguaugaaauaaguuaaauauaa

SEQ ID NO: 452474 - RNA, 24 nt, Artificial Sequence
  Synthetic
aaguaugaaauaaguuaaauauaa

SEQ ID NO: 452475 - RNA, 18 nt, Artificial Sequence
  Synthetic
uauuaacuuuaaauauaa

SEQ ID NO: 452476 - RNA, 19 nt, Artificial Sequence
  Synthetic
auauuaacuuuaaauauaa

SEQ ID NO: 452477 - RNA, 20 nt, Artificial Sequence
  Synthetic
aauauuaacuuuaaauauaa

SEQ ID NO: 452478 - RNA, 21 nt, Artificial Sequence
  Synthetic
caauauuaacuuuaaauauaa

SEQ ID NO: 452479 - RNA, 22 nt, Artificial Sequence
  Synthetic
acaauauuaacuuuaaauauaa

SEQ ID NO: 452480 - RNA, 23 nt, Artificial Sequence
  Synthetic
aacaauauuaacuuuaaauauaa

SEQ ID NO: 452481 - RNA, 24 nt, Artificial Sequence
  Synthetic
uaacaauauuaacuuuaaauauaa

SEQ ID NO: 452482 - RNA, 18 nt, Artificial Sequence
  Synthetic
aaaauacuggcaauauaa

SEQ ID NO: 452483 - RNA, 19 nt, Artificial Sequence
  Synthetic
uaaaauacuggcaauauaa

SEQ ID NO: 452484 - RNA, 20 nt, Artificial Sequence
  Synthetic
uuaaaauacuggcaauauaa

SEQ ID NO: 452485 - RNA, 21 nt, Artificial Sequence
  Synthetic
uuuaaaauacuggcaauauaa

SEQ ID NO: 452486 - RNA, 22 nt, Artificial Sequence
  Synthetic
auuuaaaauacuggcaauauaa

SEQ ID NO: 452487 - RNA, 23 nt, Artificial Sequence
  Synthetic
cauuuaaaauacuggcaauauaa

SEQ ID NO: 452488 - RNA, 24 nt, Artificial Sequence
  Synthetic
acauuuaaaauacuggcaauauaa

SEQ ID NO: 452489 - RNA, 18 nt, Artificial Sequence
  Synthetic
uauucuuccagaauauaa

SEQ ID NO: 452490 - RNA, 19 nt, Artificial Sequence
  Synthetic
auauucuuccagaauauaa

SEQ ID NO: 452491 - RNA, 20 nt, Artificial Sequence
  Synthetic
aauauucuuccagaauauaa

SEQ ID NO: 452492 - RNA, 21 nt, Artificial Sequence
  Synthetic
caauauucuuccagaauauaa

SEQ ID NO: 452493 - RNA, 22 nt, Artificial Sequence
  Synthetic
acaauauucuuccagaauauaa

SEQ ID NO: 452494 - RNA, 23 nt, Artificial Sequence
  Synthetic
uacaauauucuuccagaauauaa

SEQ ID NO: 452495 - RNA, 24 nt, Artificial Sequence
  Synthetic
cuacaauauucuuccagaauauaa

SEQ ID NO: 452496 - RNA, 18 nt, Artificial Sequence
  Synthetic
ugauaaaauagaauauaa

SEQ ID NO: 452497 - RNA, 19 nt, Artificial Sequence
  Synthetic
gugauaaaauagaauauaa

SEQ ID NO: 452498 - RNA, 20 nt, Artificial Sequence
  Synthetic
ugugauaaaauagaauauaa

SEQ ID NO: 452499 - RNA, 21 nt, Artificial Sequence
  Synthetic
augugauaaaauagaauauaa

SEQ ID NO: 452500 - RNA, 22 nt, Artificial Sequence
  Synthetic
aaugugauaaaauagaauauaa

SEQ ID NO: 452501 - RNA, 23 nt, Artificial Sequence
  Synthetic
aaaugugauaaaauagaauauaa

SEQ ID NO: 452502 - RNA, 24 nt, Artificial Sequence
  Synthetic
uaaaugugauaaaauagaauauaa

SEQ ID NO: 452503 - RNA, 18 nt, Artificial Sequence
  Synthetic
caauaagaaauaauauaa

SEQ ID NO: 452504 - RNA, 19 nt, Artificial Sequence
  Synthetic
ucaauaagaaauaauauaa

SEQ ID NO: 452505 - RNA, 20 nt, Artificial Sequence
  Synthetic
uucaauaagaaauaauauaa

SEQ ID NO: 452506 - RNA, 21 nt, Artificial Sequence
  Synthetic
cuucaauaagaaauaauauaa

SEQ ID NO: 452507 - RNA, 22 nt, Artificial Sequence
  Synthetic
acuucaauaagaaauaauauaa

SEQ ID NO: 452508 - RNA, 23 nt, Artificial Sequence
  Synthetic
aacuucaauaagaaauaauauaa

SEQ ID NO: 452509 - RNA, 24 nt, Artificial Sequence
  Synthetic
caacuucaauaagaaauaauauaa

SEQ ID NO: 452510 - RNA, 18 nt, Artificial Sequence
  Synthetic
uaaaaucucauaauauaa

SEQ ID NO: 452511 - RNA, 19 nt, Artificial Sequence
  Synthetic
uuaaaaucucauaauauaa

SEQ ID NO: 452512 - RNA, 20 nt, Artificial Sequence
  Synthetic
uuuaaaaucucauaauauaa

SEQ ID NO: 452513 - RNA, 21 nt, Artificial Sequence
  Synthetic
uuuuaaaaucucauaauauaa

SEQ ID NO: 452514 - RNA, 22 nt, Artificial Sequence
  Synthetic
uuuuuaaaaucucauaauauaa

SEQ ID NO: 452515 - RNA, 23 nt, Artificial Sequence
  Synthetic
uuuuuuaaaaucucauaauauaa

SEQ ID NO: 452516 - RNA, 24 nt, Artificial Sequence
  Synthetic
auuuuuuaaaaucucauaauauaa

SEQ ID NO: 452517 - RNA, 18 nt, Artificial Sequence
  Synthetic
ucagaagagcuaauauaa

SEQ ID NO: 452518 - RNA, 19 nt, Artificial Sequence
  Synthetic
uucagaagagcuaauauaa

SEQ ID NO: 452519 - RNA, 20 nt, Artificial Sequence
  Synthetic
cuucagaagagcuaauauaa

SEQ ID NO: 452520 - RNA, 21 nt, Artificial Sequence
  Synthetic
acuucagaagagcuaauauaa

SEQ ID NO: 452521 - RNA, 22 nt, Artificial Sequence
  Synthetic
aacuucagaagagcuaauauaa

SEQ ID NO: 452522 - RNA, 23 nt, Artificial Sequence
  Synthetic
uaacuucagaagagcuaauauaa

SEQ ID NO: 452523 - RNA, 24 nt, Artificial Sequence
  Synthetic
auaacuucagaagagcuaauauaa

SEQ ID NO: 452524 - RNA, 18 nt, Artificial Sequence
  Synthetic
gaaaagcaauuaauauaa

SEQ ID NO: 452525 - RNA, 19 nt, Artificial Sequence
  Synthetic
ggaaaagcaauuaauauaa

SEQ ID NO: 452526 - RNA, 20 nt, Artificial Sequence
  Synthetic
uggaaaagcaauuaauauaa

SEQ ID NO: 452527 - RNA, 21 nt, Artificial Sequence
  Synthetic
auggaaaagcaauuaauauaa

SEQ ID NO: 452528 - RNA, 22 nt, Artificial Sequence
  Synthetic
uauggaaaagcaauuaauauaa

SEQ ID NO: 452529 - RNA, 23 nt, Artificial Sequence
  Synthetic
cuauggaaaagcaauuaauauaa

SEQ ID NO: 452530 - RNA, 24 nt, Artificial Sequence
  Synthetic
ucuauggaaaagcaauuaauauaa

SEQ ID NO: 452531 - RNA, 18 nt, Artificial Sequence
  Synthetic
aauuauuuuuuaauauaa

SEQ ID NO: 452532 - RNA, 19 nt, Artificial Sequence
  Synthetic
gaauuauuuuuuaauauaa

SEQ ID NO: 452533 - RNA, 20 nt, Artificial Sequence
  Synthetic
agaauuauuuuuuaauauaa

SEQ ID NO: 452534 - RNA, 21 nt, Artificial Sequence
  Synthetic
aagaauuauuuuuuaauauaa

SEQ ID NO: 452535 - RNA, 22 nt, Artificial Sequence
  Synthetic
uaagaauuauuuuuuaauauaa

SEQ ID NO: 452536 - RNA, 23 nt, Artificial Sequence
  Synthetic
uuaagaauuauuuuuuaauauaa

SEQ ID NO: 452537 - RNA, 24 nt, Artificial Sequence
  Synthetic
uuuaagaauuauuuuuuaauauaa

SEQ ID NO: 452538 - RNA, 18 nt, Artificial Sequence
  Synthetic
ggaauauuuaacauauaa

SEQ ID NO: 452539 - RNA, 19 nt, Artificial Sequence
  Synthetic
aggaauauuuaacauauaa

SEQ ID NO: 452540 - RNA, 20 nt, Artificial Sequence
  Synthetic
uaggaauauuuaacauauaa

SEQ ID NO: 452541 - RNA, 21 nt, Artificial Sequence
  Synthetic
uuaggaauauuuaacauauaa

SEQ ID NO: 452542 - RNA, 22 nt, Artificial Sequence
  Synthetic
uuuaggaauauuuaacauauaa

SEQ ID NO: 452543 - RNA, 23 nt, Artificial Sequence
  Synthetic
auuuaggaauauuuaacauauaa

SEQ ID NO: 452544 - RNA, 24 nt, Artificial Sequence
  Synthetic
uauuuaggaauauuuaacauauaa

SEQ ID NO: 452545 - RNA, 18 nt, Artificial Sequence
  Synthetic
aggcauguugacauauaa

SEQ ID NO: 452546 - RNA, 19 nt, Artificial Sequence
  Synthetic
caggcauguugacauauaa

SEQ ID NO: 452547 - RNA, 20 nt, Artificial Sequence
  Synthetic
gcaggcauguugacauauaa

SEQ ID NO: 452548 - RNA, 21 nt, Artificial Sequence
  Synthetic
ugcaggcauguugacauauaa

SEQ ID NO: 452549 - RNA, 22 nt, Artificial Sequence
  Synthetic
augcaggcauguugacauauaa

SEQ ID NO: 452550 - RNA, 23 nt, Artificial Sequence
  Synthetic
aaugcaggcauguugacauauaa

SEQ ID NO: 452551 - RNA, 24 nt, Artificial Sequence
  Synthetic
gaaugcaggcauguugacauauaa

SEQ ID NO: 452552 - RNA, 18 nt, Artificial Sequence
  Synthetic
cagccuuccuacauauaa

SEQ ID NO: 452553 - RNA, 19 nt, Artificial Sequence
  Synthetic
ucagccuuccuacauauaa

SEQ ID NO: 452554 - RNA, 20 nt, Artificial Sequence
  Synthetic
uucagccuuccuacauauaa

SEQ ID NO: 452555 - RNA, 21 nt, Artificial Sequence
  Synthetic
uuucagccuuccuacauauaa

SEQ ID NO: 452556 - RNA, 22 nt, Artificial Sequence
  Synthetic
uuuucagccuuccuacauauaa

SEQ ID NO: 452557 - RNA, 23 nt, Artificial Sequence
  Synthetic
uuuuucagccuuccuacauauaa

SEQ ID NO: 452558 - RNA, 24 nt, Artificial Sequence
  Synthetic
auuuuucagccuuccuacauauaa

SEQ ID NO: 452559 - RNA, 18 nt, Artificial Sequence
  Synthetic
cuuuggacguacauauaa

SEQ ID NO: 452560 - RNA, 19 nt, Artificial Sequence
  Synthetic
ccuuuggacguacauauaa

SEQ ID NO: 452561 - RNA, 20 nt, Artificial Sequence
  Synthetic
accuuuggacguacauauaa

SEQ ID NO: 452562 - RNA, 21 nt, Artificial Sequence
  Synthetic
uaccuuuggacguacauauaa

SEQ ID NO: 452563 - RNA, 22 nt, Artificial Sequence
  Synthetic
uuaccuuuggacguacauauaa

SEQ ID NO: 452564 - RNA, 23 nt, Artificial Sequence
  Synthetic
guuaccuuuggacguacauauaa

SEQ ID NO: 452565 - RNA, 24 nt, Artificial Sequence
  Synthetic
gguuaccuuuggacguacauauaa

SEQ ID NO: 452566 - RNA, 18 nt, Artificial Sequence
  Synthetic
aauauacauuacauauaa

SEQ ID NO: 452567 - RNA, 19 nt, Artificial Sequence
  Synthetic
caauauacauuacauauaa

SEQ ID NO: 452568 - RNA, 20 nt, Artificial Sequence
  Synthetic
acaauauacauuacauauaa

SEQ ID NO: 452569 - RNA, 21 nt, Artificial Sequence
  Synthetic
aacaauauacauuacauauaa

SEQ ID NO: 452570 - RNA, 22 nt, Artificial Sequence
  Synthetic
aaacaauauacauuacauauaa

SEQ ID NO: 452571 - RNA, 23 nt, Artificial Sequence
  Synthetic
aaaacaauauacauuacauauaa

SEQ ID NO: 452572 - RNA, 24 nt, Artificial Sequence
  Synthetic
aaaaacaauauacauuacauauaa

SEQ ID NO: 452573 - RNA, 18 nt, Artificial Sequence
  Synthetic
cauagaagaaccauauaa

SEQ ID NO: 452574 - RNA, 19 nt, Artificial Sequence
  Synthetic
acauagaagaaccauauaa

SEQ ID NO: 452575 - RNA, 20 nt, Artificial Sequence
  Synthetic
aacauagaagaaccauauaa

SEQ ID NO: 452576 - RNA, 21 nt, Artificial Sequence
  Synthetic
caacauagaagaaccauauaa

SEQ ID NO: 452577 - RNA, 22 nt, Artificial Sequence
  Synthetic
ucaacauagaagaaccauauaa

SEQ ID NO: 452578 - RNA, 23 nt, Artificial Sequence
  Synthetic
uucaacauagaagaaccauauaa

SEQ ID NO: 452579 - RNA, 24 nt, Artificial Sequence
  Synthetic
cuucaacauagaagaaccauauaa

SEQ ID NO: 452580 - RNA, 18 nt, Artificial Sequence
  Synthetic
aaaaaucacuccauauaa

SEQ ID NO: 452581 - RNA, 19 nt, Artificial Sequence
  Synthetic
uaaaaaucacuccauauaa

SEQ ID NO: 452582 - RNA, 20 nt, Artificial Sequence
  Synthetic
auaaaaaucacuccauauaa

SEQ ID NO: 452583 - RNA, 21 nt, Artificial Sequence
  Synthetic
aauaaaaaucacuccauauaa

SEQ ID NO: 452584 - RNA, 22 nt, Artificial Sequence
  Synthetic
caauaaaaaucacuccauauaa

SEQ ID NO: 452585 - RNA, 23 nt, Artificial Sequence
  Synthetic
acaauaaaaaucacuccauauaa

SEQ ID NO: 452586 - RNA, 24 nt, Artificial Sequence
  Synthetic
aacaauaaaaaucacuccauauaa

SEQ ID NO: 452587 - RNA, 18 nt, Artificial Sequence
  Synthetic
uugacuugacucauauaa

SEQ ID NO: 452588 - RNA, 19 nt, Artificial Sequence
  Synthetic
guugacuugacucauauaa

SEQ ID NO: 452589 - RNA, 20 nt, Artificial Sequence
  Synthetic
gguugacuugacucauauaa

SEQ ID NO: 452590 - RNA, 21 nt, Artificial Sequence
  Synthetic
agguugacuugacucauauaa

SEQ ID NO: 452591 - RNA, 22 nt, Artificial Sequence
  Synthetic
aagguugacuugacucauauaa

SEQ ID NO: 452592 - RNA, 23 nt, Artificial Sequence
  Synthetic
uaagguugacuugacucauauaa

SEQ ID NO: 452593 - RNA, 24 nt, Artificial Sequence
  Synthetic
guaagguugacuugacucauauaa

SEQ ID NO: 452594 - RNA, 18 nt, Artificial Sequence
  Synthetic
cucagacaccucauauaa

SEQ ID NO: 452595 - RNA, 19 nt, Artificial Sequence
  Synthetic
ucucagacaccucauauaa

SEQ ID NO: 452596 - RNA, 20 nt, Artificial Sequence
  Synthetic
gucucagacaccucauauaa

SEQ ID NO: 452597 - RNA, 21 nt, Artificial Sequence
  Synthetic
ugucucagacaccucauauaa

SEQ ID NO: 452598 - RNA, 22 nt, Artificial Sequence
  Synthetic
cugucucagacaccucauauaa

SEQ ID NO: 452599 - RNA, 23 nt, Artificial Sequence
  Synthetic
acugucucagacaccucauauaa

SEQ ID NO: 452600 - RNA, 24 nt, Artificial Sequence
  Synthetic
gacugucucagacaccucauauaa

SEQ ID NO: 452601 - RNA, 18 nt, Artificial Sequence
  Synthetic
auauuucauuucauauaa

SEQ ID NO: 452602 - RNA, 19 nt, Artificial Sequence
  Synthetic
aauauuucauuucauauaa

SEQ ID NO: 452603 - RNA, 20 nt, Artificial Sequence
  Synthetic
uaauauuucauuucauauaa

SEQ ID NO: 452604 - RNA, 21 nt, Artificial Sequence
  Synthetic
uuaauauuucauuucauauaa

SEQ ID NO: 452605 - RNA, 22 nt, Artificial Sequence
  Synthetic
uuuaauauuucauuucauauaa

SEQ ID NO: 452606 - RNA, 23 nt, Artificial Sequence
  Synthetic
uuuuaauauuucauuucauauaa

SEQ ID NO: 452607 - RNA, 24 nt, Artificial Sequence
  Synthetic
guuuuaauauuucauuucauauaa

SEQ ID NO: 452608 - RNA, 18 nt, Artificial Sequence
  Synthetic
gagaagagauggauauaa

SEQ ID NO: 452609 - RNA, 19 nt, Artificial Sequence
  Synthetic
ugagaagagauggauauaa

SEQ ID NO: 452610 - RNA, 20 nt, Artificial Sequence
  Synthetic
gugagaagagauggauauaa

SEQ ID NO: 452611 - RNA, 21 nt, Artificial Sequence
  Synthetic
ggugagaagagauggauauaa

SEQ ID NO: 452612 - RNA, 22 nt, Artificial Sequence
  Synthetic
gggugagaagagauggauauaa

SEQ ID NO: 452613 - RNA, 23 nt, Artificial Sequence
  Synthetic
agggugagaagagauggauauaa

SEQ ID NO: 452614 - RNA, 24 nt, Artificial Sequence
  Synthetic
gagggugagaagagauggauauaa

SEQ ID NO: 452615 - RNA, 18 nt, Artificial Sequence
  Synthetic
aaacacggauggauauaa

SEQ ID NO: 452616 - RNA, 19 nt, Artificial Sequence
  Synthetic
aaaacacggauggauauaa

SEQ ID NO: 452617 - RNA, 20 nt, Artificial Sequence
  Synthetic
uaaaacacggauggauauaa

SEQ ID NO: 452618 - RNA, 21 nt, Artificial Sequence
  Synthetic
uuaaaacacggauggauauaa

SEQ ID NO: 452619 - RNA, 22 nt, Artificial Sequence
  Synthetic
auuaaaacacggauggauauaa

SEQ ID NO: 452620 - RNA, 23 nt, Artificial Sequence
  Synthetic
uauuaaaacacggauggauauaa

SEQ ID NO: 452621 - RNA, 24 nt, Artificial Sequence
  Synthetic
guauuaaaacacggauggauauaa

SEQ ID NO: 452622 - RNA, 18 nt, Artificial Sequence
  Synthetic
aauacacaaaauauauaa

SEQ ID NO: 452623 - RNA, 19 nt, Artificial Sequence
  Synthetic
aaauacacaaaauauauaa

SEQ ID NO: 452624 - RNA, 20 nt, Artificial Sequence
  Synthetic
aaaauacacaaaauauauaa

SEQ ID NO: 452625 - RNA, 21 nt, Artificial Sequence
  Synthetic
aaaaauacacaaaauauauaa

SEQ ID NO: 452626 - RNA, 22 nt, Artificial Sequence
  Synthetic
aaaaaauacacaaaauauauaa

SEQ ID NO: 452627 - RNA, 23 nt, Artificial Sequence
  Synthetic
caaaaaauacacaaaauauauaa

SEQ ID NO: 452628 - RNA, 24 nt, Artificial Sequence
  Synthetic
ccaaaaaauacacaaaauauauaa

SEQ ID NO: 452629 - RNA, 18 nt, Artificial Sequence
  Synthetic
aaaagauuccauauauaa

SEQ ID NO: 452630 - RNA, 19 nt, Artificial Sequence
  Synthetic
aaaaagauuccauauauaa

SEQ ID NO: 452631 - RNA, 20 nt, Artificial Sequence
  Synthetic
aaaaaagauuccauauauaa

SEQ ID NO: 452632 - RNA, 21 nt, Artificial Sequence
  Synthetic
aaaaaaagauuccauauauaa

SEQ ID NO: 452633 - RNA, 22 nt, Artificial Sequence
  Synthetic
uaaaaaaagauuccauauauaa

SEQ ID NO: 452634 - RNA, 23 nt, Artificial Sequence
  Synthetic
uuaaaaaaagauuccauauauaa

SEQ ID NO: 452635 - RNA, 24 nt, Artificial Sequence
  Synthetic
uuuaaaaaaagauuccauauauaa

SEQ ID NO: 452636 - RNA, 18 nt, Artificial Sequence
  Synthetic
guugcauagcauauauaa

SEQ ID NO: 452637 - RNA, 19 nt, Artificial Sequence
  Synthetic
uguugcauagcauauauaa

SEQ ID NO: 452638 - RNA, 20 nt, Artificial Sequence
  Synthetic
uuguugcauagcauauauaa

SEQ ID NO: 452639 - RNA, 21 nt, Artificial Sequence
  Synthetic
uuuguugcauagcauauauaa

SEQ ID NO: 452640 - RNA, 22 nt, Artificial Sequence
  Synthetic
guuuguugcauagcauauauaa

SEQ ID NO: 452641 - RNA, 23 nt, Artificial Sequence
  Synthetic
gguuuguugcauagcauauauaa

SEQ ID NO: 452642 - RNA, 24 nt, Artificial Sequence
  Synthetic
ugguuuguugcauagcauauauaa

SEQ ID NO: 452643 - RNA, 18 nt, Artificial Sequence
  Synthetic
auuuccauucauauauaa

SEQ ID NO: 452644 - RNA, 19 nt, Artificial Sequence
  Synthetic
aauuuccauucauauauaa

SEQ ID NO: 452645 - RNA, 20 nt, Artificial Sequence
  Synthetic
uaauuuccauucauauauaa

SEQ ID NO: 452646 - RNA, 21 nt, Artificial Sequence
  Synthetic
uuaauuuccauucauauauaa

SEQ ID NO: 452647 - RNA, 22 nt, Artificial Sequence
  Synthetic
guuaauuuccauucauauauaa

SEQ ID NO: 452648 - RNA, 23 nt, Artificial Sequence
  Synthetic
uguuaauuuccauucauauauaa

SEQ ID NO: 452649 - RNA, 24 nt, Artificial Sequence
  Synthetic
cuguuaauuuccauucauauauaa

SEQ ID NO: 452650 - RNA, 18 nt, Artificial Sequence
  Synthetic
aacaaaggagauauauaa

SEQ ID NO: 452651 - RNA, 19 nt, Artificial Sequence
  Synthetic
caacaaaggagauauauaa

SEQ ID NO: 452652 - RNA, 20 nt, Artificial Sequence
  Synthetic
ccaacaaaggagauauauaa

SEQ ID NO: 452653 - RNA, 21 nt, Artificial Sequence
  Synthetic
cccaacaaaggagauauauaa

SEQ ID NO: 452654 - RNA, 22 nt, Artificial Sequence
  Synthetic
acccaacaaaggagauauauaa

SEQ ID NO: 452655 - RNA, 23 nt, Artificial Sequence
  Synthetic
cacccaacaaaggagauauauaa

SEQ ID NO: 452656 - RNA, 24 nt, Artificial Sequence
  Synthetic
acacccaacaaaggagauauauaa

SEQ ID NO: 452657 - RNA, 18 nt, Artificial Sequence
  Synthetic
gaauguccugauauauaa

SEQ ID NO: 452658 - RNA, 19 nt, Artificial Sequence
  Synthetic
agaauguccugauauauaa

SEQ ID NO: 452659 - RNA, 20 nt, Artificial Sequence
  Synthetic
cagaauguccugauauauaa

SEQ ID NO: 452660 - RNA, 21 nt, Artificial Sequence
  Synthetic
ccagaauguccugauauauaa

SEQ ID NO: 452661 - RNA, 22 nt, Artificial Sequence
  Synthetic
uccagaauguccugauauauaa

SEQ ID NO: 452662 - RNA, 23 nt, Artificial Sequence
  Synthetic
cuccagaauguccugauauauaa

SEQ ID NO: 452663 - RNA, 24 nt, Artificial Sequence
  Synthetic
acuccagaauguccugauauauaa

SEQ ID NO: 452664 - RNA, 18 nt, Artificial Sequence
  Synthetic
gagcacaaauauauauaa

SEQ ID NO: 452665 - RNA, 19 nt, Artificial Sequence
  Synthetic
agagcacaaauauauauaa

SEQ ID NO: 452666 - RNA, 20 nt, Artificial Sequence
  Synthetic
uagagcacaaauauauauaa

SEQ ID NO: 452667 - RNA, 21 nt, Artificial Sequence
  Synthetic
uuagagcacaaauauauauaa

SEQ ID NO: 452668 - RNA, 22 nt, Artificial Sequence
  Synthetic
auuagagcacaaauauauauaa

SEQ ID NO: 452669 - RNA, 23 nt, Artificial Sequence
  Synthetic
aauuagagcacaaauauauauaa

SEQ ID NO: 452670 - RNA, 24 nt, Artificial Sequence
  Synthetic
aaauuagagcacaaauauauauaa

SEQ ID NO: 452671 - RNA, 18 nt, Artificial Sequence
  Synthetic
cacuaaagaaguauauaa

SEQ ID NO: 452672 - RNA, 19 nt, Artificial Sequence
  Synthetic
acacuaaagaaguauauaa

SEQ ID NO: 452673 - RNA, 20 nt, Artificial Sequence
  Synthetic
aacacuaaagaaguauauaa

SEQ ID NO: 452674 - RNA, 21 nt, Artificial Sequence
  Synthetic
caacacuaaagaaguauauaa

SEQ ID NO: 452675 - RNA, 22 nt, Artificial Sequence
  Synthetic
ucaacacuaaagaaguauauaa

SEQ ID NO: 452676 - RNA, 23 nt, Artificial Sequence
  Synthetic
uucaacacuaaagaaguauauaa

SEQ ID NO: 452677 - RNA, 24 nt, Artificial Sequence
  Synthetic
uuucaacacuaaagaaguauauaa

SEQ ID NO: 452678 - RNA, 18 nt, Artificial Sequence
  Synthetic
cuuauuuacauuauauaa

SEQ ID NO: 452679 - RNA, 19 nt, Artificial Sequence
  Synthetic
acuuauuuacauuauauaa

SEQ ID NO: 452680 - RNA, 20 nt, Artificial Sequence
  Synthetic
aacuuauuuacauuauauaa

SEQ ID NO: 452681 - RNA, 21 nt, Artificial Sequence
  Synthetic
gaacuuauuuacauuauauaa

SEQ ID NO: 452682 - RNA, 22 nt, Artificial Sequence
  Synthetic
agaacuuauuuacauuauauaa

SEQ ID NO: 452683 - RNA, 23 nt, Artificial Sequence
  Synthetic
uagaacuuauuuacauuauauaa

SEQ ID NO: 452684 - RNA, 24 nt, Artificial Sequence
  Synthetic
uuagaacuuauuuacauuauauaa

SEQ ID NO: 452685 - RNA, 18 nt, Artificial Sequence
  Synthetic
uuauaaucucuuauauaa

SEQ ID NO: 452686 - RNA, 19 nt, Artificial Sequence
  Synthetic
uuuauaaucucuuauauaa

SEQ ID NO: 452687 - RNA, 20 nt, Artificial Sequence
  Synthetic
uuuuauaaucucuuauauaa

SEQ ID NO: 452688 - RNA, 21 nt, Artificial Sequence
  Synthetic
uuuuuauaaucucuuauauaa

SEQ ID NO: 452689 - RNA, 22 nt, Artificial Sequence
  Synthetic
uuuuuuauaaucucuuauauaa

SEQ ID NO: 452690 - RNA, 23 nt, Artificial Sequence
  Synthetic
cuuuuuuauaaucucuuauauaa

SEQ ID NO: 452691 - RNA, 24 nt, Artificial Sequence
  Synthetic
acuuuuuuauaaucucuuauauaa

SEQ ID NO: 452692 - RNA, 18 nt, Artificial Sequence
  Synthetic
agaccagguguuauauaa

SEQ ID NO: 452693 - RNA, 19 nt, Artificial Sequence
  Synthetic
uagaccagguguuauauaa

SEQ ID NO: 452694 - RNA, 20 nt, Artificial Sequence
  Synthetic
auagaccagguguuauauaa

SEQ ID NO: 452695 - RNA, 21 nt, Artificial Sequence
  Synthetic
gauagaccagguguuauauaa

SEQ ID NO: 452696 - RNA, 22 nt, Artificial Sequence
  Synthetic
agauagaccagguguuauauaa

SEQ ID NO: 452697 - RNA, 23 nt, Artificial Sequence
  Synthetic
uagauagaccagguguuauauaa

SEQ ID NO: 452698 - RNA, 24 nt, Artificial Sequence
  Synthetic
guagauagaccagguguuauauaa

SEQ ID NO: 452699 - RNA, 18 nt, Artificial Sequence
  Synthetic
aaauucauauuuauauaa

SEQ ID NO: 452700 - RNA, 19 nt, Artificial Sequence
  Synthetic
aaaauucauauuuauauaa

SEQ ID NO: 452701 - RNA, 20 nt, Artificial Sequence
  Synthetic
uaaaauucauauuuauauaa

SEQ ID NO: 452702 - RNA, 21 nt, Artificial Sequence
  Synthetic
uuaaaauucauauuuauauaa

SEQ ID NO: 452703 - RNA, 22 nt, Artificial Sequence
  Synthetic
uuuaaaauucauauuuauauaa

SEQ ID NO: 452704 - RNA, 23 nt, Artificial Sequence
  Synthetic
guuuaaaauucauauuuauauaa

SEQ ID NO: 452705 - RNA, 24 nt, Artificial Sequence
  Synthetic
uguuuaaaauucauauuuauauaa

SEQ ID NO: 452706 - RNA, 18 nt, Artificial Sequence
  Synthetic
aauaaaaacaaacuauaa

SEQ ID NO: 452707 - RNA, 19 nt, Artificial Sequence
  Synthetic
gaauaaaaacaaacuauaa

SEQ ID NO: 452708 - RNA, 20 nt, Artificial Sequence
  Synthetic
agaauaaaaacaaacuauaa

SEQ ID NO: 452709 - RNA, 21 nt, Artificial Sequence
  Synthetic
cagaauaaaaacaaacuauaa

SEQ ID NO: 452710 - RNA, 22 nt, Artificial Sequence
  Synthetic
ccagaauaaaaacaaacuauaa

SEQ ID NO: 452711 - RNA, 23 nt, Artificial Sequence
  Synthetic
uccagaauaaaaacaaacuauaa

SEQ ID NO: 452712 - RNA, 24 nt, Artificial Sequence
  Synthetic
cuccagaauaaaaacaaacuauaa

SEQ ID NO: 452713 - RNA, 18 nt, Artificial Sequence
  Synthetic
ugcauucucacacuauaa

SEQ ID NO: 452714 - RNA, 19 nt, Artificial Sequence
  Synthetic
cugcauucucacacuauaa

SEQ ID NO: 452715 - RNA, 20 nt, Artificial Sequence
  Synthetic
acugcauucucacacuauaa

SEQ ID NO: 452716 - RNA, 21 nt, Artificial Sequence
  Synthetic
cacugcauucucacacuauaa

SEQ ID NO: 452717 - RNA, 22 nt, Artificial Sequence
  Synthetic
acacugcauucucacacuauaa

SEQ ID NO: 452718 - RNA, 23 nt, Artificial Sequence
  Synthetic
uacacugcauucucacacuauaa

SEQ ID NO: 452719 - RNA, 24 nt, Artificial Sequence
  Synthetic
uuacacugcauucucacacuauaa

SEQ ID NO: 452720 - RNA, 18 nt, Artificial Sequence
  Synthetic
gucugaaugccacuauaa

SEQ ID NO: 452721 - RNA, 19 nt, Artificial Sequence
  Synthetic
ggucugaaugccacuauaa

SEQ ID NO: 452722 - RNA, 20 nt, Artificial Sequence
  Synthetic
uggucugaaugccacuauaa

SEQ ID NO: 452723 - RNA, 21 nt, Artificial Sequence
  Synthetic
auggucugaaugccacuauaa

SEQ ID NO: 452724 - RNA, 22 nt, Artificial Sequence
  Synthetic
aauggucugaaugccacuauaa

SEQ ID NO: 452725 - RNA, 23 nt, Artificial Sequence
  Synthetic
caauggucugaaugccacuauaa

SEQ ID NO: 452726 - RNA, 24 nt, Artificial Sequence
  Synthetic
acaauggucugaaugccacuauaa

SEQ ID NO: 452727 - RNA, 18 nt, Artificial Sequence
  Synthetic
gaugaggcuggccuauaa

SEQ ID NO: 452728 - RNA, 19 nt, Artificial Sequence
  Synthetic
agaugaggcuggccuauaa

SEQ ID NO: 452729 - RNA, 20 nt, Artificial Sequence
  Synthetic
aagaugaggcuggccuauaa

SEQ ID NO: 452730 - RNA, 21 nt, Artificial Sequence
  Synthetic
uaagaugaggcuggccuauaa

SEQ ID NO: 452731 - RNA, 22 nt, Artificial Sequence
  Synthetic
cuaagaugaggcuggccuauaa

SEQ ID NO: 452732 - RNA, 23 nt, Artificial Sequence
  Synthetic
acuaagaugaggcuggccuauaa

SEQ ID NO: 452733 - RNA, 24 nt, Artificial Sequence
  Synthetic
aacuaagaugaggcuggccuauaa

SEQ ID NO: 452734 - RNA, 18 nt, Artificial Sequence
  Synthetic
ugaaaucucugccuauaa

SEQ ID NO: 452735 - RNA, 19 nt, Artificial Sequence
  Synthetic
cugaaaucucugccuauaa

SEQ ID NO: 452736 - RNA, 20 nt, Artificial Sequence
  Synthetic
ucugaaaucucugccuauaa

SEQ ID NO: 452737 - RNA, 21 nt, Artificial Sequence
  Synthetic
gucugaaaucucugccuauaa

SEQ ID NO: 452738 - RNA, 22 nt, Artificial Sequence
  Synthetic
ugucugaaaucucugccuauaa

SEQ ID NO: 452739 - RNA, 23 nt, Artificial Sequence
  Synthetic
cugucugaaaucucugccuauaa

SEQ ID NO: 452740 - RNA, 24 nt, Artificial Sequence
  Synthetic
ccugucugaaaucucugccuauaa

SEQ ID NO: 452741 - RNA, 18 nt, Artificial Sequence
  Synthetic
cagcuucuacaucuauaa

SEQ ID NO: 452742 - RNA, 19 nt, Artificial Sequence
  Synthetic
ucagcuucuacaucuauaa

SEQ ID NO: 452743 - RNA, 20 nt, Artificial Sequence
  Synthetic
cucagcuucuacaucuauaa

SEQ ID NO: 452744 - RNA, 21 nt, Artificial Sequence
  Synthetic
ccucagcuucuacaucuauaa

SEQ ID NO: 452745 - RNA, 22 nt, Artificial Sequence
  Synthetic
gccucagcuucuacaucuauaa

SEQ ID NO: 452746 - RNA, 23 nt, Artificial Sequence
  Synthetic
ggccucagcuucuacaucuauaa

SEQ ID NO: 452747 - RNA, 24 nt, Artificial Sequence
  Synthetic
aggccucagcuucuacaucuauaa

SEQ ID NO: 452748 - RNA, 18 nt, Artificial Sequence
  Synthetic
ucugccuaugcucuauaa

SEQ ID NO: 452749 - RNA, 19 nt, Artificial Sequence
  Synthetic
cucugccuaugcucuauaa

SEQ ID NO: 452750 - RNA, 20 nt, Artificial Sequence
  Synthetic
acucugccuaugcucuauaa

SEQ ID NO: 452751 - RNA, 21 nt, Artificial Sequence
  Synthetic
gacucugccuaugcucuauaa

SEQ ID NO: 452752 - RNA, 22 nt, Artificial Sequence
  Synthetic
agacucugccuaugcucuauaa

SEQ ID NO: 452753 - RNA, 23 nt, Artificial Sequence
  Synthetic
uagacucugccuaugcucuauaa

SEQ ID NO: 452754 - RNA, 24 nt, Artificial Sequence
  Synthetic
auagacucugccuaugcucuauaa

SEQ ID NO: 452755 - RNA, 18 nt, Artificial Sequence
  Synthetic
cguauaaaaucucuauaa

SEQ ID NO: 452756 - RNA, 19 nt, Artificial Sequence
  Synthetic
acguauaaaaucucuauaa

SEQ ID NO: 452757 - RNA, 20 nt, Artificial Sequence
  Synthetic
gacguauaaaaucucuauaa

SEQ ID NO: 452758 - RNA, 21 nt, Artificial Sequence
  Synthetic
ggacguauaaaaucucuauaa

SEQ ID NO: 452759 - RNA, 22 nt, Artificial Sequence
  Synthetic
uggacguauaaaaucucuauaa

SEQ ID NO: 452760 - RNA, 23 nt, Artificial Sequence
  Synthetic
auggacguauaaaaucucuauaa

SEQ ID NO: 452761 - RNA, 24 nt, Artificial Sequence
  Synthetic
gauggacguauaaaaucucuauaa

SEQ ID NO: 452762 - RNA, 18 nt, Artificial Sequence
  Synthetic
uuaagaauuguucuauaa

SEQ ID NO: 452763 - RNA, 19 nt, Artificial Sequence
  Synthetic
auuaagaauuguucuauaa

SEQ ID NO: 452764 - RNA, 20 nt, Artificial Sequence
  Synthetic
uauuaagaauuguucuauaa

SEQ ID NO: 452765 - RNA, 21 nt, Artificial Sequence
  Synthetic
uuauuaagaauuguucuauaa

SEQ ID NO: 452766 - RNA, 22 nt, Artificial Sequence
  Synthetic
auuauuaagaauuguucuauaa

SEQ ID NO: 452767 - RNA, 23 nt, Artificial Sequence
  Synthetic
uauuauuaagaauuguucuauaa

SEQ ID NO: 452768 - RNA, 24 nt, Artificial Sequence
  Synthetic
auauuauuaagaauuguucuauaa

SEQ ID NO: 452769 - RNA, 18 nt, Artificial Sequence
  Synthetic
ggacacuaguuucuauaa

SEQ ID NO: 452770 - RNA, 19 nt, Artificial Sequence
  Synthetic
cggacacuaguuucuauaa

SEQ ID NO: 452771 - RNA, 20 nt, Artificial Sequence
  Synthetic
gcggacacuaguuucuauaa

SEQ ID NO: 452772 - RNA, 21 nt, Artificial Sequence
  Synthetic
ugcggacacuaguuucuauaa

SEQ ID NO: 452773 - RNA, 22 nt, Artificial Sequence
  Synthetic
uugcggacacuaguuucuauaa

SEQ ID NO: 452774 - RNA, 23 nt, Artificial Sequence
  Synthetic
auugcggacacuaguuucuauaa

SEQ ID NO: 452775 - RNA, 24 nt, Artificial Sequence
  Synthetic
aauugcggacacuaguuucuauaa

SEQ ID NO: 452776 - RNA, 18 nt, Artificial Sequence
  Synthetic
agucuccauuuucuauaa

SEQ ID NO: 452777 - RNA, 19 nt, Artificial Sequence
  Synthetic
gagucuccauuuucuauaa

SEQ ID NO: 452778 - RNA, 20 nt, Artificial Sequence
  Synthetic
agagucuccauuuucuauaa

SEQ ID NO: 452779 - RNA, 21 nt, Artificial Sequence
  Synthetic
cagagucuccauuuucuauaa

SEQ ID NO: 452780 - RNA, 22 nt, Artificial Sequence
  Synthetic
ucagagucuccauuuucuauaa

SEQ ID NO: 452781 - RNA, 23 nt, Artificial Sequence
  Synthetic
uucagagucuccauuuucuauaa

SEQ ID NO: 452782 - RNA, 24 nt, Artificial Sequence
  Synthetic
cuucagagucuccauuuucuauaa

SEQ ID NO: 452783 - RNA, 18 nt, Artificial Sequence
  Synthetic
gcccauuugagaguauaa

SEQ ID NO: 452784 - RNA, 19 nt, Artificial Sequence
  Synthetic
ugcccauuugagaguauaa

SEQ ID NO: 452785 - RNA, 20 nt, Artificial Sequence
  Synthetic
cugcccauuugagaguauaa

SEQ ID NO: 452786 - RNA, 21 nt, Artificial Sequence
  Synthetic
acugcccauuugagaguauaa

SEQ ID NO: 452787 - RNA, 22 nt, Artificial Sequence
  Synthetic
uacugcccauuugagaguauaa

SEQ ID NO: 452788 - RNA, 23 nt, Artificial Sequence
  Synthetic
cuacugcccauuugagaguauaa

SEQ ID NO: 452789 - RNA, 24 nt, Artificial Sequence
  Synthetic
gcuacugcccauuugagaguauaa

SEQ ID NO: 452790 - RNA, 18 nt, Artificial Sequence
  Synthetic
cgcugacccugaguauaa

SEQ ID NO: 452791 - RNA, 19 nt, Artificial Sequence
  Synthetic
ucgcugacccugaguauaa

SEQ ID NO: 452792 - RNA, 20 nt, Artificial Sequence
  Synthetic
gucgcugacccugaguauaa

SEQ ID NO: 452793 - RNA, 21 nt, Artificial Sequence
  Synthetic
ugucgcugacccugaguauaa

SEQ ID NO: 452794 - RNA, 22 nt, Artificial Sequence
  Synthetic
uugucgcugacccugaguauaa

SEQ ID NO: 452795 - RNA, 23 nt, Artificial Sequence
  Synthetic
auugucgcugacccugaguauaa

SEQ ID NO: 452796 - RNA, 24 nt, Artificial Sequence
  Synthetic
cauugucgcugacccugaguauaa

SEQ ID NO: 452797 - RNA, 18 nt, Artificial Sequence
  Synthetic
aaaggcauaaccguauaa

SEQ ID NO: 452798 - RNA, 19 nt, Artificial Sequence
  Synthetic
aaaaggcauaaccguauaa

SEQ ID NO: 452799 - RNA, 20 nt, Artificial Sequence
  Synthetic
gaaaaggcauaaccguauaa

SEQ ID NO: 452800 - RNA, 21 nt, Artificial Sequence
  Synthetic
ggaaaaggcauaaccguauaa

SEQ ID NO: 452801 - RNA, 22 nt, Artificial Sequence
  Synthetic
uggaaaaggcauaaccguauaa

SEQ ID NO: 452802 - RNA, 23 nt, Artificial Sequence
  Synthetic
cuggaaaaggcauaaccguauaa

SEQ ID NO: 452803 - RNA, 24 nt, Artificial Sequence
  Synthetic
acuggaaaaggcauaaccguauaa

SEQ ID NO: 452804 - RNA, 18 nt, Artificial Sequence
  Synthetic
ccuccuaaguagguauaa

SEQ ID NO: 452805 - RNA, 19 nt, Artificial Sequence
  Synthetic
uccuccuaaguagguauaa

SEQ ID NO: 452806 - RNA, 20 nt, Artificial Sequence
  Synthetic
guccuccuaaguagguauaa

SEQ ID NO: 452807 - RNA, 21 nt, Artificial Sequence
  Synthetic
gguccuccuaaguagguauaa

SEQ ID NO: 452808 - RNA, 22 nt, Artificial Sequence
  Synthetic
ggguccuccuaaguagguauaa

SEQ ID NO: 452809 - RNA, 23 nt, Artificial Sequence
  Synthetic
aggguccuccuaaguagguauaa

SEQ ID NO: 452810 - RNA, 24 nt, Artificial Sequence
  Synthetic
gaggguccuccuaaguagguauaa

SEQ ID NO: 452811 - RNA, 18 nt, Artificial Sequence
  Synthetic
guaaagugcaauguauaa

SEQ ID NO: 452812 - RNA, 19 nt, Artificial Sequence
  Synthetic
aguaaagugcaauguauaa

SEQ ID NO: 452813 - RNA, 20 nt, Artificial Sequence
  Synthetic
uaguaaagugcaauguauaa

SEQ ID NO: 452814 - RNA, 21 nt, Artificial Sequence
  Synthetic
cuaguaaagugcaauguauaa

SEQ ID NO: 452815 - RNA, 22 nt, Artificial Sequence
  Synthetic
acuaguaaagugcaauguauaa

SEQ ID NO: 452816 - RNA, 23 nt, Artificial Sequence
  Synthetic
aacuaguaaagugcaauguauaa

SEQ ID NO: 452817 - RNA, 24 nt, Artificial Sequence
  Synthetic
caacuaguaaagugcaauguauaa

SEQ ID NO: 452818 - RNA, 18 nt, Artificial Sequence
  Synthetic
acauuuuugaguguauaa

SEQ ID NO: 452819 - RNA, 19 nt, Artificial Sequence
  Synthetic
aacauuuuugaguguauaa

SEQ ID NO: 452820 - RNA, 20 nt, Artificial Sequence
  Synthetic
aaacauuuuugaguguauaa

SEQ ID NO: 452821 - RNA, 21 nt, Artificial Sequence
  Synthetic
aaaacauuuuugaguguauaa

SEQ ID NO: 452822 - RNA, 22 nt, Artificial Sequence
  Synthetic
aaaaacauuuuugaguguauaa

SEQ ID NO: 452823 - RNA, 23 nt, Artificial Sequence
  Synthetic
aaaaaacauuuuugaguguauaa

SEQ ID NO: 452824 - RNA, 24 nt, Artificial Sequence
  Synthetic
gaaaaaacauuuuugaguguauaa

SEQ ID NO: 452825 - RNA, 18 nt, Artificial Sequence
  Synthetic
aaaaguauacuuguauaa

SEQ ID NO: 452826 - RNA, 19 nt, Artificial Sequence
  Synthetic
gaaaaguauacuuguauaa

SEQ ID NO: 452827 - RNA, 20 nt, Artificial Sequence
  Synthetic
ggaaaaguauacuuguauaa

SEQ ID NO: 452828 - RNA, 21 nt, Artificial Sequence
  Synthetic
aggaaaaguauacuuguauaa

SEQ ID NO: 452829 - RNA, 22 nt, Artificial Sequence
  Synthetic
aaggaaaaguauacuuguauaa

SEQ ID NO: 452830 - RNA, 23 nt, Artificial Sequence
  Synthetic
uaaggaaaaguauacuuguauaa

SEQ ID NO: 452831 - RNA, 24 nt, Artificial Sequence
  Synthetic
cuaaggaaaaguauacuuguauaa

SEQ ID NO: 452832 - RNA, 18 nt, Artificial Sequence
  Synthetic
auaaguauguaauuauaa

SEQ ID NO: 452833 - RNA, 19 nt, Artificial Sequence
  Synthetic
cauaaguauguaauuauaa

SEQ ID NO: 452834 - RNA, 20 nt, Artificial Sequence
  Synthetic
acauaaguauguaauuauaa

SEQ ID NO: 452835 - RNA, 21 nt, Artificial Sequence
  Synthetic
cacauaaguauguaauuauaa

SEQ ID NO: 452836 - RNA, 22 nt, Artificial Sequence
  Synthetic
ucacauaaguauguaauuauaa

SEQ ID NO: 452837 - RNA, 23 nt, Artificial Sequence
  Synthetic
gucacauaaguauguaauuauaa

SEQ ID NO: 452838 - RNA, 24 nt, Artificial Sequence
  Synthetic
ggucacauaaguauguaauuauaa

SEQ ID NO: 452839 - RNA, 18 nt, Artificial Sequence
  Synthetic
augagaagagcauuauaa

SEQ ID NO: 452840 - RNA, 19 nt, Artificial Sequence
  Synthetic
aaugagaagagcauuauaa

SEQ ID NO: 452841 - RNA, 20 nt, Artificial Sequence
  Synthetic
gaaugagaagagcauuauaa

SEQ ID NO: 452842 - RNA, 21 nt, Artificial Sequence
  Synthetic
agaaugagaagagcauuauaa

SEQ ID NO: 452843 - RNA, 22 nt, Artificial Sequence
  Synthetic
gagaaugagaagagcauuauaa

SEQ ID NO: 452844 - RNA, 23 nt, Artificial Sequence
  Synthetic
agagaaugagaagagcauuauaa

SEQ ID NO: 452845 - RNA, 24 nt, Artificial Sequence
  Synthetic
uagagaaugagaagagcauuauaa

SEQ ID NO: 452846 - RNA, 18 nt, Artificial Sequence
  Synthetic
guuuaggcccacuuauaa

SEQ ID NO: 452847 - RNA, 19 nt, Artificial Sequence
  Synthetic
uguuuaggcccacuuauaa

SEQ ID NO: 452848 - RNA, 20 nt, Artificial Sequence
  Synthetic
auguuuaggcccacuuauaa

SEQ ID NO: 452849 - RNA, 21 nt, Artificial Sequence
  Synthetic
aauguuuaggcccacuuauaa

SEQ ID NO: 452850 - RNA, 22 nt, Artificial Sequence
  Synthetic
caauguuuaggcccacuuauaa

SEQ ID NO: 452851 - RNA, 23 nt, Artificial Sequence
  Synthetic
ccaauguuuaggcccacuuauaa

SEQ ID NO: 452852 - RNA, 24 nt, Artificial Sequence
  Synthetic
cccaauguuuaggcccacuuauaa

SEQ ID NO: 452853 - RNA, 18 nt, Artificial Sequence
  Synthetic
cguagcucccacuuauaa

SEQ ID NO: 452854 - RNA, 19 nt, Artificial Sequence
  Synthetic
gcguagcucccacuuauaa

SEQ ID NO: 452855 - RNA, 20 nt, Artificial Sequence
  Synthetic
agcguagcucccacuuauaa

SEQ ID NO: 452856 - RNA, 21 nt, Artificial Sequence
  Synthetic
cagcguagcucccacuuauaa

SEQ ID NO: 452857 - RNA, 22 nt, Artificial Sequence
  Synthetic
acagcguagcucccacuuauaa

SEQ ID NO: 452858 - RNA, 23 nt, Artificial Sequence
  Synthetic
uacagcguagcucccacuuauaa

SEQ ID NO: 452859 - RNA, 24 nt, Artificial Sequence
  Synthetic
cuacagcguagcucccacuuauaa

SEQ ID NO: 452860 - RNA, 18 nt, Artificial Sequence
  Synthetic
auauauucucacuuauaa

SEQ ID NO: 452861 - RNA, 19 nt, Artificial Sequence
  Synthetic
cauauauucucacuuauaa

SEQ ID NO: 452862 - RNA, 20 nt, Artificial Sequence
  Synthetic
ccauauauucucacuuauaa

SEQ ID NO: 452863 - RNA, 21 nt, Artificial Sequence
  Synthetic
accauauauucucacuuauaa

SEQ ID NO: 452864 - RNA, 22 nt, Artificial Sequence
  Synthetic
uaccauauauucucacuuauaa

SEQ ID NO: 452865 - RNA, 23 nt, Artificial Sequence
  Synthetic
auaccauauauucucacuuauaa

SEQ ID NO: 452866 - RNA, 24 nt, Artificial Sequence
  Synthetic
aauaccauauauucucacuuauaa

SEQ ID NO: 452867 - RNA, 18 nt, Artificial Sequence
  Synthetic
auauguucucacuuauaa

SEQ ID NO: 452868 - RNA, 19 nt, Artificial Sequence
  Synthetic
uauauguucucacuuauaa

SEQ ID NO: 452869 - RNA, 20 nt, Artificial Sequence
  Synthetic
cuauauguucucacuuauaa

SEQ ID NO: 452870 - RNA, 21 nt, Artificial Sequence
  Synthetic
acuauauguucucacuuauaa

SEQ ID NO: 452871 - RNA, 22 nt, Artificial Sequence
  Synthetic
cacuauauguucucacuuauaa

SEQ ID NO: 452872 - RNA, 23 nt, Artificial Sequence
  Synthetic
acacuauauguucucacuuauaa

SEQ ID NO: 452873 - RNA, 24 nt, Artificial Sequence
  Synthetic
aacacuauauguucucacuuauaa

SEQ ID NO: 452874 - RNA, 18 nt, Artificial Sequence
  Synthetic
auaauaguucacuuauaa

SEQ ID NO: 452875 - RNA, 19 nt, Artificial Sequence
  Synthetic
aauaauaguucacuuauaa

SEQ ID NO: 452876 - RNA, 20 nt, Artificial Sequence
  Synthetic
aaauaauaguucacuuauaa

SEQ ID NO: 452877 - RNA, 21 nt, Artificial Sequence
  Synthetic
aaaauaauaguucacuuauaa

SEQ ID NO: 452878 - RNA, 22 nt, Artificial Sequence
  Synthetic
caaaauaauaguucacuuauaa

SEQ ID NO: 452879 - RNA, 23 nt, Artificial Sequence
  Synthetic
acaaaauaauaguucacuuauaa

SEQ ID NO: 452880 - RNA, 24 nt, Artificial Sequence
  Synthetic
cacaaaauaauaguucacuuauaa

SEQ ID NO: 452881 - RNA, 18 nt, Artificial Sequence
  Synthetic
uuugucuuucacuuauaa

SEQ ID NO: 452882 - RNA, 19 nt, Artificial Sequence
  Synthetic
auuugucuuucacuuauaa

SEQ ID NO: 452883 - RNA, 20 nt, Artificial Sequence
  Synthetic
uauuugucuuucacuuauaa

SEQ ID NO: 452884 - RNA, 21 nt, Artificial Sequence
  Synthetic
uuauuugucuuucacuuauaa

SEQ ID NO: 452885 - RNA, 22 nt, Artificial Sequence
  Synthetic
auuauuugucuuucacuuauaa

SEQ ID NO: 452886 - RNA, 23 nt, Artificial Sequence
  Synthetic
cauuauuugucuuucacuuauaa

SEQ ID NO: 452887 - RNA, 24 nt, Artificial Sequence
  Synthetic
acauuauuugucuuucacuuauaa

SEQ ID NO: 452888 - RNA, 18 nt, Artificial Sequence
  Synthetic
guucucacuuacuuauaa

SEQ ID NO: 452889 - RNA, 19 nt, Artificial Sequence
  Synthetic
uguucucacuuacuuauaa

SEQ ID NO: 452890 - RNA, 20 nt, Artificial Sequence
  Synthetic
auguucucacuuacuuauaa

SEQ ID NO: 452891 - RNA, 21 nt, Artificial Sequence
  Synthetic
cauguucucacuuacuuauaa

SEQ ID NO: 452892 - RNA, 22 nt, Artificial Sequence
  Synthetic
acauguucucacuuacuuauaa

SEQ ID NO: 452893 - RNA, 23 nt, Artificial Sequence
  Synthetic
cacauguucucacuuacuuauaa

SEQ ID NO: 452894 - RNA, 24 nt, Artificial Sequence
  Synthetic
ucacauguucucacuuacuuauaa

SEQ ID NO: 452895 - RNA, 18 nt, Artificial Sequence
  Synthetic
ggauuagcgcccuuauaa

SEQ ID NO: 452896 - RNA, 19 nt, Artificial Sequence
  Synthetic
gggauuagcgcccuuauaa

SEQ ID NO: 452897 - RNA, 20 nt, Artificial Sequence
  Synthetic
ugggauuagcgcccuuauaa

SEQ ID NO: 452898 - RNA, 21 nt, Artificial Sequence
  Synthetic
uugggauuagcgcccuuauaa

SEQ ID NO: 452899 - RNA, 22 nt, Artificial Sequence
  Synthetic
uuugggauuagcgcccuuauaa

SEQ ID NO: 452900 - RNA, 23 nt, Artificial Sequence
  Synthetic
uuuugggauuagcgcccuuauaa

SEQ ID NO: 452901 - RNA, 24 nt, Artificial Sequence
  Synthetic
uuuuugggauuagcgcccuuauaa

SEQ ID NO: 452902 - RNA, 18 nt, Artificial Sequence
  Synthetic
cucuucccuuucuuauaa

SEQ ID NO: 452903 - RNA, 19 nt, Artificial Sequence
  Synthetic
acucuucccuuucuuauaa

SEQ ID NO: 452904 - RNA, 20 nt, Artificial Sequence
  Synthetic
uacucuucccuuucuuauaa

SEQ ID NO: 452905 - RNA, 21 nt, Artificial Sequence
  Synthetic
uuacucuucccuuucuuauaa

SEQ ID NO: 452906 - RNA, 22 nt, Artificial Sequence
  Synthetic
uuuacucuucccuuucuuauaa

SEQ ID NO: 452907 - RNA, 23 nt, Artificial Sequence
  Synthetic
uuuuacucuucccuuucuuauaa

SEQ ID NO: 452908 - RNA, 24 nt, Artificial Sequence
  Synthetic
auuuuacucuucccuuucuuauaa

SEQ ID NO: 452909 - RNA, 18 nt, Artificial Sequence
  Synthetic
cccaugagauaguuauaa

SEQ ID NO: 452910 - RNA, 19 nt, Artificial Sequence
  Synthetic
acccaugagauaguuauaa

SEQ ID NO: 452911 - RNA, 20 nt, Artificial Sequence
  Synthetic
aacccaugagauaguuauaa

SEQ ID NO: 452912 - RNA, 21 nt, Artificial Sequence
  Synthetic
caacccaugagauaguuauaa

SEQ ID NO: 452913 - RNA, 22 nt, Artificial Sequence
  Synthetic
ccaacccaugagauaguuauaa

SEQ ID NO: 452914 - RNA, 23 nt, Artificial Sequence
  Synthetic
cccaacccaugagauaguuauaa

SEQ ID NO: 452915 - RNA, 24 nt, Artificial Sequence
  Synthetic
ucccaacccaugagauaguuauaa

SEQ ID NO: 452916 - RNA, 18 nt, Artificial Sequence
  Synthetic
aagagugauuaguuauaa

SEQ ID NO: 452917 - RNA, 19 nt, Artificial Sequence
  Synthetic
aaagagugauuaguuauaa

SEQ ID NO: 452918 - RNA, 20 nt, Artificial Sequence
  Synthetic
uaaagagugauuaguuauaa

SEQ ID NO: 452919 - RNA, 21 nt, Artificial Sequence
  Synthetic
auaaagagugauuaguuauaa

SEQ ID NO: 452920 - RNA, 22 nt, Artificial Sequence
  Synthetic
uauaaagagugauuaguuauaa

SEQ ID NO: 452921 - RNA, 23 nt, Artificial Sequence
  Synthetic
uuauaaagagugauuaguuauaa

SEQ ID NO: 452922 - RNA, 24 nt, Artificial Sequence
  Synthetic
cuuauaaagagugauuaguuauaa

SEQ ID NO: 452923 - RNA, 18 nt, Artificial Sequence
  Synthetic
ucagaaagccuguuauaa

SEQ ID NO: 452924 - RNA, 19 nt, Artificial Sequence
  Synthetic
uucagaaagccuguuauaa

SEQ ID NO: 452925 - RNA, 20 nt, Artificial Sequence
  Synthetic
guucagaaagccuguuauaa

SEQ ID NO: 452926 - RNA, 21 nt, Artificial Sequence
  Synthetic
aguucagaaagccuguuauaa

SEQ ID NO: 452927 - RNA, 22 nt, Artificial Sequence
  Synthetic
aaguucagaaagccuguuauaa

SEQ ID NO: 452928 - RNA, 23 nt, Artificial Sequence
  Synthetic
gaaguucagaaagccuguuauaa

SEQ ID NO: 452929 - RNA, 24 nt, Artificial Sequence
  Synthetic
ugaaguucagaaagccuguuauaa

SEQ ID NO: 452930 - RNA, 18 nt, Artificial Sequence
  Synthetic
gugaaaauguuguuauaa

SEQ ID NO: 452931 - RNA, 19 nt, Artificial Sequence
  Synthetic
agugaaaauguuguuauaa

SEQ ID NO: 452932 - RNA, 20 nt, Artificial Sequence
  Synthetic
uagugaaaauguuguuauaa

SEQ ID NO: 452933 - RNA, 21 nt, Artificial Sequence
  Synthetic
guagugaaaauguuguuauaa

SEQ ID NO: 452934 - RNA, 22 nt, Artificial Sequence
  Synthetic
aguagugaaaauguuguuauaa

SEQ ID NO: 452935 - RNA, 23 nt, Artificial Sequence
  Synthetic
aaguagugaaaauguuguuauaa

SEQ ID NO: 452936 - RNA, 24 nt, Artificial Sequence
  Synthetic
aaaguagugaaaauguuguuauaa

SEQ ID NO: 452937 - RNA, 18 nt, Artificial Sequence
  Synthetic
auaauauacaauuuauaa

SEQ ID NO: 452938 - RNA, 19 nt, Artificial Sequence
  Synthetic
cauaauauacaauuuauaa

SEQ ID NO: 452939 - RNA, 20 nt, Artificial Sequence
  Synthetic
ucauaauauacaauuuauaa

SEQ ID NO: 452940 - RNA, 21 nt, Artificial Sequence
  Synthetic
aucauaauauacaauuuauaa

SEQ ID NO: 452941 - RNA, 22 nt, Artificial Sequence
  Synthetic
gaucauaauauacaauuuauaa

SEQ ID NO: 452942 - RNA, 23 nt, Artificial Sequence
  Synthetic
ugaucauaauauacaauuuauaa

SEQ ID NO: 452943 - RNA, 24 nt, Artificial Sequence
  Synthetic
augaucauaauauacaauuuauaa

SEQ ID NO: 452944 - RNA, 18 nt, Artificial Sequence
  Synthetic
aacaauauuaauuuauaa

SEQ ID NO: 452945 - RNA, 19 nt, Artificial Sequence
  Synthetic
caacaauauuaauuuauaa

SEQ ID NO: 452946 - RNA, 20 nt, Artificial Sequence
  Synthetic
acaacaauauuaauuuauaa

SEQ ID NO: 452947 - RNA, 21 nt, Artificial Sequence
  Synthetic
aacaacaauauuaauuuauaa

SEQ ID NO: 452948 - RNA, 22 nt, Artificial Sequence
  Synthetic
gaacaacaauauuaauuuauaa

SEQ ID NO: 452949 - RNA, 23 nt, Artificial Sequence
  Synthetic
ugaacaacaauauuaauuuauaa

SEQ ID NO: 452950 - RNA, 24 nt, Artificial Sequence
  Synthetic
augaacaacaauauuaauuuauaa

SEQ ID NO: 452951 - RNA, 18 nt, Artificial Sequence
  Synthetic
aauauaaaacauuuauaa

SEQ ID NO: 452952 - RNA, 19 nt, Artificial Sequence
  Synthetic
gaauauaaaacauuuauaa

SEQ ID NO: 452953 - RNA, 20 nt, Artificial Sequence
  Synthetic
ggaauauaaaacauuuauaa

SEQ ID NO: 452954 - RNA, 21 nt, Artificial Sequence
  Synthetic
gggaauauaaaacauuuauaa

SEQ ID NO: 452955 - RNA, 22 nt, Artificial Sequence
  Synthetic
agggaauauaaaacauuuauaa

SEQ ID NO: 452956 - RNA, 23 nt, Artificial Sequence
  Synthetic
uagggaauauaaaacauuuauaa

SEQ ID NO: 452957 - RNA, 24 nt, Artificial Sequence
  Synthetic
auagggaauauaaaacauuuauaa

SEQ ID NO: 452958 - RNA, 18 nt, Artificial Sequence
  Synthetic
uuuagcuuccauuuauaa

SEQ ID NO: 452959 - RNA, 19 nt, Artificial Sequence
  Synthetic
auuuagcuuccauuuauaa

SEQ ID NO: 452960 - RNA, 20 nt, Artificial Sequence
  Synthetic
cauuuagcuuccauuuauaa

SEQ ID NO: 452961 - RNA, 21 nt, Artificial Sequence
  Synthetic
ucauuuagcuuccauuuauaa

SEQ ID NO: 452962 - RNA, 22 nt, Artificial Sequence
  Synthetic
aucauuuagcuuccauuuauaa

SEQ ID NO: 452963 - RNA, 23 nt, Artificial Sequence
  Synthetic
caucauuuagcuuccauuuauaa

SEQ ID NO: 452964 - RNA, 24 nt, Artificial Sequence
  Synthetic
ucaucauuuagcuuccauuuauaa

SEQ ID NO: 452965 - RNA, 18 nt, Artificial Sequence
  Synthetic
ccauguucucauuuauaa

SEQ ID NO: 452966 - RNA, 19 nt, Artificial Sequence
  Synthetic
cccauguucucauuuauaa

SEQ ID NO: 452967 - RNA, 20 nt, Artificial Sequence
  Synthetic
ccccauguucucauuuauaa

SEQ ID NO: 452968 - RNA, 21 nt, Artificial Sequence
  Synthetic
accccauguucucauuuauaa

SEQ ID NO: 452969 - RNA, 22 nt, Artificial Sequence
  Synthetic
uaccccauguucucauuuauaa

SEQ ID NO: 452970 - RNA, 23 nt, Artificial Sequence
  Synthetic
auaccccauguucucauuuauaa

SEQ ID NO: 452971 - RNA, 24 nt, Artificial Sequence
  Synthetic
aauaccccauguucucauuuauaa

SEQ ID NO: 452972 - RNA, 18 nt, Artificial Sequence
  Synthetic
cucuuuauggauuuauaa

SEQ ID NO: 452973 - RNA, 19 nt, Artificial Sequence
  Synthetic
ccucuuuauggauuuauaa

SEQ ID NO: 452974 - RNA, 20 nt, Artificial Sequence
  Synthetic
accucuuuauggauuuauaa

SEQ ID NO: 452975 - RNA, 21 nt, Artificial Sequence
  Synthetic
aaccucuuuauggauuuauaa

SEQ ID NO: 452976 - RNA, 22 nt, Artificial Sequence
  Synthetic
aaaccucuuuauggauuuauaa

SEQ ID NO: 452977 - RNA, 23 nt, Artificial Sequence
  Synthetic
aaaaccucuuuauggauuuauaa

SEQ ID NO: 452978 - RNA, 24 nt, Artificial Sequence
  Synthetic
uaaaaccucuuuauggauuuauaa

SEQ ID NO: 452979 - RNA, 18 nt, Artificial Sequence
  Synthetic
agacugggugauuuauaa

SEQ ID NO: 452980 - RNA, 19 nt, Artificial Sequence
  Synthetic
gagacugggugauuuauaa

SEQ ID NO: 452981 - RNA, 20 nt, Artificial Sequence
  Synthetic
ugagacugggugauuuauaa

SEQ ID NO: 452982 - RNA, 21 nt, Artificial Sequence
  Synthetic
cugagacugggugauuuauaa

SEQ ID NO: 452983 - RNA, 22 nt, Artificial Sequence
  Synthetic
ucugagacugggugauuuauaa

SEQ ID NO: 452984 - RNA, 23 nt, Artificial Sequence
  Synthetic
aucugagacugggugauuuauaa

SEQ ID NO: 452985 - RNA, 24 nt, Artificial Sequence
  Synthetic
uaucugagacugggugauuuauaa

SEQ ID NO: 452986 - RNA, 18 nt, Artificial Sequence
  Synthetic
augaauauauauuuauaa

SEQ ID NO: 452987 - RNA, 19 nt, Artificial Sequence
  Synthetic
uaugaauauauauuuauaa

SEQ ID NO: 452988 - RNA, 20 nt, Artificial Sequence
  Synthetic
auaugaauauauauuuauaa

SEQ ID NO: 452989 - RNA, 21 nt, Artificial Sequence
  Synthetic
uauaugaauauauauuuauaa

SEQ ID NO: 452990 - RNA, 22 nt, Artificial Sequence
  Synthetic
auauaugaauauauauuuauaa

SEQ ID NO: 452991 - RNA, 23 nt, Artificial Sequence
  Synthetic
uauauaugaauauauauuuauaa

SEQ ID NO: 452992 - RNA, 24 nt, Artificial Sequence
  Synthetic
auauauaugaauauauauuuauaa

SEQ ID NO: 452993 - RNA, 18 nt, Artificial Sequence
  Synthetic
acuauucagccuuuauaa

SEQ ID NO: 452994 - RNA, 19 nt, Artificial Sequence
  Synthetic
uacuauucagccuuuauaa

SEQ ID NO: 452995 - RNA, 20 nt, Artificial Sequence
  Synthetic
auacuauucagccuuuauaa

SEQ ID NO: 452996 - RNA, 21 nt, Artificial Sequence
  Synthetic
aauacuauucagccuuuauaa

SEQ ID NO: 452997 - RNA, 22 nt, Artificial Sequence
  Synthetic
gaauacuauucagccuuuauaa

SEQ ID NO: 452998 - RNA, 23 nt, Artificial Sequence
  Synthetic
ggaauacuauucagccuuuauaa

SEQ ID NO: 452999 - RNA, 24 nt, Artificial Sequence
  Synthetic
uggaauacuauucagccuuuauaa

SEQ ID NO: 453000 - RNA, 18 nt, Artificial Sequence
  Synthetic
uugucauuuauuuuauaa

SEQ ID NO: 453001 - RNA, 19 nt, Artificial Sequence
  Synthetic
cuugucauuuauuuuauaa

SEQ ID NO: 453002 - RNA, 20 nt, Artificial Sequence
  Synthetic
gcuugucauuuauuuuauaa

SEQ ID NO: 453003 - RNA, 21 nt, Artificial Sequence
  Synthetic
ggcuugucauuuauuuuauaa

SEQ ID NO: 453004 - RNA, 22 nt, Artificial Sequence
  Synthetic
uggcuugucauuuauuuuauaa

SEQ ID NO: 453005 - RNA, 23 nt, Artificial Sequence
  Synthetic
uuggcuugucauuuauuuuauaa

SEQ ID NO: 453006 - RNA, 24 nt, Artificial Sequence
  Synthetic
guuggcuugucauuuauuuuauaa

SEQ ID NO: 453007 - RNA, 18 nt, Artificial Sequence
  Synthetic
gaucugaugguuuuauaa

SEQ ID NO: 453008 - RNA, 19 nt, Artificial Sequence
  Synthetic
agaucugaugguuuuauaa

SEQ ID NO: 453009 - RNA, 20 nt, Artificial Sequence
  Synthetic
gagaucugaugguuuuauaa

SEQ ID NO: 453010 - RNA, 21 nt, Artificial Sequence
  Synthetic
ugagaucugaugguuuuauaa

SEQ ID NO: 453011 - RNA, 22 nt, Artificial Sequence
  Synthetic
augagaucugaugguuuuauaa

SEQ ID NO: 453012 - RNA, 23 nt, Artificial Sequence
  Synthetic
caugagaucugaugguuuuauaa

SEQ ID NO: 453013 - RNA, 24 nt, Artificial Sequence
  Synthetic
ucaugagaucugaugguuuuauaa

SEQ ID NO: 453014 - RNA, 18 nt, Artificial Sequence
  Synthetic
agaagacaauuuuuauaa

SEQ ID NO: 453015 - RNA, 19 nt, Artificial Sequence
  Synthetic
cagaagacaauuuuuauaa

SEQ ID NO: 453016 - RNA, 20 nt, Artificial Sequence
  Synthetic
ucagaagacaauuuuuauaa

SEQ ID NO: 453017 - RNA, 21 nt, Artificial Sequence
  Synthetic
aucagaagacaauuuuuauaa

SEQ ID NO: 453018 - RNA, 22 nt, Artificial Sequence
  Synthetic
caucagaagacaauuuuuauaa

SEQ ID NO: 453019 - RNA, 23 nt, Artificial Sequence
  Synthetic
ucaucagaagacaauuuuuauaa

SEQ ID NO: 453020 - RNA, 24 nt, Artificial Sequence
  Synthetic
uucaucagaagacaauuuuuauaa

SEQ ID NO: 453021 - RNA, 18 nt, Artificial Sequence
  Synthetic
cauauuuauuaaaacuaa

SEQ ID NO: 453022 - RNA, 19 nt, Artificial Sequence
  Synthetic
acauauuuauuaaaacuaa

SEQ ID NO: 453023 - RNA, 20 nt, Artificial Sequence
  Synthetic
aacauauuuauuaaaacuaa

SEQ ID NO: 453024 - RNA, 21 nt, Artificial Sequence
  Synthetic
caacauauuuauuaaaacuaa

SEQ ID NO: 453025 - RNA, 22 nt, Artificial Sequence
  Synthetic
acaacauauuuauuaaaacuaa

SEQ ID NO: 453026 - RNA, 23 nt, Artificial Sequence
  Synthetic
gacaacauauuuauuaaaacuaa

SEQ ID NO: 453027 - RNA, 24 nt, Artificial Sequence
  Synthetic
ugacaacauauuuauuaaaacuaa

SEQ ID NO: 453028 - RNA, 18 nt, Artificial Sequence
  Synthetic
ucauucucagcaaacuaa

SEQ ID NO: 453029 - RNA, 19 nt, Artificial Sequence
  Synthetic
aucauucucagcaaacuaa

SEQ ID NO: 453030 - RNA, 20 nt, Artificial Sequence
  Synthetic
caucauucucagcaaacuaa

SEQ ID NO: 453031 - RNA, 21 nt, Artificial Sequence
  Synthetic
ccaucauucucagcaaacuaa

SEQ ID NO: 453032 - RNA, 22 nt, Artificial Sequence
  Synthetic
accaucauucucagcaaacuaa

SEQ ID NO: 453033 - RNA, 23 nt, Artificial Sequence
  Synthetic
aaccaucauucucagcaaacuaa

SEQ ID NO: 453034 - RNA, 24 nt, Artificial Sequence
  Synthetic
aaaccaucauucucagcaaacuaa

SEQ ID NO: 453035 - RNA, 18 nt, Artificial Sequence
  Synthetic
cagaguuacucaaacuaa

SEQ ID NO: 453036 - RNA, 19 nt, Artificial Sequence
  Synthetic
acagaguuacucaaacuaa

SEQ ID NO: 453037 - RNA, 20 nt, Artificial Sequence
  Synthetic
uacagaguuacucaaacuaa

SEQ ID NO: 453038 - RNA, 21 nt, Artificial Sequence
  Synthetic
cuacagaguuacucaaacuaa

SEQ ID NO: 453039 - RNA, 22 nt, Artificial Sequence
  Synthetic
ucuacagaguuacucaaacuaa

SEQ ID NO: 453040 - RNA, 23 nt, Artificial Sequence
  Synthetic
uucuacagaguuacucaaacuaa

SEQ ID NO: 453041 - RNA, 24 nt, Artificial Sequence
  Synthetic
cuucuacagaguuacucaaacuaa

SEQ ID NO: 453042 - RNA, 18 nt, Artificial Sequence
  Synthetic
cuuuguuggagaaacuaa

SEQ ID NO: 453043 - RNA, 19 nt, Artificial Sequence
  Synthetic
gcuuuguuggagaaacuaa

SEQ ID NO: 453044 - RNA, 20 nt, Artificial Sequence
  Synthetic
agcuuuguuggagaaacuaa

SEQ ID NO: 453045 - RNA, 21 nt, Artificial Sequence
  Synthetic
uagcuuuguuggagaaacuaa

SEQ ID NO: 453046 - RNA, 22 nt, Artificial Sequence
  Synthetic
auagcuuuguuggagaaacuaa

SEQ ID NO: 453047 - RNA, 23 nt, Artificial Sequence
  Synthetic
cauagcuuuguuggagaaacuaa

SEQ ID NO: 453048 - RNA, 24 nt, Artificial Sequence
  Synthetic
ucauagcuuuguuggagaaacuaa

SEQ ID NO: 453049 - RNA, 18 nt, Artificial Sequence
  Synthetic
auaagacagggaaacuaa

SEQ ID NO: 453050 - RNA, 19 nt, Artificial Sequence
  Synthetic
gauaagacagggaaacuaa

SEQ ID NO: 453051 - RNA, 20 nt, Artificial Sequence
  Synthetic
agauaagacagggaaacuaa

SEQ ID NO: 453052 - RNA, 21 nt, Artificial Sequence
  Synthetic
cagauaagacagggaaacuaa

SEQ ID NO: 453053 - RNA, 22 nt, Artificial Sequence
  Synthetic
acagauaagacagggaaacuaa

SEQ ID NO: 453054 - RNA, 23 nt, Artificial Sequence
  Synthetic
aacagauaagacagggaaacuaa

SEQ ID NO: 453055 - RNA, 24 nt, Artificial Sequence
  Synthetic
gaacagauaagacagggaaacuaa

SEQ ID NO: 453056 - RNA, 18 nt, Artificial Sequence
  Synthetic
ucccuaaaucuaaacuaa

SEQ ID NO: 453057 - RNA, 19 nt, Artificial Sequence
  Synthetic
aucccuaaaucuaaacuaa

SEQ ID NO: 453058 - RNA, 20 nt, Artificial Sequence
  Synthetic
uaucccuaaaucuaaacuaa

SEQ ID NO: 453059 - RNA, 21 nt, Artificial Sequence
  Synthetic
cuaucccuaaaucuaaacuaa

SEQ ID NO: 453060 - RNA, 22 nt, Artificial Sequence
  Synthetic
ucuaucccuaaaucuaaacuaa

SEQ ID NO: 453061 - RNA, 23 nt, Artificial Sequence
  Synthetic
uucuaucccuaaaucuaaacuaa

SEQ ID NO: 453062 - RNA, 24 nt, Artificial Sequence
  Synthetic
uuucuaucccuaaaucuaaacuaa

SEQ ID NO: 453063 - RNA, 18 nt, Artificial Sequence
  Synthetic
augcaagaaaacaacuaa

SEQ ID NO: 453064 - RNA, 19 nt, Artificial Sequence
  Synthetic
uaugcaagaaaacaacuaa

SEQ ID NO: 453065 - RNA, 20 nt, Artificial Sequence
  Synthetic
uuaugcaagaaaacaacuaa

SEQ ID NO: 453066 - RNA, 21 nt, Artificial Sequence
  Synthetic
cuuaugcaagaaaacaacuaa

SEQ ID NO: 453067 - RNA, 22 nt, Artificial Sequence
  Synthetic
ucuuaugcaagaaaacaacuaa

SEQ ID NO: 453068 - RNA, 23 nt, Artificial Sequence
  Synthetic
uucuuaugcaagaaaacaacuaa

SEQ ID NO: 453069 - RNA, 24 nt, Artificial Sequence
  Synthetic
cuucuuaugcaagaaaacaacuaa

SEQ ID NO: 453070 - RNA, 18 nt, Artificial Sequence
  Synthetic
auagauccaaucaacuaa

SEQ ID NO: 453071 - RNA, 19 nt, Artificial Sequence
  Synthetic
aauagauccaaucaacuaa

SEQ ID NO: 453072 - RNA, 20 nt, Artificial Sequence
  Synthetic
uaauagauccaaucaacuaa

SEQ ID NO: 453073 - RNA, 21 nt, Artificial Sequence
  Synthetic
uuaauagauccaaucaacuaa

SEQ ID NO: 453074 - RNA, 22 nt, Artificial Sequence
  Synthetic
uuuaauagauccaaucaacuaa

SEQ ID NO: 453075 - RNA, 23 nt, Artificial Sequence
  Synthetic
cuuuaauagauccaaucaacuaa

SEQ ID NO: 453076 - RNA, 24 nt, Artificial Sequence
  Synthetic
acuuuaauagauccaaucaacuaa

SEQ ID NO: 453077 - RNA, 18 nt, Artificial Sequence
  Synthetic
uagguguauuucaacuaa

SEQ ID NO: 453078 - RNA, 19 nt, Artificial Sequence
  Synthetic
guagguguauuucaacuaa

SEQ ID NO: 453079 - RNA, 20 nt, Artificial Sequence
  Synthetic
aguagguguauuucaacuaa

SEQ ID NO: 453080 - RNA, 21 nt, Artificial Sequence
  Synthetic
gaguagguguauuucaacuaa

SEQ ID NO: 453081 - RNA, 22 nt, Artificial Sequence
  Synthetic
ugaguagguguauuucaacuaa

SEQ ID NO: 453082 - RNA, 23 nt, Artificial Sequence
  Synthetic
cugaguagguguauuucaacuaa

SEQ ID NO: 453083 - RNA, 24 nt, Artificial Sequence
  Synthetic
gcugaguagguguauuucaacuaa

SEQ ID NO: 453084 - RNA, 18 nt, Artificial Sequence
  Synthetic
agaucaaagcagaacuaa

SEQ ID NO: 453085 - RNA, 19 nt, Artificial Sequence
  Synthetic
aagaucaaagcagaacuaa

SEQ ID NO: 453086 - RNA, 20 nt, Artificial Sequence
  Synthetic
aaagaucaaagcagaacuaa

SEQ ID NO: 453087 - RNA, 21 nt, Artificial Sequence
  Synthetic
caaagaucaaagcagaacuaa

SEQ ID NO: 453088 - RNA, 22 nt, Artificial Sequence
  Synthetic
acaaagaucaaagcagaacuaa

SEQ ID NO: 453089 - RNA, 23 nt, Artificial Sequence
  Synthetic
aacaaagaucaaagcagaacuaa

SEQ ID NO: 453090 - RNA, 24 nt, Artificial Sequence
  Synthetic
uaacaaagaucaaagcagaacuaa

SEQ ID NO: 453091 - RNA, 18 nt, Artificial Sequence
  Synthetic
agaucagagcagaacuaa

SEQ ID NO: 453092 - RNA, 19 nt, Artificial Sequence
  Synthetic
aagaucagagcagaacuaa

SEQ ID NO: 453093 - RNA, 20 nt, Artificial Sequence
  Synthetic
aaagaucagagcagaacuaa

SEQ ID NO: 453094 - RNA, 21 nt, Artificial Sequence
  Synthetic
caaagaucagagcagaacuaa

SEQ ID NO: 453095 - RNA, 22 nt, Artificial Sequence
  Synthetic
acaaagaucagagcagaacuaa

SEQ ID NO: 453096 - RNA, 23 nt, Artificial Sequence
  Synthetic
aacaaagaucagagcagaacuaa

SEQ ID NO: 453097 - RNA, 24 nt, Artificial Sequence
  Synthetic
uaacaaagaucagagcagaacuaa

SEQ ID NO: 453098 - RNA, 18 nt, Artificial Sequence
  Synthetic
aggguguuagagaacuaa

SEQ ID NO: 453099 - RNA, 19 nt, Artificial Sequence
  Synthetic
gaggguguuagagaacuaa

SEQ ID NO: 453100 - RNA, 20 nt, Artificial Sequence
  Synthetic
agaggguguuagagaacuaa

SEQ ID NO: 453101 - RNA, 21 nt, Artificial Sequence
  Synthetic
aagaggguguuagagaacuaa

SEQ ID NO: 453102 - RNA, 22 nt, Artificial Sequence
  Synthetic
gaagaggguguuagagaacuaa

SEQ ID NO: 453103 - RNA, 23 nt, Artificial Sequence
  Synthetic
ggaagaggguguuagagaacuaa

SEQ ID NO: 453104 - RNA, 24 nt, Artificial Sequence
  Synthetic
gggaagaggguguuagagaacuaa

SEQ ID NO: 453105 - RNA, 18 nt, Artificial Sequence
  Synthetic
ggaagggacaguaacuaa

SEQ ID NO: 453106 - RNA, 19 nt, Artificial Sequence
  Synthetic
gggaagggacaguaacuaa

SEQ ID NO: 453107 - RNA, 20 nt, Artificial Sequence
  Synthetic
ggggaagggacaguaacuaa

SEQ ID NO: 453108 - RNA, 21 nt, Artificial Sequence
  Synthetic
aggggaagggacaguaacuaa

SEQ ID NO: 453109 - RNA, 22 nt, Artificial Sequence
  Synthetic
caggggaagggacaguaacuaa

SEQ ID NO: 453110 - RNA, 23 nt, Artificial Sequence
  Synthetic
gcaggggaagggacaguaacuaa

SEQ ID NO: 453111 - RNA, 24 nt, Artificial Sequence
  Synthetic
ugcaggggaagggacaguaacuaa

SEQ ID NO: 453112 - RNA, 18 nt, Artificial Sequence
  Synthetic
uugccuucauuuaacuaa

SEQ ID NO: 453113 - RNA, 19 nt, Artificial Sequence
  Synthetic
uuugccuucauuuaacuaa

SEQ ID NO: 453114 - RNA, 20 nt, Artificial Sequence
  Synthetic
uuuugccuucauuuaacuaa

SEQ ID NO: 453115 - RNA, 21 nt, Artificial Sequence
  Synthetic
auuuugccuucauuuaacuaa

SEQ ID NO: 453116 - RNA, 22 nt, Artificial Sequence
  Synthetic
aauuuugccuucauuuaacuaa

SEQ ID NO: 453117 - RNA, 23 nt, Artificial Sequence
  Synthetic
uaauuuugccuucauuuaacuaa

SEQ ID NO: 453118 - RNA, 24 nt, Artificial Sequence
  Synthetic
auaauuuugccuucauuuaacuaa

SEQ ID NO: 453119 - RNA, 18 nt, Artificial Sequence
  Synthetic
guauggaaaacacacuaa

SEQ ID NO: 453120 - RNA, 19 nt, Artificial Sequence
  Synthetic
gguauggaaaacacacuaa

SEQ ID NO: 453121 - RNA, 20 nt, Artificial Sequence
  Synthetic
agguauggaaaacacacuaa

SEQ ID NO: 453122 - RNA, 21 nt, Artificial Sequence
  Synthetic
cagguauggaaaacacacuaa

SEQ ID NO: 453123 - RNA, 22 nt, Artificial Sequence
  Synthetic
gcagguauggaaaacacacuaa

SEQ ID NO: 453124 - RNA, 23 nt, Artificial Sequence
  Synthetic
ugcagguauggaaaacacacuaa

SEQ ID NO: 453125 - RNA, 24 nt, Artificial Sequence
  Synthetic
uugcagguauggaaaacacacuaa

SEQ ID NO: 453126 - RNA, 18 nt, Artificial Sequence
  Synthetic
cagaauaacacccacuaa

SEQ ID NO: 453127 - RNA, 19 nt, Artificial Sequence
  Synthetic
ccagaauaacacccacuaa

SEQ ID NO: 453128 - RNA, 20 nt, Artificial Sequence
  Synthetic
accagaauaacacccacuaa

SEQ ID NO: 453129 - RNA, 21 nt, Artificial Sequence
  Synthetic
gaccagaauaacacccacuaa

SEQ ID NO: 453130 - RNA, 22 nt, Artificial Sequence
  Synthetic
ggaccagaauaacacccacuaa

SEQ ID NO: 453131 - RNA, 23 nt, Artificial Sequence
  Synthetic
uggaccagaauaacacccacuaa

SEQ ID NO: 453132 - RNA, 24 nt, Artificial Sequence
  Synthetic
cuggaccagaauaacacccacuaa

SEQ ID NO: 453133 - RNA, 18 nt, Artificial Sequence
  Synthetic
aaacuaaaggcucacuaa

SEQ ID NO: 453134 - RNA, 19 nt, Artificial Sequence
  Synthetic
caaacuaaaggcucacuaa

SEQ ID NO: 453135 - RNA, 20 nt, Artificial Sequence
  Synthetic
acaaacuaaaggcucacuaa

SEQ ID NO: 453136 - RNA, 21 nt, Artificial Sequence
  Synthetic
aacaaacuaaaggcucacuaa

SEQ ID NO: 453137 - RNA, 22 nt, Artificial Sequence
  Synthetic
aaacaaacuaaaggcucacuaa

SEQ ID NO: 453138 - RNA, 23 nt, Artificial Sequence
  Synthetic
gaaacaaacuaaaggcucacuaa

SEQ ID NO: 453139 - RNA, 24 nt, Artificial Sequence
  Synthetic
cgaaacaaacuaaaggcucacuaa

SEQ ID NO: 453140 - RNA, 18 nt, Artificial Sequence
  Synthetic
cucauuacugcucacuaa

SEQ ID NO: 453141 - RNA, 19 nt, Artificial Sequence
  Synthetic
gcucauuacugcucacuaa

SEQ ID NO: 453142 - RNA, 20 nt, Artificial Sequence
  Synthetic
ggcucauuacugcucacuaa

SEQ ID NO: 453143 - RNA, 21 nt, Artificial Sequence
  Synthetic
uggcucauuacugcucacuaa

SEQ ID NO: 453144 - RNA, 22 nt, Artificial Sequence
  Synthetic
auggcucauuacugcucacuaa

SEQ ID NO: 453145 - RNA, 23 nt, Artificial Sequence
  Synthetic
cauggcucauuacugcucacuaa

SEQ ID NO: 453146 - RNA, 24 nt, Artificial Sequence
  Synthetic
acauggcucauuacugcucacuaa

SEQ ID NO: 453147 - RNA, 18 nt, Artificial Sequence
  Synthetic
gggucccacugucacuaa

SEQ ID NO: 453148 - RNA, 19 nt, Artificial Sequence
  Synthetic
ugggucccacugucacuaa

SEQ ID NO: 453149 - RNA, 20 nt, Artificial Sequence
  Synthetic
augggucccacugucacuaa

SEQ ID NO: 453150 - RNA, 21 nt, Artificial Sequence
  Synthetic
caugggucccacugucacuaa

SEQ ID NO: 453151 - RNA, 22 nt, Artificial Sequence
  Synthetic
ccaugggucccacugucacuaa

SEQ ID NO: 453152 - RNA, 23 nt, Artificial Sequence
  Synthetic
gccaugggucccacugucacuaa

SEQ ID NO: 453153 - RNA, 24 nt, Artificial Sequence
  Synthetic
ugccaugggucccacugucacuaa

SEQ ID NO: 453154 - RNA, 18 nt, Artificial Sequence
  Synthetic
cccagugacacagacuaa

SEQ ID NO: 453155 - RNA, 19 nt, Artificial Sequence
  Synthetic
ucccagugacacagacuaa

SEQ ID NO: 453156 - RNA, 20 nt, Artificial Sequence
  Synthetic
cucccagugacacagacuaa

SEQ ID NO: 453157 - RNA, 21 nt, Artificial Sequence
  Synthetic
acucccagugacacagacuaa

SEQ ID NO: 453158 - RNA, 22 nt, Artificial Sequence
  Synthetic
gacucccagugacacagacuaa

SEQ ID NO: 453159 - RNA, 23 nt, Artificial Sequence
  Synthetic
ggacucccagugacacagacuaa

SEQ ID NO: 453160 - RNA, 24 nt, Artificial Sequence
  Synthetic
gggacucccagugacacagacuaa

SEQ ID NO: 453161 - RNA, 18 nt, Artificial Sequence
  Synthetic
aauugacaaucagacuaa

SEQ ID NO: 453162 - RNA, 19 nt, Artificial Sequence
  Synthetic
aaauugacaaucagacuaa

SEQ ID NO: 453163 - RNA, 20 nt, Artificial Sequence
  Synthetic
aaaauugacaaucagacuaa

SEQ ID NO: 453164 - RNA, 21 nt, Artificial Sequence
  Synthetic
caaaauugacaaucagacuaa

SEQ ID NO: 453165 - RNA, 22 nt, Artificial Sequence
  Synthetic
acaaaauugacaaucagacuaa

SEQ ID NO: 453166 - RNA, 23 nt, Artificial Sequence
  Synthetic
uacaaaauugacaaucagacuaa

SEQ ID NO: 453167 - RNA, 24 nt, Artificial Sequence
  Synthetic
auacaaaauugacaaucagacuaa

SEQ ID NO: 453168 - RNA, 18 nt, Artificial Sequence
  Synthetic
cuuccuuucaaugacuaa

SEQ ID NO: 453169 - RNA, 19 nt, Artificial Sequence
  Synthetic
ccuuccuuucaaugacuaa

SEQ ID NO: 453170 - RNA, 20 nt, Artificial Sequence
  Synthetic
accuuccuuucaaugacuaa

SEQ ID NO: 453171 - RNA, 21 nt, Artificial Sequence
  Synthetic
aaccuuccuuucaaugacuaa

SEQ ID NO: 453172 - RNA, 22 nt, Artificial Sequence
  Synthetic
uaaccuuccuuucaaugacuaa

SEQ ID NO: 453173 - RNA, 23 nt, Artificial Sequence
  Synthetic
uuaaccuuccuuucaaugacuaa

SEQ ID NO: 453174 - RNA, 24 nt, Artificial Sequence
  Synthetic
uuuaaccuuccuuucaaugacuaa

SEQ ID NO: 453175 - RNA, 18 nt, Artificial Sequence
  Synthetic
aggguuuaguaugacuaa

SEQ ID NO: 453176 - RNA, 19 nt, Artificial Sequence
  Synthetic
caggguuuaguaugacuaa

SEQ ID NO: 453177 - RNA, 20 nt, Artificial Sequence
  Synthetic
ucaggguuuaguaugacuaa

SEQ ID NO: 453178 - RNA, 21 nt, Artificial Sequence
  Synthetic
aucaggguuuaguaugacuaa

SEQ ID NO: 453179 - RNA, 22 nt, Artificial Sequence
  Synthetic
caucaggguuuaguaugacuaa

SEQ ID NO: 453180 - RNA, 23 nt, Artificial Sequence
  Synthetic
gcaucaggguuuaguaugacuaa

SEQ ID NO: 453181 - RNA, 24 nt, Artificial Sequence
  Synthetic
agcaucaggguuuaguaugacuaa

SEQ ID NO: 453182 - RNA, 18 nt, Artificial Sequence
  Synthetic
ucuacuguugaauacuaa

SEQ ID NO: 453183 - RNA, 19 nt, Artificial Sequence
  Synthetic
aucuacuguugaauacuaa

SEQ ID NO: 453184 - RNA, 20 nt, Artificial Sequence
  Synthetic
aaucuacuguugaauacuaa

SEQ ID NO: 453185 - RNA, 21 nt, Artificial Sequence
  Synthetic
gaaucuacuguugaauacuaa

SEQ ID NO: 453186 - RNA, 22 nt, Artificial Sequence
  Synthetic
ugaaucuacuguugaauacuaa

SEQ ID NO: 453187 - RNA, 23 nt, Artificial Sequence
  Synthetic
augaaucuacuguugaauacuaa

SEQ ID NO: 453188 - RNA, 24 nt, Artificial Sequence
  Synthetic
uaugaaucuacuguugaauacuaa

SEQ ID NO: 453189 - RNA, 18 nt, Artificial Sequence
  Synthetic
ucaagcaauacauacuaa

SEQ ID NO: 453190 - RNA, 19 nt, Artificial Sequence
  Synthetic
aucaagcaauacauacuaa

SEQ ID NO: 453191 - RNA, 20 nt, Artificial Sequence
  Synthetic
aaucaagcaauacauacuaa

SEQ ID NO: 453192 - RNA, 21 nt, Artificial Sequence
  Synthetic
uaaucaagcaauacauacuaa

SEQ ID NO: 453193 - RNA, 22 nt, Artificial Sequence
  Synthetic
uuaaucaagcaauacauacuaa

SEQ ID NO: 453194 - RNA, 23 nt, Artificial Sequence
  Synthetic
uuuaaucaagcaauacauacuaa

SEQ ID NO: 453195 - RNA, 24 nt, Artificial Sequence
  Synthetic
cuuuaaucaagcaauacauacuaa

SEQ ID NO: 453196 - RNA, 18 nt, Artificial Sequence
  Synthetic
cagaacuuaauauacuaa

SEQ ID NO: 453197 - RNA, 19 nt, Artificial Sequence
  Synthetic
acagaacuuaauauacuaa

SEQ ID NO: 453198 - RNA, 20 nt, Artificial Sequence
  Synthetic
uacagaacuuaauauacuaa

SEQ ID NO: 453199 - RNA, 21 nt, Artificial Sequence
  Synthetic
auacagaacuuaauauacuaa

SEQ ID NO: 453200 - RNA, 22 nt, Artificial Sequence
  Synthetic
gauacagaacuuaauauacuaa

SEQ ID NO: 453201 - RNA, 23 nt, Artificial Sequence
  Synthetic
ugauacagaacuuaauauacuaa

SEQ ID NO: 453202 - RNA, 24 nt, Artificial Sequence
  Synthetic
gugauacagaacuuaauauacuaa

SEQ ID NO: 453203 - RNA, 18 nt, Artificial Sequence
  Synthetic
guauuuucuaacuacuaa

SEQ ID NO: 453204 - RNA, 19 nt, Artificial Sequence
  Synthetic
aguauuuucuaacuacuaa

SEQ ID NO: 453205 - RNA, 20 nt, Artificial Sequence
  Synthetic
caguauuuucuaacuacuaa

SEQ ID NO: 453206 - RNA, 21 nt, Artificial Sequence
  Synthetic
acaguauuuucuaacuacuaa

SEQ ID NO: 453207 - RNA, 22 nt, Artificial Sequence
  Synthetic
gacaguauuuucuaacuacuaa

SEQ ID NO: 453208 - RNA, 23 nt, Artificial Sequence
  Synthetic
agacaguauuuucuaacuacuaa

SEQ ID NO: 453209 - RNA, 24 nt, Artificial Sequence
  Synthetic
uagacaguauuuucuaacuacuaa

SEQ ID NO: 453210 - RNA, 18 nt, Artificial Sequence
  Synthetic
auugcaauagccuacuaa

SEQ ID NO: 453211 - RNA, 19 nt, Artificial Sequence
  Synthetic
uauugcaauagccuacuaa

SEQ ID NO: 453212 - RNA, 20 nt, Artificial Sequence
  Synthetic
auauugcaauagccuacuaa

SEQ ID NO: 453213 - RNA, 21 nt, Artificial Sequence
  Synthetic
aauauugcaauagccuacuaa

SEQ ID NO: 453214 - RNA, 22 nt, Artificial Sequence
  Synthetic
aaauauugcaauagccuacuaa

SEQ ID NO: 453215 - RNA, 23 nt, Artificial Sequence
  Synthetic
gaaauauugcaauagccuacuaa

SEQ ID NO: 453216 - RNA, 24 nt, Artificial Sequence
  Synthetic
ugaaauauugcaauagccuacuaa

SEQ ID NO: 453217 - RNA, 18 nt, Artificial Sequence
  Synthetic
uuuuaaguauucuacuaa

SEQ ID NO: 453218 - RNA, 19 nt, Artificial Sequence
  Synthetic
auuuuaaguauucuacuaa

SEQ ID NO: 453219 - RNA, 20 nt, Artificial Sequence
  Synthetic
uauuuuaaguauucuacuaa

SEQ ID NO: 453220 - RNA, 21 nt, Artificial Sequence
  Synthetic
auauuuuaaguauucuacuaa

SEQ ID NO: 453221 - RNA, 22 nt, Artificial Sequence
  Synthetic
gauauuuuaaguauucuacuaa

SEQ ID NO: 453222 - RNA, 23 nt, Artificial Sequence
  Synthetic
agauauuuuaaguauucuacuaa

SEQ ID NO: 453223 - RNA, 24 nt, Artificial Sequence
  Synthetic
uagauauuuuaaguauucuacuaa

SEQ ID NO: 453224 - RNA, 18 nt, Artificial Sequence
  Synthetic
cagcaaaacuaguacuaa

SEQ ID NO: 453225 - RNA, 19 nt, Artificial Sequence
  Synthetic
acagcaaaacuaguacuaa

SEQ ID NO: 453226 - RNA, 20 nt, Artificial Sequence
  Synthetic
uacagcaaaacuaguacuaa

SEQ ID NO: 453227 - RNA, 21 nt, Artificial Sequence
  Synthetic
auacagcaaaacuaguacuaa

SEQ ID NO: 453228 - RNA, 22 nt, Artificial Sequence
  Synthetic
gauacagcaaaacuaguacuaa

SEQ ID NO: 453229 - RNA, 23 nt, Artificial Sequence
  Synthetic
ggauacagcaaaacuaguacuaa

SEQ ID NO: 453230 - RNA, 24 nt, Artificial Sequence
  Synthetic
gggauacagcaaaacuaguacuaa

SEQ ID NO: 453231 - RNA, 18 nt, Artificial Sequence
  Synthetic
auauauucauuguacuaa

SEQ ID NO: 453232 - RNA, 19 nt, Artificial Sequence
  Synthetic
gauauauucauuguacuaa

SEQ ID NO: 453233 - RNA, 20 nt, Artificial Sequence
  Synthetic
ugauauauucauuguacuaa

SEQ ID NO: 453234 - RNA, 21 nt, Artificial Sequence
  Synthetic
cugauauauucauuguacuaa

SEQ ID NO: 453235 - RNA, 22 nt, Artificial Sequence
  Synthetic
ucugauauauucauuguacuaa

SEQ ID NO: 453236 - RNA, 23 nt, Artificial Sequence
  Synthetic
cucugauauauucauuguacuaa

SEQ ID NO: 453237 - RNA, 24 nt, Artificial Sequence
  Synthetic
ucucugauauauucauuguacuaa

SEQ ID NO: 453238 - RNA, 18 nt, Artificial Sequence
  Synthetic
uaugagagauuguacuaa

SEQ ID NO: 453239 - RNA, 19 nt, Artificial Sequence
  Synthetic
uuaugagagauuguacuaa

SEQ ID NO: 453240 - RNA, 20 nt, Artificial Sequence
  Synthetic
uuuaugagagauuguacuaa

SEQ ID NO: 453241 - RNA, 21 nt, Artificial Sequence
  Synthetic
guuuaugagagauuguacuaa

SEQ ID NO: 453242 - RNA, 22 nt, Artificial Sequence
  Synthetic
uguuuaugagagauuguacuaa

SEQ ID NO: 453243 - RNA, 23 nt, Artificial Sequence
  Synthetic
auguuuaugagagauuguacuaa

SEQ ID NO: 453244 - RNA, 24 nt, Artificial Sequence
  Synthetic
uauguuuaugagagauuguacuaa

SEQ ID NO: 453245 - RNA, 18 nt, Artificial Sequence
  Synthetic
aagaaucacuuguacuaa

SEQ ID NO: 453246 - RNA, 19 nt, Artificial Sequence
  Synthetic
uaagaaucacuuguacuaa

SEQ ID NO: 453247 - RNA, 20 nt, Artificial Sequence
  Synthetic
auaagaaucacuuguacuaa

SEQ ID NO: 453248 - RNA, 21 nt, Artificial Sequence
  Synthetic
aauaagaaucacuuguacuaa

SEQ ID NO: 453249 - RNA, 22 nt, Artificial Sequence
  Synthetic
caauaagaaucacuuguacuaa

SEQ ID NO: 453250 - RNA, 23 nt, Artificial Sequence
  Synthetic
acaauaagaaucacuuguacuaa

SEQ ID NO: 453251 - RNA, 24 nt, Artificial Sequence
  Synthetic
uacaauaagaaucacuuguacuaa

SEQ ID NO: 453252 - RNA, 18 nt, Artificial Sequence
  Synthetic
gaaugaugcaauuacuaa

SEQ ID NO: 453253 - RNA, 19 nt, Artificial Sequence
  Synthetic
agaaugaugcaauuacuaa

SEQ ID NO: 453254 - RNA, 20 nt, Artificial Sequence
  Synthetic
aagaaugaugcaauuacuaa

SEQ ID NO: 453255 - RNA, 21 nt, Artificial Sequence
  Synthetic
aaagaaugaugcaauuacuaa

SEQ ID NO: 453256 - RNA, 22 nt, Artificial Sequence
  Synthetic
uaaagaaugaugcaauuacuaa

SEQ ID NO: 453257 - RNA, 23 nt, Artificial Sequence
  Synthetic
uuaaagaaugaugcaauuacuaa

SEQ ID NO: 453258 - RNA, 24 nt, Artificial Sequence
  Synthetic
uuuaaagaaugaugcaauuacuaa

SEQ ID NO: 453259 - RNA, 18 nt, Artificial Sequence
  Synthetic
ugcauauauaauuacuaa

SEQ ID NO: 453260 - RNA, 19 nt, Artificial Sequence
  Synthetic
gugcauauauaauuacuaa

SEQ ID NO: 453261 - RNA, 20 nt, Artificial Sequence
  Synthetic
agugcauauauaauuacuaa

SEQ ID NO: 453262 - RNA, 21 nt, Artificial Sequence
  Synthetic
uagugcauauauaauuacuaa

SEQ ID NO: 453263 - RNA, 22 nt, Artificial Sequence
  Synthetic
cuagugcauauauaauuacuaa

SEQ ID NO: 453264 - RNA, 23 nt, Artificial Sequence
  Synthetic
gcuagugcauauauaauuacuaa

SEQ ID NO: 453265 - RNA, 24 nt, Artificial Sequence
  Synthetic
ugcuagugcauauauaauuacuaa

SEQ ID NO: 453266 - RNA, 18 nt, Artificial Sequence
  Synthetic
caucaucccaguuacuaa

SEQ ID NO: 453267 - RNA, 19 nt, Artificial Sequence
  Synthetic
ucaucaucccaguuacuaa

SEQ ID NO: 453268 - RNA, 20 nt, Artificial Sequence
  Synthetic
gucaucaucccaguuacuaa

SEQ ID NO: 453269 - RNA, 21 nt, Artificial Sequence
  Synthetic
ggucaucaucccaguuacuaa

SEQ ID NO: 453270 - RNA, 22 nt, Artificial Sequence
  Synthetic
aggucaucaucccaguuacuaa

SEQ ID NO: 453271 - RNA, 23 nt, Artificial Sequence
  Synthetic
aaggucaucaucccaguuacuaa

SEQ ID NO: 453272 - RNA, 24 nt, Artificial Sequence
  Synthetic
aaaggucaucaucccaguuacuaa

SEQ ID NO: 453273 - RNA, 18 nt, Artificial Sequence
  Synthetic
uuaaaggauuuuuacuaa

SEQ ID NO: 453274 - RNA, 19 nt, Artificial Sequence
  Synthetic
auuaaaggauuuuuacuaa

SEQ ID NO: 453275 - RNA, 20 nt, Artificial Sequence
  Synthetic
cauuaaaggauuuuuacuaa

SEQ ID NO: 453276 - RNA, 21 nt, Artificial Sequence
  Synthetic
ccauuaaaggauuuuuacuaa

SEQ ID NO: 453277 - RNA, 22 nt, Artificial Sequence
  Synthetic
accauuaaaggauuuuuacuaa

SEQ ID NO: 453278 - RNA, 23 nt, Artificial Sequence
  Synthetic
aaccauuaaaggauuuuuacuaa

SEQ ID NO: 453279 - RNA, 24 nt, Artificial Sequence
  Synthetic
caaccauuaaaggauuuuuacuaa

SEQ ID NO: 453280 - RNA, 18 nt, Artificial Sequence
  Synthetic
uccuuaauagaaaccuaa

SEQ ID NO: 453281 - RNA, 19 nt, Artificial Sequence
  Synthetic
uuccuuaauagaaaccuaa

SEQ ID NO: 453282 - RNA, 20 nt, Artificial Sequence
  Synthetic
auuccuuaauagaaaccuaa

SEQ ID NO: 453283 - RNA, 21 nt, Artificial Sequence
  Synthetic
aauuccuuaauagaaaccuaa

SEQ ID NO: 453284 - RNA, 22 nt, Artificial Sequence
  Synthetic
uaauuccuuaauagaaaccuaa

SEQ ID NO: 453285 - RNA, 23 nt, Artificial Sequence
  Synthetic
guaauuccuuaauagaaaccuaa

SEQ ID NO: 453286 - RNA, 24 nt, Artificial Sequence
  Synthetic
aguaauuccuuaauagaaaccuaa

SEQ ID NO: 453287 - RNA, 18 nt, Artificial Sequence
  Synthetic
aagaaauaauaaaccuaa

SEQ ID NO: 453288 - RNA, 19 nt, Artificial Sequence
  Synthetic
aaagaaauaauaaaccuaa

SEQ ID NO: 453289 - RNA, 20 nt, Artificial Sequence
  Synthetic
aaaagaaauaauaaaccuaa

SEQ ID NO: 453290 - RNA, 21 nt, Artificial Sequence
  Synthetic
uaaaagaaauaauaaaccuaa

SEQ ID NO: 453291 - RNA, 22 nt, Artificial Sequence
  Synthetic
auaaaagaaauaauaaaccuaa

SEQ ID NO: 453292 - RNA, 23 nt, Artificial Sequence
  Synthetic
cauaaaagaaauaauaaaccuaa

SEQ ID NO: 453293 - RNA, 24 nt, Artificial Sequence
  Synthetic
acauaaaagaaauaauaaaccuaa

SEQ ID NO: 453294 - RNA, 18 nt, Artificial Sequence
  Synthetic
gauuuuaagacaaccuaa

SEQ ID NO: 453295 - RNA, 19 nt, Artificial Sequence
  Synthetic
ugauuuuaagacaaccuaa

SEQ ID NO: 453296 - RNA, 20 nt, Artificial Sequence
  Synthetic
augauuuuaagacaaccuaa

SEQ ID NO: 453297 - RNA, 21 nt, Artificial Sequence
  Synthetic
caugauuuuaagacaaccuaa

SEQ ID NO: 453298 - RNA, 22 nt, Artificial Sequence
  Synthetic
gcaugauuuuaagacaaccuaa

SEQ ID NO: 453299 - RNA, 23 nt, Artificial Sequence
  Synthetic
cgcaugauuuuaagacaaccuaa

SEQ ID NO: 453300 - RNA, 24 nt, Artificial Sequence
  Synthetic
acgcaugauuuuaagacaaccuaa

SEQ ID NO: 453301 - RNA, 18 nt, Artificial Sequence
  Synthetic
ggaaugaacccaaccuaa

SEQ ID NO: 453302 - RNA, 19 nt, Artificial Sequence
  Synthetic
uggaaugaacccaaccuaa

SEQ ID NO: 453303 - RNA, 20 nt, Artificial Sequence
  Synthetic
auggaaugaacccaaccuaa

SEQ ID NO: 453304 - RNA, 21 nt, Artificial Sequence
  Synthetic
aauggaaugaacccaaccuaa

SEQ ID NO: 453305 - RNA, 22 nt, Artificial Sequence
  Synthetic
gaauggaaugaacccaaccuaa

SEQ ID NO: 453306 - RNA, 23 nt, Artificial Sequence
  Synthetic
ggaauggaaugaacccaaccuaa

SEQ ID NO: 453307 - RNA, 24 nt, Artificial Sequence
  Synthetic
aggaauggaaugaacccaaccuaa

SEQ ID NO: 453308 - RNA, 18 nt, Artificial Sequence
  Synthetic
cccaaguaaugaaccuaa

SEQ ID NO: 453309 - RNA, 19 nt, Artificial Sequence
  Synthetic
ccccaaguaaugaaccuaa

SEQ ID NO: 453310 - RNA, 20 nt, Artificial Sequence
  Synthetic
cccccaaguaaugaaccuaa

SEQ ID NO: 453311 - RNA, 21 nt, Artificial Sequence
  Synthetic
ccccccaaguaaugaaccuaa

SEQ ID NO: 453312 - RNA, 22 nt, Artificial Sequence
  Synthetic
gccccccaaguaaugaaccuaa

SEQ ID NO: 453313 - RNA, 23 nt, Artificial Sequence
  Synthetic
agccccccaaguaaugaaccuaa

SEQ ID NO: 453314 - RNA, 24 nt, Artificial Sequence
  Synthetic
cagccccccaaguaaugaaccuaa

SEQ ID NO: 453315 - RNA, 18 nt, Artificial Sequence
  Synthetic
caauuaauaaugaccuaa

SEQ ID NO: 453316 - RNA, 19 nt, Artificial Sequence
  Synthetic
ucaauuaauaaugaccuaa

SEQ ID NO: 453317 - RNA, 20 nt, Artificial Sequence
  Synthetic
cucaauuaauaaugaccuaa

SEQ ID NO: 453318 - RNA, 21 nt, Artificial Sequence
  Synthetic
acucaauuaauaaugaccuaa

SEQ ID NO: 453319 - RNA, 22 nt, Artificial Sequence
  Synthetic
aacucaauuaauaaugaccuaa

SEQ ID NO: 453320 - RNA, 23 nt, Artificial Sequence
  Synthetic
gaacucaauuaauaaugaccuaa

SEQ ID NO: 453321 - RNA, 24 nt, Artificial Sequence
  Synthetic
ugaacucaauuaauaaugaccuaa

SEQ ID NO: 453322 - RNA, 18 nt, Artificial Sequence
  Synthetic
ugaacuauaaauaccuaa

SEQ ID NO: 453323 - RNA, 19 nt, Artificial Sequence
  Synthetic
augaacuauaaauaccuaa

SEQ ID NO: 453324 - RNA, 20 nt, Artificial Sequence
  Synthetic
uaugaacuauaaauaccuaa

SEQ ID NO: 453325 - RNA, 21 nt, Artificial Sequence
  Synthetic
auaugaacuauaaauaccuaa

SEQ ID NO: 453326 - RNA, 22 nt, Artificial Sequence
  Synthetic
cauaugaacuauaaauaccuaa

SEQ ID NO: 453327 - RNA, 23 nt, Artificial Sequence
  Synthetic
acauaugaacuauaaauaccuaa

SEQ ID NO: 453328 - RNA, 24 nt, Artificial Sequence
  Synthetic
uacauaugaacuauaaauaccuaa

SEQ ID NO: 453329 - RNA, 18 nt, Artificial Sequence
  Synthetic
uauuaccaacauaccuaa

SEQ ID NO: 453330 - RNA, 19 nt, Artificial Sequence
  Synthetic
auauuaccaacauaccuaa

SEQ ID NO: 453331 - RNA, 20 nt, Artificial Sequence
  Synthetic
aauauuaccaacauaccuaa

SEQ ID NO: 453332 - RNA, 21 nt, Artificial Sequence
  Synthetic
uaauauuaccaacauaccuaa

SEQ ID NO: 453333 - RNA, 22 nt, Artificial Sequence
  Synthetic
guaauauuaccaacauaccuaa

SEQ ID NO: 453334 - RNA, 23 nt, Artificial Sequence
  Synthetic
uguaauauuaccaacauaccuaa

SEQ ID NO: 453335 - RNA, 24 nt, Artificial Sequence
  Synthetic
uuguaauauuaccaacauaccuaa

SEQ ID NO: 453336 - RNA, 18 nt, Artificial Sequence
  Synthetic
caccaaaccuguaccuaa

SEQ ID NO: 453337 - RNA, 19 nt, Artificial Sequence
  Synthetic
ucaccaaaccuguaccuaa

SEQ ID NO: 453338 - RNA, 20 nt, Artificial Sequence
  Synthetic
aucaccaaaccuguaccuaa

SEQ ID NO: 453339 - RNA, 21 nt, Artificial Sequence
  Synthetic
aaucaccaaaccuguaccuaa

SEQ ID NO: 453340 - RNA, 22 nt, Artificial Sequence
  Synthetic
gaaucaccaaaccuguaccuaa

SEQ ID NO: 453341 - RNA, 23 nt, Artificial Sequence
  Synthetic
ggaaucaccaaaccuguaccuaa

SEQ ID NO: 453342 - RNA, 24 nt, Artificial Sequence
  Synthetic
uggaaucaccaaaccuguaccuaa

SEQ ID NO: 453343 - RNA, 18 nt, Artificial Sequence
  Synthetic
accacaagcaaacccuaa

SEQ ID NO: 453344 - RNA, 19 nt, Artificial Sequence
  Synthetic
caccacaagcaaacccuaa

SEQ ID NO: 453345 - RNA, 20 nt, Artificial Sequence
  Synthetic
ccaccacaagcaaacccuaa

SEQ ID NO: 453346 - RNA, 21 nt, Artificial Sequence
  Synthetic
uccaccacaagcaaacccuaa

SEQ ID NO: 453347 - RNA, 22 nt, Artificial Sequence
  Synthetic
cuccaccacaagcaaacccuaa

SEQ ID NO: 453348 - RNA, 23 nt, Artificial Sequence
  Synthetic
ucuccaccacaagcaaacccuaa

SEQ ID NO: 453349 - RNA, 24 nt, Artificial Sequence
  Synthetic
cucuccaccacaagcaaacccuaa

SEQ ID NO: 453350 - RNA, 18 nt, Artificial Sequence
  Synthetic
cccaaagcacaacccuaa

SEQ ID NO: 453351 - RNA, 19 nt, Artificial Sequence
  Synthetic
ccccaaagcacaacccuaa

SEQ ID NO: 453352 - RNA, 20 nt, Artificial Sequence
  Synthetic
accccaaagcacaacccuaa

SEQ ID NO: 453353 - RNA, 21 nt, Artificial Sequence
  Synthetic
gaccccaaagcacaacccuaa

SEQ ID NO: 453354 - RNA, 22 nt, Artificial Sequence
  Synthetic
agaccccaaagcacaacccuaa

SEQ ID NO: 453355 - RNA, 23 nt, Artificial Sequence
  Synthetic
cagaccccaaagcacaacccuaa

SEQ ID NO: 453356 - RNA, 24 nt, Artificial Sequence
  Synthetic
ucagaccccaaagcacaacccuaa

SEQ ID NO: 453357 - RNA, 18 nt, Artificial Sequence
  Synthetic
gcuucagaguuacccuaa

SEQ ID NO: 453358 - RNA, 19 nt, Artificial Sequence
  Synthetic
ugcuucagaguuacccuaa

SEQ ID NO: 453359 - RNA, 20 nt, Artificial Sequence
  Synthetic
augcuucagaguuacccuaa

SEQ ID NO: 453360 - RNA, 21 nt, Artificial Sequence
  Synthetic
caugcuucagaguuacccuaa

SEQ ID NO: 453361 - RNA, 22 nt, Artificial Sequence
  Synthetic
ucaugcuucagaguuacccuaa

SEQ ID NO: 453362 - RNA, 23 nt, Artificial Sequence
  Synthetic
aucaugcuucagaguuacccuaa

SEQ ID NO: 453363 - RNA, 24 nt, Artificial Sequence
  Synthetic
aaucaugcuucagaguuacccuaa

SEQ ID NO: 453364 - RNA, 18 nt, Artificial Sequence
  Synthetic
uuuuuuuuuucccccuaa

SEQ ID NO: 453365 - RNA, 19 nt, Artificial Sequence
  Synthetic
uuuuuuuuuuucccccuaa

SEQ ID NO: 453366 - RNA, 20 nt, Artificial Sequence
  Synthetic
uuuuuuuuuuuucccccuaa

SEQ ID NO: 453367 - RNA, 21 nt, Artificial Sequence
  Synthetic
uuuuuuuuuuuuucccccuaa

SEQ ID NO: 453368 - RNA, 22 nt, Artificial Sequence
  Synthetic
cuuuuuuuuuuuuucccccuaa

SEQ ID NO: 453369 - RNA, 23 nt, Artificial Sequence
  Synthetic
ucuuuuuuuuuuuuucccccuaa

SEQ ID NO: 453370 - RNA, 24 nt, Artificial Sequence
  Synthetic
cucuuuuuuuuuuuuucccccuaa

SEQ ID NO: 453371 - RNA, 18 nt, Artificial Sequence
  Synthetic
ccccuuuagguccccuaa

SEQ ID NO: 453372 - RNA, 19 nt, Artificial Sequence
  Synthetic
accccuuuagguccccuaa

SEQ ID NO: 453373 - RNA, 20 nt, Artificial Sequence
  Synthetic
aaccccuuuagguccccuaa

SEQ ID NO: 453374 - RNA, 21 nt, Artificial Sequence
  Synthetic
gaaccccuuuagguccccuaa

SEQ ID NO: 453375 - RNA, 22 nt, Artificial Sequence
  Synthetic
ugaaccccuuuagguccccuaa

SEQ ID NO: 453376 - RNA, 23 nt, Artificial Sequence
  Synthetic
augaaccccuuuagguccccuaa

SEQ ID NO: 453377 - RNA, 24 nt, Artificial Sequence
  Synthetic
aaugaaccccuuuagguccccuaa

SEQ ID NO: 453378 - RNA, 18 nt, Artificial Sequence
  Synthetic
guucaguccgagcccuaa

SEQ ID NO: 453379 - RNA, 19 nt, Artificial Sequence
  Synthetic
uguucaguccgagcccuaa

SEQ ID NO: 453380 - RNA, 20 nt, Artificial Sequence
  Synthetic
guguucaguccgagcccuaa

SEQ ID NO: 453381 - RNA, 21 nt, Artificial Sequence
  Synthetic
aguguucaguccgagcccuaa

SEQ ID NO: 453382 - RNA, 22 nt, Artificial Sequence
  Synthetic
gaguguucaguccgagcccuaa

SEQ ID NO: 453383 - RNA, 23 nt, Artificial Sequence
  Synthetic
ugaguguucaguccgagcccuaa

SEQ ID NO: 453384 - RNA, 24 nt, Artificial Sequence
  Synthetic
uugaguguucaguccgagcccuaa

SEQ ID NO: 453385 - RNA, 18 nt, Artificial Sequence
  Synthetic
ccaccaggccugcccuaa

SEQ ID NO: 453386 - RNA, 19 nt, Artificial Sequence
  Synthetic
accaccaggccugcccuaa

SEQ ID NO: 453387 - RNA, 20 nt, Artificial Sequence
  Synthetic
caccaccaggccugcccuaa

SEQ ID NO: 453388 - RNA, 21 nt, Artificial Sequence
  Synthetic
ucaccaccaggccugcccuaa

SEQ ID NO: 453389 - RNA, 22 nt, Artificial Sequence
  Synthetic
gucaccaccaggccugcccuaa

SEQ ID NO: 453390 - RNA, 23 nt, Artificial Sequence
  Synthetic
ugucaccaccaggccugcccuaa

SEQ ID NO: 453391 - RNA, 24 nt, Artificial Sequence
  Synthetic
uugucaccaccaggccugcccuaa

SEQ ID NO: 453392 - RNA, 18 nt, Artificial Sequence
  Synthetic
ucagauagguugcccuaa

SEQ ID NO: 453393 - RNA, 19 nt, Artificial Sequence
  Synthetic
cucagauagguugcccuaa

SEQ ID NO: 453394 - RNA, 20 nt, Artificial Sequence
  Synthetic
acucagauagguugcccuaa

SEQ ID NO: 453395 - RNA, 21 nt, Artificial Sequence
  Synthetic
gacucagauagguugcccuaa

SEQ ID NO: 453396 - RNA, 22 nt, Artificial Sequence
  Synthetic
ggacucagauagguugcccuaa

SEQ ID NO: 453397 - RNA, 23 nt, Artificial Sequence
  Synthetic
aggacucagauagguugcccuaa

SEQ ID NO: 453398 - RNA, 24 nt, Artificial Sequence
  Synthetic
caggacucagauagguugcccuaa

SEQ ID NO: 453399 - RNA, 18 nt, Artificial Sequence
  Synthetic
acucccuguuaucccuaa

SEQ ID NO: 453400 - RNA, 19 nt, Artificial Sequence
  Synthetic
uacucccuguuaucccuaa

SEQ ID NO: 453401 - RNA, 20 nt, Artificial Sequence
  Synthetic
auacucccuguuaucccuaa

SEQ ID NO: 453402 - RNA, 21 nt, Artificial Sequence
  Synthetic
aauacucccuguuaucccuaa

SEQ ID NO: 453403 - RNA, 22 nt, Artificial Sequence
  Synthetic
uaauacucccuguuaucccuaa

SEQ ID NO: 453404 - RNA, 23 nt, Artificial Sequence
  Synthetic
uuaauacucccuguuaucccuaa

SEQ ID NO: 453405 - RNA, 24 nt, Artificial Sequence
  Synthetic
cuuaauacucccuguuaucccuaa

SEQ ID NO: 453406 - RNA, 18 nt, Artificial Sequence
  Synthetic
uuccauaaacuucccuaa

SEQ ID NO: 453407 - RNA, 19 nt, Artificial Sequence
  Synthetic
guuccauaaacuucccuaa

SEQ ID NO: 453408 - RNA, 20 nt, Artificial Sequence
  Synthetic
gguuccauaaacuucccuaa

SEQ ID NO: 453409 - RNA, 21 nt, Artificial Sequence
  Synthetic
ugguuccauaaacuucccuaa

SEQ ID NO: 453410 - RNA, 22 nt, Artificial Sequence
  Synthetic
augguuccauaaacuucccuaa

SEQ ID NO: 453411 - RNA, 23 nt, Artificial Sequence
  Synthetic
uaugguuccauaaacuucccuaa

SEQ ID NO: 453412 - RNA, 24 nt, Artificial Sequence
  Synthetic
guaugguuccauaaacuucccuaa

SEQ ID NO: 453413 - RNA, 18 nt, Artificial Sequence
  Synthetic
uuaguuuggguucccuaa

SEQ ID NO: 453414 - RNA, 19 nt, Artificial Sequence
  Synthetic
cuuaguuuggguucccuaa

SEQ ID NO: 453415 - RNA, 20 nt, Artificial Sequence
  Synthetic
ucuuaguuuggguucccuaa

SEQ ID NO: 453416 - RNA, 21 nt, Artificial Sequence
  Synthetic
aucuuaguuuggguucccuaa

SEQ ID NO: 453417 - RNA, 22 nt, Artificial Sequence
  Synthetic
uaucuuaguuuggguucccuaa

SEQ ID NO: 453418 - RNA, 23 nt, Artificial Sequence
  Synthetic
auaucuuaguuuggguucccuaa

SEQ ID NO: 453419 - RNA, 24 nt, Artificial Sequence
  Synthetic
aauaucuuaguuuggguucccuaa

SEQ ID NO: 453420 - RNA, 18 nt, Artificial Sequence
  Synthetic
accuuuguuuuagccuaa

SEQ ID NO: 453421 - RNA, 19 nt, Artificial Sequence
  Synthetic
caccuuuguuuuagccuaa

SEQ ID NO: 453422 - RNA, 20 nt, Artificial Sequence
  Synthetic
acaccuuuguuuuagccuaa

SEQ ID NO: 453423 - RNA, 21 nt, Artificial Sequence
  Synthetic
aacaccuuuguuuuagccuaa

SEQ ID NO: 453424 - RNA, 22 nt, Artificial Sequence
  Synthetic
aaacaccuuuguuuuagccuaa

SEQ ID NO: 453425 - RNA, 23 nt, Artificial Sequence
  Synthetic
aaaacaccuuuguuuuagccuaa

SEQ ID NO: 453426 - RNA, 24 nt, Artificial Sequence
  Synthetic
gaaaacaccuuuguuuuagccuaa

SEQ ID NO: 453427 - RNA, 18 nt, Artificial Sequence
  Synthetic
auugauaccaaggccuaa

SEQ ID NO: 453428 - RNA, 19 nt, Artificial Sequence
  Synthetic
uauugauaccaaggccuaa

SEQ ID NO: 453429 - RNA, 20 nt, Artificial Sequence
  Synthetic
uuauugauaccaaggccuaa

SEQ ID NO: 453430 - RNA, 21 nt, Artificial Sequence
  Synthetic
uuuauugauaccaaggccuaa

SEQ ID NO: 453431 - RNA, 22 nt, Artificial Sequence
  Synthetic
auuuauugauaccaaggccuaa

SEQ ID NO: 453432 - RNA, 23 nt, Artificial Sequence
  Synthetic
cauuuauugauaccaaggccuaa

SEQ ID NO: 453433 - RNA, 24 nt, Artificial Sequence
  Synthetic
acauuuauugauaccaaggccuaa

SEQ ID NO: 453434 - RNA, 18 nt, Artificial Sequence
  Synthetic
gcuccuuucuuugccuaa

SEQ ID NO: 453435 - RNA, 19 nt, Artificial Sequence
  Synthetic
ugcuccuuucuuugccuaa

SEQ ID NO: 453436 - RNA, 20 nt, Artificial Sequence
  Synthetic
gugcuccuuucuuugccuaa

SEQ ID NO: 453437 - RNA, 21 nt, Artificial Sequence
  Synthetic
ugugcuccuuucuuugccuaa

SEQ ID NO: 453438 - RNA, 22 nt, Artificial Sequence
  Synthetic
cugugcuccuuucuuugccuaa

SEQ ID NO: 453439 - RNA, 23 nt, Artificial Sequence
  Synthetic
ucugugcuccuuucuuugccuaa

SEQ ID NO: 453440 - RNA, 24 nt, Artificial Sequence
  Synthetic
uucugugcuccuuucuuugccuaa

SEQ ID NO: 453441 - RNA, 18 nt, Artificial Sequence
  Synthetic
guuuauaagaaauccuaa

SEQ ID NO: 453442 - RNA, 19 nt, Artificial Sequence
  Synthetic
gguuuauaagaaauccuaa

SEQ ID NO: 453443 - RNA, 20 nt, Artificial Sequence
  Synthetic
agguuuauaagaaauccuaa

SEQ ID NO: 453444 - RNA, 21 nt, Artificial Sequence
  Synthetic
aagguuuauaagaaauccuaa

SEQ ID NO: 453445 - RNA, 22 nt, Artificial Sequence
  Synthetic
aaagguuuauaagaaauccuaa

SEQ ID NO: 453446 - RNA, 23 nt, Artificial Sequence
  Synthetic
aaaagguuuauaagaaauccuaa

SEQ ID NO: 453447 - RNA, 24 nt, Artificial Sequence
  Synthetic
aaaaagguuuauaagaaauccuaa

SEQ ID NO: 453448 - RNA, 18 nt, Artificial Sequence
  Synthetic
ggggaggaacaauccuaa

SEQ ID NO: 453449 - RNA, 19 nt, Artificial Sequence
  Synthetic
uggggaggaacaauccuaa

SEQ ID NO: 453450 - RNA, 20 nt, Artificial Sequence
  Synthetic
auggggaggaacaauccuaa

SEQ ID NO: 453451 - RNA, 21 nt, Artificial Sequence
  Synthetic
gauggggaggaacaauccuaa

SEQ ID NO: 453452 - RNA, 22 nt, Artificial Sequence
  Synthetic
agauggggaggaacaauccuaa

SEQ ID NO: 453453 - RNA, 23 nt, Artificial Sequence
  Synthetic
aagauggggaggaacaauccuaa

SEQ ID NO: 453454 - RNA, 24 nt, Artificial Sequence
  Synthetic
gaagauggggaggaacaauccuaa

SEQ ID NO: 453455 - RNA, 18 nt, Artificial Sequence
  Synthetic
agaaauuggacauccuaa

SEQ ID NO: 453456 - RNA, 19 nt, Artificial Sequence
  Synthetic
aagaaauuggacauccuaa

SEQ ID NO: 453457 - RNA, 20 nt, Artificial Sequence
  Synthetic
caagaaauuggacauccuaa

SEQ ID NO: 453458 - RNA, 21 nt, Artificial Sequence
  Synthetic
ccaagaaauuggacauccuaa

SEQ ID NO: 453459 - RNA, 22 nt, Artificial Sequence
  Synthetic
accaagaaauuggacauccuaa

SEQ ID NO: 453460 - RNA, 23 nt, Artificial Sequence
  Synthetic
uaccaagaaauuggacauccuaa

SEQ ID NO: 453461 - RNA, 24 nt, Artificial Sequence
  Synthetic
auaccaagaaauuggacauccuaa

SEQ ID NO: 453462 - RNA, 18 nt, Artificial Sequence
  Synthetic
uuauaguagccauccuaa

SEQ ID NO: 453463 - RNA, 19 nt, Artificial Sequence
  Synthetic
uuuauaguagccauccuaa

SEQ ID NO: 453464 - RNA, 20 nt, Artificial Sequence
  Synthetic
uuuuauaguagccauccuaa

SEQ ID NO: 453465 - RNA, 21 nt, Artificial Sequence
  Synthetic
uuuuuauaguagccauccuaa

SEQ ID NO: 453466 - RNA, 22 nt, Artificial Sequence
  Synthetic
guuuuuauaguagccauccuaa

SEQ ID NO: 453467 - RNA, 23 nt, Artificial Sequence
  Synthetic
uguuuuuauaguagccauccuaa

SEQ ID NO: 453468 - RNA, 24 nt, Artificial Sequence
  Synthetic
uuguuuuuauaguagccauccuaa

SEQ ID NO: 453469 - RNA, 18 nt, Artificial Sequence
  Synthetic
auauaauugcccuccuaa

SEQ ID NO: 453470 - RNA, 19 nt, Artificial Sequence
  Synthetic
uauauaauugcccuccuaa

SEQ ID NO: 453471 - RNA, 20 nt, Artificial Sequence
  Synthetic
uuauauaauugcccuccuaa

SEQ ID NO: 453472 - RNA, 21 nt, Artificial Sequence
  Synthetic
uuuauauaauugcccuccuaa

SEQ ID NO: 453473 - RNA, 22 nt, Artificial Sequence
  Synthetic
guuuauauaauugcccuccuaa

SEQ ID NO: 453474 - RNA, 23 nt, Artificial Sequence
  Synthetic
aguuuauauaauugcccuccuaa

SEQ ID NO: 453475 - RNA, 24 nt, Artificial Sequence
  Synthetic
uaguuuauauaauugcccuccuaa

SEQ ID NO: 453476 - RNA, 18 nt, Artificial Sequence
  Synthetic
auguaccacugcuccuaa

SEQ ID NO: 453477 - RNA, 19 nt, Artificial Sequence
  Synthetic
uauguaccacugcuccuaa

SEQ ID NO: 453478 - RNA, 20 nt, Artificial Sequence
  Synthetic
uuauguaccacugcuccuaa

SEQ ID NO: 453479 - RNA, 21 nt, Artificial Sequence
  Synthetic
cuuauguaccacugcuccuaa

SEQ ID NO: 453480 - RNA, 22 nt, Artificial Sequence
  Synthetic
ccuuauguaccacugcuccuaa

SEQ ID NO: 453481 - RNA, 23 nt, Artificial Sequence
  Synthetic
accuuauguaccacugcuccuaa

SEQ ID NO: 453482 - RNA, 24 nt, Artificial Sequence
  Synthetic
caccuuauguaccacugcuccuaa

SEQ ID NO: 453483 - RNA, 18 nt, Artificial Sequence
  Synthetic
ugucuggcuaauuccuaa

SEQ ID NO: 453484 - RNA, 19 nt, Artificial Sequence
  Synthetic
augucuggcuaauuccuaa

SEQ ID NO: 453485 - RNA, 20 nt, Artificial Sequence
  Synthetic
aaugucuggcuaauuccuaa

SEQ ID NO: 453486 - RNA, 21 nt, Artificial Sequence
  Synthetic
aaaugucuggcuaauuccuaa

SEQ ID NO: 453487 - RNA, 22 nt, Artificial Sequence
  Synthetic
aaaaugucuggcuaauuccuaa

SEQ ID NO: 453488 - RNA, 23 nt, Artificial Sequence
  Synthetic
uaaaaugucuggcuaauuccuaa

SEQ ID NO: 453489 - RNA, 24 nt, Artificial Sequence
  Synthetic
uuaaaaugucuggcuaauuccuaa

SEQ ID NO: 453490 - RNA, 18 nt, Artificial Sequence
  Synthetic
ccaguacaugcuuccuaa

SEQ ID NO: 453491 - RNA, 19 nt, Artificial Sequence
  Synthetic
cccaguacaugcuuccuaa

SEQ ID NO: 453492 - RNA, 20 nt, Artificial Sequence
  Synthetic
ccccaguacaugcuuccuaa

SEQ ID NO: 453493 - RNA, 21 nt, Artificial Sequence
  Synthetic
accccaguacaugcuuccuaa

SEQ ID NO: 453494 - RNA, 22 nt, Artificial Sequence
  Synthetic
gaccccaguacaugcuuccuaa

SEQ ID NO: 453495 - RNA, 23 nt, Artificial Sequence
  Synthetic
agaccccaguacaugcuuccuaa

SEQ ID NO: 453496 - RNA, 24 nt, Artificial Sequence
  Synthetic
uagaccccaguacaugcuuccuaa

SEQ ID NO: 453497 - RNA, 18 nt, Artificial Sequence
  Synthetic
ucauuucaagguuccuaa

SEQ ID NO: 453498 - RNA, 19 nt, Artificial Sequence
  Synthetic
uucauuucaagguuccuaa

SEQ ID NO: 453499 - RNA, 20 nt, Artificial Sequence
  Synthetic
auucauuucaagguuccuaa

SEQ ID NO: 453500 - RNA, 21 nt, Artificial Sequence
  Synthetic
uauucauuucaagguuccuaa

SEQ ID NO: 453501 - RNA, 22 nt, Artificial Sequence
  Synthetic
uuauucauuucaagguuccuaa

SEQ ID NO: 453502 - RNA, 23 nt, Artificial Sequence
  Synthetic
uuuauucauuucaagguuccuaa

SEQ ID NO: 453503 - RNA, 24 nt, Artificial Sequence
  Synthetic
auuuauucauuucaagguuccuaa

SEQ ID NO: 453504 - RNA, 18 nt, Artificial Sequence
  Synthetic
guaauguuguguuccuaa

SEQ ID NO: 453505 - RNA, 19 nt, Artificial Sequence
  Synthetic
uguaauguuguguuccuaa

SEQ ID NO: 453506 - RNA, 20 nt, Artificial Sequence
  Synthetic
cuguaauguuguguuccuaa

SEQ ID NO: 453507 - RNA, 21 nt, Artificial Sequence
  Synthetic
ucuguaauguuguguuccuaa

SEQ ID NO: 453508 - RNA, 22 nt, Artificial Sequence
  Synthetic
uucuguaauguuguguuccuaa

SEQ ID NO: 453509 - RNA, 23 nt, Artificial Sequence
  Synthetic
uuucuguaauguuguguuccuaa

SEQ ID NO: 453510 - RNA, 24 nt, Artificial Sequence
  Synthetic
guuucuguaauguuguguuccuaa

SEQ ID NO: 453511 - RNA, 18 nt, Artificial Sequence
  Synthetic
aauauucauuguuccuaa

SEQ ID NO: 453512 - RNA, 19 nt, Artificial Sequence
  Synthetic
aaauauucauuguuccuaa

SEQ ID NO: 453513 - RNA, 20 nt, Artificial Sequence
  Synthetic
uaaauauucauuguuccuaa

SEQ ID NO: 453514 - RNA, 21 nt, Artificial Sequence
  Synthetic
cuaaauauucauuguuccuaa

SEQ ID NO: 453515 - RNA, 22 nt, Artificial Sequence
  Synthetic
acuaaauauucauuguuccuaa

SEQ ID NO: 453516 - RNA, 23 nt, Artificial Sequence
  Synthetic
uacuaaauauucauuguuccuaa

SEQ ID NO: 453517 - RNA, 24 nt, Artificial Sequence
  Synthetic
cuacuaaauauucauuguuccuaa

SEQ ID NO: 453518 - RNA, 18 nt, Artificial Sequence
  Synthetic
uuuggugagguuuccuaa

SEQ ID NO: 453519 - RNA, 19 nt, Artificial Sequence
  Synthetic
auuuggugagguuuccuaa

SEQ ID NO: 453520 - RNA, 20 nt, Artificial Sequence
  Synthetic
uauuuggugagguuuccuaa

SEQ ID NO: 453521 - RNA, 21 nt, Artificial Sequence
  Synthetic
guauuuggugagguuuccuaa

SEQ ID NO: 453522 - RNA, 22 nt, Artificial Sequence
  Synthetic
uguauuuggugagguuuccuaa

SEQ ID NO: 453523 - RNA, 23 nt, Artificial Sequence
  Synthetic
uuguauuuggugagguuuccuaa

SEQ ID NO: 453524 - RNA, 24 nt, Artificial Sequence
  Synthetic
cuuguauuuggugagguuuccuaa

SEQ ID NO: 453525 - RNA, 18 nt, Artificial Sequence
  Synthetic
uucacacuuuuuuccuaa

SEQ ID NO: 453526 - RNA, 19 nt, Artificial Sequence
  Synthetic
uuucacacuuuuuuccuaa

SEQ ID NO: 453527 - RNA, 20 nt, Artificial Sequence
  Synthetic
uuuucacacuuuuuuccuaa

SEQ ID NO: 453528 - RNA, 21 nt, Artificial Sequence
  Synthetic
auuuucacacuuuuuuccuaa

SEQ ID NO: 453529 - RNA, 22 nt, Artificial Sequence
  Synthetic
uauuuucacacuuuuuuccuaa

SEQ ID NO: 453530 - RNA, 23 nt, Artificial Sequence
  Synthetic
cuauuuucacacuuuuuuccuaa

SEQ ID NO: 453531 - RNA, 24 nt, Artificial Sequence
  Synthetic
ucuauuuucacacuuuuuuccuaa

SEQ ID NO: 453532 - RNA, 18 nt, Artificial Sequence
  Synthetic
ugagguugaaaaagcuaa

SEQ ID NO: 453533 - RNA, 19 nt, Artificial Sequence
  Synthetic
cugagguugaaaaagcuaa

SEQ ID NO: 453534 - RNA, 20 nt, Artificial Sequence
  Synthetic
ccugagguugaaaaagcuaa

SEQ ID NO: 453535 - RNA, 21 nt, Artificial Sequence
  Synthetic
accugagguugaaaaagcuaa

SEQ ID NO: 453536 - RNA, 22 nt, Artificial Sequence
  Synthetic
caccugagguugaaaaagcuaa

SEQ ID NO: 453537 - RNA, 23 nt, Artificial Sequence
  Synthetic
ccaccugagguugaaaaagcuaa

SEQ ID NO: 453538 - RNA, 24 nt, Artificial Sequence
  Synthetic
accaccugagguugaaaaagcuaa

SEQ ID NO: 453539 - RNA, 18 nt, Artificial Sequence
  Synthetic
cuaccaccccaaagcuaa

SEQ ID NO: 453540 - RNA, 19 nt, Artificial Sequence
  Synthetic
ucuaccaccccaaagcuaa

SEQ ID NO: 453541 - RNA, 20 nt, Artificial Sequence
  Synthetic
aucuaccaccccaaagcuaa

SEQ ID NO: 453542 - RNA, 21 nt, Artificial Sequence
  Synthetic
caucuaccaccccaaagcuaa

SEQ ID NO: 453543 - RNA, 22 nt, Artificial Sequence
  Synthetic
ccaucuaccaccccaaagcuaa

SEQ ID NO: 453544 - RNA, 23 nt, Artificial Sequence
  Synthetic
cccaucuaccaccccaaagcuaa

SEQ ID NO: 453545 - RNA, 24 nt, Artificial Sequence
  Synthetic
gcccaucuaccaccccaaagcuaa

SEQ ID NO: 453546 - RNA, 18 nt, Artificial Sequence
  Synthetic
uaagcuguagaaagcuaa

SEQ ID NO: 453547 - RNA, 19 nt, Artificial Sequence
  Synthetic
uuaagcuguagaaagcuaa

SEQ ID NO: 453548 - RNA, 20 nt, Artificial Sequence
  Synthetic
uuuaagcuguagaaagcuaa

SEQ ID NO: 453549 - RNA, 21 nt, Artificial Sequence
  Synthetic
guuuaagcuguagaaagcuaa

SEQ ID NO: 453550 - RNA, 22 nt, Artificial Sequence
  Synthetic
aguuuaagcuguagaaagcuaa

SEQ ID NO: 453551 - RNA, 23 nt, Artificial Sequence
  Synthetic
gaguuuaagcuguagaaagcuaa

SEQ ID NO: 453552 - RNA, 24 nt, Artificial Sequence
  Synthetic
agaguuuaagcuguagaaagcuaa

SEQ ID NO: 453553 - RNA, 18 nt, Artificial Sequence
  Synthetic
ucauuaaagcgaagcuaa

SEQ ID NO: 453554 - RNA, 19 nt, Artificial Sequence
  Synthetic
uucauuaaagcgaagcuaa

SEQ ID NO: 453555 - RNA, 20 nt, Artificial Sequence
  Synthetic
guucauuaaagcgaagcuaa

SEQ ID NO: 453556 - RNA, 21 nt, Artificial Sequence
  Synthetic
aguucauuaaagcgaagcuaa

SEQ ID NO: 453557 - RNA, 22 nt, Artificial Sequence
  Synthetic
gaguucauuaaagcgaagcuaa

SEQ ID NO: 453558 - RNA, 23 nt, Artificial Sequence
  Synthetic
agaguucauuaaagcgaagcuaa

SEQ ID NO: 453559 - RNA, 24 nt, Artificial Sequence
  Synthetic
aagaguucauuaaagcgaagcuaa

SEQ ID NO: 453560 - RNA, 18 nt, Artificial Sequence
  Synthetic
ucugaucuuggaagcuaa

SEQ ID NO: 453561 - RNA, 19 nt, Artificial Sequence
  Synthetic
aucugaucuuggaagcuaa

SEQ ID NO: 453562 - RNA, 20 nt, Artificial Sequence
  Synthetic
uaucugaucuuggaagcuaa

SEQ ID NO: 453563 - RNA, 21 nt, Artificial Sequence
  Synthetic
uuaucugaucuuggaagcuaa

SEQ ID NO: 453564 - RNA, 22 nt, Artificial Sequence
  Synthetic
cuuaucugaucuuggaagcuaa

SEQ ID NO: 453565 - RNA, 23 nt, Artificial Sequence
  Synthetic
ucuuaucugaucuuggaagcuaa

SEQ ID NO: 453566 - RNA, 24 nt, Artificial Sequence
  Synthetic
cucuuaucugaucuuggaagcuaa

SEQ ID NO: 453567 - RNA, 18 nt, Artificial Sequence
  Synthetic
auaaaauagguaagcuaa

SEQ ID NO: 453568 - RNA, 19 nt, Artificial Sequence
  Synthetic
uauaaaauagguaagcuaa

SEQ ID NO: 453569 - RNA, 20 nt, Artificial Sequence
  Synthetic
guauaaaauagguaagcuaa

SEQ ID NO: 453570 - RNA, 21 nt, Artificial Sequence
  Synthetic
gguauaaaauagguaagcuaa

SEQ ID NO: 453571 - RNA, 22 nt, Artificial Sequence
  Synthetic
agguauaaaauagguaagcuaa

SEQ ID NO: 453572 - RNA, 23 nt, Artificial Sequence
  Synthetic
aagguauaaaauagguaagcuaa

SEQ ID NO: 453573 - RNA, 24 nt, Artificial Sequence
  Synthetic
caagguauaaaauagguaagcuaa

SEQ ID NO: 453574 - RNA, 18 nt, Artificial Sequence
  Synthetic
cagcaaaacaacagcuaa

SEQ ID NO: 453575 - RNA, 19 nt, Artificial Sequence
  Synthetic
ccagcaaaacaacagcuaa

SEQ ID NO: 453576 - RNA, 20 nt, Artificial Sequence
  Synthetic
uccagcaaaacaacagcuaa

SEQ ID NO: 453577 - RNA, 21 nt, Artificial Sequence
  Synthetic
uuccagcaaaacaacagcuaa

SEQ ID NO: 453578 - RNA, 22 nt, Artificial Sequence
  Synthetic
guuccagcaaaacaacagcuaa

SEQ ID NO: 453579 - RNA, 23 nt, Artificial Sequence
  Synthetic
aguuccagcaaaacaacagcuaa

SEQ ID NO: 453580 - RNA, 24 nt, Artificial Sequence
  Synthetic
caguuccagcaaaacaacagcuaa

SEQ ID NO: 453581 - RNA, 18 nt, Artificial Sequence
  Synthetic
aagauauaucacagcuaa

SEQ ID NO: 453582 - RNA, 19 nt, Artificial Sequence
  Synthetic
aaagauauaucacagcuaa

SEQ ID NO: 453583 - RNA, 20 nt, Artificial Sequence
  Synthetic
aaaagauauaucacagcuaa

SEQ ID NO: 453584 - RNA, 21 nt, Artificial Sequence
  Synthetic
gaaaagauauaucacagcuaa

SEQ ID NO: 453585 - RNA, 22 nt, Artificial Sequence
  Synthetic
ggaaaagauauaucacagcuaa

SEQ ID NO: 453586 - RNA, 23 nt, Artificial Sequence
  Synthetic
uggaaaagauauaucacagcuaa

SEQ ID NO: 453587 - RNA, 24 nt, Artificial Sequence
  Synthetic
guggaaaagauauaucacagcuaa

SEQ ID NO: 453588 - RNA, 18 nt, Artificial Sequence
  Synthetic
aguuaaaacuacagcuaa

SEQ ID NO: 453589 - RNA, 19 nt, Artificial Sequence
  Synthetic
aaguuaaaacuacagcuaa

SEQ ID NO: 453590 - RNA, 20 nt, Artificial Sequence
  Synthetic
aaaguuaaaacuacagcuaa

SEQ ID NO: 453591 - RNA, 21 nt, Artificial Sequence
  Synthetic
aaaaguuaaaacuacagcuaa

SEQ ID NO: 453592 - RNA, 22 nt, Artificial Sequence
  Synthetic
caaaaguuaaaacuacagcuaa

SEQ ID NO: 453593 - RNA, 23 nt, Artificial Sequence
  Synthetic
acaaaaguuaaaacuacagcuaa

SEQ ID NO: 453594 - RNA, 24 nt, Artificial Sequence
  Synthetic
aacaaaaguuaaaacuacagcuaa

SEQ ID NO: 453595 - RNA, 18 nt, Artificial Sequence
  Synthetic
aagcugaagagcagcuaa

SEQ ID NO: 453596 - RNA, 19 nt, Artificial Sequence
  Synthetic
aaagcugaagagcagcuaa

SEQ ID NO: 453597 - RNA, 20 nt, Artificial Sequence
  Synthetic
uaaagcugaagagcagcuaa

SEQ ID NO: 453598 - RNA, 21 nt, Artificial Sequence
  Synthetic
guaaagcugaagagcagcuaa

SEQ ID NO: 453599 - RNA, 22 nt, Artificial Sequence
  Synthetic
gguaaagcugaagagcagcuaa

SEQ ID NO: 453600 - RNA, 23 nt, Artificial Sequence
  Synthetic
agguaaagcugaagagcagcuaa

SEQ ID NO: 453601 - RNA, 24 nt, Artificial Sequence
  Synthetic
aagguaaagcugaagagcagcuaa

SEQ ID NO: 453602 - RNA, 18 nt, Artificial Sequence
  Synthetic
acaauauguacuagcuaa

SEQ ID NO: 453603 - RNA, 19 nt, Artificial Sequence
  Synthetic
uacaauauguacuagcuaa

SEQ ID NO: 453604 - RNA, 20 nt, Artificial Sequence
  Synthetic
guacaauauguacuagcuaa

SEQ ID NO: 453605 - RNA, 21 nt, Artificial Sequence
  Synthetic
aguacaauauguacuagcuaa

SEQ ID NO: 453606 - RNA, 22 nt, Artificial Sequence
  Synthetic
gaguacaauauguacuagcuaa

SEQ ID NO: 453607 - RNA, 23 nt, Artificial Sequence
  Synthetic
ugaguacaauauguacuagcuaa

SEQ ID NO: 453608 - RNA, 24 nt, Artificial Sequence
  Synthetic
cugaguacaauauguacuagcuaa

SEQ ID NO: 453609 - RNA, 18 nt, Artificial Sequence
  Synthetic
cuguacuucaguagcuaa

SEQ ID NO: 453610 - RNA, 19 nt, Artificial Sequence
  Synthetic
ccuguacuucaguagcuaa

SEQ ID NO: 453611 - RNA, 20 nt, Artificial Sequence
  Synthetic
gccuguacuucaguagcuaa

SEQ ID NO: 453612 - RNA, 21 nt, Artificial Sequence
  Synthetic
ugccuguacuucaguagcuaa

SEQ ID NO: 453613 - RNA, 22 nt, Artificial Sequence
  Synthetic
cugccuguacuucaguagcuaa

SEQ ID NO: 453614 - RNA, 23 nt, Artificial Sequence
  Synthetic
ucugccuguacuucaguagcuaa

SEQ ID NO: 453615 - RNA, 24 nt, Artificial Sequence
  Synthetic
uucugccuguacuucaguagcuaa

SEQ ID NO: 453616 - RNA, 18 nt, Artificial Sequence
  Synthetic
gauuacugaguuagcuaa

SEQ ID NO: 453617 - RNA, 19 nt, Artificial Sequence
  Synthetic
ugauuacugaguuagcuaa

SEQ ID NO: 453618 - RNA, 20 nt, Artificial Sequence
  Synthetic
uugauuacugaguuagcuaa

SEQ ID NO: 453619 - RNA, 21 nt, Artificial Sequence
  Synthetic
auugauuacugaguuagcuaa

SEQ ID NO: 453620 - RNA, 22 nt, Artificial Sequence
  Synthetic
uauugauuacugaguuagcuaa

SEQ ID NO: 453621 - RNA, 23 nt, Artificial Sequence
  Synthetic
uuauugauuacugaguuagcuaa

SEQ ID NO: 453622 - RNA, 24 nt, Artificial Sequence
  Synthetic
guuauugauuacugaguuagcuaa

SEQ ID NO: 453623 - RNA, 18 nt, Artificial Sequence
  Synthetic
cuuccuugauuuagcuaa

SEQ ID NO: 453624 - RNA, 19 nt, Artificial Sequence
  Synthetic
ccuuccuugauuuagcuaa

SEQ ID NO: 453625 - RNA, 20 nt, Artificial Sequence
  Synthetic
gccuuccuugauuuagcuaa

SEQ ID NO: 453626 - RNA, 21 nt, Artificial Sequence
  Synthetic
agccuuccuugauuuagcuaa

SEQ ID NO: 453627 - RNA, 22 nt, Artificial Sequence
  Synthetic
aagccuuccuugauuuagcuaa

SEQ ID NO: 453628 - RNA, 23 nt, Artificial Sequence
  Synthetic
gaagccuuccuugauuuagcuaa

SEQ ID NO: 453629 - RNA, 24 nt, Artificial Sequence
  Synthetic
ugaagccuuccuugauuuagcuaa

SEQ ID NO: 453630 - RNA, 18 nt, Artificial Sequence
  Synthetic
uuuuggauaugacgcuaa

SEQ ID NO: 453631 - RNA, 19 nt, Artificial Sequence
  Synthetic
uuuuuggauaugacgcuaa

SEQ ID NO: 453632 - RNA, 20 nt, Artificial Sequence
  Synthetic
uuuuuuggauaugacgcuaa

SEQ ID NO: 453633 - RNA, 21 nt, Artificial Sequence
  Synthetic
uuuuuuuggauaugacgcuaa

SEQ ID NO: 453634 - RNA, 22 nt, Artificial Sequence
  Synthetic
uuuuuuuuggauaugacgcuaa

SEQ ID NO: 453635 - RNA, 23 nt, Artificial Sequence
  Synthetic
auuuuuuuuggauaugacgcuaa

SEQ ID NO: 453636 - RNA, 24 nt, Artificial Sequence
  Synthetic
aauuuuuuuuggauaugacgcuaa

SEQ ID NO: 453637 - RNA, 18 nt, Artificial Sequence
  Synthetic
accuuaagauuacgcuaa

SEQ ID NO: 453638 - RNA, 19 nt, Artificial Sequence
  Synthetic
gaccuuaagauuacgcuaa

SEQ ID NO: 453639 - RNA, 20 nt, Artificial Sequence
  Synthetic
ggaccuuaagauuacgcuaa

SEQ ID NO: 453640 - RNA, 21 nt, Artificial Sequence
  Synthetic
uggaccuuaagauuacgcuaa

SEQ ID NO: 453641 - RNA, 22 nt, Artificial Sequence
  Synthetic
auggaccuuaagauuacgcuaa

SEQ ID NO: 453642 - RNA, 23 nt, Artificial Sequence
  Synthetic
gauggaccuuaagauuacgcuaa

SEQ ID NO: 453643 - RNA, 24 nt, Artificial Sequence
  Synthetic
ggauggaccuuaagauuacgcuaa

SEQ ID NO: 453644 - RNA, 18 nt, Artificial Sequence
  Synthetic
gggcuacucuuacgcuaa

SEQ ID NO: 453645 - RNA, 19 nt, Artificial Sequence
  Synthetic
cgggcuacucuuacgcuaa

SEQ ID NO: 453646 - RNA, 20 nt, Artificial Sequence
  Synthetic
ucgggcuacucuuacgcuaa

SEQ ID NO: 453647 - RNA, 21 nt, Artificial Sequence
  Synthetic
gucgggcuacucuuacgcuaa

SEQ ID NO: 453648 - RNA, 22 nt, Artificial Sequence
  Synthetic
ugucgggcuacucuuacgcuaa

SEQ ID NO: 453649 - RNA, 23 nt, Artificial Sequence
  Synthetic
cugucgggcuacucuuacgcuaa

SEQ ID NO: 453650 - RNA, 24 nt, Artificial Sequence
  Synthetic
ucugucgggcuacucuuacgcuaa

SEQ ID NO: 453651 - RNA, 18 nt, Artificial Sequence
  Synthetic
caaggccugaaaggcuaa

SEQ ID NO: 453652 - RNA, 19 nt, Artificial Sequence
  Synthetic
ucaaggccugaaaggcuaa

SEQ ID NO: 453653 - RNA, 20 nt, Artificial Sequence
  Synthetic
cucaaggccugaaaggcuaa

SEQ ID NO: 453654 - RNA, 21 nt, Artificial Sequence
  Synthetic
ccucaaggccugaaaggcuaa

SEQ ID NO: 453655 - RNA, 22 nt, Artificial Sequence
  Synthetic
uccucaaggccugaaaggcuaa

SEQ ID NO: 453656 - RNA, 23 nt, Artificial Sequence
  Synthetic
cuccucaaggccugaaaggcuaa

SEQ ID NO: 453657 - RNA, 24 nt, Artificial Sequence
  Synthetic
ccuccucaaggccugaaaggcuaa

SEQ ID NO: 453658 - RNA, 18 nt, Artificial Sequence
  Synthetic
cagcaaaagcaaggcuaa

SEQ ID NO: 453659 - RNA, 19 nt, Artificial Sequence
  Synthetic
acagcaaaagcaaggcuaa

SEQ ID NO: 453660 - RNA, 20 nt, Artificial Sequence
  Synthetic
uacagcaaaagcaaggcuaa

SEQ ID NO: 453661 - RNA, 21 nt, Artificial Sequence
  Synthetic
auacagcaaaagcaaggcuaa

SEQ ID NO: 453662 - RNA, 22 nt, Artificial Sequence
  Synthetic
gauacagcaaaagcaaggcuaa

SEQ ID NO: 453663 - RNA, 23 nt, Artificial Sequence
  Synthetic
ggauacagcaaaagcaaggcuaa

SEQ ID NO: 453664 - RNA, 24 nt, Artificial Sequence
  Synthetic
gggauacagcaaaagcaaggcuaa

SEQ ID NO: 453665 - RNA, 18 nt, Artificial Sequence
  Synthetic
uuggaaacccagggcuaa

SEQ ID NO: 453666 - RNA, 19 nt, Artificial Sequence
  Synthetic
guuggaaacccagggcuaa

SEQ ID NO: 453667 - RNA, 20 nt, Artificial Sequence
  Synthetic
gguuggaaacccagggcuaa

SEQ ID NO: 453668 - RNA, 21 nt, Artificial Sequence
  Synthetic
ggguuggaaacccagggcuaa

SEQ ID NO: 453669 - RNA, 22 nt, Artificial Sequence
  Synthetic
gggguuggaaacccagggcuaa

SEQ ID NO: 453670 - RNA, 23 nt, Artificial Sequence
  Synthetic
agggguuggaaacccagggcuaa

SEQ ID NO: 453671 - RNA, 24 nt, Artificial Sequence
  Synthetic
cagggguuggaaacccagggcuaa

SEQ ID NO: 453672 - RNA, 18 nt, Artificial Sequence
  Synthetic
aacacugaagagggcuaa

SEQ ID NO: 453673 - RNA, 19 nt, Artificial Sequence
  Synthetic
uaacacugaagagggcuaa

SEQ ID NO: 453674 - RNA, 20 nt, Artificial Sequence
  Synthetic
uuaacacugaagagggcuaa

SEQ ID NO: 453675 - RNA, 21 nt, Artificial Sequence
  Synthetic
auuaacacugaagagggcuaa

SEQ ID NO: 453676 - RNA, 22 nt, Artificial Sequence
  Synthetic
uauuaacacugaagagggcuaa

SEQ ID NO: 453677 - RNA, 23 nt, Artificial Sequence
  Synthetic
auauuaacacugaagagggcuaa

SEQ ID NO: 453678 - RNA, 24 nt, Artificial Sequence
  Synthetic
gauauuaacacugaagagggcuaa

SEQ ID NO: 453679 - RNA, 18 nt, Artificial Sequence
  Synthetic
ugauuuuuagggggcuaa

SEQ ID NO: 453680 - RNA, 19 nt, Artificial Sequence
  Synthetic
gugauuuuuagggggcuaa

SEQ ID NO: 453681 - RNA, 20 nt, Artificial Sequence
  Synthetic
agugauuuuuagggggcuaa

SEQ ID NO: 453682 - RNA, 21 nt, Artificial Sequence
  Synthetic
gagugauuuuuagggggcuaa

SEQ ID NO: 453683 - RNA, 22 nt, Artificial Sequence
  Synthetic
ugagugauuuuuagggggcuaa

SEQ ID NO: 453684 - RNA, 23 nt, Artificial Sequence
  Synthetic
cugagugauuuuuagggggcuaa

SEQ ID NO: 453685 - RNA, 24 nt, Artificial Sequence
  Synthetic
ccugagugauuuuuagggggcuaa

SEQ ID NO: 453686 - RNA, 18 nt, Artificial Sequence
  Synthetic
augaaggcaaauggcuaa

SEQ ID NO: 453687 - RNA, 19 nt, Artificial Sequence
  Synthetic
uaugaaggcaaauggcuaa

SEQ ID NO: 453688 - RNA, 20 nt, Artificial Sequence
  Synthetic
auaugaaggcaaauggcuaa

SEQ ID NO: 453689 - RNA, 21 nt, Artificial Sequence
  Synthetic
uauaugaaggcaaauggcuaa

SEQ ID NO: 453690 - RNA, 22 nt, Artificial Sequence
  Synthetic
auauaugaaggcaaauggcuaa

SEQ ID NO: 453691 - RNA, 23 nt, Artificial Sequence
  Synthetic
aauauaugaaggcaaauggcuaa

SEQ ID NO: 453692 - RNA, 24 nt, Artificial Sequence
  Synthetic
aaauauaugaaggcaaauggcuaa

SEQ ID NO: 453693 - RNA, 18 nt, Artificial Sequence
  Synthetic
cacuccagccauggcuaa

SEQ ID NO: 453694 - RNA, 19 nt, Artificial Sequence
  Synthetic
ccacuccagccauggcuaa

SEQ ID NO: 453695 - RNA, 20 nt, Artificial Sequence
  Synthetic
gccacuccagccauggcuaa

SEQ ID NO: 453696 - RNA, 21 nt, Artificial Sequence
  Synthetic
agccacuccagccauggcuaa

SEQ ID NO: 453697 - RNA, 22 nt, Artificial Sequence
  Synthetic
cagccacuccagccauggcuaa

SEQ ID NO: 453698 - RNA, 23 nt, Artificial Sequence
  Synthetic
ccagccacuccagccauggcuaa

SEQ ID NO: 453699 - RNA, 24 nt, Artificial Sequence
  Synthetic
cccagccacuccagccauggcuaa

SEQ ID NO: 453700 - RNA, 18 nt, Artificial Sequence
  Synthetic
uugaagacauuaugcuaa

SEQ ID NO: 453701 - RNA, 19 nt, Artificial Sequence
  Synthetic
cuugaagacauuaugcuaa

SEQ ID NO: 453702 - RNA, 20 nt, Artificial Sequence
  Synthetic
ccuugaagacauuaugcuaa

SEQ ID NO: 453703 - RNA, 21 nt, Artificial Sequence
  Synthetic
accuugaagacauuaugcuaa

SEQ ID NO: 453704 - RNA, 22 nt, Artificial Sequence
  Synthetic
uaccuugaagacauuaugcuaa

SEQ ID NO: 453705 - RNA, 23 nt, Artificial Sequence
  Synthetic
guaccuugaagacauuaugcuaa

SEQ ID NO: 453706 - RNA, 24 nt, Artificial Sequence
  Synthetic
uguaccuugaagacauuaugcuaa

SEQ ID NO: 453707 - RNA, 18 nt, Artificial Sequence
  Synthetic
cugcuuuuaaacugcuaa

SEQ ID NO: 453708 - RNA, 19 nt, Artificial Sequence
  Synthetic
gcugcuuuuaaacugcuaa

SEQ ID NO: 453709 - RNA, 20 nt, Artificial Sequence
  Synthetic
ugcugcuuuuaaacugcuaa

SEQ ID NO: 453710 - RNA, 21 nt, Artificial Sequence
  Synthetic
uugcugcuuuuaaacugcuaa

SEQ ID NO: 453711 - RNA, 22 nt, Artificial Sequence
  Synthetic
uuugcugcuuuuaaacugcuaa

SEQ ID NO: 453712 - RNA, 23 nt, Artificial Sequence
  Synthetic
uuuugcugcuuuuaaacugcuaa

SEQ ID NO: 453713 - RNA, 24 nt, Artificial Sequence
  Synthetic
uuuuugcugcuuuuaaacugcuaa

SEQ ID NO: 453714 - RNA, 18 nt, Artificial Sequence
  Synthetic
aguauguuggccugcuaa

SEQ ID NO: 453715 - RNA, 19 nt, Artificial Sequence
  Synthetic
gaguauguuggccugcuaa

SEQ ID NO: 453716 - RNA, 20 nt, Artificial Sequence
  Synthetic
ugaguauguuggccugcuaa

SEQ ID NO: 453717 - RNA, 21 nt, Artificial Sequence
  Synthetic
uugaguauguuggccugcuaa

SEQ ID NO: 453718 - RNA, 22 nt, Artificial Sequence
  Synthetic
cuugaguauguuggccugcuaa

SEQ ID NO: 453719 - RNA, 23 nt, Artificial Sequence
  Synthetic
acuugaguauguuggccugcuaa

SEQ ID NO: 453720 - RNA, 24 nt, Artificial Sequence
  Synthetic
gacuugaguauguuggccugcuaa

SEQ ID NO: 453721 - RNA, 18 nt, Artificial Sequence
  Synthetic
ucaauagauagcugcuaa

SEQ ID NO: 453722 - RNA, 19 nt, Artificial Sequence
  Synthetic
uucaauagauagcugcuaa

SEQ ID NO: 453723 - RNA, 20 nt, Artificial Sequence
  Synthetic
cuucaauagauagcugcuaa

SEQ ID NO: 453724 - RNA, 21 nt, Artificial Sequence
  Synthetic
acuucaauagauagcugcuaa

SEQ ID NO: 453725 - RNA, 22 nt, Artificial Sequence
  Synthetic
aacuucaauagauagcugcuaa

SEQ ID NO: 453726 - RNA, 23 nt, Artificial Sequence
  Synthetic
caacuucaauagauagcugcuaa

SEQ ID NO: 453727 - RNA, 24 nt, Artificial Sequence
  Synthetic
ccaacuucaauagauagcugcuaa

SEQ ID NO: 453728 - RNA, 18 nt, Artificial Sequence
  Synthetic
cacugugcuggcugcuaa

SEQ ID NO: 453729 - RNA, 19 nt, Artificial Sequence
  Synthetic
gcacugugcuggcugcuaa

SEQ ID NO: 453730 - RNA, 20 nt, Artificial Sequence
  Synthetic
ggcacugugcuggcugcuaa

SEQ ID NO: 453731 - RNA, 21 nt, Artificial Sequence
  Synthetic
aggcacugugcuggcugcuaa

SEQ ID NO: 453732 - RNA, 22 nt, Artificial Sequence
  Synthetic
aaggcacugugcuggcugcuaa

SEQ ID NO: 453733 - RNA, 23 nt, Artificial Sequence
  Synthetic
caaggcacugugcuggcugcuaa

SEQ ID NO: 453734 - RNA, 24 nt, Artificial Sequence
  Synthetic
gcaaggcacugugcuggcugcuaa

SEQ ID NO: 453735 - RNA, 18 nt, Artificial Sequence
  Synthetic
cuuacuuuuuucugcuaa

SEQ ID NO: 453736 - RNA, 19 nt, Artificial Sequence
  Synthetic
acuuacuuuuuucugcuaa

SEQ ID NO: 453737 - RNA, 20 nt, Artificial Sequence
  Synthetic
aacuuacuuuuuucugcuaa

SEQ ID NO: 453738 - RNA, 21 nt, Artificial Sequence
  Synthetic
uaacuuacuuuuuucugcuaa

SEQ ID NO: 453739 - RNA, 22 nt, Artificial Sequence
  Synthetic
uuaacuuacuuuuuucugcuaa

SEQ ID NO: 453740 - RNA, 23 nt, Artificial Sequence
  Synthetic
uuuaacuuacuuuuuucugcuaa

SEQ ID NO: 453741 - RNA, 24 nt, Artificial Sequence
  Synthetic
auuuaacuuacuuuuuucugcuaa

SEQ ID NO: 453742 - RNA, 18 nt, Artificial Sequence
  Synthetic
cagcaaaaacagugcuaa

SEQ ID NO: 453743 - RNA, 19 nt, Artificial Sequence
  Synthetic
acagcaaaaacagugcuaa

SEQ ID NO: 453744 - RNA, 20 nt, Artificial Sequence
  Synthetic
uacagcaaaaacagugcuaa

SEQ ID NO: 453745 - RNA, 21 nt, Artificial Sequence
  Synthetic
auacagcaaaaacagugcuaa

SEQ ID NO: 453746 - RNA, 22 nt, Artificial Sequence
  Synthetic
gauacagcaaaaacagugcuaa

SEQ ID NO: 453747 - RNA, 23 nt, Artificial Sequence
  Synthetic
agauacagcaaaaacagugcuaa

SEQ ID NO: 453748 - RNA, 24 nt, Artificial Sequence
  Synthetic
gagauacagcaaaaacagugcuaa

SEQ ID NO: 453749 - RNA, 18 nt, Artificial Sequence
  Synthetic
uagcaaaagcagugcuaa

SEQ ID NO: 453750 - RNA, 19 nt, Artificial Sequence
  Synthetic
guagcaaaagcagugcuaa

SEQ ID NO: 453751 - RNA, 20 nt, Artificial Sequence
  Synthetic
gguagcaaaagcagugcuaa

SEQ ID NO: 453752 - RNA, 21 nt, Artificial Sequence
  Synthetic
ggguagcaaaagcagugcuaa

SEQ ID NO: 453753 - RNA, 22 nt, Artificial Sequence
  Synthetic
gggguagcaaaagcagugcuaa

SEQ ID NO: 453754 - RNA, 23 nt, Artificial Sequence
  Synthetic
ggggguagcaaaagcagugcuaa

SEQ ID NO: 453755 - RNA, 24 nt, Artificial Sequence
  Synthetic
uggggguagcaaaagcagugcuaa

SEQ ID NO: 453756 - RNA, 18 nt, Artificial Sequence
  Synthetic
aggaaggcugagugcuaa

SEQ ID NO: 453757 - RNA, 19 nt, Artificial Sequence
  Synthetic
uaggaaggcugagugcuaa

SEQ ID NO: 453758 - RNA, 20 nt, Artificial Sequence
  Synthetic
auaggaaggcugagugcuaa

SEQ ID NO: 453759 - RNA, 21 nt, Artificial Sequence
  Synthetic
uauaggaaggcugagugcuaa

SEQ ID NO: 453760 - RNA, 22 nt, Artificial Sequence
  Synthetic
uuauaggaaggcugagugcuaa

SEQ ID NO: 453761 - RNA, 23 nt, Artificial Sequence
  Synthetic
uuuauaggaaggcugagugcuaa

SEQ ID NO: 453762 - RNA, 24 nt, Artificial Sequence
  Synthetic
guuuauaggaaggcugagugcuaa

SEQ ID NO: 453763 - RNA, 18 nt, Artificial Sequence
  Synthetic
agcaauaugaauugcuaa

SEQ ID NO: 453764 - RNA, 19 nt, Artificial Sequence
  Synthetic
gagcaauaugaauugcuaa

SEQ ID NO: 453765 - RNA, 20 nt, Artificial Sequence
  Synthetic
agagcaauaugaauugcuaa

SEQ ID NO: 453766 - RNA, 21 nt, Artificial Sequence
  Synthetic
uagagcaauaugaauugcuaa

SEQ ID NO: 453767 - RNA, 22 nt, Artificial Sequence
  Synthetic
auagagcaauaugaauugcuaa

SEQ ID NO: 453768 - RNA, 23 nt, Artificial Sequence
  Synthetic
cauagagcaauaugaauugcuaa

SEQ ID NO: 453769 - RNA, 24 nt, Artificial Sequence
  Synthetic
gcauagagcaauaugaauugcuaa

SEQ ID NO: 453770 - RNA, 18 nt, Artificial Sequence
  Synthetic
uacaauacuacuugcuaa

SEQ ID NO: 453771 - RNA, 19 nt, Artificial Sequence
  Synthetic
guacaauacuacuugcuaa

SEQ ID NO: 453772 - RNA, 20 nt, Artificial Sequence
  Synthetic
uguacaauacuacuugcuaa

SEQ ID NO: 453773 - RNA, 21 nt, Artificial Sequence
  Synthetic
uuguacaauacuacuugcuaa

SEQ ID NO: 453774 - RNA, 22 nt, Artificial Sequence
  Synthetic
uuuguacaauacuacuugcuaa

SEQ ID NO: 453775 - RNA, 23 nt, Artificial Sequence
  Synthetic
uuuuguacaauacuacuugcuaa

SEQ ID NO: 453776 - RNA, 24 nt, Artificial Sequence
  Synthetic
uuuuuguacaauacuacuugcuaa

SEQ ID NO: 453777 - RNA, 18 nt, Artificial Sequence
  Synthetic
uuaacuucaucuugcuaa

SEQ ID NO: 453778 - RNA, 19 nt, Artificial Sequence
  Synthetic
uuuaacuucaucuugcuaa

SEQ ID NO: 453779 - RNA, 20 nt, Artificial Sequence
  Synthetic
uuuuaacuucaucuugcuaa

SEQ ID NO: 453780 - RNA, 21 nt, Artificial Sequence
  Synthetic
guuuuaacuucaucuugcuaa

SEQ ID NO: 453781 - RNA, 22 nt, Artificial Sequence
  Synthetic
gguuuuaacuucaucuugcuaa

SEQ ID NO: 453782 - RNA, 23 nt, Artificial Sequence
  Synthetic
ugguuuuaacuucaucuugcuaa

SEQ ID NO: 453783 - RNA, 24 nt, Artificial Sequence
  Synthetic
cugguuuuaacuucaucuugcuaa

SEQ ID NO: 453784 - RNA, 18 nt, Artificial Sequence
  Synthetic
cauuagucauguugcuaa

SEQ ID NO: 453785 - RNA, 19 nt, Artificial Sequence
  Synthetic
acauuagucauguugcuaa

SEQ ID NO: 453786 - RNA, 20 nt, Artificial Sequence
  Synthetic
aacauuagucauguugcuaa

SEQ ID NO: 453787 - RNA, 21 nt, Artificial Sequence
  Synthetic
aaacauuagucauguugcuaa

SEQ ID NO: 453788 - RNA, 22 nt, Artificial Sequence
  Synthetic
aaaacauuagucauguugcuaa

SEQ ID NO: 453789 - RNA, 23 nt, Artificial Sequence
  Synthetic
gaaaacauuagucauguugcuaa

SEQ ID NO: 453790 - RNA, 24 nt, Artificial Sequence
  Synthetic
ugaaaacauuagucauguugcuaa

SEQ ID NO: 453791 - RNA, 18 nt, Artificial Sequence
  Synthetic
aguuuccuccuuugcuaa

SEQ ID NO: 453792 - RNA, 19 nt, Artificial Sequence
  Synthetic
caguuuccuccuuugcuaa

SEQ ID NO: 453793 - RNA, 20 nt, Artificial Sequence
  Synthetic
ucaguuuccuccuuugcuaa

SEQ ID NO: 453794 - RNA, 21 nt, Artificial Sequence
  Synthetic
cucaguuuccuccuuugcuaa

SEQ ID NO: 453795 - RNA, 22 nt, Artificial Sequence
  Synthetic
ccucaguuuccuccuuugcuaa

SEQ ID NO: 453796 - RNA, 23 nt, Artificial Sequence
  Synthetic
gccucaguuuccuccuuugcuaa

SEQ ID NO: 453797 - RNA, 24 nt, Artificial Sequence
  Synthetic
ugccucaguuuccuccuuugcuaa

SEQ ID NO: 453798 - RNA, 18 nt, Artificial Sequence
  Synthetic
cucuugcagggaaucuaa

SEQ ID NO: 453799 - RNA, 19 nt, Artificial Sequence
  Synthetic
ccucuugcagggaaucuaa

SEQ ID NO: 453800 - RNA, 20 nt, Artificial Sequence
  Synthetic
accucuugcagggaaucuaa

SEQ ID NO: 453801 - RNA, 21 nt, Artificial Sequence
  Synthetic
aaccucuugcagggaaucuaa

SEQ ID NO: 453802 - RNA, 22 nt, Artificial Sequence
  Synthetic
aaaccucuugcagggaaucuaa

SEQ ID NO: 453803 - RNA, 23 nt, Artificial Sequence
  Synthetic
aaaaccucuugcagggaaucuaa

SEQ ID NO: 453804 - RNA, 24 nt, Artificial Sequence
  Synthetic
gaaaaccucuugcagggaaucuaa

SEQ ID NO: 453805 - RNA, 18 nt, Artificial Sequence
  Synthetic
uauuuuugagacaucuaa

SEQ ID NO: 453806 - RNA, 19 nt, Artificial Sequence
  Synthetic
uuauuuuugagacaucuaa

SEQ ID NO: 453807 - RNA, 20 nt, Artificial Sequence
  Synthetic
auuauuuuugagacaucuaa

SEQ ID NO: 453808 - RNA, 21 nt, Artificial Sequence
  Synthetic
gauuauuuuugagacaucuaa

SEQ ID NO: 453809 - RNA, 22 nt, Artificial Sequence
  Synthetic
agauuauuuuugagacaucuaa

SEQ ID NO: 453810 - RNA, 23 nt, Artificial Sequence
  Synthetic
gagauuauuuuugagacaucuaa

SEQ ID NO: 453811 - RNA, 24 nt, Artificial Sequence
  Synthetic
ugagauuauuuuugagacaucuaa

SEQ ID NO: 453812 - RNA, 18 nt, Artificial Sequence
  Synthetic
gguucugagugcaucuaa

SEQ ID NO: 453813 - RNA, 19 nt, Artificial Sequence
  Synthetic
agguucugagugcaucuaa

SEQ ID NO: 453814 - RNA, 20 nt, Artificial Sequence
  Synthetic
gagguucugagugcaucuaa

SEQ ID NO: 453815 - RNA, 21 nt, Artificial Sequence
  Synthetic
ugagguucugagugcaucuaa

SEQ ID NO: 453816 - RNA, 22 nt, Artificial Sequence
  Synthetic
gugagguucugagugcaucuaa

SEQ ID NO: 453817 - RNA, 23 nt, Artificial Sequence
  Synthetic
ggugagguucugagugcaucuaa

SEQ ID NO: 453818 - RNA, 24 nt, Artificial Sequence
  Synthetic
aggugagguucugagugcaucuaa

SEQ ID NO: 453819 - RNA, 18 nt, Artificial Sequence
  Synthetic
ucuuuuucugucaucuaa

SEQ ID NO: 453820 - RNA, 19 nt, Artificial Sequence
  Synthetic
cucuuuuucugucaucuaa

SEQ ID NO: 453821 - RNA, 20 nt, Artificial Sequence
  Synthetic
gcucuuuuucugucaucuaa

SEQ ID NO: 453822 - RNA, 21 nt, Artificial Sequence
  Synthetic
ugcucuuuuucugucaucuaa

SEQ ID NO: 453823 - RNA, 22 nt, Artificial Sequence
  Synthetic
uugcucuuuuucugucaucuaa

SEQ ID NO: 453824 - RNA, 23 nt, Artificial Sequence
  Synthetic
uuugcucuuuuucugucaucuaa

SEQ ID NO: 453825 - RNA, 24 nt, Artificial Sequence
  Synthetic
cuuugcucuuuuucugucaucuaa

SEQ ID NO: 453826 - RNA, 18 nt, Artificial Sequence
  Synthetic
aguguccguuucaucuaa

SEQ ID NO: 453827 - RNA, 19 nt, Artificial Sequence
  Synthetic
gaguguccguuucaucuaa

SEQ ID NO: 453828 - RNA, 20 nt, Artificial Sequence
  Synthetic
agaguguccguuucaucuaa

SEQ ID NO: 453829 - RNA, 21 nt, Artificial Sequence
  Synthetic
uagaguguccguuucaucuaa

SEQ ID NO: 453830 - RNA, 22 nt, Artificial Sequence
  Synthetic
uuagaguguccguuucaucuaa

SEQ ID NO: 453831 - RNA, 23 nt, Artificial Sequence
  Synthetic
cuuagaguguccguuucaucuaa

SEQ ID NO: 453832 - RNA, 24 nt, Artificial Sequence
  Synthetic
ccuuagaguguccguuucaucuaa

SEQ ID NO: 453833 - RNA, 18 nt, Artificial Sequence
  Synthetic
caguucuaaaggaucuaa

SEQ ID NO: 453834 - RNA, 19 nt, Artificial Sequence
  Synthetic
ucaguucuaaaggaucuaa

SEQ ID NO: 453835 - RNA, 20 nt, Artificial Sequence
  Synthetic
uucaguucuaaaggaucuaa

SEQ ID NO: 453836 - RNA, 21 nt, Artificial Sequence
  Synthetic
auucaguucuaaaggaucuaa

SEQ ID NO: 453837 - RNA, 22 nt, Artificial Sequence
  Synthetic
aauucaguucuaaaggaucuaa

SEQ ID NO: 453838 - RNA, 23 nt, Artificial Sequence
  Synthetic
gaauucaguucuaaaggaucuaa

SEQ ID NO: 453839 - RNA, 24 nt, Artificial Sequence
  Synthetic
ggaauucaguucuaaaggaucuaa

SEQ ID NO: 453840 - RNA, 18 nt, Artificial Sequence
  Synthetic
auugcuugcuauaucuaa

SEQ ID NO: 453841 - RNA, 19 nt, Artificial Sequence
  Synthetic
cauugcuugcuauaucuaa

SEQ ID NO: 453842 - RNA, 20 nt, Artificial Sequence
  Synthetic
acauugcuugcuauaucuaa

SEQ ID NO: 453843 - RNA, 21 nt, Artificial Sequence
  Synthetic
aacauugcuugcuauaucuaa

SEQ ID NO: 453844 - RNA, 22 nt, Artificial Sequence
  Synthetic
gaacauugcuugcuauaucuaa

SEQ ID NO: 453845 - RNA, 23 nt, Artificial Sequence
  Synthetic
agaacauugcuugcuauaucuaa

SEQ ID NO: 453846 - RNA, 24 nt, Artificial Sequence
  Synthetic
aagaacauugcuugcuauaucuaa

SEQ ID NO: 453847 - RNA, 18 nt, Artificial Sequence
  Synthetic
auaaaauuguauaucuaa

SEQ ID NO: 453848 - RNA, 19 nt, Artificial Sequence
  Synthetic
uauaaaauuguauaucuaa

SEQ ID NO: 453849 - RNA, 20 nt, Artificial Sequence
  Synthetic
auauaaaauuguauaucuaa

SEQ ID NO: 453850 - RNA, 21 nt, Artificial Sequence
  Synthetic
aauauaaaauuguauaucuaa

SEQ ID NO: 453851 - RNA, 22 nt, Artificial Sequence
  Synthetic
aaauauaaaauuguauaucuaa

SEQ ID NO: 453852 - RNA, 23 nt, Artificial Sequence
  Synthetic
caaauauaaaauuguauaucuaa

SEQ ID NO: 453853 - RNA, 24 nt, Artificial Sequence
  Synthetic
gcaaauauaaaauuguauaucuaa

SEQ ID NO: 453854 - RNA, 18 nt, Artificial Sequence
  Synthetic
cuuaugucuccuaucuaa

SEQ ID NO: 453855 - RNA, 19 nt, Artificial Sequence
  Synthetic
acuuaugucuccuaucuaa

SEQ ID NO: 453856 - RNA, 20 nt, Artificial Sequence
  Synthetic
aacuuaugucuccuaucuaa

SEQ ID NO: 453857 - RNA, 21 nt, Artificial Sequence
  Synthetic
gaacuuaugucuccuaucuaa

SEQ ID NO: 453858 - RNA, 22 nt, Artificial Sequence
  Synthetic
ugaacuuaugucuccuaucuaa

SEQ ID NO: 453859 - RNA, 23 nt, Artificial Sequence
  Synthetic
augaacuuaugucuccuaucuaa

SEQ ID NO: 453860 - RNA, 24 nt, Artificial Sequence
  Synthetic
caugaacuuaugucuccuaucuaa

SEQ ID NO: 453861 - RNA, 18 nt, Artificial Sequence
  Synthetic
gcugcauugauuaucuaa

SEQ ID NO: 453862 - RNA, 19 nt, Artificial Sequence
  Synthetic
ugcugcauugauuaucuaa

SEQ ID NO: 453863 - RNA, 20 nt, Artificial Sequence
  Synthetic
augcugcauugauuaucuaa

SEQ ID NO: 453864 - RNA, 21 nt, Artificial Sequence
  Synthetic
gaugcugcauugauuaucuaa

SEQ ID NO: 453865 - RNA, 22 nt, Artificial Sequence
  Synthetic
ugaugcugcauugauuaucuaa

SEQ ID NO: 453866 - RNA, 23 nt, Artificial Sequence
  Synthetic
gugaugcugcauugauuaucuaa

SEQ ID NO: 453867 - RNA, 24 nt, Artificial Sequence
  Synthetic
ggugaugcugcauugauuaucuaa

SEQ ID NO: 453868 - RNA, 18 nt, Artificial Sequence
  Synthetic
ggauggaaaaaacucuaa

SEQ ID NO: 453869 - RNA, 19 nt, Artificial Sequence
  Synthetic
gggauggaaaaaacucuaa

SEQ ID NO: 453870 - RNA, 20 nt, Artificial Sequence
  Synthetic
agggauggaaaaaacucuaa

SEQ ID NO: 453871 - RNA, 21 nt, Artificial Sequence
  Synthetic
uagggauggaaaaaacucuaa

SEQ ID NO: 453872 - RNA, 22 nt, Artificial Sequence
  Synthetic
cuagggauggaaaaaacucuaa

SEQ ID NO: 453873 - RNA, 23 nt, Artificial Sequence
  Synthetic
ccuagggauggaaaaaacucuaa

SEQ ID NO: 453874 - RNA, 24 nt, Artificial Sequence
  Synthetic
accuagggauggaaaaaacucuaa

SEQ ID NO: 453875 - RNA, 18 nt, Artificial Sequence
  Synthetic
aacugugggcaacucuaa

SEQ ID NO: 453876 - RNA, 19 nt, Artificial Sequence
  Synthetic
uaacugugggcaacucuaa

SEQ ID NO: 453877 - RNA, 20 nt, Artificial Sequence
  Synthetic
cuaacugugggcaacucuaa

SEQ ID NO: 453878 - RNA, 21 nt, Artificial Sequence
  Synthetic
acuaacugugggcaacucuaa

SEQ ID NO: 453879 - RNA, 22 nt, Artificial Sequence
  Synthetic
gacuaacugugggcaacucuaa

SEQ ID NO: 453880 - RNA, 23 nt, Artificial Sequence
  Synthetic
ugacuaacugugggcaacucuaa

SEQ ID NO: 453881 - RNA, 24 nt, Artificial Sequence
  Synthetic
augacuaacugugggcaacucuaa

SEQ ID NO: 453882 - RNA, 18 nt, Artificial Sequence
  Synthetic
ucuuccuuuagacucuaa

SEQ ID NO: 453883 - RNA, 19 nt, Artificial Sequence
  Synthetic
cucuuccuuuagacucuaa

SEQ ID NO: 453884 - RNA, 20 nt, Artificial Sequence
  Synthetic
ucucuuccuuuagacucuaa

SEQ ID NO: 453885 - RNA, 21 nt, Artificial Sequence
  Synthetic
uucucuuccuuuagacucuaa

SEQ ID NO: 453886 - RNA, 22 nt, Artificial Sequence
  Synthetic
guucucuuccuuuagacucuaa

SEQ ID NO: 453887 - RNA, 23 nt, Artificial Sequence
  Synthetic
uguucucuuccuuuagacucuaa

SEQ ID NO: 453888 - RNA, 24 nt, Artificial Sequence
  Synthetic
uuguucucuuccuuuagacucuaa

SEQ ID NO: 453889 - RNA, 18 nt, Artificial Sequence
  Synthetic
ggacuuuggggacucuaa

SEQ ID NO: 453890 - RNA, 19 nt, Artificial Sequence
  Synthetic
uggacuuuggggacucuaa

SEQ ID NO: 453891 - RNA, 20 nt, Artificial Sequence
  Synthetic
auggacuuuggggacucuaa

SEQ ID NO: 453892 - RNA, 21 nt, Artificial Sequence
  Synthetic
aauggacuuuggggacucuaa

SEQ ID NO: 453893 - RNA, 22 nt, Artificial Sequence
  Synthetic
caauggacuuuggggacucuaa

SEQ ID NO: 453894 - RNA, 23 nt, Artificial Sequence
  Synthetic
acaauggacuuuggggacucuaa

SEQ ID NO: 453895 - RNA, 24 nt, Artificial Sequence
  Synthetic
uacaauggacuuuggggacucuaa

SEQ ID NO: 453896 - RNA, 18 nt, Artificial Sequence
  Synthetic
uuuuaaacuaaccucuaa

SEQ ID NO: 453897 - RNA, 19 nt, Artificial Sequence
  Synthetic
guuuuaaacuaaccucuaa

SEQ ID NO: 453898 - RNA, 20 nt, Artificial Sequence
  Synthetic
aguuuuaaacuaaccucuaa

SEQ ID NO: 453899 - RNA, 21 nt, Artificial Sequence
  Synthetic
aaguuuuaaacuaaccucuaa

SEQ ID NO: 453900 - RNA, 22 nt, Artificial Sequence
  Synthetic
aaaguuuuaaacuaaccucuaa

SEQ ID NO: 453901 - RNA, 23 nt, Artificial Sequence
  Synthetic
gaaaguuuuaaacuaaccucuaa

SEQ ID NO: 453902 - RNA, 24 nt, Artificial Sequence
  Synthetic
agaaaguuuuaaacuaaccucuaa

SEQ ID NO: 453903 - RNA, 18 nt, Artificial Sequence
  Synthetic
aaucuugacguccucuaa

SEQ ID NO: 453904 - RNA, 19 nt, Artificial Sequence
  Synthetic
caaucuugacguccucuaa

SEQ ID NO: 453905 - RNA, 20 nt, Artificial Sequence
  Synthetic
ccaaucuugacguccucuaa

SEQ ID NO: 453906 - RNA, 21 nt, Artificial Sequence
  Synthetic
accaaucuugacguccucuaa

SEQ ID NO: 453907 - RNA, 22 nt, Artificial Sequence
  Synthetic
gaccaaucuugacguccucuaa

SEQ ID NO: 453908 - RNA, 23 nt, Artificial Sequence
  Synthetic
agaccaaucuugacguccucuaa

SEQ ID NO: 453909 - RNA, 24 nt, Artificial Sequence
  Synthetic
aagaccaaucuugacguccucuaa

SEQ ID NO: 453910 - RNA, 18 nt, Artificial Sequence
  Synthetic
aagccuggugagcucuaa

SEQ ID NO: 453911 - RNA, 19 nt, Artificial Sequence
  Synthetic
aaagccuggugagcucuaa

SEQ ID NO: 453912 - RNA, 20 nt, Artificial Sequence
  Synthetic
gaaagccuggugagcucuaa

SEQ ID NO: 453913 - RNA, 21 nt, Artificial Sequence
  Synthetic
ugaaagccuggugagcucuaa

SEQ ID NO: 453914 - RNA, 22 nt, Artificial Sequence
  Synthetic
augaaagccuggugagcucuaa

SEQ ID NO: 453915 - RNA, 23 nt, Artificial Sequence
  Synthetic
gaugaaagccuggugagcucuaa

SEQ ID NO: 453916 - RNA, 24 nt, Artificial Sequence
  Synthetic
ugaugaaagccuggugagcucuaa

SEQ ID NO: 453917 - RNA, 18 nt, Artificial Sequence
  Synthetic
agcaccuugcugcucuaa

SEQ ID NO: 453918 - RNA, 19 nt, Artificial Sequence
  Synthetic
gagcaccuugcugcucuaa

SEQ ID NO: 453919 - RNA, 20 nt, Artificial Sequence
  Synthetic
agagcaccuugcugcucuaa

SEQ ID NO: 453920 - RNA, 21 nt, Artificial Sequence
  Synthetic
aagagcaccuugcugcucuaa

SEQ ID NO: 453921 - RNA, 22 nt, Artificial Sequence
  Synthetic
aaagagcaccuugcugcucuaa

SEQ ID NO: 453922 - RNA, 23 nt, Artificial Sequence
  Synthetic
aaaagagcaccuugcugcucuaa

SEQ ID NO: 453923 - RNA, 24 nt, Artificial Sequence
  Synthetic
uaaaagagcaccuugcugcucuaa

SEQ ID NO: 453924 - RNA, 18 nt, Artificial Sequence
  Synthetic
uuagaccuguaucucuaa

SEQ ID NO: 453925 - RNA, 19 nt, Artificial Sequence
  Synthetic
cuuagaccuguaucucuaa

SEQ ID NO: 453926 - RNA, 20 nt, Artificial Sequence
  Synthetic
ucuuagaccuguaucucuaa

SEQ ID NO: 453927 - RNA, 21 nt, Artificial Sequence
  Synthetic
uucuuagaccuguaucucuaa

SEQ ID NO: 453928 - RNA, 22 nt, Artificial Sequence
  Synthetic
uuucuuagaccuguaucucuaa

SEQ ID NO: 453929 - RNA, 23 nt, Artificial Sequence
  Synthetic
cuuucuuagaccuguaucucuaa

SEQ ID NO: 453930 - RNA, 24 nt, Artificial Sequence
  Synthetic
ucuuucuuagaccuguaucucuaa

SEQ ID NO: 453931 - RNA, 18 nt, Artificial Sequence
  Synthetic
augaauacuuaucucuaa

SEQ ID NO: 453932 - RNA, 19 nt, Artificial Sequence
  Synthetic
uaugaauacuuaucucuaa

SEQ ID NO: 453933 - RNA, 20 nt, Artificial Sequence
  Synthetic
auaugaauacuuaucucuaa

SEQ ID NO: 453934 - RNA, 21 nt, Artificial Sequence
  Synthetic
uauaugaauacuuaucucuaa

SEQ ID NO: 453935 - RNA, 22 nt, Artificial Sequence
  Synthetic
auauaugaauacuuaucucuaa

SEQ ID NO: 453936 - RNA, 23 nt, Artificial Sequence
  Synthetic
uauauaugaauacuuaucucuaa

SEQ ID NO: 453937 - RNA, 24 nt, Artificial Sequence
  Synthetic
auauauaugaauacuuaucucuaa

SEQ ID NO: 453938 - RNA, 18 nt, Artificial Sequence
  Synthetic
ccagucuuacaagucuaa

SEQ ID NO: 453939 - RNA, 19 nt, Artificial Sequence
  Synthetic
cccagucuuacaagucuaa

SEQ ID NO: 453940 - RNA, 20 nt, Artificial Sequence
  Synthetic
ucccagucuuacaagucuaa

SEQ ID NO: 453941 - RNA, 21 nt, Artificial Sequence
  Synthetic
uucccagucuuacaagucuaa

SEQ ID NO: 453942 - RNA, 22 nt, Artificial Sequence
  Synthetic
cuucccagucuuacaagucuaa

SEQ ID NO: 453943 - RNA, 23 nt, Artificial Sequence
  Synthetic
ucuucccagucuuacaagucuaa

SEQ ID NO: 453944 - RNA, 24 nt, Artificial Sequence
  Synthetic
uucuucccagucuuacaagucuaa

SEQ ID NO: 453945 - RNA, 18 nt, Artificial Sequence
  Synthetic
ccucaaagcaaggucuaa

SEQ ID NO: 453946 - RNA, 19 nt, Artificial Sequence
  Synthetic
accucaaagcaaggucuaa

SEQ ID NO: 453947 - RNA, 20 nt, Artificial Sequence
  Synthetic
gaccucaaagcaaggucuaa

SEQ ID NO: 453948 - RNA, 21 nt, Artificial Sequence
  Synthetic
ggaccucaaagcaaggucuaa

SEQ ID NO: 453949 - RNA, 22 nt, Artificial Sequence
  Synthetic
gggaccucaaagcaaggucuaa

SEQ ID NO: 453950 - RNA, 23 nt, Artificial Sequence
  Synthetic
agggaccucaaagcaaggucuaa

SEQ ID NO: 453951 - RNA, 24 nt, Artificial Sequence
  Synthetic
aagggaccucaaagcaaggucuaa

SEQ ID NO: 453952 - RNA, 18 nt, Artificial Sequence
  Synthetic
auuugugggagugucuaa

SEQ ID NO: 453953 - RNA, 19 nt, Artificial Sequence
  Synthetic
cauuugugggagugucuaa

SEQ ID NO: 453954 - RNA, 20 nt, Artificial Sequence
  Synthetic
acauuugugggagugucuaa

SEQ ID NO: 453955 - RNA, 21 nt, Artificial Sequence
  Synthetic
gacauuugugggagugucuaa

SEQ ID NO: 453956 - RNA, 22 nt, Artificial Sequence
  Synthetic
ugacauuugugggagugucuaa

SEQ ID NO: 453957 - RNA, 23 nt, Artificial Sequence
  Synthetic
uugacauuugugggagugucuaa

SEQ ID NO: 453958 - RNA, 24 nt, Artificial Sequence
  Synthetic
auugacauuugugggagugucuaa

SEQ ID NO: 453959 - RNA, 18 nt, Artificial Sequence
  Synthetic
aauaucagacuugucuaa

SEQ ID NO: 453960 - RNA, 19 nt, Artificial Sequence
  Synthetic
caauaucagacuugucuaa

SEQ ID NO: 453961 - RNA, 20 nt, Artificial Sequence
  Synthetic
gcaauaucagacuugucuaa

SEQ ID NO: 453962 - RNA, 21 nt, Artificial Sequence
  Synthetic
agcaauaucagacuugucuaa

SEQ ID NO: 453963 - RNA, 22 nt, Artificial Sequence
  Synthetic
aagcaauaucagacuugucuaa

SEQ ID NO: 453964 - RNA, 23 nt, Artificial Sequence
  Synthetic
uaagcaauaucagacuugucuaa

SEQ ID NO: 453965 - RNA, 24 nt, Artificial Sequence
  Synthetic
auaagcaauaucagacuugucuaa

SEQ ID NO: 453966 - RNA, 18 nt, Artificial Sequence
  Synthetic
aaagccuauuuugucuaa

SEQ ID NO: 453967 - RNA, 19 nt, Artificial Sequence
  Synthetic
uaaagccuauuuugucuaa

SEQ ID NO: 453968 - RNA, 20 nt, Artificial Sequence
  Synthetic
uuaaagccuauuuugucuaa

SEQ ID NO: 453969 - RNA, 21 nt, Artificial Sequence
  Synthetic
uuuaaagccuauuuugucuaa

SEQ ID NO: 453970 - RNA, 22 nt, Artificial Sequence
  Synthetic
uuuuaaagccuauuuugucuaa

SEQ ID NO: 453971 - RNA, 23 nt, Artificial Sequence
  Synthetic
uuuuuaaagccuauuuugucuaa

SEQ ID NO: 453972 - RNA, 24 nt, Artificial Sequence
  Synthetic
auuuuuaaagccuauuuugucuaa

SEQ ID NO: 453973 - RNA, 18 nt, Artificial Sequence
  Synthetic
acauaauuaacauucuaa

SEQ ID NO: 453974 - RNA, 19 nt, Artificial Sequence
  Synthetic
aacauaauuaacauucuaa

SEQ ID NO: 453975 - RNA, 20 nt, Artificial Sequence
  Synthetic
aaacauaauuaacauucuaa

SEQ ID NO: 453976 - RNA, 21 nt, Artificial Sequence
  Synthetic
caaacauaauuaacauucuaa

SEQ ID NO: 453977 - RNA, 22 nt, Artificial Sequence
  Synthetic
ccaaacauaauuaacauucuaa

SEQ ID NO: 453978 - RNA, 23 nt, Artificial Sequence
  Synthetic
uccaaacauaauuaacauucuaa

SEQ ID NO: 453979 - RNA, 24 nt, Artificial Sequence
  Synthetic
auccaaacauaauuaacauucuaa

SEQ ID NO: 453980 - RNA, 18 nt, Artificial Sequence
  Synthetic
uuuuucagaucauucuaa

SEQ ID NO: 453981 - RNA, 19 nt, Artificial Sequence
  Synthetic
auuuuucagaucauucuaa

SEQ ID NO: 453982 - RNA, 20 nt, Artificial Sequence
  Synthetic
cauuuuucagaucauucuaa

SEQ ID NO: 453983 - RNA, 21 nt, Artificial Sequence
  Synthetic
acauuuuucagaucauucuaa

SEQ ID NO: 453984 - RNA, 22 nt, Artificial Sequence
  Synthetic
aacauuuuucagaucauucuaa

SEQ ID NO: 453985 - RNA, 23 nt, Artificial Sequence
  Synthetic
aaacauuuuucagaucauucuaa

SEQ ID NO: 453986 - RNA, 24 nt, Artificial Sequence
  Synthetic
aaaacauuuuucagaucauucuaa

SEQ ID NO: 453987 - RNA, 18 nt, Artificial Sequence
  Synthetic
aaaauauguucauucuaa

SEQ ID NO: 453988 - RNA, 19 nt, Artificial Sequence
  Synthetic
caaaauauguucauucuaa

SEQ ID NO: 453989 - RNA, 20 nt, Artificial Sequence
  Synthetic
ccaaaauauguucauucuaa

SEQ ID NO: 453990 - RNA, 21 nt, Artificial Sequence
  Synthetic
cccaaaauauguucauucuaa

SEQ ID NO: 453991 - RNA, 22 nt, Artificial Sequence
  Synthetic
acccaaaauauguucauucuaa

SEQ ID NO: 453992 - RNA, 23 nt, Artificial Sequence
  Synthetic
uacccaaaauauguucauucuaa

SEQ ID NO: 453993 - RNA, 24 nt, Artificial Sequence
  Synthetic
guacccaaaauauguucauucuaa

SEQ ID NO: 453994 - RNA, 18 nt, Artificial Sequence
  Synthetic
uguuguucgugauucuaa

SEQ ID NO: 453995 - RNA, 19 nt, Artificial Sequence
  Synthetic
uuguuguucgugauucuaa

SEQ ID NO: 453996 - RNA, 20 nt, Artificial Sequence
  Synthetic
guuguuguucgugauucuaa

SEQ ID NO: 453997 - RNA, 21 nt, Artificial Sequence
  Synthetic
uguuguuguucgugauucuaa

SEQ ID NO: 453998 - RNA, 22 nt, Artificial Sequence
  Synthetic
uuguuguuguucgugauucuaa

SEQ ID NO: 453999 - RNA, 23 nt, Artificial Sequence
  Synthetic
guuguuguuguucgugauucuaa

SEQ ID NO: 454000 - RNA, 24 nt, Artificial Sequence
  Synthetic
uguuguuguuguucgugauucuaa

SEQ ID NO: 454001 - RNA, 18 nt, Artificial Sequence
  Synthetic
guaugcugaauauucuaa

SEQ ID NO: 454002 - RNA, 19 nt, Artificial Sequence
  Synthetic
aguaugcugaauauucuaa

SEQ ID NO: 454003 - RNA, 20 nt, Artificial Sequence
  Synthetic
aaguaugcugaauauucuaa

SEQ ID NO: 454004 - RNA, 21 nt, Artificial Sequence
  Synthetic
aaaguaugcugaauauucuaa

SEQ ID NO: 454005 - RNA, 22 nt, Artificial Sequence
  Synthetic
aaaaguaugcugaauauucuaa

SEQ ID NO: 454006 - RNA, 23 nt, Artificial Sequence
  Synthetic
uaaaaguaugcugaauauucuaa

SEQ ID NO: 454007 - RNA, 24 nt, Artificial Sequence
  Synthetic
uuaaaaguaugcugaauauucuaa

SEQ ID NO: 454008 - RNA, 18 nt, Artificial Sequence
  Synthetic
ucagaauuuauauucuaa

SEQ ID NO: 454009 - RNA, 19 nt, Artificial Sequence
  Synthetic
uucagaauuuauauucuaa

SEQ ID NO: 454010 - RNA, 20 nt, Artificial Sequence
  Synthetic
auucagaauuuauauucuaa

SEQ ID NO: 454011 - RNA, 21 nt, Artificial Sequence
  Synthetic
aauucagaauuuauauucuaa

SEQ ID NO: 454012 - RNA, 22 nt, Artificial Sequence
  Synthetic
gaauucagaauuuauauucuaa

SEQ ID NO: 454013 - RNA, 23 nt, Artificial Sequence
  Synthetic
ggaauucagaauuuauauucuaa

SEQ ID NO: 454014 - RNA, 24 nt, Artificial Sequence
  Synthetic
gggaauucagaauuuauauucuaa

SEQ ID NO: 454015 - RNA, 18 nt, Artificial Sequence
  Synthetic
uacuuagcuuuauucuaa

SEQ ID NO: 454016 - RNA, 19 nt, Artificial Sequence
  Synthetic
uuacuuagcuuuauucuaa

SEQ ID NO: 454017 - RNA, 20 nt, Artificial Sequence
  Synthetic
uuuacuuagcuuuauucuaa

SEQ ID NO: 454018 - RNA, 21 nt, Artificial Sequence
  Synthetic
uuuuacuuagcuuuauucuaa

SEQ ID NO: 454019 - RNA, 22 nt, Artificial Sequence
  Synthetic
uuuuuacuuagcuuuauucuaa

SEQ ID NO: 454020 - RNA, 23 nt, Artificial Sequence
  Synthetic
cuuuuuacuuagcuuuauucuaa

SEQ ID NO: 454021 - RNA, 24 nt, Artificial Sequence
  Synthetic
acuuuuuacuuagcuuuauucuaa

SEQ ID NO: 454022 - RNA, 18 nt, Artificial Sequence
  Synthetic
cuugagagacaguucuaa

SEQ ID NO: 454023 - RNA, 19 nt, Artificial Sequence
  Synthetic
acuugagagacaguucuaa

SEQ ID NO: 454024 - RNA, 20 nt, Artificial Sequence
  Synthetic
gacuugagagacaguucuaa

SEQ ID NO: 454025 - RNA, 21 nt, Artificial Sequence
  Synthetic
agacuugagagacaguucuaa

SEQ ID NO: 454026 - RNA, 22 nt, Artificial Sequence
  Synthetic
aagacuugagagacaguucuaa

SEQ ID NO: 454027 - RNA, 23 nt, Artificial Sequence
  Synthetic
uaagacuugagagacaguucuaa

SEQ ID NO: 454028 - RNA, 24 nt, Artificial Sequence
  Synthetic
uuaagacuugagagacaguucuaa

SEQ ID NO: 454029 - RNA, 18 nt, Artificial Sequence
  Synthetic
aucuuguccagguucuaa

SEQ ID NO: 454030 - RNA, 19 nt, Artificial Sequence
  Synthetic
gaucuuguccagguucuaa

SEQ ID NO: 454031 - RNA, 20 nt, Artificial Sequence
  Synthetic
ggaucuuguccagguucuaa

SEQ ID NO: 454032 - RNA, 21 nt, Artificial Sequence
  Synthetic
uggaucuuguccagguucuaa

SEQ ID NO: 454033 - RNA, 22 nt, Artificial Sequence
  Synthetic
guggaucuuguccagguucuaa

SEQ ID NO: 454034 - RNA, 23 nt, Artificial Sequence
  Synthetic
uguggaucuuguccagguucuaa

SEQ ID NO: 454035 - RNA, 24 nt, Artificial Sequence
  Synthetic
auguggaucuuguccagguucuaa

SEQ ID NO: 454036 - RNA, 18 nt, Artificial Sequence
  Synthetic
guuucugaaugguucuaa

SEQ ID NO: 454037 - RNA, 19 nt, Artificial Sequence
  Synthetic
uguuucugaaugguucuaa

SEQ ID NO: 454038 - RNA, 20 nt, Artificial Sequence
  Synthetic
auguuucugaaugguucuaa

SEQ ID NO: 454039 - RNA, 21 nt, Artificial Sequence
  Synthetic
gauguuucugaaugguucuaa

SEQ ID NO: 454040 - RNA, 22 nt, Artificial Sequence
  Synthetic
ugauguuucugaaugguucuaa

SEQ ID NO: 454041 - RNA, 23 nt, Artificial Sequence
  Synthetic
uugauguuucugaaugguucuaa

SEQ ID NO: 454042 - RNA, 24 nt, Artificial Sequence
  Synthetic
auugauguuucugaaugguucuaa

SEQ ID NO: 454043 - RNA, 18 nt, Artificial Sequence
  Synthetic
aaaagguagacuuucuaa

SEQ ID NO: 454044 - RNA, 19 nt, Artificial Sequence
  Synthetic
aaaaagguagacuuucuaa

SEQ ID NO: 454045 - RNA, 20 nt, Artificial Sequence
  Synthetic
aaaaaagguagacuuucuaa

SEQ ID NO: 454046 - RNA, 21 nt, Artificial Sequence
  Synthetic
gaaaaaagguagacuuucuaa

SEQ ID NO: 454047 - RNA, 22 nt, Artificial Sequence
  Synthetic
ggaaaaaagguagacuuucuaa

SEQ ID NO: 454048 - RNA, 23 nt, Artificial Sequence
  Synthetic
aggaaaaaagguagacuuucuaa

SEQ ID NO: 454049 - RNA, 24 nt, Artificial Sequence
  Synthetic
aaggaaaaaagguagacuuucuaa

SEQ ID NO: 454050 - RNA, 18 nt, Artificial Sequence
  Synthetic
uaaaauccuauuuucuaa

SEQ ID NO: 454051 - RNA, 19 nt, Artificial Sequence
  Synthetic
auaaaauccuauuuucuaa

SEQ ID NO: 454052 - RNA, 20 nt, Artificial Sequence
  Synthetic
uauaaaauccuauuuucuaa

SEQ ID NO: 454053 - RNA, 21 nt, Artificial Sequence
  Synthetic
guauaaaauccuauuuucuaa

SEQ ID NO: 454054 - RNA, 22 nt, Artificial Sequence
  Synthetic
gguauaaaauccuauuuucuaa

SEQ ID NO: 454055 - RNA, 23 nt, Artificial Sequence
  Synthetic
ugguauaaaauccuauuuucuaa

SEQ ID NO: 454056 - RNA, 24 nt, Artificial Sequence
  Synthetic
uugguauaaaauccuauuuucuaa

SEQ ID NO: 454057 - RNA, 18 nt, Artificial Sequence
  Synthetic
gcaaucuguguuuucuaa

SEQ ID NO: 454058 - RNA, 19 nt, Artificial Sequence
  Synthetic
ggcaaucuguguuuucuaa

SEQ ID NO: 454059 - RNA, 20 nt, Artificial Sequence
  Synthetic
aggcaaucuguguuuucuaa

SEQ ID NO: 454060 - RNA, 21 nt, Artificial Sequence
  Synthetic
gaggcaaucuguguuuucuaa

SEQ ID NO: 454061 - RNA, 22 nt, Artificial Sequence
  Synthetic
ggaggcaaucuguguuuucuaa

SEQ ID NO: 454062 - RNA, 23 nt, Artificial Sequence
  Synthetic
aggaggcaaucuguguuuucuaa

SEQ ID NO: 454063 - RNA, 24 nt, Artificial Sequence
  Synthetic
uaggaggcaaucuguguuuucuaa

SEQ ID NO: 454064 - RNA, 18 nt, Artificial Sequence
  Synthetic
aaaacucaauuuuucuaa

SEQ ID NO: 454065 - RNA, 19 nt, Artificial Sequence
  Synthetic
aaaaacucaauuuuucuaa

SEQ ID NO: 454066 - RNA, 20 nt, Artificial Sequence
  Synthetic
gaaaaacucaauuuuucuaa

SEQ ID NO: 454067 - RNA, 21 nt, Artificial Sequence
  Synthetic
ugaaaaacucaauuuuucuaa

SEQ ID NO: 454068 - RNA, 22 nt, Artificial Sequence
  Synthetic
uugaaaaacucaauuuuucuaa

SEQ ID NO: 454069 - RNA, 23 nt, Artificial Sequence
  Synthetic
guugaaaaacucaauuuuucuaa

SEQ ID NO: 454070 - RNA, 24 nt, Artificial Sequence
  Synthetic
uguugaaaaacucaauuuuucuaa

SEQ ID NO: 454071 - RNA, 18 nt, Artificial Sequence
  Synthetic
gggggucauuuuuucuaa

SEQ ID NO: 454072 - RNA, 19 nt, Artificial Sequence
  Synthetic
ugggggucauuuuuucuaa

SEQ ID NO: 454073 - RNA, 20 nt, Artificial Sequence
  Synthetic
augggggucauuuuuucuaa

SEQ ID NO: 454074 - RNA, 21 nt, Artificial Sequence
  Synthetic
gaugggggucauuuuuucuaa

SEQ ID NO: 454075 - RNA, 22 nt, Artificial Sequence
  Synthetic
agaugggggucauuuuuucuaa

SEQ ID NO: 454076 - RNA, 23 nt, Artificial Sequence
  Synthetic
aagaugggggucauuuuuucuaa

SEQ ID NO: 454077 - RNA, 24 nt, Artificial Sequence
  Synthetic
aaagaugggggucauuuuuucuaa

SEQ ID NO: 454078 - RNA, 18 nt, Artificial Sequence
  Synthetic
agaguaggaaaaaaguaa

SEQ ID NO: 454079 - RNA, 19 nt, Artificial Sequence
  Synthetic
aagaguaggaaaaaaguaa

SEQ ID NO: 454080 - RNA, 20 nt, Artificial Sequence
  Synthetic
uaagaguaggaaaaaaguaa

SEQ ID NO: 454081 - RNA, 21 nt, Artificial Sequence
  Synthetic
uuaagaguaggaaaaaaguaa

SEQ ID NO: 454082 - RNA, 22 nt, Artificial Sequence
  Synthetic
uuuaagaguaggaaaaaaguaa

SEQ ID NO: 454083 - RNA, 23 nt, Artificial Sequence
  Synthetic
uuuuaagaguaggaaaaaaguaa

SEQ ID NO: 454084 - RNA, 24 nt, Artificial Sequence
  Synthetic
guuuuaagaguaggaaaaaaguaa

SEQ ID NO: 454085 - RNA, 18 nt, Artificial Sequence
  Synthetic
agaaaaaacaaaaaguaa

SEQ ID NO: 454086 - RNA, 19 nt, Artificial Sequence
  Synthetic
uagaaaaaacaaaaaguaa

SEQ ID NO: 454087 - RNA, 20 nt, Artificial Sequence
  Synthetic
guagaaaaaacaaaaaguaa

SEQ ID NO: 454088 - RNA, 21 nt, Artificial Sequence
  Synthetic
aguagaaaaaacaaaaaguaa

SEQ ID NO: 454089 - RNA, 22 nt, Artificial Sequence
  Synthetic
gaguagaaaaaacaaaaaguaa

SEQ ID NO: 454090 - RNA, 23 nt, Artificial Sequence
  Synthetic
ugaguagaaaaaacaaaaaguaa

SEQ ID NO: 454091 - RNA, 24 nt, Artificial Sequence
  Synthetic
uugaguagaaaaaacaaaaaguaa

SEQ ID NO: 454092 - RNA, 18 nt, Artificial Sequence
  Synthetic
aaaaacaggaaaaaguaa

SEQ ID NO: 454093 - RNA, 19 nt, Artificial Sequence
  Synthetic
caaaaacaggaaaaaguaa

SEQ ID NO: 454094 - RNA, 20 nt, Artificial Sequence
  Synthetic
acaaaaacaggaaaaaguaa

SEQ ID NO: 454095 - RNA, 21 nt, Artificial Sequence
  Synthetic
cacaaaaacaggaaaaaguaa

SEQ ID NO: 454096 - RNA, 22 nt, Artificial Sequence
  Synthetic
acacaaaaacaggaaaaaguaa

SEQ ID NO: 454097 - RNA, 23 nt, Artificial Sequence
  Synthetic
uacacaaaaacaggaaaaaguaa

SEQ ID NO: 454098 - RNA, 24 nt, Artificial Sequence
  Synthetic
auacacaaaaacaggaaaaaguaa

SEQ ID NO: 454099 - RNA, 18 nt, Artificial Sequence
  Synthetic
cagaauuggaaaaaguaa

SEQ ID NO: 454100 - RNA, 19 nt, Artificial Sequence
  Synthetic
gcagaauuggaaaaaguaa

SEQ ID NO: 454101 - RNA, 20 nt, Artificial Sequence
  Synthetic
cgcagaauuggaaaaaguaa

SEQ ID NO: 454102 - RNA, 21 nt, Artificial Sequence
  Synthetic
acgcagaauuggaaaaaguaa

SEQ ID NO: 454103 - RNA, 22 nt, Artificial Sequence
  Synthetic
cacgcagaauuggaaaaaguaa

SEQ ID NO: 454104 - RNA, 23 nt, Artificial Sequence
  Synthetic
acacgcagaauuggaaaaaguaa

SEQ ID NO: 454105 - RNA, 24 nt, Artificial Sequence
  Synthetic
gacacgcagaauuggaaaaaguaa

SEQ ID NO: 454106 - RNA, 18 nt, Artificial Sequence
  Synthetic
aaguagacagaaaaguaa

SEQ ID NO: 454107 - RNA, 19 nt, Artificial Sequence
  Synthetic
aaaguagacagaaaaguaa

SEQ ID NO: 454108 - RNA, 20 nt, Artificial Sequence
  Synthetic
aaaaguagacagaaaaguaa

SEQ ID NO: 454109 - RNA, 21 nt, Artificial Sequence
  Synthetic
gaaaaguagacagaaaaguaa

SEQ ID NO: 454110 - RNA, 22 nt, Artificial Sequence
  Synthetic
agaaaaguagacagaaaaguaa

SEQ ID NO: 454111 - RNA, 23 nt, Artificial Sequence
  Synthetic
gagaaaaguagacagaaaaguaa

SEQ ID NO: 454112 - RNA, 24 nt, Artificial Sequence
  Synthetic
ugagaaaaguagacagaaaaguaa

SEQ ID NO: 454113 - RNA, 18 nt, Artificial Sequence
  Synthetic
uuguaaauagaaaaguaa

SEQ ID NO: 454114 - RNA, 19 nt, Artificial Sequence
  Synthetic
uuuguaaauagaaaaguaa

SEQ ID NO: 454115 - RNA, 20 nt, Artificial Sequence
  Synthetic
uuuuguaaauagaaaaguaa

SEQ ID NO: 454116 - RNA, 21 nt, Artificial Sequence
  Synthetic
uuuuuguaaauagaaaaguaa

SEQ ID NO: 454117 - RNA, 22 nt, Artificial Sequence
  Synthetic
auuuuuguaaauagaaaaguaa

SEQ ID NO: 454118 - RNA, 23 nt, Artificial Sequence
  Synthetic
cauuuuuguaaauagaaaaguaa

SEQ ID NO: 454119 - RNA, 24 nt, Artificial Sequence
  Synthetic
ccauuuuuguaaauagaaaaguaa

SEQ ID NO: 454120 - RNA, 18 nt, Artificial Sequence
  Synthetic
uguaaaauugaaaaguaa

SEQ ID NO: 454121 - RNA, 19 nt, Artificial Sequence
  Synthetic
auguaaaauugaaaaguaa

SEQ ID NO: 454122 - RNA, 20 nt, Artificial Sequence
  Synthetic
gauguaaaauugaaaaguaa

SEQ ID NO: 454123 - RNA, 21 nt, Artificial Sequence
  Synthetic
ugauguaaaauugaaaaguaa

SEQ ID NO: 454124 - RNA, 22 nt, Artificial Sequence
  Synthetic
uugauguaaaauugaaaaguaa

SEQ ID NO: 454125 - RNA, 23 nt, Artificial Sequence
  Synthetic
uuugauguaaaauugaaaaguaa

SEQ ID NO: 454126 - RNA, 24 nt, Artificial Sequence
  Synthetic
auuugauguaaaauugaaaaguaa

SEQ ID NO: 454127 - RNA, 18 nt, Artificial Sequence
  Synthetic
agagaaaacacaaaguaa

SEQ ID NO: 454128 - RNA, 19 nt, Artificial Sequence
  Synthetic
aagagaaaacacaaaguaa

SEQ ID NO: 454129 - RNA, 20 nt, Artificial Sequence
  Synthetic
caagagaaaacacaaaguaa

SEQ ID NO: 454130 - RNA, 21 nt, Artificial Sequence
  Synthetic
acaagagaaaacacaaaguaa

SEQ ID NO: 454131 - RNA, 22 nt, Artificial Sequence
  Synthetic
aacaagagaaaacacaaaguaa

SEQ ID NO: 454132 - RNA, 23 nt, Artificial Sequence
  Synthetic
caacaagagaaaacacaaaguaa

SEQ ID NO: 454133 - RNA, 24 nt, Artificial Sequence
  Synthetic
acaacaagagaaaacacaaaguaa

SEQ ID NO: 454134 - RNA, 18 nt, Artificial Sequence
  Synthetic
gguugcucaggaaaguaa

SEQ ID NO: 454135 - RNA, 19 nt, Artificial Sequence
  Synthetic
ugguugcucaggaaaguaa

SEQ ID NO: 454136 - RNA, 20 nt, Artificial Sequence
  Synthetic
cugguugcucaggaaaguaa

SEQ ID NO: 454137 - RNA, 21 nt, Artificial Sequence
  Synthetic
gcugguugcucaggaaaguaa

SEQ ID NO: 454138 - RNA, 22 nt, Artificial Sequence
  Synthetic
agcugguugcucaggaaaguaa

SEQ ID NO: 454139 - RNA, 23 nt, Artificial Sequence
  Synthetic
cagcugguugcucaggaaaguaa

SEQ ID NO: 454140 - RNA, 24 nt, Artificial Sequence
  Synthetic
ucagcugguugcucaggaaaguaa

SEQ ID NO: 454141 - RNA, 18 nt, Artificial Sequence
  Synthetic
aaaaauuccugaaaguaa

SEQ ID NO: 454142 - RNA, 19 nt, Artificial Sequence
  Synthetic
aaaaaauuccugaaaguaa

SEQ ID NO: 454143 - RNA, 20 nt, Artificial Sequence
  Synthetic
uaaaaaauuccugaaaguaa

SEQ ID NO: 454144 - RNA, 21 nt, Artificial Sequence
  Synthetic
uuaaaaaauuccugaaaguaa

SEQ ID NO: 454145 - RNA, 22 nt, Artificial Sequence
  Synthetic
cuuaaaaaauuccugaaaguaa

SEQ ID NO: 454146 - RNA, 23 nt, Artificial Sequence
  Synthetic
acuuaaaaaauuccugaaaguaa

SEQ ID NO: 454147 - RNA, 24 nt, Artificial Sequence
  Synthetic
aacuuaaaaaauuccugaaaguaa

SEQ ID NO: 454148 - RNA, 18 nt, Artificial Sequence
  Synthetic
ucauaacuuugaaaguaa

SEQ ID NO: 454149 - RNA, 19 nt, Artificial Sequence
  Synthetic
uucauaacuuugaaaguaa

SEQ ID NO: 454150 - RNA, 20 nt, Artificial Sequence
  Synthetic
cuucauaacuuugaaaguaa

SEQ ID NO: 454151 - RNA, 21 nt, Artificial Sequence
  Synthetic
ucuucauaacuuugaaaguaa

SEQ ID NO: 454152 - RNA, 22 nt, Artificial Sequence
  Synthetic
uucuucauaacuuugaaaguaa

SEQ ID NO: 454153 - RNA, 23 nt, Artificial Sequence
  Synthetic
uuucuucauaacuuugaaaguaa

SEQ ID NO: 454154 - RNA, 24 nt, Artificial Sequence
  Synthetic
auuucuucauaacuuugaaaguaa

SEQ ID NO: 454155 - RNA, 18 nt, Artificial Sequence
  Synthetic
auuacucugcuaaaguaa

SEQ ID NO: 454156 - RNA, 19 nt, Artificial Sequence
  Synthetic
aauuacucugcuaaaguaa

SEQ ID NO: 454157 - RNA, 20 nt, Artificial Sequence
  Synthetic
aaauuacucugcuaaaguaa

SEQ ID NO: 454158 - RNA, 21 nt, Artificial Sequence
  Synthetic
uaaauuacucugcuaaaguaa

SEQ ID NO: 454159 - RNA, 22 nt, Artificial Sequence
  Synthetic
uuaaauuacucugcuaaaguaa

SEQ ID NO: 454160 - RNA, 23 nt, Artificial Sequence
  Synthetic
auuaaauuacucugcuaaaguaa

SEQ ID NO: 454161 - RNA, 24 nt, Artificial Sequence
  Synthetic
aauuaaauuacucugcuaaaguaa

SEQ ID NO: 454162 - RNA, 18 nt, Artificial Sequence
  Synthetic
aauuuucucaacaaguaa

SEQ ID NO: 454163 - RNA, 19 nt, Artificial Sequence
  Synthetic
caauuuucucaacaaguaa

SEQ ID NO: 454164 - RNA, 20 nt, Artificial Sequence
  Synthetic
gcaauuuucucaacaaguaa

SEQ ID NO: 454165 - RNA, 21 nt, Artificial Sequence
  Synthetic
ggcaauuuucucaacaaguaa

SEQ ID NO: 454166 - RNA, 22 nt, Artificial Sequence
  Synthetic
gggcaauuuucucaacaaguaa

SEQ ID NO: 454167 - RNA, 23 nt, Artificial Sequence
  Synthetic
agggcaauuuucucaacaaguaa

SEQ ID NO: 454168 - RNA, 24 nt, Artificial Sequence
  Synthetic
gagggcaauuuucucaacaaguaa

SEQ ID NO: 454169 - RNA, 18 nt, Artificial Sequence
  Synthetic
uugaccucagacaaguaa

SEQ ID NO: 454170 - RNA, 19 nt, Artificial Sequence
  Synthetic
uuugaccucagacaaguaa

SEQ ID NO: 454171 - RNA, 20 nt, Artificial Sequence
  Synthetic
auuugaccucagacaaguaa

SEQ ID NO: 454172 - RNA, 21 nt, Artificial Sequence
  Synthetic
uauuugaccucagacaaguaa

SEQ ID NO: 454173 - RNA, 22 nt, Artificial Sequence
  Synthetic
guauuugaccucagacaaguaa

SEQ ID NO: 454174 - RNA, 23 nt, Artificial Sequence
  Synthetic
uguauuugaccucagacaaguaa

SEQ ID NO: 454175 - RNA, 24 nt, Artificial Sequence
  Synthetic
auguauuugaccucagacaaguaa

SEQ ID NO: 454176 - RNA, 18 nt, Artificial Sequence
  Synthetic
ugaaagugaggcaaguaa

SEQ ID NO: 454177 - RNA, 19 nt, Artificial Sequence
  Synthetic
uugaaagugaggcaaguaa

SEQ ID NO: 454178 - RNA, 20 nt, Artificial Sequence
  Synthetic
cuugaaagugaggcaaguaa

SEQ ID NO: 454179 - RNA, 21 nt, Artificial Sequence
  Synthetic
acuugaaagugaggcaaguaa

SEQ ID NO: 454180 - RNA, 22 nt, Artificial Sequence
  Synthetic
aacuugaaagugaggcaaguaa

SEQ ID NO: 454181 - RNA, 23 nt, Artificial Sequence
  Synthetic
gaacuugaaagugaggcaaguaa

SEQ ID NO: 454182 - RNA, 24 nt, Artificial Sequence
  Synthetic
ugaacuugaaagugaggcaaguaa

SEQ ID NO: 454183 - RNA, 18 nt, Artificial Sequence
  Synthetic
ccacauaaugucaaguaa

SEQ ID NO: 454184 - RNA, 19 nt, Artificial Sequence
  Synthetic
cccacauaaugucaaguaa

SEQ ID NO: 454185 - RNA, 20 nt, Artificial Sequence
  Synthetic
acccacauaaugucaaguaa

SEQ ID NO: 454186 - RNA, 21 nt, Artificial Sequence
  Synthetic
uacccacauaaugucaaguaa

SEQ ID NO: 454187 - RNA, 22 nt, Artificial Sequence
  Synthetic
uuacccacauaaugucaaguaa

SEQ ID NO: 454188 - RNA, 23 nt, Artificial Sequence
  Synthetic
auuacccacauaaugucaaguaa

SEQ ID NO: 454189 - RNA, 24 nt, Artificial Sequence
  Synthetic
gauuacccacauaaugucaaguaa

SEQ ID NO: 454190 - RNA, 18 nt, Artificial Sequence
  Synthetic
aucuuacacuucaaguaa

SEQ ID NO: 454191 - RNA, 19 nt, Artificial Sequence
  Synthetic
aaucuuacacuucaaguaa

SEQ ID NO: 454192 - RNA, 20 nt, Artificial Sequence
  Synthetic
gaaucuuacacuucaaguaa

SEQ ID NO: 454193 - RNA, 21 nt, Artificial Sequence
  Synthetic
ugaaucuuacacuucaaguaa

SEQ ID NO: 454194 - RNA, 22 nt, Artificial Sequence
  Synthetic
gugaaucuuacacuucaaguaa

SEQ ID NO: 454195 - RNA, 23 nt, Artificial Sequence
  Synthetic
ugugaaucuuacacuucaaguaa

SEQ ID NO: 454196 - RNA, 24 nt, Artificial Sequence
  Synthetic
augugaaucuuacacuucaaguaa

SEQ ID NO: 454197 - RNA, 18 nt, Artificial Sequence
  Synthetic
cugcucagaaagaaguaa

SEQ ID NO: 454198 - RNA, 19 nt, Artificial Sequence
  Synthetic
ucugcucagaaagaaguaa

SEQ ID NO: 454199 - RNA, 20 nt, Artificial Sequence
  Synthetic
uucugcucagaaagaaguaa

SEQ ID NO: 454200 - RNA, 21 nt, Artificial Sequence
  Synthetic
uuucugcucagaaagaaguaa

SEQ ID NO: 454201 - RNA, 22 nt, Artificial Sequence
  Synthetic
guuucugcucagaaagaaguaa

SEQ ID NO: 454202 - RNA, 23 nt, Artificial Sequence
  Synthetic
uguuucugcucagaaagaaguaa

SEQ ID NO: 454203 - RNA, 24 nt, Artificial Sequence
  Synthetic
cuguuucugcucagaaagaaguaa

SEQ ID NO: 454204 - RNA, 18 nt, Artificial Sequence
  Synthetic
uuauuuuguaagaaguaa

SEQ ID NO: 454205 - RNA, 19 nt, Artificial Sequence
  Synthetic
uuuauuuuguaagaaguaa

SEQ ID NO: 454206 - RNA, 20 nt, Artificial Sequence
  Synthetic
uuuuauuuuguaagaaguaa

SEQ ID NO: 454207 - RNA, 21 nt, Artificial Sequence
  Synthetic
uuuuuauuuuguaagaaguaa

SEQ ID NO: 454208 - RNA, 22 nt, Artificial Sequence
  Synthetic
uuuuuuauuuuguaagaaguaa

SEQ ID NO: 454209 - RNA, 23 nt, Artificial Sequence
  Synthetic
auuuuuuauuuuguaagaaguaa

SEQ ID NO: 454210 - RNA, 24 nt, Artificial Sequence
  Synthetic
gauuuuuuauuuuguaagaaguaa

SEQ ID NO: 454211 - RNA, 18 nt, Artificial Sequence
  Synthetic
auuguacagaugaaguaa

SEQ ID NO: 454212 - RNA, 19 nt, Artificial Sequence
  Synthetic
uauuguacagaugaaguaa

SEQ ID NO: 454213 - RNA, 20 nt, Artificial Sequence
  Synthetic
cuauuguacagaugaaguaa

SEQ ID NO: 454214 - RNA, 21 nt, Artificial Sequence
  Synthetic
ucuauuguacagaugaaguaa

SEQ ID NO: 454215 - RNA, 22 nt, Artificial Sequence
  Synthetic
cucuauuguacagaugaaguaa

SEQ ID NO: 454216 - RNA, 23 nt, Artificial Sequence
  Synthetic
ucucuauuguacagaugaaguaa

SEQ ID NO: 454217 - RNA, 24 nt, Artificial Sequence
  Synthetic
aucucuauuguacagaugaaguaa

SEQ ID NO: 454218 - RNA, 18 nt, Artificial Sequence
  Synthetic
ucuuaugaaaauaaguaa

SEQ ID NO: 454219 - RNA, 19 nt, Artificial Sequence
  Synthetic
aucuuaugaaaauaaguaa

SEQ ID NO: 454220 - RNA, 20 nt, Artificial Sequence
  Synthetic
caucuuaugaaaauaaguaa

SEQ ID NO: 454221 - RNA, 21 nt, Artificial Sequence
  Synthetic
ccaucuuaugaaaauaaguaa

SEQ ID NO: 454222 - RNA, 22 nt, Artificial Sequence
  Synthetic
gccaucuuaugaaaauaaguaa

SEQ ID NO: 454223 - RNA, 23 nt, Artificial Sequence
  Synthetic
ugccaucuuaugaaaauaaguaa

SEQ ID NO: 454224 - RNA, 24 nt, Artificial Sequence
  Synthetic
uugccaucuuaugaaaauaaguaa

SEQ ID NO: 454225 - RNA, 18 nt, Artificial Sequence
  Synthetic
aaaaaaauaaauaaguaa

SEQ ID NO: 454226 - RNA, 19 nt, Artificial Sequence
  Synthetic
aaaaaaaauaaauaaguaa

SEQ ID NO: 454227 - RNA, 20 nt, Artificial Sequence
  Synthetic
aaaaaaaaauaaauaaguaa

SEQ ID NO: 454228 - RNA, 21 nt, Artificial Sequence
  Synthetic
caaaaaaaaauaaauaaguaa

SEQ ID NO: 454229 - RNA, 22 nt, Artificial Sequence
  Synthetic
ucaaaaaaaaauaaauaaguaa

SEQ ID NO: 454230 - RNA, 23 nt, Artificial Sequence
  Synthetic
cucaaaaaaaaauaaauaaguaa

SEQ ID NO: 454231 - RNA, 24 nt, Artificial Sequence
  Synthetic
acucaaaaaaaaauaaauaaguaa

SEQ ID NO: 454232 - RNA, 18 nt, Artificial Sequence
  Synthetic
uuugagauaaauaaguaa

SEQ ID NO: 454233 - RNA, 19 nt, Artificial Sequence
  Synthetic
auuugagauaaauaaguaa

SEQ ID NO: 454234 - RNA, 20 nt, Artificial Sequence
  Synthetic
uauuugagauaaauaaguaa

SEQ ID NO: 454235 - RNA, 21 nt, Artificial Sequence
  Synthetic
uuauuugagauaaauaaguaa

SEQ ID NO: 454236 - RNA, 22 nt, Artificial Sequence
  Synthetic
guuauuugagauaaauaaguaa

SEQ ID NO: 454237 - RNA, 23 nt, Artificial Sequence
  Synthetic
aguuauuugagauaaauaaguaa

SEQ ID NO: 454238 - RNA, 24 nt, Artificial Sequence
  Synthetic
gaguuauuugagauaaauaaguaa

SEQ ID NO: 454239 - RNA, 18 nt, Artificial Sequence
  Synthetic
cgauagauagauaaguaa

SEQ ID NO: 454240 - RNA, 19 nt, Artificial Sequence
  Synthetic
ucgauagauagauaaguaa

SEQ ID NO: 454241 - RNA, 20 nt, Artificial Sequence
  Synthetic
aucgauagauagauaaguaa

SEQ ID NO: 454242 - RNA, 21 nt, Artificial Sequence
  Synthetic
caucgauagauagauaaguaa

SEQ ID NO: 454243 - RNA, 22 nt, Artificial Sequence
  Synthetic
ccaucgauagauagauaaguaa

SEQ ID NO: 454244 - RNA, 23 nt, Artificial Sequence
  Synthetic
uccaucgauagauagauaaguaa

SEQ ID NO: 454245 - RNA, 24 nt, Artificial Sequence
  Synthetic
auccaucgauagauagauaaguaa

SEQ ID NO: 454246 - RNA, 18 nt, Artificial Sequence
  Synthetic
cuagcaacugauaaguaa

SEQ ID NO: 454247 - RNA, 19 nt, Artificial Sequence
  Synthetic
acuagcaacugauaaguaa

SEQ ID NO: 454248 - RNA, 20 nt, Artificial Sequence
  Synthetic
aacuagcaacugauaaguaa

SEQ ID NO: 454249 - RNA, 21 nt, Artificial Sequence
  Synthetic
caacuagcaacugauaaguaa

SEQ ID NO: 454250 - RNA, 22 nt, Artificial Sequence
  Synthetic
ucaacuagcaacugauaaguaa

SEQ ID NO: 454251 - RNA, 23 nt, Artificial Sequence
  Synthetic
gucaacuagcaacugauaaguaa

SEQ ID NO: 454252 - RNA, 24 nt, Artificial Sequence
  Synthetic
ugucaacuagcaacugauaaguaa

SEQ ID NO: 454253 - RNA, 18 nt, Artificial Sequence
  Synthetic
gagucaaggguuaaguaa

SEQ ID NO: 454254 - RNA, 19 nt, Artificial Sequence
  Synthetic
ugagucaaggguuaaguaa

SEQ ID NO: 454255 - RNA, 20 nt, Artificial Sequence
  Synthetic
augagucaaggguuaaguaa

SEQ ID NO: 454256 - RNA, 21 nt, Artificial Sequence
  Synthetic
caugagucaaggguuaaguaa

SEQ ID NO: 454257 - RNA, 22 nt, Artificial Sequence
  Synthetic
gcaugagucaaggguuaaguaa

SEQ ID NO: 454258 - RNA, 23 nt, Artificial Sequence
  Synthetic
ugcaugagucaaggguuaaguaa

SEQ ID NO: 454259 - RNA, 24 nt, Artificial Sequence
  Synthetic
uugcaugagucaaggguuaaguaa

SEQ ID NO: 454260 - RNA, 18 nt, Artificial Sequence
  Synthetic
agcaaaugcuaacaguaa

SEQ ID NO: 454261 - RNA, 19 nt, Artificial Sequence
  Synthetic
aagcaaaugcuaacaguaa

SEQ ID NO: 454262 - RNA, 20 nt, Artificial Sequence
  Synthetic
aaagcaaaugcuaacaguaa

SEQ ID NO: 454263 - RNA, 21 nt, Artificial Sequence
  Synthetic
gaaagcaaaugcuaacaguaa

SEQ ID NO: 454264 - RNA, 22 nt, Artificial Sequence
  Synthetic
agaaagcaaaugcuaacaguaa

SEQ ID NO: 454265 - RNA, 23 nt, Artificial Sequence
  Synthetic
cagaaagcaaaugcuaacaguaa

SEQ ID NO: 454266 - RNA, 24 nt, Artificial Sequence
  Synthetic
acagaaagcaaaugcuaacaguaa

SEQ ID NO: 454267 - RNA, 18 nt, Artificial Sequence
  Synthetic
gauaaugacucacaguaa

SEQ ID NO: 454268 - RNA, 19 nt, Artificial Sequence
  Synthetic
agauaaugacucacaguaa

SEQ ID NO: 454269 - RNA, 20 nt, Artificial Sequence
  Synthetic
cagauaaugacucacaguaa

SEQ ID NO: 454270 - RNA, 21 nt, Artificial Sequence
  Synthetic
acagauaaugacucacaguaa

SEQ ID NO: 454271 - RNA, 22 nt, Artificial Sequence
  Synthetic
aacagauaaugacucacaguaa

SEQ ID NO: 454272 - RNA, 23 nt, Artificial Sequence
  Synthetic
uaacagauaaugacucacaguaa

SEQ ID NO: 454273 - RNA, 24 nt, Artificial Sequence
  Synthetic
auaacagauaaugacucacaguaa

SEQ ID NO: 454274 - RNA, 18 nt, Artificial Sequence
  Synthetic
aaauaauuuagacaguaa

SEQ ID NO: 454275 - RNA, 19 nt, Artificial Sequence
  Synthetic
aaaauaauuuagacaguaa

SEQ ID NO: 454276 - RNA, 20 nt, Artificial Sequence
  Synthetic
aaaaauaauuuagacaguaa

SEQ ID NO: 454277 - RNA, 21 nt, Artificial Sequence
  Synthetic
uaaaaauaauuuagacaguaa

SEQ ID NO: 454278 - RNA, 22 nt, Artificial Sequence
  Synthetic
auaaaaauaauuuagacaguaa

SEQ ID NO: 454279 - RNA, 23 nt, Artificial Sequence
  Synthetic
aauaaaaauaauuuagacaguaa

SEQ ID NO: 454280 - RNA, 24 nt, Artificial Sequence
  Synthetic
gaauaaaaauaauuuagacaguaa

SEQ ID NO: 454281 - RNA, 18 nt, Artificial Sequence
  Synthetic
ccaaaacaauuacaguaa

SEQ ID NO: 454282 - RNA, 19 nt, Artificial Sequence
  Synthetic
accaaaacaauuacaguaa

SEQ ID NO: 454283 - RNA, 20 nt, Artificial Sequence
  Synthetic
aaccaaaacaauuacaguaa

SEQ ID NO: 454284 - RNA, 21 nt, Artificial Sequence
  Synthetic
aaaccaaaacaauuacaguaa

SEQ ID NO: 454285 - RNA, 22 nt, Artificial Sequence
  Synthetic
caaaccaaaacaauuacaguaa

SEQ ID NO: 454286 - RNA, 23 nt, Artificial Sequence
  Synthetic
gcaaaccaaaacaauuacaguaa

SEQ ID NO: 454287 - RNA, 24 nt, Artificial Sequence
  Synthetic
ggcaaaccaaaacaauuacaguaa

SEQ ID NO: 454288 - RNA, 18 nt, Artificial Sequence
  Synthetic
caacucuuccaccaguaa

SEQ ID NO: 454289 - RNA, 19 nt, Artificial Sequence
  Synthetic
gcaacucuuccaccaguaa

SEQ ID NO: 454290 - RNA, 20 nt, Artificial Sequence
  Synthetic
ggcaacucuuccaccaguaa

SEQ ID NO: 454291 - RNA, 21 nt, Artificial Sequence
  Synthetic
gggcaacucuuccaccaguaa

SEQ ID NO: 454292 - RNA, 22 nt, Artificial Sequence
  Synthetic
ggggcaacucuuccaccaguaa

SEQ ID NO: 454293 - RNA, 23 nt, Artificial Sequence
  Synthetic
aggggcaacucuuccaccaguaa

SEQ ID NO: 454294 - RNA, 24 nt, Artificial Sequence
  Synthetic
caggggcaacucuuccaccaguaa

SEQ ID NO: 454295 - RNA, 18 nt, Artificial Sequence
  Synthetic
gcucuaucugcccaguaa

SEQ ID NO: 454296 - RNA, 19 nt, Artificial Sequence
  Synthetic
ggcucuaucugcccaguaa

SEQ ID NO: 454297 - RNA, 20 nt, Artificial Sequence
  Synthetic
gggcucuaucugcccaguaa

SEQ ID NO: 454298 - RNA, 21 nt, Artificial Sequence
  Synthetic
cgggcucuaucugcccaguaa

SEQ ID NO: 454299 - RNA, 22 nt, Artificial Sequence
  Synthetic
ccgggcucuaucugcccaguaa

SEQ ID NO: 454300 - RNA, 23 nt, Artificial Sequence
  Synthetic
cccgggcucuaucugcccaguaa

SEQ ID NO: 454301 - RNA, 24 nt, Artificial Sequence
  Synthetic
ccccgggcucuaucugcccaguaa

SEQ ID NO: 454302 - RNA, 18 nt, Artificial Sequence
  Synthetic
uggauucacugccaguaa

SEQ ID NO: 454303 - RNA, 19 nt, Artificial Sequence
  Synthetic
auggauucacugccaguaa

SEQ ID NO: 454304 - RNA, 20 nt, Artificial Sequence
  Synthetic
uauggauucacugccaguaa

SEQ ID NO: 454305 - RNA, 21 nt, Artificial Sequence
  Synthetic
guauggauucacugccaguaa

SEQ ID NO: 454306 - RNA, 22 nt, Artificial Sequence
  Synthetic
cguauggauucacugccaguaa

SEQ ID NO: 454307 - RNA, 23 nt, Artificial Sequence
  Synthetic
ccguauggauucacugccaguaa

SEQ ID NO: 454308 - RNA, 24 nt, Artificial Sequence
  Synthetic
cccguauggauucacugccaguaa

SEQ ID NO: 454309 - RNA, 18 nt, Artificial Sequence
  Synthetic
cuaguuuggaagcaguaa

SEQ ID NO: 454310 - RNA, 19 nt, Artificial Sequence
  Synthetic
ucuaguuuggaagcaguaa

SEQ ID NO: 454311 - RNA, 20 nt, Artificial Sequence
  Synthetic
uucuaguuuggaagcaguaa

SEQ ID NO: 454312 - RNA, 21 nt, Artificial Sequence
  Synthetic
uuucuaguuuggaagcaguaa

SEQ ID NO: 454313 - RNA, 22 nt, Artificial Sequence
  Synthetic
uuuucuaguuuggaagcaguaa

SEQ ID NO: 454314 - RNA, 23 nt, Artificial Sequence
  Synthetic
uuuuucuaguuuggaagcaguaa

SEQ ID NO: 454315 - RNA, 24 nt, Artificial Sequence
  Synthetic
uuuuuucuaguuuggaagcaguaa

SEQ ID NO: 454316 - RNA, 18 nt, Artificial Sequence
  Synthetic
uuucauuugaagcaguaa

SEQ ID NO: 454317 - RNA, 19 nt, Artificial Sequence
  Synthetic
uuuucauuugaagcaguaa

SEQ ID NO: 454318 - RNA, 20 nt, Artificial Sequence
  Synthetic
uuuuucauuugaagcaguaa

SEQ ID NO: 454319 - RNA, 21 nt, Artificial Sequence
  Synthetic
uuuuuucauuugaagcaguaa

SEQ ID NO: 454320 - RNA, 22 nt, Artificial Sequence
  Synthetic
cuuuuuucauuugaagcaguaa

SEQ ID NO: 454321 - RNA, 23 nt, Artificial Sequence
  Synthetic
ucuuuuuucauuugaagcaguaa

SEQ ID NO: 454322 - RNA, 24 nt, Artificial Sequence
  Synthetic
aucuuuuuucauuugaagcaguaa

SEQ ID NO: 454323 - RNA, 18 nt, Artificial Sequence
  Synthetic
caggaagccaggcaguaa

SEQ ID NO: 454324 - RNA, 19 nt, Artificial Sequence
  Synthetic
ucaggaagccaggcaguaa

SEQ ID NO: 454325 - RNA, 20 nt, Artificial Sequence
  Synthetic
gucaggaagccaggcaguaa

SEQ ID NO: 454326 - RNA, 21 nt, Artificial Sequence
  Synthetic
agucaggaagccaggcaguaa

SEQ ID NO: 454327 - RNA, 22 nt, Artificial Sequence
  Synthetic
aagucaggaagccaggcaguaa

SEQ ID NO: 454328 - RNA, 23 nt, Artificial Sequence
  Synthetic
gaagucaggaagccaggcaguaa

SEQ ID NO: 454329 - RNA, 24 nt, Artificial Sequence
  Synthetic
ggaagucaggaagccaggcaguaa

SEQ ID NO: 454330 - RNA, 18 nt, Artificial Sequence
  Synthetic
agccaaaccaugcaguaa

SEQ ID NO: 454331 - RNA, 19 nt, Artificial Sequence
  Synthetic
aagccaaaccaugcaguaa

SEQ ID NO: 454332 - RNA, 20 nt, Artificial Sequence
  Synthetic
uaagccaaaccaugcaguaa

SEQ ID NO: 454333 - RNA, 21 nt, Artificial Sequence
  Synthetic
auaagccaaaccaugcaguaa

SEQ ID NO: 454334 - RNA, 22 nt, Artificial Sequence
  Synthetic
aauaagccaaaccaugcaguaa

SEQ ID NO: 454335 - RNA, 23 nt, Artificial Sequence
  Synthetic
uaauaagccaaaccaugcaguaa

SEQ ID NO: 454336 - RNA, 24 nt, Artificial Sequence
  Synthetic
guaauaagccaaaccaugcaguaa

SEQ ID NO: 454337 - RNA, 18 nt, Artificial Sequence
  Synthetic
ucucuuucuucucaguaa

SEQ ID NO: 454338 - RNA, 19 nt, Artificial Sequence
  Synthetic
uucucuuucuucucaguaa

SEQ ID NO: 454339 - RNA, 20 nt, Artificial Sequence
  Synthetic
guucucuuucuucucaguaa

SEQ ID NO: 454340 - RNA, 21 nt, Artificial Sequence
  Synthetic
aguucucuuucuucucaguaa

SEQ ID NO: 454341 - RNA, 22 nt, Artificial Sequence
  Synthetic
gaguucucuuucuucucaguaa

SEQ ID NO: 454342 - RNA, 23 nt, Artificial Sequence
  Synthetic
ugaguucucuuucuucucaguaa

SEQ ID NO: 454343 - RNA, 24 nt, Artificial Sequence
  Synthetic
uugaguucucuuucuucucaguaa

SEQ ID NO: 454344 - RNA, 18 nt, Artificial Sequence
  Synthetic
aaaugggugggucaguaa

SEQ ID NO: 454345 - RNA, 19 nt, Artificial Sequence
  Synthetic
uaaaugggugggucaguaa

SEQ ID NO: 454346 - RNA, 20 nt, Artificial Sequence
  Synthetic
auaaaugggugggucaguaa

SEQ ID NO: 454347 - RNA, 21 nt, Artificial Sequence
  Synthetic
cauaaaugggugggucaguaa

SEQ ID NO: 454348 - RNA, 22 nt, Artificial Sequence
  Synthetic
gcauaaaugggugggucaguaa

SEQ ID NO: 454349 - RNA, 23 nt, Artificial Sequence
  Synthetic
ugcauaaaugggugggucaguaa

SEQ ID NO: 454350 - RNA, 24 nt, Artificial Sequence
  Synthetic
uugcauaaaugggugggucaguaa

SEQ ID NO: 454351 - RNA, 18 nt, Artificial Sequence
  Synthetic
gcacugaauuuucaguaa

SEQ ID NO: 454352 - RNA, 19 nt, Artificial Sequence
  Synthetic
agcacugaauuuucaguaa

SEQ ID NO: 454353 - RNA, 20 nt, Artificial Sequence
  Synthetic
uagcacugaauuuucaguaa

SEQ ID NO: 454354 - RNA, 21 nt, Artificial Sequence
  Synthetic
uuagcacugaauuuucaguaa

SEQ ID NO: 454355 - RNA, 22 nt, Artificial Sequence
  Synthetic
uuuagcacugaauuuucaguaa

SEQ ID NO: 454356 - RNA, 23 nt, Artificial Sequence
  Synthetic
uuuuagcacugaauuuucaguaa

SEQ ID NO: 454357 - RNA, 24 nt, Artificial Sequence
  Synthetic
uuuuuagcacugaauuuucaguaa

SEQ ID NO: 454358 - RNA, 18 nt, Artificial Sequence
  Synthetic
ugacgugagugagaguaa

SEQ ID NO: 454359 - RNA, 19 nt, Artificial Sequence
  Synthetic
augacgugagugagaguaa

SEQ ID NO: 454360 - RNA, 20 nt, Artificial Sequence
  Synthetic
aaugacgugagugagaguaa

SEQ ID NO: 454361 - RNA, 21 nt, Artificial Sequence
  Synthetic
aaaugacgugagugagaguaa

SEQ ID NO: 454362 - RNA, 22 nt, Artificial Sequence
  Synthetic
aaaaugacgugagugagaguaa

SEQ ID NO: 454363 - RNA, 23 nt, Artificial Sequence
  Synthetic
gaaaaugacgugagugagaguaa

SEQ ID NO: 454364 - RNA, 24 nt, Artificial Sequence
  Synthetic
ugaaaaugacgugagugagaguaa

SEQ ID NO: 454365 - RNA, 18 nt, Artificial Sequence
  Synthetic
gacaaagauguagaguaa

SEQ ID NO: 454366 - RNA, 19 nt, Artificial Sequence
  Synthetic
ugacaaagauguagaguaa

SEQ ID NO: 454367 - RNA, 20 nt, Artificial Sequence
  Synthetic
uugacaaagauguagaguaa

SEQ ID NO: 454368 - RNA, 21 nt, Artificial Sequence
  Synthetic
auugacaaagauguagaguaa

SEQ ID NO: 454369 - RNA, 22 nt, Artificial Sequence
  Synthetic
uauugacaaagauguagaguaa

SEQ ID NO: 454370 - RNA, 23 nt, Artificial Sequence
  Synthetic
auauugacaaagauguagaguaa

SEQ ID NO: 454371 - RNA, 24 nt, Artificial Sequence
  Synthetic
aauauugacaaagauguagaguaa

SEQ ID NO: 454372 - RNA, 18 nt, Artificial Sequence
  Synthetic
cagugcaggauggaguaa

SEQ ID NO: 454373 - RNA, 19 nt, Artificial Sequence
  Synthetic
acagugcaggauggaguaa

SEQ ID NO: 454374 - RNA, 20 nt, Artificial Sequence
  Synthetic
cacagugcaggauggaguaa

SEQ ID NO: 454375 - RNA, 21 nt, Artificial Sequence
  Synthetic
ucacagugcaggauggaguaa

SEQ ID NO: 454376 - RNA, 22 nt, Artificial Sequence
  Synthetic
cucacagugcaggauggaguaa

SEQ ID NO: 454377 - RNA, 23 nt, Artificial Sequence
  Synthetic
ccucacagugcaggauggaguaa

SEQ ID NO: 454378 - RNA, 24 nt, Artificial Sequence
  Synthetic
uccucacagugcaggauggaguaa

SEQ ID NO: 454379 - RNA, 18 nt, Artificial Sequence
  Synthetic
aaaaauaggauggaguaa

SEQ ID NO: 454380 - RNA, 19 nt, Artificial Sequence
  Synthetic
gaaaaauaggauggaguaa

SEQ ID NO: 454381 - RNA, 20 nt, Artificial Sequence
  Synthetic
ugaaaaauaggauggaguaa

SEQ ID NO: 454382 - RNA, 21 nt, Artificial Sequence
  Synthetic
augaaaaauaggauggaguaa

SEQ ID NO: 454383 - RNA, 22 nt, Artificial Sequence
  Synthetic
uaugaaaaauaggauggaguaa

SEQ ID NO: 454384 - RNA, 23 nt, Artificial Sequence
  Synthetic
guaugaaaaauaggauggaguaa

SEQ ID NO: 454385 - RNA, 24 nt, Artificial Sequence
  Synthetic
aguaugaaaaauaggauggaguaa

SEQ ID NO: 454386 - RNA, 18 nt, Artificial Sequence
  Synthetic
guuuucaaguuggaguaa

SEQ ID NO: 454387 - RNA, 19 nt, Artificial Sequence
  Synthetic
uguuuucaaguuggaguaa

SEQ ID NO: 454388 - RNA, 20 nt, Artificial Sequence
  Synthetic
uuguuuucaaguuggaguaa

SEQ ID NO: 454389 - RNA, 21 nt, Artificial Sequence
  Synthetic
cuuguuuucaaguuggaguaa

SEQ ID NO: 454390 - RNA, 22 nt, Artificial Sequence
  Synthetic
acuuguuuucaaguuggaguaa

SEQ ID NO: 454391 - RNA, 23 nt, Artificial Sequence
  Synthetic
gacuuguuuucaaguuggaguaa

SEQ ID NO: 454392 - RNA, 24 nt, Artificial Sequence
  Synthetic
ggacuuguuuucaaguuggaguaa

SEQ ID NO: 454393 - RNA, 18 nt, Artificial Sequence
  Synthetic
ucccacagguuggaguaa

SEQ ID NO: 454394 - RNA, 19 nt, Artificial Sequence
  Synthetic
cucccacagguuggaguaa

SEQ ID NO: 454395 - RNA, 20 nt, Artificial Sequence
  Synthetic
acucccacagguuggaguaa

SEQ ID NO: 454396 - RNA, 21 nt, Artificial Sequence
  Synthetic
uacucccacagguuggaguaa

SEQ ID NO: 454397 - RNA, 22 nt, Artificial Sequence
  Synthetic
auacucccacagguuggaguaa

SEQ ID NO: 454398 - RNA, 23 nt, Artificial Sequence
  Synthetic
aauacucccacagguuggaguaa

SEQ ID NO: 454399 - RNA, 24 nt, Artificial Sequence
  Synthetic
aaauacucccacagguuggaguaa

SEQ ID NO: 454400 - RNA, 18 nt, Artificial Sequence
  Synthetic
agcuggggcugugaguaa

SEQ ID NO: 454401 - RNA, 19 nt, Artificial Sequence
  Synthetic
gagcuggggcugugaguaa

SEQ ID NO: 454402 - RNA, 20 nt, Artificial Sequence
  Synthetic
ggagcuggggcugugaguaa

SEQ ID NO: 454403 - RNA, 21 nt, Artificial Sequence
  Synthetic
aggagcuggggcugugaguaa

SEQ ID NO: 454404 - RNA, 22 nt, Artificial Sequence
  Synthetic
caggagcuggggcugugaguaa

SEQ ID NO: 454405 - RNA, 23 nt, Artificial Sequence
  Synthetic
acaggagcuggggcugugaguaa

SEQ ID NO: 454406 - RNA, 24 nt, Artificial Sequence
  Synthetic
gacaggagcuggggcugugaguaa

SEQ ID NO: 454407 - RNA, 18 nt, Artificial Sequence
  Synthetic
gagacaaagugugaguaa

SEQ ID NO: 454408 - RNA, 19 nt, Artificial Sequence
  Synthetic
ggagacaaagugugaguaa

SEQ ID NO: 454409 - RNA, 20 nt, Artificial Sequence
  Synthetic
gggagacaaagugugaguaa

SEQ ID NO: 454410 - RNA, 21 nt, Artificial Sequence
  Synthetic
agggagacaaagugugaguaa

SEQ ID NO: 454411 - RNA, 22 nt, Artificial Sequence
  Synthetic
aagggagacaaagugugaguaa

SEQ ID NO: 454412 - RNA, 23 nt, Artificial Sequence
  Synthetic
aaagggagacaaagugugaguaa

SEQ ID NO: 454413 - RNA, 24 nt, Artificial Sequence
  Synthetic
aaaagggagacaaagugugaguaa

SEQ ID NO: 454414 - RNA, 18 nt, Artificial Sequence
  Synthetic
acagaauucccauaguaa

SEQ ID NO: 454415 - RNA, 19 nt, Artificial Sequence
  Synthetic
aacagaauucccauaguaa

SEQ ID NO: 454416 - RNA, 20 nt, Artificial Sequence
  Synthetic
aaacagaauucccauaguaa

SEQ ID NO: 454417 - RNA, 21 nt, Artificial Sequence
  Synthetic
gaaacagaauucccauaguaa

SEQ ID NO: 454418 - RNA, 22 nt, Artificial Sequence
  Synthetic
ugaaacagaauucccauaguaa

SEQ ID NO: 454419 - RNA, 23 nt, Artificial Sequence
  Synthetic
cugaaacagaauucccauaguaa

SEQ ID NO: 454420 - RNA, 24 nt, Artificial Sequence
  Synthetic
ccugaaacagaauucccauaguaa

SEQ ID NO: 454421 - RNA, 18 nt, Artificial Sequence
  Synthetic
aaauagggaauauaguaa

SEQ ID NO: 454422 - RNA, 19 nt, Artificial Sequence
  Synthetic
aaaauagggaauauaguaa

SEQ ID NO: 454423 - RNA, 20 nt, Artificial Sequence
  Synthetic
aaaaauagggaauauaguaa

SEQ ID NO: 454424 - RNA, 21 nt, Artificial Sequence
  Synthetic
caaaaauagggaauauaguaa

SEQ ID NO: 454425 - RNA, 22 nt, Artificial Sequence
  Synthetic
acaaaaauagggaauauaguaa

SEQ ID NO: 454426 - RNA, 23 nt, Artificial Sequence
  Synthetic
cacaaaaauagggaauauaguaa

SEQ ID NO: 454427 - RNA, 24 nt, Artificial Sequence
  Synthetic
ucacaaaaauagggaauauaguaa

SEQ ID NO: 454428 - RNA, 18 nt, Artificial Sequence
  Synthetic
uuauuauccauauaguaa

SEQ ID NO: 454429 - RNA, 19 nt, Artificial Sequence
  Synthetic
guuauuauccauauaguaa

SEQ ID NO: 454430 - RNA, 20 nt, Artificial Sequence
  Synthetic
aguuauuauccauauaguaa

SEQ ID NO: 454431 - RNA, 21 nt, Artificial Sequence
  Synthetic
aaguuauuauccauauaguaa

SEQ ID NO: 454432 - RNA, 22 nt, Artificial Sequence
  Synthetic
uaaguuauuauccauauaguaa

SEQ ID NO: 454433 - RNA, 23 nt, Artificial Sequence
  Synthetic
cuaaguuauuauccauauaguaa

SEQ ID NO: 454434 - RNA, 24 nt, Artificial Sequence
  Synthetic
ucuaaguuauuauccauauaguaa

SEQ ID NO: 454435 - RNA, 18 nt, Artificial Sequence
  Synthetic
aaagucaggauauaguaa

SEQ ID NO: 454436 - RNA, 19 nt, Artificial Sequence
  Synthetic
gaaagucaggauauaguaa

SEQ ID NO: 454437 - RNA, 20 nt, Artificial Sequence
  Synthetic
agaaagucaggauauaguaa

SEQ ID NO: 454438 - RNA, 21 nt, Artificial Sequence
  Synthetic
uagaaagucaggauauaguaa

SEQ ID NO: 454439 - RNA, 22 nt, Artificial Sequence
  Synthetic
cuagaaagucaggauauaguaa

SEQ ID NO: 454440 - RNA, 23 nt, Artificial Sequence
  Synthetic
gcuagaaagucaggauauaguaa

SEQ ID NO: 454441 - RNA, 24 nt, Artificial Sequence
  Synthetic
agcuagaaagucaggauauaguaa

SEQ ID NO: 454442 - RNA, 18 nt, Artificial Sequence
  Synthetic
ggugauaauguguaguaa

SEQ ID NO: 454443 - RNA, 19 nt, Artificial Sequence
  Synthetic
uggugauaauguguaguaa

SEQ ID NO: 454444 - RNA, 20 nt, Artificial Sequence
  Synthetic
auggugauaauguguaguaa

SEQ ID NO: 454445 - RNA, 21 nt, Artificial Sequence
  Synthetic
aauggugauaauguguaguaa

SEQ ID NO: 454446 - RNA, 22 nt, Artificial Sequence
  Synthetic
uaauggugauaauguguaguaa

SEQ ID NO: 454447 - RNA, 23 nt, Artificial Sequence
  Synthetic
cuaauggugauaauguguaguaa

SEQ ID NO: 454448 - RNA, 24 nt, Artificial Sequence
  Synthetic
ucuaauggugauaauguguaguaa

SEQ ID NO: 454449 - RNA, 18 nt, Artificial Sequence
  Synthetic
aguccugaauuguaguaa

SEQ ID NO: 454450 - RNA, 19 nt, Artificial Sequence
  Synthetic
caguccugaauuguaguaa

SEQ ID NO: 454451 - RNA, 20 nt, Artificial Sequence
  Synthetic
gcaguccugaauuguaguaa

SEQ ID NO: 454452 - RNA, 21 nt, Artificial Sequence
  Synthetic
ggcaguccugaauuguaguaa

SEQ ID NO: 454453 - RNA, 22 nt, Artificial Sequence
  Synthetic
uggcaguccugaauuguaguaa

SEQ ID NO: 454454 - RNA, 23 nt, Artificial Sequence
  Synthetic
auggcaguccugaauuguaguaa

SEQ ID NO: 454455 - RNA, 24 nt, Artificial Sequence
  Synthetic
cauggcaguccugaauuguaguaa

SEQ ID NO: 454456 - RNA, 18 nt, Artificial Sequence
  Synthetic
uuauuuuuggauuaguaa

SEQ ID NO: 454457 - RNA, 19 nt, Artificial Sequence
  Synthetic
uuuauuuuuggauuaguaa

SEQ ID NO: 454458 - RNA, 20 nt, Artificial Sequence
  Synthetic
cuuuauuuuuggauuaguaa

SEQ ID NO: 454459 - RNA, 21 nt, Artificial Sequence
  Synthetic
ucuuuauuuuuggauuaguaa

SEQ ID NO: 454460 - RNA, 22 nt, Artificial Sequence
  Synthetic
aucuuuauuuuuggauuaguaa

SEQ ID NO: 454461 - RNA, 23 nt, Artificial Sequence
  Synthetic
uaucuuuauuuuuggauuaguaa

SEQ ID NO: 454462 - RNA, 24 nt, Artificial Sequence
  Synthetic
uuaucuuuauuuuuggauuaguaa

SEQ ID NO: 454463 - RNA, 18 nt, Artificial Sequence
  Synthetic
acagucauugcuuaguaa

SEQ ID NO: 454464 - RNA, 19 nt, Artificial Sequence
  Synthetic
gacagucauugcuuaguaa

SEQ ID NO: 454465 - RNA, 20 nt, Artificial Sequence
  Synthetic
ugacagucauugcuuaguaa

SEQ ID NO: 454466 - RNA, 21 nt, Artificial Sequence
  Synthetic
gugacagucauugcuuaguaa

SEQ ID NO: 454467 - RNA, 22 nt, Artificial Sequence
  Synthetic
ugugacagucauugcuuaguaa

SEQ ID NO: 454468 - RNA, 23 nt, Artificial Sequence
  Synthetic
augugacagucauugcuuaguaa

SEQ ID NO: 454469 - RNA, 24 nt, Artificial Sequence
  Synthetic
caugugacagucauugcuuaguaa

SEQ ID NO: 454470 - RNA, 18 nt, Artificial Sequence
  Synthetic
aaugucuucauaacguaa

SEQ ID NO: 454471 - RNA, 19 nt, Artificial Sequence
  Synthetic
uaaugucuucauaacguaa

SEQ ID NO: 454472 - RNA, 20 nt, Artificial Sequence
  Synthetic
uuaaugucuucauaacguaa

SEQ ID NO: 454473 - RNA, 21 nt, Artificial Sequence
  Synthetic
cuuaaugucuucauaacguaa

SEQ ID NO: 454474 - RNA, 22 nt, Artificial Sequence
  Synthetic
gcuuaaugucuucauaacguaa

SEQ ID NO: 454475 - RNA, 23 nt, Artificial Sequence
  Synthetic
cgcuuaaugucuucauaacguaa

SEQ ID NO: 454476 - RNA, 24 nt, Artificial Sequence
  Synthetic
gcgcuuaaugucuucauaacguaa

SEQ ID NO: 454477 - RNA, 18 nt, Artificial Sequence
  Synthetic
aaauuuuccaucacguaa

SEQ ID NO: 454478 - RNA, 19 nt, Artificial Sequence
  Synthetic
aaaauuuuccaucacguaa

SEQ ID NO: 454479 - RNA, 20 nt, Artificial Sequence
  Synthetic
uaaaauuuuccaucacguaa

SEQ ID NO: 454480 - RNA, 21 nt, Artificial Sequence
  Synthetic
cuaaaauuuuccaucacguaa

SEQ ID NO: 454481 - RNA, 22 nt, Artificial Sequence
  Synthetic
acuaaaauuuuccaucacguaa

SEQ ID NO: 454482 - RNA, 23 nt, Artificial Sequence
  Synthetic
cacuaaaauuuuccaucacguaa

SEQ ID NO: 454483 - RNA, 24 nt, Artificial Sequence
  Synthetic
acacuaaaauuuuccaucacguaa

SEQ ID NO: 454484 - RNA, 18 nt, Artificial Sequence
  Synthetic
auuucaugugauacguaa

SEQ ID NO: 454485 - RNA, 19 nt, Artificial Sequence
  Synthetic
cauuucaugugauacguaa

SEQ ID NO: 454486 - RNA, 20 nt, Artificial Sequence
  Synthetic
gcauuucaugugauacguaa

SEQ ID NO: 454487 - RNA, 21 nt, Artificial Sequence
  Synthetic
ugcauuucaugugauacguaa

SEQ ID NO: 454488 - RNA, 22 nt, Artificial Sequence
  Synthetic
cugcauuucaugugauacguaa

SEQ ID NO: 454489 - RNA, 23 nt, Artificial Sequence
  Synthetic
acugcauuucaugugauacguaa

SEQ ID NO: 454490 - RNA, 24 nt, Artificial Sequence
  Synthetic
gacugcauuucaugugauacguaa

SEQ ID NO: 454491 - RNA, 18 nt, Artificial Sequence
  Synthetic
uucuagaaguaaccguaa

SEQ ID NO: 454492 - RNA, 19 nt, Artificial Sequence
  Synthetic
cuucuagaaguaaccguaa

SEQ ID NO: 454493 - RNA, 20 nt, Artificial Sequence
  Synthetic
acuucuagaaguaaccguaa

SEQ ID NO: 454494 - RNA, 21 nt, Artificial Sequence
  Synthetic
uacuucuagaaguaaccguaa

SEQ ID NO: 454495 - RNA, 22 nt, Artificial Sequence
  Synthetic
cuacuucuagaaguaaccguaa

SEQ ID NO: 454496 - RNA, 23 nt, Artificial Sequence
  Synthetic
ccuacuucuagaaguaaccguaa

SEQ ID NO: 454497 - RNA, 24 nt, Artificial Sequence
  Synthetic
gccuacuucuagaaguaaccguaa

SEQ ID NO: 454498 - RNA, 18 nt, Artificial Sequence
  Synthetic
cuggccaaugaagcguaa

SEQ ID NO: 454499 - RNA, 19 nt, Artificial Sequence
  Synthetic
ucuggccaaugaagcguaa

SEQ ID NO: 454500 - RNA, 20 nt, Artificial Sequence
  Synthetic
aucuggccaaugaagcguaa

SEQ ID NO: 454501 - RNA, 21 nt, Artificial Sequence
  Synthetic
caucuggccaaugaagcguaa

SEQ ID NO: 454502 - RNA, 22 nt, Artificial Sequence
  Synthetic
acaucuggccaaugaagcguaa

SEQ ID NO: 454503 - RNA, 23 nt, Artificial Sequence
  Synthetic
gacaucuggccaaugaagcguaa

SEQ ID NO: 454504 - RNA, 24 nt, Artificial Sequence
  Synthetic
agacaucuggccaaugaagcguaa

SEQ ID NO: 454505 - RNA, 18 nt, Artificial Sequence
  Synthetic
cauuugaauuaaucguaa

SEQ ID NO: 454506 - RNA, 19 nt, Artificial Sequence
  Synthetic
acauuugaauuaaucguaa

SEQ ID NO: 454507 - RNA, 20 nt, Artificial Sequence
  Synthetic
aacauuugaauuaaucguaa

SEQ ID NO: 454508 - RNA, 21 nt, Artificial Sequence
  Synthetic
gaacauuugaauuaaucguaa

SEQ ID NO: 454509 - RNA, 22 nt, Artificial Sequence
  Synthetic
ggaacauuugaauuaaucguaa

SEQ ID NO: 454510 - RNA, 23 nt, Artificial Sequence
  Synthetic
gggaacauuugaauuaaucguaa

SEQ ID NO: 454511 - RNA, 24 nt, Artificial Sequence
  Synthetic
ugggaacauuugaauuaaucguaa

SEQ ID NO: 454512 - RNA, 18 nt, Artificial Sequence
  Synthetic
gcauggacucacucguaa

SEQ ID NO: 454513 - RNA, 19 nt, Artificial Sequence
  Synthetic
ugcauggacucacucguaa

SEQ ID NO: 454514 - RNA, 20 nt, Artificial Sequence
  Synthetic
cugcauggacucacucguaa

SEQ ID NO: 454515 - RNA, 21 nt, Artificial Sequence
  Synthetic
acugcauggacucacucguaa

SEQ ID NO: 454516 - RNA, 22 nt, Artificial Sequence
  Synthetic
cacugcauggacucacucguaa

SEQ ID NO: 454517 - RNA, 23 nt, Artificial Sequence
  Synthetic
acacugcauggacucacucguaa

SEQ ID NO: 454518 - RNA, 24 nt, Artificial Sequence
  Synthetic
aacacugcauggacucacucguaa

SEQ ID NO: 454519 - RNA, 18 nt, Artificial Sequence
  Synthetic
gcauguucucacucguaa

SEQ ID NO: 454520 - RNA, 19 nt, Artificial Sequence
  Synthetic
ugcauguucucacucguaa

SEQ ID NO: 454521 - RNA, 20 nt, Artificial Sequence
  Synthetic
cugcauguucucacucguaa

SEQ ID NO: 454522 - RNA, 21 nt, Artificial Sequence
  Synthetic
acugcauguucucacucguaa

SEQ ID NO: 454523 - RNA, 22 nt, Artificial Sequence
  Synthetic
cacugcauguucucacucguaa

SEQ ID NO: 454524 - RNA, 23 nt, Artificial Sequence
  Synthetic
gcacugcauguucucacucguaa

SEQ ID NO: 454525 - RNA, 24 nt, Artificial Sequence
  Synthetic
agcacugcauguucucacucguaa

SEQ ID NO: 454526 - RNA, 18 nt, Artificial Sequence
  Synthetic
auauguucucacucguaa

SEQ ID NO: 454527 - RNA, 19 nt, Artificial Sequence
  Synthetic
cauauguucucacucguaa

SEQ ID NO: 454528 - RNA, 20 nt, Artificial Sequence
  Synthetic
ccauauguucucacucguaa

SEQ ID NO: 454529 - RNA, 21 nt, Artificial Sequence
  Synthetic
accauauguucucacucguaa

SEQ ID NO: 454530 - RNA, 22 nt, Artificial Sequence
  Synthetic
uaccauauguucucacucguaa

SEQ ID NO: 454531 - RNA, 23 nt, Artificial Sequence
  Synthetic
auaccauauguucucacucguaa

SEQ ID NO: 454532 - RNA, 24 nt, Artificial Sequence
  Synthetic
aauaccauauguucucacucguaa

SEQ ID NO: 454533 - RNA, 18 nt, Artificial Sequence
  Synthetic
aaaauaagcaagucguaa

SEQ ID NO: 454534 - RNA, 19 nt, Artificial Sequence
  Synthetic
uaaaauaagcaagucguaa

SEQ ID NO: 454535 - RNA, 20 nt, Artificial Sequence
  Synthetic
auaaaauaagcaagucguaa

SEQ ID NO: 454536 - RNA, 21 nt, Artificial Sequence
  Synthetic
aauaaaauaagcaagucguaa

SEQ ID NO: 454537 - RNA, 22 nt, Artificial Sequence
  Synthetic
aaauaaaauaagcaagucguaa

SEQ ID NO: 454538 - RNA, 23 nt, Artificial Sequence
  Synthetic
uaaauaaaauaagcaagucguaa

SEQ ID NO: 454539 - RNA, 24 nt, Artificial Sequence
  Synthetic
cuaaauaaaauaagcaagucguaa

SEQ ID NO: 454540 - RNA, 18 nt, Artificial Sequence
  Synthetic
guuaacacuacuucguaa

SEQ ID NO: 454541 - RNA, 19 nt, Artificial Sequence
  Synthetic
aguuaacacuacuucguaa

SEQ ID NO: 454542 - RNA, 20 nt, Artificial Sequence
  Synthetic
caguuaacacuacuucguaa

SEQ ID NO: 454543 - RNA, 21 nt, Artificial Sequence
  Synthetic
gcaguuaacacuacuucguaa

SEQ ID NO: 454544 - RNA, 22 nt, Artificial Sequence
  Synthetic
agcaguuaacacuacuucguaa

SEQ ID NO: 454545 - RNA, 23 nt, Artificial Sequence
  Synthetic
aagcaguuaacacuacuucguaa

SEQ ID NO: 454546 - RNA, 24 nt, Artificial Sequence
  Synthetic
caagcaguuaacacuacuucguaa

SEQ ID NO: 454547 - RNA, 18 nt, Artificial Sequence
  Synthetic
uccuaaguaguuucguaa

SEQ ID NO: 454548 - RNA, 19 nt, Artificial Sequence
  Synthetic
uuccuaaguaguuucguaa

SEQ ID NO: 454549 - RNA, 20 nt, Artificial Sequence
  Synthetic
uuuccuaaguaguuucguaa

SEQ ID NO: 454550 - RNA, 21 nt, Artificial Sequence
  Synthetic
cuuuccuaaguaguuucguaa

SEQ ID NO: 454551 - RNA, 22 nt, Artificial Sequence
  Synthetic
gcuuuccuaaguaguuucguaa

SEQ ID NO: 454552 - RNA, 23 nt, Artificial Sequence
  Synthetic
ggcuuuccuaaguaguuucguaa

SEQ ID NO: 454553 - RNA, 24 nt, Artificial Sequence
  Synthetic
gggcuuuccuaaguaguuucguaa

SEQ ID NO: 454554 - RNA, 18 nt, Artificial Sequence
  Synthetic
uauaaaauauaaagguaa

SEQ ID NO: 454555 - RNA, 19 nt, Artificial Sequence
  Synthetic
auauaaaauauaaagguaa

SEQ ID NO: 454556 - RNA, 20 nt, Artificial Sequence
  Synthetic
aauauaaaauauaaagguaa

SEQ ID NO: 454557 - RNA, 21 nt, Artificial Sequence
  Synthetic
gaauauaaaauauaaagguaa

SEQ ID NO: 454558 - RNA, 22 nt, Artificial Sequence
  Synthetic
agaauauaaaauauaaagguaa

SEQ ID NO: 454559 - RNA, 23 nt, Artificial Sequence
  Synthetic
cagaauauaaaauauaaagguaa

SEQ ID NO: 454560 - RNA, 24 nt, Artificial Sequence
  Synthetic
acagaauauaaaauauaaagguaa

SEQ ID NO: 454561 - RNA, 18 nt, Artificial Sequence
  Synthetic
caaagaauauaaagguaa

SEQ ID NO: 454562 - RNA, 19 nt, Artificial Sequence
  Synthetic
acaaagaauauaaagguaa

SEQ ID NO: 454563 - RNA, 20 nt, Artificial Sequence
  Synthetic
gacaaagaauauaaagguaa

SEQ ID NO: 454564 - RNA, 21 nt, Artificial Sequence
  Synthetic
agacaaagaauauaaagguaa

SEQ ID NO: 454565 - RNA, 22 nt, Artificial Sequence
  Synthetic
uagacaaagaauauaaagguaa

SEQ ID NO: 454566 - RNA, 23 nt, Artificial Sequence
  Synthetic
uuagacaaagaauauaaagguaa

SEQ ID NO: 454567 - RNA, 24 nt, Artificial Sequence
  Synthetic
guuagacaaagaauauaaagguaa

SEQ ID NO: 454568 - RNA, 18 nt, Artificial Sequence
  Synthetic
aaaaaggggccaagguaa

SEQ ID NO: 454569 - RNA, 19 nt, Artificial Sequence
  Synthetic
caaaaaggggccaagguaa

SEQ ID NO: 454570 - RNA, 20 nt, Artificial Sequence
  Synthetic
ucaaaaaggggccaagguaa

SEQ ID NO: 454571 - RNA, 21 nt, Artificial Sequence
  Synthetic
uucaaaaaggggccaagguaa

SEQ ID NO: 454572 - RNA, 22 nt, Artificial Sequence
  Synthetic
cuucaaaaaggggccaagguaa

SEQ ID NO: 454573 - RNA, 23 nt, Artificial Sequence
  Synthetic
ccuucaaaaaggggccaagguaa

SEQ ID NO: 454574 - RNA, 24 nt, Artificial Sequence
  Synthetic
gccuucaaaaaggggccaagguaa

SEQ ID NO: 454575 - RNA, 18 nt, Artificial Sequence
  Synthetic
ugaaguuacaccagguaa

SEQ ID NO: 454576 - RNA, 19 nt, Artificial Sequence
  Synthetic
gugaaguuacaccagguaa

SEQ ID NO: 454577 - RNA, 20 nt, Artificial Sequence
  Synthetic
agugaaguuacaccagguaa

SEQ ID NO: 454578 - RNA, 21 nt, Artificial Sequence
  Synthetic
aagugaaguuacaccagguaa

SEQ ID NO: 454579 - RNA, 22 nt, Artificial Sequence
  Synthetic
caagugaaguuacaccagguaa

SEQ ID NO: 454580 - RNA, 23 nt, Artificial Sequence
  Synthetic
acaagugaaguuacaccagguaa

SEQ ID NO: 454581 - RNA, 24 nt, Artificial Sequence
  Synthetic
uacaagugaaguuacaccagguaa

SEQ ID NO: 454582 - RNA, 18 nt, Artificial Sequence
  Synthetic
agccccuguaccagguaa

SEQ ID NO: 454583 - RNA, 19 nt, Artificial Sequence
  Synthetic
gagccccuguaccagguaa

SEQ ID NO: 454584 - RNA, 20 nt, Artificial Sequence
  Synthetic
agagccccuguaccagguaa

SEQ ID NO: 454585 - RNA, 21 nt, Artificial Sequence
  Synthetic
aagagccccuguaccagguaa

SEQ ID NO: 454586 - RNA, 22 nt, Artificial Sequence
  Synthetic
gaagagccccuguaccagguaa

SEQ ID NO: 454587 - RNA, 23 nt, Artificial Sequence
  Synthetic
ugaagagccccuguaccagguaa

SEQ ID NO: 454588 - RNA, 24 nt, Artificial Sequence
  Synthetic
augaagagccccuguaccagguaa

SEQ ID NO: 454589 - RNA, 18 nt, Artificial Sequence
  Synthetic
ucauucauucccagguaa

SEQ ID NO: 454590 - RNA, 19 nt, Artificial Sequence
  Synthetic
cucauucauucccagguaa

SEQ ID NO: 454591 - RNA, 20 nt, Artificial Sequence
  Synthetic
ccucauucauucccagguaa

SEQ ID NO: 454592 - RNA, 21 nt, Artificial Sequence
  Synthetic
uccucauucauucccagguaa

SEQ ID NO: 454593 - RNA, 22 nt, Artificial Sequence
  Synthetic
uuccucauucauucccagguaa

SEQ ID NO: 454594 - RNA, 23 nt, Artificial Sequence
  Synthetic
cuuccucauucauucccagguaa

SEQ ID NO: 454595 - RNA, 24 nt, Artificial Sequence
  Synthetic
ccuuccucauucauucccagguaa

SEQ ID NO: 454596 - RNA, 18 nt, Artificial Sequence
  Synthetic
cccaggggcuccagguaa

SEQ ID NO: 454597 - RNA, 19 nt, Artificial Sequence
  Synthetic
acccaggggcuccagguaa

SEQ ID NO: 454598 - RNA, 20 nt, Artificial Sequence
  Synthetic
gacccaggggcuccagguaa

SEQ ID NO: 454599 - RNA, 21 nt, Artificial Sequence
  Synthetic
agacccaggggcuccagguaa

SEQ ID NO: 454600 - RNA, 22 nt, Artificial Sequence
  Synthetic
aagacccaggggcuccagguaa

SEQ ID NO: 454601 - RNA, 23 nt, Artificial Sequence
  Synthetic
uaagacccaggggcuccagguaa

SEQ ID NO: 454602 - RNA, 24 nt, Artificial Sequence
  Synthetic
cuaagacccaggggcuccagguaa

SEQ ID NO: 454603 - RNA, 18 nt, Artificial Sequence
  Synthetic
auuaguuuagucagguaa

SEQ ID NO: 454604 - RNA, 19 nt, Artificial Sequence
  Synthetic
cauuaguuuagucagguaa

SEQ ID NO: 454605 - RNA, 20 nt, Artificial Sequence
  Synthetic
ucauuaguuuagucagguaa

SEQ ID NO: 454606 - RNA, 21 nt, Artificial Sequence
  Synthetic
uucauuaguuuagucagguaa

SEQ ID NO: 454607 - RNA, 22 nt, Artificial Sequence
  Synthetic
uuucauuaguuuagucagguaa

SEQ ID NO: 454608 - RNA, 23 nt, Artificial Sequence
  Synthetic
auuucauuaguuuagucagguaa

SEQ ID NO: 454609 - RNA, 24 nt, Artificial Sequence
  Synthetic
gauuucauuaguuuagucagguaa

SEQ ID NO: 454610 - RNA, 18 nt, Artificial Sequence
  Synthetic
gagggagauuucagguaa

SEQ ID NO: 454611 - RNA, 19 nt, Artificial Sequence
  Synthetic
agagggagauuucagguaa

SEQ ID NO: 454612 - RNA, 20 nt, Artificial Sequence
  Synthetic
aagagggagauuucagguaa

SEQ ID NO: 454613 - RNA, 21 nt, Artificial Sequence
  Synthetic
gaagagggagauuucagguaa

SEQ ID NO: 454614 - RNA, 22 nt, Artificial Sequence
  Synthetic
ugaagagggagauuucagguaa

SEQ ID NO: 454615 - RNA, 23 nt, Artificial Sequence
  Synthetic
augaagagggagauuucagguaa

SEQ ID NO: 454616 - RNA, 24 nt, Artificial Sequence
  Synthetic
gaugaagagggagauuucagguaa

SEQ ID NO: 454617 - RNA, 18 nt, Artificial Sequence
  Synthetic
uaauacauuacgagguaa

SEQ ID NO: 454618 - RNA, 19 nt, Artificial Sequence
  Synthetic
auaauacauuacgagguaa

SEQ ID NO: 454619 - RNA, 20 nt, Artificial Sequence
  Synthetic
uauaauacauuacgagguaa

SEQ ID NO: 454620 - RNA, 21 nt, Artificial Sequence
  Synthetic
auauaauacauuacgagguaa

SEQ ID NO: 454621 - RNA, 22 nt, Artificial Sequence
  Synthetic
cauauaauacauuacgagguaa

SEQ ID NO: 454622 - RNA, 23 nt, Artificial Sequence
  Synthetic
acauauaauacauuacgagguaa

SEQ ID NO: 454623 - RNA, 24 nt, Artificial Sequence
  Synthetic
aacauauaauacauuacgagguaa

SEQ ID NO: 454624 - RNA, 18 nt, Artificial Sequence
  Synthetic
aaaagcuuucugagguaa

SEQ ID NO: 454625 - RNA, 19 nt, Artificial Sequence
  Synthetic
aaaaagcuuucugagguaa

SEQ ID NO: 454626 - RNA, 20 nt, Artificial Sequence
  Synthetic
gaaaaagcuuucugagguaa

SEQ ID NO: 454627 - RNA, 21 nt, Artificial Sequence
  Synthetic
ugaaaaagcuuucugagguaa

SEQ ID NO: 454628 - RNA, 22 nt, Artificial Sequence
  Synthetic
augaaaaagcuuucugagguaa

SEQ ID NO: 454629 - RNA, 23 nt, Artificial Sequence
  Synthetic
caugaaaaagcuuucugagguaa

SEQ ID NO: 454630 - RNA, 24 nt, Artificial Sequence
  Synthetic
gcaugaaaaagcuuucugagguaa

SEQ ID NO: 454631 - RNA, 18 nt, Artificial Sequence
  Synthetic
auuuuacaggugagguaa

SEQ ID NO: 454632 - RNA, 19 nt, Artificial Sequence
  Synthetic
uauuuuacaggugagguaa

SEQ ID NO: 454633 - RNA, 20 nt, Artificial Sequence
  Synthetic
cuauuuuacaggugagguaa

SEQ ID NO: 454634 - RNA, 21 nt, Artificial Sequence
  Synthetic
ccuauuuuacaggugagguaa

SEQ ID NO: 454635 - RNA, 22 nt, Artificial Sequence
  Synthetic
accuauuuuacaggugagguaa

SEQ ID NO: 454636 - RNA, 23 nt, Artificial Sequence
  Synthetic
uaccuauuuuacaggugagguaa

SEQ ID NO: 454637 - RNA, 24 nt, Artificial Sequence
  Synthetic
guaccuauuuuacaggugagguaa

SEQ ID NO: 454638 - RNA, 18 nt, Artificial Sequence
  Synthetic
acuuuucaggugagguaa

SEQ ID NO: 454639 - RNA, 19 nt, Artificial Sequence
  Synthetic
uacuuuucaggugagguaa

SEQ ID NO: 454640 - RNA, 20 nt, Artificial Sequence
  Synthetic
auacuuuucaggugagguaa

SEQ ID NO: 454641 - RNA, 21 nt, Artificial Sequence
  Synthetic
cauacuuuucaggugagguaa

SEQ ID NO: 454642 - RNA, 22 nt, Artificial Sequence
  Synthetic
ucauacuuuucaggugagguaa

SEQ ID NO: 454643 - RNA, 23 nt, Artificial Sequence
  Synthetic
cucauacuuuucaggugagguaa

SEQ ID NO: 454644 - RNA, 24 nt, Artificial Sequence
  Synthetic
acucauacuuuucaggugagguaa

SEQ ID NO: 454645 - RNA, 18 nt, Artificial Sequence
  Synthetic
uuauuuccagauagguaa

SEQ ID NO: 454646 - RNA, 19 nt, Artificial Sequence
  Synthetic
cuuauuuccagauagguaa

SEQ ID NO: 454647 - RNA, 20 nt, Artificial Sequence
  Synthetic
ucuuauuuccagauagguaa

SEQ ID NO: 454648 - RNA, 21 nt, Artificial Sequence
  Synthetic
cucuuauuuccagauagguaa

SEQ ID NO: 454649 - RNA, 22 nt, Artificial Sequence
  Synthetic
acucuuauuuccagauagguaa

SEQ ID NO: 454650 - RNA, 23 nt, Artificial Sequence
  Synthetic
cacucuuauuuccagauagguaa

SEQ ID NO: 454651 - RNA, 24 nt, Artificial Sequence
  Synthetic
ccacucuuauuuccagauagguaa

SEQ ID NO: 454652 - RNA, 18 nt, Artificial Sequence
  Synthetic
gaaaaaggagauagguaa

SEQ ID NO: 454653 - RNA, 19 nt, Artificial Sequence
  Synthetic
ggaaaaaggagauagguaa

SEQ ID NO: 454654 - RNA, 20 nt, Artificial Sequence
  Synthetic
uggaaaaaggagauagguaa

SEQ ID NO: 454655 - RNA, 21 nt, Artificial Sequence
  Synthetic
auggaaaaaggagauagguaa

SEQ ID NO: 454656 - RNA, 22 nt, Artificial Sequence
  Synthetic
cauggaaaaaggagauagguaa

SEQ ID NO: 454657 - RNA, 23 nt, Artificial Sequence
  Synthetic
ucauggaaaaaggagauagguaa

SEQ ID NO: 454658 - RNA, 24 nt, Artificial Sequence
  Synthetic
cucauggaaaaaggagauagguaa

SEQ ID NO: 454659 - RNA, 18 nt, Artificial Sequence
  Synthetic
cuuguauuaauuagguaa

SEQ ID NO: 454660 - RNA, 19 nt, Artificial Sequence
  Synthetic
acuuguauuaauuagguaa

SEQ ID NO: 454661 - RNA, 20 nt, Artificial Sequence
  Synthetic
aacuuguauuaauuagguaa

SEQ ID NO: 454662 - RNA, 21 nt, Artificial Sequence
  Synthetic
uaacuuguauuaauuagguaa

SEQ ID NO: 454663 - RNA, 22 nt, Artificial Sequence
  Synthetic
auaacuuguauuaauuagguaa

SEQ ID NO: 454664 - RNA, 23 nt, Artificial Sequence
  Synthetic
aauaacuuguauuaauuagguaa

SEQ ID NO: 454665 - RNA, 24 nt, Artificial Sequence
  Synthetic
aaauaacuuguauuaauuagguaa

SEQ ID NO: 454666 - RNA, 18 nt, Artificial Sequence
  Synthetic
ggucagaauuuuagguaa

SEQ ID NO: 454667 - RNA, 19 nt, Artificial Sequence
  Synthetic
gggucagaauuuuagguaa

SEQ ID NO: 454668 - RNA, 20 nt, Artificial Sequence
  Synthetic
ggggucagaauuuuagguaa

SEQ ID NO: 454669 - RNA, 21 nt, Artificial Sequence
  Synthetic
gggggucagaauuuuagguaa

SEQ ID NO: 454670 - RNA, 22 nt, Artificial Sequence
  Synthetic
ugggggucagaauuuuagguaa

SEQ ID NO: 454671 - RNA, 23 nt, Artificial Sequence
  Synthetic
gugggggucagaauuuuagguaa

SEQ ID NO: 454672 - RNA, 24 nt, Artificial Sequence
  Synthetic
agugggggucagaauuuuagguaa

SEQ ID NO: 454673 - RNA, 18 nt, Artificial Sequence
  Synthetic
acucauauuaaucgguaa

SEQ ID NO: 454674 - RNA, 19 nt, Artificial Sequence
  Synthetic
aacucauauuaaucgguaa

SEQ ID NO: 454675 - RNA, 20 nt, Artificial Sequence
  Synthetic
caacucauauuaaucgguaa

SEQ ID NO: 454676 - RNA, 21 nt, Artificial Sequence
  Synthetic
acaacucauauuaaucgguaa

SEQ ID NO: 454677 - RNA, 22 nt, Artificial Sequence
  Synthetic
gacaacucauauuaaucgguaa

SEQ ID NO: 454678 - RNA, 23 nt, Artificial Sequence
  Synthetic
agacaacucauauuaaucgguaa

SEQ ID NO: 454679 - RNA, 24 nt, Artificial Sequence
  Synthetic
cagacaacucauauuaaucgguaa

SEQ ID NO: 454680 - RNA, 18 nt, Artificial Sequence
  Synthetic
aacaugaauuaaggguaa

SEQ ID NO: 454681 - RNA, 19 nt, Artificial Sequence
  Synthetic
aaacaugaauuaaggguaa

SEQ ID NO: 454682 - RNA, 20 nt, Artificial Sequence
  Synthetic
aaaacaugaauuaaggguaa

SEQ ID NO: 454683 - RNA, 21 nt, Artificial Sequence
  Synthetic
gaaaacaugaauuaaggguaa

SEQ ID NO: 454684 - RNA, 22 nt, Artificial Sequence
  Synthetic
ugaaaacaugaauuaaggguaa

SEQ ID NO: 454685 - RNA, 23 nt, Artificial Sequence
  Synthetic
augaaaacaugaauuaaggguaa

SEQ ID NO: 454686 - RNA, 24 nt, Artificial Sequence
  Synthetic
aaugaaaacaugaauuaaggguaa

SEQ ID NO: 454687 - RNA, 18 nt, Artificial Sequence
  Synthetic
augaucaaaucaggguaa

SEQ ID NO: 454688 - RNA, 19 nt, Artificial Sequence
  Synthetic
aaugaucaaaucaggguaa

SEQ ID NO: 454689 - RNA, 20 nt, Artificial Sequence
  Synthetic
caaugaucaaaucaggguaa

SEQ ID NO: 454690 - RNA, 21 nt, Artificial Sequence
  Synthetic
ucaaugaucaaaucaggguaa

SEQ ID NO: 454691 - RNA, 22 nt, Artificial Sequence
  Synthetic
cucaaugaucaaaucaggguaa

SEQ ID NO: 454692 - RNA, 23 nt, Artificial Sequence
  Synthetic
gcucaaugaucaaaucaggguaa

SEQ ID NO: 454693 - RNA, 24 nt, Artificial Sequence
  Synthetic
ugcucaaugaucaaaucaggguaa

SEQ ID NO: 454694 - RNA, 18 nt, Artificial Sequence
  Synthetic
agacuaaaacuaggguaa

SEQ ID NO: 454695 - RNA, 19 nt, Artificial Sequence
  Synthetic
uagacuaaaacuaggguaa

SEQ ID NO: 454696 - RNA, 20 nt, Artificial Sequence
  Synthetic
uuagacuaaaacuaggguaa

SEQ ID NO: 454697 - RNA, 21 nt, Artificial Sequence
  Synthetic
uuuagacuaaaacuaggguaa

SEQ ID NO: 454698 - RNA, 22 nt, Artificial Sequence
  Synthetic
guuuagacuaaaacuaggguaa

SEQ ID NO: 454699 - RNA, 23 nt, Artificial Sequence
  Synthetic
gguuuagacuaaaacuaggguaa

SEQ ID NO: 454700 - RNA, 24 nt, Artificial Sequence
  Synthetic
ugguuuagacuaaaacuaggguaa

SEQ ID NO: 454701 - RNA, 18 nt, Artificial Sequence
  Synthetic
caugucuuucagggguaa

SEQ ID NO: 454702 - RNA, 19 nt, Artificial Sequence
  Synthetic
ccaugucuuucagggguaa

SEQ ID NO: 454703 - RNA, 20 nt, Artificial Sequence
  Synthetic
gccaugucuuucagggguaa

SEQ ID NO: 454704 - RNA, 21 nt, Artificial Sequence
  Synthetic
agccaugucuuucagggguaa

SEQ ID NO: 454705 - RNA, 22 nt, Artificial Sequence
  Synthetic
uagccaugucuuucagggguaa

SEQ ID NO: 454706 - RNA, 23 nt, Artificial Sequence
  Synthetic
cuagccaugucuuucagggguaa

SEQ ID NO: 454707 - RNA, 24 nt, Artificial Sequence
  Synthetic
acuagccaugucuuucagggguaa

SEQ ID NO: 454708 - RNA, 18 nt, Artificial Sequence
  Synthetic
cagaaacauuagggguaa

SEQ ID NO: 454709 - RNA, 19 nt, Artificial Sequence
  Synthetic
ccagaaacauuagggguaa

SEQ ID NO: 454710 - RNA, 20 nt, Artificial Sequence
  Synthetic
uccagaaacauuagggguaa

SEQ ID NO: 454711 - RNA, 21 nt, Artificial Sequence
  Synthetic
uuccagaaacauuagggguaa

SEQ ID NO: 454712 - RNA, 22 nt, Artificial Sequence
  Synthetic
cuuccagaaacauuagggguaa

SEQ ID NO: 454713 - RNA, 23 nt, Artificial Sequence
  Synthetic
acuuccagaaacauuagggguaa

SEQ ID NO: 454714 - RNA, 24 nt, Artificial Sequence
  Synthetic
aacuuccagaaacauuagggguaa

SEQ ID NO: 454715 - RNA, 18 nt, Artificial Sequence
  Synthetic
ugaagaacuuagggguaa

SEQ ID NO: 454716 - RNA, 19 nt, Artificial Sequence
  Synthetic
uugaagaacuuagggguaa

SEQ ID NO: 454717 - RNA, 20 nt, Artificial Sequence
  Synthetic
guugaagaacuuagggguaa

SEQ ID NO: 454718 - RNA, 21 nt, Artificial Sequence
  Synthetic
uguugaagaacuuagggguaa

SEQ ID NO: 454719 - RNA, 22 nt, Artificial Sequence
  Synthetic
auguugaagaacuuagggguaa

SEQ ID NO: 454720 - RNA, 23 nt, Artificial Sequence
  Synthetic
cauguugaagaacuuagggguaa

SEQ ID NO: 454721 - RNA, 24 nt, Artificial Sequence
  Synthetic
gcauguugaagaacuuagggguaa

SEQ ID NO: 454722 - RNA, 18 nt, Artificial Sequence
  Synthetic
gugaauaugaggggguaa

SEQ ID NO: 454723 - RNA, 19 nt, Artificial Sequence
  Synthetic
cgugaauaugaggggguaa

SEQ ID NO: 454724 - RNA, 20 nt, Artificial Sequence
  Synthetic
acgugaauaugaggggguaa

SEQ ID NO: 454725 - RNA, 21 nt, Artificial Sequence
  Synthetic
aacgugaauaugaggggguaa

SEQ ID NO: 454726 - RNA, 22 nt, Artificial Sequence
  Synthetic
aaacgugaauaugaggggguaa

SEQ ID NO: 454727 - RNA, 23 nt, Artificial Sequence
  Synthetic
uaaacgugaauaugaggggguaa

SEQ ID NO: 454728 - RNA, 24 nt, Artificial Sequence
  Synthetic
guaaacgugaauaugaggggguaa

SEQ ID NO: 454729 - RNA, 18 nt, Artificial Sequence
  Synthetic
auaugcuccaauggguaa

SEQ ID NO: 454730 - RNA, 19 nt, Artificial Sequence
  Synthetic
cauaugcuccaauggguaa

SEQ ID NO: 454731 - RNA, 20 nt, Artificial Sequence
  Synthetic
acauaugcuccaauggguaa

SEQ ID NO: 454732 - RNA, 21 nt, Artificial Sequence
  Synthetic
aacauaugcuccaauggguaa

SEQ ID NO: 454733 - RNA, 22 nt, Artificial Sequence
  Synthetic
uaacauaugcuccaauggguaa

SEQ ID NO: 454734 - RNA, 23 nt, Artificial Sequence
  Synthetic
uuaacauaugcuccaauggguaa

SEQ ID NO: 454735 - RNA, 24 nt, Artificial Sequence
  Synthetic
uuuaacauaugcuccaauggguaa

SEQ ID NO: 454736 - RNA, 18 nt, Artificial Sequence
  Synthetic
aaagaagacccuggguaa

SEQ ID NO: 454737 - RNA, 19 nt, Artificial Sequence
  Synthetic
gaaagaagacccuggguaa

SEQ ID NO: 454738 - RNA, 20 nt, Artificial Sequence
  Synthetic
agaaagaagacccuggguaa

SEQ ID NO: 454739 - RNA, 21 nt, Artificial Sequence
  Synthetic
uagaaagaagacccuggguaa

SEQ ID NO: 454740 - RNA, 22 nt, Artificial Sequence
  Synthetic
guagaaagaagacccuggguaa

SEQ ID NO: 454741 - RNA, 23 nt, Artificial Sequence
  Synthetic
gguagaaagaagacccuggguaa

SEQ ID NO: 454742 - RNA, 24 nt, Artificial Sequence
  Synthetic
agguagaaagaagacccuggguaa

SEQ ID NO: 454743 - RNA, 18 nt, Artificial Sequence
  Synthetic
ucucacauaucuggguaa

SEQ ID NO: 454744 - RNA, 19 nt, Artificial Sequence
  Synthetic
cucucacauaucuggguaa

SEQ ID NO: 454745 - RNA, 20 nt, Artificial Sequence
  Synthetic
gcucucacauaucuggguaa

SEQ ID NO: 454746 - RNA, 21 nt, Artificial Sequence
  Synthetic
agcucucacauaucuggguaa

SEQ ID NO: 454747 - RNA, 22 nt, Artificial Sequence
  Synthetic
aagcucucacauaucuggguaa

SEQ ID NO: 454748 - RNA, 23 nt, Artificial Sequence
  Synthetic
aaagcucucacauaucuggguaa

SEQ ID NO: 454749 - RNA, 24 nt, Artificial Sequence
  Synthetic
aaaagcucucacauaucuggguaa

SEQ ID NO: 454750 - RNA, 18 nt, Artificial Sequence
  Synthetic
aaaacaugaaaaugguaa

SEQ ID NO: 454751 - RNA, 19 nt, Artificial Sequence
  Synthetic
aaaaacaugaaaaugguaa

SEQ ID NO: 454752 - RNA, 20 nt, Artificial Sequence
  Synthetic
gaaaaacaugaaaaugguaa

SEQ ID NO: 454753 - RNA, 21 nt, Artificial Sequence
  Synthetic
ggaaaaacaugaaaaugguaa

SEQ ID NO: 454754 - RNA, 22 nt, Artificial Sequence
  Synthetic
gggaaaaacaugaaaaugguaa

SEQ ID NO: 454755 - RNA, 23 nt, Artificial Sequence
  Synthetic
agggaaaaacaugaaaaugguaa

SEQ ID NO: 454756 - RNA, 24 nt, Artificial Sequence
  Synthetic
aagggaaaaacaugaaaaugguaa

SEQ ID NO: 454757 - RNA, 18 nt, Artificial Sequence
  Synthetic
ggauuuuuggaaugguaa

SEQ ID NO: 454758 - RNA, 19 nt, Artificial Sequence
  Synthetic
aggauuuuuggaaugguaa

SEQ ID NO: 454759 - RNA, 20 nt, Artificial Sequence
  Synthetic
uaggauuuuuggaaugguaa

SEQ ID NO: 454760 - RNA, 21 nt, Artificial Sequence
  Synthetic
cuaggauuuuuggaaugguaa

SEQ ID NO: 454761 - RNA, 22 nt, Artificial Sequence
  Synthetic
ccuaggauuuuuggaaugguaa

SEQ ID NO: 454762 - RNA, 23 nt, Artificial Sequence
  Synthetic
cccuaggauuuuuggaaugguaa

SEQ ID NO: 454763 - RNA, 24 nt, Artificial Sequence
  Synthetic
gcccuaggauuuuuggaaugguaa

SEQ ID NO: 454764 - RNA, 18 nt, Artificial Sequence
  Synthetic
gggaggcuaacaugguaa

SEQ ID NO: 454765 - RNA, 19 nt, Artificial Sequence
  Synthetic
ugggaggcuaacaugguaa

SEQ ID NO: 454766 - RNA, 20 nt, Artificial Sequence
  Synthetic
uugggaggcuaacaugguaa

SEQ ID NO: 454767 - RNA, 21 nt, Artificial Sequence
  Synthetic
guugggaggcuaacaugguaa

SEQ ID NO: 454768 - RNA, 22 nt, Artificial Sequence
  Synthetic
aguugggaggcuaacaugguaa

SEQ ID NO: 454769 - RNA, 23 nt, Artificial Sequence
  Synthetic
aaguugggaggcuaacaugguaa

SEQ ID NO: 454770 - RNA, 24 nt, Artificial Sequence
  Synthetic
caaguugggaggcuaacaugguaa

SEQ ID NO: 454771 - RNA, 18 nt, Artificial Sequence
  Synthetic
augggaauagcaugguaa

SEQ ID NO: 454772 - RNA, 19 nt, Artificial Sequence
  Synthetic
gaugggaauagcaugguaa

SEQ ID NO: 454773 - RNA, 20 nt, Artificial Sequence
  Synthetic
ggaugggaauagcaugguaa

SEQ ID NO: 454774 - RNA, 21 nt, Artificial Sequence
  Synthetic
gggaugggaauagcaugguaa

SEQ ID NO: 454775 - RNA, 22 nt, Artificial Sequence
  Synthetic
cgggaugggaauagcaugguaa

SEQ ID NO: 454776 - RNA, 23 nt, Artificial Sequence
  Synthetic
gcgggaugggaauagcaugguaa

SEQ ID NO: 454777 - RNA, 24 nt, Artificial Sequence
  Synthetic
ggcgggaugggaauagcaugguaa

SEQ ID NO: 454778 - RNA, 18 nt, Artificial Sequence
  Synthetic
uguucaguugcaugguaa

SEQ ID NO: 454779 - RNA, 19 nt, Artificial Sequence
  Synthetic
guguucaguugcaugguaa

SEQ ID NO: 454780 - RNA, 20 nt, Artificial Sequence
  Synthetic
uguguucaguugcaugguaa

SEQ ID NO: 454781 - RNA, 21 nt, Artificial Sequence
  Synthetic
cuguguucaguugcaugguaa

SEQ ID NO: 454782 - RNA, 22 nt, Artificial Sequence
  Synthetic
ucuguguucaguugcaugguaa

SEQ ID NO: 454783 - RNA, 23 nt, Artificial Sequence
  Synthetic
aucuguguucaguugcaugguaa

SEQ ID NO: 454784 - RNA, 24 nt, Artificial Sequence
  Synthetic
aaucuguguucaguugcaugguaa

SEQ ID NO: 454785 - RNA, 18 nt, Artificial Sequence
  Synthetic
uucaagaaacacugguaa

SEQ ID NO: 454786 - RNA, 19 nt, Artificial Sequence
  Synthetic
uuucaagaaacacugguaa

SEQ ID NO: 454787 - RNA, 20 nt, Artificial Sequence
  Synthetic
uuuucaagaaacacugguaa

SEQ ID NO: 454788 - RNA, 21 nt, Artificial Sequence
  Synthetic
guuuucaagaaacacugguaa

SEQ ID NO: 454789 - RNA, 22 nt, Artificial Sequence
  Synthetic
uguuuucaagaaacacugguaa

SEQ ID NO: 454790 - RNA, 23 nt, Artificial Sequence
  Synthetic
guguuuucaagaaacacugguaa

SEQ ID NO: 454791 - RNA, 24 nt, Artificial Sequence
  Synthetic
uguguuuucaagaaacacugguaa

SEQ ID NO: 454792 - RNA, 18 nt, Artificial Sequence
  Synthetic
gaaacacuugacugguaa

SEQ ID NO: 454793 - RNA, 19 nt, Artificial Sequence
  Synthetic
ggaaacacuugacugguaa

SEQ ID NO: 454794 - RNA, 20 nt, Artificial Sequence
  Synthetic
uggaaacacuugacugguaa

SEQ ID NO: 454795 - RNA, 21 nt, Artificial Sequence
  Synthetic
cuggaaacacuugacugguaa

SEQ ID NO: 454796 - RNA, 22 nt, Artificial Sequence
  Synthetic
ucuggaaacacuugacugguaa

SEQ ID NO: 454797 - RNA, 23 nt, Artificial Sequence
  Synthetic
cucuggaaacacuugacugguaa

SEQ ID NO: 454798 - RNA, 24 nt, Artificial Sequence
  Synthetic
ccucuggaaacacuugacugguaa

SEQ ID NO: 454799 - RNA, 18 nt, Artificial Sequence
  Synthetic
auguaaauguucugguaa

SEQ ID NO: 454800 - RNA, 19 nt, Artificial Sequence
  Synthetic
aauguaaauguucugguaa

SEQ ID NO: 454801 - RNA, 20 nt, Artificial Sequence
  Synthetic
aaauguaaauguucugguaa

SEQ ID NO: 454802 - RNA, 21 nt, Artificial Sequence
  Synthetic
aaaauguaaauguucugguaa

SEQ ID NO: 454803 - RNA, 22 nt, Artificial Sequence
  Synthetic
caaaauguaaauguucugguaa

SEQ ID NO: 454804 - RNA, 23 nt, Artificial Sequence
  Synthetic
ccaaaauguaaauguucugguaa

SEQ ID NO: 454805 - RNA, 24 nt, Artificial Sequence
  Synthetic
cccaaaauguaaauguucugguaa

SEQ ID NO: 454806 - RNA, 18 nt, Artificial Sequence
  Synthetic
aaacacauauugugguaa

SEQ ID NO: 454807 - RNA, 19 nt, Artificial Sequence
  Synthetic
uaaacacauauugugguaa

SEQ ID NO: 454808 - RNA, 20 nt, Artificial Sequence
  Synthetic
auaaacacauauugugguaa

SEQ ID NO: 454809 - RNA, 21 nt, Artificial Sequence
  Synthetic
aauaaacacauauugugguaa

SEQ ID NO: 454810 - RNA, 22 nt, Artificial Sequence
  Synthetic
gaauaaacacauauugugguaa

SEQ ID NO: 454811 - RNA, 23 nt, Artificial Sequence
  Synthetic
ggaauaaacacauauugugguaa

SEQ ID NO: 454812 - RNA, 24 nt, Artificial Sequence
  Synthetic
cggaauaaacacauauugugguaa

SEQ ID NO: 454813 - RNA, 18 nt, Artificial Sequence
  Synthetic
aaauaucacuugugguaa

SEQ ID NO: 454814 - RNA, 19 nt, Artificial Sequence
  Synthetic
aaaauaucacuugugguaa

SEQ ID NO: 454815 - RNA, 20 nt, Artificial Sequence
  Synthetic
caaaauaucacuugugguaa

SEQ ID NO: 454816 - RNA, 21 nt, Artificial Sequence
  Synthetic
ucaaaauaucacuugugguaa

SEQ ID NO: 454817 - RNA, 22 nt, Artificial Sequence
  Synthetic
aucaaaauaucacuugugguaa

SEQ ID NO: 454818 - RNA, 23 nt, Artificial Sequence
  Synthetic
uaucaaaauaucacuugugguaa

SEQ ID NO: 454819 - RNA, 24 nt, Artificial Sequence
  Synthetic
guaucaaaauaucacuugugguaa

SEQ ID NO: 454820 - RNA, 18 nt, Artificial Sequence
  Synthetic
auagugagagauugguaa

SEQ ID NO: 454821 - RNA, 19 nt, Artificial Sequence
  Synthetic
uauagugagagauugguaa

SEQ ID NO: 454822 - RNA, 20 nt, Artificial Sequence
  Synthetic
guauagugagagauugguaa

SEQ ID NO: 454823 - RNA, 21 nt, Artificial Sequence
  Synthetic
gguauagugagagauugguaa

SEQ ID NO: 454824 - RNA, 22 nt, Artificial Sequence
  Synthetic
cgguauagugagagauugguaa

SEQ ID NO: 454825 - RNA, 23 nt, Artificial Sequence
  Synthetic
gcgguauagugagagauugguaa

SEQ ID NO: 454826 - RNA, 24 nt, Artificial Sequence
  Synthetic
agcgguauagugagagauugguaa

SEQ ID NO: 454827 - RNA, 18 nt, Artificial Sequence
  Synthetic
ugaagaacuuauugguaa

SEQ ID NO: 454828 - RNA, 19 nt, Artificial Sequence
  Synthetic
augaagaacuuauugguaa

SEQ ID NO: 454829 - RNA, 20 nt, Artificial Sequence
  Synthetic
gaugaagaacuuauugguaa

SEQ ID NO: 454830 - RNA, 21 nt, Artificial Sequence
  Synthetic
agaugaagaacuuauugguaa

SEQ ID NO: 454831 - RNA, 22 nt, Artificial Sequence
  Synthetic
gagaugaagaacuuauugguaa

SEQ ID NO: 454832 - RNA, 23 nt, Artificial Sequence
  Synthetic
ggagaugaagaacuuauugguaa

SEQ ID NO: 454833 - RNA, 24 nt, Artificial Sequence
  Synthetic
uggagaugaagaacuuauugguaa

SEQ ID NO: 454834 - RNA, 18 nt, Artificial Sequence
  Synthetic
aauaaugaauuuugguaa

SEQ ID NO: 454835 - RNA, 19 nt, Artificial Sequence
  Synthetic
gaauaaugaauuuugguaa

SEQ ID NO: 454836 - RNA, 20 nt, Artificial Sequence
  Synthetic
agaauaaugaauuuugguaa

SEQ ID NO: 454837 - RNA, 21 nt, Artificial Sequence
  Synthetic
gagaauaaugaauuuugguaa

SEQ ID NO: 454838 - RNA, 22 nt, Artificial Sequence
  Synthetic
ggagaauaaugaauuuugguaa

SEQ ID NO: 454839 - RNA, 23 nt, Artificial Sequence
  Synthetic
aggagaauaaugaauuuugguaa

SEQ ID NO: 454840 - RNA, 24 nt, Artificial Sequence
  Synthetic
caggagaauaaugaauuuugguaa

SEQ ID NO: 454841 - RNA, 18 nt, Artificial Sequence
  Synthetic
ccaaaggaaaaaauguaa

SEQ ID NO: 454842 - RNA, 19 nt, Artificial Sequence
  Synthetic
cccaaaggaaaaaauguaa

SEQ ID NO: 454843 - RNA, 20 nt, Artificial Sequence
  Synthetic
acccaaaggaaaaaauguaa

SEQ ID NO: 454844 - RNA, 21 nt, Artificial Sequence
  Synthetic
cacccaaaggaaaaaauguaa

SEQ ID NO: 454845 - RNA, 22 nt, Artificial Sequence
  Synthetic
acacccaaaggaaaaaauguaa

SEQ ID NO: 454846 - RNA, 23 nt, Artificial Sequence
  Synthetic
gacacccaaaggaaaaaauguaa

SEQ ID NO: 454847 - RNA, 24 nt, Artificial Sequence
  Synthetic
ugacacccaaaggaaaaaauguaa

SEQ ID NO: 454848 - RNA, 18 nt, Artificial Sequence
  Synthetic
uuuaaucuaaaaauguaa

SEQ ID NO: 454849 - RNA, 19 nt, Artificial Sequence
  Synthetic
uuuuaaucuaaaaauguaa

SEQ ID NO: 454850 - RNA, 20 nt, Artificial Sequence
  Synthetic
cuuuuaaucuaaaaauguaa

SEQ ID NO: 454851 - RNA, 21 nt, Artificial Sequence
  Synthetic
acuuuuaaucuaaaaauguaa

SEQ ID NO: 454852 - RNA, 22 nt, Artificial Sequence
  Synthetic
uacuuuuaaucuaaaaauguaa

SEQ ID NO: 454853 - RNA, 23 nt, Artificial Sequence
  Synthetic
uuacuuuuaaucuaaaaauguaa

SEQ ID NO: 454854 - RNA, 24 nt, Artificial Sequence
  Synthetic
auuacuuuuaaucuaaaaauguaa

SEQ ID NO: 454855 - RNA, 18 nt, Artificial Sequence
  Synthetic
cuugacuuuaaaauguaa

SEQ ID NO: 454856 - RNA, 19 nt, Artificial Sequence
  Synthetic
acuugacuuuaaaauguaa

SEQ ID NO: 454857 - RNA, 20 nt, Artificial Sequence
  Synthetic
aacuugacuuuaaaauguaa

SEQ ID NO: 454858 - RNA, 21 nt, Artificial Sequence
  Synthetic
aaacuugacuuuaaaauguaa

SEQ ID NO: 454859 - RNA, 22 nt, Artificial Sequence
  Synthetic
gaaacuugacuuuaaaauguaa

SEQ ID NO: 454860 - RNA, 23 nt, Artificial Sequence
  Synthetic
agaaacuugacuuuaaaauguaa

SEQ ID NO: 454861 - RNA, 24 nt, Artificial Sequence
  Synthetic
uagaaacuugacuuuaaaauguaa

SEQ ID NO: 454862 - RNA, 18 nt, Artificial Sequence
  Synthetic
ucuccucagcaaauguaa

SEQ ID NO: 454863 - RNA, 19 nt, Artificial Sequence
  Synthetic
cucuccucagcaaauguaa

SEQ ID NO: 454864 - RNA, 20 nt, Artificial Sequence
  Synthetic
gcucuccucagcaaauguaa

SEQ ID NO: 454865 - RNA, 21 nt, Artificial Sequence
  Synthetic
agcucuccucagcaaauguaa

SEQ ID NO: 454866 - RNA, 22 nt, Artificial Sequence
  Synthetic
aagcucuccucagcaaauguaa

SEQ ID NO: 454867 - RNA, 23 nt, Artificial Sequence
  Synthetic
aaagcucuccucagcaaauguaa

SEQ ID NO: 454868 - RNA, 24 nt, Artificial Sequence
  Synthetic
uaaagcucuccucagcaaauguaa

SEQ ID NO: 454869 - RNA, 18 nt, Artificial Sequence
  Synthetic
cuaaacaaggaaauguaa

SEQ ID NO: 454870 - RNA, 19 nt, Artificial Sequence
  Synthetic
acuaaacaaggaaauguaa

SEQ ID NO: 454871 - RNA, 20 nt, Artificial Sequence
  Synthetic
aacuaaacaaggaaauguaa

SEQ ID NO: 454872 - RNA, 21 nt, Artificial Sequence
  Synthetic
aaacuaaacaaggaaauguaa

SEQ ID NO: 454873 - RNA, 22 nt, Artificial Sequence
  Synthetic
aaaacuaaacaaggaaauguaa

SEQ ID NO: 454874 - RNA, 23 nt, Artificial Sequence
  Synthetic
uaaaacuaaacaaggaaauguaa

SEQ ID NO: 454875 - RNA, 24 nt, Artificial Sequence
  Synthetic
uuaaaacuaaacaaggaaauguaa

SEQ ID NO: 454876 - RNA, 18 nt, Artificial Sequence
  Synthetic
gcacuuugggaaauguaa

SEQ ID NO: 454877 - RNA, 19 nt, Artificial Sequence
  Synthetic
agcacuuugggaaauguaa

SEQ ID NO: 454878 - RNA, 20 nt, Artificial Sequence
  Synthetic
uagcacuuugggaaauguaa

SEQ ID NO: 454879 - RNA, 21 nt, Artificial Sequence
  Synthetic
uuagcacuuugggaaauguaa

SEQ ID NO: 454880 - RNA, 22 nt, Artificial Sequence
  Synthetic
uuuagcacuuugggaaauguaa

SEQ ID NO: 454881 - RNA, 23 nt, Artificial Sequence
  Synthetic
uuuuagcacuuugggaaauguaa

SEQ ID NO: 454882 - RNA, 24 nt, Artificial Sequence
  Synthetic
guuuuagcacuuugggaaauguaa

SEQ ID NO: 454883 - RNA, 18 nt, Artificial Sequence
  Synthetic
augagaguaacaauguaa

SEQ ID NO: 454884 - RNA, 19 nt, Artificial Sequence
  Synthetic
caugagaguaacaauguaa

SEQ ID NO: 454885 - RNA, 20 nt, Artificial Sequence
  Synthetic
ccaugagaguaacaauguaa

SEQ ID NO: 454886 - RNA, 21 nt, Artificial Sequence
  Synthetic
accaugagaguaacaauguaa

SEQ ID NO: 454887 - RNA, 22 nt, Artificial Sequence
  Synthetic
uaccaugagaguaacaauguaa

SEQ ID NO: 454888 - RNA, 23 nt, Artificial Sequence
  Synthetic
uuaccaugagaguaacaauguaa

SEQ ID NO: 454889 - RNA, 24 nt, Artificial Sequence
  Synthetic
auuaccaugagaguaacaauguaa

SEQ ID NO: 454890 - RNA, 18 nt, Artificial Sequence
  Synthetic
aauggcaauccaauguaa

SEQ ID NO: 454891 - RNA, 19 nt, Artificial Sequence
  Synthetic
uaauggcaauccaauguaa

SEQ ID NO: 454892 - RNA, 20 nt, Artificial Sequence
  Synthetic
auaauggcaauccaauguaa

SEQ ID NO: 454893 - RNA, 21 nt, Artificial Sequence
  Synthetic
aauaauggcaauccaauguaa

SEQ ID NO: 454894 - RNA, 22 nt, Artificial Sequence
  Synthetic
gaauaauggcaauccaauguaa

SEQ ID NO: 454895 - RNA, 23 nt, Artificial Sequence
  Synthetic
ugaauaauggcaauccaauguaa

SEQ ID NO: 454896 - RNA, 24 nt, Artificial Sequence
  Synthetic
gugaauaauggcaauccaauguaa

SEQ ID NO: 454897 - RNA, 18 nt, Artificial Sequence
  Synthetic
gaaggaagcucaauguaa

SEQ ID NO: 454898 - RNA, 19 nt, Artificial Sequence
  Synthetic
ugaaggaagcucaauguaa

SEQ ID NO: 454899 - RNA, 20 nt, Artificial Sequence
  Synthetic
gugaaggaagcucaauguaa

SEQ ID NO: 454900 - RNA, 21 nt, Artificial Sequence
  Synthetic
ggugaaggaagcucaauguaa

SEQ ID NO: 454901 - RNA, 22 nt, Artificial Sequence
  Synthetic
aggugaaggaagcucaauguaa

SEQ ID NO: 454902 - RNA, 23 nt, Artificial Sequence
  Synthetic
gaggugaaggaagcucaauguaa

SEQ ID NO: 454903 - RNA, 24 nt, Artificial Sequence
  Synthetic
agaggugaaggaagcucaauguaa

SEQ ID NO: 454904 - RNA, 18 nt, Artificial Sequence
  Synthetic
acauguuggagaauguaa

SEQ ID NO: 454905 - RNA, 19 nt, Artificial Sequence
  Synthetic
aacauguuggagaauguaa

SEQ ID NO: 454906 - RNA, 20 nt, Artificial Sequence
  Synthetic
caacauguuggagaauguaa

SEQ ID NO: 454907 - RNA, 21 nt, Artificial Sequence
  Synthetic
acaacauguuggagaauguaa

SEQ ID NO: 454908 - RNA, 22 nt, Artificial Sequence
  Synthetic
aacaacauguuggagaauguaa

SEQ ID NO: 454909 - RNA, 23 nt, Artificial Sequence
  Synthetic
aaacaacauguuggagaauguaa

SEQ ID NO: 454910 - RNA, 24 nt, Artificial Sequence
  Synthetic
aaaacaacauguuggagaauguaa

SEQ ID NO: 454911 - RNA, 18 nt, Artificial Sequence
  Synthetic
auuuacaugguaauguaa

SEQ ID NO: 454912 - RNA, 19 nt, Artificial Sequence
  Synthetic
aauuuacaugguaauguaa

SEQ ID NO: 454913 - RNA, 20 nt, Artificial Sequence
  Synthetic
uaauuuacaugguaauguaa

SEQ ID NO: 454914 - RNA, 21 nt, Artificial Sequence
  Synthetic
auaauuuacaugguaauguaa

SEQ ID NO: 454915 - RNA, 22 nt, Artificial Sequence
  Synthetic
aauaauuuacaugguaauguaa

SEQ ID NO: 454916 - RNA, 23 nt, Artificial Sequence
  Synthetic
aaauaauuuacaugguaauguaa

SEQ ID NO: 454917 - RNA, 24 nt, Artificial Sequence
  Synthetic
gaaauaauuuacaugguaauguaa

SEQ ID NO: 454918 - RNA, 18 nt, Artificial Sequence
  Synthetic
guagaaacguacauguaa

SEQ ID NO: 454919 - RNA, 19 nt, Artificial Sequence
  Synthetic
uguagaaacguacauguaa

SEQ ID NO: 454920 - RNA, 20 nt, Artificial Sequence
  Synthetic
auguagaaacguacauguaa

SEQ ID NO: 454921 - RNA, 21 nt, Artificial Sequence
  Synthetic
gauguagaaacguacauguaa

SEQ ID NO: 454922 - RNA, 22 nt, Artificial Sequence
  Synthetic
ugauguagaaacguacauguaa

SEQ ID NO: 454923 - RNA, 23 nt, Artificial Sequence
  Synthetic
cugauguagaaacguacauguaa

SEQ ID NO: 454924 - RNA, 24 nt, Artificial Sequence
  Synthetic
acugauguagaaacguacauguaa

SEQ ID NO: 454925 - RNA, 18 nt, Artificial Sequence
  Synthetic
auauuagccaggauguaa

SEQ ID NO: 454926 - RNA, 19 nt, Artificial Sequence
  Synthetic
gauauuagccaggauguaa

SEQ ID NO: 454927 - RNA, 20 nt, Artificial Sequence
  Synthetic
cgauauuagccaggauguaa

SEQ ID NO: 454928 - RNA, 21 nt, Artificial Sequence
  Synthetic
ucgauauuagccaggauguaa

SEQ ID NO: 454929 - RNA, 22 nt, Artificial Sequence
  Synthetic
uucgauauuagccaggauguaa

SEQ ID NO: 454930 - RNA, 23 nt, Artificial Sequence
  Synthetic
uuucgauauuagccaggauguaa

SEQ ID NO: 454931 - RNA, 24 nt, Artificial Sequence
  Synthetic
guuucgauauuagccaggauguaa

SEQ ID NO: 454932 - RNA, 18 nt, Artificial Sequence
  Synthetic
aaucuacaaaauauguaa

SEQ ID NO: 454933 - RNA, 19 nt, Artificial Sequence
  Synthetic
aaaucuacaaaauauguaa

SEQ ID NO: 454934 - RNA, 20 nt, Artificial Sequence
  Synthetic
aaaaucuacaaaauauguaa

SEQ ID NO: 454935 - RNA, 21 nt, Artificial Sequence
  Synthetic
aaaaaucuacaaaauauguaa

SEQ ID NO: 454936 - RNA, 22 nt, Artificial Sequence
  Synthetic
uaaaaaucuacaaaauauguaa

SEQ ID NO: 454937 - RNA, 23 nt, Artificial Sequence
  Synthetic
cuaaaaaucuacaaaauauguaa

SEQ ID NO: 454938 - RNA, 24 nt, Artificial Sequence
  Synthetic
ccuaaaaaucuacaaaauauguaa

SEQ ID NO: 454939 - RNA, 18 nt, Artificial Sequence
  Synthetic
uauuugguuaauauguaa

SEQ ID NO: 454940 - RNA, 19 nt, Artificial Sequence
  Synthetic
guauuugguuaauauguaa

SEQ ID NO: 454941 - RNA, 20 nt, Artificial Sequence
  Synthetic
uguauuugguuaauauguaa

SEQ ID NO: 454942 - RNA, 21 nt, Artificial Sequence
  Synthetic
cuguauuugguuaauauguaa

SEQ ID NO: 454943 - RNA, 22 nt, Artificial Sequence
  Synthetic
acuguauuugguuaauauguaa

SEQ ID NO: 454944 - RNA, 23 nt, Artificial Sequence
  Synthetic
uacuguauuugguuaauauguaa

SEQ ID NO: 454945 - RNA, 24 nt, Artificial Sequence
  Synthetic
auacuguauuugguuaauauguaa

SEQ ID NO: 454946 - RNA, 18 nt, Artificial Sequence
  Synthetic
auuuccuuuccuauguaa

SEQ ID NO: 454947 - RNA, 19 nt, Artificial Sequence
  Synthetic
uauuuccuuuccuauguaa

SEQ ID NO: 454948 - RNA, 20 nt, Artificial Sequence
  Synthetic
auauuuccuuuccuauguaa

SEQ ID NO: 454949 - RNA, 21 nt, Artificial Sequence
  Synthetic
cauauuuccuuuccuauguaa

SEQ ID NO: 454950 - RNA, 22 nt, Artificial Sequence
  Synthetic
acauauuuccuuuccuauguaa

SEQ ID NO: 454951 - RNA, 23 nt, Artificial Sequence
  Synthetic
cacauauuuccuuuccuauguaa

SEQ ID NO: 454952 - RNA, 24 nt, Artificial Sequence
  Synthetic
ccacauauuuccuuuccuauguaa

SEQ ID NO: 454953 - RNA, 18 nt, Artificial Sequence
  Synthetic
uuacuguggucacuguaa

SEQ ID NO: 454954 - RNA, 19 nt, Artificial Sequence
  Synthetic
auuacuguggucacuguaa

SEQ ID NO: 454955 - RNA, 20 nt, Artificial Sequence
  Synthetic
uauuacuguggucacuguaa

SEQ ID NO: 454956 - RNA, 21 nt, Artificial Sequence
  Synthetic
auauuacuguggucacuguaa

SEQ ID NO: 454957 - RNA, 22 nt, Artificial Sequence
  Synthetic
uauauuacuguggucacuguaa

SEQ ID NO: 454958 - RNA, 23 nt, Artificial Sequence
  Synthetic
cuauauuacuguggucacuguaa

SEQ ID NO: 454959 - RNA, 24 nt, Artificial Sequence
  Synthetic
acuauauuacuguggucacuguaa

SEQ ID NO: 454960 - RNA, 18 nt, Artificial Sequence
  Synthetic
ccuucaaagagacuguaa

SEQ ID NO: 454961 - RNA, 19 nt, Artificial Sequence
  Synthetic
gccuucaaagagacuguaa

SEQ ID NO: 454962 - RNA, 20 nt, Artificial Sequence
  Synthetic
ugccuucaaagagacuguaa

SEQ ID NO: 454963 - RNA, 21 nt, Artificial Sequence
  Synthetic
cugccuucaaagagacuguaa

SEQ ID NO: 454964 - RNA, 22 nt, Artificial Sequence
  Synthetic
ccugccuucaaagagacuguaa

SEQ ID NO: 454965 - RNA, 23 nt, Artificial Sequence
  Synthetic
gccugccuucaaagagacuguaa

SEQ ID NO: 454966 - RNA, 24 nt, Artificial Sequence
  Synthetic
ugccugccuucaaagagacuguaa

SEQ ID NO: 454967 - RNA, 18 nt, Artificial Sequence
  Synthetic
gguugugacugacuguaa

SEQ ID NO: 454968 - RNA, 19 nt, Artificial Sequence
  Synthetic
ugguugugacugacuguaa

SEQ ID NO: 454969 - RNA, 20 nt, Artificial Sequence
  Synthetic
cugguugugacugacuguaa

SEQ ID NO: 454970 - RNA, 21 nt, Artificial Sequence
  Synthetic
ccugguugugacugacuguaa

SEQ ID NO: 454971 - RNA, 22 nt, Artificial Sequence
  Synthetic
cccugguugugacugacuguaa

SEQ ID NO: 454972 - RNA, 23 nt, Artificial Sequence
  Synthetic
ucccugguugugacugacuguaa

SEQ ID NO: 454973 - RNA, 24 nt, Artificial Sequence
  Synthetic
aucccugguugugacugacuguaa

SEQ ID NO: 454974 - RNA, 18 nt, Artificial Sequence
  Synthetic
uggaggaggacgcuguaa

SEQ ID NO: 454975 - RNA, 19 nt, Artificial Sequence
  Synthetic
guggaggaggacgcuguaa

SEQ ID NO: 454976 - RNA, 20 nt, Artificial Sequence
  Synthetic
uguggaggaggacgcuguaa

SEQ ID NO: 454977 - RNA, 21 nt, Artificial Sequence
  Synthetic
cuguggaggaggacgcuguaa

SEQ ID NO: 454978 - RNA, 22 nt, Artificial Sequence
  Synthetic
ucuguggaggaggacgcuguaa

SEQ ID NO: 454979 - RNA, 23 nt, Artificial Sequence
  Synthetic
aucuguggaggaggacgcuguaa

SEQ ID NO: 454980 - RNA, 24 nt, Artificial Sequence
  Synthetic
gaucuguggaggaggacgcuguaa

SEQ ID NO: 454981 - RNA, 18 nt, Artificial Sequence
  Synthetic
auagaggguuaucuguaa

SEQ ID NO: 454982 - RNA, 19 nt, Artificial Sequence
  Synthetic
gauagaggguuaucuguaa

SEQ ID NO: 454983 - RNA, 20 nt, Artificial Sequence
  Synthetic
ugauagaggguuaucuguaa

SEQ ID NO: 454984 - RNA, 21 nt, Artificial Sequence
  Synthetic
augauagaggguuaucuguaa

SEQ ID NO: 454985 - RNA, 22 nt, Artificial Sequence
  Synthetic
uaugauagaggguuaucuguaa

SEQ ID NO: 454986 - RNA, 23 nt, Artificial Sequence
  Synthetic
uuaugauagaggguuaucuguaa

SEQ ID NO: 454987 - RNA, 24 nt, Artificial Sequence
  Synthetic
uuuaugauagaggguuaucuguaa

SEQ ID NO: 454988 - RNA, 18 nt, Artificial Sequence
  Synthetic
aagcuguauaaaguguaa

SEQ ID NO: 454989 - RNA, 19 nt, Artificial Sequence
  Synthetic
aaagcuguauaaaguguaa

SEQ ID NO: 454990 - RNA, 20 nt, Artificial Sequence
  Synthetic
gaaagcuguauaaaguguaa

SEQ ID NO: 454991 - RNA, 21 nt, Artificial Sequence
  Synthetic
agaaagcuguauaaaguguaa

SEQ ID NO: 454992 - RNA, 22 nt, Artificial Sequence
  Synthetic
aagaaagcuguauaaaguguaa

SEQ ID NO: 454993 - RNA, 23 nt, Artificial Sequence
  Synthetic
uaagaaagcuguauaaaguguaa

SEQ ID NO: 454994 - RNA, 24 nt, Artificial Sequence
  Synthetic
auaagaaagcuguauaaaguguaa

SEQ ID NO: 454995 - RNA, 18 nt, Artificial Sequence
  Synthetic
gggaggaaaacaguguaa

SEQ ID NO: 454996 - RNA, 19 nt, Artificial Sequence
  Synthetic
ggggaggaaaacaguguaa

SEQ ID NO: 454997 - RNA, 20 nt, Artificial Sequence
  Synthetic
gggggaggaaaacaguguaa

SEQ ID NO: 454998 - RNA, 21 nt, Artificial Sequence
  Synthetic
agggggaggaaaacaguguaa

SEQ ID NO: 454999 - RNA, 22 nt, Artificial Sequence
  Synthetic
uagggggaggaaaacaguguaa

SEQ ID NO: 455000 - RNA, 23 nt, Artificial Sequence
  Synthetic
uuagggggaggaaaacaguguaa

SEQ ID NO: 455001 - RNA, 24 nt, Artificial Sequence
  Synthetic
uuuagggggaggaaaacaguguaa

SEQ ID NO: 455002 - RNA, 18 nt, Artificial Sequence
  Synthetic
uaaucuuuacccguguaa

SEQ ID NO: 455003 - RNA, 19 nt, Artificial Sequence
  Synthetic
uuaaucuuuacccguguaa

SEQ ID NO: 455004 - RNA, 20 nt, Artificial Sequence
  Synthetic
guuaaucuuuacccguguaa

SEQ ID NO: 455005 - RNA, 21 nt, Artificial Sequence
  Synthetic
uguuaaucuuuacccguguaa

SEQ ID NO: 455006 - RNA, 22 nt, Artificial Sequence
  Synthetic
auguuaaucuuuacccguguaa

SEQ ID NO: 455007 - RNA, 23 nt, Artificial Sequence
  Synthetic
cauguuaaucuuuacccguguaa

SEQ ID NO: 455008 - RNA, 24 nt, Artificial Sequence
  Synthetic
ucauguuaaucuuuacccguguaa

SEQ ID NO: 455009 - RNA, 18 nt, Artificial Sequence
  Synthetic
agaaucagaaagguguaa

SEQ ID NO: 455010 - RNA, 19 nt, Artificial Sequence
  Synthetic
gagaaucagaaagguguaa

SEQ ID NO: 455011 - RNA, 20 nt, Artificial Sequence
  Synthetic
agagaaucagaaagguguaa

SEQ ID NO: 455012 - RNA, 21 nt, Artificial Sequence
  Synthetic
cagagaaucagaaagguguaa

SEQ ID NO: 455013 - RNA, 22 nt, Artificial Sequence
  Synthetic
acagagaaucagaaagguguaa

SEQ ID NO: 455014 - RNA, 23 nt, Artificial Sequence
  Synthetic
uacagagaaucagaaagguguaa

SEQ ID NO: 455015 - RNA, 24 nt, Artificial Sequence
  Synthetic
uuacagagaaucagaaagguguaa

SEQ ID NO: 455016 - RNA, 18 nt, Artificial Sequence
  Synthetic
gguaucccagagguguaa

SEQ ID NO: 455017 - RNA, 19 nt, Artificial Sequence
  Synthetic
agguaucccagagguguaa

SEQ ID NO: 455018 - RNA, 20 nt, Artificial Sequence
  Synthetic
uagguaucccagagguguaa

SEQ ID NO: 455019 - RNA, 21 nt, Artificial Sequence
  Synthetic
cuagguaucccagagguguaa

SEQ ID NO: 455020 - RNA, 22 nt, Artificial Sequence
  Synthetic
acuagguaucccagagguguaa

SEQ ID NO: 455021 - RNA, 23 nt, Artificial Sequence
  Synthetic
gacuagguaucccagagguguaa

SEQ ID NO: 455022 - RNA, 24 nt, Artificial Sequence
  Synthetic
agacuagguaucccagagguguaa

SEQ ID NO: 455023 - RNA, 18 nt, Artificial Sequence
  Synthetic
aggagaaauaugguguaa

SEQ ID NO: 455024 - RNA, 19 nt, Artificial Sequence
  Synthetic
caggagaaauaugguguaa

SEQ ID NO: 455025 - RNA, 20 nt, Artificial Sequence
  Synthetic
ccaggagaaauaugguguaa

SEQ ID NO: 455026 - RNA, 21 nt, Artificial Sequence
  Synthetic
accaggagaaauaugguguaa

SEQ ID NO: 455027 - RNA, 22 nt, Artificial Sequence
  Synthetic
caccaggagaaauaugguguaa

SEQ ID NO: 455028 - RNA, 23 nt, Artificial Sequence
  Synthetic
ucaccaggagaaauaugguguaa

SEQ ID NO: 455029 - RNA, 24 nt, Artificial Sequence
  Synthetic
uucaccaggagaaauaugguguaa

SEQ ID NO: 455030 - RNA, 18 nt, Artificial Sequence
  Synthetic
gaucacuuaccuguguaa

SEQ ID NO: 455031 - RNA, 19 nt, Artificial Sequence
  Synthetic
ugaucacuuaccuguguaa

SEQ ID NO: 455032 - RNA, 20 nt, Artificial Sequence
  Synthetic
cugaucacuuaccuguguaa

SEQ ID NO: 455033 - RNA, 21 nt, Artificial Sequence
  Synthetic
acugaucacuuaccuguguaa

SEQ ID NO: 455034 - RNA, 22 nt, Artificial Sequence
  Synthetic
aacugaucacuuaccuguguaa

SEQ ID NO: 455035 - RNA, 23 nt, Artificial Sequence
  Synthetic
aaacugaucacuuaccuguguaa

SEQ ID NO: 455036 - RNA, 24 nt, Artificial Sequence
  Synthetic
gaaacugaucacuuaccuguguaa

SEQ ID NO: 455037 - RNA, 18 nt, Artificial Sequence
  Synthetic
uugcaggcaaaauuguaa

SEQ ID NO: 455038 - RNA, 19 nt, Artificial Sequence
  Synthetic
uuugcaggcaaaauuguaa

SEQ ID NO: 455039 - RNA, 20 nt, Artificial Sequence
  Synthetic
auuugcaggcaaaauuguaa

SEQ ID NO: 455040 - RNA, 21 nt, Artificial Sequence
  Synthetic
cauuugcaggcaaaauuguaa

SEQ ID NO: 455041 - RNA, 22 nt, Artificial Sequence
  Synthetic
gcauuugcaggcaaaauuguaa

SEQ ID NO: 455042 - RNA, 23 nt, Artificial Sequence
  Synthetic
ugcauuugcaggcaaaauuguaa

SEQ ID NO: 455043 - RNA, 24 nt, Artificial Sequence
  Synthetic
uugcauuugcaggcaaaauuguaa

SEQ ID NO: 455044 - RNA, 18 nt, Artificial Sequence
  Synthetic
gccaccuguccauuguaa

SEQ ID NO: 455045 - RNA, 19 nt, Artificial Sequence
  Synthetic
ggccaccuguccauuguaa

SEQ ID NO: 455046 - RNA, 20 nt, Artificial Sequence
  Synthetic
aggccaccuguccauuguaa

SEQ ID NO: 455047 - RNA, 21 nt, Artificial Sequence
  Synthetic
aaggccaccuguccauuguaa

SEQ ID NO: 455048 - RNA, 22 nt, Artificial Sequence
  Synthetic
uaaggccaccuguccauuguaa

SEQ ID NO: 455049 - RNA, 23 nt, Artificial Sequence
  Synthetic
auaaggccaccuguccauuguaa

SEQ ID NO: 455050 - RNA, 24 nt, Artificial Sequence
  Synthetic
aauaaggccaccuguccauuguaa

SEQ ID NO: 455051 - RNA, 18 nt, Artificial Sequence
  Synthetic
uggagacuaucauuguaa

SEQ ID NO: 455052 - RNA, 19 nt, Artificial Sequence
  Synthetic
uuggagacuaucauuguaa

SEQ ID NO: 455053 - RNA, 20 nt, Artificial Sequence
  Synthetic
auuggagacuaucauuguaa

SEQ ID NO: 455054 - RNA, 21 nt, Artificial Sequence
  Synthetic
gauuggagacuaucauuguaa

SEQ ID NO: 455055 - RNA, 22 nt, Artificial Sequence
  Synthetic
cgauuggagacuaucauuguaa

SEQ ID NO: 455056 - RNA, 23 nt, Artificial Sequence
  Synthetic
gcgauuggagacuaucauuguaa

SEQ ID NO: 455057 - RNA, 24 nt, Artificial Sequence
  Synthetic
ugcgauuggagacuaucauuguaa

SEQ ID NO: 455058 - RNA, 18 nt, Artificial Sequence
  Synthetic
ugucauggaagauuguaa

SEQ ID NO: 455059 - RNA, 19 nt, Artificial Sequence
  Synthetic
augucauggaagauuguaa

SEQ ID NO: 455060 - RNA, 20 nt, Artificial Sequence
  Synthetic
uaugucauggaagauuguaa

SEQ ID NO: 455061 - RNA, 21 nt, Artificial Sequence
  Synthetic
uuaugucauggaagauuguaa

SEQ ID NO: 455062 - RNA, 22 nt, Artificial Sequence
  Synthetic
uuuaugucauggaagauuguaa

SEQ ID NO: 455063 - RNA, 23 nt, Artificial Sequence
  Synthetic
uuuuaugucauggaagauuguaa

SEQ ID NO: 455064 - RNA, 24 nt, Artificial Sequence
  Synthetic
cuuuuaugucauggaagauuguaa

SEQ ID NO: 455065 - RNA, 18 nt, Artificial Sequence
  Synthetic
uacauucgaauauuguaa

SEQ ID NO: 455066 - RNA, 19 nt, Artificial Sequence
  Synthetic
auacauucgaauauuguaa

SEQ ID NO: 455067 - RNA, 20 nt, Artificial Sequence
  Synthetic
cauacauucgaauauuguaa

SEQ ID NO: 455068 - RNA, 21 nt, Artificial Sequence
  Synthetic
gcauacauucgaauauuguaa

SEQ ID NO: 455069 - RNA, 22 nt, Artificial Sequence
  Synthetic
ggcauacauucgaauauuguaa

SEQ ID NO: 455070 - RNA, 23 nt, Artificial Sequence
  Synthetic
aggcauacauucgaauauuguaa

SEQ ID NO: 455071 - RNA, 24 nt, Artificial Sequence
  Synthetic
caggcauacauucgaauauuguaa

SEQ ID NO: 455072 - RNA, 18 nt, Artificial Sequence
  Synthetic
auuuuacugcuauuguaa

SEQ ID NO: 455073 - RNA, 19 nt, Artificial Sequence
  Synthetic
gauuuuacugcuauuguaa

SEQ ID NO: 455074 - RNA, 20 nt, Artificial Sequence
  Synthetic
ugauuuuacugcuauuguaa

SEQ ID NO: 455075 - RNA, 21 nt, Artificial Sequence
  Synthetic
augauuuuacugcuauuguaa

SEQ ID NO: 455076 - RNA, 22 nt, Artificial Sequence
  Synthetic
aaugauuuuacugcuauuguaa

SEQ ID NO: 455077 - RNA, 23 nt, Artificial Sequence
  Synthetic
aaaugauuuuacugcuauuguaa

SEQ ID NO: 455078 - RNA, 24 nt, Artificial Sequence
  Synthetic
uaaaugauuuuacugcuauuguaa

SEQ ID NO: 455079 - RNA, 18 nt, Artificial Sequence
  Synthetic
cuguuuagucuauuguaa

SEQ ID NO: 455080 - RNA, 19 nt, Artificial Sequence
  Synthetic
ucuguuuagucuauuguaa

SEQ ID NO: 455081 - RNA, 20 nt, Artificial Sequence
  Synthetic
uucuguuuagucuauuguaa

SEQ ID NO: 455082 - RNA, 21 nt, Artificial Sequence
  Synthetic
cuucuguuuagucuauuguaa

SEQ ID NO: 455083 - RNA, 22 nt, Artificial Sequence
  Synthetic
acuucuguuuagucuauuguaa

SEQ ID NO: 455084 - RNA, 23 nt, Artificial Sequence
  Synthetic
uacuucuguuuagucuauuguaa

SEQ ID NO: 455085 - RNA, 24 nt, Artificial Sequence
  Synthetic
cuacuucuguuuagucuauuguaa

SEQ ID NO: 455086 - RNA, 18 nt, Artificial Sequence
  Synthetic
cucaauaugguauuguaa

SEQ ID NO: 455087 - RNA, 19 nt, Artificial Sequence
  Synthetic
acucaauaugguauuguaa

SEQ ID NO: 455088 - RNA, 20 nt, Artificial Sequence
  Synthetic
aacucaauaugguauuguaa

SEQ ID NO: 455089 - RNA, 21 nt, Artificial Sequence
  Synthetic
uaacucaauaugguauuguaa

SEQ ID NO: 455090 - RNA, 22 nt, Artificial Sequence
  Synthetic
auaacucaauaugguauuguaa

SEQ ID NO: 455091 - RNA, 23 nt, Artificial Sequence
  Synthetic
uauaacucaauaugguauuguaa

SEQ ID NO: 455092 - RNA, 24 nt, Artificial Sequence
  Synthetic
auauaacucaauaugguauuguaa

SEQ ID NO: 455093 - RNA, 18 nt, Artificial Sequence
  Synthetic
uauauuuauuacuuguaa

SEQ ID NO: 455094 - RNA, 19 nt, Artificial Sequence
  Synthetic
auauauuuauuacuuguaa

SEQ ID NO: 455095 - RNA, 20 nt, Artificial Sequence
  Synthetic
gauauauuuauuacuuguaa

SEQ ID NO: 455096 - RNA, 21 nt, Artificial Sequence
  Synthetic
ugauauauuuauuacuuguaa

SEQ ID NO: 455097 - RNA, 22 nt, Artificial Sequence
  Synthetic
augauauauuuauuacuuguaa

SEQ ID NO: 455098 - RNA, 23 nt, Artificial Sequence
  Synthetic
aaugauauauuuauuacuuguaa

SEQ ID NO: 455099 - RNA, 24 nt, Artificial Sequence
  Synthetic
aaaugauauauuuauuacuuguaa

SEQ ID NO: 455100 - RNA, 18 nt, Artificial Sequence
  Synthetic
uuaaggguucccuuguaa

SEQ ID NO: 455101 - RNA, 19 nt, Artificial Sequence
  Synthetic
auuaaggguucccuuguaa

SEQ ID NO: 455102 - RNA, 20 nt, Artificial Sequence
  Synthetic
gauuaaggguucccuuguaa

SEQ ID NO: 455103 - RNA, 21 nt, Artificial Sequence
  Synthetic
ggauuaaggguucccuuguaa

SEQ ID NO: 455104 - RNA, 22 nt, Artificial Sequence
  Synthetic
aggauuaaggguucccuuguaa

SEQ ID NO: 455105 - RNA, 23 nt, Artificial Sequence
  Synthetic
uaggauuaaggguucccuuguaa

SEQ ID NO: 455106 - RNA, 24 nt, Artificial Sequence
  Synthetic
uuaggauuaaggguucccuuguaa

SEQ ID NO: 455107 - RNA, 18 nt, Artificial Sequence
  Synthetic
acuaucccuuccuuguaa

SEQ ID NO: 455108 - RNA, 19 nt, Artificial Sequence
  Synthetic
uacuaucccuuccuuguaa

SEQ ID NO: 455109 - RNA, 20 nt, Artificial Sequence
  Synthetic
auacuaucccuuccuuguaa

SEQ ID NO: 455110 - RNA, 21 nt, Artificial Sequence
  Synthetic
cauacuaucccuuccuuguaa

SEQ ID NO: 455111 - RNA, 22 nt, Artificial Sequence
  Synthetic
ccauacuaucccuuccuuguaa

SEQ ID NO: 455112 - RNA, 23 nt, Artificial Sequence
  Synthetic
cccauacuaucccuuccuuguaa

SEQ ID NO: 455113 - RNA, 24 nt, Artificial Sequence
  Synthetic
ucccauacuaucccuuccuuguaa

SEQ ID NO: 455114 - RNA, 18 nt, Artificial Sequence
  Synthetic
gcagcaaaauucuuguaa

SEQ ID NO: 455115 - RNA, 19 nt, Artificial Sequence
  Synthetic
ggcagcaaaauucuuguaa

SEQ ID NO: 455116 - RNA, 20 nt, Artificial Sequence
  Synthetic
aggcagcaaaauucuuguaa

SEQ ID NO: 455117 - RNA, 21 nt, Artificial Sequence
  Synthetic
uaggcagcaaaauucuuguaa

SEQ ID NO: 455118 - RNA, 22 nt, Artificial Sequence
  Synthetic
auaggcagcaaaauucuuguaa

SEQ ID NO: 455119 - RNA, 23 nt, Artificial Sequence
  Synthetic
uauaggcagcaaaauucuuguaa

SEQ ID NO: 455120 - RNA, 24 nt, Artificial Sequence
  Synthetic
cuauaggcagcaaaauucuuguaa

SEQ ID NO: 455121 - RNA, 18 nt, Artificial Sequence
  Synthetic
aacuaacgaacguuguaa

SEQ ID NO: 455122 - RNA, 19 nt, Artificial Sequence
  Synthetic
aaacuaacgaacguuguaa

SEQ ID NO: 455123 - RNA, 20 nt, Artificial Sequence
  Synthetic
gaaacuaacgaacguuguaa

SEQ ID NO: 455124 - RNA, 21 nt, Artificial Sequence
  Synthetic
agaaacuaacgaacguuguaa

SEQ ID NO: 455125 - RNA, 22 nt, Artificial Sequence
  Synthetic
uagaaacuaacgaacguuguaa

SEQ ID NO: 455126 - RNA, 23 nt, Artificial Sequence
  Synthetic
guagaaacuaacgaacguuguaa

SEQ ID NO: 455127 - RNA, 24 nt, Artificial Sequence
  Synthetic
gguagaaacuaacgaacguuguaa

SEQ ID NO: 455128 - RNA, 18 nt, Artificial Sequence
  Synthetic
ucuccccugauguuguaa

SEQ ID NO: 455129 - RNA, 19 nt, Artificial Sequence
  Synthetic
uucuccccugauguuguaa

SEQ ID NO: 455130 - RNA, 20 nt, Artificial Sequence
  Synthetic
cuucuccccugauguuguaa

SEQ ID NO: 455131 - RNA, 21 nt, Artificial Sequence
  Synthetic
ccuucuccccugauguuguaa

SEQ ID NO: 455132 - RNA, 22 nt, Artificial Sequence
  Synthetic
cccuucuccccugauguuguaa

SEQ ID NO: 455133 - RNA, 23 nt, Artificial Sequence
  Synthetic
ucccuucuccccugauguuguaa

SEQ ID NO: 455134 - RNA, 24 nt, Artificial Sequence
  Synthetic
uucccuucuccccugauguuguaa

SEQ ID NO: 455135 - RNA, 18 nt, Artificial Sequence
  Synthetic
aauaaguacaauuuguaa

SEQ ID NO: 455136 - RNA, 19 nt, Artificial Sequence
  Synthetic
aaauaaguacaauuuguaa

SEQ ID NO: 455137 - RNA, 20 nt, Artificial Sequence
  Synthetic
aaaauaaguacaauuuguaa

SEQ ID NO: 455138 - RNA, 21 nt, Artificial Sequence
  Synthetic
aaaaauaaguacaauuuguaa

SEQ ID NO: 455139 - RNA, 22 nt, Artificial Sequence
  Synthetic
caaaaauaaguacaauuuguaa

SEQ ID NO: 455140 - RNA, 23 nt, Artificial Sequence
  Synthetic
ucaaaaauaaguacaauuuguaa

SEQ ID NO: 455141 - RNA, 24 nt, Artificial Sequence
  Synthetic
aucaaaaauaaguacaauuuguaa

SEQ ID NO: 455142 - RNA, 18 nt, Artificial Sequence
  Synthetic
uuagauugucguuuguaa

SEQ ID NO: 455143 - RNA, 19 nt, Artificial Sequence
  Synthetic
auuagauugucguuuguaa

SEQ ID NO: 455144 - RNA, 20 nt, Artificial Sequence
  Synthetic
uauuagauugucguuuguaa

SEQ ID NO: 455145 - RNA, 21 nt, Artificial Sequence
  Synthetic
uuauuagauugucguuuguaa

SEQ ID NO: 455146 - RNA, 22 nt, Artificial Sequence
  Synthetic
auuauuagauugucguuuguaa

SEQ ID NO: 455147 - RNA, 23 nt, Artificial Sequence
  Synthetic
uauuauuagauugucguuuguaa

SEQ ID NO: 455148 - RNA, 24 nt, Artificial Sequence
  Synthetic
uuauuauuagauugucguuuguaa

SEQ ID NO: 455149 - RNA, 18 nt, Artificial Sequence
  Synthetic
aucugugcauguuuguaa

SEQ ID NO: 455150 - RNA, 19 nt, Artificial Sequence
  Synthetic
aaucugugcauguuuguaa

SEQ ID NO: 455151 - RNA, 20 nt, Artificial Sequence
  Synthetic
caaucugugcauguuuguaa

SEQ ID NO: 455152 - RNA, 21 nt, Artificial Sequence
  Synthetic
acaaucugugcauguuuguaa

SEQ ID NO: 455153 - RNA, 22 nt, Artificial Sequence
  Synthetic
gacaaucugugcauguuuguaa

SEQ ID NO: 455154 - RNA, 23 nt, Artificial Sequence
  Synthetic
agacaaucugugcauguuuguaa

SEQ ID NO: 455155 - RNA, 24 nt, Artificial Sequence
  Synthetic
cagacaaucugugcauguuuguaa

SEQ ID NO: 455156 - RNA, 18 nt, Artificial Sequence
  Synthetic
gaauucuuuuguuuguaa

SEQ ID NO: 455157 - RNA, 19 nt, Artificial Sequence
  Synthetic
ggaauucuuuuguuuguaa

SEQ ID NO: 455158 - RNA, 20 nt, Artificial Sequence
  Synthetic
gggaauucuuuuguuuguaa

SEQ ID NO: 455159 - RNA, 21 nt, Artificial Sequence
  Synthetic
ugggaauucuuuuguuuguaa

SEQ ID NO: 455160 - RNA, 22 nt, Artificial Sequence
  Synthetic
uugggaauucuuuuguuuguaa

SEQ ID NO: 455161 - RNA, 23 nt, Artificial Sequence
  Synthetic
uuugggaauucuuuuguuuguaa

SEQ ID NO: 455162 - RNA, 24 nt, Artificial Sequence
  Synthetic
cuuugggaauucuuuuguuuguaa

SEQ ID NO: 455163 - RNA, 18 nt, Artificial Sequence
  Synthetic
agguacucuuuuuuguaa

SEQ ID NO: 455164 - RNA, 19 nt, Artificial Sequence
  Synthetic
aagguacucuuuuuuguaa

SEQ ID NO: 455165 - RNA, 20 nt, Artificial Sequence
  Synthetic
uaagguacucuuuuuuguaa

SEQ ID NO: 455166 - RNA, 21 nt, Artificial Sequence
  Synthetic
auaagguacucuuuuuuguaa

SEQ ID NO: 455167 - RNA, 22 nt, Artificial Sequence
  Synthetic
aauaagguacucuuuuuuguaa

SEQ ID NO: 455168 - RNA, 23 nt, Artificial Sequence
  Synthetic
gaauaagguacucuuuuuuguaa

SEQ ID NO: 455169 - RNA, 24 nt, Artificial Sequence
  Synthetic
ugaauaagguacucuuuuuuguaa

SEQ ID NO: 455170 - RNA, 18 nt, Artificial Sequence
  Synthetic
aaaaauacaaaaaauuaa

SEQ ID NO: 455171 - RNA, 19 nt, Artificial Sequence
  Synthetic
caaaaauacaaaaaauuaa

SEQ ID NO: 455172 - RNA, 20 nt, Artificial Sequence
  Synthetic
ccaaaaauacaaaaaauuaa

SEQ ID NO: 455173 - RNA, 21 nt, Artificial Sequence
  Synthetic
accaaaaauacaaaaaauuaa

SEQ ID NO: 455174 - RNA, 22 nt, Artificial Sequence
  Synthetic
uaccaaaaauacaaaaaauuaa

SEQ ID NO: 455175 - RNA, 23 nt, Artificial Sequence
  Synthetic
cuaccaaaaauacaaaaaauuaa

SEQ ID NO: 455176 - RNA, 24 nt, Artificial Sequence
  Synthetic
ucuaccaaaaauacaaaaaauuaa

SEQ ID NO: 455177 - RNA, 18 nt, Artificial Sequence
  Synthetic
auuugagagaaaaauuaa

SEQ ID NO: 455178 - RNA, 19 nt, Artificial Sequence
  Synthetic
aauuugagagaaaaauuaa

SEQ ID NO: 455179 - RNA, 20 nt, Artificial Sequence
  Synthetic
caauuugagagaaaaauuaa

SEQ ID NO: 455180 - RNA, 21 nt, Artificial Sequence
  Synthetic
ucaauuugagagaaaaauuaa

SEQ ID NO: 455181 - RNA, 22 nt, Artificial Sequence
  Synthetic
aucaauuugagagaaaaauuaa

SEQ ID NO: 455182 - RNA, 23 nt, Artificial Sequence
  Synthetic
gaucaauuugagagaaaaauuaa

SEQ ID NO: 455183 - RNA, 24 nt, Artificial Sequence
  Synthetic
agaucaauuugagagaaaaauuaa

SEQ ID NO: 455184 - RNA, 18 nt, Artificial Sequence
  Synthetic
cuuugcaaugaaaauuaa

SEQ ID NO: 455185 - RNA, 19 nt, Artificial Sequence
  Synthetic
ccuuugcaaugaaaauuaa

SEQ ID NO: 455186 - RNA, 20 nt, Artificial Sequence
  Synthetic
gccuuugcaaugaaaauuaa

SEQ ID NO: 455187 - RNA, 21 nt, Artificial Sequence
  Synthetic
ggccuuugcaaugaaaauuaa

SEQ ID NO: 455188 - RNA, 22 nt, Artificial Sequence
  Synthetic
aggccuuugcaaugaaaauuaa

SEQ ID NO: 455189 - RNA, 23 nt, Artificial Sequence
  Synthetic
uaggccuuugcaaugaaaauuaa

SEQ ID NO: 455190 - RNA, 24 nt, Artificial Sequence
  Synthetic
uuaggccuuugcaaugaaaauuaa

SEQ ID NO: 455191 - RNA, 18 nt, Artificial Sequence
  Synthetic
ugaauugaauaaaauuaa

SEQ ID NO: 455192 - RNA, 19 nt, Artificial Sequence
  Synthetic
cugaauugaauaaaauuaa

SEQ ID NO: 455193 - RNA, 20 nt, Artificial Sequence
  Synthetic
ucugaauugaauaaaauuaa

SEQ ID NO: 455194 - RNA, 21 nt, Artificial Sequence
  Synthetic
uucugaauugaauaaaauuaa

SEQ ID NO: 455195 - RNA, 22 nt, Artificial Sequence
  Synthetic
uuucugaauugaauaaaauuaa

SEQ ID NO: 455196 - RNA, 23 nt, Artificial Sequence
  Synthetic
auuucugaauugaauaaaauuaa

SEQ ID NO: 455197 - RNA, 24 nt, Artificial Sequence
  Synthetic
uauuucugaauugaauaaaauuaa

SEQ ID NO: 455198 - RNA, 18 nt, Artificial Sequence
  Synthetic
cccuaaguauaaaauuaa

SEQ ID NO: 455199 - RNA, 19 nt, Artificial Sequence
  Synthetic
acccuaaguauaaaauuaa

SEQ ID NO: 455200 - RNA, 20 nt, Artificial Sequence
  Synthetic
aacccuaaguauaaaauuaa

SEQ ID NO: 455201 - RNA, 21 nt, Artificial Sequence
  Synthetic
caacccuaaguauaaaauuaa

SEQ ID NO: 455202 - RNA, 22 nt, Artificial Sequence
  Synthetic
ucaacccuaaguauaaaauuaa

SEQ ID NO: 455203 - RNA, 23 nt, Artificial Sequence
  Synthetic
aucaacccuaaguauaaaauuaa

SEQ ID NO: 455204 - RNA, 24 nt, Artificial Sequence
  Synthetic
aaucaacccuaaguauaaaauuaa

SEQ ID NO: 455205 - RNA, 18 nt, Artificial Sequence
  Synthetic
gcccuccuguaaaauuaa

SEQ ID NO: 455206 - RNA, 19 nt, Artificial Sequence
  Synthetic
ugcccuccuguaaaauuaa

SEQ ID NO: 455207 - RNA, 20 nt, Artificial Sequence
  Synthetic
uugcccuccuguaaaauuaa

SEQ ID NO: 455208 - RNA, 21 nt, Artificial Sequence
  Synthetic
guugcccuccuguaaaauuaa

SEQ ID NO: 455209 - RNA, 22 nt, Artificial Sequence
  Synthetic
cguugcccuccuguaaaauuaa

SEQ ID NO: 455210 - RNA, 23 nt, Artificial Sequence
  Synthetic
ucguugcccuccuguaaaauuaa

SEQ ID NO: 455211 - RNA, 24 nt, Artificial Sequence
  Synthetic
uucguugcccuccuguaaaauuaa

SEQ ID NO: 455212 - RNA, 18 nt, Artificial Sequence
  Synthetic
aaauauacaccaaauuaa

SEQ ID NO: 455213 - RNA, 19 nt, Artificial Sequence
  Synthetic
aaaauauacaccaaauuaa

SEQ ID NO: 455214 - RNA, 20 nt, Artificial Sequence
  Synthetic
aaaaauauacaccaaauuaa

SEQ ID NO: 455215 - RNA, 21 nt, Artificial Sequence
  Synthetic
uaaaaauauacaccaaauuaa

SEQ ID NO: 455216 - RNA, 22 nt, Artificial Sequence
  Synthetic
uuaaaaauauacaccaaauuaa

SEQ ID NO: 455217 - RNA, 23 nt, Artificial Sequence
  Synthetic
uuuaaaaauauacaccaaauuaa

SEQ ID NO: 455218 - RNA, 24 nt, Artificial Sequence
  Synthetic
uuuuaaaaauauacaccaaauuaa

SEQ ID NO: 455219 - RNA, 18 nt, Artificial Sequence
  Synthetic
cauuaccacagaaauuaa

SEQ ID NO: 455220 - RNA, 19 nt, Artificial Sequence
  Synthetic
ccauuaccacagaaauuaa

SEQ ID NO: 455221 - RNA, 20 nt, Artificial Sequence
  Synthetic
cccauuaccacagaaauuaa

SEQ ID NO: 455222 - RNA, 21 nt, Artificial Sequence
  Synthetic
ucccauuaccacagaaauuaa

SEQ ID NO: 455223 - RNA, 22 nt, Artificial Sequence
  Synthetic
uucccauuaccacagaaauuaa

SEQ ID NO: 455224 - RNA, 23 nt, Artificial Sequence
  Synthetic
cuucccauuaccacagaaauuaa

SEQ ID NO: 455225 - RNA, 24 nt, Artificial Sequence
  Synthetic
ccuucccauuaccacagaaauuaa

SEQ ID NO: 455226 - RNA, 18 nt, Artificial Sequence
  Synthetic
cucagaaguagaaauuaa

SEQ ID NO: 455227 - RNA, 19 nt, Artificial Sequence
  Synthetic
ccucagaaguagaaauuaa

SEQ ID NO: 455228 - RNA, 20 nt, Artificial Sequence
  Synthetic
uccucagaaguagaaauuaa

SEQ ID NO: 455229 - RNA, 21 nt, Artificial Sequence
  Synthetic
uuccucagaaguagaaauuaa

SEQ ID NO: 455230 - RNA, 22 nt, Artificial Sequence
  Synthetic
auuccucagaaguagaaauuaa

SEQ ID NO: 455231 - RNA, 23 nt, Artificial Sequence
  Synthetic
cauuccucagaaguagaaauuaa

SEQ ID NO: 455232 - RNA, 24 nt, Artificial Sequence
  Synthetic
ucauuccucagaaguagaaauuaa

SEQ ID NO: 455233 - RNA, 18 nt, Artificial Sequence
  Synthetic
uuuaaauuuggaaauuaa

SEQ ID NO: 455234 - RNA, 19 nt, Artificial Sequence
  Synthetic
auuuaaauuuggaaauuaa

SEQ ID NO: 455235 - RNA, 20 nt, Artificial Sequence
  Synthetic
cauuuaaauuuggaaauuaa

SEQ ID NO: 455236 - RNA, 21 nt, Artificial Sequence
  Synthetic
acauuuaaauuuggaaauuaa

SEQ ID NO: 455237 - RNA, 22 nt, Artificial Sequence
  Synthetic
gacauuuaaauuuggaaauuaa

SEQ ID NO: 455238 - RNA, 23 nt, Artificial Sequence
  Synthetic
agacauuuaaauuuggaaauuaa

SEQ ID NO: 455239 - RNA, 24 nt, Artificial Sequence
  Synthetic
uagacauuuaaauuuggaaauuaa

SEQ ID NO: 455240 - RNA, 18 nt, Artificial Sequence
  Synthetic
uguucccaaugaaauuaa

SEQ ID NO: 455241 - RNA, 19 nt, Artificial Sequence
  Synthetic
auguucccaaugaaauuaa

SEQ ID NO: 455242 - RNA, 20 nt, Artificial Sequence
  Synthetic
aauguucccaaugaaauuaa

SEQ ID NO: 455243 - RNA, 21 nt, Artificial Sequence
  Synthetic
aaauguucccaaugaaauuaa

SEQ ID NO: 455244 - RNA, 22 nt, Artificial Sequence
  Synthetic
caaauguucccaaugaaauuaa

SEQ ID NO: 455245 - RNA, 23 nt, Artificial Sequence
  Synthetic
acaaauguucccaaugaaauuaa

SEQ ID NO: 455246 - RNA, 24 nt, Artificial Sequence
  Synthetic
uacaaauguucccaaugaaauuaa

SEQ ID NO: 455247 - RNA, 18 nt, Artificial Sequence
  Synthetic
aaaccugcuugaaauuaa

SEQ ID NO: 455248 - RNA, 19 nt, Artificial Sequence
  Synthetic
gaaaccugcuugaaauuaa

SEQ ID NO: 455249 - RNA, 20 nt, Artificial Sequence
  Synthetic
agaaaccugcuugaaauuaa

SEQ ID NO: 455250 - RNA, 21 nt, Artificial Sequence
  Synthetic
gagaaaccugcuugaaauuaa

SEQ ID NO: 455251 - RNA, 22 nt, Artificial Sequence
  Synthetic
cgagaaaccugcuugaaauuaa

SEQ ID NO: 455252 - RNA, 23 nt, Artificial Sequence
  Synthetic
ucgagaaaccugcuugaaauuaa

SEQ ID NO: 455253 - RNA, 24 nt, Artificial Sequence
  Synthetic
aucgagaaaccugcuugaaauuaa

SEQ ID NO: 455254 - RNA, 18 nt, Artificial Sequence
  Synthetic
uauauaaauuuaaauuaa

SEQ ID NO: 455255 - RNA, 19 nt, Artificial Sequence
  Synthetic
cuauauaaauuuaaauuaa

SEQ ID NO: 455256 - RNA, 20 nt, Artificial Sequence
  Synthetic
gcuauauaaauuuaaauuaa

SEQ ID NO: 455257 - RNA, 21 nt, Artificial Sequence
  Synthetic
ggcuauauaaauuuaaauuaa

SEQ ID NO: 455258 - RNA, 22 nt, Artificial Sequence
  Synthetic
uggcuauauaaauuuaaauuaa

SEQ ID NO: 455259 - RNA, 23 nt, Artificial Sequence
  Synthetic
guggcuauauaaauuuaaauuaa

SEQ ID NO: 455260 - RNA, 24 nt, Artificial Sequence
  Synthetic
uguggcuauauaaauuuaaauuaa

SEQ ID NO: 455261 - RNA, 18 nt, Artificial Sequence
  Synthetic
ccaucuuagaacaauuaa

SEQ ID NO: 455262 - RNA, 19 nt, Artificial Sequence
  Synthetic
uccaucuuagaacaauuaa

SEQ ID NO: 455263 - RNA, 20 nt, Artificial Sequence
  Synthetic
auccaucuuagaacaauuaa

SEQ ID NO: 455264 - RNA, 21 nt, Artificial Sequence
  Synthetic
uauccaucuuagaacaauuaa

SEQ ID NO: 455265 - RNA, 22 nt, Artificial Sequence
  Synthetic
auauccaucuuagaacaauuaa

SEQ ID NO: 455266 - RNA, 23 nt, Artificial Sequence
  Synthetic
gauauccaucuuagaacaauuaa

SEQ ID NO: 455267 - RNA, 24 nt, Artificial Sequence
  Synthetic
ugauauccaucuuagaacaauuaa

SEQ ID NO: 455268 - RNA, 18 nt, Artificial Sequence
  Synthetic
cccuaacaucacaauuaa

SEQ ID NO: 455269 - RNA, 19 nt, Artificial Sequence
  Synthetic
acccuaacaucacaauuaa

SEQ ID NO: 455270 - RNA, 20 nt, Artificial Sequence
  Synthetic
cacccuaacaucacaauuaa

SEQ ID NO: 455271 - RNA, 21 nt, Artificial Sequence
  Synthetic
acacccuaacaucacaauuaa

SEQ ID NO: 455272 - RNA, 22 nt, Artificial Sequence
  Synthetic
gacacccuaacaucacaauuaa

SEQ ID NO: 455273 - RNA, 23 nt, Artificial Sequence
  Synthetic
ugacacccuaacaucacaauuaa

SEQ ID NO: 455274 - RNA, 24 nt, Artificial Sequence
  Synthetic
uugacacccuaacaucacaauuaa

SEQ ID NO: 455275 - RNA, 18 nt, Artificial Sequence
  Synthetic
agauauugcgacaauuaa

SEQ ID NO: 455276 - RNA, 19 nt, Artificial Sequence
  Synthetic
gagauauugcgacaauuaa

SEQ ID NO: 455277 - RNA, 20 nt, Artificial Sequence
  Synthetic
ugagauauugcgacaauuaa

SEQ ID NO: 455278 - RNA, 21 nt, Artificial Sequence
  Synthetic
cugagauauugcgacaauuaa

SEQ ID NO: 455279 - RNA, 22 nt, Artificial Sequence
  Synthetic
acugagauauugcgacaauuaa

SEQ ID NO: 455280 - RNA, 23 nt, Artificial Sequence
  Synthetic
aacugagauauugcgacaauuaa

SEQ ID NO: 455281 - RNA, 24 nt, Artificial Sequence
  Synthetic
uaacugagauauugcgacaauuaa

SEQ ID NO: 455282 - RNA, 18 nt, Artificial Sequence
  Synthetic
acuucacaaaagaauuaa

SEQ ID NO: 455283 - RNA, 19 nt, Artificial Sequence
  Synthetic
aacuucacaaaagaauuaa

SEQ ID NO: 455284 - RNA, 20 nt, Artificial Sequence
  Synthetic
gaacuucacaaaagaauuaa

SEQ ID NO: 455285 - RNA, 21 nt, Artificial Sequence
  Synthetic
agaacuucacaaaagaauuaa

SEQ ID NO: 455286 - RNA, 22 nt, Artificial Sequence
  Synthetic
aagaacuucacaaaagaauuaa

SEQ ID NO: 455287 - RNA, 23 nt, Artificial Sequence
  Synthetic
aaagaacuucacaaaagaauuaa

SEQ ID NO: 455288 - RNA, 24 nt, Artificial Sequence
  Synthetic
gaaagaacuucacaaaagaauuaa

SEQ ID NO: 455289 - RNA, 18 nt, Artificial Sequence
  Synthetic
acaauuaagaggaauuaa

SEQ ID NO: 455290 - RNA, 19 nt, Artificial Sequence
  Synthetic
aacaauuaagaggaauuaa

SEQ ID NO: 455291 - RNA, 20 nt, Artificial Sequence
  Synthetic
gaacaauuaagaggaauuaa

SEQ ID NO: 455292 - RNA, 21 nt, Artificial Sequence
  Synthetic
agaacaauuaagaggaauuaa

SEQ ID NO: 455293 - RNA, 22 nt, Artificial Sequence
  Synthetic
uagaacaauuaagaggaauuaa

SEQ ID NO: 455294 - RNA, 23 nt, Artificial Sequence
  Synthetic
uuagaacaauuaagaggaauuaa

SEQ ID NO: 455295 - RNA, 24 nt, Artificial Sequence
  Synthetic
cuuagaacaauuaagaggaauuaa

SEQ ID NO: 455296 - RNA, 18 nt, Artificial Sequence
  Synthetic
aagagacagaauaauuaa

SEQ ID NO: 455297 - RNA, 19 nt, Artificial Sequence
  Synthetic
caagagacagaauaauuaa

SEQ ID NO: 455298 - RNA, 20 nt, Artificial Sequence
  Synthetic
ucaagagacagaauaauuaa

SEQ ID NO: 455299 - RNA, 21 nt, Artificial Sequence
  Synthetic
uucaagagacagaauaauuaa

SEQ ID NO: 455300 - RNA, 22 nt, Artificial Sequence
  Synthetic
auucaagagacagaauaauuaa

SEQ ID NO: 455301 - RNA, 23 nt, Artificial Sequence
  Synthetic
cauucaagagacagaauaauuaa

SEQ ID NO: 455302 - RNA, 24 nt, Artificial Sequence
  Synthetic
gcauucaagagacagaauaauuaa

SEQ ID NO: 455303 - RNA, 18 nt, Artificial Sequence
  Synthetic
gaaugcaucacuaauuaa

SEQ ID NO: 455304 - RNA, 19 nt, Artificial Sequence
  Synthetic
ugaaugcaucacuaauuaa

SEQ ID NO: 455305 - RNA, 20 nt, Artificial Sequence
  Synthetic
uugaaugcaucacuaauuaa

SEQ ID NO: 455306 - RNA, 21 nt, Artificial Sequence
  Synthetic
auugaaugcaucacuaauuaa

SEQ ID NO: 455307 - RNA, 22 nt, Artificial Sequence
  Synthetic
uauugaaugcaucacuaauuaa

SEQ ID NO: 455308 - RNA, 23 nt, Artificial Sequence
  Synthetic
uuauugaaugcaucacuaauuaa

SEQ ID NO: 455309 - RNA, 24 nt, Artificial Sequence
  Synthetic
cuuauugaaugcaucacuaauuaa

SEQ ID NO: 455310 - RNA, 18 nt, Artificial Sequence
  Synthetic
caaaugggaucuaauuaa

SEQ ID NO: 455311 - RNA, 19 nt, Artificial Sequence
  Synthetic
acaaaugggaucuaauuaa

SEQ ID NO: 455312 - RNA, 20 nt, Artificial Sequence
  Synthetic
gacaaaugggaucuaauuaa

SEQ ID NO: 455313 - RNA, 21 nt, Artificial Sequence
  Synthetic
ugacaaaugggaucuaauuaa

SEQ ID NO: 455314 - RNA, 22 nt, Artificial Sequence
  Synthetic
uugacaaaugggaucuaauuaa

SEQ ID NO: 455315 - RNA, 23 nt, Artificial Sequence
  Synthetic
auugacaaaugggaucuaauuaa

SEQ ID NO: 455316 - RNA, 24 nt, Artificial Sequence
  Synthetic
aauugacaaaugggaucuaauuaa

SEQ ID NO: 455317 - RNA, 18 nt, Artificial Sequence
  Synthetic
aaccacaagaguaauuaa

SEQ ID NO: 455318 - RNA, 19 nt, Artificial Sequence
  Synthetic
aaaccacaagaguaauuaa

SEQ ID NO: 455319 - RNA, 20 nt, Artificial Sequence
  Synthetic
caaaccacaagaguaauuaa

SEQ ID NO: 455320 - RNA, 21 nt, Artificial Sequence
  Synthetic
acaaaccacaagaguaauuaa

SEQ ID NO: 455321 - RNA, 22 nt, Artificial Sequence
  Synthetic
gacaaaccacaagaguaauuaa

SEQ ID NO: 455322 - RNA, 23 nt, Artificial Sequence
  Synthetic
agacaaaccacaagaguaauuaa

SEQ ID NO: 455323 - RNA, 24 nt, Artificial Sequence
  Synthetic
aagacaaaccacaagaguaauuaa

SEQ ID NO: 455324 - RNA, 18 nt, Artificial Sequence
  Synthetic
uuuugaaaagguaauuaa

SEQ ID NO: 455325 - RNA, 19 nt, Artificial Sequence
  Synthetic
auuuugaaaagguaauuaa

SEQ ID NO: 455326 - RNA, 20 nt, Artificial Sequence
  Synthetic
uauuuugaaaagguaauuaa

SEQ ID NO: 455327 - RNA, 21 nt, Artificial Sequence
  Synthetic
auauuuugaaaagguaauuaa

SEQ ID NO: 455328 - RNA, 22 nt, Artificial Sequence
  Synthetic
uauauuuugaaaagguaauuaa

SEQ ID NO: 455329 - RNA, 23 nt, Artificial Sequence
  Synthetic
auauauuuugaaaagguaauuaa

SEQ ID NO: 455330 - RNA, 24 nt, Artificial Sequence
  Synthetic
cauauauuuugaaaagguaauuaa

SEQ ID NO: 455331 - RNA, 18 nt, Artificial Sequence
  Synthetic
uuacuguaagguaauuaa

SEQ ID NO: 455332 - RNA, 19 nt, Artificial Sequence
  Synthetic
uuuacuguaagguaauuaa

SEQ ID NO: 455333 - RNA, 20 nt, Artificial Sequence
  Synthetic
auuuacuguaagguaauuaa

SEQ ID NO: 455334 - RNA, 21 nt, Artificial Sequence
  Synthetic
uauuuacuguaagguaauuaa

SEQ ID NO: 455335 - RNA, 22 nt, Artificial Sequence
  Synthetic
auauuuacuguaagguaauuaa

SEQ ID NO: 455336 - RNA, 23 nt, Artificial Sequence
  Synthetic
aauauuuacuguaagguaauuaa

SEQ ID NO: 455337 - RNA, 24 nt, Artificial Sequence
  Synthetic
caauauuuacuguaagguaauuaa

SEQ ID NO: 455338 - RNA, 18 nt, Artificial Sequence
  Synthetic
uuggaaaucauuaauuaa

SEQ ID NO: 455339 - RNA, 19 nt, Artificial Sequence
  Synthetic
cuuggaaaucauuaauuaa

SEQ ID NO: 455340 - RNA, 20 nt, Artificial Sequence
  Synthetic
ccuuggaaaucauuaauuaa

SEQ ID NO: 455341 - RNA, 21 nt, Artificial Sequence
  Synthetic
accuuggaaaucauuaauuaa

SEQ ID NO: 455342 - RNA, 22 nt, Artificial Sequence
  Synthetic
aaccuuggaaaucauuaauuaa

SEQ ID NO: 455343 - RNA, 23 nt, Artificial Sequence
  Synthetic
aaaccuuggaaaucauuaauuaa

SEQ ID NO: 455344 - RNA, 24 nt, Artificial Sequence
  Synthetic
aaaaccuuggaaaucauuaauuaa

SEQ ID NO: 455345 - RNA, 18 nt, Artificial Sequence
  Synthetic
ugugauacacaacauuaa

SEQ ID NO: 455346 - RNA, 19 nt, Artificial Sequence
  Synthetic
gugugauacacaacauuaa

SEQ ID NO: 455347 - RNA, 20 nt, Artificial Sequence
  Synthetic
agugugauacacaacauuaa

SEQ ID NO: 455348 - RNA, 21 nt, Artificial Sequence
  Synthetic
cagugugauacacaacauuaa

SEQ ID NO: 455349 - RNA, 22 nt, Artificial Sequence
  Synthetic
ucagugugauacacaacauuaa

SEQ ID NO: 455350 - RNA, 23 nt, Artificial Sequence
  Synthetic
aucagugugauacacaacauuaa

SEQ ID NO: 455351 - RNA, 24 nt, Artificial Sequence
  Synthetic
aaucagugugauacacaacauuaa

SEQ ID NO: 455352 - RNA, 18 nt, Artificial Sequence
  Synthetic
ccaagccugcaacauuaa

SEQ ID NO: 455353 - RNA, 19 nt, Artificial Sequence
  Synthetic
uccaagccugcaacauuaa

SEQ ID NO: 455354 - RNA, 20 nt, Artificial Sequence
  Synthetic
auccaagccugcaacauuaa

SEQ ID NO: 455355 - RNA, 21 nt, Artificial Sequence
  Synthetic
uauccaagccugcaacauuaa

SEQ ID NO: 455356 - RNA, 22 nt, Artificial Sequence
  Synthetic
guauccaagccugcaacauuaa

SEQ ID NO: 455357 - RNA, 23 nt, Artificial Sequence
  Synthetic
uguauccaagccugcaacauuaa

SEQ ID NO: 455358 - RNA, 24 nt, Artificial Sequence
  Synthetic
uuguauccaagccugcaacauuaa

SEQ ID NO: 455359 - RNA, 18 nt, Artificial Sequence
  Synthetic
uaagaauuguaacauuaa

SEQ ID NO: 455360 - RNA, 19 nt, Artificial Sequence
  Synthetic
guaagaauuguaacauuaa

SEQ ID NO: 455361 - RNA, 20 nt, Artificial Sequence
  Synthetic
gguaagaauuguaacauuaa

SEQ ID NO: 455362 - RNA, 21 nt, Artificial Sequence
  Synthetic
agguaagaauuguaacauuaa

SEQ ID NO: 455363 - RNA, 22 nt, Artificial Sequence
  Synthetic
cagguaagaauuguaacauuaa

SEQ ID NO: 455364 - RNA, 23 nt, Artificial Sequence
  Synthetic
ucagguaagaauuguaacauuaa

SEQ ID NO: 455365 - RNA, 24 nt, Artificial Sequence
  Synthetic
cucagguaagaauuguaacauuaa

SEQ ID NO: 455366 - RNA, 18 nt, Artificial Sequence
  Synthetic
uuaaugcagggacauuaa

SEQ ID NO: 455367 - RNA, 19 nt, Artificial Sequence
  Synthetic
uuuaaugcagggacauuaa

SEQ ID NO: 455368 - RNA, 20 nt, Artificial Sequence
  Synthetic
guuuaaugcagggacauuaa

SEQ ID NO: 455369 - RNA, 21 nt, Artificial Sequence
  Synthetic
uguuuaaugcagggacauuaa

SEQ ID NO: 455370 - RNA, 22 nt, Artificial Sequence
  Synthetic
auguuuaaugcagggacauuaa

SEQ ID NO: 455371 - RNA, 23 nt, Artificial Sequence
  Synthetic
gauguuuaaugcagggacauuaa

SEQ ID NO: 455372 - RNA, 24 nt, Artificial Sequence
  Synthetic
cgauguuuaaugcagggacauuaa

SEQ ID NO: 455373 - RNA, 18 nt, Artificial Sequence
  Synthetic
aucuaaagcugacauuaa

SEQ ID NO: 455374 - RNA, 19 nt, Artificial Sequence
  Synthetic
aaucuaaagcugacauuaa

SEQ ID NO: 455375 - RNA, 20 nt, Artificial Sequence
  Synthetic
aaaucuaaagcugacauuaa

SEQ ID NO: 455376 - RNA, 21 nt, Artificial Sequence
  Synthetic
gaaaucuaaagcugacauuaa

SEQ ID NO: 455377 - RNA, 22 nt, Artificial Sequence
  Synthetic
ggaaaucuaaagcugacauuaa

SEQ ID NO: 455378 - RNA, 23 nt, Artificial Sequence
  Synthetic
aggaaaucuaaagcugacauuaa

SEQ ID NO: 455379 - RNA, 24 nt, Artificial Sequence
  Synthetic
aaggaaaucuaaagcugacauuaa

SEQ ID NO: 455380 - RNA, 18 nt, Artificial Sequence
  Synthetic
uggaggucauuacauuaa

SEQ ID NO: 455381 - RNA, 19 nt, Artificial Sequence
  Synthetic
cuggaggucauuacauuaa

SEQ ID NO: 455382 - RNA, 20 nt, Artificial Sequence
  Synthetic
acuggaggucauuacauuaa

SEQ ID NO: 455383 - RNA, 21 nt, Artificial Sequence
  Synthetic
aacuggaggucauuacauuaa

SEQ ID NO: 455384 - RNA, 22 nt, Artificial Sequence
  Synthetic
gaacuggaggucauuacauuaa

SEQ ID NO: 455385 - RNA, 23 nt, Artificial Sequence
  Synthetic
ggaacuggaggucauuacauuaa

SEQ ID NO: 455386 - RNA, 24 nt, Artificial Sequence
  Synthetic
uggaacuggaggucauuacauuaa

SEQ ID NO: 455387 - RNA, 18 nt, Artificial Sequence
  Synthetic
cauggccuggaccauuaa

SEQ ID NO: 455388 - RNA, 19 nt, Artificial Sequence
  Synthetic
gcauggccuggaccauuaa

SEQ ID NO: 455389 - RNA, 20 nt, Artificial Sequence
  Synthetic
ugcauggccuggaccauuaa

SEQ ID NO: 455390 - RNA, 21 nt, Artificial Sequence
  Synthetic
uugcauggccuggaccauuaa

SEQ ID NO: 455391 - RNA, 22 nt, Artificial Sequence
  Synthetic
uuugcauggccuggaccauuaa

SEQ ID NO: 455392 - RNA, 23 nt, Artificial Sequence
  Synthetic
auuugcauggccuggaccauuaa

SEQ ID NO: 455393 - RNA, 24 nt, Artificial Sequence
  Synthetic
aauuugcauggccuggaccauuaa

SEQ ID NO: 455394 - RNA, 18 nt, Artificial Sequence
  Synthetic
uuugucucgcuccauuaa

SEQ ID NO: 455395 - RNA, 19 nt, Artificial Sequence
  Synthetic
auuugucucgcuccauuaa

SEQ ID NO: 455396 - RNA, 20 nt, Artificial Sequence
  Synthetic
aauuugucucgcuccauuaa

SEQ ID NO: 455397 - RNA, 21 nt, Artificial Sequence
  Synthetic
aaauuugucucgcuccauuaa

SEQ ID NO: 455398 - RNA, 22 nt, Artificial Sequence
  Synthetic
uaaauuugucucgcuccauuaa

SEQ ID NO: 455399 - RNA, 23 nt, Artificial Sequence
  Synthetic
cuaaauuugucucgcuccauuaa

SEQ ID NO: 455400 - RNA, 24 nt, Artificial Sequence
  Synthetic
ccuaaauuugucucgcuccauuaa

SEQ ID NO: 455401 - RNA, 18 nt, Artificial Sequence
  Synthetic
ugucagcauuuccauuaa

SEQ ID NO: 455402 - RNA, 19 nt, Artificial Sequence
  Synthetic
uugucagcauuuccauuaa

SEQ ID NO: 455403 - RNA, 20 nt, Artificial Sequence
  Synthetic
uuugucagcauuuccauuaa

SEQ ID NO: 455404 - RNA, 21 nt, Artificial Sequence
  Synthetic
guuugucagcauuuccauuaa

SEQ ID NO: 455405 - RNA, 22 nt, Artificial Sequence
  Synthetic
gguuugucagcauuuccauuaa

SEQ ID NO: 455406 - RNA, 23 nt, Artificial Sequence
  Synthetic
agguuugucagcauuuccauuaa

SEQ ID NO: 455407 - RNA, 24 nt, Artificial Sequence
  Synthetic
aagguuugucagcauuuccauuaa

SEQ ID NO: 455408 - RNA, 18 nt, Artificial Sequence
  Synthetic
ccuggguauuuccauuaa

SEQ ID NO: 455409 - RNA, 19 nt, Artificial Sequence
  Synthetic
accuggguauuuccauuaa

SEQ ID NO: 455410 - RNA, 20 nt, Artificial Sequence
  Synthetic
aaccuggguauuuccauuaa

SEQ ID NO: 455411 - RNA, 21 nt, Artificial Sequence
  Synthetic
aaaccuggguauuuccauuaa

SEQ ID NO: 455412 - RNA, 22 nt, Artificial Sequence
  Synthetic
aaaaccuggguauuuccauuaa

SEQ ID NO: 455413 - RNA, 23 nt, Artificial Sequence
  Synthetic
gaaaaccuggguauuuccauuaa

SEQ ID NO: 455414 - RNA, 24 nt, Artificial Sequence
  Synthetic
agaaaaccuggguauuuccauuaa

SEQ ID NO: 455415 - RNA, 18 nt, Artificial Sequence
  Synthetic
ugucacuuacagcauuaa

SEQ ID NO: 455416 - RNA, 19 nt, Artificial Sequence
  Synthetic
cugucacuuacagcauuaa

SEQ ID NO: 455417 - RNA, 20 nt, Artificial Sequence
  Synthetic
ucugucacuuacagcauuaa

SEQ ID NO: 455418 - RNA, 21 nt, Artificial Sequence
  Synthetic
uucugucacuuacagcauuaa

SEQ ID NO: 455419 - RNA, 22 nt, Artificial Sequence
  Synthetic
uuucugucacuuacagcauuaa

SEQ ID NO: 455420 - RNA, 23 nt, Artificial Sequence
  Synthetic
uuuucugucacuuacagcauuaa

SEQ ID NO: 455421 - RNA, 24 nt, Artificial Sequence
  Synthetic
guuuucugucacuuacagcauuaa

SEQ ID NO: 455422 - RNA, 18 nt, Artificial Sequence
  Synthetic
aaccuggccaggcauuaa

SEQ ID NO: 455423 - RNA, 19 nt, Artificial Sequence
  Synthetic
gaaccuggccaggcauuaa

SEQ ID NO: 455424 - RNA, 20 nt, Artificial Sequence
  Synthetic
agaaccuggccaggcauuaa

SEQ ID NO: 455425 - RNA, 21 nt, Artificial Sequence
  Synthetic
gagaaccuggccaggcauuaa

SEQ ID NO: 455426 - RNA, 22 nt, Artificial Sequence
  Synthetic
ggagaaccuggccaggcauuaa

SEQ ID NO: 455427 - RNA, 23 nt, Artificial Sequence
  Synthetic
aggagaaccuggccaggcauuaa

SEQ ID NO: 455428 - RNA, 24 nt, Artificial Sequence
  Synthetic
aaggagaaccuggccaggcauuaa

SEQ ID NO: 455429 - RNA, 18 nt, Artificial Sequence
  Synthetic
uguuccaaguggcauuaa

SEQ ID NO: 455430 - RNA, 19 nt, Artificial Sequence
  Synthetic
auguuccaaguggcauuaa

SEQ ID NO: 455431 - RNA, 20 nt, Artificial Sequence
  Synthetic
gauguuccaaguggcauuaa

SEQ ID NO: 455432 - RNA, 21 nt, Artificial Sequence
  Synthetic
agauguuccaaguggcauuaa

SEQ ID NO: 455433 - RNA, 22 nt, Artificial Sequence
  Synthetic
uagauguuccaaguggcauuaa

SEQ ID NO: 455434 - RNA, 23 nt, Artificial Sequence
  Synthetic
uuagauguuccaaguggcauuaa

SEQ ID NO: 455435 - RNA, 24 nt, Artificial Sequence
  Synthetic
uuuagauguuccaaguggcauuaa

SEQ ID NO: 455436 - RNA, 18 nt, Artificial Sequence
  Synthetic
aguugaaaauaucauuaa

SEQ ID NO: 455437 - RNA, 19 nt, Artificial Sequence
  Synthetic
aaguugaaaauaucauuaa

SEQ ID NO: 455438 - RNA, 20 nt, Artificial Sequence
  Synthetic
uaaguugaaaauaucauuaa

SEQ ID NO: 455439 - RNA, 21 nt, Artificial Sequence
  Synthetic
guaaguugaaaauaucauuaa

SEQ ID NO: 455440 - RNA, 22 nt, Artificial Sequence
  Synthetic
uguaaguugaaaauaucauuaa

SEQ ID NO: 455441 - RNA, 23 nt, Artificial Sequence
  Synthetic
cuguaaguugaaaauaucauuaa

SEQ ID NO: 455442 - RNA, 24 nt, Artificial Sequence
  Synthetic
acuguaaguugaaaauaucauuaa

SEQ ID NO: 455443 - RNA, 18 nt, Artificial Sequence
  Synthetic
gacagacugacucauuaa

SEQ ID NO: 455444 - RNA, 19 nt, Artificial Sequence
  Synthetic
agacagacugacucauuaa

SEQ ID NO: 455445 - RNA, 20 nt, Artificial Sequence
  Synthetic
gagacagacugacucauuaa

SEQ ID NO: 455446 - RNA, 21 nt, Artificial Sequence
  Synthetic
agagacagacugacucauuaa

SEQ ID NO: 455447 - RNA, 22 nt, Artificial Sequence
  Synthetic
gagagacagacugacucauuaa

SEQ ID NO: 455448 - RNA, 23 nt, Artificial Sequence
  Synthetic
agagagacagacugacucauuaa

SEQ ID NO: 455449 - RNA, 24 nt, Artificial Sequence
  Synthetic
gagagagacagacugacucauuaa

SEQ ID NO: 455450 - RNA, 18 nt, Artificial Sequence
  Synthetic
uggaugaugauucauuaa

SEQ ID NO: 455451 - RNA, 19 nt, Artificial Sequence
  Synthetic
uuggaugaugauucauuaa

SEQ ID NO: 455452 - RNA, 20 nt, Artificial Sequence
  Synthetic
guuggaugaugauucauuaa

SEQ ID NO: 455453 - RNA, 21 nt, Artificial Sequence
  Synthetic
uguuggaugaugauucauuaa

SEQ ID NO: 455454 - RNA, 22 nt, Artificial Sequence
  Synthetic
uuguuggaugaugauucauuaa

SEQ ID NO: 455455 - RNA, 23 nt, Artificial Sequence
  Synthetic
uuuguuggaugaugauucauuaa

SEQ ID NO: 455456 - RNA, 24 nt, Artificial Sequence
  Synthetic
auuuguuggaugaugauucauuaa

SEQ ID NO: 455457 - RNA, 18 nt, Artificial Sequence
  Synthetic
gacauuaaccaagauuaa

SEQ ID NO: 455458 - RNA, 19 nt, Artificial Sequence
  Synthetic
ugacauuaaccaagauuaa

SEQ ID NO: 455459 - RNA, 20 nt, Artificial Sequence
  Synthetic
gugacauuaaccaagauuaa

SEQ ID NO: 455460 - RNA, 21 nt, Artificial Sequence
  Synthetic
agugacauuaaccaagauuaa

SEQ ID NO: 455461 - RNA, 22 nt, Artificial Sequence
  Synthetic
gagugacauuaaccaagauuaa

SEQ ID NO: 455462 - RNA, 23 nt, Artificial Sequence
  Synthetic
agagugacauuaaccaagauuaa

SEQ ID NO: 455463 - RNA, 24 nt, Artificial Sequence
  Synthetic
gagagugacauuaaccaagauuaa

SEQ ID NO: 455464 - RNA, 18 nt, Artificial Sequence
  Synthetic
ugauaacuccaagauuaa

SEQ ID NO: 455465 - RNA, 19 nt, Artificial Sequence
  Synthetic
augauaacuccaagauuaa

SEQ ID NO: 455466 - RNA, 20 nt, Artificial Sequence
  Synthetic
aaugauaacuccaagauuaa

SEQ ID NO: 455467 - RNA, 21 nt, Artificial Sequence
  Synthetic
aaaugauaacuccaagauuaa

SEQ ID NO: 455468 - RNA, 22 nt, Artificial Sequence
  Synthetic
gaaaugauaacuccaagauuaa

SEQ ID NO: 455469 - RNA, 23 nt, Artificial Sequence
  Synthetic
ugaaaugauaacuccaagauuaa

SEQ ID NO: 455470 - RNA, 24 nt, Artificial Sequence
  Synthetic
uugaaaugauaacuccaagauuaa

SEQ ID NO: 455471 - RNA, 18 nt, Artificial Sequence
  Synthetic
uggugcccuuaagauuaa

SEQ ID NO: 455472 - RNA, 19 nt, Artificial Sequence
  Synthetic
guggugcccuuaagauuaa

SEQ ID NO: 455473 - RNA, 20 nt, Artificial Sequence
  Synthetic
cguggugcccuuaagauuaa

SEQ ID NO: 455474 - RNA, 21 nt, Artificial Sequence
  Synthetic
ucguggugcccuuaagauuaa

SEQ ID NO: 455475 - RNA, 22 nt, Artificial Sequence
  Synthetic
gucguggugcccuuaagauuaa

SEQ ID NO: 455476 - RNA, 23 nt, Artificial Sequence
  Synthetic
agucguggugcccuuaagauuaa

SEQ ID NO: 455477 - RNA, 24 nt, Artificial Sequence
  Synthetic
gagucguggugcccuuaagauuaa

SEQ ID NO: 455478 - RNA, 18 nt, Artificial Sequence
  Synthetic
aucugaaacauagauuaa

SEQ ID NO: 455479 - RNA, 19 nt, Artificial Sequence
  Synthetic
uaucugaaacauagauuaa

SEQ ID NO: 455480 - RNA, 20 nt, Artificial Sequence
  Synthetic
uuaucugaaacauagauuaa

SEQ ID NO: 455481 - RNA, 21 nt, Artificial Sequence
  Synthetic
auuaucugaaacauagauuaa

SEQ ID NO: 455482 - RNA, 22 nt, Artificial Sequence
  Synthetic
cauuaucugaaacauagauuaa

SEQ ID NO: 455483 - RNA, 23 nt, Artificial Sequence
  Synthetic
acauuaucugaaacauagauuaa

SEQ ID NO: 455484 - RNA, 24 nt, Artificial Sequence
  Synthetic
cacauuaucugaaacauagauuaa

SEQ ID NO: 455485 - RNA, 18 nt, Artificial Sequence
  Synthetic
cugaagauggaggauuaa

SEQ ID NO: 455486 - RNA, 19 nt, Artificial Sequence
  Synthetic
gcugaagauggaggauuaa

SEQ ID NO: 455487 - RNA, 20 nt, Artificial Sequence
  Synthetic
agcugaagauggaggauuaa

SEQ ID NO: 455488 - RNA, 21 nt, Artificial Sequence
  Synthetic
gagcugaagauggaggauuaa

SEQ ID NO: 455489 - RNA, 22 nt, Artificial Sequence
  Synthetic
ugagcugaagauggaggauuaa

SEQ ID NO: 455490 - RNA, 23 nt, Artificial Sequence
  Synthetic
gugagcugaagauggaggauuaa

SEQ ID NO: 455491 - RNA, 24 nt, Artificial Sequence
  Synthetic
ugugagcugaagauggaggauuaa

SEQ ID NO: 455492 - RNA, 18 nt, Artificial Sequence
  Synthetic
ggauuguuuuaggauuaa

SEQ ID NO: 455493 - RNA, 19 nt, Artificial Sequence
  Synthetic
aggauuguuuuaggauuaa

SEQ ID NO: 455494 - RNA, 20 nt, Artificial Sequence
  Synthetic
caggauuguuuuaggauuaa

SEQ ID NO: 455495 - RNA, 21 nt, Artificial Sequence
  Synthetic
ccaggauuguuuuaggauuaa

SEQ ID NO: 455496 - RNA, 22 nt, Artificial Sequence
  Synthetic
accaggauuguuuuaggauuaa

SEQ ID NO: 455497 - RNA, 23 nt, Artificial Sequence
  Synthetic
caccaggauuguuuuaggauuaa

SEQ ID NO: 455498 - RNA, 24 nt, Artificial Sequence
  Synthetic
ccaccaggauuguuuuaggauuaa

SEQ ID NO: 455499 - RNA, 18 nt, Artificial Sequence
  Synthetic
aucuguggaugggauuaa

SEQ ID NO: 455500 - RNA, 19 nt, Artificial Sequence
  Synthetic
caucuguggaugggauuaa

SEQ ID NO: 455501 - RNA, 20 nt, Artificial Sequence
  Synthetic
gcaucuguggaugggauuaa

SEQ ID NO: 455502 - RNA, 21 nt, Artificial Sequence
  Synthetic
ggcaucuguggaugggauuaa

SEQ ID NO: 455503 - RNA, 22 nt, Artificial Sequence
  Synthetic
uggcaucuguggaugggauuaa

SEQ ID NO: 455504 - RNA, 23 nt, Artificial Sequence
  Synthetic
cuggcaucuguggaugggauuaa

SEQ ID NO: 455505 - RNA, 24 nt, Artificial Sequence
  Synthetic
ccuggcaucuguggaugggauuaa

SEQ ID NO: 455506 - RNA, 18 nt, Artificial Sequence
  Synthetic
uucaaaucauuggauuaa

SEQ ID NO: 455507 - RNA, 19 nt, Artificial Sequence
  Synthetic
guucaaaucauuggauuaa

SEQ ID NO: 455508 - RNA, 20 nt, Artificial Sequence
  Synthetic
uguucaaaucauuggauuaa

SEQ ID NO: 455509 - RNA, 21 nt, Artificial Sequence
  Synthetic
auguucaaaucauuggauuaa

SEQ ID NO: 455510 - RNA, 22 nt, Artificial Sequence
  Synthetic
aauguucaaaucauuggauuaa

SEQ ID NO: 455511 - RNA, 23 nt, Artificial Sequence
  Synthetic
aaauguucaaaucauuggauuaa

SEQ ID NO: 455512 - RNA, 24 nt, Artificial Sequence
  Synthetic
aaaauguucaaaucauuggauuaa

SEQ ID NO: 455513 - RNA, 18 nt, Artificial Sequence
  Synthetic
uaugaauagaaugauuaa

SEQ ID NO: 455514 - RNA, 19 nt, Artificial Sequence
  Synthetic
uuaugaauagaaugauuaa

SEQ ID NO: 455515 - RNA, 20 nt, Artificial Sequence
  Synthetic
auuaugaauagaaugauuaa

SEQ ID NO: 455516 - RNA, 21 nt, Artificial Sequence
  Synthetic
aauuaugaauagaaugauuaa

SEQ ID NO: 455517 - RNA, 22 nt, Artificial Sequence
  Synthetic
aaauuaugaauagaaugauuaa

SEQ ID NO: 455518 - RNA, 23 nt, Artificial Sequence
  Synthetic
aaaauuaugaauagaaugauuaa

SEQ ID NO: 455519 - RNA, 24 nt, Artificial Sequence
  Synthetic
gaaaauuaugaauagaaugauuaa

SEQ ID NO: 455520 - RNA, 18 nt, Artificial Sequence
  Synthetic
ugucugaauaaugauuaa

SEQ ID NO: 455521 - RNA, 19 nt, Artificial Sequence
  Synthetic
augucugaauaaugauuaa

SEQ ID NO: 455522 - RNA, 20 nt, Artificial Sequence
  Synthetic
caugucugaauaaugauuaa

SEQ ID NO: 455523 - RNA, 21 nt, Artificial Sequence
  Synthetic
gcaugucugaauaaugauuaa

SEQ ID NO: 455524 - RNA, 22 nt, Artificial Sequence
  Synthetic
ugcaugucugaauaaugauuaa

SEQ ID NO: 455525 - RNA, 23 nt, Artificial Sequence
  Synthetic
cugcaugucugaauaaugauuaa

SEQ ID NO: 455526 - RNA, 24 nt, Artificial Sequence
  Synthetic
ucugcaugucugaauaaugauuaa

SEQ ID NO: 455527 - RNA, 18 nt, Artificial Sequence
  Synthetic
aaauacuuguaugauuaa

SEQ ID NO: 455528 - RNA, 19 nt, Artificial Sequence
  Synthetic
aaaauacuuguaugauuaa

SEQ ID NO: 455529 - RNA, 20 nt, Artificial Sequence
  Synthetic
uaaaauacuuguaugauuaa

SEQ ID NO: 455530 - RNA, 21 nt, Artificial Sequence
  Synthetic
auaaaauacuuguaugauuaa

SEQ ID NO: 455531 - RNA, 22 nt, Artificial Sequence
  Synthetic
aauaaaauacuuguaugauuaa

SEQ ID NO: 455532 - RNA, 23 nt, Artificial Sequence
  Synthetic
uaauaaaauacuuguaugauuaa

SEQ ID NO: 455533 - RNA, 24 nt, Artificial Sequence
  Synthetic
auaauaaaauacuuguaugauuaa

SEQ ID NO: 455534 - RNA, 18 nt, Artificial Sequence
  Synthetic
acacuccugacugauuaa

SEQ ID NO: 455535 - RNA, 19 nt, Artificial Sequence
  Synthetic
uacacuccugacugauuaa

SEQ ID NO: 455536 - RNA, 20 nt, Artificial Sequence
  Synthetic
guacacuccugacugauuaa

SEQ ID NO: 455537 - RNA, 21 nt, Artificial Sequence
  Synthetic
aguacacuccugacugauuaa

SEQ ID NO: 455538 - RNA, 22 nt, Artificial Sequence
  Synthetic
gaguacacuccugacugauuaa

SEQ ID NO: 455539 - RNA, 23 nt, Artificial Sequence
  Synthetic
ugaguacacuccugacugauuaa

SEQ ID NO: 455540 - RNA, 24 nt, Artificial Sequence
  Synthetic
uugaguacacuccugacugauuaa

SEQ ID NO: 455541 - RNA, 18 nt, Artificial Sequence
  Synthetic
uuuaacuaaagugauuaa

SEQ ID NO: 455542 - RNA, 19 nt, Artificial Sequence
  Synthetic
guuuaacuaaagugauuaa

SEQ ID NO: 455543 - RNA, 20 nt, Artificial Sequence
  Synthetic
uguuuaacuaaagugauuaa

SEQ ID NO: 455544 - RNA, 21 nt, Artificial Sequence
  Synthetic
auguuuaacuaaagugauuaa

SEQ ID NO: 455545 - RNA, 22 nt, Artificial Sequence
  Synthetic
gauguuuaacuaaagugauuaa

SEQ ID NO: 455546 - RNA, 23 nt, Artificial Sequence
  Synthetic
agauguuuaacuaaagugauuaa

SEQ ID NO: 455547 - RNA, 24 nt, Artificial Sequence
  Synthetic
aagauguuuaacuaaagugauuaa

SEQ ID NO: 455548 - RNA, 18 nt, Artificial Sequence
  Synthetic
acaaaacuuagugauuaa

SEQ ID NO: 455549 - RNA, 19 nt, Artificial Sequence
  Synthetic
aacaaaacuuagugauuaa

SEQ ID NO: 455550 - RNA, 20 nt, Artificial Sequence
  Synthetic
caacaaaacuuagugauuaa

SEQ ID NO: 455551 - RNA, 21 nt, Artificial Sequence
  Synthetic
acaacaaaacuuagugauuaa

SEQ ID NO: 455552 - RNA, 22 nt, Artificial Sequence
  Synthetic
aacaacaaaacuuagugauuaa

SEQ ID NO: 455553 - RNA, 23 nt, Artificial Sequence
  Synthetic
uaacaacaaaacuuagugauuaa

SEQ ID NO: 455554 - RNA, 24 nt, Artificial Sequence
  Synthetic
uuaacaacaaaacuuagugauuaa

SEQ ID NO: 455555 - RNA, 18 nt, Artificial Sequence
  Synthetic
uaucuucaaugugauuaa

SEQ ID NO: 455556 - RNA, 19 nt, Artificial Sequence
  Synthetic
cuaucuucaaugugauuaa

SEQ ID NO: 455557 - RNA, 20 nt, Artificial Sequence
  Synthetic
gcuaucuucaaugugauuaa

SEQ ID NO: 455558 - RNA, 21 nt, Artificial Sequence
  Synthetic
ugcuaucuucaaugugauuaa

SEQ ID NO: 455559 - RNA, 22 nt, Artificial Sequence
  Synthetic
augcuaucuucaaugugauuaa

SEQ ID NO: 455560 - RNA, 23 nt, Artificial Sequence
  Synthetic
caugcuaucuucaaugugauuaa

SEQ ID NO: 455561 - RNA, 24 nt, Artificial Sequence
  Synthetic
ucaugcuaucuucaaugugauuaa

SEQ ID NO: 455562 - RNA, 18 nt, Artificial Sequence
  Synthetic
aauauauuuauugauuaa

SEQ ID NO: 455563 - RNA, 19 nt, Artificial Sequence
  Synthetic
gaauauauuuauugauuaa

SEQ ID NO: 455564 - RNA, 20 nt, Artificial Sequence
  Synthetic
ugaauauauuuauugauuaa

SEQ ID NO: 455565 - RNA, 21 nt, Artificial Sequence
  Synthetic
augaauauauuuauugauuaa

SEQ ID NO: 455566 - RNA, 22 nt, Artificial Sequence
  Synthetic
aaugaauauauuuauugauuaa

SEQ ID NO: 455567 - RNA, 23 nt, Artificial Sequence
  Synthetic
aaaugaauauauuuauugauuaa

SEQ ID NO: 455568 - RNA, 24 nt, Artificial Sequence
  Synthetic
aaaaugaauauauuuauugauuaa

SEQ ID NO: 455569 - RNA, 18 nt, Artificial Sequence
  Synthetic
auagcagaaaaauauuaa

SEQ ID NO: 455570 - RNA, 19 nt, Artificial Sequence
  Synthetic
aauagcagaaaaauauuaa

SEQ ID NO: 455571 - RNA, 20 nt, Artificial Sequence
  Synthetic
gaauagcagaaaaauauuaa

SEQ ID NO: 455572 - RNA, 21 nt, Artificial Sequence
  Synthetic
ggaauagcagaaaaauauuaa

SEQ ID NO: 455573 - RNA, 22 nt, Artificial Sequence
  Synthetic
aggaauagcagaaaaauauuaa

SEQ ID NO: 455574 - RNA, 23 nt, Artificial Sequence
  Synthetic
uaggaauagcagaaaaauauuaa

SEQ ID NO: 455575 - RNA, 24 nt, Artificial Sequence
  Synthetic
guaggaauagcagaaaaauauuaa

SEQ ID NO: 455576 - RNA, 18 nt, Artificial Sequence
  Synthetic
auauaaucacaauauuaa

SEQ ID NO: 455577 - RNA, 19 nt, Artificial Sequence
  Synthetic
uauauaaucacaauauuaa

SEQ ID NO: 455578 - RNA, 20 nt, Artificial Sequence
  Synthetic
cuauauaaucacaauauuaa

SEQ ID NO: 455579 - RNA, 21 nt, Artificial Sequence
  Synthetic
acuauauaaucacaauauuaa

SEQ ID NO: 455580 - RNA, 22 nt, Artificial Sequence
  Synthetic
aacuauauaaucacaauauuaa

SEQ ID NO: 455581 - RNA, 23 nt, Artificial Sequence
  Synthetic
caacuauauaaucacaauauuaa

SEQ ID NO: 455582 - RNA, 24 nt, Artificial Sequence
  Synthetic
ucaacuauauaaucacaauauuaa

SEQ ID NO: 455583 - RNA, 18 nt, Artificial Sequence
  Synthetic
cuuuuugaggaauauuaa

SEQ ID NO: 455584 - RNA, 19 nt, Artificial Sequence
  Synthetic
acuuuuugaggaauauuaa

SEQ ID NO: 455585 - RNA, 20 nt, Artificial Sequence
  Synthetic
aacuuuuugaggaauauuaa

SEQ ID NO: 455586 - RNA, 21 nt, Artificial Sequence
  Synthetic
caacuuuuugaggaauauuaa

SEQ ID NO: 455587 - RNA, 22 nt, Artificial Sequence
  Synthetic
ccaacuuuuugaggaauauuaa

SEQ ID NO: 455588 - RNA, 23 nt, Artificial Sequence
  Synthetic
uccaacuuuuugaggaauauuaa

SEQ ID NO: 455589 - RNA, 24 nt, Artificial Sequence
  Synthetic
auccaacuuuuugaggaauauuaa

SEQ ID NO: 455590 - RNA, 18 nt, Artificial Sequence
  Synthetic
ccuaaauguuaauauuaa

SEQ ID NO: 455591 - RNA, 19 nt, Artificial Sequence
  Synthetic
accuaaauguuaauauuaa

SEQ ID NO: 455592 - RNA, 20 nt, Artificial Sequence
  Synthetic
caccuaaauguuaauauuaa

SEQ ID NO: 455593 - RNA, 21 nt, Artificial Sequence
  Synthetic
acaccuaaauguuaauauuaa

SEQ ID NO: 455594 - RNA, 22 nt, Artificial Sequence
  Synthetic
gacaccuaaauguuaauauuaa

SEQ ID NO: 455595 - RNA, 23 nt, Artificial Sequence
  Synthetic
ugacaccuaaauguuaauauuaa

SEQ ID NO: 455596 - RNA, 24 nt, Artificial Sequence
  Synthetic
augacaccuaaauguuaauauuaa

SEQ ID NO: 455597 - RNA, 18 nt, Artificial Sequence
  Synthetic
uuuuaaauaacauauuaa

SEQ ID NO: 455598 - RNA, 19 nt, Artificial Sequence
  Synthetic
auuuuaaauaacauauuaa

SEQ ID NO: 455599 - RNA, 20 nt, Artificial Sequence
  Synthetic
cauuuuaaauaacauauuaa

SEQ ID NO: 455600 - RNA, 21 nt, Artificial Sequence
  Synthetic
acauuuuaaauaacauauuaa

SEQ ID NO: 455601 - RNA, 22 nt, Artificial Sequence
  Synthetic
gacauuuuaaauaacauauuaa

SEQ ID NO: 455602 - RNA, 23 nt, Artificial Sequence
  Synthetic
ugacauuuuaaauaacauauuaa

SEQ ID NO: 455603 - RNA, 24 nt, Artificial Sequence
  Synthetic
uugacauuuuaaauaacauauuaa

SEQ ID NO: 455604 - RNA, 18 nt, Artificial Sequence
  Synthetic
uuaauucugacauauuaa

SEQ ID NO: 455605 - RNA, 19 nt, Artificial Sequence
  Synthetic
uuuaauucugacauauuaa

SEQ ID NO: 455606 - RNA, 20 nt, Artificial Sequence
  Synthetic
auuuaauucugacauauuaa

SEQ ID NO: 455607 - RNA, 21 nt, Artificial Sequence
  Synthetic
aauuuaauucugacauauuaa

SEQ ID NO: 455608 - RNA, 22 nt, Artificial Sequence
  Synthetic
caauuuaauucugacauauuaa

SEQ ID NO: 455609 - RNA, 23 nt, Artificial Sequence
  Synthetic
ccaauuuaauucugacauauuaa

SEQ ID NO: 455610 - RNA, 24 nt, Artificial Sequence
  Synthetic
uccaauuuaauucugacauauuaa

SEQ ID NO: 455611 - RNA, 18 nt, Artificial Sequence
  Synthetic
aauugcuaugcauauuaa

SEQ ID NO: 455612 - RNA, 19 nt, Artificial Sequence
  Synthetic
caauugcuaugcauauuaa

SEQ ID NO: 455613 - RNA, 20 nt, Artificial Sequence
  Synthetic
gcaauugcuaugcauauuaa

SEQ ID NO: 455614 - RNA, 21 nt, Artificial Sequence
  Synthetic
ggcaauugcuaugcauauuaa

SEQ ID NO: 455615 - RNA, 22 nt, Artificial Sequence
  Synthetic
aggcaauugcuaugcauauuaa

SEQ ID NO: 455616 - RNA, 23 nt, Artificial Sequence
  Synthetic
caggcaauugcuaugcauauuaa

SEQ ID NO: 455617 - RNA, 24 nt, Artificial Sequence
  Synthetic
ccaggcaauugcuaugcauauuaa

SEQ ID NO: 455618 - RNA, 18 nt, Artificial Sequence
  Synthetic
uuauaauuaggauauuaa

SEQ ID NO: 455619 - RNA, 19 nt, Artificial Sequence
  Synthetic
guuauaauuaggauauuaa

SEQ ID NO: 455620 - RNA, 20 nt, Artificial Sequence
  Synthetic
uguuauaauuaggauauuaa

SEQ ID NO: 455621 - RNA, 21 nt, Artificial Sequence
  Synthetic
auguuauaauuaggauauuaa

SEQ ID NO: 455622 - RNA, 22 nt, Artificial Sequence
  Synthetic
cauguuauaauuaggauauuaa

SEQ ID NO: 455623 - RNA, 23 nt, Artificial Sequence
  Synthetic
acauguuauaauuaggauauuaa

SEQ ID NO: 455624 - RNA, 24 nt, Artificial Sequence
  Synthetic
gacauguuauaauuaggauauuaa

SEQ ID NO: 455625 - RNA, 18 nt, Artificial Sequence
  Synthetic
uagaaaacacacuauuaa

SEQ ID NO: 455626 - RNA, 19 nt, Artificial Sequence
  Synthetic
cuagaaaacacacuauuaa

SEQ ID NO: 455627 - RNA, 20 nt, Artificial Sequence
  Synthetic
gcuagaaaacacacuauuaa

SEQ ID NO: 455628 - RNA, 21 nt, Artificial Sequence
  Synthetic
ugcuagaaaacacacuauuaa

SEQ ID NO: 455629 - RNA, 22 nt, Artificial Sequence
  Synthetic
gugcuagaaaacacacuauuaa

SEQ ID NO: 455630 - RNA, 23 nt, Artificial Sequence
  Synthetic
agugcuagaaaacacacuauuaa

SEQ ID NO: 455631 - RNA, 24 nt, Artificial Sequence
  Synthetic
aagugcuagaaaacacacuauuaa

SEQ ID NO: 455632 - RNA, 18 nt, Artificial Sequence
  Synthetic
auuuucuugaaguauuaa

SEQ ID NO: 455633 - RNA, 19 nt, Artificial Sequence
  Synthetic
aauuuucuugaaguauuaa

SEQ ID NO: 455634 - RNA, 20 nt, Artificial Sequence
  Synthetic
uaauuuucuugaaguauuaa

SEQ ID NO: 455635 - RNA, 21 nt, Artificial Sequence
  Synthetic
uuaauuuucuugaaguauuaa

SEQ ID NO: 455636 - RNA, 22 nt, Artificial Sequence
  Synthetic
auuaauuuucuugaaguauuaa

SEQ ID NO: 455637 - RNA, 23 nt, Artificial Sequence
  Synthetic
uauuaauuuucuugaaguauuaa

SEQ ID NO: 455638 - RNA, 24 nt, Artificial Sequence
  Synthetic
uuauuaauuuucuugaaguauuaa

SEQ ID NO: 455639 - RNA, 18 nt, Artificial Sequence
  Synthetic
agagauuggugguauuaa

SEQ ID NO: 455640 - RNA, 19 nt, Artificial Sequence
  Synthetic
uagagauuggugguauuaa

SEQ ID NO: 455641 - RNA, 20 nt, Artificial Sequence
  Synthetic
uuagagauuggugguauuaa

SEQ ID NO: 455642 - RNA, 21 nt, Artificial Sequence
  Synthetic
uuuagagauuggugguauuaa

SEQ ID NO: 455643 - RNA, 22 nt, Artificial Sequence
  Synthetic
auuuagagauuggugguauuaa

SEQ ID NO: 455644 - RNA, 23 nt, Artificial Sequence
  Synthetic
gauuuagagauuggugguauuaa

SEQ ID NO: 455645 - RNA, 24 nt, Artificial Sequence
  Synthetic
agauuuagagauuggugguauuaa

SEQ ID NO: 455646 - RNA, 18 nt, Artificial Sequence
  Synthetic
auggggcuuuuguauuaa

SEQ ID NO: 455647 - RNA, 19 nt, Artificial Sequence
  Synthetic
aauggggcuuuuguauuaa

SEQ ID NO: 455648 - RNA, 20 nt, Artificial Sequence
  Synthetic
aaauggggcuuuuguauuaa

SEQ ID NO: 455649 - RNA, 21 nt, Artificial Sequence
  Synthetic
aaaauggggcuuuuguauuaa

SEQ ID NO: 455650 - RNA, 22 nt, Artificial Sequence
  Synthetic
gaaaauggggcuuuuguauuaa

SEQ ID NO: 455651 - RNA, 23 nt, Artificial Sequence
  Synthetic
ugaaaauggggcuuuuguauuaa

SEQ ID NO: 455652 - RNA, 24 nt, Artificial Sequence
  Synthetic
gugaaaauggggcuuuuguauuaa

SEQ ID NO: 455653 - RNA, 18 nt, Artificial Sequence
  Synthetic
cucuuauauaauuauuaa

SEQ ID NO: 455654 - RNA, 19 nt, Artificial Sequence
  Synthetic
acucuuauauaauuauuaa

SEQ ID NO: 455655 - RNA, 20 nt, Artificial Sequence
  Synthetic
uacucuuauauaauuauuaa

SEQ ID NO: 455656 - RNA, 21 nt, Artificial Sequence
  Synthetic
auacucuuauauaauuauuaa

SEQ ID NO: 455657 - RNA, 22 nt, Artificial Sequence
  Synthetic
cauacucuuauauaauuauuaa

SEQ ID NO: 455658 - RNA, 23 nt, Artificial Sequence
  Synthetic
ucauacucuuauauaauuauuaa

SEQ ID NO: 455659 - RNA, 24 nt, Artificial Sequence
  Synthetic
cucauacucuuauauaauuauuaa

SEQ ID NO: 455660 - RNA, 18 nt, Artificial Sequence
  Synthetic
uuuucucuggauuauuaa

SEQ ID NO: 455661 - RNA, 19 nt, Artificial Sequence
  Synthetic
uuuuucucuggauuauuaa

SEQ ID NO: 455662 - RNA, 20 nt, Artificial Sequence
  Synthetic
auuuuucucuggauuauuaa

SEQ ID NO: 455663 - RNA, 21 nt, Artificial Sequence
  Synthetic
gauuuuucucuggauuauuaa

SEQ ID NO: 455664 - RNA, 22 nt, Artificial Sequence
  Synthetic
ugauuuuucucuggauuauuaa

SEQ ID NO: 455665 - RNA, 23 nt, Artificial Sequence
  Synthetic
cugauuuuucucuggauuauuaa

SEQ ID NO: 455666 - RNA, 24 nt, Artificial Sequence
  Synthetic
acugauuuuucucuggauuauuaa

SEQ ID NO: 455667 - RNA, 18 nt, Artificial Sequence
  Synthetic
ucacuaaaguauuauuaa

SEQ ID NO: 455668 - RNA, 19 nt, Artificial Sequence
  Synthetic
gucacuaaaguauuauuaa

SEQ ID NO: 455669 - RNA, 20 nt, Artificial Sequence
  Synthetic
ggucacuaaaguauuauuaa

SEQ ID NO: 455670 - RNA, 21 nt, Artificial Sequence
  Synthetic
uggucacuaaaguauuauuaa

SEQ ID NO: 455671 - RNA, 22 nt, Artificial Sequence
  Synthetic
auggucacuaaaguauuauuaa

SEQ ID NO: 455672 - RNA, 23 nt, Artificial Sequence
  Synthetic
aauggucacuaaaguauuauuaa

SEQ ID NO: 455673 - RNA, 24 nt, Artificial Sequence
  Synthetic
caauggucacuaaaguauuauuaa

SEQ ID NO: 455674 - RNA, 18 nt, Artificial Sequence
  Synthetic
cgagacacuauuuauuaa

SEQ ID NO: 455675 - RNA, 19 nt, Artificial Sequence
  Synthetic
acgagacacuauuuauuaa

SEQ ID NO: 455676 - RNA, 20 nt, Artificial Sequence
  Synthetic
uacgagacacuauuuauuaa

SEQ ID NO: 455677 - RNA, 21 nt, Artificial Sequence
  Synthetic
uuacgagacacuauuuauuaa

SEQ ID NO: 455678 - RNA, 22 nt, Artificial Sequence
  Synthetic
auuacgagacacuauuuauuaa

SEQ ID NO: 455679 - RNA, 23 nt, Artificial Sequence
  Synthetic
aauuacgagacacuauuuauuaa

SEQ ID NO: 455680 - RNA, 24 nt, Artificial Sequence
  Synthetic
caauuacgagacacuauuuauuaa

SEQ ID NO: 455681 - RNA, 18 nt, Artificial Sequence
  Synthetic
aaaguaacuguuuauuaa

SEQ ID NO: 455682 - RNA, 19 nt, Artificial Sequence
  Synthetic
uaaaguaacuguuuauuaa

SEQ ID NO: 455683 - RNA, 20 nt, Artificial Sequence
  Synthetic
uuaaaguaacuguuuauuaa

SEQ ID NO: 455684 - RNA, 21 nt, Artificial Sequence
  Synthetic
uuuaaaguaacuguuuauuaa

SEQ ID NO: 455685 - RNA, 22 nt, Artificial Sequence
  Synthetic
auuuaaaguaacuguuuauuaa

SEQ ID NO: 455686 - RNA, 23 nt, Artificial Sequence
  Synthetic
cauuuaaaguaacuguuuauuaa

SEQ ID NO: 455687 - RNA, 24 nt, Artificial Sequence
  Synthetic
ccauuuaaaguaacuguuuauuaa

SEQ ID NO: 455688 - RNA, 18 nt, Artificial Sequence
  Synthetic
uugaaagaaaaaacuuaa

SEQ ID NO: 455689 - RNA, 19 nt, Artificial Sequence
  Synthetic
auugaaagaaaaaacuuaa

SEQ ID NO: 455690 - RNA, 20 nt, Artificial Sequence
  Synthetic
cauugaaagaaaaaacuuaa

SEQ ID NO: 455691 - RNA, 21 nt, Artificial Sequence
  Synthetic
ccauugaaagaaaaaacuuaa

SEQ ID NO: 455692 - RNA, 22 nt, Artificial Sequence
  Synthetic
cccauugaaagaaaaaacuuaa

SEQ ID NO: 455693 - RNA, 23 nt, Artificial Sequence
  Synthetic
acccauugaaagaaaaaacuuaa

SEQ ID NO: 455694 - RNA, 24 nt, Artificial Sequence
  Synthetic
aacccauugaaagaaaaaacuuaa

SEQ ID NO: 455695 - RNA, 18 nt, Artificial Sequence
  Synthetic
ucaacacucucaacuuaa

SEQ ID NO: 455696 - RNA, 19 nt, Artificial Sequence
  Synthetic
gucaacacucucaacuuaa

SEQ ID NO: 455697 - RNA, 20 nt, Artificial Sequence
  Synthetic
ugucaacacucucaacuuaa

SEQ ID NO: 455698 - RNA, 21 nt, Artificial Sequence
  Synthetic
uugucaacacucucaacuuaa

SEQ ID NO: 455699 - RNA, 22 nt, Artificial Sequence
  Synthetic
cuugucaacacucucaacuuaa

SEQ ID NO: 455700 - RNA, 23 nt, Artificial Sequence
  Synthetic
ucuugucaacacucucaacuuaa

SEQ ID NO: 455701 - RNA, 24 nt, Artificial Sequence
  Synthetic
uucuugucaacacucucaacuuaa

SEQ ID NO: 455702 - RNA, 18 nt, Artificial Sequence
  Synthetic
caauauguuugaacuuaa

SEQ ID NO: 455703 - RNA, 19 nt, Artificial Sequence
  Synthetic
ccaauauguuugaacuuaa

SEQ ID NO: 455704 - RNA, 20 nt, Artificial Sequence
  Synthetic
cccaauauguuugaacuuaa

SEQ ID NO: 455705 - RNA, 21 nt, Artificial Sequence
  Synthetic
acccaauauguuugaacuuaa

SEQ ID NO: 455706 - RNA, 22 nt, Artificial Sequence
  Synthetic
uacccaauauguuugaacuuaa

SEQ ID NO: 455707 - RNA, 23 nt, Artificial Sequence
  Synthetic
auacccaauauguuugaacuuaa

SEQ ID NO: 455708 - RNA, 24 nt, Artificial Sequence
  Synthetic
aauacccaauauguuugaacuuaa

SEQ ID NO: 455709 - RNA, 18 nt, Artificial Sequence
  Synthetic
guaaggaaaagcacuuaa

SEQ ID NO: 455710 - RNA, 19 nt, Artificial Sequence
  Synthetic
gguaaggaaaagcacuuaa

SEQ ID NO: 455711 - RNA, 20 nt, Artificial Sequence
  Synthetic
agguaaggaaaagcacuuaa

SEQ ID NO: 455712 - RNA, 21 nt, Artificial Sequence
  Synthetic
gagguaaggaaaagcacuuaa

SEQ ID NO: 455713 - RNA, 22 nt, Artificial Sequence
  Synthetic
agagguaaggaaaagcacuuaa

SEQ ID NO: 455714 - RNA, 23 nt, Artificial Sequence
  Synthetic
uagagguaaggaaaagcacuuaa

SEQ ID NO: 455715 - RNA, 24 nt, Artificial Sequence
  Synthetic
auagagguaaggaaaagcacuuaa

SEQ ID NO: 455716 - RNA, 18 nt, Artificial Sequence
  Synthetic
cagauuuuaaauacuuaa

SEQ ID NO: 455717 - RNA, 19 nt, Artificial Sequence
  Synthetic
ccagauuuuaaauacuuaa

SEQ ID NO: 455718 - RNA, 20 nt, Artificial Sequence
  Synthetic
accagauuuuaaauacuuaa

SEQ ID NO: 455719 - RNA, 21 nt, Artificial Sequence
  Synthetic
uaccagauuuuaaauacuuaa

SEQ ID NO: 455720 - RNA, 22 nt, Artificial Sequence
  Synthetic
uuaccagauuuuaaauacuuaa

SEQ ID NO: 455721 - RNA, 23 nt, Artificial Sequence
  Synthetic
cuuaccagauuuuaaauacuuaa

SEQ ID NO: 455722 - RNA, 24 nt, Artificial Sequence
  Synthetic
acuuaccagauuuuaaauacuuaa

SEQ ID NO: 455723 - RNA, 18 nt, Artificial Sequence
  Synthetic
gaugucgucaauacuuaa

SEQ ID NO: 455724 - RNA, 19 nt, Artificial Sequence
  Synthetic
ggaugucgucaauacuuaa

SEQ ID NO: 455725 - RNA, 20 nt, Artificial Sequence
  Synthetic
aggaugucgucaauacuuaa

SEQ ID NO: 455726 - RNA, 21 nt, Artificial Sequence
  Synthetic
aaggaugucgucaauacuuaa

SEQ ID NO: 455727 - RNA, 22 nt, Artificial Sequence
  Synthetic
gaaggaugucgucaauacuuaa

SEQ ID NO: 455728 - RNA, 23 nt, Artificial Sequence
  Synthetic
ugaaggaugucgucaauacuuaa

SEQ ID NO: 455729 - RNA, 24 nt, Artificial Sequence
  Synthetic
augaaggaugucgucaauacuuaa

SEQ ID NO: 455730 - RNA, 18 nt, Artificial Sequence
  Synthetic
gcuucucuuccuacuuaa

SEQ ID NO: 455731 - RNA, 19 nt, Artificial Sequence
  Synthetic
agcuucucuuccuacuuaa

SEQ ID NO: 455732 - RNA, 20 nt, Artificial Sequence
  Synthetic
cagcuucucuuccuacuuaa

SEQ ID NO: 455733 - RNA, 21 nt, Artificial Sequence
  Synthetic
ccagcuucucuuccuacuuaa

SEQ ID NO: 455734 - RNA, 22 nt, Artificial Sequence
  Synthetic
accagcuucucuuccuacuuaa

SEQ ID NO: 455735 - RNA, 23 nt, Artificial Sequence
  Synthetic
uaccagcuucucuuccuacuuaa

SEQ ID NO: 455736 - RNA, 24 nt, Artificial Sequence
  Synthetic
auaccagcuucucuuccuacuuaa

SEQ ID NO: 455737 - RNA, 18 nt, Artificial Sequence
  Synthetic
uaaauaucuguuacuuaa

SEQ ID NO: 455738 - RNA, 19 nt, Artificial Sequence
  Synthetic
uuaaauaucuguuacuuaa

SEQ ID NO: 455739 - RNA, 20 nt, Artificial Sequence
  Synthetic
uuuaaauaucuguuacuuaa

SEQ ID NO: 455740 - RNA, 21 nt, Artificial Sequence
  Synthetic
auuuaaauaucuguuacuuaa

SEQ ID NO: 455741 - RNA, 22 nt, Artificial Sequence
  Synthetic
cauuuaaauaucuguuacuuaa

SEQ ID NO: 455742 - RNA, 23 nt, Artificial Sequence
  Synthetic
gcauuuaaauaucuguuacuuaa

SEQ ID NO: 455743 - RNA, 24 nt, Artificial Sequence
  Synthetic
ggcauuuaaauaucuguuacuuaa

SEQ ID NO: 455744 - RNA, 18 nt, Artificial Sequence
  Synthetic
caaaauugccaaccuuaa

SEQ ID NO: 455745 - RNA, 19 nt, Artificial Sequence
  Synthetic
ucaaaauugccaaccuuaa

SEQ ID NO: 455746 - RNA, 20 nt, Artificial Sequence
  Synthetic
aucaaaauugccaaccuuaa

SEQ ID NO: 455747 - RNA, 21 nt, Artificial Sequence
  Synthetic
caucaaaauugccaaccuuaa

SEQ ID NO: 455748 - RNA, 22 nt, Artificial Sequence
  Synthetic
ucaucaaaauugccaaccuuaa

SEQ ID NO: 455749 - RNA, 23 nt, Artificial Sequence
  Synthetic
aucaucaaaauugccaaccuuaa

SEQ ID NO: 455750 - RNA, 24 nt, Artificial Sequence
  Synthetic
caucaucaaaauugccaaccuuaa

SEQ ID NO: 455751 - RNA, 18 nt, Artificial Sequence
  Synthetic
uaaaugcaauaaccuuaa

SEQ ID NO: 455752 - RNA, 19 nt, Artificial Sequence
  Synthetic
uuaaaugcaauaaccuuaa

SEQ ID NO: 455753 - RNA, 20 nt, Artificial Sequence
  Synthetic
uuuaaaugcaauaaccuuaa

SEQ ID NO: 455754 - RNA, 21 nt, Artificial Sequence
  Synthetic
cuuuaaaugcaauaaccuuaa

SEQ ID NO: 455755 - RNA, 22 nt, Artificial Sequence
  Synthetic
acuuuaaaugcaauaaccuuaa

SEQ ID NO: 455756 - RNA, 23 nt, Artificial Sequence
  Synthetic
gacuuuaaaugcaauaaccuuaa

SEQ ID NO: 455757 - RNA, 24 nt, Artificial Sequence
  Synthetic
agacuuuaaaugcaauaaccuuaa

SEQ ID NO: 455758 - RNA, 18 nt, Artificial Sequence
  Synthetic
gggaaucugcuaccuuaa

SEQ ID NO: 455759 - RNA, 19 nt, Artificial Sequence
  Synthetic
agggaaucugcuaccuuaa

SEQ ID NO: 455760 - RNA, 20 nt, Artificial Sequence
  Synthetic
aagggaaucugcuaccuuaa

SEQ ID NO: 455761 - RNA, 21 nt, Artificial Sequence
  Synthetic
aaagggaaucugcuaccuuaa

SEQ ID NO: 455762 - RNA, 22 nt, Artificial Sequence
  Synthetic
aaaagggaaucugcuaccuuaa

SEQ ID NO: 455763 - RNA, 23 nt, Artificial Sequence
  Synthetic
caaaagggaaucugcuaccuuaa

SEQ ID NO: 455764 - RNA, 24 nt, Artificial Sequence
  Synthetic
ccaaaagggaaucugcuaccuuaa

SEQ ID NO: 455765 - RNA, 18 nt, Artificial Sequence
  Synthetic
uucauguauuuaccuuaa

SEQ ID NO: 455766 - RNA, 19 nt, Artificial Sequence
  Synthetic
uuucauguauuuaccuuaa

SEQ ID NO: 455767 - RNA, 20 nt, Artificial Sequence
  Synthetic
uuuucauguauuuaccuuaa

SEQ ID NO: 455768 - RNA, 21 nt, Artificial Sequence
  Synthetic
uuuuucauguauuuaccuuaa

SEQ ID NO: 455769 - RNA, 22 nt, Artificial Sequence
  Synthetic
auuuuucauguauuuaccuuaa

SEQ ID NO: 455770 - RNA, 23 nt, Artificial Sequence
  Synthetic
cauuuuucauguauuuaccuuaa

SEQ ID NO: 455771 - RNA, 24 nt, Artificial Sequence
  Synthetic
gcauuuuucauguauuuaccuuaa

SEQ ID NO: 455772 - RNA, 18 nt, Artificial Sequence
  Synthetic
uggucaagagagccuuaa

SEQ ID NO: 455773 - RNA, 19 nt, Artificial Sequence
  Synthetic
uuggucaagagagccuuaa

SEQ ID NO: 455774 - RNA, 20 nt, Artificial Sequence
  Synthetic
guuggucaagagagccuuaa

SEQ ID NO: 455775 - RNA, 21 nt, Artificial Sequence
  Synthetic
gguuggucaagagagccuuaa

SEQ ID NO: 455776 - RNA, 22 nt, Artificial Sequence
  Synthetic
ggguuggucaagagagccuuaa

SEQ ID NO: 455777 - RNA, 23 nt, Artificial Sequence
  Synthetic
uggguuggucaagagagccuuaa

SEQ ID NO: 455778 - RNA, 24 nt, Artificial Sequence
  Synthetic
auggguuggucaagagagccuuaa

SEQ ID NO: 455779 - RNA, 18 nt, Artificial Sequence
  Synthetic
acuauuuuauagccuuaa

SEQ ID NO: 455780 - RNA, 19 nt, Artificial Sequence
  Synthetic
cacuauuuuauagccuuaa

SEQ ID NO: 455781 - RNA, 20 nt, Artificial Sequence
  Synthetic
ccacuauuuuauagccuuaa

SEQ ID NO: 455782 - RNA, 21 nt, Artificial Sequence
  Synthetic
accacuauuuuauagccuuaa

SEQ ID NO: 455783 - RNA, 22 nt, Artificial Sequence
  Synthetic
gaccacuauuuuauagccuuaa

SEQ ID NO: 455784 - RNA, 23 nt, Artificial Sequence
  Synthetic
ggaccacuauuuuauagccuuaa

SEQ ID NO: 455785 - RNA, 24 nt, Artificial Sequence
  Synthetic
gggaccacuauuuuauagccuuaa

SEQ ID NO: 455786 - RNA, 18 nt, Artificial Sequence
  Synthetic
caauuuugaaguccuuaa

SEQ ID NO: 455787 - RNA, 19 nt, Artificial Sequence
  Synthetic
ucaauuuugaaguccuuaa

SEQ ID NO: 455788 - RNA, 20 nt, Artificial Sequence
  Synthetic
aucaauuuugaaguccuuaa

SEQ ID NO: 455789 - RNA, 21 nt, Artificial Sequence
  Synthetic
aaucaauuuugaaguccuuaa

SEQ ID NO: 455790 - RNA, 22 nt, Artificial Sequence
  Synthetic
caaucaauuuugaaguccuuaa

SEQ ID NO: 455791 - RNA, 23 nt, Artificial Sequence
  Synthetic
ccaaucaauuuugaaguccuuaa

SEQ ID NO: 455792 - RNA, 24 nt, Artificial Sequence
  Synthetic
uccaaucaauuuugaaguccuuaa

SEQ ID NO: 455793 - RNA, 18 nt, Artificial Sequence
  Synthetic
auaugacucuguccuuaa

SEQ ID NO: 455794 - RNA, 19 nt, Artificial Sequence
  Synthetic
aauaugacucuguccuuaa

SEQ ID NO: 455795 - RNA, 20 nt, Artificial Sequence
  Synthetic
caauaugacucuguccuuaa

SEQ ID NO: 455796 - RNA, 21 nt, Artificial Sequence
  Synthetic
ccaauaugacucuguccuuaa

SEQ ID NO: 455797 - RNA, 22 nt, Artificial Sequence
  Synthetic
uccaauaugacucuguccuuaa

SEQ ID NO: 455798 - RNA, 23 nt, Artificial Sequence
  Synthetic
guccaauaugacucuguccuuaa

SEQ ID NO: 455799 - RNA, 24 nt, Artificial Sequence
  Synthetic
aguccaauaugacucuguccuuaa

SEQ ID NO: 455800 - RNA, 18 nt, Artificial Sequence
  Synthetic
ggcaaauucuguccuuaa

SEQ ID NO: 455801 - RNA, 19 nt, Artificial Sequence
  Synthetic
aggcaaauucuguccuuaa

SEQ ID NO: 455802 - RNA, 20 nt, Artificial Sequence
  Synthetic
gaggcaaauucuguccuuaa

SEQ ID NO: 455803 - RNA, 21 nt, Artificial Sequence
  Synthetic
cgaggcaaauucuguccuuaa

SEQ ID NO: 455804 - RNA, 22 nt, Artificial Sequence
  Synthetic
ucgaggcaaauucuguccuuaa

SEQ ID NO: 455805 - RNA, 23 nt, Artificial Sequence
  Synthetic
uucgaggcaaauucuguccuuaa

SEQ ID NO: 455806 - RNA, 24 nt, Artificial Sequence
  Synthetic
uuucgaggcaaauucuguccuuaa

SEQ ID NO: 455807 - RNA, 18 nt, Artificial Sequence
  Synthetic
uaaaaaucaauuccuuaa

SEQ ID NO: 455808 - RNA, 19 nt, Artificial Sequence
  Synthetic
auaaaaaucaauuccuuaa

SEQ ID NO: 455809 - RNA, 20 nt, Artificial Sequence
  Synthetic
cauaaaaaucaauuccuuaa

SEQ ID NO: 455810 - RNA, 21 nt, Artificial Sequence
  Synthetic
ccauaaaaaucaauuccuuaa

SEQ ID NO: 455811 - RNA, 22 nt, Artificial Sequence
  Synthetic
accauaaaaaucaauuccuuaa

SEQ ID NO: 455812 - RNA, 23 nt, Artificial Sequence
  Synthetic
uaccauaaaaaucaauuccuuaa

SEQ ID NO: 455813 - RNA, 24 nt, Artificial Sequence
  Synthetic
uuaccauaaaaaucaauuccuuaa

SEQ ID NO: 455814 - RNA, 18 nt, Artificial Sequence
  Synthetic
auucuaguaauuccuuaa

SEQ ID NO: 455815 - RNA, 19 nt, Artificial Sequence
  Synthetic
uauucuaguaauuccuuaa

SEQ ID NO: 455816 - RNA, 20 nt, Artificial Sequence
  Synthetic
auauucuaguaauuccuuaa

SEQ ID NO: 455817 - RNA, 21 nt, Artificial Sequence
  Synthetic
gauauucuaguaauuccuuaa

SEQ ID NO: 455818 - RNA, 22 nt, Artificial Sequence
  Synthetic
cgauauucuaguaauuccuuaa

SEQ ID NO: 455819 - RNA, 23 nt, Artificial Sequence
  Synthetic
ccgauauucuaguaauuccuuaa

SEQ ID NO: 455820 - RNA, 24 nt, Artificial Sequence
  Synthetic
cccgauauucuaguaauuccuuaa

SEQ ID NO: 455821 - RNA, 18 nt, Artificial Sequence
  Synthetic
uguauuuaacuuccuuaa

SEQ ID NO: 455822 - RNA, 19 nt, Artificial Sequence
  Synthetic
uuguauuuaacuuccuuaa

SEQ ID NO: 455823 - RNA, 20 nt, Artificial Sequence
  Synthetic
cuuguauuuaacuuccuuaa

SEQ ID NO: 455824 - RNA, 21 nt, Artificial Sequence
  Synthetic
acuuguauuuaacuuccuuaa

SEQ ID NO: 455825 - RNA, 22 nt, Artificial Sequence
  Synthetic
aacuuguauuuaacuuccuuaa

SEQ ID NO: 455826 - RNA, 23 nt, Artificial Sequence
  Synthetic
uaacuuguauuuaacuuccuuaa

SEQ ID NO: 455827 - RNA, 24 nt, Artificial Sequence
  Synthetic
cuaacuuguauuuaacuuccuuaa

SEQ ID NO: 455828 - RNA, 18 nt, Artificial Sequence
  Synthetic
gaaacucuucuuccuuaa

SEQ ID NO: 455829 - RNA, 19 nt, Artificial Sequence
  Synthetic
agaaacucuucuuccuuaa

SEQ ID NO: 455830 - RNA, 20 nt, Artificial Sequence
  Synthetic
aagaaacucuucuuccuuaa

SEQ ID NO: 455831 - RNA, 21 nt, Artificial Sequence
  Synthetic
uaagaaacucuucuuccuuaa

SEQ ID NO: 455832 - RNA, 22 nt, Artificial Sequence
  Synthetic
uuaagaaacucuucuuccuuaa

SEQ ID NO: 455833 - RNA, 23 nt, Artificial Sequence
  Synthetic
auuaagaaacucuucuuccuuaa

SEQ ID NO: 455834 - RNA, 24 nt, Artificial Sequence
  Synthetic
aauuaagaaacucuucuuccuuaa

SEQ ID NO: 455835 - RNA, 18 nt, Artificial Sequence
  Synthetic
aaagcagcaacagcuuaa

SEQ ID NO: 455836 - RNA, 19 nt, Artificial Sequence
  Synthetic
uaaagcagcaacagcuuaa

SEQ ID NO: 455837 - RNA, 20 nt, Artificial Sequence
  Synthetic
uuaaagcagcaacagcuuaa

SEQ ID NO: 455838 - RNA, 21 nt, Artificial Sequence
  Synthetic
cuuaaagcagcaacagcuuaa

SEQ ID NO: 455839 - RNA, 22 nt, Artificial Sequence
  Synthetic
gcuuaaagcagcaacagcuuaa

SEQ ID NO: 455840 - RNA, 23 nt, Artificial Sequence
  Synthetic
ugcuuaaagcagcaacagcuuaa

SEQ ID NO: 455841 - RNA, 24 nt, Artificial Sequence
  Synthetic
gugcuuaaagcagcaacagcuuaa

SEQ ID NO: 455842 - RNA, 18 nt, Artificial Sequence
  Synthetic
gaacaaacacuagcuuaa

SEQ ID NO: 455843 - RNA, 19 nt, Artificial Sequence
  Synthetic
agaacaaacacuagcuuaa

SEQ ID NO: 455844 - RNA, 20 nt, Artificial Sequence
  Synthetic
aagaacaaacacuagcuuaa

SEQ ID NO: 455845 - RNA, 21 nt, Artificial Sequence
  Synthetic
caagaacaaacacuagcuuaa

SEQ ID NO: 455846 - RNA, 22 nt, Artificial Sequence
  Synthetic
acaagaacaaacacuagcuuaa

SEQ ID NO: 455847 - RNA, 23 nt, Artificial Sequence
  Synthetic
aacaagaacaaacacuagcuuaa

SEQ ID NO: 455848 - RNA, 24 nt, Artificial Sequence
  Synthetic
gaacaagaacaaacacuagcuuaa

SEQ ID NO: 455849 - RNA, 18 nt, Artificial Sequence
  Synthetic
cggauauugcaggcuuaa

SEQ ID NO: 455850 - RNA, 19 nt, Artificial Sequence
  Synthetic
ucggauauugcaggcuuaa

SEQ ID NO: 455851 - RNA, 20 nt, Artificial Sequence
  Synthetic
aucggauauugcaggcuuaa

SEQ ID NO: 455852 - RNA, 21 nt, Artificial Sequence
  Synthetic
aaucggauauugcaggcuuaa

SEQ ID NO: 455853 - RNA, 22 nt, Artificial Sequence
  Synthetic
caaucggauauugcaggcuuaa

SEQ ID NO: 455854 - RNA, 23 nt, Artificial Sequence
  Synthetic
ccaaucggauauugcaggcuuaa

SEQ ID NO: 455855 - RNA, 24 nt, Artificial Sequence
  Synthetic
gccaaucggauauugcaggcuuaa

SEQ ID NO: 455856 - RNA, 18 nt, Artificial Sequence
  Synthetic
auuggagguggggcuuaa

SEQ ID NO: 455857 - RNA, 19 nt, Artificial Sequence
  Synthetic
uauuggagguggggcuuaa

SEQ ID NO: 455858 - RNA, 20 nt, Artificial Sequence
  Synthetic
auauuggagguggggcuuaa

SEQ ID NO: 455859 - RNA, 21 nt, Artificial Sequence
  Synthetic
aauauuggagguggggcuuaa

SEQ ID NO: 455860 - RNA, 22 nt, Artificial Sequence
  Synthetic
caauauuggagguggggcuuaa

SEQ ID NO: 455861 - RNA, 23 nt, Artificial Sequence
  Synthetic
ucaauauuggagguggggcuuaa

SEQ ID NO: 455862 - RNA, 24 nt, Artificial Sequence
  Synthetic
cucaauauuggagguggggcuuaa

SEQ ID NO: 455863 - RNA, 18 nt, Artificial Sequence
  Synthetic
ucaugcagauuggcuuaa

SEQ ID NO: 455864 - RNA, 19 nt, Artificial Sequence
  Synthetic
gucaugcagauuggcuuaa

SEQ ID NO: 455865 - RNA, 20 nt, Artificial Sequence
  Synthetic
agucaugcagauuggcuuaa

SEQ ID NO: 455866 - RNA, 21 nt, Artificial Sequence
  Synthetic
cagucaugcagauuggcuuaa

SEQ ID NO: 455867 - RNA, 22 nt, Artificial Sequence
  Synthetic
acagucaugcagauuggcuuaa

SEQ ID NO: 455868 - RNA, 23 nt, Artificial Sequence
  Synthetic
aacagucaugcagauuggcuuaa

SEQ ID NO: 455869 - RNA, 24 nt, Artificial Sequence
  Synthetic
gaacagucaugcagauuggcuuaa

SEQ ID NO: 455870 - RNA, 18 nt, Artificial Sequence
  Synthetic
agaaauuaaaaugcuuaa

SEQ ID NO: 455871 - RNA, 19 nt, Artificial Sequence
  Synthetic
aagaaauuaaaaugcuuaa

SEQ ID NO: 455872 - RNA, 20 nt, Artificial Sequence
  Synthetic
caagaaauuaaaaugcuuaa

SEQ ID NO: 455873 - RNA, 21 nt, Artificial Sequence
  Synthetic
ucaagaaauuaaaaugcuuaa

SEQ ID NO: 455874 - RNA, 22 nt, Artificial Sequence
  Synthetic
uucaagaaauuaaaaugcuuaa

SEQ ID NO: 455875 - RNA, 23 nt, Artificial Sequence
  Synthetic
cuucaagaaauuaaaaugcuuaa

SEQ ID NO: 455876 - RNA, 24 nt, Artificial Sequence
  Synthetic
ccuucaagaaauuaaaaugcuuaa

SEQ ID NO: 455877 - RNA, 18 nt, Artificial Sequence
  Synthetic
gccaagaagcaugcuuaa

SEQ ID NO: 455878 - RNA, 19 nt, Artificial Sequence
  Synthetic
agccaagaagcaugcuuaa

SEQ ID NO: 455879 - RNA, 20 nt, Artificial Sequence
  Synthetic
cagccaagaagcaugcuuaa

SEQ ID NO: 455880 - RNA, 21 nt, Artificial Sequence
  Synthetic
ccagccaagaagcaugcuuaa

SEQ ID NO: 455881 - RNA, 22 nt, Artificial Sequence
  Synthetic
uccagccaagaagcaugcuuaa

SEQ ID NO: 455882 - RNA, 23 nt, Artificial Sequence
  Synthetic
uuccagccaagaagcaugcuuaa

SEQ ID NO: 455883 - RNA, 24 nt, Artificial Sequence
  Synthetic
auuccagccaagaagcaugcuuaa

SEQ ID NO: 455884 - RNA, 18 nt, Artificial Sequence
  Synthetic
auagcaagagaugcuuaa

SEQ ID NO: 455885 - RNA, 19 nt, Artificial Sequence
  Synthetic
cauagcaagagaugcuuaa

SEQ ID NO: 455886 - RNA, 20 nt, Artificial Sequence
  Synthetic
ucauagcaagagaugcuuaa

SEQ ID NO: 455887 - RNA, 21 nt, Artificial Sequence
  Synthetic
gucauagcaagagaugcuuaa

SEQ ID NO: 455888 - RNA, 22 nt, Artificial Sequence
  Synthetic
ggucauagcaagagaugcuuaa

SEQ ID NO: 455889 - RNA, 23 nt, Artificial Sequence
  Synthetic
uggucauagcaagagaugcuuaa

SEQ ID NO: 455890 - RNA, 24 nt, Artificial Sequence
  Synthetic
uuggucauagcaagagaugcuuaa

SEQ ID NO: 455891 - RNA, 18 nt, Artificial Sequence
  Synthetic
auacagagaagugcuuaa

SEQ ID NO: 455892 - RNA, 19 nt, Artificial Sequence
  Synthetic
aauacagagaagugcuuaa

SEQ ID NO: 455893 - RNA, 20 nt, Artificial Sequence
  Synthetic
gaauacagagaagugcuuaa

SEQ ID NO: 455894 - RNA, 21 nt, Artificial Sequence
  Synthetic
cgaauacagagaagugcuuaa

SEQ ID NO: 455895 - RNA, 22 nt, Artificial Sequence
  Synthetic
acgaauacagagaagugcuuaa

SEQ ID NO: 455896 - RNA, 23 nt, Artificial Sequence
  Synthetic
aacgaauacagagaagugcuuaa

SEQ ID NO: 455897 - RNA, 24 nt, Artificial Sequence
  Synthetic
uaacgaauacagagaagugcuuaa

SEQ ID NO: 455898 - RNA, 18 nt, Artificial Sequence
  Synthetic
aauuaagaaugugcuuaa

SEQ ID NO: 455899 - RNA, 19 nt, Artificial Sequence
  Synthetic
uaauuaagaaugugcuuaa

SEQ ID NO: 455900 - RNA, 20 nt, Artificial Sequence
  Synthetic
auaauuaagaaugugcuuaa

SEQ ID NO: 455901 - RNA, 21 nt, Artificial Sequence
  Synthetic
gauaauuaagaaugugcuuaa

SEQ ID NO: 455902 - RNA, 22 nt, Artificial Sequence
  Synthetic
agauaauuaagaaugugcuuaa

SEQ ID NO: 455903 - RNA, 23 nt, Artificial Sequence
  Synthetic
aagauaauuaagaaugugcuuaa

SEQ ID NO: 455904 - RNA, 24 nt, Artificial Sequence
  Synthetic
aaagauaauuaagaaugugcuuaa

SEQ ID NO: 455905 - RNA, 18 nt, Artificial Sequence
  Synthetic
cucuucuacugugcuuaa

SEQ ID NO: 455906 - RNA, 19 nt, Artificial Sequence
  Synthetic
acucuucuacugugcuuaa

SEQ ID NO: 455907 - RNA, 20 nt, Artificial Sequence
  Synthetic
gacucuucuacugugcuuaa

SEQ ID NO: 455908 - RNA, 21 nt, Artificial Sequence
  Synthetic
ggacucuucuacugugcuuaa

SEQ ID NO: 455909 - RNA, 22 nt, Artificial Sequence
  Synthetic
gggacucuucuacugugcuuaa

SEQ ID NO: 455910 - RNA, 23 nt, Artificial Sequence
  Synthetic
ggggacucuucuacugugcuuaa

SEQ ID NO: 455911 - RNA, 24 nt, Artificial Sequence
  Synthetic
aggggacucuucuacugugcuuaa

SEQ ID NO: 455912 - RNA, 18 nt, Artificial Sequence
  Synthetic
ggauaggaaauugcuuaa

SEQ ID NO: 455913 - RNA, 19 nt, Artificial Sequence
  Synthetic
aggauaggaaauugcuuaa

SEQ ID NO: 455914 - RNA, 20 nt, Artificial Sequence
  Synthetic
aaggauaggaaauugcuuaa

SEQ ID NO: 455915 - RNA, 21 nt, Artificial Sequence
  Synthetic
gaaggauaggaaauugcuuaa

SEQ ID NO: 455916 - RNA, 22 nt, Artificial Sequence
  Synthetic
cgaaggauaggaaauugcuuaa

SEQ ID NO: 455917 - RNA, 23 nt, Artificial Sequence
  Synthetic
gcgaaggauaggaaauugcuuaa

SEQ ID NO: 455918 - RNA, 24 nt, Artificial Sequence
  Synthetic
ggcgaaggauaggaaauugcuuaa

SEQ ID NO: 455919 - RNA, 18 nt, Artificial Sequence
  Synthetic
ggagugaacauugcuuaa

SEQ ID NO: 455920 - RNA, 19 nt, Artificial Sequence
  Synthetic
aggagugaacauugcuuaa

SEQ ID NO: 455921 - RNA, 20 nt, Artificial Sequence
  Synthetic
aaggagugaacauugcuuaa

SEQ ID NO: 455922 - RNA, 21 nt, Artificial Sequence
  Synthetic
gaaggagugaacauugcuuaa

SEQ ID NO: 455923 - RNA, 22 nt, Artificial Sequence
  Synthetic
ugaaggagugaacauugcuuaa

SEQ ID NO: 455924 - RNA, 23 nt, Artificial Sequence
  Synthetic
uugaaggagugaacauugcuuaa

SEQ ID NO: 455925 - RNA, 24 nt, Artificial Sequence
  Synthetic
uuugaaggagugaacauugcuuaa

SEQ ID NO: 455926 - RNA, 18 nt, Artificial Sequence
  Synthetic
ucaauggugcuugcuuaa

SEQ ID NO: 455927 - RNA, 19 nt, Artificial Sequence
  Synthetic
gucaauggugcuugcuuaa

SEQ ID NO: 455928 - RNA, 20 nt, Artificial Sequence
  Synthetic
agucaauggugcuugcuuaa

SEQ ID NO: 455929 - RNA, 21 nt, Artificial Sequence
  Synthetic
aagucaauggugcuugcuuaa

SEQ ID NO: 455930 - RNA, 22 nt, Artificial Sequence
  Synthetic
uaagucaauggugcuugcuuaa

SEQ ID NO: 455931 - RNA, 23 nt, Artificial Sequence
  Synthetic
guaagucaauggugcuugcuuaa

SEQ ID NO: 455932 - RNA, 24 nt, Artificial Sequence
  Synthetic
gguaagucaauggugcuugcuuaa

SEQ ID NO: 455933 - RNA, 18 nt, Artificial Sequence
  Synthetic
auuuuuucaguugcuuaa

SEQ ID NO: 455934 - RNA, 19 nt, Artificial Sequence
  Synthetic
uauuuuuucaguugcuuaa

SEQ ID NO: 455935 - RNA, 20 nt, Artificial Sequence
  Synthetic
guauuuuuucaguugcuuaa

SEQ ID NO: 455936 - RNA, 21 nt, Artificial Sequence
  Synthetic
uguauuuuuucaguugcuuaa

SEQ ID NO: 455937 - RNA, 22 nt, Artificial Sequence
  Synthetic
guguauuuuuucaguugcuuaa

SEQ ID NO: 455938 - RNA, 23 nt, Artificial Sequence
  Synthetic
uguguauuuuuucaguugcuuaa

SEQ ID NO: 455939 - RNA, 24 nt, Artificial Sequence
  Synthetic
uuguguauuuuuucaguugcuuaa

SEQ ID NO: 455940 - RNA, 18 nt, Artificial Sequence
  Synthetic
acacuguaauuugcuuaa

SEQ ID NO: 455941 - RNA, 19 nt, Artificial Sequence
  Synthetic
cacacuguaauuugcuuaa

SEQ ID NO: 455942 - RNA, 20 nt, Artificial Sequence
  Synthetic
ucacacuguaauuugcuuaa

SEQ ID NO: 455943 - RNA, 21 nt, Artificial Sequence
  Synthetic
uucacacuguaauuugcuuaa

SEQ ID NO: 455944 - RNA, 22 nt, Artificial Sequence
  Synthetic
cuucacacuguaauuugcuuaa

SEQ ID NO: 455945 - RNA, 23 nt, Artificial Sequence
  Synthetic
ucuucacacuguaauuugcuuaa

SEQ ID NO: 455946 - RNA, 24 nt, Artificial Sequence
  Synthetic
uucuucacacuguaauuugcuuaa

SEQ ID NO: 455947 - RNA, 18 nt, Artificial Sequence
  Synthetic
aagaucuagaaaucuuaa

SEQ ID NO: 455948 - RNA, 19 nt, Artificial Sequence
  Synthetic
aaagaucuagaaaucuuaa

SEQ ID NO: 455949 - RNA, 20 nt, Artificial Sequence
  Synthetic
aaaagaucuagaaaucuuaa

SEQ ID NO: 455950 - RNA, 21 nt, Artificial Sequence
  Synthetic
aaaaagaucuagaaaucuuaa

SEQ ID NO: 455951 - RNA, 22 nt, Artificial Sequence
  Synthetic
caaaaagaucuagaaaucuuaa

SEQ ID NO: 455952 - RNA, 23 nt, Artificial Sequence
  Synthetic
gcaaaaagaucuagaaaucuuaa

SEQ ID NO: 455953 - RNA, 24 nt, Artificial Sequence
  Synthetic
agcaaaaagaucuagaaaucuuaa

SEQ ID NO: 455954 - RNA, 18 nt, Artificial Sequence
  Synthetic
cauugcguugcaucuuaa

SEQ ID NO: 455955 - RNA, 19 nt, Artificial Sequence
  Synthetic
gcauugcguugcaucuuaa

SEQ ID NO: 455956 - RNA, 20 nt, Artificial Sequence
  Synthetic
ugcauugcguugcaucuuaa

SEQ ID NO: 455957 - RNA, 21 nt, Artificial Sequence
  Synthetic
cugcauugcguugcaucuuaa

SEQ ID NO: 455958 - RNA, 22 nt, Artificial Sequence
  Synthetic
acugcauugcguugcaucuuaa

SEQ ID NO: 455959 - RNA, 23 nt, Artificial Sequence
  Synthetic
cacugcauugcguugcaucuuaa

SEQ ID NO: 455960 - RNA, 24 nt, Artificial Sequence
  Synthetic
ccacugcauugcguugcaucuuaa

SEQ ID NO: 455961 - RNA, 18 nt, Artificial Sequence
  Synthetic
aacugguggucaucuuaa

SEQ ID NO: 455962 - RNA, 19 nt, Artificial Sequence
  Synthetic
gaacugguggucaucuuaa

SEQ ID NO: 455963 - RNA, 20 nt, Artificial Sequence
  Synthetic
ggaacugguggucaucuuaa

SEQ ID NO: 455964 - RNA, 21 nt, Artificial Sequence
  Synthetic
uggaacugguggucaucuuaa

SEQ ID NO: 455965 - RNA, 22 nt, Artificial Sequence
  Synthetic
auggaacugguggucaucuuaa

SEQ ID NO: 455966 - RNA, 23 nt, Artificial Sequence
  Synthetic
gauggaacugguggucaucuuaa

SEQ ID NO: 455967 - RNA, 24 nt, Artificial Sequence
  Synthetic
ggauggaacugguggucaucuuaa

SEQ ID NO: 455968 - RNA, 18 nt, Artificial Sequence
  Synthetic
gaaaacuuucuaucuuaa

SEQ ID NO: 455969 - RNA, 19 nt, Artificial Sequence
  Synthetic
ggaaaacuuucuaucuuaa

SEQ ID NO: 455970 - RNA, 20 nt, Artificial Sequence
  Synthetic
gggaaaacuuucuaucuuaa

SEQ ID NO: 455971 - RNA, 21 nt, Artificial Sequence
  Synthetic
cgggaaaacuuucuaucuuaa

SEQ ID NO: 455972 - RNA, 22 nt, Artificial Sequence
  Synthetic
gcgggaaaacuuucuaucuuaa

SEQ ID NO: 455973 - RNA, 23 nt, Artificial Sequence
  Synthetic
cgcgggaaaacuuucuaucuuaa

SEQ ID NO: 455974 - RNA, 24 nt, Artificial Sequence
  Synthetic
acgcgggaaaacuuucuaucuuaa

SEQ ID NO: 455975 - RNA, 18 nt, Artificial Sequence
  Synthetic
uauuuuuuuguaucuuaa

SEQ ID NO: 455976 - RNA, 19 nt, Artificial Sequence
  Synthetic
cuauuuuuuuguaucuuaa

SEQ ID NO: 455977 - RNA, 20 nt, Artificial Sequence
  Synthetic
gcuauuuuuuuguaucuuaa

SEQ ID NO: 455978 - RNA, 21 nt, Artificial Sequence
  Synthetic
ggcuauuuuuuuguaucuuaa

SEQ ID NO: 455979 - RNA, 22 nt, Artificial Sequence
  Synthetic
aggcuauuuuuuuguaucuuaa

SEQ ID NO: 455980 - RNA, 23 nt, Artificial Sequence
  Synthetic
aaggcuauuuuuuuguaucuuaa

SEQ ID NO: 455981 - RNA, 24 nt, Artificial Sequence
  Synthetic
caaggcuauuuuuuuguaucuuaa

SEQ ID NO: 455982 - RNA, 18 nt, Artificial Sequence
  Synthetic
uaaguuuagaacucuuaa

SEQ ID NO: 455983 - RNA, 19 nt, Artificial Sequence
  Synthetic
auaaguuuagaacucuuaa

SEQ ID NO: 455984 - RNA, 20 nt, Artificial Sequence
  Synthetic
aauaaguuuagaacucuuaa

SEQ ID NO: 455985 - RNA, 21 nt, Artificial Sequence
  Synthetic
uaauaaguuuagaacucuuaa

SEQ ID NO: 455986 - RNA, 22 nt, Artificial Sequence
  Synthetic
auaauaaguuuagaacucuuaa

SEQ ID NO: 455987 - RNA, 23 nt, Artificial Sequence
  Synthetic
gauaauaaguuuagaacucuuaa

SEQ ID NO: 455988 - RNA, 24 nt, Artificial Sequence
  Synthetic
agauaauaaguuuagaacucuuaa

SEQ ID NO: 455989 - RNA, 18 nt, Artificial Sequence
  Synthetic
ugaucgaaauacucuuaa

SEQ ID NO: 455990 - RNA, 19 nt, Artificial Sequence
  Synthetic
cugaucgaaauacucuuaa

SEQ ID NO: 455991 - RNA, 20 nt, Artificial Sequence
  Synthetic
ccugaucgaaauacucuuaa

SEQ ID NO: 455992 - RNA, 21 nt, Artificial Sequence
  Synthetic
accugaucgaaauacucuuaa

SEQ ID NO: 455993 - RNA, 22 nt, Artificial Sequence
  Synthetic
aaccugaucgaaauacucuuaa

SEQ ID NO: 455994 - RNA, 23 nt, Artificial Sequence
  Synthetic
uaaccugaucgaaauacucuuaa

SEQ ID NO: 455995 - RNA, 24 nt, Artificial Sequence
  Synthetic
uuaaccugaucgaaauacucuuaa

SEQ ID NO: 455996 - RNA, 18 nt, Artificial Sequence
  Synthetic
cuucaggcaggcucuuaa

SEQ ID NO: 455997 - RNA, 19 nt, Artificial Sequence
  Synthetic
acuucaggcaggcucuuaa

SEQ ID NO: 455998 - RNA, 20 nt, Artificial Sequence
  Synthetic
uacuucaggcaggcucuuaa

SEQ ID NO: 455999 - RNA, 21 nt, Artificial Sequence
  Synthetic
uuacuucaggcaggcucuuaa

SEQ ID NO: 456000 - RNA, 22 nt, Artificial Sequence
  Synthetic
uuuacuucaggcaggcucuuaa

SEQ ID NO: 456001 - RNA, 23 nt, Artificial Sequence
  Synthetic
auuuacuucaggcaggcucuuaa

SEQ ID NO: 456002 - RNA, 24 nt, Artificial Sequence
  Synthetic
aauuuacuucaggcaggcucuuaa

SEQ ID NO: 456003 - RNA, 18 nt, Artificial Sequence
  Synthetic
uauaucagagucucuuaa

SEQ ID NO: 456004 - RNA, 19 nt, Artificial Sequence
  Synthetic
uuauaucagagucucuuaa

SEQ ID NO: 456005 - RNA, 20 nt, Artificial Sequence
  Synthetic
auuauaucagagucucuuaa

SEQ ID NO: 456006 - RNA, 21 nt, Artificial Sequence
  Synthetic
aauuauaucagagucucuuaa

SEQ ID NO: 456007 - RNA, 22 nt, Artificial Sequence
  Synthetic
caauuauaucagagucucuuaa

SEQ ID NO: 456008 - RNA, 23 nt, Artificial Sequence
  Synthetic
ucaauuauaucagagucucuuaa

SEQ ID NO: 456009 - RNA, 24 nt, Artificial Sequence
  Synthetic
gucaauuauaucagagucucuuaa

SEQ ID NO: 456010 - RNA, 18 nt, Artificial Sequence
  Synthetic
guccgugcuuggucuuaa

SEQ ID NO: 456011 - RNA, 19 nt, Artificial Sequence
  Synthetic
aguccgugcuuggucuuaa

SEQ ID NO: 456012 - RNA, 20 nt, Artificial Sequence
  Synthetic
caguccgugcuuggucuuaa

SEQ ID NO: 456013 - RNA, 21 nt, Artificial Sequence
  Synthetic
acaguccgugcuuggucuuaa

SEQ ID NO: 456014 - RNA, 22 nt, Artificial Sequence
  Synthetic
uacaguccgugcuuggucuuaa

SEQ ID NO: 456015 - RNA, 23 nt, Artificial Sequence
  Synthetic
uuacaguccgugcuuggucuuaa

SEQ ID NO: 456016 - RNA, 24 nt, Artificial Sequence
  Synthetic
uuuacaguccgugcuuggucuuaa

SEQ ID NO: 456017 - RNA, 18 nt, Artificial Sequence
  Synthetic
acaaaugggaauucuuaa

SEQ ID NO: 456018 - RNA, 19 nt, Artificial Sequence
  Synthetic
gacaaaugggaauucuuaa

SEQ ID NO: 456019 - RNA, 20 nt, Artificial Sequence
  Synthetic
cgacaaaugggaauucuuaa

SEQ ID NO: 456020 - RNA, 21 nt, Artificial Sequence
  Synthetic
acgacaaaugggaauucuuaa

SEQ ID NO: 456021 - RNA, 22 nt, Artificial Sequence
  Synthetic
gacgacaaaugggaauucuuaa

SEQ ID NO: 456022 - RNA, 23 nt, Artificial Sequence
  Synthetic
agacgacaaaugggaauucuuaa

SEQ ID NO: 456023 - RNA, 24 nt, Artificial Sequence
  Synthetic
cagacgacaaaugggaauucuuaa

SEQ ID NO: 456024 - RNA, 18 nt, Artificial Sequence
  Synthetic
uauaaucuucauucuuaa

SEQ ID NO: 456025 - RNA, 19 nt, Artificial Sequence
  Synthetic
uuauaaucuucauucuuaa

SEQ ID NO: 456026 - RNA, 20 nt, Artificial Sequence
  Synthetic
uuuauaaucuucauucuuaa

SEQ ID NO: 456027 - RNA, 21 nt, Artificial Sequence
  Synthetic
auuuauaaucuucauucuuaa

SEQ ID NO: 456028 - RNA, 22 nt, Artificial Sequence
  Synthetic
aauuuauaaucuucauucuuaa

SEQ ID NO: 456029 - RNA, 23 nt, Artificial Sequence
  Synthetic
gaauuuauaaucuucauucuuaa

SEQ ID NO: 456030 - RNA, 24 nt, Artificial Sequence
  Synthetic
ggaauuuauaaucuucauucuuaa

SEQ ID NO: 456031 - RNA, 18 nt, Artificial Sequence
  Synthetic
aaccuagugauuucuuaa

SEQ ID NO: 456032 - RNA, 19 nt, Artificial Sequence
  Synthetic
caaccuagugauuucuuaa

SEQ ID NO: 456033 - RNA, 20 nt, Artificial Sequence
  Synthetic
ucaaccuagugauuucuuaa

SEQ ID NO: 456034 - RNA, 21 nt, Artificial Sequence
  Synthetic
uucaaccuagugauuucuuaa

SEQ ID NO: 456035 - RNA, 22 nt, Artificial Sequence
  Synthetic
cuucaaccuagugauuucuuaa

SEQ ID NO: 456036 - RNA, 23 nt, Artificial Sequence
  Synthetic
ucuucaaccuagugauuucuuaa

SEQ ID NO: 456037 - RNA, 24 nt, Artificial Sequence
  Synthetic
uucuucaaccuagugauuucuuaa

SEQ ID NO: 456038 - RNA, 18 nt, Artificial Sequence
  Synthetic
cucaucacuuuuucuuaa

SEQ ID NO: 456039 - RNA, 19 nt, Artificial Sequence
  Synthetic
ccucaucacuuuuucuuaa

SEQ ID NO: 456040 - RNA, 20 nt, Artificial Sequence
  Synthetic
uccucaucacuuuuucuuaa

SEQ ID NO: 456041 - RNA, 21 nt, Artificial Sequence
  Synthetic
guccucaucacuuuuucuuaa

SEQ ID NO: 456042 - RNA, 22 nt, Artificial Sequence
  Synthetic
uguccucaucacuuuuucuuaa

SEQ ID NO: 456043 - RNA, 23 nt, Artificial Sequence
  Synthetic
auguccucaucacuuuuucuuaa

SEQ ID NO: 456044 - RNA, 24 nt, Artificial Sequence
  Synthetic
cauguccucaucacuuuuucuuaa

SEQ ID NO: 456045 - RNA, 18 nt, Artificial Sequence
  Synthetic
guuacagcaaaaaguuaa

SEQ ID NO: 456046 - RNA, 19 nt, Artificial Sequence
  Synthetic
uguuacagcaaaaaguuaa

SEQ ID NO: 456047 - RNA, 20 nt, Artificial Sequence
  Synthetic
uuguuacagcaaaaaguuaa

SEQ ID NO: 456048 - RNA, 21 nt, Artificial Sequence
  Synthetic
guuguuacagcaaaaaguuaa

SEQ ID NO: 456049 - RNA, 22 nt, Artificial Sequence
  Synthetic
uguuguuacagcaaaaaguuaa

SEQ ID NO: 456050 - RNA, 23 nt, Artificial Sequence
  Synthetic
cuguuguuacagcaaaaaguuaa

SEQ ID NO: 456051 - RNA, 24 nt, Artificial Sequence
  Synthetic
ucuguuguuacagcaaaaaguuaa

SEQ ID NO: 456052 - RNA, 18 nt, Artificial Sequence
  Synthetic
cauauuuuuaaaaguuaa

SEQ ID NO: 456053 - RNA, 19 nt, Artificial Sequence
  Synthetic
acauauuuuuaaaaguuaa

SEQ ID NO: 456054 - RNA, 20 nt, Artificial Sequence
  Synthetic
aacauauuuuuaaaaguuaa

SEQ ID NO: 456055 - RNA, 21 nt, Artificial Sequence
  Synthetic
aaacauauuuuuaaaaguuaa

SEQ ID NO: 456056 - RNA, 22 nt, Artificial Sequence
  Synthetic
uaaacauauuuuuaaaaguuaa

SEQ ID NO: 456057 - RNA, 23 nt, Artificial Sequence
  Synthetic
auaaacauauuuuuaaaaguuaa

SEQ ID NO: 456058 - RNA, 24 nt, Artificial Sequence
  Synthetic
cauaaacauauuuuuaaaaguuaa

SEQ ID NO: 456059 - RNA, 18 nt, Artificial Sequence
  Synthetic
aaucaauggcaaaguuaa

SEQ ID NO: 456060 - RNA, 19 nt, Artificial Sequence
  Synthetic
uaaucaauggcaaaguuaa

SEQ ID NO: 456061 - RNA, 20 nt, Artificial Sequence
  Synthetic
guaaucaauggcaaaguuaa

SEQ ID NO: 456062 - RNA, 21 nt, Artificial Sequence
  Synthetic
aguaaucaauggcaaaguuaa

SEQ ID NO: 456063 - RNA, 22 nt, Artificial Sequence
  Synthetic
caguaaucaauggcaaaguuaa

SEQ ID NO: 456064 - RNA, 23 nt, Artificial Sequence
  Synthetic
acaguaaucaauggcaaaguuaa

SEQ ID NO: 456065 - RNA, 24 nt, Artificial Sequence
  Synthetic
cacaguaaucaauggcaaaguuaa

SEQ ID NO: 456066 - RNA, 18 nt, Artificial Sequence
  Synthetic
uuuucaccucaaaguuaa

SEQ ID NO: 456067 - RNA, 19 nt, Artificial Sequence
  Synthetic
auuuucaccucaaaguuaa

SEQ ID NO: 456068 - RNA, 20 nt, Artificial Sequence
  Synthetic
aauuuucaccucaaaguuaa

SEQ ID NO: 456069 - RNA, 21 nt, Artificial Sequence
  Synthetic
aaauuuucaccucaaaguuaa

SEQ ID NO: 456070 - RNA, 22 nt, Artificial Sequence
  Synthetic
caaauuuucaccucaaaguuaa

SEQ ID NO: 456071 - RNA, 23 nt, Artificial Sequence
  Synthetic
ucaaauuuucaccucaaaguuaa

SEQ ID NO: 456072 - RNA, 24 nt, Artificial Sequence
  Synthetic
gucaaauuuucaccucaaaguuaa

SEQ ID NO: 456073 - RNA, 18 nt, Artificial Sequence
  Synthetic
aacacuuaagaaaguuaa

SEQ ID NO: 456074 - RNA, 19 nt, Artificial Sequence
  Synthetic
gaacacuuaagaaaguuaa

SEQ ID NO: 456075 - RNA, 20 nt, Artificial Sequence
  Synthetic
ugaacacuuaagaaaguuaa

SEQ ID NO: 456076 - RNA, 21 nt, Artificial Sequence
  Synthetic
augaacacuuaagaaaguuaa

SEQ ID NO: 456077 - RNA, 22 nt, Artificial Sequence
  Synthetic
caugaacacuuaagaaaguuaa

SEQ ID NO: 456078 - RNA, 23 nt, Artificial Sequence
  Synthetic
acaugaacacuuaagaaaguuaa

SEQ ID NO: 456079 - RNA, 24 nt, Artificial Sequence
  Synthetic
cacaugaacacuuaagaaaguuaa

SEQ ID NO: 456080 - RNA, 18 nt, Artificial Sequence
  Synthetic
cuuguauuuuaaaguuaa

SEQ ID NO: 456081 - RNA, 19 nt, Artificial Sequence
  Synthetic
ccuuguauuuuaaaguuaa

SEQ ID NO: 456082 - RNA, 20 nt, Artificial Sequence
  Synthetic
accuuguauuuuaaaguuaa

SEQ ID NO: 456083 - RNA, 21 nt, Artificial Sequence
  Synthetic
gaccuuguauuuuaaaguuaa

SEQ ID NO: 456084 - RNA, 22 nt, Artificial Sequence
  Synthetic
ugaccuuguauuuuaaaguuaa

SEQ ID NO: 456085 - RNA, 23 nt, Artificial Sequence
  Synthetic
uugaccuuguauuuuaaaguuaa

SEQ ID NO: 456086 - RNA, 24 nt, Artificial Sequence
  Synthetic
cuugaccuuguauuuuaaaguuaa

SEQ ID NO: 456087 - RNA, 18 nt, Artificial Sequence
  Synthetic
gucuuuuaaagaaguuaa

SEQ ID NO: 456088 - RNA, 19 nt, Artificial Sequence
  Synthetic
ggucuuuuaaagaaguuaa

SEQ ID NO: 456089 - RNA, 20 nt, Artificial Sequence
  Synthetic
aggucuuuuaaagaaguuaa

SEQ ID NO: 456090 - RNA, 21 nt, Artificial Sequence
  Synthetic
uaggucuuuuaaagaaguuaa

SEQ ID NO: 456091 - RNA, 22 nt, Artificial Sequence
  Synthetic
uuaggucuuuuaaagaaguuaa

SEQ ID NO: 456092 - RNA, 23 nt, Artificial Sequence
  Synthetic
cuuaggucuuuuaaagaaguuaa

SEQ ID NO: 456093 - RNA, 24 nt, Artificial Sequence
  Synthetic
ucuuaggucuuuuaaagaaguuaa

SEQ ID NO: 456094 - RNA, 18 nt, Artificial Sequence
  Synthetic
guaaguuuucuaaguuaa

SEQ ID NO: 456095 - RNA, 19 nt, Artificial Sequence
  Synthetic
gguaaguuuucuaaguuaa

SEQ ID NO: 456096 - RNA, 20 nt, Artificial Sequence
  Synthetic
agguaaguuuucuaaguuaa

SEQ ID NO: 456097 - RNA, 21 nt, Artificial Sequence
  Synthetic
uagguaaguuuucuaaguuaa

SEQ ID NO: 456098 - RNA, 22 nt, Artificial Sequence
  Synthetic
uuagguaaguuuucuaaguuaa

SEQ ID NO: 456099 - RNA, 23 nt, Artificial Sequence
  Synthetic
guuagguaaguuuucuaaguuaa

SEQ ID NO: 456100 - RNA, 24 nt, Artificial Sequence
  Synthetic
aguuagguaaguuuucuaaguuaa

SEQ ID NO: 456101 - RNA, 18 nt, Artificial Sequence
  Synthetic
uucuuuggaaacaguuaa

SEQ ID NO: 456102 - RNA, 19 nt, Artificial Sequence
  Synthetic
auucuuuggaaacaguuaa

SEQ ID NO: 456103 - RNA, 20 nt, Artificial Sequence
  Synthetic
cauucuuuggaaacaguuaa

SEQ ID NO: 456104 - RNA, 21 nt, Artificial Sequence
  Synthetic
acauucuuuggaaacaguuaa

SEQ ID NO: 456105 - RNA, 22 nt, Artificial Sequence
  Synthetic
aacauucuuuggaaacaguuaa

SEQ ID NO: 456106 - RNA, 23 nt, Artificial Sequence
  Synthetic
uaacauucuuuggaaacaguuaa

SEQ ID NO: 456107 - RNA, 24 nt, Artificial Sequence
  Synthetic
cuaacauucuuuggaaacaguuaa

SEQ ID NO: 456108 - RNA, 18 nt, Artificial Sequence
  Synthetic
uuuugacuugacaguuaa

SEQ ID NO: 456109 - RNA, 19 nt, Artificial Sequence
  Synthetic
auuuugacuugacaguuaa

SEQ ID NO: 456110 - RNA, 20 nt, Artificial Sequence
  Synthetic
aauuuugacuugacaguuaa

SEQ ID NO: 456111 - RNA, 21 nt, Artificial Sequence
  Synthetic
gaauuuugacuugacaguuaa

SEQ ID NO: 456112 - RNA, 22 nt, Artificial Sequence
  Synthetic
ggaauuuugacuugacaguuaa

SEQ ID NO: 456113 - RNA, 23 nt, Artificial Sequence
  Synthetic
aggaauuuugacuugacaguuaa

SEQ ID NO: 456114 - RNA, 24 nt, Artificial Sequence
  Synthetic
gaggaauuuugacuugacaguuaa

SEQ ID NO: 456115 - RNA, 18 nt, Artificial Sequence
  Synthetic
augcuacaugucaguuaa

SEQ ID NO: 456116 - RNA, 19 nt, Artificial Sequence
  Synthetic
caugcuacaugucaguuaa

SEQ ID NO: 456117 - RNA, 20 nt, Artificial Sequence
  Synthetic
ucaugcuacaugucaguuaa

SEQ ID NO: 456118 - RNA, 21 nt, Artificial Sequence
  Synthetic
gucaugcuacaugucaguuaa

SEQ ID NO: 456119 - RNA, 22 nt, Artificial Sequence
  Synthetic
agucaugcuacaugucaguuaa

SEQ ID NO: 456120 - RNA, 23 nt, Artificial Sequence
  Synthetic
cagucaugcuacaugucaguuaa

SEQ ID NO: 456121 - RNA, 24 nt, Artificial Sequence
  Synthetic
ucagucaugcuacaugucaguuaa

SEQ ID NO: 456122 - RNA, 18 nt, Artificial Sequence
  Synthetic
ucauuucacuucaguuaa

SEQ ID NO: 456123 - RNA, 19 nt, Artificial Sequence
  Synthetic
uucauuucacuucaguuaa

SEQ ID NO: 456124 - RNA, 20 nt, Artificial Sequence
  Synthetic
uuucauuucacuucaguuaa

SEQ ID NO: 456125 - RNA, 21 nt, Artificial Sequence
  Synthetic
guuucauuucacuucaguuaa

SEQ ID NO: 456126 - RNA, 22 nt, Artificial Sequence
  Synthetic
aguuucauuucacuucaguuaa

SEQ ID NO: 456127 - RNA, 23 nt, Artificial Sequence
  Synthetic
aaguuucauuucacuucaguuaa

SEQ ID NO: 456128 - RNA, 24 nt, Artificial Sequence
  Synthetic
uaaguuucauuucacuucaguuaa

SEQ ID NO: 456129 - RNA, 18 nt, Artificial Sequence
  Synthetic
caaacucuccagaguuaa

SEQ ID NO: 456130 - RNA, 19 nt, Artificial Sequence
  Synthetic
ucaaacucuccagaguuaa

SEQ ID NO: 456131 - RNA, 20 nt, Artificial Sequence
  Synthetic
cucaaacucuccagaguuaa

SEQ ID NO: 456132 - RNA, 21 nt, Artificial Sequence
  Synthetic
acucaaacucuccagaguuaa

SEQ ID NO: 456133 - RNA, 22 nt, Artificial Sequence
  Synthetic
uacucaaacucuccagaguuaa

SEQ ID NO: 456134 - RNA, 23 nt, Artificial Sequence
  Synthetic
uuacucaaacucuccagaguuaa

SEQ ID NO: 456135 - RNA, 24 nt, Artificial Sequence
  Synthetic
auuacucaaacucuccagaguuaa

SEQ ID NO: 456136 - RNA, 18 nt, Artificial Sequence
  Synthetic
aucccaguaaauaguuaa

SEQ ID NO: 456137 - RNA, 19 nt, Artificial Sequence
  Synthetic
gaucccaguaaauaguuaa

SEQ ID NO: 456138 - RNA, 20 nt, Artificial Sequence
  Synthetic
agaucccaguaaauaguuaa

SEQ ID NO: 456139 - RNA, 21 nt, Artificial Sequence
  Synthetic
uagaucccaguaaauaguuaa

SEQ ID NO: 456140 - RNA, 22 nt, Artificial Sequence
  Synthetic
cuagaucccaguaaauaguuaa

SEQ ID NO: 456141 - RNA, 23 nt, Artificial Sequence
  Synthetic
ucuagaucccaguaaauaguuaa

SEQ ID NO: 456142 - RNA, 24 nt, Artificial Sequence
  Synthetic
uucuagaucccaguaaauaguuaa

SEQ ID NO: 456143 - RNA, 18 nt, Artificial Sequence
  Synthetic
aaacauacaucuaguuaa

SEQ ID NO: 456144 - RNA, 19 nt, Artificial Sequence
  Synthetic
aaaacauacaucuaguuaa

SEQ ID NO: 456145 - RNA, 20 nt, Artificial Sequence
  Synthetic
uaaaacauacaucuaguuaa

SEQ ID NO: 456146 - RNA, 21 nt, Artificial Sequence
  Synthetic
guaaaacauacaucuaguuaa

SEQ ID NO: 456147 - RNA, 22 nt, Artificial Sequence
  Synthetic
aguaaaacauacaucuaguuaa

SEQ ID NO: 456148 - RNA, 23 nt, Artificial Sequence
  Synthetic
gaguaaaacauacaucuaguuaa

SEQ ID NO: 456149 - RNA, 24 nt, Artificial Sequence
  Synthetic
ugaguaaaacauacaucuaguuaa

SEQ ID NO: 456150 - RNA, 18 nt, Artificial Sequence
  Synthetic
ccaugagaacuuaguuaa

SEQ ID NO: 456151 - RNA, 19 nt, Artificial Sequence
  Synthetic
gccaugagaacuuaguuaa

SEQ ID NO: 456152 - RNA, 20 nt, Artificial Sequence
  Synthetic
ugccaugagaacuuaguuaa

SEQ ID NO: 456153 - RNA, 21 nt, Artificial Sequence
  Synthetic
cugccaugagaacuuaguuaa

SEQ ID NO: 456154 - RNA, 22 nt, Artificial Sequence
  Synthetic
gcugccaugagaacuuaguuaa

SEQ ID NO: 456155 - RNA, 23 nt, Artificial Sequence
  Synthetic
ugcugccaugagaacuuaguuaa

SEQ ID NO: 456156 - RNA, 24 nt, Artificial Sequence
  Synthetic
augcugccaugagaacuuaguuaa

SEQ ID NO: 456157 - RNA, 18 nt, Artificial Sequence
  Synthetic
aaucaaagagaacguuaa

SEQ ID NO: 456158 - RNA, 19 nt, Artificial Sequence
  Synthetic
aaaucaaagagaacguuaa

SEQ ID NO: 456159 - RNA, 20 nt, Artificial Sequence
  Synthetic
caaaucaaagagaacguuaa

SEQ ID NO: 456160 - RNA, 21 nt, Artificial Sequence
  Synthetic
ucaaaucaaagagaacguuaa

SEQ ID NO: 456161 - RNA, 22 nt, Artificial Sequence
  Synthetic
aucaaaucaaagagaacguuaa

SEQ ID NO: 456162 - RNA, 23 nt, Artificial Sequence
  Synthetic
caucaaaucaaagagaacguuaa

SEQ ID NO: 456163 - RNA, 24 nt, Artificial Sequence
  Synthetic
gcaucaaaucaaagagaacguuaa

SEQ ID NO: 456164 - RNA, 18 nt, Artificial Sequence
  Synthetic
acuucuuucucacguuaa

SEQ ID NO: 456165 - RNA, 19 nt, Artificial Sequence
  Synthetic
uacuucuuucucacguuaa

SEQ ID NO: 456166 - RNA, 20 nt, Artificial Sequence
  Synthetic
uuacuucuuucucacguuaa

SEQ ID NO: 456167 - RNA, 21 nt, Artificial Sequence
  Synthetic
cuuacuucuuucucacguuaa

SEQ ID NO: 456168 - RNA, 22 nt, Artificial Sequence
  Synthetic
ccuuacuucuuucucacguuaa

SEQ ID NO: 456169 - RNA, 23 nt, Artificial Sequence
  Synthetic
cccuuacuucuuucucacguuaa

SEQ ID NO: 456170 - RNA, 24 nt, Artificial Sequence
  Synthetic
ucccuuacuucuuucucacguuaa

SEQ ID NO: 456171 - RNA, 18 nt, Artificial Sequence
  Synthetic
uauugaguaaaccguuaa

SEQ ID NO: 456172 - RNA, 19 nt, Artificial Sequence
  Synthetic
auauugaguaaaccguuaa

SEQ ID NO: 456173 - RNA, 20 nt, Artificial Sequence
  Synthetic
aauauugaguaaaccguuaa

SEQ ID NO: 456174 - RNA, 21 nt, Artificial Sequence
  Synthetic
gaauauugaguaaaccguuaa

SEQ ID NO: 456175 - RNA, 22 nt, Artificial Sequence
  Synthetic
ugaauauugaguaaaccguuaa

SEQ ID NO: 456176 - RNA, 23 nt, Artificial Sequence
  Synthetic
gugaauauugaguaaaccguuaa

SEQ ID NO: 456177 - RNA, 24 nt, Artificial Sequence
  Synthetic
ggugaauauugaguaaaccguuaa

SEQ ID NO: 456178 - RNA, 18 nt, Artificial Sequence
  Synthetic
aaacuaccaaaagguuaa

SEQ ID NO: 456179 - RNA, 19 nt, Artificial Sequence
  Synthetic
aaaacuaccaaaagguuaa

SEQ ID NO: 456180 - RNA, 20 nt, Artificial Sequence
  Synthetic
uaaaacuaccaaaagguuaa

SEQ ID NO: 456181 - RNA, 21 nt, Artificial Sequence
  Synthetic
auaaaacuaccaaaagguuaa

SEQ ID NO: 456182 - RNA, 22 nt, Artificial Sequence
  Synthetic
aauaaaacuaccaaaagguuaa

SEQ ID NO: 456183 - RNA, 23 nt, Artificial Sequence
  Synthetic
caauaaaacuaccaaaagguuaa

SEQ ID NO: 456184 - RNA, 24 nt, Artificial Sequence
  Synthetic
gcaauaaaacuaccaaaagguuaa

SEQ ID NO: 456185 - RNA, 18 nt, Artificial Sequence
  Synthetic
uccuucauuggagguuaa

SEQ ID NO: 456186 - RNA, 19 nt, Artificial Sequence
  Synthetic
auccuucauuggagguuaa

SEQ ID NO: 456187 - RNA, 20 nt, Artificial Sequence
  Synthetic
uauccuucauuggagguuaa

SEQ ID NO: 456188 - RNA, 21 nt, Artificial Sequence
  Synthetic
auauccuucauuggagguuaa

SEQ ID NO: 456189 - RNA, 22 nt, Artificial Sequence
  Synthetic
uauauccuucauuggagguuaa

SEQ ID NO: 456190 - RNA, 23 nt, Artificial Sequence
  Synthetic
auauauccuucauuggagguuaa

SEQ ID NO: 456191 - RNA, 24 nt, Artificial Sequence
  Synthetic
aauauauccuucauuggagguuaa

SEQ ID NO: 456192 - RNA, 18 nt, Artificial Sequence
  Synthetic
uggaggacauuagguuaa

SEQ ID NO: 456193 - RNA, 19 nt, Artificial Sequence
  Synthetic
cuggaggacauuagguuaa

SEQ ID NO: 456194 - RNA, 20 nt, Artificial Sequence
  Synthetic
ccuggaggacauuagguuaa

SEQ ID NO: 456195 - RNA, 21 nt, Artificial Sequence
  Synthetic
gccuggaggacauuagguuaa

SEQ ID NO: 456196 - RNA, 22 nt, Artificial Sequence
  Synthetic
agccuggaggacauuagguuaa

SEQ ID NO: 456197 - RNA, 23 nt, Artificial Sequence
  Synthetic
gagccuggaggacauuagguuaa

SEQ ID NO: 456198 - RNA, 24 nt, Artificial Sequence
  Synthetic
ugagccuggaggacauuagguuaa

SEQ ID NO: 456199 - RNA, 18 nt, Artificial Sequence
  Synthetic
cacccuaacaaggguuaa

SEQ ID NO: 456200 - RNA, 19 nt, Artificial Sequence
  Synthetic
ucacccuaacaaggguuaa

SEQ ID NO: 456201 - RNA, 20 nt, Artificial Sequence
  Synthetic
cucacccuaacaaggguuaa

SEQ ID NO: 456202 - RNA, 21 nt, Artificial Sequence
  Synthetic
ucucacccuaacaaggguuaa

SEQ ID NO: 456203 - RNA, 22 nt, Artificial Sequence
  Synthetic
uucucacccuaacaaggguuaa

SEQ ID NO: 456204 - RNA, 23 nt, Artificial Sequence
  Synthetic
uuucucacccuaacaaggguuaa

SEQ ID NO: 456205 - RNA, 24 nt, Artificial Sequence
  Synthetic
auuucucacccuaacaaggguuaa

SEQ ID NO: 456206 - RNA, 18 nt, Artificial Sequence
  Synthetic
aaggugaauaaugguuaa

SEQ ID NO: 456207 - RNA, 19 nt, Artificial Sequence
  Synthetic
aaaggugaauaaugguuaa

SEQ ID NO: 456208 - RNA, 20 nt, Artificial Sequence
  Synthetic
gaaaggugaauaaugguuaa

SEQ ID NO: 456209 - RNA, 21 nt, Artificial Sequence
  Synthetic
ggaaaggugaauaaugguuaa

SEQ ID NO: 456210 - RNA, 22 nt, Artificial Sequence
  Synthetic
gggaaaggugaauaaugguuaa

SEQ ID NO: 456211 - RNA, 23 nt, Artificial Sequence
  Synthetic
ugggaaaggugaauaaugguuaa

SEQ ID NO: 456212 - RNA, 24 nt, Artificial Sequence
  Synthetic
cugggaaaggugaauaaugguuaa

SEQ ID NO: 456213 - RNA, 18 nt, Artificial Sequence
  Synthetic
uaguugguuacugguuaa

SEQ ID NO: 456214 - RNA, 19 nt, Artificial Sequence
  Synthetic
uuaguugguuacugguuaa

SEQ ID NO: 456215 - RNA, 20 nt, Artificial Sequence
  Synthetic
guuaguugguuacugguuaa

SEQ ID NO: 456216 - RNA, 21 nt, Artificial Sequence
  Synthetic
gguuaguugguuacugguuaa

SEQ ID NO: 456217 - RNA, 22 nt, Artificial Sequence
  Synthetic
ugguuaguugguuacugguuaa

SEQ ID NO: 456218 - RNA, 23 nt, Artificial Sequence
  Synthetic
uugguuaguugguuacugguuaa

SEQ ID NO: 456219 - RNA, 24 nt, Artificial Sequence
  Synthetic
auugguuaguugguuacugguuaa

SEQ ID NO: 456220 - RNA, 18 nt, Artificial Sequence
  Synthetic
gggacagacccugguuaa

SEQ ID NO: 456221 - RNA, 19 nt, Artificial Sequence
  Synthetic
agggacagacccugguuaa

SEQ ID NO: 456222 - RNA, 20 nt, Artificial Sequence
  Synthetic
gagggacagacccugguuaa

SEQ ID NO: 456223 - RNA, 21 nt, Artificial Sequence
  Synthetic
ugagggacagacccugguuaa

SEQ ID NO: 456224 - RNA, 22 nt, Artificial Sequence
  Synthetic
cugagggacagacccugguuaa

SEQ ID NO: 456225 - RNA, 23 nt, Artificial Sequence
  Synthetic
gcugagggacagacccugguuaa

SEQ ID NO: 456226 - RNA, 24 nt, Artificial Sequence
  Synthetic
ugcugagggacagacccugguuaa

SEQ ID NO: 456227 - RNA, 18 nt, Artificial Sequence
  Synthetic
aaaaaggacauugguuaa

SEQ ID NO: 456228 - RNA, 19 nt, Artificial Sequence
  Synthetic
uaaaaaggacauugguuaa

SEQ ID NO: 456229 - RNA, 20 nt, Artificial Sequence
  Synthetic
uuaaaaaggacauugguuaa

SEQ ID NO: 456230 - RNA, 21 nt, Artificial Sequence
  Synthetic
auuaaaaaggacauugguuaa

SEQ ID NO: 456231 - RNA, 22 nt, Artificial Sequence
  Synthetic
gauuaaaaaggacauugguuaa

SEQ ID NO: 456232 - RNA, 23 nt, Artificial Sequence
  Synthetic
ggauuaaaaaggacauugguuaa

SEQ ID NO: 456233 - RNA, 24 nt, Artificial Sequence
  Synthetic
gggauuaaaaaggacauugguuaa

SEQ ID NO: 456234 - RNA, 18 nt, Artificial Sequence
  Synthetic
acuuuguaacuugguuaa

SEQ ID NO: 456235 - RNA, 19 nt, Artificial Sequence
  Synthetic
cacuuuguaacuugguuaa

SEQ ID NO: 456236 - RNA, 20 nt, Artificial Sequence
  Synthetic
acacuuuguaacuugguuaa

SEQ ID NO: 456237 - RNA, 21 nt, Artificial Sequence
  Synthetic
gacacuuuguaacuugguuaa

SEQ ID NO: 456238 - RNA, 22 nt, Artificial Sequence
  Synthetic
agacacuuuguaacuugguuaa

SEQ ID NO: 456239 - RNA, 23 nt, Artificial Sequence
  Synthetic
gagacacuuuguaacuugguuaa

SEQ ID NO: 456240 - RNA, 24 nt, Artificial Sequence
  Synthetic
ugagacacuuuguaacuugguuaa

SEQ ID NO: 456241 - RNA, 18 nt, Artificial Sequence
  Synthetic
uuuuauuuauaauguuaa

SEQ ID NO: 456242 - RNA, 19 nt, Artificial Sequence
  Synthetic
auuuuauuuauaauguuaa

SEQ ID NO: 456243 - RNA, 20 nt, Artificial Sequence
  Synthetic
uauuuuauuuauaauguuaa

SEQ ID NO: 456244 - RNA, 21 nt, Artificial Sequence
  Synthetic
auauuuuauuuauaauguuaa

SEQ ID NO: 456245 - RNA, 22 nt, Artificial Sequence
  Synthetic
aauauuuuauuuauaauguuaa

SEQ ID NO: 456246 - RNA, 23 nt, Artificial Sequence
  Synthetic
aaauauuuuauuuauaauguuaa

SEQ ID NO: 456247 - RNA, 24 nt, Artificial Sequence
  Synthetic
aaaauauuuuauuuauaauguuaa

SEQ ID NO: 456248 - RNA, 18 nt, Artificial Sequence
  Synthetic
agauauaccuaauguuaa

SEQ ID NO: 456249 - RNA, 19 nt, Artificial Sequence
  Synthetic
gagauauaccuaauguuaa

SEQ ID NO: 456250 - RNA, 20 nt, Artificial Sequence
  Synthetic
ggagauauaccuaauguuaa

SEQ ID NO: 456251 - RNA, 21 nt, Artificial Sequence
  Synthetic
aggagauauaccuaauguuaa

SEQ ID NO: 456252 - RNA, 22 nt, Artificial Sequence
  Synthetic
uaggagauauaccuaauguuaa

SEQ ID NO: 456253 - RNA, 23 nt, Artificial Sequence
  Synthetic
uuaggagauauaccuaauguuaa

SEQ ID NO: 456254 - RNA, 24 nt, Artificial Sequence
  Synthetic
auuaggagauauaccuaauguuaa

SEQ ID NO: 456255 - RNA, 18 nt, Artificial Sequence
  Synthetic
agacaagucuaauguuaa

SEQ ID NO: 456256 - RNA, 19 nt, Artificial Sequence
  Synthetic
cagacaagucuaauguuaa

SEQ ID NO: 456257 - RNA, 20 nt, Artificial Sequence
  Synthetic
acagacaagucuaauguuaa

SEQ ID NO: 456258 - RNA, 21 nt, Artificial Sequence
  Synthetic
uacagacaagucuaauguuaa

SEQ ID NO: 456259 - RNA, 22 nt, Artificial Sequence
  Synthetic
auacagacaagucuaauguuaa

SEQ ID NO: 456260 - RNA, 23 nt, Artificial Sequence
  Synthetic
aauacagacaagucuaauguuaa

SEQ ID NO: 456261 - RNA, 24 nt, Artificial Sequence
  Synthetic
aaauacagacaagucuaauguuaa

SEQ ID NO: 456262 - RNA, 18 nt, Artificial Sequence
  Synthetic
gaggagucuuaauguuaa

SEQ ID NO: 456263 - RNA, 19 nt, Artificial Sequence
  Synthetic
ugaggagucuuaauguuaa

SEQ ID NO: 456264 - RNA, 20 nt, Artificial Sequence
  Synthetic
cugaggagucuuaauguuaa

SEQ ID NO: 456265 - RNA, 21 nt, Artificial Sequence
  Synthetic
acugaggagucuuaauguuaa

SEQ ID NO: 456266 - RNA, 22 nt, Artificial Sequence
  Synthetic
cacugaggagucuuaauguuaa

SEQ ID NO: 456267 - RNA, 23 nt, Artificial Sequence
  Synthetic
acacugaggagucuuaauguuaa

SEQ ID NO: 456268 - RNA, 24 nt, Artificial Sequence
  Synthetic
gacacugaggagucuuaauguuaa

SEQ ID NO: 456269 - RNA, 18 nt, Artificial Sequence
  Synthetic
aaaaauggaauauguuaa

SEQ ID NO: 456270 - RNA, 19 nt, Artificial Sequence
  Synthetic
uaaaaauggaauauguuaa

SEQ ID NO: 456271 - RNA, 20 nt, Artificial Sequence
  Synthetic
uuaaaaauggaauauguuaa

SEQ ID NO: 456272 - RNA, 21 nt, Artificial Sequence
  Synthetic
uuuaaaaauggaauauguuaa

SEQ ID NO: 456273 - RNA, 22 nt, Artificial Sequence
  Synthetic
uuuuaaaaauggaauauguuaa

SEQ ID NO: 456274 - RNA, 23 nt, Artificial Sequence
  Synthetic
auuuuaaaaauggaauauguuaa

SEQ ID NO: 456275 - RNA, 24 nt, Artificial Sequence
  Synthetic
uauuuuaaaaauggaauauguuaa

SEQ ID NO: 456276 - RNA, 18 nt, Artificial Sequence
  Synthetic
cuaagacgaggguguuaa

SEQ ID NO: 456277 - RNA, 19 nt, Artificial Sequence
  Synthetic
ucuaagacgaggguguuaa

SEQ ID NO: 456278 - RNA, 20 nt, Artificial Sequence
  Synthetic
uucuaagacgaggguguuaa

SEQ ID NO: 456279 - RNA, 21 nt, Artificial Sequence
  Synthetic
uuucuaagacgaggguguuaa

SEQ ID NO: 456280 - RNA, 22 nt, Artificial Sequence
  Synthetic
uuuucuaagacgaggguguuaa

SEQ ID NO: 456281 - RNA, 23 nt, Artificial Sequence
  Synthetic
uuuuucuaagacgaggguguuaa

SEQ ID NO: 456282 - RNA, 24 nt, Artificial Sequence
  Synthetic
cuuuuucuaagacgaggguguuaa

SEQ ID NO: 456283 - RNA, 18 nt, Artificial Sequence
  Synthetic
uggaggucauuguguuaa

SEQ ID NO: 456284 - RNA, 19 nt, Artificial Sequence
  Synthetic
cuggaggucauuguguuaa

SEQ ID NO: 456285 - RNA, 20 nt, Artificial Sequence
  Synthetic
acuggaggucauuguguuaa

SEQ ID NO: 456286 - RNA, 21 nt, Artificial Sequence
  Synthetic
aacuggaggucauuguguuaa

SEQ ID NO: 456287 - RNA, 22 nt, Artificial Sequence
  Synthetic
gaacuggaggucauuguguuaa

SEQ ID NO: 456288 - RNA, 23 nt, Artificial Sequence
  Synthetic
ggaacuggaggucauuguguuaa

SEQ ID NO: 456289 - RNA, 24 nt, Artificial Sequence
  Synthetic
uggaacuggaggucauuguguuaa

SEQ ID NO: 456290 - RNA, 18 nt, Artificial Sequence
  Synthetic
aucaggaaagauuguuaa

SEQ ID NO: 456291 - RNA, 19 nt, Artificial Sequence
  Synthetic
uaucaggaaagauuguuaa

SEQ ID NO: 456292 - RNA, 20 nt, Artificial Sequence
  Synthetic
uuaucaggaaagauuguuaa

SEQ ID NO: 456293 - RNA, 21 nt, Artificial Sequence
  Synthetic
uuuaucaggaaagauuguuaa

SEQ ID NO: 456294 - RNA, 22 nt, Artificial Sequence
  Synthetic
auuuaucaggaaagauuguuaa

SEQ ID NO: 456295 - RNA, 23 nt, Artificial Sequence
  Synthetic
cauuuaucaggaaagauuguuaa

SEQ ID NO: 456296 - RNA, 24 nt, Artificial Sequence
  Synthetic
ccauuuaucaggaaagauuguuaa

SEQ ID NO: 456297 - RNA, 18 nt, Artificial Sequence
  Synthetic
ugauauagcauuuguuaa

SEQ ID NO: 456298 - RNA, 19 nt, Artificial Sequence
  Synthetic
augauauagcauuuguuaa

SEQ ID NO: 456299 - RNA, 20 nt, Artificial Sequence
  Synthetic
caugauauagcauuuguuaa

SEQ ID NO: 456300 - RNA, 21 nt, Artificial Sequence
  Synthetic
acaugauauagcauuuguuaa

SEQ ID NO: 456301 - RNA, 22 nt, Artificial Sequence
  Synthetic
uacaugauauagcauuuguuaa

SEQ ID NO: 456302 - RNA, 23 nt, Artificial Sequence
  Synthetic
uuacaugauauagcauuuguuaa

SEQ ID NO: 456303 - RNA, 24 nt, Artificial Sequence
  Synthetic
cuuacaugauauagcauuuguuaa

SEQ ID NO: 456304 - RNA, 18 nt, Artificial Sequence
  Synthetic
acaauggauauuuguuaa

SEQ ID NO: 456305 - RNA, 19 nt, Artificial Sequence
  Synthetic
aacaauggauauuuguuaa

SEQ ID NO: 456306 - RNA, 20 nt, Artificial Sequence
  Synthetic
uaacaauggauauuuguuaa

SEQ ID NO: 456307 - RNA, 21 nt, Artificial Sequence
  Synthetic
auaacaauggauauuuguuaa

SEQ ID NO: 456308 - RNA, 22 nt, Artificial Sequence
  Synthetic
uauaacaauggauauuuguuaa

SEQ ID NO: 456309 - RNA, 23 nt, Artificial Sequence
  Synthetic
uuauaacaauggauauuuguuaa

SEQ ID NO: 456310 - RNA, 24 nt, Artificial Sequence
  Synthetic
auuauaacaauggauauuuguuaa

SEQ ID NO: 456311 - RNA, 18 nt, Artificial Sequence
  Synthetic
agugguucucaaauuuaa

SEQ ID NO: 456312 - RNA, 19 nt, Artificial Sequence
  Synthetic
uagugguucucaaauuuaa

SEQ ID NO: 456313 - RNA, 20 nt, Artificial Sequence
  Synthetic
cuagugguucucaaauuuaa

SEQ ID NO: 456314 - RNA, 21 nt, Artificial Sequence
  Synthetic
ucuagugguucucaaauuuaa

SEQ ID NO: 456315 - RNA, 22 nt, Artificial Sequence
  Synthetic
gucuagugguucucaaauuuaa

SEQ ID NO: 456316 - RNA, 23 nt, Artificial Sequence
  Synthetic
ggucuagugguucucaaauuuaa

SEQ ID NO: 456317 - RNA, 24 nt, Artificial Sequence
  Synthetic
uggucuagugguucucaaauuuaa

SEQ ID NO: 456318 - RNA, 18 nt, Artificial Sequence
  Synthetic
acaauaagucaaauuuaa

SEQ ID NO: 456319 - RNA, 19 nt, Artificial Sequence
  Synthetic
aacaauaagucaaauuuaa

SEQ ID NO: 456320 - RNA, 20 nt, Artificial Sequence
  Synthetic
uaacaauaagucaaauuuaa

SEQ ID NO: 456321 - RNA, 21 nt, Artificial Sequence
  Synthetic
auaacaauaagucaaauuuaa

SEQ ID NO: 456322 - RNA, 22 nt, Artificial Sequence
  Synthetic
aauaacaauaagucaaauuuaa

SEQ ID NO: 456323 - RNA, 23 nt, Artificial Sequence
  Synthetic
caauaacaauaagucaaauuuaa

SEQ ID NO: 456324 - RNA, 24 nt, Artificial Sequence
  Synthetic
ucaauaacaauaagucaaauuuaa

SEQ ID NO: 456325 - RNA, 18 nt, Artificial Sequence
  Synthetic
guuguuuaguaaauuuaa

SEQ ID NO: 456326 - RNA, 19 nt, Artificial Sequence
  Synthetic
gguuguuuaguaaauuuaa

SEQ ID NO: 456327 - RNA, 20 nt, Artificial Sequence
  Synthetic
agguuguuuaguaaauuuaa

SEQ ID NO: 456328 - RNA, 21 nt, Artificial Sequence
  Synthetic
cagguuguuuaguaaauuuaa

SEQ ID NO: 456329 - RNA, 22 nt, Artificial Sequence
  Synthetic
ccagguuguuuaguaaauuuaa

SEQ ID NO: 456330 - RNA, 23 nt, Artificial Sequence
  Synthetic
accagguuguuuaguaaauuuaa

SEQ ID NO: 456331 - RNA, 24 nt, Artificial Sequence
  Synthetic
uaccagguuguuuaguaaauuuaa

SEQ ID NO: 456332 - RNA, 18 nt, Artificial Sequence
  Synthetic
uugacuugguaaauuuaa

SEQ ID NO: 456333 - RNA, 19 nt, Artificial Sequence
  Synthetic
auugacuugguaaauuuaa

SEQ ID NO: 456334 - RNA, 20 nt, Artificial Sequence
  Synthetic
uauugacuugguaaauuuaa

SEQ ID NO: 456335 - RNA, 21 nt, Artificial Sequence
  Synthetic
cuauugacuugguaaauuuaa

SEQ ID NO: 456336 - RNA, 22 nt, Artificial Sequence
  Synthetic
gcuauugacuugguaaauuuaa

SEQ ID NO: 456337 - RNA, 23 nt, Artificial Sequence
  Synthetic
ugcuauugacuugguaaauuuaa

SEQ ID NO: 456338 - RNA, 24 nt, Artificial Sequence
  Synthetic
gugcuauugacuugguaaauuuaa

SEQ ID NO: 456339 - RNA, 18 nt, Artificial Sequence
  Synthetic
uuauagaaaacaauuuaa

SEQ ID NO: 456340 - RNA, 19 nt, Artificial Sequence
  Synthetic
uuuauagaaaacaauuuaa

SEQ ID NO: 456341 - RNA, 20 nt, Artificial Sequence
  Synthetic
guuuauagaaaacaauuuaa

SEQ ID NO: 456342 - RNA, 21 nt, Artificial Sequence
  Synthetic
gguuuauagaaaacaauuuaa

SEQ ID NO: 456343 - RNA, 22 nt, Artificial Sequence
  Synthetic
ggguuuauagaaaacaauuuaa

SEQ ID NO: 456344 - RNA, 23 nt, Artificial Sequence
  Synthetic
aggguuuauagaaaacaauuuaa

SEQ ID NO: 456345 - RNA, 24 nt, Artificial Sequence
  Synthetic
aaggguuuauagaaaacaauuuaa

SEQ ID NO: 456346 - RNA, 18 nt, Artificial Sequence
  Synthetic
aaggagcgcagaauuuaa

SEQ ID NO: 456347 - RNA, 19 nt, Artificial Sequence
  Synthetic
caaggagcgcagaauuuaa

SEQ ID NO: 456348 - RNA, 20 nt, Artificial Sequence
  Synthetic
ccaaggagcgcagaauuuaa

SEQ ID NO: 456349 - RNA, 21 nt, Artificial Sequence
  Synthetic
uccaaggagcgcagaauuuaa

SEQ ID NO: 456350 - RNA, 22 nt, Artificial Sequence
  Synthetic
uuccaaggagcgcagaauuuaa

SEQ ID NO: 456351 - RNA, 23 nt, Artificial Sequence
  Synthetic
uuuccaaggagcgcagaauuuaa

SEQ ID NO: 456352 - RNA, 24 nt, Artificial Sequence
  Synthetic
auuuccaaggagcgcagaauuuaa

SEQ ID NO: 456353 - RNA, 18 nt, Artificial Sequence
  Synthetic
cccucgacuggaauuuaa

SEQ ID NO: 456354 - RNA, 19 nt, Artificial Sequence
  Synthetic
gcccucgacuggaauuuaa

SEQ ID NO: 456355 - RNA, 20 nt, Artificial Sequence
  Synthetic
ggcccucgacuggaauuuaa

SEQ ID NO: 456356 - RNA, 21 nt, Artificial Sequence
  Synthetic
aggcccucgacuggaauuuaa

SEQ ID NO: 456357 - RNA, 22 nt, Artificial Sequence
  Synthetic
aaggcccucgacuggaauuuaa

SEQ ID NO: 456358 - RNA, 23 nt, Artificial Sequence
  Synthetic
caaggcccucgacuggaauuuaa

SEQ ID NO: 456359 - RNA, 24 nt, Artificial Sequence
  Synthetic
ucaaggcccucgacuggaauuuaa

SEQ ID NO: 456360 - RNA, 18 nt, Artificial Sequence
  Synthetic
ugcgccuugcuaauuuaa

SEQ ID NO: 456361 - RNA, 19 nt, Artificial Sequence
  Synthetic
cugcgccuugcuaauuuaa

SEQ ID NO: 456362 - RNA, 20 nt, Artificial Sequence
  Synthetic
gcugcgccuugcuaauuuaa

SEQ ID NO: 456363 - RNA, 21 nt, Artificial Sequence
  Synthetic
agcugcgccuugcuaauuuaa

SEQ ID NO: 456364 - RNA, 22 nt, Artificial Sequence
  Synthetic
aagcugcgccuugcuaauuuaa

SEQ ID NO: 456365 - RNA, 23 nt, Artificial Sequence
  Synthetic
gaagcugcgccuugcuaauuuaa

SEQ ID NO: 456366 - RNA, 24 nt, Artificial Sequence
  Synthetic
ggaagcugcgccuugcuaauuuaa

SEQ ID NO: 456367 - RNA, 18 nt, Artificial Sequence
  Synthetic
auagaacuuguaauuuaa

SEQ ID NO: 456368 - RNA, 19 nt, Artificial Sequence
  Synthetic
cauagaacuuguaauuuaa

SEQ ID NO: 456369 - RNA, 20 nt, Artificial Sequence
  Synthetic
acauagaacuuguaauuuaa

SEQ ID NO: 456370 - RNA, 21 nt, Artificial Sequence
  Synthetic
cacauagaacuuguaauuuaa

SEQ ID NO: 456371 - RNA, 22 nt, Artificial Sequence
  Synthetic
acacauagaacuuguaauuuaa

SEQ ID NO: 456372 - RNA, 23 nt, Artificial Sequence
  Synthetic
uacacauagaacuuguaauuuaa

SEQ ID NO: 456373 - RNA, 24 nt, Artificial Sequence
  Synthetic
auacacauagaacuuguaauuuaa

SEQ ID NO: 456374 - RNA, 18 nt, Artificial Sequence
  Synthetic
uuaggaagcuuaauuuaa

SEQ ID NO: 456375 - RNA, 19 nt, Artificial Sequence
  Synthetic
uuuaggaagcuuaauuuaa

SEQ ID NO: 456376 - RNA, 20 nt, Artificial Sequence
  Synthetic
uuuuaggaagcuuaauuuaa

SEQ ID NO: 456377 - RNA, 21 nt, Artificial Sequence
  Synthetic
guuuuaggaagcuuaauuuaa

SEQ ID NO: 456378 - RNA, 22 nt, Artificial Sequence
  Synthetic
uguuuuaggaagcuuaauuuaa

SEQ ID NO: 456379 - RNA, 23 nt, Artificial Sequence
  Synthetic
auguuuuaggaagcuuaauuuaa

SEQ ID NO: 456380 - RNA, 24 nt, Artificial Sequence
  Synthetic
uauguuuuaggaagcuuaauuuaa

SEQ ID NO: 456381 - RNA, 18 nt, Artificial Sequence
  Synthetic
aaauagcucuuaauuuaa

SEQ ID NO: 456382 - RNA, 19 nt, Artificial Sequence
  Synthetic
uaaauagcucuuaauuuaa

SEQ ID NO: 456383 - RNA, 20 nt, Artificial Sequence
  Synthetic
uuaaauagcucuuaauuuaa

SEQ ID NO: 456384 - RNA, 21 nt, Artificial Sequence
  Synthetic
auuaaauagcucuuaauuuaa

SEQ ID NO: 456385 - RNA, 22 nt, Artificial Sequence
  Synthetic
aauuaaauagcucuuaauuuaa

SEQ ID NO: 456386 - RNA, 23 nt, Artificial Sequence
  Synthetic
uaauuaaauagcucuuaauuuaa

SEQ ID NO: 456387 - RNA, 24 nt, Artificial Sequence
  Synthetic
uuaauuaaauagcucuuaauuuaa

SEQ ID NO: 456388 - RNA, 18 nt, Artificial Sequence
  Synthetic
acaaaauuaaacauuuaa

SEQ ID NO: 456389 - RNA, 19 nt, Artificial Sequence
  Synthetic
aacaaaauuaaacauuuaa

SEQ ID NO: 456390 - RNA, 20 nt, Artificial Sequence
  Synthetic
gaacaaaauuaaacauuuaa

SEQ ID NO: 456391 - RNA, 21 nt, Artificial Sequence
  Synthetic
ugaacaaaauuaaacauuuaa

SEQ ID NO: 456392 - RNA, 22 nt, Artificial Sequence
  Synthetic
cugaacaaaauuaaacauuuaa

SEQ ID NO: 456393 - RNA, 23 nt, Artificial Sequence
  Synthetic
ucugaacaaaauuaaacauuuaa

SEQ ID NO: 456394 - RNA, 24 nt, Artificial Sequence
  Synthetic
cucugaacaaaauuaaacauuuaa

SEQ ID NO: 456395 - RNA, 18 nt, Artificial Sequence
  Synthetic
agcauuuuacacauuuaa

SEQ ID NO: 456396 - RNA, 19 nt, Artificial Sequence
  Synthetic
aagcauuuuacacauuuaa

SEQ ID NO: 456397 - RNA, 20 nt, Artificial Sequence
  Synthetic
uaagcauuuuacacauuuaa

SEQ ID NO: 456398 - RNA, 21 nt, Artificial Sequence
  Synthetic
auaagcauuuuacacauuuaa

SEQ ID NO: 456399 - RNA, 22 nt, Artificial Sequence
  Synthetic
cauaagcauuuuacacauuuaa

SEQ ID NO: 456400 - RNA, 23 nt, Artificial Sequence
  Synthetic
ucauaagcauuuuacacauuuaa

SEQ ID NO: 456401 - RNA, 24 nt, Artificial Sequence
  Synthetic
aucauaagcauuuuacacauuuaa

SEQ ID NO: 456402 - RNA, 18 nt, Artificial Sequence
  Synthetic
uuaccuuaugacauuuaa

SEQ ID NO: 456403 - RNA, 19 nt, Artificial Sequence
  Synthetic
uuuaccuuaugacauuuaa

SEQ ID NO: 456404 - RNA, 20 nt, Artificial Sequence
  Synthetic
uuuuaccuuaugacauuuaa

SEQ ID NO: 456405 - RNA, 21 nt, Artificial Sequence
  Synthetic
guuuuaccuuaugacauuuaa

SEQ ID NO: 456406 - RNA, 22 nt, Artificial Sequence
  Synthetic
uguuuuaccuuaugacauuuaa

SEQ ID NO: 456407 - RNA, 23 nt, Artificial Sequence
  Synthetic
cuguuuuaccuuaugacauuuaa

SEQ ID NO: 456408 - RNA, 24 nt, Artificial Sequence
  Synthetic
ucuguuuuaccuuaugacauuuaa

SEQ ID NO: 456409 - RNA, 18 nt, Artificial Sequence
  Synthetic
ugccucugauacauuuaa

SEQ ID NO: 456410 - RNA, 19 nt, Artificial Sequence
  Synthetic
uugccucugauacauuuaa

SEQ ID NO: 456411 - RNA, 20 nt, Artificial Sequence
  Synthetic
guugccucugauacauuuaa

SEQ ID NO: 456412 - RNA, 21 nt, Artificial Sequence
  Synthetic
aguugccucugauacauuuaa

SEQ ID NO: 456413 - RNA, 22 nt, Artificial Sequence
  Synthetic
gaguugccucugauacauuuaa

SEQ ID NO: 456414 - RNA, 23 nt, Artificial Sequence
  Synthetic
ugaguugccucugauacauuuaa

SEQ ID NO: 456415 - RNA, 24 nt, Artificial Sequence
  Synthetic
cugaguugccucugauacauuuaa

SEQ ID NO: 456416 - RNA, 18 nt, Artificial Sequence
  Synthetic
agauucugaagcauuuaa

SEQ ID NO: 456417 - RNA, 19 nt, Artificial Sequence
  Synthetic
uagauucugaagcauuuaa

SEQ ID NO: 456418 - RNA, 20 nt, Artificial Sequence
  Synthetic
auagauucugaagcauuuaa

SEQ ID NO: 456419 - RNA, 21 nt, Artificial Sequence
  Synthetic
aauagauucugaagcauuuaa

SEQ ID NO: 456420 - RNA, 22 nt, Artificial Sequence
  Synthetic
uaauagauucugaagcauuuaa

SEQ ID NO: 456421 - RNA, 23 nt, Artificial Sequence
  Synthetic
auaauagauucugaagcauuuaa

SEQ ID NO: 456422 - RNA, 24 nt, Artificial Sequence
  Synthetic
aauaauagauucugaagcauuuaa

SEQ ID NO: 456423 - RNA, 18 nt, Artificial Sequence
  Synthetic
acuuucuuccucauuuaa

SEQ ID NO: 456424 - RNA, 19 nt, Artificial Sequence
  Synthetic
aacuuucuuccucauuuaa

SEQ ID NO: 456425 - RNA, 20 nt, Artificial Sequence
  Synthetic
uaacuuucuuccucauuuaa

SEQ ID NO: 456426 - RNA, 21 nt, Artificial Sequence
  Synthetic
cuaacuuucuuccucauuuaa

SEQ ID NO: 456427 - RNA, 22 nt, Artificial Sequence
  Synthetic
ccuaacuuucuuccucauuuaa

SEQ ID NO: 456428 - RNA, 23 nt, Artificial Sequence
  Synthetic
accuaacuuucuuccucauuuaa

SEQ ID NO: 456429 - RNA, 24 nt, Artificial Sequence
  Synthetic
caccuaacuuucuuccucauuuaa

SEQ ID NO: 456430 - RNA, 18 nt, Artificial Sequence
  Synthetic
ugaguuaaggagauuuaa

SEQ ID NO: 456431 - RNA, 19 nt, Artificial Sequence
  Synthetic
cugaguuaaggagauuuaa

SEQ ID NO: 456432 - RNA, 20 nt, Artificial Sequence
  Synthetic
ucugaguuaaggagauuuaa

SEQ ID NO: 456433 - RNA, 21 nt, Artificial Sequence
  Synthetic
uucugaguuaaggagauuuaa

SEQ ID NO: 456434 - RNA, 22 nt, Artificial Sequence
  Synthetic
cuucugaguuaaggagauuuaa

SEQ ID NO: 456435 - RNA, 23 nt, Artificial Sequence
  Synthetic
ccuucugaguuaaggagauuuaa

SEQ ID NO: 456436 - RNA, 24 nt, Artificial Sequence
  Synthetic
cccuucugaguuaaggagauuuaa

SEQ ID NO: 456437 - RNA, 18 nt, Artificial Sequence
  Synthetic
uuaggguauuagauuuaa

SEQ ID NO: 456438 - RNA, 19 nt, Artificial Sequence
  Synthetic
uuuaggguauuagauuuaa

SEQ ID NO: 456439 - RNA, 20 nt, Artificial Sequence
  Synthetic
cuuuaggguauuagauuuaa

SEQ ID NO: 456440 - RNA, 21 nt, Artificial Sequence
  Synthetic
acuuuaggguauuagauuuaa

SEQ ID NO: 456441 - RNA, 22 nt, Artificial Sequence
  Synthetic
aacuuuaggguauuagauuuaa

SEQ ID NO: 456442 - RNA, 23 nt, Artificial Sequence
  Synthetic
aaacuuuaggguauuagauuuaa

SEQ ID NO: 456443 - RNA, 24 nt, Artificial Sequence
  Synthetic
uaaacuuuaggguauuagauuuaa

SEQ ID NO: 456444 - RNA, 18 nt, Artificial Sequence
  Synthetic
augaaauaguggauuuaa

SEQ ID NO: 456445 - RNA, 19 nt, Artificial Sequence
  Synthetic
gaugaaauaguggauuuaa

SEQ ID NO: 456446 - RNA, 20 nt, Artificial Sequence
  Synthetic
cgaugaaauaguggauuuaa

SEQ ID NO: 456447 - RNA, 21 nt, Artificial Sequence
  Synthetic
gcgaugaaauaguggauuuaa

SEQ ID NO: 456448 - RNA, 22 nt, Artificial Sequence
  Synthetic
agcgaugaaauaguggauuuaa

SEQ ID NO: 456449 - RNA, 23 nt, Artificial Sequence
  Synthetic
uagcgaugaaauaguggauuuaa

SEQ ID NO: 456450 - RNA, 24 nt, Artificial Sequence
  Synthetic
uuagcgaugaaauaguggauuuaa

SEQ ID NO: 456451 - RNA, 18 nt, Artificial Sequence
  Synthetic
acuaaagcaaauauuuaa

SEQ ID NO: 456452 - RNA, 19 nt, Artificial Sequence
  Synthetic
gacuaaagcaaauauuuaa

SEQ ID NO: 456453 - RNA, 20 nt, Artificial Sequence
  Synthetic
agacuaaagcaaauauuuaa

SEQ ID NO: 456454 - RNA, 21 nt, Artificial Sequence
  Synthetic
gagacuaaagcaaauauuuaa

SEQ ID NO: 456455 - RNA, 22 nt, Artificial Sequence
  Synthetic
ggagacuaaagcaaauauuuaa

SEQ ID NO: 456456 - RNA, 23 nt, Artificial Sequence
  Synthetic
uggagacuaaagcaaauauuuaa

SEQ ID NO: 456457 - RNA, 24 nt, Artificial Sequence
  Synthetic
uuggagacuaaagcaaauauuuaa

SEQ ID NO: 456458 - RNA, 18 nt, Artificial Sequence
  Synthetic
gggucaguauauauuuaa

SEQ ID NO: 456459 - RNA, 19 nt, Artificial Sequence
  Synthetic
ggggucaguauauauuuaa

SEQ ID NO: 456460 - RNA, 20 nt, Artificial Sequence
  Synthetic
uggggucaguauauauuuaa

SEQ ID NO: 456461 - RNA, 21 nt, Artificial Sequence
  Synthetic
cuggggucaguauauauuuaa

SEQ ID NO: 456462 - RNA, 22 nt, Artificial Sequence
  Synthetic
acuggggucaguauauauuuaa

SEQ ID NO: 456463 - RNA, 23 nt, Artificial Sequence
  Synthetic
aacuggggucaguauauauuuaa

SEQ ID NO: 456464 - RNA, 24 nt, Artificial Sequence
  Synthetic
aaacuggggucaguauauauuuaa

SEQ ID NO: 456465 - RNA, 18 nt, Artificial Sequence
  Synthetic
augaagauguauauuuaa

SEQ ID NO: 456466 - RNA, 19 nt, Artificial Sequence
  Synthetic
uaugaagauguauauuuaa

SEQ ID NO: 456467 - RNA, 20 nt, Artificial Sequence
  Synthetic
auaugaagauguauauuuaa

SEQ ID NO: 456468 - RNA, 21 nt, Artificial Sequence
  Synthetic
aauaugaagauguauauuuaa

SEQ ID NO: 456469 - RNA, 22 nt, Artificial Sequence
  Synthetic
uaauaugaagauguauauuuaa

SEQ ID NO: 456470 - RNA, 23 nt, Artificial Sequence
  Synthetic
cuaauaugaagauguauauuuaa

SEQ ID NO: 456471 - RNA, 24 nt, Artificial Sequence
  Synthetic
gcuaauaugaagauguauauuuaa

SEQ ID NO: 456472 - RNA, 18 nt, Artificial Sequence
  Synthetic
uguuuauauucuauuuaa

SEQ ID NO: 456473 - RNA, 19 nt, Artificial Sequence
  Synthetic
uuguuuauauucuauuuaa

SEQ ID NO: 456474 - RNA, 20 nt, Artificial Sequence
  Synthetic
uuuguuuauauucuauuuaa

SEQ ID NO: 456475 - RNA, 21 nt, Artificial Sequence
  Synthetic
uuuuguuuauauucuauuuaa

SEQ ID NO: 456476 - RNA, 22 nt, Artificial Sequence
  Synthetic
guuuuguuuauauucuauuuaa

SEQ ID NO: 456477 - RNA, 23 nt, Artificial Sequence
  Synthetic
uguuuuguuuauauucuauuuaa

SEQ ID NO: 456478 - RNA, 24 nt, Artificial Sequence
  Synthetic
auguuuuguuuauauucuauuuaa

SEQ ID NO: 456479 - RNA, 18 nt, Artificial Sequence
  Synthetic
aagaagauaaguauuuaa

SEQ ID NO: 456480 - RNA, 19 nt, Artificial Sequence
  Synthetic
uaagaagauaaguauuuaa

SEQ ID NO: 456481 - RNA, 20 nt, Artificial Sequence
  Synthetic
auaagaagauaaguauuuaa

SEQ ID NO: 456482 - RNA, 21 nt, Artificial Sequence
  Synthetic
gauaagaagauaaguauuuaa

SEQ ID NO: 456483 - RNA, 22 nt, Artificial Sequence
  Synthetic
agauaagaagauaaguauuuaa

SEQ ID NO: 456484 - RNA, 23 nt, Artificial Sequence
  Synthetic
aagauaagaagauaaguauuuaa

SEQ ID NO: 456485 - RNA, 24 nt, Artificial Sequence
  Synthetic
gaagauaagaagauaaguauuuaa

SEQ ID NO: 456486 - RNA, 18 nt, Artificial Sequence
  Synthetic
auuuacagaauuauuuaa

SEQ ID NO: 456487 - RNA, 19 nt, Artificial Sequence
  Synthetic
cauuuacagaauuauuuaa

SEQ ID NO: 456488 - RNA, 20 nt, Artificial Sequence
  Synthetic
ucauuuacagaauuauuuaa

SEQ ID NO: 456489 - RNA, 21 nt, Artificial Sequence
  Synthetic
aucauuuacagaauuauuuaa

SEQ ID NO: 456490 - RNA, 22 nt, Artificial Sequence
  Synthetic
aaucauuuacagaauuauuuaa

SEQ ID NO: 456491 - RNA, 23 nt, Artificial Sequence
  Synthetic
aaaucauuuacagaauuauuuaa

SEQ ID NO: 456492 - RNA, 24 nt, Artificial Sequence
  Synthetic
aaaaucauuuacagaauuauuuaa

SEQ ID NO: 456493 - RNA, 18 nt, Artificial Sequence
  Synthetic
uaacuuuagguuauuuaa

SEQ ID NO: 456494 - RNA, 19 nt, Artificial Sequence
  Synthetic
uuaacuuuagguuauuuaa

SEQ ID NO: 456495 - RNA, 20 nt, Artificial Sequence
  Synthetic
uuuaacuuuagguuauuuaa

SEQ ID NO: 456496 - RNA, 21 nt, Artificial Sequence
  Synthetic
auuuaacuuuagguuauuuaa

SEQ ID NO: 456497 - RNA, 22 nt, Artificial Sequence
  Synthetic
aauuuaacuuuagguuauuuaa

SEQ ID NO: 456498 - RNA, 23 nt, Artificial Sequence
  Synthetic
caauuuaacuuuagguuauuuaa

SEQ ID NO: 456499 - RNA, 24 nt, Artificial Sequence
  Synthetic
ccaauuuaacuuuagguuauuuaa

SEQ ID NO: 456500 - RNA, 18 nt, Artificial Sequence
  Synthetic
aaaucuauauuuauuuaa

SEQ ID NO: 456501 - RNA, 19 nt, Artificial Sequence
  Synthetic
caaaucuauauuuauuuaa

SEQ ID NO: 456502 - RNA, 20 nt, Artificial Sequence
  Synthetic
acaaaucuauauuuauuuaa

SEQ ID NO: 456503 - RNA, 21 nt, Artificial Sequence
  Synthetic
gacaaaucuauauuuauuuaa

SEQ ID NO: 456504 - RNA, 22 nt, Artificial Sequence
  Synthetic
agacaaaucuauauuuauuuaa

SEQ ID NO: 456505 - RNA, 23 nt, Artificial Sequence
  Synthetic
gagacaaaucuauauuuauuuaa

SEQ ID NO: 456506 - RNA, 24 nt, Artificial Sequence
  Synthetic
cgagacaaaucuauauuuauuuaa

SEQ ID NO: 456507 - RNA, 18 nt, Artificial Sequence
  Synthetic
aggcauaauuuuauuuaa

SEQ ID NO: 456508 - RNA, 19 nt, Artificial Sequence
  Synthetic
caggcauaauuuuauuuaa

SEQ ID NO: 456509 - RNA, 20 nt, Artificial Sequence
  Synthetic
ccaggcauaauuuuauuuaa

SEQ ID NO: 456510 - RNA, 21 nt, Artificial Sequence
  Synthetic
uccaggcauaauuuuauuuaa

SEQ ID NO: 456511 - RNA, 22 nt, Artificial Sequence
  Synthetic
cuccaggcauaauuuuauuuaa

SEQ ID NO: 456512 - RNA, 23 nt, Artificial Sequence
  Synthetic
ucuccaggcauaauuuuauuuaa

SEQ ID NO: 456513 - RNA, 24 nt, Artificial Sequence
  Synthetic
uucuccaggcauaauuuuauuuaa

SEQ ID NO: 456514 - RNA, 18 nt, Artificial Sequence
  Synthetic
acaacagauucacuuuaa

SEQ ID NO: 456515 - RNA, 19 nt, Artificial Sequence
  Synthetic
cacaacagauucacuuuaa

SEQ ID NO: 456516 - RNA, 20 nt, Artificial Sequence
  Synthetic
acacaacagauucacuuuaa

SEQ ID NO: 456517 - RNA, 21 nt, Artificial Sequence
  Synthetic
cacacaacagauucacuuuaa

SEQ ID NO: 456518 - RNA, 22 nt, Artificial Sequence
  Synthetic
acacacaacagauucacuuuaa

SEQ ID NO: 456519 - RNA, 23 nt, Artificial Sequence
  Synthetic
aacacacaacagauucacuuuaa

SEQ ID NO: 456520 - RNA, 24 nt, Artificial Sequence
  Synthetic
aaacacacaacagauucacuuuaa

SEQ ID NO: 456521 - RNA, 18 nt, Artificial Sequence
  Synthetic
ggucucaaaauacuuuaa

SEQ ID NO: 456522 - RNA, 19 nt, Artificial Sequence
  Synthetic
uggucucaaaauacuuuaa

SEQ ID NO: 456523 - RNA, 20 nt, Artificial Sequence
  Synthetic
auggucucaaaauacuuuaa

SEQ ID NO: 456524 - RNA, 21 nt, Artificial Sequence
  Synthetic
uauggucucaaaauacuuuaa

SEQ ID NO: 456525 - RNA, 22 nt, Artificial Sequence
  Synthetic
auauggucucaaaauacuuuaa

SEQ ID NO: 456526 - RNA, 23 nt, Artificial Sequence
  Synthetic
gauauggucucaaaauacuuuaa

SEQ ID NO: 456527 - RNA, 24 nt, Artificial Sequence
  Synthetic
ugauauggucucaaaauacuuuaa

SEQ ID NO: 456528 - RNA, 18 nt, Artificial Sequence
  Synthetic
aaugaugaaugccuuuaa

SEQ ID NO: 456529 - RNA, 19 nt, Artificial Sequence
  Synthetic
caaugaugaaugccuuuaa

SEQ ID NO: 456530 - RNA, 20 nt, Artificial Sequence
  Synthetic
acaaugaugaaugccuuuaa

SEQ ID NO: 456531 - RNA, 21 nt, Artificial Sequence
  Synthetic
gacaaugaugaaugccuuuaa

SEQ ID NO: 456532 - RNA, 22 nt, Artificial Sequence
  Synthetic
ugacaaugaugaaugccuuuaa

SEQ ID NO: 456533 - RNA, 23 nt, Artificial Sequence
  Synthetic
augacaaugaugaaugccuuuaa

SEQ ID NO: 456534 - RNA, 24 nt, Artificial Sequence
  Synthetic
aaugacaaugaugaaugccuuuaa

SEQ ID NO: 456535 - RNA, 18 nt, Artificial Sequence
  Synthetic
cuuuacuuagagcuuuaa

SEQ ID NO: 456536 - RNA, 19 nt, Artificial Sequence
  Synthetic
gcuuuacuuagagcuuuaa

SEQ ID NO: 456537 - RNA, 20 nt, Artificial Sequence
  Synthetic
agcuuuacuuagagcuuuaa

SEQ ID NO: 456538 - RNA, 21 nt, Artificial Sequence
  Synthetic
cagcuuuacuuagagcuuuaa

SEQ ID NO: 456539 - RNA, 22 nt, Artificial Sequence
  Synthetic
acagcuuuacuuagagcuuuaa

SEQ ID NO: 456540 - RNA, 23 nt, Artificial Sequence
  Synthetic
aacagcuuuacuuagagcuuuaa

SEQ ID NO: 456541 - RNA, 24 nt, Artificial Sequence
  Synthetic
uaacagcuuuacuuagagcuuuaa

SEQ ID NO: 456542 - RNA, 18 nt, Artificial Sequence
  Synthetic
agagcccuugggcuuuaa

SEQ ID NO: 456543 - RNA, 19 nt, Artificial Sequence
  Synthetic
aagagcccuugggcuuuaa

SEQ ID NO: 456544 - RNA, 20 nt, Artificial Sequence
  Synthetic
gaagagcccuugggcuuuaa

SEQ ID NO: 456545 - RNA, 21 nt, Artificial Sequence
  Synthetic
ggaagagcccuugggcuuuaa

SEQ ID NO: 456546 - RNA, 22 nt, Artificial Sequence
  Synthetic
uggaagagcccuugggcuuuaa

SEQ ID NO: 456547 - RNA, 23 nt, Artificial Sequence
  Synthetic
auggaagagcccuugggcuuuaa

SEQ ID NO: 456548 - RNA, 24 nt, Artificial Sequence
  Synthetic
gauggaagagcccuugggcuuuaa

SEQ ID NO: 456549 - RNA, 18 nt, Artificial Sequence
  Synthetic
auggagguaaugcuuuaa

SEQ ID NO: 456550 - RNA, 19 nt, Artificial Sequence
  Synthetic
aauggagguaaugcuuuaa

SEQ ID NO: 456551 - RNA, 20 nt, Artificial Sequence
  Synthetic
aaauggagguaaugcuuuaa

SEQ ID NO: 456552 - RNA, 21 nt, Artificial Sequence
  Synthetic
caaauggagguaaugcuuuaa

SEQ ID NO: 456553 - RNA, 22 nt, Artificial Sequence
  Synthetic
gcaaauggagguaaugcuuuaa

SEQ ID NO: 456554 - RNA, 23 nt, Artificial Sequence
  Synthetic
ggcaaauggagguaaugcuuuaa

SEQ ID NO: 456555 - RNA, 24 nt, Artificial Sequence
  Synthetic
aggcaaauggagguaaugcuuuaa

SEQ ID NO: 456556 - RNA, 18 nt, Artificial Sequence
  Synthetic
ucggaacuucugcuuuaa

SEQ ID NO: 456557 - RNA, 19 nt, Artificial Sequence
  Synthetic
uucggaacuucugcuuuaa

SEQ ID NO: 456558 - RNA, 20 nt, Artificial Sequence
  Synthetic
guucggaacuucugcuuuaa

SEQ ID NO: 456559 - RNA, 21 nt, Artificial Sequence
  Synthetic
gguucggaacuucugcuuuaa

SEQ ID NO: 456560 - RNA, 22 nt, Artificial Sequence
  Synthetic
agguucggaacuucugcuuuaa

SEQ ID NO: 456561 - RNA, 23 nt, Artificial Sequence
  Synthetic
gagguucggaacuucugcuuuaa

SEQ ID NO: 456562 - RNA, 24 nt, Artificial Sequence
  Synthetic
agagguucggaacuucugcuuuaa

SEQ ID NO: 456563 - RNA, 18 nt, Artificial Sequence
  Synthetic
gaaaguguugugcuuuaa

SEQ ID NO: 456564 - RNA, 19 nt, Artificial Sequence
  Synthetic
agaaaguguugugcuuuaa

SEQ ID NO: 456565 - RNA, 20 nt, Artificial Sequence
  Synthetic
gagaaaguguugugcuuuaa

SEQ ID NO: 456566 - RNA, 21 nt, Artificial Sequence
  Synthetic
ugagaaaguguugugcuuuaa

SEQ ID NO: 456567 - RNA, 22 nt, Artificial Sequence
  Synthetic
uugagaaaguguugugcuuuaa

SEQ ID NO: 456568 - RNA, 23 nt, Artificial Sequence
  Synthetic
uuugagaaaguguugugcuuuaa

SEQ ID NO: 456569 - RNA, 24 nt, Artificial Sequence
  Synthetic
uuuugagaaaguguugugcuuuaa

SEQ ID NO: 456570 - RNA, 18 nt, Artificial Sequence
  Synthetic
auaaacaguuugcuuuaa

SEQ ID NO: 456571 - RNA, 19 nt, Artificial Sequence
  Synthetic
aauaaacaguuugcuuuaa

SEQ ID NO: 456572 - RNA, 20 nt, Artificial Sequence
  Synthetic
uaauaaacaguuugcuuuaa

SEQ ID NO: 456573 - RNA, 21 nt, Artificial Sequence
  Synthetic
uuaauaaacaguuugcuuuaa

SEQ ID NO: 456574 - RNA, 22 nt, Artificial Sequence
  Synthetic
auuaauaaacaguuugcuuuaa

SEQ ID NO: 456575 - RNA, 23 nt, Artificial Sequence
  Synthetic
uauuaauaaacaguuugcuuuaa

SEQ ID NO: 456576 - RNA, 24 nt, Artificial Sequence
  Synthetic
cuauuaauaaacaguuugcuuuaa

SEQ ID NO: 456577 - RNA, 18 nt, Artificial Sequence
  Synthetic
guuacaacuuaucuuuaa

SEQ ID NO: 456578 - RNA, 19 nt, Artificial Sequence
  Synthetic
aguuacaacuuaucuuuaa

SEQ ID NO: 456579 - RNA, 20 nt, Artificial Sequence
  Synthetic
gaguuacaacuuaucuuuaa

SEQ ID NO: 456580 - RNA, 21 nt, Artificial Sequence
  Synthetic
agaguuacaacuuaucuuuaa

SEQ ID NO: 456581 - RNA, 22 nt, Artificial Sequence
  Synthetic
gagaguuacaacuuaucuuuaa

SEQ ID NO: 456582 - RNA, 23 nt, Artificial Sequence
  Synthetic
ugagaguuacaacuuaucuuuaa

SEQ ID NO: 456583 - RNA, 24 nt, Artificial Sequence
  Synthetic
gugagaguuacaacuuaucuuuaa

SEQ ID NO: 456584 - RNA, 18 nt, Artificial Sequence
  Synthetic
uucuaacuuccucuuuaa

SEQ ID NO: 456585 - RNA, 19 nt, Artificial Sequence
  Synthetic
cuucuaacuuccucuuuaa

SEQ ID NO: 456586 - RNA, 20 nt, Artificial Sequence
  Synthetic
ucuucuaacuuccucuuuaa

SEQ ID NO: 456587 - RNA, 21 nt, Artificial Sequence
  Synthetic
aucuucuaacuuccucuuuaa

SEQ ID NO: 456588 - RNA, 22 nt, Artificial Sequence
  Synthetic
gaucuucuaacuuccucuuuaa

SEQ ID NO: 456589 - RNA, 23 nt, Artificial Sequence
  Synthetic
agaucuucuaacuuccucuuuaa

SEQ ID NO: 456590 - RNA, 24 nt, Artificial Sequence
  Synthetic
cagaucuucuaacuuccucuuuaa

SEQ ID NO: 456591 - RNA, 18 nt, Artificial Sequence
  Synthetic
ugaaucuacugucuuuaa

SEQ ID NO: 456592 - RNA, 19 nt, Artificial Sequence
  Synthetic
uugaaucuacugucuuuaa

SEQ ID NO: 456593 - RNA, 20 nt, Artificial Sequence
  Synthetic
guugaaucuacugucuuuaa

SEQ ID NO: 456594 - RNA, 21 nt, Artificial Sequence
  Synthetic
aguugaaucuacugucuuuaa

SEQ ID NO: 456595 - RNA, 22 nt, Artificial Sequence
  Synthetic
caguugaaucuacugucuuuaa

SEQ ID NO: 456596 - RNA, 23 nt, Artificial Sequence
  Synthetic
gcaguugaaucuacugucuuuaa

SEQ ID NO: 456597 - RNA, 24 nt, Artificial Sequence
  Synthetic
agcaguugaaucuacugucuuuaa

SEQ ID NO: 456598 - RNA, 18 nt, Artificial Sequence
  Synthetic
ugucccaucuuucuuuaa

SEQ ID NO: 456599 - RNA, 19 nt, Artificial Sequence
  Synthetic
gugucccaucuuucuuuaa

SEQ ID NO: 456600 - RNA, 20 nt, Artificial Sequence
  Synthetic
agugucccaucuuucuuuaa

SEQ ID NO: 456601 - RNA, 21 nt, Artificial Sequence
  Synthetic
uagugucccaucuuucuuuaa

SEQ ID NO: 456602 - RNA, 22 nt, Artificial Sequence
  Synthetic
cuagugucccaucuuucuuuaa

SEQ ID NO: 456603 - RNA, 23 nt, Artificial Sequence
  Synthetic
ucuagugucccaucuuucuuuaa

SEQ ID NO: 456604 - RNA, 24 nt, Artificial Sequence
  Synthetic
gucuagugucccaucuuucuuuaa

SEQ ID NO: 456605 - RNA, 18 nt, Artificial Sequence
  Synthetic
ucaaauacaaaaguuuaa

SEQ ID NO: 456606 - RNA, 19 nt, Artificial Sequence
  Synthetic
uucaaauacaaaaguuuaa

SEQ ID NO: 456607 - RNA, 20 nt, Artificial Sequence
  Synthetic
uuucaaauacaaaaguuuaa

SEQ ID NO: 456608 - RNA, 21 nt, Artificial Sequence
  Synthetic
cuuucaaauacaaaaguuuaa

SEQ ID NO: 456609 - RNA, 22 nt, Artificial Sequence
  Synthetic
gcuuucaaauacaaaaguuuaa

SEQ ID NO: 456610 - RNA, 23 nt, Artificial Sequence
  Synthetic
agcuuucaaauacaaaaguuuaa

SEQ ID NO: 456611 - RNA, 24 nt, Artificial Sequence
  Synthetic
uagcuuucaaauacaaaaguuuaa

SEQ ID NO: 456612 - RNA, 18 nt, Artificial Sequence
  Synthetic
uaacauauucaaguuuaa

SEQ ID NO: 456613 - RNA, 19 nt, Artificial Sequence
  Synthetic
uuaacauauucaaguuuaa

SEQ ID NO: 456614 - RNA, 20 nt, Artificial Sequence
  Synthetic
uuuaacauauucaaguuuaa

SEQ ID NO: 456615 - RNA, 21 nt, Artificial Sequence
  Synthetic
auuuaacauauucaaguuuaa

SEQ ID NO: 456616 - RNA, 22 nt, Artificial Sequence
  Synthetic
uauuuaacauauucaaguuuaa

SEQ ID NO: 456617 - RNA, 23 nt, Artificial Sequence
  Synthetic
guauuuaacauauucaaguuuaa

SEQ ID NO: 456618 - RNA, 24 nt, Artificial Sequence
  Synthetic
gguauuuaacauauucaaguuuaa

SEQ ID NO: 456619 - RNA, 18 nt, Artificial Sequence
  Synthetic
uuauuccuagaaguuuaa

SEQ ID NO: 456620 - RNA, 19 nt, Artificial Sequence
  Synthetic
auuauuccuagaaguuuaa

SEQ ID NO: 456621 - RNA, 20 nt, Artificial Sequence
  Synthetic
aauuauuccuagaaguuuaa

SEQ ID NO: 456622 - RNA, 21 nt, Artificial Sequence
  Synthetic
uaauuauuccuagaaguuuaa

SEQ ID NO: 456623 - RNA, 22 nt, Artificial Sequence
  Synthetic
uuaauuauuccuagaaguuuaa

SEQ ID NO: 456624 - RNA, 23 nt, Artificial Sequence
  Synthetic
guuaauuauuccuagaaguuuaa

SEQ ID NO: 456625 - RNA, 24 nt, Artificial Sequence
  Synthetic
aguuaauuauuccuagaaguuuaa

SEQ ID NO: 456626 - RNA, 18 nt, Artificial Sequence
  Synthetic
gaagaaaaaguaguuuaa

SEQ ID NO: 456627 - RNA, 19 nt, Artificial Sequence
  Synthetic
ggaagaaaaaguaguuuaa

SEQ ID NO: 456628 - RNA, 20 nt, Artificial Sequence
  Synthetic
gggaagaaaaaguaguuuaa

SEQ ID NO: 456629 - RNA, 21 nt, Artificial Sequence
  Synthetic
ugggaagaaaaaguaguuuaa

SEQ ID NO: 456630 - RNA, 22 nt, Artificial Sequence
  Synthetic
cugggaagaaaaaguaguuuaa

SEQ ID NO: 456631 - RNA, 23 nt, Artificial Sequence
  Synthetic
acugggaagaaaaaguaguuuaa

SEQ ID NO: 456632 - RNA, 24 nt, Artificial Sequence
  Synthetic
gacugggaagaaaaaguaguuuaa

SEQ ID NO: 456633 - RNA, 18 nt, Artificial Sequence
  Synthetic
gccuucagccagguuuaa

SEQ ID NO: 456634 - RNA, 19 nt, Artificial Sequence
  Synthetic
ugccuucagccagguuuaa

SEQ ID NO: 456635 - RNA, 20 nt, Artificial Sequence
  Synthetic
cugccuucagccagguuuaa

SEQ ID NO: 456636 - RNA, 21 nt, Artificial Sequence
  Synthetic
acugccuucagccagguuuaa

SEQ ID NO: 456637 - RNA, 22 nt, Artificial Sequence
  Synthetic
uacugccuucagccagguuuaa

SEQ ID NO: 456638 - RNA, 23 nt, Artificial Sequence
  Synthetic
cuacugccuucagccagguuuaa

SEQ ID NO: 456639 - RNA, 24 nt, Artificial Sequence
  Synthetic
ccuacugccuucagccagguuuaa

SEQ ID NO: 456640 - RNA, 18 nt, Artificial Sequence
  Synthetic
gaaaacuaugagguuuaa

SEQ ID NO: 456641 - RNA, 19 nt, Artificial Sequence
  Synthetic
ugaaaacuaugagguuuaa

SEQ ID NO: 456642 - RNA, 20 nt, Artificial Sequence
  Synthetic
uugaaaacuaugagguuuaa

SEQ ID NO: 456643 - RNA, 21 nt, Artificial Sequence
  Synthetic
guugaaaacuaugagguuuaa

SEQ ID NO: 456644 - RNA, 22 nt, Artificial Sequence
  Synthetic
aguugaaaacuaugagguuuaa

SEQ ID NO: 456645 - RNA, 23 nt, Artificial Sequence
  Synthetic
aaguugaaaacuaugagguuuaa

SEQ ID NO: 456646 - RNA, 24 nt, Artificial Sequence
  Synthetic
gaaguugaaaacuaugagguuuaa

SEQ ID NO: 456647 - RNA, 18 nt, Artificial Sequence
  Synthetic
auuccauucaugguuuaa

SEQ ID NO: 456648 - RNA, 19 nt, Artificial Sequence
  Synthetic
aauuccauucaugguuuaa

SEQ ID NO: 456649 - RNA, 20 nt, Artificial Sequence
  Synthetic
aaauuccauucaugguuuaa

SEQ ID NO: 456650 - RNA, 21 nt, Artificial Sequence
  Synthetic
aaaauuccauucaugguuuaa

SEQ ID NO: 456651 - RNA, 22 nt, Artificial Sequence
  Synthetic
uaaaauuccauucaugguuuaa

SEQ ID NO: 456652 - RNA, 23 nt, Artificial Sequence
  Synthetic
guaaaauuccauucaugguuuaa

SEQ ID NO: 456653 - RNA, 24 nt, Artificial Sequence
  Synthetic
aguaaaauuccauucaugguuuaa

SEQ ID NO: 456654 - RNA, 18 nt, Artificial Sequence
  Synthetic
aaucugaagaauguuuaa

SEQ ID NO: 456655 - RNA, 19 nt, Artificial Sequence
  Synthetic
uaaucugaagaauguuuaa

SEQ ID NO: 456656 - RNA, 20 nt, Artificial Sequence
  Synthetic
auaaucugaagaauguuuaa

SEQ ID NO: 456657 - RNA, 21 nt, Artificial Sequence
  Synthetic
cauaaucugaagaauguuuaa

SEQ ID NO: 456658 - RNA, 22 nt, Artificial Sequence
  Synthetic
acauaaucugaagaauguuuaa

SEQ ID NO: 456659 - RNA, 23 nt, Artificial Sequence
  Synthetic
uacauaaucugaagaauguuuaa

SEQ ID NO: 456660 - RNA, 24 nt, Artificial Sequence
  Synthetic
uuacauaaucugaagaauguuuaa

SEQ ID NO: 456661 - RNA, 18 nt, Artificial Sequence
  Synthetic
guaggucaacauguuuaa

SEQ ID NO: 456662 - RNA, 19 nt, Artificial Sequence
  Synthetic
uguaggucaacauguuuaa

SEQ ID NO: 456663 - RNA, 20 nt, Artificial Sequence
  Synthetic
auguaggucaacauguuuaa

SEQ ID NO: 456664 - RNA, 21 nt, Artificial Sequence
  Synthetic
aauguaggucaacauguuuaa

SEQ ID NO: 456665 - RNA, 22 nt, Artificial Sequence
  Synthetic
uaauguaggucaacauguuuaa

SEQ ID NO: 456666 - RNA, 23 nt, Artificial Sequence
  Synthetic
uuaauguaggucaacauguuuaa

SEQ ID NO: 456667 - RNA, 24 nt, Artificial Sequence
  Synthetic
uuuaauguaggucaacauguuuaa

SEQ ID NO: 456668 - RNA, 18 nt, Artificial Sequence
  Synthetic
auuggaaauuauguuuaa

SEQ ID NO: 456669 - RNA, 19 nt, Artificial Sequence
  Synthetic
aauuggaaauuauguuuaa

SEQ ID NO: 456670 - RNA, 20 nt, Artificial Sequence
  Synthetic
gaauuggaaauuauguuuaa

SEQ ID NO: 456671 - RNA, 21 nt, Artificial Sequence
  Synthetic
ggaauuggaaauuauguuuaa

SEQ ID NO: 456672 - RNA, 22 nt, Artificial Sequence
  Synthetic
uggaauuggaaauuauguuuaa

SEQ ID NO: 456673 - RNA, 23 nt, Artificial Sequence
  Synthetic
uuggaauuggaaauuauguuuaa

SEQ ID NO: 456674 - RNA, 24 nt, Artificial Sequence
  Synthetic
uuuggaauuggaaauuauguuuaa

SEQ ID NO: 456675 - RNA, 18 nt, Artificial Sequence
  Synthetic
uaaucugucccuguuuaa

SEQ ID NO: 456676 - RNA, 19 nt, Artificial Sequence
  Synthetic
cuaaucugucccuguuuaa

SEQ ID NO: 456677 - RNA, 20 nt, Artificial Sequence
  Synthetic
ccuaaucugucccuguuuaa

SEQ ID NO: 456678 - RNA, 21 nt, Artificial Sequence
  Synthetic
accuaaucugucccuguuuaa

SEQ ID NO: 456679 - RNA, 22 nt, Artificial Sequence
  Synthetic
aaccuaaucugucccuguuuaa

SEQ ID NO: 456680 - RNA, 23 nt, Artificial Sequence
  Synthetic
gaaccuaaucugucccuguuuaa

SEQ ID NO: 456681 - RNA, 24 nt, Artificial Sequence
  Synthetic
ugaaccuaaucugucccuguuuaa

SEQ ID NO: 456682 - RNA, 18 nt, Artificial Sequence
  Synthetic
cugucuucucaauuuuaa

SEQ ID NO: 456683 - RNA, 19 nt, Artificial Sequence
  Synthetic
acugucuucucaauuuuaa

SEQ ID NO: 456684 - RNA, 20 nt, Artificial Sequence
  Synthetic
cacugucuucucaauuuuaa

SEQ ID NO: 456685 - RNA, 21 nt, Artificial Sequence
  Synthetic
ucacugucuucucaauuuuaa

SEQ ID NO: 456686 - RNA, 22 nt, Artificial Sequence
  Synthetic
cucacugucuucucaauuuuaa

SEQ ID NO: 456687 - RNA, 23 nt, Artificial Sequence
  Synthetic
acucacugucuucucaauuuuaa

SEQ ID NO: 456688 - RNA, 24 nt, Artificial Sequence
  Synthetic
aacucacugucuucucaauuuuaa

SEQ ID NO: 456689 - RNA, 18 nt, Artificial Sequence
  Synthetic
aacaaaagagaauuuuaa

SEQ ID NO: 456690 - RNA, 19 nt, Artificial Sequence
  Synthetic
aaacaaaagagaauuuuaa

SEQ ID NO: 456691 - RNA, 20 nt, Artificial Sequence
  Synthetic
aaaacaaaagagaauuuuaa

SEQ ID NO: 456692 - RNA, 21 nt, Artificial Sequence
  Synthetic
uaaaacaaaagagaauuuuaa

SEQ ID NO: 456693 - RNA, 22 nt, Artificial Sequence
  Synthetic
guaaaacaaaagagaauuuuaa

SEQ ID NO: 456694 - RNA, 23 nt, Artificial Sequence
  Synthetic
aguaaaacaaaagagaauuuuaa

SEQ ID NO: 456695 - RNA, 24 nt, Artificial Sequence
  Synthetic
uaguaaaacaaaagagaauuuuaa

SEQ ID NO: 456696 - RNA, 18 nt, Artificial Sequence
  Synthetic
uaggugagggaauuuuaa

SEQ ID NO: 456697 - RNA, 19 nt, Artificial Sequence
  Synthetic
auaggugagggaauuuuaa

SEQ ID NO: 456698 - RNA, 20 nt, Artificial Sequence
  Synthetic
aauaggugagggaauuuuaa

SEQ ID NO: 456699 - RNA, 21 nt, Artificial Sequence
  Synthetic
aaauaggugagggaauuuuaa

SEQ ID NO: 456700 - RNA, 22 nt, Artificial Sequence
  Synthetic
aaaauaggugagggaauuuuaa

SEQ ID NO: 456701 - RNA, 23 nt, Artificial Sequence
  Synthetic
caaaauaggugagggaauuuuaa

SEQ ID NO: 456702 - RNA, 24 nt, Artificial Sequence
  Synthetic
ccaaaauaggugagggaauuuuaa

SEQ ID NO: 456703 - RNA, 18 nt, Artificial Sequence
  Synthetic
aaaccuuaugaauuuuaa

SEQ ID NO: 456704 - RNA, 19 nt, Artificial Sequence
  Synthetic
uaaaccuuaugaauuuuaa

SEQ ID NO: 456705 - RNA, 20 nt, Artificial Sequence
  Synthetic
auaaaccuuaugaauuuuaa

SEQ ID NO: 456706 - RNA, 21 nt, Artificial Sequence
  Synthetic
aauaaaccuuaugaauuuuaa

SEQ ID NO: 456707 - RNA, 22 nt, Artificial Sequence
  Synthetic
gaauaaaccuuaugaauuuuaa

SEQ ID NO: 456708 - RNA, 23 nt, Artificial Sequence
  Synthetic
ggaauaaaccuuaugaauuuuaa

SEQ ID NO: 456709 - RNA, 24 nt, Artificial Sequence
  Synthetic
aggaauaaaccuuaugaauuuuaa

SEQ ID NO: 456710 - RNA, 18 nt, Artificial Sequence
  Synthetic
uaaucaccuuaauuuuaa

SEQ ID NO: 456711 - RNA, 19 nt, Artificial Sequence
  Synthetic
auaaucaccuuaauuuuaa

SEQ ID NO: 456712 - RNA, 20 nt, Artificial Sequence
  Synthetic
uauaaucaccuuaauuuuaa

SEQ ID NO: 456713 - RNA, 21 nt, Artificial Sequence
  Synthetic
guauaaucaccuuaauuuuaa

SEQ ID NO: 456714 - RNA, 22 nt, Artificial Sequence
  Synthetic
aguauaaucaccuuaauuuuaa

SEQ ID NO: 456715 - RNA, 23 nt, Artificial Sequence
  Synthetic
uaguauaaucaccuuaauuuuaa

SEQ ID NO: 456716 - RNA, 24 nt, Artificial Sequence
  Synthetic
auaguauaaucaccuuaauuuuaa

SEQ ID NO: 456717 - RNA, 18 nt, Artificial Sequence
  Synthetic
uauaauuauacauuuuaa

SEQ ID NO: 456718 - RNA, 19 nt, Artificial Sequence
  Synthetic
auauaauuauacauuuuaa

SEQ ID NO: 456719 - RNA, 20 nt, Artificial Sequence
  Synthetic
uauauaauuauacauuuuaa

SEQ ID NO: 456720 - RNA, 21 nt, Artificial Sequence
  Synthetic
uuauauaauuauacauuuuaa

SEQ ID NO: 456721 - RNA, 22 nt, Artificial Sequence
  Synthetic
uuuauauaauuauacauuuuaa

SEQ ID NO: 456722 - RNA, 23 nt, Artificial Sequence
  Synthetic
auuuauauaauuauacauuuuaa

SEQ ID NO: 456723 - RNA, 24 nt, Artificial Sequence
  Synthetic
aauuuauauaauuauacauuuuaa

SEQ ID NO: 456724 - RNA, 18 nt, Artificial Sequence
  Synthetic
cuuccaguaccauuuuaa

SEQ ID NO: 456725 - RNA, 19 nt, Artificial Sequence
  Synthetic
ccuuccaguaccauuuuaa

SEQ ID NO: 456726 - RNA, 20 nt, Artificial Sequence
  Synthetic
uccuuccaguaccauuuuaa

SEQ ID NO: 456727 - RNA, 21 nt, Artificial Sequence
  Synthetic
auccuuccaguaccauuuuaa

SEQ ID NO: 456728 - RNA, 22 nt, Artificial Sequence
  Synthetic
uauccuuccaguaccauuuuaa

SEQ ID NO: 456729 - RNA, 23 nt, Artificial Sequence
  Synthetic
guauccuuccaguaccauuuuaa

SEQ ID NO: 456730 - RNA, 24 nt, Artificial Sequence
  Synthetic
cguauccuuccaguaccauuuuaa

SEQ ID NO: 456731 - RNA, 18 nt, Artificial Sequence
  Synthetic
auuuuucaagcauuuuaa

SEQ ID NO: 456732 - RNA, 19 nt, Artificial Sequence
  Synthetic
uauuuuucaagcauuuuaa

SEQ ID NO: 456733 - RNA, 20 nt, Artificial Sequence
  Synthetic
uuauuuuucaagcauuuuaa

SEQ ID NO: 456734 - RNA, 21 nt, Artificial Sequence
  Synthetic
cuuauuuuucaagcauuuuaa

SEQ ID NO: 456735 - RNA, 22 nt, Artificial Sequence
  Synthetic
acuuauuuuucaagcauuuuaa

SEQ ID NO: 456736 - RNA, 23 nt, Artificial Sequence
  Synthetic
aacuuauuuuucaagcauuuuaa

SEQ ID NO: 456737 - RNA, 24 nt, Artificial Sequence
  Synthetic
caacuuauuuuucaagcauuuuaa

SEQ ID NO: 456738 - RNA, 18 nt, Artificial Sequence
  Synthetic
uaauuuauugcauuuuaa

SEQ ID NO: 456739 - RNA, 19 nt, Artificial Sequence
  Synthetic
auaauuuauugcauuuuaa

SEQ ID NO: 456740 - RNA, 20 nt, Artificial Sequence
  Synthetic
uauaauuuauugcauuuuaa

SEQ ID NO: 456741 - RNA, 21 nt, Artificial Sequence
  Synthetic
guauaauuuauugcauuuuaa

SEQ ID NO: 456742 - RNA, 22 nt, Artificial Sequence
  Synthetic
aguauaauuuauugcauuuuaa

SEQ ID NO: 456743 - RNA, 23 nt, Artificial Sequence
  Synthetic
uaguauaauuuauugcauuuuaa

SEQ ID NO: 456744 - RNA, 24 nt, Artificial Sequence
  Synthetic
guaguauaauuuauugcauuuuaa

SEQ ID NO: 456745 - RNA, 18 nt, Artificial Sequence
  Synthetic
gugcuauuugcauuuuaa

SEQ ID NO: 456746 - RNA, 19 nt, Artificial Sequence
  Synthetic
ggugcuauuugcauuuuaa

SEQ ID NO: 456747 - RNA, 20 nt, Artificial Sequence
  Synthetic
gggugcuauuugcauuuuaa

SEQ ID NO: 456748 - RNA, 21 nt, Artificial Sequence
  Synthetic
agggugcuauuugcauuuuaa

SEQ ID NO: 456749 - RNA, 22 nt, Artificial Sequence
  Synthetic
gagggugcuauuugcauuuuaa

SEQ ID NO: 456750 - RNA, 23 nt, Artificial Sequence
  Synthetic
agagggugcuauuugcauuuuaa

SEQ ID NO: 456751 - RNA, 24 nt, Artificial Sequence
  Synthetic
cagagggugcuauuugcauuuuaa

SEQ ID NO: 456752 - RNA, 18 nt, Artificial Sequence
  Synthetic
aucaggcagagauuuuaa

SEQ ID NO: 456753 - RNA, 19 nt, Artificial Sequence
  Synthetic
caucaggcagagauuuuaa

SEQ ID NO: 456754 - RNA, 20 nt, Artificial Sequence
  Synthetic
acaucaggcagagauuuuaa

SEQ ID NO: 456755 - RNA, 21 nt, Artificial Sequence
  Synthetic
uacaucaggcagagauuuuaa

SEQ ID NO: 456756 - RNA, 22 nt, Artificial Sequence
  Synthetic
cuacaucaggcagagauuuuaa

SEQ ID NO: 456757 - RNA, 23 nt, Artificial Sequence
  Synthetic
gcuacaucaggcagagauuuuaa

SEQ ID NO: 456758 - RNA, 24 nt, Artificial Sequence
  Synthetic
ggcuacaucaggcagagauuuuaa

SEQ ID NO: 456759 - RNA, 18 nt, Artificial Sequence
  Synthetic
uauaaaagcugauuuuaa

SEQ ID NO: 456760 - RNA, 19 nt, Artificial Sequence
  Synthetic
auauaaaagcugauuuuaa

SEQ ID NO: 456761 - RNA, 20 nt, Artificial Sequence
  Synthetic
aauauaaaagcugauuuuaa

SEQ ID NO: 456762 - RNA, 21 nt, Artificial Sequence
  Synthetic
caauauaaaagcugauuuuaa

SEQ ID NO: 456763 - RNA, 22 nt, Artificial Sequence
  Synthetic
ucaauauaaaagcugauuuuaa

SEQ ID NO: 456764 - RNA, 23 nt, Artificial Sequence
  Synthetic
cucaauauaaaagcugauuuuaa

SEQ ID NO: 456765 - RNA, 24 nt, Artificial Sequence
  Synthetic
acucaauauaaaagcugauuuuaa

SEQ ID NO: 456766 - RNA, 18 nt, Artificial Sequence
  Synthetic
uacuauuuaauauuuuaa

SEQ ID NO: 456767 - RNA, 19 nt, Artificial Sequence
  Synthetic
cuacuauuuaauauuuuaa

SEQ ID NO: 456768 - RNA, 20 nt, Artificial Sequence
  Synthetic
ucuacuauuuaauauuuuaa

SEQ ID NO: 456769 - RNA, 21 nt, Artificial Sequence
  Synthetic
uucuacuauuuaauauuuuaa

SEQ ID NO: 456770 - RNA, 22 nt, Artificial Sequence
  Synthetic
uuucuacuauuuaauauuuuaa

SEQ ID NO: 456771 - RNA, 23 nt, Artificial Sequence
  Synthetic
auuucuacuauuuaauauuuuaa

SEQ ID NO: 456772 - RNA, 24 nt, Artificial Sequence
  Synthetic
uauuucuacuauuuaauauuuuaa

SEQ ID NO: 456773 - RNA, 18 nt, Artificial Sequence
  Synthetic
aaaucugauauauuuuaa

SEQ ID NO: 456774 - RNA, 19 nt, Artificial Sequence
  Synthetic
gaaaucugauauauuuuaa

SEQ ID NO: 456775 - RNA, 20 nt, Artificial Sequence
  Synthetic
agaaaucugauauauuuuaa

SEQ ID NO: 456776 - RNA, 21 nt, Artificial Sequence
  Synthetic
uagaaaucugauauauuuuaa

SEQ ID NO: 456777 - RNA, 22 nt, Artificial Sequence
  Synthetic
uuagaaaucugauauauuuuaa

SEQ ID NO: 456778 - RNA, 23 nt, Artificial Sequence
  Synthetic
uuuagaaaucugauauauuuuaa

SEQ ID NO: 456779 - RNA, 24 nt, Artificial Sequence
  Synthetic
auuuagaaaucugauauauuuuaa

SEQ ID NO: 456780 - RNA, 18 nt, Artificial Sequence
  Synthetic
uuagcauuucuauuuuaa

SEQ ID NO: 456781 - RNA, 19 nt, Artificial Sequence
  Synthetic
uuuagcauuucuauuuuaa

SEQ ID NO: 456782 - RNA, 20 nt, Artificial Sequence
  Synthetic
uuuuagcauuucuauuuuaa

SEQ ID NO: 456783 - RNA, 21 nt, Artificial Sequence
  Synthetic
auuuuagcauuucuauuuuaa

SEQ ID NO: 456784 - RNA, 22 nt, Artificial Sequence
  Synthetic
cauuuuagcauuucuauuuuaa

SEQ ID NO: 456785 - RNA, 23 nt, Artificial Sequence
  Synthetic
ccauuuuagcauuucuauuuuaa

SEQ ID NO: 456786 - RNA, 24 nt, Artificial Sequence
  Synthetic
gccauuuuagcauuucuauuuuaa

SEQ ID NO: 456787 - RNA, 18 nt, Artificial Sequence
  Synthetic
auuucauuucuauuuuaa

SEQ ID NO: 456788 - RNA, 19 nt, Artificial Sequence
  Synthetic
aauuucauuucuauuuuaa

SEQ ID NO: 456789 - RNA, 20 nt, Artificial Sequence
  Synthetic
uaauuucauuucuauuuuaa

SEQ ID NO: 456790 - RNA, 21 nt, Artificial Sequence
  Synthetic
auaauuucauuucuauuuuaa

SEQ ID NO: 456791 - RNA, 22 nt, Artificial Sequence
  Synthetic
uauaauuucauuucuauuuuaa

SEQ ID NO: 456792 - RNA, 23 nt, Artificial Sequence
  Synthetic
auauaauuucauuucuauuuuaa

SEQ ID NO: 456793 - RNA, 24 nt, Artificial Sequence
  Synthetic
cauauaauuucauuucuauuuuaa

SEQ ID NO: 456794 - RNA, 18 nt, Artificial Sequence
  Synthetic
aguagcaauuuauuuuaa

SEQ ID NO: 456795 - RNA, 19 nt, Artificial Sequence
  Synthetic
caguagcaauuuauuuuaa

SEQ ID NO: 456796 - RNA, 20 nt, Artificial Sequence
  Synthetic
acaguagcaauuuauuuuaa

SEQ ID NO: 456797 - RNA, 21 nt, Artificial Sequence
  Synthetic
uacaguagcaauuuauuuuaa

SEQ ID NO: 456798 - RNA, 22 nt, Artificial Sequence
  Synthetic
guacaguagcaauuuauuuuaa

SEQ ID NO: 456799 - RNA, 23 nt, Artificial Sequence
  Synthetic
uguacaguagcaauuuauuuuaa

SEQ ID NO: 456800 - RNA, 24 nt, Artificial Sequence
  Synthetic
auguacaguagcaauuuauuuuaa

SEQ ID NO: 456801 - RNA, 18 nt, Artificial Sequence
  Synthetic
cagcuggcuuuauuuuaa

SEQ ID NO: 456802 - RNA, 19 nt, Artificial Sequence
  Synthetic
acagcuggcuuuauuuuaa

SEQ ID NO: 456803 - RNA, 20 nt, Artificial Sequence
  Synthetic
aacagcuggcuuuauuuuaa

SEQ ID NO: 456804 - RNA, 21 nt, Artificial Sequence
  Synthetic
uaacagcuggcuuuauuuuaa

SEQ ID NO: 456805 - RNA, 22 nt, Artificial Sequence
  Synthetic
cuaacagcuggcuuuauuuuaa

SEQ ID NO: 456806 - RNA, 23 nt, Artificial Sequence
  Synthetic
ucuaacagcuggcuuuauuuuaa

SEQ ID NO: 456807 - RNA, 24 nt, Artificial Sequence
  Synthetic
uucuaacagcuggcuuuauuuuaa

SEQ ID NO: 456808 - RNA, 18 nt, Artificial Sequence
  Synthetic
ggacuggguuuauuuuaa

SEQ ID NO: 456809 - RNA, 19 nt, Artificial Sequence
  Synthetic
aggacuggguuuauuuuaa

SEQ ID NO: 456810 - RNA, 20 nt, Artificial Sequence
  Synthetic
aaggacuggguuuauuuuaa

SEQ ID NO: 456811 - RNA, 21 nt, Artificial Sequence
  Synthetic
aaaggacuggguuuauuuuaa

SEQ ID NO: 456812 - RNA, 22 nt, Artificial Sequence
  Synthetic
aaaaggacuggguuuauuuuaa

SEQ ID NO: 456813 - RNA, 23 nt, Artificial Sequence
  Synthetic
gaaaaggacuggguuuauuuuaa

SEQ ID NO: 456814 - RNA, 24 nt, Artificial Sequence
  Synthetic
ggaaaaggacuggguuuauuuuaa

SEQ ID NO: 456815 - RNA, 18 nt, Artificial Sequence
  Synthetic
caguaaauuuuauuuuaa

SEQ ID NO: 456816 - RNA, 19 nt, Artificial Sequence
  Synthetic
ucaguaaauuuuauuuuaa

SEQ ID NO: 456817 - RNA, 20 nt, Artificial Sequence
  Synthetic
cucaguaaauuuuauuuuaa

SEQ ID NO: 456818 - RNA, 21 nt, Artificial Sequence
  Synthetic
acucaguaaauuuuauuuuaa

SEQ ID NO: 456819 - RNA, 22 nt, Artificial Sequence
  Synthetic
aacucaguaaauuuuauuuuaa

SEQ ID NO: 456820 - RNA, 23 nt, Artificial Sequence
  Synthetic
aaacucaguaaauuuuauuuuaa

SEQ ID NO: 456821 - RNA, 24 nt, Artificial Sequence
  Synthetic
aaaacucaguaaauuuuauuuuaa

SEQ ID NO: 456822 - RNA, 18 nt, Artificial Sequence
  Synthetic
aaccacauuuuauuuuaa

SEQ ID NO: 456823 - RNA, 19 nt, Artificial Sequence
  Synthetic
aaaccacauuuuauuuuaa

SEQ ID NO: 456824 - RNA, 20 nt, Artificial Sequence
  Synthetic
uaaaccacauuuuauuuuaa

SEQ ID NO: 456825 - RNA, 21 nt, Artificial Sequence
  Synthetic
uuaaaccacauuuuauuuuaa

SEQ ID NO: 456826 - RNA, 22 nt, Artificial Sequence
  Synthetic
auuaaaccacauuuuauuuuaa

SEQ ID NO: 456827 - RNA, 23 nt, Artificial Sequence
  Synthetic
gauuaaaccacauuuuauuuuaa

SEQ ID NO: 456828 - RNA, 24 nt, Artificial Sequence
  Synthetic
ugauuaaaccacauuuuauuuuaa

SEQ ID NO: 456829 - RNA, 18 nt, Artificial Sequence
  Synthetic
uucagcucccacuuuuaa

SEQ ID NO: 456830 - RNA, 19 nt, Artificial Sequence
  Synthetic
guucagcucccacuuuuaa

SEQ ID NO: 456831 - RNA, 20 nt, Artificial Sequence
  Synthetic
uguucagcucccacuuuuaa

SEQ ID NO: 456832 - RNA, 21 nt, Artificial Sequence
  Synthetic
uuguucagcucccacuuuuaa

SEQ ID NO: 456833 - RNA, 22 nt, Artificial Sequence
  Synthetic
auuguucagcucccacuuuuaa

SEQ ID NO: 456834 - RNA, 23 nt, Artificial Sequence
  Synthetic
cauuguucagcucccacuuuuaa

SEQ ID NO: 456835 - RNA, 24 nt, Artificial Sequence
  Synthetic
ucauuguucagcucccacuuuuaa

SEQ ID NO: 456836 - RNA, 18 nt, Artificial Sequence
  Synthetic
ucugccugguacuuuuaa

SEQ ID NO: 456837 - RNA, 19 nt, Artificial Sequence
  Synthetic
gucugccugguacuuuuaa

SEQ ID NO: 456838 - RNA, 20 nt, Artificial Sequence
  Synthetic
ugucugccugguacuuuuaa

SEQ ID NO: 456839 - RNA, 21 nt, Artificial Sequence
  Synthetic
augucugccugguacuuuuaa

SEQ ID NO: 456840 - RNA, 22 nt, Artificial Sequence
  Synthetic
uaugucugccugguacuuuuaa

SEQ ID NO: 456841 - RNA, 23 nt, Artificial Sequence
  Synthetic
auaugucugccugguacuuuuaa

SEQ ID NO: 456842 - RNA, 24 nt, Artificial Sequence
  Synthetic
aauaugucugccugguacuuuuaa

SEQ ID NO: 456843 - RNA, 18 nt, Artificial Sequence
  Synthetic
aguaaacugaccuuuuaa

SEQ ID NO: 456844 - RNA, 19 nt, Artificial Sequence
  Synthetic
aaguaaacugaccuuuuaa

SEQ ID NO: 456845 - RNA, 20 nt, Artificial Sequence
  Synthetic
caaguaaacugaccuuuuaa

SEQ ID NO: 456846 - RNA, 21 nt, Artificial Sequence
  Synthetic
gcaaguaaacugaccuuuuaa

SEQ ID NO: 456847 - RNA, 22 nt, Artificial Sequence
  Synthetic
ggcaaguaaacugaccuuuuaa

SEQ ID NO: 456848 - RNA, 23 nt, Artificial Sequence
  Synthetic
aggcaaguaaacugaccuuuuaa

SEQ ID NO: 456849 - RNA, 24 nt, Artificial Sequence
  Synthetic
aaggcaaguaaacugaccuuuuaa

SEQ ID NO: 456850 - RNA, 18 nt, Artificial Sequence
  Synthetic
ggauccucugccuuuuaa

SEQ ID NO: 456851 - RNA, 19 nt, Artificial Sequence
  Synthetic
aggauccucugccuuuuaa

SEQ ID NO: 456852 - RNA, 20 nt, Artificial Sequence
  Synthetic
gaggauccucugccuuuuaa

SEQ ID NO: 456853 - RNA, 21 nt, Artificial Sequence
  Synthetic
agaggauccucugccuuuuaa

SEQ ID NO: 456854 - RNA, 22 nt, Artificial Sequence
  Synthetic
gagaggauccucugccuuuuaa

SEQ ID NO: 456855 - RNA, 23 nt, Artificial Sequence
  Synthetic
ggagaggauccucugccuuuuaa

SEQ ID NO: 456856 - RNA, 24 nt, Artificial Sequence
  Synthetic
gggagaggauccucugccuuuuaa

SEQ ID NO: 456857 - RNA, 18 nt, Artificial Sequence
  Synthetic
uuccauggaagcuuuuaa

SEQ ID NO: 456858 - RNA, 19 nt, Artificial Sequence
  Synthetic
cuuccauggaagcuuuuaa

SEQ ID NO: 456859 - RNA, 20 nt, Artificial Sequence
  Synthetic
gcuuccauggaagcuuuuaa

SEQ ID NO: 456860 - RNA, 21 nt, Artificial Sequence
  Synthetic
agcuuccauggaagcuuuuaa

SEQ ID NO: 456861 - RNA, 22 nt, Artificial Sequence
  Synthetic
uagcuuccauggaagcuuuuaa

SEQ ID NO: 456862 - RNA, 23 nt, Artificial Sequence
  Synthetic
guagcuuccauggaagcuuuuaa

SEQ ID NO: 456863 - RNA, 24 nt, Artificial Sequence
  Synthetic
uguagcuuccauggaagcuuuuaa

SEQ ID NO: 456864 - RNA, 18 nt, Artificial Sequence
  Synthetic
caguaugacagcuuuuaa

SEQ ID NO: 456865 - RNA, 19 nt, Artificial Sequence
  Synthetic
acaguaugacagcuuuuaa

SEQ ID NO: 456866 - RNA, 20 nt, Artificial Sequence
  Synthetic
uacaguaugacagcuuuuaa

SEQ ID NO: 456867 - RNA, 21 nt, Artificial Sequence
  Synthetic
uuacaguaugacagcuuuuaa

SEQ ID NO: 456868 - RNA, 22 nt, Artificial Sequence
  Synthetic
cuuacaguaugacagcuuuuaa

SEQ ID NO: 456869 - RNA, 23 nt, Artificial Sequence
  Synthetic
acuuacaguaugacagcuuuuaa

SEQ ID NO: 456870 - RNA, 24 nt, Artificial Sequence
  Synthetic
aacuuacaguaugacagcuuuuaa

SEQ ID NO: 456871 - RNA, 18 nt, Artificial Sequence
  Synthetic
ggacauuuaaucuuuuaa

SEQ ID NO: 456872 - RNA, 19 nt, Artificial Sequence
  Synthetic
uggacauuuaaucuuuuaa

SEQ ID NO: 456873 - RNA, 20 nt, Artificial Sequence
  Synthetic
uuggacauuuaaucuuuuaa

SEQ ID NO: 456874 - RNA, 21 nt, Artificial Sequence
  Synthetic
auuggacauuuaaucuuuuaa

SEQ ID NO: 456875 - RNA, 22 nt, Artificial Sequence
  Synthetic
uauuggacauuuaaucuuuuaa

SEQ ID NO: 456876 - RNA, 23 nt, Artificial Sequence
  Synthetic
uuauuggacauuuaaucuuuuaa

SEQ ID NO: 456877 - RNA, 24 nt, Artificial Sequence
  Synthetic
uuuauuggacauuuaaucuuuuaa

SEQ ID NO: 456878 - RNA, 18 nt, Artificial Sequence
  Synthetic
ccagucugugucuuuuaa

SEQ ID NO: 456879 - RNA, 19 nt, Artificial Sequence
  Synthetic
gccagucugugucuuuuaa

SEQ ID NO: 456880 - RNA, 20 nt, Artificial Sequence
  Synthetic
ugccagucugugucuuuuaa

SEQ ID NO: 456881 - RNA, 21 nt, Artificial Sequence
  Synthetic
uugccagucugugucuuuuaa

SEQ ID NO: 456882 - RNA, 22 nt, Artificial Sequence
  Synthetic
uuugccagucugugucuuuuaa

SEQ ID NO: 456883 - RNA, 23 nt, Artificial Sequence
  Synthetic
auuugccagucugugucuuuuaa

SEQ ID NO: 456884 - RNA, 24 nt, Artificial Sequence
  Synthetic
aauuugccagucugugucuuuuaa

SEQ ID NO: 456885 - RNA, 18 nt, Artificial Sequence
  Synthetic
aaaaaauucuucuuuuaa

SEQ ID NO: 456886 - RNA, 19 nt, Artificial Sequence
  Synthetic
uaaaaaauucuucuuuuaa

SEQ ID NO: 456887 - RNA, 20 nt, Artificial Sequence
  Synthetic
uuaaaaaauucuucuuuuaa

SEQ ID NO: 456888 - RNA, 21 nt, Artificial Sequence
  Synthetic
auuaaaaaauucuucuuuuaa

SEQ ID NO: 456889 - RNA, 22 nt, Artificial Sequence
  Synthetic
uauuaaaaaauucuucuuuuaa

SEQ ID NO: 456890 - RNA, 23 nt, Artificial Sequence
  Synthetic
auauuaaaaaauucuucuuuuaa

SEQ ID NO: 456891 - RNA, 24 nt, Artificial Sequence
  Synthetic
uauauuaaaaaauucuucuuuuaa

SEQ ID NO: 456892 - RNA, 18 nt, Artificial Sequence
  Synthetic
aaaauuauuuucuuuuaa

SEQ ID NO: 456893 - RNA, 19 nt, Artificial Sequence
  Synthetic
aaaaauuauuuucuuuuaa

SEQ ID NO: 456894 - RNA, 20 nt, Artificial Sequence
  Synthetic
uaaaaauuauuuucuuuuaa

SEQ ID NO: 456895 - RNA, 21 nt, Artificial Sequence
  Synthetic
cuaaaaauuauuuucuuuuaa

SEQ ID NO: 456896 - RNA, 22 nt, Artificial Sequence
  Synthetic
gcuaaaaauuauuuucuuuuaa

SEQ ID NO: 456897 - RNA, 23 nt, Artificial Sequence
  Synthetic
ugcuaaaaauuauuuucuuuuaa

SEQ ID NO: 456898 - RNA, 24 nt, Artificial Sequence
  Synthetic
uugcuaaaaauuauuuucuuuuaa

SEQ ID NO: 456899 - RNA, 18 nt, Artificial Sequence
  Synthetic
cuacauaaacaguuuuaa

SEQ ID NO: 456900 - RNA, 19 nt, Artificial Sequence
  Synthetic
ccuacauaaacaguuuuaa

SEQ ID NO: 456901 - RNA, 20 nt, Artificial Sequence
  Synthetic
uccuacauaaacaguuuuaa

SEQ ID NO: 456902 - RNA, 21 nt, Artificial Sequence
  Synthetic
uuccuacauaaacaguuuuaa

SEQ ID NO: 456903 - RNA, 22 nt, Artificial Sequence
  Synthetic
uuuccuacauaaacaguuuuaa

SEQ ID NO: 456904 - RNA, 23 nt, Artificial Sequence
  Synthetic
guuuccuacauaaacaguuuuaa

SEQ ID NO: 456905 - RNA, 24 nt, Artificial Sequence
  Synthetic
aguuuccuacauaaacaguuuuaa

SEQ ID NO: 456906 - RNA, 18 nt, Artificial Sequence
  Synthetic
uaccccuggugguuuuaa

SEQ ID NO: 456907 - RNA, 19 nt, Artificial Sequence
  Synthetic
guaccccuggugguuuuaa

SEQ ID NO: 456908 - RNA, 20 nt, Artificial Sequence
  Synthetic
uguaccccuggugguuuuaa

SEQ ID NO: 456909 - RNA, 21 nt, Artificial Sequence
  Synthetic
uuguaccccuggugguuuuaa

SEQ ID NO: 456910 - RNA, 22 nt, Artificial Sequence
  Synthetic
uuuguaccccuggugguuuuaa

SEQ ID NO: 456911 - RNA, 23 nt, Artificial Sequence
  Synthetic
cuuuguaccccuggugguuuuaa

SEQ ID NO: 456912 - RNA, 24 nt, Artificial Sequence
  Synthetic
ccuuuguaccccuggugguuuuaa

SEQ ID NO: 456913 - RNA, 18 nt, Artificial Sequence
  Synthetic
cucgcugaaaauuuuuaa

SEQ ID NO: 456914 - RNA, 19 nt, Artificial Sequence
  Synthetic
ucucgcugaaaauuuuuaa

SEQ ID NO: 456915 - RNA, 20 nt, Artificial Sequence
  Synthetic
uucucgcugaaaauuuuuaa

SEQ ID NO: 456916 - RNA, 21 nt, Artificial Sequence
  Synthetic
auucucgcugaaaauuuuuaa

SEQ ID NO: 456917 - RNA, 22 nt, Artificial Sequence
  Synthetic
aauucucgcugaaaauuuuuaa

SEQ ID NO: 456918 - RNA, 23 nt, Artificial Sequence
  Synthetic
caauucucgcugaaaauuuuuaa

SEQ ID NO: 456919 - RNA, 24 nt, Artificial Sequence
  Synthetic
acaauucucgcugaaaauuuuuaa

SEQ ID NO: 456920 - RNA, 18 nt, Artificial Sequence
  Synthetic
guucuaaagaauuuuuaa

SEQ ID NO: 456921 - RNA, 19 nt, Artificial Sequence
  Synthetic
aguucuaaagaauuuuuaa

SEQ ID NO: 456922 - RNA, 20 nt, Artificial Sequence
  Synthetic
aaguucuaaagaauuuuuaa

SEQ ID NO: 456923 - RNA, 21 nt, Artificial Sequence
  Synthetic
caaguucuaaagaauuuuuaa

SEQ ID NO: 456924 - RNA, 22 nt, Artificial Sequence
  Synthetic
acaaguucuaaagaauuuuuaa

SEQ ID NO: 456925 - RNA, 23 nt, Artificial Sequence
  Synthetic
uacaaguucuaaagaauuuuuaa

SEQ ID NO: 456926 - RNA, 24 nt, Artificial Sequence
  Synthetic
guacaaguucuaaagaauuuuuaa

SEQ ID NO: 456927 - RNA, 18 nt, Artificial Sequence
  Synthetic
aaggcccuguauuuuuaa

SEQ ID NO: 456928 - RNA, 19 nt, Artificial Sequence
  Synthetic
caaggcccuguauuuuuaa

SEQ ID NO: 456929 - RNA, 20 nt, Artificial Sequence
  Synthetic
acaaggcccuguauuuuuaa

SEQ ID NO: 456930 - RNA, 21 nt, Artificial Sequence
  Synthetic
cacaaggcccuguauuuuuaa

SEQ ID NO: 456931 - RNA, 22 nt, Artificial Sequence
  Synthetic
ccacaaggcccuguauuuuuaa

SEQ ID NO: 456932 - RNA, 23 nt, Artificial Sequence
  Synthetic
accacaaggcccuguauuuuuaa

SEQ ID NO: 456933 - RNA, 24 nt, Artificial Sequence
  Synthetic
caccacaaggcccuguauuuuuaa

SEQ ID NO: 456934 - RNA, 18 nt, Artificial Sequence
  Synthetic
uaauuuuuguauuuuuaa

SEQ ID NO: 456935 - RNA, 19 nt, Artificial Sequence
  Synthetic
cuaauuuuuguauuuuuaa

SEQ ID NO: 456936 - RNA, 20 nt, Artificial Sequence
  Synthetic
gcuaauuuuuguauuuuuaa

SEQ ID NO: 456937 - RNA, 21 nt, Artificial Sequence
  Synthetic
agcuaauuuuuguauuuuuaa

SEQ ID NO: 456938 - RNA, 22 nt, Artificial Sequence
  Synthetic
cagcuaauuuuuguauuuuuaa

SEQ ID NO: 456939 - RNA, 23 nt, Artificial Sequence
  Synthetic
ucagcuaauuuuuguauuuuuaa

SEQ ID NO: 456940 - RNA, 24 nt, Artificial Sequence
  Synthetic
cucagcuaauuuuuguauuuuuaa

SEQ ID NO: 456941 - RNA, 18 nt, Artificial Sequence
  Synthetic
ucauuuuuguauuuuuaa

SEQ ID NO: 456942 - RNA, 19 nt, Artificial Sequence
  Synthetic
gucauuuuuguauuuuuaa

SEQ ID NO: 456943 - RNA, 20 nt, Artificial Sequence
  Synthetic
ggucauuuuuguauuuuuaa

SEQ ID NO: 456944 - RNA, 21 nt, Artificial Sequence
  Synthetic
aggucauuuuuguauuuuuaa

SEQ ID NO: 456945 - RNA, 22 nt, Artificial Sequence
  Synthetic
caggucauuuuuguauuuuuaa

SEQ ID NO: 456946 - RNA, 23 nt, Artificial Sequence
  Synthetic
acaggucauuuuuguauuuuuaa

SEQ ID NO: 456947 - RNA, 24 nt, Artificial Sequence
  Synthetic
cacaggucauuuuuguauuuuuaa

SEQ ID NO: 456948 - RNA, 21 nt, Artificial Sequence
  Synthetic
uuuuuuuuuuuguauuuuuaa

SEQ ID NO: 456949 - RNA, 22 nt, Artificial Sequence
  Synthetic
uuuuuuuuuuuuguauuuuuaa

SEQ ID NO: 456950 - RNA, 23 nt, Artificial Sequence
  Synthetic
auuuuuuuuuuuuguauuuuuaa

SEQ ID NO: 456951 - RNA, 24 nt, Artificial Sequence
  Synthetic
aauuuuuuuuuuuuguauuuuuaa

SEQ ID NO: 456952 - RNA, 23 nt, Artificial Sequence
  Synthetic
uuuuuuuuuuuuuguauuuuuaa

SEQ ID NO: 456953 - RNA, 24 nt, Artificial Sequence
  Synthetic
uuuuuuuuuuuuuuguauuuuuaa

SEQ ID NO: 456954 - RNA, 18 nt, Artificial Sequence
  Synthetic
ugaacagacacuuuuuaa

SEQ ID NO: 456955 - RNA, 19 nt, Artificial Sequence
  Synthetic
augaacagacacuuuuuaa

SEQ ID NO: 456956 - RNA, 20 nt, Artificial Sequence
  Synthetic
caugaacagacacuuuuuaa

SEQ ID NO: 456957 - RNA, 21 nt, Artificial Sequence
  Synthetic
acaugaacagacacuuuuuaa

SEQ ID NO: 456958 - RNA, 22 nt, Artificial Sequence
  Synthetic
cacaugaacagacacuuuuuaa

SEQ ID NO: 456959 - RNA, 23 nt, Artificial Sequence
  Synthetic
gcacaugaacagacacuuuuuaa

SEQ ID NO: 456960 - RNA, 24 nt, Artificial Sequence
  Synthetic
agcacaugaacagacacuuuuuaa

SEQ ID NO: 456961 - RNA, 18 nt, Artificial Sequence
  Synthetic
uuguguuuuacuuuuuaa

SEQ ID NO: 456962 - RNA, 19 nt, Artificial Sequence
  Synthetic
uuuguguuuuacuuuuuaa

SEQ ID NO: 456963 - RNA, 20 nt, Artificial Sequence
  Synthetic
guuuguguuuuacuuuuuaa

SEQ ID NO: 456964 - RNA, 21 nt, Artificial Sequence
  Synthetic
uguuuguguuuuacuuuuuaa

SEQ ID NO: 456965 - RNA, 22 nt, Artificial Sequence
  Synthetic
guguuuguguuuuacuuuuuaa

SEQ ID NO: 456966 - RNA, 23 nt, Artificial Sequence
  Synthetic
cguguuuguguuuuacuuuuuaa

SEQ ID NO: 456967 - RNA, 24 nt, Artificial Sequence
  Synthetic
gcguguuuguguuuuacuuuuuaa

SEQ ID NO: 456968 - RNA, 18 nt, Artificial Sequence
  Synthetic
uccaauuuaccuuuuuaa

SEQ ID NO: 456969 - RNA, 19 nt, Artificial Sequence
  Synthetic
auccaauuuaccuuuuuaa

SEQ ID NO: 456970 - RNA, 20 nt, Artificial Sequence
  Synthetic
aauccaauuuaccuuuuuaa

SEQ ID NO: 456971 - RNA, 21 nt, Artificial Sequence
  Synthetic
caauccaauuuaccuuuuuaa

SEQ ID NO: 456972 - RNA, 22 nt, Artificial Sequence
  Synthetic
ucaauccaauuuaccuuuuuaa

SEQ ID NO: 456973 - RNA, 23 nt, Artificial Sequence
  Synthetic
uucaauccaauuuaccuuuuuaa

SEQ ID NO: 456974 - RNA, 24 nt, Artificial Sequence
  Synthetic
uuucaauccaauuuaccuuuuuaa

SEQ ID NO: 456975 - RNA, 18 nt, Artificial Sequence
  Synthetic
gcaauaaaagcuuuuuaa

SEQ ID NO: 456976 - RNA, 19 nt, Artificial Sequence
  Synthetic
ugcaauaaaagcuuuuuaa

SEQ ID NO: 456977 - RNA, 20 nt, Artificial Sequence
  Synthetic
uugcaauaaaagcuuuuuaa

SEQ ID NO: 456978 - RNA, 21 nt, Artificial Sequence
  Synthetic
uuugcaauaaaagcuuuuuaa

SEQ ID NO: 456979 - RNA, 22 nt, Artificial Sequence
  Synthetic
guuugcaauaaaagcuuuuuaa

SEQ ID NO: 456980 - RNA, 23 nt, Artificial Sequence
  Synthetic
uguuugcaauaaaagcuuuuuaa

SEQ ID NO: 456981 - RNA, 24 nt, Artificial Sequence
  Synthetic
cuguuugcaauaaaagcuuuuuaa

SEQ ID NO: 456982 - RNA, 18 nt, Artificial Sequence
  Synthetic
aauugaagagcuuuuuaa

SEQ ID NO: 456983 - RNA, 19 nt, Artificial Sequence
  Synthetic
aaauugaagagcuuuuuaa

SEQ ID NO: 456984 - RNA, 20 nt, Artificial Sequence
  Synthetic
aaaauugaagagcuuuuuaa

SEQ ID NO: 456985 - RNA, 21 nt, Artificial Sequence
  Synthetic
caaaauugaagagcuuuuuaa

SEQ ID NO: 456986 - RNA, 22 nt, Artificial Sequence
  Synthetic
acaaaauugaagagcuuuuuaa

SEQ ID NO: 456987 - RNA, 23 nt, Artificial Sequence
  Synthetic
uacaaaauugaagagcuuuuuaa

SEQ ID NO: 456988 - RNA, 24 nt, Artificial Sequence
  Synthetic
auacaaaauugaagagcuuuuuaa

SEQ ID NO: 456989 - RNA, 18 nt, Artificial Sequence
  Synthetic
aggaaauugaguuuuuaa

SEQ ID NO: 456990 - RNA, 19 nt, Artificial Sequence
  Synthetic
uaggaaauugaguuuuuaa

SEQ ID NO: 456991 - RNA, 20 nt, Artificial Sequence
  Synthetic
uuaggaaauugaguuuuuaa

SEQ ID NO: 456992 - RNA, 21 nt, Artificial Sequence
  Synthetic
uuuaggaaauugaguuuuuaa

SEQ ID NO: 456993 - RNA, 22 nt, Artificial Sequence
  Synthetic
cuuuaggaaauugaguuuuuaa

SEQ ID NO: 456994 - RNA, 23 nt, Artificial Sequence
  Synthetic
gcuuuaggaaauugaguuuuuaa

SEQ ID NO: 456995 - RNA, 24 nt, Artificial Sequence
  Synthetic
ugcuuuaggaaauugaguuuuuaa

SEQ ID NO: 456996 - RNA, 18 nt, Artificial Sequence
  Synthetic
ucuugugccgguuuuuaa

SEQ ID NO: 456997 - RNA, 19 nt, Artificial Sequence
  Synthetic
gucuugugccgguuuuuaa

SEQ ID NO: 456998 - RNA, 20 nt, Artificial Sequence
  Synthetic
ugucuugugccgguuuuuaa

SEQ ID NO: 456999 - RNA, 21 nt, Artificial Sequence
  Synthetic
uugucuugugccgguuuuuaa

SEQ ID NO: 457000 - RNA, 22 nt, Artificial Sequence
  Synthetic
cuugucuugugccgguuuuuaa

SEQ ID NO: 457001 - RNA, 23 nt, Artificial Sequence
  Synthetic
ccuugucuugugccgguuuuuaa

SEQ ID NO: 457002 - RNA, 24 nt, Artificial Sequence
  Synthetic
uccuugucuugugccgguuuuuaa

SEQ ID NO: 457003 - RNA, 18 nt, Artificial Sequence
  Synthetic
aagauaauugguuuuuaa

SEQ ID NO: 457004 - RNA, 19 nt, Artificial Sequence
  Synthetic
gaagauaauugguuuuuaa

SEQ ID NO: 457005 - RNA, 20 nt, Artificial Sequence
  Synthetic
agaagauaauugguuuuuaa

SEQ ID NO: 457006 - RNA, 21 nt, Artificial Sequence
  Synthetic
aagaagauaauugguuuuuaa

SEQ ID NO: 457007 - RNA, 22 nt, Artificial Sequence
  Synthetic
uaagaagauaauugguuuuuaa

SEQ ID NO: 457008 - RNA, 23 nt, Artificial Sequence
  Synthetic
uuaagaagauaauugguuuuuaa

SEQ ID NO: 457009 - RNA, 24 nt, Artificial Sequence
  Synthetic
cuuaagaagauaauugguuuuuaa

SEQ ID NO: 457010 - RNA, 18 nt, Artificial Sequence
  Synthetic
cccucauaaauuuuuuaa

SEQ ID NO: 457011 - RNA, 19 nt, Artificial Sequence
  Synthetic
ucccucauaaauuuuuuaa

SEQ ID NO: 457012 - RNA, 20 nt, Artificial Sequence
  Synthetic
aucccucauaaauuuuuuaa

SEQ ID NO: 457013 - RNA, 21 nt, Artificial Sequence
  Synthetic
uaucccucauaaauuuuuuaa

SEQ ID NO: 457014 - RNA, 22 nt, Artificial Sequence
  Synthetic
uuaucccucauaaauuuuuuaa

SEQ ID NO: 457015 - RNA, 23 nt, Artificial Sequence
  Synthetic
auuaucccucauaaauuuuuuaa

SEQ ID NO: 457016 - RNA, 24 nt, Artificial Sequence
  Synthetic
uauuaucccucauaaauuuuuuaa

SEQ ID NO: 457017 - RNA, 18 nt, Artificial Sequence
  Synthetic
uugaacuuuauuuuuuaa

SEQ ID NO: 457018 - RNA, 19 nt, Artificial Sequence
  Synthetic
auugaacuuuauuuuuuaa

SEQ ID NO: 457019 - RNA, 20 nt, Artificial Sequence
  Synthetic
uauugaacuuuauuuuuuaa

SEQ ID NO: 457020 - RNA, 21 nt, Artificial Sequence
  Synthetic
auauugaacuuuauuuuuuaa

SEQ ID NO: 457021 - RNA, 22 nt, Artificial Sequence
  Synthetic
uauauugaacuuuauuuuuuaa

SEQ ID NO: 457022 - RNA, 23 nt, Artificial Sequence
  Synthetic
auauauugaacuuuauuuuuuaa

SEQ ID NO: 457023 - RNA, 24 nt, Artificial Sequence
  Synthetic
aauauauugaacuuuauuuuuuaa

SEQ ID NO: 457024 - RNA, 18 nt, Artificial Sequence
  Synthetic
gugguaagauuuuuuuaa

SEQ ID NO: 457025 - RNA, 19 nt, Artificial Sequence
  Synthetic
ugugguaagauuuuuuuaa

SEQ ID NO: 457026 - RNA, 20 nt, Artificial Sequence
  Synthetic
augugguaagauuuuuuuaa

SEQ ID NO: 457027 - RNA, 21 nt, Artificial Sequence
  Synthetic
aaugugguaagauuuuuuuaa

SEQ ID NO: 457028 - RNA, 22 nt, Artificial Sequence
  Synthetic
aaaugugguaagauuuuuuuaa

SEQ ID NO: 457029 - RNA, 23 nt, Artificial Sequence
  Synthetic
aaaaugugguaagauuuuuuuaa

SEQ ID NO: 457030 - RNA, 24 nt, Artificial Sequence
  Synthetic
aaaaaugugguaagauuuuuuuaa

SEQ ID NO: 457031 - RNA, 18 nt, Artificial Sequence
  Synthetic
aauuucagauuuuuuuaa

SEQ ID NO: 457032 - RNA, 19 nt, Artificial Sequence
  Synthetic
aaauuucagauuuuuuuaa

SEQ ID NO: 457033 - RNA, 20 nt, Artificial Sequence
  Synthetic
caaauuucagauuuuuuuaa

SEQ ID NO: 457034 - RNA, 21 nt, Artificial Sequence
  Synthetic
ucaaauuucagauuuuuuuaa

SEQ ID NO: 457035 - RNA, 22 nt, Artificial Sequence
  Synthetic
uucaaauuucagauuuuuuuaa

SEQ ID NO: 457036 - RNA, 23 nt, Artificial Sequence
  Synthetic
uuucaaauuucagauuuuuuuaa

SEQ ID NO: 457037 - RNA, 24 nt, Artificial Sequence
  Synthetic
auuucaaauuucagauuuuuuuaa

SEQ ID NO: 457038 - RNA, 18 nt, Artificial Sequence
  Synthetic
uuauagagauuuuuuuaa

SEQ ID NO: 457039 - RNA, 19 nt, Artificial Sequence
  Synthetic
auuauagagauuuuuuuaa

SEQ ID NO: 457040 - RNA, 20 nt, Artificial Sequence
  Synthetic
gauuauagagauuuuuuuaa

SEQ ID NO: 457041 - RNA, 21 nt, Artificial Sequence
  Synthetic
ggauuauagagauuuuuuuaa

SEQ ID NO: 457042 - RNA, 22 nt, Artificial Sequence
  Synthetic
gggauuauagagauuuuuuuaa

SEQ ID NO: 457043 - RNA, 23 nt, Artificial Sequence
  Synthetic
agggauuauagagauuuuuuuaa

SEQ ID NO: 457044 - RNA, 24 nt, Artificial Sequence
  Synthetic
aagggauuauagagauuuuuuuaa

SEQ ID NO: 457045 - RNA, 18 nt, Artificial Sequence
  Synthetic
cucauauaguuuuuuuaa

SEQ ID NO: 457046 - RNA, 19 nt, Artificial Sequence
  Synthetic
acucauauaguuuuuuuaa

SEQ ID NO: 457047 - RNA, 20 nt, Artificial Sequence
  Synthetic
aacucauauaguuuuuuuaa

SEQ ID NO: 457048 - RNA, 21 nt, Artificial Sequence
  Synthetic
aaacucauauaguuuuuuuaa

SEQ ID NO: 457049 - RNA, 22 nt, Artificial Sequence
  Synthetic
aaaacucauauaguuuuuuuaa

SEQ ID NO: 457050 - RNA, 23 nt, Artificial Sequence
  Synthetic
aaaaacucauauaguuuuuuuaa

SEQ ID NO: 457051 - RNA, 24 nt, Artificial Sequence
  Synthetic
caaaaacucauauaguuuuuuuaa

SEQ ID NO: 457052 - RNA, 18 nt, Artificial Sequence
  Synthetic
aauaaguuuuuuuuuuaa

SEQ ID NO: 457053 - RNA, 19 nt, Artificial Sequence
  Synthetic
gaauaaguuuuuuuuuuaa

SEQ ID NO: 457054 - RNA, 20 nt, Artificial Sequence
  Synthetic
agaauaaguuuuuuuuuuaa

SEQ ID NO: 457055 - RNA, 21 nt, Artificial Sequence
  Synthetic
cagaauaaguuuuuuuuuuaa

SEQ ID NO: 457056 - RNA, 22 nt, Artificial Sequence
  Synthetic
ccagaauaaguuuuuuuuuuaa

SEQ ID NO: 457057 - RNA, 23 nt, Artificial Sequence
  Synthetic
gccagaauaaguuuuuuuuuuaa

SEQ ID NO: 457058 - RNA, 24 nt, Artificial Sequence
  Synthetic
agccagaauaaguuuuuuuuuuaa

SEQ ID NO: 457059 - RNA, 18 nt, Artificial Sequence
  Synthetic
uuguuuuuuuuuuuuuaa

SEQ ID NO: 457060 - RNA, 19 nt, Artificial Sequence
  Synthetic
cuuguuuuuuuuuuuuuaa

SEQ ID NO: 457061 - RNA, 20 nt, Artificial Sequence
  Synthetic
ucuuguuuuuuuuuuuuuaa

SEQ ID NO: 457062 - RNA, 21 nt, Artificial Sequence
  Synthetic
aucuuguuuuuuuuuuuuuaa

SEQ ID NO: 457063 - RNA, 22 nt, Artificial Sequence
  Synthetic
uaucuuguuuuuuuuuuuuuaa

SEQ ID NO: 457064 - RNA, 23 nt, Artificial Sequence
  Synthetic
guaucuuguuuuuuuuuuuuuaa

SEQ ID NO: 457065 - RNA, 24 nt, Artificial Sequence
  Synthetic
uguaucuuguuuuuuuuuuuuuaa

SEQ ID NO: 457066 - RNA, 18 nt, Artificial Sequence
  Synthetic
uuuuuuuuuuuuuuuuaa

SEQ ID NO: 457067 - RNA, 19 nt, Artificial Sequence
  Synthetic
uuuuuuuuuuuuuuuuuaa

SEQ ID NO: 457068 - RNA, 20 nt, Artificial Sequence
  Synthetic
uuuuuuuuuuuuuuuuuuaa

SEQ ID NO: 457069 - RNA, 21 nt, Artificial Sequence
  Synthetic
cuuuuuuuuuuuuuuuuuuaa

SEQ ID NO: 457070 - RNA, 22 nt, Artificial Sequence
  Synthetic
ucuuuuuuuuuuuuuuuuuuaa

SEQ ID NO: 457071 - RNA, 23 nt, Artificial Sequence
  Synthetic
gucuuuuuuuuuuuuuuuuuuaa

SEQ ID NO: 457072 - RNA, 24 nt, Artificial Sequence
  Synthetic
agucuuuuuuuuuuuuuuuuuuaa

SEQ ID NO: 457073 - RNA, 18 nt, Artificial Sequence
  Synthetic
auuccaaaaaaaaaaaca

SEQ ID NO: 457074 - RNA, 19 nt, Artificial Sequence
  Synthetic
uauuccaaaaaaaaaaaca

SEQ ID NO: 457075 - RNA, 20 nt, Artificial Sequence
  Synthetic
cuauuccaaaaaaaaaaaca

SEQ ID NO: 457076 - RNA, 21 nt, Artificial Sequence
  Synthetic
acuauuccaaaaaaaaaaaca

SEQ ID NO: 457077 - RNA, 22 nt, Artificial Sequence
  Synthetic
cacuauuccaaaaaaaaaaaca

SEQ ID NO: 457078 - RNA, 23 nt, Artificial Sequence
  Synthetic
gcacuauuccaaaaaaaaaaaca

SEQ ID NO: 457079 - RNA, 24 nt, Artificial Sequence
  Synthetic
ggcacuauuccaaaaaaaaaaaca

SEQ ID NO: 457080 - RNA, 18 nt, Artificial Sequence
  Synthetic
gaaagaaaagaaaaaaca

SEQ ID NO: 457081 - RNA, 19 nt, Artificial Sequence
  Synthetic
agaaagaaaagaaaaaaca

SEQ ID NO: 457082 - RNA, 20 nt, Artificial Sequence
  Synthetic
aagaaagaaaagaaaaaaca

SEQ ID NO: 457083 - RNA, 21 nt, Artificial Sequence
  Synthetic
aaagaaagaaaagaaaaaaca

SEQ ID NO: 457084 - RNA, 22 nt, Artificial Sequence
  Synthetic
gaaagaaagaaaagaaaaaaca

SEQ ID NO: 457085 - RNA, 23 nt, Artificial Sequence
  Synthetic
agaaagaaagaaaagaaaaaaca

SEQ ID NO: 457086 - RNA, 24 nt, Artificial Sequence
  Synthetic
aagaaagaaagaaaagaaaaaaca

SEQ ID NO: 457087 - RNA, 18 nt, Artificial Sequence
  Synthetic
ucuuaaguagaaaaaaca

SEQ ID NO: 457088 - RNA, 19 nt, Artificial Sequence
  Synthetic
uucuuaaguagaaaaaaca

SEQ ID NO: 457089 - RNA, 20 nt, Artificial Sequence
  Synthetic
cuucuuaaguagaaaaaaca

SEQ ID NO: 457090 - RNA, 21 nt, Artificial Sequence
  Synthetic
acuucuuaaguagaaaaaaca

SEQ ID NO: 457091 - RNA, 22 nt, Artificial Sequence
  Synthetic
uacuucuuaaguagaaaaaaca

SEQ ID NO: 457092 - RNA, 23 nt, Artificial Sequence
  Synthetic
cuacuucuuaaguagaaaaaaca

SEQ ID NO: 457093 - RNA, 24 nt, Artificial Sequence
  Synthetic
ucuacuucuuaaguagaaaaaaca

SEQ ID NO: 457094 - RNA, 18 nt, Artificial Sequence
  Synthetic
caguugccauaaaaaaca

SEQ ID NO: 457095 - RNA, 19 nt, Artificial Sequence
  Synthetic
acaguugccauaaaaaaca

SEQ ID NO: 457096 - RNA, 20 nt, Artificial Sequence
  Synthetic
gacaguugccauaaaaaaca

SEQ ID NO: 457097 - RNA, 21 nt, Artificial Sequence
  Synthetic
ugacaguugccauaaaaaaca

SEQ ID NO: 457098 - RNA, 22 nt, Artificial Sequence
  Synthetic
augacaguugccauaaaaaaca

SEQ ID NO: 457099 - RNA, 23 nt, Artificial Sequence
  Synthetic
aaugacaguugccauaaaaaaca

SEQ ID NO: 457100 - RNA, 24 nt, Artificial Sequence
  Synthetic
aaaugacaguugccauaaaaaaca

SEQ ID NO: 457101 - RNA, 18 nt, Artificial Sequence
  Synthetic
aagcuuccauaaaaaaca

SEQ ID NO: 457102 - RNA, 19 nt, Artificial Sequence
  Synthetic
gaagcuuccauaaaaaaca

SEQ ID NO: 457103 - RNA, 20 nt, Artificial Sequence
  Synthetic
ugaagcuuccauaaaaaaca

SEQ ID NO: 457104 - RNA, 21 nt, Artificial Sequence
  Synthetic
augaagcuuccauaaaaaaca

SEQ ID NO: 457105 - RNA, 22 nt, Artificial Sequence
  Synthetic
caugaagcuuccauaaaaaaca

SEQ ID NO: 457106 - RNA, 23 nt, Artificial Sequence
  Synthetic
ucaugaagcuuccauaaaaaaca

SEQ ID NO: 457107 - RNA, 24 nt, Artificial Sequence
  Synthetic
gucaugaagcuuccauaaaaaaca

SEQ ID NO: 457108 - RNA, 18 nt, Artificial Sequence
  Synthetic
agaaugccuucaaaaaca

SEQ ID NO: 457109 - RNA, 19 nt, Artificial Sequence
  Synthetic
aagaaugccuucaaaaaca

SEQ ID NO: 457110 - RNA, 20 nt, Artificial Sequence
  Synthetic
aaagaaugccuucaaaaaca

SEQ ID NO: 457111 - RNA, 21 nt, Artificial Sequence
  Synthetic
uaaagaaugccuucaaaaaca

SEQ ID NO: 457112 - RNA, 22 nt, Artificial Sequence
  Synthetic
cuaaagaaugccuucaaaaaca

SEQ ID NO: 457113 - RNA, 23 nt, Artificial Sequence
  Synthetic
ccuaaagaaugccuucaaaaaca

SEQ ID NO: 457114 - RNA, 24 nt, Artificial Sequence
  Synthetic
uccuaaagaaugccuucaaaaaca

SEQ ID NO: 457115 - RNA, 18 nt, Artificial Sequence
  Synthetic
guuuaauuuucaaaaaca

SEQ ID NO: 457116 - RNA, 19 nt, Artificial Sequence
  Synthetic
uguuuaauuuucaaaaaca

SEQ ID NO: 457117 - RNA, 20 nt, Artificial Sequence
  Synthetic
auguuuaauuuucaaaaaca

SEQ ID NO: 457118 - RNA, 21 nt, Artificial Sequence
  Synthetic
uauguuuaauuuucaaaaaca

SEQ ID NO: 457119 - RNA, 22 nt, Artificial Sequence
  Synthetic
auauguuuaauuuucaaaaaca

SEQ ID NO: 457120 - RNA, 23 nt, Artificial Sequence
  Synthetic
cauauguuuaauuuucaaaaaca

SEQ ID NO: 457121 - RNA, 24 nt, Artificial Sequence
  Synthetic
ucauauguuuaauuuucaaaaaca

SEQ ID NO: 457122 - RNA, 18 nt, Artificial Sequence
  Synthetic
uguacaccgagaaaaaca

SEQ ID NO: 457123 - RNA, 19 nt, Artificial Sequence
  Synthetic
uuguacaccgagaaaaaca

SEQ ID NO: 457124 - RNA, 20 nt, Artificial Sequence
  Synthetic
guuguacaccgagaaaaaca

SEQ ID NO: 457125 - RNA, 21 nt, Artificial Sequence
  Synthetic
aguuguacaccgagaaaaaca

SEQ ID NO: 457126 - RNA, 22 nt, Artificial Sequence
  Synthetic
aaguuguacaccgagaaaaaca

SEQ ID NO: 457127 - RNA, 23 nt, Artificial Sequence
  Synthetic
caaguuguacaccgagaaaaaca

SEQ ID NO: 457128 - RNA, 24 nt, Artificial Sequence
  Synthetic
gcaaguuguacaccgagaaaaaca

SEQ ID NO: 457129 - RNA, 18 nt, Artificial Sequence
  Synthetic
aguuaaaaaauaaaaaca

SEQ ID NO: 457130 - RNA, 19 nt, Artificial Sequence
  Synthetic
gaguuaaaaaauaaaaaca

SEQ ID NO: 457131 - RNA, 20 nt, Artificial Sequence
  Synthetic
ggaguuaaaaaauaaaaaca

SEQ ID NO: 457132 - RNA, 21 nt, Artificial Sequence
  Synthetic
uggaguuaaaaaauaaaaaca

SEQ ID NO: 457133 - RNA, 22 nt, Artificial Sequence
  Synthetic
auggaguuaaaaaauaaaaaca

SEQ ID NO: 457134 - RNA, 23 nt, Artificial Sequence
  Synthetic
aauggaguuaaaaaauaaaaaca

SEQ ID NO: 457135 - RNA, 24 nt, Artificial Sequence
  Synthetic
gaauggaguuaaaaaauaaaaaca

SEQ ID NO: 457136 - RNA, 18 nt, Artificial Sequence
  Synthetic
aagaacguccuaaaaaca

SEQ ID NO: 457137 - RNA, 19 nt, Artificial Sequence
  Synthetic
uaagaacguccuaaaaaca

SEQ ID NO: 457138 - RNA, 20 nt, Artificial Sequence
  Synthetic
guaagaacguccuaaaaaca

SEQ ID NO: 457139 - RNA, 21 nt, Artificial Sequence
  Synthetic
aguaagaacguccuaaaaaca

SEQ ID NO: 457140 - RNA, 22 nt, Artificial Sequence
  Synthetic
uaguaagaacguccuaaaaaca

SEQ ID NO: 457141 - RNA, 23 nt, Artificial Sequence
  Synthetic
guaguaagaacguccuaaaaaca

SEQ ID NO: 457142 - RNA, 24 nt, Artificial Sequence
  Synthetic
uguaguaagaacguccuaaaaaca

SEQ ID NO: 457143 - RNA, 18 nt, Artificial Sequence
  Synthetic
aucaaaaagcuaaaaaca

SEQ ID NO: 457144 - RNA, 19 nt, Artificial Sequence
  Synthetic
gaucaaaaagcuaaaaaca

SEQ ID NO: 457145 - RNA, 20 nt, Artificial Sequence
  Synthetic
agaucaaaaagcuaaaaaca

SEQ ID NO: 457146 - RNA, 21 nt, Artificial Sequence
  Synthetic
cagaucaaaaagcuaaaaaca

SEQ ID NO: 457147 - RNA, 22 nt, Artificial Sequence
  Synthetic
acagaucaaaaagcuaaaaaca

SEQ ID NO: 457148 - RNA, 23 nt, Artificial Sequence
  Synthetic
aacagaucaaaaagcuaaaaaca

SEQ ID NO: 457149 - RNA, 24 nt, Artificial Sequence
  Synthetic
uaacagaucaaaaagcuaaaaaca

SEQ ID NO: 457150 - RNA, 18 nt, Artificial Sequence
  Synthetic
aagagaaaguuaaaaaca

SEQ ID NO: 457151 - RNA, 19 nt, Artificial Sequence
  Synthetic
aaagagaaaguuaaaaaca

SEQ ID NO: 457152 - RNA, 20 nt, Artificial Sequence
  Synthetic
caaagagaaaguuaaaaaca

SEQ ID NO: 457153 - RNA, 21 nt, Artificial Sequence
  Synthetic
ccaaagagaaaguuaaaaaca

SEQ ID NO: 457154 - RNA, 22 nt, Artificial Sequence
  Synthetic
uccaaagagaaaguuaaaaaca

SEQ ID NO: 457155 - RNA, 23 nt, Artificial Sequence
  Synthetic
uuccaaagagaaaguuaaaaaca

SEQ ID NO: 457156 - RNA, 24 nt, Artificial Sequence
  Synthetic
uuuccaaagagaaaguuaaaaaca

SEQ ID NO: 457157 - RNA, 18 nt, Artificial Sequence
  Synthetic
ucuagaggaaacaaaaca

SEQ ID NO: 457158 - RNA, 19 nt, Artificial Sequence
  Synthetic
uucuagaggaaacaaaaca

SEQ ID NO: 457159 - RNA, 20 nt, Artificial Sequence
  Synthetic
auucuagaggaaacaaaaca

SEQ ID NO: 457160 - RNA, 21 nt, Artificial Sequence
  Synthetic
cauucuagaggaaacaaaaca

SEQ ID NO: 457161 - RNA, 22 nt, Artificial Sequence
  Synthetic
ucauucuagaggaaacaaaaca

SEQ ID NO: 457162 - RNA, 23 nt, Artificial Sequence
  Synthetic
aucauucuagaggaaacaaaaca

SEQ ID NO: 457163 - RNA, 24 nt, Artificial Sequence
  Synthetic
uaucauucuagaggaaacaaaaca

SEQ ID NO: 457164 - RNA, 18 nt, Artificial Sequence
  Synthetic
ccucagccucccaaaaca

SEQ ID NO: 457165 - RNA, 19 nt, Artificial Sequence
  Synthetic
gccucagccucccaaaaca

SEQ ID NO: 457166 - RNA, 20 nt, Artificial Sequence
  Synthetic
cgccucagccucccaaaaca

SEQ ID NO: 457167 - RNA, 21 nt, Artificial Sequence
  Synthetic
ccgccucagccucccaaaaca

SEQ ID NO: 457168 - RNA, 22 nt, Artificial Sequence
  Synthetic
cccgccucagccucccaaaaca

SEQ ID NO: 457169 - RNA, 23 nt, Artificial Sequence
  Synthetic
acccgccucagccucccaaaaca

SEQ ID NO: 457170 - RNA, 24 nt, Artificial Sequence
  Synthetic
cacccgccucagccucccaaaaca

SEQ ID NO: 457171 - RNA, 18 nt, Artificial Sequence
  Synthetic
aaguuaaaaagcaaaaca

SEQ ID NO: 457172 - RNA, 19 nt, Artificial Sequence
  Synthetic
uaaguuaaaaagcaaaaca

SEQ ID NO: 457173 - RNA, 20 nt, Artificial Sequence
  Synthetic
auaaguuaaaaagcaaaaca

SEQ ID NO: 457174 - RNA, 21 nt, Artificial Sequence
  Synthetic
cauaaguuaaaaagcaaaaca

SEQ ID NO: 457175 - RNA, 22 nt, Artificial Sequence
  Synthetic
gcauaaguuaaaaagcaaaaca

SEQ ID NO: 457176 - RNA, 23 nt, Artificial Sequence
  Synthetic
ggcauaaguuaaaaagcaaaaca

SEQ ID NO: 457177 - RNA, 24 nt, Artificial Sequence
  Synthetic
gggcauaaguuaaaaagcaaaaca

SEQ ID NO: 457178 - RNA, 18 nt, Artificial Sequence
  Synthetic
caauauuaaggcaaaaca

SEQ ID NO: 457179 - RNA, 19 nt, Artificial Sequence
  Synthetic
ccaauauuaaggcaaaaca

SEQ ID NO: 457180 - RNA, 20 nt, Artificial Sequence
  Synthetic
accaauauuaaggcaaaaca

SEQ ID NO: 457181 - RNA, 21 nt, Artificial Sequence
  Synthetic
caccaauauuaaggcaaaaca

SEQ ID NO: 457182 - RNA, 22 nt, Artificial Sequence
  Synthetic
acaccaauauuaaggcaaaaca

SEQ ID NO: 457183 - RNA, 23 nt, Artificial Sequence
  Synthetic
gacaccaauauuaaggcaaaaca

SEQ ID NO: 457184 - RNA, 24 nt, Artificial Sequence
  Synthetic
agacaccaauauuaaggcaaaaca

SEQ ID NO: 457185 - RNA, 18 nt, Artificial Sequence
  Synthetic
aaucuaaaaaucaaaaca

SEQ ID NO: 457186 - RNA, 19 nt, Artificial Sequence
  Synthetic
gaaucuaaaaaucaaaaca

SEQ ID NO: 457187 - RNA, 20 nt, Artificial Sequence
  Synthetic
agaaucuaaaaaucaaaaca

SEQ ID NO: 457188 - RNA, 21 nt, Artificial Sequence
  Synthetic
cagaaucuaaaaaucaaaaca

SEQ ID NO: 457189 - RNA, 22 nt, Artificial Sequence
  Synthetic
gcagaaucuaaaaaucaaaaca

SEQ ID NO: 457190 - RNA, 23 nt, Artificial Sequence
  Synthetic
ugcagaaucuaaaaaucaaaaca

SEQ ID NO: 457191 - RNA, 24 nt, Artificial Sequence
  Synthetic
uugcagaaucuaaaaaucaaaaca

SEQ ID NO: 457192 - RNA, 18 nt, Artificial Sequence
  Synthetic
caagaauccuucaaaaca

SEQ ID NO: 457193 - RNA, 19 nt, Artificial Sequence
  Synthetic
acaagaauccuucaaaaca

SEQ ID NO: 457194 - RNA, 20 nt, Artificial Sequence
  Synthetic
gacaagaauccuucaaaaca

SEQ ID NO: 457195 - RNA, 21 nt, Artificial Sequence
  Synthetic
ggacaagaauccuucaaaaca

SEQ ID NO: 457196 - RNA, 22 nt, Artificial Sequence
  Synthetic
aggacaagaauccuucaaaaca

SEQ ID NO: 457197 - RNA, 23 nt, Artificial Sequence
  Synthetic
aaggacaagaauccuucaaaaca

SEQ ID NO: 457198 - RNA, 24 nt, Artificial Sequence
  Synthetic
aaaggacaagaauccuucaaaaca

SEQ ID NO: 457199 - RNA, 18 nt, Artificial Sequence
  Synthetic
caaaauuccuucaaaaca

SEQ ID NO: 457200 - RNA, 19 nt, Artificial Sequence
  Synthetic
ccaaaauuccuucaaaaca

SEQ ID NO: 457201 - RNA, 20 nt, Artificial Sequence
  Synthetic
uccaaaauuccuucaaaaca

SEQ ID NO: 457202 - RNA, 21 nt, Artificial Sequence
  Synthetic
uuccaaaauuccuucaaaaca

SEQ ID NO: 457203 - RNA, 22 nt, Artificial Sequence
  Synthetic
auuccaaaauuccuucaaaaca

SEQ ID NO: 457204 - RNA, 23 nt, Artificial Sequence
  Synthetic
gauuccaaaauuccuucaaaaca

SEQ ID NO: 457205 - RNA, 24 nt, Artificial Sequence
  Synthetic
ugauuccaaaauuccuucaaaaca

SEQ ID NO: 457206 - RNA, 18 nt, Artificial Sequence
  Synthetic
uuuuguaucuucaaaaca

SEQ ID NO: 457207 - RNA, 19 nt, Artificial Sequence
  Synthetic
cuuuuguaucuucaaaaca

SEQ ID NO: 457208 - RNA, 20 nt, Artificial Sequence
  Synthetic
ccuuuuguaucuucaaaaca

SEQ ID NO: 457209 - RNA, 21 nt, Artificial Sequence
  Synthetic
uccuuuuguaucuucaaaaca

SEQ ID NO: 457210 - RNA, 22 nt, Artificial Sequence
  Synthetic
uuccuuuuguaucuucaaaaca

SEQ ID NO: 457211 - RNA, 23 nt, Artificial Sequence
  Synthetic
uuuccuuuuguaucuucaaaaca

SEQ ID NO: 457212 - RNA, 24 nt, Artificial Sequence
  Synthetic
uuuuccuuuuguaucuucaaaaca

SEQ ID NO: 457213 - RNA, 18 nt, Artificial Sequence
  Synthetic
aauaaagauuucaaaaca

SEQ ID NO: 457214 - RNA, 19 nt, Artificial Sequence
  Synthetic
uaauaaagauuucaaaaca

SEQ ID NO: 457215 - RNA, 20 nt, Artificial Sequence
  Synthetic
guaauaaagauuucaaaaca

SEQ ID NO: 457216 - RNA, 21 nt, Artificial Sequence
  Synthetic
uguaauaaagauuucaaaaca

SEQ ID NO: 457217 - RNA, 22 nt, Artificial Sequence
  Synthetic
guguaauaaagauuucaaaaca

SEQ ID NO: 457218 - RNA, 23 nt, Artificial Sequence
  Synthetic
uguguaauaaagauuucaaaaca

SEQ ID NO: 457219 - RNA, 24 nt, Artificial Sequence
  Synthetic
cuguguaauaaagauuucaaaaca

SEQ ID NO: 457220 - RNA, 18 nt, Artificial Sequence
  Synthetic
uucuguaaaaagaaaaca

SEQ ID NO: 457221 - RNA, 19 nt, Artificial Sequence
  Synthetic
uuucuguaaaaagaaaaca

SEQ ID NO: 457222 - RNA, 20 nt, Artificial Sequence
  Synthetic
cuuucuguaaaaagaaaaca

SEQ ID NO: 457223 - RNA, 21 nt, Artificial Sequence
  Synthetic
ucuuucuguaaaaagaaaaca

SEQ ID NO: 457224 - RNA, 22 nt, Artificial Sequence
  Synthetic
cucuuucuguaaaaagaaaaca

SEQ ID NO: 457225 - RNA, 23 nt, Artificial Sequence
  Synthetic
ucucuuucuguaaaaagaaaaca

SEQ ID NO: 457226 - RNA, 24 nt, Artificial Sequence
  Synthetic
uucucuuucuguaaaaagaaaaca

SEQ ID NO: 457227 - RNA, 18 nt, Artificial Sequence
  Synthetic
aguugaaacaagaaaaca

SEQ ID NO: 457228 - RNA, 19 nt, Artificial Sequence
  Synthetic
uaguugaaacaagaaaaca

SEQ ID NO: 457229 - RNA, 20 nt, Artificial Sequence
  Synthetic
auaguugaaacaagaaaaca

SEQ ID NO: 457230 - RNA, 21 nt, Artificial Sequence
  Synthetic
gauaguugaaacaagaaaaca

SEQ ID NO: 457231 - RNA, 22 nt, Artificial Sequence
  Synthetic
agauaguugaaacaagaaaaca

SEQ ID NO: 457232 - RNA, 23 nt, Artificial Sequence
  Synthetic
aagauaguugaaacaagaaaaca

SEQ ID NO: 457233 - RNA, 24 nt, Artificial Sequence
  Synthetic
gaagauaguugaaacaagaaaaca

SEQ ID NO: 457234 - RNA, 18 nt, Artificial Sequence
  Synthetic
aaaauucauaagaaaaca

SEQ ID NO: 457235 - RNA, 19 nt, Artificial Sequence
  Synthetic
aaaaauucauaagaaaaca

SEQ ID NO: 457236 - RNA, 20 nt, Artificial Sequence
  Synthetic
gaaaaauucauaagaaaaca

SEQ ID NO: 457237 - RNA, 21 nt, Artificial Sequence
  Synthetic
agaaaaauucauaagaaaaca

SEQ ID NO: 457238 - RNA, 22 nt, Artificial Sequence
  Synthetic
cagaaaaauucauaagaaaaca

SEQ ID NO: 457239 - RNA, 23 nt, Artificial Sequence
  Synthetic
acagaaaaauucauaagaaaaca

SEQ ID NO: 457240 - RNA, 24 nt, Artificial Sequence
  Synthetic
gacagaaaaauucauaagaaaaca

SEQ ID NO: 457241 - RNA, 18 nt, Artificial Sequence
  Synthetic
aggaaggauaagaaaaca

SEQ ID NO: 457242 - RNA, 19 nt, Artificial Sequence
  Synthetic
uaggaaggauaagaaaaca

SEQ ID NO: 457243 - RNA, 20 nt, Artificial Sequence
  Synthetic
cuaggaaggauaagaaaaca

SEQ ID NO: 457244 - RNA, 21 nt, Artificial Sequence
  Synthetic
acuaggaaggauaagaaaaca

SEQ ID NO: 457245 - RNA, 22 nt, Artificial Sequence
  Synthetic
aacuaggaaggauaagaaaaca

SEQ ID NO: 457246 - RNA, 23 nt, Artificial Sequence
  Synthetic
caacuaggaaggauaagaaaaca

SEQ ID NO: 457247 - RNA, 24 nt, Artificial Sequence
  Synthetic
gcaacuaggaaggauaagaaaaca

SEQ ID NO: 457248 - RNA, 18 nt, Artificial Sequence
  Synthetic
aucaucauccagaaaaca

SEQ ID NO: 457249 - RNA, 19 nt, Artificial Sequence
  Synthetic
aaucaucauccagaaaaca

SEQ ID NO: 457250 - RNA, 20 nt, Artificial Sequence
  Synthetic
aaaucaucauccagaaaaca

SEQ ID NO: 457251 - RNA, 21 nt, Artificial Sequence
  Synthetic
uaaaucaucauccagaaaaca

SEQ ID NO: 457252 - RNA, 22 nt, Artificial Sequence
  Synthetic
auaaaucaucauccagaaaaca

SEQ ID NO: 457253 - RNA, 23 nt, Artificial Sequence
  Synthetic
aauaaaucaucauccagaaaaca

SEQ ID NO: 457254 - RNA, 24 nt, Artificial Sequence
  Synthetic
aaauaaaucaucauccagaaaaca

SEQ ID NO: 457255 - RNA, 18 nt, Artificial Sequence
  Synthetic
ccuacauaugagaaaaca

SEQ ID NO: 457256 - RNA, 19 nt, Artificial Sequence
  Synthetic
gccuacauaugagaaaaca

SEQ ID NO: 457257 - RNA, 20 nt, Artificial Sequence
  Synthetic
ggccuacauaugagaaaaca

SEQ ID NO: 457258 - RNA, 21 nt, Artificial Sequence
  Synthetic
cggccuacauaugagaaaaca

SEQ ID NO: 457259 - RNA, 22 nt, Artificial Sequence
  Synthetic
ucggccuacauaugagaaaaca

SEQ ID NO: 457260 - RNA, 23 nt, Artificial Sequence
  Synthetic
cucggccuacauaugagaaaaca

SEQ ID NO: 457261 - RNA, 24 nt, Artificial Sequence
  Synthetic
ucucggccuacauaugagaaaaca

SEQ ID NO: 457262 - RNA, 18 nt, Artificial Sequence
  Synthetic
gcaguaagugagaaaaca

SEQ ID NO: 457263 - RNA, 19 nt, Artificial Sequence
  Synthetic
agcaguaagugagaaaaca

SEQ ID NO: 457264 - RNA, 20 nt, Artificial Sequence
  Synthetic
aagcaguaagugagaaaaca

SEQ ID NO: 457265 - RNA, 21 nt, Artificial Sequence
  Synthetic
gaagcaguaagugagaaaaca

SEQ ID NO: 457266 - RNA, 22 nt, Artificial Sequence
  Synthetic
ggaagcaguaagugagaaaaca

SEQ ID NO: 457267 - RNA, 23 nt, Artificial Sequence
  Synthetic
uggaagcaguaagugagaaaaca

SEQ ID NO: 457268 - RNA, 24 nt, Artificial Sequence
  Synthetic
uuggaagcaguaagugagaaaaca

SEQ ID NO: 457269 - RNA, 18 nt, Artificial Sequence
  Synthetic
gagaguccugggaaaaca

SEQ ID NO: 457270 - RNA, 19 nt, Artificial Sequence
  Synthetic
ugagaguccugggaaaaca

SEQ ID NO: 457271 - RNA, 20 nt, Artificial Sequence
  Synthetic
uugagaguccugggaaaaca

SEQ ID NO: 457272 - RNA, 21 nt, Artificial Sequence
  Synthetic
guugagaguccugggaaaaca

SEQ ID NO: 457273 - RNA, 22 nt, Artificial Sequence
  Synthetic
uguugagaguccugggaaaaca

SEQ ID NO: 457274 - RNA, 23 nt, Artificial Sequence
  Synthetic
uuguugagaguccugggaaaaca

SEQ ID NO: 457275 - RNA, 24 nt, Artificial Sequence
  Synthetic
uuuguugagaguccugggaaaaca

SEQ ID NO: 457276 - RNA, 18 nt, Artificial Sequence
  Synthetic
aauggugcuaugaaaaca

SEQ ID NO: 457277 - RNA, 19 nt, Artificial Sequence
  Synthetic
uaauggugcuaugaaaaca

SEQ ID NO: 457278 - RNA, 20 nt, Artificial Sequence
  Synthetic
auaauggugcuaugaaaaca

SEQ ID NO: 457279 - RNA, 21 nt, Artificial Sequence
  Synthetic
aauaauggugcuaugaaaaca

SEQ ID NO: 457280 - RNA, 22 nt, Artificial Sequence
  Synthetic
uaauaauggugcuaugaaaaca

SEQ ID NO: 457281 - RNA, 23 nt, Artificial Sequence
  Synthetic
auaauaauggugcuaugaaaaca

SEQ ID NO: 457282 - RNA, 24 nt, Artificial Sequence
  Synthetic
aauaauaauggugcuaugaaaaca

SEQ ID NO: 457283 - RNA, 18 nt, Artificial Sequence
  Synthetic
uacacuacacugaaaaca

SEQ ID NO: 457284 - RNA, 19 nt, Artificial Sequence
  Synthetic
uuacacuacacugaaaaca

SEQ ID NO: 457285 - RNA, 20 nt, Artificial Sequence
  Synthetic
auuacacuacacugaaaaca

SEQ ID NO: 457286 - RNA, 21 nt, Artificial Sequence
  Synthetic
aauuacacuacacugaaaaca

SEQ ID NO: 457287 - RNA, 22 nt, Artificial Sequence
  Synthetic
caauuacacuacacugaaaaca

SEQ ID NO: 457288 - RNA, 23 nt, Artificial Sequence
  Synthetic
acaauuacacuacacugaaaaca

SEQ ID NO: 457289 - RNA, 24 nt, Artificial Sequence
  Synthetic
gacaauuacacuacacugaaaaca

SEQ ID NO: 457290 - RNA, 18 nt, Artificial Sequence
  Synthetic
uauacuguacugaaaaca

SEQ ID NO: 457291 - RNA, 19 nt, Artificial Sequence
  Synthetic
guauacuguacugaaaaca

SEQ ID NO: 457292 - RNA, 20 nt, Artificial Sequence
  Synthetic
uguauacuguacugaaaaca

SEQ ID NO: 457293 - RNA, 21 nt, Artificial Sequence
  Synthetic
auguauacuguacugaaaaca

SEQ ID NO: 457294 - RNA, 22 nt, Artificial Sequence
  Synthetic
cauguauacuguacugaaaaca

SEQ ID NO: 457295 - RNA, 23 nt, Artificial Sequence
  Synthetic
ccauguauacuguacugaaaaca

SEQ ID NO: 457296 - RNA, 24 nt, Artificial Sequence
  Synthetic
accauguauacuguacugaaaaca

SEQ ID NO: 457297 - RNA, 18 nt, Artificial Sequence
  Synthetic
agaaugaagcugaaaaca

SEQ ID NO: 457298 - RNA, 19 nt, Artificial Sequence
  Synthetic
aagaaugaagcugaaaaca

SEQ ID NO: 457299 - RNA, 20 nt, Artificial Sequence
  Synthetic
caagaaugaagcugaaaaca

SEQ ID NO: 457300 - RNA, 21 nt, Artificial Sequence
  Synthetic
ucaagaaugaagcugaaaaca

SEQ ID NO: 457301 - RNA, 22 nt, Artificial Sequence
  Synthetic
aucaagaaugaagcugaaaaca

SEQ ID NO: 457302 - RNA, 23 nt, Artificial Sequence
  Synthetic
gaucaagaaugaagcugaaaaca

SEQ ID NO: 457303 - RNA, 24 nt, Artificial Sequence
  Synthetic
ugaucaagaaugaagcugaaaaca

SEQ ID NO: 457304 - RNA, 18 nt, Artificial Sequence
  Synthetic
uuuuuaccucugaaaaca

SEQ ID NO: 457305 - RNA, 19 nt, Artificial Sequence
  Synthetic
auuuuuaccucugaaaaca

SEQ ID NO: 457306 - RNA, 20 nt, Artificial Sequence
  Synthetic
aauuuuuaccucugaaaaca

SEQ ID NO: 457307 - RNA, 21 nt, Artificial Sequence
  Synthetic
aaauuuuuaccucugaaaaca

SEQ ID NO: 457308 - RNA, 22 nt, Artificial Sequence
  Synthetic
aaaauuuuuaccucugaaaaca

SEQ ID NO: 457309 - RNA, 23 nt, Artificial Sequence
  Synthetic
gaaaauuuuuaccucugaaaaca

SEQ ID NO: 457310 - RNA, 24 nt, Artificial Sequence
  Synthetic
ggaaaauuuuuaccucugaaaaca

SEQ ID NO: 457311 - RNA, 18 nt, Artificial Sequence
  Synthetic
uguuuugguaauaaaaca

SEQ ID NO: 457312 - RNA, 19 nt, Artificial Sequence
  Synthetic
cuguuuugguaauaaaaca

SEQ ID NO: 457313 - RNA, 20 nt, Artificial Sequence
  Synthetic
ccuguuuugguaauaaaaca

SEQ ID NO: 457314 - RNA, 21 nt, Artificial Sequence
  Synthetic
uccuguuuugguaauaaaaca

SEQ ID NO: 457315 - RNA, 22 nt, Artificial Sequence
  Synthetic
cuccuguuuugguaauaaaaca

SEQ ID NO: 457316 - RNA, 23 nt, Artificial Sequence
  Synthetic
ucuccuguuuugguaauaaaaca

SEQ ID NO: 457317 - RNA, 24 nt, Artificial Sequence
  Synthetic
uucuccuguuuugguaauaaaaca

SEQ ID NO: 457318 - RNA, 18 nt, Artificial Sequence
  Synthetic
acauggggucauaaaaca

SEQ ID NO: 457319 - RNA, 19 nt, Artificial Sequence
  Synthetic
gacauggggucauaaaaca

SEQ ID NO: 457320 - RNA, 20 nt, Artificial Sequence
  Synthetic
agacauggggucauaaaaca

SEQ ID NO: 457321 - RNA, 21 nt, Artificial Sequence
  Synthetic
uagacauggggucauaaaaca

SEQ ID NO: 457322 - RNA, 22 nt, Artificial Sequence
  Synthetic
uuagacauggggucauaaaaca

SEQ ID NO: 457323 - RNA, 23 nt, Artificial Sequence
  Synthetic
guuagacauggggucauaaaaca

SEQ ID NO: 457324 - RNA, 24 nt, Artificial Sequence
  Synthetic
uguuagacauggggucauaaaaca

SEQ ID NO: 457325 - RNA, 18 nt, Artificial Sequence
  Synthetic
cauauccaauauaaaaca

SEQ ID NO: 457326 - RNA, 19 nt, Artificial Sequence
  Synthetic
ucauauccaauauaaaaca

SEQ ID NO: 457327 - RNA, 20 nt, Artificial Sequence
  Synthetic
uucauauccaauauaaaaca

SEQ ID NO: 457328 - RNA, 21 nt, Artificial Sequence
  Synthetic
uuucauauccaauauaaaaca

SEQ ID NO: 457329 - RNA, 22 nt, Artificial Sequence
  Synthetic
uuuucauauccaauauaaaaca

SEQ ID NO: 457330 - RNA, 23 nt, Artificial Sequence
  Synthetic
auuuucauauccaauauaaaaca

SEQ ID NO: 457331 - RNA, 24 nt, Artificial Sequence
  Synthetic
uauuuucauauccaauauaaaaca

SEQ ID NO: 457332 - RNA, 18 nt, Artificial Sequence
  Synthetic
uugugaaagucuaaaaca

SEQ ID NO: 457333 - RNA, 19 nt, Artificial Sequence
  Synthetic
uuugugaaagucuaaaaca

SEQ ID NO: 457334 - RNA, 20 nt, Artificial Sequence
  Synthetic
guuugugaaagucuaaaaca

SEQ ID NO: 457335 - RNA, 21 nt, Artificial Sequence
  Synthetic
gguuugugaaagucuaaaaca

SEQ ID NO: 457336 - RNA, 22 nt, Artificial Sequence
  Synthetic
ggguuugugaaagucuaaaaca

SEQ ID NO: 457337 - RNA, 23 nt, Artificial Sequence
  Synthetic
uggguuugugaaagucuaaaaca

SEQ ID NO: 457338 - RNA, 24 nt, Artificial Sequence
  Synthetic
uuggguuugugaaagucuaaaaca

SEQ ID NO: 457339 - RNA, 18 nt, Artificial Sequence
  Synthetic
gacugcucaaguaaaaca

SEQ ID NO: 457340 - RNA, 19 nt, Artificial Sequence
  Synthetic
ugacugcucaaguaaaaca

SEQ ID NO: 457341 - RNA, 20 nt, Artificial Sequence
  Synthetic
gugacugcucaaguaaaaca

SEQ ID NO: 457342 - RNA, 21 nt, Artificial Sequence
  Synthetic
agugacugcucaaguaaaaca

SEQ ID NO: 457343 - RNA, 22 nt, Artificial Sequence
  Synthetic
uagugacugcucaaguaaaaca

SEQ ID NO: 457344 - RNA, 23 nt, Artificial Sequence
  Synthetic
uuagugacugcucaaguaaaaca

SEQ ID NO: 457345 - RNA, 24 nt, Artificial Sequence
  Synthetic
uuuagugacugcucaaguaaaaca

SEQ ID NO: 457346 - RNA, 18 nt, Artificial Sequence
  Synthetic
uacuugacuuguaaaaca

SEQ ID NO: 457347 - RNA, 19 nt, Artificial Sequence
  Synthetic
cuacuugacuuguaaaaca

SEQ ID NO: 457348 - RNA, 20 nt, Artificial Sequence
  Synthetic
acuacuugacuuguaaaaca

SEQ ID NO: 457349 - RNA, 21 nt, Artificial Sequence
  Synthetic
cacuacuugacuuguaaaaca

SEQ ID NO: 457350 - RNA, 22 nt, Artificial Sequence
  Synthetic
ucacuacuugacuuguaaaaca

SEQ ID NO: 457351 - RNA, 23 nt, Artificial Sequence
  Synthetic
aucacuacuugacuuguaaaaca

SEQ ID NO: 457352 - RNA, 24 nt, Artificial Sequence
  Synthetic
uaucacuacuugacuuguaaaaca

SEQ ID NO: 457353 - RNA, 18 nt, Artificial Sequence
  Synthetic
ugaucuucuguuaaaaca

SEQ ID NO: 457354 - RNA, 19 nt, Artificial Sequence
  Synthetic
augaucuucuguuaaaaca

SEQ ID NO: 457355 - RNA, 20 nt, Artificial Sequence
  Synthetic
caugaucuucuguuaaaaca

SEQ ID NO: 457356 - RNA, 21 nt, Artificial Sequence
  Synthetic
gcaugaucuucuguuaaaaca

SEQ ID NO: 457357 - RNA, 22 nt, Artificial Sequence
  Synthetic
ggcaugaucuucuguuaaaaca

SEQ ID NO: 457358 - RNA, 23 nt, Artificial Sequence
  Synthetic
uggcaugaucuucuguuaaaaca

SEQ ID NO: 457359 - RNA, 24 nt, Artificial Sequence
  Synthetic
cuggcaugaucuucuguuaaaaca

SEQ ID NO: 457360 - RNA, 18 nt, Artificial Sequence
  Synthetic
gcauuuaaauuuaaaaca

SEQ ID NO: 457361 - RNA, 19 nt, Artificial Sequence
  Synthetic
agcauuuaaauuuaaaaca

SEQ ID NO: 457362 - RNA, 20 nt, Artificial Sequence
  Synthetic
cagcauuuaaauuuaaaaca

SEQ ID NO: 457363 - RNA, 21 nt, Artificial Sequence
  Synthetic
acagcauuuaaauuuaaaaca

SEQ ID NO: 457364 - RNA, 22 nt, Artificial Sequence
  Synthetic
gacagcauuuaaauuuaaaaca

SEQ ID NO: 457365 - RNA, 23 nt, Artificial Sequence
  Synthetic
agacagcauuuaaauuuaaaaca

SEQ ID NO: 457366 - RNA, 24 nt, Artificial Sequence
  Synthetic
cagacagcauuuaaauuuaaaaca

SEQ ID NO: 457367 - RNA, 18 nt, Artificial Sequence
  Synthetic
aaauaaaacaaacaaaca

SEQ ID NO: 457368 - RNA, 19 nt, Artificial Sequence
  Synthetic
aaaauaaaacaaacaaaca

SEQ ID NO: 457369 - RNA, 20 nt, Artificial Sequence
  Synthetic
aaaaauaaaacaaacaaaca

SEQ ID NO: 457370 - RNA, 21 nt, Artificial Sequence
  Synthetic
uaaaaauaaaacaaacaaaca

SEQ ID NO: 457371 - RNA, 22 nt, Artificial Sequence
  Synthetic
auaaaaauaaaacaaacaaaca

SEQ ID NO: 457372 - RNA, 23 nt, Artificial Sequence
  Synthetic
aauaaaaauaaaacaaacaaaca

SEQ ID NO: 457373 - RNA, 24 nt, Artificial Sequence
  Synthetic
aaauaaaaauaaaacaaacaaaca

SEQ ID NO: 457374 - RNA, 18 nt, Artificial Sequence
  Synthetic
uuaucuaggaaacaaaca

SEQ ID NO: 457375 - RNA, 19 nt, Artificial Sequence
  Synthetic
uuuaucuaggaaacaaaca

SEQ ID NO: 457376 - RNA, 20 nt, Artificial Sequence
  Synthetic
auuuaucuaggaaacaaaca

SEQ ID NO: 457377 - RNA, 21 nt, Artificial Sequence
  Synthetic
aauuuaucuaggaaacaaaca

SEQ ID NO: 457378 - RNA, 22 nt, Artificial Sequence
  Synthetic
aaauuuaucuaggaaacaaaca

SEQ ID NO: 457379 - RNA, 23 nt, Artificial Sequence
  Synthetic
aaaauuuaucuaggaaacaaaca

SEQ ID NO: 457380 - RNA, 24 nt, Artificial Sequence
  Synthetic
gaaaauuuaucuaggaaacaaaca

SEQ ID NO: 457381 - RNA, 18 nt, Artificial Sequence
  Synthetic
uuucucuagcaacaaaca

SEQ ID NO: 457382 - RNA, 19 nt, Artificial Sequence
  Synthetic
uuuucucuagcaacaaaca

SEQ ID NO: 457383 - RNA, 20 nt, Artificial Sequence
  Synthetic
auuuucucuagcaacaaaca

SEQ ID NO: 457384 - RNA, 21 nt, Artificial Sequence
  Synthetic
gauuuucucuagcaacaaaca

SEQ ID NO: 457385 - RNA, 22 nt, Artificial Sequence
  Synthetic
ggauuuucucuagcaacaaaca

SEQ ID NO: 457386 - RNA, 23 nt, Artificial Sequence
  Synthetic
uggauuuucucuagcaacaaaca

SEQ ID NO: 457387 - RNA, 24 nt, Artificial Sequence
  Synthetic
auggauuuucucuagcaacaaaca

SEQ ID NO: 457388 - RNA, 18 nt, Artificial Sequence
  Synthetic
cauacaggcacacaaaca

SEQ ID NO: 457389 - RNA, 19 nt, Artificial Sequence
  Synthetic
acauacaggcacacaaaca

SEQ ID NO: 457390 - RNA, 20 nt, Artificial Sequence
  Synthetic
aacauacaggcacacaaaca

SEQ ID NO: 457391 - RNA, 21 nt, Artificial Sequence
  Synthetic
uaacauacaggcacacaaaca

SEQ ID NO: 457392 - RNA, 22 nt, Artificial Sequence
  Synthetic
uuaacauacaggcacacaaaca

SEQ ID NO: 457393 - RNA, 23 nt, Artificial Sequence
  Synthetic
auuaacauacaggcacacaaaca

SEQ ID NO: 457394 - RNA, 24 nt, Artificial Sequence
  Synthetic
aauuaacauacaggcacacaaaca

SEQ ID NO: 457395 - RNA, 18 nt, Artificial Sequence
  Synthetic
accaauaacagacaaaca

SEQ ID NO: 457396 - RNA, 19 nt, Artificial Sequence
  Synthetic
caccaauaacagacaaaca

SEQ ID NO: 457397 - RNA, 20 nt, Artificial Sequence
  Synthetic
acaccaauaacagacaaaca

SEQ ID NO: 457398 - RNA, 21 nt, Artificial Sequence
  Synthetic
uacaccaauaacagacaaaca

SEQ ID NO: 457399 - RNA, 22 nt, Artificial Sequence
  Synthetic
auacaccaauaacagacaaaca

SEQ ID NO: 457400 - RNA, 23 nt, Artificial Sequence
  Synthetic
uauacaccaauaacagacaaaca

SEQ ID NO: 457401 - RNA, 24 nt, Artificial Sequence
  Synthetic
uuauacaccaauaacagacaaaca

SEQ ID NO: 457402 - RNA, 18 nt, Artificial Sequence
  Synthetic
accaacgacagacaaaca

SEQ ID NO: 457403 - RNA, 19 nt, Artificial Sequence
  Synthetic
caccaacgacagacaaaca

SEQ ID NO: 457404 - RNA, 20 nt, Artificial Sequence
  Synthetic
acaccaacgacagacaaaca

SEQ ID NO: 457405 - RNA, 21 nt, Artificial Sequence
  Synthetic
uacaccaacgacagacaaaca

SEQ ID NO: 457406 - RNA, 22 nt, Artificial Sequence
  Synthetic
auacaccaacgacagacaaaca

SEQ ID NO: 457407 - RNA, 23 nt, Artificial Sequence
  Synthetic
uauacaccaacgacagacaaaca

SEQ ID NO: 457408 - RNA, 24 nt, Artificial Sequence
  Synthetic
uuauacaccaacgacagacaaaca

SEQ ID NO: 457409 - RNA, 18 nt, Artificial Sequence
  Synthetic
accaagaauagacaaaca

SEQ ID NO: 457410 - RNA, 19 nt, Artificial Sequence
  Synthetic
caccaagaauagacaaaca

SEQ ID NO: 457411 - RNA, 20 nt, Artificial Sequence
  Synthetic
acaccaagaauagacaaaca

SEQ ID NO: 457412 - RNA, 21 nt, Artificial Sequence
  Synthetic
uacaccaagaauagacaaaca

SEQ ID NO: 457413 - RNA, 22 nt, Artificial Sequence
  Synthetic
auacaccaagaauagacaaaca

SEQ ID NO: 457414 - RNA, 23 nt, Artificial Sequence
  Synthetic
uauacaccaagaauagacaaaca

SEQ ID NO: 457415 - RNA, 24 nt, Artificial Sequence
  Synthetic
cuauacaccaagaauagacaaaca

SEQ ID NO: 457416 - RNA, 18 nt, Artificial Sequence
  Synthetic
agaaucgcucaccaaaca

SEQ ID NO: 457417 - RNA, 19 nt, Artificial Sequence
  Synthetic
cagaaucgcucaccaaaca

SEQ ID NO: 457418 - RNA, 20 nt, Artificial Sequence
  Synthetic
ucagaaucgcucaccaaaca

SEQ ID NO: 457419 - RNA, 21 nt, Artificial Sequence
  Synthetic
uucagaaucgcucaccaaaca

SEQ ID NO: 457420 - RNA, 22 nt, Artificial Sequence
  Synthetic
uuucagaaucgcucaccaaaca

SEQ ID NO: 457421 - RNA, 23 nt, Artificial Sequence
  Synthetic
guuucagaaucgcucaccaaaca

SEQ ID NO: 457422 - RNA, 24 nt, Artificial Sequence
  Synthetic
aguuucagaaucgcucaccaaaca

SEQ ID NO: 457423 - RNA, 18 nt, Artificial Sequence
  Synthetic
agaagaaacauccaaaca

SEQ ID NO: 457424 - RNA, 19 nt, Artificial Sequence
  Synthetic
uagaagaaacauccaaaca

SEQ ID NO: 457425 - RNA, 20 nt, Artificial Sequence
  Synthetic
auagaagaaacauccaaaca

SEQ ID NO: 457426 - RNA, 21 nt, Artificial Sequence
  Synthetic
uauagaagaaacauccaaaca

SEQ ID NO: 457427 - RNA, 22 nt, Artificial Sequence
  Synthetic
auauagaagaaacauccaaaca

SEQ ID NO: 457428 - RNA, 23 nt, Artificial Sequence
  Synthetic
aauauagaagaaacauccaaaca

SEQ ID NO: 457429 - RNA, 24 nt, Artificial Sequence
  Synthetic
aaauauagaagaaacauccaaaca

SEQ ID NO: 457430 - RNA, 18 nt, Artificial Sequence
  Synthetic
uuuuuuucaaagcaaaca

SEQ ID NO: 457431 - RNA, 19 nt, Artificial Sequence
  Synthetic
uuuuuuuucaaagcaaaca

SEQ ID NO: 457432 - RNA, 20 nt, Artificial Sequence
  Synthetic
uuuuuuuuucaaagcaaaca

SEQ ID NO: 457433 - RNA, 21 nt, Artificial Sequence
  Synthetic
uuuuuuuuuucaaagcaaaca

SEQ ID NO: 457434 - RNA, 22 nt, Artificial Sequence
  Synthetic
uuuuuuuuuuucaaagcaaaca

SEQ ID NO: 457435 - RNA, 23 nt, Artificial Sequence
  Synthetic
auuuuuuuuuuucaaagcaaaca

SEQ ID NO: 457436 - RNA, 24 nt, Artificial Sequence
  Synthetic
uauuuuuuuuuuucaaagcaaaca

SEQ ID NO: 457437 - RNA, 18 nt, Artificial Sequence
  Synthetic
aguaaauggaagcaaaca

SEQ ID NO: 457438 - RNA, 19 nt, Artificial Sequence
  Synthetic
aaguaaauggaagcaaaca

SEQ ID NO: 457439 - RNA, 20 nt, Artificial Sequence
  Synthetic
aaaguaaauggaagcaaaca

SEQ ID NO: 457440 - RNA, 21 nt, Artificial Sequence
  Synthetic
gaaaguaaauggaagcaaaca

SEQ ID NO: 457441 - RNA, 22 nt, Artificial Sequence
  Synthetic
ggaaaguaaauggaagcaaaca

SEQ ID NO: 457442 - RNA, 23 nt, Artificial Sequence
  Synthetic
aggaaaguaaauggaagcaaaca

SEQ ID NO: 457443 - RNA, 24 nt, Artificial Sequence
  Synthetic
caggaaaguaaauggaagcaaaca

SEQ ID NO: 457444 - RNA, 18 nt, Artificial Sequence
  Synthetic
ucagauauucagcaaaca

SEQ ID NO: 457445 - RNA, 19 nt, Artificial Sequence
  Synthetic
gucagauauucagcaaaca

SEQ ID NO: 457446 - RNA, 20 nt, Artificial Sequence
  Synthetic
agucagauauucagcaaaca

SEQ ID NO: 457447 - RNA, 21 nt, Artificial Sequence
  Synthetic
uagucagauauucagcaaaca

SEQ ID NO: 457448 - RNA, 22 nt, Artificial Sequence
  Synthetic
auagucagauauucagcaaaca

SEQ ID NO: 457449 - RNA, 23 nt, Artificial Sequence
  Synthetic
gauagucagauauucagcaaaca

SEQ ID NO: 457450 - RNA, 24 nt, Artificial Sequence
  Synthetic
agauagucagauauucagcaaaca

SEQ ID NO: 457451 - RNA, 18 nt, Artificial Sequence
  Synthetic
uccuuugaaaggcaaaca

SEQ ID NO: 457452 - RNA, 19 nt, Artificial Sequence
  Synthetic
uuccuuugaaaggcaaaca

SEQ ID NO: 457453 - RNA, 20 nt, Artificial Sequence
  Synthetic
auuccuuugaaaggcaaaca

SEQ ID NO: 457454 - RNA, 21 nt, Artificial Sequence
  Synthetic
cauuccuuugaaaggcaaaca

SEQ ID NO: 457455 - RNA, 22 nt, Artificial Sequence
  Synthetic
acauuccuuugaaaggcaaaca

SEQ ID NO: 457456 - RNA, 23 nt, Artificial Sequence
  Synthetic
aacauuccuuugaaaggcaaaca

SEQ ID NO: 457457 - RNA, 24 nt, Artificial Sequence
  Synthetic
gaacauuccuuugaaaggcaaaca

SEQ ID NO: 457458 - RNA, 18 nt, Artificial Sequence
  Synthetic
aaguuuaaugggcaaaca

SEQ ID NO: 457459 - RNA, 19 nt, Artificial Sequence
  Synthetic
aaaguuuaaugggcaaaca

SEQ ID NO: 457460 - RNA, 20 nt, Artificial Sequence
  Synthetic
caaaguuuaaugggcaaaca

SEQ ID NO: 457461 - RNA, 21 nt, Artificial Sequence
  Synthetic
ucaaaguuuaaugggcaaaca

SEQ ID NO: 457462 - RNA, 22 nt, Artificial Sequence
  Synthetic
aucaaaguuuaaugggcaaaca

SEQ ID NO: 457463 - RNA, 23 nt, Artificial Sequence
  Synthetic
uaucaaaguuuaaugggcaaaca

SEQ ID NO: 457464 - RNA, 24 nt, Artificial Sequence
  Synthetic
auaucaaaguuuaaugggcaaaca

SEQ ID NO: 457465 - RNA, 18 nt, Artificial Sequence
  Synthetic
cacacagaaaugcaaaca

SEQ ID NO: 457466 - RNA, 19 nt, Artificial Sequence
  Synthetic
ucacacagaaaugcaaaca

SEQ ID NO: 457467 - RNA, 20 nt, Artificial Sequence
  Synthetic
cucacacagaaaugcaaaca

SEQ ID NO: 457468 - RNA, 21 nt, Artificial Sequence
  Synthetic
ccucacacagaaaugcaaaca

SEQ ID NO: 457469 - RNA, 22 nt, Artificial Sequence
  Synthetic
uccucacacagaaaugcaaaca

SEQ ID NO: 457470 - RNA, 23 nt, Artificial Sequence
  Synthetic
cuccucacacagaaaugcaaaca

SEQ ID NO: 457471 - RNA, 24 nt, Artificial Sequence
  Synthetic
ucuccucacacagaaaugcaaaca

SEQ ID NO: 457472 - RNA, 18 nt, Artificial Sequence
  Synthetic
gaauggggaaugcaaaca

SEQ ID NO: 457473 - RNA, 19 nt, Artificial Sequence
  Synthetic
agaauggggaaugcaaaca

SEQ ID NO: 457474 - RNA, 20 nt, Artificial Sequence
  Synthetic
cagaauggggaaugcaaaca

SEQ ID NO: 457475 - RNA, 21 nt, Artificial Sequence
  Synthetic
acagaauggggaaugcaaaca

SEQ ID NO: 457476 - RNA, 22 nt, Artificial Sequence
  Synthetic
cacagaauggggaaugcaaaca

SEQ ID NO: 457477 - RNA, 23 nt, Artificial Sequence
  Synthetic
acacagaauggggaaugcaaaca

SEQ ID NO: 457478 - RNA, 24 nt, Artificial Sequence
  Synthetic
uacacagaauggggaaugcaaaca

SEQ ID NO: 457479 - RNA, 18 nt, Artificial Sequence
  Synthetic
uguauuugcaugcaaaca

SEQ ID NO: 457480 - RNA, 19 nt, Artificial Sequence
  Synthetic
guguauuugcaugcaaaca

SEQ ID NO: 457481 - RNA, 20 nt, Artificial Sequence
  Synthetic
cguguauuugcaugcaaaca

SEQ ID NO: 457482 - RNA, 21 nt, Artificial Sequence
  Synthetic
gcguguauuugcaugcaaaca

SEQ ID NO: 457483 - RNA, 22 nt, Artificial Sequence
  Synthetic
agcguguauuugcaugcaaaca

SEQ ID NO: 457484 - RNA, 23 nt, Artificial Sequence
  Synthetic
cagcguguauuugcaugcaaaca

SEQ ID NO: 457485 - RNA, 24 nt, Artificial Sequence
  Synthetic
acagcguguauuugcaugcaaaca

SEQ ID NO: 457486 - RNA, 18 nt, Artificial Sequence
  Synthetic
uuaccuuagaaucaaaca

SEQ ID NO: 457487 - RNA, 19 nt, Artificial Sequence
  Synthetic
cuuaccuuagaaucaaaca

SEQ ID NO: 457488 - RNA, 20 nt, Artificial Sequence
  Synthetic
acuuaccuuagaaucaaaca

SEQ ID NO: 457489 - RNA, 21 nt, Artificial Sequence
  Synthetic
uacuuaccuuagaaucaaaca

SEQ ID NO: 457490 - RNA, 22 nt, Artificial Sequence
  Synthetic
cuacuuaccuuagaaucaaaca

SEQ ID NO: 457491 - RNA, 23 nt, Artificial Sequence
  Synthetic
ucuacuuaccuuagaaucaaaca

SEQ ID NO: 457492 - RNA, 24 nt, Artificial Sequence
  Synthetic
aucuacuuaccuuagaaucaaaca

SEQ ID NO: 457493 - RNA, 18 nt, Artificial Sequence
  Synthetic
uccaggccaucucaaaca

SEQ ID NO: 457494 - RNA, 19 nt, Artificial Sequence
  Synthetic
auccaggccaucucaaaca

SEQ ID NO: 457495 - RNA, 20 nt, Artificial Sequence
  Synthetic
cauccaggccaucucaaaca

SEQ ID NO: 457496 - RNA, 21 nt, Artificial Sequence
  Synthetic
ccauccaggccaucucaaaca

SEQ ID NO: 457497 - RNA, 22 nt, Artificial Sequence
  Synthetic
accauccaggccaucucaaaca

SEQ ID NO: 457498 - RNA, 23 nt, Artificial Sequence
  Synthetic
caccauccaggccaucucaaaca

SEQ ID NO: 457499 - RNA, 24 nt, Artificial Sequence
  Synthetic
ucaccauccaggccaucucaaaca

SEQ ID NO: 457500 - RNA, 18 nt, Artificial Sequence
  Synthetic
acuaggaaaauucaaaca

SEQ ID NO: 457501 - RNA, 19 nt, Artificial Sequence
  Synthetic
cacuaggaaaauucaaaca

SEQ ID NO: 457502 - RNA, 20 nt, Artificial Sequence
  Synthetic
ucacuaggaaaauucaaaca

SEQ ID NO: 457503 - RNA, 21 nt, Artificial Sequence
  Synthetic
uucacuaggaaaauucaaaca

SEQ ID NO: 457504 - RNA, 22 nt, Artificial Sequence
  Synthetic
cuucacuaggaaaauucaaaca

SEQ ID NO: 457505 - RNA, 23 nt, Artificial Sequence
  Synthetic
acuucacuaggaaaauucaaaca

SEQ ID NO: 457506 - RNA, 24 nt, Artificial Sequence
  Synthetic
gacuucacuaggaaaauucaaaca

SEQ ID NO: 457507 - RNA, 18 nt, Artificial Sequence
  Synthetic
aaacuuaacaaagaaaca

SEQ ID NO: 457508 - RNA, 19 nt, Artificial Sequence
  Synthetic
aaaacuuaacaaagaaaca

SEQ ID NO: 457509 - RNA, 20 nt, Artificial Sequence
  Synthetic
aaaaacuuaacaaagaaaca

SEQ ID NO: 457510 - RNA, 21 nt, Artificial Sequence
  Synthetic
caaaaacuuaacaaagaaaca

SEQ ID NO: 457511 - RNA, 22 nt, Artificial Sequence
  Synthetic
acaaaaacuuaacaaagaaaca

SEQ ID NO: 457512 - RNA, 23 nt, Artificial Sequence
  Synthetic
aacaaaaacuuaacaaagaaaca

SEQ ID NO: 457513 - RNA, 24 nt, Artificial Sequence
  Synthetic
aaacaaaaacuuaacaaagaaaca

SEQ ID NO: 457514 - RNA, 18 nt, Artificial Sequence
  Synthetic
uaaagccuccaagaaaca

SEQ ID NO: 457515 - RNA, 19 nt, Artificial Sequence
  Synthetic
auaaagccuccaagaaaca

SEQ ID NO: 457516 - RNA, 20 nt, Artificial Sequence
  Synthetic
uauaaagccuccaagaaaca

SEQ ID NO: 457517 - RNA, 21 nt, Artificial Sequence
  Synthetic
auauaaagccuccaagaaaca

SEQ ID NO: 457518 - RNA, 22 nt, Artificial Sequence
  Synthetic
aauauaaagccuccaagaaaca

SEQ ID NO: 457519 - RNA, 23 nt, Artificial Sequence
  Synthetic
uaauauaaagccuccaagaaaca

SEQ ID NO: 457520 - RNA, 24 nt, Artificial Sequence
  Synthetic
uuaauauaaagccuccaagaaaca

SEQ ID NO: 457521 - RNA, 18 nt, Artificial Sequence
  Synthetic
gggcugguggaagaaaca

SEQ ID NO: 457522 - RNA, 19 nt, Artificial Sequence
  Synthetic
ggggcugguggaagaaaca

SEQ ID NO: 457523 - RNA, 20 nt, Artificial Sequence
  Synthetic
aggggcugguggaagaaaca

SEQ ID NO: 457524 - RNA, 21 nt, Artificial Sequence
  Synthetic
aaggggcugguggaagaaaca

SEQ ID NO: 457525 - RNA, 22 nt, Artificial Sequence
  Synthetic
uaaggggcugguggaagaaaca

SEQ ID NO: 457526 - RNA, 23 nt, Artificial Sequence
  Synthetic
auaaggggcugguggaagaaaca

SEQ ID NO: 457527 - RNA, 24 nt, Artificial Sequence
  Synthetic
gauaaggggcugguggaagaaaca

SEQ ID NO: 457528 - RNA, 18 nt, Artificial Sequence
  Synthetic
aaaaaauaauaagaaaca

SEQ ID NO: 457529 - RNA, 19 nt, Artificial Sequence
  Synthetic
aaaaaaauaauaagaaaca

SEQ ID NO: 457530 - RNA, 20 nt, Artificial Sequence
  Synthetic
gaaaaaaauaauaagaaaca

SEQ ID NO: 457531 - RNA, 21 nt, Artificial Sequence
  Synthetic
agaaaaaaauaauaagaaaca

SEQ ID NO: 457532 - RNA, 22 nt, Artificial Sequence
  Synthetic
aagaaaaaaauaauaagaaaca

SEQ ID NO: 457533 - RNA, 23 nt, Artificial Sequence
  Synthetic
aaagaaaaaaauaauaagaaaca

SEQ ID NO: 457534 - RNA, 24 nt, Artificial Sequence
  Synthetic
aaaagaaaaaaauaauaagaaaca

SEQ ID NO: 457535 - RNA, 18 nt, Artificial Sequence
  Synthetic
aggcaggaaacagaaaca

SEQ ID NO: 457536 - RNA, 19 nt, Artificial Sequence
  Synthetic
aaggcaggaaacagaaaca

SEQ ID NO: 457537 - RNA, 20 nt, Artificial Sequence
  Synthetic
caaggcaggaaacagaaaca

SEQ ID NO: 457538 - RNA, 21 nt, Artificial Sequence
  Synthetic
acaaggcaggaaacagaaaca

SEQ ID NO: 457539 - RNA, 22 nt, Artificial Sequence
  Synthetic
aacaaggcaggaaacagaaaca

SEQ ID NO: 457540 - RNA, 23 nt, Artificial Sequence
  Synthetic
aaacaaggcaggaaacagaaaca

SEQ ID NO: 457541 - RNA, 24 nt, Artificial Sequence
  Synthetic
aaaacaaggcaggaaacagaaaca

SEQ ID NO: 457542 - RNA, 18 nt, Artificial Sequence
  Synthetic
aaauaauauucagaaaca

SEQ ID NO: 457543 - RNA, 19 nt, Artificial Sequence
  Synthetic
uaaauaauauucagaaaca

SEQ ID NO: 457544 - RNA, 20 nt, Artificial Sequence
  Synthetic
auaaauaauauucagaaaca

SEQ ID NO: 457545 - RNA, 21 nt, Artificial Sequence
  Synthetic
aauaaauaauauucagaaaca

SEQ ID NO: 457546 - RNA, 22 nt, Artificial Sequence
  Synthetic
aaauaaauaauauucagaaaca

SEQ ID NO: 457547 - RNA, 23 nt, Artificial Sequence
  Synthetic
uaaauaaauaauauucagaaaca

SEQ ID NO: 457548 - RNA, 24 nt, Artificial Sequence
  Synthetic
uuaaauaaauaauauucagaaaca

SEQ ID NO: 457549 - RNA, 18 nt, Artificial Sequence
  Synthetic
gcuaucaacagagaaaca

SEQ ID NO: 457550 - RNA, 19 nt, Artificial Sequence
  Synthetic
agcuaucaacagagaaaca

SEQ ID NO: 457551 - RNA, 20 nt, Artificial Sequence
  Synthetic
aagcuaucaacagagaaaca

SEQ ID NO: 457552 - RNA, 21 nt, Artificial Sequence
  Synthetic
aaagcuaucaacagagaaaca

SEQ ID NO: 457553 - RNA, 22 nt, Artificial Sequence
  Synthetic
caaagcuaucaacagagaaaca

SEQ ID NO: 457554 - RNA, 23 nt, Artificial Sequence
  Synthetic
ucaaagcuaucaacagagaaaca

SEQ ID NO: 457555 - RNA, 24 nt, Artificial Sequence
  Synthetic
aucaaagcuaucaacagagaaaca

SEQ ID NO: 457556 - RNA, 18 nt, Artificial Sequence
  Synthetic
gucaaacucagagaaaca

SEQ ID NO: 457557 - RNA, 19 nt, Artificial Sequence
  Synthetic
ugucaaacucagagaaaca

SEQ ID NO: 457558 - RNA, 20 nt, Artificial Sequence
  Synthetic
augucaaacucagagaaaca

SEQ ID NO: 457559 - RNA, 21 nt, Artificial Sequence
  Synthetic
aaugucaaacucagagaaaca

SEQ ID NO: 457560 - RNA, 22 nt, Artificial Sequence
  Synthetic
aaaugucaaacucagagaaaca

SEQ ID NO: 457561 - RNA, 23 nt, Artificial Sequence
  Synthetic
aaaaugucaaacucagagaaaca

SEQ ID NO: 457562 - RNA, 24 nt, Artificial Sequence
  Synthetic
aaaaaugucaaacucagagaaaca

SEQ ID NO: 457563 - RNA, 18 nt, Artificial Sequence
  Synthetic
gccuaaaagugagaaaca

SEQ ID NO: 457564 - RNA, 19 nt, Artificial Sequence
  Synthetic
agccuaaaagugagaaaca

SEQ ID NO: 457565 - RNA, 20 nt, Artificial Sequence
  Synthetic
uagccuaaaagugagaaaca

SEQ ID NO: 457566 - RNA, 21 nt, Artificial Sequence
  Synthetic
uuagccuaaaagugagaaaca

SEQ ID NO: 457567 - RNA, 22 nt, Artificial Sequence
  Synthetic
auuagccuaaaagugagaaaca

SEQ ID NO: 457568 - RNA, 23 nt, Artificial Sequence
  Synthetic
aauuagccuaaaagugagaaaca

SEQ ID NO: 457569 - RNA, 24 nt, Artificial Sequence
  Synthetic
aaauuagccuaaaagugagaaaca

SEQ ID NO: 457570 - RNA, 18 nt, Artificial Sequence
  Synthetic
uagaaacaaauagaaaca

SEQ ID NO: 457571 - RNA, 19 nt, Artificial Sequence
  Synthetic
uuagaaacaaauagaaaca

SEQ ID NO: 457572 - RNA, 20 nt, Artificial Sequence
  Synthetic
uuuagaaacaaauagaaaca

SEQ ID NO: 457573 - RNA, 21 nt, Artificial Sequence
  Synthetic
uuuuagaaacaaauagaaaca

SEQ ID NO: 457574 - RNA, 22 nt, Artificial Sequence
  Synthetic
uuuuuagaaacaaauagaaaca

SEQ ID NO: 457575 - RNA, 23 nt, Artificial Sequence
  Synthetic
auuuuuagaaacaaauagaaaca

SEQ ID NO: 457576 - RNA, 24 nt, Artificial Sequence
  Synthetic
uauuuuuagaaacaaauagaaaca

SEQ ID NO: 457577 - RNA, 18 nt, Artificial Sequence
  Synthetic
aagagaaagauagaaaca

SEQ ID NO: 457578 - RNA, 19 nt, Artificial Sequence
  Synthetic
aaagagaaagauagaaaca

SEQ ID NO: 457579 - RNA, 20 nt, Artificial Sequence
  Synthetic
gaaagagaaagauagaaaca

SEQ ID NO: 457580 - RNA, 21 nt, Artificial Sequence
  Synthetic
agaaagagaaagauagaaaca

SEQ ID NO: 457581 - RNA, 22 nt, Artificial Sequence
  Synthetic
gagaaagagaaagauagaaaca

SEQ ID NO: 457582 - RNA, 23 nt, Artificial Sequence
  Synthetic
agagaaagagaaagauagaaaca

SEQ ID NO: 457583 - RNA, 24 nt, Artificial Sequence
  Synthetic
cagagaaagagaaagauagaaaca

SEQ ID NO: 457584 - RNA, 18 nt, Artificial Sequence
  Synthetic
uuuuuuuuuauagaaaca

SEQ ID NO: 457585 - RNA, 19 nt, Artificial Sequence
  Synthetic
uuuuuuuuuuauagaaaca

SEQ ID NO: 457586 - RNA, 20 nt, Artificial Sequence
  Synthetic
uuuuuuuuuuuauagaaaca

SEQ ID NO: 457587 - RNA, 21 nt, Artificial Sequence
  Synthetic
uuuuuuuuuuuuauagaaaca

SEQ ID NO: 457588 - RNA, 22 nt, Artificial Sequence
  Synthetic
uuuuuuuuuuuuuauagaaaca

SEQ ID NO: 457589 - RNA, 23 nt, Artificial Sequence
  Synthetic
uuuuuuuuuuuuuuauagaaaca

SEQ ID NO: 457590 - RNA, 24 nt, Artificial Sequence
  Synthetic
uuuuuuuuuuuuuuuauagaaaca

SEQ ID NO: 457591 - RNA, 18 nt, Artificial Sequence
  Synthetic
aacuacuacaaggaaaca

SEQ ID NO: 457592 - RNA, 19 nt, Artificial Sequence
  Synthetic
aaacuacuacaaggaaaca

SEQ ID NO: 457593 - RNA, 20 nt, Artificial Sequence
  Synthetic
gaaacuacuacaaggaaaca

SEQ ID NO: 457594 - RNA, 21 nt, Artificial Sequence
  Synthetic
agaaacuacuacaaggaaaca

SEQ ID NO: 457595 - RNA, 22 nt, Artificial Sequence
  Synthetic
aagaaacuacuacaaggaaaca

SEQ ID NO: 457596 - RNA, 23 nt, Artificial Sequence
  Synthetic
uaagaaacuacuacaaggaaaca

SEQ ID NO: 457597 - RNA, 24 nt, Artificial Sequence
  Synthetic
cuaagaaacuacuacaaggaaaca

SEQ ID NO: 457598 - RNA, 18 nt, Artificial Sequence
  Synthetic
uaagacaaccaggaaaca

SEQ ID NO: 457599 - RNA, 19 nt, Artificial Sequence
  Synthetic
guaagacaaccaggaaaca

SEQ ID NO: 457600 - RNA, 20 nt, Artificial Sequence
  Synthetic
uguaagacaaccaggaaaca

SEQ ID NO: 457601 - RNA, 21 nt, Artificial Sequence
  Synthetic
cuguaagacaaccaggaaaca

SEQ ID NO: 457602 - RNA, 22 nt, Artificial Sequence
  Synthetic
ucuguaagacaaccaggaaaca

SEQ ID NO: 457603 - RNA, 23 nt, Artificial Sequence
  Synthetic
aucuguaagacaaccaggaaaca

SEQ ID NO: 457604 - RNA, 24 nt, Artificial Sequence
  Synthetic
aaucuguaagacaaccaggaaaca

SEQ ID NO: 457605 - RNA, 18 nt, Artificial Sequence
  Synthetic
cuggacaugacggaaaca

SEQ ID NO: 457606 - RNA, 19 nt, Artificial Sequence
  Synthetic
ucuggacaugacggaaaca

SEQ ID NO: 457607 - RNA, 20 nt, Artificial Sequence
  Synthetic
cucuggacaugacggaaaca

SEQ ID NO: 457608 - RNA, 21 nt, Artificial Sequence
  Synthetic
acucuggacaugacggaaaca

SEQ ID NO: 457609 - RNA, 22 nt, Artificial Sequence
  Synthetic
cacucuggacaugacggaaaca

SEQ ID NO: 457610 - RNA, 23 nt, Artificial Sequence
  Synthetic
ucacucuggacaugacggaaaca

SEQ ID NO: 457611 - RNA, 24 nt, Artificial Sequence
  Synthetic
uucacucuggacaugacggaaaca

SEQ ID NO: 457612 - RNA, 18 nt, Artificial Sequence
  Synthetic
agagaaaauagggaaaca

SEQ ID NO: 457613 - RNA, 19 nt, Artificial Sequence
  Synthetic
gagagaaaauagggaaaca

SEQ ID NO: 457614 - RNA, 20 nt, Artificial Sequence
  Synthetic
ugagagaaaauagggaaaca

SEQ ID NO: 457615 - RNA, 21 nt, Artificial Sequence
  Synthetic
uugagagaaaauagggaaaca

SEQ ID NO: 457616 - RNA, 22 nt, Artificial Sequence
  Synthetic
auugagagaaaauagggaaaca

SEQ ID NO: 457617 - RNA, 23 nt, Artificial Sequence
  Synthetic
aauugagagaaaauagggaaaca

SEQ ID NO: 457618 - RNA, 24 nt, Artificial Sequence
  Synthetic
aaauugagagaaaauagggaaaca

SEQ ID NO: 457619 - RNA, 18 nt, Artificial Sequence
  Synthetic
auuaugguaggggaaaca

SEQ ID NO: 457620 - RNA, 19 nt, Artificial Sequence
  Synthetic
uauuaugguaggggaaaca

SEQ ID NO: 457621 - RNA, 20 nt, Artificial Sequence
  Synthetic
guauuaugguaggggaaaca

SEQ ID NO: 457622 - RNA, 21 nt, Artificial Sequence
  Synthetic
gguauuaugguaggggaaaca

SEQ ID NO: 457623 - RNA, 22 nt, Artificial Sequence
  Synthetic
agguauuaugguaggggaaaca

SEQ ID NO: 457624 - RNA, 23 nt, Artificial Sequence
  Synthetic
gagguauuaugguaggggaaaca

SEQ ID NO: 457625 - RNA, 24 nt, Artificial Sequence
  Synthetic
ugagguauuaugguaggggaaaca

SEQ ID NO: 457626 - RNA, 18 nt, Artificial Sequence
  Synthetic
gucaucuacauggaaaca

SEQ ID NO: 457627 - RNA, 19 nt, Artificial Sequence
  Synthetic
agucaucuacauggaaaca

SEQ ID NO: 457628 - RNA, 20 nt, Artificial Sequence
  Synthetic
cagucaucuacauggaaaca

SEQ ID NO: 457629 - RNA, 21 nt, Artificial Sequence
  Synthetic
ucagucaucuacauggaaaca

SEQ ID NO: 457630 - RNA, 22 nt, Artificial Sequence
  Synthetic
uucagucaucuacauggaaaca

SEQ ID NO: 457631 - RNA, 23 nt, Artificial Sequence
  Synthetic
auucagucaucuacauggaaaca

SEQ ID NO: 457632 - RNA, 24 nt, Artificial Sequence
  Synthetic
aauucagucaucuacauggaaaca

SEQ ID NO: 457633 - RNA, 18 nt, Artificial Sequence
  Synthetic
augcaguaauuggaaaca

SEQ ID NO: 457634 - RNA, 19 nt, Artificial Sequence
  Synthetic
caugcaguaauuggaaaca

SEQ ID NO: 457635 - RNA, 20 nt, Artificial Sequence
  Synthetic
ccaugcaguaauuggaaaca

SEQ ID NO: 457636 - RNA, 21 nt, Artificial Sequence
  Synthetic
accaugcaguaauuggaaaca

SEQ ID NO: 457637 - RNA, 22 nt, Artificial Sequence
  Synthetic
aaccaugcaguaauuggaaaca

SEQ ID NO: 457638 - RNA, 23 nt, Artificial Sequence
  Synthetic
aaaccaugcaguaauuggaaaca

SEQ ID NO: 457639 - RNA, 24 nt, Artificial Sequence
  Synthetic
caaaccaugcaguaauuggaaaca

SEQ ID NO: 457640 - RNA, 18 nt, Artificial Sequence
  Synthetic
agugaguccaaugaaaca

SEQ ID NO: 457641 - RNA, 19 nt, Artificial Sequence
  Synthetic
aagugaguccaaugaaaca

SEQ ID NO: 457642 - RNA, 20 nt, Artificial Sequence
  Synthetic
caagugaguccaaugaaaca

SEQ ID NO: 457643 - RNA, 21 nt, Artificial Sequence
  Synthetic
ccaagugaguccaaugaaaca

SEQ ID NO: 457644 - RNA, 22 nt, Artificial Sequence
  Synthetic
accaagugaguccaaugaaaca

SEQ ID NO: 457645 - RNA, 23 nt, Artificial Sequence
  Synthetic
gaccaagugaguccaaugaaaca

SEQ ID NO: 457646 - RNA, 24 nt, Artificial Sequence
  Synthetic
ugaccaagugaguccaaugaaaca

SEQ ID NO: 457647 - RNA, 18 nt, Artificial Sequence
  Synthetic
gugccauugucugaaaca

SEQ ID NO: 457648 - RNA, 19 nt, Artificial Sequence
  Synthetic
ggugccauugucugaaaca

SEQ ID NO: 457649 - RNA, 20 nt, Artificial Sequence
  Synthetic
uggugccauugucugaaaca

SEQ ID NO: 457650 - RNA, 21 nt, Artificial Sequence
  Synthetic
guggugccauugucugaaaca

SEQ ID NO: 457651 - RNA, 22 nt, Artificial Sequence
  Synthetic
gguggugccauugucugaaaca

SEQ ID NO: 457652 - RNA, 23 nt, Artificial Sequence
  Synthetic
ugguggugccauugucugaaaca

SEQ ID NO: 457653 - RNA, 24 nt, Artificial Sequence
  Synthetic
augguggugccauugucugaaaca

SEQ ID NO: 457654 - RNA, 18 nt, Artificial Sequence
  Synthetic
ucuauauuguuugaaaca

SEQ ID NO: 457655 - RNA, 19 nt, Artificial Sequence
  Synthetic
aucuauauuguuugaaaca

SEQ ID NO: 457656 - RNA, 20 nt, Artificial Sequence
  Synthetic
uaucuauauuguuugaaaca

SEQ ID NO: 457657 - RNA, 21 nt, Artificial Sequence
  Synthetic
auaucuauauuguuugaaaca

SEQ ID NO: 457658 - RNA, 22 nt, Artificial Sequence
  Synthetic
cauaucuauauuguuugaaaca

SEQ ID NO: 457659 - RNA, 23 nt, Artificial Sequence
  Synthetic
acauaucuauauuguuugaaaca

SEQ ID NO: 457660 - RNA, 24 nt, Artificial Sequence
  Synthetic
cacauaucuauauuguuugaaaca

SEQ ID NO: 457661 - RNA, 18 nt, Artificial Sequence
  Synthetic
gcaacagaacaauaaaca

SEQ ID NO: 457662 - RNA, 19 nt, Artificial Sequence
  Synthetic
agcaacagaacaauaaaca

SEQ ID NO: 457663 - RNA, 20 nt, Artificial Sequence
  Synthetic
cagcaacagaacaauaaaca

SEQ ID NO: 457664 - RNA, 21 nt, Artificial Sequence
  Synthetic
ucagcaacagaacaauaaaca

SEQ ID NO: 457665 - RNA, 22 nt, Artificial Sequence
  Synthetic
gucagcaacagaacaauaaaca

SEQ ID NO: 457666 - RNA, 23 nt, Artificial Sequence
  Synthetic
agucagcaacagaacaauaaaca

SEQ ID NO: 457667 - RNA, 24 nt, Artificial Sequence
  Synthetic
uagucagcaacagaacaauaaaca

SEQ ID NO: 457668 - RNA, 18 nt, Artificial Sequence
  Synthetic
cuaaugcugcaauaaaca

SEQ ID NO: 457669 - RNA, 19 nt, Artificial Sequence
  Synthetic
acuaaugcugcaauaaaca

SEQ ID NO: 457670 - RNA, 20 nt, Artificial Sequence
  Synthetic
gacuaaugcugcaauaaaca

SEQ ID NO: 457671 - RNA, 21 nt, Artificial Sequence
  Synthetic
ugacuaaugcugcaauaaaca

SEQ ID NO: 457672 - RNA, 22 nt, Artificial Sequence
  Synthetic
gugacuaaugcugcaauaaaca

SEQ ID NO: 457673 - RNA, 23 nt, Artificial Sequence
  Synthetic
ugugacuaaugcugcaauaaaca

SEQ ID NO: 457674 - RNA, 24 nt, Artificial Sequence
  Synthetic
uugugacuaaugcugcaauaaaca

SEQ ID NO: 457675 - RNA, 18 nt, Artificial Sequence
  Synthetic
aaagagaauucauaaaca

SEQ ID NO: 457676 - RNA, 19 nt, Artificial Sequence
  Synthetic
aaaagagaauucauaaaca

SEQ ID NO: 457677 - RNA, 20 nt, Artificial Sequence
  Synthetic
aaaaagagaauucauaaaca

SEQ ID NO: 457678 - RNA, 21 nt, Artificial Sequence
  Synthetic
caaaaagagaauucauaaaca

SEQ ID NO: 457679 - RNA, 22 nt, Artificial Sequence
  Synthetic
ucaaaaagagaauucauaaaca

SEQ ID NO: 457680 - RNA, 23 nt, Artificial Sequence
  Synthetic
uucaaaaagagaauucauaaaca

SEQ ID NO: 457681 - RNA, 24 nt, Artificial Sequence
  Synthetic
uuucaaaaagagaauucauaaaca

SEQ ID NO: 457682 - RNA, 18 nt, Artificial Sequence
  Synthetic
gaauaucagagauaaaca

SEQ ID NO: 457683 - RNA, 19 nt, Artificial Sequence
  Synthetic
ggaauaucagagauaaaca

SEQ ID NO: 457684 - RNA, 20 nt, Artificial Sequence
  Synthetic
gggaauaucagagauaaaca

SEQ ID NO: 457685 - RNA, 21 nt, Artificial Sequence
  Synthetic
ggggaauaucagagauaaaca

SEQ ID NO: 457686 - RNA, 22 nt, Artificial Sequence
  Synthetic
aggggaauaucagagauaaaca

SEQ ID NO: 457687 - RNA, 23 nt, Artificial Sequence
  Synthetic
uaggggaauaucagagauaaaca

SEQ ID NO: 457688 - RNA, 24 nt, Artificial Sequence
  Synthetic
cuaggggaauaucagagauaaaca

SEQ ID NO: 457689 - RNA, 18 nt, Artificial Sequence
  Synthetic
auaagugggagauaaaca

SEQ ID NO: 457690 - RNA, 19 nt, Artificial Sequence
  Synthetic
cauaagugggagauaaaca

SEQ ID NO: 457691 - RNA, 20 nt, Artificial Sequence
  Synthetic
ucauaagugggagauaaaca

SEQ ID NO: 457692 - RNA, 21 nt, Artificial Sequence
  Synthetic
cucauaagugggagauaaaca

SEQ ID NO: 457693 - RNA, 22 nt, Artificial Sequence
  Synthetic
acucauaagugggagauaaaca

SEQ ID NO: 457694 - RNA, 23 nt, Artificial Sequence
  Synthetic
cacucauaagugggagauaaaca

SEQ ID NO: 457695 - RNA, 24 nt, Artificial Sequence
  Synthetic
ucacucauaagugggagauaaaca

SEQ ID NO: 457696 - RNA, 18 nt, Artificial Sequence
  Synthetic
ugagugcaaauauaaaca

SEQ ID NO: 457697 - RNA, 19 nt, Artificial Sequence
  Synthetic
uugagugcaaauauaaaca

SEQ ID NO: 457698 - RNA, 20 nt, Artificial Sequence
  Synthetic
cuugagugcaaauauaaaca

SEQ ID NO: 457699 - RNA, 21 nt, Artificial Sequence
  Synthetic
ucuugagugcaaauauaaaca

SEQ ID NO: 457700 - RNA, 22 nt, Artificial Sequence
  Synthetic
aucuugagugcaaauauaaaca

SEQ ID NO: 457701 - RNA, 23 nt, Artificial Sequence
  Synthetic
uaucuugagugcaaauauaaaca

SEQ ID NO: 457702 - RNA, 24 nt, Artificial Sequence
  Synthetic
uuaucuugagugcaaauauaaaca

SEQ ID NO: 457703 - RNA, 18 nt, Artificial Sequence
  Synthetic
uauagaacuguauaaaca

SEQ ID NO: 457704 - RNA, 19 nt, Artificial Sequence
  Synthetic
auauagaacuguauaaaca

SEQ ID NO: 457705 - RNA, 20 nt, Artificial Sequence
  Synthetic
aauauagaacuguauaaaca

SEQ ID NO: 457706 - RNA, 21 nt, Artificial Sequence
  Synthetic
caauauagaacuguauaaaca

SEQ ID NO: 457707 - RNA, 22 nt, Artificial Sequence
  Synthetic
acaauauagaacuguauaaaca

SEQ ID NO: 457708 - RNA, 23 nt, Artificial Sequence
  Synthetic
aacaauauagaacuguauaaaca

SEQ ID NO: 457709 - RNA, 24 nt, Artificial Sequence
  Synthetic
gaacaauauagaacuguauaaaca

SEQ ID NO: 457710 - RNA, 18 nt, Artificial Sequence
  Synthetic
agucuuauuuuauaaaca

SEQ ID NO: 457711 - RNA, 19 nt, Artificial Sequence
  Synthetic
cagucuuauuuuauaaaca

SEQ ID NO: 457712 - RNA, 20 nt, Artificial Sequence
  Synthetic
ccagucuuauuuuauaaaca

SEQ ID NO: 457713 - RNA, 21 nt, Artificial Sequence
  Synthetic
gccagucuuauuuuauaaaca

SEQ ID NO: 457714 - RNA, 22 nt, Artificial Sequence
  Synthetic
ggccagucuuauuuuauaaaca

SEQ ID NO: 457715 - RNA, 23 nt, Artificial Sequence
  Synthetic
aggccagucuuauuuuauaaaca

SEQ ID NO: 457716 - RNA, 24 nt, Artificial Sequence
  Synthetic
uaggccagucuuauuuuauaaaca

SEQ ID NO: 457717 - RNA, 18 nt, Artificial Sequence
  Synthetic
uauauuuaaaacuaaaca

SEQ ID NO: 457718 - RNA, 19 nt, Artificial Sequence
  Synthetic
uuauauuuaaaacuaaaca

SEQ ID NO: 457719 - RNA, 20 nt, Artificial Sequence
  Synthetic
auuauauuuaaaacuaaaca

SEQ ID NO: 457720 - RNA, 21 nt, Artificial Sequence
  Synthetic
aauuauauuuaaaacuaaaca

SEQ ID NO: 457721 - RNA, 22 nt, Artificial Sequence
  Synthetic
aaauuauauuuaaaacuaaaca

SEQ ID NO: 457722 - RNA, 23 nt, Artificial Sequence
  Synthetic
gaaauuauauuuaaaacuaaaca

SEQ ID NO: 457723 - RNA, 24 nt, Artificial Sequence
  Synthetic
agaaauuauauuuaaaacuaaaca

SEQ ID NO: 457724 - RNA, 18 nt, Artificial Sequence
  Synthetic
augcuuuuuuacuaaaca

SEQ ID NO: 457725 - RNA, 19 nt, Artificial Sequence
  Synthetic
uaugcuuuuuuacuaaaca

SEQ ID NO: 457726 - RNA, 20 nt, Artificial Sequence
  Synthetic
auaugcuuuuuuacuaaaca

SEQ ID NO: 457727 - RNA, 21 nt, Artificial Sequence
  Synthetic
aauaugcuuuuuuacuaaaca

SEQ ID NO: 457728 - RNA, 22 nt, Artificial Sequence
  Synthetic
aaauaugcuuuuuuacuaaaca

SEQ ID NO: 457729 - RNA, 23 nt, Artificial Sequence
  Synthetic
caaauaugcuuuuuuacuaaaca

SEQ ID NO: 457730 - RNA, 24 nt, Artificial Sequence
  Synthetic
ucaaauaugcuuuuuuacuaaaca

SEQ ID NO: 457731 - RNA, 18 nt, Artificial Sequence
  Synthetic
ucuaaacauaccuaaaca

SEQ ID NO: 457732 - RNA, 19 nt, Artificial Sequence
  Synthetic
aucuaaacauaccuaaaca

SEQ ID NO: 457733 - RNA, 20 nt, Artificial Sequence
  Synthetic
caucuaaacauaccuaaaca

SEQ ID NO: 457734 - RNA, 21 nt, Artificial Sequence
  Synthetic
gcaucuaaacauaccuaaaca

SEQ ID NO: 457735 - RNA, 22 nt, Artificial Sequence
  Synthetic
ugcaucuaaacauaccuaaaca

SEQ ID NO: 457736 - RNA, 23 nt, Artificial Sequence
  Synthetic
gugcaucuaaacauaccuaaaca

SEQ ID NO: 457737 - RNA, 24 nt, Artificial Sequence
  Synthetic
cgugcaucuaaacauaccuaaaca

SEQ ID NO: 457738 - RNA, 18 nt, Artificial Sequence
  Synthetic
ucauuaaauuccuaaaca

SEQ ID NO: 457739 - RNA, 19 nt, Artificial Sequence
  Synthetic
aucauuaaauuccuaaaca

SEQ ID NO: 457740 - RNA, 20 nt, Artificial Sequence
  Synthetic
caucauuaaauuccuaaaca

SEQ ID NO: 457741 - RNA, 21 nt, Artificial Sequence
  Synthetic
acaucauuaaauuccuaaaca

SEQ ID NO: 457742 - RNA, 22 nt, Artificial Sequence
  Synthetic
cacaucauuaaauuccuaaaca

SEQ ID NO: 457743 - RNA, 23 nt, Artificial Sequence
  Synthetic
acacaucauuaaauuccuaaaca

SEQ ID NO: 457744 - RNA, 24 nt, Artificial Sequence
  Synthetic
uacacaucauuaaauuccuaaaca

SEQ ID NO: 457745 - RNA, 18 nt, Artificial Sequence
  Synthetic
auaagugggagcuaaaca

SEQ ID NO: 457746 - RNA, 19 nt, Artificial Sequence
  Synthetic
uauaagugggagcuaaaca

SEQ ID NO: 457747 - RNA, 20 nt, Artificial Sequence
  Synthetic
uuauaagugggagcuaaaca

SEQ ID NO: 457748 - RNA, 21 nt, Artificial Sequence
  Synthetic
cuuauaagugggagcuaaaca

SEQ ID NO: 457749 - RNA, 22 nt, Artificial Sequence
  Synthetic
acuuauaagugggagcuaaaca

SEQ ID NO: 457750 - RNA, 23 nt, Artificial Sequence
  Synthetic
cacuuauaagugggagcuaaaca

SEQ ID NO: 457751 - RNA, 24 nt, Artificial Sequence
  Synthetic
ucacuuauaagugggagcuaaaca

SEQ ID NO: 457752 - RNA, 18 nt, Artificial Sequence
  Synthetic
ugaaggaagcgcuaaaca

SEQ ID NO: 457753 - RNA, 19 nt, Artificial Sequence
  Synthetic
cugaaggaagcgcuaaaca

SEQ ID NO: 457754 - RNA, 20 nt, Artificial Sequence
  Synthetic
ccugaaggaagcgcuaaaca

SEQ ID NO: 457755 - RNA, 21 nt, Artificial Sequence
  Synthetic
uccugaaggaagcgcuaaaca

SEQ ID NO: 457756 - RNA, 22 nt, Artificial Sequence
  Synthetic
cuccugaaggaagcgcuaaaca

SEQ ID NO: 457757 - RNA, 23 nt, Artificial Sequence
  Synthetic
gcuccugaaggaagcgcuaaaca

SEQ ID NO: 457758 - RNA, 24 nt, Artificial Sequence
  Synthetic
agcuccugaaggaagcgcuaaaca

SEQ ID NO: 457759 - RNA, 18 nt, Artificial Sequence
  Synthetic
guaugaaugugcuaaaca

SEQ ID NO: 457760 - RNA, 19 nt, Artificial Sequence
  Synthetic
uguaugaaugugcuaaaca

SEQ ID NO: 457761 - RNA, 20 nt, Artificial Sequence
  Synthetic
auguaugaaugugcuaaaca

SEQ ID NO: 457762 - RNA, 21 nt, Artificial Sequence
  Synthetic
uauguaugaaugugcuaaaca

SEQ ID NO: 457763 - RNA, 22 nt, Artificial Sequence
  Synthetic
uuauguaugaaugugcuaaaca

SEQ ID NO: 457764 - RNA, 23 nt, Artificial Sequence
  Synthetic
cuuauguaugaaugugcuaaaca

SEQ ID NO: 457765 - RNA, 24 nt, Artificial Sequence
  Synthetic
acuuauguaugaaugugcuaaaca

SEQ ID NO: 457766 - RNA, 18 nt, Artificial Sequence
  Synthetic
aaucaaaaacaguaaaca

SEQ ID NO: 457767 - RNA, 19 nt, Artificial Sequence
  Synthetic
uaaucaaaaacaguaaaca

SEQ ID NO: 457768 - RNA, 20 nt, Artificial Sequence
  Synthetic
uuaaucaaaaacaguaaaca

SEQ ID NO: 457769 - RNA, 21 nt, Artificial Sequence
  Synthetic
auuaaucaaaaacaguaaaca

SEQ ID NO: 457770 - RNA, 22 nt, Artificial Sequence
  Synthetic
aauuaaucaaaaacaguaaaca

SEQ ID NO: 457771 - RNA, 23 nt, Artificial Sequence
  Synthetic
aaauuaaucaaaaacaguaaaca

SEQ ID NO: 457772 - RNA, 24 nt, Artificial Sequence
  Synthetic
caaauuaaucaaaaacaguaaaca

SEQ ID NO: 457773 - RNA, 18 nt, Artificial Sequence
  Synthetic
ugguggucgcaguaaaca

SEQ ID NO: 457774 - RNA, 19 nt, Artificial Sequence
  Synthetic
uugguggucgcaguaaaca

SEQ ID NO: 457775 - RNA, 20 nt, Artificial Sequence
  Synthetic
uuugguggucgcaguaaaca

SEQ ID NO: 457776 - RNA, 21 nt, Artificial Sequence
  Synthetic
uuuugguggucgcaguaaaca

SEQ ID NO: 457777 - RNA, 22 nt, Artificial Sequence
  Synthetic
auuuugguggucgcaguaaaca

SEQ ID NO: 457778 - RNA, 23 nt, Artificial Sequence
  Synthetic
aauuuugguggucgcaguaaaca

SEQ ID NO: 457779 - RNA, 24 nt, Artificial Sequence
  Synthetic
caauuuugguggucgcaguaaaca

SEQ ID NO: 457780 - RNA, 18 nt, Artificial Sequence
  Synthetic
aaagugcugcaguaaaca

SEQ ID NO: 457781 - RNA, 19 nt, Artificial Sequence
  Synthetic
aaaagugcugcaguaaaca

SEQ ID NO: 457782 - RNA, 20 nt, Artificial Sequence
  Synthetic
gaaaagugcugcaguaaaca

SEQ ID NO: 457783 - RNA, 21 nt, Artificial Sequence
  Synthetic
ugaaaagugcugcaguaaaca

SEQ ID NO: 457784 - RNA, 22 nt, Artificial Sequence
  Synthetic
augaaaagugcugcaguaaaca

SEQ ID NO: 457785 - RNA, 23 nt, Artificial Sequence
  Synthetic
uaugaaaagugcugcaguaaaca

SEQ ID NO: 457786 - RNA, 24 nt, Artificial Sequence
  Synthetic
guaugaaaagugcugcaguaaaca

SEQ ID NO: 457787 - RNA, 18 nt, Artificial Sequence
  Synthetic
agcucucuucaguaaaca

SEQ ID NO: 457788 - RNA, 19 nt, Artificial Sequence
  Synthetic
aagcucucuucaguaaaca

SEQ ID NO: 457789 - RNA, 20 nt, Artificial Sequence
  Synthetic
aaagcucucuucaguaaaca

SEQ ID NO: 457790 - RNA, 21 nt, Artificial Sequence
  Synthetic
gaaagcucucuucaguaaaca

SEQ ID NO: 457791 - RNA, 22 nt, Artificial Sequence
  Synthetic
ugaaagcucucuucaguaaaca

SEQ ID NO: 457792 - RNA, 23 nt, Artificial Sequence
  Synthetic
augaaagcucucuucaguaaaca

SEQ ID NO: 457793 - RNA, 24 nt, Artificial Sequence
  Synthetic
caugaaagcucucuucaguaaaca

SEQ ID NO: 457794 - RNA, 18 nt, Artificial Sequence
  Synthetic
gaagcggggauguaaaca

SEQ ID NO: 457795 - RNA, 19 nt, Artificial Sequence
  Synthetic
agaagcggggauguaaaca

SEQ ID NO: 457796 - RNA, 20 nt, Artificial Sequence
  Synthetic
cagaagcggggauguaaaca

SEQ ID NO: 457797 - RNA, 21 nt, Artificial Sequence
  Synthetic
acagaagcggggauguaaaca

SEQ ID NO: 457798 - RNA, 22 nt, Artificial Sequence
  Synthetic
cacagaagcggggauguaaaca

SEQ ID NO: 457799 - RNA, 23 nt, Artificial Sequence
  Synthetic
gcacagaagcggggauguaaaca

SEQ ID NO: 457800 - RNA, 24 nt, Artificial Sequence
  Synthetic
ggcacagaagcggggauguaaaca

SEQ ID NO: 457801 - RNA, 18 nt, Artificial Sequence
  Synthetic
ucuuauuuuuauuaaaca

SEQ ID NO: 457802 - RNA, 19 nt, Artificial Sequence
  Synthetic
uucuuauuuuuauuaaaca

SEQ ID NO: 457803 - RNA, 20 nt, Artificial Sequence
  Synthetic
auucuuauuuuuauuaaaca

SEQ ID NO: 457804 - RNA, 21 nt, Artificial Sequence
  Synthetic
cauucuuauuuuuauuaaaca

SEQ ID NO: 457805 - RNA, 22 nt, Artificial Sequence
  Synthetic
gcauucuuauuuuuauuaaaca

SEQ ID NO: 457806 - RNA, 23 nt, Artificial Sequence
  Synthetic
agcauucuuauuuuuauuaaaca

SEQ ID NO: 457807 - RNA, 24 nt, Artificial Sequence
  Synthetic
aagcauucuuauuuuuauuaaaca

SEQ ID NO: 457808 - RNA, 18 nt, Artificial Sequence
  Synthetic
gaaauaggaaguuaaaca

SEQ ID NO: 457809 - RNA, 19 nt, Artificial Sequence
  Synthetic
ugaaauaggaaguuaaaca

SEQ ID NO: 457810 - RNA, 20 nt, Artificial Sequence
  Synthetic
augaaauaggaaguuaaaca

SEQ ID NO: 457811 - RNA, 21 nt, Artificial Sequence
  Synthetic
uaugaaauaggaaguuaaaca

SEQ ID NO: 457812 - RNA, 22 nt, Artificial Sequence
  Synthetic
cuaugaaauaggaaguuaaaca

SEQ ID NO: 457813 - RNA, 23 nt, Artificial Sequence
  Synthetic
ccuaugaaauaggaaguuaaaca

SEQ ID NO: 457814 - RNA, 24 nt, Artificial Sequence
  Synthetic
cccuaugaaauaggaaguuaaaca

SEQ ID NO: 457815 - RNA, 18 nt, Artificial Sequence
  Synthetic
uuaucuuuaaguuaaaca

SEQ ID NO: 457816 - RNA, 19 nt, Artificial Sequence
  Synthetic
auuaucuuuaaguuaaaca

SEQ ID NO: 457817 - RNA, 20 nt, Artificial Sequence
  Synthetic
gauuaucuuuaaguuaaaca

SEQ ID NO: 457818 - RNA, 21 nt, Artificial Sequence
  Synthetic
ggauuaucuuuaaguuaaaca

SEQ ID NO: 457819 - RNA, 22 nt, Artificial Sequence
  Synthetic
aggauuaucuuuaaguuaaaca

SEQ ID NO: 457820 - RNA, 23 nt, Artificial Sequence
  Synthetic
aaggauuaucuuuaaguuaaaca

SEQ ID NO: 457821 - RNA, 24 nt, Artificial Sequence
  Synthetic
aaaggauuaucuuuaaguuaaaca

SEQ ID NO: 457822 - RNA, 18 nt, Artificial Sequence
  Synthetic
cucuggcacguuuaaaca

SEQ ID NO: 457823 - RNA, 19 nt, Artificial Sequence
  Synthetic
acucuggcacguuuaaaca

SEQ ID NO: 457824 - RNA, 20 nt, Artificial Sequence
  Synthetic
gacucuggcacguuuaaaca

SEQ ID NO: 457825 - RNA, 21 nt, Artificial Sequence
  Synthetic
ugacucuggcacguuuaaaca

SEQ ID NO: 457826 - RNA, 22 nt, Artificial Sequence
  Synthetic
augacucuggcacguuuaaaca

SEQ ID NO: 457827 - RNA, 23 nt, Artificial Sequence
  Synthetic
aaugacucuggcacguuuaaaca

SEQ ID NO: 457828 - RNA, 24 nt, Artificial Sequence
  Synthetic
caaugacucuggcacguuuaaaca

SEQ ID NO: 457829 - RNA, 18 nt, Artificial Sequence
  Synthetic
accaaaauuguuuaaaca

SEQ ID NO: 457830 - RNA, 19 nt, Artificial Sequence
  Synthetic
uaccaaaauuguuuaaaca

SEQ ID NO: 457831 - RNA, 20 nt, Artificial Sequence
  Synthetic
uuaccaaaauuguuuaaaca

SEQ ID NO: 457832 - RNA, 21 nt, Artificial Sequence
  Synthetic
uuuaccaaaauuguuuaaaca

SEQ ID NO: 457833 - RNA, 22 nt, Artificial Sequence
  Synthetic
guuuaccaaaauuguuuaaaca

SEQ ID NO: 457834 - RNA, 23 nt, Artificial Sequence
  Synthetic
uguuuaccaaaauuguuuaaaca

SEQ ID NO: 457835 - RNA, 24 nt, Artificial Sequence
  Synthetic
cuguuuaccaaaauuguuuaaaca

SEQ ID NO: 457836 - RNA, 18 nt, Artificial Sequence
  Synthetic
ccaacgaaaaaaacaaca

SEQ ID NO: 457837 - RNA, 19 nt, Artificial Sequence
  Synthetic
cccaacgaaaaaaacaaca

SEQ ID NO: 457838 - RNA, 20 nt, Artificial Sequence
  Synthetic
ucccaacgaaaaaaacaaca

SEQ ID NO: 457839 - RNA, 21 nt, Artificial Sequence
  Synthetic
gucccaacgaaaaaaacaaca

SEQ ID NO: 457840 - RNA, 22 nt, Artificial Sequence
  Synthetic
ugucccaacgaaaaaaacaaca

SEQ ID NO: 457841 - RNA, 23 nt, Artificial Sequence
  Synthetic
augucccaacgaaaaaaacaaca

SEQ ID NO: 457842 - RNA, 24 nt, Artificial Sequence
  Synthetic
caugucccaacgaaaaaaacaaca

SEQ ID NO: 457843 - RNA, 18 nt, Artificial Sequence
  Synthetic
uuagggcugcaaacaaca

SEQ ID NO: 457844 - RNA, 19 nt, Artificial Sequence
  Synthetic
uuuagggcugcaaacaaca

SEQ ID NO: 457845 - RNA, 20 nt, Artificial Sequence
  Synthetic
uuuuagggcugcaaacaaca

SEQ ID NO: 457846 - RNA, 21 nt, Artificial Sequence
  Synthetic
auuuuagggcugcaaacaaca

SEQ ID NO: 457847 - RNA, 22 nt, Artificial Sequence
  Synthetic
aauuuuagggcugcaaacaaca

SEQ ID NO: 457848 - RNA, 23 nt, Artificial Sequence
  Synthetic
gaauuuuagggcugcaaacaaca

SEQ ID NO: 457849 - RNA, 24 nt, Artificial Sequence
  Synthetic
ggaauuuuagggcugcaaacaaca

SEQ ID NO: 457850 - RNA, 18 nt, Artificial Sequence
  Synthetic
auuuuuacaacaacaaca

SEQ ID NO: 457851 - RNA, 19 nt, Artificial Sequence
  Synthetic
cauuuuuacaacaacaaca

SEQ ID NO: 457852 - RNA, 20 nt, Artificial Sequence
  Synthetic
gcauuuuuacaacaacaaca

SEQ ID NO: 457853 - RNA, 21 nt, Artificial Sequence
  Synthetic
agcauuuuuacaacaacaaca

SEQ ID NO: 457854 - RNA, 22 nt, Artificial Sequence
  Synthetic
uagcauuuuuacaacaacaaca

SEQ ID NO: 457855 - RNA, 23 nt, Artificial Sequence
  Synthetic
auagcauuuuuacaacaacaaca

SEQ ID NO: 457856 - RNA, 24 nt, Artificial Sequence
  Synthetic
cauagcauuuuuacaacaacaaca

SEQ ID NO: 457857 - RNA, 18 nt, Artificial Sequence
  Synthetic
gaccaauuuucaacaaca

SEQ ID NO: 457858 - RNA, 19 nt, Artificial Sequence
  Synthetic
ggaccaauuuucaacaaca

SEQ ID NO: 457859 - RNA, 20 nt, Artificial Sequence
  Synthetic
uggaccaauuuucaacaaca

SEQ ID NO: 457860 - RNA, 21 nt, Artificial Sequence
  Synthetic
guggaccaauuuucaacaaca

SEQ ID NO: 457861 - RNA, 22 nt, Artificial Sequence
  Synthetic
uguggaccaauuuucaacaaca

SEQ ID NO: 457862 - RNA, 23 nt, Artificial Sequence
  Synthetic
auguggaccaauuuucaacaaca

SEQ ID NO: 457863 - RNA, 24 nt, Artificial Sequence
  Synthetic
uauguggaccaauuuucaacaaca

SEQ ID NO: 457864 - RNA, 18 nt, Artificial Sequence
  Synthetic
agaaaugaaaacacaaca

SEQ ID NO: 457865 - RNA, 19 nt, Artificial Sequence
  Synthetic
cagaaaugaaaacacaaca

SEQ ID NO: 457866 - RNA, 20 nt, Artificial Sequence
  Synthetic
acagaaaugaaaacacaaca

SEQ ID NO: 457867 - RNA, 21 nt, Artificial Sequence
  Synthetic
aacagaaaugaaaacacaaca

SEQ ID NO: 457868 - RNA, 22 nt, Artificial Sequence
  Synthetic
aaacagaaaugaaaacacaaca

SEQ ID NO: 457869 - RNA, 23 nt, Artificial Sequence
  Synthetic
caaacagaaaugaaaacacaaca

SEQ ID NO: 457870 - RNA, 24 nt, Artificial Sequence
  Synthetic
acaaacagaaaugaaaacacaaca

SEQ ID NO: 457871 - RNA, 18 nt, Artificial Sequence
  Synthetic
aagguuuugaacacaaca

SEQ ID NO: 457872 - RNA, 19 nt, Artificial Sequence
  Synthetic
aaagguuuugaacacaaca

SEQ ID NO: 457873 - RNA, 20 nt, Artificial Sequence
  Synthetic
gaaagguuuugaacacaaca

SEQ ID NO: 457874 - RNA, 21 nt, Artificial Sequence
  Synthetic
agaaagguuuugaacacaaca

SEQ ID NO: 457875 - RNA, 22 nt, Artificial Sequence
  Synthetic
uagaaagguuuugaacacaaca

SEQ ID NO: 457876 - RNA, 23 nt, Artificial Sequence
  Synthetic
uuagaaagguuuugaacacaaca

SEQ ID NO: 457877 - RNA, 24 nt, Artificial Sequence
  Synthetic
cuuagaaagguuuugaacacaaca

SEQ ID NO: 457878 - RNA, 18 nt, Artificial Sequence
  Synthetic
guccuucuugacacaaca

SEQ ID NO: 457879 - RNA, 19 nt, Artificial Sequence
  Synthetic
uguccuucuugacacaaca

SEQ ID NO: 457880 - RNA, 20 nt, Artificial Sequence
  Synthetic
auguccuucuugacacaaca

SEQ ID NO: 457881 - RNA, 21 nt, Artificial Sequence
  Synthetic
aauguccuucuugacacaaca

SEQ ID NO: 457882 - RNA, 22 nt, Artificial Sequence
  Synthetic
aaauguccuucuugacacaaca

SEQ ID NO: 457883 - RNA, 23 nt, Artificial Sequence
  Synthetic
aaaauguccuucuugacacaaca

SEQ ID NO: 457884 - RNA, 24 nt, Artificial Sequence
  Synthetic
caaaauguccuucuugacacaaca

SEQ ID NO: 457885 - RNA, 18 nt, Artificial Sequence
  Synthetic
aauguaaauuccacaaca

SEQ ID NO: 457886 - RNA, 19 nt, Artificial Sequence
  Synthetic
aaauguaaauuccacaaca

SEQ ID NO: 457887 - RNA, 20 nt, Artificial Sequence
  Synthetic
aaaauguaaauuccacaaca

SEQ ID NO: 457888 - RNA, 21 nt, Artificial Sequence
  Synthetic
uaaaauguaaauuccacaaca

SEQ ID NO: 457889 - RNA, 22 nt, Artificial Sequence
  Synthetic
cuaaaauguaaauuccacaaca

SEQ ID NO: 457890 - RNA, 23 nt, Artificial Sequence
  Synthetic
gcuaaaauguaaauuccacaaca

SEQ ID NO: 457891 - RNA, 24 nt, Artificial Sequence
  Synthetic
ugcuaaaauguaaauuccacaaca

SEQ ID NO: 457892 - RNA, 18 nt, Artificial Sequence
  Synthetic
cuauuugauagcacaaca

SEQ ID NO: 457893 - RNA, 19 nt, Artificial Sequence
  Synthetic
acuauuugauagcacaaca

SEQ ID NO: 457894 - RNA, 20 nt, Artificial Sequence
  Synthetic
uacuauuugauagcacaaca

SEQ ID NO: 457895 - RNA, 21 nt, Artificial Sequence
  Synthetic
cuacuauuugauagcacaaca

SEQ ID NO: 457896 - RNA, 22 nt, Artificial Sequence
  Synthetic
ccuacuauuugauagcacaaca

SEQ ID NO: 457897 - RNA, 23 nt, Artificial Sequence
  Synthetic
accuacuauuugauagcacaaca

SEQ ID NO: 457898 - RNA, 24 nt, Artificial Sequence
  Synthetic
gaccuacuauuugauagcacaaca

SEQ ID NO: 457899 - RNA, 18 nt, Artificial Sequence
  Synthetic
ucuuaaaauaagacaaca

SEQ ID NO: 457900 - RNA, 19 nt, Artificial Sequence
  Synthetic
uucuuaaaauaagacaaca

SEQ ID NO: 457901 - RNA, 20 nt, Artificial Sequence
  Synthetic
uuucuuaaaauaagacaaca

SEQ ID NO: 457902 - RNA, 21 nt, Artificial Sequence
  Synthetic
auuucuuaaaauaagacaaca

SEQ ID NO: 457903 - RNA, 22 nt, Artificial Sequence
  Synthetic
aauuucuuaaaauaagacaaca

SEQ ID NO: 457904 - RNA, 23 nt, Artificial Sequence
  Synthetic
caauuucuuaaaauaagacaaca

SEQ ID NO: 457905 - RNA, 24 nt, Artificial Sequence
  Synthetic
gcaauuucuuaaaauaagacaaca

SEQ ID NO: 457906 - RNA, 18 nt, Artificial Sequence
  Synthetic
ggucaaauguagacaaca

SEQ ID NO: 457907 - RNA, 19 nt, Artificial Sequence
  Synthetic
uggucaaauguagacaaca

SEQ ID NO: 457908 - RNA, 20 nt, Artificial Sequence
  Synthetic
cuggucaaauguagacaaca

SEQ ID NO: 457909 - RNA, 21 nt, Artificial Sequence
  Synthetic
ucuggucaaauguagacaaca

SEQ ID NO: 457910 - RNA, 22 nt, Artificial Sequence
  Synthetic
aucuggucaaauguagacaaca

SEQ ID NO: 457911 - RNA, 23 nt, Artificial Sequence
  Synthetic
gaucuggucaaauguagacaaca

SEQ ID NO: 457912 - RNA, 24 nt, Artificial Sequence
  Synthetic
agaucuggucaaauguagacaaca

SEQ ID NO: 457913 - RNA, 18 nt, Artificial Sequence
  Synthetic
guacaaucuaugacaaca

SEQ ID NO: 457914 - RNA, 19 nt, Artificial Sequence
  Synthetic
uguacaaucuaugacaaca

SEQ ID NO: 457915 - RNA, 20 nt, Artificial Sequence
  Synthetic
cuguacaaucuaugacaaca

SEQ ID NO: 457916 - RNA, 21 nt, Artificial Sequence
  Synthetic
ccuguacaaucuaugacaaca

SEQ ID NO: 457917 - RNA, 22 nt, Artificial Sequence
  Synthetic
accuguacaaucuaugacaaca

SEQ ID NO: 457918 - RNA, 23 nt, Artificial Sequence
  Synthetic
aaccuguacaaucuaugacaaca

SEQ ID NO: 457919 - RNA, 24 nt, Artificial Sequence
  Synthetic
aaaccuguacaaucuaugacaaca

SEQ ID NO: 457920 - RNA, 18 nt, Artificial Sequence
  Synthetic
augguauaccugacaaca

SEQ ID NO: 457921 - RNA, 19 nt, Artificial Sequence
  Synthetic
aaugguauaccugacaaca

SEQ ID NO: 457922 - RNA, 20 nt, Artificial Sequence
  Synthetic
aaaugguauaccugacaaca

SEQ ID NO: 457923 - RNA, 21 nt, Artificial Sequence
  Synthetic
gaaaugguauaccugacaaca

SEQ ID NO: 457924 - RNA, 22 nt, Artificial Sequence
  Synthetic
ggaaaugguauaccugacaaca

SEQ ID NO: 457925 - RNA, 23 nt, Artificial Sequence
  Synthetic
gggaaaugguauaccugacaaca

SEQ ID NO: 457926 - RNA, 24 nt, Artificial Sequence
  Synthetic
ugggaaaugguauaccugacaaca

SEQ ID NO: 457927 - RNA, 18 nt, Artificial Sequence
  Synthetic
gcaaauauauauacaaca

SEQ ID NO: 457928 - RNA, 19 nt, Artificial Sequence
  Synthetic
agcaaauauauauacaaca

SEQ ID NO: 457929 - RNA, 20 nt, Artificial Sequence
  Synthetic
aagcaaauauauauacaaca

SEQ ID NO: 457930 - RNA, 21 nt, Artificial Sequence
  Synthetic
aaagcaaauauauauacaaca

SEQ ID NO: 457931 - RNA, 22 nt, Artificial Sequence
  Synthetic
uaaagcaaauauauauacaaca

SEQ ID NO: 457932 - RNA, 23 nt, Artificial Sequence
  Synthetic
auaaagcaaauauauauacaaca

SEQ ID NO: 457933 - RNA, 24 nt, Artificial Sequence
  Synthetic
uauaaagcaaauauauauacaaca

SEQ ID NO: 457934 - RNA, 18 nt, Artificial Sequence
  Synthetic
uagacuucuuauacaaca

SEQ ID NO: 457935 - RNA, 19 nt, Artificial Sequence
  Synthetic
guagacuucuuauacaaca

SEQ ID NO: 457936 - RNA, 20 nt, Artificial Sequence
  Synthetic
gguagacuucuuauacaaca

SEQ ID NO: 457937 - RNA, 21 nt, Artificial Sequence
  Synthetic
ugguagacuucuuauacaaca

SEQ ID NO: 457938 - RNA, 22 nt, Artificial Sequence
  Synthetic
augguagacuucuuauacaaca

SEQ ID NO: 457939 - RNA, 23 nt, Artificial Sequence
  Synthetic
gaugguagacuucuuauacaaca

SEQ ID NO: 457940 - RNA, 24 nt, Artificial Sequence
  Synthetic
agaugguagacuucuuauacaaca

SEQ ID NO: 457941 - RNA, 18 nt, Artificial Sequence
  Synthetic
aaacauguuaguacaaca

SEQ ID NO: 457942 - RNA, 19 nt, Artificial Sequence
  Synthetic
caaacauguuaguacaaca

SEQ ID NO: 457943 - RNA, 20 nt, Artificial Sequence
  Synthetic
ccaaacauguuaguacaaca

SEQ ID NO: 457944 - RNA, 21 nt, Artificial Sequence
  Synthetic
uccaaacauguuaguacaaca

SEQ ID NO: 457945 - RNA, 22 nt, Artificial Sequence
  Synthetic
auccaaacauguuaguacaaca

SEQ ID NO: 457946 - RNA, 23 nt, Artificial Sequence
  Synthetic
uauccaaacauguuaguacaaca

SEQ ID NO: 457947 - RNA, 24 nt, Artificial Sequence
  Synthetic
auauccaaacauguuaguacaaca

SEQ ID NO: 457948 - RNA, 18 nt, Artificial Sequence
  Synthetic
aauggcaaauguacaaca

SEQ ID NO: 457949 - RNA, 19 nt, Artificial Sequence
  Synthetic
caauggcaaauguacaaca

SEQ ID NO: 457950 - RNA, 20 nt, Artificial Sequence
  Synthetic
ucaauggcaaauguacaaca

SEQ ID NO: 457951 - RNA, 21 nt, Artificial Sequence
  Synthetic
gucaauggcaaauguacaaca

SEQ ID NO: 457952 - RNA, 22 nt, Artificial Sequence
  Synthetic
cgucaauggcaaauguacaaca

SEQ ID NO: 457953 - RNA, 23 nt, Artificial Sequence
  Synthetic
acgucaauggcaaauguacaaca

SEQ ID NO: 457954 - RNA, 24 nt, Artificial Sequence
  Synthetic
cacgucaauggcaaauguacaaca

SEQ ID NO: 457955 - RNA, 18 nt, Artificial Sequence
  Synthetic
aagaaaguguuuacaaca

SEQ ID NO: 457956 - RNA, 19 nt, Artificial Sequence
  Synthetic
uaagaaaguguuuacaaca

SEQ ID NO: 457957 - RNA, 20 nt, Artificial Sequence
  Synthetic
uuaagaaaguguuuacaaca

SEQ ID NO: 457958 - RNA, 21 nt, Artificial Sequence
  Synthetic
auuaagaaaguguuuacaaca

SEQ ID NO: 457959 - RNA, 22 nt, Artificial Sequence
  Synthetic
uauuaagaaaguguuuacaaca

SEQ ID NO: 457960 - RNA, 23 nt, Artificial Sequence
  Synthetic
uuauuaagaaaguguuuacaaca

SEQ ID NO: 457961 - RNA, 24 nt, Artificial Sequence
  Synthetic
uuuauuaagaaaguguuuacaaca

SEQ ID NO: 457962 - RNA, 18 nt, Artificial Sequence
  Synthetic
ugugaaaaggaaccaaca

SEQ ID NO: 457963 - RNA, 19 nt, Artificial Sequence
  Synthetic
uugugaaaaggaaccaaca

SEQ ID NO: 457964 - RNA, 20 nt, Artificial Sequence
  Synthetic
guugugaaaaggaaccaaca

SEQ ID NO: 457965 - RNA, 21 nt, Artificial Sequence
  Synthetic
uguugugaaaaggaaccaaca

SEQ ID NO: 457966 - RNA, 22 nt, Artificial Sequence
  Synthetic
guguugugaaaaggaaccaaca

SEQ ID NO: 457967 - RNA, 23 nt, Artificial Sequence
  Synthetic
uguguugugaaaaggaaccaaca

SEQ ID NO: 457968 - RNA, 24 nt, Artificial Sequence
  Synthetic
cuguguugugaaaaggaaccaaca

SEQ ID NO: 457969 - RNA, 18 nt, Artificial Sequence
  Synthetic
agaccagccugaccaaca

SEQ ID NO: 457970 - RNA, 19 nt, Artificial Sequence
  Synthetic
gagaccagccugaccaaca

SEQ ID NO: 457971 - RNA, 20 nt, Artificial Sequence
  Synthetic
cgagaccagccugaccaaca

SEQ ID NO: 457972 - RNA, 21 nt, Artificial Sequence
  Synthetic
ucgagaccagccugaccaaca

SEQ ID NO: 457973 - RNA, 22 nt, Artificial Sequence
  Synthetic
cucgagaccagccugaccaaca

SEQ ID NO: 457974 - RNA, 23 nt, Artificial Sequence
  Synthetic
gcucgagaccagccugaccaaca

SEQ ID NO: 457975 - RNA, 24 nt, Artificial Sequence
  Synthetic
agcucgagaccagccugaccaaca

SEQ ID NO: 457976 - RNA, 18 nt, Artificial Sequence
  Synthetic
aauuguaauauaccaaca

SEQ ID NO: 457977 - RNA, 19 nt, Artificial Sequence
  Synthetic
aaauuguaauauaccaaca

SEQ ID NO: 457978 - RNA, 20 nt, Artificial Sequence
  Synthetic
uaaauuguaauauaccaaca

SEQ ID NO: 457979 - RNA, 21 nt, Artificial Sequence
  Synthetic
cuaaauuguaauauaccaaca

SEQ ID NO: 457980 - RNA, 22 nt, Artificial Sequence
  Synthetic
acuaaauuguaauauaccaaca

SEQ ID NO: 457981 - RNA, 23 nt, Artificial Sequence
  Synthetic
aacuaaauuguaauauaccaaca

SEQ ID NO: 457982 - RNA, 24 nt, Artificial Sequence
  Synthetic
gaacuaaauuguaauauaccaaca

SEQ ID NO: 457983 - RNA, 18 nt, Artificial Sequence
  Synthetic
uuuguccaacacccaaca

SEQ ID NO: 457984 - RNA, 19 nt, Artificial Sequence
  Synthetic
auuuguccaacacccaaca

SEQ ID NO: 457985 - RNA, 20 nt, Artificial Sequence
  Synthetic
gauuuguccaacacccaaca

SEQ ID NO: 457986 - RNA, 21 nt, Artificial Sequence
  Synthetic
ggauuuguccaacacccaaca

SEQ ID NO: 457987 - RNA, 22 nt, Artificial Sequence
  Synthetic
uggauuuguccaacacccaaca

SEQ ID NO: 457988 - RNA, 23 nt, Artificial Sequence
  Synthetic
cuggauuuguccaacacccaaca

SEQ ID NO: 457989 - RNA, 24 nt, Artificial Sequence
  Synthetic
ccuggauuuguccaacacccaaca

SEQ ID NO: 457990 - RNA, 18 nt, Artificial Sequence
  Synthetic
uuggcaugguacccaaca

SEQ ID NO: 457991 - RNA, 19 nt, Artificial Sequence
  Synthetic
uuuggcaugguacccaaca

SEQ ID NO: 457992 - RNA, 20 nt, Artificial Sequence
  Synthetic
guuuggcaugguacccaaca

SEQ ID NO: 457993 - RNA, 21 nt, Artificial Sequence
  Synthetic
cguuuggcaugguacccaaca

SEQ ID NO: 457994 - RNA, 22 nt, Artificial Sequence
  Synthetic
acguuuggcaugguacccaaca

SEQ ID NO: 457995 - RNA, 23 nt, Artificial Sequence
  Synthetic
uacguuuggcaugguacccaaca

SEQ ID NO: 457996 - RNA, 24 nt, Artificial Sequence
  Synthetic
guacguuuggcaugguacccaaca

SEQ ID NO: 457997 - RNA, 18 nt, Artificial Sequence
  Synthetic
ccccccccccccccaaca

SEQ ID NO: 457998 - RNA, 19 nt, Artificial Sequence
  Synthetic
accccccccccccccaaca

SEQ ID NO: 457999 - RNA, 20 nt, Artificial Sequence
  Synthetic
caccccccccccccccaaca

SEQ ID NO: 458000 - RNA, 21 nt, Artificial Sequence
  Synthetic
acaccccccccccccccaaca

SEQ ID NO: 458001 - RNA, 22 nt, Artificial Sequence
  Synthetic
aacaccccccccccccccaaca

SEQ ID NO: 458002 - RNA, 23 nt, Artificial Sequence
  Synthetic
aaacaccccccccccccccaaca

SEQ ID NO: 458003 - RNA, 24 nt, Artificial Sequence
  Synthetic
caaacaccccccccccccccaaca

SEQ ID NO: 458004 - RNA, 18 nt, Artificial Sequence
  Synthetic
cauagacugagcccaaca

SEQ ID NO: 458005 - RNA, 19 nt, Artificial Sequence
  Synthetic
acauagacugagcccaaca

SEQ ID NO: 458006 - RNA, 20 nt, Artificial Sequence
  Synthetic
cacauagacugagcccaaca

SEQ ID NO: 458007 - RNA, 21 nt, Artificial Sequence
  Synthetic
gcacauagacugagcccaaca

SEQ ID NO: 458008 - RNA, 22 nt, Artificial Sequence
  Synthetic
ggcacauagacugagcccaaca

SEQ ID NO: 458009 - RNA, 23 nt, Artificial Sequence
  Synthetic
uggcacauagacugagcccaaca

SEQ ID NO: 458010 - RNA, 24 nt, Artificial Sequence
  Synthetic
auggcacauagacugagcccaaca

SEQ ID NO: 458011 - RNA, 18 nt, Artificial Sequence
  Synthetic
ugcugcuggggcccaaca

SEQ ID NO: 458012 - RNA, 19 nt, Artificial Sequence
  Synthetic
cugcugcuggggcccaaca

SEQ ID NO: 458013 - RNA, 20 nt, Artificial Sequence
  Synthetic
acugcugcuggggcccaaca

SEQ ID NO: 458014 - RNA, 21 nt, Artificial Sequence
  Synthetic
cacugcugcuggggcccaaca

SEQ ID NO: 458015 - RNA, 22 nt, Artificial Sequence
  Synthetic
ucacugcugcuggggcccaaca

SEQ ID NO: 458016 - RNA, 23 nt, Artificial Sequence
  Synthetic
uucacugcugcuggggcccaaca

SEQ ID NO: 458017 - RNA, 24 nt, Artificial Sequence
  Synthetic
auucacugcugcuggggcccaaca

SEQ ID NO: 458018 - RNA, 18 nt, Artificial Sequence
  Synthetic
agaaagaacaagccaaca

SEQ ID NO: 458019 - RNA, 19 nt, Artificial Sequence
  Synthetic
aagaaagaacaagccaaca

SEQ ID NO: 458020 - RNA, 20 nt, Artificial Sequence
  Synthetic
aaagaaagaacaagccaaca

SEQ ID NO: 458021 - RNA, 21 nt, Artificial Sequence
  Synthetic
aaaagaaagaacaagccaaca

SEQ ID NO: 458022 - RNA, 22 nt, Artificial Sequence
  Synthetic
caaaagaaagaacaagccaaca

SEQ ID NO: 458023 - RNA, 23 nt, Artificial Sequence
  Synthetic
acaaaagaaagaacaagccaaca

SEQ ID NO: 458024 - RNA, 24 nt, Artificial Sequence
  Synthetic
uacaaaagaaagaacaagccaaca

SEQ ID NO: 458025 - RNA, 18 nt, Artificial Sequence
  Synthetic
caguggaaguauccaaca

SEQ ID NO: 458026 - RNA, 19 nt, Artificial Sequence
  Synthetic
acaguggaaguauccaaca

SEQ ID NO: 458027 - RNA, 20 nt, Artificial Sequence
  Synthetic
uacaguggaaguauccaaca

SEQ ID NO: 458028 - RNA, 21 nt, Artificial Sequence
  Synthetic
uuacaguggaaguauccaaca

SEQ ID NO: 458029 - RNA, 22 nt, Artificial Sequence
  Synthetic
auuacaguggaaguauccaaca

SEQ ID NO: 458030 - RNA, 23 nt, Artificial Sequence
  Synthetic
uauuacaguggaaguauccaaca

SEQ ID NO: 458031 - RNA, 24 nt, Artificial Sequence
  Synthetic
auauuacaguggaaguauccaaca

SEQ ID NO: 458032 - RNA, 18 nt, Artificial Sequence
  Synthetic
caggcccugccuccaaca

SEQ ID NO: 458033 - RNA, 19 nt, Artificial Sequence
  Synthetic
ccaggcccugccuccaaca

SEQ ID NO: 458034 - RNA, 20 nt, Artificial Sequence
  Synthetic
accaggcccugccuccaaca

SEQ ID NO: 458035 - RNA, 21 nt, Artificial Sequence
  Synthetic
uaccaggcccugccuccaaca

SEQ ID NO: 458036 - RNA, 22 nt, Artificial Sequence
  Synthetic
cuaccaggcccugccuccaaca

SEQ ID NO: 458037 - RNA, 23 nt, Artificial Sequence
  Synthetic
ccuaccaggcccugccuccaaca

SEQ ID NO: 458038 - RNA, 24 nt, Artificial Sequence
  Synthetic
accuaccaggcccugccuccaaca

SEQ ID NO: 458039 - RNA, 18 nt, Artificial Sequence
  Synthetic
guccaaaaccuuccaaca

SEQ ID NO: 458040 - RNA, 19 nt, Artificial Sequence
  Synthetic
aguccaaaaccuuccaaca

SEQ ID NO: 458041 - RNA, 20 nt, Artificial Sequence
  Synthetic
uaguccaaaaccuuccaaca

SEQ ID NO: 458042 - RNA, 21 nt, Artificial Sequence
  Synthetic
guaguccaaaaccuuccaaca

SEQ ID NO: 458043 - RNA, 22 nt, Artificial Sequence
  Synthetic
aguaguccaaaaccuuccaaca

SEQ ID NO: 458044 - RNA, 23 nt, Artificial Sequence
  Synthetic
caguaguccaaaaccuuccaaca

SEQ ID NO: 458045 - RNA, 24 nt, Artificial Sequence
  Synthetic
ucaguaguccaaaaccuuccaaca

SEQ ID NO: 458046 - RNA, 18 nt, Artificial Sequence
  Synthetic
ucugugauccuuccaaca

SEQ ID NO: 458047 - RNA, 19 nt, Artificial Sequence
  Synthetic
cucugugauccuuccaaca

SEQ ID NO: 458048 - RNA, 20 nt, Artificial Sequence
  Synthetic
gcucugugauccuuccaaca

SEQ ID NO: 458049 - RNA, 21 nt, Artificial Sequence
  Synthetic
ugcucugugauccuuccaaca

SEQ ID NO: 458050 - RNA, 22 nt, Artificial Sequence
  Synthetic
augcucugugauccuuccaaca

SEQ ID NO: 458051 - RNA, 23 nt, Artificial Sequence
  Synthetic
aaugcucugugauccuuccaaca

SEQ ID NO: 458052 - RNA, 24 nt, Artificial Sequence
  Synthetic
aaaugcucugugauccuuccaaca

SEQ ID NO: 458053 - RNA, 18 nt, Artificial Sequence
  Synthetic
uccuccauguaagcaaca

SEQ ID NO: 458054 - RNA, 19 nt, Artificial Sequence
  Synthetic
cuccuccauguaagcaaca

SEQ ID NO: 458055 - RNA, 20 nt, Artificial Sequence
  Synthetic
ucuccuccauguaagcaaca

SEQ ID NO: 458056 - RNA, 21 nt, Artificial Sequence
  Synthetic
cucuccuccauguaagcaaca

SEQ ID NO: 458057 - RNA, 22 nt, Artificial Sequence
  Synthetic
acucuccuccauguaagcaaca

SEQ ID NO: 458058 - RNA, 23 nt, Artificial Sequence
  Synthetic
aacucuccuccauguaagcaaca

SEQ ID NO: 458059 - RNA, 24 nt, Artificial Sequence
  Synthetic
uaacucuccuccauguaagcaaca

SEQ ID NO: 458060 - RNA, 18 nt, Artificial Sequence
  Synthetic
caaguuucuucagcaaca

SEQ ID NO: 458061 - RNA, 19 nt, Artificial Sequence
  Synthetic
ucaaguuucuucagcaaca

SEQ ID NO: 458062 - RNA, 20 nt, Artificial Sequence
  Synthetic
uucaaguuucuucagcaaca

SEQ ID NO: 458063 - RNA, 21 nt, Artificial Sequence
  Synthetic
auucaaguuucuucagcaaca

SEQ ID NO: 458064 - RNA, 22 nt, Artificial Sequence
  Synthetic
aauucaaguuucuucagcaaca

SEQ ID NO: 458065 - RNA, 23 nt, Artificial Sequence
  Synthetic
caauucaaguuucuucagcaaca

SEQ ID NO: 458066 - RNA, 24 nt, Artificial Sequence
  Synthetic
acaauucaaguuucuucagcaaca

SEQ ID NO: 458067 - RNA, 18 nt, Artificial Sequence
  Synthetic
uuauaagaaagagcaaca

SEQ ID NO: 458068 - RNA, 19 nt, Artificial Sequence
  Synthetic
uuuauaagaaagagcaaca

SEQ ID NO: 458069 - RNA, 20 nt, Artificial Sequence
  Synthetic
uuuuauaagaaagagcaaca

SEQ ID NO: 458070 - RNA, 21 nt, Artificial Sequence
  Synthetic
cuuuuauaagaaagagcaaca

SEQ ID NO: 458071 - RNA, 22 nt, Artificial Sequence
  Synthetic
ucuuuuauaagaaagagcaaca

SEQ ID NO: 458072 - RNA, 23 nt, Artificial Sequence
  Synthetic
cucuuuuauaagaaagagcaaca

SEQ ID NO: 458073 - RNA, 24 nt, Artificial Sequence
  Synthetic
acucuuuuauaagaaagagcaaca

SEQ ID NO: 458074 - RNA, 18 nt, Artificial Sequence
  Synthetic
aacuagaauaaggcaaca

SEQ ID NO: 458075 - RNA, 19 nt, Artificial Sequence
  Synthetic
aaacuagaauaaggcaaca

SEQ ID NO: 458076 - RNA, 20 nt, Artificial Sequence
  Synthetic
aaaacuagaauaaggcaaca

SEQ ID NO: 458077 - RNA, 21 nt, Artificial Sequence
  Synthetic
uaaaacuagaauaaggcaaca

SEQ ID NO: 458078 - RNA, 22 nt, Artificial Sequence
  Synthetic
auaaaacuagaauaaggcaaca

SEQ ID NO: 458079 - RNA, 23 nt, Artificial Sequence
  Synthetic
aauaaaacuagaauaaggcaaca

SEQ ID NO: 458080 - RNA, 24 nt, Artificial Sequence
  Synthetic
aaauaaaacuagaauaaggcaaca

SEQ ID NO: 458081 - RNA, 18 nt, Artificial Sequence
  Synthetic
agguuucccagggcaaca

SEQ ID NO: 458082 - RNA, 19 nt, Artificial Sequence
  Synthetic
gagguuucccagggcaaca

SEQ ID NO: 458083 - RNA, 20 nt, Artificial Sequence
  Synthetic
ugagguuucccagggcaaca

SEQ ID NO: 458084 - RNA, 21 nt, Artificial Sequence
  Synthetic
augagguuucccagggcaaca

SEQ ID NO: 458085 - RNA, 22 nt, Artificial Sequence
  Synthetic
caugagguuucccagggcaaca

SEQ ID NO: 458086 - RNA, 23 nt, Artificial Sequence
  Synthetic
ucaugagguuucccagggcaaca

SEQ ID NO: 458087 - RNA, 24 nt, Artificial Sequence
  Synthetic
aucaugagguuucccagggcaaca

SEQ ID NO: 458088 - RNA, 18 nt, Artificial Sequence
  Synthetic
acuccaccccgggcaaca

SEQ ID NO: 458089 - RNA, 19 nt, Artificial Sequence
  Synthetic
cacuccaccccgggcaaca

SEQ ID NO: 458090 - RNA, 20 nt, Artificial Sequence
  Synthetic
gcacuccaccccgggcaaca

SEQ ID NO: 458091 - RNA, 21 nt, Artificial Sequence
  Synthetic
ugcacuccaccccgggcaaca

SEQ ID NO: 458092 - RNA, 22 nt, Artificial Sequence
  Synthetic
cugcacuccaccccgggcaaca

SEQ ID NO: 458093 - RNA, 23 nt, Artificial Sequence
  Synthetic
acugcacuccaccccgggcaaca

SEQ ID NO: 458094 - RNA, 24 nt, Artificial Sequence
  Synthetic
cacugcacuccaccccgggcaaca

SEQ ID NO: 458095 - RNA, 18 nt, Artificial Sequence
  Synthetic
auguagauaguggcaaca

SEQ ID NO: 458096 - RNA, 19 nt, Artificial Sequence
  Synthetic
uauguagauaguggcaaca

SEQ ID NO: 458097 - RNA, 20 nt, Artificial Sequence
  Synthetic
guauguagauaguggcaaca

SEQ ID NO: 458098 - RNA, 21 nt, Artificial Sequence
  Synthetic
aguauguagauaguggcaaca

SEQ ID NO: 458099 - RNA, 22 nt, Artificial Sequence
  Synthetic
caguauguagauaguggcaaca

SEQ ID NO: 458100 - RNA, 23 nt, Artificial Sequence
  Synthetic
ucaguauguagauaguggcaaca

SEQ ID NO: 458101 - RNA, 24 nt, Artificial Sequence
  Synthetic
uucaguauguagauaguggcaaca

SEQ ID NO: 458102 - RNA, 18 nt, Artificial Sequence
  Synthetic
aagccaucaucugcaaca

SEQ ID NO: 458103 - RNA, 19 nt, Artificial Sequence
  Synthetic
gaagccaucaucugcaaca

SEQ ID NO: 458104 - RNA, 20 nt, Artificial Sequence
  Synthetic
agaagccaucaucugcaaca

SEQ ID NO: 458105 - RNA, 21 nt, Artificial Sequence
  Synthetic
uagaagccaucaucugcaaca

SEQ ID NO: 458106 - RNA, 22 nt, Artificial Sequence
  Synthetic
cuagaagccaucaucugcaaca

SEQ ID NO: 458107 - RNA, 23 nt, Artificial Sequence
  Synthetic
gcuagaagccaucaucugcaaca

SEQ ID NO: 458108 - RNA, 24 nt, Artificial Sequence
  Synthetic
ggcuagaagccaucaucugcaaca

SEQ ID NO: 458109 - RNA, 18 nt, Artificial Sequence
  Synthetic
guauuugauagugcaaca

SEQ ID NO: 458110 - RNA, 19 nt, Artificial Sequence
  Synthetic
aguauuugauagugcaaca

SEQ ID NO: 458111 - RNA, 20 nt, Artificial Sequence
  Synthetic
uaguauuugauagugcaaca

SEQ ID NO: 458112 - RNA, 21 nt, Artificial Sequence
  Synthetic
cuaguauuugauagugcaaca

SEQ ID NO: 458113 - RNA, 22 nt, Artificial Sequence
  Synthetic
ccuaguauuugauagugcaaca

SEQ ID NO: 458114 - RNA, 23 nt, Artificial Sequence
  Synthetic
accuaguauuugauagugcaaca

SEQ ID NO: 458115 - RNA, 24 nt, Artificial Sequence
  Synthetic
gaccuaguauuugauagugcaaca

SEQ ID NO: 458116 - RNA, 18 nt, Artificial Sequence
  Synthetic
acauucaaaugugcaaca

SEQ ID NO: 458117 - RNA, 19 nt, Artificial Sequence
  Synthetic
aacauucaaaugugcaaca

SEQ ID NO: 458118 - RNA, 20 nt, Artificial Sequence
  Synthetic
caacauucaaaugugcaaca

SEQ ID NO: 458119 - RNA, 21 nt, Artificial Sequence
  Synthetic
acaacauucaaaugugcaaca

SEQ ID NO: 458120 - RNA, 22 nt, Artificial Sequence
  Synthetic
aacaacauucaaaugugcaaca

SEQ ID NO: 458121 - RNA, 23 nt, Artificial Sequence
  Synthetic
uaacaacauucaaaugugcaaca

SEQ ID NO: 458122 - RNA, 24 nt, Artificial Sequence
  Synthetic
auaacaacauucaaaugugcaaca

SEQ ID NO: 458123 - RNA, 18 nt, Artificial Sequence
  Synthetic
ugagacuagaaaucaaca

SEQ ID NO: 458124 - RNA, 19 nt, Artificial Sequence
  Synthetic
augagacuagaaaucaaca

SEQ ID NO: 458125 - RNA, 20 nt, Artificial Sequence
  Synthetic
aaugagacuagaaaucaaca

SEQ ID NO: 458126 - RNA, 21 nt, Artificial Sequence
  Synthetic
gaaugagacuagaaaucaaca

SEQ ID NO: 458127 - RNA, 22 nt, Artificial Sequence
  Synthetic
ggaaugagacuagaaaucaaca

SEQ ID NO: 458128 - RNA, 23 nt, Artificial Sequence
  Synthetic
uggaaugagacuagaaaucaaca

SEQ ID NO: 458129 - RNA, 24 nt, Artificial Sequence
  Synthetic
auggaaugagacuagaaaucaaca

SEQ ID NO: 458130 - RNA, 18 nt, Artificial Sequence
  Synthetic
ccugaagcagaaucaaca

SEQ ID NO: 458131 - RNA, 19 nt, Artificial Sequence
  Synthetic
accugaagcagaaucaaca

SEQ ID NO: 458132 - RNA, 20 nt, Artificial Sequence
  Synthetic
caccugaagcagaaucaaca

SEQ ID NO: 458133 - RNA, 21 nt, Artificial Sequence
  Synthetic
ucaccugaagcagaaucaaca

SEQ ID NO: 458134 - RNA, 22 nt, Artificial Sequence
  Synthetic
uucaccugaagcagaaucaaca

SEQ ID NO: 458135 - RNA, 23 nt, Artificial Sequence
  Synthetic
guucaccugaagcagaaucaaca

SEQ ID NO: 458136 - RNA, 24 nt, Artificial Sequence
  Synthetic
gguucaccugaagcagaaucaaca

SEQ ID NO: 458137 - RNA, 18 nt, Artificial Sequence
  Synthetic
aguucuccauaaucaaca

SEQ ID NO: 458138 - RNA, 19 nt, Artificial Sequence
  Synthetic
gaguucuccauaaucaaca

SEQ ID NO: 458139 - RNA, 20 nt, Artificial Sequence
  Synthetic
ugaguucuccauaaucaaca

SEQ ID NO: 458140 - RNA, 21 nt, Artificial Sequence
  Synthetic
cugaguucuccauaaucaaca

SEQ ID NO: 458141 - RNA, 22 nt, Artificial Sequence
  Synthetic
acugaguucuccauaaucaaca

SEQ ID NO: 458142 - RNA, 23 nt, Artificial Sequence
  Synthetic
uacugaguucuccauaaucaaca

SEQ ID NO: 458143 - RNA, 24 nt, Artificial Sequence
  Synthetic
uuacugaguucuccauaaucaaca

SEQ ID NO: 458144 - RNA, 18 nt, Artificial Sequence
  Synthetic
agaccagccugaucaaca

SEQ ID NO: 458145 - RNA, 19 nt, Artificial Sequence
  Synthetic
aagaccagccugaucaaca

SEQ ID NO: 458146 - RNA, 20 nt, Artificial Sequence
  Synthetic
uaagaccagccugaucaaca

SEQ ID NO: 458147 - RNA, 21 nt, Artificial Sequence
  Synthetic
uuaagaccagccugaucaaca

SEQ ID NO: 458148 - RNA, 22 nt, Artificial Sequence
  Synthetic
uuuaagaccagccugaucaaca

SEQ ID NO: 458149 - RNA, 23 nt, Artificial Sequence
  Synthetic
guuuaagaccagccugaucaaca

SEQ ID NO: 458150 - RNA, 24 nt, Artificial Sequence
  Synthetic
aguuuaagaccagccugaucaaca

SEQ ID NO: 458151 - RNA, 18 nt, Artificial Sequence
  Synthetic
uuuuaacaaauaucaaca

SEQ ID NO: 458152 - RNA, 19 nt, Artificial Sequence
  Synthetic
auuuuaacaaauaucaaca

SEQ ID NO: 458153 - RNA, 20 nt, Artificial Sequence
  Synthetic
aauuuuaacaaauaucaaca

SEQ ID NO: 458154 - RNA, 21 nt, Artificial Sequence
  Synthetic
aaauuuuaacaaauaucaaca

SEQ ID NO: 458155 - RNA, 22 nt, Artificial Sequence
  Synthetic
uaaauuuuaacaaauaucaaca

SEQ ID NO: 458156 - RNA, 23 nt, Artificial Sequence
  Synthetic
auaaauuuuaacaaauaucaaca

SEQ ID NO: 458157 - RNA, 24 nt, Artificial Sequence
  Synthetic
uauaaauuuuaacaaauaucaaca

SEQ ID NO: 458158 - RNA, 18 nt, Artificial Sequence
  Synthetic
aaaucaaagcuaucaaca

SEQ ID NO: 458159 - RNA, 19 nt, Artificial Sequence
  Synthetic
gaaaucaaagcuaucaaca

SEQ ID NO: 458160 - RNA, 20 nt, Artificial Sequence
  Synthetic
ugaaaucaaagcuaucaaca

SEQ ID NO: 458161 - RNA, 21 nt, Artificial Sequence
  Synthetic
uugaaaucaaagcuaucaaca

SEQ ID NO: 458162 - RNA, 22 nt, Artificial Sequence
  Synthetic
uuugaaaucaaagcuaucaaca

SEQ ID NO: 458163 - RNA, 23 nt, Artificial Sequence
  Synthetic
guuugaaaucaaagcuaucaaca

SEQ ID NO: 458164 - RNA, 24 nt, Artificial Sequence
  Synthetic
cguuugaaaucaaagcuaucaaca

SEQ ID NO: 458165 - RNA, 18 nt, Artificial Sequence
  Synthetic
uucugaagucuaucaaca

SEQ ID NO: 458166 - RNA, 19 nt, Artificial Sequence
  Synthetic
auucugaagucuaucaaca

SEQ ID NO: 458167 - RNA, 20 nt, Artificial Sequence
  Synthetic
aauucugaagucuaucaaca

SEQ ID NO: 458168 - RNA, 21 nt, Artificial Sequence
  Synthetic
gaauucugaagucuaucaaca

SEQ ID NO: 458169 - RNA, 22 nt, Artificial Sequence
  Synthetic
agaauucugaagucuaucaaca

SEQ ID NO: 458170 - RNA, 23 nt, Artificial Sequence
  Synthetic
uagaauucugaagucuaucaaca

SEQ ID NO: 458171 - RNA, 24 nt, Artificial Sequence
  Synthetic
uuagaauucugaagucuaucaaca

SEQ ID NO: 458172 - RNA, 18 nt, Artificial Sequence
  Synthetic
uuauauaugcacucaaca

SEQ ID NO: 458173 - RNA, 19 nt, Artificial Sequence
  Synthetic
auuauauaugcacucaaca

SEQ ID NO: 458174 - RNA, 20 nt, Artificial Sequence
  Synthetic
aauuauauaugcacucaaca

SEQ ID NO: 458175 - RNA, 21 nt, Artificial Sequence
  Synthetic
caauuauauaugcacucaaca

SEQ ID NO: 458176 - RNA, 22 nt, Artificial Sequence
  Synthetic
acaauuauauaugcacucaaca

SEQ ID NO: 458177 - RNA, 23 nt, Artificial Sequence
  Synthetic
aacaauuauauaugcacucaaca

SEQ ID NO: 458178 - RNA, 24 nt, Artificial Sequence
  Synthetic
uaacaauuauauaugcacucaaca

SEQ ID NO: 458179 - RNA, 18 nt, Artificial Sequence
  Synthetic
gagaaguaggucucaaca

SEQ ID NO: 458180 - RNA, 19 nt, Artificial Sequence
  Synthetic
ugagaaguaggucucaaca

SEQ ID NO: 458181 - RNA, 20 nt, Artificial Sequence
  Synthetic
uugagaaguaggucucaaca

SEQ ID NO: 458182 - RNA, 21 nt, Artificial Sequence
  Synthetic
uuugagaaguaggucucaaca

SEQ ID NO: 458183 - RNA, 22 nt, Artificial Sequence
  Synthetic
uuuugagaaguaggucucaaca

SEQ ID NO: 458184 - RNA, 23 nt, Artificial Sequence
  Synthetic
uuuuugagaaguaggucucaaca

SEQ ID NO: 458185 - RNA, 24 nt, Artificial Sequence
  Synthetic
uuuuuugagaaguaggucucaaca

SEQ ID NO: 458186 - RNA, 18 nt, Artificial Sequence
  Synthetic
auguuaaucuagucaaca

SEQ ID NO: 458187 - RNA, 19 nt, Artificial Sequence
  Synthetic
aauguuaaucuagucaaca

SEQ ID NO: 458188 - RNA, 20 nt, Artificial Sequence
  Synthetic
caauguuaaucuagucaaca

SEQ ID NO: 458189 - RNA, 21 nt, Artificial Sequence
  Synthetic
ucaauguuaaucuagucaaca

SEQ ID NO: 458190 - RNA, 22 nt, Artificial Sequence
  Synthetic
gucaauguuaaucuagucaaca

SEQ ID NO: 458191 - RNA, 23 nt, Artificial Sequence
  Synthetic
ggucaauguuaaucuagucaaca

SEQ ID NO: 458192 - RNA, 24 nt, Artificial Sequence
  Synthetic
uggucaauguuaaucuagucaaca

SEQ ID NO: 458193 - RNA, 18 nt, Artificial Sequence
  Synthetic
auacaaaaaucgucaaca

SEQ ID NO: 458194 - RNA, 19 nt, Artificial Sequence
  Synthetic
cauacaaaaaucgucaaca

SEQ ID NO: 458195 - RNA, 20 nt, Artificial Sequence
  Synthetic
gcauacaaaaaucgucaaca

SEQ ID NO: 458196 - RNA, 21 nt, Artificial Sequence
  Synthetic
agcauacaaaaaucgucaaca

SEQ ID NO: 458197 - RNA, 22 nt, Artificial Sequence
  Synthetic
uagcauacaaaaaucgucaaca

SEQ ID NO: 458198 - RNA, 23 nt, Artificial Sequence
  Synthetic
guagcauacaaaaaucgucaaca

SEQ ID NO: 458199 - RNA, 24 nt, Artificial Sequence
  Synthetic
aguagcauacaaaaaucgucaaca

SEQ ID NO: 458200 - RNA, 18 nt, Artificial Sequence
  Synthetic
gaagcugcuaggucaaca

SEQ ID NO: 458201 - RNA, 19 nt, Artificial Sequence
  Synthetic
ugaagcugcuaggucaaca

SEQ ID NO: 458202 - RNA, 20 nt, Artificial Sequence
  Synthetic
gugaagcugcuaggucaaca

SEQ ID NO: 458203 - RNA, 21 nt, Artificial Sequence
  Synthetic
ggugaagcugcuaggucaaca

SEQ ID NO: 458204 - RNA, 22 nt, Artificial Sequence
  Synthetic
aggugaagcugcuaggucaaca

SEQ ID NO: 458205 - RNA, 23 nt, Artificial Sequence
  Synthetic
caggugaagcugcuaggucaaca

SEQ ID NO: 458206 - RNA, 24 nt, Artificial Sequence
  Synthetic
ucaggugaagcugcuaggucaaca

SEQ ID NO: 458207 - RNA, 18 nt, Artificial Sequence
  Synthetic
guacauguucauucaaca

SEQ ID NO: 458208 - RNA, 19 nt, Artificial Sequence
  Synthetic
aguacauguucauucaaca

SEQ ID NO: 458209 - RNA, 20 nt, Artificial Sequence
  Synthetic
caguacauguucauucaaca

SEQ ID NO: 458210 - RNA, 21 nt, Artificial Sequence
  Synthetic
gcaguacauguucauucaaca

SEQ ID NO: 458211 - RNA, 22 nt, Artificial Sequence
  Synthetic
ggcaguacauguucauucaaca

SEQ ID NO: 458212 - RNA, 23 nt, Artificial Sequence
  Synthetic
aggcaguacauguucauucaaca

SEQ ID NO: 458213 - RNA, 24 nt, Artificial Sequence
  Synthetic
uaggcaguacauguucauucaaca

SEQ ID NO: 458214 - RNA, 18 nt, Artificial Sequence
  Synthetic
ucacaggcaccuucaaca

SEQ ID NO: 458215 - RNA, 19 nt, Artificial Sequence
  Synthetic
uucacaggcaccuucaaca

SEQ ID NO: 458216 - RNA, 20 nt, Artificial Sequence
  Synthetic
cuucacaggcaccuucaaca

SEQ ID NO: 458217 - RNA, 21 nt, Artificial Sequence
  Synthetic
ucuucacaggcaccuucaaca

SEQ ID NO: 458218 - RNA, 22 nt, Artificial Sequence
  Synthetic
uucuucacaggcaccuucaaca

SEQ ID NO: 458219 - RNA, 23 nt, Artificial Sequence
  Synthetic
auucuucacaggcaccuucaaca

SEQ ID NO: 458220 - RNA, 24 nt, Artificial Sequence
  Synthetic
aauucuucacaggcaccuucaaca

SEQ ID NO: 458221 - RNA, 18 nt, Artificial Sequence
  Synthetic
ugaccacuggcuucaaca

SEQ ID NO: 458222 - RNA, 19 nt, Artificial Sequence
  Synthetic
augaccacuggcuucaaca

SEQ ID NO: 458223 - RNA, 20 nt, Artificial Sequence
  Synthetic
gaugaccacuggcuucaaca

SEQ ID NO: 458224 - RNA, 21 nt, Artificial Sequence
  Synthetic
ggaugaccacuggcuucaaca

SEQ ID NO: 458225 - RNA, 22 nt, Artificial Sequence
  Synthetic
uggaugaccacuggcuucaaca

SEQ ID NO: 458226 - RNA, 23 nt, Artificial Sequence
  Synthetic
cuggaugaccacuggcuucaaca

SEQ ID NO: 458227 - RNA, 24 nt, Artificial Sequence
  Synthetic
acuggaugaccacuggcuucaaca

SEQ ID NO: 458228 - RNA, 18 nt, Artificial Sequence
  Synthetic
uaagucuuguguucaaca

SEQ ID NO: 458229 - RNA, 19 nt, Artificial Sequence
  Synthetic
cuaagucuuguguucaaca

SEQ ID NO: 458230 - RNA, 20 nt, Artificial Sequence
  Synthetic
ccuaagucuuguguucaaca

SEQ ID NO: 458231 - RNA, 21 nt, Artificial Sequence
  Synthetic
uccuaagucuuguguucaaca

SEQ ID NO: 458232 - RNA, 22 nt, Artificial Sequence
  Synthetic
uuccuaagucuuguguucaaca

SEQ ID NO: 458233 - RNA, 23 nt, Artificial Sequence
  Synthetic
guuccuaagucuuguguucaaca

SEQ ID NO: 458234 - RNA, 24 nt, Artificial Sequence
  Synthetic
uguuccuaagucuuguguucaaca

SEQ ID NO: 458235 - RNA, 18 nt, Artificial Sequence
  Synthetic
caaacauucauuucaaca

SEQ ID NO: 458236 - RNA, 19 nt, Artificial Sequence
  Synthetic
acaaacauucauuucaaca

SEQ ID NO: 458237 - RNA, 20 nt, Artificial Sequence
  Synthetic
uacaaacauucauuucaaca

SEQ ID NO: 458238 - RNA, 21 nt, Artificial Sequence
  Synthetic
auacaaacauucauuucaaca

SEQ ID NO: 458239 - RNA, 22 nt, Artificial Sequence
  Synthetic
cauacaaacauucauuucaaca

SEQ ID NO: 458240 - RNA, 23 nt, Artificial Sequence
  Synthetic
acauacaaacauucauuucaaca

SEQ ID NO: 458241 - RNA, 24 nt, Artificial Sequence
  Synthetic
cacauacaaacauucauuucaaca

SEQ ID NO: 458242 - RNA, 18 nt, Artificial Sequence
  Synthetic
acaaccccacuuucaaca

SEQ ID NO: 458243 - RNA, 19 nt, Artificial Sequence
  Synthetic
aacaaccccacuuucaaca

SEQ ID NO: 458244 - RNA, 20 nt, Artificial Sequence
  Synthetic
caacaaccccacuuucaaca

SEQ ID NO: 458245 - RNA, 21 nt, Artificial Sequence
  Synthetic
ucaacaaccccacuuucaaca

SEQ ID NO: 458246 - RNA, 22 nt, Artificial Sequence
  Synthetic
uucaacaaccccacuuucaaca

SEQ ID NO: 458247 - RNA, 23 nt, Artificial Sequence
  Synthetic
cuucaacaaccccacuuucaaca

SEQ ID NO: 458248 - RNA, 24 nt, Artificial Sequence
  Synthetic
ccuucaacaaccccacuuucaaca

SEQ ID NO: 458249 - RNA, 18 nt, Artificial Sequence
  Synthetic
uuugauuuucuuucaaca

SEQ ID NO: 458250 - RNA, 19 nt, Artificial Sequence
  Synthetic
auuugauuuucuuucaaca

SEQ ID NO: 458251 - RNA, 20 nt, Artificial Sequence
  Synthetic
gauuugauuuucuuucaaca

SEQ ID NO: 458252 - RNA, 21 nt, Artificial Sequence
  Synthetic
agauuugauuuucuuucaaca

SEQ ID NO: 458253 - RNA, 22 nt, Artificial Sequence
  Synthetic
gagauuugauuuucuuucaaca

SEQ ID NO: 458254 - RNA, 23 nt, Artificial Sequence
  Synthetic
ugagauuugauuuucuuucaaca

SEQ ID NO: 458255 - RNA, 24 nt, Artificial Sequence
  Synthetic
augagauuugauuuucuuucaaca

SEQ ID NO: 458256 - RNA, 18 nt, Artificial Sequence
  Synthetic
ugaagugagaaaagaaca

SEQ ID NO: 458257 - RNA, 19 nt, Artificial Sequence
  Synthetic
gugaagugagaaaagaaca

SEQ ID NO: 458258 - RNA, 20 nt, Artificial Sequence
  Synthetic
ugugaagugagaaaagaaca

SEQ ID NO: 458259 - RNA, 21 nt, Artificial Sequence
  Synthetic
augugaagugagaaaagaaca

SEQ ID NO: 458260 - RNA, 22 nt, Artificial Sequence
  Synthetic
caugugaagugagaaaagaaca

SEQ ID NO: 458261 - RNA, 23 nt, Artificial Sequence
  Synthetic
acaugugaagugagaaaagaaca

SEQ ID NO: 458262 - RNA, 24 nt, Artificial Sequence
  Synthetic
uacaugugaagugagaaaagaaca

SEQ ID NO: 458263 - RNA, 18 nt, Artificial Sequence
  Synthetic
acaguagaauaaagaaca

SEQ ID NO: 458264 - RNA, 19 nt, Artificial Sequence
  Synthetic
aacaguagaauaaagaaca

SEQ ID NO: 458265 - RNA, 20 nt, Artificial Sequence
  Synthetic
uaacaguagaauaaagaaca

SEQ ID NO: 458266 - RNA, 21 nt, Artificial Sequence
  Synthetic
auaacaguagaauaaagaaca

SEQ ID NO: 458267 - RNA, 22 nt, Artificial Sequence
  Synthetic
gauaacaguagaauaaagaaca

SEQ ID NO: 458268 - RNA, 23 nt, Artificial Sequence
  Synthetic
ggauaacaguagaauaaagaaca

SEQ ID NO: 458269 - RNA, 24 nt, Artificial Sequence
  Synthetic
aggauaacaguagaauaaagaaca

SEQ ID NO: 458270 - RNA, 18 nt, Artificial Sequence
  Synthetic
ucuagagcauaaagaaca

SEQ ID NO: 458271 - RNA, 19 nt, Artificial Sequence
  Synthetic
uucuagagcauaaagaaca

SEQ ID NO: 458272 - RNA, 20 nt, Artificial Sequence
  Synthetic
uuucuagagcauaaagaaca

SEQ ID NO: 458273 - RNA, 21 nt, Artificial Sequence
  Synthetic
guuucuagagcauaaagaaca

SEQ ID NO: 458274 - RNA, 22 nt, Artificial Sequence
  Synthetic
uguuucuagagcauaaagaaca

SEQ ID NO: 458275 - RNA, 23 nt, Artificial Sequence
  Synthetic
guguuucuagagcauaaagaaca

SEQ ID NO: 458276 - RNA, 24 nt, Artificial Sequence
  Synthetic
aguguuucuagagcauaaagaaca

SEQ ID NO: 458277 - RNA, 18 nt, Artificial Sequence
  Synthetic
aauaacgauuaaagaaca

SEQ ID NO: 458278 - RNA, 19 nt, Artificial Sequence
  Synthetic
uaauaacgauuaaagaaca

SEQ ID NO: 458279 - RNA, 20 nt, Artificial Sequence
  Synthetic
uuaauaacgauuaaagaaca

SEQ ID NO: 458280 - RNA, 21 nt, Artificial Sequence
  Synthetic
uuuaauaacgauuaaagaaca

SEQ ID NO: 458281 - RNA, 22 nt, Artificial Sequence
  Synthetic
uuuuaauaacgauuaaagaaca

SEQ ID NO: 458282 - RNA, 23 nt, Artificial Sequence
  Synthetic
auuuuaauaacgauuaaagaaca

SEQ ID NO: 458283 - RNA, 24 nt, Artificial Sequence
  Synthetic
cauuuuaauaacgauuaaagaaca

SEQ ID NO: 458284 - RNA, 18 nt, Artificial Sequence
  Synthetic
auaaaaagugcaagaaca

SEQ ID NO: 458285 - RNA, 19 nt, Artificial Sequence
  Synthetic
aauaaaaagugcaagaaca

SEQ ID NO: 458286 - RNA, 20 nt, Artificial Sequence
  Synthetic
aaauaaaaagugcaagaaca

SEQ ID NO: 458287 - RNA, 21 nt, Artificial Sequence
  Synthetic
gaaauaaaaagugcaagaaca

SEQ ID NO: 458288 - RNA, 22 nt, Artificial Sequence
  Synthetic
agaaauaaaaagugcaagaaca

SEQ ID NO: 458289 - RNA, 23 nt, Artificial Sequence
  Synthetic
aagaaauaaaaagugcaagaaca

SEQ ID NO: 458290 - RNA, 24 nt, Artificial Sequence
  Synthetic
uaagaaauaaaaagugcaagaaca

SEQ ID NO: 458291 - RNA, 18 nt, Artificial Sequence
  Synthetic
aauaauugaucaagaaca

SEQ ID NO: 458292 - RNA, 19 nt, Artificial Sequence
  Synthetic
gaauaauugaucaagaaca

SEQ ID NO: 458293 - RNA, 20 nt, Artificial Sequence
  Synthetic
ggaauaauugaucaagaaca

SEQ ID NO: 458294 - RNA, 21 nt, Artificial Sequence
  Synthetic
uggaauaauugaucaagaaca

SEQ ID NO: 458295 - RNA, 22 nt, Artificial Sequence
  Synthetic
auggaauaauugaucaagaaca

SEQ ID NO: 458296 - RNA, 23 nt, Artificial Sequence
  Synthetic
aauggaauaauugaucaagaaca

SEQ ID NO: 458297 - RNA, 24 nt, Artificial Sequence
  Synthetic
caauggaauaauugaucaagaaca

SEQ ID NO: 458298 - RNA, 18 nt, Artificial Sequence
  Synthetic
acagguaaacuaagaaca

SEQ ID NO: 458299 - RNA, 19 nt, Artificial Sequence
  Synthetic
aacagguaaacuaagaaca

SEQ ID NO: 458300 - RNA, 20 nt, Artificial Sequence
  Synthetic
caacagguaaacuaagaaca

SEQ ID NO: 458301 - RNA, 21 nt, Artificial Sequence
  Synthetic
ucaacagguaaacuaagaaca

SEQ ID NO: 458302 - RNA, 22 nt, Artificial Sequence
  Synthetic
gucaacagguaaacuaagaaca

SEQ ID NO: 458303 - RNA, 23 nt, Artificial Sequence
  Synthetic
agucaacagguaaacuaagaaca

SEQ ID NO: 458304 - RNA, 24 nt, Artificial Sequence
  Synthetic
gagucaacagguaaacuaagaaca

SEQ ID NO: 458305 - RNA, 18 nt, Artificial Sequence
  Synthetic
auucugggucuaagaaca

SEQ ID NO: 458306 - RNA, 19 nt, Artificial Sequence
  Synthetic
cauucugggucuaagaaca

SEQ ID NO: 458307 - RNA, 20 nt, Artificial Sequence
  Synthetic
gcauucugggucuaagaaca

SEQ ID NO: 458308 - RNA, 21 nt, Artificial Sequence
  Synthetic
agcauucugggucuaagaaca

SEQ ID NO: 458309 - RNA, 22 nt, Artificial Sequence
  Synthetic
gagcauucugggucuaagaaca

SEQ ID NO: 458310 - RNA, 23 nt, Artificial Sequence
  Synthetic
agagcauucugggucuaagaaca

SEQ ID NO: 458311 - RNA, 24 nt, Artificial Sequence
  Synthetic
aagagcauucugggucuaagaaca

SEQ ID NO: 458312 - RNA, 18 nt, Artificial Sequence
  Synthetic
acacauugcuacagaaca

SEQ ID NO: 458313 - RNA, 19 nt, Artificial Sequence
  Synthetic
uacacauugcuacagaaca

SEQ ID NO: 458314 - RNA, 20 nt, Artificial Sequence
  Synthetic
auacacauugcuacagaaca

SEQ ID NO: 458315 - RNA, 21 nt, Artificial Sequence
  Synthetic
aauacacauugcuacagaaca

SEQ ID NO: 458316 - RNA, 22 nt, Artificial Sequence
  Synthetic
gaauacacauugcuacagaaca

SEQ ID NO: 458317 - RNA, 23 nt, Artificial Sequence
  Synthetic
ugaauacacauugcuacagaaca

SEQ ID NO: 458318 - RNA, 24 nt, Artificial Sequence
  Synthetic
uugaauacacauugcuacagaaca

SEQ ID NO: 458319 - RNA, 18 nt, Artificial Sequence
  Synthetic
uucucaaccuccagaaca

SEQ ID NO: 458320 - RNA, 19 nt, Artificial Sequence
  Synthetic
cuucucaaccuccagaaca

SEQ ID NO: 458321 - RNA, 20 nt, Artificial Sequence
  Synthetic
acuucucaaccuccagaaca

SEQ ID NO: 458322 - RNA, 21 nt, Artificial Sequence
  Synthetic
gacuucucaaccuccagaaca

SEQ ID NO: 458323 - RNA, 22 nt, Artificial Sequence
  Synthetic
ggacuucucaaccuccagaaca

SEQ ID NO: 458324 - RNA, 23 nt, Artificial Sequence
  Synthetic
uggacuucucaaccuccagaaca

SEQ ID NO: 458325 - RNA, 24 nt, Artificial Sequence
  Synthetic
uuggacuucucaaccuccagaaca

SEQ ID NO: 458326 - RNA, 18 nt, Artificial Sequence
  Synthetic
auauauacauucagaaca

SEQ ID NO: 458327 - RNA, 19 nt, Artificial Sequence
  Synthetic
aauauauacauucagaaca

SEQ ID NO: 458328 - RNA, 20 nt, Artificial Sequence
  Synthetic
caauauauacauucagaaca

SEQ ID NO: 458329 - RNA, 21 nt, Artificial Sequence
  Synthetic
acaauauauacauucagaaca

SEQ ID NO: 458330 - RNA, 22 nt, Artificial Sequence
  Synthetic
uacaauauauacauucagaaca

SEQ ID NO: 458331 - RNA, 23 nt, Artificial Sequence
  Synthetic
uuacaauauauacauucagaaca

SEQ ID NO: 458332 - RNA, 24 nt, Artificial Sequence
  Synthetic
auuacaauauauacauucagaaca

SEQ ID NO: 458333 - RNA, 18 nt, Artificial Sequence
  Synthetic
aacuacuacaagagaaca

SEQ ID NO: 458334 - RNA, 19 nt, Artificial Sequence
  Synthetic
aaacuacuacaagagaaca

SEQ ID NO: 458335 - RNA, 20 nt, Artificial Sequence
  Synthetic
gaaacuacuacaagagaaca

SEQ ID NO: 458336 - RNA, 21 nt, Artificial Sequence
  Synthetic
ugaaacuacuacaagagaaca

SEQ ID NO: 458337 - RNA, 22 nt, Artificial Sequence
  Synthetic
augaaacuacuacaagagaaca

SEQ ID NO: 458338 - RNA, 23 nt, Artificial Sequence
  Synthetic
caugaaacuacuacaagagaaca

SEQ ID NO: 458339 - RNA, 24 nt, Artificial Sequence
  Synthetic
ccaugaaacuacuacaagagaaca

SEQ ID NO: 458340 - RNA, 18 nt, Artificial Sequence
  Synthetic
uaccuuaugaagagaaca

SEQ ID NO: 458341 - RNA, 19 nt, Artificial Sequence
  Synthetic
guaccuuaugaagagaaca

SEQ ID NO: 458342 - RNA, 20 nt, Artificial Sequence
  Synthetic
gguaccuuaugaagagaaca

SEQ ID NO: 458343 - RNA, 21 nt, Artificial Sequence
  Synthetic
ugguaccuuaugaagagaaca

SEQ ID NO: 458344 - RNA, 22 nt, Artificial Sequence
  Synthetic
augguaccuuaugaagagaaca

SEQ ID NO: 458345 - RNA, 23 nt, Artificial Sequence
  Synthetic
aaugguaccuuaugaagagaaca

SEQ ID NO: 458346 - RNA, 24 nt, Artificial Sequence
  Synthetic
aaaugguaccuuaugaagagaaca

SEQ ID NO: 458347 - RNA, 18 nt, Artificial Sequence
  Synthetic
cagagcauugugagaaca

SEQ ID NO: 458348 - RNA, 19 nt, Artificial Sequence
  Synthetic
ucagagcauugugagaaca

SEQ ID NO: 458349 - RNA, 20 nt, Artificial Sequence
  Synthetic
uucagagcauugugagaaca

SEQ ID NO: 458350 - RNA, 21 nt, Artificial Sequence
  Synthetic
auucagagcauugugagaaca

SEQ ID NO: 458351 - RNA, 22 nt, Artificial Sequence
  Synthetic
gauucagagcauugugagaaca

SEQ ID NO: 458352 - RNA, 23 nt, Artificial Sequence
  Synthetic
ugauucagagcauugugagaaca

SEQ ID NO: 458353 - RNA, 24 nt, Artificial Sequence
  Synthetic
cugauucagagcauugugagaaca

SEQ ID NO: 458354 - RNA, 18 nt, Artificial Sequence
  Synthetic
uuauuucaguugagaaca

SEQ ID NO: 458355 - RNA, 19 nt, Artificial Sequence
  Synthetic
guuauuucaguugagaaca

SEQ ID NO: 458356 - RNA, 20 nt, Artificial Sequence
  Synthetic
aguuauuucaguugagaaca

SEQ ID NO: 458357 - RNA, 21 nt, Artificial Sequence
  Synthetic
uaguuauuucaguugagaaca

SEQ ID NO: 458358 - RNA, 22 nt, Artificial Sequence
  Synthetic
uuaguuauuucaguugagaaca

SEQ ID NO: 458359 - RNA, 23 nt, Artificial Sequence
  Synthetic
cuuaguuauuucaguugagaaca

SEQ ID NO: 458360 - RNA, 24 nt, Artificial Sequence
  Synthetic
gcuuaguuauuucaguugagaaca

SEQ ID NO: 458361 - RNA, 18 nt, Artificial Sequence
  Synthetic
guguacuuuuauagaaca

SEQ ID NO: 458362 - RNA, 19 nt, Artificial Sequence
  Synthetic
aguguacuuuuauagaaca

SEQ ID NO: 458363 - RNA, 20 nt, Artificial Sequence
  Synthetic
aaguguacuuuuauagaaca

SEQ ID NO: 458364 - RNA, 21 nt, Artificial Sequence
  Synthetic
aaaguguacuuuuauagaaca

SEQ ID NO: 458365 - RNA, 22 nt, Artificial Sequence
  Synthetic
gaaaguguacuuuuauagaaca

SEQ ID NO: 458366 - RNA, 23 nt, Artificial Sequence
  Synthetic
agaaaguguacuuuuauagaaca

SEQ ID NO: 458367 - RNA, 24 nt, Artificial Sequence
  Synthetic
aagaaaguguacuuuuauagaaca

SEQ ID NO: 458368 - RNA, 18 nt, Artificial Sequence
  Synthetic
caucauugguuuagaaca

SEQ ID NO: 458369 - RNA, 19 nt, Artificial Sequence
  Synthetic
gcaucauugguuuagaaca

SEQ ID NO: 458370 - RNA, 20 nt, Artificial Sequence
  Synthetic
agcaucauugguuuagaaca

SEQ ID NO: 458371 - RNA, 21 nt, Artificial Sequence
  Synthetic
aagcaucauugguuuagaaca

SEQ ID NO: 458372 - RNA, 22 nt, Artificial Sequence
  Synthetic
aaagcaucauugguuuagaaca

SEQ ID NO: 458373 - RNA, 23 nt, Artificial Sequence
  Synthetic
aaaagcaucauugguuuagaaca

SEQ ID NO: 458374 - RNA, 24 nt, Artificial Sequence
  Synthetic
gaaaagcaucauugguuuagaaca

SEQ ID NO: 458375 - RNA, 18 nt, Artificial Sequence
  Synthetic
ucaaaagcuggacgaaca

SEQ ID NO: 458376 - RNA, 19 nt, Artificial Sequence
  Synthetic
uucaaaagcuggacgaaca

SEQ ID NO: 458377 - RNA, 20 nt, Artificial Sequence
  Synthetic
cuucaaaagcuggacgaaca

SEQ ID NO: 458378 - RNA, 21 nt, Artificial Sequence
  Synthetic
acuucaaaagcuggacgaaca

SEQ ID NO: 458379 - RNA, 22 nt, Artificial Sequence
  Synthetic
gacuucaaaagcuggacgaaca

SEQ ID NO: 458380 - RNA, 23 nt, Artificial Sequence
  Synthetic
agacuucaaaagcuggacgaaca

SEQ ID NO: 458381 - RNA, 24 nt, Artificial Sequence
  Synthetic
aagacuucaaaagcuggacgaaca

SEQ ID NO: 458382 - RNA, 18 nt, Artificial Sequence
  Synthetic
cugauagugauacgaaca

SEQ ID NO: 458383 - RNA, 19 nt, Artificial Sequence
  Synthetic
gcugauagugauacgaaca

SEQ ID NO: 458384 - RNA, 20 nt, Artificial Sequence
  Synthetic
ugcugauagugauacgaaca

SEQ ID NO: 458385 - RNA, 21 nt, Artificial Sequence
  Synthetic
augcugauagugauacgaaca

SEQ ID NO: 458386 - RNA, 22 nt, Artificial Sequence
  Synthetic
aaugcugauagugauacgaaca

SEQ ID NO: 458387 - RNA, 23 nt, Artificial Sequence
  Synthetic
aaaugcugauagugauacgaaca

SEQ ID NO: 458388 - RNA, 24 nt, Artificial Sequence
  Synthetic
aaaaugcugauagugauacgaaca

SEQ ID NO: 458389 - RNA, 18 nt, Artificial Sequence
  Synthetic
caccacagccaccgaaca

SEQ ID NO: 458390 - RNA, 19 nt, Artificial Sequence
  Synthetic
ucaccacagccaccgaaca

SEQ ID NO: 458391 - RNA, 20 nt, Artificial Sequence
  Synthetic
uucaccacagccaccgaaca

SEQ ID NO: 458392 - RNA, 21 nt, Artificial Sequence
  Synthetic
auucaccacagccaccgaaca

SEQ ID NO: 458393 - RNA, 22 nt, Artificial Sequence
  Synthetic
uauucaccacagccaccgaaca

SEQ ID NO: 458394 - RNA, 23 nt, Artificial Sequence
  Synthetic
uuauucaccacagccaccgaaca

SEQ ID NO: 458395 - RNA, 24 nt, Artificial Sequence
  Synthetic
cuuauucaccacagccaccgaaca

SEQ ID NO: 458396 - RNA, 18 nt, Artificial Sequence
  Synthetic
aggaguggccaaggaaca

SEQ ID NO: 458397 - RNA, 19 nt, Artificial Sequence
  Synthetic
gaggaguggccaaggaaca

SEQ ID NO: 458398 - RNA, 20 nt, Artificial Sequence
  Synthetic
ggaggaguggccaaggaaca

SEQ ID NO: 458399 - RNA, 21 nt, Artificial Sequence
  Synthetic
uggaggaguggccaaggaaca

SEQ ID NO: 458400 - RNA, 22 nt, Artificial Sequence
  Synthetic
cuggaggaguggccaaggaaca

SEQ ID NO: 458401 - RNA, 23 nt, Artificial Sequence
  Synthetic
ccuggaggaguggccaaggaaca

SEQ ID NO: 458402 - RNA, 24 nt, Artificial Sequence
  Synthetic
gccuggaggaguggccaaggaaca

SEQ ID NO: 458403 - RNA, 18 nt, Artificial Sequence
  Synthetic
ucauuacaugaaggaaca

SEQ ID NO: 458404 - RNA, 19 nt, Artificial Sequence
  Synthetic
uucauuacaugaaggaaca

SEQ ID NO: 458405 - RNA, 20 nt, Artificial Sequence
  Synthetic
auucauuacaugaaggaaca

SEQ ID NO: 458406 - RNA, 21 nt, Artificial Sequence
  Synthetic
uauucauuacaugaaggaaca

SEQ ID NO: 458407 - RNA, 22 nt, Artificial Sequence
  Synthetic
uuauucauuacaugaaggaaca

SEQ ID NO: 458408 - RNA, 23 nt, Artificial Sequence
  Synthetic
uuuauucauuacaugaaggaaca

SEQ ID NO: 458409 - RNA, 24 nt, Artificial Sequence
  Synthetic
guuuauucauuacaugaaggaaca

SEQ ID NO: 458410 - RNA, 18 nt, Artificial Sequence
  Synthetic
aggucucauccaggaaca

SEQ ID NO: 458411 - RNA, 19 nt, Artificial Sequence
  Synthetic
gaggucucauccaggaaca

SEQ ID NO: 458412 - RNA, 20 nt, Artificial Sequence
  Synthetic
agaggucucauccaggaaca

SEQ ID NO: 458413 - RNA, 21 nt, Artificial Sequence
  Synthetic
cagaggucucauccaggaaca

SEQ ID NO: 458414 - RNA, 22 nt, Artificial Sequence
  Synthetic
ucagaggucucauccaggaaca

SEQ ID NO: 458415 - RNA, 23 nt, Artificial Sequence
  Synthetic
cucagaggucucauccaggaaca

SEQ ID NO: 458416 - RNA, 24 nt, Artificial Sequence
  Synthetic
ucucagaggucucauccaggaaca

SEQ ID NO: 458417 - RNA, 18 nt, Artificial Sequence
  Synthetic
gaaauugucagaggaaca

SEQ ID NO: 458418 - RNA, 19 nt, Artificial Sequence
  Synthetic
agaaauugucagaggaaca

SEQ ID NO: 458419 - RNA, 20 nt, Artificial Sequence
  Synthetic
aagaaauugucagaggaaca

SEQ ID NO: 458420 - RNA, 21 nt, Artificial Sequence
  Synthetic
aaagaaauugucagaggaaca

SEQ ID NO: 458421 - RNA, 22 nt, Artificial Sequence
  Synthetic
gaaagaaauugucagaggaaca

SEQ ID NO: 458422 - RNA, 23 nt, Artificial Sequence
  Synthetic
ggaaagaaauugucagaggaaca

SEQ ID NO: 458423 - RNA, 24 nt, Artificial Sequence
  Synthetic
gggaaagaaauugucagaggaaca

SEQ ID NO: 458424 - RNA, 18 nt, Artificial Sequence
  Synthetic
ugaucagagagaggaaca

SEQ ID NO: 458425 - RNA, 19 nt, Artificial Sequence
  Synthetic
augaucagagagaggaaca

SEQ ID NO: 458426 - RNA, 20 nt, Artificial Sequence
  Synthetic
gaugaucagagagaggaaca

SEQ ID NO: 458427 - RNA, 21 nt, Artificial Sequence
  Synthetic
agaugaucagagagaggaaca

SEQ ID NO: 458428 - RNA, 22 nt, Artificial Sequence
  Synthetic
gagaugaucagagagaggaaca

SEQ ID NO: 458429 - RNA, 23 nt, Artificial Sequence
  Synthetic
ugagaugaucagagagaggaaca

SEQ ID NO: 458430 - RNA, 24 nt, Artificial Sequence
  Synthetic
augagaugaucagagagaggaaca

SEQ ID NO: 458431 - RNA, 18 nt, Artificial Sequence
  Synthetic
auuuggaaaugaggaaca

SEQ ID NO: 458432 - RNA, 19 nt, Artificial Sequence
  Synthetic
aauuuggaaaugaggaaca

SEQ ID NO: 458433 - RNA, 20 nt, Artificial Sequence
  Synthetic
aaauuuggaaaugaggaaca

SEQ ID NO: 458434 - RNA, 21 nt, Artificial Sequence
  Synthetic
aaaauuuggaaaugaggaaca

SEQ ID NO: 458435 - RNA, 22 nt, Artificial Sequence
  Synthetic
uaaaauuuggaaaugaggaaca

SEQ ID NO: 458436 - RNA, 23 nt, Artificial Sequence
  Synthetic
auaaaauuuggaaaugaggaaca

SEQ ID NO: 458437 - RNA, 24 nt, Artificial Sequence
  Synthetic
uauaaaauuuggaaaugaggaaca

SEQ ID NO: 458438 - RNA, 18 nt, Artificial Sequence
  Synthetic
aguggauaaugaggaaca

SEQ ID NO: 458439 - RNA, 19 nt, Artificial Sequence
  Synthetic
caguggauaaugaggaaca

SEQ ID NO: 458440 - RNA, 20 nt, Artificial Sequence
  Synthetic
acaguggauaaugaggaaca

SEQ ID NO: 458441 - RNA, 21 nt, Artificial Sequence
  Synthetic
uacaguggauaaugaggaaca

SEQ ID NO: 458442 - RNA, 22 nt, Artificial Sequence
  Synthetic
auacaguggauaaugaggaaca

SEQ ID NO: 458443 - RNA, 23 nt, Artificial Sequence
  Synthetic
aauacaguggauaaugaggaaca

SEQ ID NO: 458444 - RNA, 24 nt, Artificial Sequence
  Synthetic
aaauacaguggauaaugaggaaca

SEQ ID NO: 458445 - RNA, 18 nt, Artificial Sequence
  Synthetic
guauuccaagagggaaca

SEQ ID NO: 458446 - RNA, 19 nt, Artificial Sequence
  Synthetic
uguauuccaagagggaaca

SEQ ID NO: 458447 - RNA, 20 nt, Artificial Sequence
  Synthetic
auguauuccaagagggaaca

SEQ ID NO: 458448 - RNA, 21 nt, Artificial Sequence
  Synthetic
aauguauuccaagagggaaca

SEQ ID NO: 458449 - RNA, 22 nt, Artificial Sequence
  Synthetic
gaauguauuccaagagggaaca

SEQ ID NO: 458450 - RNA, 23 nt, Artificial Sequence
  Synthetic
agaauguauuccaagagggaaca

SEQ ID NO: 458451 - RNA, 24 nt, Artificial Sequence
  Synthetic
gagaauguauuccaagagggaaca

SEQ ID NO: 458452 - RNA, 18 nt, Artificial Sequence
  Synthetic
gagguuugcuggggaaca

SEQ ID NO: 458453 - RNA, 19 nt, Artificial Sequence
  Synthetic
ugagguuugcuggggaaca

SEQ ID NO: 458454 - RNA, 20 nt, Artificial Sequence
  Synthetic
uugagguuugcuggggaaca

SEQ ID NO: 458455 - RNA, 21 nt, Artificial Sequence
  Synthetic
guugagguuugcuggggaaca

SEQ ID NO: 458456 - RNA, 22 nt, Artificial Sequence
  Synthetic
gguugagguuugcuggggaaca

SEQ ID NO: 458457 - RNA, 23 nt, Artificial Sequence
  Synthetic
ugguugagguuugcuggggaaca

SEQ ID NO: 458458 - RNA, 24 nt, Artificial Sequence
  Synthetic
uugguugagguuugcuggggaaca

SEQ ID NO: 458459 - RNA, 18 nt, Artificial Sequence
  Synthetic
cacagcccugugggaaca

SEQ ID NO: 458460 - RNA, 19 nt, Artificial Sequence
  Synthetic
acacagcccugugggaaca

SEQ ID NO: 458461 - RNA, 20 nt, Artificial Sequence
  Synthetic
aacacagcccugugggaaca

SEQ ID NO: 458462 - RNA, 21 nt, Artificial Sequence
  Synthetic
gaacacagcccugugggaaca

SEQ ID NO: 458463 - RNA, 22 nt, Artificial Sequence
  Synthetic
ggaacacagcccugugggaaca

SEQ ID NO: 458464 - RNA, 23 nt, Artificial Sequence
  Synthetic
uggaacacagcccugugggaaca

SEQ ID NO: 458465 - RNA, 24 nt, Artificial Sequence
  Synthetic
cuggaacacagcccugugggaaca

SEQ ID NO: 458466 - RNA, 18 nt, Artificial Sequence
  Synthetic
uaggacagaaauggaaca

SEQ ID NO: 458467 - RNA, 19 nt, Artificial Sequence
  Synthetic
auaggacagaaauggaaca

SEQ ID NO: 458468 - RNA, 20 nt, Artificial Sequence
  Synthetic
gauaggacagaaauggaaca

SEQ ID NO: 458469 - RNA, 21 nt, Artificial Sequence
  Synthetic
ugauaggacagaaauggaaca

SEQ ID NO: 458470 - RNA, 22 nt, Artificial Sequence
  Synthetic
cugauaggacagaaauggaaca

SEQ ID NO: 458471 - RNA, 23 nt, Artificial Sequence
  Synthetic
ucugauaggacagaaauggaaca

SEQ ID NO: 458472 - RNA, 24 nt, Artificial Sequence
  Synthetic
cucugauaggacagaaauggaaca

SEQ ID NO: 458473 - RNA, 18 nt, Artificial Sequence
  Synthetic
uuaggugggaauggaaca

SEQ ID NO: 458474 - RNA, 19 nt, Artificial Sequence
  Synthetic
cuuaggugggaauggaaca

SEQ ID NO: 458475 - RNA, 20 nt, Artificial Sequence
  Synthetic
ucuuaggugggaauggaaca

SEQ ID NO: 458476 - RNA, 21 nt, Artificial Sequence
  Synthetic
cucuuaggugggaauggaaca

SEQ ID NO: 458477 - RNA, 22 nt, Artificial Sequence
  Synthetic
acucuuaggugggaauggaaca

SEQ ID NO: 458478 - RNA, 23 nt, Artificial Sequence
  Synthetic
cacucuuaggugggaauggaaca

SEQ ID NO: 458479 - RNA, 24 nt, Artificial Sequence
  Synthetic
ucacucuuaggugggaauggaaca

SEQ ID NO: 458480 - RNA, 18 nt, Artificial Sequence
  Synthetic
uuucugaaugauggaaca

SEQ ID NO: 458481 - RNA, 19 nt, Artificial Sequence
  Synthetic
auuucugaaugauggaaca

SEQ ID NO: 458482 - RNA, 20 nt, Artificial Sequence
  Synthetic
cauuucugaaugauggaaca

SEQ ID NO: 458483 - RNA, 21 nt, Artificial Sequence
  Synthetic
gcauuucugaaugauggaaca

SEQ ID NO: 458484 - RNA, 22 nt, Artificial Sequence
  Synthetic
agcauuucugaaugauggaaca

SEQ ID NO: 458485 - RNA, 23 nt, Artificial Sequence
  Synthetic
gagcauuucugaaugauggaaca

SEQ ID NO: 458486 - RNA, 24 nt, Artificial Sequence
  Synthetic
agagcauuucugaaugauggaaca

SEQ ID NO: 458487 - RNA, 18 nt, Artificial Sequence
  Synthetic
guaagugggaguggaaca

SEQ ID NO: 458488 - RNA, 19 nt, Artificial Sequence
  Synthetic
cguaagugggaguggaaca

SEQ ID NO: 458489 - RNA, 20 nt, Artificial Sequence
  Synthetic
ucguaagugggaguggaaca

SEQ ID NO: 458490 - RNA, 21 nt, Artificial Sequence
  Synthetic
cucguaagugggaguggaaca

SEQ ID NO: 458491 - RNA, 22 nt, Artificial Sequence
  Synthetic
acucguaagugggaguggaaca

SEQ ID NO: 458492 - RNA, 23 nt, Artificial Sequence
  Synthetic
cacucguaagugggaguggaaca

SEQ ID NO: 458493 - RNA, 24 nt, Artificial Sequence
  Synthetic
ucacucguaagugggaguggaaca

SEQ ID NO: 458494 - RNA, 18 nt, Artificial Sequence
  Synthetic
uaagguuaguuuggaaca

SEQ ID NO: 458495 - RNA, 19 nt, Artificial Sequence
  Synthetic
uuaagguuaguuuggaaca

SEQ ID NO: 458496 - RNA, 20 nt, Artificial Sequence
  Synthetic
uuuaagguuaguuuggaaca

SEQ ID NO: 458497 - RNA, 21 nt, Artificial Sequence
  Synthetic
auuuaagguuaguuuggaaca

SEQ ID NO: 458498 - RNA, 22 nt, Artificial Sequence
  Synthetic
cauuuaagguuaguuuggaaca

SEQ ID NO: 458499 - RNA, 23 nt, Artificial Sequence
  Synthetic
acauuuaagguuaguuuggaaca

SEQ ID NO: 458500 - RNA, 24 nt, Artificial Sequence
  Synthetic
aacauuuaagguuaguuuggaaca

SEQ ID NO: 458501 - RNA, 18 nt, Artificial Sequence
  Synthetic
caaaauagccaaugaaca

SEQ ID NO: 458502 - RNA, 19 nt, Artificial Sequence
  Synthetic
ucaaaauagccaaugaaca

SEQ ID NO: 458503 - RNA, 20 nt, Artificial Sequence
  Synthetic
gucaaaauagccaaugaaca

SEQ ID NO: 458504 - RNA, 21 nt, Artificial Sequence
  Synthetic
ugucaaaauagccaaugaaca

SEQ ID NO: 458505 - RNA, 22 nt, Artificial Sequence
  Synthetic
uugucaaaauagccaaugaaca

SEQ ID NO: 458506 - RNA, 23 nt, Artificial Sequence
  Synthetic
auugucaaaauagccaaugaaca

SEQ ID NO: 458507 - RNA, 24 nt, Artificial Sequence
  Synthetic
cauugucaaaauagccaaugaaca

SEQ ID NO: 458508 - RNA, 18 nt, Artificial Sequence
  Synthetic
agcaauaacgaaugaaca

SEQ ID NO: 458509 - RNA, 19 nt, Artificial Sequence
  Synthetic
aagcaauaacgaaugaaca

SEQ ID NO: 458510 - RNA, 20 nt, Artificial Sequence
  Synthetic
aaagcaauaacgaaugaaca

SEQ ID NO: 458511 - RNA, 21 nt, Artificial Sequence
  Synthetic
aaaagcaauaacgaaugaaca

SEQ ID NO: 458512 - RNA, 22 nt, Artificial Sequence
  Synthetic
gaaaagcaauaacgaaugaaca

SEQ ID NO: 458513 - RNA, 23 nt, Artificial Sequence
  Synthetic
ggaaaagcaauaacgaaugaaca

SEQ ID NO: 458514 - RNA, 24 nt, Artificial Sequence
  Synthetic
aggaaaagcaauaacgaaugaaca

SEQ ID NO: 458515 - RNA, 18 nt, Artificial Sequence
  Synthetic
acaaaaucugaaugaaca

SEQ ID NO: 458516 - RNA, 19 nt, Artificial Sequence
  Synthetic
gacaaaaucugaaugaaca

SEQ ID NO: 458517 - RNA, 20 nt, Artificial Sequence
  Synthetic
ggacaaaaucugaaugaaca

SEQ ID NO: 458518 - RNA, 21 nt, Artificial Sequence
  Synthetic
aggacaaaaucugaaugaaca

SEQ ID NO: 458519 - RNA, 22 nt, Artificial Sequence
  Synthetic
uaggacaaaaucugaaugaaca

SEQ ID NO: 458520 - RNA, 23 nt, Artificial Sequence
  Synthetic
auaggacaaaaucugaaugaaca

SEQ ID NO: 458521 - RNA, 24 nt, Artificial Sequence
  Synthetic
uauaggacaaaaucugaaugaaca

SEQ ID NO: 458522 - RNA, 18 nt, Artificial Sequence
  Synthetic
uaaagaauaacaugaaca

SEQ ID NO: 458523 - RNA, 19 nt, Artificial Sequence
  Synthetic
auaaagaauaacaugaaca

SEQ ID NO: 458524 - RNA, 20 nt, Artificial Sequence
  Synthetic
aauaaagaauaacaugaaca

SEQ ID NO: 458525 - RNA, 21 nt, Artificial Sequence
  Synthetic
aaauaaagaauaacaugaaca

SEQ ID NO: 458526 - RNA, 22 nt, Artificial Sequence
  Synthetic
aaaauaaagaauaacaugaaca

SEQ ID NO: 458527 - RNA, 23 nt, Artificial Sequence
  Synthetic
aaaaauaaagaauaacaugaaca

SEQ ID NO: 458528 - RNA, 24 nt, Artificial Sequence
  Synthetic
aaaaaauaaagaauaacaugaaca

SEQ ID NO: 458529 - RNA, 18 nt, Artificial Sequence
  Synthetic
ccucuacaaccaugaaca

SEQ ID NO: 458530 - RNA, 19 nt, Artificial Sequence
  Synthetic
uccucuacaaccaugaaca

SEQ ID NO: 458531 - RNA, 20 nt, Artificial Sequence
  Synthetic
auccucuacaaccaugaaca

SEQ ID NO: 458532 - RNA, 21 nt, Artificial Sequence
  Synthetic
gauccucuacaaccaugaaca

SEQ ID NO: 458533 - RNA, 22 nt, Artificial Sequence
  Synthetic
agauccucuacaaccaugaaca

SEQ ID NO: 458534 - RNA, 23 nt, Artificial Sequence
  Synthetic
aagauccucuacaaccaugaaca

SEQ ID NO: 458535 - RNA, 24 nt, Artificial Sequence
  Synthetic
caagauccucuacaaccaugaaca

SEQ ID NO: 458536 - RNA, 18 nt, Artificial Sequence
  Synthetic
uaaaucaacauaugaaca

SEQ ID NO: 458537 - RNA, 19 nt, Artificial Sequence
  Synthetic
guaaaucaacauaugaaca

SEQ ID NO: 458538 - RNA, 20 nt, Artificial Sequence
  Synthetic
uguaaaucaacauaugaaca

SEQ ID NO: 458539 - RNA, 21 nt, Artificial Sequence
  Synthetic
guguaaaucaacauaugaaca

SEQ ID NO: 458540 - RNA, 22 nt, Artificial Sequence
  Synthetic
aguguaaaucaacauaugaaca

SEQ ID NO: 458541 - RNA, 23 nt, Artificial Sequence
  Synthetic
aaguguaaaucaacauaugaaca

SEQ ID NO: 458542 - RNA, 24 nt, Artificial Sequence
  Synthetic
uaaguguaaaucaacauaugaaca

SEQ ID NO: 458543 - RNA, 18 nt, Artificial Sequence
  Synthetic
ucuaauagaguaugaaca

SEQ ID NO: 458544 - RNA, 19 nt, Artificial Sequence
  Synthetic
uucuaauagaguaugaaca

SEQ ID NO: 458545 - RNA, 20 nt, Artificial Sequence
  Synthetic
auucuaauagaguaugaaca

SEQ ID NO: 458546 - RNA, 21 nt, Artificial Sequence
  Synthetic
gauucuaauagaguaugaaca

SEQ ID NO: 458547 - RNA, 22 nt, Artificial Sequence
  Synthetic
agauucuaauagaguaugaaca

SEQ ID NO: 458548 - RNA, 23 nt, Artificial Sequence
  Synthetic
cagauucuaauagaguaugaaca

SEQ ID NO: 458549 - RNA, 24 nt, Artificial Sequence
  Synthetic
ucagauucuaauagaguaugaaca

SEQ ID NO: 458550 - RNA, 18 nt, Artificial Sequence
  Synthetic
caccucacauuaugaaca

SEQ ID NO: 458551 - RNA, 19 nt, Artificial Sequence
  Synthetic
ccaccucacauuaugaaca

SEQ ID NO: 458552 - RNA, 20 nt, Artificial Sequence
  Synthetic
cccaccucacauuaugaaca

SEQ ID NO: 458553 - RNA, 21 nt, Artificial Sequence
  Synthetic
ucccaccucacauuaugaaca

SEQ ID NO: 458554 - RNA, 22 nt, Artificial Sequence
  Synthetic
uucccaccucacauuaugaaca

SEQ ID NO: 458555 - RNA, 23 nt, Artificial Sequence
  Synthetic
uuucccaccucacauuaugaaca

SEQ ID NO: 458556 - RNA, 24 nt, Artificial Sequence
  Synthetic
uuuucccaccucacauuaugaaca

SEQ ID NO: 458557 - RNA, 18 nt, Artificial Sequence
  Synthetic
ugcuaugagaacugaaca

SEQ ID NO: 458558 - RNA, 19 nt, Artificial Sequence
  Synthetic
cugcuaugagaacugaaca

SEQ ID NO: 458559 - RNA, 20 nt, Artificial Sequence
  Synthetic
acugcuaugagaacugaaca

SEQ ID NO: 458560 - RNA, 21 nt, Artificial Sequence
  Synthetic
uacugcuaugagaacugaaca

SEQ ID NO: 458561 - RNA, 22 nt, Artificial Sequence
  Synthetic
uuacugcuaugagaacugaaca

SEQ ID NO: 458562 - RNA, 23 nt, Artificial Sequence
  Synthetic
cuuacugcuaugagaacugaaca

SEQ ID NO: 458563 - RNA, 24 nt, Artificial Sequence
  Synthetic
gcuuacugcuaugagaacugaaca

SEQ ID NO: 458564 - RNA, 18 nt, Artificial Sequence
  Synthetic
auacccucccccugaaca

SEQ ID NO: 458565 - RNA, 19 nt, Artificial Sequence
  Synthetic
uauacccucccccugaaca

SEQ ID NO: 458566 - RNA, 20 nt, Artificial Sequence
  Synthetic
auauacccucccccugaaca

SEQ ID NO: 458567 - RNA, 21 nt, Artificial Sequence
  Synthetic
aauauacccucccccugaaca

SEQ ID NO: 458568 - RNA, 22 nt, Artificial Sequence
  Synthetic
aaauauacccucccccugaaca

SEQ ID NO: 458569 - RNA, 23 nt, Artificial Sequence
  Synthetic
aaaauauacccucccccugaaca

SEQ ID NO: 458570 - RNA, 24 nt, Artificial Sequence
  Synthetic
aaaaauauacccucccccugaaca

SEQ ID NO: 458571 - RNA, 18 nt, Artificial Sequence
  Synthetic
gauuucucuuucugaaca

SEQ ID NO: 458572 - RNA, 19 nt, Artificial Sequence
  Synthetic
ggauuucucuuucugaaca

SEQ ID NO: 458573 - RNA, 20 nt, Artificial Sequence
  Synthetic
uggauuucucuuucugaaca

SEQ ID NO: 458574 - RNA, 21 nt, Artificial Sequence
  Synthetic
cuggauuucucuuucugaaca

SEQ ID NO: 458575 - RNA, 22 nt, Artificial Sequence
  Synthetic
ccuggauuucucuuucugaaca

SEQ ID NO: 458576 - RNA, 23 nt, Artificial Sequence
  Synthetic
accuggauuucucuuucugaaca

SEQ ID NO: 458577 - RNA, 24 nt, Artificial Sequence
  Synthetic
aaccuggauuucucuuucugaaca

SEQ ID NO: 458578 - RNA, 18 nt, Artificial Sequence
  Synthetic
caauuuuuaaagugaaca

SEQ ID NO: 458579 - RNA, 19 nt, Artificial Sequence
  Synthetic
ccaauuuuuaaagugaaca

SEQ ID NO: 458580 - RNA, 20 nt, Artificial Sequence
  Synthetic
cccaauuuuuaaagugaaca

SEQ ID NO: 458581 - RNA, 21 nt, Artificial Sequence
  Synthetic
acccaauuuuuaaagugaaca

SEQ ID NO: 458582 - RNA, 22 nt, Artificial Sequence
  Synthetic
aacccaauuuuuaaagugaaca

SEQ ID NO: 458583 - RNA, 23 nt, Artificial Sequence
  Synthetic
caacccaauuuuuaaagugaaca

SEQ ID NO: 458584 - RNA, 24 nt, Artificial Sequence
  Synthetic
acaacccaauuuuuaaagugaaca

SEQ ID NO: 458585 - RNA, 18 nt, Artificial Sequence
  Synthetic
gcacgugugaggugaaca

SEQ ID NO: 458586 - RNA, 19 nt, Artificial Sequence
  Synthetic
ugcacgugugaggugaaca

SEQ ID NO: 458587 - RNA, 20 nt, Artificial Sequence
  Synthetic
uugcacgugugaggugaaca

SEQ ID NO: 458588 - RNA, 21 nt, Artificial Sequence
  Synthetic
cuugcacgugugaggugaaca

SEQ ID NO: 458589 - RNA, 22 nt, Artificial Sequence
  Synthetic
gcuugcacgugugaggugaaca

SEQ ID NO: 458590 - RNA, 23 nt, Artificial Sequence
  Synthetic
ggcuugcacgugugaggugaaca

SEQ ID NO: 458591 - RNA, 24 nt, Artificial Sequence
  Synthetic
uggcuugcacgugugaggugaaca

SEQ ID NO: 458592 - RNA, 18 nt, Artificial Sequence
  Synthetic
guaagugggaauugaaca

SEQ ID NO: 458593 - RNA, 19 nt, Artificial Sequence
  Synthetic
cguaagugggaauugaaca

SEQ ID NO: 458594 - RNA, 20 nt, Artificial Sequence
  Synthetic
ucguaagugggaauugaaca

SEQ ID NO: 458595 - RNA, 21 nt, Artificial Sequence
  Synthetic
cucguaagugggaauugaaca

SEQ ID NO: 458596 - RNA, 22 nt, Artificial Sequence
  Synthetic
acucguaagugggaauugaaca

SEQ ID NO: 458597 - RNA, 23 nt, Artificial Sequence
  Synthetic
cacucguaagugggaauugaaca

SEQ ID NO: 458598 - RNA, 24 nt, Artificial Sequence
  Synthetic
ucacucguaagugggaauugaaca

SEQ ID NO: 458599 - RNA, 21 nt, Artificial Sequence
  Synthetic
cucacaggugggaauugaaca

SEQ ID NO: 458600 - RNA, 22 nt, Artificial Sequence
  Synthetic
acucacaggugggaauugaaca

SEQ ID NO: 458601 - RNA, 23 nt, Artificial Sequence
  Synthetic
cacucacaggugggaauugaaca

SEQ ID NO: 458602 - RNA, 24 nt, Artificial Sequence
  Synthetic
ucacucacaggugggaauugaaca

SEQ ID NO: 458603 - RNA, 21 nt, Artificial Sequence
  Synthetic
cucauaggugggaauugaaca

SEQ ID NO: 458604 - RNA, 22 nt, Artificial Sequence
  Synthetic
gcucauaggugggaauugaaca

SEQ ID NO: 458605 - RNA, 23 nt, Artificial Sequence
  Synthetic
cgcucauaggugggaauugaaca

SEQ ID NO: 458606 - RNA, 24 nt, Artificial Sequence
  Synthetic
ucgcucauaggugggaauugaaca

SEQ ID NO: 458607 - RNA, 18 nt, Artificial Sequence
  Synthetic
aauauugggaauugaaca

SEQ ID NO: 458608 - RNA, 19 nt, Artificial Sequence
  Synthetic
uaauauugggaauugaaca

SEQ ID NO: 458609 - RNA, 20 nt, Artificial Sequence
  Synthetic
auaauauugggaauugaaca

SEQ ID NO: 458610 - RNA, 21 nt, Artificial Sequence
  Synthetic
aauaauauugggaauugaaca

SEQ ID NO: 458611 - RNA, 22 nt, Artificial Sequence
  Synthetic
aaauaauauugggaauugaaca

SEQ ID NO: 458612 - RNA, 23 nt, Artificial Sequence
  Synthetic
aaaauaauauugggaauugaaca

SEQ ID NO: 458613 - RNA, 24 nt, Artificial Sequence
  Synthetic
gaaaauaauauugggaauugaaca

SEQ ID NO: 458614 - RNA, 18 nt, Artificial Sequence
  Synthetic
aggaaacuucauugaaca

SEQ ID NO: 458615 - RNA, 19 nt, Artificial Sequence
  Synthetic
aaggaaacuucauugaaca

SEQ ID NO: 458616 - RNA, 20 nt, Artificial Sequence
  Synthetic
aaaggaaacuucauugaaca

SEQ ID NO: 458617 - RNA, 21 nt, Artificial Sequence
  Synthetic
aaaaggaaacuucauugaaca

SEQ ID NO: 458618 - RNA, 22 nt, Artificial Sequence
  Synthetic
aaaaaggaaacuucauugaaca

SEQ ID NO: 458619 - RNA, 23 nt, Artificial Sequence
  Synthetic
gaaaaaggaaacuucauugaaca

SEQ ID NO: 458620 - RNA, 24 nt, Artificial Sequence
  Synthetic
agaaaaaggaaacuucauugaaca

SEQ ID NO: 458621 - RNA, 18 nt, Artificial Sequence
  Synthetic
uauucaaaagauugaaca

SEQ ID NO: 458622 - RNA, 19 nt, Artificial Sequence
  Synthetic
uuauucaaaagauugaaca

SEQ ID NO: 458623 - RNA, 20 nt, Artificial Sequence
  Synthetic
guuauucaaaagauugaaca

SEQ ID NO: 458624 - RNA, 21 nt, Artificial Sequence
  Synthetic
uguuauucaaaagauugaaca

SEQ ID NO: 458625 - RNA, 22 nt, Artificial Sequence
  Synthetic
guguuauucaaaagauugaaca

SEQ ID NO: 458626 - RNA, 23 nt, Artificial Sequence
  Synthetic
uguguuauucaaaagauugaaca

SEQ ID NO: 458627 - RNA, 24 nt, Artificial Sequence
  Synthetic
auguguuauucaaaagauugaaca

SEQ ID NO: 458628 - RNA, 18 nt, Artificial Sequence
  Synthetic
acacgaaaagcuugaaca

SEQ ID NO: 458629 - RNA, 19 nt, Artificial Sequence
  Synthetic
cacacgaaaagcuugaaca

SEQ ID NO: 458630 - RNA, 20 nt, Artificial Sequence
  Synthetic
gcacacgaaaagcuugaaca

SEQ ID NO: 458631 - RNA, 21 nt, Artificial Sequence
  Synthetic
ggcacacgaaaagcuugaaca

SEQ ID NO: 458632 - RNA, 22 nt, Artificial Sequence
  Synthetic
aggcacacgaaaagcuugaaca

SEQ ID NO: 458633 - RNA, 23 nt, Artificial Sequence
  Synthetic
gaggcacacgaaaagcuugaaca

SEQ ID NO: 458634 - RNA, 24 nt, Artificial Sequence
  Synthetic
ggaggcacacgaaaagcuugaaca

SEQ ID NO: 458635 - RNA, 18 nt, Artificial Sequence
  Synthetic
aggcuugagaguugaaca

SEQ ID NO: 458636 - RNA, 19 nt, Artificial Sequence
  Synthetic
aaggcuugagaguugaaca

SEQ ID NO: 458637 - RNA, 20 nt, Artificial Sequence
  Synthetic
uaaggcuugagaguugaaca

SEQ ID NO: 458638 - RNA, 21 nt, Artificial Sequence
  Synthetic
auaaggcuugagaguugaaca

SEQ ID NO: 458639 - RNA, 22 nt, Artificial Sequence
  Synthetic
aauaaggcuugagaguugaaca

SEQ ID NO: 458640 - RNA, 23 nt, Artificial Sequence
  Synthetic
uaauaaggcuugagaguugaaca

SEQ ID NO: 458641 - RNA, 24 nt, Artificial Sequence
  Synthetic
auaauaaggcuugagaguugaaca

SEQ ID NO: 458642 - RNA, 18 nt, Artificial Sequence
  Synthetic
gauaaugggaguugaaca

SEQ ID NO: 458643 - RNA, 19 nt, Artificial Sequence
  Synthetic
ugauaaugggaguugaaca

SEQ ID NO: 458644 - RNA, 20 nt, Artificial Sequence
  Synthetic
cugauaaugggaguugaaca

SEQ ID NO: 458645 - RNA, 21 nt, Artificial Sequence
  Synthetic
acugauaaugggaguugaaca

SEQ ID NO: 458646 - RNA, 22 nt, Artificial Sequence
  Synthetic
cacugauaaugggaguugaaca

SEQ ID NO: 458647 - RNA, 23 nt, Artificial Sequence
  Synthetic
ucacugauaaugggaguugaaca

SEQ ID NO: 458648 - RNA, 24 nt, Artificial Sequence
  Synthetic
cucacugauaaugggaguugaaca

SEQ ID NO: 458649 - RNA, 18 nt, Artificial Sequence
  Synthetic
gacauuagcuguugaaca

SEQ ID NO: 458650 - RNA, 19 nt, Artificial Sequence
  Synthetic
agacauuagcuguugaaca

SEQ ID NO: 458651 - RNA, 20 nt, Artificial Sequence
  Synthetic
aagacauuagcuguugaaca

SEQ ID NO: 458652 - RNA, 21 nt, Artificial Sequence
  Synthetic
caagacauuagcuguugaaca

SEQ ID NO: 458653 - RNA, 22 nt, Artificial Sequence
  Synthetic
acaagacauuagcuguugaaca

SEQ ID NO: 458654 - RNA, 23 nt, Artificial Sequence
  Synthetic
uacaagacauuagcuguugaaca

SEQ ID NO: 458655 - RNA, 24 nt, Artificial Sequence
  Synthetic
uuacaagacauuagcuguugaaca

SEQ ID NO: 458656 - RNA, 18 nt, Artificial Sequence
  Synthetic
uuacaaagcaaaauaaca

SEQ ID NO: 458657 - RNA, 19 nt, Artificial Sequence
  Synthetic
cuuacaaagcaaaauaaca

SEQ ID NO: 458658 - RNA, 20 nt, Artificial Sequence
  Synthetic
gcuuacaaagcaaaauaaca

SEQ ID NO: 458659 - RNA, 21 nt, Artificial Sequence
  Synthetic
agcuuacaaagcaaaauaaca

SEQ ID NO: 458660 - RNA, 22 nt, Artificial Sequence
  Synthetic
uagcuuacaaagcaaaauaaca

SEQ ID NO: 458661 - RNA, 23 nt, Artificial Sequence
  Synthetic
guagcuuacaaagcaaaauaaca

SEQ ID NO: 458662 - RNA, 24 nt, Artificial Sequence
  Synthetic
gguagcuuacaaagcaaaauaaca

SEQ ID NO: 458663 - RNA, 18 nt, Artificial Sequence
  Synthetic
gggaaguaacaaauaaca

SEQ ID NO: 458664 - RNA, 19 nt, Artificial Sequence
  Synthetic
ugggaaguaacaaauaaca

SEQ ID NO: 458665 - RNA, 20 nt, Artificial Sequence
  Synthetic
uugggaaguaacaaauaaca

SEQ ID NO: 458666 - RNA, 21 nt, Artificial Sequence
  Synthetic
cuugggaaguaacaaauaaca

SEQ ID NO: 458667 - RNA, 22 nt, Artificial Sequence
  Synthetic
acuugggaaguaacaaauaaca

SEQ ID NO: 458668 - RNA, 23 nt, Artificial Sequence
  Synthetic
cacuugggaaguaacaaauaaca

SEQ ID NO: 458669 - RNA, 24 nt, Artificial Sequence
  Synthetic
ucacuugggaaguaacaaauaaca

SEQ ID NO: 458670 - RNA, 18 nt, Artificial Sequence
  Synthetic
auccuaggugaaauaaca

SEQ ID NO: 458671 - RNA, 19 nt, Artificial Sequence
  Synthetic
uauccuaggugaaauaaca

SEQ ID NO: 458672 - RNA, 20 nt, Artificial Sequence
  Synthetic
uuauccuaggugaaauaaca

SEQ ID NO: 458673 - RNA, 21 nt, Artificial Sequence
  Synthetic
auuauccuaggugaaauaaca

SEQ ID NO: 458674 - RNA, 22 nt, Artificial Sequence
  Synthetic
cauuauccuaggugaaauaaca

SEQ ID NO: 458675 - RNA, 23 nt, Artificial Sequence
  Synthetic
ccauuauccuaggugaaauaaca

SEQ ID NO: 458676 - RNA, 24 nt, Artificial Sequence
  Synthetic
gccauuauccuaggugaaauaaca

SEQ ID NO: 458677 - RNA, 18 nt, Artificial Sequence
  Synthetic
aacuccuuaguaauaaca

SEQ ID NO: 458678 - RNA, 19 nt, Artificial Sequence
  Synthetic
uaacuccuuaguaauaaca

SEQ ID NO: 458679 - RNA, 20 nt, Artificial Sequence
  Synthetic
uuaacuccuuaguaauaaca

SEQ ID NO: 458680 - RNA, 21 nt, Artificial Sequence
  Synthetic
uuuaacuccuuaguaauaaca

SEQ ID NO: 458681 - RNA, 22 nt, Artificial Sequence
  Synthetic
auuuaacuccuuaguaauaaca

SEQ ID NO: 458682 - RNA, 23 nt, Artificial Sequence
  Synthetic
uauuuaacuccuuaguaauaaca

SEQ ID NO: 458683 - RNA, 24 nt, Artificial Sequence
  Synthetic
uuauuuaacuccuuaguaauaaca

SEQ ID NO: 458684 - RNA, 18 nt, Artificial Sequence
  Synthetic
auggcauguacgauaaca

SEQ ID NO: 458685 - RNA, 19 nt, Artificial Sequence
  Synthetic
aauggcauguacgauaaca

SEQ ID NO: 458686 - RNA, 20 nt, Artificial Sequence
  Synthetic
gaauggcauguacgauaaca

SEQ ID NO: 458687 - RNA, 21 nt, Artificial Sequence
  Synthetic
ggaauggcauguacgauaaca

SEQ ID NO: 458688 - RNA, 22 nt, Artificial Sequence
  Synthetic
cggaauggcauguacgauaaca

SEQ ID NO: 458689 - RNA, 23 nt, Artificial Sequence
  Synthetic
acggaauggcauguacgauaaca

SEQ ID NO: 458690 - RNA, 24 nt, Artificial Sequence
  Synthetic
gacggaauggcauguacgauaaca

SEQ ID NO: 458691 - RNA, 18 nt, Artificial Sequence
  Synthetic
caccaauaaaugauaaca

SEQ ID NO: 458692 - RNA, 19 nt, Artificial Sequence
  Synthetic
acaccaauaaaugauaaca

SEQ ID NO: 458693 - RNA, 20 nt, Artificial Sequence
  Synthetic
gacaccaauaaaugauaaca

SEQ ID NO: 458694 - RNA, 21 nt, Artificial Sequence
  Synthetic
agacaccaauaaaugauaaca

SEQ ID NO: 458695 - RNA, 22 nt, Artificial Sequence
  Synthetic
cagacaccaauaaaugauaaca

SEQ ID NO: 458696 - RNA, 23 nt, Artificial Sequence
  Synthetic
acagacaccaauaaaugauaaca

SEQ ID NO: 458697 - RNA, 24 nt, Artificial Sequence
  Synthetic
aacagacaccaauaaaugauaaca

SEQ ID NO: 458698 - RNA, 18 nt, Artificial Sequence
  Synthetic
acauuaugacugauaaca

SEQ ID NO: 458699 - RNA, 19 nt, Artificial Sequence
  Synthetic
gacauuaugacugauaaca

SEQ ID NO: 458700 - RNA, 20 nt, Artificial Sequence
  Synthetic
agacauuaugacugauaaca

SEQ ID NO: 458701 - RNA, 21 nt, Artificial Sequence
  Synthetic
aagacauuaugacugauaaca

SEQ ID NO: 458702 - RNA, 22 nt, Artificial Sequence
  Synthetic
gaagacauuaugacugauaaca

SEQ ID NO: 458703 - RNA, 23 nt, Artificial Sequence
  Synthetic
agaagacauuaugacugauaaca

SEQ ID NO: 458704 - RNA, 24 nt, Artificial Sequence
  Synthetic
gagaagacauuaugacugauaaca

SEQ ID NO: 458705 - RNA, 18 nt, Artificial Sequence
  Synthetic
uuuaaguaucugauaaca

SEQ ID NO: 458706 - RNA, 19 nt, Artificial Sequence
  Synthetic
uuuuaaguaucugauaaca

SEQ ID NO: 458707 - RNA, 20 nt, Artificial Sequence
  Synthetic
guuuuaaguaucugauaaca

SEQ ID NO: 458708 - RNA, 21 nt, Artificial Sequence
  Synthetic
aguuuuaaguaucugauaaca

SEQ ID NO: 458709 - RNA, 22 nt, Artificial Sequence
  Synthetic
caguuuuaaguaucugauaaca

SEQ ID NO: 458710 - RNA, 23 nt, Artificial Sequence
  Synthetic
ccaguuuuaaguaucugauaaca

SEQ ID NO: 458711 - RNA, 24 nt, Artificial Sequence
  Synthetic
uccaguuuuaaguaucugauaaca

SEQ ID NO: 458712 - RNA, 18 nt, Artificial Sequence
  Synthetic
cauacuugcuauauaaca

SEQ ID NO: 458713 - RNA, 19 nt, Artificial Sequence
  Synthetic
acauacuugcuauauaaca

SEQ ID NO: 458714 - RNA, 20 nt, Artificial Sequence
  Synthetic
aacauacuugcuauauaaca

SEQ ID NO: 458715 - RNA, 21 nt, Artificial Sequence
  Synthetic
aaacauacuugcuauauaaca

SEQ ID NO: 458716 - RNA, 22 nt, Artificial Sequence
  Synthetic
aaaacauacuugcuauauaaca

SEQ ID NO: 458717 - RNA, 23 nt, Artificial Sequence
  Synthetic
caaaacauacuugcuauauaaca

SEQ ID NO: 458718 - RNA, 24 nt, Artificial Sequence
  Synthetic
ucaaaacauacuugcuauauaaca

SEQ ID NO: 458719 - RNA, 18 nt, Artificial Sequence
  Synthetic
augccaguagcuauaaca

SEQ ID NO: 458720 - RNA, 19 nt, Artificial Sequence
  Synthetic
aaugccaguagcuauaaca

SEQ ID NO: 458721 - RNA, 20 nt, Artificial Sequence
  Synthetic
uaaugccaguagcuauaaca

SEQ ID NO: 458722 - RNA, 21 nt, Artificial Sequence
  Synthetic
uuaaugccaguagcuauaaca

SEQ ID NO: 458723 - RNA, 22 nt, Artificial Sequence
  Synthetic
guuaaugccaguagcuauaaca

SEQ ID NO: 458724 - RNA, 23 nt, Artificial Sequence
  Synthetic
gguuaaugccaguagcuauaaca

SEQ ID NO: 458725 - RNA, 24 nt, Artificial Sequence
  Synthetic
agguuaaugccaguagcuauaaca

SEQ ID NO: 458726 - RNA, 18 nt, Artificial Sequence
  Synthetic
uaguggagaguuauaaca

SEQ ID NO: 458727 - RNA, 19 nt, Artificial Sequence
  Synthetic
uuaguggagaguuauaaca

SEQ ID NO: 458728 - RNA, 20 nt, Artificial Sequence
  Synthetic
auuaguggagaguuauaaca

SEQ ID NO: 458729 - RNA, 21 nt, Artificial Sequence
  Synthetic
uauuaguggagaguuauaaca

SEQ ID NO: 458730 - RNA, 22 nt, Artificial Sequence
  Synthetic
auauuaguggagaguuauaaca

SEQ ID NO: 458731 - RNA, 23 nt, Artificial Sequence
  Synthetic
aauauuaguggagaguuauaaca

SEQ ID NO: 458732 - RNA, 24 nt, Artificial Sequence
  Synthetic
uaauauuaguggagaguuauaaca

SEQ ID NO: 458733 - RNA, 21 nt, Artificial Sequence
  Synthetic
gucauucucagcaaacuaaca

SEQ ID NO: 458734 - RNA, 22 nt, Artificial Sequence
  Synthetic
cgucauucucagcaaacuaaca

SEQ ID NO: 458735 - RNA, 23 nt, Artificial Sequence
  Synthetic
ccgucauucucagcaaacuaaca

SEQ ID NO: 458736 - RNA, 24 nt, Artificial Sequence
  Synthetic
accgucauucucagcaaacuaaca

SEQ ID NO: 458737 - RNA, 18 nt, Artificial Sequence
  Synthetic
auucuuagcaaacuaaca

SEQ ID NO: 458738 - RNA, 19 nt, Artificial Sequence
  Synthetic
cauucuuagcaaacuaaca

SEQ ID NO: 458739 - RNA, 20 nt, Artificial Sequence
  Synthetic
ucauucuuagcaaacuaaca

SEQ ID NO: 458740 - RNA, 21 nt, Artificial Sequence
  Synthetic
aucauucuuagcaaacuaaca

SEQ ID NO: 458741 - RNA, 22 nt, Artificial Sequence
  Synthetic
caucauucuuagcaaacuaaca

SEQ ID NO: 458742 - RNA, 23 nt, Artificial Sequence
  Synthetic
ccaucauucuuagcaaacuaaca

SEQ ID NO: 458743 - RNA, 24 nt, Artificial Sequence
  Synthetic
accaucauucuuagcaaacuaaca

SEQ ID NO: 458744 - RNA, 18 nt, Artificial Sequence
  Synthetic
ccacauuuugcacuaaca

SEQ ID NO: 458745 - RNA, 19 nt, Artificial Sequence
  Synthetic
uccacauuuugcacuaaca

SEQ ID NO: 458746 - RNA, 20 nt, Artificial Sequence
  Synthetic
guccacauuuugcacuaaca

SEQ ID NO: 458747 - RNA, 21 nt, Artificial Sequence
  Synthetic
aguccacauuuugcacuaaca

SEQ ID NO: 458748 - RNA, 22 nt, Artificial Sequence
  Synthetic
caguccacauuuugcacuaaca

SEQ ID NO: 458749 - RNA, 23 nt, Artificial Sequence
  Synthetic
ccaguccacauuuugcacuaaca

SEQ ID NO: 458750 - RNA, 24 nt, Artificial Sequence
  Synthetic
uccaguccacauuuugcacuaaca

SEQ ID NO: 458751 - RNA, 18 nt, Artificial Sequence
  Synthetic
uucuugcuaugacuaaca

SEQ ID NO: 458752 - RNA, 19 nt, Artificial Sequence
  Synthetic
auucuugcuaugacuaaca

SEQ ID NO: 458753 - RNA, 20 nt, Artificial Sequence
  Synthetic
cauucuugcuaugacuaaca

SEQ ID NO: 458754 - RNA, 21 nt, Artificial Sequence
  Synthetic
ucauucuugcuaugacuaaca

SEQ ID NO: 458755 - RNA, 22 nt, Artificial Sequence
  Synthetic
gucauucuugcuaugacuaaca

SEQ ID NO: 458756 - RNA, 23 nt, Artificial Sequence
  Synthetic
ggucauucuugcuaugacuaaca

SEQ ID NO: 458757 - RNA, 24 nt, Artificial Sequence
  Synthetic
aggucauucuugcuaugacuaaca

SEQ ID NO: 458758 - RNA, 18 nt, Artificial Sequence
  Synthetic
aaggaaauuauacuaaca

SEQ ID NO: 458759 - RNA, 19 nt, Artificial Sequence
  Synthetic
caaggaaauuauacuaaca

SEQ ID NO: 458760 - RNA, 20 nt, Artificial Sequence
  Synthetic
ucaaggaaauuauacuaaca

SEQ ID NO: 458761 - RNA, 21 nt, Artificial Sequence
  Synthetic
uucaaggaaauuauacuaaca

SEQ ID NO: 458762 - RNA, 22 nt, Artificial Sequence
  Synthetic
auucaaggaaauuauacuaaca

SEQ ID NO: 458763 - RNA, 23 nt, Artificial Sequence
  Synthetic
aauucaaggaaauuauacuaaca

SEQ ID NO: 458764 - RNA, 24 nt, Artificial Sequence
  Synthetic
aaauucaaggaaauuauacuaaca

SEQ ID NO: 458765 - RNA, 18 nt, Artificial Sequence
  Synthetic
ccaaaccuguaccuaaca

SEQ ID NO: 458766 - RNA, 19 nt, Artificial Sequence
  Synthetic
accaaaccuguaccuaaca

SEQ ID NO: 458767 - RNA, 20 nt, Artificial Sequence
  Synthetic
caccaaaccuguaccuaaca

SEQ ID NO: 458768 - RNA, 21 nt, Artificial Sequence
  Synthetic
ucaccaaaccuguaccuaaca

SEQ ID NO: 458769 - RNA, 22 nt, Artificial Sequence
  Synthetic
aucaccaaaccuguaccuaaca

SEQ ID NO: 458770 - RNA, 23 nt, Artificial Sequence
  Synthetic
aaucaccaaaccuguaccuaaca

SEQ ID NO: 458771 - RNA, 24 nt, Artificial Sequence
  Synthetic
gaaucaccaaaccuguaccuaaca

SEQ ID NO: 458772 - RNA, 18 nt, Artificial Sequence
  Synthetic
uuuuuuagcuuccuaaca

SEQ ID NO: 458773 - RNA, 19 nt, Artificial Sequence
  Synthetic
uuuuuuuagcuuccuaaca

SEQ ID NO: 458774 - RNA, 20 nt, Artificial Sequence
  Synthetic
uuuuuuuuagcuuccuaaca

SEQ ID NO: 458775 - RNA, 21 nt, Artificial Sequence
  Synthetic
auuuuuuuuagcuuccuaaca

SEQ ID NO: 458776 - RNA, 22 nt, Artificial Sequence
  Synthetic
aauuuuuuuuagcuuccuaaca

SEQ ID NO: 458777 - RNA, 23 nt, Artificial Sequence
  Synthetic
caauuuuuuuuagcuuccuaaca

SEQ ID NO: 458778 - RNA, 24 nt, Artificial Sequence
  Synthetic
acaauuuuuuuuagcuuccuaaca

SEQ ID NO: 458779 - RNA, 18 nt, Artificial Sequence
  Synthetic
cacugaagagggcuaaca

SEQ ID NO: 458780 - RNA, 19 nt, Artificial Sequence
  Synthetic
acacugaagagggcuaaca

SEQ ID NO: 458781 - RNA, 20 nt, Artificial Sequence
  Synthetic
aacacugaagagggcuaaca

SEQ ID NO: 458782 - RNA, 21 nt, Artificial Sequence
  Synthetic
uaacacugaagagggcuaaca

SEQ ID NO: 458783 - RNA, 22 nt, Artificial Sequence
  Synthetic
uuaacacugaagagggcuaaca

SEQ ID NO: 458784 - RNA, 23 nt, Artificial Sequence
  Synthetic
auuaacacugaagagggcuaaca

SEQ ID NO: 458785 - RNA, 24 nt, Artificial Sequence
  Synthetic
uauuaacacugaagagggcuaaca

SEQ ID NO: 458786 - RNA, 18 nt, Artificial Sequence
  Synthetic
aaugaaacauggcuaaca

SEQ ID NO: 458787 - RNA, 19 nt, Artificial Sequence
  Synthetic
caaugaaacauggcuaaca

SEQ ID NO: 458788 - RNA, 20 nt, Artificial Sequence
  Synthetic
ucaaugaaacauggcuaaca

SEQ ID NO: 458789 - RNA, 21 nt, Artificial Sequence
  Synthetic
cucaaugaaacauggcuaaca

SEQ ID NO: 458790 - RNA, 22 nt, Artificial Sequence
  Synthetic
acucaaugaaacauggcuaaca

SEQ ID NO: 458791 - RNA, 23 nt, Artificial Sequence
  Synthetic
cacucaaugaaacauggcuaaca

SEQ ID NO: 458792 - RNA, 24 nt, Artificial Sequence
  Synthetic
ccacucaaugaaacauggcuaaca

SEQ ID NO: 458793 - RNA, 18 nt, Artificial Sequence
  Synthetic
agaccauccuggcuaaca

SEQ ID NO: 458794 - RNA, 19 nt, Artificial Sequence
  Synthetic
gagaccauccuggcuaaca

SEQ ID NO: 458795 - RNA, 20 nt, Artificial Sequence
  Synthetic
cgagaccauccuggcuaaca

SEQ ID NO: 458796 - RNA, 21 nt, Artificial Sequence
  Synthetic
ucgagaccauccuggcuaaca

SEQ ID NO: 458797 - RNA, 22 nt, Artificial Sequence
  Synthetic
aucgagaccauccuggcuaaca

SEQ ID NO: 458798 - RNA, 23 nt, Artificial Sequence
  Synthetic
gaucgagaccauccuggcuaaca

SEQ ID NO: 458799 - RNA, 24 nt, Artificial Sequence
  Synthetic
agaucgagaccauccuggcuaaca

SEQ ID NO: 458800 - RNA, 18 nt, Artificial Sequence
  Synthetic
ugaacauaugugcuaaca

SEQ ID NO: 458801 - RNA, 19 nt, Artificial Sequence
  Synthetic
gugaacauaugugcuaaca

SEQ ID NO: 458802 - RNA, 20 nt, Artificial Sequence
  Synthetic
agugaacauaugugcuaaca

SEQ ID NO: 458803 - RNA, 21 nt, Artificial Sequence
  Synthetic
cagugaacauaugugcuaaca

SEQ ID NO: 458804 - RNA, 22 nt, Artificial Sequence
  Synthetic
acagugaacauaugugcuaaca

SEQ ID NO: 458805 - RNA, 23 nt, Artificial Sequence
  Synthetic
aacagugaacauaugugcuaaca

SEQ ID NO: 458806 - RNA, 24 nt, Artificial Sequence
  Synthetic
aaacagugaacauaugugcuaaca

SEQ ID NO: 458807 - RNA, 18 nt, Artificial Sequence
  Synthetic
uucugagugcaucuaaca

SEQ ID NO: 458808 - RNA, 19 nt, Artificial Sequence
  Synthetic
guucugagugcaucuaaca

SEQ ID NO: 458809 - RNA, 20 nt, Artificial Sequence
  Synthetic
gguucugagugcaucuaaca

SEQ ID NO: 458810 - RNA, 21 nt, Artificial Sequence
  Synthetic
agguucugagugcaucuaaca

SEQ ID NO: 458811 - RNA, 22 nt, Artificial Sequence
  Synthetic
gagguucugagugcaucuaaca

SEQ ID NO: 458812 - RNA, 23 nt, Artificial Sequence
  Synthetic
ugagguucugagugcaucuaaca

SEQ ID NO: 458813 - RNA, 24 nt, Artificial Sequence
  Synthetic
gugagguucugagugcaucuaaca

SEQ ID NO: 458814 - RNA, 18 nt, Artificial Sequence
  Synthetic
gucuguuuguaucuaaca

SEQ ID NO: 458815 - RNA, 19 nt, Artificial Sequence
  Synthetic
ugucuguuuguaucuaaca

SEQ ID NO: 458816 - RNA, 20 nt, Artificial Sequence
  Synthetic
cugucuguuuguaucuaaca

SEQ ID NO: 458817 - RNA, 21 nt, Artificial Sequence
  Synthetic
ccugucuguuuguaucuaaca

SEQ ID NO: 458818 - RNA, 22 nt, Artificial Sequence
  Synthetic
uccugucuguuuguaucuaaca

SEQ ID NO: 458819 - RNA, 23 nt, Artificial Sequence
  Synthetic
guccugucuguuuguaucuaaca

SEQ ID NO: 458820 - RNA, 24 nt, Artificial Sequence
  Synthetic
aguccugucuguuuguaucuaaca

SEQ ID NO: 458821 - RNA, 18 nt, Artificial Sequence
  Synthetic
aagaguucagcucuaaca

SEQ ID NO: 458822 - RNA, 19 nt, Artificial Sequence
  Synthetic
gaagaguucagcucuaaca

SEQ ID NO: 458823 - RNA, 20 nt, Artificial Sequence
  Synthetic
agaagaguucagcucuaaca

SEQ ID NO: 458824 - RNA, 21 nt, Artificial Sequence
  Synthetic
cagaagaguucagcucuaaca

SEQ ID NO: 458825 - RNA, 22 nt, Artificial Sequence
  Synthetic
ccagaagaguucagcucuaaca

SEQ ID NO: 458826 - RNA, 23 nt, Artificial Sequence
  Synthetic
accagaagaguucagcucuaaca

SEQ ID NO: 458827 - RNA, 24 nt, Artificial Sequence
  Synthetic
aaccagaagaguucagcucuaaca

SEQ ID NO: 458828 - RNA, 18 nt, Artificial Sequence
  Synthetic
uucuccauuucucuaaca

SEQ ID NO: 458829 - RNA, 19 nt, Artificial Sequence
  Synthetic
uuucuccauuucucuaaca

SEQ ID NO: 458830 - RNA, 20 nt, Artificial Sequence
  Synthetic
cuuucuccauuucucuaaca

SEQ ID NO: 458831 - RNA, 21 nt, Artificial Sequence
  Synthetic
acuuucuccauuucucuaaca

SEQ ID NO: 458832 - RNA, 22 nt, Artificial Sequence
  Synthetic
gacuuucuccauuucucuaaca

SEQ ID NO: 458833 - RNA, 23 nt, Artificial Sequence
  Synthetic
ugacuuucuccauuucucuaaca

SEQ ID NO: 458834 - RNA, 24 nt, Artificial Sequence
  Synthetic
cugacuuucuccauuucucuaaca

SEQ ID NO: 458835 - RNA, 18 nt, Artificial Sequence
  Synthetic
gugcugcucugucuaaca

SEQ ID NO: 458836 - RNA, 19 nt, Artificial Sequence
  Synthetic
ugugcugcucugucuaaca

SEQ ID NO: 458837 - RNA, 20 nt, Artificial Sequence
  Synthetic
cugugcugcucugucuaaca

SEQ ID NO: 458838 - RNA, 21 nt, Artificial Sequence
  Synthetic
gcugugcugcucugucuaaca

SEQ ID NO: 458839 - RNA, 22 nt, Artificial Sequence
  Synthetic
ggcugugcugcucugucuaaca

SEQ ID NO: 458840 - RNA, 23 nt, Artificial Sequence
  Synthetic
gggcugugcugcucugucuaaca

SEQ ID NO: 458841 - RNA, 24 nt, Artificial Sequence
  Synthetic
agggcugugcugcucugucuaaca

SEQ ID NO: 458842 - RNA, 18 nt, Artificial Sequence
  Synthetic
uauacugcauuucuaaca

SEQ ID NO: 458843 - RNA, 19 nt, Artificial Sequence
  Synthetic
uuauacugcauuucuaaca

SEQ ID NO: 458844 - RNA, 20 nt, Artificial Sequence
  Synthetic
auuauacugcauuucuaaca

SEQ ID NO: 458845 - RNA, 21 nt, Artificial Sequence
  Synthetic
cauuauacugcauuucuaaca

SEQ ID NO: 458846 - RNA, 22 nt, Artificial Sequence
  Synthetic
acauuauacugcauuucuaaca

SEQ ID NO: 458847 - RNA, 23 nt, Artificial Sequence
  Synthetic
cacauuauacugcauuucuaaca

SEQ ID NO: 458848 - RNA, 24 nt, Artificial Sequence
  Synthetic
ccacauuauacugcauuucuaaca

SEQ ID NO: 458849 - RNA, 18 nt, Artificial Sequence
  Synthetic
caccuuaaaaaaguaaca

SEQ ID NO: 458850 - RNA, 19 nt, Artificial Sequence
  Synthetic
acaccuuaaaaaaguaaca

SEQ ID NO: 458851 - RNA, 20 nt, Artificial Sequence
  Synthetic
cacaccuuaaaaaaguaaca

SEQ ID NO: 458852 - RNA, 21 nt, Artificial Sequence
  Synthetic
ucacaccuuaaaaaaguaaca

SEQ ID NO: 458853 - RNA, 22 nt, Artificial Sequence
  Synthetic
aucacaccuuaaaaaaguaaca

SEQ ID NO: 458854 - RNA, 23 nt, Artificial Sequence
  Synthetic
uaucacaccuuaaaaaaguaaca

SEQ ID NO: 458855 - RNA, 24 nt, Artificial Sequence
  Synthetic
uuaucacaccuuaaaaaaguaaca

SEQ ID NO: 458856 - RNA, 18 nt, Artificial Sequence
  Synthetic
cccucugaguaaguaaca

SEQ ID NO: 458857 - RNA, 19 nt, Artificial Sequence
  Synthetic
ucccucugaguaaguaaca

SEQ ID NO: 458858 - RNA, 20 nt, Artificial Sequence
  Synthetic
gucccucugaguaaguaaca

SEQ ID NO: 458859 - RNA, 21 nt, Artificial Sequence
  Synthetic
agucccucugaguaaguaaca

SEQ ID NO: 458860 - RNA, 22 nt, Artificial Sequence
  Synthetic
gagucccucugaguaaguaaca

SEQ ID NO: 458861 - RNA, 23 nt, Artificial Sequence
  Synthetic
ugagucccucugaguaaguaaca

SEQ ID NO: 458862 - RNA, 24 nt, Artificial Sequence
  Synthetic
gugagucccucugaguaaguaaca

SEQ ID NO: 458863 - RNA, 18 nt, Artificial Sequence
  Synthetic
gauugaaaggcaguaaca

SEQ ID NO: 458864 - RNA, 19 nt, Artificial Sequence
  Synthetic
ugauugaaaggcaguaaca

SEQ ID NO: 458865 - RNA, 20 nt, Artificial Sequence
  Synthetic
augauugaaaggcaguaaca

SEQ ID NO: 458866 - RNA, 21 nt, Artificial Sequence
  Synthetic
aaugauugaaaggcaguaaca

SEQ ID NO: 458867 - RNA, 22 nt, Artificial Sequence
  Synthetic
caaugauugaaaggcaguaaca

SEQ ID NO: 458868 - RNA, 23 nt, Artificial Sequence
  Synthetic
acaaugauugaaaggcaguaaca

SEQ ID NO: 458869 - RNA, 24 nt, Artificial Sequence
  Synthetic
aacaaugauugaaaggcaguaaca

SEQ ID NO: 458870 - RNA, 18 nt, Artificial Sequence
  Synthetic
cuuaaaaauucaguaaca

SEQ ID NO: 458871 - RNA, 19 nt, Artificial Sequence
  Synthetic
ucuuaaaaauucaguaaca

SEQ ID NO: 458872 - RNA, 20 nt, Artificial Sequence
  Synthetic
gucuuaaaaauucaguaaca

SEQ ID NO: 458873 - RNA, 21 nt, Artificial Sequence
  Synthetic
agucuuaaaaauucaguaaca

SEQ ID NO: 458874 - RNA, 22 nt, Artificial Sequence
  Synthetic
cagucuuaaaaauucaguaaca

SEQ ID NO: 458875 - RNA, 23 nt, Artificial Sequence
  Synthetic
gcagucuuaaaaauucaguaaca

SEQ ID NO: 458876 - RNA, 24 nt, Artificial Sequence
  Synthetic
agcagucuuaaaaauucaguaaca

SEQ ID NO: 458877 - RNA, 18 nt, Artificial Sequence
  Synthetic
gcugccuuuucaguaaca

SEQ ID NO: 458878 - RNA, 19 nt, Artificial Sequence
  Synthetic
ggcugccuuuucaguaaca

SEQ ID NO: 458879 - RNA, 20 nt, Artificial Sequence
  Synthetic
uggcugccuuuucaguaaca

SEQ ID NO: 458880 - RNA, 21 nt, Artificial Sequence
  Synthetic
uuggcugccuuuucaguaaca

SEQ ID NO: 458881 - RNA, 22 nt, Artificial Sequence
  Synthetic
uuuggcugccuuuucaguaaca

SEQ ID NO: 458882 - RNA, 23 nt, Artificial Sequence
  Synthetic
auuuggcugccuuuucaguaaca

SEQ ID NO: 458883 - RNA, 24 nt, Artificial Sequence
  Synthetic
uauuuggcugccuuuucaguaaca

SEQ ID NO: 458884 - RNA, 18 nt, Artificial Sequence
  Synthetic
ucaaccaaaguaguaaca

SEQ ID NO: 458885 - RNA, 19 nt, Artificial Sequence
  Synthetic
cucaaccaaaguaguaaca

SEQ ID NO: 458886 - RNA, 20 nt, Artificial Sequence
  Synthetic
gcucaaccaaaguaguaaca

SEQ ID NO: 458887 - RNA, 21 nt, Artificial Sequence
  Synthetic
agcucaaccaaaguaguaaca

SEQ ID NO: 458888 - RNA, 22 nt, Artificial Sequence
  Synthetic
aagcucaaccaaaguaguaaca

SEQ ID NO: 458889 - RNA, 23 nt, Artificial Sequence
  Synthetic
gaagcucaaccaaaguaguaaca

SEQ ID NO: 458890 - RNA, 24 nt, Artificial Sequence
  Synthetic
agaagcucaaccaaaguaguaaca

SEQ ID NO: 458891 - RNA, 18 nt, Artificial Sequence
  Synthetic
gauuagcaagggguaaca

SEQ ID NO: 458892 - RNA, 19 nt, Artificial Sequence
  Synthetic
ugauuagcaagggguaaca

SEQ ID NO: 458893 - RNA, 20 nt, Artificial Sequence
  Synthetic
gugauuagcaagggguaaca

SEQ ID NO: 458894 - RNA, 21 nt, Artificial Sequence
  Synthetic
ggugauuagcaagggguaaca

SEQ ID NO: 458895 - RNA, 22 nt, Artificial Sequence
  Synthetic
aggugauuagcaagggguaaca

SEQ ID NO: 458896 - RNA, 23 nt, Artificial Sequence
  Synthetic
aaggugauuagcaagggguaaca

SEQ ID NO: 458897 - RNA, 24 nt, Artificial Sequence
  Synthetic
gaaggugauuagcaagggguaaca

SEQ ID NO: 458898 - RNA, 18 nt, Artificial Sequence
  Synthetic
augaagcaaaugguaaca

SEQ ID NO: 458899 - RNA, 19 nt, Artificial Sequence
  Synthetic
aaugaagcaaaugguaaca

SEQ ID NO: 458900 - RNA, 20 nt, Artificial Sequence
  Synthetic
gaaugaagcaaaugguaaca

SEQ ID NO: 458901 - RNA, 21 nt, Artificial Sequence
  Synthetic
ugaaugaagcaaaugguaaca

SEQ ID NO: 458902 - RNA, 22 nt, Artificial Sequence
  Synthetic
augaaugaagcaaaugguaaca

SEQ ID NO: 458903 - RNA, 23 nt, Artificial Sequence
  Synthetic
caugaaugaagcaaaugguaaca

SEQ ID NO: 458904 - RNA, 24 nt, Artificial Sequence
  Synthetic
ccaugaaugaagcaaaugguaaca

SEQ ID NO: 458905 - RNA, 18 nt, Artificial Sequence
  Synthetic
guuuagucuauuguaaca

SEQ ID NO: 458906 - RNA, 19 nt, Artificial Sequence
  Synthetic
uguuuagucuauuguaaca

SEQ ID NO: 458907 - RNA, 20 nt, Artificial Sequence
  Synthetic
cuguuuagucuauuguaaca

SEQ ID NO: 458908 - RNA, 21 nt, Artificial Sequence
  Synthetic
ucuguuuagucuauuguaaca

SEQ ID NO: 458909 - RNA, 22 nt, Artificial Sequence
  Synthetic
uucuguuuagucuauuguaaca

SEQ ID NO: 458910 - RNA, 23 nt, Artificial Sequence
  Synthetic
cuucuguuuagucuauuguaaca

SEQ ID NO: 458911 - RNA, 24 nt, Artificial Sequence
  Synthetic
acuucuguuuagucuauuguaaca

SEQ ID NO: 458912 - RNA, 18 nt, Artificial Sequence
  Synthetic
agggacuagguuguaaca

SEQ ID NO: 458913 - RNA, 19 nt, Artificial Sequence
  Synthetic
uagggacuagguuguaaca

SEQ ID NO: 458914 - RNA, 20 nt, Artificial Sequence
  Synthetic
auagggacuagguuguaaca

SEQ ID NO: 458915 - RNA, 21 nt, Artificial Sequence
  Synthetic
uauagggacuagguuguaaca

SEQ ID NO: 458916 - RNA, 22 nt, Artificial Sequence
  Synthetic
cuauagggacuagguuguaaca

SEQ ID NO: 458917 - RNA, 23 nt, Artificial Sequence
  Synthetic
ccuauagggacuagguuguaaca

SEQ ID NO: 458918 - RNA, 24 nt, Artificial Sequence
  Synthetic
cccuauagggacuagguuguaaca

SEQ ID NO: 458919 - RNA, 18 nt, Artificial Sequence
  Synthetic
auuucccagacauuaaca

SEQ ID NO: 458920 - RNA, 19 nt, Artificial Sequence
  Synthetic
aauuucccagacauuaaca

SEQ ID NO: 458921 - RNA, 20 nt, Artificial Sequence
  Synthetic
caauuucccagacauuaaca

SEQ ID NO: 458922 - RNA, 21 nt, Artificial Sequence
  Synthetic
gcaauuucccagacauuaaca

SEQ ID NO: 458923 - RNA, 22 nt, Artificial Sequence
  Synthetic
ggcaauuucccagacauuaaca

SEQ ID NO: 458924 - RNA, 23 nt, Artificial Sequence
  Synthetic
uggcaauuucccagacauuaaca

SEQ ID NO: 458925 - RNA, 24 nt, Artificial Sequence
  Synthetic
cuggcaauuucccagacauuaaca

SEQ ID NO: 458926 - RNA, 18 nt, Artificial Sequence
  Synthetic
uccugugggacauuaaca

SEQ ID NO: 458927 - RNA, 19 nt, Artificial Sequence
  Synthetic
uuccugugggacauuaaca

SEQ ID NO: 458928 - RNA, 20 nt, Artificial Sequence
  Synthetic
guuccugugggacauuaaca

SEQ ID NO: 458929 - RNA, 21 nt, Artificial Sequence
  Synthetic
aguuccugugggacauuaaca

SEQ ID NO: 458930 - RNA, 22 nt, Artificial Sequence
  Synthetic
aaguuccugugggacauuaaca

SEQ ID NO: 458931 - RNA, 23 nt, Artificial Sequence
  Synthetic
gaaguuccugugggacauuaaca

SEQ ID NO: 458932 - RNA, 24 nt, Artificial Sequence
  Synthetic
ugaaguuccugugggacauuaaca

SEQ ID NO: 458933 - RNA, 18 nt, Artificial Sequence
  Synthetic
aucccuucuucauuaaca

SEQ ID NO: 458934 - RNA, 19 nt, Artificial Sequence
  Synthetic
caucccuucuucauuaaca

SEQ ID NO: 458935 - RNA, 20 nt, Artificial Sequence
  Synthetic
ucaucccuucuucauuaaca

SEQ ID NO: 458936 - RNA, 21 nt, Artificial Sequence
  Synthetic
aucaucccuucuucauuaaca

SEQ ID NO: 458937 - RNA, 22 nt, Artificial Sequence
  Synthetic
uaucaucccuucuucauuaaca

SEQ ID NO: 458938 - RNA, 23 nt, Artificial Sequence
  Synthetic
auaucaucccuucuucauuaaca

SEQ ID NO: 458939 - RNA, 24 nt, Artificial Sequence
  Synthetic
aauaucaucccuucuucauuaaca

SEQ ID NO: 458940 - RNA, 18 nt, Artificial Sequence
  Synthetic
uuccaggugauauuaaca

SEQ ID NO: 458941 - RNA, 19 nt, Artificial Sequence
  Synthetic
cuuccaggugauauuaaca

SEQ ID NO: 458942 - RNA, 20 nt, Artificial Sequence
  Synthetic
acuuccaggugauauuaaca

SEQ ID NO: 458943 - RNA, 21 nt, Artificial Sequence
  Synthetic
aacuuccaggugauauuaaca

SEQ ID NO: 458944 - RNA, 22 nt, Artificial Sequence
  Synthetic
uaacuuccaggugauauuaaca

SEQ ID NO: 458945 - RNA, 23 nt, Artificial Sequence
  Synthetic
uuaacuuccaggugauauuaaca

SEQ ID NO: 458946 - RNA, 24 nt, Artificial Sequence
  Synthetic
guuaacuuccaggugauauuaaca

SEQ ID NO: 458947 - RNA, 18 nt, Artificial Sequence
  Synthetic
aggaauugucuauuaaca

SEQ ID NO: 458948 - RNA, 19 nt, Artificial Sequence
  Synthetic
aaggaauugucuauuaaca

SEQ ID NO: 458949 - RNA, 20 nt, Artificial Sequence
  Synthetic
aaaggaauugucuauuaaca

SEQ ID NO: 458950 - RNA, 21 nt, Artificial Sequence
  Synthetic
uaaaggaauugucuauuaaca

SEQ ID NO: 458951 - RNA, 22 nt, Artificial Sequence
  Synthetic
auaaaggaauugucuauuaaca

SEQ ID NO: 458952 - RNA, 23 nt, Artificial Sequence
  Synthetic
aauaaaggaauugucuauuaaca

SEQ ID NO: 458953 - RNA, 24 nt, Artificial Sequence
  Synthetic
aaauaaaggaauugucuauuaaca

SEQ ID NO: 458954 - RNA, 18 nt, Artificial Sequence
  Synthetic
gucuuauuuuuauuaaca

SEQ ID NO: 458955 - RNA, 19 nt, Artificial Sequence
  Synthetic
ggucuuauuuuuauuaaca

SEQ ID NO: 458956 - RNA, 20 nt, Artificial Sequence
  Synthetic
gggucuuauuuuuauuaaca

SEQ ID NO: 458957 - RNA, 21 nt, Artificial Sequence
  Synthetic
agggucuuauuuuuauuaaca

SEQ ID NO: 458958 - RNA, 22 nt, Artificial Sequence
  Synthetic
aagggucuuauuuuuauuaaca

SEQ ID NO: 458959 - RNA, 23 nt, Artificial Sequence
  Synthetic
uaagggucuuauuuuuauuaaca

SEQ ID NO: 458960 - RNA, 24 nt, Artificial Sequence
  Synthetic
auaagggucuuauuuuuauuaaca

SEQ ID NO: 458961 - RNA, 18 nt, Artificial Sequence
  Synthetic
ugaaacaaaaacuuaaca

SEQ ID NO: 458962 - RNA, 19 nt, Artificial Sequence
  Synthetic
cugaaacaaaaacuuaaca

SEQ ID NO: 458963 - RNA, 20 nt, Artificial Sequence
  Synthetic
acugaaacaaaaacuuaaca

SEQ ID NO: 458964 - RNA, 21 nt, Artificial Sequence
  Synthetic
cacugaaacaaaaacuuaaca

SEQ ID NO: 458965 - RNA, 22 nt, Artificial Sequence
  Synthetic
ucacugaaacaaaaacuuaaca

SEQ ID NO: 458966 - RNA, 23 nt, Artificial Sequence
  Synthetic
gucacugaaacaaaaacuuaaca

SEQ ID NO: 458967 - RNA, 24 nt, Artificial Sequence
  Synthetic
ggucacugaaacaaaaacuuaaca

SEQ ID NO: 458968 - RNA, 18 nt, Artificial Sequence
  Synthetic
uauggauggaacuuaaca

SEQ ID NO: 458969 - RNA, 19 nt, Artificial Sequence
  Synthetic
auauggauggaacuuaaca

SEQ ID NO: 458970 - RNA, 20 nt, Artificial Sequence
  Synthetic
aauauggauggaacuuaaca

SEQ ID NO: 458971 - RNA, 21 nt, Artificial Sequence
  Synthetic
aaauauggauggaacuuaaca

SEQ ID NO: 458972 - RNA, 22 nt, Artificial Sequence
  Synthetic
gaaauauggauggaacuuaaca

SEQ ID NO: 458973 - RNA, 23 nt, Artificial Sequence
  Synthetic
agaaauauggauggaacuuaaca

SEQ ID NO: 458974 - RNA, 24 nt, Artificial Sequence
  Synthetic
aagaaauauggauggaacuuaaca

SEQ ID NO: 458975 - RNA, 18 nt, Artificial Sequence
  Synthetic
ucacuccucugcuuaaca

SEQ ID NO: 458976 - RNA, 19 nt, Artificial Sequence
  Synthetic
gucacuccucugcuuaaca

SEQ ID NO: 458977 - RNA, 20 nt, Artificial Sequence
  Synthetic
agucacuccucugcuuaaca

SEQ ID NO: 458978 - RNA, 21 nt, Artificial Sequence
  Synthetic
aagucacuccucugcuuaaca

SEQ ID NO: 458979 - RNA, 22 nt, Artificial Sequence
  Synthetic
gaagucacuccucugcuuaaca

SEQ ID NO: 458980 - RNA, 23 nt, Artificial Sequence
  Synthetic
ugaagucacuccucugcuuaaca

SEQ ID NO: 458981 - RNA, 24 nt, Artificial Sequence
  Synthetic
augaagucacuccucugcuuaaca

SEQ ID NO: 458982 - RNA, 18 nt, Artificial Sequence
  Synthetic
aacgcauuuuucuuaaca

SEQ ID NO: 458983 - RNA, 19 nt, Artificial Sequence
  Synthetic
caacgcauuuuucuuaaca

SEQ ID NO: 458984 - RNA, 20 nt, Artificial Sequence
  Synthetic
acaacgcauuuuucuuaaca

SEQ ID NO: 458985 - RNA, 21 nt, Artificial Sequence
  Synthetic
aacaacgcauuuuucuuaaca

SEQ ID NO: 458986 - RNA, 22 nt, Artificial Sequence
  Synthetic
gaacaacgcauuuuucuuaaca

SEQ ID NO: 458987 - RNA, 23 nt, Artificial Sequence
  Synthetic
ggaacaacgcauuuuucuuaaca

SEQ ID NO: 458988 - RNA, 24 nt, Artificial Sequence
  Synthetic
gggaacaacgcauuuuucuuaaca

SEQ ID NO: 458989 - RNA, 18 nt, Artificial Sequence
  Synthetic
gagaaugaaaaguuaaca

SEQ ID NO: 458990 - RNA, 19 nt, Artificial Sequence
  Synthetic
ugagaaugaaaaguuaaca

SEQ ID NO: 458991 - RNA, 20 nt, Artificial Sequence
  Synthetic
augagaaugaaaaguuaaca

SEQ ID NO: 458992 - RNA, 21 nt, Artificial Sequence
  Synthetic
aaugagaaugaaaaguuaaca

SEQ ID NO: 458993 - RNA, 22 nt, Artificial Sequence
  Synthetic
gaaugagaaugaaaaguuaaca

SEQ ID NO: 458994 - RNA, 23 nt, Artificial Sequence
  Synthetic
ggaaugagaaugaaaaguuaaca

SEQ ID NO: 458995 - RNA, 24 nt, Artificial Sequence
  Synthetic
uggaaugagaaugaaaaguuaaca

SEQ ID NO: 458996 - RNA, 18 nt, Artificial Sequence
  Synthetic
uucaccucaaaguuaaca

SEQ ID NO: 458997 - RNA, 19 nt, Artificial Sequence
  Synthetic
uuucaccucaaaguuaaca

SEQ ID NO: 458998 - RNA, 20 nt, Artificial Sequence
  Synthetic
uuuucaccucaaaguuaaca

SEQ ID NO: 458999 - RNA, 21 nt, Artificial Sequence
  Synthetic
auuuucaccucaaaguuaaca

SEQ ID NO: 459000 - RNA, 22 nt, Artificial Sequence
  Synthetic
aauuuucaccucaaaguuaaca

SEQ ID NO: 459001 - RNA, 23 nt, Artificial Sequence
  Synthetic
aaauuuucaccucaaaguuaaca

SEQ ID NO: 459002 - RNA, 24 nt, Artificial Sequence
  Synthetic
caaauuuucaccucaaaguuaaca

SEQ ID NO: 459003 - RNA, 18 nt, Artificial Sequence
  Synthetic
cugcuuucugaguuaaca

SEQ ID NO: 459004 - RNA, 19 nt, Artificial Sequence
  Synthetic
ucugcuuucugaguuaaca

SEQ ID NO: 459005 - RNA, 20 nt, Artificial Sequence
  Synthetic
uucugcuuucugaguuaaca

SEQ ID NO: 459006 - RNA, 21 nt, Artificial Sequence
  Synthetic
cuucugcuuucugaguuaaca

SEQ ID NO: 459007 - RNA, 22 nt, Artificial Sequence
  Synthetic
ccuucugcuuucugaguuaaca

SEQ ID NO: 459008 - RNA, 23 nt, Artificial Sequence
  Synthetic
accuucugcuuucugaguuaaca

SEQ ID NO: 459009 - RNA, 24 nt, Artificial Sequence
  Synthetic
aaccuucugcuuucugaguuaaca

SEQ ID NO: 459010 - RNA, 18 nt, Artificial Sequence
  Synthetic
augauuuugggguuaaca

SEQ ID NO: 459011 - RNA, 19 nt, Artificial Sequence
  Synthetic
aaugauuuugggguuaaca

SEQ ID NO: 459012 - RNA, 20 nt, Artificial Sequence
  Synthetic
gaaugauuuugggguuaaca

SEQ ID NO: 459013 - RNA, 21 nt, Artificial Sequence
  Synthetic
ugaaugauuuugggguuaaca

SEQ ID NO: 459014 - RNA, 22 nt, Artificial Sequence
  Synthetic
uugaaugauuuugggguuaaca

SEQ ID NO: 459015 - RNA, 23 nt, Artificial Sequence
  Synthetic
cuugaaugauuuugggguuaaca

SEQ ID NO: 459016 - RNA, 24 nt, Artificial Sequence
  Synthetic
ucuugaaugauuuugggguuaaca

SEQ ID NO: 459017 - RNA, 18 nt, Artificial Sequence
  Synthetic
uuuguaacuugguuaaca

SEQ ID NO: 459018 - RNA, 19 nt, Artificial Sequence
  Synthetic
cuuuguaacuugguuaaca

SEQ ID NO: 459019 - RNA, 20 nt, Artificial Sequence
  Synthetic
acuuuguaacuugguuaaca

SEQ ID NO: 459020 - RNA, 21 nt, Artificial Sequence
  Synthetic
cacuuuguaacuugguuaaca

SEQ ID NO: 459021 - RNA, 22 nt, Artificial Sequence
  Synthetic
acacuuuguaacuugguuaaca

SEQ ID NO: 459022 - RNA, 23 nt, Artificial Sequence
  Synthetic
gacacuuuguaacuugguuaaca

SEQ ID NO: 459023 - RNA, 24 nt, Artificial Sequence
  Synthetic
agacacuuuguaacuugguuaaca

SEQ ID NO: 459024 - RNA, 18 nt, Artificial Sequence
  Synthetic
guggaaggcuuguuaaca

SEQ ID NO: 459025 - RNA, 19 nt, Artificial Sequence
  Synthetic
uguggaaggcuuguuaaca

SEQ ID NO: 459026 - RNA, 20 nt, Artificial Sequence
  Synthetic
auguggaaggcuuguuaaca

SEQ ID NO: 459027 - RNA, 21 nt, Artificial Sequence
  Synthetic
cauguggaaggcuuguuaaca

SEQ ID NO: 459028 - RNA, 22 nt, Artificial Sequence
  Synthetic
ucauguggaaggcuuguuaaca

SEQ ID NO: 459029 - RNA, 23 nt, Artificial Sequence
  Synthetic
gucauguggaaggcuuguuaaca

SEQ ID NO: 459030 - RNA, 24 nt, Artificial Sequence
  Synthetic
ugucauguggaaggcuuguuaaca

SEQ ID NO: 459031 - RNA, 18 nt, Artificial Sequence
  Synthetic
aaauuugcauauuuaaca

SEQ ID NO: 459032 - RNA, 19 nt, Artificial Sequence
  Synthetic
gaaauuugcauauuuaaca

SEQ ID NO: 459033 - RNA, 20 nt, Artificial Sequence
  Synthetic
agaaauuugcauauuuaaca

SEQ ID NO: 459034 - RNA, 21 nt, Artificial Sequence
  Synthetic
uagaaauuugcauauuuaaca

SEQ ID NO: 459035 - RNA, 22 nt, Artificial Sequence
  Synthetic
guagaaauuugcauauuuaaca

SEQ ID NO: 459036 - RNA, 23 nt, Artificial Sequence
  Synthetic
uguagaaauuugcauauuuaaca

SEQ ID NO: 459037 - RNA, 24 nt, Artificial Sequence
  Synthetic
cuguagaaauuugcauauuuaaca

SEQ ID NO: 459038 - RNA, 18 nt, Artificial Sequence
  Synthetic
auuauuaaaccuuuaaca

SEQ ID NO: 459039 - RNA, 19 nt, Artificial Sequence
  Synthetic
gauuauuaaaccuuuaaca

SEQ ID NO: 459040 - RNA, 20 nt, Artificial Sequence
  Synthetic
ugauuauuaaaccuuuaaca

SEQ ID NO: 459041 - RNA, 21 nt, Artificial Sequence
  Synthetic
gugauuauuaaaccuuuaaca

SEQ ID NO: 459042 - RNA, 22 nt, Artificial Sequence
  Synthetic
ugugauuauuaaaccuuuaaca

SEQ ID NO: 459043 - RNA, 23 nt, Artificial Sequence
  Synthetic
augugauuauuaaaccuuuaaca

SEQ ID NO: 459044 - RNA, 24 nt, Artificial Sequence
  Synthetic
aaugugauuauuaaaccuuuaaca

SEQ ID NO: 459045 - RNA, 18 nt, Artificial Sequence
  Synthetic
uuuugaucaccuuuaaca

SEQ ID NO: 459046 - RNA, 19 nt, Artificial Sequence
  Synthetic
uuuuugaucaccuuuaaca

SEQ ID NO: 459047 - RNA, 20 nt, Artificial Sequence
  Synthetic
uuuuuugaucaccuuuaaca

SEQ ID NO: 459048 - RNA, 21 nt, Artificial Sequence
  Synthetic
guuuuuugaucaccuuuaaca

SEQ ID NO: 459049 - RNA, 22 nt, Artificial Sequence
  Synthetic
aguuuuuugaucaccuuuaaca

SEQ ID NO: 459050 - RNA, 23 nt, Artificial Sequence
  Synthetic
aaguuuuuugaucaccuuuaaca

SEQ ID NO: 459051 - RNA, 24 nt, Artificial Sequence
  Synthetic
caaguuuuuugaucaccuuuaaca

SEQ ID NO: 459052 - RNA, 18 nt, Artificial Sequence
  Synthetic
acgguauuuuguuuaaca

SEQ ID NO: 459053 - RNA, 19 nt, Artificial Sequence
  Synthetic
uacgguauuuuguuuaaca

SEQ ID NO: 459054 - RNA, 20 nt, Artificial Sequence
  Synthetic
uuacgguauuuuguuuaaca

SEQ ID NO: 459055 - RNA, 21 nt, Artificial Sequence
  Synthetic
guuacgguauuuuguuuaaca

SEQ ID NO: 459056 - RNA, 22 nt, Artificial Sequence
  Synthetic
aguuacgguauuuuguuuaaca

SEQ ID NO: 459057 - RNA, 23 nt, Artificial Sequence
  Synthetic
aaguuacgguauuuuguuuaaca

SEQ ID NO: 459058 - RNA, 24 nt, Artificial Sequence
  Synthetic
aaaguuacgguauuuuguuuaaca

SEQ ID NO: 459059 - RNA, 18 nt, Artificial Sequence
  Synthetic
cuagcuuuuaaaaacaca

SEQ ID NO: 459060 - RNA, 19 nt, Artificial Sequence
  Synthetic
ucuagcuuuuaaaaacaca

SEQ ID NO: 459061 - RNA, 20 nt, Artificial Sequence
  Synthetic
cucuagcuuuuaaaaacaca

SEQ ID NO: 459062 - RNA, 21 nt, Artificial Sequence
  Synthetic
acucuagcuuuuaaaaacaca

SEQ ID NO: 459063 - RNA, 22 nt, Artificial Sequence
  Synthetic
cacucuagcuuuuaaaaacaca

SEQ ID NO: 459064 - RNA, 23 nt, Artificial Sequence
  Synthetic
ccacucuagcuuuuaaaaacaca

SEQ ID NO: 459065 - RNA, 24 nt, Artificial Sequence
  Synthetic
cccacucuagcuuuuaaaaacaca

SEQ ID NO: 459066 - RNA, 18 nt, Artificial Sequence
  Synthetic
caaaaccaucaaaacaca

SEQ ID NO: 459067 - RNA, 19 nt, Artificial Sequence
  Synthetic
acaaaaccaucaaaacaca

SEQ ID NO: 459068 - RNA, 20 nt, Artificial Sequence
  Synthetic
cacaaaaccaucaaaacaca

SEQ ID NO: 459069 - RNA, 21 nt, Artificial Sequence
  Synthetic
acacaaaaccaucaaaacaca

SEQ ID NO: 459070 - RNA, 22 nt, Artificial Sequence
  Synthetic
uacacaaaaccaucaaaacaca

SEQ ID NO: 459071 - RNA, 23 nt, Artificial Sequence
  Synthetic
cuacacaaaaccaucaaaacaca

SEQ ID NO: 459072 - RNA, 24 nt, Artificial Sequence
  Synthetic
acuacacaaaaccaucaaaacaca

SEQ ID NO: 459073 - RNA, 18 nt, Artificial Sequence
  Synthetic
aagaauaaauaaaacaca

SEQ ID NO: 459074 - RNA, 19 nt, Artificial Sequence
  Synthetic
aaagaauaaauaaaacaca

SEQ ID NO: 459075 - RNA, 20 nt, Artificial Sequence
  Synthetic
aaaagaauaaauaaaacaca

SEQ ID NO: 459076 - RNA, 21 nt, Artificial Sequence
  Synthetic
aaaaagaauaaauaaaacaca

SEQ ID NO: 459077 - RNA, 22 nt, Artificial Sequence
  Synthetic
uaaaaagaauaaauaaaacaca

SEQ ID NO: 459078 - RNA, 23 nt, Artificial Sequence
  Synthetic
guaaaaagaauaaauaaaacaca

SEQ ID NO: 459079 - RNA, 24 nt, Artificial Sequence
  Synthetic
cguaaaaagaauaaauaaaacaca

SEQ ID NO: 459080 - RNA, 18 nt, Artificial Sequence
  Synthetic
auugcaaauuaaaacaca

SEQ ID NO: 459081 - RNA, 19 nt, Artificial Sequence
  Synthetic
gauugcaaauuaaaacaca

SEQ ID NO: 459082 - RNA, 20 nt, Artificial Sequence
  Synthetic
ugauugcaaauuaaaacaca

SEQ ID NO: 459083 - RNA, 21 nt, Artificial Sequence
  Synthetic
gugauugcaaauuaaaacaca

SEQ ID NO: 459084 - RNA, 22 nt, Artificial Sequence
  Synthetic
ggugauugcaaauuaaaacaca

SEQ ID NO: 459085 - RNA, 23 nt, Artificial Sequence
  Synthetic
aggugauugcaaauuaaaacaca

SEQ ID NO: 459086 - RNA, 24 nt, Artificial Sequence
  Synthetic
caggugauugcaaauuaaaacaca

SEQ ID NO: 459087 - RNA, 18 nt, Artificial Sequence
  Synthetic
caaaacuauacaaacaca

SEQ ID NO: 459088 - RNA, 19 nt, Artificial Sequence
  Synthetic
ucaaaacuauacaaacaca

SEQ ID NO: 459089 - RNA, 20 nt, Artificial Sequence
  Synthetic
cucaaaacuauacaaacaca

SEQ ID NO: 459090 - RNA, 21 nt, Artificial Sequence
  Synthetic
ccucaaaacuauacaaacaca

SEQ ID NO: 459091 - RNA, 22 nt, Artificial Sequence
  Synthetic
cccucaaaacuauacaaacaca

SEQ ID NO: 459092 - RNA, 23 nt, Artificial Sequence
  Synthetic
acccucaaaacuauacaaacaca

SEQ ID NO: 459093 - RNA, 24 nt, Artificial Sequence
  Synthetic
aacccucaaaacuauacaaacaca

SEQ ID NO: 459094 - RNA, 18 nt, Artificial Sequence
  Synthetic
ggaagcuauacaaacaca

SEQ ID NO: 459095 - RNA, 19 nt, Artificial Sequence
  Synthetic
uggaagcuauacaaacaca

SEQ ID NO: 459096 - RNA, 20 nt, Artificial Sequence
  Synthetic
uuggaagcuauacaaacaca

SEQ ID NO: 459097 - RNA, 21 nt, Artificial Sequence
  Synthetic
uuuggaagcuauacaaacaca

SEQ ID NO: 459098 - RNA, 22 nt, Artificial Sequence
  Synthetic
uuuuggaagcuauacaaacaca

SEQ ID NO: 459099 - RNA, 23 nt, Artificial Sequence
  Synthetic
auuuuggaagcuauacaaacaca

SEQ ID NO: 459100 - RNA, 24 nt, Artificial Sequence
  Synthetic
aauuuuggaagcuauacaaacaca

SEQ ID NO: 459101 - RNA, 18 nt, Artificial Sequence
  Synthetic
agauauucagcaaacaca

SEQ ID NO: 459102 - RNA, 19 nt, Artificial Sequence
  Synthetic
cagauauucagcaaacaca

SEQ ID NO: 459103 - RNA, 20 nt, Artificial Sequence
  Synthetic
ucagauauucagcaaacaca

SEQ ID NO: 459104 - RNA, 21 nt, Artificial Sequence
  Synthetic
gucagauauucagcaaacaca

SEQ ID NO: 459105 - RNA, 22 nt, Artificial Sequence
  Synthetic
agucagauauucagcaaacaca

SEQ ID NO: 459106 - RNA, 23 nt, Artificial Sequence
  Synthetic
uagucagauauucagcaaacaca

SEQ ID NO: 459107 - RNA, 24 nt, Artificial Sequence
  Synthetic
auagucagauauucagcaaacaca

SEQ ID NO: 459108 - RNA, 18 nt, Artificial Sequence
  Synthetic
cacacacacagaaacaca

SEQ ID NO: 459109 - RNA, 19 nt, Artificial Sequence
  Synthetic
acacacacacagaaacaca

SEQ ID NO: 459110 - RNA, 20 nt, Artificial Sequence
  Synthetic
uacacacacacagaaacaca

SEQ ID NO: 459111 - RNA, 21 nt, Artificial Sequence
  Synthetic
guacacacacacagaaacaca

SEQ ID NO: 459112 - RNA, 22 nt, Artificial Sequence
  Synthetic
uguacacacacacagaaacaca

SEQ ID NO: 459113 - RNA, 23 nt, Artificial Sequence
  Synthetic
uuguacacacacacagaaacaca

SEQ ID NO: 459114 - RNA, 24 nt, Artificial Sequence
  Synthetic
uuuguacacacacacagaaacaca

SEQ ID NO: 459115 - RNA, 18 nt, Artificial Sequence
  Synthetic
cuaaaagugagaaacaca

SEQ ID NO: 459116 - RNA, 19 nt, Artificial Sequence
  Synthetic
ccuaaaagugagaaacaca

SEQ ID NO: 459117 - RNA, 20 nt, Artificial Sequence
  Synthetic
gccuaaaagugagaaacaca

SEQ ID NO: 459118 - RNA, 21 nt, Artificial Sequence
  Synthetic
agccuaaaagugagaaacaca

SEQ ID NO: 459119 - RNA, 22 nt, Artificial Sequence
  Synthetic
uagccuaaaagugagaaacaca

SEQ ID NO: 459120 - RNA, 23 nt, Artificial Sequence
  Synthetic
uuagccuaaaagugagaaacaca

SEQ ID NO: 459121 - RNA, 24 nt, Artificial Sequence
  Synthetic
auuagccuaaaagugagaaacaca

SEQ ID NO: 459122 - RNA, 18 nt, Artificial Sequence
  Synthetic
uugcgguauauaaacaca

SEQ ID NO: 459123 - RNA, 19 nt, Artificial Sequence
  Synthetic
auugcgguauauaaacaca

SEQ ID NO: 459124 - RNA, 20 nt, Artificial Sequence
  Synthetic
aauugcgguauauaaacaca

SEQ ID NO: 459125 - RNA, 21 nt, Artificial Sequence
  Synthetic
aaauugcgguauauaaacaca

SEQ ID NO: 459126 - RNA, 22 nt, Artificial Sequence
  Synthetic
gaaauugcgguauauaaacaca

SEQ ID NO: 459127 - RNA, 23 nt, Artificial Sequence
  Synthetic
agaaauugcgguauauaaacaca

SEQ ID NO: 459128 - RNA, 24 nt, Artificial Sequence
  Synthetic
aagaaauugcgguauauaaacaca

SEQ ID NO: 459129 - RNA, 18 nt, Artificial Sequence
  Synthetic
ggucccucccacaacaca

SEQ ID NO: 459130 - RNA, 19 nt, Artificial Sequence
  Synthetic
gggucccucccacaacaca

SEQ ID NO: 459131 - RNA, 20 nt, Artificial Sequence
  Synthetic
ugggucccucccacaacaca

SEQ ID NO: 459132 - RNA, 21 nt, Artificial Sequence
  Synthetic
cugggucccucccacaacaca

SEQ ID NO: 459133 - RNA, 22 nt, Artificial Sequence
  Synthetic
ccugggucccucccacaacaca

SEQ ID NO: 459134 - RNA, 23 nt, Artificial Sequence
  Synthetic
cccugggucccucccacaacaca

SEQ ID NO: 459135 - RNA, 24 nt, Artificial Sequence
  Synthetic
ccccugggucccucccacaacaca

SEQ ID NO: 459136 - RNA, 18 nt, Artificial Sequence
  Synthetic
acgagccuggccaacaca

SEQ ID NO: 459137 - RNA, 19 nt, Artificial Sequence
  Synthetic
gacgagccuggccaacaca

SEQ ID NO: 459138 - RNA, 20 nt, Artificial Sequence
  Synthetic
agacgagccuggccaacaca

SEQ ID NO: 459139 - RNA, 21 nt, Artificial Sequence
  Synthetic
cagacgagccuggccaacaca

SEQ ID NO: 459140 - RNA, 22 nt, Artificial Sequence
  Synthetic
acagacgagccuggccaacaca

SEQ ID NO: 459141 - RNA, 23 nt, Artificial Sequence
  Synthetic
uacagacgagccuggccaacaca

SEQ ID NO: 459142 - RNA, 24 nt, Artificial Sequence
  Synthetic
uuacagacgagccuggccaacaca

SEQ ID NO: 459143 - RNA, 18 nt, Artificial Sequence
  Synthetic
accugccuggccaacaca

SEQ ID NO: 459144 - RNA, 19 nt, Artificial Sequence
  Synthetic
gaccugccuggccaacaca

SEQ ID NO: 459145 - RNA, 20 nt, Artificial Sequence
  Synthetic
agaccugccuggccaacaca

SEQ ID NO: 459146 - RNA, 21 nt, Artificial Sequence
  Synthetic
gagaccugccuggccaacaca

SEQ ID NO: 459147 - RNA, 22 nt, Artificial Sequence
  Synthetic
cgagaccugccuggccaacaca

SEQ ID NO: 459148 - RNA, 23 nt, Artificial Sequence
  Synthetic
ucgagaccugccuggccaacaca

SEQ ID NO: 459149 - RNA, 24 nt, Artificial Sequence
  Synthetic
uucgagaccugccuggccaacaca

SEQ ID NO: 459150 - RNA, 18 nt, Artificial Sequence
  Synthetic
aacagccugggcaacaca

SEQ ID NO: 459151 - RNA, 19 nt, Artificial Sequence
  Synthetic
gaacagccugggcaacaca

SEQ ID NO: 459152 - RNA, 20 nt, Artificial Sequence
  Synthetic
agaacagccugggcaacaca

SEQ ID NO: 459153 - RNA, 21 nt, Artificial Sequence
  Synthetic
aagaacagccugggcaacaca

SEQ ID NO: 459154 - RNA, 22 nt, Artificial Sequence
  Synthetic
caagaacagccugggcaacaca

SEQ ID NO: 459155 - RNA, 23 nt, Artificial Sequence
  Synthetic
ucaagaacagccugggcaacaca

SEQ ID NO: 459156 - RNA, 24 nt, Artificial Sequence
  Synthetic
uucaagaacagccugggcaacaca

SEQ ID NO: 459157 - RNA, 18 nt, Artificial Sequence
  Synthetic
gaccaggugggcaacaca

SEQ ID NO: 459158 - RNA, 19 nt, Artificial Sequence
  Synthetic
agaccaggugggcaacaca

SEQ ID NO: 459159 - RNA, 20 nt, Artificial Sequence
  Synthetic
gagaccaggugggcaacaca

SEQ ID NO: 459160 - RNA, 21 nt, Artificial Sequence
  Synthetic
ugagaccaggugggcaacaca

SEQ ID NO: 459161 - RNA, 22 nt, Artificial Sequence
  Synthetic
uugagaccaggugggcaacaca

SEQ ID NO: 459162 - RNA, 23 nt, Artificial Sequence
  Synthetic
uuugagaccaggugggcaacaca

SEQ ID NO: 459163 - RNA, 24 nt, Artificial Sequence
  Synthetic
guuugagaccaggugggcaacaca

SEQ ID NO: 459164 - RNA, 18 nt, Artificial Sequence
  Synthetic
aguaugaugcucaacaca

SEQ ID NO: 459165 - RNA, 19 nt, Artificial Sequence
  Synthetic
caguaugaugcucaacaca

SEQ ID NO: 459166 - RNA, 20 nt, Artificial Sequence
  Synthetic
ccaguaugaugcucaacaca

SEQ ID NO: 459167 - RNA, 21 nt, Artificial Sequence
  Synthetic
accaguaugaugcucaacaca

SEQ ID NO: 459168 - RNA, 22 nt, Artificial Sequence
  Synthetic
caccaguaugaugcucaacaca

SEQ ID NO: 459169 - RNA, 23 nt, Artificial Sequence
  Synthetic
gcaccaguaugaugcucaacaca

SEQ ID NO: 459170 - RNA, 24 nt, Artificial Sequence
  Synthetic
agcaccaguaugaugcucaacaca

SEQ ID NO: 459171 - RNA, 18 nt, Artificial Sequence
  Synthetic
acaacgguuuucaacaca

SEQ ID NO: 459172 - RNA, 19 nt, Artificial Sequence
  Synthetic
uacaacgguuuucaacaca

SEQ ID NO: 459173 - RNA, 20 nt, Artificial Sequence
  Synthetic
cuacaacgguuuucaacaca

SEQ ID NO: 459174 - RNA, 21 nt, Artificial Sequence
  Synthetic
gcuacaacgguuuucaacaca

SEQ ID NO: 459175 - RNA, 22 nt, Artificial Sequence
  Synthetic
ugcuacaacgguuuucaacaca

SEQ ID NO: 459176 - RNA, 23 nt, Artificial Sequence
  Synthetic
augcuacaacgguuuucaacaca

SEQ ID NO: 459177 - RNA, 24 nt, Artificial Sequence
  Synthetic
uaugcuacaacgguuuucaacaca

SEQ ID NO: 459178 - RNA, 18 nt, Artificial Sequence
  Synthetic
aaaaagugcaagaacaca

SEQ ID NO: 459179 - RNA, 19 nt, Artificial Sequence
  Synthetic
uaaaaagugcaagaacaca

SEQ ID NO: 459180 - RNA, 20 nt, Artificial Sequence
  Synthetic
auaaaaagugcaagaacaca

SEQ ID NO: 459181 - RNA, 21 nt, Artificial Sequence
  Synthetic
aauaaaaagugcaagaacaca

SEQ ID NO: 459182 - RNA, 22 nt, Artificial Sequence
  Synthetic
aaauaaaaagugcaagaacaca

SEQ ID NO: 459183 - RNA, 23 nt, Artificial Sequence
  Synthetic
gaaauaaaaagugcaagaacaca

SEQ ID NO: 459184 - RNA, 24 nt, Artificial Sequence
  Synthetic
agaaauaaaaagugcaagaacaca

SEQ ID NO: 459185 - RNA, 18 nt, Artificial Sequence
  Synthetic
uuauuaguuaagaacaca

SEQ ID NO: 459186 - RNA, 19 nt, Artificial Sequence
  Synthetic
uuuauuaguuaagaacaca

SEQ ID NO: 459187 - RNA, 20 nt, Artificial Sequence
  Synthetic
uuuuauuaguuaagaacaca

SEQ ID NO: 459188 - RNA, 21 nt, Artificial Sequence
  Synthetic
uuuuuauuaguuaagaacaca

SEQ ID NO: 459189 - RNA, 22 nt, Artificial Sequence
  Synthetic
uuuuuuauuaguuaagaacaca

SEQ ID NO: 459190 - RNA, 23 nt, Artificial Sequence
  Synthetic
guuuuuuauuaguuaagaacaca

SEQ ID NO: 459191 - RNA, 24 nt, Artificial Sequence
  Synthetic
gguuuuuuauuaguuaagaacaca

SEQ ID NO: 459192 - RNA, 18 nt, Artificial Sequence
  Synthetic
guggaauaaaugaacaca

SEQ ID NO: 459193 - RNA, 19 nt, Artificial Sequence
  Synthetic
uguggaauaaaugaacaca

SEQ ID NO: 459194 - RNA, 20 nt, Artificial Sequence
  Synthetic
cuguggaauaaaugaacaca

SEQ ID NO: 459195 - RNA, 21 nt, Artificial Sequence
  Synthetic
ucuguggaauaaaugaacaca

SEQ ID NO: 459196 - RNA, 22 nt, Artificial Sequence
  Synthetic
aucuguggaauaaaugaacaca

SEQ ID NO: 459197 - RNA, 23 nt, Artificial Sequence
  Synthetic
uaucuguggaauaaaugaacaca

SEQ ID NO: 459198 - RNA, 24 nt, Artificial Sequence
  Synthetic
auaucuguggaauaaaugaacaca

SEQ ID NO: 459199 - RNA, 18 nt, Artificial Sequence
  Synthetic
ugaguacauaugaacaca

SEQ ID NO: 459200 - RNA, 19 nt, Artificial Sequence
  Synthetic
cugaguacauaugaacaca

SEQ ID NO: 459201 - RNA, 20 nt, Artificial Sequence
  Synthetic
acugaguacauaugaacaca

SEQ ID NO: 459202 - RNA, 21 nt, Artificial Sequence
  Synthetic
cacugaguacauaugaacaca

SEQ ID NO: 459203 - RNA, 22 nt, Artificial Sequence
  Synthetic
acacugaguacauaugaacaca

SEQ ID NO: 459204 - RNA, 23 nt, Artificial Sequence
  Synthetic
aacacugaguacauaugaacaca

SEQ ID NO: 459205 - RNA, 24 nt, Artificial Sequence
  Synthetic
aaacacugaguacauaugaacaca

SEQ ID NO: 459206 - RNA, 18 nt, Artificial Sequence
  Synthetic
ugaaauuuauugaacaca

SEQ ID NO: 459207 - RNA, 19 nt, Artificial Sequence
  Synthetic
uugaaauuuauugaacaca

SEQ ID NO: 459208 - RNA, 20 nt, Artificial Sequence
  Synthetic
auugaaauuuauugaacaca

SEQ ID NO: 459209 - RNA, 21 nt, Artificial Sequence
  Synthetic
aauugaaauuuauugaacaca

SEQ ID NO: 459210 - RNA, 22 nt, Artificial Sequence
  Synthetic
aaauugaaauuuauugaacaca

SEQ ID NO: 459211 - RNA, 23 nt, Artificial Sequence
  Synthetic
gaaauugaaauuuauugaacaca

SEQ ID NO: 459212 - RNA, 24 nt, Artificial Sequence
  Synthetic
ggaaauugaaauuuauugaacaca

SEQ ID NO: 459213 - RNA, 18 nt, Artificial Sequence
  Synthetic
guccaucaaaauaacaca

SEQ ID NO: 459214 - RNA, 19 nt, Artificial Sequence
  Synthetic
aguccaucaaaauaacaca

SEQ ID NO: 459215 - RNA, 20 nt, Artificial Sequence
  Synthetic
caguccaucaaaauaacaca

SEQ ID NO: 459216 - RNA, 21 nt, Artificial Sequence
  Synthetic
acaguccaucaaaauaacaca

SEQ ID NO: 459217 - RNA, 22 nt, Artificial Sequence
  Synthetic
cacaguccaucaaaauaacaca

SEQ ID NO: 459218 - RNA, 23 nt, Artificial Sequence
  Synthetic
ucacaguccaucaaaauaacaca

SEQ ID NO: 459219 - RNA, 24 nt, Artificial Sequence
  Synthetic
aucacaguccaucaaaauaacaca

SEQ ID NO: 459220 - RNA, 18 nt, Artificial Sequence
  Synthetic
cuaucauuaccuaacaca

SEQ ID NO: 459221 - RNA, 19 nt, Artificial Sequence
  Synthetic
acuaucauuaccuaacaca

SEQ ID NO: 459222 - RNA, 20 nt, Artificial Sequence
  Synthetic
aacuaucauuaccuaacaca

SEQ ID NO: 459223 - RNA, 21 nt, Artificial Sequence
  Synthetic
uaacuaucauuaccuaacaca

SEQ ID NO: 459224 - RNA, 22 nt, Artificial Sequence
  Synthetic
uuaacuaucauuaccuaacaca

SEQ ID NO: 459225 - RNA, 23 nt, Artificial Sequence
  Synthetic
auuaacuaucauuaccuaacaca

SEQ ID NO: 459226 - RNA, 24 nt, Artificial Sequence
  Synthetic
uauuaacuaucauuaccuaacaca

SEQ ID NO: 459227 - RNA, 21 nt, Artificial Sequence
  Synthetic
gagaccauccuggcuaacaca

SEQ ID NO: 459228 - RNA, 22 nt, Artificial Sequence
  Synthetic
cgagaccauccuggcuaacaca

SEQ ID NO: 459229 - RNA, 23 nt, Artificial Sequence
  Synthetic
ucgagaccauccuggcuaacaca

SEQ ID NO: 459230 - RNA, 24 nt, Artificial Sequence
  Synthetic
aucgagaccauccuggcuaacaca

SEQ ID NO: 459231 - RNA, 18 nt, Artificial Sequence
  Synthetic
ucccuagaaucuaacaca

SEQ ID NO: 459232 - RNA, 19 nt, Artificial Sequence
  Synthetic
aucccuagaaucuaacaca

SEQ ID NO: 459233 - RNA, 20 nt, Artificial Sequence
  Synthetic
uaucccuagaaucuaacaca

SEQ ID NO: 459234 - RNA, 21 nt, Artificial Sequence
  Synthetic
guaucccuagaaucuaacaca

SEQ ID NO: 459235 - RNA, 22 nt, Artificial Sequence
  Synthetic
uguaucccuagaaucuaacaca

SEQ ID NO: 459236 - RNA, 23 nt, Artificial Sequence
  Synthetic
uuguaucccuagaaucuaacaca

SEQ ID NO: 459237 - RNA, 24 nt, Artificial Sequence
  Synthetic
auuguaucccuagaaucuaacaca

SEQ ID NO: 459238 - RNA, 18 nt, Artificial Sequence
  Synthetic
ggaaaucauauuaacaca

SEQ ID NO: 459239 - RNA, 19 nt, Artificial Sequence
  Synthetic
gggaaaucauauuaacaca

SEQ ID NO: 459240 - RNA, 20 nt, Artificial Sequence
  Synthetic
agggaaaucauauuaacaca

SEQ ID NO: 459241 - RNA, 21 nt, Artificial Sequence
  Synthetic
cagggaaaucauauuaacaca

SEQ ID NO: 459242 - RNA, 22 nt, Artificial Sequence
  Synthetic
acagggaaaucauauuaacaca

SEQ ID NO: 459243 - RNA, 23 nt, Artificial Sequence
  Synthetic
gacagggaaaucauauuaacaca

SEQ ID NO: 459244 - RNA, 24 nt, Artificial Sequence
  Synthetic
ugacagggaaaucauauuaacaca

SEQ ID NO: 459245 - RNA, 18 nt, Artificial Sequence
  Synthetic
uaaaaacacacacacaca

SEQ ID NO: 459246 - RNA, 19 nt, Artificial Sequence
  Synthetic
guaaaaacacacacacaca

SEQ ID NO: 459247 - RNA, 20 nt, Artificial Sequence
  Synthetic
uguaaaaacacacacacaca

SEQ ID NO: 459248 - RNA, 21 nt, Artificial Sequence
  Synthetic
auguaaaaacacacacacaca

SEQ ID NO: 459249 - RNA, 22 nt, Artificial Sequence
  Synthetic
aauguaaaaacacacacacaca

SEQ ID NO: 459250 - RNA, 23 nt, Artificial Sequence
  Synthetic
caauguaaaaacacacacacaca

SEQ ID NO: 459251 - RNA, 24 nt, Artificial Sequence
  Synthetic
gcaauguaaaaacacacacacaca

SEQ ID NO: 459252 - RNA, 18 nt, Artificial Sequence
  Synthetic
cacacacacacacacaca

SEQ ID NO: 459253 - RNA, 21 nt, Artificial Sequence
  Synthetic
acacacacacacacacacaca

SEQ ID NO: 459254 - RNA, 22 nt, Artificial Sequence
  Synthetic
cacacacacacacacacacaca

SEQ ID NO: 459255 - RNA, 23 nt, Artificial Sequence
  Synthetic
acacacacacacacacacacaca

SEQ ID NO: 459256 - RNA, 24 nt, Artificial Sequence
  Synthetic
cacacacacacacacacacacaca

SEQ ID NO: 459257 - RNA, 21 nt, Artificial Sequence
  Synthetic
gcacacacacacacacacaca

SEQ ID NO: 459258 - RNA, 22 nt, Artificial Sequence
  Synthetic
ugcacacacacacacacacaca

SEQ ID NO: 459259 - RNA, 23 nt, Artificial Sequence
  Synthetic
gugcacacacacacacacacaca

SEQ ID NO: 459260 - RNA, 24 nt, Artificial Sequence
  Synthetic
cgugcacacacacacacacacaca

SEQ ID NO: 459261 - RNA, 19 nt, Artificial Sequence
  Synthetic
gcacacacacacacacaca

SEQ ID NO: 459262 - RNA, 20 nt, Artificial Sequence
  Synthetic
ugcacacacacacacacaca

SEQ ID NO: 459263 - RNA, 21 nt, Artificial Sequence
  Synthetic
gugcacacacacacacacaca

SEQ ID NO: 459264 - RNA, 22 nt, Artificial Sequence
  Synthetic
cgugcacacacacacacacaca

SEQ ID NO: 459265 - RNA, 23 nt, Artificial Sequence
  Synthetic
acgugcacacacacacacacaca

SEQ ID NO: 459266 - RNA, 24 nt, Artificial Sequence
  Synthetic
cacgugcacacacacacacacaca

SEQ ID NO: 459267 - RNA, 18 nt, Artificial Sequence
  Synthetic
agauuuuguacacacaca

SEQ ID NO: 459268 - RNA, 19 nt, Artificial Sequence
  Synthetic
aagauuuuguacacacaca

SEQ ID NO: 459269 - RNA, 20 nt, Artificial Sequence
  Synthetic
aaagauuuuguacacacaca

SEQ ID NO: 459270 - RNA, 21 nt, Artificial Sequence
  Synthetic
uaaagauuuuguacacacaca

SEQ ID NO: 459271 - RNA, 22 nt, Artificial Sequence
  Synthetic
guaaagauuuuguacacacaca

SEQ ID NO: 459272 - RNA, 23 nt, Artificial Sequence
  Synthetic
uguaaagauuuuguacacacaca

SEQ ID NO: 459273 - RNA, 24 nt, Artificial Sequence
  Synthetic
cuguaaagauuuuguacacacaca

SEQ ID NO: 459274 - RNA, 18 nt, Artificial Sequence
  Synthetic
gacacagaaagacacaca

SEQ ID NO: 459275 - RNA, 19 nt, Artificial Sequence
  Synthetic
ggacacagaaagacacaca

SEQ ID NO: 459276 - RNA, 20 nt, Artificial Sequence
  Synthetic
uggacacagaaagacacaca

SEQ ID NO: 459277 - RNA, 21 nt, Artificial Sequence
  Synthetic
guggacacagaaagacacaca

SEQ ID NO: 459278 - RNA, 22 nt, Artificial Sequence
  Synthetic
aguggacacagaaagacacaca

SEQ ID NO: 459279 - RNA, 23 nt, Artificial Sequence
  Synthetic
gaguggacacagaaagacacaca

SEQ ID NO: 459280 - RNA, 24 nt, Artificial Sequence
  Synthetic
agaguggacacagaaagacacaca

SEQ ID NO: 459281 - RNA, 18 nt, Artificial Sequence
  Synthetic
cucauacguauacacaca

SEQ ID NO: 459282 - RNA, 19 nt, Artificial Sequence
  Synthetic
acucauacguauacacaca

SEQ ID NO: 459283 - RNA, 20 nt, Artificial Sequence
  Synthetic
cacucauacguauacacaca

SEQ ID NO: 459284 - RNA, 21 nt, Artificial Sequence
  Synthetic
acacucauacguauacacaca

SEQ ID NO: 459285 - RNA, 22 nt, Artificial Sequence
  Synthetic
uacacucauacguauacacaca

SEQ ID NO: 459286 - RNA, 23 nt, Artificial Sequence
  Synthetic
auacacucauacguauacacaca

SEQ ID NO: 459287 - RNA, 24 nt, Artificial Sequence
  Synthetic
cauacacucauacguauacacaca

SEQ ID NO: 459288 - RNA, 18 nt, Artificial Sequence
  Synthetic
aucagacccacccacaca

SEQ ID NO: 459289 - RNA, 19 nt, Artificial Sequence
  Synthetic
gaucagacccacccacaca

SEQ ID NO: 459290 - RNA, 20 nt, Artificial Sequence
  Synthetic
ggaucagacccacccacaca

SEQ ID NO: 459291 - RNA, 21 nt, Artificial Sequence
  Synthetic
uggaucagacccacccacaca

SEQ ID NO: 459292 - RNA, 22 nt, Artificial Sequence
  Synthetic
uuggaucagacccacccacaca

SEQ ID NO: 459293 - RNA, 23 nt, Artificial Sequence
  Synthetic
auuggaucagacccacccacaca

SEQ ID NO: 459294 - RNA, 24 nt, Artificial Sequence
  Synthetic
gauuggaucagacccacccacaca

SEQ ID NO: 459295 - RNA, 18 nt, Artificial Sequence
  Synthetic
uagacugaaccccacaca

SEQ ID NO: 459296 - RNA, 19 nt, Artificial Sequence
  Synthetic
cuagacugaaccccacaca

SEQ ID NO: 459297 - RNA, 20 nt, Artificial Sequence
  Synthetic
acuagacugaaccccacaca

SEQ ID NO: 459298 - RNA, 21 nt, Artificial Sequence
  Synthetic
uacuagacugaaccccacaca

SEQ ID NO: 459299 - RNA, 22 nt, Artificial Sequence
  Synthetic
auacuagacugaaccccacaca

SEQ ID NO: 459300 - RNA, 23 nt, Artificial Sequence
  Synthetic
gauacuagacugaaccccacaca

SEQ ID NO: 459301 - RNA, 24 nt, Artificial Sequence
  Synthetic
ggauacuagacugaaccccacaca

SEQ ID NO: 459302 - RNA, 18 nt, Artificial Sequence
  Synthetic
uuaagggcuucccacaca

SEQ ID NO: 459303 - RNA, 19 nt, Artificial Sequence
  Synthetic
auuaagggcuucccacaca

SEQ ID NO: 459304 - RNA, 20 nt, Artificial Sequence
  Synthetic
gauuaagggcuucccacaca

SEQ ID NO: 459305 - RNA, 21 nt, Artificial Sequence
  Synthetic
ugauuaagggcuucccacaca

SEQ ID NO: 459306 - RNA, 22 nt, Artificial Sequence
  Synthetic
uugauuaagggcuucccacaca

SEQ ID NO: 459307 - RNA, 23 nt, Artificial Sequence
  Synthetic
auugauuaagggcuucccacaca

SEQ ID NO: 459308 - RNA, 24 nt, Artificial Sequence
  Synthetic
cauugauuaagggcuucccacaca

SEQ ID NO: 459309 - RNA, 18 nt, Artificial Sequence
  Synthetic
cagcacauucuccacaca

SEQ ID NO: 459310 - RNA, 19 nt, Artificial Sequence
  Synthetic
gcagcacauucuccacaca

SEQ ID NO: 459311 - RNA, 20 nt, Artificial Sequence
  Synthetic
agcagcacauucuccacaca

SEQ ID NO: 459312 - RNA, 21 nt, Artificial Sequence
  Synthetic
cagcagcacauucuccacaca

SEQ ID NO: 459313 - RNA, 22 nt, Artificial Sequence
  Synthetic
acagcagcacauucuccacaca

SEQ ID NO: 459314 - RNA, 23 nt, Artificial Sequence
  Synthetic
aacagcagcacauucuccacaca

SEQ ID NO: 459315 - RNA, 24 nt, Artificial Sequence
  Synthetic
uaacagcagcacauucuccacaca

SEQ ID NO: 459316 - RNA, 18 nt, Artificial Sequence
  Synthetic
uaacuaugucagcacaca

SEQ ID NO: 459317 - RNA, 19 nt, Artificial Sequence
  Synthetic
auaacuaugucagcacaca

SEQ ID NO: 459318 - RNA, 20 nt, Artificial Sequence
  Synthetic
gauaacuaugucagcacaca

SEQ ID NO: 459319 - RNA, 21 nt, Artificial Sequence
  Synthetic
ggauaacuaugucagcacaca

SEQ ID NO: 459320 - RNA, 22 nt, Artificial Sequence
  Synthetic
aggauaacuaugucagcacaca

SEQ ID NO: 459321 - RNA, 23 nt, Artificial Sequence
  Synthetic
aaggauaacuaugucagcacaca

SEQ ID NO: 459322 - RNA, 24 nt, Artificial Sequence
  Synthetic
aaaggauaacuaugucagcacaca

SEQ ID NO: 459323 - RNA, 18 nt, Artificial Sequence
  Synthetic
agauaugccaggcacaca

SEQ ID NO: 459324 - RNA, 19 nt, Artificial Sequence
  Synthetic
gagauaugccaggcacaca

SEQ ID NO: 459325 - RNA, 20 nt, Artificial Sequence
  Synthetic
ugagauaugccaggcacaca

SEQ ID NO: 459326 - RNA, 21 nt, Artificial Sequence
  Synthetic
cugagauaugccaggcacaca

SEQ ID NO: 459327 - RNA, 22 nt, Artificial Sequence
  Synthetic
ucugagauaugccaggcacaca

SEQ ID NO: 459328 - RNA, 23 nt, Artificial Sequence
  Synthetic
aucugagauaugccaggcacaca

SEQ ID NO: 459329 - RNA, 24 nt, Artificial Sequence
  Synthetic
uaucugagauaugccaggcacaca

SEQ ID NO: 459330 - RNA, 18 nt, Artificial Sequence
  Synthetic
gaucauucauggcacaca

SEQ ID NO: 459331 - RNA, 19 nt, Artificial Sequence
  Synthetic
ugaucauucauggcacaca

SEQ ID NO: 459332 - RNA, 20 nt, Artificial Sequence
  Synthetic
uugaucauucauggcacaca

SEQ ID NO: 459333 - RNA, 21 nt, Artificial Sequence
  Synthetic
uuugaucauucauggcacaca

SEQ ID NO: 459334 - RNA, 22 nt, Artificial Sequence
  Synthetic
auuugaucauucauggcacaca

SEQ ID NO: 459335 - RNA, 23 nt, Artificial Sequence
  Synthetic
gauuugaucauucauggcacaca

SEQ ID NO: 459336 - RNA, 24 nt, Artificial Sequence
  Synthetic
ugauuugaucauucauggcacaca

SEQ ID NO: 459337 - RNA, 18 nt, Artificial Sequence
  Synthetic
auaacuccacugcacaca

SEQ ID NO: 459338 - RNA, 19 nt, Artificial Sequence
  Synthetic
aauaacuccacugcacaca

SEQ ID NO: 459339 - RNA, 20 nt, Artificial Sequence
  Synthetic
uaauaacuccacugcacaca

SEQ ID NO: 459340 - RNA, 21 nt, Artificial Sequence
  Synthetic
auaauaacuccacugcacaca

SEQ ID NO: 459341 - RNA, 22 nt, Artificial Sequence
  Synthetic
uauaauaacuccacugcacaca

SEQ ID NO: 459342 - RNA, 23 nt, Artificial Sequence
  Synthetic
auauaauaacuccacugcacaca

SEQ ID NO: 459343 - RNA, 24 nt, Artificial Sequence
  Synthetic
aauauaauaacuccacugcacaca

SEQ ID NO: 459344 - RNA, 18 nt, Artificial Sequence
  Synthetic
cgcaggcaacaucacaca

SEQ ID NO: 459345 - RNA, 19 nt, Artificial Sequence
  Synthetic
gcgcaggcaacaucacaca

SEQ ID NO: 459346 - RNA, 20 nt, Artificial Sequence
  Synthetic
agcgcaggcaacaucacaca

SEQ ID NO: 459347 - RNA, 21 nt, Artificial Sequence
  Synthetic
cagcgcaggcaacaucacaca

SEQ ID NO: 459348 - RNA, 22 nt, Artificial Sequence
  Synthetic
acagcgcaggcaacaucacaca

SEQ ID NO: 459349 - RNA, 23 nt, Artificial Sequence
  Synthetic
cacagcgcaggcaacaucacaca

SEQ ID NO: 459350 - RNA, 24 nt, Artificial Sequence
  Synthetic
acacagcgcaggcaacaucacaca

SEQ ID NO: 459351 - RNA, 21 nt, Artificial Sequence
  Synthetic
caggaaggggaacaucacaca

SEQ ID NO: 459352 - RNA, 22 nt, Artificial Sequence
  Synthetic
acaggaaggggaacaucacaca

SEQ ID NO: 459353 - RNA, 23 nt, Artificial Sequence
  Synthetic
cacaggaaggggaacaucacaca

SEQ ID NO: 459354 - RNA, 24 nt, Artificial Sequence
  Synthetic
acacaggaaggggaacaucacaca

SEQ ID NO: 459355 - RNA, 24 nt, Artificial Sequence
  Synthetic
ucacaggaaggggaacaucacaca

SEQ ID NO: 459356 - RNA, 22 nt, Artificial Sequence
  Synthetic
gcaggaaggggaacaucacaca

SEQ ID NO: 459357 - RNA, 23 nt, Artificial Sequence
  Synthetic
cgcaggaaggggaacaucacaca

SEQ ID NO: 459358 - RNA, 24 nt, Artificial Sequence
  Synthetic
acgcaggaaggggaacaucacaca

SEQ ID NO: 459359 - RNA, 18 nt, Artificial Sequence
  Synthetic
ggcggggaacaucacaca

SEQ ID NO: 459360 - RNA, 19 nt, Artificial Sequence
  Synthetic
gggcggggaacaucacaca

SEQ ID NO: 459361 - RNA, 20 nt, Artificial Sequence
  Synthetic
agggcggggaacaucacaca

SEQ ID NO: 459362 - RNA, 21 nt, Artificial Sequence
  Synthetic
cagggcggggaacaucacaca

SEQ ID NO: 459363 - RNA, 22 nt, Artificial Sequence
  Synthetic
acagggcggggaacaucacaca

SEQ ID NO: 459364 - RNA, 23 nt, Artificial Sequence
  Synthetic
cacagggcggggaacaucacaca

SEQ ID NO: 459365 - RNA, 24 nt, Artificial Sequence
  Synthetic
acacagggcggggaacaucacaca

SEQ ID NO: 459366 - RNA, 18 nt, Artificial Sequence
  Synthetic
gcucggaaaccucacaca

SEQ ID NO: 459367 - RNA, 19 nt, Artificial Sequence
  Synthetic
agcucggaaaccucacaca

SEQ ID NO: 459368 - RNA, 20 nt, Artificial Sequence
  Synthetic
aagcucggaaaccucacaca

SEQ ID NO: 459369 - RNA, 21 nt, Artificial Sequence
  Synthetic
gaagcucggaaaccucacaca

SEQ ID NO: 459370 - RNA, 22 nt, Artificial Sequence
  Synthetic
agaagcucggaaaccucacaca

SEQ ID NO: 459371 - RNA, 23 nt, Artificial Sequence
  Synthetic
aagaagcucggaaaccucacaca

SEQ ID NO: 459372 - RNA, 24 nt, Artificial Sequence
  Synthetic
gaagaagcucggaaaccucacaca

SEQ ID NO: 459373 - RNA, 18 nt, Artificial Sequence
  Synthetic
aucaacuuuauucacaca

SEQ ID NO: 459374 - RNA, 19 nt, Artificial Sequence
  Synthetic
aaucaacuuuauucacaca

SEQ ID NO: 459375 - RNA, 20 nt, Artificial Sequence
  Synthetic
caaucaacuuuauucacaca

SEQ ID NO: 459376 - RNA, 21 nt, Artificial Sequence
  Synthetic
ucaaucaacuuuauucacaca

SEQ ID NO: 459377 - RNA, 22 nt, Artificial Sequence
  Synthetic
cucaaucaacuuuauucacaca

SEQ ID NO: 459378 - RNA, 23 nt, Artificial Sequence
  Synthetic
ucucaaucaacuuuauucacaca

SEQ ID NO: 459379 - RNA, 24 nt, Artificial Sequence
  Synthetic
aucucaaucaacuuuauucacaca

SEQ ID NO: 459380 - RNA, 18 nt, Artificial Sequence
  Synthetic
aggcaaugcaaagacaca

SEQ ID NO: 459381 - RNA, 19 nt, Artificial Sequence
  Synthetic
uaggcaaugcaaagacaca

SEQ ID NO: 459382 - RNA, 20 nt, Artificial Sequence
  Synthetic
auaggcaaugcaaagacaca

SEQ ID NO: 459383 - RNA, 21 nt, Artificial Sequence
  Synthetic
aauaggcaaugcaaagacaca

SEQ ID NO: 459384 - RNA, 22 nt, Artificial Sequence
  Synthetic
aaauaggcaaugcaaagacaca

SEQ ID NO: 459385 - RNA, 23 nt, Artificial Sequence
  Synthetic
uaaauaggcaaugcaaagacaca

SEQ ID NO: 459386 - RNA, 24 nt, Artificial Sequence
  Synthetic
uuaaauaggcaaugcaaagacaca

SEQ ID NO: 459387 - RNA, 18 nt, Artificial Sequence
  Synthetic
gcuuuuucagaagacaca

SEQ ID NO: 459388 - RNA, 19 nt, Artificial Sequence
  Synthetic
ggcuuuuucagaagacaca

SEQ ID NO: 459389 - RNA, 20 nt, Artificial Sequence
  Synthetic
aggcuuuuucagaagacaca

SEQ ID NO: 459390 - RNA, 21 nt, Artificial Sequence
  Synthetic
aaggcuuuuucagaagacaca

SEQ ID NO: 459391 - RNA, 22 nt, Artificial Sequence
  Synthetic
aaaggcuuuuucagaagacaca

SEQ ID NO: 459392 - RNA, 23 nt, Artificial Sequence
  Synthetic
caaaggcuuuuucagaagacaca

SEQ ID NO: 459393 - RNA, 24 nt, Artificial Sequence
  Synthetic
gcaaaggcuuuuucagaagacaca

SEQ ID NO: 459394 - RNA, 18 nt, Artificial Sequence
  Synthetic
accagaauguaagacaca

SEQ ID NO: 459395 - RNA, 19 nt, Artificial Sequence
  Synthetic
caccagaauguaagacaca

SEQ ID NO: 459396 - RNA, 20 nt, Artificial Sequence
  Synthetic
acaccagaauguaagacaca

SEQ ID NO: 459397 - RNA, 21 nt, Artificial Sequence
  Synthetic
gacaccagaauguaagacaca

SEQ ID NO: 459398 - RNA, 22 nt, Artificial Sequence
  Synthetic
agacaccagaauguaagacaca

SEQ ID NO: 459399 - RNA, 23 nt, Artificial Sequence
  Synthetic
gagacaccagaauguaagacaca

SEQ ID NO: 459400 - RNA, 24 nt, Artificial Sequence
  Synthetic
ugagacaccagaauguaagacaca

SEQ ID NO: 459401 - RNA, 18 nt, Artificial Sequence
  Synthetic
ggcuugaguccagacaca

SEQ ID NO: 459402 - RNA, 19 nt, Artificial Sequence
  Synthetic
aggcuugaguccagacaca

SEQ ID NO: 459403 - RNA, 20 nt, Artificial Sequence
  Synthetic
gaggcuugaguccagacaca

SEQ ID NO: 459404 - RNA, 21 nt, Artificial Sequence
  Synthetic
ggaggcuugaguccagacaca

SEQ ID NO: 459405 - RNA, 22 nt, Artificial Sequence
  Synthetic
aggaggcuugaguccagacaca

SEQ ID NO: 459406 - RNA, 23 nt, Artificial Sequence
  Synthetic
gaggaggcuugaguccagacaca

SEQ ID NO: 459407 - RNA, 24 nt, Artificial Sequence
  Synthetic
agaggaggcuugaguccagacaca

SEQ ID NO: 459408 - RNA, 18 nt, Artificial Sequence
  Synthetic
gagagaaagagagacaca

SEQ ID NO: 459409 - RNA, 19 nt, Artificial Sequence
  Synthetic
agagagaaagagagacaca

SEQ ID NO: 459410 - RNA, 20 nt, Artificial Sequence
  Synthetic
gagagagaaagagagacaca

SEQ ID NO: 459411 - RNA, 21 nt, Artificial Sequence
  Synthetic
agagagagaaagagagacaca

SEQ ID NO: 459412 - RNA, 22 nt, Artificial Sequence
  Synthetic
gagagagagaaagagagacaca

SEQ ID NO: 459413 - RNA, 23 nt, Artificial Sequence
  Synthetic
agagagagagaaagagagacaca

SEQ ID NO: 459414 - RNA, 24 nt, Artificial Sequence
  Synthetic
gagagagagagaaagagagacaca

SEQ ID NO: 459415 - RNA, 18 nt, Artificial Sequence
  Synthetic
gugcgugagagagacaca

SEQ ID NO: 459416 - RNA, 19 nt, Artificial Sequence
  Synthetic
ugugcgugagagagacaca

SEQ ID NO: 459417 - RNA, 20 nt, Artificial Sequence
  Synthetic
gugugcgugagagagacaca

SEQ ID NO: 459418 - RNA, 21 nt, Artificial Sequence
  Synthetic
ugugugcgugagagagacaca

SEQ ID NO: 459419 - RNA, 22 nt, Artificial Sequence
  Synthetic
uugugugcgugagagagacaca

SEQ ID NO: 459420 - RNA, 23 nt, Artificial Sequence
  Synthetic
uuugugugcgugagagagacaca

SEQ ID NO: 459421 - RNA, 24 nt, Artificial Sequence
  Synthetic
guuugugugcgugagagagacaca

SEQ ID NO: 459422 - RNA, 18 nt, Artificial Sequence
  Synthetic
gaagccaaaggagacaca

SEQ ID NO: 459423 - RNA, 19 nt, Artificial Sequence
  Synthetic
ggaagccaaaggagacaca

SEQ ID NO: 459424 - RNA, 20 nt, Artificial Sequence
  Synthetic
gggaagccaaaggagacaca

SEQ ID NO: 459425 - RNA, 21 nt, Artificial Sequence
  Synthetic
ggggaagccaaaggagacaca

SEQ ID NO: 459426 - RNA, 22 nt, Artificial Sequence
  Synthetic
uggggaagccaaaggagacaca

SEQ ID NO: 459427 - RNA, 23 nt, Artificial Sequence
  Synthetic
guggggaagccaaaggagacaca

SEQ ID NO: 459428 - RNA, 24 nt, Artificial Sequence
  Synthetic
uguggggaagccaaaggagacaca

SEQ ID NO: 459429 - RNA, 18 nt, Artificial Sequence
  Synthetic
cugcuaaugggagacaca

SEQ ID NO: 459430 - RNA, 19 nt, Artificial Sequence
  Synthetic
gcugcuaaugggagacaca

SEQ ID NO: 459431 - RNA, 20 nt, Artificial Sequence
  Synthetic
ggcugcuaaugggagacaca

SEQ ID NO: 459432 - RNA, 21 nt, Artificial Sequence
  Synthetic
uggcugcuaaugggagacaca

SEQ ID NO: 459433 - RNA, 22 nt, Artificial Sequence
  Synthetic
cuggcugcuaaugggagacaca

SEQ ID NO: 459434 - RNA, 23 nt, Artificial Sequence
  Synthetic
gcuggcugcuaaugggagacaca

SEQ ID NO: 459435 - RNA, 24 nt, Artificial Sequence
  Synthetic
ugcuggcugcuaaugggagacaca

SEQ ID NO: 459436 - RNA, 18 nt, Artificial Sequence
  Synthetic
uguaaaacaugagacaca

SEQ ID NO: 459437 - RNA, 19 nt, Artificial Sequence
  Synthetic
uuguaaaacaugagacaca

SEQ ID NO: 459438 - RNA, 20 nt, Artificial Sequence
  Synthetic
auuguaaaacaugagacaca

SEQ ID NO: 459439 - RNA, 21 nt, Artificial Sequence
  Synthetic
gauuguaaaacaugagacaca

SEQ ID NO: 459440 - RNA, 22 nt, Artificial Sequence
  Synthetic
agauuguaaaacaugagacaca

SEQ ID NO: 459441 - RNA, 23 nt, Artificial Sequence
  Synthetic
cagauuguaaaacaugagacaca

SEQ ID NO: 459442 - RNA, 24 nt, Artificial Sequence
  Synthetic
ccagauuguaaaacaugagacaca

SEQ ID NO: 459443 - RNA, 18 nt, Artificial Sequence
  Synthetic
acauguugaguagacaca

SEQ ID NO: 459444 - RNA, 19 nt, Artificial Sequence
  Synthetic
aacauguugaguagacaca

SEQ ID NO: 459445 - RNA, 20 nt, Artificial Sequence
  Synthetic
gaacauguugaguagacaca

SEQ ID NO: 459446 - RNA, 21 nt, Artificial Sequence
  Synthetic
ugaacauguugaguagacaca

SEQ ID NO: 459447 - RNA, 22 nt, Artificial Sequence
  Synthetic
cugaacauguugaguagacaca

SEQ ID NO: 459448 - RNA, 23 nt, Artificial Sequence
  Synthetic
acugaacauguugaguagacaca

SEQ ID NO: 459449 - RNA, 24 nt, Artificial Sequence
  Synthetic
gacugaacauguugaguagacaca

SEQ ID NO: 459450 - RNA, 18 nt, Artificial Sequence
  Synthetic
uccagccugagcgacaca

SEQ ID NO: 459451 - RNA, 19 nt, Artificial Sequence
  Synthetic
cuccagccugagcgacaca

SEQ ID NO: 459452 - RNA, 20 nt, Artificial Sequence
  Synthetic
acuccagccugagcgacaca

SEQ ID NO: 459453 - RNA, 21 nt, Artificial Sequence
  Synthetic
cacuccagccugagcgacaca

SEQ ID NO: 459454 - RNA, 22 nt, Artificial Sequence
  Synthetic
gcacuccagccugagcgacaca

SEQ ID NO: 459455 - RNA, 23 nt, Artificial Sequence
  Synthetic
ugcacuccagccugagcgacaca

SEQ ID NO: 459456 - RNA, 24 nt, Artificial Sequence
  Synthetic
cugcacuccagccugagcgacaca

SEQ ID NO: 459457 - RNA, 18 nt, Artificial Sequence
  Synthetic
guagggcuggaggacaca

SEQ ID NO: 459458 - RNA, 19 nt, Artificial Sequence
  Synthetic
gguagggcuggaggacaca

SEQ ID NO: 459459 - RNA, 20 nt, Artificial Sequence
  Synthetic
ggguagggcuggaggacaca

SEQ ID NO: 459460 - RNA, 21 nt, Artificial Sequence
  Synthetic
aggguagggcuggaggacaca

SEQ ID NO: 459461 - RNA, 22 nt, Artificial Sequence
  Synthetic
aaggguagggcuggaggacaca

SEQ ID NO: 459462 - RNA, 23 nt, Artificial Sequence
  Synthetic
gaaggguagggcuggaggacaca

SEQ ID NO: 459463 - RNA, 24 nt, Artificial Sequence
  Synthetic
ugaaggguagggcuggaggacaca

SEQ ID NO: 459464 - RNA, 18 nt, Artificial Sequence
  Synthetic
aaugugguauaggacaca

SEQ ID NO: 459465 - RNA, 19 nt, Artificial Sequence
  Synthetic
aaaugugguauaggacaca

SEQ ID NO: 459466 - RNA, 20 nt, Artificial Sequence
  Synthetic
aaaaugugguauaggacaca

SEQ ID NO: 459467 - RNA, 21 nt, Artificial Sequence
  Synthetic
aaaaaugugguauaggacaca

SEQ ID NO: 459468 - RNA, 22 nt, Artificial Sequence
  Synthetic
aaaaaaugugguauaggacaca

SEQ ID NO: 459469 - RNA, 23 nt, Artificial Sequence
  Synthetic
uaaaaaaugugguauaggacaca

SEQ ID NO: 459470 - RNA, 24 nt, Artificial Sequence
  Synthetic
uuaaaaaaugugguauaggacaca

SEQ ID NO: 459471 - RNA, 18 nt, Artificial Sequence
  Synthetic
uugcuauguuaggacaca

SEQ ID NO: 459472 - RNA, 19 nt, Artificial Sequence
  Synthetic
uuugcuauguuaggacaca

SEQ ID NO: 459473 - RNA, 20 nt, Artificial Sequence
  Synthetic
cuuugcuauguuaggacaca

SEQ ID NO: 459474 - RNA, 21 nt, Artificial Sequence
  Synthetic
ucuuugcuauguuaggacaca

SEQ ID NO: 459475 - RNA, 22 nt, Artificial Sequence
  Synthetic
cucuuugcuauguuaggacaca

SEQ ID NO: 459476 - RNA, 23 nt, Artificial Sequence
  Synthetic
ucucuuugcuauguuaggacaca

SEQ ID NO: 459477 - RNA, 24 nt, Artificial Sequence
  Synthetic
cucucuuugcuauguuaggacaca

SEQ ID NO: 459478 - RNA, 18 nt, Artificial Sequence
  Synthetic
ugagaacacauggacaca

SEQ ID NO: 459479 - RNA, 19 nt, Artificial Sequence
  Synthetic
augagaacacauggacaca

SEQ ID NO: 459480 - RNA, 20 nt, Artificial Sequence
  Synthetic
aaugagaacacauggacaca

SEQ ID NO: 459481 - RNA, 21 nt, Artificial Sequence
  Synthetic
caaugagaacacauggacaca

SEQ ID NO: 459482 - RNA, 22 nt, Artificial Sequence
  Synthetic
acaaugagaacacauggacaca

SEQ ID NO: 459483 - RNA, 23 nt, Artificial Sequence
  Synthetic
aacaaugagaacacauggacaca

SEQ ID NO: 459484 - RNA, 24 nt, Artificial Sequence
  Synthetic
gaacaaugagaacacauggacaca

SEQ ID NO: 459485 - RNA, 20 nt, Artificial Sequence
  Synthetic
gaugagaacacauggacaca

SEQ ID NO: 459486 - RNA, 21 nt, Artificial Sequence
  Synthetic
ugaugagaacacauggacaca

SEQ ID NO: 459487 - RNA, 22 nt, Artificial Sequence
  Synthetic
augaugagaacacauggacaca

SEQ ID NO: 459488 - RNA, 23 nt, Artificial Sequence
  Synthetic
aaugaugagaacacauggacaca

SEQ ID NO: 459489 - RNA, 24 nt, Artificial Sequence
  Synthetic
aaaugaugagaacacauggacaca

SEQ ID NO: 459490 - RNA, 19 nt, Artificial Sequence
  Synthetic
gugagaacacauggacaca

SEQ ID NO: 459491 - RNA, 20 nt, Artificial Sequence
  Synthetic
agugagaacacauggacaca

SEQ ID NO: 459492 - RNA, 21 nt, Artificial Sequence
  Synthetic
cagugagaacacauggacaca

SEQ ID NO: 459493 - RNA, 22 nt, Artificial Sequence
  Synthetic
acagugagaacacauggacaca

SEQ ID NO: 459494 - RNA, 23 nt, Artificial Sequence
  Synthetic
aacagugagaacacauggacaca

SEQ ID NO: 459495 - RNA, 24 nt, Artificial Sequence
  Synthetic
gaacagugagaacacauggacaca

SEQ ID NO: 459496 - RNA, 18 nt, Artificial Sequence
  Synthetic
ugaaaacauauggacaca

SEQ ID NO: 459497 - RNA, 19 nt, Artificial Sequence
  Synthetic
augaaaacauauggacaca

SEQ ID NO: 459498 - RNA, 20 nt, Artificial Sequence
  Synthetic
aaugaaaacauauggacaca

SEQ ID NO: 459499 - RNA, 21 nt, Artificial Sequence
  Synthetic
caaugaaaacauauggacaca

SEQ ID NO: 459500 - RNA, 22 nt, Artificial Sequence
  Synthetic
acaaugaaaacauauggacaca

SEQ ID NO: 459501 - RNA, 23 nt, Artificial Sequence
  Synthetic
aacaaugaaaacauauggacaca

SEQ ID NO: 459502 - RNA, 24 nt, Artificial Sequence
  Synthetic
aaacaaugaaaacauauggacaca

SEQ ID NO: 459503 - RNA, 18 nt, Artificial Sequence
  Synthetic
gaaaacaauguggacaca

SEQ ID NO: 459504 - RNA, 19 nt, Artificial Sequence
  Synthetic
agaaaacaauguggacaca

SEQ ID NO: 459505 - RNA, 20 nt, Artificial Sequence
  Synthetic
aagaaaacaauguggacaca

SEQ ID NO: 459506 - RNA, 21 nt, Artificial Sequence
  Synthetic
aaagaaaacaauguggacaca

SEQ ID NO: 459507 - RNA, 22 nt, Artificial Sequence
  Synthetic
gaaagaaaacaauguggacaca

SEQ ID NO: 459508 - RNA, 23 nt, Artificial Sequence
  Synthetic
agaaagaaaacaauguggacaca

SEQ ID NO: 459509 - RNA, 24 nt, Artificial Sequence
  Synthetic
aagaaagaaaacaauguggacaca

SEQ ID NO: 459510 - RNA, 18 nt, Artificial Sequence
  Synthetic
guaaaauggucugacaca

SEQ ID NO: 459511 - RNA, 19 nt, Artificial Sequence
  Synthetic
gguaaaauggucugacaca

SEQ ID NO: 459512 - RNA, 20 nt, Artificial Sequence
  Synthetic
agguaaaauggucugacaca

SEQ ID NO: 459513 - RNA, 21 nt, Artificial Sequence
  Synthetic
uagguaaaauggucugacaca

SEQ ID NO: 459514 - RNA, 22 nt, Artificial Sequence
  Synthetic
uuagguaaaauggucugacaca

SEQ ID NO: 459515 - RNA, 23 nt, Artificial Sequence
  Synthetic
auuagguaaaauggucugacaca

SEQ ID NO: 459516 - RNA, 24 nt, Artificial Sequence
  Synthetic
gauuagguaaaauggucugacaca

SEQ ID NO: 459517 - RNA, 18 nt, Artificial Sequence
  Synthetic
ggucucucccuugacaca

SEQ ID NO: 459518 - RNA, 19 nt, Artificial Sequence
  Synthetic
uggucucucccuugacaca

SEQ ID NO: 459519 - RNA, 20 nt, Artificial Sequence
  Synthetic
cuggucucucccuugacaca

SEQ ID NO: 459520 - RNA, 21 nt, Artificial Sequence
  Synthetic
ccuggucucucccuugacaca

SEQ ID NO: 459521 - RNA, 22 nt, Artificial Sequence
  Synthetic
accuggucucucccuugacaca

SEQ ID NO: 459522 - RNA, 23 nt, Artificial Sequence
  Synthetic
caccuggucucucccuugacaca

SEQ ID NO: 459523 - RNA, 24 nt, Artificial Sequence
  Synthetic
ccaccuggucucucccuugacaca

SEQ ID NO: 459524 - RNA, 18 nt, Artificial Sequence
  Synthetic
aaaucaaacuuugacaca

SEQ ID NO: 459525 - RNA, 19 nt, Artificial Sequence
  Synthetic
uaaaucaaacuuugacaca

SEQ ID NO: 459526 - RNA, 20 nt, Artificial Sequence
  Synthetic
uuaaaucaaacuuugacaca

SEQ ID NO: 459527 - RNA, 21 nt, Artificial Sequence
  Synthetic
cuuaaaucaaacuuugacaca

SEQ ID NO: 459528 - RNA, 22 nt, Artificial Sequence
  Synthetic
acuuaaaucaaacuuugacaca

SEQ ID NO: 459529 - RNA, 23 nt, Artificial Sequence
  Synthetic
cacuuaaaucaaacuuugacaca

SEQ ID NO: 459530 - RNA, 24 nt, Artificial Sequence
  Synthetic
ucacuuaaaucaaacuuugacaca

SEQ ID NO: 459531 - RNA, 18 nt, Artificial Sequence
  Synthetic
caguauucaaaauacaca

SEQ ID NO: 459532 - RNA, 19 nt, Artificial Sequence
  Synthetic
ucaguauucaaaauacaca

SEQ ID NO: 459533 - RNA, 20 nt, Artificial Sequence
  Synthetic
gucaguauucaaaauacaca

SEQ ID NO: 459534 - RNA, 21 nt, Artificial Sequence
  Synthetic
ggucaguauucaaaauacaca

SEQ ID NO: 459535 - RNA, 22 nt, Artificial Sequence
  Synthetic
gggucaguauucaaaauacaca

SEQ ID NO: 459536 - RNA, 23 nt, Artificial Sequence
  Synthetic
ggggucaguauucaaaauacaca

SEQ ID NO: 459537 - RNA, 24 nt, Artificial Sequence
  Synthetic
aggggucaguauucaaaauacaca

SEQ ID NO: 459538 - RNA, 18 nt, Artificial Sequence
  Synthetic
aagcaaagcaaauacaca

SEQ ID NO: 459539 - RNA, 19 nt, Artificial Sequence
  Synthetic
aaagcaaagcaaauacaca

SEQ ID NO: 459540 - RNA, 20 nt, Artificial Sequence
  Synthetic
gaaagcaaagcaaauacaca

SEQ ID NO: 459541 - RNA, 21 nt, Artificial Sequence
  Synthetic
ugaaagcaaagcaaauacaca

SEQ ID NO: 459542 - RNA, 22 nt, Artificial Sequence
  Synthetic
augaaagcaaagcaaauacaca

SEQ ID NO: 459543 - RNA, 23 nt, Artificial Sequence
  Synthetic
uaugaaagcaaagcaaauacaca

SEQ ID NO: 459544 - RNA, 24 nt, Artificial Sequence
  Synthetic
guaugaaagcaaagcaaauacaca

SEQ ID NO: 459545 - RNA, 18 nt, Artificial Sequence
  Synthetic
uuuggcaugaaauacaca

SEQ ID NO: 459546 - RNA, 19 nt, Artificial Sequence
  Synthetic
uuuuggcaugaaauacaca

SEQ ID NO: 459547 - RNA, 20 nt, Artificial Sequence
  Synthetic
cuuuuggcaugaaauacaca

SEQ ID NO: 459548 - RNA, 21 nt, Artificial Sequence
  Synthetic
acuuuuggcaugaaauacaca

SEQ ID NO: 459549 - RNA, 22 nt, Artificial Sequence
  Synthetic
gacuuuuggcaugaaauacaca

SEQ ID NO: 459550 - RNA, 23 nt, Artificial Sequence
  Synthetic
agacuuuuggcaugaaauacaca

SEQ ID NO: 459551 - RNA, 24 nt, Artificial Sequence
  Synthetic
gagacuuuuggcaugaaauacaca

SEQ ID NO: 459552 - RNA, 18 nt, Artificial Sequence
  Synthetic
aagggaugcacauacaca

SEQ ID NO: 459553 - RNA, 19 nt, Artificial Sequence
  Synthetic
caagggaugcacauacaca

SEQ ID NO: 459554 - RNA, 20 nt, Artificial Sequence
  Synthetic
acaagggaugcacauacaca

SEQ ID NO: 459555 - RNA, 21 nt, Artificial Sequence
  Synthetic
uacaagggaugcacauacaca

SEQ ID NO: 459556 - RNA, 22 nt, Artificial Sequence
  Synthetic
cuacaagggaugcacauacaca

SEQ ID NO: 459557 - RNA, 23 nt, Artificial Sequence
  Synthetic
gcuacaagggaugcacauacaca

SEQ ID NO: 459558 - RNA, 24 nt, Artificial Sequence
  Synthetic
agcuacaagggaugcacauacaca

SEQ ID NO: 459559 - RNA, 18 nt, Artificial Sequence
  Synthetic
uauucacuaucauacaca

SEQ ID NO: 459560 - RNA, 19 nt, Artificial Sequence
  Synthetic
uuauucacuaucauacaca

SEQ ID NO: 459561 - RNA, 20 nt, Artificial Sequence
  Synthetic
cuuauucacuaucauacaca

SEQ ID NO: 459562 - RNA, 21 nt, Artificial Sequence
  Synthetic
acuuauucacuaucauacaca

SEQ ID NO: 459563 - RNA, 22 nt, Artificial Sequence
  Synthetic
cacuuauucacuaucauacaca

SEQ ID NO: 459564 - RNA, 23 nt, Artificial Sequence
  Synthetic
acacuuauucacuaucauacaca

SEQ ID NO: 459565 - RNA, 24 nt, Artificial Sequence
  Synthetic
cacacuuauucacuaucauacaca

SEQ ID NO: 459566 - RNA, 18 nt, Artificial Sequence
  Synthetic
aacaauuucauauacaca

SEQ ID NO: 459567 - RNA, 19 nt, Artificial Sequence
  Synthetic
aaacaauuucauauacaca

SEQ ID NO: 459568 - RNA, 20 nt, Artificial Sequence
  Synthetic
uaaacaauuucauauacaca

SEQ ID NO: 459569 - RNA, 21 nt, Artificial Sequence
  Synthetic
auaaacaauuucauauacaca

SEQ ID NO: 459570 - RNA, 22 nt, Artificial Sequence
  Synthetic
aauaaacaauuucauauacaca

SEQ ID NO: 459571 - RNA, 23 nt, Artificial Sequence
  Synthetic
gaauaaacaauuucauauacaca

SEQ ID NO: 459572 - RNA, 24 nt, Artificial Sequence
  Synthetic
ggaauaaacaauuucauauacaca

SEQ ID NO: 459573 - RNA, 18 nt, Artificial Sequence
  Synthetic
agaggugauauauacaca

SEQ ID NO: 459574 - RNA, 19 nt, Artificial Sequence
  Synthetic
gagaggugauauauacaca

SEQ ID NO: 459575 - RNA, 20 nt, Artificial Sequence
  Synthetic
agagaggugauauauacaca

SEQ ID NO: 459576 - RNA, 21 nt, Artificial Sequence
  Synthetic
cagagaggugauauauacaca

SEQ ID NO: 459577 - RNA, 22 nt, Artificial Sequence
  Synthetic
ccagagaggugauauauacaca

SEQ ID NO: 459578 - RNA, 23 nt, Artificial Sequence
  Synthetic
accagagaggugauauauacaca

SEQ ID NO: 459579 - RNA, 24 nt, Artificial Sequence
  Synthetic
uaccagagaggugauauauacaca

SEQ ID NO: 459580 - RNA, 18 nt, Artificial Sequence
  Synthetic
augugguauauauacaca

SEQ ID NO: 459581 - RNA, 19 nt, Artificial Sequence
  Synthetic
aaugugguauauauacaca

SEQ ID NO: 459582 - RNA, 20 nt, Artificial Sequence
  Synthetic
aaaugugguauauauacaca

SEQ ID NO: 459583 - RNA, 21 nt, Artificial Sequence
  Synthetic
uaaaugugguauauauacaca

SEQ ID NO: 459584 - RNA, 22 nt, Artificial Sequence
  Synthetic
auaaaugugguauauauacaca

SEQ ID NO: 459585 - RNA, 23 nt, Artificial Sequence
  Synthetic
gauaaaugugguauauauacaca

SEQ ID NO: 459586 - RNA, 24 nt, Artificial Sequence
  Synthetic
agauaaaugugguauauauacaca

SEQ ID NO: 459587 - RNA, 18 nt, Artificial Sequence
  Synthetic
auguguuaauacuacaca

SEQ ID NO: 459588 - RNA, 19 nt, Artificial Sequence
  Synthetic
aauguguuaauacuacaca

SEQ ID NO: 459589 - RNA, 20 nt, Artificial Sequence
  Synthetic
aaauguguuaauacuacaca

SEQ ID NO: 459590 - RNA, 21 nt, Artificial Sequence
  Synthetic
caaauguguuaauacuacaca

SEQ ID NO: 459591 - RNA, 22 nt, Artificial Sequence
  Synthetic
ucaaauguguuaauacuacaca

SEQ ID NO: 459592 - RNA, 23 nt, Artificial Sequence
  Synthetic
gucaaauguguuaauacuacaca

SEQ ID NO: 459593 - RNA, 24 nt, Artificial Sequence
  Synthetic
agucaaauguguuaauacuacaca

SEQ ID NO: 459594 - RNA, 18 nt, Artificial Sequence
  Synthetic
gggaagaaagccuacaca

SEQ ID NO: 459595 - RNA, 19 nt, Artificial Sequence
  Synthetic
ugggaagaaagccuacaca

SEQ ID NO: 459596 - RNA, 20 nt, Artificial Sequence
  Synthetic
augggaagaaagccuacaca

SEQ ID NO: 459597 - RNA, 21 nt, Artificial Sequence
  Synthetic
aaugggaagaaagccuacaca

SEQ ID NO: 459598 - RNA, 22 nt, Artificial Sequence
  Synthetic
aaaugggaagaaagccuacaca

SEQ ID NO: 459599 - RNA, 23 nt, Artificial Sequence
  Synthetic
aaaaugggaagaaagccuacaca

SEQ ID NO: 459600 - RNA, 24 nt, Artificial Sequence
  Synthetic
caaaaugggaagaaagccuacaca

SEQ ID NO: 459601 - RNA, 18 nt, Artificial Sequence
  Synthetic
gaagcaccuagcuacaca

SEQ ID NO: 459602 - RNA, 19 nt, Artificial Sequence
  Synthetic
agaagcaccuagcuacaca

SEQ ID NO: 459603 - RNA, 20 nt, Artificial Sequence
  Synthetic
aagaagcaccuagcuacaca

SEQ ID NO: 459604 - RNA, 21 nt, Artificial Sequence
  Synthetic
aaagaagcaccuagcuacaca

SEQ ID NO: 459605 - RNA, 22 nt, Artificial Sequence
  Synthetic
gaaagaagcaccuagcuacaca

SEQ ID NO: 459606 - RNA, 23 nt, Artificial Sequence
  Synthetic
ggaaagaagcaccuagcuacaca

SEQ ID NO: 459607 - RNA, 24 nt, Artificial Sequence
  Synthetic
uggaaagaagcaccuagcuacaca

SEQ ID NO: 459608 - RNA, 18 nt, Artificial Sequence
  Synthetic
cccuugcgcugcuacaca

SEQ ID NO: 459609 - RNA, 19 nt, Artificial Sequence
  Synthetic
ucccuugcgcugcuacaca

SEQ ID NO: 459610 - RNA, 20 nt, Artificial Sequence
  Synthetic
aucccuugcgcugcuacaca

SEQ ID NO: 459611 - RNA, 21 nt, Artificial Sequence
  Synthetic
uaucccuugcgcugcuacaca

SEQ ID NO: 459612 - RNA, 22 nt, Artificial Sequence
  Synthetic
auaucccuugcgcugcuacaca

SEQ ID NO: 459613 - RNA, 23 nt, Artificial Sequence
  Synthetic
uauaucccuugcgcugcuacaca

SEQ ID NO: 459614 - RNA, 24 nt, Artificial Sequence
  Synthetic
cuauaucccuugcgcugcuacaca

SEQ ID NO: 459615 - RNA, 18 nt, Artificial Sequence
  Synthetic
gagacagacacguacaca

SEQ ID NO: 459616 - RNA, 19 nt, Artificial Sequence
  Synthetic
ggagacagacacguacaca

SEQ ID NO: 459617 - RNA, 20 nt, Artificial Sequence
  Synthetic
uggagacagacacguacaca

SEQ ID NO: 459618 - RNA, 21 nt, Artificial Sequence
  Synthetic
uuggagacagacacguacaca

SEQ ID NO: 459619 - RNA, 22 nt, Artificial Sequence
  Synthetic
guuggagacagacacguacaca

SEQ ID NO: 459620 - RNA, 23 nt, Artificial Sequence
  Synthetic
aguuggagacagacacguacaca

SEQ ID NO: 459621 - RNA, 24 nt, Artificial Sequence
  Synthetic
aaguuggagacagacacguacaca

SEQ ID NO: 459622 - RNA, 18 nt, Artificial Sequence
  Synthetic
ugauuugaucauuacaca

SEQ ID NO: 459623 - RNA, 19 nt, Artificial Sequence
  Synthetic
cugauuugaucauuacaca

SEQ ID NO: 459624 - RNA, 20 nt, Artificial Sequence
  Synthetic
ccugauuugaucauuacaca

SEQ ID NO: 459625 - RNA, 21 nt, Artificial Sequence
  Synthetic
accugauuugaucauuacaca

SEQ ID NO: 459626 - RNA, 22 nt, Artificial Sequence
  Synthetic
aaccugauuugaucauuacaca

SEQ ID NO: 459627 - RNA, 23 nt, Artificial Sequence
  Synthetic
aaaccugauuugaucauuacaca

SEQ ID NO: 459628 - RNA, 24 nt, Artificial Sequence
  Synthetic
gaaaccugauuugaucauuacaca

SEQ ID NO: 459629 - RNA, 18 nt, Artificial Sequence
  Synthetic
gaaacuuuaccuuacaca

SEQ ID NO: 459630 - RNA, 19 nt, Artificial Sequence
  Synthetic
agaaacuuuaccuuacaca

SEQ ID NO: 459631 - RNA, 20 nt, Artificial Sequence
  Synthetic
cagaaacuuuaccuuacaca

SEQ ID NO: 459632 - RNA, 21 nt, Artificial Sequence
  Synthetic
ucagaaacuuuaccuuacaca

SEQ ID NO: 459633 - RNA, 22 nt, Artificial Sequence
  Synthetic
gucagaaacuuuaccuuacaca

SEQ ID NO: 459634 - RNA, 23 nt, Artificial Sequence
  Synthetic
ggucagaaacuuuaccuuacaca

SEQ ID NO: 459635 - RNA, 24 nt, Artificial Sequence
  Synthetic
uggucagaaacuuuaccuuacaca

SEQ ID NO: 459636 - RNA, 18 nt, Artificial Sequence
  Synthetic
auggcuuugucuuacaca

SEQ ID NO: 459637 - RNA, 19 nt, Artificial Sequence
  Synthetic
aauggcuuugucuuacaca

SEQ ID NO: 459638 - RNA, 20 nt, Artificial Sequence
  Synthetic
aaauggcuuugucuuacaca

SEQ ID NO: 459639 - RNA, 21 nt, Artificial Sequence
  Synthetic
caaauggcuuugucuuacaca

SEQ ID NO: 459640 - RNA, 22 nt, Artificial Sequence
  Synthetic
acaaauggcuuugucuuacaca

SEQ ID NO: 459641 - RNA, 23 nt, Artificial Sequence
  Synthetic
cacaaauggcuuugucuuacaca

SEQ ID NO: 459642 - RNA, 24 nt, Artificial Sequence
  Synthetic
gcacaaauggcuuugucuuacaca

SEQ ID NO: 459643 - RNA, 18 nt, Artificial Sequence
  Synthetic
ucuuuaaugguuuacaca

SEQ ID NO: 459644 - RNA, 19 nt, Artificial Sequence
  Synthetic
uucuuuaaugguuuacaca

SEQ ID NO: 459645 - RNA, 20 nt, Artificial Sequence
  Synthetic
guucuuuaaugguuuacaca

SEQ ID NO: 459646 - RNA, 21 nt, Artificial Sequence
  Synthetic
uguucuuuaaugguuuacaca

SEQ ID NO: 459647 - RNA, 22 nt, Artificial Sequence
  Synthetic
auguucuuuaaugguuuacaca

SEQ ID NO: 459648 - RNA, 23 nt, Artificial Sequence
  Synthetic
uauguucuuuaaugguuuacaca

SEQ ID NO: 459649 - RNA, 24 nt, Artificial Sequence
  Synthetic
uuauguucuuuaaugguuuacaca

SEQ ID NO: 459650 - RNA, 18 nt, Artificial Sequence
  Synthetic
aucauauuguuuuacaca

SEQ ID NO: 459651 - RNA, 19 nt, Artificial Sequence
  Synthetic
caucauauuguuuuacaca

SEQ ID NO: 459652 - RNA, 20 nt, Artificial Sequence
  Synthetic
ccaucauauuguuuuacaca

SEQ ID NO: 459653 - RNA, 21 nt, Artificial Sequence
  Synthetic
uccaucauauuguuuuacaca

SEQ ID NO: 459654 - RNA, 22 nt, Artificial Sequence
  Synthetic
uuccaucauauuguuuuacaca

SEQ ID NO: 459655 - RNA, 23 nt, Artificial Sequence
  Synthetic
uuuccaucauauuguuuuacaca

SEQ ID NO: 459656 - RNA, 24 nt, Artificial Sequence
  Synthetic
cuuuccaucauauuguuuuacaca

SEQ ID NO: 459657 - RNA, 18 nt, Artificial Sequence
  Synthetic
acgcaaaucaaaaccaca

SEQ ID NO: 459658 - RNA, 19 nt, Artificial Sequence
  Synthetic
aacgcaaaucaaaaccaca

SEQ ID NO: 459659 - RNA, 20 nt, Artificial Sequence
  Synthetic
aaacgcaaaucaaaaccaca

SEQ ID NO: 459660 - RNA, 21 nt, Artificial Sequence
  Synthetic
gaaacgcaaaucaaaaccaca

SEQ ID NO: 459661 - RNA, 22 nt, Artificial Sequence
  Synthetic
agaaacgcaaaucaaaaccaca

SEQ ID NO: 459662 - RNA, 23 nt, Artificial Sequence
  Synthetic
gagaaacgcaaaucaaaaccaca

SEQ ID NO: 459663 - RNA, 24 nt, Artificial Sequence
  Synthetic
agagaaacgcaaaucaaaaccaca

SEQ ID NO: 459664 - RNA, 21 nt, Artificial Sequence
  Synthetic
aaaaugcaaaucaaaaccaca

SEQ ID NO: 459665 - RNA, 22 nt, Artificial Sequence
  Synthetic
gaaaaugcaaaucaaaaccaca

SEQ ID NO: 459666 - RNA, 23 nt, Artificial Sequence
  Synthetic
ggaaaaugcaaaucaaaaccaca

SEQ ID NO: 459667 - RNA, 24 nt, Artificial Sequence
  Synthetic
aggaaaaugcaaaucaaaaccaca

SEQ ID NO: 459668 - RNA, 24 nt, Artificial Sequence
  Synthetic
ggagaaaugcaaaucaaaaccaca

SEQ ID NO: 459669 - RNA, 20 nt, Artificial Sequence
  Synthetic
gaaugcaaaucaaaaccaca

SEQ ID NO: 459670 - RNA, 21 nt, Artificial Sequence
  Synthetic
ggaaugcaaaucaaaaccaca

SEQ ID NO: 459671 - RNA, 22 nt, Artificial Sequence
  Synthetic
aggaaugcaaaucaaaaccaca

SEQ ID NO: 459672 - RNA, 23 nt, Artificial Sequence
  Synthetic
gaggaaugcaaaucaaaaccaca

SEQ ID NO: 459673 - RNA, 24 nt, Artificial Sequence
  Synthetic
agaggaaugcaaaucaaaaccaca

SEQ ID NO: 459674 - RNA, 18 nt, Artificial Sequence
  Synthetic
augcaagucaaaaccaca

SEQ ID NO: 459675 - RNA, 19 nt, Artificial Sequence
  Synthetic
aaugcaagucaaaaccaca

SEQ ID NO: 459676 - RNA, 20 nt, Artificial Sequence
  Synthetic
aaaugcaagucaaaaccaca

SEQ ID NO: 459677 - RNA, 21 nt, Artificial Sequence
  Synthetic
gaaaugcaagucaaaaccaca

SEQ ID NO: 459678 - RNA, 22 nt, Artificial Sequence
  Synthetic
agaaaugcaagucaaaaccaca

SEQ ID NO: 459679 - RNA, 23 nt, Artificial Sequence
  Synthetic
gagaaaugcaagucaaaaccaca

SEQ ID NO: 459680 - RNA, 24 nt, Artificial Sequence
  Synthetic
agagaaaugcaagucaaaaccaca

SEQ ID NO: 459681 - RNA, 18 nt, Artificial Sequence
  Synthetic
ugaagaacgaaaaccaca

SEQ ID NO: 459682 - RNA, 19 nt, Artificial Sequence
  Synthetic
augaagaacgaaaaccaca

SEQ ID NO: 459683 - RNA, 20 nt, Artificial Sequence
  Synthetic
aaugaagaacgaaaaccaca

SEQ ID NO: 459684 - RNA, 21 nt, Artificial Sequence
  Synthetic
aaaugaagaacgaaaaccaca

SEQ ID NO: 459685 - RNA, 22 nt, Artificial Sequence
  Synthetic
caaaugaagaacgaaaaccaca

SEQ ID NO: 459686 - RNA, 23 nt, Artificial Sequence
  Synthetic
gcaaaugaagaacgaaaaccaca

SEQ ID NO: 459687 - RNA, 24 nt, Artificial Sequence
  Synthetic
ugcaaaugaagaacgaaaaccaca

SEQ ID NO: 459688 - RNA, 18 nt, Artificial Sequence
  Synthetic
uguuaaaaggcaaccaca

SEQ ID NO: 459689 - RNA, 19 nt, Artificial Sequence
  Synthetic
guguuaaaaggcaaccaca

SEQ ID NO: 459690 - RNA, 20 nt, Artificial Sequence
  Synthetic
aguguuaaaaggcaaccaca

SEQ ID NO: 459691 - RNA, 21 nt, Artificial Sequence
  Synthetic
aaguguuaaaaggcaaccaca

SEQ ID NO: 459692 - RNA, 22 nt, Artificial Sequence
  Synthetic
gaaguguuaaaaggcaaccaca

SEQ ID NO: 459693 - RNA, 23 nt, Artificial Sequence
  Synthetic
agaaguguuaaaaggcaaccaca

SEQ ID NO: 459694 - RNA, 24 nt, Artificial Sequence
  Synthetic
uagaaguguuaaaaggcaaccaca

SEQ ID NO: 459695 - RNA, 18 nt, Artificial Sequence
  Synthetic
aaauagaaaaccaccaca

SEQ ID NO: 459696 - RNA, 19 nt, Artificial Sequence
  Synthetic
aaaauagaaaaccaccaca

SEQ ID NO: 459697 - RNA, 20 nt, Artificial Sequence
  Synthetic
aaaaauagaaaaccaccaca

SEQ ID NO: 459698 - RNA, 21 nt, Artificial Sequence
  Synthetic
caaaaauagaaaaccaccaca

SEQ ID NO: 459699 - RNA, 22 nt, Artificial Sequence
  Synthetic
acaaaaauagaaaaccaccaca

SEQ ID NO: 459700 - RNA, 23 nt, Artificial Sequence
  Synthetic
aacaaaaauagaaaaccaccaca

SEQ ID NO: 459701 - RNA, 24 nt, Artificial Sequence
  Synthetic
aaacaaaaauagaaaaccaccaca

SEQ ID NO: 459702 - RNA, 18 nt, Artificial Sequence
  Synthetic
uuaaauuuucucaccaca

SEQ ID NO: 459703 - RNA, 19 nt, Artificial Sequence
  Synthetic
uuuaaauuuucucaccaca

SEQ ID NO: 459704 - RNA, 20 nt, Artificial Sequence
  Synthetic
uuuuaaauuuucucaccaca

SEQ ID NO: 459705 - RNA, 21 nt, Artificial Sequence
  Synthetic
auuuuaaauuuucucaccaca

SEQ ID NO: 459706 - RNA, 22 nt, Artificial Sequence
  Synthetic
aauuuuaaauuuucucaccaca

SEQ ID NO: 459707 - RNA, 23 nt, Artificial Sequence
  Synthetic
gaauuuuaaauuuucucaccaca

SEQ ID NO: 459708 - RNA, 24 nt, Artificial Sequence
  Synthetic
agaauuuuaaauuuucucaccaca

SEQ ID NO: 459709 - RNA, 18 nt, Artificial Sequence
  Synthetic
guaucuucucagaccaca

SEQ ID NO: 459710 - RNA, 19 nt, Artificial Sequence
  Synthetic
aguaucuucucagaccaca

SEQ ID NO: 459711 - RNA, 20 nt, Artificial Sequence
  Synthetic
aaguaucuucucagaccaca

SEQ ID NO: 459712 - RNA, 21 nt, Artificial Sequence
  Synthetic
caaguaucuucucagaccaca

SEQ ID NO: 459713 - RNA, 22 nt, Artificial Sequence
  Synthetic
ucaaguaucuucucagaccaca

SEQ ID NO: 459714 - RNA, 23 nt, Artificial Sequence
  Synthetic
aucaaguaucuucucagaccaca

SEQ ID NO: 459715 - RNA, 24 nt, Artificial Sequence
  Synthetic
uaucaaguaucuucucagaccaca

SEQ ID NO: 459716 - RNA, 18 nt, Artificial Sequence
  Synthetic
gagaaaacugagaccaca

SEQ ID NO: 459717 - RNA, 19 nt, Artificial Sequence
  Synthetic
ugagaaaacugagaccaca

SEQ ID NO: 459718 - RNA, 20 nt, Artificial Sequence
  Synthetic
gugagaaaacugagaccaca

SEQ ID NO: 459719 - RNA, 21 nt, Artificial Sequence
  Synthetic
ggugagaaaacugagaccaca

SEQ ID NO: 459720 - RNA, 22 nt, Artificial Sequence
  Synthetic
aggugagaaaacugagaccaca

SEQ ID NO: 459721 - RNA, 23 nt, Artificial Sequence
  Synthetic
caggugagaaaacugagaccaca

SEQ ID NO: 459722 - RNA, 24 nt, Artificial Sequence
  Synthetic
ccaggugagaaaacugagaccaca

SEQ ID NO: 459723 - RNA, 18 nt, Artificial Sequence
  Synthetic
ugaacugaaaugaccaca

SEQ ID NO: 459724 - RNA, 19 nt, Artificial Sequence
  Synthetic
augaacugaaaugaccaca

SEQ ID NO: 459725 - RNA, 20 nt, Artificial Sequence
  Synthetic
aaugaacugaaaugaccaca

SEQ ID NO: 459726 - RNA, 21 nt, Artificial Sequence
  Synthetic
aaaugaacugaaaugaccaca

SEQ ID NO: 459727 - RNA, 22 nt, Artificial Sequence
  Synthetic
aaaaugaacugaaaugaccaca

SEQ ID NO: 459728 - RNA, 23 nt, Artificial Sequence
  Synthetic
gaaaaugaacugaaaugaccaca

SEQ ID NO: 459729 - RNA, 24 nt, Artificial Sequence
  Synthetic
ugaaaaugaacugaaaugaccaca

SEQ ID NO: 459730 - RNA, 18 nt, Artificial Sequence
  Synthetic
aaauuaaaccugaccaca

SEQ ID NO: 459731 - RNA, 19 nt, Artificial Sequence
  Synthetic
uaaauuaaaccugaccaca

SEQ ID NO: 459732 - RNA, 20 nt, Artificial Sequence
  Synthetic
cuaaauuaaaccugaccaca

SEQ ID NO: 459733 - RNA, 21 nt, Artificial Sequence
  Synthetic
ucuaaauuaaaccugaccaca

SEQ ID NO: 459734 - RNA, 22 nt, Artificial Sequence
  Synthetic
cucuaaauuaaaccugaccaca

SEQ ID NO: 459735 - RNA, 23 nt, Artificial Sequence
  Synthetic
gcucuaaauuaaaccugaccaca

SEQ ID NO: 459736 - RNA, 24 nt, Artificial Sequence
  Synthetic
ggcucuaaauuaaaccugaccaca

SEQ ID NO: 459737 - RNA, 18 nt, Artificial Sequence
  Synthetic
gcaucuucucugaccaca

SEQ ID NO: 459738 - RNA, 19 nt, Artificial Sequence
  Synthetic
agcaucuucucugaccaca

SEQ ID NO: 459739 - RNA, 20 nt, Artificial Sequence
  Synthetic
aagcaucuucucugaccaca

SEQ ID NO: 459740 - RNA, 21 nt, Artificial Sequence
  Synthetic
caagcaucuucucugaccaca

SEQ ID NO: 459741 - RNA, 22 nt, Artificial Sequence
  Synthetic
ucaagcaucuucucugaccaca

SEQ ID NO: 459742 - RNA, 23 nt, Artificial Sequence
  Synthetic
aucaagcaucuucucugaccaca

SEQ ID NO: 459743 - RNA, 24 nt, Artificial Sequence
  Synthetic
uaucaagcaucuucucugaccaca

SEQ ID NO: 459744 - RNA, 18 nt, Artificial Sequence
  Synthetic
agggaaguauugaccaca

SEQ ID NO: 459745 - RNA, 19 nt, Artificial Sequence
  Synthetic
cagggaaguauugaccaca

SEQ ID NO: 459746 - RNA, 20 nt, Artificial Sequence
  Synthetic
acagggaaguauugaccaca

SEQ ID NO: 459747 - RNA, 21 nt, Artificial Sequence
  Synthetic
aacagggaaguauugaccaca

SEQ ID NO: 459748 - RNA, 22 nt, Artificial Sequence
  Synthetic
gaacagggaaguauugaccaca

SEQ ID NO: 459749 - RNA, 23 nt, Artificial Sequence
  Synthetic
ggaacagggaaguauugaccaca

SEQ ID NO: 459750 - RNA, 24 nt, Artificial Sequence
  Synthetic
aggaacagggaaguauugaccaca

SEQ ID NO: 459751 - RNA, 18 nt, Artificial Sequence
  Synthetic
ccaagcuauuauaccaca

SEQ ID NO: 459752 - RNA, 19 nt, Artificial Sequence
  Synthetic
uccaagcuauuauaccaca

SEQ ID NO: 459753 - RNA, 20 nt, Artificial Sequence
  Synthetic
uuccaagcuauuauaccaca

SEQ ID NO: 459754 - RNA, 21 nt, Artificial Sequence
  Synthetic
uuuccaagcuauuauaccaca

SEQ ID NO: 459755 - RNA, 22 nt, Artificial Sequence
  Synthetic
cuuuccaagcuauuauaccaca

SEQ ID NO: 459756 - RNA, 23 nt, Artificial Sequence
  Synthetic
ccuuuccaagcuauuauaccaca

SEQ ID NO: 459757 - RNA, 24 nt, Artificial Sequence
  Synthetic
uccuuuccaagcuauuauaccaca

SEQ ID NO: 459758 - RNA, 18 nt, Artificial Sequence
  Synthetic
uauaucauuuauaccaca

SEQ ID NO: 459759 - RNA, 19 nt, Artificial Sequence
  Synthetic
guauaucauuuauaccaca

SEQ ID NO: 459760 - RNA, 20 nt, Artificial Sequence
  Synthetic
uguauaucauuuauaccaca

SEQ ID NO: 459761 - RNA, 21 nt, Artificial Sequence
  Synthetic
uuguauaucauuuauaccaca

SEQ ID NO: 459762 - RNA, 22 nt, Artificial Sequence
  Synthetic
auuguauaucauuuauaccaca

SEQ ID NO: 459763 - RNA, 23 nt, Artificial Sequence
  Synthetic
uauuguauaucauuuauaccaca

SEQ ID NO: 459764 - RNA, 24 nt, Artificial Sequence
  Synthetic
uuauuguauaucauuuauaccaca

SEQ ID NO: 459765 - RNA, 18 nt, Artificial Sequence
  Synthetic
augauucugccuaccaca

SEQ ID NO: 459766 - RNA, 19 nt, Artificial Sequence
  Synthetic
caugauucugccuaccaca

SEQ ID NO: 459767 - RNA, 20 nt, Artificial Sequence
  Synthetic
ccaugauucugccuaccaca

SEQ ID NO: 459768 - RNA, 21 nt, Artificial Sequence
  Synthetic
cccaugauucugccuaccaca

SEQ ID NO: 459769 - RNA, 22 nt, Artificial Sequence
  Synthetic
gcccaugauucugccuaccaca

SEQ ID NO: 459770 - RNA, 23 nt, Artificial Sequence
  Synthetic
ggcccaugauucugccuaccaca

SEQ ID NO: 459771 - RNA, 24 nt, Artificial Sequence
  Synthetic
gggcccaugauucugccuaccaca

SEQ ID NO: 459772 - RNA, 18 nt, Artificial Sequence
  Synthetic
uaggcuguuguuaccaca

SEQ ID NO: 459773 - RNA, 19 nt, Artificial Sequence
  Synthetic
guaggcuguuguuaccaca

SEQ ID NO: 459774 - RNA, 20 nt, Artificial Sequence
  Synthetic
gguaggcuguuguuaccaca

SEQ ID NO: 459775 - RNA, 21 nt, Artificial Sequence
  Synthetic
ugguaggcuguuguuaccaca

SEQ ID NO: 459776 - RNA, 22 nt, Artificial Sequence
  Synthetic
augguaggcuguuguuaccaca

SEQ ID NO: 459777 - RNA, 23 nt, Artificial Sequence
  Synthetic
uaugguaggcuguuguuaccaca

SEQ ID NO: 459778 - RNA, 24 nt, Artificial Sequence
  Synthetic
auaugguaggcuguuguuaccaca

SEQ ID NO: 459779 - RNA, 18 nt, Artificial Sequence
  Synthetic
uuucaacucaaacccaca

SEQ ID NO: 459780 - RNA, 19 nt, Artificial Sequence
  Synthetic
guuucaacucaaacccaca

SEQ ID NO: 459781 - RNA, 20 nt, Artificial Sequence
  Synthetic
aguuucaacucaaacccaca

SEQ ID NO: 459782 - RNA, 21 nt, Artificial Sequence
  Synthetic
aaguuucaacucaaacccaca

SEQ ID NO: 459783 - RNA, 22 nt, Artificial Sequence
  Synthetic
gaaguuucaacucaaacccaca

SEQ ID NO: 459784 - RNA, 23 nt, Artificial Sequence
  Synthetic
agaaguuucaacucaaacccaca

SEQ ID NO: 459785 - RNA, 24 nt, Artificial Sequence
  Synthetic
aagaaguuucaacucaaacccaca

SEQ ID NO: 459786 - RNA, 18 nt, Artificial Sequence
  Synthetic
acaguccaauaacccaca

SEQ ID NO: 459787 - RNA, 19 nt, Artificial Sequence
  Synthetic
uacaguccaauaacccaca

SEQ ID NO: 459788 - RNA, 20 nt, Artificial Sequence
  Synthetic
cuacaguccaauaacccaca

SEQ ID NO: 459789 - RNA, 21 nt, Artificial Sequence
  Synthetic
acuacaguccaauaacccaca

SEQ ID NO: 459790 - RNA, 22 nt, Artificial Sequence
  Synthetic
gacuacaguccaauaacccaca

SEQ ID NO: 459791 - RNA, 23 nt, Artificial Sequence
  Synthetic
agacuacaguccaauaacccaca

SEQ ID NO: 459792 - RNA, 24 nt, Artificial Sequence
  Synthetic
aagacuacaguccaauaacccaca

SEQ ID NO: 459793 - RNA, 18 nt, Artificial Sequence
  Synthetic
ggucaucccaaccccaca

SEQ ID NO: 459794 - RNA, 19 nt, Artificial Sequence
  Synthetic
uggucaucccaaccccaca

SEQ ID NO: 459795 - RNA, 20 nt, Artificial Sequence
  Synthetic
auggucaucccaaccccaca

SEQ ID NO: 459796 - RNA, 21 nt, Artificial Sequence
  Synthetic
aauggucaucccaaccccaca

SEQ ID NO: 459797 - RNA, 22 nt, Artificial Sequence
  Synthetic
aaauggucaucccaaccccaca

SEQ ID NO: 459798 - RNA, 23 nt, Artificial Sequence
  Synthetic
uaaauggucaucccaaccccaca

SEQ ID NO: 459799 - RNA, 24 nt, Artificial Sequence
  Synthetic
cuaaauggucaucccaaccccaca

SEQ ID NO: 459800 - RNA, 18 nt, Artificial Sequence
  Synthetic
ccuaauugugcccccaca

SEQ ID NO: 459801 - RNA, 19 nt, Artificial Sequence
  Synthetic
uccuaauugugcccccaca

SEQ ID NO: 459802 - RNA, 20 nt, Artificial Sequence
  Synthetic
auccuaauugugcccccaca

SEQ ID NO: 459803 - RNA, 21 nt, Artificial Sequence
  Synthetic
aauccuaauugugcccccaca

SEQ ID NO: 459804 - RNA, 22 nt, Artificial Sequence
  Synthetic
caauccuaauugugcccccaca

SEQ ID NO: 459805 - RNA, 23 nt, Artificial Sequence
  Synthetic
ccaauccuaauugugcccccaca

SEQ ID NO: 459806 - RNA, 24 nt, Artificial Sequence
  Synthetic
cccaauccuaauugugcccccaca

SEQ ID NO: 459807 - RNA, 18 nt, Artificial Sequence
  Synthetic
ccacuccuuguccccaca

SEQ ID NO: 459808 - RNA, 19 nt, Artificial Sequence
  Synthetic
accacuccuuguccccaca

SEQ ID NO: 459809 - RNA, 20 nt, Artificial Sequence
  Synthetic
caccacuccuuguccccaca

SEQ ID NO: 459810 - RNA, 21 nt, Artificial Sequence
  Synthetic
ccaccacuccuuguccccaca

SEQ ID NO: 459811 - RNA, 22 nt, Artificial Sequence
  Synthetic
accaccacuccuuguccccaca

SEQ ID NO: 459812 - RNA, 23 nt, Artificial Sequence
  Synthetic
caccaccacuccuuguccccaca

SEQ ID NO: 459813 - RNA, 24 nt, Artificial Sequence
  Synthetic
ccaccaccacuccuuguccccaca

SEQ ID NO: 459814 - RNA, 18 nt, Artificial Sequence
  Synthetic
agaccuguuucgcccaca

SEQ ID NO: 459815 - RNA, 19 nt, Artificial Sequence
  Synthetic
uagaccuguuucgcccaca

SEQ ID NO: 459816 - RNA, 20 nt, Artificial Sequence
  Synthetic
auagaccuguuucgcccaca

SEQ ID NO: 459817 - RNA, 21 nt, Artificial Sequence
  Synthetic
aauagaccuguuucgcccaca

SEQ ID NO: 459818 - RNA, 22 nt, Artificial Sequence
  Synthetic
aaauagaccuguuucgcccaca

SEQ ID NO: 459819 - RNA, 23 nt, Artificial Sequence
  Synthetic
aaaauagaccuguuucgcccaca

SEQ ID NO: 459820 - RNA, 24 nt, Artificial Sequence
  Synthetic
caaaauagaccuguuucgcccaca

SEQ ID NO: 459821 - RNA, 18 nt, Artificial Sequence
  Synthetic
ccuuucucaagucccaca

SEQ ID NO: 459822 - RNA, 19 nt, Artificial Sequence
  Synthetic
gccuuucucaagucccaca

SEQ ID NO: 459823 - RNA, 20 nt, Artificial Sequence
  Synthetic
agccuuucucaagucccaca

SEQ ID NO: 459824 - RNA, 21 nt, Artificial Sequence
  Synthetic
aagccuuucucaagucccaca

SEQ ID NO: 459825 - RNA, 22 nt, Artificial Sequence
  Synthetic
gaagccuuucucaagucccaca

SEQ ID NO: 459826 - RNA, 23 nt, Artificial Sequence
  Synthetic
ugaagccuuucucaagucccaca

SEQ ID NO: 459827 - RNA, 24 nt, Artificial Sequence
  Synthetic
gugaagccuuucucaagucccaca

SEQ ID NO: 459828 - RNA, 18 nt, Artificial Sequence
  Synthetic
aauuuuuucuuucccaca

SEQ ID NO: 459829 - RNA, 19 nt, Artificial Sequence
  Synthetic
aaauuuuuucuuucccaca

SEQ ID NO: 459830 - RNA, 20 nt, Artificial Sequence
  Synthetic
uaaauuuuuucuuucccaca

SEQ ID NO: 459831 - RNA, 21 nt, Artificial Sequence
  Synthetic
uuaaauuuuuucuuucccaca

SEQ ID NO: 459832 - RNA, 22 nt, Artificial Sequence
  Synthetic
auuaaauuuuuucuuucccaca

SEQ ID NO: 459833 - RNA, 23 nt, Artificial Sequence
  Synthetic
cauuaaauuuuuucuuucccaca

SEQ ID NO: 459834 - RNA, 24 nt, Artificial Sequence
  Synthetic
ucauuaaauuuuuucuuucccaca

SEQ ID NO: 459835 - RNA, 18 nt, Artificial Sequence
  Synthetic
gaggccuccccagccaca

SEQ ID NO: 459836 - RNA, 19 nt, Artificial Sequence
  Synthetic
ugaggccuccccagccaca

SEQ ID NO: 459837 - RNA, 20 nt, Artificial Sequence
  Synthetic
cugaggccuccccagccaca

SEQ ID NO: 459838 - RNA, 21 nt, Artificial Sequence
  Synthetic
ccugaggccuccccagccaca

SEQ ID NO: 459839 - RNA, 22 nt, Artificial Sequence
  Synthetic
uccugaggccuccccagccaca

SEQ ID NO: 459840 - RNA, 23 nt, Artificial Sequence
  Synthetic
uuccugaggccuccccagccaca

SEQ ID NO: 459841 - RNA, 24 nt, Artificial Sequence
  Synthetic
uuuccugaggccuccccagccaca

SEQ ID NO: 459842 - RNA, 18 nt, Artificial Sequence
  Synthetic
caaauuaguucagccaca

SEQ ID NO: 459843 - RNA, 19 nt, Artificial Sequence
  Synthetic
gcaaauuaguucagccaca

SEQ ID NO: 459844 - RNA, 20 nt, Artificial Sequence
  Synthetic
ugcaaauuaguucagccaca

SEQ ID NO: 459845 - RNA, 21 nt, Artificial Sequence
  Synthetic
augcaaauuaguucagccaca

SEQ ID NO: 459846 - RNA, 22 nt, Artificial Sequence
  Synthetic
aaugcaaauuaguucagccaca

SEQ ID NO: 459847 - RNA, 23 nt, Artificial Sequence
  Synthetic
gaaugcaaauuaguucagccaca

SEQ ID NO: 459848 - RNA, 24 nt, Artificial Sequence
  Synthetic
ggaaugcaaauuaguucagccaca

SEQ ID NO: 459849 - RNA, 18 nt, Artificial Sequence
  Synthetic
gaaacgaaaagagccaca

SEQ ID NO: 459850 - RNA, 19 nt, Artificial Sequence
  Synthetic
agaaacgaaaagagccaca

SEQ ID NO: 459851 - RNA, 20 nt, Artificial Sequence
  Synthetic
cagaaacgaaaagagccaca

SEQ ID NO: 459852 - RNA, 21 nt, Artificial Sequence
  Synthetic
gcagaaacgaaaagagccaca

SEQ ID NO: 459853 - RNA, 22 nt, Artificial Sequence
  Synthetic
ggcagaaacgaaaagagccaca

SEQ ID NO: 459854 - RNA, 23 nt, Artificial Sequence
  Synthetic
aggcagaaacgaaaagagccaca

SEQ ID NO: 459855 - RNA, 24 nt, Artificial Sequence
  Synthetic
aaggcagaaacgaaaagagccaca

SEQ ID NO: 459856 - RNA, 18 nt, Artificial Sequence
  Synthetic
caccuuuuaauagccaca

SEQ ID NO: 459857 - RNA, 19 nt, Artificial Sequence
  Synthetic
ucaccuuuuaauagccaca

SEQ ID NO: 459858 - RNA, 20 nt, Artificial Sequence
  Synthetic
uucaccuuuuaauagccaca

SEQ ID NO: 459859 - RNA, 21 nt, Artificial Sequence
  Synthetic
guucaccuuuuaauagccaca

SEQ ID NO: 459860 - RNA, 22 nt, Artificial Sequence
  Synthetic
aguucaccuuuuaauagccaca

SEQ ID NO: 459861 - RNA, 23 nt, Artificial Sequence
  Synthetic
caguucaccuuuuaauagccaca

SEQ ID NO: 459862 - RNA, 24 nt, Artificial Sequence
  Synthetic
ucaguucaccuuuuaauagccaca

SEQ ID NO: 459863 - RNA, 18 nt, Artificial Sequence
  Synthetic
cuuaagagugacgccaca

SEQ ID NO: 459864 - RNA, 19 nt, Artificial Sequence
  Synthetic
ucuuaagagugacgccaca

SEQ ID NO: 459865 - RNA, 20 nt, Artificial Sequence
  Synthetic
aucuuaagagugacgccaca

SEQ ID NO: 459866 - RNA, 21 nt, Artificial Sequence
  Synthetic
aaucuuaagagugacgccaca

SEQ ID NO: 459867 - RNA, 22 nt, Artificial Sequence
  Synthetic
aaaucuuaagagugacgccaca

SEQ ID NO: 459868 - RNA, 23 nt, Artificial Sequence
  Synthetic
aaaaucuuaagagugacgccaca

SEQ ID NO: 459869 - RNA, 24 nt, Artificial Sequence
  Synthetic
gaaaaucuuaagagugacgccaca

SEQ ID NO: 459870 - RNA, 18 nt, Artificial Sequence
  Synthetic
augguggugagggccaca

SEQ ID NO: 459871 - RNA, 19 nt, Artificial Sequence
  Synthetic
caugguggugagggccaca

SEQ ID NO: 459872 - RNA, 20 nt, Artificial Sequence
  Synthetic
ucaugguggugagggccaca

SEQ ID NO: 459873 - RNA, 21 nt, Artificial Sequence
  Synthetic
cucaugguggugagggccaca

SEQ ID NO: 459874 - RNA, 22 nt, Artificial Sequence
  Synthetic
ccucaugguggugagggccaca

SEQ ID NO: 459875 - RNA, 23 nt, Artificial Sequence
  Synthetic
cccucaugguggugagggccaca

SEQ ID NO: 459876 - RNA, 24 nt, Artificial Sequence
  Synthetic
acccucaugguggugagggccaca

SEQ ID NO: 459877 - RNA, 18 nt, Artificial Sequence
  Synthetic
uggcuucccugggccaca

SEQ ID NO: 459878 - RNA, 19 nt, Artificial Sequence
  Synthetic
uuggcuucccugggccaca

SEQ ID NO: 459879 - RNA, 20 nt, Artificial Sequence
  Synthetic
uuuggcuucccugggccaca

SEQ ID NO: 459880 - RNA, 21 nt, Artificial Sequence
  Synthetic
uuuuggcuucccugggccaca

SEQ ID NO: 459881 - RNA, 22 nt, Artificial Sequence
  Synthetic
cuuuuggcuucccugggccaca

SEQ ID NO: 459882 - RNA, 23 nt, Artificial Sequence
  Synthetic
ucuuuuggcuucccugggccaca

SEQ ID NO: 459883 - RNA, 24 nt, Artificial Sequence
  Synthetic
aucuuuuggcuucccugggccaca

SEQ ID NO: 459884 - RNA, 18 nt, Artificial Sequence
  Synthetic
cucuaaucaguggccaca

SEQ ID NO: 459885 - RNA, 19 nt, Artificial Sequence
  Synthetic
acucuaaucaguggccaca

SEQ ID NO: 459886 - RNA, 20 nt, Artificial Sequence
  Synthetic
aacucuaaucaguggccaca

SEQ ID NO: 459887 - RNA, 21 nt, Artificial Sequence
  Synthetic
uaacucuaaucaguggccaca

SEQ ID NO: 459888 - RNA, 22 nt, Artificial Sequence
  Synthetic
auaacucuaaucaguggccaca

SEQ ID NO: 459889 - RNA, 23 nt, Artificial Sequence
  Synthetic
gauaacucuaaucaguggccaca

SEQ ID NO: 459890 - RNA, 24 nt, Artificial Sequence
  Synthetic
agauaacucuaaucaguggccaca

SEQ ID NO: 459891 - RNA, 18 nt, Artificial Sequence
  Synthetic
aaagugcugaaugccaca

SEQ ID NO: 459892 - RNA, 19 nt, Artificial Sequence
  Synthetic
gaaagugcugaaugccaca

SEQ ID NO: 459893 - RNA, 20 nt, Artificial Sequence
  Synthetic
ggaaagugcugaaugccaca

SEQ ID NO: 459894 - RNA, 21 nt, Artificial Sequence
  Synthetic
aggaaagugcugaaugccaca

SEQ ID NO: 459895 - RNA, 22 nt, Artificial Sequence
  Synthetic
aaggaaagugcugaaugccaca

SEQ ID NO: 459896 - RNA, 23 nt, Artificial Sequence
  Synthetic
caaggaaagugcugaaugccaca

SEQ ID NO: 459897 - RNA, 24 nt, Artificial Sequence
  Synthetic
acaaggaaagugcugaaugccaca

SEQ ID NO: 459898 - RNA, 18 nt, Artificial Sequence
  Synthetic
ucucuguuuaaugccaca

SEQ ID NO: 459899 - RNA, 19 nt, Artificial Sequence
  Synthetic
aucucuguuuaaugccaca

SEQ ID NO: 459900 - RNA, 20 nt, Artificial Sequence
  Synthetic
gaucucuguuuaaugccaca

SEQ ID NO: 459901 - RNA, 21 nt, Artificial Sequence
  Synthetic
ugaucucuguuuaaugccaca

SEQ ID NO: 459902 - RNA, 22 nt, Artificial Sequence
  Synthetic
gugaucucuguuuaaugccaca

SEQ ID NO: 459903 - RNA, 23 nt, Artificial Sequence
  Synthetic
agugaucucuguuuaaugccaca

SEQ ID NO: 459904 - RNA, 24 nt, Artificial Sequence
  Synthetic
cagugaucucuguuuaaugccaca

SEQ ID NO: 459905 - RNA, 18 nt, Artificial Sequence
  Synthetic
ugccaucuuugugccaca

SEQ ID NO: 459906 - RNA, 19 nt, Artificial Sequence
  Synthetic
uugccaucuuugugccaca

SEQ ID NO: 459907 - RNA, 20 nt, Artificial Sequence
  Synthetic
uuugccaucuuugugccaca

SEQ ID NO: 459908 - RNA, 21 nt, Artificial Sequence
  Synthetic
auuugccaucuuugugccaca

SEQ ID NO: 459909 - RNA, 22 nt, Artificial Sequence
  Synthetic
uauuugccaucuuugugccaca

SEQ ID NO: 459910 - RNA, 23 nt, Artificial Sequence
  Synthetic
auauuugccaucuuugugccaca

SEQ ID NO: 459911 - RNA, 24 nt, Artificial Sequence
  Synthetic
uauauuugccaucuuugugccaca

SEQ ID NO: 459912 - RNA, 18 nt, Artificial Sequence
  Synthetic
auugccauggaauccaca

SEQ ID NO: 459913 - RNA, 19 nt, Artificial Sequence
  Synthetic
cauugccauggaauccaca

SEQ ID NO: 459914 - RNA, 20 nt, Artificial Sequence
  Synthetic
ccauugccauggaauccaca

SEQ ID NO: 459915 - RNA, 21 nt, Artificial Sequence
  Synthetic
uccauugccauggaauccaca

SEQ ID NO: 459916 - RNA, 22 nt, Artificial Sequence
  Synthetic
cuccauugccauggaauccaca

SEQ ID NO: 459917 - RNA, 23 nt, Artificial Sequence
  Synthetic
ucuccauugccauggaauccaca

SEQ ID NO: 459918 - RNA, 24 nt, Artificial Sequence
  Synthetic
uucuccauugccauggaauccaca

SEQ ID NO: 459919 - RNA, 18 nt, Artificial Sequence
  Synthetic
aggguguuuauauccaca

SEQ ID NO: 459920 - RNA, 19 nt, Artificial Sequence
  Synthetic
aaggguguuuauauccaca

SEQ ID NO: 459921 - RNA, 20 nt, Artificial Sequence
  Synthetic
gaaggguguuuauauccaca

SEQ ID NO: 459922 - RNA, 21 nt, Artificial Sequence
  Synthetic
ugaaggguguuuauauccaca

SEQ ID NO: 459923 - RNA, 22 nt, Artificial Sequence
  Synthetic
gugaaggguguuuauauccaca

SEQ ID NO: 459924 - RNA, 23 nt, Artificial Sequence
  Synthetic
ugugaaggguguuuauauccaca

SEQ ID NO: 459925 - RNA, 24 nt, Artificial Sequence
  Synthetic
augugaaggguguuuauauccaca

SEQ ID NO: 459926 - RNA, 18 nt, Artificial Sequence
  Synthetic
ugaaauaggcuauccaca

SEQ ID NO: 459927 - RNA, 19 nt, Artificial Sequence
  Synthetic
gugaaauaggcuauccaca

SEQ ID NO: 459928 - RNA, 20 nt, Artificial Sequence
  Synthetic
agugaaauaggcuauccaca

SEQ ID NO: 459929 - RNA, 21 nt, Artificial Sequence
  Synthetic
aagugaaauaggcuauccaca

SEQ ID NO: 459930 - RNA, 22 nt, Artificial Sequence
  Synthetic
uaagugaaauaggcuauccaca

SEQ ID NO: 459931 - RNA, 23 nt, Artificial Sequence
  Synthetic
uuaagugaaauaggcuauccaca

SEQ ID NO: 459932 - RNA, 24 nt, Artificial Sequence
  Synthetic
auuaagugaaauaggcuauccaca

SEQ ID NO: 459933 - RNA, 18 nt, Artificial Sequence
  Synthetic
aaagaguacaacuccaca

SEQ ID NO: 459934 - RNA, 19 nt, Artificial Sequence
  Synthetic
uaaagaguacaacuccaca

SEQ ID NO: 459935 - RNA, 20 nt, Artificial Sequence
  Synthetic
auaaagaguacaacuccaca

SEQ ID NO: 459936 - RNA, 21 nt, Artificial Sequence
  Synthetic
aauaaagaguacaacuccaca

SEQ ID NO: 459937 - RNA, 22 nt, Artificial Sequence
  Synthetic
aaauaaagaguacaacuccaca

SEQ ID NO: 459938 - RNA, 23 nt, Artificial Sequence
  Synthetic
aaaauaaagaguacaacuccaca

SEQ ID NO: 459939 - RNA, 24 nt, Artificial Sequence
  Synthetic
uaaaauaaagaguacaacuccaca

SEQ ID NO: 459940 - RNA, 18 nt, Artificial Sequence
  Synthetic
ugaagucagggcuccaca

SEQ ID NO: 459941 - RNA, 19 nt, Artificial Sequence
  Synthetic
gugaagucagggcuccaca

SEQ ID NO: 459942 - RNA, 20 nt, Artificial Sequence
  Synthetic
ugugaagucagggcuccaca

SEQ ID NO: 459943 - RNA, 21 nt, Artificial Sequence
  Synthetic
augugaagucagggcuccaca

SEQ ID NO: 459944 - RNA, 22 nt, Artificial Sequence
  Synthetic
caugugaagucagggcuccaca

SEQ ID NO: 459945 - RNA, 23 nt, Artificial Sequence
  Synthetic
ucaugugaagucagggcuccaca

SEQ ID NO: 459946 - RNA, 24 nt, Artificial Sequence
  Synthetic
uucaugugaagucagggcuccaca

SEQ ID NO: 459947 - RNA, 18 nt, Artificial Sequence
  Synthetic
uauaaaccccucuccaca

SEQ ID NO: 459948 - RNA, 19 nt, Artificial Sequence
  Synthetic
cuauaaaccccucuccaca

SEQ ID NO: 459949 - RNA, 20 nt, Artificial Sequence
  Synthetic
ucuauaaaccccucuccaca

SEQ ID NO: 459950 - RNA, 21 nt, Artificial Sequence
  Synthetic
uucuauaaaccccucuccaca

SEQ ID NO: 459951 - RNA, 22 nt, Artificial Sequence
  Synthetic
uuucuauaaaccccucuccaca

SEQ ID NO: 459952 - RNA, 23 nt, Artificial Sequence
  Synthetic
auuucuauaaaccccucuccaca

SEQ ID NO: 459953 - RNA, 24 nt, Artificial Sequence
  Synthetic
gauuucuauaaaccccucuccaca

SEQ ID NO: 459954 - RNA, 18 nt, Artificial Sequence
  Synthetic
auguuauaguuguccaca

SEQ ID NO: 459955 - RNA, 19 nt, Artificial Sequence
  Synthetic
uauguuauaguuguccaca

SEQ ID NO: 459956 - RNA, 20 nt, Artificial Sequence
  Synthetic
cuauguuauaguuguccaca

SEQ ID NO: 459957 - RNA, 21 nt, Artificial Sequence
  Synthetic
gcuauguuauaguuguccaca

SEQ ID NO: 459958 - RNA, 22 nt, Artificial Sequence
  Synthetic
agcuauguuauaguuguccaca

SEQ ID NO: 459959 - RNA, 23 nt, Artificial Sequence
  Synthetic
cagcuauguuauaguuguccaca

SEQ ID NO: 459960 - RNA, 24 nt, Artificial Sequence
  Synthetic
ucagcuauguuauaguuguccaca

SEQ ID NO: 459961 - RNA, 18 nt, Artificial Sequence
  Synthetic
ccuaccuacaauuccaca

SEQ ID NO: 459962 - RNA, 19 nt, Artificial Sequence
  Synthetic
uccuaccuacaauuccaca

SEQ ID NO: 459963 - RNA, 20 nt, Artificial Sequence
  Synthetic
auccuaccuacaauuccaca

SEQ ID NO: 459964 - RNA, 21 nt, Artificial Sequence
  Synthetic
gauccuaccuacaauuccaca

SEQ ID NO: 459965 - RNA, 22 nt, Artificial Sequence
  Synthetic
ugauccuaccuacaauuccaca

SEQ ID NO: 459966 - RNA, 23 nt, Artificial Sequence
  Synthetic
augauccuaccuacaauuccaca

SEQ ID NO: 459967 - RNA, 24 nt, Artificial Sequence
  Synthetic
aaugauccuaccuacaauuccaca

SEQ ID NO: 459968 - RNA, 18 nt, Artificial Sequence
  Synthetic
auccaaucucauuccaca

SEQ ID NO: 459969 - RNA, 19 nt, Artificial Sequence
  Synthetic
gauccaaucucauuccaca

SEQ ID NO: 459970 - RNA, 20 nt, Artificial Sequence
  Synthetic
ugauccaaucucauuccaca

SEQ ID NO: 459971 - RNA, 21 nt, Artificial Sequence
  Synthetic
uugauccaaucucauuccaca

SEQ ID NO: 459972 - RNA, 22 nt, Artificial Sequence
  Synthetic
guugauccaaucucauuccaca

SEQ ID NO: 459973 - RNA, 23 nt, Artificial Sequence
  Synthetic
uguugauccaaucucauuccaca

SEQ ID NO: 459974 - RNA, 24 nt, Artificial Sequence
  Synthetic
guguugauccaaucucauuccaca

SEQ ID NO: 459975 - RNA, 18 nt, Artificial Sequence
  Synthetic
gcuaacauuccuuccaca

SEQ ID NO: 459976 - RNA, 19 nt, Artificial Sequence
  Synthetic
agcuaacauuccuuccaca

SEQ ID NO: 459977 - RNA, 20 nt, Artificial Sequence
  Synthetic
aagcuaacauuccuuccaca

SEQ ID NO: 459978 - RNA, 21 nt, Artificial Sequence
  Synthetic
aaagcuaacauuccuuccaca

SEQ ID NO: 459979 - RNA, 22 nt, Artificial Sequence
  Synthetic
gaaagcuaacauuccuuccaca

SEQ ID NO: 459980 - RNA, 23 nt, Artificial Sequence
  Synthetic
ggaaagcuaacauuccuuccaca

SEQ ID NO: 459981 - RNA, 24 nt, Artificial Sequence
  Synthetic
uggaaagcuaacauuccuuccaca

SEQ ID NO: 459982 - RNA, 18 nt, Artificial Sequence
  Synthetic
agcacacagucuuccaca

SEQ ID NO: 459983 - RNA, 19 nt, Artificial Sequence
  Synthetic
gagcacacagucuuccaca

SEQ ID NO: 459984 - RNA, 20 nt, Artificial Sequence
  Synthetic
ugagcacacagucuuccaca

SEQ ID NO: 459985 - RNA, 21 nt, Artificial Sequence
  Synthetic
cugagcacacagucuuccaca

SEQ ID NO: 459986 - RNA, 22 nt, Artificial Sequence
  Synthetic
gcugagcacacagucuuccaca

SEQ ID NO: 459987 - RNA, 23 nt, Artificial Sequence
  Synthetic
ugcugagcacacagucuuccaca

SEQ ID NO: 459988 - RNA, 24 nt, Artificial Sequence
  Synthetic
uugcugagcacacagucuuccaca

SEQ ID NO: 459989 - RNA, 18 nt, Artificial Sequence
  Synthetic
uauucaauaauuuccaca

SEQ ID NO: 459990 - RNA, 19 nt, Artificial Sequence
  Synthetic
auauucaauaauuuccaca

SEQ ID NO: 459991 - RNA, 20 nt, Artificial Sequence
  Synthetic
cauauucaauaauuuccaca

SEQ ID NO: 459992 - RNA, 21 nt, Artificial Sequence
  Synthetic
acauauucaauaauuuccaca

SEQ ID NO: 459993 - RNA, 22 nt, Artificial Sequence
  Synthetic
aacauauucaauaauuuccaca

SEQ ID NO: 459994 - RNA, 23 nt, Artificial Sequence
  Synthetic
uaacauauucaauaauuuccaca

SEQ ID NO: 459995 - RNA, 24 nt, Artificial Sequence
  Synthetic
auaacauauucaauaauuuccaca

SEQ ID NO: 459996 - RNA, 18 nt, Artificial Sequence
  Synthetic
gccuguuauguuuccaca

SEQ ID NO: 459997 - RNA, 19 nt, Artificial Sequence
  Synthetic
ggccuguuauguuuccaca

SEQ ID NO: 459998 - RNA, 20 nt, Artificial Sequence
  Synthetic
aggccuguuauguuuccaca

SEQ ID NO: 459999 - RNA, 21 nt, Artificial Sequence
  Synthetic
caggccuguuauguuuccaca

SEQ ID NO: 460000 - RNA, 22 nt, Artificial Sequence
  Synthetic
ucaggccuguuauguuuccaca

SEQ ID NO: 460001 - RNA, 23 nt, Artificial Sequence
  Synthetic
cucaggccuguuauguuuccaca

SEQ ID NO: 460002 - RNA, 24 nt, Artificial Sequence
  Synthetic
acucaggccuguuauguuuccaca

SEQ ID NO: 460003 - RNA, 18 nt, Artificial Sequence
  Synthetic
ccacaaagcacaagcaca

SEQ ID NO: 460004 - RNA, 19 nt, Artificial Sequence
  Synthetic
cccacaaagcacaagcaca

SEQ ID NO: 460005 - RNA, 20 nt, Artificial Sequence
  Synthetic
ccccacaaagcacaagcaca

SEQ ID NO: 460006 - RNA, 21 nt, Artificial Sequence
  Synthetic
uccccacaaagcacaagcaca

SEQ ID NO: 460007 - RNA, 22 nt, Artificial Sequence
  Synthetic
cuccccacaaagcacaagcaca

SEQ ID NO: 460008 - RNA, 23 nt, Artificial Sequence
  Synthetic
ccuccccacaaagcacaagcaca

SEQ ID NO: 460009 - RNA, 24 nt, Artificial Sequence
  Synthetic
accuccccacaaagcacaagcaca

SEQ ID NO: 460010 - RNA, 18 nt, Artificial Sequence
  Synthetic
aaugggaaaagaagcaca

SEQ ID NO: 460011 - RNA, 19 nt, Artificial Sequence
  Synthetic
aaaugggaaaagaagcaca

SEQ ID NO: 460012 - RNA, 20 nt, Artificial Sequence
  Synthetic
gaaaugggaaaagaagcaca

SEQ ID NO: 460013 - RNA, 21 nt, Artificial Sequence
  Synthetic
agaaaugggaaaagaagcaca

SEQ ID NO: 460014 - RNA, 22 nt, Artificial Sequence
  Synthetic
cagaaaugggaaaagaagcaca

SEQ ID NO: 460015 - RNA, 23 nt, Artificial Sequence
  Synthetic
acagaaaugggaaaagaagcaca

SEQ ID NO: 460016 - RNA, 24 nt, Artificial Sequence
  Synthetic
aacagaaaugggaaaagaagcaca

SEQ ID NO: 460017 - RNA, 18 nt, Artificial Sequence
  Synthetic
auauuuaaaugaagcaca

SEQ ID NO: 460018 - RNA, 19 nt, Artificial Sequence
  Synthetic
uauauuuaaaugaagcaca

SEQ ID NO: 460019 - RNA, 20 nt, Artificial Sequence
  Synthetic
auauauuuaaaugaagcaca

SEQ ID NO: 460020 - RNA, 21 nt, Artificial Sequence
  Synthetic
uauauauuuaaaugaagcaca

SEQ ID NO: 460021 - RNA, 22 nt, Artificial Sequence
  Synthetic
guauauauuuaaaugaagcaca

SEQ ID NO: 460022 - RNA, 23 nt, Artificial Sequence
  Synthetic
aguauauauuuaaaugaagcaca

SEQ ID NO: 460023 - RNA, 24 nt, Artificial Sequence
  Synthetic
caguauauauuuaaaugaagcaca

SEQ ID NO: 460024 - RNA, 18 nt, Artificial Sequence
  Synthetic
caagugugcugaagcaca

SEQ ID NO: 460025 - RNA, 19 nt, Artificial Sequence
  Synthetic
ccaagugugcugaagcaca

SEQ ID NO: 460026 - RNA, 20 nt, Artificial Sequence
  Synthetic
accaagugugcugaagcaca

SEQ ID NO: 460027 - RNA, 21 nt, Artificial Sequence
  Synthetic
uaccaagugugcugaagcaca

SEQ ID NO: 460028 - RNA, 22 nt, Artificial Sequence
  Synthetic
cuaccaagugugcugaagcaca

SEQ ID NO: 460029 - RNA, 23 nt, Artificial Sequence
  Synthetic
acuaccaagugugcugaagcaca

SEQ ID NO: 460030 - RNA, 24 nt, Artificial Sequence
  Synthetic
aacuaccaagugugcugaagcaca

SEQ ID NO: 460031 - RNA, 18 nt, Artificial Sequence
  Synthetic
auuguagcuauaagcaca

SEQ ID NO: 460032 - RNA, 19 nt, Artificial Sequence
  Synthetic
uauuguagcuauaagcaca

SEQ ID NO: 460033 - RNA, 20 nt, Artificial Sequence
  Synthetic
uuauuguagcuauaagcaca

SEQ ID NO: 460034 - RNA, 21 nt, Artificial Sequence
  Synthetic
auuauuguagcuauaagcaca

SEQ ID NO: 460035 - RNA, 22 nt, Artificial Sequence
  Synthetic
aauuauuguagcuauaagcaca

SEQ ID NO: 460036 - RNA, 23 nt, Artificial Sequence
  Synthetic
caauuauuguagcuauaagcaca

SEQ ID NO: 460037 - RNA, 24 nt, Artificial Sequence
  Synthetic
ccaauuauuguagcuauaagcaca

SEQ ID NO: 460038 - RNA, 18 nt, Artificial Sequence
  Synthetic
gaaaaccuuggcagcaca

SEQ ID NO: 460039 - RNA, 19 nt, Artificial Sequence
  Synthetic
ugaaaaccuuggcagcaca

SEQ ID NO: 460040 - RNA, 20 nt, Artificial Sequence
  Synthetic
cugaaaaccuuggcagcaca

SEQ ID NO: 460041 - RNA, 21 nt, Artificial Sequence
  Synthetic
acugaaaaccuuggcagcaca

SEQ ID NO: 460042 - RNA, 22 nt, Artificial Sequence
  Synthetic
aacugaaaaccuuggcagcaca

SEQ ID NO: 460043 - RNA, 23 nt, Artificial Sequence
  Synthetic
aaacugaaaaccuuggcagcaca

SEQ ID NO: 460044 - RNA, 24 nt, Artificial Sequence
  Synthetic
gaaacugaaaaccuuggcagcaca

SEQ ID NO: 460045 - RNA, 18 nt, Artificial Sequence
  Synthetic
uuuauuacaaagagcaca

SEQ ID NO: 460046 - RNA, 19 nt, Artificial Sequence
  Synthetic
guuuauuacaaagagcaca

SEQ ID NO: 460047 - RNA, 20 nt, Artificial Sequence
  Synthetic
uguuuauuacaaagagcaca

SEQ ID NO: 460048 - RNA, 21 nt, Artificial Sequence
  Synthetic
auguuuauuacaaagagcaca

SEQ ID NO: 460049 - RNA, 22 nt, Artificial Sequence
  Synthetic
gauguuuauuacaaagagcaca

SEQ ID NO: 460050 - RNA, 23 nt, Artificial Sequence
  Synthetic
ugauguuuauuacaaagagcaca

SEQ ID NO: 460051 - RNA, 24 nt, Artificial Sequence
  Synthetic
gugauguuuauuacaaagagcaca

SEQ ID NO: 460052 - RNA, 18 nt, Artificial Sequence
  Synthetic
uggcaggcaaagagcaca

SEQ ID NO: 460053 - RNA, 19 nt, Artificial Sequence
  Synthetic
uuggcaggcaaagagcaca

SEQ ID NO: 460054 - RNA, 20 nt, Artificial Sequence
  Synthetic
auuggcaggcaaagagcaca

SEQ ID NO: 460055 - RNA, 21 nt, Artificial Sequence
  Synthetic
uauuggcaggcaaagagcaca

SEQ ID NO: 460056 - RNA, 22 nt, Artificial Sequence
  Synthetic
guauuggcaggcaaagagcaca

SEQ ID NO: 460057 - RNA, 23 nt, Artificial Sequence
  Synthetic
gguauuggcaggcaaagagcaca

SEQ ID NO: 460058 - RNA, 24 nt, Artificial Sequence
  Synthetic
ggguauuggcaggcaaagagcaca

SEQ ID NO: 460059 - RNA, 18 nt, Artificial Sequence
  Synthetic
gcagcuaaccagagcaca

SEQ ID NO: 460060 - RNA, 19 nt, Artificial Sequence
  Synthetic
agcagcuaaccagagcaca

SEQ ID NO: 460061 - RNA, 20 nt, Artificial Sequence
  Synthetic
cagcagcuaaccagagcaca

SEQ ID NO: 460062 - RNA, 21 nt, Artificial Sequence
  Synthetic
ucagcagcuaaccagagcaca

SEQ ID NO: 460063 - RNA, 22 nt, Artificial Sequence
  Synthetic
gucagcagcuaaccagagcaca

SEQ ID NO: 460064 - RNA, 23 nt, Artificial Sequence
  Synthetic
agucagcagcuaaccagagcaca

SEQ ID NO: 460065 - RNA, 24 nt, Artificial Sequence
  Synthetic
cagucagcagcuaaccagagcaca

SEQ ID NO: 460066 - RNA, 18 nt, Artificial Sequence
  Synthetic
uacaguuucaugagcaca

SEQ ID NO: 460067 - RNA, 19 nt, Artificial Sequence
  Synthetic
uuacaguuucaugagcaca

SEQ ID NO: 460068 - RNA, 20 nt, Artificial Sequence
  Synthetic
auuacaguuucaugagcaca

SEQ ID NO: 460069 - RNA, 21 nt, Artificial Sequence
  Synthetic
aauuacaguuucaugagcaca

SEQ ID NO: 460070 - RNA, 22 nt, Artificial Sequence
  Synthetic
aaauuacaguuucaugagcaca

SEQ ID NO: 460071 - RNA, 23 nt, Artificial Sequence
  Synthetic
aaaauuacaguuucaugagcaca

SEQ ID NO: 460072 - RNA, 24 nt, Artificial Sequence
  Synthetic
uaaaauuacaguuucaugagcaca

SEQ ID NO: 460073 - RNA, 18 nt, Artificial Sequence
  Synthetic
aagauucuaacuagcaca

SEQ ID NO: 460074 - RNA, 19 nt, Artificial Sequence
  Synthetic
uaagauucuaacuagcaca

SEQ ID NO: 460075 - RNA, 20 nt, Artificial Sequence
  Synthetic
auaagauucuaacuagcaca

SEQ ID NO: 460076 - RNA, 21 nt, Artificial Sequence
  Synthetic
aauaagauucuaacuagcaca

SEQ ID NO: 460077 - RNA, 22 nt, Artificial Sequence
  Synthetic
aaauaagauucuaacuagcaca

SEQ ID NO: 460078 - RNA, 23 nt, Artificial Sequence
  Synthetic
gaaauaagauucuaacuagcaca

SEQ ID NO: 460079 - RNA, 24 nt, Artificial Sequence
  Synthetic
ggaaauaagauucuaacuagcaca

SEQ ID NO: 460080 - RNA, 18 nt, Artificial Sequence
  Synthetic
auguacugaaguagcaca

SEQ ID NO: 460081 - RNA, 19 nt, Artificial Sequence
  Synthetic
aauguacugaaguagcaca

SEQ ID NO: 460082 - RNA, 20 nt, Artificial Sequence
  Synthetic
aaauguacugaaguagcaca

SEQ ID NO: 460083 - RNA, 21 nt, Artificial Sequence
  Synthetic
caaauguacugaaguagcaca

SEQ ID NO: 460084 - RNA, 22 nt, Artificial Sequence
  Synthetic
acaaauguacugaaguagcaca

SEQ ID NO: 460085 - RNA, 23 nt, Artificial Sequence
  Synthetic
gacaaauguacugaaguagcaca

SEQ ID NO: 460086 - RNA, 24 nt, Artificial Sequence
  Synthetic
agacaaauguacugaaguagcaca

SEQ ID NO: 460087 - RNA, 18 nt, Artificial Sequence
  Synthetic
cuuccacuagaccgcaca

SEQ ID NO: 460088 - RNA, 19 nt, Artificial Sequence
  Synthetic
ccuuccacuagaccgcaca

SEQ ID NO: 460089 - RNA, 20 nt, Artificial Sequence
  Synthetic
uccuuccacuagaccgcaca

SEQ ID NO: 460090 - RNA, 21 nt, Artificial Sequence
  Synthetic
uuccuuccacuagaccgcaca

SEQ ID NO: 460091 - RNA, 22 nt, Artificial Sequence
  Synthetic
uuuccuuccacuagaccgcaca

SEQ ID NO: 460092 - RNA, 23 nt, Artificial Sequence
  Synthetic
auuuccuuccacuagaccgcaca

SEQ ID NO: 460093 - RNA, 24 nt, Artificial Sequence
  Synthetic
aauuuccuuccacuagaccgcaca

SEQ ID NO: 460094 - RNA, 18 nt, Artificial Sequence
  Synthetic
aaaagaaagaaaggcaca

SEQ ID NO: 460095 - RNA, 19 nt, Artificial Sequence
  Synthetic
uaaaagaaagaaaggcaca

SEQ ID NO: 460096 - RNA, 20 nt, Artificial Sequence
  Synthetic
cuaaaagaaagaaaggcaca

SEQ ID NO: 460097 - RNA, 21 nt, Artificial Sequence
  Synthetic
acuaaaagaaagaaaggcaca

SEQ ID NO: 460098 - RNA, 22 nt, Artificial Sequence
  Synthetic
uacuaaaagaaagaaaggcaca

SEQ ID NO: 460099 - RNA, 23 nt, Artificial Sequence
  Synthetic
guacuaaaagaaagaaaggcaca

SEQ ID NO: 460100 - RNA, 24 nt, Artificial Sequence
  Synthetic
uguacuaaaagaaagaaaggcaca

SEQ ID NO: 460101 - RNA, 18 nt, Artificial Sequence
  Synthetic
ugagauaugccaggcaca

SEQ ID NO: 460102 - RNA, 19 nt, Artificial Sequence
  Synthetic
cugagauaugccaggcaca

SEQ ID NO: 460103 - RNA, 20 nt, Artificial Sequence
  Synthetic
ucugagauaugccaggcaca

SEQ ID NO: 460104 - RNA, 21 nt, Artificial Sequence
  Synthetic
aucugagauaugccaggcaca

SEQ ID NO: 460105 - RNA, 22 nt, Artificial Sequence
  Synthetic
uaucugagauaugccaggcaca

SEQ ID NO: 460106 - RNA, 23 nt, Artificial Sequence
  Synthetic
guaucugagauaugccaggcaca

SEQ ID NO: 460107 - RNA, 24 nt, Artificial Sequence
  Synthetic
aguaucugagauaugccaggcaca

SEQ ID NO: 460108 - RNA, 18 nt, Artificial Sequence
  Synthetic
cacaucuucucaggcaca

SEQ ID NO: 460109 - RNA, 19 nt, Artificial Sequence
  Synthetic
acacaucuucucaggcaca

SEQ ID NO: 460110 - RNA, 20 nt, Artificial Sequence
  Synthetic
cacacaucuucucaggcaca

SEQ ID NO: 460111 - RNA, 21 nt, Artificial Sequence
  Synthetic
ccacacaucuucucaggcaca

SEQ ID NO: 460112 - RNA, 22 nt, Artificial Sequence
  Synthetic
gccacacaucuucucaggcaca

SEQ ID NO: 460113 - RNA, 23 nt, Artificial Sequence
  Synthetic
ugccacacaucuucucaggcaca

SEQ ID NO: 460114 - RNA, 24 nt, Artificial Sequence
  Synthetic
augccacacaucuucucaggcaca

SEQ ID NO: 460115 - RNA, 18 nt, Artificial Sequence
  Synthetic
ugaggauaaugaggcaca

SEQ ID NO: 460116 - RNA, 19 nt, Artificial Sequence
  Synthetic
augaggauaaugaggcaca

SEQ ID NO: 460117 - RNA, 20 nt, Artificial Sequence
  Synthetic
aaugaggauaaugaggcaca

SEQ ID NO: 460118 - RNA, 21 nt, Artificial Sequence
  Synthetic
aaaugaggauaaugaggcaca

SEQ ID NO: 460119 - RNA, 22 nt, Artificial Sequence
  Synthetic
gaaaugaggauaaugaggcaca

SEQ ID NO: 460120 - RNA, 23 nt, Artificial Sequence
  Synthetic
ugaaaugaggauaaugaggcaca

SEQ ID NO: 460121 - RNA, 24 nt, Artificial Sequence
  Synthetic
gugaaaugaggauaaugaggcaca

SEQ ID NO: 460122 - RNA, 18 nt, Artificial Sequence
  Synthetic
caauuuuggcucggcaca

SEQ ID NO: 460123 - RNA, 19 nt, Artificial Sequence
  Synthetic
ucaauuuuggcucggcaca

SEQ ID NO: 460124 - RNA, 20 nt, Artificial Sequence
  Synthetic
aucaauuuuggcucggcaca

SEQ ID NO: 460125 - RNA, 21 nt, Artificial Sequence
  Synthetic
uaucaauuuuggcucggcaca

SEQ ID NO: 460126 - RNA, 22 nt, Artificial Sequence
  Synthetic
auaucaauuuuggcucggcaca

SEQ ID NO: 460127 - RNA, 23 nt, Artificial Sequence
  Synthetic
aauaucaauuuuggcucggcaca

SEQ ID NO: 460128 - RNA, 24 nt, Artificial Sequence
  Synthetic
aaauaucaauuuuggcucggcaca

SEQ ID NO: 460129 - RNA, 18 nt, Artificial Sequence
  Synthetic
uuuacaggcgagggcaca

SEQ ID NO: 460130 - RNA, 19 nt, Artificial Sequence
  Synthetic
uuuuacaggcgagggcaca

SEQ ID NO: 460131 - RNA, 20 nt, Artificial Sequence
  Synthetic
auuuuacaggcgagggcaca

SEQ ID NO: 460132 - RNA, 21 nt, Artificial Sequence
  Synthetic
cauuuuacaggcgagggcaca

SEQ ID NO: 460133 - RNA, 22 nt, Artificial Sequence
  Synthetic
ccauuuuacaggcgagggcaca

SEQ ID NO: 460134 - RNA, 23 nt, Artificial Sequence
  Synthetic
cccauuuuacaggcgagggcaca

SEQ ID NO: 460135 - RNA, 24 nt, Artificial Sequence
  Synthetic
ucccauuuuacaggcgagggcaca

SEQ ID NO: 460136 - RNA, 18 nt, Artificial Sequence
  Synthetic
uugaucauucauggcaca

SEQ ID NO: 460137 - RNA, 19 nt, Artificial Sequence
  Synthetic
uuugaucauucauggcaca

SEQ ID NO: 460138 - RNA, 20 nt, Artificial Sequence
  Synthetic
auuugaucauucauggcaca

SEQ ID NO: 460139 - RNA, 21 nt, Artificial Sequence
  Synthetic
gauuugaucauucauggcaca

SEQ ID NO: 460140 - RNA, 22 nt, Artificial Sequence
  Synthetic
ugauuugaucauucauggcaca

SEQ ID NO: 460141 - RNA, 23 nt, Artificial Sequence
  Synthetic
augauuugaucauucauggcaca

SEQ ID NO: 460142 - RNA, 24 nt, Artificial Sequence
  Synthetic
gaugauuugaucauucauggcaca

SEQ ID NO: 460143 - RNA, 18 nt, Artificial Sequence
  Synthetic
auauauauauauggcaca

SEQ ID NO: 460144 - RNA, 19 nt, Artificial Sequence
  Synthetic
uauauauauauauggcaca

SEQ ID NO: 460145 - RNA, 20 nt, Artificial Sequence
  Synthetic
auauauauauauauggcaca

SEQ ID NO: 460146 - RNA, 21 nt, Artificial Sequence
  Synthetic
uauauauauauauauggcaca

SEQ ID NO: 460147 - RNA, 22 nt, Artificial Sequence
  Synthetic
auauauauauauauauggcaca

SEQ ID NO: 460148 - RNA, 23 nt, Artificial Sequence
  Synthetic
uauauauauauauauauggcaca

SEQ ID NO: 460149 - RNA, 24 nt, Artificial Sequence
  Synthetic
auauauauauauauauauggcaca

SEQ ID NO: 460150 - RNA, 18 nt, Artificial Sequence
  Synthetic
cuagcagugccuggcaca

SEQ ID NO: 460151 - RNA, 19 nt, Artificial Sequence
  Synthetic
ccuagcagugccuggcaca

SEQ ID NO: 460152 - RNA, 20 nt, Artificial Sequence
  Synthetic
uccuagcagugccuggcaca

SEQ ID NO: 460153 - RNA, 21 nt, Artificial Sequence
  Synthetic
uuccuagcagugccuggcaca

SEQ ID NO: 460154 - RNA, 22 nt, Artificial Sequence
  Synthetic
cuuccuagcagugccuggcaca

SEQ ID NO: 460155 - RNA, 23 nt, Artificial Sequence
  Synthetic
acuuccuagcagugccuggcaca

SEQ ID NO: 460156 - RNA, 24 nt, Artificial Sequence
  Synthetic
cacuuccuagcagugccuggcaca

SEQ ID NO: 460157 - RNA, 18 nt, Artificial Sequence
  Synthetic
ccaaagaaagcuggcaca

SEQ ID NO: 460158 - RNA, 19 nt, Artificial Sequence
  Synthetic
uccaaagaaagcuggcaca

SEQ ID NO: 460159 - RNA, 20 nt, Artificial Sequence
  Synthetic
cuccaaagaaagcuggcaca

SEQ ID NO: 460160 - RNA, 21 nt, Artificial Sequence
  Synthetic
ucuccaaagaaagcuggcaca

SEQ ID NO: 460161 - RNA, 22 nt, Artificial Sequence
  Synthetic
uucuccaaagaaagcuggcaca

SEQ ID NO: 460162 - RNA, 23 nt, Artificial Sequence
  Synthetic
cuucuccaaagaaagcuggcaca

SEQ ID NO: 460163 - RNA, 24 nt, Artificial Sequence
  Synthetic
acuucuccaaagaaagcuggcaca

SEQ ID NO: 460164 - RNA, 18 nt, Artificial Sequence
  Synthetic
ugaaauaaacuuggcaca

SEQ ID NO: 460165 - RNA, 19 nt, Artificial Sequence
  Synthetic
gugaaauaaacuuggcaca

SEQ ID NO: 460166 - RNA, 20 nt, Artificial Sequence
  Synthetic
agugaaauaaacuuggcaca

SEQ ID NO: 460167 - RNA, 21 nt, Artificial Sequence
  Synthetic
aagugaaauaaacuuggcaca

SEQ ID NO: 460168 - RNA, 22 nt, Artificial Sequence
  Synthetic
uaagugaaauaaacuuggcaca

SEQ ID NO: 460169 - RNA, 23 nt, Artificial Sequence
  Synthetic
uuaagugaaauaaacuuggcaca

SEQ ID NO: 460170 - RNA, 24 nt, Artificial Sequence
  Synthetic
guuaagugaaauaaacuuggcaca

SEQ ID NO: 460171 - RNA, 18 nt, Artificial Sequence
  Synthetic
gggggaauuaaaugcaca

SEQ ID NO: 460172 - RNA, 19 nt, Artificial Sequence
  Synthetic
ggggggaauuaaaugcaca

SEQ ID NO: 460173 - RNA, 20 nt, Artificial Sequence
  Synthetic
aggggggaauuaaaugcaca

SEQ ID NO: 460174 - RNA, 21 nt, Artificial Sequence
  Synthetic
aaggggggaauuaaaugcaca

SEQ ID NO: 460175 - RNA, 22 nt, Artificial Sequence
  Synthetic
aaaggggggaauuaaaugcaca

SEQ ID NO: 460176 - RNA, 23 nt, Artificial Sequence
  Synthetic
caaaggggggaauuaaaugcaca

SEQ ID NO: 460177 - RNA, 24 nt, Artificial Sequence
  Synthetic
ucaaaggggggaauuaaaugcaca

SEQ ID NO: 460178 - RNA, 18 nt, Artificial Sequence
  Synthetic
ugaaacgggagaugcaca

SEQ ID NO: 460179 - RNA, 19 nt, Artificial Sequence
  Synthetic
cugaaacgggagaugcaca

SEQ ID NO: 460180 - RNA, 20 nt, Artificial Sequence
  Synthetic
acugaaacgggagaugcaca

SEQ ID NO: 460181 - RNA, 21 nt, Artificial Sequence
  Synthetic
uacugaaacgggagaugcaca

SEQ ID NO: 460182 - RNA, 22 nt, Artificial Sequence
  Synthetic
uuacugaaacgggagaugcaca

SEQ ID NO: 460183 - RNA, 23 nt, Artificial Sequence
  Synthetic
guuacugaaacgggagaugcaca

SEQ ID NO: 460184 - RNA, 24 nt, Artificial Sequence
  Synthetic
aguuacugaaacgggagaugcaca

SEQ ID NO: 460185 - RNA, 18 nt, Artificial Sequence
  Synthetic
augugguaccuaugcaca

SEQ ID NO: 460186 - RNA, 19 nt, Artificial Sequence
  Synthetic
caugugguaccuaugcaca

SEQ ID NO: 460187 - RNA, 20 nt, Artificial Sequence
  Synthetic
acaugugguaccuaugcaca

SEQ ID NO: 460188 - RNA, 21 nt, Artificial Sequence
  Synthetic
aacaugugguaccuaugcaca

SEQ ID NO: 460189 - RNA, 22 nt, Artificial Sequence
  Synthetic
gaacaugugguaccuaugcaca

SEQ ID NO: 460190 - RNA, 23 nt, Artificial Sequence
  Synthetic
agaacaugugguaccuaugcaca

SEQ ID NO: 460191 - RNA, 24 nt, Artificial Sequence
  Synthetic
aagaacaugugguaccuaugcaca

SEQ ID NO: 460192 - RNA, 18 nt, Artificial Sequence
  Synthetic
uccucaaggcacugcaca

SEQ ID NO: 460193 - RNA, 19 nt, Artificial Sequence
  Synthetic
guccucaaggcacugcaca

SEQ ID NO: 460194 - RNA, 20 nt, Artificial Sequence
  Synthetic
uguccucaaggcacugcaca

SEQ ID NO: 460195 - RNA, 21 nt, Artificial Sequence
  Synthetic
guguccucaaggcacugcaca

SEQ ID NO: 460196 - RNA, 22 nt, Artificial Sequence
  Synthetic
cguguccucaaggcacugcaca

SEQ ID NO: 460197 - RNA, 23 nt, Artificial Sequence
  Synthetic
ucguguccucaaggcacugcaca

SEQ ID NO: 460198 - RNA, 24 nt, Artificial Sequence
  Synthetic
uucguguccucaaggcacugcaca

SEQ ID NO: 460199 - RNA, 18 nt, Artificial Sequence
  Synthetic
ucugaaagucacugcaca

SEQ ID NO: 460200 - RNA, 19 nt, Artificial Sequence
  Synthetic
aucugaaagucacugcaca

SEQ ID NO: 460201 - RNA, 20 nt, Artificial Sequence
  Synthetic
gaucugaaagucacugcaca

SEQ ID NO: 460202 - RNA, 21 nt, Artificial Sequence
  Synthetic
agaucugaaagucacugcaca

SEQ ID NO: 460203 - RNA, 22 nt, Artificial Sequence
  Synthetic
cagaucugaaagucacugcaca

SEQ ID NO: 460204 - RNA, 23 nt, Artificial Sequence
  Synthetic
ccagaucugaaagucacugcaca

SEQ ID NO: 460205 - RNA, 24 nt, Artificial Sequence
  Synthetic
uccagaucugaaagucacugcaca

SEQ ID NO: 460206 - RNA, 18 nt, Artificial Sequence
  Synthetic
accaauuucaccugcaca

SEQ ID NO: 460207 - RNA, 19 nt, Artificial Sequence
  Synthetic
aaccaauuucaccugcaca

SEQ ID NO: 460208 - RNA, 20 nt, Artificial Sequence
  Synthetic
uaaccaauuucaccugcaca

SEQ ID NO: 460209 - RNA, 21 nt, Artificial Sequence
  Synthetic
uuaaccaauuucaccugcaca

SEQ ID NO: 460210 - RNA, 22 nt, Artificial Sequence
  Synthetic
guuaaccaauuucaccugcaca

SEQ ID NO: 460211 - RNA, 23 nt, Artificial Sequence
  Synthetic
uguuaaccaauuucaccugcaca

SEQ ID NO: 460212 - RNA, 24 nt, Artificial Sequence
  Synthetic
cuguuaaccaauuucaccugcaca

SEQ ID NO: 460213 - RNA, 18 nt, Artificial Sequence
  Synthetic
agcagcaguaucugcaca

SEQ ID NO: 460214 - RNA, 19 nt, Artificial Sequence
  Synthetic
gagcagcaguaucugcaca

SEQ ID NO: 460215 - RNA, 20 nt, Artificial Sequence
  Synthetic
ugagcagcaguaucugcaca

SEQ ID NO: 460216 - RNA, 21 nt, Artificial Sequence
  Synthetic
augagcagcaguaucugcaca

SEQ ID NO: 460217 - RNA, 22 nt, Artificial Sequence
  Synthetic
caugagcagcaguaucugcaca

SEQ ID NO: 460218 - RNA, 23 nt, Artificial Sequence
  Synthetic
gcaugagcagcaguaucugcaca

SEQ ID NO: 460219 - RNA, 24 nt, Artificial Sequence
  Synthetic
ugcaugagcagcaguaucugcaca

SEQ ID NO: 460220 - RNA, 18 nt, Artificial Sequence
  Synthetic
ccuauccuucucugcaca

SEQ ID NO: 460221 - RNA, 19 nt, Artificial Sequence
  Synthetic
uccuauccuucucugcaca

SEQ ID NO: 460222 - RNA, 20 nt, Artificial Sequence
  Synthetic
uuccuauccuucucugcaca

SEQ ID NO: 460223 - RNA, 21 nt, Artificial Sequence
  Synthetic
auuccuauccuucucugcaca

SEQ ID NO: 460224 - RNA, 22 nt, Artificial Sequence
  Synthetic
cauuccuauccuucucugcaca

SEQ ID NO: 460225 - RNA, 23 nt, Artificial Sequence
  Synthetic
ccauuccuauccuucucugcaca

SEQ ID NO: 460226 - RNA, 24 nt, Artificial Sequence
  Synthetic
accauuccuauccuucucugcaca

SEQ ID NO: 460227 - RNA, 18 nt, Artificial Sequence
  Synthetic
auccguauuuugugcaca

SEQ ID NO: 460228 - RNA, 19 nt, Artificial Sequence
  Synthetic
aauccguauuuugugcaca

SEQ ID NO: 460229 - RNA, 20 nt, Artificial Sequence
  Synthetic
uaauccguauuuugugcaca

SEQ ID NO: 460230 - RNA, 21 nt, Artificial Sequence
  Synthetic
uuaauccguauuuugugcaca

SEQ ID NO: 460231 - RNA, 22 nt, Artificial Sequence
  Synthetic
uuuaauccguauuuugugcaca

SEQ ID NO: 460232 - RNA, 23 nt, Artificial Sequence
  Synthetic
auuuaauccguauuuugugcaca

SEQ ID NO: 460233 - RNA, 24 nt, Artificial Sequence
  Synthetic
aauuuaauccguauuuugugcaca

SEQ ID NO: 460234 - RNA, 18 nt, Artificial Sequence
  Synthetic
gcacccuauaaaaucaca

SEQ ID NO: 460235 - RNA, 19 nt, Artificial Sequence
  Synthetic
ugcacccuauaaaaucaca

SEQ ID NO: 460236 - RNA, 20 nt, Artificial Sequence
  Synthetic
augcacccuauaaaaucaca

SEQ ID NO: 460237 - RNA, 21 nt, Artificial Sequence
  Synthetic
caugcacccuauaaaaucaca

SEQ ID NO: 460238 - RNA, 22 nt, Artificial Sequence
  Synthetic
acaugcacccuauaaaaucaca

SEQ ID NO: 460239 - RNA, 23 nt, Artificial Sequence
  Synthetic
aacaugcacccuauaaaaucaca

SEQ ID NO: 460240 - RNA, 24 nt, Artificial Sequence
  Synthetic
aaacaugcacccuauaaaaucaca

SEQ ID NO: 460241 - RNA, 18 nt, Artificial Sequence
  Synthetic
augcaaauuaaaaucaca

SEQ ID NO: 460242 - RNA, 19 nt, Artificial Sequence
  Synthetic
aaugcaaauuaaaaucaca

SEQ ID NO: 460243 - RNA, 20 nt, Artificial Sequence
  Synthetic
aaaugcaaauuaaaaucaca

SEQ ID NO: 460244 - RNA, 21 nt, Artificial Sequence
  Synthetic
aaaaugcaaauuaaaaucaca

SEQ ID NO: 460245 - RNA, 22 nt, Artificial Sequence
  Synthetic
aaaaaugcaaauuaaaaucaca

SEQ ID NO: 460246 - RNA, 23 nt, Artificial Sequence
  Synthetic
aaaaaaugcaaauuaaaaucaca

SEQ ID NO: 460247 - RNA, 24 nt, Artificial Sequence
  Synthetic
caaaaaaugcaaauuaaaaucaca

SEQ ID NO: 460248 - RNA, 18 nt, Artificial Sequence
  Synthetic
uuaauguguguaaucaca

SEQ ID NO: 460249 - RNA, 19 nt, Artificial Sequence
  Synthetic
cuuaauguguguaaucaca

SEQ ID NO: 460250 - RNA, 20 nt, Artificial Sequence
  Synthetic
ucuuaauguguguaaucaca

SEQ ID NO: 460251 - RNA, 21 nt, Artificial Sequence
  Synthetic
uucuuaauguguguaaucaca

SEQ ID NO: 460252 - RNA, 22 nt, Artificial Sequence
  Synthetic
uuucuuaauguguguaaucaca

SEQ ID NO: 460253 - RNA, 23 nt, Artificial Sequence
  Synthetic
cuuucuuaauguguguaaucaca

SEQ ID NO: 460254 - RNA, 24 nt, Artificial Sequence
  Synthetic
acuuucuuaauguguguaaucaca

SEQ ID NO: 460255 - RNA, 18 nt, Artificial Sequence
  Synthetic
cuuuucucuuuaaucaca

SEQ ID NO: 460256 - RNA, 19 nt, Artificial Sequence
  Synthetic
ucuuuucucuuuaaucaca

SEQ ID NO: 460257 - RNA, 20 nt, Artificial Sequence
  Synthetic
aucuuuucucuuuaaucaca

SEQ ID NO: 460258 - RNA, 21 nt, Artificial Sequence
  Synthetic
gaucuuuucucuuuaaucaca

SEQ ID NO: 460259 - RNA, 22 nt, Artificial Sequence
  Synthetic
ugaucuuuucucuuuaaucaca

SEQ ID NO: 460260 - RNA, 23 nt, Artificial Sequence
  Synthetic
uugaucuuuucucuuuaaucaca

SEQ ID NO: 460261 - RNA, 24 nt, Artificial Sequence
  Synthetic
auugaucuuuucucuuuaaucaca

SEQ ID NO: 460262 - RNA, 18 nt, Artificial Sequence
  Synthetic
cugaaaaugaggaucaca

SEQ ID NO: 460263 - RNA, 19 nt, Artificial Sequence
  Synthetic
ucugaaaaugaggaucaca

SEQ ID NO: 460264 - RNA, 20 nt, Artificial Sequence
  Synthetic
cucugaaaaugaggaucaca

SEQ ID NO: 460265 - RNA, 21 nt, Artificial Sequence
  Synthetic
ccucugaaaaugaggaucaca

SEQ ID NO: 460266 - RNA, 22 nt, Artificial Sequence
  Synthetic
accucugaaaaugaggaucaca

SEQ ID NO: 460267 - RNA, 23 nt, Artificial Sequence
  Synthetic
aaccucugaaaaugaggaucaca

SEQ ID NO: 460268 - RNA, 24 nt, Artificial Sequence
  Synthetic
caaccucugaaaaugaggaucaca

SEQ ID NO: 460269 - RNA, 18 nt, Artificial Sequence
  Synthetic
cuaguucuuuauaucaca

SEQ ID NO: 460270 - RNA, 19 nt, Artificial Sequence
  Synthetic
ucuaguucuuuauaucaca

SEQ ID NO: 460271 - RNA, 20 nt, Artificial Sequence
  Synthetic
uucuaguucuuuauaucaca

SEQ ID NO: 460272 - RNA, 21 nt, Artificial Sequence
  Synthetic
auucuaguucuuuauaucaca

SEQ ID NO: 460273 - RNA, 22 nt, Artificial Sequence
  Synthetic
cauucuaguucuuuauaucaca

SEQ ID NO: 460274 - RNA, 23 nt, Artificial Sequence
  Synthetic
acauucuaguucuuuauaucaca

SEQ ID NO: 460275 - RNA, 24 nt, Artificial Sequence
  Synthetic
uacauucuaguucuuuauaucaca

SEQ ID NO: 460276 - RNA, 18 nt, Artificial Sequence
  Synthetic
ugauuguuaccuaucaca

SEQ ID NO: 460277 - RNA, 19 nt, Artificial Sequence
  Synthetic
gugauuguuaccuaucaca

SEQ ID NO: 460278 - RNA, 20 nt, Artificial Sequence
  Synthetic
agugauuguuaccuaucaca

SEQ ID NO: 460279 - RNA, 21 nt, Artificial Sequence
  Synthetic
uagugauuguuaccuaucaca

SEQ ID NO: 460280 - RNA, 22 nt, Artificial Sequence
  Synthetic
guagugauuguuaccuaucaca

SEQ ID NO: 460281 - RNA, 23 nt, Artificial Sequence
  Synthetic
gguagugauuguuaccuaucaca

SEQ ID NO: 460282 - RNA, 24 nt, Artificial Sequence
  Synthetic
ggguagugauuguuaccuaucaca

SEQ ID NO: 460283 - RNA, 18 nt, Artificial Sequence
  Synthetic
cuaagacaacaacucaca

SEQ ID NO: 460284 - RNA, 19 nt, Artificial Sequence
  Synthetic
acuaagacaacaacucaca

SEQ ID NO: 460285 - RNA, 20 nt, Artificial Sequence
  Synthetic
uacuaagacaacaacucaca

SEQ ID NO: 460286 - RNA, 21 nt, Artificial Sequence
  Synthetic
guacuaagacaacaacucaca

SEQ ID NO: 460287 - RNA, 22 nt, Artificial Sequence
  Synthetic
aguacuaagacaacaacucaca

SEQ ID NO: 460288 - RNA, 23 nt, Artificial Sequence
  Synthetic
aaguacuaagacaacaacucaca

SEQ ID NO: 460289 - RNA, 24 nt, Artificial Sequence
  Synthetic
aaaguacuaagacaacaacucaca

SEQ ID NO: 460290 - RNA, 18 nt, Artificial Sequence
  Synthetic
ggcaagucugaacucaca

SEQ ID NO: 460291 - RNA, 19 nt, Artificial Sequence
  Synthetic
aggcaagucugaacucaca

SEQ ID NO: 460292 - RNA, 20 nt, Artificial Sequence
  Synthetic
aaggcaagucugaacucaca

SEQ ID NO: 460293 - RNA, 21 nt, Artificial Sequence
  Synthetic
aaaggcaagucugaacucaca

SEQ ID NO: 460294 - RNA, 22 nt, Artificial Sequence
  Synthetic
uaaaggcaagucugaacucaca

SEQ ID NO: 460295 - RNA, 23 nt, Artificial Sequence
  Synthetic
cuaaaggcaagucugaacucaca

SEQ ID NO: 460296 - RNA, 24 nt, Artificial Sequence
  Synthetic
gcuaaaggcaagucugaacucaca

SEQ ID NO: 460297 - RNA, 18 nt, Artificial Sequence
  Synthetic
gacacauaaacacucaca

SEQ ID NO: 460298 - RNA, 19 nt, Artificial Sequence
  Synthetic
agacacauaaacacucaca

SEQ ID NO: 460299 - RNA, 20 nt, Artificial Sequence
  Synthetic
uagacacauaaacacucaca

SEQ ID NO: 460300 - RNA, 21 nt, Artificial Sequence
  Synthetic
guagacacauaaacacucaca

SEQ ID NO: 460301 - RNA, 22 nt, Artificial Sequence
  Synthetic
cguagacacauaaacacucaca

SEQ ID NO: 460302 - RNA, 23 nt, Artificial Sequence
  Synthetic
ucguagacacauaaacacucaca

SEQ ID NO: 460303 - RNA, 24 nt, Artificial Sequence
  Synthetic
gucguagacacauaaacacucaca

SEQ ID NO: 460304 - RNA, 18 nt, Artificial Sequence
  Synthetic
cucaacaggagacucaca

SEQ ID NO: 460305 - RNA, 19 nt, Artificial Sequence
  Synthetic
ucucaacaggagacucaca

SEQ ID NO: 460306 - RNA, 20 nt, Artificial Sequence
  Synthetic
aucucaacaggagacucaca

SEQ ID NO: 460307 - RNA, 21 nt, Artificial Sequence
  Synthetic
caucucaacaggagacucaca

SEQ ID NO: 460308 - RNA, 22 nt, Artificial Sequence
  Synthetic
acaucucaacaggagacucaca

SEQ ID NO: 460309 - RNA, 23 nt, Artificial Sequence
  Synthetic
gacaucucaacaggagacucaca

SEQ ID NO: 460310 - RNA, 24 nt, Artificial Sequence
  Synthetic
agacaucucaacaggagacucaca

SEQ ID NO: 460311 - RNA, 18 nt, Artificial Sequence
  Synthetic
aagcucggaaaccucaca

SEQ ID NO: 460312 - RNA, 19 nt, Artificial Sequence
  Synthetic
gaagcucggaaaccucaca

SEQ ID NO: 460313 - RNA, 20 nt, Artificial Sequence
  Synthetic
agaagcucggaaaccucaca

SEQ ID NO: 460314 - RNA, 21 nt, Artificial Sequence
  Synthetic
aagaagcucggaaaccucaca

SEQ ID NO: 460315 - RNA, 22 nt, Artificial Sequence
  Synthetic
gaagaagcucggaaaccucaca

SEQ ID NO: 460316 - RNA, 23 nt, Artificial Sequence
  Synthetic
cgaagaagcucggaaaccucaca

SEQ ID NO: 460317 - RNA, 24 nt, Artificial Sequence
  Synthetic
acgaagaagcucggaaaccucaca

SEQ ID NO: 460318 - RNA, 18 nt, Artificial Sequence
  Synthetic
gcccaccucggccucaca

SEQ ID NO: 460319 - RNA, 19 nt, Artificial Sequence
  Synthetic
cgcccaccucggccucaca

SEQ ID NO: 460320 - RNA, 20 nt, Artificial Sequence
  Synthetic
ccgcccaccucggccucaca

SEQ ID NO: 460321 - RNA, 21 nt, Artificial Sequence
  Synthetic
uccgcccaccucggccucaca

SEQ ID NO: 460322 - RNA, 22 nt, Artificial Sequence
  Synthetic
auccgcccaccucggccucaca

SEQ ID NO: 460323 - RNA, 23 nt, Artificial Sequence
  Synthetic
gauccgcccaccucggccucaca

SEQ ID NO: 460324 - RNA, 24 nt, Artificial Sequence
  Synthetic
ugauccgcccaccucggccucaca

SEQ ID NO: 460325 - RNA, 18 nt, Artificial Sequence
  Synthetic
ucucauuuacuccucaca

SEQ ID NO: 460326 - RNA, 19 nt, Artificial Sequence
  Synthetic
aucucauuuacuccucaca

SEQ ID NO: 460327 - RNA, 20 nt, Artificial Sequence
  Synthetic
caucucauuuacuccucaca

SEQ ID NO: 460328 - RNA, 21 nt, Artificial Sequence
  Synthetic
ucaucucauuuacuccucaca

SEQ ID NO: 460329 - RNA, 22 nt, Artificial Sequence
  Synthetic
aucaucucauuuacuccucaca

SEQ ID NO: 460330 - RNA, 23 nt, Artificial Sequence
  Synthetic
uaucaucucauuuacuccucaca

SEQ ID NO: 460331 - RNA, 24 nt, Artificial Sequence
  Synthetic
auaucaucucauuuacuccucaca

SEQ ID NO: 460332 - RNA, 18 nt, Artificial Sequence
  Synthetic
auuacccuucuccucaca

SEQ ID NO: 460333 - RNA, 19 nt, Artificial Sequence
  Synthetic
cauuacccuucuccucaca

SEQ ID NO: 460334 - RNA, 20 nt, Artificial Sequence
  Synthetic
ucauuacccuucuccucaca

SEQ ID NO: 460335 - RNA, 21 nt, Artificial Sequence
  Synthetic
uucauuacccuucuccucaca

SEQ ID NO: 460336 - RNA, 22 nt, Artificial Sequence
  Synthetic
auucauuacccuucuccucaca

SEQ ID NO: 460337 - RNA, 23 nt, Artificial Sequence
  Synthetic
cauucauuacccuucuccucaca

SEQ ID NO: 460338 - RNA, 24 nt, Artificial Sequence
  Synthetic
acauucauuacccuucuccucaca

SEQ ID NO: 460339 - RNA, 18 nt, Artificial Sequence
  Synthetic
uuugauuaagagcucaca

SEQ ID NO: 460340 - RNA, 19 nt, Artificial Sequence
  Synthetic
uuuugauuaagagcucaca

SEQ ID NO: 460341 - RNA, 20 nt, Artificial Sequence
  Synthetic
cuuuugauuaagagcucaca

SEQ ID NO: 460342 - RNA, 21 nt, Artificial Sequence
  Synthetic
ccuuuugauuaagagcucaca

SEQ ID NO: 460343 - RNA, 22 nt, Artificial Sequence
  Synthetic
gccuuuugauuaagagcucaca

SEQ ID NO: 460344 - RNA, 23 nt, Artificial Sequence
  Synthetic
ggccuuuugauuaagagcucaca

SEQ ID NO: 460345 - RNA, 24 nt, Artificial Sequence
  Synthetic
gggccuuuugauuaagagcucaca

SEQ ID NO: 460346 - RNA, 18 nt, Artificial Sequence
  Synthetic
acaaaacugaggcucaca

SEQ ID NO: 460347 - RNA, 19 nt, Artificial Sequence
  Synthetic
gacaaaacugaggcucaca

SEQ ID NO: 460348 - RNA, 20 nt, Artificial Sequence
  Synthetic
agacaaaacugaggcucaca

SEQ ID NO: 460349 - RNA, 21 nt, Artificial Sequence
  Synthetic
cagacaaaacugaggcucaca

SEQ ID NO: 460350 - RNA, 22 nt, Artificial Sequence
  Synthetic
gcagacaaaacugaggcucaca

SEQ ID NO: 460351 - RNA, 23 nt, Artificial Sequence
  Synthetic
agcagacaaaacugaggcucaca

SEQ ID NO: 460352 - RNA, 24 nt, Artificial Sequence
  Synthetic
aagcagacaaaacugaggcucaca

SEQ ID NO: 460353 - RNA, 18 nt, Artificial Sequence
  Synthetic
aaaugcauuuaucucaca

SEQ ID NO: 460354 - RNA, 19 nt, Artificial Sequence
  Synthetic
uaaaugcauuuaucucaca

SEQ ID NO: 460355 - RNA, 20 nt, Artificial Sequence
  Synthetic
guaaaugcauuuaucucaca

SEQ ID NO: 460356 - RNA, 21 nt, Artificial Sequence
  Synthetic
uguaaaugcauuuaucucaca

SEQ ID NO: 460357 - RNA, 22 nt, Artificial Sequence
  Synthetic
auguaaaugcauuuaucucaca

SEQ ID NO: 460358 - RNA, 23 nt, Artificial Sequence
  Synthetic
aauguaaaugcauuuaucucaca

SEQ ID NO: 460359 - RNA, 24 nt, Artificial Sequence
  Synthetic
aaauguaaaugcauuuaucucaca

SEQ ID NO: 460360 - RNA, 18 nt, Artificial Sequence
  Synthetic
aggacuuuucuucucaca

SEQ ID NO: 460361 - RNA, 19 nt, Artificial Sequence
  Synthetic
aaggacuuuucuucucaca

SEQ ID NO: 460362 - RNA, 20 nt, Artificial Sequence
  Synthetic
uaaggacuuuucuucucaca

SEQ ID NO: 460363 - RNA, 21 nt, Artificial Sequence
  Synthetic
auaaggacuuuucuucucaca

SEQ ID NO: 460364 - RNA, 22 nt, Artificial Sequence
  Synthetic
cauaaggacuuuucuucucaca

SEQ ID NO: 460365 - RNA, 23 nt, Artificial Sequence
  Synthetic
ucauaaggacuuuucuucucaca

SEQ ID NO: 460366 - RNA, 24 nt, Artificial Sequence
  Synthetic
cucauaaggacuuuucuucucaca

SEQ ID NO: 460367 - RNA, 18 nt, Artificial Sequence
  Synthetic
ggaaguguggcagucaca

SEQ ID NO: 460368 - RNA, 19 nt, Artificial Sequence
  Synthetic
aggaaguguggcagucaca

SEQ ID NO: 460369 - RNA, 20 nt, Artificial Sequence
  Synthetic
aaggaaguguggcagucaca

SEQ ID NO: 460370 - RNA, 21 nt, Artificial Sequence
  Synthetic
uaaggaaguguggcagucaca

SEQ ID NO: 460371 - RNA, 22 nt, Artificial Sequence
  Synthetic
cuaaggaaguguggcagucaca

SEQ ID NO: 460372 - RNA, 23 nt, Artificial Sequence
  Synthetic
gcuaaggaaguguggcagucaca

SEQ ID NO: 460373 - RNA, 24 nt, Artificial Sequence
  Synthetic
cgcuaaggaaguguggcagucaca

SEQ ID NO: 460374 - RNA, 18 nt, Artificial Sequence
  Synthetic
uuaauguccauagucaca

SEQ ID NO: 460375 - RNA, 19 nt, Artificial Sequence
  Synthetic
auuaauguccauagucaca

SEQ ID NO: 460376 - RNA, 20 nt, Artificial Sequence
  Synthetic
cauuaauguccauagucaca

SEQ ID NO: 460377 - RNA, 21 nt, Artificial Sequence
  Synthetic
ccauuaauguccauagucaca

SEQ ID NO: 460378 - RNA, 22 nt, Artificial Sequence
  Synthetic
cccauuaauguccauagucaca

SEQ ID NO: 460379 - RNA, 23 nt, Artificial Sequence
  Synthetic
ucccauuaauguccauagucaca

SEQ ID NO: 460380 - RNA, 24 nt, Artificial Sequence
  Synthetic
aucccauuaauguccauagucaca

SEQ ID NO: 460381 - RNA, 18 nt, Artificial Sequence
  Synthetic
uacauacguauagucaca

SEQ ID NO: 460382 - RNA, 19 nt, Artificial Sequence
  Synthetic
auacauacguauagucaca

SEQ ID NO: 460383 - RNA, 20 nt, Artificial Sequence
  Synthetic
gauacauacguauagucaca

SEQ ID NO: 460384 - RNA, 21 nt, Artificial Sequence
  Synthetic
ugauacauacguauagucaca

SEQ ID NO: 460385 - RNA, 22 nt, Artificial Sequence
  Synthetic
uugauacauacguauagucaca

SEQ ID NO: 460386 - RNA, 23 nt, Artificial Sequence
  Synthetic
cuugauacauacguauagucaca

SEQ ID NO: 460387 - RNA, 24 nt, Artificial Sequence
  Synthetic
acuugauacauacguauagucaca

SEQ ID NO: 460388 - RNA, 18 nt, Artificial Sequence
  Synthetic
acucacaaacccgucaca

SEQ ID NO: 460389 - RNA, 19 nt, Artificial Sequence
  Synthetic
gacucacaaacccgucaca

SEQ ID NO: 460390 - RNA, 20 nt, Artificial Sequence
  Synthetic
ggacucacaaacccgucaca

SEQ ID NO: 460391 - RNA, 21 nt, Artificial Sequence
  Synthetic
uggacucacaaacccgucaca

SEQ ID NO: 460392 - RNA, 22 nt, Artificial Sequence
  Synthetic
cuggacucacaaacccgucaca

SEQ ID NO: 460393 - RNA, 23 nt, Artificial Sequence
  Synthetic
gcuggacucacaaacccgucaca

SEQ ID NO: 460394 - RNA, 24 nt, Artificial Sequence
  Synthetic
ugcuggacucacaaacccgucaca

SEQ ID NO: 460395 - RNA, 18 nt, Artificial Sequence
  Synthetic
gauggaaugacugucaca

SEQ ID NO: 460396 - RNA, 19 nt, Artificial Sequence
  Synthetic
agauggaaugacugucaca

SEQ ID NO: 460397 - RNA, 20 nt, Artificial Sequence
  Synthetic
cagauggaaugacugucaca

SEQ ID NO: 460398 - RNA, 21 nt, Artificial Sequence
  Synthetic
ucagauggaaugacugucaca

SEQ ID NO: 460399 - RNA, 22 nt, Artificial Sequence
  Synthetic
gucagauggaaugacugucaca

SEQ ID NO: 460400 - RNA, 23 nt, Artificial Sequence
  Synthetic
agucagauggaaugacugucaca

SEQ ID NO: 460401 - RNA, 24 nt, Artificial Sequence
  Synthetic
gagucagauggaaugacugucaca

SEQ ID NO: 460402 - RNA, 18 nt, Artificial Sequence
  Synthetic
ccacagagagcugucaca

SEQ ID NO: 460403 - RNA, 19 nt, Artificial Sequence
  Synthetic
accacagagagcugucaca

SEQ ID NO: 460404 - RNA, 20 nt, Artificial Sequence
  Synthetic
aaccacagagagcugucaca

SEQ ID NO: 460405 - RNA, 21 nt, Artificial Sequence
  Synthetic
caaccacagagagcugucaca

SEQ ID NO: 460406 - RNA, 22 nt, Artificial Sequence
  Synthetic
gcaaccacagagagcugucaca

SEQ ID NO: 460407 - RNA, 23 nt, Artificial Sequence
  Synthetic
ggcaaccacagagagcugucaca

SEQ ID NO: 460408 - RNA, 24 nt, Artificial Sequence
  Synthetic
aggcaaccacagagagcugucaca

SEQ ID NO: 460409 - RNA, 18 nt, Artificial Sequence
  Synthetic
ugauuacuuaaauucaca

SEQ ID NO: 460410 - RNA, 19 nt, Artificial Sequence
  Synthetic
cugauuacuuaaauucaca

SEQ ID NO: 460411 - RNA, 20 nt, Artificial Sequence
  Synthetic
gcugauuacuuaaauucaca

SEQ ID NO: 460412 - RNA, 21 nt, Artificial Sequence
  Synthetic
ggcugauuacuuaaauucaca

SEQ ID NO: 460413 - RNA, 22 nt, Artificial Sequence
  Synthetic
aggcugauuacuuaaauucaca

SEQ ID NO: 460414 - RNA, 23 nt, Artificial Sequence
  Synthetic
aaggcugauuacuuaaauucaca

SEQ ID NO: 460415 - RNA, 24 nt, Artificial Sequence
  Synthetic
aaaggcugauuacuuaaauucaca

SEQ ID NO: 460416 - RNA, 18 nt, Artificial Sequence
  Synthetic
gagagaaaagaauucaca

SEQ ID NO: 460417 - RNA, 19 nt, Artificial Sequence
  Synthetic
ugagagaaaagaauucaca

SEQ ID NO: 460418 - RNA, 20 nt, Artificial Sequence
  Synthetic
uugagagaaaagaauucaca

SEQ ID NO: 460419 - RNA, 21 nt, Artificial Sequence
  Synthetic
auugagagaaaagaauucaca

SEQ ID NO: 460420 - RNA, 22 nt, Artificial Sequence
  Synthetic
uauugagagaaaagaauucaca

SEQ ID NO: 460421 - RNA, 23 nt, Artificial Sequence
  Synthetic
guauugagagaaaagaauucaca

SEQ ID NO: 460422 - RNA, 24 nt, Artificial Sequence
  Synthetic
aguauugagagaaaagaauucaca

SEQ ID NO: 460423 - RNA, 18 nt, Artificial Sequence
  Synthetic
gcagaugaggaauucaca

SEQ ID NO: 460424 - RNA, 19 nt, Artificial Sequence
  Synthetic
ggcagaugaggaauucaca

SEQ ID NO: 460425 - RNA, 20 nt, Artificial Sequence
  Synthetic
gggcagaugaggaauucaca

SEQ ID NO: 460426 - RNA, 21 nt, Artificial Sequence
  Synthetic
agggcagaugaggaauucaca

SEQ ID NO: 460427 - RNA, 22 nt, Artificial Sequence
  Synthetic
aagggcagaugaggaauucaca

SEQ ID NO: 460428 - RNA, 23 nt, Artificial Sequence
  Synthetic
gaagggcagaugaggaauucaca

SEQ ID NO: 460429 - RNA, 24 nt, Artificial Sequence
  Synthetic
ggaagggcagaugaggaauucaca

SEQ ID NO: 460430 - RNA, 18 nt, Artificial Sequence
  Synthetic
uucaguccagcauucaca

SEQ ID NO: 460431 - RNA, 19 nt, Artificial Sequence
  Synthetic
guucaguccagcauucaca

SEQ ID NO: 460432 - RNA, 20 nt, Artificial Sequence
  Synthetic
aguucaguccagcauucaca

SEQ ID NO: 460433 - RNA, 21 nt, Artificial Sequence
  Synthetic
uaguucaguccagcauucaca

SEQ ID NO: 460434 - RNA, 22 nt, Artificial Sequence
  Synthetic
uuaguucaguccagcauucaca

SEQ ID NO: 460435 - RNA, 23 nt, Artificial Sequence
  Synthetic
uuuaguucaguccagcauucaca

SEQ ID NO: 460436 - RNA, 24 nt, Artificial Sequence
  Synthetic
uuuuaguucaguccagcauucaca

SEQ ID NO: 460437 - RNA, 18 nt, Artificial Sequence
  Synthetic
ugacugaaaucauucaca

SEQ ID NO: 460438 - RNA, 19 nt, Artificial Sequence
  Synthetic
gugacugaaaucauucaca

SEQ ID NO: 460439 - RNA, 20 nt, Artificial Sequence
  Synthetic
ggugacugaaaucauucaca

SEQ ID NO: 460440 - RNA, 21 nt, Artificial Sequence
  Synthetic
aggugacugaaaucauucaca

SEQ ID NO: 460441 - RNA, 22 nt, Artificial Sequence
  Synthetic
aaggugacugaaaucauucaca

SEQ ID NO: 460442 - RNA, 23 nt, Artificial Sequence
  Synthetic
uaaggugacugaaaucauucaca

SEQ ID NO: 460443 - RNA, 24 nt, Artificial Sequence
  Synthetic
auaaggugacugaaaucauucaca

SEQ ID NO: 460444 - RNA, 18 nt, Artificial Sequence
  Synthetic
ugaauuaagucauucaca

SEQ ID NO: 460445 - RNA, 19 nt, Artificial Sequence
  Synthetic
gugaauuaagucauucaca

SEQ ID NO: 460446 - RNA, 20 nt, Artificial Sequence
  Synthetic
ugugaauuaagucauucaca

SEQ ID NO: 460447 - RNA, 21 nt, Artificial Sequence
  Synthetic
augugaauuaagucauucaca

SEQ ID NO: 460448 - RNA, 22 nt, Artificial Sequence
  Synthetic
aaugugaauuaagucauucaca

SEQ ID NO: 460449 - RNA, 23 nt, Artificial Sequence
  Synthetic
caaugugaauuaagucauucaca

SEQ ID NO: 460450 - RNA, 24 nt, Artificial Sequence
  Synthetic
acaaugugaauuaagucauucaca

SEQ ID NO: 460451 - RNA, 18 nt, Artificial Sequence
  Synthetic
ugcaaaauuguauucaca

SEQ ID NO: 460452 - RNA, 19 nt, Artificial Sequence
  Synthetic
cugcaaaauuguauucaca

SEQ ID NO: 460453 - RNA, 20 nt, Artificial Sequence
  Synthetic
ucugcaaaauuguauucaca

SEQ ID NO: 460454 - RNA, 21 nt, Artificial Sequence
  Synthetic
uucugcaaaauuguauucaca

SEQ ID NO: 460455 - RNA, 22 nt, Artificial Sequence
  Synthetic
uuucugcaaaauuguauucaca

SEQ ID NO: 460456 - RNA, 23 nt, Artificial Sequence
  Synthetic
uuuucugcaaaauuguauucaca

SEQ ID NO: 460457 - RNA, 24 nt, Artificial Sequence
  Synthetic
uuuuucugcaaaauuguauucaca

SEQ ID NO: 460458 - RNA, 18 nt, Artificial Sequence
  Synthetic
acuaaagagcucuucaca

SEQ ID NO: 460459 - RNA, 19 nt, Artificial Sequence
  Synthetic
aacuaaagagcucuucaca

SEQ ID NO: 460460 - RNA, 20 nt, Artificial Sequence
  Synthetic
aaacuaaagagcucuucaca

SEQ ID NO: 460461 - RNA, 21 nt, Artificial Sequence
  Synthetic
uaaacuaaagagcucuucaca

SEQ ID NO: 460462 - RNA, 22 nt, Artificial Sequence
  Synthetic
uuaaacuaaagagcucuucaca

SEQ ID NO: 460463 - RNA, 23 nt, Artificial Sequence
  Synthetic
auuaaacuaaagagcucuucaca

SEQ ID NO: 460464 - RNA, 24 nt, Artificial Sequence
  Synthetic
aauuaaacuaaagagcucuucaca

SEQ ID NO: 460465 - RNA, 18 nt, Artificial Sequence
  Synthetic
ccaugcuuuugguucaca

SEQ ID NO: 460466 - RNA, 19 nt, Artificial Sequence
  Synthetic
uccaugcuuuugguucaca

SEQ ID NO: 460467 - RNA, 20 nt, Artificial Sequence
  Synthetic
uuccaugcuuuugguucaca

SEQ ID NO: 460468 - RNA, 21 nt, Artificial Sequence
  Synthetic
auuccaugcuuuugguucaca

SEQ ID NO: 460469 - RNA, 22 nt, Artificial Sequence
  Synthetic
aauuccaugcuuuugguucaca

SEQ ID NO: 460470 - RNA, 23 nt, Artificial Sequence
  Synthetic
uaauuccaugcuuuugguucaca

SEQ ID NO: 460471 - RNA, 24 nt, Artificial Sequence
  Synthetic
cuaauuccaugcuuuugguucaca

SEQ ID NO: 460472 - RNA, 18 nt, Artificial Sequence
  Synthetic
gagcaaaaaauguucaca

SEQ ID NO: 460473 - RNA, 19 nt, Artificial Sequence
  Synthetic
ugagcaaaaaauguucaca

SEQ ID NO: 460474 - RNA, 20 nt, Artificial Sequence
  Synthetic
gugagcaaaaaauguucaca

SEQ ID NO: 460475 - RNA, 21 nt, Artificial Sequence
  Synthetic
ugugagcaaaaaauguucaca

SEQ ID NO: 460476 - RNA, 22 nt, Artificial Sequence
  Synthetic
cugugagcaaaaaauguucaca

SEQ ID NO: 460477 - RNA, 23 nt, Artificial Sequence
  Synthetic
ccugugagcaaaaaauguucaca

SEQ ID NO: 460478 - RNA, 24 nt, Artificial Sequence
  Synthetic
accugugagcaaaaaauguucaca

SEQ ID NO: 460479 - RNA, 18 nt, Artificial Sequence
  Synthetic
caucuuuuaauguucaca

SEQ ID NO: 460480 - RNA, 19 nt, Artificial Sequence
  Synthetic
ucaucuuuuaauguucaca

SEQ ID NO: 460481 - RNA, 20 nt, Artificial Sequence
  Synthetic
gucaucuuuuaauguucaca

SEQ ID NO: 460482 - RNA, 21 nt, Artificial Sequence
  Synthetic
agucaucuuuuaauguucaca

SEQ ID NO: 460483 - RNA, 22 nt, Artificial Sequence
  Synthetic
aagucaucuuuuaauguucaca

SEQ ID NO: 460484 - RNA, 23 nt, Artificial Sequence
  Synthetic
uaagucaucuuuuaauguucaca

SEQ ID NO: 460485 - RNA, 24 nt, Artificial Sequence
  Synthetic
uuaagucaucuuuuaauguucaca

SEQ ID NO: 460486 - RNA, 18 nt, Artificial Sequence
  Synthetic
ccuauaugcauguucaca

SEQ ID NO: 460487 - RNA, 19 nt, Artificial Sequence
  Synthetic
uccuauaugcauguucaca

SEQ ID NO: 460488 - RNA, 20 nt, Artificial Sequence
  Synthetic
uuccuauaugcauguucaca

SEQ ID NO: 460489 - RNA, 21 nt, Artificial Sequence
  Synthetic
auuccuauaugcauguucaca

SEQ ID NO: 460490 - RNA, 22 nt, Artificial Sequence
  Synthetic
uauuccuauaugcauguucaca

SEQ ID NO: 460491 - RNA, 23 nt, Artificial Sequence
  Synthetic
auauuccuauaugcauguucaca

SEQ ID NO: 460492 - RNA, 24 nt, Artificial Sequence
  Synthetic
aauauuccuauaugcauguucaca

SEQ ID NO: 460493 - RNA, 18 nt, Artificial Sequence
  Synthetic
aucauuuaacuguucaca

SEQ ID NO: 460494 - RNA, 19 nt, Artificial Sequence
  Synthetic
aaucauuuaacuguucaca

SEQ ID NO: 460495 - RNA, 20 nt, Artificial Sequence
  Synthetic
gaaucauuuaacuguucaca

SEQ ID NO: 460496 - RNA, 21 nt, Artificial Sequence
  Synthetic
agaaucauuuaacuguucaca

SEQ ID NO: 460497 - RNA, 22 nt, Artificial Sequence
  Synthetic
gagaaucauuuaacuguucaca

SEQ ID NO: 460498 - RNA, 23 nt, Artificial Sequence
  Synthetic
ggagaaucauuuaacuguucaca

SEQ ID NO: 460499 - RNA, 24 nt, Artificial Sequence
  Synthetic
gggagaaucauuuaacuguucaca

SEQ ID NO: 460500 - RNA, 18 nt, Artificial Sequence
  Synthetic
aguuuccacaauuucaca

SEQ ID NO: 460501 - RNA, 19 nt, Artificial Sequence
  Synthetic
aaguuuccacaauuucaca

SEQ ID NO: 460502 - RNA, 20 nt, Artificial Sequence
  Synthetic
aaaguuuccacaauuucaca

SEQ ID NO: 460503 - RNA, 21 nt, Artificial Sequence
  Synthetic
uaaaguuuccacaauuucaca

SEQ ID NO: 460504 - RNA, 22 nt, Artificial Sequence
  Synthetic
uuaaaguuuccacaauuucaca

SEQ ID NO: 460505 - RNA, 23 nt, Artificial Sequence
  Synthetic
uuuaaaguuuccacaauuucaca

SEQ ID NO: 460506 - RNA, 24 nt, Artificial Sequence
  Synthetic
uuuuaaaguuuccacaauuucaca

SEQ ID NO: 460507 - RNA, 18 nt, Artificial Sequence
  Synthetic
ucuuuuagcaauuucaca

SEQ ID NO: 460508 - RNA, 19 nt, Artificial Sequence
  Synthetic
gucuuuuagcaauuucaca

SEQ ID NO: 460509 - RNA, 20 nt, Artificial Sequence
  Synthetic
ugucuuuuagcaauuucaca

SEQ ID NO: 460510 - RNA, 21 nt, Artificial Sequence
  Synthetic
cugucuuuuagcaauuucaca

SEQ ID NO: 460511 - RNA, 22 nt, Artificial Sequence
  Synthetic
acugucuuuuagcaauuucaca

SEQ ID NO: 460512 - RNA, 23 nt, Artificial Sequence
  Synthetic
aacugucuuuuagcaauuucaca

SEQ ID NO: 460513 - RNA, 24 nt, Artificial Sequence
  Synthetic
aaacugucuuuuagcaauuucaca

SEQ ID NO: 460514 - RNA, 18 nt, Artificial Sequence
  Synthetic
guuacauuccauuucaca

SEQ ID NO: 460515 - RNA, 19 nt, Artificial Sequence
  Synthetic
uguuacauuccauuucaca

SEQ ID NO: 460516 - RNA, 20 nt, Artificial Sequence
  Synthetic
guguuacauuccauuucaca

SEQ ID NO: 460517 - RNA, 21 nt, Artificial Sequence
  Synthetic
gguguuacauuccauuucaca

SEQ ID NO: 460518 - RNA, 22 nt, Artificial Sequence
  Synthetic
agguguuacauuccauuucaca

SEQ ID NO: 460519 - RNA, 23 nt, Artificial Sequence
  Synthetic
cagguguuacauuccauuucaca

SEQ ID NO: 460520 - RNA, 24 nt, Artificial Sequence
  Synthetic
ucagguguuacauuccauuucaca

SEQ ID NO: 460521 - RNA, 18 nt, Artificial Sequence
  Synthetic
gugcuagauaguuucaca

SEQ ID NO: 460522 - RNA, 19 nt, Artificial Sequence
  Synthetic
agugcuagauaguuucaca

SEQ ID NO: 460523 - RNA, 20 nt, Artificial Sequence
  Synthetic
aagugcuagauaguuucaca

SEQ ID NO: 460524 - RNA, 21 nt, Artificial Sequence
  Synthetic
aaagugcuagauaguuucaca

SEQ ID NO: 460525 - RNA, 22 nt, Artificial Sequence
  Synthetic
uaaagugcuagauaguuucaca

SEQ ID NO: 460526 - RNA, 23 nt, Artificial Sequence
  Synthetic
guaaagugcuagauaguuucaca

SEQ ID NO: 460527 - RNA, 24 nt, Artificial Sequence
  Synthetic
gguaaagugcuagauaguuucaca

SEQ ID NO: 460528 - RNA, 18 nt, Artificial Sequence
  Synthetic
gcaguuuugauuuucaca

SEQ ID NO: 460529 - RNA, 19 nt, Artificial Sequence
  Synthetic
ugcaguuuugauuuucaca

SEQ ID NO: 460530 - RNA, 20 nt, Artificial Sequence
  Synthetic
gugcaguuuugauuuucaca

SEQ ID NO: 460531 - RNA, 21 nt, Artificial Sequence
  Synthetic
agugcaguuuugauuuucaca

SEQ ID NO: 460532 - RNA, 22 nt, Artificial Sequence
  Synthetic
aagugcaguuuugauuuucaca

SEQ ID NO: 460533 - RNA, 23 nt, Artificial Sequence
  Synthetic
aaagugcaguuuugauuuucaca

SEQ ID NO: 460534 - RNA, 24 nt, Artificial Sequence
  Synthetic
gaaagugcaguuuugauuuucaca

SEQ ID NO: 460535 - RNA, 18 nt, Artificial Sequence
  Synthetic
uaagguucacuuuucaca

SEQ ID NO: 460536 - RNA, 19 nt, Artificial Sequence
  Synthetic
uuaagguucacuuuucaca

SEQ ID NO: 460537 - RNA, 20 nt, Artificial Sequence
  Synthetic
cuuaagguucacuuuucaca

SEQ ID NO: 460538 - RNA, 21 nt, Artificial Sequence
  Synthetic
ucuuaagguucacuuuucaca

SEQ ID NO: 460539 - RNA, 22 nt, Artificial Sequence
  Synthetic
aucuuaagguucacuuuucaca

SEQ ID NO: 460540 - RNA, 23 nt, Artificial Sequence
  Synthetic
aaucuuaagguucacuuuucaca

SEQ ID NO: 460541 - RNA, 24 nt, Artificial Sequence
  Synthetic
uaaucuuaagguucacuuuucaca

SEQ ID NO: 460542 - RNA, 18 nt, Artificial Sequence
  Synthetic
gucaaguuucaaaagaca

SEQ ID NO: 460543 - RNA, 19 nt, Artificial Sequence
  Synthetic
ggucaaguuucaaaagaca

SEQ ID NO: 460544 - RNA, 20 nt, Artificial Sequence
  Synthetic
aggucaaguuucaaaagaca

SEQ ID NO: 460545 - RNA, 21 nt, Artificial Sequence
  Synthetic
gaggucaaguuucaaaagaca

SEQ ID NO: 460546 - RNA, 22 nt, Artificial Sequence
  Synthetic
agaggucaaguuucaaaagaca

SEQ ID NO: 460547 - RNA, 23 nt, Artificial Sequence
  Synthetic
aagaggucaaguuucaaaagaca

SEQ ID NO: 460548 - RNA, 24 nt, Artificial Sequence
  Synthetic
aaagaggucaaguuucaaaagaca

SEQ ID NO: 460549 - RNA, 18 nt, Artificial Sequence
  Synthetic
gaggccaaagaaaagaca

SEQ ID NO: 460550 - RNA, 19 nt, Artificial Sequence
  Synthetic
ugaggccaaagaaaagaca

SEQ ID NO: 460551 - RNA, 20 nt, Artificial Sequence
  Synthetic
augaggccaaagaaaagaca

SEQ ID NO: 460552 - RNA, 21 nt, Artificial Sequence
  Synthetic
aaugaggccaaagaaaagaca

SEQ ID NO: 460553 - RNA, 22 nt, Artificial Sequence
  Synthetic
aaaugaggccaaagaaaagaca

SEQ ID NO: 460554 - RNA, 23 nt, Artificial Sequence
  Synthetic
aaaaugaggccaaagaaaagaca

SEQ ID NO: 460555 - RNA, 24 nt, Artificial Sequence
  Synthetic
uaaaaugaggccaaagaaaagaca

SEQ ID NO: 460556 - RNA, 18 nt, Artificial Sequence
  Synthetic
gagaaaucugaaaagaca

SEQ ID NO: 460557 - RNA, 19 nt, Artificial Sequence
  Synthetic
ugagaaaucugaaaagaca

SEQ ID NO: 460558 - RNA, 20 nt, Artificial Sequence
  Synthetic
cugagaaaucugaaaagaca

SEQ ID NO: 460559 - RNA, 21 nt, Artificial Sequence
  Synthetic
ccugagaaaucugaaaagaca

SEQ ID NO: 460560 - RNA, 22 nt, Artificial Sequence
  Synthetic
cccugagaaaucugaaaagaca

SEQ ID NO: 460561 - RNA, 23 nt, Artificial Sequence
  Synthetic
acccugagaaaucugaaaagaca

SEQ ID NO: 460562 - RNA, 24 nt, Artificial Sequence
  Synthetic
cacccugagaaaucugaaaagaca

SEQ ID NO: 460563 - RNA, 18 nt, Artificial Sequence
  Synthetic
caagaucaucgaaagaca

SEQ ID NO: 460564 - RNA, 19 nt, Artificial Sequence
  Synthetic
acaagaucaucgaaagaca

SEQ ID NO: 460565 - RNA, 20 nt, Artificial Sequence
  Synthetic
aacaagaucaucgaaagaca

SEQ ID NO: 460566 - RNA, 21 nt, Artificial Sequence
  Synthetic
aaacaagaucaucgaaagaca

SEQ ID NO: 460567 - RNA, 22 nt, Artificial Sequence
  Synthetic
aaaacaagaucaucgaaagaca

SEQ ID NO: 460568 - RNA, 23 nt, Artificial Sequence
  Synthetic
aaaaacaagaucaucgaaagaca

SEQ ID NO: 460569 - RNA, 24 nt, Artificial Sequence
  Synthetic
aaaaaacaagaucaucgaaagaca

SEQ ID NO: 460570 - RNA, 18 nt, Artificial Sequence
  Synthetic
agagaggauaacaagaca

SEQ ID NO: 460571 - RNA, 19 nt, Artificial Sequence
  Synthetic
cagagaggauaacaagaca

SEQ ID NO: 460572 - RNA, 20 nt, Artificial Sequence
  Synthetic
acagagaggauaacaagaca

SEQ ID NO: 460573 - RNA, 21 nt, Artificial Sequence
  Synthetic
gacagagaggauaacaagaca

SEQ ID NO: 460574 - RNA, 22 nt, Artificial Sequence
  Synthetic
ggacagagaggauaacaagaca

SEQ ID NO: 460575 - RNA, 23 nt, Artificial Sequence
  Synthetic
aggacagagaggauaacaagaca

SEQ ID NO: 460576 - RNA, 24 nt, Artificial Sequence
  Synthetic
gaggacagagaggauaacaagaca

SEQ ID NO: 460577 - RNA, 18 nt, Artificial Sequence
  Synthetic
uacagaugguacaagaca

SEQ ID NO: 460578 - RNA, 19 nt, Artificial Sequence
  Synthetic
auacagaugguacaagaca

SEQ ID NO: 460579 - RNA, 20 nt, Artificial Sequence
  Synthetic
aauacagaugguacaagaca

SEQ ID NO: 460580 - RNA, 21 nt, Artificial Sequence
  Synthetic
gaauacagaugguacaagaca

SEQ ID NO: 460581 - RNA, 22 nt, Artificial Sequence
  Synthetic
ggaauacagaugguacaagaca

SEQ ID NO: 460582 - RNA, 23 nt, Artificial Sequence
  Synthetic
cggaauacagaugguacaagaca

SEQ ID NO: 460583 - RNA, 24 nt, Artificial Sequence
  Synthetic
ccggaauacagaugguacaagaca

SEQ ID NO: 460584 - RNA, 18 nt, Artificial Sequence
  Synthetic
aucaucgcaggcaagaca

SEQ ID NO: 460585 - RNA, 19 nt, Artificial Sequence
  Synthetic
caucaucgcaggcaagaca

SEQ ID NO: 460586 - RNA, 20 nt, Artificial Sequence
  Synthetic
ccaucaucgcaggcaagaca

SEQ ID NO: 460587 - RNA, 21 nt, Artificial Sequence
  Synthetic
gccaucaucgcaggcaagaca

SEQ ID NO: 460588 - RNA, 22 nt, Artificial Sequence
  Synthetic
agccaucaucgcaggcaagaca

SEQ ID NO: 460589 - RNA, 23 nt, Artificial Sequence
  Synthetic
uagccaucaucgcaggcaagaca

SEQ ID NO: 460590 - RNA, 24 nt, Artificial Sequence
  Synthetic
guagccaucaucgcaggcaagaca

SEQ ID NO: 460591 - RNA, 18 nt, Artificial Sequence
  Synthetic
auguuaauaggcaagaca

SEQ ID NO: 460592 - RNA, 19 nt, Artificial Sequence
  Synthetic
aauguuaauaggcaagaca

SEQ ID NO: 460593 - RNA, 20 nt, Artificial Sequence
  Synthetic
caauguuaauaggcaagaca

SEQ ID NO: 460594 - RNA, 21 nt, Artificial Sequence
  Synthetic
ccaauguuaauaggcaagaca

SEQ ID NO: 460595 - RNA, 22 nt, Artificial Sequence
  Synthetic
cccaauguuaauaggcaagaca

SEQ ID NO: 460596 - RNA, 23 nt, Artificial Sequence
  Synthetic
gcccaauguuaauaggcaagaca

SEQ ID NO: 460597 - RNA, 24 nt, Artificial Sequence
  Synthetic
agcccaauguuaauaggcaagaca

SEQ ID NO: 460598 - RNA, 18 nt, Artificial Sequence
  Synthetic
acuguccaaugcaagaca

SEQ ID NO: 460599 - RNA, 19 nt, Artificial Sequence
  Synthetic
uacuguccaaugcaagaca

SEQ ID NO: 460600 - RNA, 20 nt, Artificial Sequence
  Synthetic
cuacuguccaaugcaagaca

SEQ ID NO: 460601 - RNA, 21 nt, Artificial Sequence
  Synthetic
acuacuguccaaugcaagaca

SEQ ID NO: 460602 - RNA, 22 nt, Artificial Sequence
  Synthetic
cacuacuguccaaugcaagaca

SEQ ID NO: 460603 - RNA, 23 nt, Artificial Sequence
  Synthetic
ucacuacuguccaaugcaagaca

SEQ ID NO: 460604 - RNA, 24 nt, Artificial Sequence
  Synthetic
aucacuacuguccaaugcaagaca

SEQ ID NO: 460605 - RNA, 18 nt, Artificial Sequence
  Synthetic
agcccagugcagaagaca

SEQ ID NO: 460606 - RNA, 19 nt, Artificial Sequence
  Synthetic
cagcccagugcagaagaca

SEQ ID NO: 460607 - RNA, 20 nt, Artificial Sequence
  Synthetic
gcagcccagugcagaagaca

SEQ ID NO: 460608 - RNA, 21 nt, Artificial Sequence
  Synthetic
ggcagcccagugcagaagaca

SEQ ID NO: 460609 - RNA, 22 nt, Artificial Sequence
  Synthetic
aggcagcccagugcagaagaca

SEQ ID NO: 460610 - RNA, 23 nt, Artificial Sequence
  Synthetic
uaggcagcccagugcagaagaca

SEQ ID NO: 460611 - RNA, 24 nt, Artificial Sequence
  Synthetic
guaggcagcccagugcagaagaca

SEQ ID NO: 460612 - RNA, 18 nt, Artificial Sequence
  Synthetic
aaaagcagagagaagaca

SEQ ID NO: 460613 - RNA, 19 nt, Artificial Sequence
  Synthetic
gaaaagcagagagaagaca

SEQ ID NO: 460614 - RNA, 20 nt, Artificial Sequence
  Synthetic
agaaaagcagagagaagaca

SEQ ID NO: 460615 - RNA, 21 nt, Artificial Sequence
  Synthetic
aagaaaagcagagagaagaca

SEQ ID NO: 460616 - RNA, 22 nt, Artificial Sequence
  Synthetic
gaagaaaagcagagagaagaca

SEQ ID NO: 460617 - RNA, 23 nt, Artificial Sequence
  Synthetic
ugaagaaaagcagagagaagaca

SEQ ID NO: 460618 - RNA, 24 nt, Artificial Sequence
  Synthetic
uugaagaaaagcagagagaagaca

SEQ ID NO: 460619 - RNA, 18 nt, Artificial Sequence
  Synthetic
agacacauggagaagaca

SEQ ID NO: 460620 - RNA, 19 nt, Artificial Sequence
  Synthetic
gagacacauggagaagaca

SEQ ID NO: 460621 - RNA, 20 nt, Artificial Sequence
  Synthetic
ggagacacauggagaagaca

SEQ ID NO: 460622 - RNA, 21 nt, Artificial Sequence
  Synthetic
aggagacacauggagaagaca

SEQ ID NO: 460623 - RNA, 22 nt, Artificial Sequence
  Synthetic
aaggagacacauggagaagaca

SEQ ID NO: 460624 - RNA, 23 nt, Artificial Sequence
  Synthetic
aaaggagacacauggagaagaca

SEQ ID NO: 460625 - RNA, 24 nt, Artificial Sequence
  Synthetic
caaaggagacacauggagaagaca

SEQ ID NO: 460626 - RNA, 18 nt, Artificial Sequence
  Synthetic
auguagaaugagaagaca

SEQ ID NO: 460627 - RNA, 19 nt, Artificial Sequence
  Synthetic
cauguagaaugagaagaca

SEQ ID NO: 460628 - RNA, 20 nt, Artificial Sequence
  Synthetic
ucauguagaaugagaagaca

SEQ ID NO: 460629 - RNA, 21 nt, Artificial Sequence
  Synthetic
cucauguagaaugagaagaca

SEQ ID NO: 460630 - RNA, 22 nt, Artificial Sequence
  Synthetic
ucucauguagaaugagaagaca

SEQ ID NO: 460631 - RNA, 23 nt, Artificial Sequence
  Synthetic
uucucauguagaaugagaagaca

SEQ ID NO: 460632 - RNA, 24 nt, Artificial Sequence
  Synthetic
auucucauguagaaugagaagaca

SEQ ID NO: 460633 - RNA, 18 nt, Artificial Sequence
  Synthetic
agggguacagggaagaca

SEQ ID NO: 460634 - RNA, 19 nt, Artificial Sequence
  Synthetic
uagggguacagggaagaca

SEQ ID NO: 460635 - RNA, 20 nt, Artificial Sequence
  Synthetic
cuagggguacagggaagaca

SEQ ID NO: 460636 - RNA, 21 nt, Artificial Sequence
  Synthetic
ucuagggguacagggaagaca

SEQ ID NO: 460637 - RNA, 22 nt, Artificial Sequence
  Synthetic
gucuagggguacagggaagaca

SEQ ID NO: 460638 - RNA, 23 nt, Artificial Sequence
  Synthetic
ugucuagggguacagggaagaca

SEQ ID NO: 460639 - RNA, 24 nt, Artificial Sequence
  Synthetic
cugucuagggguacagggaagaca

SEQ ID NO: 460640 - RNA, 18 nt, Artificial Sequence
  Synthetic
aaaauugcauugaagaca

SEQ ID NO: 460641 - RNA, 19 nt, Artificial Sequence
  Synthetic
uaaaauugcauugaagaca

SEQ ID NO: 460642 - RNA, 20 nt, Artificial Sequence
  Synthetic
uuaaaauugcauugaagaca

SEQ ID NO: 460643 - RNA, 21 nt, Artificial Sequence
  Synthetic
uuuaaaauugcauugaagaca

SEQ ID NO: 460644 - RNA, 22 nt, Artificial Sequence
  Synthetic
auuuaaaauugcauugaagaca

SEQ ID NO: 460645 - RNA, 23 nt, Artificial Sequence
  Synthetic
cauuuaaaauugcauugaagaca

SEQ ID NO: 460646 - RNA, 24 nt, Artificial Sequence
  Synthetic
acauuuaaaauugcauugaagaca

SEQ ID NO: 460647 - RNA, 18 nt, Artificial Sequence
  Synthetic
ucacagagauugaagaca

SEQ ID NO: 460648 - RNA, 19 nt, Artificial Sequence
  Synthetic
uucacagagauugaagaca

SEQ ID NO: 460649 - RNA, 20 nt, Artificial Sequence
  Synthetic
auucacagagauugaagaca

SEQ ID NO: 460650 - RNA, 21 nt, Artificial Sequence
  Synthetic
uauucacagagauugaagaca

SEQ ID NO: 460651 - RNA, 22 nt, Artificial Sequence
  Synthetic
cuauucacagagauugaagaca

SEQ ID NO: 460652 - RNA, 23 nt, Artificial Sequence
  Synthetic
ucuauucacagagauugaagaca

SEQ ID NO: 460653 - RNA, 24 nt, Artificial Sequence
  Synthetic
aucuauucacagagauugaagaca

SEQ ID NO: 460654 - RNA, 18 nt, Artificial Sequence
  Synthetic
gaccaauggaauaagaca

SEQ ID NO: 460655 - RNA, 19 nt, Artificial Sequence
  Synthetic
agaccaauggaauaagaca

SEQ ID NO: 460656 - RNA, 20 nt, Artificial Sequence
  Synthetic
cagaccaauggaauaagaca

SEQ ID NO: 460657 - RNA, 21 nt, Artificial Sequence
  Synthetic
acagaccaauggaauaagaca

SEQ ID NO: 460658 - RNA, 22 nt, Artificial Sequence
  Synthetic
aacagaccaauggaauaagaca

SEQ ID NO: 460659 - RNA, 23 nt, Artificial Sequence
  Synthetic
aaacagaccaauggaauaagaca

SEQ ID NO: 460660 - RNA, 24 nt, Artificial Sequence
  Synthetic
aaaacagaccaauggaauaagaca

SEQ ID NO: 460661 - RNA, 18 nt, Artificial Sequence
  Synthetic
ccaagaacagauaagaca

SEQ ID NO: 460662 - RNA, 19 nt, Artificial Sequence
  Synthetic
accaagaacagauaagaca

SEQ ID NO: 460663 - RNA, 20 nt, Artificial Sequence
  Synthetic
gaccaagaacagauaagaca

SEQ ID NO: 460664 - RNA, 21 nt, Artificial Sequence
  Synthetic
agaccaagaacagauaagaca

SEQ ID NO: 460665 - RNA, 22 nt, Artificial Sequence
  Synthetic
aagaccaagaacagauaagaca

SEQ ID NO: 460666 - RNA, 23 nt, Artificial Sequence
  Synthetic
uaagaccaagaacagauaagaca

SEQ ID NO: 460667 - RNA, 24 nt, Artificial Sequence
  Synthetic
uuaagaccaagaacagauaagaca

SEQ ID NO: 460668 - RNA, 18 nt, Artificial Sequence
  Synthetic
aacacucgguauaagaca

SEQ ID NO: 460669 - RNA, 19 nt, Artificial Sequence
  Synthetic
aaacacucgguauaagaca

SEQ ID NO: 460670 - RNA, 20 nt, Artificial Sequence
  Synthetic
uaaacacucgguauaagaca

SEQ ID NO: 460671 - RNA, 21 nt, Artificial Sequence
  Synthetic
auaaacacucgguauaagaca

SEQ ID NO: 460672 - RNA, 22 nt, Artificial Sequence
  Synthetic
uauaaacacucgguauaagaca

SEQ ID NO: 460673 - RNA, 23 nt, Artificial Sequence
  Synthetic
cuauaaacacucgguauaagaca

SEQ ID NO: 460674 - RNA, 24 nt, Artificial Sequence
  Synthetic
ucuauaaacacucgguauaagaca

SEQ ID NO: 460675 - RNA, 18 nt, Artificial Sequence
  Synthetic
cuguguggagcuaagaca

SEQ ID NO: 460676 - RNA, 19 nt, Artificial Sequence
  Synthetic
acuguguggagcuaagaca

SEQ ID NO: 460677 - RNA, 20 nt, Artificial Sequence
  Synthetic
gacuguguggagcuaagaca

SEQ ID NO: 460678 - RNA, 21 nt, Artificial Sequence
  Synthetic
ggacuguguggagcuaagaca

SEQ ID NO: 460679 - RNA, 22 nt, Artificial Sequence
  Synthetic
gggacuguguggagcuaagaca

SEQ ID NO: 460680 - RNA, 23 nt, Artificial Sequence
  Synthetic
agggacuguguggagcuaagaca

SEQ ID NO: 460681 - RNA, 24 nt, Artificial Sequence
  Synthetic
gagggacuguguggagcuaagaca

SEQ ID NO: 460682 - RNA, 18 nt, Artificial Sequence
  Synthetic
guuacuugugcuaagaca

SEQ ID NO: 460683 - RNA, 19 nt, Artificial Sequence
  Synthetic
aguuacuugugcuaagaca

SEQ ID NO: 460684 - RNA, 20 nt, Artificial Sequence
  Synthetic
caguuacuugugcuaagaca

SEQ ID NO: 460685 - RNA, 21 nt, Artificial Sequence
  Synthetic
ccaguuacuugugcuaagaca

SEQ ID NO: 460686 - RNA, 22 nt, Artificial Sequence
  Synthetic
accaguuacuugugcuaagaca

SEQ ID NO: 460687 - RNA, 23 nt, Artificial Sequence
  Synthetic
uaccaguuacuugugcuaagaca

SEQ ID NO: 460688 - RNA, 24 nt, Artificial Sequence
  Synthetic
auaccaguuacuugugcuaagaca

SEQ ID NO: 460689 - RNA, 18 nt, Artificial Sequence
  Synthetic
uuuucuaucauuaagaca

SEQ ID NO: 460690 - RNA, 19 nt, Artificial Sequence
  Synthetic
guuuucuaucauuaagaca

SEQ ID NO: 460691 - RNA, 20 nt, Artificial Sequence
  Synthetic
uguuuucuaucauuaagaca

SEQ ID NO: 460692 - RNA, 21 nt, Artificial Sequence
  Synthetic
auguuuucuaucauuaagaca

SEQ ID NO: 460693 - RNA, 22 nt, Artificial Sequence
  Synthetic
uauguuuucuaucauuaagaca

SEQ ID NO: 460694 - RNA, 23 nt, Artificial Sequence
  Synthetic
uuauguuuucuaucauuaagaca

SEQ ID NO: 460695 - RNA, 24 nt, Artificial Sequence
  Synthetic
uuuauguuuucuaucauuaagaca

SEQ ID NO: 460696 - RNA, 18 nt, Artificial Sequence
  Synthetic
agagagaccaaacagaca

SEQ ID NO: 460697 - RNA, 19 nt, Artificial Sequence
  Synthetic
aagagagaccaaacagaca

SEQ ID NO: 460698 - RNA, 20 nt, Artificial Sequence
  Synthetic
aaagagagaccaaacagaca

SEQ ID NO: 460699 - RNA, 21 nt, Artificial Sequence
  Synthetic
aaaagagagaccaaacagaca

SEQ ID NO: 460700 - RNA, 22 nt, Artificial Sequence
  Synthetic
gaaaagagagaccaaacagaca

SEQ ID NO: 460701 - RNA, 23 nt, Artificial Sequence
  Synthetic
agaaaagagagaccaaacagaca

SEQ ID NO: 460702 - RNA, 24 nt, Artificial Sequence
  Synthetic
gagaaaagagagaccaaacagaca

SEQ ID NO: 460703 - RNA, 18 nt, Artificial Sequence
  Synthetic
auaaaccaauaacagaca

SEQ ID NO: 460704 - RNA, 19 nt, Artificial Sequence
  Synthetic
uauaaaccaauaacagaca

SEQ ID NO: 460705 - RNA, 20 nt, Artificial Sequence
  Synthetic
cuauaaaccaauaacagaca

SEQ ID NO: 460706 - RNA, 21 nt, Artificial Sequence
  Synthetic
ccuauaaaccaauaacagaca

SEQ ID NO: 460707 - RNA, 22 nt, Artificial Sequence
  Synthetic
uccuauaaaccaauaacagaca

SEQ ID NO: 460708 - RNA, 23 nt, Artificial Sequence
  Synthetic
uuccuauaaaccaauaacagaca

SEQ ID NO: 460709 - RNA, 24 nt, Artificial Sequence
  Synthetic
auuccuauaaaccaauaacagaca

SEQ ID NO: 460710 - RNA, 18 nt, Artificial Sequence
  Synthetic
accagugccccacagaca

SEQ ID NO: 460711 - RNA, 19 nt, Artificial Sequence
  Synthetic
aaccagugccccacagaca

SEQ ID NO: 460712 - RNA, 20 nt, Artificial Sequence
  Synthetic
aaaccagugccccacagaca

SEQ ID NO: 460713 - RNA, 21 nt, Artificial Sequence
  Synthetic
gaaaccagugccccacagaca

SEQ ID NO: 460714 - RNA, 22 nt, Artificial Sequence
  Synthetic
ugaaaccagugccccacagaca

SEQ ID NO: 460715 - RNA, 23 nt, Artificial Sequence
  Synthetic
cugaaaccagugccccacagaca

SEQ ID NO: 460716 - RNA, 24 nt, Artificial Sequence
  Synthetic
gcugaaaccagugccccacagaca

SEQ ID NO: 460717 - RNA, 18 nt, Artificial Sequence
  Synthetic
gugcaucauccacagaca

SEQ ID NO: 460718 - RNA, 19 nt, Artificial Sequence
  Synthetic
agugcaucauccacagaca

SEQ ID NO: 460719 - RNA, 20 nt, Artificial Sequence
  Synthetic
cagugcaucauccacagaca

SEQ ID NO: 460720 - RNA, 21 nt, Artificial Sequence
  Synthetic
acagugcaucauccacagaca

SEQ ID NO: 460721 - RNA, 22 nt, Artificial Sequence
  Synthetic
gacagugcaucauccacagaca

SEQ ID NO: 460722 - RNA, 23 nt, Artificial Sequence
  Synthetic
agacagugcaucauccacagaca

SEQ ID NO: 460723 - RNA, 24 nt, Artificial Sequence
  Synthetic
aagacagugcaucauccacagaca

SEQ ID NO: 460724 - RNA, 18 nt, Artificial Sequence
  Synthetic
agaaaugugggacagaca

SEQ ID NO: 460725 - RNA, 19 nt, Artificial Sequence
  Synthetic
aagaaaugugggacagaca

SEQ ID NO: 460726 - RNA, 20 nt, Artificial Sequence
  Synthetic
uaagaaaugugggacagaca

SEQ ID NO: 460727 - RNA, 21 nt, Artificial Sequence
  Synthetic
guaagaaaugugggacagaca

SEQ ID NO: 460728 - RNA, 22 nt, Artificial Sequence
  Synthetic
aguaagaaaugugggacagaca

SEQ ID NO: 460729 - RNA, 23 nt, Artificial Sequence
  Synthetic
caguaagaaaugugggacagaca

SEQ ID NO: 460730 - RNA, 24 nt, Artificial Sequence
  Synthetic
acaguaagaaaugugggacagaca

SEQ ID NO: 460731 - RNA, 18 nt, Artificial Sequence
  Synthetic
guucuaugaauccagaca

SEQ ID NO: 460732 - RNA, 19 nt, Artificial Sequence
  Synthetic
aguucuaugaauccagaca

SEQ ID NO: 460733 - RNA, 20 nt, Artificial Sequence
  Synthetic
gaguucuaugaauccagaca

SEQ ID NO: 460734 - RNA, 21 nt, Artificial Sequence
  Synthetic
agaguucuaugaauccagaca

SEQ ID NO: 460735 - RNA, 22 nt, Artificial Sequence
  Synthetic
gagaguucuaugaauccagaca

SEQ ID NO: 460736 - RNA, 23 nt, Artificial Sequence
  Synthetic
agagaguucuaugaauccagaca

SEQ ID NO: 460737 - RNA, 24 nt, Artificial Sequence
  Synthetic
cagagaguucuaugaauccagaca

SEQ ID NO: 460738 - RNA, 18 nt, Artificial Sequence
  Synthetic
cguagggggauccagaca

SEQ ID NO: 460739 - RNA, 19 nt, Artificial Sequence
  Synthetic
acguagggggauccagaca

SEQ ID NO: 460740 - RNA, 20 nt, Artificial Sequence
  Synthetic
aacguagggggauccagaca

SEQ ID NO: 460741 - RNA, 21 nt, Artificial Sequence
  Synthetic
caacguagggggauccagaca

SEQ ID NO: 460742 - RNA, 22 nt, Artificial Sequence
  Synthetic
acaacguagggggauccagaca

SEQ ID NO: 460743 - RNA, 23 nt, Artificial Sequence
  Synthetic
gacaacguagggggauccagaca

SEQ ID NO: 460744 - RNA, 24 nt, Artificial Sequence
  Synthetic
agacaacguagggggauccagaca

SEQ ID NO: 460745 - RNA, 18 nt, Artificial Sequence
  Synthetic
cacugcuuggagcagaca

SEQ ID NO: 460746 - RNA, 19 nt, Artificial Sequence
  Synthetic
ccacugcuuggagcagaca

SEQ ID NO: 460747 - RNA, 20 nt, Artificial Sequence
  Synthetic
cccacugcuuggagcagaca

SEQ ID NO: 460748 - RNA, 21 nt, Artificial Sequence
  Synthetic
acccacugcuuggagcagaca

SEQ ID NO: 460749 - RNA, 22 nt, Artificial Sequence
  Synthetic
gacccacugcuuggagcagaca

SEQ ID NO: 460750 - RNA, 23 nt, Artificial Sequence
  Synthetic
agacccacugcuuggagcagaca

SEQ ID NO: 460751 - RNA, 24 nt, Artificial Sequence
  Synthetic
aagacccacugcuuggagcagaca

SEQ ID NO: 460752 - RNA, 18 nt, Artificial Sequence
  Synthetic
cuucuuaccaggcagaca

SEQ ID NO: 460753 - RNA, 19 nt, Artificial Sequence
  Synthetic
gcuucuuaccaggcagaca

SEQ ID NO: 460754 - RNA, 20 nt, Artificial Sequence
  Synthetic
ugcuucuuaccaggcagaca

SEQ ID NO: 460755 - RNA, 21 nt, Artificial Sequence
  Synthetic
cugcuucuuaccaggcagaca

SEQ ID NO: 460756 - RNA, 22 nt, Artificial Sequence
  Synthetic
gcugcuucuuaccaggcagaca

SEQ ID NO: 460757 - RNA, 23 nt, Artificial Sequence
  Synthetic
agcugcuucuuaccaggcagaca

SEQ ID NO: 460758 - RNA, 24 nt, Artificial Sequence
  Synthetic
gagcugcuucuuaccaggcagaca

SEQ ID NO: 460759 - RNA, 18 nt, Artificial Sequence
  Synthetic
ugcacggggcugcagaca

SEQ ID NO: 460760 - RNA, 19 nt, Artificial Sequence
  Synthetic
gugcacggggcugcagaca

SEQ ID NO: 460761 - RNA, 20 nt, Artificial Sequence
  Synthetic
ggugcacggggcugcagaca

SEQ ID NO: 460762 - RNA, 21 nt, Artificial Sequence
  Synthetic
uggugcacggggcugcagaca

SEQ ID NO: 460763 - RNA, 22 nt, Artificial Sequence
  Synthetic
guggugcacggggcugcagaca

SEQ ID NO: 460764 - RNA, 23 nt, Artificial Sequence
  Synthetic
aguggugcacggggcugcagaca

SEQ ID NO: 460765 - RNA, 24 nt, Artificial Sequence
  Synthetic
caguggugcacggggcugcagaca

SEQ ID NO: 460766 - RNA, 18 nt, Artificial Sequence
  Synthetic
cggaugacagugcagaca

SEQ ID NO: 460767 - RNA, 19 nt, Artificial Sequence
  Synthetic
gcggaugacagugcagaca

SEQ ID NO: 460768 - RNA, 20 nt, Artificial Sequence
  Synthetic
agcggaugacagugcagaca

SEQ ID NO: 460769 - RNA, 21 nt, Artificial Sequence
  Synthetic
aagcggaugacagugcagaca

SEQ ID NO: 460770 - RNA, 22 nt, Artificial Sequence
  Synthetic
uaagcggaugacagugcagaca

SEQ ID NO: 460771 - RNA, 23 nt, Artificial Sequence
  Synthetic
cuaagcggaugacagugcagaca

SEQ ID NO: 460772 - RNA, 24 nt, Artificial Sequence
  Synthetic
ucuaagcggaugacagugcagaca

SEQ ID NO: 460773 - RNA, 18 nt, Artificial Sequence
  Synthetic
ggugaaauaaaucagaca

SEQ ID NO: 460774 - RNA, 19 nt, Artificial Sequence
  Synthetic
aggugaaauaaaucagaca

SEQ ID NO: 460775 - RNA, 20 nt, Artificial Sequence
  Synthetic
uaggugaaauaaaucagaca

SEQ ID NO: 460776 - RNA, 21 nt, Artificial Sequence
  Synthetic
cuaggugaaauaaaucagaca

SEQ ID NO: 460777 - RNA, 22 nt, Artificial Sequence
  Synthetic
gcuaggugaaauaaaucagaca

SEQ ID NO: 460778 - RNA, 23 nt, Artificial Sequence
  Synthetic
ugcuaggugaaauaaaucagaca

SEQ ID NO: 460779 - RNA, 24 nt, Artificial Sequence
  Synthetic
augcuaggugaaauaaaucagaca

SEQ ID NO: 460780 - RNA, 18 nt, Artificial Sequence
  Synthetic
cacauugaacaucagaca

SEQ ID NO: 460781 - RNA, 19 nt, Artificial Sequence
  Synthetic
acacauugaacaucagaca

SEQ ID NO: 460782 - RNA, 20 nt, Artificial Sequence
  Synthetic
aacacauugaacaucagaca

SEQ ID NO: 460783 - RNA, 21 nt, Artificial Sequence
  Synthetic
caacacauugaacaucagaca

SEQ ID NO: 460784 - RNA, 22 nt, Artificial Sequence
  Synthetic
ucaacacauugaacaucagaca

SEQ ID NO: 460785 - RNA, 23 nt, Artificial Sequence
  Synthetic
uucaacacauugaacaucagaca

SEQ ID NO: 460786 - RNA, 24 nt, Artificial Sequence
  Synthetic
uuucaacacauugaacaucagaca

SEQ ID NO: 460787 - RNA, 18 nt, Artificial Sequence
  Synthetic
agagguagggcucagaca

SEQ ID NO: 460788 - RNA, 19 nt, Artificial Sequence
  Synthetic
gagagguagggcucagaca

SEQ ID NO: 460789 - RNA, 20 nt, Artificial Sequence
  Synthetic
agagagguagggcucagaca

SEQ ID NO: 460790 - RNA, 21 nt, Artificial Sequence
  Synthetic
gagagagguagggcucagaca

SEQ ID NO: 460791 - RNA, 22 nt, Artificial Sequence
  Synthetic
ggagagagguagggcucagaca

SEQ ID NO: 460792 - RNA, 23 nt, Artificial Sequence
  Synthetic
uggagagagguagggcucagaca

SEQ ID NO: 460793 - RNA, 24 nt, Artificial Sequence
  Synthetic
guggagagagguagggcucagaca

SEQ ID NO: 460794 - RNA, 18 nt, Artificial Sequence
  Synthetic
aguagcaguggucagaca

SEQ ID NO: 460795 - RNA, 19 nt, Artificial Sequence
  Synthetic
uaguagcaguggucagaca

SEQ ID NO: 460796 - RNA, 20 nt, Artificial Sequence
  Synthetic
guaguagcaguggucagaca

SEQ ID NO: 460797 - RNA, 21 nt, Artificial Sequence
  Synthetic
aguaguagcaguggucagaca

SEQ ID NO: 460798 - RNA, 22 nt, Artificial Sequence
  Synthetic
uaguaguagcaguggucagaca

SEQ ID NO: 460799 - RNA, 23 nt, Artificial Sequence
  Synthetic
auaguaguagcaguggucagaca

SEQ ID NO: 460800 - RNA, 24 nt, Artificial Sequence
  Synthetic
cauaguaguagcaguggucagaca

SEQ ID NO: 460801 - RNA, 18 nt, Artificial Sequence
  Synthetic
caaagaucaaaagagaca

SEQ ID NO: 460802 - RNA, 19 nt, Artificial Sequence
  Synthetic
acaaagaucaaaagagaca

SEQ ID NO: 460803 - RNA, 20 nt, Artificial Sequence
  Synthetic
aacaaagaucaaaagagaca

SEQ ID NO: 460804 - RNA, 21 nt, Artificial Sequence
  Synthetic
caacaaagaucaaaagagaca

SEQ ID NO: 460805 - RNA, 22 nt, Artificial Sequence
  Synthetic
ccaacaaagaucaaaagagaca

SEQ ID NO: 460806 - RNA, 23 nt, Artificial Sequence
  Synthetic
accaacaaagaucaaaagagaca

SEQ ID NO: 460807 - RNA, 24 nt, Artificial Sequence
  Synthetic
aaccaacaaagaucaaaagagaca

SEQ ID NO: 460808 - RNA, 18 nt, Artificial Sequence
  Synthetic
aaacuguaagaagagaca

SEQ ID NO: 460809 - RNA, 19 nt, Artificial Sequence
  Synthetic
aaaacuguaagaagagaca

SEQ ID NO: 460810 - RNA, 20 nt, Artificial Sequence
  Synthetic
aaaaacuguaagaagagaca

SEQ ID NO: 460811 - RNA, 21 nt, Artificial Sequence
  Synthetic
caaaaacuguaagaagagaca

SEQ ID NO: 460812 - RNA, 22 nt, Artificial Sequence
  Synthetic
acaaaaacuguaagaagagaca

SEQ ID NO: 460813 - RNA, 23 nt, Artificial Sequence
  Synthetic
gacaaaaacuguaagaagagaca

SEQ ID NO: 460814 - RNA, 24 nt, Artificial Sequence
  Synthetic
ggacaaaaacuguaagaagagaca

SEQ ID NO: 460815 - RNA, 18 nt, Artificial Sequence
  Synthetic
aggagagugacagagaca

SEQ ID NO: 460816 - RNA, 19 nt, Artificial Sequence
  Synthetic
aaggagagugacagagaca

SEQ ID NO: 460817 - RNA, 20 nt, Artificial Sequence
  Synthetic
aaaggagagugacagagaca

SEQ ID NO: 460818 - RNA, 21 nt, Artificial Sequence
  Synthetic
uaaaggagagugacagagaca

SEQ ID NO: 460819 - RNA, 22 nt, Artificial Sequence
  Synthetic
guaaaggagagugacagagaca

SEQ ID NO: 460820 - RNA, 23 nt, Artificial Sequence
  Synthetic
aguaaaggagagugacagagaca

SEQ ID NO: 460821 - RNA, 24 nt, Artificial Sequence
  Synthetic
aaguaaaggagagugacagagaca

SEQ ID NO: 460822 - RNA, 18 nt, Artificial Sequence
  Synthetic
acugaggaggcagagaca

SEQ ID NO: 460823 - RNA, 19 nt, Artificial Sequence
  Synthetic
aacugaggaggcagagaca

SEQ ID NO: 460824 - RNA, 20 nt, Artificial Sequence
  Synthetic
caacugaggaggcagagaca

SEQ ID NO: 460825 - RNA, 21 nt, Artificial Sequence
  Synthetic
acaacugaggaggcagagaca

SEQ ID NO: 460826 - RNA, 22 nt, Artificial Sequence
  Synthetic
aacaacugaggaggcagagaca

SEQ ID NO: 460827 - RNA, 23 nt, Artificial Sequence
  Synthetic
caacaacugaggaggcagagaca

SEQ ID NO: 460828 - RNA, 24 nt, Artificial Sequence
  Synthetic
acaacaacugaggaggcagagaca

SEQ ID NO: 460829 - RNA, 18 nt, Artificial Sequence
  Synthetic
gagagagaaagagagaca

SEQ ID NO: 460830 - RNA, 19 nt, Artificial Sequence
  Synthetic
agagagagaaagagagaca

SEQ ID NO: 460831 - RNA, 20 nt, Artificial Sequence
  Synthetic
gagagagagaaagagagaca

SEQ ID NO: 460832 - RNA, 21 nt, Artificial Sequence
  Synthetic
agagagagagaaagagagaca

SEQ ID NO: 460833 - RNA, 22 nt, Artificial Sequence
  Synthetic
gagagagagagaaagagagaca

SEQ ID NO: 460834 - RNA, 23 nt, Artificial Sequence
  Synthetic
agagagagagagaaagagagaca

SEQ ID NO: 460835 - RNA, 24 nt, Artificial Sequence
  Synthetic
gagagagagagagaaagagagaca

SEQ ID NO: 460836 - RNA, 23 nt, Artificial Sequence
  Synthetic
agagagagagagagagagagaca

SEQ ID NO: 460837 - RNA, 24 nt, Artificial Sequence
  Synthetic
gagagagagagagagagagagaca

SEQ ID NO: 460838 - RNA, 18 nt, Artificial Sequence
  Synthetic
uauauuuagagagagaca

SEQ ID NO: 460839 - RNA, 19 nt, Artificial Sequence
  Synthetic
auauauuuagagagagaca

SEQ ID NO: 460840 - RNA, 20 nt, Artificial Sequence
  Synthetic
uauauauuuagagagagaca

SEQ ID NO: 460841 - RNA, 21 nt, Artificial Sequence
  Synthetic
auauauauuuagagagagaca

SEQ ID NO: 460842 - RNA, 22 nt, Artificial Sequence
  Synthetic
uauauauauuuagagagagaca

SEQ ID NO: 460843 - RNA, 23 nt, Artificial Sequence
  Synthetic
auauauauauuuagagagagaca

SEQ ID NO: 460844 - RNA, 24 nt, Artificial Sequence
  Synthetic
aauauauauauuuagagagagaca

SEQ ID NO: 460845 - RNA, 18 nt, Artificial Sequence
  Synthetic
gugugcgugagagagaca

SEQ ID NO: 460846 - RNA, 19 nt, Artificial Sequence
  Synthetic
ugugugcgugagagagaca

SEQ ID NO: 460847 - RNA, 20 nt, Artificial Sequence
  Synthetic
uugugugcgugagagagaca

SEQ ID NO: 460848 - RNA, 21 nt, Artificial Sequence
  Synthetic
uuugugugcgugagagagaca

SEQ ID NO: 460849 - RNA, 22 nt, Artificial Sequence
  Synthetic
guuugugugcgugagagagaca

SEQ ID NO: 460850 - RNA, 23 nt, Artificial Sequence
  Synthetic
uguuugugugcgugagagagaca

SEQ ID NO: 460851 - RNA, 24 nt, Artificial Sequence
  Synthetic
auguuugugugcgugagagagaca

SEQ ID NO: 460852 - RNA, 18 nt, Artificial Sequence
  Synthetic
ugagugcuuagagagaca

SEQ ID NO: 460853 - RNA, 19 nt, Artificial Sequence
  Synthetic
augagugcuuagagagaca

SEQ ID NO: 460854 - RNA, 20 nt, Artificial Sequence
  Synthetic
aaugagugcuuagagagaca

SEQ ID NO: 460855 - RNA, 21 nt, Artificial Sequence
  Synthetic
gaaugagugcuuagagagaca

SEQ ID NO: 460856 - RNA, 22 nt, Artificial Sequence
  Synthetic
ggaaugagugcuuagagagaca

SEQ ID NO: 460857 - RNA, 23 nt, Artificial Sequence
  Synthetic
aggaaugagugcuuagagagaca

SEQ ID NO: 460858 - RNA, 24 nt, Artificial Sequence
  Synthetic
aaggaaugagugcuuagagagaca

SEQ ID NO: 460859 - RNA, 18 nt, Artificial Sequence
  Synthetic
augaauuuauuagagaca

SEQ ID NO: 460860 - RNA, 19 nt, Artificial Sequence
  Synthetic
aaugaauuuauuagagaca

SEQ ID NO: 460861 - RNA, 20 nt, Artificial Sequence
  Synthetic
caaugaauuuauuagagaca

SEQ ID NO: 460862 - RNA, 21 nt, Artificial Sequence
  Synthetic
ccaaugaauuuauuagagaca

SEQ ID NO: 460863 - RNA, 22 nt, Artificial Sequence
  Synthetic
gccaaugaauuuauuagagaca

SEQ ID NO: 460864 - RNA, 23 nt, Artificial Sequence
  Synthetic
ugccaaugaauuuauuagagaca

SEQ ID NO: 460865 - RNA, 24 nt, Artificial Sequence
  Synthetic
uugccaaugaauuuauuagagaca

SEQ ID NO: 460866 - RNA, 18 nt, Artificial Sequence
  Synthetic
cgugaaugcaaggagaca

SEQ ID NO: 460867 - RNA, 19 nt, Artificial Sequence
  Synthetic
ccgugaaugcaaggagaca

SEQ ID NO: 460868 - RNA, 20 nt, Artificial Sequence
  Synthetic
cccgugaaugcaaggagaca

SEQ ID NO: 460869 - RNA, 21 nt, Artificial Sequence
  Synthetic
ucccgugaaugcaaggagaca

SEQ ID NO: 460870 - RNA, 22 nt, Artificial Sequence
  Synthetic
uucccgugaaugcaaggagaca

SEQ ID NO: 460871 - RNA, 23 nt, Artificial Sequence
  Synthetic
auucccgugaaugcaaggagaca

SEQ ID NO: 460872 - RNA, 24 nt, Artificial Sequence
  Synthetic
cauucccgugaaugcaaggagaca

SEQ ID NO: 460873 - RNA, 18 nt, Artificial Sequence
  Synthetic
aaguagcaauaggagaca

SEQ ID NO: 460874 - RNA, 19 nt, Artificial Sequence
  Synthetic
aaaguagcaauaggagaca

SEQ ID NO: 460875 - RNA, 20 nt, Artificial Sequence
  Synthetic
gaaaguagcaauaggagaca

SEQ ID NO: 460876 - RNA, 21 nt, Artificial Sequence
  Synthetic
agaaaguagcaauaggagaca

SEQ ID NO: 460877 - RNA, 22 nt, Artificial Sequence
  Synthetic
cagaaaguagcaauaggagaca

SEQ ID NO: 460878 - RNA, 23 nt, Artificial Sequence
  Synthetic
acagaaaguagcaauaggagaca

SEQ ID NO: 460879 - RNA, 24 nt, Artificial Sequence
  Synthetic
aacagaaaguagcaauaggagaca

SEQ ID NO: 460880 - RNA, 18 nt, Artificial Sequence
  Synthetic
agccuuccuugggagaca

SEQ ID NO: 460881 - RNA, 19 nt, Artificial Sequence
  Synthetic
gagccuuccuugggagaca

SEQ ID NO: 460882 - RNA, 20 nt, Artificial Sequence
  Synthetic
agagccuuccuugggagaca

SEQ ID NO: 460883 - RNA, 21 nt, Artificial Sequence
  Synthetic
gagagccuuccuugggagaca

SEQ ID NO: 460884 - RNA, 22 nt, Artificial Sequence
  Synthetic
agagagccuuccuugggagaca

SEQ ID NO: 460885 - RNA, 23 nt, Artificial Sequence
  Synthetic
cagagagccuuccuugggagaca

SEQ ID NO: 460886 - RNA, 24 nt, Artificial Sequence
  Synthetic
gcagagagccuuccuugggagaca

SEQ ID NO: 460887 - RNA, 18 nt, Artificial Sequence
  Synthetic
guggaguggguggagaca

SEQ ID NO: 460888 - RNA, 19 nt, Artificial Sequence
  Synthetic
uguggaguggguggagaca

SEQ ID NO: 460889 - RNA, 20 nt, Artificial Sequence
  Synthetic
guguggaguggguggagaca

SEQ ID NO: 460890 - RNA, 21 nt, Artificial Sequence
  Synthetic
uguguggaguggguggagaca

SEQ ID NO: 460891 - RNA, 22 nt, Artificial Sequence
  Synthetic
guguguggaguggguggagaca

SEQ ID NO: 460892 - RNA, 23 nt, Artificial Sequence
  Synthetic
aguguguggaguggguggagaca

SEQ ID NO: 460893 - RNA, 24 nt, Artificial Sequence
  Synthetic
gaguguguggaguggguggagaca

SEQ ID NO: 460894 - RNA, 18 nt, Artificial Sequence
  Synthetic
auauagcuuuaugagaca

SEQ ID NO: 460895 - RNA, 19 nt, Artificial Sequence
  Synthetic
aauauagcuuuaugagaca

SEQ ID NO: 460896 - RNA, 20 nt, Artificial Sequence
  Synthetic
gaauauagcuuuaugagaca

SEQ ID NO: 460897 - RNA, 21 nt, Artificial Sequence
  Synthetic
ugaauauagcuuuaugagaca

SEQ ID NO: 460898 - RNA, 22 nt, Artificial Sequence
  Synthetic
augaauauagcuuuaugagaca

SEQ ID NO: 460899 - RNA, 23 nt, Artificial Sequence
  Synthetic
caugaauauagcuuuaugagaca

SEQ ID NO: 460900 - RNA, 24 nt, Artificial Sequence
  Synthetic
ucaugaauauagcuuuaugagaca

SEQ ID NO: 460901 - RNA, 18 nt, Artificial Sequence
  Synthetic
uggaaggaaacugagaca

SEQ ID NO: 460902 - RNA, 19 nt, Artificial Sequence
  Synthetic
auggaaggaaacugagaca

SEQ ID NO: 460903 - RNA, 20 nt, Artificial Sequence
  Synthetic
uauggaaggaaacugagaca

SEQ ID NO: 460904 - RNA, 21 nt, Artificial Sequence
  Synthetic
auauggaaggaaacugagaca

SEQ ID NO: 460905 - RNA, 22 nt, Artificial Sequence
  Synthetic
uauauggaaggaaacugagaca

SEQ ID NO: 460906 - RNA, 23 nt, Artificial Sequence
  Synthetic
uuauauggaaggaaacugagaca

SEQ ID NO: 460907 - RNA, 24 nt, Artificial Sequence
  Synthetic
uuuauauggaaggaaacugagaca

SEQ ID NO: 460908 - RNA, 18 nt, Artificial Sequence
  Synthetic
acaaacacuacugagaca

SEQ ID NO: 460909 - RNA, 19 nt, Artificial Sequence
  Synthetic
uacaaacacuacugagaca

SEQ ID NO: 460910 - RNA, 20 nt, Artificial Sequence
  Synthetic
cuacaaacacuacugagaca

SEQ ID NO: 460911 - RNA, 21 nt, Artificial Sequence
  Synthetic
acuacaaacacuacugagaca

SEQ ID NO: 460912 - RNA, 22 nt, Artificial Sequence
  Synthetic
aacuacaaacacuacugagaca

SEQ ID NO: 460913 - RNA, 23 nt, Artificial Sequence
  Synthetic
aaacuacaaacacuacugagaca

SEQ ID NO: 460914 - RNA, 24 nt, Artificial Sequence
  Synthetic
gaaacuacaaacacuacugagaca

SEQ ID NO: 460915 - RNA, 18 nt, Artificial Sequence
  Synthetic
aaccaaaagagugagaca

SEQ ID NO: 460916 - RNA, 19 nt, Artificial Sequence
  Synthetic
aaaccaaaagagugagaca

SEQ ID NO: 460917 - RNA, 20 nt, Artificial Sequence
  Synthetic
aaaaccaaaagagugagaca

SEQ ID NO: 460918 - RNA, 21 nt, Artificial Sequence
  Synthetic
aaaaaccaaaagagugagaca

SEQ ID NO: 460919 - RNA, 22 nt, Artificial Sequence
  Synthetic
gaaaaaccaaaagagugagaca

SEQ ID NO: 460920 - RNA, 23 nt, Artificial Sequence
  Synthetic
ugaaaaaccaaaagagugagaca

SEQ ID NO: 460921 - RNA, 24 nt, Artificial Sequence
  Synthetic
augaaaaaccaaaagagugagaca

SEQ ID NO: 460922 - RNA, 18 nt, Artificial Sequence
  Synthetic
ugagauggcuuugagaca

SEQ ID NO: 460923 - RNA, 19 nt, Artificial Sequence
  Synthetic
uugagauggcuuugagaca

SEQ ID NO: 460924 - RNA, 20 nt, Artificial Sequence
  Synthetic
uuugagauggcuuugagaca

SEQ ID NO: 460925 - RNA, 21 nt, Artificial Sequence
  Synthetic
cuuugagauggcuuugagaca

SEQ ID NO: 460926 - RNA, 22 nt, Artificial Sequence
  Synthetic
acuuugagauggcuuugagaca

SEQ ID NO: 460927 - RNA, 23 nt, Artificial Sequence
  Synthetic
gacuuugagauggcuuugagaca

SEQ ID NO: 460928 - RNA, 24 nt, Artificial Sequence
  Synthetic
ugacuuugagauggcuuugagaca

SEQ ID NO: 460929 - RNA, 18 nt, Artificial Sequence
  Synthetic
guaaaaggguuugagaca

SEQ ID NO: 460930 - RNA, 19 nt, Artificial Sequence
  Synthetic
gguaaaaggguuugagaca

SEQ ID NO: 460931 - RNA, 20 nt, Artificial Sequence
  Synthetic
agguaaaaggguuugagaca

SEQ ID NO: 460932 - RNA, 21 nt, Artificial Sequence
  Synthetic
uagguaaaaggguuugagaca

SEQ ID NO: 460933 - RNA, 22 nt, Artificial Sequence
  Synthetic
auagguaaaaggguuugagaca

SEQ ID NO: 460934 - RNA, 23 nt, Artificial Sequence
  Synthetic
uauagguaaaaggguuugagaca

SEQ ID NO: 460935 - RNA, 24 nt, Artificial Sequence
  Synthetic
guauagguaaaaggguuugagaca

SEQ ID NO: 460936 - RNA, 18 nt, Artificial Sequence
  Synthetic
uuuuucuacaaauagaca

SEQ ID NO: 460937 - RNA, 19 nt, Artificial Sequence
  Synthetic
uuuuuucuacaaauagaca

SEQ ID NO: 460938 - RNA, 20 nt, Artificial Sequence
  Synthetic
cuuuuuucuacaaauagaca

SEQ ID NO: 460939 - RNA, 21 nt, Artificial Sequence
  Synthetic
ucuuuuuucuacaaauagaca

SEQ ID NO: 460940 - RNA, 22 nt, Artificial Sequence
  Synthetic
uucuuuuuucuacaaauagaca

SEQ ID NO: 460941 - RNA, 23 nt, Artificial Sequence
  Synthetic
auucuuuuuucuacaaauagaca

SEQ ID NO: 460942 - RNA, 24 nt, Artificial Sequence
  Synthetic
cauucuuuuuucuacaaauagaca

SEQ ID NO: 460943 - RNA, 18 nt, Artificial Sequence
  Synthetic
auauggaagaaauagaca

SEQ ID NO: 460944 - RNA, 19 nt, Artificial Sequence
  Synthetic
cauauggaagaaauagaca

SEQ ID NO: 460945 - RNA, 20 nt, Artificial Sequence
  Synthetic
ccauauggaagaaauagaca

SEQ ID NO: 460946 - RNA, 21 nt, Artificial Sequence
  Synthetic
cccauauggaagaaauagaca

SEQ ID NO: 460947 - RNA, 22 nt, Artificial Sequence
  Synthetic
ucccauauggaagaaauagaca

SEQ ID NO: 460948 - RNA, 23 nt, Artificial Sequence
  Synthetic
uucccauauggaagaaauagaca

SEQ ID NO: 460949 - RNA, 24 nt, Artificial Sequence
  Synthetic
uuucccauauggaagaaauagaca

SEQ ID NO: 460950 - RNA, 18 nt, Artificial Sequence
  Synthetic
agacaggaacaauagaca

SEQ ID NO: 460951 - RNA, 19 nt, Artificial Sequence
  Synthetic
aagacaggaacaauagaca

SEQ ID NO: 460952 - RNA, 20 nt, Artificial Sequence
  Synthetic
aaagacaggaacaauagaca

SEQ ID NO: 460953 - RNA, 21 nt, Artificial Sequence
  Synthetic
uaaagacaggaacaauagaca

SEQ ID NO: 460954 - RNA, 22 nt, Artificial Sequence
  Synthetic
auaaagacaggaacaauagaca

SEQ ID NO: 460955 - RNA, 23 nt, Artificial Sequence
  Synthetic
cauaaagacaggaacaauagaca

SEQ ID NO: 460956 - RNA, 24 nt, Artificial Sequence
  Synthetic
acauaaagacaggaacaauagaca

SEQ ID NO: 460957 - RNA, 18 nt, Artificial Sequence
  Synthetic
aguguggaauaauagaca

SEQ ID NO: 460958 - RNA, 19 nt, Artificial Sequence
  Synthetic
gaguguggaauaauagaca

SEQ ID NO: 460959 - RNA, 20 nt, Artificial Sequence
  Synthetic
agaguguggaauaauagaca

SEQ ID NO: 460960 - RNA, 21 nt, Artificial Sequence
  Synthetic
cagaguguggaauaauagaca

SEQ ID NO: 460961 - RNA, 22 nt, Artificial Sequence
  Synthetic
acagaguguggaauaauagaca

SEQ ID NO: 460962 - RNA, 23 nt, Artificial Sequence
  Synthetic
cacagaguguggaauaauagaca

SEQ ID NO: 460963 - RNA, 24 nt, Artificial Sequence
  Synthetic
gcacagaguguggaauaauagaca

SEQ ID NO: 460964 - RNA, 18 nt, Artificial Sequence
  Synthetic
gaugagaacacauagaca

SEQ ID NO: 460965 - RNA, 19 nt, Artificial Sequence
  Synthetic
cgaugagaacacauagaca

SEQ ID NO: 460966 - RNA, 20 nt, Artificial Sequence
  Synthetic
acgaugagaacacauagaca

SEQ ID NO: 460967 - RNA, 21 nt, Artificial Sequence
  Synthetic
aacgaugagaacacauagaca

SEQ ID NO: 460968 - RNA, 22 nt, Artificial Sequence
  Synthetic
gaacgaugagaacacauagaca

SEQ ID NO: 460969 - RNA, 23 nt, Artificial Sequence
  Synthetic
ugaacgaugagaacacauagaca

SEQ ID NO: 460970 - RNA, 24 nt, Artificial Sequence
  Synthetic
uugaacgaugagaacacauagaca

SEQ ID NO: 460971 - RNA, 18 nt, Artificial Sequence
  Synthetic
cauaaaaauagauagaca

SEQ ID NO: 460972 - RNA, 19 nt, Artificial Sequence
  Synthetic
ccauaaaaauagauagaca

SEQ ID NO: 460973 - RNA, 20 nt, Artificial Sequence
  Synthetic
uccauaaaaauagauagaca

SEQ ID NO: 460974 - RNA, 21 nt, Artificial Sequence
  Synthetic
uuccauaaaaauagauagaca

SEQ ID NO: 460975 - RNA, 22 nt, Artificial Sequence
  Synthetic
auuccauaaaaauagauagaca

SEQ ID NO: 460976 - RNA, 23 nt, Artificial Sequence
  Synthetic
uauuccauaaaaauagauagaca

SEQ ID NO: 460977 - RNA, 24 nt, Artificial Sequence
  Synthetic
auauuccauaaaaauagauagaca

SEQ ID NO: 460978 - RNA, 18 nt, Artificial Sequence
  Synthetic
aagauuaacugauagaca

SEQ ID NO: 460979 - RNA, 19 nt, Artificial Sequence
  Synthetic
caagauuaacugauagaca

SEQ ID NO: 460980 - RNA, 20 nt, Artificial Sequence
  Synthetic
gcaagauuaacugauagaca

SEQ ID NO: 460981 - RNA, 21 nt, Artificial Sequence
  Synthetic
ggcaagauuaacugauagaca

SEQ ID NO: 460982 - RNA, 22 nt, Artificial Sequence
  Synthetic
gggcaagauuaacugauagaca

SEQ ID NO: 460983 - RNA, 23 nt, Artificial Sequence
  Synthetic
ugggcaagauuaacugauagaca

SEQ ID NO: 460984 - RNA, 24 nt, Artificial Sequence
  Synthetic
augggcaagauuaacugauagaca

SEQ ID NO: 460985 - RNA, 18 nt, Artificial Sequence
  Synthetic
uaaaagucuauauagaca

SEQ ID NO: 460986 - RNA, 19 nt, Artificial Sequence
  Synthetic
cuaaaagucuauauagaca

SEQ ID NO: 460987 - RNA, 20 nt, Artificial Sequence
  Synthetic
ucuaaaagucuauauagaca

SEQ ID NO: 460988 - RNA, 21 nt, Artificial Sequence
  Synthetic
aucuaaaagucuauauagaca

SEQ ID NO: 460989 - RNA, 22 nt, Artificial Sequence
  Synthetic
uaucuaaaagucuauauagaca

SEQ ID NO: 460990 - RNA, 23 nt, Artificial Sequence
  Synthetic
uuaucuaaaagucuauauagaca

SEQ ID NO: 460991 - RNA, 24 nt, Artificial Sequence
  Synthetic
uuuaucuaaaagucuauauagaca

SEQ ID NO: 460992 - RNA, 18 nt, Artificial Sequence
  Synthetic
uggggcaaacuauagaca

SEQ ID NO: 460993 - RNA, 19 nt, Artificial Sequence
  Synthetic
uuggggcaaacuauagaca

SEQ ID NO: 460994 - RNA, 20 nt, Artificial Sequence
  Synthetic
uuuggggcaaacuauagaca

SEQ ID NO: 460995 - RNA, 21 nt, Artificial Sequence
  Synthetic
cuuuggggcaaacuauagaca

SEQ ID NO: 460996 - RNA, 22 nt, Artificial Sequence
  Synthetic
ccuuuggggcaaacuauagaca

SEQ ID NO: 460997 - RNA, 23 nt, Artificial Sequence
  Synthetic
accuuuggggcaaacuauagaca

SEQ ID NO: 460998 - RNA, 24 nt, Artificial Sequence
  Synthetic
uaccuuuggggcaaacuauagaca

SEQ ID NO: 460999 - RNA, 18 nt, Artificial Sequence
  Synthetic
uacacccuuuuauagaca

SEQ ID NO: 461000 - RNA, 19 nt, Artificial Sequence
  Synthetic
uuacacccuuuuauagaca

SEQ ID NO: 461001 - RNA, 20 nt, Artificial Sequence
  Synthetic
cuuacacccuuuuauagaca

SEQ ID NO: 461002 - RNA, 21 nt, Artificial Sequence
  Synthetic
acuuacacccuuuuauagaca

SEQ ID NO: 461003 - RNA, 22 nt, Artificial Sequence
  Synthetic
uacuuacacccuuuuauagaca

SEQ ID NO: 461004 - RNA, 23 nt, Artificial Sequence
  Synthetic
guacuuacacccuuuuauagaca

SEQ ID NO: 461005 - RNA, 24 nt, Artificial Sequence
  Synthetic
uguacuuacacccuuuuauagaca

SEQ ID NO: 461006 - RNA, 18 nt, Artificial Sequence
  Synthetic
gucuccucgaacuagaca

SEQ ID NO: 461007 - RNA, 19 nt, Artificial Sequence
  Synthetic
cgucuccucgaacuagaca

SEQ ID NO: 461008 - RNA, 20 nt, Artificial Sequence
  Synthetic
acgucuccucgaacuagaca

SEQ ID NO: 461009 - RNA, 21 nt, Artificial Sequence
  Synthetic
aacgucuccucgaacuagaca

SEQ ID NO: 461010 - RNA, 22 nt, Artificial Sequence
  Synthetic
aaacgucuccucgaacuagaca

SEQ ID NO: 461011 - RNA, 23 nt, Artificial Sequence
  Synthetic
uaaacgucuccucgaacuagaca

SEQ ID NO: 461012 - RNA, 24 nt, Artificial Sequence
  Synthetic
auaaacgucuccucgaacuagaca

SEQ ID NO: 461013 - RNA, 18 nt, Artificial Sequence
  Synthetic
uaaugacaucacuagaca

SEQ ID NO: 461014 - RNA, 19 nt, Artificial Sequence
  Synthetic
auaaugacaucacuagaca

SEQ ID NO: 461015 - RNA, 20 nt, Artificial Sequence
  Synthetic
uauaaugacaucacuagaca

SEQ ID NO: 461016 - RNA, 21 nt, Artificial Sequence
  Synthetic
auauaaugacaucacuagaca

SEQ ID NO: 461017 - RNA, 22 nt, Artificial Sequence
  Synthetic
aauauaaugacaucacuagaca

SEQ ID NO: 461018 - RNA, 23 nt, Artificial Sequence
  Synthetic
aaauauaaugacaucacuagaca

SEQ ID NO: 461019 - RNA, 24 nt, Artificial Sequence
  Synthetic
aaaauauaaugacaucacuagaca

SEQ ID NO: 461020 - RNA, 18 nt, Artificial Sequence
  Synthetic
aggaauggaagcuagaca

SEQ ID NO: 461021 - RNA, 19 nt, Artificial Sequence
  Synthetic
aaggaauggaagcuagaca

SEQ ID NO: 461022 - RNA, 20 nt, Artificial Sequence
  Synthetic
aaaggaauggaagcuagaca

SEQ ID NO: 461023 - RNA, 21 nt, Artificial Sequence
  Synthetic
gaaaggaauggaagcuagaca

SEQ ID NO: 461024 - RNA, 22 nt, Artificial Sequence
  Synthetic
ugaaaggaauggaagcuagaca

SEQ ID NO: 461025 - RNA, 23 nt, Artificial Sequence
  Synthetic
gugaaaggaauggaagcuagaca

SEQ ID NO: 461026 - RNA, 24 nt, Artificial Sequence
  Synthetic
agugaaaggaauggaagcuagaca

SEQ ID NO: 461027 - RNA, 18 nt, Artificial Sequence
  Synthetic
cuuuaaaagagcuagaca

SEQ ID NO: 461028 - RNA, 19 nt, Artificial Sequence
  Synthetic
gcuuuaaaagagcuagaca

SEQ ID NO: 461029 - RNA, 20 nt, Artificial Sequence
  Synthetic
ugcuuuaaaagagcuagaca

SEQ ID NO: 461030 - RNA, 21 nt, Artificial Sequence
  Synthetic
augcuuuaaaagagcuagaca

SEQ ID NO: 461031 - RNA, 22 nt, Artificial Sequence
  Synthetic
aaugcuuuaaaagagcuagaca

SEQ ID NO: 461032 - RNA, 23 nt, Artificial Sequence
  Synthetic
uaaugcuuuaaaagagcuagaca

SEQ ID NO: 461033 - RNA, 24 nt, Artificial Sequence
  Synthetic
guaaugcuuuaaaagagcuagaca

SEQ ID NO: 461034 - RNA, 18 nt, Artificial Sequence
  Synthetic
ucacuuuuucucuagaca

SEQ ID NO: 461035 - RNA, 19 nt, Artificial Sequence
  Synthetic
aucacuuuuucucuagaca

SEQ ID NO: 461036 - RNA, 20 nt, Artificial Sequence
  Synthetic
uaucacuuuuucucuagaca

SEQ ID NO: 461037 - RNA, 21 nt, Artificial Sequence
  Synthetic
uuaucacuuuuucucuagaca

SEQ ID NO: 461038 - RNA, 22 nt, Artificial Sequence
  Synthetic
auuaucacuuuuucucuagaca

SEQ ID NO: 461039 - RNA, 23 nt, Artificial Sequence
  Synthetic
cauuaucacuuuuucucuagaca

SEQ ID NO: 461040 - RNA, 24 nt, Artificial Sequence
  Synthetic
ucauuaucacuuuuucucuagaca

SEQ ID NO: 461041 - RNA, 18 nt, Artificial Sequence
  Synthetic
gaauuuuccagguagaca

SEQ ID NO: 461042 - RNA, 19 nt, Artificial Sequence
  Synthetic
ugaauuuuccagguagaca

SEQ ID NO: 461043 - RNA, 20 nt, Artificial Sequence
  Synthetic
uugaauuuuccagguagaca

SEQ ID NO: 461044 - RNA, 21 nt, Artificial Sequence
  Synthetic
guugaauuuuccagguagaca

SEQ ID NO: 461045 - RNA, 22 nt, Artificial Sequence
  Synthetic
aguugaauuuuccagguagaca

SEQ ID NO: 461046 - RNA, 23 nt, Artificial Sequence
  Synthetic
gaguugaauuuuccagguagaca

SEQ ID NO: 461047 - RNA, 24 nt, Artificial Sequence
  Synthetic
agaguugaauuuuccagguagaca

SEQ ID NO: 461048 - RNA, 18 nt, Artificial Sequence
  Synthetic
uauuuuuuggauuagaca

SEQ ID NO: 461049 - RNA, 19 nt, Artificial Sequence
  Synthetic
auauuuuuuggauuagaca

SEQ ID NO: 461050 - RNA, 20 nt, Artificial Sequence
  Synthetic
cauauuuuuuggauuagaca

SEQ ID NO: 461051 - RNA, 21 nt, Artificial Sequence
  Synthetic
acauauuuuuuggauuagaca

SEQ ID NO: 461052 - RNA, 22 nt, Artificial Sequence
  Synthetic
uacauauuuuuuggauuagaca

SEQ ID NO: 461053 - RNA, 23 nt, Artificial Sequence
  Synthetic
auacauauuuuuuggauuagaca

SEQ ID NO: 461054 - RNA, 24 nt, Artificial Sequence
  Synthetic
aauacauauuuuuuggauuagaca

SEQ ID NO: 461055 - RNA, 18 nt, Artificial Sequence
  Synthetic
ugaaguagggaaacgaca

SEQ ID NO: 461056 - RNA, 19 nt, Artificial Sequence
  Synthetic
augaaguagggaaacgaca

SEQ ID NO: 461057 - RNA, 20 nt, Artificial Sequence
  Synthetic
aaugaaguagggaaacgaca

SEQ ID NO: 461058 - RNA, 21 nt, Artificial Sequence
  Synthetic
aaaugaaguagggaaacgaca

SEQ ID NO: 461059 - RNA, 22 nt, Artificial Sequence
  Synthetic
aaaaugaaguagggaaacgaca

SEQ ID NO: 461060 - RNA, 23 nt, Artificial Sequence
  Synthetic
aaaaaugaaguagggaaacgaca

SEQ ID NO: 461061 - RNA, 24 nt, Artificial Sequence
  Synthetic
gaaaaaugaaguagggaaacgaca

SEQ ID NO: 461062 - RNA, 18 nt, Artificial Sequence
  Synthetic
uuagggauagagacgaca

SEQ ID NO: 461063 - RNA, 19 nt, Artificial Sequence
  Synthetic
guuagggauagagacgaca

SEQ ID NO: 461064 - RNA, 20 nt, Artificial Sequence
  Synthetic
gguuagggauagagacgaca

SEQ ID NO: 461065 - RNA, 21 nt, Artificial Sequence
  Synthetic
agguuagggauagagacgaca

SEQ ID NO: 461066 - RNA, 22 nt, Artificial Sequence
  Synthetic
aagguuagggauagagacgaca

SEQ ID NO: 461067 - RNA, 23 nt, Artificial Sequence
  Synthetic
gaagguuagggauagagacgaca

SEQ ID NO: 461068 - RNA, 24 nt, Artificial Sequence
  Synthetic
agaagguuagggauagagacgaca

SEQ ID NO: 461069 - RNA, 18 nt, Artificial Sequence
  Synthetic
cugcacaaacaagcgaca

SEQ ID NO: 461070 - RNA, 19 nt, Artificial Sequence
  Synthetic
gcugcacaaacaagcgaca

SEQ ID NO: 461071 - RNA, 20 nt, Artificial Sequence
  Synthetic
agcugcacaaacaagcgaca

SEQ ID NO: 461072 - RNA, 21 nt, Artificial Sequence
  Synthetic
uagcugcacaaacaagcgaca

SEQ ID NO: 461073 - RNA, 22 nt, Artificial Sequence
  Synthetic
guagcugcacaaacaagcgaca

SEQ ID NO: 461074 - RNA, 23 nt, Artificial Sequence
  Synthetic
aguagcugcacaaacaagcgaca

SEQ ID NO: 461075 - RNA, 24 nt, Artificial Sequence
  Synthetic
gaguagcugcacaaacaagcgaca

SEQ ID NO: 461076 - RNA, 18 nt, Artificial Sequence
  Synthetic
ugucuuuuacuugcgaca

SEQ ID NO: 461077 - RNA, 19 nt, Artificial Sequence
  Synthetic
uugucuuuuacuugcgaca

SEQ ID NO: 461078 - RNA, 20 nt, Artificial Sequence
  Synthetic
uuugucuuuuacuugcgaca

SEQ ID NO: 461079 - RNA, 21 nt, Artificial Sequence
  Synthetic
uuuugucuuuuacuugcgaca

SEQ ID NO: 461080 - RNA, 22 nt, Artificial Sequence
  Synthetic
auuuugucuuuuacuugcgaca

SEQ ID NO: 461081 - RNA, 23 nt, Artificial Sequence
  Synthetic
aauuuugucuuuuacuugcgaca

SEQ ID NO: 461082 - RNA, 24 nt, Artificial Sequence
  Synthetic
uaauuuugucuuuuacuugcgaca

SEQ ID NO: 461083 - RNA, 18 nt, Artificial Sequence
  Synthetic
uaugaggauacaucgaca

SEQ ID NO: 461084 - RNA, 19 nt, Artificial Sequence
  Synthetic
auaugaggauacaucgaca

SEQ ID NO: 461085 - RNA, 20 nt, Artificial Sequence
  Synthetic
aauaugaggauacaucgaca

SEQ ID NO: 461086 - RNA, 21 nt, Artificial Sequence
  Synthetic
gaauaugaggauacaucgaca

SEQ ID NO: 461087 - RNA, 22 nt, Artificial Sequence
  Synthetic
ugaauaugaggauacaucgaca

SEQ ID NO: 461088 - RNA, 23 nt, Artificial Sequence
  Synthetic
gugaauaugaggauacaucgaca

SEQ ID NO: 461089 - RNA, 24 nt, Artificial Sequence
  Synthetic
agugaauaugaggauacaucgaca

SEQ ID NO: 461090 - RNA, 18 nt, Artificial Sequence
  Synthetic
agaguagccugaucgaca

SEQ ID NO: 461091 - RNA, 19 nt, Artificial Sequence
  Synthetic
aagaguagccugaucgaca

SEQ ID NO: 461092 - RNA, 20 nt, Artificial Sequence
  Synthetic
aaagaguagccugaucgaca

SEQ ID NO: 461093 - RNA, 21 nt, Artificial Sequence
  Synthetic
aaaagaguagccugaucgaca

SEQ ID NO: 461094 - RNA, 22 nt, Artificial Sequence
  Synthetic
gaaaagaguagccugaucgaca

SEQ ID NO: 461095 - RNA, 23 nt, Artificial Sequence
  Synthetic
ggaaaagaguagccugaucgaca

SEQ ID NO: 461096 - RNA, 24 nt, Artificial Sequence
  Synthetic
uggaaaagaguagccugaucgaca

SEQ ID NO: 461097 - RNA, 18 nt, Artificial Sequence
  Synthetic
aaaaacuuacaaaggaca

SEQ ID NO: 461098 - RNA, 19 nt, Artificial Sequence
  Synthetic
gaaaaacuuacaaaggaca

SEQ ID NO: 461099 - RNA, 20 nt, Artificial Sequence
  Synthetic
cgaaaaacuuacaaaggaca

SEQ ID NO: 461100 - RNA, 21 nt, Artificial Sequence
  Synthetic
gcgaaaaacuuacaaaggaca

SEQ ID NO: 461101 - RNA, 22 nt, Artificial Sequence
  Synthetic
agcgaaaaacuuacaaaggaca

SEQ ID NO: 461102 - RNA, 23 nt, Artificial Sequence
  Synthetic
aagcgaaaaacuuacaaaggaca

SEQ ID NO: 461103 - RNA, 24 nt, Artificial Sequence
  Synthetic
gaagcgaaaaacuuacaaaggaca

SEQ ID NO: 461104 - RNA, 18 nt, Artificial Sequence
  Synthetic
gagagagaucaaaggaca

SEQ ID NO: 461105 - RNA, 19 nt, Artificial Sequence
  Synthetic
agagagagaucaaaggaca

SEQ ID NO: 461106 - RNA, 20 nt, Artificial Sequence
  Synthetic
gagagagagaucaaaggaca

SEQ ID NO: 461107 - RNA, 21 nt, Artificial Sequence
  Synthetic
ggagagagagaucaaaggaca

SEQ ID NO: 461108 - RNA, 22 nt, Artificial Sequence
  Synthetic
aggagagagagaucaaaggaca

SEQ ID NO: 461109 - RNA, 23 nt, Artificial Sequence
  Synthetic
gaggagagagagaucaaaggaca

SEQ ID NO: 461110 - RNA, 24 nt, Artificial Sequence
  Synthetic
ggaggagagagagaucaaaggaca

SEQ ID NO: 461111 - RNA, 18 nt, Artificial Sequence
  Synthetic
agguugagucaaaggaca

SEQ ID NO: 461112 - RNA, 19 nt, Artificial Sequence
  Synthetic
aagguugagucaaaggaca

SEQ ID NO: 461113 - RNA, 20 nt, Artificial Sequence
  Synthetic
gaagguugagucaaaggaca

SEQ ID NO: 461114 - RNA, 21 nt, Artificial Sequence
  Synthetic
agaagguugagucaaaggaca

SEQ ID NO: 461115 - RNA, 22 nt, Artificial Sequence
  Synthetic
uagaagguugagucaaaggaca

SEQ ID NO: 461116 - RNA, 23 nt, Artificial Sequence
  Synthetic
guagaagguugagucaaaggaca

SEQ ID NO: 461117 - RNA, 24 nt, Artificial Sequence
  Synthetic
aguagaagguugagucaaaggaca

SEQ ID NO: 461118 - RNA, 18 nt, Artificial Sequence
  Synthetic
uagagaguaagaaggaca

SEQ ID NO: 461119 - RNA, 19 nt, Artificial Sequence
  Synthetic
uuagagaguaagaaggaca

SEQ ID NO: 461120 - RNA, 20 nt, Artificial Sequence
  Synthetic
uuuagagaguaagaaggaca

SEQ ID NO: 461121 - RNA, 21 nt, Artificial Sequence
  Synthetic
auuuagagaguaagaaggaca

SEQ ID NO: 461122 - RNA, 22 nt, Artificial Sequence
  Synthetic
uauuuagagaguaagaaggaca

SEQ ID NO: 461123 - RNA, 23 nt, Artificial Sequence
  Synthetic
auauuuagagaguaagaaggaca

SEQ ID NO: 461124 - RNA, 24 nt, Artificial Sequence
  Synthetic
aauauuuagagaguaagaaggaca

SEQ ID NO: 461125 - RNA, 18 nt, Artificial Sequence
  Synthetic
caaacauagugaaggaca

SEQ ID NO: 461126 - RNA, 19 nt, Artificial Sequence
  Synthetic
gcaaacauagugaaggaca

SEQ ID NO: 461127 - RNA, 20 nt, Artificial Sequence
  Synthetic
ugcaaacauagugaaggaca

SEQ ID NO: 461128 - RNA, 21 nt, Artificial Sequence
  Synthetic
augcaaacauagugaaggaca

SEQ ID NO: 461129 - RNA, 22 nt, Artificial Sequence
  Synthetic
uaugcaaacauagugaaggaca

SEQ ID NO: 461130 - RNA, 23 nt, Artificial Sequence
  Synthetic
auaugcaaacauagugaaggaca

SEQ ID NO: 461131 - RNA, 24 nt, Artificial Sequence
  Synthetic
uauaugcaaacauagugaaggaca

SEQ ID NO: 461132 - RNA, 18 nt, Artificial Sequence
  Synthetic
gcaauuaaucuaaggaca

SEQ ID NO: 461133 - RNA, 19 nt, Artificial Sequence
  Synthetic
ggcaauuaaucuaaggaca

SEQ ID NO: 461134 - RNA, 20 nt, Artificial Sequence
  Synthetic
aggcaauuaaucuaaggaca

SEQ ID NO: 461135 - RNA, 21 nt, Artificial Sequence
  Synthetic
aaggcaauuaaucuaaggaca

SEQ ID NO: 461136 - RNA, 22 nt, Artificial Sequence
  Synthetic
aaaggcaauuaaucuaaggaca

SEQ ID NO: 461137 - RNA, 23 nt, Artificial Sequence
  Synthetic
gaaaggcaauuaaucuaaggaca

SEQ ID NO: 461138 - RNA, 24 nt, Artificial Sequence
  Synthetic
agaaaggcaauuaaucuaaggaca

SEQ ID NO: 461139 - RNA, 18 nt, Artificial Sequence
  Synthetic
gcagacaucuacaggaca

SEQ ID NO: 461140 - RNA, 19 nt, Artificial Sequence
  Synthetic
ggcagacaucuacaggaca

SEQ ID NO: 461141 - RNA, 20 nt, Artificial Sequence
  Synthetic
aggcagacaucuacaggaca

SEQ ID NO: 461142 - RNA, 21 nt, Artificial Sequence
  Synthetic
aaggcagacaucuacaggaca

SEQ ID NO: 461143 - RNA, 22 nt, Artificial Sequence
  Synthetic
gaaggcagacaucuacaggaca

SEQ ID NO: 461144 - RNA, 23 nt, Artificial Sequence
  Synthetic
ugaaggcagacaucuacaggaca

SEQ ID NO: 461145 - RNA, 24 nt, Artificial Sequence
  Synthetic
augaaggcagacaucuacaggaca

SEQ ID NO: 461146 - RNA, 18 nt, Artificial Sequence
  Synthetic
gagaaaaaaaucaggaca

SEQ ID NO: 461147 - RNA, 19 nt, Artificial Sequence
  Synthetic
agagaaaaaaaucaggaca

SEQ ID NO: 461148 - RNA, 20 nt, Artificial Sequence
  Synthetic
cagagaaaaaaaucaggaca

SEQ ID NO: 461149 - RNA, 21 nt, Artificial Sequence
  Synthetic
gcagagaaaaaaaucaggaca

SEQ ID NO: 461150 - RNA, 22 nt, Artificial Sequence
  Synthetic
cgcagagaaaaaaaucaggaca

SEQ ID NO: 461151 - RNA, 23 nt, Artificial Sequence
  Synthetic
acgcagagaaaaaaaucaggaca

SEQ ID NO: 461152 - RNA, 24 nt, Artificial Sequence
  Synthetic
gacgcagagaaaaaaaucaggaca

SEQ ID NO: 461153 - RNA, 18 nt, Artificial Sequence
  Synthetic
gaaaggcaagucaggaca

SEQ ID NO: 461154 - RNA, 19 nt, Artificial Sequence
  Synthetic
agaaaggcaagucaggaca

SEQ ID NO: 461155 - RNA, 20 nt, Artificial Sequence
  Synthetic
gagaaaggcaagucaggaca

SEQ ID NO: 461156 - RNA, 21 nt, Artificial Sequence
  Synthetic
ugagaaaggcaagucaggaca

SEQ ID NO: 461157 - RNA, 22 nt, Artificial Sequence
  Synthetic
augagaaaggcaagucaggaca

SEQ ID NO: 461158 - RNA, 23 nt, Artificial Sequence
  Synthetic
gaugagaaaggcaagucaggaca

SEQ ID NO: 461159 - RNA, 24 nt, Artificial Sequence
  Synthetic
cgaugagaaaggcaagucaggaca

SEQ ID NO: 461160 - RNA, 18 nt, Artificial Sequence
  Synthetic
cccaaagcuaagaggaca

SEQ ID NO: 461161 - RNA, 19 nt, Artificial Sequence
  Synthetic
ccccaaagcuaagaggaca

SEQ ID NO: 461162 - RNA, 20 nt, Artificial Sequence
  Synthetic
accccaaagcuaagaggaca

SEQ ID NO: 461163 - RNA, 21 nt, Artificial Sequence
  Synthetic
caccccaaagcuaagaggaca

SEQ ID NO: 461164 - RNA, 22 nt, Artificial Sequence
  Synthetic
ccaccccaaagcuaagaggaca

SEQ ID NO: 461165 - RNA, 23 nt, Artificial Sequence
  Synthetic
accaccccaaagcuaagaggaca

SEQ ID NO: 461166 - RNA, 24 nt, Artificial Sequence
  Synthetic
uaccaccccaaagcuaagaggaca

SEQ ID NO: 461167 - RNA, 18 nt, Artificial Sequence
  Synthetic
agacacgacaggaggaca

SEQ ID NO: 461168 - RNA, 19 nt, Artificial Sequence
  Synthetic
aagacacgacaggaggaca

SEQ ID NO: 461169 - RNA, 20 nt, Artificial Sequence
  Synthetic
gaagacacgacaggaggaca

SEQ ID NO: 461170 - RNA, 21 nt, Artificial Sequence
  Synthetic
ggaagacacgacaggaggaca

SEQ ID NO: 461171 - RNA, 22 nt, Artificial Sequence
  Synthetic
aggaagacacgacaggaggaca

SEQ ID NO: 461172 - RNA, 23 nt, Artificial Sequence
  Synthetic
gaggaagacacgacaggaggaca

SEQ ID NO: 461173 - RNA, 24 nt, Artificial Sequence
  Synthetic
agaggaagacacgacaggaggaca

SEQ ID NO: 461174 - RNA, 18 nt, Artificial Sequence
  Synthetic
ggguagggcuggaggaca

SEQ ID NO: 461175 - RNA, 19 nt, Artificial Sequence
  Synthetic
aggguagggcuggaggaca

SEQ ID NO: 461176 - RNA, 20 nt, Artificial Sequence
  Synthetic
aaggguagggcuggaggaca

SEQ ID NO: 461177 - RNA, 21 nt, Artificial Sequence
  Synthetic
gaaggguagggcuggaggaca

SEQ ID NO: 461178 - RNA, 22 nt, Artificial Sequence
  Synthetic
ugaaggguagggcuggaggaca

SEQ ID NO: 461179 - RNA, 23 nt, Artificial Sequence
  Synthetic
augaaggguagggcuggaggaca

SEQ ID NO: 461180 - RNA, 24 nt, Artificial Sequence
  Synthetic
gaugaaggguagggcuggaggaca

SEQ ID NO: 461181 - RNA, 18 nt, Artificial Sequence
  Synthetic
gcagcaauguggaggaca

SEQ ID NO: 461182 - RNA, 19 nt, Artificial Sequence
  Synthetic
ggcagcaauguggaggaca

SEQ ID NO: 461183 - RNA, 20 nt, Artificial Sequence
  Synthetic
uggcagcaauguggaggaca

SEQ ID NO: 461184 - RNA, 21 nt, Artificial Sequence
  Synthetic
cuggcagcaauguggaggaca

SEQ ID NO: 461185 - RNA, 22 nt, Artificial Sequence
  Synthetic
acuggcagcaauguggaggaca

SEQ ID NO: 461186 - RNA, 23 nt, Artificial Sequence
  Synthetic
uacuggcagcaauguggaggaca

SEQ ID NO: 461187 - RNA, 24 nt, Artificial Sequence
  Synthetic
auacuggcagcaauguggaggaca

SEQ ID NO: 461188 - RNA, 18 nt, Artificial Sequence
  Synthetic
auuuugcagaugaggaca

SEQ ID NO: 461189 - RNA, 19 nt, Artificial Sequence
  Synthetic
cauuuugcagaugaggaca

SEQ ID NO: 461190 - RNA, 20 nt, Artificial Sequence
  Synthetic
ccauuuugcagaugaggaca

SEQ ID NO: 461191 - RNA, 21 nt, Artificial Sequence
  Synthetic
uccauuuugcagaugaggaca

SEQ ID NO: 461192 - RNA, 22 nt, Artificial Sequence
  Synthetic
auccauuuugcagaugaggaca

SEQ ID NO: 461193 - RNA, 23 nt, Artificial Sequence
  Synthetic
uauccauuuugcagaugaggaca

SEQ ID NO: 461194 - RNA, 24 nt, Artificial Sequence
  Synthetic
cuauccauuuugcagaugaggaca

SEQ ID NO: 461195 - RNA, 18 nt, Artificial Sequence
  Synthetic
aacaagggggugaggaca

SEQ ID NO: 461196 - RNA, 19 nt, Artificial Sequence
  Synthetic
uaacaagggggugaggaca

SEQ ID NO: 461197 - RNA, 20 nt, Artificial Sequence
  Synthetic
auaacaagggggugaggaca

SEQ ID NO: 461198 - RNA, 21 nt, Artificial Sequence
  Synthetic
uauaacaagggggugaggaca

SEQ ID NO: 461199 - RNA, 22 nt, Artificial Sequence
  Synthetic
uuauaacaagggggugaggaca

SEQ ID NO: 461200 - RNA, 23 nt, Artificial Sequence
  Synthetic
guuauaacaagggggugaggaca

SEQ ID NO: 461201 - RNA, 24 nt, Artificial Sequence
  Synthetic
aguuauaacaagggggugaggaca

SEQ ID NO: 461202 - RNA, 18 nt, Artificial Sequence
  Synthetic
uuuuacugggauaggaca

SEQ ID NO: 461203 - RNA, 19 nt, Artificial Sequence
  Synthetic
cuuuuacugggauaggaca

SEQ ID NO: 461204 - RNA, 20 nt, Artificial Sequence
  Synthetic
ccuuuuacugggauaggaca

SEQ ID NO: 461205 - RNA, 21 nt, Artificial Sequence
  Synthetic
cccuuuuacugggauaggaca

SEQ ID NO: 461206 - RNA, 22 nt, Artificial Sequence
  Synthetic
acccuuuuacugggauaggaca

SEQ ID NO: 461207 - RNA, 23 nt, Artificial Sequence
  Synthetic
cacccuuuuacugggauaggaca

SEQ ID NO: 461208 - RNA, 24 nt, Artificial Sequence
  Synthetic
gcacccuuuuacugggauaggaca

SEQ ID NO: 461209 - RNA, 18 nt, Artificial Sequence
  Synthetic
uguguguaagguaggaca

SEQ ID NO: 461210 - RNA, 19 nt, Artificial Sequence
  Synthetic
guguguguaagguaggaca

SEQ ID NO: 461211 - RNA, 20 nt, Artificial Sequence
  Synthetic
aguguguguaagguaggaca

SEQ ID NO: 461212 - RNA, 21 nt, Artificial Sequence
  Synthetic
aaguguguguaagguaggaca

SEQ ID NO: 461213 - RNA, 22 nt, Artificial Sequence
  Synthetic
aaaguguguguaagguaggaca

SEQ ID NO: 461214 - RNA, 23 nt, Artificial Sequence
  Synthetic
uaaaguguguguaagguaggaca

SEQ ID NO: 461215 - RNA, 24 nt, Artificial Sequence
  Synthetic
guaaaguguguguaagguaggaca

SEQ ID NO: 461216 - RNA, 18 nt, Artificial Sequence
  Synthetic
cuuugcuauguuaggaca

SEQ ID NO: 461217 - RNA, 19 nt, Artificial Sequence
  Synthetic
ucuuugcuauguuaggaca

SEQ ID NO: 461218 - RNA, 20 nt, Artificial Sequence
  Synthetic
cucuuugcuauguuaggaca

SEQ ID NO: 461219 - RNA, 21 nt, Artificial Sequence
  Synthetic
ucucuuugcuauguuaggaca

SEQ ID NO: 461220 - RNA, 22 nt, Artificial Sequence
  Synthetic
cucucuuugcuauguuaggaca

SEQ ID NO: 461221 - RNA, 23 nt, Artificial Sequence
  Synthetic
ucucucuuugcuauguuaggaca

SEQ ID NO: 461222 - RNA, 24 nt, Artificial Sequence
  Synthetic
gucucucuuugcuauguuaggaca

SEQ ID NO: 461223 - RNA, 18 nt, Artificial Sequence
  Synthetic
aaugguaguugacggaca

SEQ ID NO: 461224 - RNA, 19 nt, Artificial Sequence
  Synthetic
uaaugguaguugacggaca

SEQ ID NO: 461225 - RNA, 20 nt, Artificial Sequence
  Synthetic
auaaugguaguugacggaca

SEQ ID NO: 461226 - RNA, 21 nt, Artificial Sequence
  Synthetic
aauaaugguaguugacggaca

SEQ ID NO: 461227 - RNA, 22 nt, Artificial Sequence
  Synthetic
uaauaaugguaguugacggaca

SEQ ID NO: 461228 - RNA, 23 nt, Artificial Sequence
  Synthetic
uuaauaaugguaguugacggaca

SEQ ID NO: 461229 - RNA, 24 nt, Artificial Sequence
  Synthetic
uuuaauaaugguaguugacggaca

SEQ ID NO: 461230 - RNA, 18 nt, Artificial Sequence
  Synthetic
ugggaaaaugaagggaca

SEQ ID NO: 461231 - RNA, 19 nt, Artificial Sequence
  Synthetic
cugggaaaaugaagggaca

SEQ ID NO: 461232 - RNA, 20 nt, Artificial Sequence
  Synthetic
ccugggaaaaugaagggaca

SEQ ID NO: 461233 - RNA, 21 nt, Artificial Sequence
  Synthetic
uccugggaaaaugaagggaca

SEQ ID NO: 461234 - RNA, 22 nt, Artificial Sequence
  Synthetic
guccugggaaaaugaagggaca

SEQ ID NO: 461235 - RNA, 23 nt, Artificial Sequence
  Synthetic
aguccugggaaaaugaagggaca

SEQ ID NO: 461236 - RNA, 24 nt, Artificial Sequence
  Synthetic
gaguccugggaaaaugaagggaca

SEQ ID NO: 461237 - RNA, 18 nt, Artificial Sequence
  Synthetic
ucugaaaacacagggaca

SEQ ID NO: 461238 - RNA, 19 nt, Artificial Sequence
  Synthetic
cucugaaaacacagggaca

SEQ ID NO: 461239 - RNA, 20 nt, Artificial Sequence
  Synthetic
ccucugaaaacacagggaca

SEQ ID NO: 461240 - RNA, 21 nt, Artificial Sequence
  Synthetic
accucugaaaacacagggaca

SEQ ID NO: 461241 - RNA, 22 nt, Artificial Sequence
  Synthetic
uaccucugaaaacacagggaca

SEQ ID NO: 461242 - RNA, 23 nt, Artificial Sequence
  Synthetic
uuaccucugaaaacacagggaca

SEQ ID NO: 461243 - RNA, 24 nt, Artificial Sequence
  Synthetic
uuuaccucugaaaacacagggaca

SEQ ID NO: 461244 - RNA, 18 nt, Artificial Sequence
  Synthetic
uguuagaagccagggaca

SEQ ID NO: 461245 - RNA, 19 nt, Artificial Sequence
  Synthetic
uuguuagaagccagggaca

SEQ ID NO: 461246 - RNA, 20 nt, Artificial Sequence
  Synthetic
guuguuagaagccagggaca

SEQ ID NO: 461247 - RNA, 21 nt, Artificial Sequence
  Synthetic
aguuguuagaagccagggaca

SEQ ID NO: 461248 - RNA, 22 nt, Artificial Sequence
  Synthetic
aaguuguuagaagccagggaca

SEQ ID NO: 461249 - RNA, 23 nt, Artificial Sequence
  Synthetic
gaaguuguuagaagccagggaca

SEQ ID NO: 461250 - RNA, 24 nt, Artificial Sequence
  Synthetic
ggaaguuguuagaagccagggaca

SEQ ID NO: 461251 - RNA, 18 nt, Artificial Sequence
  Synthetic
gggaagaaacgagggaca

SEQ ID NO: 461252 - RNA, 19 nt, Artificial Sequence
  Synthetic
ugggaagaaacgagggaca

SEQ ID NO: 461253 - RNA, 20 nt, Artificial Sequence
  Synthetic
augggaagaaacgagggaca

SEQ ID NO: 461254 - RNA, 21 nt, Artificial Sequence
  Synthetic
caugggaagaaacgagggaca

SEQ ID NO: 461255 - RNA, 22 nt, Artificial Sequence
  Synthetic
acaugggaagaaacgagggaca

SEQ ID NO: 461256 - RNA, 23 nt, Artificial Sequence
  Synthetic
aacaugggaagaaacgagggaca

SEQ ID NO: 461257 - RNA, 24 nt, Artificial Sequence
  Synthetic
gaacaugggaagaaacgagggaca

SEQ ID NO: 461258 - RNA, 18 nt, Artificial Sequence
  Synthetic
gugaggggcaaggggaca

SEQ ID NO: 461259 - RNA, 19 nt, Artificial Sequence
  Synthetic
ggugaggggcaaggggaca

SEQ ID NO: 461260 - RNA, 20 nt, Artificial Sequence
  Synthetic
gggugaggggcaaggggaca

SEQ ID NO: 461261 - RNA, 21 nt, Artificial Sequence
  Synthetic
ggggugaggggcaaggggaca

SEQ ID NO: 461262 - RNA, 22 nt, Artificial Sequence
  Synthetic
aggggugaggggcaaggggaca

SEQ ID NO: 461263 - RNA, 23 nt, Artificial Sequence
  Synthetic
aaggggugaggggcaaggggaca

SEQ ID NO: 461264 - RNA, 24 nt, Artificial Sequence
  Synthetic
caaggggugaggggcaaggggaca

SEQ ID NO: 461265 - RNA, 18 nt, Artificial Sequence
  Synthetic
ugagaguauaaggggaca

SEQ ID NO: 461266 - RNA, 19 nt, Artificial Sequence
  Synthetic
uugagaguauaaggggaca

SEQ ID NO: 461267 - RNA, 20 nt, Artificial Sequence
  Synthetic
uuugagaguauaaggggaca

SEQ ID NO: 461268 - RNA, 21 nt, Artificial Sequence
  Synthetic
auuugagaguauaaggggaca

SEQ ID NO: 461269 - RNA, 22 nt, Artificial Sequence
  Synthetic
cauuugagaguauaaggggaca

SEQ ID NO: 461270 - RNA, 23 nt, Artificial Sequence
  Synthetic
ccauuugagaguauaaggggaca

SEQ ID NO: 461271 - RNA, 24 nt, Artificial Sequence
  Synthetic
cccauuugagaguauaaggggaca

SEQ ID NO: 461272 - RNA, 18 nt, Artificial Sequence
  Synthetic
gaguagggagaggggaca

SEQ ID NO: 461273 - RNA, 19 nt, Artificial Sequence
  Synthetic
ggaguagggagaggggaca

SEQ ID NO: 461274 - RNA, 20 nt, Artificial Sequence
  Synthetic
aggaguagggagaggggaca

SEQ ID NO: 461275 - RNA, 21 nt, Artificial Sequence
  Synthetic
uaggaguagggagaggggaca

SEQ ID NO: 461276 - RNA, 22 nt, Artificial Sequence
  Synthetic
auaggaguagggagaggggaca

SEQ ID NO: 461277 - RNA, 23 nt, Artificial Sequence
  Synthetic
aauaggaguagggagaggggaca

SEQ ID NO: 461278 - RNA, 24 nt, Artificial Sequence
  Synthetic
aaauaggaguagggagaggggaca

SEQ ID NO: 461279 - RNA, 18 nt, Artificial Sequence
  Synthetic
uuguuugcaaaugggaca

SEQ ID NO: 461280 - RNA, 19 nt, Artificial Sequence
  Synthetic
auuguuugcaaaugggaca

SEQ ID NO: 461281 - RNA, 20 nt, Artificial Sequence
  Synthetic
aauuguuugcaaaugggaca

SEQ ID NO: 461282 - RNA, 21 nt, Artificial Sequence
  Synthetic
aaauuguuugcaaaugggaca

SEQ ID NO: 461283 - RNA, 22 nt, Artificial Sequence
  Synthetic
uaaauuguuugcaaaugggaca

SEQ ID NO: 461284 - RNA, 23 nt, Artificial Sequence
  Synthetic
uuaaauuguuugcaaaugggaca

SEQ ID NO: 461285 - RNA, 24 nt, Artificial Sequence
  Synthetic
cuuaaauuguuugcaaaugggaca

SEQ ID NO: 461286 - RNA, 18 nt, Artificial Sequence
  Synthetic
cuguucauuccugggaca

SEQ ID NO: 461287 - RNA, 19 nt, Artificial Sequence
  Synthetic
acuguucauuccugggaca

SEQ ID NO: 461288 - RNA, 20 nt, Artificial Sequence
  Synthetic
cacuguucauuccugggaca

SEQ ID NO: 461289 - RNA, 21 nt, Artificial Sequence
  Synthetic
ccacuguucauuccugggaca

SEQ ID NO: 461290 - RNA, 22 nt, Artificial Sequence
  Synthetic
uccacuguucauuccugggaca

SEQ ID NO: 461291 - RNA, 23 nt, Artificial Sequence
  Synthetic
auccacuguucauuccugggaca

SEQ ID NO: 461292 - RNA, 24 nt, Artificial Sequence
  Synthetic
cauccacuguucauuccugggaca

SEQ ID NO: 461293 - RNA, 18 nt, Artificial Sequence
  Synthetic
gucauugauaaauggaca

SEQ ID NO: 461294 - RNA, 19 nt, Artificial Sequence
  Synthetic
agucauugauaaauggaca

SEQ ID NO: 461295 - RNA, 20 nt, Artificial Sequence
  Synthetic
aagucauugauaaauggaca

SEQ ID NO: 461296 - RNA, 21 nt, Artificial Sequence
  Synthetic
uaagucauugauaaauggaca

SEQ ID NO: 461297 - RNA, 22 nt, Artificial Sequence
  Synthetic
uuaagucauugauaaauggaca

SEQ ID NO: 461298 - RNA, 23 nt, Artificial Sequence
  Synthetic
guuaagucauugauaaauggaca

SEQ ID NO: 461299 - RNA, 24 nt, Artificial Sequence
  Synthetic
gguuaagucauugauaaauggaca

SEQ ID NO: 461300 - RNA, 18 nt, Artificial Sequence
  Synthetic
accugauuggaauggaca

SEQ ID NO: 461301 - RNA, 19 nt, Artificial Sequence
  Synthetic
aaccugauuggaauggaca

SEQ ID NO: 461302 - RNA, 20 nt, Artificial Sequence
  Synthetic
caaccugauuggaauggaca

SEQ ID NO: 461303 - RNA, 21 nt, Artificial Sequence
  Synthetic
acaaccugauuggaauggaca

SEQ ID NO: 461304 - RNA, 22 nt, Artificial Sequence
  Synthetic
cacaaccugauuggaauggaca

SEQ ID NO: 461305 - RNA, 23 nt, Artificial Sequence
  Synthetic
gcacaaccugauuggaauggaca

SEQ ID NO: 461306 - RNA, 24 nt, Artificial Sequence
  Synthetic
ugcacaaccugauuggaauggaca

SEQ ID NO: 461307 - RNA, 18 nt, Artificial Sequence
  Synthetic
ucaagagaugaauggaca

SEQ ID NO: 461308 - RNA, 19 nt, Artificial Sequence
  Synthetic
aucaagagaugaauggaca

SEQ ID NO: 461309 - RNA, 20 nt, Artificial Sequence
  Synthetic
caucaagagaugaauggaca

SEQ ID NO: 461310 - RNA, 21 nt, Artificial Sequence
  Synthetic
ccaucaagagaugaauggaca

SEQ ID NO: 461311 - RNA, 22 nt, Artificial Sequence
  Synthetic
uccaucaagagaugaauggaca

SEQ ID NO: 461312 - RNA, 23 nt, Artificial Sequence
  Synthetic
guccaucaagagaugaauggaca

SEQ ID NO: 461313 - RNA, 24 nt, Artificial Sequence
  Synthetic
cguccaucaagagaugaauggaca

SEQ ID NO: 461314 - RNA, 18 nt, Artificial Sequence
  Synthetic
ucaguagaugaauggaca

SEQ ID NO: 461315 - RNA, 19 nt, Artificial Sequence
  Synthetic
aucaguagaugaauggaca

SEQ ID NO: 461316 - RNA, 20 nt, Artificial Sequence
  Synthetic
caucaguagaugaauggaca

SEQ ID NO: 461317 - RNA, 21 nt, Artificial Sequence
  Synthetic
ccaucaguagaugaauggaca

SEQ ID NO: 461318 - RNA, 22 nt, Artificial Sequence
  Synthetic
uccaucaguagaugaauggaca

SEQ ID NO: 461319 - RNA, 23 nt, Artificial Sequence
  Synthetic
guccaucaguagaugaauggaca

SEQ ID NO: 461320 - RNA, 24 nt, Artificial Sequence
  Synthetic
uguccaucaguagaugaauggaca

SEQ ID NO: 461321 - RNA, 18 nt, Artificial Sequence
  Synthetic
uacacuccaacauggaca

SEQ ID NO: 461322 - RNA, 19 nt, Artificial Sequence
  Synthetic
uuacacuccaacauggaca

SEQ ID NO: 461323 - RNA, 20 nt, Artificial Sequence
  Synthetic
auuacacuccaacauggaca

SEQ ID NO: 461324 - RNA, 21 nt, Artificial Sequence
  Synthetic
cauuacacuccaacauggaca

SEQ ID NO: 461325 - RNA, 22 nt, Artificial Sequence
  Synthetic
ccauuacacuccaacauggaca

SEQ ID NO: 461326 - RNA, 23 nt, Artificial Sequence
  Synthetic
gccauuacacuccaacauggaca

SEQ ID NO: 461327 - RNA, 24 nt, Artificial Sequence
  Synthetic
ugccauuacacuccaacauggaca

SEQ ID NO: 461328 - RNA, 21 nt, Artificial Sequence
  Synthetic
aacaaugagaacacauggaca

SEQ ID NO: 461329 - RNA, 22 nt, Artificial Sequence
  Synthetic
gaacaaugagaacacauggaca

SEQ ID NO: 461330 - RNA, 23 nt, Artificial Sequence
  Synthetic
ggaacaaugagaacacauggaca

SEQ ID NO: 461331 - RNA, 24 nt, Artificial Sequence
  Synthetic
uggaacaaugagaacacauggaca

SEQ ID NO: 461332 - RNA, 18 nt, Artificial Sequence
  Synthetic
gaugagaacacauggaca

SEQ ID NO: 461333 - RNA, 19 nt, Artificial Sequence
  Synthetic
ugaugagaacacauggaca

SEQ ID NO: 461334 - RNA, 20 nt, Artificial Sequence
  Synthetic
augaugagaacacauggaca

SEQ ID NO: 461335 - RNA, 21 nt, Artificial Sequence
  Synthetic
aaugaugagaacacauggaca

SEQ ID NO: 461336 - RNA, 22 nt, Artificial Sequence
  Synthetic
aaaugaugagaacacauggaca

SEQ ID NO: 461337 - RNA, 23 nt, Artificial Sequence
  Synthetic
uaaaugaugagaacacauggaca

SEQ ID NO: 461338 - RNA, 24 nt, Artificial Sequence
  Synthetic
cuaaaugaugagaacacauggaca

SEQ ID NO: 461339 - RNA, 18 nt, Artificial Sequence
  Synthetic
agugagaacacauggaca

SEQ ID NO: 461340 - RNA, 19 nt, Artificial Sequence
  Synthetic
cagugagaacacauggaca

SEQ ID NO: 461341 - RNA, 20 nt, Artificial Sequence
  Synthetic
acagugagaacacauggaca

SEQ ID NO: 461342 - RNA, 21 nt, Artificial Sequence
  Synthetic
aacagugagaacacauggaca

SEQ ID NO: 461343 - RNA, 22 nt, Artificial Sequence
  Synthetic
gaacagugagaacacauggaca

SEQ ID NO: 461344 - RNA, 23 nt, Artificial Sequence
  Synthetic
ggaacagugagaacacauggaca

SEQ ID NO: 461345 - RNA, 24 nt, Artificial Sequence
  Synthetic
uggaacagugagaacacauggaca

SEQ ID NO: 461346 - RNA, 18 nt, Artificial Sequence
  Synthetic
caauggaacucauggaca

SEQ ID NO: 461347 - RNA, 19 nt, Artificial Sequence
  Synthetic
acaauggaacucauggaca

SEQ ID NO: 461348 - RNA, 20 nt, Artificial Sequence
  Synthetic
aacaauggaacucauggaca

SEQ ID NO: 461349 - RNA, 21 nt, Artificial Sequence
  Synthetic
aaacaauggaacucauggaca

SEQ ID NO: 461350 - RNA, 22 nt, Artificial Sequence
  Synthetic
aaaacaauggaacucauggaca

SEQ ID NO: 461351 - RNA, 23 nt, Artificial Sequence
  Synthetic
caaaacaauggaacucauggaca

SEQ ID NO: 461352 - RNA, 24 nt, Artificial Sequence
  Synthetic
ucaaaacaauggaacucauggaca

SEQ ID NO: 461353 - RNA, 18 nt, Artificial Sequence
  Synthetic
caauugaacucauggaca

SEQ ID NO: 461354 - RNA, 19 nt, Artificial Sequence
  Synthetic
acaauugaacucauggaca

SEQ ID NO: 461355 - RNA, 20 nt, Artificial Sequence
  Synthetic
aacaauugaacucauggaca

SEQ ID NO: 461356 - RNA, 21 nt, Artificial Sequence
  Synthetic
aaacaauugaacucauggaca

SEQ ID NO: 461357 - RNA, 22 nt, Artificial Sequence
  Synthetic
aaaacaauugaacucauggaca

SEQ ID NO: 461358 - RNA, 23 nt, Artificial Sequence
  Synthetic
caaaacaauugaacucauggaca

SEQ ID NO: 461359 - RNA, 24 nt, Artificial Sequence
  Synthetic
ucaaaacaauugaacucauggaca

SEQ ID NO: 461360 - RNA, 18 nt, Artificial Sequence
  Synthetic
aaugaaaacauauggaca

SEQ ID NO: 461361 - RNA, 19 nt, Artificial Sequence
  Synthetic
caaugaaaacauauggaca

SEQ ID NO: 461362 - RNA, 20 nt, Artificial Sequence
  Synthetic
acaaugaaaacauauggaca

SEQ ID NO: 461363 - RNA, 21 nt, Artificial Sequence
  Synthetic
aacaaugaaaacauauggaca

SEQ ID NO: 461364 - RNA, 22 nt, Artificial Sequence
  Synthetic
aaacaaugaaaacauauggaca

SEQ ID NO: 461365 - RNA, 23 nt, Artificial Sequence
  Synthetic
uaaacaaugaaaacauauggaca

SEQ ID NO: 461366 - RNA, 24 nt, Artificial Sequence
  Synthetic
auaaacaaugaaaacauauggaca

SEQ ID NO: 461367 - RNA, 18 nt, Artificial Sequence
  Synthetic
aacaugccaugcuggaca

SEQ ID NO: 461368 - RNA, 19 nt, Artificial Sequence
  Synthetic
aaacaugccaugcuggaca

SEQ ID NO: 461369 - RNA, 20 nt, Artificial Sequence
  Synthetic
uaaacaugccaugcuggaca

SEQ ID NO: 461370 - RNA, 21 nt, Artificial Sequence
  Synthetic
uuaaacaugccaugcuggaca

SEQ ID NO: 461371 - RNA, 22 nt, Artificial Sequence
  Synthetic
cuuaaacaugccaugcuggaca

SEQ ID NO: 461372 - RNA, 23 nt, Artificial Sequence
  Synthetic
ucuuaaacaugccaugcuggaca

SEQ ID NO: 461373 - RNA, 24 nt, Artificial Sequence
  Synthetic
uucuuaaacaugccaugcuggaca

SEQ ID NO: 461374 - RNA, 18 nt, Artificial Sequence
  Synthetic
augagaaggcaguggaca

SEQ ID NO: 461375 - RNA, 19 nt, Artificial Sequence
  Synthetic
caugagaaggcaguggaca

SEQ ID NO: 461376 - RNA, 20 nt, Artificial Sequence
  Synthetic
ccaugagaaggcaguggaca

SEQ ID NO: 461377 - RNA, 21 nt, Artificial Sequence
  Synthetic
uccaugagaaggcaguggaca

SEQ ID NO: 461378 - RNA, 22 nt, Artificial Sequence
  Synthetic
auccaugagaaggcaguggaca

SEQ ID NO: 461379 - RNA, 23 nt, Artificial Sequence
  Synthetic
uauccaugagaaggcaguggaca

SEQ ID NO: 461380 - RNA, 24 nt, Artificial Sequence
  Synthetic
auauccaugagaaggcaguggaca

SEQ ID NO: 461381 - RNA, 18 nt, Artificial Sequence
  Synthetic
gaggggcugcaguggaca

SEQ ID NO: 461382 - RNA, 19 nt, Artificial Sequence
  Synthetic
ggaggggcugcaguggaca

SEQ ID NO: 461383 - RNA, 20 nt, Artificial Sequence
  Synthetic
gggaggggcugcaguggaca

SEQ ID NO: 461384 - RNA, 21 nt, Artificial Sequence
  Synthetic
agggaggggcugcaguggaca

SEQ ID NO: 461385 - RNA, 22 nt, Artificial Sequence
  Synthetic
aagggaggggcugcaguggaca

SEQ ID NO: 461386 - RNA, 23 nt, Artificial Sequence
  Synthetic
aaagggaggggcugcaguggaca

SEQ ID NO: 461387 - RNA, 24 nt, Artificial Sequence
  Synthetic
uaaagggaggggcugcaguggaca

SEQ ID NO: 461388 - RNA, 18 nt, Artificial Sequence
  Synthetic
uaaagaaaagaguggaca

SEQ ID NO: 461389 - RNA, 19 nt, Artificial Sequence
  Synthetic
auaaagaaaagaguggaca

SEQ ID NO: 461390 - RNA, 20 nt, Artificial Sequence
  Synthetic
aauaaagaaaagaguggaca

SEQ ID NO: 461391 - RNA, 21 nt, Artificial Sequence
  Synthetic
uaauaaagaaaagaguggaca

SEQ ID NO: 461392 - RNA, 22 nt, Artificial Sequence
  Synthetic
auaauaaagaaaagaguggaca

SEQ ID NO: 461393 - RNA, 23 nt, Artificial Sequence
  Synthetic
aauaauaaagaaaagaguggaca

SEQ ID NO: 461394 - RNA, 24 nt, Artificial Sequence
  Synthetic
uaauaauaaagaaaagaguggaca

SEQ ID NO: 461395 - RNA, 18 nt, Artificial Sequence
  Synthetic
aagaaaacaauguggaca

SEQ ID NO: 461396 - RNA, 19 nt, Artificial Sequence
  Synthetic
aaagaaaacaauguggaca

SEQ ID NO: 461397 - RNA, 20 nt, Artificial Sequence
  Synthetic
gaaagaaaacaauguggaca

SEQ ID NO: 461398 - RNA, 21 nt, Artificial Sequence
  Synthetic
agaaagaaaacaauguggaca

SEQ ID NO: 461399 - RNA, 22 nt, Artificial Sequence
  Synthetic
aagaaagaaaacaauguggaca

SEQ ID NO: 461400 - RNA, 23 nt, Artificial Sequence
  Synthetic
aaagaaagaaaacaauguggaca

SEQ ID NO: 461401 - RNA, 24 nt, Artificial Sequence
  Synthetic
aaaagaaagaaaacaauguggaca

SEQ ID NO: 461402 - RNA, 18 nt, Artificial Sequence
  Synthetic
agaaauucuuauuggaca

SEQ ID NO: 461403 - RNA, 19 nt, Artificial Sequence
  Synthetic
cagaaauucuuauuggaca

SEQ ID NO: 461404 - RNA, 20 nt, Artificial Sequence
  Synthetic
ucagaaauucuuauuggaca

SEQ ID NO: 461405 - RNA, 21 nt, Artificial Sequence
  Synthetic
uucagaaauucuuauuggaca

SEQ ID NO: 461406 - RNA, 22 nt, Artificial Sequence
  Synthetic
uuucagaaauucuuauuggaca

SEQ ID NO: 461407 - RNA, 23 nt, Artificial Sequence
  Synthetic
auuucagaaauucuuauuggaca

SEQ ID NO: 461408 - RNA, 24 nt, Artificial Sequence
  Synthetic
cauuucagaaauucuuauuggaca

SEQ ID NO: 461409 - RNA, 18 nt, Artificial Sequence
  Synthetic
uucugcaguccuuggaca

SEQ ID NO: 461410 - RNA, 19 nt, Artificial Sequence
  Synthetic
auucugcaguccuuggaca

SEQ ID NO: 461411 - RNA, 20 nt, Artificial Sequence
  Synthetic
cauucugcaguccuuggaca

SEQ ID NO: 461412 - RNA, 21 nt, Artificial Sequence
  Synthetic
ccauucugcaguccuuggaca

SEQ ID NO: 461413 - RNA, 22 nt, Artificial Sequence
  Synthetic
uccauucugcaguccuuggaca

SEQ ID NO: 461414 - RNA, 23 nt, Artificial Sequence
  Synthetic
auccauucugcaguccuuggaca

SEQ ID NO: 461415 - RNA, 24 nt, Artificial Sequence
  Synthetic
cauccauucugcaguccuuggaca

SEQ ID NO: 461416 - RNA, 18 nt, Artificial Sequence
  Synthetic
ccauuagguucuuggaca

SEQ ID NO: 461417 - RNA, 19 nt, Artificial Sequence
  Synthetic
uccauuagguucuuggaca

SEQ ID NO: 461418 - RNA, 20 nt, Artificial Sequence
  Synthetic
uuccauuagguucuuggaca

SEQ ID NO: 461419 - RNA, 21 nt, Artificial Sequence
  Synthetic
uuuccauuagguucuuggaca

SEQ ID NO: 461420 - RNA, 22 nt, Artificial Sequence
  Synthetic
uuuuccauuagguucuuggaca

SEQ ID NO: 461421 - RNA, 23 nt, Artificial Sequence
  Synthetic
auuuuccauuagguucuuggaca

SEQ ID NO: 461422 - RNA, 24 nt, Artificial Sequence
  Synthetic
aauuuuccauuagguucuuggaca

SEQ ID NO: 461423 - RNA, 18 nt, Artificial Sequence
  Synthetic
cuacaaacaguuuggaca

SEQ ID NO: 461424 - RNA, 19 nt, Artificial Sequence
  Synthetic
acuacaaacaguuuggaca

SEQ ID NO: 461425 - RNA, 20 nt, Artificial Sequence
  Synthetic
cacuacaaacaguuuggaca

SEQ ID NO: 461426 - RNA, 21 nt, Artificial Sequence
  Synthetic
ccacuacaaacaguuuggaca

SEQ ID NO: 461427 - RNA, 22 nt, Artificial Sequence
  Synthetic
accacuacaaacaguuuggaca

SEQ ID NO: 461428 - RNA, 23 nt, Artificial Sequence
  Synthetic
uaccacuacaaacaguuuggaca

SEQ ID NO: 461429 - RNA, 24 nt, Artificial Sequence
  Synthetic
uuaccacuacaaacaguuuggaca

SEQ ID NO: 461430 - RNA, 18 nt, Artificial Sequence
  Synthetic
ugauucacaguuuggaca

SEQ ID NO: 461431 - RNA, 19 nt, Artificial Sequence
  Synthetic
augauucacaguuuggaca

SEQ ID NO: 461432 - RNA, 20 nt, Artificial Sequence
  Synthetic
uaugauucacaguuuggaca

SEQ ID NO: 461433 - RNA, 21 nt, Artificial Sequence
  Synthetic
uuaugauucacaguuuggaca

SEQ ID NO: 461434 - RNA, 22 nt, Artificial Sequence
  Synthetic
uuuaugauucacaguuuggaca

SEQ ID NO: 461435 - RNA, 23 nt, Artificial Sequence
  Synthetic
guuuaugauucacaguuuggaca

SEQ ID NO: 461436 - RNA, 24 nt, Artificial Sequence
  Synthetic
aguuuaugauucacaguuuggaca

SEQ ID NO: 461437 - RNA, 18 nt, Artificial Sequence
  Synthetic
gacuuauugguuuggaca

SEQ ID NO: 461438 - RNA, 19 nt, Artificial Sequence
  Synthetic
agacuuauugguuuggaca

SEQ ID NO: 461439 - RNA, 20 nt, Artificial Sequence
  Synthetic
cagacuuauugguuuggaca

SEQ ID NO: 461440 - RNA, 21 nt, Artificial Sequence
  Synthetic
ucagacuuauugguuuggaca

SEQ ID NO: 461441 - RNA, 22 nt, Artificial Sequence
  Synthetic
aucagacuuauugguuuggaca

SEQ ID NO: 461442 - RNA, 23 nt, Artificial Sequence
  Synthetic
aaucagacuuauugguuuggaca

SEQ ID NO: 461443 - RNA, 24 nt, Artificial Sequence
  Synthetic
uaaucagacuuauugguuuggaca

SEQ ID NO: 461444 - RNA, 18 nt, Artificial Sequence
  Synthetic
ccaaguuacaaaaugaca

SEQ ID NO: 461445 - RNA, 19 nt, Artificial Sequence
  Synthetic
uccaaguuacaaaaugaca

SEQ ID NO: 461446 - RNA, 20 nt, Artificial Sequence
  Synthetic
uuccaaguuacaaaaugaca

SEQ ID NO: 461447 - RNA, 21 nt, Artificial Sequence
  Synthetic
uuuccaaguuacaaaaugaca

SEQ ID NO: 461448 - RNA, 22 nt, Artificial Sequence
  Synthetic
auuuccaaguuacaaaaugaca

SEQ ID NO: 461449 - RNA, 23 nt, Artificial Sequence
  Synthetic
aauuuccaaguuacaaaaugaca

SEQ ID NO: 461450 - RNA, 24 nt, Artificial Sequence
  Synthetic
gaauuuccaaguuacaaaaugaca

SEQ ID NO: 461451 - RNA, 18 nt, Artificial Sequence
  Synthetic
ucuuacaguaaaaugaca

SEQ ID NO: 461452 - RNA, 19 nt, Artificial Sequence
  Synthetic
uucuuacaguaaaaugaca

SEQ ID NO: 461453 - RNA, 20 nt, Artificial Sequence
  Synthetic
uuucuuacaguaaaaugaca

SEQ ID NO: 461454 - RNA, 21 nt, Artificial Sequence
  Synthetic
uuuucuuacaguaaaaugaca

SEQ ID NO: 461455 - RNA, 22 nt, Artificial Sequence
  Synthetic
uuuuucuuacaguaaaaugaca

SEQ ID NO: 461456 - RNA, 23 nt, Artificial Sequence
  Synthetic
auuuuucuuacaguaaaaugaca

SEQ ID NO: 461457 - RNA, 24 nt, Artificial Sequence
  Synthetic
aauuuuucuuacaguaaaaugaca

SEQ ID NO: 461458 - RNA, 18 nt, Artificial Sequence
  Synthetic
guuuugacaagaaugaca

SEQ ID NO: 461459 - RNA, 19 nt, Artificial Sequence
  Synthetic
uguuuugacaagaaugaca

SEQ ID NO: 461460 - RNA, 20 nt, Artificial Sequence
  Synthetic
cuguuuugacaagaaugaca

SEQ ID NO: 461461 - RNA, 21 nt, Artificial Sequence
  Synthetic
ccuguuuugacaagaaugaca

SEQ ID NO: 461462 - RNA, 22 nt, Artificial Sequence
  Synthetic
accuguuuugacaagaaugaca

SEQ ID NO: 461463 - RNA, 23 nt, Artificial Sequence
  Synthetic
aaccuguuuugacaagaaugaca

SEQ ID NO: 461464 - RNA, 24 nt, Artificial Sequence
  Synthetic
aaaccuguuuugacaagaaugaca

SEQ ID NO: 461465 - RNA, 18 nt, Artificial Sequence
  Synthetic
uucuauagcugaaugaca

SEQ ID NO: 461466 - RNA, 19 nt, Artificial Sequence
  Synthetic
uuucuauagcugaaugaca

SEQ ID NO: 461467 - RNA, 20 nt, Artificial Sequence
  Synthetic
auuucuauagcugaaugaca

SEQ ID NO: 461468 - RNA, 21 nt, Artificial Sequence
  Synthetic
gauuucuauagcugaaugaca

SEQ ID NO: 461469 - RNA, 22 nt, Artificial Sequence
  Synthetic
agauuucuauagcugaaugaca

SEQ ID NO: 461470 - RNA, 23 nt, Artificial Sequence
  Synthetic
aagauuucuauagcugaaugaca

SEQ ID NO: 461471 - RNA, 24 nt, Artificial Sequence
  Synthetic
gaagauuucuauagcugaaugaca

SEQ ID NO: 461472 - RNA, 18 nt, Artificial Sequence
  Synthetic
uguguauugcacaugaca

SEQ ID NO: 461473 - RNA, 19 nt, Artificial Sequence
  Synthetic
uuguguauugcacaugaca

SEQ ID NO: 461474 - RNA, 20 nt, Artificial Sequence
  Synthetic
uuuguguauugcacaugaca

SEQ ID NO: 461475 - RNA, 21 nt, Artificial Sequence
  Synthetic
auuuguguauugcacaugaca

SEQ ID NO: 461476 - RNA, 22 nt, Artificial Sequence
  Synthetic
cauuuguguauugcacaugaca

SEQ ID NO: 461477 - RNA, 23 nt, Artificial Sequence
  Synthetic
ucauuuguguauugcacaugaca

SEQ ID NO: 461478 - RNA, 24 nt, Artificial Sequence
  Synthetic
gucauuuguguauugcacaugaca

SEQ ID NO: 461479 - RNA, 18 nt, Artificial Sequence
  Synthetic
auagguaaugacaugaca

SEQ ID NO: 461480 - RNA, 19 nt, Artificial Sequence
  Synthetic
cauagguaaugacaugaca

SEQ ID NO: 461481 - RNA, 20 nt, Artificial Sequence
  Synthetic
gcauagguaaugacaugaca

SEQ ID NO: 461482 - RNA, 21 nt, Artificial Sequence
  Synthetic
ggcauagguaaugacaugaca

SEQ ID NO: 461483 - RNA, 22 nt, Artificial Sequence
  Synthetic
gggcauagguaaugacaugaca

SEQ ID NO: 461484 - RNA, 23 nt, Artificial Sequence
  Synthetic
ugggcauagguaaugacaugaca

SEQ ID NO: 461485 - RNA, 24 nt, Artificial Sequence
  Synthetic
cugggcauagguaaugacaugaca

SEQ ID NO: 461486 - RNA, 18 nt, Artificial Sequence
  Synthetic
uuauuuaacuucaugaca

SEQ ID NO: 461487 - RNA, 19 nt, Artificial Sequence
  Synthetic
guuauuuaacuucaugaca

SEQ ID NO: 461488 - RNA, 20 nt, Artificial Sequence
  Synthetic
uguuauuuaacuucaugaca

SEQ ID NO: 461489 - RNA, 21 nt, Artificial Sequence
  Synthetic
auguuauuuaacuucaugaca

SEQ ID NO: 461490 - RNA, 22 nt, Artificial Sequence
  Synthetic
cauguuauuuaacuucaugaca

SEQ ID NO: 461491 - RNA, 23 nt, Artificial Sequence
  Synthetic
acauguuauuuaacuucaugaca

SEQ ID NO: 461492 - RNA, 24 nt, Artificial Sequence
  Synthetic
aacauguuauuuaacuucaugaca

SEQ ID NO: 461493 - RNA, 18 nt, Artificial Sequence
  Synthetic
gaagucagaaagaugaca

SEQ ID NO: 461494 - RNA, 19 nt, Artificial Sequence
  Synthetic
ugaagucagaaagaugaca

SEQ ID NO: 461495 - RNA, 20 nt, Artificial Sequence
  Synthetic
cugaagucagaaagaugaca

SEQ ID NO: 461496 - RNA, 21 nt, Artificial Sequence
  Synthetic
ccugaagucagaaagaugaca

SEQ ID NO: 461497 - RNA, 22 nt, Artificial Sequence
  Synthetic
cccugaagucagaaagaugaca

SEQ ID NO: 461498 - RNA, 23 nt, Artificial Sequence
  Synthetic
gcccugaagucagaaagaugaca

SEQ ID NO: 461499 - RNA, 24 nt, Artificial Sequence
  Synthetic
cgcccugaagucagaaagaugaca

SEQ ID NO: 461500 - RNA, 18 nt, Artificial Sequence
  Synthetic
guaauuccccagaugaca

SEQ ID NO: 461501 - RNA, 19 nt, Artificial Sequence
  Synthetic
aguaauuccccagaugaca

SEQ ID NO: 461502 - RNA, 20 nt, Artificial Sequence
  Synthetic
aaguaauuccccagaugaca

SEQ ID NO: 461503 - RNA, 21 nt, Artificial Sequence
  Synthetic
uaaguaauuccccagaugaca

SEQ ID NO: 461504 - RNA, 22 nt, Artificial Sequence
  Synthetic
uuaaguaauuccccagaugaca

SEQ ID NO: 461505 - RNA, 23 nt, Artificial Sequence
  Synthetic
uuuaaguaauuccccagaugaca

SEQ ID NO: 461506 - RNA, 24 nt, Artificial Sequence
  Synthetic
auuuaaguaauuccccagaugaca

SEQ ID NO: 461507 - RNA, 18 nt, Artificial Sequence
  Synthetic
aaaaaugaagagaugaca

SEQ ID NO: 461508 - RNA, 19 nt, Artificial Sequence
  Synthetic
uaaaaaugaagagaugaca

SEQ ID NO: 461509 - RNA, 20 nt, Artificial Sequence
  Synthetic
auaaaaaugaagagaugaca

SEQ ID NO: 461510 - RNA, 21 nt, Artificial Sequence
  Synthetic
aauaaaaaugaagagaugaca

SEQ ID NO: 461511 - RNA, 22 nt, Artificial Sequence
  Synthetic
aaauaaaaaugaagagaugaca

SEQ ID NO: 461512 - RNA, 23 nt, Artificial Sequence
  Synthetic
gaaauaaaaaugaagagaugaca

SEQ ID NO: 461513 - RNA, 24 nt, Artificial Sequence
  Synthetic
agaaauaaaaaugaagagaugaca

SEQ ID NO: 461514 - RNA, 18 nt, Artificial Sequence
  Synthetic
aguagccuagagaugaca

SEQ ID NO: 461515 - RNA, 19 nt, Artificial Sequence
  Synthetic
aaguagccuagagaugaca

SEQ ID NO: 461516 - RNA, 20 nt, Artificial Sequence
  Synthetic
gaaguagccuagagaugaca

SEQ ID NO: 461517 - RNA, 21 nt, Artificial Sequence
  Synthetic
ugaaguagccuagagaugaca

SEQ ID NO: 461518 - RNA, 22 nt, Artificial Sequence
  Synthetic
augaaguagccuagagaugaca

SEQ ID NO: 461519 - RNA, 23 nt, Artificial Sequence
  Synthetic
caugaaguagccuagagaugaca

SEQ ID NO: 461520 - RNA, 24 nt, Artificial Sequence
  Synthetic
acaugaaguagccuagagaugaca

SEQ ID NO: 461521 - RNA, 18 nt, Artificial Sequence
  Synthetic
gaugauaaauagaugaca

SEQ ID NO: 461522 - RNA, 19 nt, Artificial Sequence
  Synthetic
agaugauaaauagaugaca

SEQ ID NO: 461523 - RNA, 20 nt, Artificial Sequence
  Synthetic
uagaugauaaauagaugaca

SEQ ID NO: 461524 - RNA, 21 nt, Artificial Sequence
  Synthetic
auagaugauaaauagaugaca

SEQ ID NO: 461525 - RNA, 22 nt, Artificial Sequence
  Synthetic
uauagaugauaaauagaugaca

SEQ ID NO: 461526 - RNA, 23 nt, Artificial Sequence
  Synthetic
auauagaugauaaauagaugaca

SEQ ID NO: 461527 - RNA, 24 nt, Artificial Sequence
  Synthetic
gauauagaugauaaauagaugaca

SEQ ID NO: 461528 - RNA, 18 nt, Artificial Sequence
  Synthetic
ggauacaguaauaugaca

SEQ ID NO: 461529 - RNA, 19 nt, Artificial Sequence
  Synthetic
aggauacaguaauaugaca

SEQ ID NO: 461530 - RNA, 20 nt, Artificial Sequence
  Synthetic
aaggauacaguaauaugaca

SEQ ID NO: 461531 - RNA, 21 nt, Artificial Sequence
  Synthetic
aaaggauacaguaauaugaca

SEQ ID NO: 461532 - RNA, 22 nt, Artificial Sequence
  Synthetic
aaaaggauacaguaauaugaca

SEQ ID NO: 461533 - RNA, 23 nt, Artificial Sequence
  Synthetic
gaaaaggauacaguaauaugaca

SEQ ID NO: 461534 - RNA, 24 nt, Artificial Sequence
  Synthetic
agaaaaggauacaguaauaugaca

SEQ ID NO: 461535 - RNA, 18 nt, Artificial Sequence
  Synthetic
uaaucauaucauaugaca

SEQ ID NO: 461536 - RNA, 19 nt, Artificial Sequence
  Synthetic
auaaucauaucauaugaca

SEQ ID NO: 461537 - RNA, 20 nt, Artificial Sequence
  Synthetic
gauaaucauaucauaugaca

SEQ ID NO: 461538 - RNA, 21 nt, Artificial Sequence
  Synthetic
agauaaucauaucauaugaca

SEQ ID NO: 461539 - RNA, 22 nt, Artificial Sequence
  Synthetic
uagauaaucauaucauaugaca

SEQ ID NO: 461540 - RNA, 23 nt, Artificial Sequence
  Synthetic
auagauaaucauaucauaugaca

SEQ ID NO: 461541 - RNA, 24 nt, Artificial Sequence
  Synthetic
gauagauaaucauaucauaugaca

SEQ ID NO: 461542 - RNA, 18 nt, Artificial Sequence
  Synthetic
caaggccauuauaugaca

SEQ ID NO: 461543 - RNA, 19 nt, Artificial Sequence
  Synthetic
ccaaggccauuauaugaca

SEQ ID NO: 461544 - RNA, 20 nt, Artificial Sequence
  Synthetic
gccaaggccauuauaugaca

SEQ ID NO: 461545 - RNA, 21 nt, Artificial Sequence
  Synthetic
ggccaaggccauuauaugaca

SEQ ID NO: 461546 - RNA, 22 nt, Artificial Sequence
  Synthetic
aggccaaggccauuauaugaca

SEQ ID NO: 461547 - RNA, 23 nt, Artificial Sequence
  Synthetic
aaggccaaggccauuauaugaca

SEQ ID NO: 461548 - RNA, 24 nt, Artificial Sequence
  Synthetic
gaaggccaaggccauuauaugaca

SEQ ID NO: 461549 - RNA, 18 nt, Artificial Sequence
  Synthetic
aguggaauacuuaugaca

SEQ ID NO: 461550 - RNA, 19 nt, Artificial Sequence
  Synthetic
aaguggaauacuuaugaca

SEQ ID NO: 461551 - RNA, 20 nt, Artificial Sequence
  Synthetic
aaaguggaauacuuaugaca

SEQ ID NO: 461552 - RNA, 21 nt, Artificial Sequence
  Synthetic
uaaaguggaauacuuaugaca

SEQ ID NO: 461553 - RNA, 22 nt, Artificial Sequence
  Synthetic
cuaaaguggaauacuuaugaca

SEQ ID NO: 461554 - RNA, 23 nt, Artificial Sequence
  Synthetic
ucuaaaguggaauacuuaugaca

SEQ ID NO: 461555 - RNA, 24 nt, Artificial Sequence
  Synthetic
uucuaaaguggaauacuuaugaca

SEQ ID NO: 461556 - RNA, 18 nt, Artificial Sequence
  Synthetic
aaacccaaaguuaugaca

SEQ ID NO: 461557 - RNA, 19 nt, Artificial Sequence
  Synthetic
gaaacccaaaguuaugaca

SEQ ID NO: 461558 - RNA, 20 nt, Artificial Sequence
  Synthetic
ggaaacccaaaguuaugaca

SEQ ID NO: 461559 - RNA, 21 nt, Artificial Sequence
  Synthetic
gggaaacccaaaguuaugaca

SEQ ID NO: 461560 - RNA, 22 nt, Artificial Sequence
  Synthetic
agggaaacccaaaguuaugaca

SEQ ID NO: 461561 - RNA, 23 nt, Artificial Sequence
  Synthetic
gagggaaacccaaaguuaugaca

SEQ ID NO: 461562 - RNA, 24 nt, Artificial Sequence
  Synthetic
ggagggaaacccaaaguuaugaca

SEQ ID NO: 461563 - RNA, 18 nt, Artificial Sequence
  Synthetic
cucuuucaaaaacugaca

SEQ ID NO: 461564 - RNA, 19 nt, Artificial Sequence
  Synthetic
ucucuuucaaaaacugaca

SEQ ID NO: 461565 - RNA, 20 nt, Artificial Sequence
  Synthetic
uucucuuucaaaaacugaca

SEQ ID NO: 461566 - RNA, 21 nt, Artificial Sequence
  Synthetic
uuucucuuucaaaaacugaca

SEQ ID NO: 461567 - RNA, 22 nt, Artificial Sequence
  Synthetic
auuucucuuucaaaaacugaca

SEQ ID NO: 461568 - RNA, 23 nt, Artificial Sequence
  Synthetic
gauuucucuuucaaaaacugaca

SEQ ID NO: 461569 - RNA, 24 nt, Artificial Sequence
  Synthetic
ggauuucucuuucaaaaacugaca

SEQ ID NO: 461570 - RNA, 18 nt, Artificial Sequence
  Synthetic
aucccagaccaacugaca

SEQ ID NO: 461571 - RNA, 19 nt, Artificial Sequence
  Synthetic
caucccagaccaacugaca

SEQ ID NO: 461572 - RNA, 20 nt, Artificial Sequence
  Synthetic
ccaucccagaccaacugaca

SEQ ID NO: 461573 - RNA, 21 nt, Artificial Sequence
  Synthetic
cccaucccagaccaacugaca

SEQ ID NO: 461574 - RNA, 22 nt, Artificial Sequence
  Synthetic
ccccaucccagaccaacugaca

SEQ ID NO: 461575 - RNA, 23 nt, Artificial Sequence
  Synthetic
gccccaucccagaccaacugaca

SEQ ID NO: 461576 - RNA, 24 nt, Artificial Sequence
  Synthetic
ggccccaucccagaccaacugaca

SEQ ID NO: 461577 - RNA, 18 nt, Artificial Sequence
  Synthetic
cuuaagagguaacugaca

SEQ ID NO: 461578 - RNA, 19 nt, Artificial Sequence
  Synthetic
ucuuaagagguaacugaca

SEQ ID NO: 461579 - RNA, 20 nt, Artificial Sequence
  Synthetic
aucuuaagagguaacugaca

SEQ ID NO: 461580 - RNA, 21 nt, Artificial Sequence
  Synthetic
caucuuaagagguaacugaca

SEQ ID NO: 461581 - RNA, 22 nt, Artificial Sequence
  Synthetic
ucaucuuaagagguaacugaca

SEQ ID NO: 461582 - RNA, 23 nt, Artificial Sequence
  Synthetic
aucaucuuaagagguaacugaca

SEQ ID NO: 461583 - RNA, 24 nt, Artificial Sequence
  Synthetic
uaucaucuuaagagguaacugaca

SEQ ID NO: 461584 - RNA, 18 nt, Artificial Sequence
  Synthetic
aaguaauguucacugaca

SEQ ID NO: 461585 - RNA, 19 nt, Artificial Sequence
  Synthetic
aaaguaauguucacugaca

SEQ ID NO: 461586 - RNA, 20 nt, Artificial Sequence
  Synthetic
aaaaguaauguucacugaca

SEQ ID NO: 461587 - RNA, 21 nt, Artificial Sequence
  Synthetic
gaaaaguaauguucacugaca

SEQ ID NO: 461588 - RNA, 22 nt, Artificial Sequence
  Synthetic
ggaaaaguaauguucacugaca

SEQ ID NO: 461589 - RNA, 23 nt, Artificial Sequence
  Synthetic
uggaaaaguaauguucacugaca

SEQ ID NO: 461590 - RNA, 24 nt, Artificial Sequence
  Synthetic
uuggaaaaguaauguucacugaca

SEQ ID NO: 461591 - RNA, 18 nt, Artificial Sequence
  Synthetic
cacugaccuugacugaca

SEQ ID NO: 461592 - RNA, 19 nt, Artificial Sequence
  Synthetic
ccacugaccuugacugaca

SEQ ID NO: 461593 - RNA, 20 nt, Artificial Sequence
  Synthetic
cccacugaccuugacugaca

SEQ ID NO: 461594 - RNA, 21 nt, Artificial Sequence
  Synthetic
ucccacugaccuugacugaca

SEQ ID NO: 461595 - RNA, 22 nt, Artificial Sequence
  Synthetic
cucccacugaccuugacugaca

SEQ ID NO: 461596 - RNA, 23 nt, Artificial Sequence
  Synthetic
acucccacugaccuugacugaca

SEQ ID NO: 461597 - RNA, 24 nt, Artificial Sequence
  Synthetic
aacucccacugaccuugacugaca

SEQ ID NO: 461598 - RNA, 18 nt, Artificial Sequence
  Synthetic
aguauaagggcccugaca

SEQ ID NO: 461599 - RNA, 19 nt, Artificial Sequence
  Synthetic
aaguauaagggcccugaca

SEQ ID NO: 461600 - RNA, 20 nt, Artificial Sequence
  Synthetic
caaguauaagggcccugaca

SEQ ID NO: 461601 - RNA, 21 nt, Artificial Sequence
  Synthetic
gcaaguauaagggcccugaca

SEQ ID NO: 461602 - RNA, 22 nt, Artificial Sequence
  Synthetic
agcaaguauaagggcccugaca

SEQ ID NO: 461603 - RNA, 23 nt, Artificial Sequence
  Synthetic
aagcaaguauaagggcccugaca

SEQ ID NO: 461604 - RNA, 24 nt, Artificial Sequence
  Synthetic
aaagcaaguauaagggcccugaca

SEQ ID NO: 461605 - RNA, 18 nt, Artificial Sequence
  Synthetic
cuagcauagagccugaca

SEQ ID NO: 461606 - RNA, 19 nt, Artificial Sequence
  Synthetic
ccuagcauagagccugaca

SEQ ID NO: 461607 - RNA, 20 nt, Artificial Sequence
  Synthetic
accuagcauagagccugaca

SEQ ID NO: 461608 - RNA, 21 nt, Artificial Sequence
  Synthetic
caccuagcauagagccugaca

SEQ ID NO: 461609 - RNA, 22 nt, Artificial Sequence
  Synthetic
gcaccuagcauagagccugaca

SEQ ID NO: 461610 - RNA, 23 nt, Artificial Sequence
  Synthetic
agcaccuagcauagagccugaca

SEQ ID NO: 461611 - RNA, 24 nt, Artificial Sequence
  Synthetic
gagcaccuagcauagagccugaca

SEQ ID NO: 461612 - RNA, 18 nt, Artificial Sequence
  Synthetic
aaacugcgguagcugaca

SEQ ID NO: 461613 - RNA, 19 nt, Artificial Sequence
  Synthetic
caaacugcgguagcugaca

SEQ ID NO: 461614 - RNA, 20 nt, Artificial Sequence
  Synthetic
ucaaacugcgguagcugaca

SEQ ID NO: 461615 - RNA, 21 nt, Artificial Sequence
  Synthetic
aucaaacugcgguagcugaca

SEQ ID NO: 461616 - RNA, 22 nt, Artificial Sequence
  Synthetic
aaucaaacugcgguagcugaca

SEQ ID NO: 461617 - RNA, 23 nt, Artificial Sequence
  Synthetic
gaaucaaacugcgguagcugaca

SEQ ID NO: 461618 - RNA, 24 nt, Artificial Sequence
  Synthetic
agaaucaaacugcgguagcugaca

SEQ ID NO: 461619 - RNA, 18 nt, Artificial Sequence
  Synthetic
cuguuaauacggcugaca

SEQ ID NO: 461620 - RNA, 19 nt, Artificial Sequence
  Synthetic
ucuguuaauacggcugaca

SEQ ID NO: 461621 - RNA, 20 nt, Artificial Sequence
  Synthetic
aucuguuaauacggcugaca

SEQ ID NO: 461622 - RNA, 21 nt, Artificial Sequence
  Synthetic
caucuguuaauacggcugaca

SEQ ID NO: 461623 - RNA, 22 nt, Artificial Sequence
  Synthetic
acaucuguuaauacggcugaca

SEQ ID NO: 461624 - RNA, 23 nt, Artificial Sequence
  Synthetic
aacaucuguuaauacggcugaca

SEQ ID NO: 461625 - RNA, 24 nt, Artificial Sequence
  Synthetic
aaacaucuguuaauacggcugaca

SEQ ID NO: 461626 - RNA, 18 nt, Artificial Sequence
  Synthetic
caaucuauacaucugaca

SEQ ID NO: 461627 - RNA, 19 nt, Artificial Sequence
  Synthetic
gcaaucuauacaucugaca

SEQ ID NO: 461628 - RNA, 20 nt, Artificial Sequence
  Synthetic
ugcaaucuauacaucugaca

SEQ ID NO: 461629 - RNA, 21 nt, Artificial Sequence
  Synthetic
uugcaaucuauacaucugaca

SEQ ID NO: 461630 - RNA, 22 nt, Artificial Sequence
  Synthetic
uuugcaaucuauacaucugaca

SEQ ID NO: 461631 - RNA, 23 nt, Artificial Sequence
  Synthetic
uuuugcaaucuauacaucugaca

SEQ ID NO: 461632 - RNA, 24 nt, Artificial Sequence
  Synthetic
uuuuugcaaucuauacaucugaca

SEQ ID NO: 461633 - RNA, 18 nt, Artificial Sequence
  Synthetic
caaucuacccaucugaca

SEQ ID NO: 461634 - RNA, 19 nt, Artificial Sequence
  Synthetic
gcaaucuacccaucugaca

SEQ ID NO: 461635 - RNA, 20 nt, Artificial Sequence
  Synthetic
ugcaaucuacccaucugaca

SEQ ID NO: 461636 - RNA, 21 nt, Artificial Sequence
  Synthetic
uugcaaucuacccaucugaca

SEQ ID NO: 461637 - RNA, 22 nt, Artificial Sequence
  Synthetic
uuugcaaucuacccaucugaca

SEQ ID NO: 461638 - RNA, 23 nt, Artificial Sequence
  Synthetic
uuuugcaaucuacccaucugaca

SEQ ID NO: 461639 - RNA, 24 nt, Artificial Sequence
  Synthetic
uuuuugcaaucuacccaucugaca

SEQ ID NO: 461640 - RNA, 18 nt, Artificial Sequence
  Synthetic
caaucuauccaucugaca

SEQ ID NO: 461641 - RNA, 19 nt, Artificial Sequence
  Synthetic
gcaaucuauccaucugaca

SEQ ID NO: 461642 - RNA, 20 nt, Artificial Sequence
  Synthetic
ugcaaucuauccaucugaca

SEQ ID NO: 461643 - RNA, 21 nt, Artificial Sequence
  Synthetic
uugcaaucuauccaucugaca

SEQ ID NO: 461644 - RNA, 22 nt, Artificial Sequence
  Synthetic
uuugcaaucuauccaucugaca

SEQ ID NO: 461645 - RNA, 23 nt, Artificial Sequence
  Synthetic
uuuugcaaucuauccaucugaca

SEQ ID NO: 461646 - RNA, 24 nt, Artificial Sequence
  Synthetic
cuuuugcaaucuauccaucugaca

SEQ ID NO: 461647 - RNA, 18 nt, Artificial Sequence
  Synthetic
caaucuacucaucugaca

SEQ ID NO: 461648 - RNA, 19 nt, Artificial Sequence
  Synthetic
gcaaucuacucaucugaca

SEQ ID NO: 461649 - RNA, 20 nt, Artificial Sequence
  Synthetic
ugcaaucuacucaucugaca

SEQ ID NO: 461650 - RNA, 21 nt, Artificial Sequence
  Synthetic
uugcaaucuacucaucugaca

SEQ ID NO: 461651 - RNA, 22 nt, Artificial Sequence
  Synthetic
uuugcaaucuacucaucugaca

SEQ ID NO: 461652 - RNA, 23 nt, Artificial Sequence
  Synthetic
uuuugcaaucuacucaucugaca

SEQ ID NO: 461653 - RNA, 24 nt, Artificial Sequence
  Synthetic
uuuuugcaaucuacucaucugaca

SEQ ID NO: 461654 - RNA, 18 nt, Artificial Sequence
  Synthetic
caaugcauagaucugaca

SEQ ID NO: 461655 - RNA, 19 nt, Artificial Sequence
  Synthetic
gcaaugcauagaucugaca

SEQ ID NO: 461656 - RNA, 20 nt, Artificial Sequence
  Synthetic
cgcaaugcauagaucugaca

SEQ ID NO: 461657 - RNA, 21 nt, Artificial Sequence
  Synthetic
ucgcaaugcauagaucugaca

SEQ ID NO: 461658 - RNA, 22 nt, Artificial Sequence
  Synthetic
uucgcaaugcauagaucugaca

SEQ ID NO: 461659 - RNA, 23 nt, Artificial Sequence
  Synthetic
auucgcaaugcauagaucugaca

SEQ ID NO: 461660 - RNA, 24 nt, Artificial Sequence
  Synthetic
uauucgcaaugcauagaucugaca

SEQ ID NO: 461661 - RNA, 18 nt, Artificial Sequence
  Synthetic
agacuuccuuuucugaca

SEQ ID NO: 461662 - RNA, 19 nt, Artificial Sequence
  Synthetic
uagacuuccuuuucugaca

SEQ ID NO: 461663 - RNA, 20 nt, Artificial Sequence
  Synthetic
auagacuuccuuuucugaca

SEQ ID NO: 461664 - RNA, 21 nt, Artificial Sequence
  Synthetic
aauagacuuccuuuucugaca

SEQ ID NO: 461665 - RNA, 22 nt, Artificial Sequence
  Synthetic
aaauagacuuccuuuucugaca

SEQ ID NO: 461666 - RNA, 23 nt, Artificial Sequence
  Synthetic
aaaauagacuuccuuuucugaca

SEQ ID NO: 461667 - RNA, 24 nt, Artificial Sequence
  Synthetic
uaaaauagacuuccuuuucugaca

SEQ ID NO: 461668 - RNA, 18 nt, Artificial Sequence
  Synthetic
aaucuguucaaagugaca

SEQ ID NO: 461669 - RNA, 19 nt, Artificial Sequence
  Synthetic
aaaucuguucaaagugaca

SEQ ID NO: 461670 - RNA, 20 nt, Artificial Sequence
  Synthetic
caaaucuguucaaagugaca

SEQ ID NO: 461671 - RNA, 21 nt, Artificial Sequence
  Synthetic
ucaaaucuguucaaagugaca

SEQ ID NO: 461672 - RNA, 22 nt, Artificial Sequence
  Synthetic
gucaaaucuguucaaagugaca

SEQ ID NO: 461673 - RNA, 23 nt, Artificial Sequence
  Synthetic
ggucaaaucuguucaaagugaca

SEQ ID NO: 461674 - RNA, 24 nt, Artificial Sequence
  Synthetic
aggucaaaucuguucaaagugaca

SEQ ID NO: 461675 - RNA, 18 nt, Artificial Sequence
  Synthetic
acugugggacaagugaca

SEQ ID NO: 461676 - RNA, 19 nt, Artificial Sequence
  Synthetic
uacugugggacaagugaca

SEQ ID NO: 461677 - RNA, 20 nt, Artificial Sequence
  Synthetic
auacugugggacaagugaca

SEQ ID NO: 461678 - RNA, 21 nt, Artificial Sequence
  Synthetic
cauacugugggacaagugaca

SEQ ID NO: 461679 - RNA, 22 nt, Artificial Sequence
  Synthetic
ucauacugugggacaagugaca

SEQ ID NO: 461680 - RNA, 23 nt, Artificial Sequence
  Synthetic
aucauacugugggacaagugaca

SEQ ID NO: 461681 - RNA, 24 nt, Artificial Sequence
  Synthetic
uaucauacugugggacaagugaca

SEQ ID NO: 461682 - RNA, 18 nt, Artificial Sequence
  Synthetic
aguaaguagagagugaca

SEQ ID NO: 461683 - RNA, 19 nt, Artificial Sequence
  Synthetic
gaguaaguagagagugaca

SEQ ID NO: 461684 - RNA, 20 nt, Artificial Sequence
  Synthetic
agaguaaguagagagugaca

SEQ ID NO: 461685 - RNA, 21 nt, Artificial Sequence
  Synthetic
aagaguaaguagagagugaca

SEQ ID NO: 461686 - RNA, 22 nt, Artificial Sequence
  Synthetic
aaagaguaaguagagagugaca

SEQ ID NO: 461687 - RNA, 23 nt, Artificial Sequence
  Synthetic
aaaagaguaaguagagagugaca

SEQ ID NO: 461688 - RNA, 24 nt, Artificial Sequence
  Synthetic
aaaaagaguaaguagagagugaca

SEQ ID NO: 461689 - RNA, 18 nt, Artificial Sequence
  Synthetic
aauuaccaaaacgugaca

SEQ ID NO: 461690 - RNA, 19 nt, Artificial Sequence
  Synthetic
aaauuaccaaaacgugaca

SEQ ID NO: 461691 - RNA, 20 nt, Artificial Sequence
  Synthetic
caaauuaccaaaacgugaca

SEQ ID NO: 461692 - RNA, 21 nt, Artificial Sequence
  Synthetic
gcaaauuaccaaaacgugaca

SEQ ID NO: 461693 - RNA, 22 nt, Artificial Sequence
  Synthetic
agcaaauuaccaaaacgugaca

SEQ ID NO: 461694 - RNA, 23 nt, Artificial Sequence
  Synthetic
gagcaaauuaccaaaacgugaca

SEQ ID NO: 461695 - RNA, 24 nt, Artificial Sequence
  Synthetic
ugagcaaauuaccaaaacgugaca

SEQ ID NO: 461696 - RNA, 18 nt, Artificial Sequence
  Synthetic
ugaccuguugacgugaca

SEQ ID NO: 461697 - RNA, 19 nt, Artificial Sequence
  Synthetic
gugaccuguugacgugaca

SEQ ID NO: 461698 - RNA, 20 nt, Artificial Sequence
  Synthetic
ugugaccuguugacgugaca

SEQ ID NO: 461699 - RNA, 21 nt, Artificial Sequence
  Synthetic
cugugaccuguugacgugaca

SEQ ID NO: 461700 - RNA, 22 nt, Artificial Sequence
  Synthetic
ccugugaccuguugacgugaca

SEQ ID NO: 461701 - RNA, 23 nt, Artificial Sequence
  Synthetic
uccugugaccuguugacgugaca

SEQ ID NO: 461702 - RNA, 24 nt, Artificial Sequence
  Synthetic
uuccugugaccuguugacgugaca

SEQ ID NO: 461703 - RNA, 18 nt, Artificial Sequence
  Synthetic
auuuuccugaaggugaca

SEQ ID NO: 461704 - RNA, 19 nt, Artificial Sequence
  Synthetic
uauuuuccugaaggugaca

SEQ ID NO: 461705 - RNA, 20 nt, Artificial Sequence
  Synthetic
uuauuuuccugaaggugaca

SEQ ID NO: 461706 - RNA, 21 nt, Artificial Sequence
  Synthetic
auuauuuuccugaaggugaca

SEQ ID NO: 461707 - RNA, 22 nt, Artificial Sequence
  Synthetic
aauuauuuuccugaaggugaca

SEQ ID NO: 461708 - RNA, 23 nt, Artificial Sequence
  Synthetic
aaauuauuuuccugaaggugaca

SEQ ID NO: 461709 - RNA, 24 nt, Artificial Sequence
  Synthetic
uaaauuauuuuccugaaggugaca

SEQ ID NO: 461710 - RNA, 18 nt, Artificial Sequence
  Synthetic
aaaauuuaagcggugaca

SEQ ID NO: 461711 - RNA, 19 nt, Artificial Sequence
  Synthetic
gaaaauuuaagcggugaca

SEQ ID NO: 461712 - RNA, 20 nt, Artificial Sequence
  Synthetic
agaaaauuuaagcggugaca

SEQ ID NO: 461713 - RNA, 21 nt, Artificial Sequence
  Synthetic
uagaaaauuuaagcggugaca

SEQ ID NO: 461714 - RNA, 22 nt, Artificial Sequence
  Synthetic
cuagaaaauuuaagcggugaca

SEQ ID NO: 461715 - RNA, 23 nt, Artificial Sequence
  Synthetic
ccuagaaaauuuaagcggugaca

SEQ ID NO: 461716 - RNA, 24 nt, Artificial Sequence
  Synthetic
cccuagaaaauuuaagcggugaca

SEQ ID NO: 461717 - RNA, 18 nt, Artificial Sequence
  Synthetic
acuuuagccugggugaca

SEQ ID NO: 461718 - RNA, 19 nt, Artificial Sequence
  Synthetic
cacuuuagccugggugaca

SEQ ID NO: 461719 - RNA, 20 nt, Artificial Sequence
  Synthetic
gcacuuuagccugggugaca

SEQ ID NO: 461720 - RNA, 21 nt, Artificial Sequence
  Synthetic
ugcacuuuagccugggugaca

SEQ ID NO: 461721 - RNA, 22 nt, Artificial Sequence
  Synthetic
cugcacuuuagccugggugaca

SEQ ID NO: 461722 - RNA, 23 nt, Artificial Sequence
  Synthetic
acugcacuuuagccugggugaca

SEQ ID NO: 461723 - RNA, 24 nt, Artificial Sequence
  Synthetic
cacugcacuuuagccugggugaca

SEQ ID NO: 461724 - RNA, 18 nt, Artificial Sequence
  Synthetic
cauccugacuuggugaca

SEQ ID NO: 461725 - RNA, 19 nt, Artificial Sequence
  Synthetic
ccauccugacuuggugaca

SEQ ID NO: 461726 - RNA, 20 nt, Artificial Sequence
  Synthetic
accauccugacuuggugaca

SEQ ID NO: 461727 - RNA, 21 nt, Artificial Sequence
  Synthetic
caccauccugacuuggugaca

SEQ ID NO: 461728 - RNA, 22 nt, Artificial Sequence
  Synthetic
ccaccauccugacuuggugaca

SEQ ID NO: 461729 - RNA, 23 nt, Artificial Sequence
  Synthetic
cccaccauccugacuuggugaca

SEQ ID NO: 461730 - RNA, 24 nt, Artificial Sequence
  Synthetic
ucccaccauccugacuuggugaca

SEQ ID NO: 461731 - RNA, 18 nt, Artificial Sequence
  Synthetic
ugcaaauaaaaugugaca

SEQ ID NO: 461732 - RNA, 19 nt, Artificial Sequence
  Synthetic
augcaaauaaaaugugaca

SEQ ID NO: 461733 - RNA, 20 nt, Artificial Sequence
  Synthetic
caugcaaauaaaaugugaca

SEQ ID NO: 461734 - RNA, 21 nt, Artificial Sequence
  Synthetic
ccaugcaaauaaaaugugaca

SEQ ID NO: 461735 - RNA, 22 nt, Artificial Sequence
  Synthetic
uccaugcaaauaaaaugugaca

SEQ ID NO: 461736 - RNA, 23 nt, Artificial Sequence
  Synthetic
cuccaugcaaauaaaaugugaca

SEQ ID NO: 461737 - RNA, 24 nt, Artificial Sequence
  Synthetic
ucuccaugcaaauaaaaugugaca

SEQ ID NO: 461738 - RNA, 18 nt, Artificial Sequence
  Synthetic
cuguacauugaugugaca

SEQ ID NO: 461739 - RNA, 19 nt, Artificial Sequence
  Synthetic
acuguacauugaugugaca

SEQ ID NO: 461740 - RNA, 20 nt, Artificial Sequence
  Synthetic
gacuguacauugaugugaca

SEQ ID NO: 461741 - RNA, 21 nt, Artificial Sequence
  Synthetic
ugacuguacauugaugugaca

SEQ ID NO: 461742 - RNA, 22 nt, Artificial Sequence
  Synthetic
uugacuguacauugaugugaca

SEQ ID NO: 461743 - RNA, 23 nt, Artificial Sequence
  Synthetic
uuugacuguacauugaugugaca

SEQ ID NO: 461744 - RNA, 24 nt, Artificial Sequence
  Synthetic
uuuugacuguacauugaugugaca

SEQ ID NO: 461745 - RNA, 18 nt, Artificial Sequence
  Synthetic
cucuggucaucugugaca

SEQ ID NO: 461746 - RNA, 19 nt, Artificial Sequence
  Synthetic
acucuggucaucugugaca

SEQ ID NO: 461747 - RNA, 20 nt, Artificial Sequence
  Synthetic
aacucuggucaucugugaca

SEQ ID NO: 461748 - RNA, 21 nt, Artificial Sequence
  Synthetic
aaacucuggucaucugugaca

SEQ ID NO: 461749 - RNA, 22 nt, Artificial Sequence
  Synthetic
gaaacucuggucaucugugaca

SEQ ID NO: 461750 - RNA, 23 nt, Artificial Sequence
  Synthetic
ugaaacucuggucaucugugaca

SEQ ID NO: 461751 - RNA, 24 nt, Artificial Sequence
  Synthetic
gugaaacucuggucaucugugaca

SEQ ID NO: 461752 - RNA, 18 nt, Artificial Sequence
  Synthetic
uagagggcaguugugaca

SEQ ID NO: 461753 - RNA, 19 nt, Artificial Sequence
  Synthetic
auagagggcaguugugaca

SEQ ID NO: 461754 - RNA, 20 nt, Artificial Sequence
  Synthetic
uauagagggcaguugugaca

SEQ ID NO: 461755 - RNA, 21 nt, Artificial Sequence
  Synthetic
guauagagggcaguugugaca

SEQ ID NO: 461756 - RNA, 22 nt, Artificial Sequence
  Synthetic
cguauagagggcaguugugaca

SEQ ID NO: 461757 - RNA, 23 nt, Artificial Sequence
  Synthetic
ccguauagagggcaguugugaca

SEQ ID NO: 461758 - RNA, 24 nt, Artificial Sequence
  Synthetic
gccguauagagggcaguugugaca

SEQ ID NO: 461759 - RNA, 18 nt, Artificial Sequence
  Synthetic
cuuuccuuauuugugaca

SEQ ID NO: 461760 - RNA, 19 nt, Artificial Sequence
  Synthetic
ccuuuccuuauuugugaca

SEQ ID NO: 461761 - RNA, 20 nt, Artificial Sequence
  Synthetic
uccuuuccuuauuugugaca

SEQ ID NO: 461762 - RNA, 21 nt, Artificial Sequence
  Synthetic
auccuuuccuuauuugugaca

SEQ ID NO: 461763 - RNA, 22 nt, Artificial Sequence
  Synthetic
cauccuuuccuuauuugugaca

SEQ ID NO: 461764 - RNA, 23 nt, Artificial Sequence
  Synthetic
acauccuuuccuuauuugugaca

SEQ ID NO: 461765 - RNA, 24 nt, Artificial Sequence
  Synthetic
uacauccuuuccuuauuugugaca

SEQ ID NO: 461766 - RNA, 18 nt, Artificial Sequence
  Synthetic
ugaucuuccuuugugaca

SEQ ID NO: 461767 - RNA, 19 nt, Artificial Sequence
  Synthetic
cugaucuuccuuugugaca

SEQ ID NO: 461768 - RNA, 20 nt, Artificial Sequence
  Synthetic
ucugaucuuccuuugugaca

SEQ ID NO: 461769 - RNA, 21 nt, Artificial Sequence
  Synthetic
uucugaucuuccuuugugaca

SEQ ID NO: 461770 - RNA, 22 nt, Artificial Sequence
  Synthetic
cuucugaucuuccuuugugaca

SEQ ID NO: 461771 - RNA, 23 nt, Artificial Sequence
  Synthetic
gcuucugaucuuccuuugugaca

SEQ ID NO: 461772 - RNA, 24 nt, Artificial Sequence
  Synthetic
agcuucugaucuuccuuugugaca

SEQ ID NO: 461773 - RNA, 18 nt, Artificial Sequence
  Synthetic
gucacuacuuuugugaca

SEQ ID NO: 461774 - RNA, 19 nt, Artificial Sequence
  Synthetic
ugucacuacuuuugugaca

SEQ ID NO: 461775 - RNA, 20 nt, Artificial Sequence
  Synthetic
augucacuacuuuugugaca

SEQ ID NO: 461776 - RNA, 21 nt, Artificial Sequence
  Synthetic
uaugucacuacuuuugugaca

SEQ ID NO: 461777 - RNA, 22 nt, Artificial Sequence
  Synthetic
uuaugucacuacuuuugugaca

SEQ ID NO: 461778 - RNA, 23 nt, Artificial Sequence
  Synthetic
guuaugucacuacuuuugugaca

SEQ ID NO: 461779 - RNA, 24 nt, Artificial Sequence
  Synthetic
gguuaugucacuacuuuugugaca

SEQ ID NO: 461780 - RNA, 18 nt, Artificial Sequence
  Synthetic
uuucacccuaaauugaca

SEQ ID NO: 461781 - RNA, 19 nt, Artificial Sequence
  Synthetic
uuuucacccuaaauugaca

SEQ ID NO: 461782 - RNA, 20 nt, Artificial Sequence
  Synthetic
auuuucacccuaaauugaca

SEQ ID NO: 461783 - RNA, 21 nt, Artificial Sequence
  Synthetic
cauuuucacccuaaauugaca

SEQ ID NO: 461784 - RNA, 22 nt, Artificial Sequence
  Synthetic
acauuuucacccuaaauugaca

SEQ ID NO: 461785 - RNA, 23 nt, Artificial Sequence
  Synthetic
uacauuuucacccuaaauugaca

SEQ ID NO: 461786 - RNA, 24 nt, Artificial Sequence
  Synthetic
cuacauuuucacccuaaauugaca

SEQ ID NO: 461787 - RNA, 18 nt, Artificial Sequence
  Synthetic
guuaaucuaauauugaca

SEQ ID NO: 461788 - RNA, 19 nt, Artificial Sequence
  Synthetic
cguuaaucuaauauugaca

SEQ ID NO: 461789 - RNA, 20 nt, Artificial Sequence
  Synthetic
ucguuaaucuaauauugaca

SEQ ID NO: 461790 - RNA, 21 nt, Artificial Sequence
  Synthetic
cucguuaaucuaauauugaca

SEQ ID NO: 461791 - RNA, 22 nt, Artificial Sequence
  Synthetic
ucucguuaaucuaauauugaca

SEQ ID NO: 461792 - RNA, 23 nt, Artificial Sequence
  Synthetic
gucucguuaaucuaauauugaca

SEQ ID NO: 461793 - RNA, 24 nt, Artificial Sequence
  Synthetic
ugucucguuaaucuaauauugaca

SEQ ID NO: 461794 - RNA, 18 nt, Artificial Sequence
  Synthetic
auccgucuaauauugaca

SEQ ID NO: 461795 - RNA, 19 nt, Artificial Sequence
  Synthetic
gauccgucuaauauugaca

SEQ ID NO: 461796 - RNA, 20 nt, Artificial Sequence
  Synthetic
ugauccgucuaauauugaca

SEQ ID NO: 461797 - RNA, 21 nt, Artificial Sequence
  Synthetic
uugauccgucuaauauugaca

SEQ ID NO: 461798 - RNA, 22 nt, Artificial Sequence
  Synthetic
guugauccgucuaauauugaca

SEQ ID NO: 461799 - RNA, 23 nt, Artificial Sequence
  Synthetic
cguugauccgucuaauauugaca

SEQ ID NO: 461800 - RNA, 24 nt, Artificial Sequence
  Synthetic
ucguugauccgucuaauauugaca

SEQ ID NO: 461801 - RNA, 18 nt, Artificial Sequence
  Synthetic
aaucuuccccuauugaca

SEQ ID NO: 461802 - RNA, 19 nt, Artificial Sequence
  Synthetic
uaaucuuccccuauugaca

SEQ ID NO: 461803 - RNA, 20 nt, Artificial Sequence
  Synthetic
auaaucuuccccuauugaca

SEQ ID NO: 461804 - RNA, 21 nt, Artificial Sequence
  Synthetic
gauaaucuuccccuauugaca

SEQ ID NO: 461805 - RNA, 22 nt, Artificial Sequence
  Synthetic
ggauaaucuuccccuauugaca

SEQ ID NO: 461806 - RNA, 23 nt, Artificial Sequence
  Synthetic
uggauaaucuuccccuauugaca

SEQ ID NO: 461807 - RNA, 24 nt, Artificial Sequence
  Synthetic
auggauaaucuuccccuauugaca

SEQ ID NO: 461808 - RNA, 18 nt, Artificial Sequence
  Synthetic
acuaaaugucuauugaca

SEQ ID NO: 461809 - RNA, 19 nt, Artificial Sequence
  Synthetic
aacuaaaugucuauugaca

SEQ ID NO: 461810 - RNA, 20 nt, Artificial Sequence
  Synthetic
aaacuaaaugucuauugaca

SEQ ID NO: 461811 - RNA, 21 nt, Artificial Sequence
  Synthetic
caaacuaaaugucuauugaca

SEQ ID NO: 461812 - RNA, 22 nt, Artificial Sequence
  Synthetic
acaaacuaaaugucuauugaca

SEQ ID NO: 461813 - RNA, 23 nt, Artificial Sequence
  Synthetic
aacaaacuaaaugucuauugaca

SEQ ID NO: 461814 - RNA, 24 nt, Artificial Sequence
  Synthetic
gaacaaacuaaaugucuauugaca

SEQ ID NO: 461815 - RNA, 18 nt, Artificial Sequence
  Synthetic
gacagcaugcccuugaca

SEQ ID NO: 461816 - RNA, 19 nt, Artificial Sequence
  Synthetic
agacagcaugcccuugaca

SEQ ID NO: 461817 - RNA, 20 nt, Artificial Sequence
  Synthetic
aagacagcaugcccuugaca

SEQ ID NO: 461818 - RNA, 21 nt, Artificial Sequence
  Synthetic
aaagacagcaugcccuugaca

SEQ ID NO: 461819 - RNA, 22 nt, Artificial Sequence
  Synthetic
gaaagacagcaugcccuugaca

SEQ ID NO: 461820 - RNA, 23 nt, Artificial Sequence
  Synthetic
cgaaagacagcaugcccuugaca

SEQ ID NO: 461821 - RNA, 24 nt, Artificial Sequence
  Synthetic
acgaaagacagcaugcccuugaca

SEQ ID NO: 461822 - RNA, 18 nt, Artificial Sequence
  Synthetic
guuugcacuaucuugaca

SEQ ID NO: 461823 - RNA, 19 nt, Artificial Sequence
  Synthetic
aguuugcacuaucuugaca

SEQ ID NO: 461824 - RNA, 20 nt, Artificial Sequence
  Synthetic
gaguuugcacuaucuugaca

SEQ ID NO: 461825 - RNA, 21 nt, Artificial Sequence
  Synthetic
ugaguuugcacuaucuugaca

SEQ ID NO: 461826 - RNA, 22 nt, Artificial Sequence
  Synthetic
cugaguuugcacuaucuugaca

SEQ ID NO: 461827 - RNA, 23 nt, Artificial Sequence
  Synthetic
acugaguuugcacuaucuugaca

SEQ ID NO: 461828 - RNA, 24 nt, Artificial Sequence
  Synthetic
uacugaguuugcacuaucuugaca

SEQ ID NO: 461829 - RNA, 18 nt, Artificial Sequence
  Synthetic
ggaaaaucucucuugaca

SEQ ID NO: 461830 - RNA, 19 nt, Artificial Sequence
  Synthetic
gggaaaaucucucuugaca

SEQ ID NO: 461831 - RNA, 20 nt, Artificial Sequence
  Synthetic
ugggaaaaucucucuugaca

SEQ ID NO: 461832 - RNA, 21 nt, Artificial Sequence
  Synthetic
cugggaaaaucucucuugaca

SEQ ID NO: 461833 - RNA, 22 nt, Artificial Sequence
  Synthetic
ccugggaaaaucucucuugaca

SEQ ID NO: 461834 - RNA, 23 nt, Artificial Sequence
  Synthetic
gccugggaaaaucucucuugaca

SEQ ID NO: 461835 - RNA, 24 nt, Artificial Sequence
  Synthetic
agccugggaaaaucucucuugaca

SEQ ID NO: 461836 - RNA, 18 nt, Artificial Sequence
  Synthetic
guaagauggaaguugaca

SEQ ID NO: 461837 - RNA, 19 nt, Artificial Sequence
  Synthetic
uguaagauggaaguugaca

SEQ ID NO: 461838 - RNA, 20 nt, Artificial Sequence
  Synthetic
guguaagauggaaguugaca

SEQ ID NO: 461839 - RNA, 21 nt, Artificial Sequence
  Synthetic
aguguaagauggaaguugaca

SEQ ID NO: 461840 - RNA, 22 nt, Artificial Sequence
  Synthetic
gaguguaagauggaaguugaca

SEQ ID NO: 461841 - RNA, 23 nt, Artificial Sequence
  Synthetic
agaguguaagauggaaguugaca

SEQ ID NO: 461842 - RNA, 24 nt, Artificial Sequence
  Synthetic
aagaguguaagauggaaguugaca

SEQ ID NO: 461843 - RNA, 18 nt, Artificial Sequence
  Synthetic
uauuuuuaucaguugaca

SEQ ID NO: 461844 - RNA, 19 nt, Artificial Sequence
  Synthetic
cuauuuuuaucaguugaca

SEQ ID NO: 461845 - RNA, 20 nt, Artificial Sequence
  Synthetic
ucuauuuuuaucaguugaca

SEQ ID NO: 461846 - RNA, 21 nt, Artificial Sequence
  Synthetic
aucuauuuuuaucaguugaca

SEQ ID NO: 461847 - RNA, 22 nt, Artificial Sequence
  Synthetic
aaucuauuuuuaucaguugaca

SEQ ID NO: 461848 - RNA, 23 nt, Artificial Sequence
  Synthetic
aaaucuauuuuuaucaguugaca

SEQ ID NO: 461849 - RNA, 24 nt, Artificial Sequence
  Synthetic
gaaaucuauuuuuaucaguugaca

SEQ ID NO: 461850 - RNA, 18 nt, Artificial Sequence
  Synthetic
caaaauggaggguugaca

SEQ ID NO: 461851 - RNA, 19 nt, Artificial Sequence
  Synthetic
acaaaauggaggguugaca

SEQ ID NO: 461852 - RNA, 20 nt, Artificial Sequence
  Synthetic
aacaaaauggaggguugaca

SEQ ID NO: 461853 - RNA, 21 nt, Artificial Sequence
  Synthetic
gaacaaaauggaggguugaca

SEQ ID NO: 461854 - RNA, 22 nt, Artificial Sequence
  Synthetic
ugaacaaaauggaggguugaca

SEQ ID NO: 461855 - RNA, 23 nt, Artificial Sequence
  Synthetic
uugaacaaaauggaggguugaca

SEQ ID NO: 461856 - RNA, 24 nt, Artificial Sequence
  Synthetic
cuugaacaaaauggaggguugaca

SEQ ID NO: 461857 - RNA, 18 nt, Artificial Sequence
  Synthetic
cuguuaaaauauuugaca

SEQ ID NO: 461858 - RNA, 19 nt, Artificial Sequence
  Synthetic
ucuguuaaaauauuugaca

SEQ ID NO: 461859 - RNA, 20 nt, Artificial Sequence
  Synthetic
uucuguuaaaauauuugaca

SEQ ID NO: 461860 - RNA, 21 nt, Artificial Sequence
  Synthetic
uuucuguuaaaauauuugaca

SEQ ID NO: 461861 - RNA, 22 nt, Artificial Sequence
  Synthetic
auuucuguuaaaauauuugaca

SEQ ID NO: 461862 - RNA, 23 nt, Artificial Sequence
  Synthetic
aauuucuguuaaaauauuugaca

SEQ ID NO: 461863 - RNA, 24 nt, Artificial Sequence
  Synthetic
aaauuucuguuaaaauauuugaca

SEQ ID NO: 461864 - RNA, 18 nt, Artificial Sequence
  Synthetic
agaaauaaacguuugaca

SEQ ID NO: 461865 - RNA, 19 nt, Artificial Sequence
  Synthetic
cagaaauaaacguuugaca

SEQ ID NO: 461866 - RNA, 20 nt, Artificial Sequence
  Synthetic
acagaaauaaacguuugaca

SEQ ID NO: 461867 - RNA, 21 nt, Artificial Sequence
  Synthetic
cacagaaauaaacguuugaca

SEQ ID NO: 461868 - RNA, 22 nt, Artificial Sequence
  Synthetic
ucacagaaauaaacguuugaca

SEQ ID NO: 461869 - RNA, 23 nt, Artificial Sequence
  Synthetic
uucacagaaauaaacguuugaca

SEQ ID NO: 461870 - RNA, 24 nt, Artificial Sequence
  Synthetic
uuucacagaaauaaacguuugaca

SEQ ID NO: 461871 - RNA, 18 nt, Artificial Sequence
  Synthetic
aaaagagagguuuugaca

SEQ ID NO: 461872 - RNA, 19 nt, Artificial Sequence
  Synthetic
aaaaagagagguuuugaca

SEQ ID NO: 461873 - RNA, 20 nt, Artificial Sequence
  Synthetic
gaaaaagagagguuuugaca

SEQ ID NO: 461874 - RNA, 21 nt, Artificial Sequence
  Synthetic
agaaaaagagagguuuugaca

SEQ ID NO: 461875 - RNA, 22 nt, Artificial Sequence
  Synthetic
gagaaaaagagagguuuugaca

SEQ ID NO: 461876 - RNA, 23 nt, Artificial Sequence
  Synthetic
ugagaaaaagagagguuuugaca

SEQ ID NO: 461877 - RNA, 24 nt, Artificial Sequence
  Synthetic
cugagaaaaagagagguuuugaca

SEQ ID NO: 461878 - RNA, 18 nt, Artificial Sequence
  Synthetic
uaagugcucaaaaauaca

SEQ ID NO: 461879 - RNA, 19 nt, Artificial Sequence
  Synthetic
auaagugcucaaaaauaca

SEQ ID NO: 461880 - RNA, 20 nt, Artificial Sequence
  Synthetic
uauaagugcucaaaaauaca

SEQ ID NO: 461881 - RNA, 21 nt, Artificial Sequence
  Synthetic
auauaagugcucaaaaauaca

SEQ ID NO: 461882 - RNA, 22 nt, Artificial Sequence
  Synthetic
cauauaagugcucaaaaauaca

SEQ ID NO: 461883 - RNA, 23 nt, Artificial Sequence
  Synthetic
acauauaagugcucaaaaauaca

SEQ ID NO: 461884 - RNA, 24 nt, Artificial Sequence
  Synthetic
cacauauaagugcucaaaaauaca

SEQ ID NO: 461885 - RNA, 18 nt, Artificial Sequence
  Synthetic
caauuugaucaaaauaca

SEQ ID NO: 461886 - RNA, 19 nt, Artificial Sequence
  Synthetic
gcaauuugaucaaaauaca

SEQ ID NO: 461887 - RNA, 20 nt, Artificial Sequence
  Synthetic
ugcaauuugaucaaaauaca

SEQ ID NO: 461888 - RNA, 21 nt, Artificial Sequence
  Synthetic
augcaauuugaucaaaauaca

SEQ ID NO: 461889 - RNA, 22 nt, Artificial Sequence
  Synthetic
gaugcaauuugaucaaaauaca

SEQ ID NO: 461890 - RNA, 23 nt, Artificial Sequence
  Synthetic
ugaugcaauuugaucaaaauaca

SEQ ID NO: 461891 - RNA, 24 nt, Artificial Sequence
  Synthetic
augaugcaauuugaucaaaauaca

SEQ ID NO: 461892 - RNA, 18 nt, Artificial Sequence
  Synthetic
auguucagagaaaauaca

SEQ ID NO: 461893 - RNA, 19 nt, Artificial Sequence
  Synthetic
cauguucagagaaaauaca

SEQ ID NO: 461894 - RNA, 20 nt, Artificial Sequence
  Synthetic
gcauguucagagaaaauaca

SEQ ID NO: 461895 - RNA, 21 nt, Artificial Sequence
  Synthetic
ugcauguucagagaaaauaca

SEQ ID NO: 461896 - RNA, 22 nt, Artificial Sequence
  Synthetic
augcauguucagagaaaauaca

SEQ ID NO: 461897 - RNA, 23 nt, Artificial Sequence
  Synthetic
caugcauguucagagaaaauaca

SEQ ID NO: 461898 - RNA, 24 nt, Artificial Sequence
  Synthetic
acaugcauguucagagaaaauaca

SEQ ID NO: 461899 - RNA, 18 nt, Artificial Sequence
  Synthetic
agaugccaugaaaauaca

SEQ ID NO: 461900 - RNA, 19 nt, Artificial Sequence
  Synthetic
aagaugccaugaaaauaca

SEQ ID NO: 461901 - RNA, 20 nt, Artificial Sequence
  Synthetic
aaagaugccaugaaaauaca

SEQ ID NO: 461902 - RNA, 21 nt, Artificial Sequence
  Synthetic
caaagaugccaugaaaauaca

SEQ ID NO: 461903 - RNA, 22 nt, Artificial Sequence
  Synthetic
acaaagaugccaugaaaauaca

SEQ ID NO: 461904 - RNA, 23 nt, Artificial Sequence
  Synthetic
gacaaagaugccaugaaaauaca

SEQ ID NO: 461905 - RNA, 24 nt, Artificial Sequence
  Synthetic
ugacaaagaugccaugaaaauaca

SEQ ID NO: 461906 - RNA, 18 nt, Artificial Sequence
  Synthetic
auuagacacucaaauaca

SEQ ID NO: 461907 - RNA, 19 nt, Artificial Sequence
  Synthetic
gauuagacacucaaauaca

SEQ ID NO: 461908 - RNA, 20 nt, Artificial Sequence
  Synthetic
ugauuagacacucaaauaca

SEQ ID NO: 461909 - RNA, 21 nt, Artificial Sequence
  Synthetic
uugauuagacacucaaauaca

SEQ ID NO: 461910 - RNA, 22 nt, Artificial Sequence
  Synthetic
uuugauuagacacucaaauaca

SEQ ID NO: 461911 - RNA, 23 nt, Artificial Sequence
  Synthetic
cuuugauuagacacucaaauaca

SEQ ID NO: 461912 - RNA, 24 nt, Artificial Sequence
  Synthetic
ccuuugauuagacacucaaauaca

SEQ ID NO: 461913 - RNA, 18 nt, Artificial Sequence
  Synthetic
ucagauucaggaaauaca

SEQ ID NO: 461914 - RNA, 19 nt, Artificial Sequence
  Synthetic
uucagauucaggaaauaca

SEQ ID NO: 461915 - RNA, 20 nt, Artificial Sequence
  Synthetic
guucagauucaggaaauaca

SEQ ID NO: 461916 - RNA, 21 nt, Artificial Sequence
  Synthetic
cguucagauucaggaaauaca

SEQ ID NO: 461917 - RNA, 22 nt, Artificial Sequence
  Synthetic
acguucagauucaggaaauaca

SEQ ID NO: 461918 - RNA, 23 nt, Artificial Sequence
  Synthetic
aacguucagauucaggaaauaca

SEQ ID NO: 461919 - RNA, 24 nt, Artificial Sequence
  Synthetic
caacguucagauucaggaaauaca

SEQ ID NO: 461920 - RNA, 18 nt, Artificial Sequence
  Synthetic
aucucaaaaauaaauaca

SEQ ID NO: 461921 - RNA, 19 nt, Artificial Sequence
  Synthetic
caucucaaaaauaaauaca

SEQ ID NO: 461922 - RNA, 20 nt, Artificial Sequence
  Synthetic
ccaucucaaaaauaaauaca

SEQ ID NO: 461923 - RNA, 21 nt, Artificial Sequence
  Synthetic
uccaucucaaaaauaaauaca

SEQ ID NO: 461924 - RNA, 22 nt, Artificial Sequence
  Synthetic
cuccaucucaaaaauaaauaca

SEQ ID NO: 461925 - RNA, 23 nt, Artificial Sequence
  Synthetic
acuccaucucaaaaauaaauaca

SEQ ID NO: 461926 - RNA, 24 nt, Artificial Sequence
  Synthetic
aacuccaucucaaaaauaaauaca

SEQ ID NO: 461927 - RNA, 18 nt, Artificial Sequence
  Synthetic
gaagaaaagauaaauaca

SEQ ID NO: 461928 - RNA, 19 nt, Artificial Sequence
  Synthetic
ggaagaaaagauaaauaca

SEQ ID NO: 461929 - RNA, 20 nt, Artificial Sequence
  Synthetic
uggaagaaaagauaaauaca

SEQ ID NO: 461930 - RNA, 21 nt, Artificial Sequence
  Synthetic
cuggaagaaaagauaaauaca

SEQ ID NO: 461931 - RNA, 22 nt, Artificial Sequence
  Synthetic
acuggaagaaaagauaaauaca

SEQ ID NO: 461932 - RNA, 23 nt, Artificial Sequence
  Synthetic
aacuggaagaaaagauaaauaca

SEQ ID NO: 461933 - RNA, 24 nt, Artificial Sequence
  Synthetic
caacuggaagaaaagauaaauaca

SEQ ID NO: 461934 - RNA, 18 nt, Artificial Sequence
  Synthetic
auuuggaaaguaaauaca

SEQ ID NO: 461935 - RNA, 19 nt, Artificial Sequence
  Synthetic
cauuuggaaaguaaauaca

SEQ ID NO: 461936 - RNA, 20 nt, Artificial Sequence
  Synthetic
gcauuuggaaaguaaauaca

SEQ ID NO: 461937 - RNA, 21 nt, Artificial Sequence
  Synthetic
ggcauuuggaaaguaaauaca

SEQ ID NO: 461938 - RNA, 22 nt, Artificial Sequence
  Synthetic
uggcauuuggaaaguaaauaca

SEQ ID NO: 461939 - RNA, 23 nt, Artificial Sequence
  Synthetic
guggcauuuggaaaguaaauaca

SEQ ID NO: 461940 - RNA, 24 nt, Artificial Sequence
  Synthetic
aguggcauuuggaaaguaaauaca

SEQ ID NO: 461941 - RNA, 18 nt, Artificial Sequence
  Synthetic
cagagaacuuuaaauaca

SEQ ID NO: 461942 - RNA, 19 nt, Artificial Sequence
  Synthetic
acagagaacuuuaaauaca

SEQ ID NO: 461943 - RNA, 20 nt, Artificial Sequence
  Synthetic
aacagagaacuuuaaauaca

SEQ ID NO: 461944 - RNA, 21 nt, Artificial Sequence
  Synthetic
uaacagagaacuuuaaauaca

SEQ ID NO: 461945 - RNA, 22 nt, Artificial Sequence
  Synthetic
uuaacagagaacuuuaaauaca

SEQ ID NO: 461946 - RNA, 23 nt, Artificial Sequence
  Synthetic
guuaacagagaacuuuaaauaca

SEQ ID NO: 461947 - RNA, 24 nt, Artificial Sequence
  Synthetic
aguuaacagagaacuuuaaauaca

SEQ ID NO: 461948 - RNA, 18 nt, Artificial Sequence
  Synthetic
aaacugagaaacaauaca

SEQ ID NO: 461949 - RNA, 19 nt, Artificial Sequence
  Synthetic
gaaacugagaaacaauaca

SEQ ID NO: 461950 - RNA, 20 nt, Artificial Sequence
  Synthetic
ggaaacugagaaacaauaca

SEQ ID NO: 461951 - RNA, 21 nt, Artificial Sequence
  Synthetic
uggaaacugagaaacaauaca

SEQ ID NO: 461952 - RNA, 22 nt, Artificial Sequence
  Synthetic
auggaaacugagaaacaauaca

SEQ ID NO: 461953 - RNA, 23 nt, Artificial Sequence
  Synthetic
uauggaaacugagaaacaauaca

SEQ ID NO: 461954 - RNA, 24 nt, Artificial Sequence
  Synthetic
cuauggaaacugagaaacaauaca

SEQ ID NO: 461955 - RNA, 18 nt, Artificial Sequence
  Synthetic
aaaacaacacacaauaca

SEQ ID NO: 461956 - RNA, 19 nt, Artificial Sequence
  Synthetic
gaaaacaacacacaauaca

SEQ ID NO: 461957 - RNA, 20 nt, Artificial Sequence
  Synthetic
ugaaaacaacacacaauaca

SEQ ID NO: 461958 - RNA, 21 nt, Artificial Sequence
  Synthetic
cugaaaacaacacacaauaca

SEQ ID NO: 461959 - RNA, 22 nt, Artificial Sequence
  Synthetic
acugaaaacaacacacaauaca

SEQ ID NO: 461960 - RNA, 23 nt, Artificial Sequence
  Synthetic
uacugaaaacaacacacaauaca

SEQ ID NO: 461961 - RNA, 24 nt, Artificial Sequence
  Synthetic
uuacugaaaacaacacacaauaca

SEQ ID NO: 461962 - RNA, 18 nt, Artificial Sequence
  Synthetic
aaaagccugagcaauaca

SEQ ID NO: 461963 - RNA, 19 nt, Artificial Sequence
  Synthetic
uaaaagccugagcaauaca

SEQ ID NO: 461964 - RNA, 20 nt, Artificial Sequence
  Synthetic
cuaaaagccugagcaauaca

SEQ ID NO: 461965 - RNA, 21 nt, Artificial Sequence
  Synthetic
gcuaaaagccugagcaauaca

SEQ ID NO: 461966 - RNA, 22 nt, Artificial Sequence
  Synthetic
agcuaaaagccugagcaauaca

SEQ ID NO: 461967 - RNA, 23 nt, Artificial Sequence
  Synthetic
uagcuaaaagccugagcaauaca

SEQ ID NO: 461968 - RNA, 24 nt, Artificial Sequence
  Synthetic
guagcuaaaagccugagcaauaca

SEQ ID NO: 461969 - RNA, 18 nt, Artificial Sequence
  Synthetic
gcaaccagugucaauaca

SEQ ID NO: 461970 - RNA, 19 nt, Artificial Sequence
  Synthetic
agcaaccagugucaauaca

SEQ ID NO: 461971 - RNA, 20 nt, Artificial Sequence
  Synthetic
gagcaaccagugucaauaca

SEQ ID NO: 461972 - RNA, 21 nt, Artificial Sequence
  Synthetic
agagcaaccagugucaauaca

SEQ ID NO: 461973 - RNA, 22 nt, Artificial Sequence
  Synthetic
uagagcaaccagugucaauaca

SEQ ID NO: 461974 - RNA, 23 nt, Artificial Sequence
  Synthetic
auagagcaaccagugucaauaca

SEQ ID NO: 461975 - RNA, 24 nt, Artificial Sequence
  Synthetic
cauagagcaaccagugucaauaca

SEQ ID NO: 461976 - RNA, 18 nt, Artificial Sequence
  Synthetic
cccaagaagaagaauaca

SEQ ID NO: 461977 - RNA, 19 nt, Artificial Sequence
  Synthetic
ccccaagaagaagaauaca

SEQ ID NO: 461978 - RNA, 20 nt, Artificial Sequence
  Synthetic
cccccaagaagaagaauaca

SEQ ID NO: 461979 - RNA, 21 nt, Artificial Sequence
  Synthetic
acccccaagaagaagaauaca

SEQ ID NO: 461980 - RNA, 22 nt, Artificial Sequence
  Synthetic
aacccccaagaagaagaauaca

SEQ ID NO: 461981 - RNA, 23 nt, Artificial Sequence
  Synthetic
gaacccccaagaagaagaauaca

SEQ ID NO: 461982 - RNA, 24 nt, Artificial Sequence
  Synthetic
agaacccccaagaagaagaauaca

SEQ ID NO: 461983 - RNA, 18 nt, Artificial Sequence
  Synthetic
acuagaauaacgaauaca

SEQ ID NO: 461984 - RNA, 19 nt, Artificial Sequence
  Synthetic
aacuagaauaacgaauaca

SEQ ID NO: 461985 - RNA, 20 nt, Artificial Sequence
  Synthetic
uaacuagaauaacgaauaca

SEQ ID NO: 461986 - RNA, 21 nt, Artificial Sequence
  Synthetic
auaacuagaauaacgaauaca

SEQ ID NO: 461987 - RNA, 22 nt, Artificial Sequence
  Synthetic
uauaacuagaauaacgaauaca

SEQ ID NO: 461988 - RNA, 23 nt, Artificial Sequence
  Synthetic
guauaacuagaauaacgaauaca

SEQ ID NO: 461989 - RNA, 24 nt, Artificial Sequence
  Synthetic
uguauaacuagaauaacgaauaca

SEQ ID NO: 461990 - RNA, 18 nt, Artificial Sequence
  Synthetic
augagccaauggaauaca

SEQ ID NO: 461991 - RNA, 19 nt, Artificial Sequence
  Synthetic
uaugagccaauggaauaca

SEQ ID NO: 461992 - RNA, 20 nt, Artificial Sequence
  Synthetic
uuaugagccaauggaauaca

SEQ ID NO: 461993 - RNA, 21 nt, Artificial Sequence
  Synthetic
cuuaugagccaauggaauaca

SEQ ID NO: 461994 - RNA, 22 nt, Artificial Sequence
  Synthetic
ucuuaugagccaauggaauaca

SEQ ID NO: 461995 - RNA, 23 nt, Artificial Sequence
  Synthetic
cucuuaugagccaauggaauaca

SEQ ID NO: 461996 - RNA, 24 nt, Artificial Sequence
  Synthetic
ucucuuaugagccaauggaauaca

SEQ ID NO: 461997 - RNA, 18 nt, Artificial Sequence
  Synthetic
uaugcaguauggaauaca

SEQ ID NO: 461998 - RNA, 19 nt, Artificial Sequence
  Synthetic
auaugcaguauggaauaca

SEQ ID NO: 461999 - RNA, 20 nt, Artificial Sequence
  Synthetic
aauaugcaguauggaauaca

SEQ ID NO: 462000 - RNA, 21 nt, Artificial Sequence
  Synthetic
aaauaugcaguauggaauaca

SEQ ID NO: 462001 - RNA, 22 nt, Artificial Sequence
  Synthetic
uaaauaugcaguauggaauaca

SEQ ID NO: 462002 - RNA, 23 nt, Artificial Sequence
  Synthetic
uuaaauaugcaguauggaauaca

SEQ ID NO: 462003 - RNA, 24 nt, Artificial Sequence
  Synthetic
guuaaauaugcaguauggaauaca

SEQ ID NO: 462004 - RNA, 18 nt, Artificial Sequence
  Synthetic
augcaagggcugaauaca

SEQ ID NO: 462005 - RNA, 19 nt, Artificial Sequence
  Synthetic
uaugcaagggcugaauaca

SEQ ID NO: 462006 - RNA, 20 nt, Artificial Sequence
  Synthetic
cuaugcaagggcugaauaca

SEQ ID NO: 462007 - RNA, 21 nt, Artificial Sequence
  Synthetic
acuaugcaagggcugaauaca

SEQ ID NO: 462008 - RNA, 22 nt, Artificial Sequence
  Synthetic
uacuaugcaagggcugaauaca

SEQ ID NO: 462009 - RNA, 23 nt, Artificial Sequence
  Synthetic
uuacuaugcaagggcugaauaca

SEQ ID NO: 462010 - RNA, 24 nt, Artificial Sequence
  Synthetic
uuuacuaugcaagggcugaauaca

SEQ ID NO: 462011 - RNA, 18 nt, Artificial Sequence
  Synthetic
auuagaaaucugaauaca

SEQ ID NO: 462012 - RNA, 19 nt, Artificial Sequence
  Synthetic
gauuagaaaucugaauaca

SEQ ID NO: 462013 - RNA, 20 nt, Artificial Sequence
  Synthetic
ugauuagaaaucugaauaca

SEQ ID NO: 462014 - RNA, 21 nt, Artificial Sequence
  Synthetic
uugauuagaaaucugaauaca

SEQ ID NO: 462015 - RNA, 22 nt, Artificial Sequence
  Synthetic
guugauuagaaaucugaauaca

SEQ ID NO: 462016 - RNA, 23 nt, Artificial Sequence
  Synthetic
aguugauuagaaaucugaauaca

SEQ ID NO: 462017 - RNA, 24 nt, Artificial Sequence
  Synthetic
uaguugauuagaaaucugaauaca

SEQ ID NO: 462018 - RNA, 18 nt, Artificial Sequence
  Synthetic
agugauaaaaauaauaca

SEQ ID NO: 462019 - RNA, 19 nt, Artificial Sequence
  Synthetic
cagugauaaaaauaauaca

SEQ ID NO: 462020 - RNA, 20 nt, Artificial Sequence
  Synthetic
gcagugauaaaaauaauaca

SEQ ID NO: 462021 - RNA, 21 nt, Artificial Sequence
  Synthetic
agcagugauaaaaauaauaca

SEQ ID NO: 462022 - RNA, 22 nt, Artificial Sequence
  Synthetic
gagcagugauaaaaauaauaca

SEQ ID NO: 462023 - RNA, 23 nt, Artificial Sequence
  Synthetic
agagcagugauaaaaauaauaca

SEQ ID NO: 462024 - RNA, 24 nt, Artificial Sequence
  Synthetic
aagagcagugauaaaaauaauaca

SEQ ID NO: 462025 - RNA, 18 nt, Artificial Sequence
  Synthetic
agaauuaaaaauaauaca

SEQ ID NO: 462026 - RNA, 19 nt, Artificial Sequence
  Synthetic
aagaauuaaaaauaauaca

SEQ ID NO: 462027 - RNA, 20 nt, Artificial Sequence
  Synthetic
uaagaauuaaaaauaauaca

SEQ ID NO: 462028 - RNA, 21 nt, Artificial Sequence
  Synthetic
auaagaauuaaaaauaauaca

SEQ ID NO: 462029 - RNA, 22 nt, Artificial Sequence
  Synthetic
uauaagaauuaaaaauaauaca

SEQ ID NO: 462030 - RNA, 23 nt, Artificial Sequence
  Synthetic
uuauaagaauuaaaaauaauaca

SEQ ID NO: 462031 - RNA, 24 nt, Artificial Sequence
  Synthetic
guuauaagaauuaaaaauaauaca

SEQ ID NO: 462032 - RNA, 18 nt, Artificial Sequence
  Synthetic
guugugagaaauaauaca

SEQ ID NO: 462033 - RNA, 19 nt, Artificial Sequence
  Synthetic
aguugugagaaauaauaca

SEQ ID NO: 462034 - RNA, 20 nt, Artificial Sequence
  Synthetic
uaguugugagaaauaauaca

SEQ ID NO: 462035 - RNA, 21 nt, Artificial Sequence
  Synthetic
guaguugugagaaauaauaca

SEQ ID NO: 462036 - RNA, 22 nt, Artificial Sequence
  Synthetic
uguaguugugagaaauaauaca

SEQ ID NO: 462037 - RNA, 23 nt, Artificial Sequence
  Synthetic
auguaguugugagaaauaauaca

SEQ ID NO: 462038 - RNA, 24 nt, Artificial Sequence
  Synthetic
cauguaguugugagaaauaauaca

SEQ ID NO: 462039 - RNA, 18 nt, Artificial Sequence
  Synthetic
uuuuuguguaauaauaca

SEQ ID NO: 462040 - RNA, 19 nt, Artificial Sequence
  Synthetic
uuuuuuguguaauaauaca

SEQ ID NO: 462041 - RNA, 20 nt, Artificial Sequence
  Synthetic
auuuuuuguguaauaauaca

SEQ ID NO: 462042 - RNA, 21 nt, Artificial Sequence
  Synthetic
uauuuuuuguguaauaauaca

SEQ ID NO: 462043 - RNA, 22 nt, Artificial Sequence
  Synthetic
uuauuuuuuguguaauaauaca

SEQ ID NO: 462044 - RNA, 23 nt, Artificial Sequence
  Synthetic
auuauuuuuuguguaauaauaca

SEQ ID NO: 462045 - RNA, 24 nt, Artificial Sequence
  Synthetic
aauuauuuuuuguguaauaauaca

SEQ ID NO: 462046 - RNA, 18 nt, Artificial Sequence
  Synthetic
uugcaguaauguaauaca

SEQ ID NO: 462047 - RNA, 19 nt, Artificial Sequence
  Synthetic
uuugcaguaauguaauaca

SEQ ID NO: 462048 - RNA, 20 nt, Artificial Sequence
  Synthetic
uuuugcaguaauguaauaca

SEQ ID NO: 462049 - RNA, 21 nt, Artificial Sequence
  Synthetic
uuuuugcaguaauguaauaca

SEQ ID NO: 462050 - RNA, 22 nt, Artificial Sequence
  Synthetic
auuuuugcaguaauguaauaca

SEQ ID NO: 462051 - RNA, 23 nt, Artificial Sequence
  Synthetic
uauuuuugcaguaauguaauaca

SEQ ID NO: 462052 - RNA, 24 nt, Artificial Sequence
  Synthetic
uuauuuuugcaguaauguaauaca

SEQ ID NO: 462053 - RNA, 18 nt, Artificial Sequence
  Synthetic
uaguuuguuuuuaauaca

SEQ ID NO: 462054 - RNA, 19 nt, Artificial Sequence
  Synthetic
auaguuuguuuuuaauaca

SEQ ID NO: 462055 - RNA, 20 nt, Artificial Sequence
  Synthetic
aauaguuuguuuuuaauaca

SEQ ID NO: 462056 - RNA, 21 nt, Artificial Sequence
  Synthetic
uaauaguuuguuuuuaauaca

SEQ ID NO: 462057 - RNA, 22 nt, Artificial Sequence
  Synthetic
guaauaguuuguuuuuaauaca

SEQ ID NO: 462058 - RNA, 23 nt, Artificial Sequence
  Synthetic
cguaauaguuuguuuuuaauaca

SEQ ID NO: 462059 - RNA, 24 nt, Artificial Sequence
  Synthetic
acguaauaguuuguuuuuaauaca

SEQ ID NO: 462060 - RNA, 18 nt, Artificial Sequence
  Synthetic
aggugccaagaacauaca

SEQ ID NO: 462061 - RNA, 19 nt, Artificial Sequence
  Synthetic
aaggugccaagaacauaca

SEQ ID NO: 462062 - RNA, 20 nt, Artificial Sequence
  Synthetic
aaaggugccaagaacauaca

SEQ ID NO: 462063 - RNA, 21 nt, Artificial Sequence
  Synthetic
caaaggugccaagaacauaca

SEQ ID NO: 462064 - RNA, 22 nt, Artificial Sequence
  Synthetic
acaaaggugccaagaacauaca

SEQ ID NO: 462065 - RNA, 23 nt, Artificial Sequence
  Synthetic
gacaaaggugccaagaacauaca

SEQ ID NO: 462066 - RNA, 24 nt, Artificial Sequence
  Synthetic
ugacaaaggugccaagaacauaca

SEQ ID NO: 462067 - RNA, 18 nt, Artificial Sequence
  Synthetic
acaagggaugcacauaca

SEQ ID NO: 462068 - RNA, 19 nt, Artificial Sequence
  Synthetic
uacaagggaugcacauaca

SEQ ID NO: 462069 - RNA, 20 nt, Artificial Sequence
  Synthetic
cuacaagggaugcacauaca

SEQ ID NO: 462070 - RNA, 21 nt, Artificial Sequence
  Synthetic
gcuacaagggaugcacauaca

SEQ ID NO: 462071 - RNA, 22 nt, Artificial Sequence
  Synthetic
agcuacaagggaugcacauaca

SEQ ID NO: 462072 - RNA, 23 nt, Artificial Sequence
  Synthetic
cagcuacaagggaugcacauaca

SEQ ID NO: 462073 - RNA, 24 nt, Artificial Sequence
  Synthetic
acagcuacaagggaugcacauaca

SEQ ID NO: 462074 - RNA, 18 nt, Artificial Sequence
  Synthetic
auugcguauauacauaca

SEQ ID NO: 462075 - RNA, 19 nt, Artificial Sequence
  Synthetic
gauugcguauauacauaca

SEQ ID NO: 462076 - RNA, 20 nt, Artificial Sequence
  Synthetic
ugauugcguauauacauaca

SEQ ID NO: 462077 - RNA, 21 nt, Artificial Sequence
  Synthetic
augauugcguauauacauaca

SEQ ID NO: 462078 - RNA, 22 nt, Artificial Sequence
  Synthetic
aaugauugcguauauacauaca

SEQ ID NO: 462079 - RNA, 23 nt, Artificial Sequence
  Synthetic
aaaugauugcguauauacauaca

SEQ ID NO: 462080 - RNA, 24 nt, Artificial Sequence
  Synthetic
aaaaugauugcguauauacauaca

SEQ ID NO: 462081 - RNA, 18 nt, Artificial Sequence
  Synthetic
cuauguuauauacauaca

SEQ ID NO: 462082 - RNA, 19 nt, Artificial Sequence
  Synthetic
gcuauguuauauacauaca

SEQ ID NO: 462083 - RNA, 20 nt, Artificial Sequence
  Synthetic
agcuauguuauauacauaca

SEQ ID NO: 462084 - RNA, 21 nt, Artificial Sequence
  Synthetic
aagcuauguuauauacauaca

SEQ ID NO: 462085 - RNA, 22 nt, Artificial Sequence
  Synthetic
aaagcuauguuauauacauaca

SEQ ID NO: 462086 - RNA, 23 nt, Artificial Sequence
  Synthetic
uaaagcuauguuauauacauaca

SEQ ID NO: 462087 - RNA, 24 nt, Artificial Sequence
  Synthetic
auaaagcuauguuauauacauaca

SEQ ID NO: 462088 - RNA, 18 nt, Artificial Sequence
  Synthetic
guauuuucucuacauaca

SEQ ID NO: 462089 - RNA, 19 nt, Artificial Sequence
  Synthetic
aguauuuucucuacauaca

SEQ ID NO: 462090 - RNA, 20 nt, Artificial Sequence
  Synthetic
aaguauuuucucuacauaca

SEQ ID NO: 462091 - RNA, 21 nt, Artificial Sequence
  Synthetic
uaaguauuuucucuacauaca

SEQ ID NO: 462092 - RNA, 22 nt, Artificial Sequence
  Synthetic
uuaaguauuuucucuacauaca

SEQ ID NO: 462093 - RNA, 23 nt, Artificial Sequence
  Synthetic
cuuaaguauuuucucuacauaca

SEQ ID NO: 462094 - RNA, 24 nt, Artificial Sequence
  Synthetic
ucuuaaguauuuucucuacauaca

SEQ ID NO: 462095 - RNA, 18 nt, Artificial Sequence
  Synthetic
agcuagaagaaccauaca

SEQ ID NO: 462096 - RNA, 19 nt, Artificial Sequence
  Synthetic
cagcuagaagaaccauaca

SEQ ID NO: 462097 - RNA, 20 nt, Artificial Sequence
  Synthetic
gcagcuagaagaaccauaca

SEQ ID NO: 462098 - RNA, 21 nt, Artificial Sequence
  Synthetic
ugcagcuagaagaaccauaca

SEQ ID NO: 462099 - RNA, 22 nt, Artificial Sequence
  Synthetic
augcagcuagaagaaccauaca

SEQ ID NO: 462100 - RNA, 23 nt, Artificial Sequence
  Synthetic
aaugcagcuagaagaaccauaca

SEQ ID NO: 462101 - RNA, 24 nt, Artificial Sequence
  Synthetic
uaaugcagcuagaagaaccauaca

SEQ ID NO: 462102 - RNA, 18 nt, Artificial Sequence
  Synthetic
acauugucuaaccauaca

SEQ ID NO: 462103 - RNA, 19 nt, Artificial Sequence
  Synthetic
uacauugucuaaccauaca

SEQ ID NO: 462104 - RNA, 20 nt, Artificial Sequence
  Synthetic
guacauugucuaaccauaca

SEQ ID NO: 462105 - RNA, 21 nt, Artificial Sequence
  Synthetic
gguacauugucuaaccauaca

SEQ ID NO: 462106 - RNA, 22 nt, Artificial Sequence
  Synthetic
ugguacauugucuaaccauaca

SEQ ID NO: 462107 - RNA, 23 nt, Artificial Sequence
  Synthetic
gugguacauugucuaaccauaca

SEQ ID NO: 462108 - RNA, 24 nt, Artificial Sequence
  Synthetic
agugguacauugucuaaccauaca

SEQ ID NO: 462109 - RNA, 18 nt, Artificial Sequence
  Synthetic
acaauagaauaccauaca

SEQ ID NO: 462110 - RNA, 19 nt, Artificial Sequence
  Synthetic
cacaauagaauaccauaca

SEQ ID NO: 462111 - RNA, 20 nt, Artificial Sequence
  Synthetic
acacaauagaauaccauaca

SEQ ID NO: 462112 - RNA, 21 nt, Artificial Sequence
  Synthetic
cacacaauagaauaccauaca

SEQ ID NO: 462113 - RNA, 22 nt, Artificial Sequence
  Synthetic
ucacacaauagaauaccauaca

SEQ ID NO: 462114 - RNA, 23 nt, Artificial Sequence
  Synthetic
uucacacaauagaauaccauaca

SEQ ID NO: 462115 - RNA, 24 nt, Artificial Sequence
  Synthetic
auucacacaauagaauaccauaca

SEQ ID NO: 462116 - RNA, 18 nt, Artificial Sequence
  Synthetic
cacaauguaugccauaca

SEQ ID NO: 462117 - RNA, 19 nt, Artificial Sequence
  Synthetic
ucacaauguaugccauaca

SEQ ID NO: 462118 - RNA, 20 nt, Artificial Sequence
  Synthetic
aucacaauguaugccauaca

SEQ ID NO: 462119 - RNA, 21 nt, Artificial Sequence
  Synthetic
aaucacaauguaugccauaca

SEQ ID NO: 462120 - RNA, 22 nt, Artificial Sequence
  Synthetic
aaaucacaauguaugccauaca

SEQ ID NO: 462121 - RNA, 23 nt, Artificial Sequence
  Synthetic
caaaucacaauguaugccauaca

SEQ ID NO: 462122 - RNA, 24 nt, Artificial Sequence
  Synthetic
acaaaucacaauguaugccauaca

SEQ ID NO: 462123 - RNA, 18 nt, Artificial Sequence
  Synthetic
aagacauccauccauaca

SEQ ID NO: 462124 - RNA, 19 nt, Artificial Sequence
  Synthetic
aaagacauccauccauaca

SEQ ID NO: 462125 - RNA, 20 nt, Artificial Sequence
  Synthetic
caaagacauccauccauaca

SEQ ID NO: 462126 - RNA, 21 nt, Artificial Sequence
  Synthetic
ucaaagacauccauccauaca

SEQ ID NO: 462127 - RNA, 22 nt, Artificial Sequence
  Synthetic
cucaaagacauccauccauaca

SEQ ID NO: 462128 - RNA, 23 nt, Artificial Sequence
  Synthetic
ccucaaagacauccauccauaca

SEQ ID NO: 462129 - RNA, 24 nt, Artificial Sequence
  Synthetic
uccucaaagacauccauccauaca

SEQ ID NO: 462130 - RNA, 18 nt, Artificial Sequence
  Synthetic
cagaauauguuccauaca

SEQ ID NO: 462131 - RNA, 19 nt, Artificial Sequence
  Synthetic
ucagaauauguuccauaca

SEQ ID NO: 462132 - RNA, 20 nt, Artificial Sequence
  Synthetic
cucagaauauguuccauaca

SEQ ID NO: 462133 - RNA, 21 nt, Artificial Sequence
  Synthetic
ucucagaauauguuccauaca

SEQ ID NO: 462134 - RNA, 22 nt, Artificial Sequence
  Synthetic
uucucagaauauguuccauaca

SEQ ID NO: 462135 - RNA, 23 nt, Artificial Sequence
  Synthetic
guucucagaauauguuccauaca

SEQ ID NO: 462136 - RNA, 24 nt, Artificial Sequence
  Synthetic
uguucucagaauauguuccauaca

SEQ ID NO: 462137 - RNA, 18 nt, Artificial Sequence
  Synthetic
cauaauggguugcauaca

SEQ ID NO: 462138 - RNA, 19 nt, Artificial Sequence
  Synthetic
gcauaauggguugcauaca

SEQ ID NO: 462139 - RNA, 20 nt, Artificial Sequence
  Synthetic
agcauaauggguugcauaca

SEQ ID NO: 462140 - RNA, 21 nt, Artificial Sequence
  Synthetic
gagcauaauggguugcauaca

SEQ ID NO: 462141 - RNA, 22 nt, Artificial Sequence
  Synthetic
ugagcauaauggguugcauaca

SEQ ID NO: 462142 - RNA, 23 nt, Artificial Sequence
  Synthetic
uugagcauaauggguugcauaca

SEQ ID NO: 462143 - RNA, 24 nt, Artificial Sequence
  Synthetic
guugagcauaauggguugcauaca

SEQ ID NO: 462144 - RNA, 18 nt, Artificial Sequence
  Synthetic
cgcagagaaaaagauaca

SEQ ID NO: 462145 - RNA, 19 nt, Artificial Sequence
  Synthetic
ccgcagagaaaaagauaca

SEQ ID NO: 462146 - RNA, 20 nt, Artificial Sequence
  Synthetic
accgcagagaaaaagauaca

SEQ ID NO: 462147 - RNA, 21 nt, Artificial Sequence
  Synthetic
uaccgcagagaaaaagauaca

SEQ ID NO: 462148 - RNA, 22 nt, Artificial Sequence
  Synthetic
guaccgcagagaaaaagauaca

SEQ ID NO: 462149 - RNA, 23 nt, Artificial Sequence
  Synthetic
aguaccgcagagaaaaagauaca

SEQ ID NO: 462150 - RNA, 24 nt, Artificial Sequence
  Synthetic
caguaccgcagagaaaaagauaca

SEQ ID NO: 462151 - RNA, 18 nt, Artificial Sequence
  Synthetic
aacagggugaaagauaca

SEQ ID NO: 462152 - RNA, 19 nt, Artificial Sequence
  Synthetic
aaacagggugaaagauaca

SEQ ID NO: 462153 - RNA, 20 nt, Artificial Sequence
  Synthetic
gaaacagggugaaagauaca

SEQ ID NO: 462154 - RNA, 21 nt, Artificial Sequence
  Synthetic
agaaacagggugaaagauaca

SEQ ID NO: 462155 - RNA, 22 nt, Artificial Sequence
  Synthetic
aagaaacagggugaaagauaca

SEQ ID NO: 462156 - RNA, 23 nt, Artificial Sequence
  Synthetic
aaagaaacagggugaaagauaca

SEQ ID NO: 462157 - RNA, 24 nt, Artificial Sequence
  Synthetic
aaaagaaacagggugaaagauaca

SEQ ID NO: 462158 - RNA, 18 nt, Artificial Sequence
  Synthetic
auuacuuauuaagauaca

SEQ ID NO: 462159 - RNA, 19 nt, Artificial Sequence
  Synthetic
uauuacuuauuaagauaca

SEQ ID NO: 462160 - RNA, 20 nt, Artificial Sequence
  Synthetic
uuauuacuuauuaagauaca

SEQ ID NO: 462161 - RNA, 21 nt, Artificial Sequence
  Synthetic
guuauuacuuauuaagauaca

SEQ ID NO: 462162 - RNA, 22 nt, Artificial Sequence
  Synthetic
aguuauuacuuauuaagauaca

SEQ ID NO: 462163 - RNA, 23 nt, Artificial Sequence
  Synthetic
gaguuauuacuuauuaagauaca

SEQ ID NO: 462164 - RNA, 24 nt, Artificial Sequence
  Synthetic
ugaguuauuacuuauuaagauaca

SEQ ID NO: 462165 - RNA, 18 nt, Artificial Sequence
  Synthetic
uauauuaaaacagauaca

SEQ ID NO: 462166 - RNA, 19 nt, Artificial Sequence
  Synthetic
cuauauuaaaacagauaca

SEQ ID NO: 462167 - RNA, 20 nt, Artificial Sequence
  Synthetic
acuauauuaaaacagauaca

SEQ ID NO: 462168 - RNA, 21 nt, Artificial Sequence
  Synthetic
gacuauauuaaaacagauaca

SEQ ID NO: 462169 - RNA, 22 nt, Artificial Sequence
  Synthetic
ugacuauauuaaaacagauaca

SEQ ID NO: 462170 - RNA, 23 nt, Artificial Sequence
  Synthetic
cugacuauauuaaaacagauaca

SEQ ID NO: 462171 - RNA, 24 nt, Artificial Sequence
  Synthetic
gcugacuauauuaaaacagauaca

SEQ ID NO: 462172 - RNA, 18 nt, Artificial Sequence
  Synthetic
agaauucuuccagauaca

SEQ ID NO: 462173 - RNA, 19 nt, Artificial Sequence
  Synthetic
gagaauucuuccagauaca

SEQ ID NO: 462174 - RNA, 20 nt, Artificial Sequence
  Synthetic
agagaauucuuccagauaca

SEQ ID NO: 462175 - RNA, 21 nt, Artificial Sequence
  Synthetic
cagagaauucuuccagauaca

SEQ ID NO: 462176 - RNA, 22 nt, Artificial Sequence
  Synthetic
ccagagaauucuuccagauaca

SEQ ID NO: 462177 - RNA, 23 nt, Artificial Sequence
  Synthetic
accagagaauucuuccagauaca

SEQ ID NO: 462178 - RNA, 24 nt, Artificial Sequence
  Synthetic
caccagagaauucuuccagauaca

SEQ ID NO: 462179 - RNA, 18 nt, Artificial Sequence
  Synthetic
cuuaacauaagagauaca

SEQ ID NO: 462180 - RNA, 19 nt, Artificial Sequence
  Synthetic
ccuuaacauaagagauaca

SEQ ID NO: 462181 - RNA, 20 nt, Artificial Sequence
  Synthetic
gccuuaacauaagagauaca

SEQ ID NO: 462182 - RNA, 21 nt, Artificial Sequence
  Synthetic
ggccuuaacauaagagauaca

SEQ ID NO: 462183 - RNA, 22 nt, Artificial Sequence
  Synthetic
uggccuuaacauaagagauaca

SEQ ID NO: 462184 - RNA, 23 nt, Artificial Sequence
  Synthetic
cuggccuuaacauaagagauaca

SEQ ID NO: 462185 - RNA, 24 nt, Artificial Sequence
  Synthetic
ucuggccuuaacauaagagauaca

SEQ ID NO: 462186 - RNA, 18 nt, Artificial Sequence
  Synthetic
aauucuaccagagauaca

SEQ ID NO: 462187 - RNA, 19 nt, Artificial Sequence
  Synthetic
gaauucuaccagagauaca

SEQ ID NO: 462188 - RNA, 20 nt, Artificial Sequence
  Synthetic
ugaauucuaccagagauaca

SEQ ID NO: 462189 - RNA, 21 nt, Artificial Sequence
  Synthetic
cugaauucuaccagagauaca

SEQ ID NO: 462190 - RNA, 22 nt, Artificial Sequence
  Synthetic
gcugaauucuaccagagauaca

SEQ ID NO: 462191 - RNA, 23 nt, Artificial Sequence
  Synthetic
agcugaauucuaccagagauaca

SEQ ID NO: 462192 - RNA, 24 nt, Artificial Sequence
  Synthetic
cagcugaauucuaccagagauaca

SEQ ID NO: 462193 - RNA, 18 nt, Artificial Sequence
  Synthetic
gguauuaguugagauaca

SEQ ID NO: 462194 - RNA, 19 nt, Artificial Sequence
  Synthetic
agguauuaguugagauaca

SEQ ID NO: 462195 - RNA, 20 nt, Artificial Sequence
  Synthetic
aagguauuaguugagauaca

SEQ ID NO: 462196 - RNA, 21 nt, Artificial Sequence
  Synthetic
aaagguauuaguugagauaca

SEQ ID NO: 462197 - RNA, 22 nt, Artificial Sequence
  Synthetic
aaaagguauuaguugagauaca

SEQ ID NO: 462198 - RNA, 23 nt, Artificial Sequence
  Synthetic
uaaaagguauuaguugagauaca

SEQ ID NO: 462199 - RNA, 24 nt, Artificial Sequence
  Synthetic
uuaaaagguauuaguugagauaca

SEQ ID NO: 462200 - RNA, 18 nt, Artificial Sequence
  Synthetic
aguuacuuccaggauaca

SEQ ID NO: 462201 - RNA, 19 nt, Artificial Sequence
  Synthetic
uaguuacuuccaggauaca

SEQ ID NO: 462202 - RNA, 20 nt, Artificial Sequence
  Synthetic
uuaguuacuuccaggauaca

SEQ ID NO: 462203 - RNA, 21 nt, Artificial Sequence
  Synthetic
guuaguuacuuccaggauaca

SEQ ID NO: 462204 - RNA, 22 nt, Artificial Sequence
  Synthetic
aguuaguuacuuccaggauaca

SEQ ID NO: 462205 - RNA, 23 nt, Artificial Sequence
  Synthetic
aaguuaguuacuuccaggauaca

SEQ ID NO: 462206 - RNA, 24 nt, Artificial Sequence
  Synthetic
caaguuaguuacuuccaggauaca

SEQ ID NO: 462207 - RNA, 18 nt, Artificial Sequence
  Synthetic
cuaagucucuaggauaca

SEQ ID NO: 462208 - RNA, 19 nt, Artificial Sequence
  Synthetic
ccuaagucucuaggauaca

SEQ ID NO: 462209 - RNA, 20 nt, Artificial Sequence
  Synthetic
cccuaagucucuaggauaca

SEQ ID NO: 462210 - RNA, 21 nt, Artificial Sequence
  Synthetic
ccccuaagucucuaggauaca

SEQ ID NO: 462211 - RNA, 22 nt, Artificial Sequence
  Synthetic
gccccuaagucucuaggauaca

SEQ ID NO: 462212 - RNA, 23 nt, Artificial Sequence
  Synthetic
ugccccuaagucucuaggauaca

SEQ ID NO: 462213 - RNA, 24 nt, Artificial Sequence
  Synthetic
cugccccuaagucucuaggauaca

SEQ ID NO: 462214 - RNA, 18 nt, Artificial Sequence
  Synthetic
aucuucacugcggauaca

SEQ ID NO: 462215 - RNA, 19 nt, Artificial Sequence
  Synthetic
aaucuucacugcggauaca

SEQ ID NO: 462216 - RNA, 20 nt, Artificial Sequence
  Synthetic
uaaucuucacugcggauaca

SEQ ID NO: 462217 - RNA, 21 nt, Artificial Sequence
  Synthetic
uuaaucuucacugcggauaca

SEQ ID NO: 462218 - RNA, 22 nt, Artificial Sequence
  Synthetic
auuaaucuucacugcggauaca

SEQ ID NO: 462219 - RNA, 23 nt, Artificial Sequence
  Synthetic
cauuaaucuucacugcggauaca

SEQ ID NO: 462220 - RNA, 24 nt, Artificial Sequence
  Synthetic
ucauuaaucuucacugcggauaca

SEQ ID NO: 462221 - RNA, 18 nt, Artificial Sequence
  Synthetic
caaggcuaaagggauaca

SEQ ID NO: 462222 - RNA, 19 nt, Artificial Sequence
  Synthetic
ccaaggcuaaagggauaca

SEQ ID NO: 462223 - RNA, 20 nt, Artificial Sequence
  Synthetic
gccaaggcuaaagggauaca

SEQ ID NO: 462224 - RNA, 21 nt, Artificial Sequence
  Synthetic
agccaaggcuaaagggauaca

SEQ ID NO: 462225 - RNA, 22 nt, Artificial Sequence
  Synthetic
gagccaaggcuaaagggauaca

SEQ ID NO: 462226 - RNA, 23 nt, Artificial Sequence
  Synthetic
cgagccaaggcuaaagggauaca

SEQ ID NO: 462227 - RNA, 24 nt, Artificial Sequence
  Synthetic
acgagccaaggcuaaagggauaca

SEQ ID NO: 462228 - RNA, 18 nt, Artificial Sequence
  Synthetic
aggcauaagaaugauaca

SEQ ID NO: 462229 - RNA, 19 nt, Artificial Sequence
  Synthetic
aaggcauaagaaugauaca

SEQ ID NO: 462230 - RNA, 20 nt, Artificial Sequence
  Synthetic
aaaggcauaagaaugauaca

SEQ ID NO: 462231 - RNA, 21 nt, Artificial Sequence
  Synthetic
caaaggcauaagaaugauaca

SEQ ID NO: 462232 - RNA, 22 nt, Artificial Sequence
  Synthetic
gcaaaggcauaagaaugauaca

SEQ ID NO: 462233 - RNA, 23 nt, Artificial Sequence
  Synthetic
ugcaaaggcauaagaaugauaca

SEQ ID NO: 462234 - RNA, 24 nt, Artificial Sequence
  Synthetic
augcaaaggcauaagaaugauaca

SEQ ID NO: 462235 - RNA, 18 nt, Artificial Sequence
  Synthetic
ccugggaaaacugauaca

SEQ ID NO: 462236 - RNA, 19 nt, Artificial Sequence
  Synthetic
uccugggaaaacugauaca

SEQ ID NO: 462237 - RNA, 20 nt, Artificial Sequence
  Synthetic
uuccugggaaaacugauaca

SEQ ID NO: 462238 - RNA, 21 nt, Artificial Sequence
  Synthetic
uuuccugggaaaacugauaca

SEQ ID NO: 462239 - RNA, 22 nt, Artificial Sequence
  Synthetic
uuuuccugggaaaacugauaca

SEQ ID NO: 462240 - RNA, 23 nt, Artificial Sequence
  Synthetic
uuuuuccugggaaaacugauaca

SEQ ID NO: 462241 - RNA, 24 nt, Artificial Sequence
  Synthetic
guuuuuccugggaaaacugauaca

SEQ ID NO: 462242 - RNA, 18 nt, Artificial Sequence
  Synthetic
gacauacggagugauaca

SEQ ID NO: 462243 - RNA, 19 nt, Artificial Sequence
  Synthetic
agacauacggagugauaca

SEQ ID NO: 462244 - RNA, 20 nt, Artificial Sequence
  Synthetic
aagacauacggagugauaca

SEQ ID NO: 462245 - RNA, 21 nt, Artificial Sequence
  Synthetic
aaagacauacggagugauaca

SEQ ID NO: 462246 - RNA, 22 nt, Artificial Sequence
  Synthetic
caaagacauacggagugauaca

SEQ ID NO: 462247 - RNA, 23 nt, Artificial Sequence
  Synthetic
acaaagacauacggagugauaca

SEQ ID NO: 462248 - RNA, 24 nt, Artificial Sequence
  Synthetic
uacaaagacauacggagugauaca

SEQ ID NO: 462249 - RNA, 18 nt, Artificial Sequence
  Synthetic
ugcugcuucugugauaca

SEQ ID NO: 462250 - RNA, 19 nt, Artificial Sequence
  Synthetic
cugcugcuucugugauaca

SEQ ID NO: 462251 - RNA, 20 nt, Artificial Sequence
  Synthetic
ccugcugcuucugugauaca

SEQ ID NO: 462252 - RNA, 21 nt, Artificial Sequence
  Synthetic
uccugcugcuucugugauaca

SEQ ID NO: 462253 - RNA, 22 nt, Artificial Sequence
  Synthetic
cuccugcugcuucugugauaca

SEQ ID NO: 462254 - RNA, 23 nt, Artificial Sequence
  Synthetic
gcuccugcugcuucugugauaca

SEQ ID NO: 462255 - RNA, 24 nt, Artificial Sequence
  Synthetic
ugcuccugcugcuucugugauaca

SEQ ID NO: 462256 - RNA, 18 nt, Artificial Sequence
  Synthetic
auuauucuaauugauaca

SEQ ID NO: 462257 - RNA, 19 nt, Artificial Sequence
  Synthetic
uauuauucuaauugauaca

SEQ ID NO: 462258 - RNA, 20 nt, Artificial Sequence
  Synthetic
auauuauucuaauugauaca

SEQ ID NO: 462259 - RNA, 21 nt, Artificial Sequence
  Synthetic
gauauuauucuaauugauaca

SEQ ID NO: 462260 - RNA, 22 nt, Artificial Sequence
  Synthetic
agauauuauucuaauugauaca

SEQ ID NO: 462261 - RNA, 23 nt, Artificial Sequence
  Synthetic
uagauauuauucuaauugauaca

SEQ ID NO: 462262 - RNA, 24 nt, Artificial Sequence
  Synthetic
cuagauauuauucuaauugauaca

SEQ ID NO: 462263 - RNA, 18 nt, Artificial Sequence
  Synthetic
uaauauccaaaauauaca

SEQ ID NO: 462264 - RNA, 19 nt, Artificial Sequence
  Synthetic
cuaauauccaaaauauaca

SEQ ID NO: 462265 - RNA, 20 nt, Artificial Sequence
  Synthetic
gcuaauauccaaaauauaca

SEQ ID NO: 462266 - RNA, 21 nt, Artificial Sequence
  Synthetic
ugcuaauauccaaaauauaca

SEQ ID NO: 462267 - RNA, 22 nt, Artificial Sequence
  Synthetic
gugcuaauauccaaaauauaca

SEQ ID NO: 462268 - RNA, 23 nt, Artificial Sequence
  Synthetic
ggugcuaauauccaaaauauaca

SEQ ID NO: 462269 - RNA, 24 nt, Artificial Sequence
  Synthetic
aggugcuaauauccaaaauauaca

SEQ ID NO: 462270 - RNA, 18 nt, Artificial Sequence
  Synthetic
agcaaagauaaauauaca

SEQ ID NO: 462271 - RNA, 19 nt, Artificial Sequence
  Synthetic
uagcaaagauaaauauaca

SEQ ID NO: 462272 - RNA, 20 nt, Artificial Sequence
  Synthetic
uuagcaaagauaaauauaca

SEQ ID NO: 462273 - RNA, 21 nt, Artificial Sequence
  Synthetic
auuagcaaagauaaauauaca

SEQ ID NO: 462274 - RNA, 22 nt, Artificial Sequence
  Synthetic
gauuagcaaagauaaauauaca

SEQ ID NO: 462275 - RNA, 23 nt, Artificial Sequence
  Synthetic
ugauuagcaaagauaaauauaca

SEQ ID NO: 462276 - RNA, 24 nt, Artificial Sequence
  Synthetic
augauuagcaaagauaaauauaca

SEQ ID NO: 462277 - RNA, 18 nt, Artificial Sequence
  Synthetic
ucauuaaagcaauauaca

SEQ ID NO: 462278 - RNA, 19 nt, Artificial Sequence
  Synthetic
aucauuaaagcaauauaca

SEQ ID NO: 462279 - RNA, 20 nt, Artificial Sequence
  Synthetic
uaucauuaaagcaauauaca

SEQ ID NO: 462280 - RNA, 21 nt, Artificial Sequence
  Synthetic
guaucauuaaagcaauauaca

SEQ ID NO: 462281 - RNA, 22 nt, Artificial Sequence
  Synthetic
aguaucauuaaagcaauauaca

SEQ ID NO: 462282 - RNA, 23 nt, Artificial Sequence
  Synthetic
uaguaucauuaaagcaauauaca

SEQ ID NO: 462283 - RNA, 24 nt, Artificial Sequence
  Synthetic
uuaguaucauuaaagcaauauaca

SEQ ID NO: 462284 - RNA, 18 nt, Artificial Sequence
  Synthetic
ccacauauaacauauaca

SEQ ID NO: 462285 - RNA, 19 nt, Artificial Sequence
  Synthetic
cccacauauaacauauaca

SEQ ID NO: 462286 - RNA, 20 nt, Artificial Sequence
  Synthetic
acccacauauaacauauaca

SEQ ID NO: 462287 - RNA, 21 nt, Artificial Sequence
  Synthetic
uacccacauauaacauauaca

SEQ ID NO: 462288 - RNA, 22 nt, Artificial Sequence
  Synthetic
auacccacauauaacauauaca

SEQ ID NO: 462289 - RNA, 23 nt, Artificial Sequence
  Synthetic
aauacccacauauaacauauaca

SEQ ID NO: 462290 - RNA, 24 nt, Artificial Sequence
  Synthetic
aaauacccacauauaacauauaca

SEQ ID NO: 462291 - RNA, 18 nt, Artificial Sequence
  Synthetic
cucuuugcaauauauaca

SEQ ID NO: 462292 - RNA, 19 nt, Artificial Sequence
  Synthetic
ccucuuugcaauauauaca

SEQ ID NO: 462293 - RNA, 20 nt, Artificial Sequence
  Synthetic
gccucuuugcaauauauaca

SEQ ID NO: 462294 - RNA, 21 nt, Artificial Sequence
  Synthetic
ugccucuuugcaauauauaca

SEQ ID NO: 462295 - RNA, 22 nt, Artificial Sequence
  Synthetic
uugccucuuugcaauauauaca

SEQ ID NO: 462296 - RNA, 23 nt, Artificial Sequence
  Synthetic
guugccucuuugcaauauauaca

SEQ ID NO: 462297 - RNA, 24 nt, Artificial Sequence
  Synthetic
gguugccucuuugcaauauauaca

SEQ ID NO: 462298 - RNA, 18 nt, Artificial Sequence
  Synthetic
ucucuaugcauauauaca

SEQ ID NO: 462299 - RNA, 19 nt, Artificial Sequence
  Synthetic
cucucuaugcauauauaca

SEQ ID NO: 462300 - RNA, 20 nt, Artificial Sequence
  Synthetic
ucucucuaugcauauauaca

SEQ ID NO: 462301 - RNA, 21 nt, Artificial Sequence
  Synthetic
uucucucuaugcauauauaca

SEQ ID NO: 462302 - RNA, 22 nt, Artificial Sequence
  Synthetic
cuucucucuaugcauauauaca

SEQ ID NO: 462303 - RNA, 23 nt, Artificial Sequence
  Synthetic
ucuucucucuaugcauauauaca

SEQ ID NO: 462304 - RNA, 24 nt, Artificial Sequence
  Synthetic
uucuucucucuaugcauauauaca

SEQ ID NO: 462305 - RNA, 18 nt, Artificial Sequence
  Synthetic
auaugucagauauauaca

SEQ ID NO: 462306 - RNA, 19 nt, Artificial Sequence
  Synthetic
uauaugucagauauauaca

SEQ ID NO: 462307 - RNA, 20 nt, Artificial Sequence
  Synthetic
auauaugucagauauauaca

SEQ ID NO: 462308 - RNA, 21 nt, Artificial Sequence
  Synthetic
aauauaugucagauauauaca

SEQ ID NO: 462309 - RNA, 22 nt, Artificial Sequence
  Synthetic
aaauauaugucagauauauaca

SEQ ID NO: 462310 - RNA, 23 nt, Artificial Sequence
  Synthetic
aaaauauaugucagauauauaca

SEQ ID NO: 462311 - RNA, 24 nt, Artificial Sequence
  Synthetic
caaaauauaugucagauauauaca

SEQ ID NO: 462312 - RNA, 18 nt, Artificial Sequence
  Synthetic
agagaggugauauauaca

SEQ ID NO: 462313 - RNA, 19 nt, Artificial Sequence
  Synthetic
cagagaggugauauauaca

SEQ ID NO: 462314 - RNA, 20 nt, Artificial Sequence
  Synthetic
ccagagaggugauauauaca

SEQ ID NO: 462315 - RNA, 21 nt, Artificial Sequence
  Synthetic
accagagaggugauauauaca

SEQ ID NO: 462316 - RNA, 22 nt, Artificial Sequence
  Synthetic
uaccagagaggugauauauaca

SEQ ID NO: 462317 - RNA, 23 nt, Artificial Sequence
  Synthetic
auaccagagaggugauauauaca

SEQ ID NO: 462318 - RNA, 24 nt, Artificial Sequence
  Synthetic
aauaccagagaggugauauauaca

SEQ ID NO: 462319 - RNA, 18 nt, Artificial Sequence
  Synthetic
aggauauguguauauaca

SEQ ID NO: 462320 - RNA, 19 nt, Artificial Sequence
  Synthetic
uaggauauguguauauaca

SEQ ID NO: 462321 - RNA, 20 nt, Artificial Sequence
  Synthetic
cuaggauauguguauauaca

SEQ ID NO: 462322 - RNA, 21 nt, Artificial Sequence
  Synthetic
ccuaggauauguguauauaca

SEQ ID NO: 462323 - RNA, 22 nt, Artificial Sequence
  Synthetic
uccuaggauauguguauauaca

SEQ ID NO: 462324 - RNA, 23 nt, Artificial Sequence
  Synthetic
guccuaggauauguguauauaca

SEQ ID NO: 462325 - RNA, 24 nt, Artificial Sequence
  Synthetic
aguccuaggauauguguauauaca

SEQ ID NO: 462326 - RNA, 18 nt, Artificial Sequence
  Synthetic
cuaaguauauuauauaca

SEQ ID NO: 462327 - RNA, 19 nt, Artificial Sequence
  Synthetic
ccuaaguauauuauauaca

SEQ ID NO: 462328 - RNA, 20 nt, Artificial Sequence
  Synthetic
uccuaaguauauuauauaca

SEQ ID NO: 462329 - RNA, 21 nt, Artificial Sequence
  Synthetic
guccuaaguauauuauauaca

SEQ ID NO: 462330 - RNA, 22 nt, Artificial Sequence
  Synthetic
uguccuaaguauauuauauaca

SEQ ID NO: 462331 - RNA, 23 nt, Artificial Sequence
  Synthetic
cuguccuaaguauauuauauaca

SEQ ID NO: 462332 - RNA, 24 nt, Artificial Sequence
  Synthetic
acuguccuaaguauauuauauaca

SEQ ID NO: 462333 - RNA, 18 nt, Artificial Sequence
  Synthetic
gaaaugaacuuauauaca

SEQ ID NO: 462334 - RNA, 19 nt, Artificial Sequence
  Synthetic
agaaaugaacuuauauaca

SEQ ID NO: 462335 - RNA, 20 nt, Artificial Sequence
  Synthetic
cagaaaugaacuuauauaca

SEQ ID NO: 462336 - RNA, 21 nt, Artificial Sequence
  Synthetic
ucagaaaugaacuuauauaca

SEQ ID NO: 462337 - RNA, 22 nt, Artificial Sequence
  Synthetic
cucagaaaugaacuuauauaca

SEQ ID NO: 462338 - RNA, 23 nt, Artificial Sequence
  Synthetic
acucagaaaugaacuuauauaca

SEQ ID NO: 462339 - RNA, 24 nt, Artificial Sequence
  Synthetic
aacucagaaaugaacuuauauaca

SEQ ID NO: 462340 - RNA, 18 nt, Artificial Sequence
  Synthetic
uugcuugcaagcuauaca

SEQ ID NO: 462341 - RNA, 19 nt, Artificial Sequence
  Synthetic
cuugcuugcaagcuauaca

SEQ ID NO: 462342 - RNA, 20 nt, Artificial Sequence
  Synthetic
acuugcuugcaagcuauaca

SEQ ID NO: 462343 - RNA, 21 nt, Artificial Sequence
  Synthetic
cacuugcuugcaagcuauaca

SEQ ID NO: 462344 - RNA, 22 nt, Artificial Sequence
  Synthetic
gcacuugcuugcaagcuauaca

SEQ ID NO: 462345 - RNA, 23 nt, Artificial Sequence
  Synthetic
ugcacuugcuugcaagcuauaca

SEQ ID NO: 462346 - RNA, 24 nt, Artificial Sequence
  Synthetic
augcacuugcuugcaagcuauaca

SEQ ID NO: 462347 - RNA, 18 nt, Artificial Sequence
  Synthetic
ucaaaaaaaagguauaca

SEQ ID NO: 462348 - RNA, 19 nt, Artificial Sequence
  Synthetic
uucaaaaaaaagguauaca

SEQ ID NO: 462349 - RNA, 20 nt, Artificial Sequence
  Synthetic
guucaaaaaaaagguauaca

SEQ ID NO: 462350 - RNA, 21 nt, Artificial Sequence
  Synthetic
aguucaaaaaaaagguauaca

SEQ ID NO: 462351 - RNA, 22 nt, Artificial Sequence
  Synthetic
aaguucaaaaaaaagguauaca

SEQ ID NO: 462352 - RNA, 23 nt, Artificial Sequence
  Synthetic
gaaguucaaaaaaaagguauaca

SEQ ID NO: 462353 - RNA, 24 nt, Artificial Sequence
  Synthetic
ugaaguucaaaaaaaagguauaca

SEQ ID NO: 462354 - RNA, 18 nt, Artificial Sequence
  Synthetic
aaucugaaaugguauaca

SEQ ID NO: 462355 - RNA, 19 nt, Artificial Sequence
  Synthetic
uaaucugaaaugguauaca

SEQ ID NO: 462356 - RNA, 20 nt, Artificial Sequence
  Synthetic
cuaaucugaaaugguauaca

SEQ ID NO: 462357 - RNA, 21 nt, Artificial Sequence
  Synthetic
acuaaucugaaaugguauaca

SEQ ID NO: 462358 - RNA, 22 nt, Artificial Sequence
  Synthetic
cacuaaucugaaaugguauaca

SEQ ID NO: 462359 - RNA, 23 nt, Artificial Sequence
  Synthetic
ucacuaaucugaaaugguauaca

SEQ ID NO: 462360 - RNA, 24 nt, Artificial Sequence
  Synthetic
aucacuaaucugaaaugguauaca

SEQ ID NO: 462361 - RNA, 18 nt, Artificial Sequence
  Synthetic
gguacacacugguauaca

SEQ ID NO: 462362 - RNA, 19 nt, Artificial Sequence
  Synthetic
ugguacacacugguauaca

SEQ ID NO: 462363 - RNA, 20 nt, Artificial Sequence
  Synthetic
uugguacacacugguauaca

SEQ ID NO: 462364 - RNA, 21 nt, Artificial Sequence
  Synthetic
auugguacacacugguauaca

SEQ ID NO: 462365 - RNA, 22 nt, Artificial Sequence
  Synthetic
aauugguacacacugguauaca

SEQ ID NO: 462366 - RNA, 23 nt, Artificial Sequence
  Synthetic
uaauugguacacacugguauaca

SEQ ID NO: 462367 - RNA, 24 nt, Artificial Sequence
  Synthetic
uuaauugguacacacugguauaca

SEQ ID NO: 462368 - RNA, 18 nt, Artificial Sequence
  Synthetic
uauauauguauguauaca

SEQ ID NO: 462369 - RNA, 19 nt, Artificial Sequence
  Synthetic
auauauauguauguauaca

SEQ ID NO: 462370 - RNA, 20 nt, Artificial Sequence
  Synthetic
uauauauauguauguauaca

SEQ ID NO: 462371 - RNA, 21 nt, Artificial Sequence
  Synthetic
auauauauauguauguauaca

SEQ ID NO: 462372 - RNA, 22 nt, Artificial Sequence
  Synthetic
uauauauauauguauguauaca

SEQ ID NO: 462373 - RNA, 23 nt, Artificial Sequence
  Synthetic
auauauauauauguauguauaca

SEQ ID NO: 462374 - RNA, 24 nt, Artificial Sequence
  Synthetic
uauauauauauauguauguauaca

SEQ ID NO: 462375 - RNA, 18 nt, Artificial Sequence
  Synthetic
aguuggguuauguauaca

SEQ ID NO: 462376 - RNA, 19 nt, Artificial Sequence
  Synthetic
aaguuggguuauguauaca

SEQ ID NO: 462377 - RNA, 20 nt, Artificial Sequence
  Synthetic
aaaguuggguuauguauaca

SEQ ID NO: 462378 - RNA, 21 nt, Artificial Sequence
  Synthetic
gaaaguuggguuauguauaca

SEQ ID NO: 462379 - RNA, 22 nt, Artificial Sequence
  Synthetic
ggaaaguuggguuauguauaca

SEQ ID NO: 462380 - RNA, 23 nt, Artificial Sequence
  Synthetic
gggaaaguuggguuauguauaca

SEQ ID NO: 462381 - RNA, 24 nt, Artificial Sequence
  Synthetic
ggggaaaguuggguuauguauaca

SEQ ID NO: 462382 - RNA, 18 nt, Artificial Sequence
  Synthetic
aguuuuauaguguauaca

SEQ ID NO: 462383 - RNA, 19 nt, Artificial Sequence
  Synthetic
aaguuuuauaguguauaca

SEQ ID NO: 462384 - RNA, 20 nt, Artificial Sequence
  Synthetic
aaaguuuuauaguguauaca

SEQ ID NO: 462385 - RNA, 21 nt, Artificial Sequence
  Synthetic
uaaaguuuuauaguguauaca

SEQ ID NO: 462386 - RNA, 22 nt, Artificial Sequence
  Synthetic
uuaaaguuuuauaguguauaca

SEQ ID NO: 462387 - RNA, 23 nt, Artificial Sequence
  Synthetic
cuuaaaguuuuauaguguauaca

SEQ ID NO: 462388 - RNA, 24 nt, Artificial Sequence
  Synthetic
acuuaaaguuuuauaguguauaca

SEQ ID NO: 462389 - RNA, 18 nt, Artificial Sequence
  Synthetic
uacucuaagauuuauaca

SEQ ID NO: 462390 - RNA, 19 nt, Artificial Sequence
  Synthetic
cuacucuaagauuuauaca

SEQ ID NO: 462391 - RNA, 20 nt, Artificial Sequence
  Synthetic
acuacucuaagauuuauaca

SEQ ID NO: 462392 - RNA, 21 nt, Artificial Sequence
  Synthetic
aacuacucuaagauuuauaca

SEQ ID NO: 462393 - RNA, 22 nt, Artificial Sequence
  Synthetic
aaacuacucuaagauuuauaca

SEQ ID NO: 462394 - RNA, 23 nt, Artificial Sequence
  Synthetic
uaaacuacucuaagauuuauaca

SEQ ID NO: 462395 - RNA, 24 nt, Artificial Sequence
  Synthetic
guaaacuacucuaagauuuauaca

SEQ ID NO: 462396 - RNA, 18 nt, Artificial Sequence
  Synthetic
cauuuuuauuuuuauaca

SEQ ID NO: 462397 - RNA, 19 nt, Artificial Sequence
  Synthetic
acauuuuuauuuuuauaca

SEQ ID NO: 462398 - RNA, 20 nt, Artificial Sequence
  Synthetic
uacauuuuuauuuuuauaca

SEQ ID NO: 462399 - RNA, 21 nt, Artificial Sequence
  Synthetic
cuacauuuuuauuuuuauaca

SEQ ID NO: 462400 - RNA, 22 nt, Artificial Sequence
  Synthetic
gcuacauuuuuauuuuuauaca

SEQ ID NO: 462401 - RNA, 23 nt, Artificial Sequence
  Synthetic
ugcuacauuuuuauuuuuauaca

SEQ ID NO: 462402 - RNA, 24 nt, Artificial Sequence
  Synthetic
cugcuacauuuuuauuuuuauaca

SEQ ID NO: 462403 - RNA, 18 nt, Artificial Sequence
  Synthetic
auacaaagcaaaacuaca

SEQ ID NO: 462404 - RNA, 19 nt, Artificial Sequence
  Synthetic
aauacaaagcaaaacuaca

SEQ ID NO: 462405 - RNA, 20 nt, Artificial Sequence
  Synthetic
aaauacaaagcaaaacuaca

SEQ ID NO: 462406 - RNA, 21 nt, Artificial Sequence
  Synthetic
gaaauacaaagcaaaacuaca

SEQ ID NO: 462407 - RNA, 22 nt, Artificial Sequence
  Synthetic
agaaauacaaagcaaaacuaca

SEQ ID NO: 462408 - RNA, 23 nt, Artificial Sequence
  Synthetic
cagaaauacaaagcaaaacuaca

SEQ ID NO: 462409 - RNA, 24 nt, Artificial Sequence
  Synthetic
acagaaauacaaagcaaaacuaca

SEQ ID NO: 462410 - RNA, 18 nt, Artificial Sequence
  Synthetic
ugaaauuagaaaacuaca

SEQ ID NO: 462411 - RNA, 19 nt, Artificial Sequence
  Synthetic
gugaaauuagaaaacuaca

SEQ ID NO: 462412 - RNA, 20 nt, Artificial Sequence
  Synthetic
ugugaaauuagaaaacuaca

SEQ ID NO: 462413 - RNA, 21 nt, Artificial Sequence
  Synthetic
gugugaaauuagaaaacuaca

SEQ ID NO: 462414 - RNA, 22 nt, Artificial Sequence
  Synthetic
ugugugaaauuagaaaacuaca

SEQ ID NO: 462415 - RNA, 23 nt, Artificial Sequence
  Synthetic
uugugugaaauuagaaaacuaca

SEQ ID NO: 462416 - RNA, 24 nt, Artificial Sequence
  Synthetic
auugugugaaauuagaaaacuaca

SEQ ID NO: 462417 - RNA, 18 nt, Artificial Sequence
  Synthetic
gucaaaccuaaaacuaca

SEQ ID NO: 462418 - RNA, 19 nt, Artificial Sequence
  Synthetic
ugucaaaccuaaaacuaca

SEQ ID NO: 462419 - RNA, 20 nt, Artificial Sequence
  Synthetic
augucaaaccuaaaacuaca

SEQ ID NO: 462420 - RNA, 21 nt, Artificial Sequence
  Synthetic
gaugucaaaccuaaaacuaca

SEQ ID NO: 462421 - RNA, 22 nt, Artificial Sequence
  Synthetic
ugaugucaaaccuaaaacuaca

SEQ ID NO: 462422 - RNA, 23 nt, Artificial Sequence
  Synthetic
gugaugucaaaccuaaaacuaca

SEQ ID NO: 462423 - RNA, 24 nt, Artificial Sequence
  Synthetic
ugugaugucaaaccuaaaacuaca

SEQ ID NO: 462424 - RNA, 18 nt, Artificial Sequence
  Synthetic
gacuugcuauaaacuaca

SEQ ID NO: 462425 - RNA, 19 nt, Artificial Sequence
  Synthetic
ugacuugcuauaaacuaca

SEQ ID NO: 462426 - RNA, 20 nt, Artificial Sequence
  Synthetic
augacuugcuauaaacuaca

SEQ ID NO: 462427 - RNA, 21 nt, Artificial Sequence
  Synthetic
gaugacuugcuauaaacuaca

SEQ ID NO: 462428 - RNA, 22 nt, Artificial Sequence
  Synthetic
ggaugacuugcuauaaacuaca

SEQ ID NO: 462429 - RNA, 23 nt, Artificial Sequence
  Synthetic
uggaugacuugcuauaaacuaca

SEQ ID NO: 462430 - RNA, 24 nt, Artificial Sequence
  Synthetic
cuggaugacuugcuauaaacuaca

SEQ ID NO: 462431 - RNA, 18 nt, Artificial Sequence
  Synthetic
ugcauaaccgcaacuaca

SEQ ID NO: 462432 - RNA, 19 nt, Artificial Sequence
  Synthetic
augcauaaccgcaacuaca

SEQ ID NO: 462433 - RNA, 20 nt, Artificial Sequence
  Synthetic
caugcauaaccgcaacuaca

SEQ ID NO: 462434 - RNA, 21 nt, Artificial Sequence
  Synthetic
ucaugcauaaccgcaacuaca

SEQ ID NO: 462435 - RNA, 22 nt, Artificial Sequence
  Synthetic
uucaugcauaaccgcaacuaca

SEQ ID NO: 462436 - RNA, 23 nt, Artificial Sequence
  Synthetic
auucaugcauaaccgcaacuaca

SEQ ID NO: 462437 - RNA, 24 nt, Artificial Sequence
  Synthetic
uauucaugcauaaccgcaacuaca

SEQ ID NO: 462438 - RNA, 18 nt, Artificial Sequence
  Synthetic
caaagccgcucaacuaca

SEQ ID NO: 462439 - RNA, 19 nt, Artificial Sequence
  Synthetic
ucaaagccgcucaacuaca

SEQ ID NO: 462440 - RNA, 20 nt, Artificial Sequence
  Synthetic
cucaaagccgcucaacuaca

SEQ ID NO: 462441 - RNA, 21 nt, Artificial Sequence
  Synthetic
acucaaagccgcucaacuaca

SEQ ID NO: 462442 - RNA, 22 nt, Artificial Sequence
  Synthetic
cacucaaagccgcucaacuaca

SEQ ID NO: 462443 - RNA, 23 nt, Artificial Sequence
  Synthetic
ucacucaaagccgcucaacuaca

SEQ ID NO: 462444 - RNA, 24 nt, Artificial Sequence
  Synthetic
cucacucaaagccgcucaacuaca

SEQ ID NO: 462445 - RNA, 18 nt, Artificial Sequence
  Synthetic
aaguagucaagaacuaca

SEQ ID NO: 462446 - RNA, 19 nt, Artificial Sequence
  Synthetic
gaaguagucaagaacuaca

SEQ ID NO: 462447 - RNA, 20 nt, Artificial Sequence
  Synthetic
ugaaguagucaagaacuaca

SEQ ID NO: 462448 - RNA, 21 nt, Artificial Sequence
  Synthetic
uugaaguagucaagaacuaca

SEQ ID NO: 462449 - RNA, 22 nt, Artificial Sequence
  Synthetic
uuugaaguagucaagaacuaca

SEQ ID NO: 462450 - RNA, 23 nt, Artificial Sequence
  Synthetic
auuugaaguagucaagaacuaca

SEQ ID NO: 462451 - RNA, 24 nt, Artificial Sequence
  Synthetic
uauuugaaguagucaagaacuaca

SEQ ID NO: 462452 - RNA, 18 nt, Artificial Sequence
  Synthetic
uuugaaucaauaacuaca

SEQ ID NO: 462453 - RNA, 19 nt, Artificial Sequence
  Synthetic
auuugaaucaauaacuaca

SEQ ID NO: 462454 - RNA, 20 nt, Artificial Sequence
  Synthetic
gauuugaaucaauaacuaca

SEQ ID NO: 462455 - RNA, 21 nt, Artificial Sequence
  Synthetic
ugauuugaaucaauaacuaca

SEQ ID NO: 462456 - RNA, 22 nt, Artificial Sequence
  Synthetic
uugauuugaaucaauaacuaca

SEQ ID NO: 462457 - RNA, 23 nt, Artificial Sequence
  Synthetic
cuugauuugaaucaauaacuaca

SEQ ID NO: 462458 - RNA, 24 nt, Artificial Sequence
  Synthetic
ucuugauuugaaucaauaacuaca

SEQ ID NO: 462459 - RNA, 18 nt, Artificial Sequence
  Synthetic
ccaggcaaagacacuaca

SEQ ID NO: 462460 - RNA, 19 nt, Artificial Sequence
  Synthetic
gccaggcaaagacacuaca

SEQ ID NO: 462461 - RNA, 20 nt, Artificial Sequence
  Synthetic
agccaggcaaagacacuaca

SEQ ID NO: 462462 - RNA, 21 nt, Artificial Sequence
  Synthetic
aagccaggcaaagacacuaca

SEQ ID NO: 462463 - RNA, 22 nt, Artificial Sequence
  Synthetic
aaagccaggcaaagacacuaca

SEQ ID NO: 462464 - RNA, 23 nt, Artificial Sequence
  Synthetic
caaagccaggcaaagacacuaca

SEQ ID NO: 462465 - RNA, 24 nt, Artificial Sequence
  Synthetic
ccaaagccaggcaaagacacuaca

SEQ ID NO: 462466 - RNA, 18 nt, Artificial Sequence
  Synthetic
uuagacaauuacacuaca

SEQ ID NO: 462467 - RNA, 19 nt, Artificial Sequence
  Synthetic
guuagacaauuacacuaca

SEQ ID NO: 462468 - RNA, 20 nt, Artificial Sequence
  Synthetic
aguuagacaauuacacuaca

SEQ ID NO: 462469 - RNA, 21 nt, Artificial Sequence
  Synthetic
aaguuagacaauuacacuaca

SEQ ID NO: 462470 - RNA, 22 nt, Artificial Sequence
  Synthetic
uaaguuagacaauuacacuaca

SEQ ID NO: 462471 - RNA, 23 nt, Artificial Sequence
  Synthetic
uuaaguuagacaauuacacuaca

SEQ ID NO: 462472 - RNA, 24 nt, Artificial Sequence
  Synthetic
auuaaguuagacaauuacacuaca

SEQ ID NO: 462473 - RNA, 18 nt, Artificial Sequence
  Synthetic
guguugacugccacuaca

SEQ ID NO: 462474 - RNA, 19 nt, Artificial Sequence
  Synthetic
gguguugacugccacuaca

SEQ ID NO: 462475 - RNA, 20 nt, Artificial Sequence
  Synthetic
agguguugacugccacuaca

SEQ ID NO: 462476 - RNA, 21 nt, Artificial Sequence
  Synthetic
gagguguugacugccacuaca

SEQ ID NO: 462477 - RNA, 22 nt, Artificial Sequence
  Synthetic
cgagguguugacugccacuaca

SEQ ID NO: 462478 - RNA, 23 nt, Artificial Sequence
  Synthetic
acgagguguugacugccacuaca

SEQ ID NO: 462479 - RNA, 24 nt, Artificial Sequence
  Synthetic
cacgagguguugacugccacuaca

SEQ ID NO: 462480 - RNA, 18 nt, Artificial Sequence
  Synthetic
ggauuggccgucacuaca

SEQ ID NO: 462481 - RNA, 19 nt, Artificial Sequence
  Synthetic
gggauuggccgucacuaca

SEQ ID NO: 462482 - RNA, 20 nt, Artificial Sequence
  Synthetic
ugggauuggccgucacuaca

SEQ ID NO: 462483 - RNA, 21 nt, Artificial Sequence
  Synthetic
cugggauuggccgucacuaca

SEQ ID NO: 462484 - RNA, 22 nt, Artificial Sequence
  Synthetic
ucugggauuggccgucacuaca

SEQ ID NO: 462485 - RNA, 23 nt, Artificial Sequence
  Synthetic
aucugggauuggccgucacuaca

SEQ ID NO: 462486 - RNA, 24 nt, Artificial Sequence
  Synthetic
aaucugggauuggccgucacuaca

SEQ ID NO: 462487 - RNA, 18 nt, Artificial Sequence
  Synthetic
uauugucagaagacuaca

SEQ ID NO: 462488 - RNA, 19 nt, Artificial Sequence
  Synthetic
auauugucagaagacuaca

SEQ ID NO: 462489 - RNA, 20 nt, Artificial Sequence
  Synthetic
aauauugucagaagacuaca

SEQ ID NO: 462490 - RNA, 21 nt, Artificial Sequence
  Synthetic
gaauauugucagaagacuaca

SEQ ID NO: 462491 - RNA, 22 nt, Artificial Sequence
  Synthetic
ugaauauugucagaagacuaca

SEQ ID NO: 462492 - RNA, 23 nt, Artificial Sequence
  Synthetic
uugaauauugucagaagacuaca

SEQ ID NO: 462493 - RNA, 24 nt, Artificial Sequence
  Synthetic
uuugaauauugucagaagacuaca

SEQ ID NO: 462494 - RNA, 18 nt, Artificial Sequence
  Synthetic
uagacacuggggacuaca

SEQ ID NO: 462495 - RNA, 19 nt, Artificial Sequence
  Synthetic
auagacacuggggacuaca

SEQ ID NO: 462496 - RNA, 20 nt, Artificial Sequence
  Synthetic
aauagacacuggggacuaca

SEQ ID NO: 462497 - RNA, 21 nt, Artificial Sequence
  Synthetic
caauagacacuggggacuaca

SEQ ID NO: 462498 - RNA, 22 nt, Artificial Sequence
  Synthetic
acaauagacacuggggacuaca

SEQ ID NO: 462499 - RNA, 23 nt, Artificial Sequence
  Synthetic
aacaauagacacuggggacuaca

SEQ ID NO: 462500 - RNA, 24 nt, Artificial Sequence
  Synthetic
gaacaauagacacuggggacuaca

SEQ ID NO: 462501 - RNA, 18 nt, Artificial Sequence
  Synthetic
accaaaucacugacuaca

SEQ ID NO: 462502 - RNA, 19 nt, Artificial Sequence
  Synthetic
gaccaaaucacugacuaca

SEQ ID NO: 462503 - RNA, 20 nt, Artificial Sequence
  Synthetic
ugaccaaaucacugacuaca

SEQ ID NO: 462504 - RNA, 21 nt, Artificial Sequence
  Synthetic
uugaccaaaucacugacuaca

SEQ ID NO: 462505 - RNA, 22 nt, Artificial Sequence
  Synthetic
auugaccaaaucacugacuaca

SEQ ID NO: 462506 - RNA, 23 nt, Artificial Sequence
  Synthetic
gauugaccaaaucacugacuaca

SEQ ID NO: 462507 - RNA, 24 nt, Artificial Sequence
  Synthetic
ugauugaccaaaucacugacuaca

SEQ ID NO: 462508 - RNA, 18 nt, Artificial Sequence
  Synthetic
cugagaaauuugacuaca

SEQ ID NO: 462509 - RNA, 19 nt, Artificial Sequence
  Synthetic
gcugagaaauuugacuaca

SEQ ID NO: 462510 - RNA, 20 nt, Artificial Sequence
  Synthetic
ugcugagaaauuugacuaca

SEQ ID NO: 462511 - RNA, 21 nt, Artificial Sequence
  Synthetic
cugcugagaaauuugacuaca

SEQ ID NO: 462512 - RNA, 22 nt, Artificial Sequence
  Synthetic
acugcugagaaauuugacuaca

SEQ ID NO: 462513 - RNA, 23 nt, Artificial Sequence
  Synthetic
uacugcugagaaauuugacuaca

SEQ ID NO: 462514 - RNA, 24 nt, Artificial Sequence
  Synthetic
uuacugcugagaaauuugacuaca

SEQ ID NO: 462515 - RNA, 18 nt, Artificial Sequence
  Synthetic
ggcgaaacauauacuaca

SEQ ID NO: 462516 - RNA, 19 nt, Artificial Sequence
  Synthetic
aggcgaaacauauacuaca

SEQ ID NO: 462517 - RNA, 20 nt, Artificial Sequence
  Synthetic
gaggcgaaacauauacuaca

SEQ ID NO: 462518 - RNA, 21 nt, Artificial Sequence
  Synthetic
ggaggcgaaacauauacuaca

SEQ ID NO: 462519 - RNA, 22 nt, Artificial Sequence
  Synthetic
gggaggcgaaacauauacuaca

SEQ ID NO: 462520 - RNA, 23 nt, Artificial Sequence
  Synthetic
agggaggcgaaacauauacuaca

SEQ ID NO: 462521 - RNA, 24 nt, Artificial Sequence
  Synthetic
cagggaggcgaaacauauacuaca

SEQ ID NO: 462522 - RNA, 18 nt, Artificial Sequence
  Synthetic
aacuaagaaacuacuaca

SEQ ID NO: 462523 - RNA, 19 nt, Artificial Sequence
  Synthetic
aaacuaagaaacuacuaca

SEQ ID NO: 462524 - RNA, 20 nt, Artificial Sequence
  Synthetic
caaacuaagaaacuacuaca

SEQ ID NO: 462525 - RNA, 21 nt, Artificial Sequence
  Synthetic
ucaaacuaagaaacuacuaca

SEQ ID NO: 462526 - RNA, 22 nt, Artificial Sequence
  Synthetic
cucaaacuaagaaacuacuaca

SEQ ID NO: 462527 - RNA, 23 nt, Artificial Sequence
  Synthetic
ccucaaacuaagaaacuacuaca

SEQ ID NO: 462528 - RNA, 24 nt, Artificial Sequence
  Synthetic
accucaaacuaagaaacuacuaca

SEQ ID NO: 462529 - RNA, 18 nt, Artificial Sequence
  Synthetic
guaguuggggaaccuaca

SEQ ID NO: 462530 - RNA, 19 nt, Artificial Sequence
  Synthetic
aguaguuggggaaccuaca

SEQ ID NO: 462531 - RNA, 20 nt, Artificial Sequence
  Synthetic
gaguaguuggggaaccuaca

SEQ ID NO: 462532 - RNA, 21 nt, Artificial Sequence
  Synthetic
agaguaguuggggaaccuaca

SEQ ID NO: 462533 - RNA, 22 nt, Artificial Sequence
  Synthetic
cagaguaguuggggaaccuaca

SEQ ID NO: 462534 - RNA, 23 nt, Artificial Sequence
  Synthetic
gcagaguaguuggggaaccuaca

SEQ ID NO: 462535 - RNA, 24 nt, Artificial Sequence
  Synthetic
ugcagaguaguuggggaaccuaca

SEQ ID NO: 462536 - RNA, 18 nt, Artificial Sequence
  Synthetic
aaacaaaugacaccuaca

SEQ ID NO: 462537 - RNA, 19 nt, Artificial Sequence
  Synthetic
aaaacaaaugacaccuaca

SEQ ID NO: 462538 - RNA, 20 nt, Artificial Sequence
  Synthetic
gaaaacaaaugacaccuaca

SEQ ID NO: 462539 - RNA, 21 nt, Artificial Sequence
  Synthetic
agaaaacaaaugacaccuaca

SEQ ID NO: 462540 - RNA, 22 nt, Artificial Sequence
  Synthetic
aagaaaacaaaugacaccuaca

SEQ ID NO: 462541 - RNA, 23 nt, Artificial Sequence
  Synthetic
aaagaaaacaaaugacaccuaca

SEQ ID NO: 462542 - RNA, 24 nt, Artificial Sequence
  Synthetic
aaaagaaaacaaaugacaccuaca

SEQ ID NO: 462543 - RNA, 18 nt, Artificial Sequence
  Synthetic
aguccugagugaccuaca

SEQ ID NO: 462544 - RNA, 19 nt, Artificial Sequence
  Synthetic
aaguccugagugaccuaca

SEQ ID NO: 462545 - RNA, 20 nt, Artificial Sequence
  Synthetic
caaguccugagugaccuaca

SEQ ID NO: 462546 - RNA, 21 nt, Artificial Sequence
  Synthetic
gcaaguccugagugaccuaca

SEQ ID NO: 462547 - RNA, 22 nt, Artificial Sequence
  Synthetic
agcaaguccugagugaccuaca

SEQ ID NO: 462548 - RNA, 23 nt, Artificial Sequence
  Synthetic
aagcaaguccugagugaccuaca

SEQ ID NO: 462549 - RNA, 24 nt, Artificial Sequence
  Synthetic
aaagcaaguccugagugaccuaca

SEQ ID NO: 462550 - RNA, 18 nt, Artificial Sequence
  Synthetic
uucauccacgucccuaca

SEQ ID NO: 462551 - RNA, 19 nt, Artificial Sequence
  Synthetic
cuucauccacgucccuaca

SEQ ID NO: 462552 - RNA, 20 nt, Artificial Sequence
  Synthetic
gcuucauccacgucccuaca

SEQ ID NO: 462553 - RNA, 21 nt, Artificial Sequence
  Synthetic
agcuucauccacgucccuaca

SEQ ID NO: 462554 - RNA, 22 nt, Artificial Sequence
  Synthetic
cagcuucauccacgucccuaca

SEQ ID NO: 462555 - RNA, 23 nt, Artificial Sequence
  Synthetic
ccagcuucauccacgucccuaca

SEQ ID NO: 462556 - RNA, 24 nt, Artificial Sequence
  Synthetic
uccagcuucauccacgucccuaca

SEQ ID NO: 462557 - RNA, 21 nt, Artificial Sequence
  Synthetic
agcuucauccaugucccuaca

SEQ ID NO: 462558 - RNA, 22 nt, Artificial Sequence
  Synthetic
cagcuucauccaugucccuaca

SEQ ID NO: 462559 - RNA, 23 nt, Artificial Sequence
  Synthetic
ccagcuucauccaugucccuaca

SEQ ID NO: 462560 - RNA, 24 nt, Artificial Sequence
  Synthetic
uccagcuucauccaugucccuaca

SEQ ID NO: 462561 - RNA, 18 nt, Artificial Sequence
  Synthetic
ggaacugggaugccuaca

SEQ ID NO: 462562 - RNA, 19 nt, Artificial Sequence
  Synthetic
gggaacugggaugccuaca

SEQ ID NO: 462563 - RNA, 20 nt, Artificial Sequence
  Synthetic
ugggaacugggaugccuaca

SEQ ID NO: 462564 - RNA, 21 nt, Artificial Sequence
  Synthetic
uugggaacugggaugccuaca

SEQ ID NO: 462565 - RNA, 22 nt, Artificial Sequence
  Synthetic
cuugggaacugggaugccuaca

SEQ ID NO: 462566 - RNA, 23 nt, Artificial Sequence
  Synthetic
acuugggaacugggaugccuaca

SEQ ID NO: 462567 - RNA, 24 nt, Artificial Sequence
  Synthetic
cacuugggaacugggaugccuaca

SEQ ID NO: 462568 - RNA, 18 nt, Artificial Sequence
  Synthetic
uucacccaugugccuaca

SEQ ID NO: 462569 - RNA, 19 nt, Artificial Sequence
  Synthetic
uuucacccaugugccuaca

SEQ ID NO: 462570 - RNA, 20 nt, Artificial Sequence
  Synthetic
auuucacccaugugccuaca

SEQ ID NO: 462571 - RNA, 21 nt, Artificial Sequence
  Synthetic
aauuucacccaugugccuaca

SEQ ID NO: 462572 - RNA, 22 nt, Artificial Sequence
  Synthetic
caauuucacccaugugccuaca

SEQ ID NO: 462573 - RNA, 23 nt, Artificial Sequence
  Synthetic
ccaauuucacccaugugccuaca

SEQ ID NO: 462574 - RNA, 24 nt, Artificial Sequence
  Synthetic
uccaauuucacccaugugccuaca

SEQ ID NO: 462575 - RNA, 18 nt, Artificial Sequence
  Synthetic
cacacauacacuccuaca

SEQ ID NO: 462576 - RNA, 19 nt, Artificial Sequence
  Synthetic
acacacauacacuccuaca

SEQ ID NO: 462577 - RNA, 20 nt, Artificial Sequence
  Synthetic
uacacacauacacuccuaca

SEQ ID NO: 462578 - RNA, 21 nt, Artificial Sequence
  Synthetic
auacacacauacacuccuaca

SEQ ID NO: 462579 - RNA, 22 nt, Artificial Sequence
  Synthetic
cauacacacauacacuccuaca

SEQ ID NO: 462580 - RNA, 23 nt, Artificial Sequence
  Synthetic
ucauacacacauacacuccuaca

SEQ ID NO: 462581 - RNA, 24 nt, Artificial Sequence
  Synthetic
uucauacacacauacacuccuaca

SEQ ID NO: 462582 - RNA, 18 nt, Artificial Sequence
  Synthetic
acauauaucacuccuaca

SEQ ID NO: 462583 - RNA, 19 nt, Artificial Sequence
  Synthetic
gacauauaucacuccuaca

SEQ ID NO: 462584 - RNA, 20 nt, Artificial Sequence
  Synthetic
ugacauauaucacuccuaca

SEQ ID NO: 462585 - RNA, 21 nt, Artificial Sequence
  Synthetic
augacauauaucacuccuaca

SEQ ID NO: 462586 - RNA, 22 nt, Artificial Sequence
  Synthetic
aaugacauauaucacuccuaca

SEQ ID NO: 462587 - RNA, 23 nt, Artificial Sequence
  Synthetic
aaaugacauauaucacuccuaca

SEQ ID NO: 462588 - RNA, 24 nt, Artificial Sequence
  Synthetic
aaaaugacauauaucacuccuaca

SEQ ID NO: 462589 - RNA, 18 nt, Artificial Sequence
  Synthetic
acauguuuacuuccuaca

SEQ ID NO: 462590 - RNA, 19 nt, Artificial Sequence
  Synthetic
uacauguuuacuuccuaca

SEQ ID NO: 462591 - RNA, 20 nt, Artificial Sequence
  Synthetic
guacauguuuacuuccuaca

SEQ ID NO: 462592 - RNA, 21 nt, Artificial Sequence
  Synthetic
aguacauguuuacuuccuaca

SEQ ID NO: 462593 - RNA, 22 nt, Artificial Sequence
  Synthetic
uaguacauguuuacuuccuaca

SEQ ID NO: 462594 - RNA, 23 nt, Artificial Sequence
  Synthetic
cuaguacauguuuacuuccuaca

SEQ ID NO: 462595 - RNA, 24 nt, Artificial Sequence
  Synthetic
gcuaguacauguuuacuuccuaca

SEQ ID NO: 462596 - RNA, 18 nt, Artificial Sequence
  Synthetic
ggaggaugaaaagcuaca

SEQ ID NO: 462597 - RNA, 19 nt, Artificial Sequence
  Synthetic
uggaggaugaaaagcuaca

SEQ ID NO: 462598 - RNA, 20 nt, Artificial Sequence
  Synthetic
cuggaggaugaaaagcuaca

SEQ ID NO: 462599 - RNA, 21 nt, Artificial Sequence
  Synthetic
ucuggaggaugaaaagcuaca

SEQ ID NO: 462600 - RNA, 22 nt, Artificial Sequence
  Synthetic
uucuggaggaugaaaagcuaca

SEQ ID NO: 462601 - RNA, 23 nt, Artificial Sequence
  Synthetic
uuucuggaggaugaaaagcuaca

SEQ ID NO: 462602 - RNA, 24 nt, Artificial Sequence
  Synthetic
auuucuggaggaugaaaagcuaca

SEQ ID NO: 462603 - RNA, 18 nt, Artificial Sequence
  Synthetic
uccagcuuuacagcuaca

SEQ ID NO: 462604 - RNA, 19 nt, Artificial Sequence
  Synthetic
cuccagcuuuacagcuaca

SEQ ID NO: 462605 - RNA, 20 nt, Artificial Sequence
  Synthetic
acuccagcuuuacagcuaca

SEQ ID NO: 462606 - RNA, 21 nt, Artificial Sequence
  Synthetic
uacuccagcuuuacagcuaca

SEQ ID NO: 462607 - RNA, 22 nt, Artificial Sequence
  Synthetic
auacuccagcuuuacagcuaca

SEQ ID NO: 462608 - RNA, 23 nt, Artificial Sequence
  Synthetic
uauacuccagcuuuacagcuaca

SEQ ID NO: 462609 - RNA, 24 nt, Artificial Sequence
  Synthetic
cuauacuccagcuuuacagcuaca

SEQ ID NO: 462610 - RNA, 20 nt, Artificial Sequence
  Synthetic
cgccuguagucccagcuaca

SEQ ID NO: 462611 - RNA, 21 nt, Artificial Sequence
  Synthetic
gcgccuguagucccagcuaca

SEQ ID NO: 462612 - RNA, 22 nt, Artificial Sequence
  Synthetic
cgcgccuguagucccagcuaca

SEQ ID NO: 462613 - RNA, 23 nt, Artificial Sequence
  Synthetic
gcgcgccuguagucccagcuaca

SEQ ID NO: 462614 - RNA, 24 nt, Artificial Sequence
  Synthetic
cgcgcgccuguagucccagcuaca

SEQ ID NO: 462615 - RNA, 18 nt, Artificial Sequence
  Synthetic
cuauggagaauagcuaca

SEQ ID NO: 462616 - RNA, 19 nt, Artificial Sequence
  Synthetic
acuauggagaauagcuaca

SEQ ID NO: 462617 - RNA, 20 nt, Artificial Sequence
  Synthetic
uacuauggagaauagcuaca

SEQ ID NO: 462618 - RNA, 21 nt, Artificial Sequence
  Synthetic
auacuauggagaauagcuaca

SEQ ID NO: 462619 - RNA, 22 nt, Artificial Sequence
  Synthetic
aauacuauggagaauagcuaca

SEQ ID NO: 462620 - RNA, 23 nt, Artificial Sequence
  Synthetic
aaauacuauggagaauagcuaca

SEQ ID NO: 462621 - RNA, 24 nt, Artificial Sequence
  Synthetic
aaaauacuauggagaauagcuaca

SEQ ID NO: 462622 - RNA, 18 nt, Artificial Sequence
  Synthetic
guucaucagagggcuaca

SEQ ID NO: 462623 - RNA, 19 nt, Artificial Sequence
  Synthetic
aguucaucagagggcuaca

SEQ ID NO: 462624 - RNA, 20 nt, Artificial Sequence
  Synthetic
caguucaucagagggcuaca

SEQ ID NO: 462625 - RNA, 21 nt, Artificial Sequence
  Synthetic
gcaguucaucagagggcuaca

SEQ ID NO: 462626 - RNA, 22 nt, Artificial Sequence
  Synthetic
ugcaguucaucagagggcuaca

SEQ ID NO: 462627 - RNA, 23 nt, Artificial Sequence
  Synthetic
augcaguucaucagagggcuaca

SEQ ID NO: 462628 - RNA, 24 nt, Artificial Sequence
  Synthetic
caugcaguucaucagagggcuaca

SEQ ID NO: 462629 - RNA, 18 nt, Artificial Sequence
  Synthetic
uuacuuaaaaaugcuaca

SEQ ID NO: 462630 - RNA, 19 nt, Artificial Sequence
  Synthetic
guuacuuaaaaaugcuaca

SEQ ID NO: 462631 - RNA, 20 nt, Artificial Sequence
  Synthetic
aguuacuuaaaaaugcuaca

SEQ ID NO: 462632 - RNA, 21 nt, Artificial Sequence
  Synthetic
gaguuacuuaaaaaugcuaca

SEQ ID NO: 462633 - RNA, 22 nt, Artificial Sequence
  Synthetic
ggaguuacuuaaaaaugcuaca

SEQ ID NO: 462634 - RNA, 23 nt, Artificial Sequence
  Synthetic
aggaguuacuuaaaaaugcuaca

SEQ ID NO: 462635 - RNA, 24 nt, Artificial Sequence
  Synthetic
aaggaguuacuuaaaaaugcuaca

SEQ ID NO: 462636 - RNA, 18 nt, Artificial Sequence
  Synthetic
uauacuaugccugcuaca

SEQ ID NO: 462637 - RNA, 19 nt, Artificial Sequence
  Synthetic
uuauacuaugccugcuaca

SEQ ID NO: 462638 - RNA, 20 nt, Artificial Sequence
  Synthetic
auuauacuaugccugcuaca

SEQ ID NO: 462639 - RNA, 21 nt, Artificial Sequence
  Synthetic
aauuauacuaugccugcuaca

SEQ ID NO: 462640 - RNA, 22 nt, Artificial Sequence
  Synthetic
gaauuauacuaugccugcuaca

SEQ ID NO: 462641 - RNA, 23 nt, Artificial Sequence
  Synthetic
ggaauuauacuaugccugcuaca

SEQ ID NO: 462642 - RNA, 24 nt, Artificial Sequence
  Synthetic
aggaauuauacuaugccugcuaca

SEQ ID NO: 462643 - RNA, 18 nt, Artificial Sequence
  Synthetic
ccauuaaaaauugcuaca

SEQ ID NO: 462644 - RNA, 19 nt, Artificial Sequence
  Synthetic
cccauuaaaaauugcuaca

SEQ ID NO: 462645 - RNA, 20 nt, Artificial Sequence
  Synthetic
ucccauuaaaaauugcuaca

SEQ ID NO: 462646 - RNA, 21 nt, Artificial Sequence
  Synthetic
cucccauuaaaaauugcuaca

SEQ ID NO: 462647 - RNA, 22 nt, Artificial Sequence
  Synthetic
acucccauuaaaaauugcuaca

SEQ ID NO: 462648 - RNA, 23 nt, Artificial Sequence
  Synthetic
aacucccauuaaaaauugcuaca

SEQ ID NO: 462649 - RNA, 24 nt, Artificial Sequence
  Synthetic
gaacucccauuaaaaauugcuaca

SEQ ID NO: 462650 - RNA, 18 nt, Artificial Sequence
  Synthetic
cuauucacaauugcuaca

SEQ ID NO: 462651 - RNA, 19 nt, Artificial Sequence
  Synthetic
ccuauucacaauugcuaca

SEQ ID NO: 462652 - RNA, 20 nt, Artificial Sequence
  Synthetic
uccuauucacaauugcuaca

SEQ ID NO: 462653 - RNA, 21 nt, Artificial Sequence
  Synthetic
cuccuauucacaauugcuaca

SEQ ID NO: 462654 - RNA, 22 nt, Artificial Sequence
  Synthetic
acuccuauucacaauugcuaca

SEQ ID NO: 462655 - RNA, 23 nt, Artificial Sequence
  Synthetic
aacuccuauucacaauugcuaca

SEQ ID NO: 462656 - RNA, 24 nt, Artificial Sequence
  Synthetic
gaacuccuauucacaauugcuaca

SEQ ID NO: 462657 - RNA, 18 nt, Artificial Sequence
  Synthetic
acugcauggcuugcuaca

SEQ ID NO: 462658 - RNA, 19 nt, Artificial Sequence
  Synthetic
cacugcauggcuugcuaca

SEQ ID NO: 462659 - RNA, 20 nt, Artificial Sequence
  Synthetic
gcacugcauggcuugcuaca

SEQ ID NO: 462660 - RNA, 21 nt, Artificial Sequence
  Synthetic
ugcacugcauggcuugcuaca

SEQ ID NO: 462661 - RNA, 22 nt, Artificial Sequence
  Synthetic
gugcacugcauggcuugcuaca

SEQ ID NO: 462662 - RNA, 23 nt, Artificial Sequence
  Synthetic
ugugcacugcauggcuugcuaca

SEQ ID NO: 462663 - RNA, 24 nt, Artificial Sequence
  Synthetic
uugugcacugcauggcuugcuaca

SEQ ID NO: 462664 - RNA, 18 nt, Artificial Sequence
  Synthetic
ugcaugcauguugcuaca

SEQ ID NO: 462665 - RNA, 19 nt, Artificial Sequence
  Synthetic
uugcaugcauguugcuaca

SEQ ID NO: 462666 - RNA, 20 nt, Artificial Sequence
  Synthetic
guugcaugcauguugcuaca

SEQ ID NO: 462667 - RNA, 21 nt, Artificial Sequence
  Synthetic
aguugcaugcauguugcuaca

SEQ ID NO: 462668 - RNA, 22 nt, Artificial Sequence
  Synthetic
caguugcaugcauguugcuaca

SEQ ID NO: 462669 - RNA, 23 nt, Artificial Sequence
  Synthetic
ccaguugcaugcauguugcuaca

SEQ ID NO: 462670 - RNA, 24 nt, Artificial Sequence
  Synthetic
uccaguugcaugcauguugcuaca

SEQ ID NO: 462671 - RNA, 18 nt, Artificial Sequence
  Synthetic
uaauaucgagaaucuaca

SEQ ID NO: 462672 - RNA, 19 nt, Artificial Sequence
  Synthetic
cuaauaucgagaaucuaca

SEQ ID NO: 462673 - RNA, 20 nt, Artificial Sequence
  Synthetic
gcuaauaucgagaaucuaca

SEQ ID NO: 462674 - RNA, 21 nt, Artificial Sequence
  Synthetic
ggcuaauaucgagaaucuaca

SEQ ID NO: 462675 - RNA, 22 nt, Artificial Sequence
  Synthetic
gggcuaauaucgagaaucuaca

SEQ ID NO: 462676 - RNA, 23 nt, Artificial Sequence
  Synthetic
agggcuaauaucgagaaucuaca

SEQ ID NO: 462677 - RNA, 24 nt, Artificial Sequence
  Synthetic
aagggcuaauaucgagaaucuaca

SEQ ID NO: 462678 - RNA, 18 nt, Artificial Sequence
  Synthetic
gaaauucagucaucuaca

SEQ ID NO: 462679 - RNA, 19 nt, Artificial Sequence
  Synthetic
ugaaauucagucaucuaca

SEQ ID NO: 462680 - RNA, 20 nt, Artificial Sequence
  Synthetic
uugaaauucagucaucuaca

SEQ ID NO: 462681 - RNA, 21 nt, Artificial Sequence
  Synthetic
uuugaaauucagucaucuaca

SEQ ID NO: 462682 - RNA, 22 nt, Artificial Sequence
  Synthetic
guuugaaauucagucaucuaca

SEQ ID NO: 462683 - RNA, 23 nt, Artificial Sequence
  Synthetic
uguuugaaauucagucaucuaca

SEQ ID NO: 462684 - RNA, 24 nt, Artificial Sequence
  Synthetic
cuguuugaaauucagucaucuaca

SEQ ID NO: 462685 - RNA, 18 nt, Artificial Sequence
  Synthetic
aucggaggcagaucuaca

SEQ ID NO: 462686 - RNA, 19 nt, Artificial Sequence
  Synthetic
aaucggaggcagaucuaca

SEQ ID NO: 462687 - RNA, 20 nt, Artificial Sequence
  Synthetic
uaaucggaggcagaucuaca

SEQ ID NO: 462688 - RNA, 21 nt, Artificial Sequence
  Synthetic
auaaucggaggcagaucuaca

SEQ ID NO: 462689 - RNA, 22 nt, Artificial Sequence
  Synthetic
uauaaucggaggcagaucuaca

SEQ ID NO: 462690 - RNA, 23 nt, Artificial Sequence
  Synthetic
auauaaucggaggcagaucuaca

SEQ ID NO: 462691 - RNA, 24 nt, Artificial Sequence
  Synthetic
aauauaaucggaggcagaucuaca

SEQ ID NO: 462692 - RNA, 18 nt, Artificial Sequence
  Synthetic
aguauguugauaucuaca

SEQ ID NO: 462693 - RNA, 19 nt, Artificial Sequence
  Synthetic
aaguauguugauaucuaca

SEQ ID NO: 462694 - RNA, 20 nt, Artificial Sequence
  Synthetic
aaaguauguugauaucuaca

SEQ ID NO: 462695 - RNA, 21 nt, Artificial Sequence
  Synthetic
aaaaguauguugauaucuaca

SEQ ID NO: 462696 - RNA, 22 nt, Artificial Sequence
  Synthetic
uaaaaguauguugauaucuaca

SEQ ID NO: 462697 - RNA, 23 nt, Artificial Sequence
  Synthetic
auaaaaguauguugauaucuaca

SEQ ID NO: 462698 - RNA, 24 nt, Artificial Sequence
  Synthetic
aauaaaaguauguugauaucuaca

SEQ ID NO: 462699 - RNA, 18 nt, Artificial Sequence
  Synthetic
cuaguuugacacucuaca

SEQ ID NO: 462700 - RNA, 19 nt, Artificial Sequence
  Synthetic
gcuaguuugacacucuaca

SEQ ID NO: 462701 - RNA, 20 nt, Artificial Sequence
  Synthetic
ggcuaguuugacacucuaca

SEQ ID NO: 462702 - RNA, 21 nt, Artificial Sequence
  Synthetic
uggcuaguuugacacucuaca

SEQ ID NO: 462703 - RNA, 22 nt, Artificial Sequence
  Synthetic
auggcuaguuugacacucuaca

SEQ ID NO: 462704 - RNA, 23 nt, Artificial Sequence
  Synthetic
cauggcuaguuugacacucuaca

SEQ ID NO: 462705 - RNA, 24 nt, Artificial Sequence
  Synthetic
gcauggcuaguuugacacucuaca

SEQ ID NO: 462706 - RNA, 18 nt, Artificial Sequence
  Synthetic
aaugacagcaucucuaca

SEQ ID NO: 462707 - RNA, 19 nt, Artificial Sequence
  Synthetic
caaugacagcaucucuaca

SEQ ID NO: 462708 - RNA, 20 nt, Artificial Sequence
  Synthetic
ucaaugacagcaucucuaca

SEQ ID NO: 462709 - RNA, 21 nt, Artificial Sequence
  Synthetic
aucaaugacagcaucucuaca

SEQ ID NO: 462710 - RNA, 22 nt, Artificial Sequence
  Synthetic
gaucaaugacagcaucucuaca

SEQ ID NO: 462711 - RNA, 23 nt, Artificial Sequence
  Synthetic
ggaucaaugacagcaucucuaca

SEQ ID NO: 462712 - RNA, 24 nt, Artificial Sequence
  Synthetic
uggaucaaugacagcaucucuaca

SEQ ID NO: 462713 - RNA, 18 nt, Artificial Sequence
  Synthetic
ugcucucaucagucuaca

SEQ ID NO: 462714 - RNA, 19 nt, Artificial Sequence
  Synthetic
augcucucaucagucuaca

SEQ ID NO: 462715 - RNA, 20 nt, Artificial Sequence
  Synthetic
aaugcucucaucagucuaca

SEQ ID NO: 462716 - RNA, 21 nt, Artificial Sequence
  Synthetic
gaaugcucucaucagucuaca

SEQ ID NO: 462717 - RNA, 22 nt, Artificial Sequence
  Synthetic
agaaugcucucaucagucuaca

SEQ ID NO: 462718 - RNA, 23 nt, Artificial Sequence
  Synthetic
uagaaugcucucaucagucuaca

SEQ ID NO: 462719 - RNA, 24 nt, Artificial Sequence
  Synthetic
guagaaugcucucaucagucuaca

SEQ ID NO: 462720 - RNA, 18 nt, Artificial Sequence
  Synthetic
uugacaguagagucuaca

SEQ ID NO: 462721 - RNA, 19 nt, Artificial Sequence
  Synthetic
auugacaguagagucuaca

SEQ ID NO: 462722 - RNA, 20 nt, Artificial Sequence
  Synthetic
uauugacaguagagucuaca

SEQ ID NO: 462723 - RNA, 21 nt, Artificial Sequence
  Synthetic
auauugacaguagagucuaca

SEQ ID NO: 462724 - RNA, 22 nt, Artificial Sequence
  Synthetic
uauauugacaguagagucuaca

SEQ ID NO: 462725 - RNA, 23 nt, Artificial Sequence
  Synthetic
guauauugacaguagagucuaca

SEQ ID NO: 462726 - RNA, 24 nt, Artificial Sequence
  Synthetic
aguauauugacaguagagucuaca

SEQ ID NO: 462727 - RNA, 18 nt, Artificial Sequence
  Synthetic
gucuauguggagucuaca

SEQ ID NO: 462728 - RNA, 19 nt, Artificial Sequence
  Synthetic
agucuauguggagucuaca

SEQ ID NO: 462729 - RNA, 20 nt, Artificial Sequence
  Synthetic
uagucuauguggagucuaca

SEQ ID NO: 462730 - RNA, 21 nt, Artificial Sequence
  Synthetic
auagucuauguggagucuaca

SEQ ID NO: 462731 - RNA, 22 nt, Artificial Sequence
  Synthetic
cauagucuauguggagucuaca

SEQ ID NO: 462732 - RNA, 23 nt, Artificial Sequence
  Synthetic
ucauagucuauguggagucuaca

SEQ ID NO: 462733 - RNA, 24 nt, Artificial Sequence
  Synthetic
aucauagucuauguggagucuaca

SEQ ID NO: 462734 - RNA, 18 nt, Artificial Sequence
  Synthetic
gcagaggauaugucuaca

SEQ ID NO: 462735 - RNA, 19 nt, Artificial Sequence
  Synthetic
ggcagaggauaugucuaca

SEQ ID NO: 462736 - RNA, 20 nt, Artificial Sequence
  Synthetic
gggcagaggauaugucuaca

SEQ ID NO: 462737 - RNA, 21 nt, Artificial Sequence
  Synthetic
agggcagaggauaugucuaca

SEQ ID NO: 462738 - RNA, 22 nt, Artificial Sequence
  Synthetic
uagggcagaggauaugucuaca

SEQ ID NO: 462739 - RNA, 23 nt, Artificial Sequence
  Synthetic
auagggcagaggauaugucuaca

SEQ ID NO: 462740 - RNA, 24 nt, Artificial Sequence
  Synthetic
aauagggcagaggauaugucuaca

SEQ ID NO: 462741 - RNA, 18 nt, Artificial Sequence
  Synthetic
uuccaagcucauucuaca

SEQ ID NO: 462742 - RNA, 19 nt, Artificial Sequence
  Synthetic
cuuccaagcucauucuaca

SEQ ID NO: 462743 - RNA, 20 nt, Artificial Sequence
  Synthetic
acuuccaagcucauucuaca

SEQ ID NO: 462744 - RNA, 21 nt, Artificial Sequence
  Synthetic
cacuuccaagcucauucuaca

SEQ ID NO: 462745 - RNA, 22 nt, Artificial Sequence
  Synthetic
acacuuccaagcucauucuaca

SEQ ID NO: 462746 - RNA, 23 nt, Artificial Sequence
  Synthetic
aacacuuccaagcucauucuaca

SEQ ID NO: 462747 - RNA, 24 nt, Artificial Sequence
  Synthetic
gaacacuuccaagcucauucuaca

SEQ ID NO: 462748 - RNA, 18 nt, Artificial Sequence
  Synthetic
uguaugcuaacuucuaca

SEQ ID NO: 462749 - RNA, 19 nt, Artificial Sequence
  Synthetic
guguaugcuaacuucuaca

SEQ ID NO: 462750 - RNA, 20 nt, Artificial Sequence
  Synthetic
uguguaugcuaacuucuaca

SEQ ID NO: 462751 - RNA, 21 nt, Artificial Sequence
  Synthetic
cuguguaugcuaacuucuaca

SEQ ID NO: 462752 - RNA, 22 nt, Artificial Sequence
  Synthetic
acuguguaugcuaacuucuaca

SEQ ID NO: 462753 - RNA, 23 nt, Artificial Sequence
  Synthetic
uacuguguaugcuaacuucuaca

SEQ ID NO: 462754 - RNA, 24 nt, Artificial Sequence
  Synthetic
guacuguguaugcuaacuucuaca

SEQ ID NO: 462755 - RNA, 18 nt, Artificial Sequence
  Synthetic
uuuucaaacuuuucuaca

SEQ ID NO: 462756 - RNA, 19 nt, Artificial Sequence
  Synthetic
auuuucaaacuuuucuaca

SEQ ID NO: 462757 - RNA, 20 nt, Artificial Sequence
  Synthetic
uauuuucaaacuuuucuaca

SEQ ID NO: 462758 - RNA, 21 nt, Artificial Sequence
  Synthetic
guauuuucaaacuuuucuaca

SEQ ID NO: 462759 - RNA, 22 nt, Artificial Sequence
  Synthetic
uguauuuucaaacuuuucuaca

SEQ ID NO: 462760 - RNA, 23 nt, Artificial Sequence
  Synthetic
guguauuuucaaacuuuucuaca

SEQ ID NO: 462761 - RNA, 24 nt, Artificial Sequence
  Synthetic
uguguauuuucaaacuuuucuaca

SEQ ID NO: 462762 - RNA, 18 nt, Artificial Sequence
  Synthetic
aagcuagaagaaaguaca

SEQ ID NO: 462763 - RNA, 19 nt, Artificial Sequence
  Synthetic
gaagcuagaagaaaguaca

SEQ ID NO: 462764 - RNA, 20 nt, Artificial Sequence
  Synthetic
agaagcuagaagaaaguaca

SEQ ID NO: 462765 - RNA, 21 nt, Artificial Sequence
  Synthetic
aagaagcuagaagaaaguaca

SEQ ID NO: 462766 - RNA, 22 nt, Artificial Sequence
  Synthetic
gaagaagcuagaagaaaguaca

SEQ ID NO: 462767 - RNA, 23 nt, Artificial Sequence
  Synthetic
cgaagaagcuagaagaaaguaca

SEQ ID NO: 462768 - RNA, 24 nt, Artificial Sequence
  Synthetic
ucgaagaagcuagaagaaaguaca

SEQ ID NO: 462769 - RNA, 18 nt, Artificial Sequence
  Synthetic
ugacagguggaaaguaca

SEQ ID NO: 462770 - RNA, 19 nt, Artificial Sequence
  Synthetic
uugacagguggaaaguaca

SEQ ID NO: 462771 - RNA, 20 nt, Artificial Sequence
  Synthetic
cuugacagguggaaaguaca

SEQ ID NO: 462772 - RNA, 21 nt, Artificial Sequence
  Synthetic
gcuugacagguggaaaguaca

SEQ ID NO: 462773 - RNA, 22 nt, Artificial Sequence
  Synthetic
ggcuugacagguggaaaguaca

SEQ ID NO: 462774 - RNA, 23 nt, Artificial Sequence
  Synthetic
aggcuugacagguggaaaguaca

SEQ ID NO: 462775 - RNA, 24 nt, Artificial Sequence
  Synthetic
uaggcuugacagguggaaaguaca

SEQ ID NO: 462776 - RNA, 18 nt, Artificial Sequence
  Synthetic
ugaacucugacaaguaca

SEQ ID NO: 462777 - RNA, 19 nt, Artificial Sequence
  Synthetic
augaacucugacaaguaca

SEQ ID NO: 462778 - RNA, 20 nt, Artificial Sequence
  Synthetic
uaugaacucugacaaguaca

SEQ ID NO: 462779 - RNA, 21 nt, Artificial Sequence
  Synthetic
cuaugaacucugacaaguaca

SEQ ID NO: 462780 - RNA, 22 nt, Artificial Sequence
  Synthetic
gcuaugaacucugacaaguaca

SEQ ID NO: 462781 - RNA, 23 nt, Artificial Sequence
  Synthetic
agcuaugaacucugacaaguaca

SEQ ID NO: 462782 - RNA, 24 nt, Artificial Sequence
  Synthetic
cagcuaugaacucugacaaguaca

SEQ ID NO: 462783 - RNA, 18 nt, Artificial Sequence
  Synthetic
uuugaaagaggaaguaca

SEQ ID NO: 462784 - RNA, 19 nt, Artificial Sequence
  Synthetic
uuuugaaagaggaaguaca

SEQ ID NO: 462785 - RNA, 20 nt, Artificial Sequence
  Synthetic
guuuugaaagaggaaguaca

SEQ ID NO: 462786 - RNA, 21 nt, Artificial Sequence
  Synthetic
uguuuugaaagaggaaguaca

SEQ ID NO: 462787 - RNA, 22 nt, Artificial Sequence
  Synthetic
guguuuugaaagaggaaguaca

SEQ ID NO: 462788 - RNA, 23 nt, Artificial Sequence
  Synthetic
aguguuuugaaagaggaaguaca

SEQ ID NO: 462789 - RNA, 24 nt, Artificial Sequence
  Synthetic
gaguguuuugaaagaggaaguaca

SEQ ID NO: 462790 - RNA, 18 nt, Artificial Sequence
  Synthetic
aaguuauuaggaaguaca

SEQ ID NO: 462791 - RNA, 19 nt, Artificial Sequence
  Synthetic
aaaguuauuaggaaguaca

SEQ ID NO: 462792 - RNA, 20 nt, Artificial Sequence
  Synthetic
caaaguuauuaggaaguaca

SEQ ID NO: 462793 - RNA, 21 nt, Artificial Sequence
  Synthetic
gcaaaguuauuaggaaguaca

SEQ ID NO: 462794 - RNA, 22 nt, Artificial Sequence
  Synthetic
cgcaaaguuauuaggaaguaca

SEQ ID NO: 462795 - RNA, 23 nt, Artificial Sequence
  Synthetic
ccgcaaaguuauuaggaaguaca

SEQ ID NO: 462796 - RNA, 24 nt, Artificial Sequence
  Synthetic
uccgcaaaguuauuaggaaguaca

SEQ ID NO: 462797 - RNA, 18 nt, Artificial Sequence
  Synthetic
agcaaauaguuaaguaca

SEQ ID NO: 462798 - RNA, 19 nt, Artificial Sequence
  Synthetic
gagcaaauaguuaaguaca

SEQ ID NO: 462799 - RNA, 20 nt, Artificial Sequence
  Synthetic
agagcaaauaguuaaguaca

SEQ ID NO: 462800 - RNA, 21 nt, Artificial Sequence
  Synthetic
gagagcaaauaguuaaguaca

SEQ ID NO: 462801 - RNA, 22 nt, Artificial Sequence
  Synthetic
agagagcaaauaguuaaguaca

SEQ ID NO: 462802 - RNA, 23 nt, Artificial Sequence
  Synthetic
aagagagcaaauaguuaaguaca

SEQ ID NO: 462803 - RNA, 24 nt, Artificial Sequence
  Synthetic
aaagagagcaaauaguuaaguaca

SEQ ID NO: 462804 - RNA, 18 nt, Artificial Sequence
  Synthetic
aaaacugaaaacaguaca

SEQ ID NO: 462805 - RNA, 19 nt, Artificial Sequence
  Synthetic
uaaaacugaaaacaguaca

SEQ ID NO: 462806 - RNA, 20 nt, Artificial Sequence
  Synthetic
auaaaacugaaaacaguaca

SEQ ID NO: 462807 - RNA, 21 nt, Artificial Sequence
  Synthetic
aauaaaacugaaaacaguaca

SEQ ID NO: 462808 - RNA, 22 nt, Artificial Sequence
  Synthetic
gaauaaaacugaaaacaguaca

SEQ ID NO: 462809 - RNA, 23 nt, Artificial Sequence
  Synthetic
agaauaaaacugaaaacaguaca

SEQ ID NO: 462810 - RNA, 24 nt, Artificial Sequence
  Synthetic
uagaauaaaacugaaaacaguaca

SEQ ID NO: 462811 - RNA, 18 nt, Artificial Sequence
  Synthetic
ucaagaauauccaguaca

SEQ ID NO: 462812 - RNA, 19 nt, Artificial Sequence
  Synthetic
aucaagaauauccaguaca

SEQ ID NO: 462813 - RNA, 20 nt, Artificial Sequence
  Synthetic
uaucaagaauauccaguaca

SEQ ID NO: 462814 - RNA, 21 nt, Artificial Sequence
  Synthetic
cuaucaagaauauccaguaca

SEQ ID NO: 462815 - RNA, 22 nt, Artificial Sequence
  Synthetic
ucuaucaagaauauccaguaca

SEQ ID NO: 462816 - RNA, 23 nt, Artificial Sequence
  Synthetic
uucuaucaagaauauccaguaca

SEQ ID NO: 462817 - RNA, 24 nt, Artificial Sequence
  Synthetic
uuucuaucaagaauauccaguaca

SEQ ID NO: 462818 - RNA, 18 nt, Artificial Sequence
  Synthetic
ccugggacacggaguaca

SEQ ID NO: 462819 - RNA, 19 nt, Artificial Sequence
  Synthetic
gccugggacacggaguaca

SEQ ID NO: 462820 - RNA, 20 nt, Artificial Sequence
  Synthetic
ugccugggacacggaguaca

SEQ ID NO: 462821 - RNA, 21 nt, Artificial Sequence
  Synthetic
uugccugggacacggaguaca

SEQ ID NO: 462822 - RNA, 22 nt, Artificial Sequence
  Synthetic
cuugccugggacacggaguaca

SEQ ID NO: 462823 - RNA, 23 nt, Artificial Sequence
  Synthetic
ucuugccugggacacggaguaca

SEQ ID NO: 462824 - RNA, 24 nt, Artificial Sequence
  Synthetic
aucuugccugggacacggaguaca

SEQ ID NO: 462825 - RNA, 18 nt, Artificial Sequence
  Synthetic
gacugcaacgggaguaca

SEQ ID NO: 462826 - RNA, 19 nt, Artificial Sequence
  Synthetic
ugacugcaacgggaguaca

SEQ ID NO: 462827 - RNA, 20 nt, Artificial Sequence
  Synthetic
cugacugcaacgggaguaca

SEQ ID NO: 462828 - RNA, 21 nt, Artificial Sequence
  Synthetic
acugacugcaacgggaguaca

SEQ ID NO: 462829 - RNA, 22 nt, Artificial Sequence
  Synthetic
gacugacugcaacgggaguaca

SEQ ID NO: 462830 - RNA, 23 nt, Artificial Sequence
  Synthetic
agacugacugcaacgggaguaca

SEQ ID NO: 462831 - RNA, 24 nt, Artificial Sequence
  Synthetic
gagacugacugcaacgggaguaca

SEQ ID NO: 462832 - RNA, 18 nt, Artificial Sequence
  Synthetic
cacucagccuggaguaca

SEQ ID NO: 462833 - RNA, 19 nt, Artificial Sequence
  Synthetic
ucacucagccuggaguaca

SEQ ID NO: 462834 - RNA, 20 nt, Artificial Sequence
  Synthetic
gucacucagccuggaguaca

SEQ ID NO: 462835 - RNA, 21 nt, Artificial Sequence
  Synthetic
ugucacucagccuggaguaca

SEQ ID NO: 462836 - RNA, 22 nt, Artificial Sequence
  Synthetic
uugucacucagccuggaguaca

SEQ ID NO: 462837 - RNA, 23 nt, Artificial Sequence
  Synthetic
uuugucacucagccuggaguaca

SEQ ID NO: 462838 - RNA, 24 nt, Artificial Sequence
  Synthetic
cuuugucacucagccuggaguaca

SEQ ID NO: 462839 - RNA, 18 nt, Artificial Sequence
  Synthetic
uaaaacauuaugaguaca

SEQ ID NO: 462840 - RNA, 19 nt, Artificial Sequence
  Synthetic
auaaaacauuaugaguaca

SEQ ID NO: 462841 - RNA, 20 nt, Artificial Sequence
  Synthetic
uauaaaacauuaugaguaca

SEQ ID NO: 462842 - RNA, 21 nt, Artificial Sequence
  Synthetic
uuauaaaacauuaugaguaca

SEQ ID NO: 462843 - RNA, 22 nt, Artificial Sequence
  Synthetic
uuuauaaaacauuaugaguaca

SEQ ID NO: 462844 - RNA, 23 nt, Artificial Sequence
  Synthetic
auuuauaaaacauuaugaguaca

SEQ ID NO: 462845 - RNA, 24 nt, Artificial Sequence
  Synthetic
uauuuauaaaacauuaugaguaca

SEQ ID NO: 462846 - RNA, 18 nt, Artificial Sequence
  Synthetic
uaaccaaaggugaguaca

SEQ ID NO: 462847 - RNA, 19 nt, Artificial Sequence
  Synthetic
cuaaccaaaggugaguaca

SEQ ID NO: 462848 - RNA, 20 nt, Artificial Sequence
  Synthetic
gcuaaccaaaggugaguaca

SEQ ID NO: 462849 - RNA, 21 nt, Artificial Sequence
  Synthetic
agcuaaccaaaggugaguaca

SEQ ID NO: 462850 - RNA, 22 nt, Artificial Sequence
  Synthetic
gagcuaaccaaaggugaguaca

SEQ ID NO: 462851 - RNA, 23 nt, Artificial Sequence
  Synthetic
agagcuaaccaaaggugaguaca

SEQ ID NO: 462852 - RNA, 24 nt, Artificial Sequence
  Synthetic
cagagcuaaccaaaggugaguaca

SEQ ID NO: 462853 - RNA, 18 nt, Artificial Sequence
  Synthetic
gacacccacaauaguaca

SEQ ID NO: 462854 - RNA, 19 nt, Artificial Sequence
  Synthetic
ugacacccacaauaguaca

SEQ ID NO: 462855 - RNA, 20 nt, Artificial Sequence
  Synthetic
augacacccacaauaguaca

SEQ ID NO: 462856 - RNA, 21 nt, Artificial Sequence
  Synthetic
aaugacacccacaauaguaca

SEQ ID NO: 462857 - RNA, 22 nt, Artificial Sequence
  Synthetic
uaaugacacccacaauaguaca

SEQ ID NO: 462858 - RNA, 23 nt, Artificial Sequence
  Synthetic
uuaaugacacccacaauaguaca

SEQ ID NO: 462859 - RNA, 24 nt, Artificial Sequence
  Synthetic
auuaaugacacccacaauaguaca

SEQ ID NO: 462860 - RNA, 18 nt, Artificial Sequence
  Synthetic
agugaggaugauaguaca

SEQ ID NO: 462861 - RNA, 19 nt, Artificial Sequence
  Synthetic
uagugaggaugauaguaca

SEQ ID NO: 462862 - RNA, 20 nt, Artificial Sequence
  Synthetic
auagugaggaugauaguaca

SEQ ID NO: 462863 - RNA, 21 nt, Artificial Sequence
  Synthetic
aauagugaggaugauaguaca

SEQ ID NO: 462864 - RNA, 22 nt, Artificial Sequence
  Synthetic
aaauagugaggaugauaguaca

SEQ ID NO: 462865 - RNA, 23 nt, Artificial Sequence
  Synthetic
gaaauagugaggaugauaguaca

SEQ ID NO: 462866 - RNA, 24 nt, Artificial Sequence
  Synthetic
ggaaauagugaggaugauaguaca

SEQ ID NO: 462867 - RNA, 18 nt, Artificial Sequence
  Synthetic
uauauggaauauaguaca

SEQ ID NO: 462868 - RNA, 19 nt, Artificial Sequence
  Synthetic
guauauggaauauaguaca

SEQ ID NO: 462869 - RNA, 20 nt, Artificial Sequence
  Synthetic
aguauauggaauauaguaca

SEQ ID NO: 462870 - RNA, 21 nt, Artificial Sequence
  Synthetic
caguauauggaauauaguaca

SEQ ID NO: 462871 - RNA, 22 nt, Artificial Sequence
  Synthetic
acaguauauggaauauaguaca

SEQ ID NO: 462872 - RNA, 23 nt, Artificial Sequence
  Synthetic
aacaguauauggaauauaguaca

SEQ ID NO: 462873 - RNA, 24 nt, Artificial Sequence
  Synthetic
gaacaguauauggaauauaguaca

SEQ ID NO: 462874 - RNA, 18 nt, Artificial Sequence
  Synthetic
uuuuuuauugcuaguaca

SEQ ID NO: 462875 - RNA, 19 nt, Artificial Sequence
  Synthetic
auuuuuuauugcuaguaca

SEQ ID NO: 462876 - RNA, 20 nt, Artificial Sequence
  Synthetic
aauuuuuuauugcuaguaca

SEQ ID NO: 462877 - RNA, 21 nt, Artificial Sequence
  Synthetic
caauuuuuuauugcuaguaca

SEQ ID NO: 462878 - RNA, 22 nt, Artificial Sequence
  Synthetic
ucaauuuuuuauugcuaguaca

SEQ ID NO: 462879 - RNA, 23 nt, Artificial Sequence
  Synthetic
uucaauuuuuuauugcuaguaca

SEQ ID NO: 462880 - RNA, 24 nt, Artificial Sequence
  Synthetic
uuucaauuuuuuauugcuaguaca

SEQ ID NO: 462881 - RNA, 18 nt, Artificial Sequence
  Synthetic
ggugcuccucaacguaca

SEQ ID NO: 462882 - RNA, 19 nt, Artificial Sequence
  Synthetic
aggugcuccucaacguaca

SEQ ID NO: 462883 - RNA, 20 nt, Artificial Sequence
  Synthetic
caggugcuccucaacguaca

SEQ ID NO: 462884 - RNA, 21 nt, Artificial Sequence
  Synthetic
acaggugcuccucaacguaca

SEQ ID NO: 462885 - RNA, 22 nt, Artificial Sequence
  Synthetic
uacaggugcuccucaacguaca

SEQ ID NO: 462886 - RNA, 23 nt, Artificial Sequence
  Synthetic
auacaggugcuccucaacguaca

SEQ ID NO: 462887 - RNA, 24 nt, Artificial Sequence
  Synthetic
gauacaggugcuccucaacguaca

SEQ ID NO: 462888 - RNA, 18 nt, Artificial Sequence
  Synthetic
uggagacagacacguaca

SEQ ID NO: 462889 - RNA, 19 nt, Artificial Sequence
  Synthetic
uuggagacagacacguaca

SEQ ID NO: 462890 - RNA, 20 nt, Artificial Sequence
  Synthetic
guuggagacagacacguaca

SEQ ID NO: 462891 - RNA, 21 nt, Artificial Sequence
  Synthetic
aguuggagacagacacguaca

SEQ ID NO: 462892 - RNA, 22 nt, Artificial Sequence
  Synthetic
aaguuggagacagacacguaca

SEQ ID NO: 462893 - RNA, 23 nt, Artificial Sequence
  Synthetic
gaaguuggagacagacacguaca

SEQ ID NO: 462894 - RNA, 24 nt, Artificial Sequence
  Synthetic
ggaaguuggagacagacacguaca

SEQ ID NO: 462895 - RNA, 18 nt, Artificial Sequence
  Synthetic
uaggagaaagcacguaca

SEQ ID NO: 462896 - RNA, 19 nt, Artificial Sequence
  Synthetic
uuaggagaaagcacguaca

SEQ ID NO: 462897 - RNA, 20 nt, Artificial Sequence
  Synthetic
uuuaggagaaagcacguaca

SEQ ID NO: 462898 - RNA, 21 nt, Artificial Sequence
  Synthetic
cuuuaggagaaagcacguaca

SEQ ID NO: 462899 - RNA, 22 nt, Artificial Sequence
  Synthetic
gcuuuaggagaaagcacguaca

SEQ ID NO: 462900 - RNA, 23 nt, Artificial Sequence
  Synthetic
ugcuuuaggagaaagcacguaca

SEQ ID NO: 462901 - RNA, 24 nt, Artificial Sequence
  Synthetic
cugcuuuaggagaaagcacguaca

SEQ ID NO: 462902 - RNA, 18 nt, Artificial Sequence
  Synthetic
aauugaucacuccguaca

SEQ ID NO: 462903 - RNA, 19 nt, Artificial Sequence
  Synthetic
caauugaucacuccguaca

SEQ ID NO: 462904 - RNA, 20 nt, Artificial Sequence
  Synthetic
acaauugaucacuccguaca

SEQ ID NO: 462905 - RNA, 21 nt, Artificial Sequence
  Synthetic
aacaauugaucacuccguaca

SEQ ID NO: 462906 - RNA, 22 nt, Artificial Sequence
  Synthetic
uaacaauugaucacuccguaca

SEQ ID NO: 462907 - RNA, 23 nt, Artificial Sequence
  Synthetic
cuaacaauugaucacuccguaca

SEQ ID NO: 462908 - RNA, 24 nt, Artificial Sequence
  Synthetic
ucuaacaauugaucacuccguaca

SEQ ID NO: 462909 - RNA, 18 nt, Artificial Sequence
  Synthetic
gcauuaaauauucguaca

SEQ ID NO: 462910 - RNA, 19 nt, Artificial Sequence
  Synthetic
agcauuaaauauucguaca

SEQ ID NO: 462911 - RNA, 20 nt, Artificial Sequence
  Synthetic
gagcauuaaauauucguaca

SEQ ID NO: 462912 - RNA, 21 nt, Artificial Sequence
  Synthetic
ggagcauuaaauauucguaca

SEQ ID NO: 462913 - RNA, 22 nt, Artificial Sequence
  Synthetic
gggagcauuaaauauucguaca

SEQ ID NO: 462914 - RNA, 23 nt, Artificial Sequence
  Synthetic
ugggagcauuaaauauucguaca

SEQ ID NO: 462915 - RNA, 24 nt, Artificial Sequence
  Synthetic
uugggagcauuaaauauucguaca

SEQ ID NO: 462916 - RNA, 18 nt, Artificial Sequence
  Synthetic
uauaucuaaucagguaca

SEQ ID NO: 462917 - RNA, 19 nt, Artificial Sequence
  Synthetic
cuauaucuaaucagguaca

SEQ ID NO: 462918 - RNA, 20 nt, Artificial Sequence
  Synthetic
ucuauaucuaaucagguaca

SEQ ID NO: 462919 - RNA, 21 nt, Artificial Sequence
  Synthetic
gucuauaucuaaucagguaca

SEQ ID NO: 462920 - RNA, 22 nt, Artificial Sequence
  Synthetic
ggucuauaucuaaucagguaca

SEQ ID NO: 462921 - RNA, 23 nt, Artificial Sequence
  Synthetic
uggucuauaucuaaucagguaca

SEQ ID NO: 462922 - RNA, 24 nt, Artificial Sequence
  Synthetic
auggucuauaucuaaucagguaca

SEQ ID NO: 462923 - RNA, 18 nt, Artificial Sequence
  Synthetic
uuuucuaccucggguaca

SEQ ID NO: 462924 - RNA, 19 nt, Artificial Sequence
  Synthetic
uuuuucuaccucggguaca

SEQ ID NO: 462925 - RNA, 20 nt, Artificial Sequence
  Synthetic
cuuuuucuaccucggguaca

SEQ ID NO: 462926 - RNA, 21 nt, Artificial Sequence
  Synthetic
ucuuuuucuaccucggguaca

SEQ ID NO: 462927 - RNA, 22 nt, Artificial Sequence
  Synthetic
cucuuuuucuaccucggguaca

SEQ ID NO: 462928 - RNA, 23 nt, Artificial Sequence
  Synthetic
ucucuuuuucuaccucggguaca

SEQ ID NO: 462929 - RNA, 24 nt, Artificial Sequence
  Synthetic
cucucuuuuucuaccucggguaca

SEQ ID NO: 462930 - RNA, 18 nt, Artificial Sequence
  Synthetic
aaacugucuagggguaca

SEQ ID NO: 462931 - RNA, 19 nt, Artificial Sequence
  Synthetic
gaaacugucuagggguaca

SEQ ID NO: 462932 - RNA, 20 nt, Artificial Sequence
  Synthetic
agaaacugucuagggguaca

SEQ ID NO: 462933 - RNA, 21 nt, Artificial Sequence
  Synthetic
gagaaacugucuagggguaca

SEQ ID NO: 462934 - RNA, 22 nt, Artificial Sequence
  Synthetic
ggagaaacugucuagggguaca

SEQ ID NO: 462935 - RNA, 23 nt, Artificial Sequence
  Synthetic
gggagaaacugucuagggguaca

SEQ ID NO: 462936 - RNA, 24 nt, Artificial Sequence
  Synthetic
ugggagaaacugucuagggguaca

SEQ ID NO: 462937 - RNA, 18 nt, Artificial Sequence
  Synthetic
ugccagugcugggguaca

SEQ ID NO: 462938 - RNA, 19 nt, Artificial Sequence
  Synthetic
uugccagugcugggguaca

SEQ ID NO: 462939 - RNA, 20 nt, Artificial Sequence
  Synthetic
auugccagugcugggguaca

SEQ ID NO: 462940 - RNA, 21 nt, Artificial Sequence
  Synthetic
uauugccagugcugggguaca

SEQ ID NO: 462941 - RNA, 22 nt, Artificial Sequence
  Synthetic
auauugccagugcugggguaca

SEQ ID NO: 462942 - RNA, 23 nt, Artificial Sequence
  Synthetic
cauauugccagugcugggguaca

SEQ ID NO: 462943 - RNA, 24 nt, Artificial Sequence
  Synthetic
ucauauugccagugcugggguaca

SEQ ID NO: 462944 - RNA, 18 nt, Artificial Sequence
  Synthetic
guugagccuguggguaca

SEQ ID NO: 462945 - RNA, 19 nt, Artificial Sequence
  Synthetic
uguugagccuguggguaca

SEQ ID NO: 462946 - RNA, 20 nt, Artificial Sequence
  Synthetic
guguugagccuguggguaca

SEQ ID NO: 462947 - RNA, 21 nt, Artificial Sequence
  Synthetic
gguguugagccuguggguaca

SEQ ID NO: 462948 - RNA, 22 nt, Artificial Sequence
  Synthetic
ugguguugagccuguggguaca

SEQ ID NO: 462949 - RNA, 23 nt, Artificial Sequence
  Synthetic
gugguguugagccuguggguaca

SEQ ID NO: 462950 - RNA, 24 nt, Artificial Sequence
  Synthetic
ugugguguugagccuguggguaca

SEQ ID NO: 462951 - RNA, 18 nt, Artificial Sequence
  Synthetic
auugcucugcaugguaca

SEQ ID NO: 462952 - RNA, 19 nt, Artificial Sequence
  Synthetic
cauugcucugcaugguaca

SEQ ID NO: 462953 - RNA, 20 nt, Artificial Sequence
  Synthetic
acauugcucugcaugguaca

SEQ ID NO: 462954 - RNA, 21 nt, Artificial Sequence
  Synthetic
uacauugcucugcaugguaca

SEQ ID NO: 462955 - RNA, 22 nt, Artificial Sequence
  Synthetic
auacauugcucugcaugguaca

SEQ ID NO: 462956 - RNA, 23 nt, Artificial Sequence
  Synthetic
gauacauugcucugcaugguaca

SEQ ID NO: 462957 - RNA, 24 nt, Artificial Sequence
  Synthetic
ugauacauugcucugcaugguaca

SEQ ID NO: 462958 - RNA, 18 nt, Artificial Sequence
  Synthetic
cauaccacuuuugguaca

SEQ ID NO: 462959 - RNA, 19 nt, Artificial Sequence
  Synthetic
acauaccacuuuugguaca

SEQ ID NO: 462960 - RNA, 20 nt, Artificial Sequence
  Synthetic
gacauaccacuuuugguaca

SEQ ID NO: 462961 - RNA, 21 nt, Artificial Sequence
  Synthetic
ggacauaccacuuuugguaca

SEQ ID NO: 462962 - RNA, 22 nt, Artificial Sequence
  Synthetic
aggacauaccacuuuugguaca

SEQ ID NO: 462963 - RNA, 23 nt, Artificial Sequence
  Synthetic
aaggacauaccacuuuugguaca

SEQ ID NO: 462964 - RNA, 24 nt, Artificial Sequence
  Synthetic
gaaggacauaccacuuuugguaca

SEQ ID NO: 462965 - RNA, 18 nt, Artificial Sequence
  Synthetic
gaagucccuucauguaca

SEQ ID NO: 462966 - RNA, 19 nt, Artificial Sequence
  Synthetic
ggaagucccuucauguaca

SEQ ID NO: 462967 - RNA, 20 nt, Artificial Sequence
  Synthetic
aggaagucccuucauguaca

SEQ ID NO: 462968 - RNA, 21 nt, Artificial Sequence
  Synthetic
aaggaagucccuucauguaca

SEQ ID NO: 462969 - RNA, 22 nt, Artificial Sequence
  Synthetic
aaaggaagucccuucauguaca

SEQ ID NO: 462970 - RNA, 23 nt, Artificial Sequence
  Synthetic
aaaaggaagucccuucauguaca

SEQ ID NO: 462971 - RNA, 24 nt, Artificial Sequence
  Synthetic
uaaaaggaagucccuucauguaca

SEQ ID NO: 462972 - RNA, 18 nt, Artificial Sequence
  Synthetic
acguaaacaauauguaca

SEQ ID NO: 462973 - RNA, 19 nt, Artificial Sequence
  Synthetic
uacguaaacaauauguaca

SEQ ID NO: 462974 - RNA, 20 nt, Artificial Sequence
  Synthetic
auacguaaacaauauguaca

SEQ ID NO: 462975 - RNA, 21 nt, Artificial Sequence
  Synthetic
uauacguaaacaauauguaca

SEQ ID NO: 462976 - RNA, 22 nt, Artificial Sequence
  Synthetic
guauacguaaacaauauguaca

SEQ ID NO: 462977 - RNA, 23 nt, Artificial Sequence
  Synthetic
uguauacguaaacaauauguaca

SEQ ID NO: 462978 - RNA, 24 nt, Artificial Sequence
  Synthetic
uuguauacguaaacaauauguaca

SEQ ID NO: 462979 - RNA, 18 nt, Artificial Sequence
  Synthetic
uugcaaacuugcuguaca

SEQ ID NO: 462980 - RNA, 19 nt, Artificial Sequence
  Synthetic
uuugcaaacuugcuguaca

SEQ ID NO: 462981 - RNA, 20 nt, Artificial Sequence
  Synthetic
guuugcaaacuugcuguaca

SEQ ID NO: 462982 - RNA, 21 nt, Artificial Sequence
  Synthetic
gguuugcaaacuugcuguaca

SEQ ID NO: 462983 - RNA, 22 nt, Artificial Sequence
  Synthetic
ugguuugcaaacuugcuguaca

SEQ ID NO: 462984 - RNA, 23 nt, Artificial Sequence
  Synthetic
gugguuugcaaacuugcuguaca

SEQ ID NO: 462985 - RNA, 24 nt, Artificial Sequence
  Synthetic
agugguuugcaaacuugcuguaca

SEQ ID NO: 462986 - RNA, 18 nt, Artificial Sequence
  Synthetic
uuuuaagugcucuguaca

SEQ ID NO: 462987 - RNA, 19 nt, Artificial Sequence
  Synthetic
auuuuaagugcucuguaca

SEQ ID NO: 462988 - RNA, 20 nt, Artificial Sequence
  Synthetic
aauuuuaagugcucuguaca

SEQ ID NO: 462989 - RNA, 21 nt, Artificial Sequence
  Synthetic
aaauuuuaagugcucuguaca

SEQ ID NO: 462990 - RNA, 22 nt, Artificial Sequence
  Synthetic
aaaauuuuaagugcucuguaca

SEQ ID NO: 462991 - RNA, 23 nt, Artificial Sequence
  Synthetic
gaaaauuuuaagugcucuguaca

SEQ ID NO: 462992 - RNA, 24 nt, Artificial Sequence
  Synthetic
ugaaaauuuuaagugcucuguaca

SEQ ID NO: 462993 - RNA, 18 nt, Artificial Sequence
  Synthetic
aaucaugggaauuguaca

SEQ ID NO: 462994 - RNA, 19 nt, Artificial Sequence
  Synthetic
gaaucaugggaauuguaca

SEQ ID NO: 462995 - RNA, 20 nt, Artificial Sequence
  Synthetic
agaaucaugggaauuguaca

SEQ ID NO: 462996 - RNA, 21 nt, Artificial Sequence
  Synthetic
aagaaucaugggaauuguaca

SEQ ID NO: 462997 - RNA, 22 nt, Artificial Sequence
  Synthetic
caagaaucaugggaauuguaca

SEQ ID NO: 462998 - RNA, 23 nt, Artificial Sequence
  Synthetic
acaagaaucaugggaauuguaca

SEQ ID NO: 462999 - RNA, 24 nt, Artificial Sequence
  Synthetic
uacaagaaucaugggaauuguaca

SEQ ID NO: 463000 - RNA, 18 nt, Artificial Sequence
  Synthetic
ugugcuagauauuguaca

SEQ ID NO: 463001 - RNA, 19 nt, Artificial Sequence
  Synthetic
augugcuagauauuguaca

SEQ ID NO: 463002 - RNA, 20 nt, Artificial Sequence
  Synthetic
uaugugcuagauauuguaca

SEQ ID NO: 463003 - RNA, 21 nt, Artificial Sequence
  Synthetic
uuaugugcuagauauuguaca

SEQ ID NO: 463004 - RNA, 22 nt, Artificial Sequence
  Synthetic
auuaugugcuagauauuguaca

SEQ ID NO: 463005 - RNA, 23 nt, Artificial Sequence
  Synthetic
aauuaugugcuagauauuguaca

SEQ ID NO: 463006 - RNA, 24 nt, Artificial Sequence
  Synthetic
uaauuaugugcuagauauuguaca

SEQ ID NO: 463007 - RNA, 18 nt, Artificial Sequence
  Synthetic
agcugugcaaguuguaca

SEQ ID NO: 463008 - RNA, 19 nt, Artificial Sequence
  Synthetic
cagcugugcaaguuguaca

SEQ ID NO: 463009 - RNA, 20 nt, Artificial Sequence
  Synthetic
acagcugugcaaguuguaca

SEQ ID NO: 463010 - RNA, 21 nt, Artificial Sequence
  Synthetic
aacagcugugcaaguuguaca

SEQ ID NO: 463011 - RNA, 22 nt, Artificial Sequence
  Synthetic
gaacagcugugcaaguuguaca

SEQ ID NO: 463012 - RNA, 23 nt, Artificial Sequence
  Synthetic
ugaacagcugugcaaguuguaca

SEQ ID NO: 463013 - RNA, 24 nt, Artificial Sequence
  Synthetic
augaacagcugugcaaguuguaca

SEQ ID NO: 463014 - RNA, 18 nt, Artificial Sequence
  Synthetic
auuguguucuguuguaca

SEQ ID NO: 463015 - RNA, 19 nt, Artificial Sequence
  Synthetic
aauuguguucuguuguaca

SEQ ID NO: 463016 - RNA, 20 nt, Artificial Sequence
  Synthetic
gaauuguguucuguuguaca

SEQ ID NO: 463017 - RNA, 21 nt, Artificial Sequence
  Synthetic
ugaauuguguucuguuguaca

SEQ ID NO: 463018 - RNA, 22 nt, Artificial Sequence
  Synthetic
augaauuguguucuguuguaca

SEQ ID NO: 463019 - RNA, 23 nt, Artificial Sequence
  Synthetic
aaugaauuguguucuguuguaca

SEQ ID NO: 463020 - RNA, 24 nt, Artificial Sequence
  Synthetic
uaaugaauuguguucuguuguaca

SEQ ID NO: 463021 - RNA, 18 nt, Artificial Sequence
  Synthetic
gggacaucaaaaauuaca

SEQ ID NO: 463022 - RNA, 19 nt, Artificial Sequence
  Synthetic
ugggacaucaaaaauuaca

SEQ ID NO: 463023 - RNA, 20 nt, Artificial Sequence
  Synthetic
uugggacaucaaaaauuaca

SEQ ID NO: 463024 - RNA, 21 nt, Artificial Sequence
  Synthetic
cuugggacaucaaaaauuaca

SEQ ID NO: 463025 - RNA, 22 nt, Artificial Sequence
  Synthetic
acuugggacaucaaaaauuaca

SEQ ID NO: 463026 - RNA, 23 nt, Artificial Sequence
  Synthetic
uacuugggacaucaaaaauuaca

SEQ ID NO: 463027 - RNA, 24 nt, Artificial Sequence
  Synthetic
uuacuugggacaucaaaaauuaca

SEQ ID NO: 463028 - RNA, 18 nt, Artificial Sequence
  Synthetic
cuaaaggagaaaauuaca

SEQ ID NO: 463029 - RNA, 19 nt, Artificial Sequence
  Synthetic
acuaaaggagaaaauuaca

SEQ ID NO: 463030 - RNA, 20 nt, Artificial Sequence
  Synthetic
aacuaaaggagaaaauuaca

SEQ ID NO: 463031 - RNA, 21 nt, Artificial Sequence
  Synthetic
gaacuaaaggagaaaauuaca

SEQ ID NO: 463032 - RNA, 22 nt, Artificial Sequence
  Synthetic
agaacuaaaggagaaaauuaca

SEQ ID NO: 463033 - RNA, 23 nt, Artificial Sequence
  Synthetic
gagaacuaaaggagaaaauuaca

SEQ ID NO: 463034 - RNA, 24 nt, Artificial Sequence
  Synthetic
agagaacuaaaggagaaaauuaca

SEQ ID NO: 463035 - RNA, 18 nt, Artificial Sequence
  Synthetic
uauauaaaacaaauuaca

SEQ ID NO: 463036 - RNA, 19 nt, Artificial Sequence
  Synthetic
uuauauaaaacaaauuaca

SEQ ID NO: 463037 - RNA, 20 nt, Artificial Sequence
  Synthetic
auuauauaaaacaaauuaca

SEQ ID NO: 463038 - RNA, 21 nt, Artificial Sequence
  Synthetic
gauuauauaaaacaaauuaca

SEQ ID NO: 463039 - RNA, 22 nt, Artificial Sequence
  Synthetic
agauuauauaaaacaaauuaca

SEQ ID NO: 463040 - RNA, 23 nt, Artificial Sequence
  Synthetic
gagauuauauaaaacaaauuaca

SEQ ID NO: 463041 - RNA, 24 nt, Artificial Sequence
  Synthetic
agagauuauauaaaacaaauuaca

SEQ ID NO: 463042 - RNA, 18 nt, Artificial Sequence
  Synthetic
cauaaggcggaaauuaca

SEQ ID NO: 463043 - RNA, 19 nt, Artificial Sequence
  Synthetic
ccauaaggcggaaauuaca

SEQ ID NO: 463044 - RNA, 20 nt, Artificial Sequence
  Synthetic
cccauaaggcggaaauuaca

SEQ ID NO: 463045 - RNA, 21 nt, Artificial Sequence
  Synthetic
acccauaaggcggaaauuaca

SEQ ID NO: 463046 - RNA, 22 nt, Artificial Sequence
  Synthetic
aacccauaaggcggaaauuaca

SEQ ID NO: 463047 - RNA, 23 nt, Artificial Sequence
  Synthetic
gaacccauaaggcggaaauuaca

SEQ ID NO: 463048 - RNA, 24 nt, Artificial Sequence
  Synthetic
ugaacccauaaggcggaaauuaca

SEQ ID NO: 463049 - RNA, 18 nt, Artificial Sequence
  Synthetic
ucuuagaaaacaauuaca

SEQ ID NO: 463050 - RNA, 19 nt, Artificial Sequence
  Synthetic
cucuuagaaaacaauuaca

SEQ ID NO: 463051 - RNA, 20 nt, Artificial Sequence
  Synthetic
gcucuuagaaaacaauuaca

SEQ ID NO: 463052 - RNA, 21 nt, Artificial Sequence
  Synthetic
agcucuuagaaaacaauuaca

SEQ ID NO: 463053 - RNA, 22 nt, Artificial Sequence
  Synthetic
aagcucuuagaaaacaauuaca

SEQ ID NO: 463054 - RNA, 23 nt, Artificial Sequence
  Synthetic
gaagcucuuagaaaacaauuaca

SEQ ID NO: 463055 - RNA, 24 nt, Artificial Sequence
  Synthetic
ggaagcucuuagaaaacaauuaca

SEQ ID NO: 463056 - RNA, 18 nt, Artificial Sequence
  Synthetic
cuucacaaaagaauuaca

SEQ ID NO: 463057 - RNA, 19 nt, Artificial Sequence
  Synthetic
acuucacaaaagaauuaca

SEQ ID NO: 463058 - RNA, 20 nt, Artificial Sequence
  Synthetic
gacuucacaaaagaauuaca

SEQ ID NO: 463059 - RNA, 21 nt, Artificial Sequence
  Synthetic
agacuucacaaaagaauuaca

SEQ ID NO: 463060 - RNA, 22 nt, Artificial Sequence
  Synthetic
uagacuucacaaaagaauuaca

SEQ ID NO: 463061 - RNA, 23 nt, Artificial Sequence
  Synthetic
cuagacuucacaaaagaauuaca

SEQ ID NO: 463062 - RNA, 24 nt, Artificial Sequence
  Synthetic
ucuagacuucacaaaagaauuaca

SEQ ID NO: 463063 - RNA, 18 nt, Artificial Sequence
  Synthetic
auauaguaaggaauuaca

SEQ ID NO: 463064 - RNA, 19 nt, Artificial Sequence
  Synthetic
aauauaguaaggaauuaca

SEQ ID NO: 463065 - RNA, 20 nt, Artificial Sequence
  Synthetic
caauauaguaaggaauuaca

SEQ ID NO: 463066 - RNA, 21 nt, Artificial Sequence
  Synthetic
ucaauauaguaaggaauuaca

SEQ ID NO: 463067 - RNA, 22 nt, Artificial Sequence
  Synthetic
aucaauauaguaaggaauuaca

SEQ ID NO: 463068 - RNA, 23 nt, Artificial Sequence
  Synthetic
caucaauauaguaaggaauuaca

SEQ ID NO: 463069 - RNA, 24 nt, Artificial Sequence
  Synthetic
ucaucaauauaguaaggaauuaca

SEQ ID NO: 463070 - RNA, 18 nt, Artificial Sequence
  Synthetic
cuuuucuguuuaauuaca

SEQ ID NO: 463071 - RNA, 19 nt, Artificial Sequence
  Synthetic
acuuuucuguuuaauuaca

SEQ ID NO: 463072 - RNA, 20 nt, Artificial Sequence
  Synthetic
cacuuuucuguuuaauuaca

SEQ ID NO: 463073 - RNA, 21 nt, Artificial Sequence
  Synthetic
acacuuuucuguuuaauuaca

SEQ ID NO: 463074 - RNA, 22 nt, Artificial Sequence
  Synthetic
cacacuuuucuguuuaauuaca

SEQ ID NO: 463075 - RNA, 23 nt, Artificial Sequence
  Synthetic
gcacacuuuucuguuuaauuaca

SEQ ID NO: 463076 - RNA, 24 nt, Artificial Sequence
  Synthetic
ggcacacuuuucuguuuaauuaca

SEQ ID NO: 463077 - RNA, 18 nt, Artificial Sequence
  Synthetic
acacaaugaaacauuaca

SEQ ID NO: 463078 - RNA, 19 nt, Artificial Sequence
  Synthetic
uacacaaugaaacauuaca

SEQ ID NO: 463079 - RNA, 20 nt, Artificial Sequence
  Synthetic
uuacacaaugaaacauuaca

SEQ ID NO: 463080 - RNA, 21 nt, Artificial Sequence
  Synthetic
auuacacaaugaaacauuaca

SEQ ID NO: 463081 - RNA, 22 nt, Artificial Sequence
  Synthetic
cauuacacaaugaaacauuaca

SEQ ID NO: 463082 - RNA, 23 nt, Artificial Sequence
  Synthetic
ucauuacacaaugaaacauuaca

SEQ ID NO: 463083 - RNA, 24 nt, Artificial Sequence
  Synthetic
aucauuacacaaugaaacauuaca

SEQ ID NO: 463084 - RNA, 18 nt, Artificial Sequence
  Synthetic
uuccuauuccccauuaca

SEQ ID NO: 463085 - RNA, 19 nt, Artificial Sequence
  Synthetic
auuccuauuccccauuaca

SEQ ID NO: 463086 - RNA, 20 nt, Artificial Sequence
  Synthetic
uauuccuauuccccauuaca

SEQ ID NO: 463087 - RNA, 21 nt, Artificial Sequence
  Synthetic
uuauuccuauuccccauuaca

SEQ ID NO: 463088 - RNA, 22 nt, Artificial Sequence
  Synthetic
guuauuccuauuccccauuaca

SEQ ID NO: 463089 - RNA, 23 nt, Artificial Sequence
  Synthetic
aguuauuccuauuccccauuaca

SEQ ID NO: 463090 - RNA, 24 nt, Artificial Sequence
  Synthetic
aaguuauuccuauuccccauuaca

SEQ ID NO: 463091 - RNA, 18 nt, Artificial Sequence
  Synthetic
auuucauuuaagauuaca

SEQ ID NO: 463092 - RNA, 19 nt, Artificial Sequence
  Synthetic
uauuucauuuaagauuaca

SEQ ID NO: 463093 - RNA, 20 nt, Artificial Sequence
  Synthetic
uuauuucauuuaagauuaca

SEQ ID NO: 463094 - RNA, 21 nt, Artificial Sequence
  Synthetic
cuuauuucauuuaagauuaca

SEQ ID NO: 463095 - RNA, 22 nt, Artificial Sequence
  Synthetic
gcuuauuucauuuaagauuaca

SEQ ID NO: 463096 - RNA, 23 nt, Artificial Sequence
  Synthetic
agcuuauuucauuuaagauuaca

SEQ ID NO: 463097 - RNA, 24 nt, Artificial Sequence
  Synthetic
uagcuuauuucauuuaagauuaca

SEQ ID NO: 463098 - RNA, 18 nt, Artificial Sequence
  Synthetic
ugauccuaugagauuaca

SEQ ID NO: 463099 - RNA, 19 nt, Artificial Sequence
  Synthetic
gugauccuaugagauuaca

SEQ ID NO: 463100 - RNA, 20 nt, Artificial Sequence
  Synthetic
ugugauccuaugagauuaca

SEQ ID NO: 463101 - RNA, 21 nt, Artificial Sequence
  Synthetic
cugugauccuaugagauuaca

SEQ ID NO: 463102 - RNA, 22 nt, Artificial Sequence
  Synthetic
acugugauccuaugagauuaca

SEQ ID NO: 463103 - RNA, 23 nt, Artificial Sequence
  Synthetic
gacugugauccuaugagauuaca

SEQ ID NO: 463104 - RNA, 24 nt, Artificial Sequence
  Synthetic
ugacugugauccuaugagauuaca

SEQ ID NO: 463105 - RNA, 18 nt, Artificial Sequence
  Synthetic
uuuaccaaauggauuaca

SEQ ID NO: 463106 - RNA, 19 nt, Artificial Sequence
  Synthetic
uuuuaccaaauggauuaca

SEQ ID NO: 463107 - RNA, 20 nt, Artificial Sequence
  Synthetic
auuuuaccaaauggauuaca

SEQ ID NO: 463108 - RNA, 21 nt, Artificial Sequence
  Synthetic
aauuuuaccaaauggauuaca

SEQ ID NO: 463109 - RNA, 22 nt, Artificial Sequence
  Synthetic
uaauuuuaccaaauggauuaca

SEQ ID NO: 463110 - RNA, 23 nt, Artificial Sequence
  Synthetic
auaauuuuaccaaauggauuaca

SEQ ID NO: 463111 - RNA, 24 nt, Artificial Sequence
  Synthetic
cauaauuuuaccaaauggauuaca

SEQ ID NO: 463112 - RNA, 18 nt, Artificial Sequence
  Synthetic
uuugaauguuggauuaca

SEQ ID NO: 463113 - RNA, 19 nt, Artificial Sequence
  Synthetic
auuugaauguuggauuaca

SEQ ID NO: 463114 - RNA, 20 nt, Artificial Sequence
  Synthetic
uauuugaauguuggauuaca

SEQ ID NO: 463115 - RNA, 21 nt, Artificial Sequence
  Synthetic
uuauuugaauguuggauuaca

SEQ ID NO: 463116 - RNA, 22 nt, Artificial Sequence
  Synthetic
auuauuugaauguuggauuaca

SEQ ID NO: 463117 - RNA, 23 nt, Artificial Sequence
  Synthetic
uauuauuugaauguuggauuaca

SEQ ID NO: 463118 - RNA, 24 nt, Artificial Sequence
  Synthetic
cuauuauuugaauguuggauuaca

SEQ ID NO: 463119 - RNA, 18 nt, Artificial Sequence
  Synthetic
uaucuauagaugauuaca

SEQ ID NO: 463120 - RNA, 19 nt, Artificial Sequence
  Synthetic
uuaucuauagaugauuaca

SEQ ID NO: 463121 - RNA, 20 nt, Artificial Sequence
  Synthetic
cuuaucuauagaugauuaca

SEQ ID NO: 463122 - RNA, 21 nt, Artificial Sequence
  Synthetic
ucuuaucuauagaugauuaca

SEQ ID NO: 463123 - RNA, 22 nt, Artificial Sequence
  Synthetic
gucuuaucuauagaugauuaca

SEQ ID NO: 463124 - RNA, 23 nt, Artificial Sequence
  Synthetic
ugucuuaucuauagaugauuaca

SEQ ID NO: 463125 - RNA, 24 nt, Artificial Sequence
  Synthetic
cugucuuaucuauagaugauuaca

SEQ ID NO: 463126 - RNA, 18 nt, Artificial Sequence
  Synthetic
aggacucuugugauuaca

SEQ ID NO: 463127 - RNA, 19 nt, Artificial Sequence
  Synthetic
gaggacucuugugauuaca

SEQ ID NO: 463128 - RNA, 20 nt, Artificial Sequence
  Synthetic
ggaggacucuugugauuaca

SEQ ID NO: 463129 - RNA, 21 nt, Artificial Sequence
  Synthetic
aggaggacucuugugauuaca

SEQ ID NO: 463130 - RNA, 22 nt, Artificial Sequence
  Synthetic
uaggaggacucuugugauuaca

SEQ ID NO: 463131 - RNA, 23 nt, Artificial Sequence
  Synthetic
uuaggaggacucuugugauuaca

SEQ ID NO: 463132 - RNA, 24 nt, Artificial Sequence
  Synthetic
cuuaggaggacucuugugauuaca

SEQ ID NO: 463133 - RNA, 18 nt, Artificial Sequence
  Synthetic
aucuccuagaauauuaca

SEQ ID NO: 463134 - RNA, 19 nt, Artificial Sequence
  Synthetic
caucuccuagaauauuaca

SEQ ID NO: 463135 - RNA, 20 nt, Artificial Sequence
  Synthetic
gcaucuccuagaauauuaca

SEQ ID NO: 463136 - RNA, 21 nt, Artificial Sequence
  Synthetic
agcaucuccuagaauauuaca

SEQ ID NO: 463137 - RNA, 22 nt, Artificial Sequence
  Synthetic
gagcaucuccuagaauauuaca

SEQ ID NO: 463138 - RNA, 23 nt, Artificial Sequence
  Synthetic
ugagcaucuccuagaauauuaca

SEQ ID NO: 463139 - RNA, 24 nt, Artificial Sequence
  Synthetic
gugagcaucuccuagaauauuaca

SEQ ID NO: 463140 - RNA, 18 nt, Artificial Sequence
  Synthetic
auaauaaauaauauuaca

SEQ ID NO: 463141 - RNA, 19 nt, Artificial Sequence
  Synthetic
aauaauaaauaauauuaca

SEQ ID NO: 463142 - RNA, 20 nt, Artificial Sequence
  Synthetic
gaauaauaaauaauauuaca

SEQ ID NO: 463143 - RNA, 21 nt, Artificial Sequence
  Synthetic
ggaauaauaaauaauauuaca

SEQ ID NO: 463144 - RNA, 22 nt, Artificial Sequence
  Synthetic
aggaauaauaaauaauauuaca

SEQ ID NO: 463145 - RNA, 23 nt, Artificial Sequence
  Synthetic
aaggaauaauaaauaauauuaca

SEQ ID NO: 463146 - RNA, 24 nt, Artificial Sequence
  Synthetic
caaggaauaauaaauaauauuaca

SEQ ID NO: 463147 - RNA, 18 nt, Artificial Sequence
  Synthetic
uuugucauucauauuaca

SEQ ID NO: 463148 - RNA, 19 nt, Artificial Sequence
  Synthetic
auuugucauucauauuaca

SEQ ID NO: 463149 - RNA, 20 nt, Artificial Sequence
  Synthetic
uauuugucauucauauuaca

SEQ ID NO: 463150 - RNA, 21 nt, Artificial Sequence
  Synthetic
auauuugucauucauauuaca

SEQ ID NO: 463151 - RNA, 22 nt, Artificial Sequence
  Synthetic
aauauuugucauucauauuaca

SEQ ID NO: 463152 - RNA, 23 nt, Artificial Sequence
  Synthetic
aaauauuugucauucauauuaca

SEQ ID NO: 463153 - RNA, 24 nt, Artificial Sequence
  Synthetic
uaaauauuugucauucauauuaca

SEQ ID NO: 463154 - RNA, 18 nt, Artificial Sequence
  Synthetic
caauuugucuauauuaca

SEQ ID NO: 463155 - RNA, 19 nt, Artificial Sequence
  Synthetic
gcaauuugucuauauuaca

SEQ ID NO: 463156 - RNA, 20 nt, Artificial Sequence
  Synthetic
ugcaauuugucuauauuaca

SEQ ID NO: 463157 - RNA, 21 nt, Artificial Sequence
  Synthetic
gugcaauuugucuauauuaca

SEQ ID NO: 463158 - RNA, 22 nt, Artificial Sequence
  Synthetic
ugugcaauuugucuauauuaca

SEQ ID NO: 463159 - RNA, 23 nt, Artificial Sequence
  Synthetic
cugugcaauuugucuauauuaca

SEQ ID NO: 463160 - RNA, 24 nt, Artificial Sequence
  Synthetic
ucugugcaauuugucuauauuaca

SEQ ID NO: 463161 - RNA, 18 nt, Artificial Sequence
  Synthetic
cucagcauguauauuaca

SEQ ID NO: 463162 - RNA, 19 nt, Artificial Sequence
  Synthetic
ccucagcauguauauuaca

SEQ ID NO: 463163 - RNA, 20 nt, Artificial Sequence
  Synthetic
uccucagcauguauauuaca

SEQ ID NO: 463164 - RNA, 21 nt, Artificial Sequence
  Synthetic
auccucagcauguauauuaca

SEQ ID NO: 463165 - RNA, 22 nt, Artificial Sequence
  Synthetic
aauccucagcauguauauuaca

SEQ ID NO: 463166 - RNA, 23 nt, Artificial Sequence
  Synthetic
caauccucagcauguauauuaca

SEQ ID NO: 463167 - RNA, 24 nt, Artificial Sequence
  Synthetic
ccaauccucagcauguauauuaca

SEQ ID NO: 463168 - RNA, 18 nt, Artificial Sequence
  Synthetic
gaaaaacauccuauuaca

SEQ ID NO: 463169 - RNA, 19 nt, Artificial Sequence
  Synthetic
ugaaaaacauccuauuaca

SEQ ID NO: 463170 - RNA, 20 nt, Artificial Sequence
  Synthetic
augaaaaacauccuauuaca

SEQ ID NO: 463171 - RNA, 21 nt, Artificial Sequence
  Synthetic
uaugaaaaacauccuauuaca

SEQ ID NO: 463172 - RNA, 22 nt, Artificial Sequence
  Synthetic
uuaugaaaaacauccuauuaca

SEQ ID NO: 463173 - RNA, 23 nt, Artificial Sequence
  Synthetic
auuaugaaaaacauccuauuaca

SEQ ID NO: 463174 - RNA, 24 nt, Artificial Sequence
  Synthetic
uauuaugaaaaacauccuauuaca

SEQ ID NO: 463175 - RNA, 18 nt, Artificial Sequence
  Synthetic
uauugccuccguauuaca

SEQ ID NO: 463176 - RNA, 19 nt, Artificial Sequence
  Synthetic
uuauugccuccguauuaca

SEQ ID NO: 463177 - RNA, 20 nt, Artificial Sequence
  Synthetic
uuuauugccuccguauuaca

SEQ ID NO: 463178 - RNA, 21 nt, Artificial Sequence
  Synthetic
uuuuauugccuccguauuaca

SEQ ID NO: 463179 - RNA, 22 nt, Artificial Sequence
  Synthetic
uuuuuauugccuccguauuaca

SEQ ID NO: 463180 - RNA, 23 nt, Artificial Sequence
  Synthetic
auuuuuauugccuccguauuaca

SEQ ID NO: 463181 - RNA, 24 nt, Artificial Sequence
  Synthetic
aauuuuuauugccuccguauuaca

SEQ ID NO: 463182 - RNA, 18 nt, Artificial Sequence
  Synthetic
acuugcccuuguauuaca

SEQ ID NO: 463183 - RNA, 19 nt, Artificial Sequence
  Synthetic
cacuugcccuuguauuaca

SEQ ID NO: 463184 - RNA, 20 nt, Artificial Sequence
  Synthetic
gcacuugcccuuguauuaca

SEQ ID NO: 463185 - RNA, 21 nt, Artificial Sequence
  Synthetic
agcacuugcccuuguauuaca

SEQ ID NO: 463186 - RNA, 22 nt, Artificial Sequence
  Synthetic
cagcacuugcccuuguauuaca

SEQ ID NO: 463187 - RNA, 23 nt, Artificial Sequence
  Synthetic
ucagcacuugcccuuguauuaca

SEQ ID NO: 463188 - RNA, 24 nt, Artificial Sequence
  Synthetic
aucagcacuugcccuuguauuaca

SEQ ID NO: 463189 - RNA, 18 nt, Artificial Sequence
  Synthetic
gguauuauuauuauuaca

SEQ ID NO: 463190 - RNA, 19 nt, Artificial Sequence
  Synthetic
ugguauuauuauuauuaca

SEQ ID NO: 463191 - RNA, 20 nt, Artificial Sequence
  Synthetic
uugguauuauuauuauuaca

SEQ ID NO: 463192 - RNA, 21 nt, Artificial Sequence
  Synthetic
cuugguauuauuauuauuaca

SEQ ID NO: 463193 - RNA, 22 nt, Artificial Sequence
  Synthetic
ucuugguauuauuauuauuaca

SEQ ID NO: 463194 - RNA, 23 nt, Artificial Sequence
  Synthetic
uucuugguauuauuauuauuaca

SEQ ID NO: 463195 - RNA, 24 nt, Artificial Sequence
  Synthetic
cuucuugguauuauuauuauuaca

SEQ ID NO: 463196 - RNA, 18 nt, Artificial Sequence
  Synthetic
auggugauguuuauuaca

SEQ ID NO: 463197 - RNA, 19 nt, Artificial Sequence
  Synthetic
uauggugauguuuauuaca

SEQ ID NO: 463198 - RNA, 20 nt, Artificial Sequence
  Synthetic
cuauggugauguuuauuaca

SEQ ID NO: 463199 - RNA, 21 nt, Artificial Sequence
  Synthetic
ucuauggugauguuuauuaca

SEQ ID NO: 463200 - RNA, 22 nt, Artificial Sequence
  Synthetic
cucuauggugauguuuauuaca

SEQ ID NO: 463201 - RNA, 23 nt, Artificial Sequence
  Synthetic
ucucuauggugauguuuauuaca

SEQ ID NO: 463202 - RNA, 24 nt, Artificial Sequence
  Synthetic
uucucuauggugauguuuauuaca

SEQ ID NO: 463203 - RNA, 18 nt, Artificial Sequence
  Synthetic
ugaagcgaaaaacuuaca

SEQ ID NO: 463204 - RNA, 19 nt, Artificial Sequence
  Synthetic
cugaagcgaaaaacuuaca

SEQ ID NO: 463205 - RNA, 20 nt, Artificial Sequence
  Synthetic
acugaagcgaaaaacuuaca

SEQ ID NO: 463206 - RNA, 21 nt, Artificial Sequence
  Synthetic
aacugaagcgaaaaacuuaca

SEQ ID NO: 463207 - RNA, 22 nt, Artificial Sequence
  Synthetic
aaacugaagcgaaaaacuuaca

SEQ ID NO: 463208 - RNA, 23 nt, Artificial Sequence
  Synthetic
aaaacugaagcgaaaaacuuaca

SEQ ID NO: 463209 - RNA, 24 nt, Artificial Sequence
  Synthetic
aaaaacugaagcgaaaaacuuaca

SEQ ID NO: 463210 - RNA, 18 nt, Artificial Sequence
  Synthetic
uuucagggaugacuuaca

SEQ ID NO: 463211 - RNA, 19 nt, Artificial Sequence
  Synthetic
auuucagggaugacuuaca

SEQ ID NO: 463212 - RNA, 20 nt, Artificial Sequence
  Synthetic
cauuucagggaugacuuaca

SEQ ID NO: 463213 - RNA, 21 nt, Artificial Sequence
  Synthetic
ccauuucagggaugacuuaca

SEQ ID NO: 463214 - RNA, 22 nt, Artificial Sequence
  Synthetic
cccauuucagggaugacuuaca

SEQ ID NO: 463215 - RNA, 23 nt, Artificial Sequence
  Synthetic
ucccauuucagggaugacuuaca

SEQ ID NO: 463216 - RNA, 24 nt, Artificial Sequence
  Synthetic
aucccauuucagggaugacuuaca

SEQ ID NO: 463217 - RNA, 18 nt, Artificial Sequence
  Synthetic
uucauccauguccuuaca

SEQ ID NO: 463218 - RNA, 19 nt, Artificial Sequence
  Synthetic
cuucauccauguccuuaca

SEQ ID NO: 463219 - RNA, 20 nt, Artificial Sequence
  Synthetic
gcuucauccauguccuuaca

SEQ ID NO: 463220 - RNA, 21 nt, Artificial Sequence
  Synthetic
agcuucauccauguccuuaca

SEQ ID NO: 463221 - RNA, 22 nt, Artificial Sequence
  Synthetic
cagcuucauccauguccuuaca

SEQ ID NO: 463222 - RNA, 23 nt, Artificial Sequence
  Synthetic
ccagcuucauccauguccuuaca

SEQ ID NO: 463223 - RNA, 24 nt, Artificial Sequence
  Synthetic
uccagcuucauccauguccuuaca

SEQ ID NO: 463224 - RNA, 18 nt, Artificial Sequence
  Synthetic
auaaacacuguccuuaca

SEQ ID NO: 463225 - RNA, 19 nt, Artificial Sequence
  Synthetic
aauaaacacuguccuuaca

SEQ ID NO: 463226 - RNA, 20 nt, Artificial Sequence
  Synthetic
aaauaaacacuguccuuaca

SEQ ID NO: 463227 - RNA, 21 nt, Artificial Sequence
  Synthetic
gaaauaaacacuguccuuaca

SEQ ID NO: 463228 - RNA, 22 nt, Artificial Sequence
  Synthetic
agaaauaaacacuguccuuaca

SEQ ID NO: 463229 - RNA, 23 nt, Artificial Sequence
  Synthetic
aagaaauaaacacuguccuuaca

SEQ ID NO: 463230 - RNA, 24 nt, Artificial Sequence
  Synthetic
uaagaaauaaacacuguccuuaca

SEQ ID NO: 463231 - RNA, 18 nt, Artificial Sequence
  Synthetic
uaaaagucaaugcuuaca

SEQ ID NO: 463232 - RNA, 19 nt, Artificial Sequence
  Synthetic
guaaaagucaaugcuuaca

SEQ ID NO: 463233 - RNA, 20 nt, Artificial Sequence
  Synthetic
gguaaaagucaaugcuuaca

SEQ ID NO: 463234 - RNA, 21 nt, Artificial Sequence
  Synthetic
agguaaaagucaaugcuuaca

SEQ ID NO: 463235 - RNA, 22 nt, Artificial Sequence
  Synthetic
aagguaaaagucaaugcuuaca

SEQ ID NO: 463236 - RNA, 23 nt, Artificial Sequence
  Synthetic
aaagguaaaagucaaugcuuaca

SEQ ID NO: 463237 - RNA, 24 nt, Artificial Sequence
  Synthetic
aaaagguaaaagucaaugcuuaca

SEQ ID NO: 463238 - RNA, 18 nt, Artificial Sequence
  Synthetic
uuauuuuugcugcuuaca

SEQ ID NO: 463239 - RNA, 19 nt, Artificial Sequence
  Synthetic
cuuauuuuugcugcuuaca

SEQ ID NO: 463240 - RNA, 20 nt, Artificial Sequence
  Synthetic
acuuauuuuugcugcuuaca

SEQ ID NO: 463241 - RNA, 21 nt, Artificial Sequence
  Synthetic
aacuuauuuuugcugcuuaca

SEQ ID NO: 463242 - RNA, 22 nt, Artificial Sequence
  Synthetic
gaacuuauuuuugcugcuuaca

SEQ ID NO: 463243 - RNA, 23 nt, Artificial Sequence
  Synthetic
ugaacuuauuuuugcugcuuaca

SEQ ID NO: 463244 - RNA, 24 nt, Artificial Sequence
  Synthetic
augaacuuauuuuugcugcuuaca

SEQ ID NO: 463245 - RNA, 18 nt, Artificial Sequence
  Synthetic
uacuagauauaucuuaca

SEQ ID NO: 463246 - RNA, 19 nt, Artificial Sequence
  Synthetic
uuacuagauauaucuuaca

SEQ ID NO: 463247 - RNA, 20 nt, Artificial Sequence
  Synthetic
cuuacuagauauaucuuaca

SEQ ID NO: 463248 - RNA, 21 nt, Artificial Sequence
  Synthetic
acuuacuagauauaucuuaca

SEQ ID NO: 463249 - RNA, 22 nt, Artificial Sequence
  Synthetic
aacuuacuagauauaucuuaca

SEQ ID NO: 463250 - RNA, 23 nt, Artificial Sequence
  Synthetic
aaacuuacuagauauaucuuaca

SEQ ID NO: 463251 - RNA, 24 nt, Artificial Sequence
  Synthetic
uaaacuuacuagauauaucuuaca

SEQ ID NO: 463252 - RNA, 18 nt, Artificial Sequence
  Synthetic
uccccaccuucucuuaca

SEQ ID NO: 463253 - RNA, 19 nt, Artificial Sequence
  Synthetic
uuccccaccuucucuuaca

SEQ ID NO: 463254 - RNA, 20 nt, Artificial Sequence
  Synthetic
cuuccccaccuucucuuaca

SEQ ID NO: 463255 - RNA, 21 nt, Artificial Sequence
  Synthetic
ccuuccccaccuucucuuaca

SEQ ID NO: 463256 - RNA, 22 nt, Artificial Sequence
  Synthetic
uccuuccccaccuucucuuaca

SEQ ID NO: 463257 - RNA, 23 nt, Artificial Sequence
  Synthetic
uuccuuccccaccuucucuuaca

SEQ ID NO: 463258 - RNA, 24 nt, Artificial Sequence
  Synthetic
cuuccuuccccaccuucucuuaca

SEQ ID NO: 463259 - RNA, 18 nt, Artificial Sequence
  Synthetic
acagagauuucucuuaca

SEQ ID NO: 463260 - RNA, 19 nt, Artificial Sequence
  Synthetic
uacagagauuucucuuaca

SEQ ID NO: 463261 - RNA, 20 nt, Artificial Sequence
  Synthetic
cuacagagauuucucuuaca

SEQ ID NO: 463262 - RNA, 21 nt, Artificial Sequence
  Synthetic
gcuacagagauuucucuuaca

SEQ ID NO: 463263 - RNA, 22 nt, Artificial Sequence
  Synthetic
ugcuacagagauuucucuuaca

SEQ ID NO: 463264 - RNA, 23 nt, Artificial Sequence
  Synthetic
augcuacagagauuucucuuaca

SEQ ID NO: 463265 - RNA, 24 nt, Artificial Sequence
  Synthetic
caugcuacagagauuucucuuaca

SEQ ID NO: 463266 - RNA, 18 nt, Artificial Sequence
  Synthetic
gacaacaguugucuuaca

SEQ ID NO: 463267 - RNA, 19 nt, Artificial Sequence
  Synthetic
agacaacaguugucuuaca

SEQ ID NO: 463268 - RNA, 20 nt, Artificial Sequence
  Synthetic
gagacaacaguugucuuaca

SEQ ID NO: 463269 - RNA, 21 nt, Artificial Sequence
  Synthetic
agagacaacaguugucuuaca

SEQ ID NO: 463270 - RNA, 22 nt, Artificial Sequence
  Synthetic
aagagacaacaguugucuuaca

SEQ ID NO: 463271 - RNA, 23 nt, Artificial Sequence
  Synthetic
uaagagacaacaguugucuuaca

SEQ ID NO: 463272 - RNA, 24 nt, Artificial Sequence
  Synthetic
uuaagagacaacaguugucuuaca

SEQ ID NO: 463273 - RNA, 18 nt, Artificial Sequence
  Synthetic
aaauggcuuugucuuaca

SEQ ID NO: 463274 - RNA, 19 nt, Artificial Sequence
  Synthetic
caaauggcuuugucuuaca

SEQ ID NO: 463275 - RNA, 20 nt, Artificial Sequence
  Synthetic
acaaauggcuuugucuuaca

SEQ ID NO: 463276 - RNA, 21 nt, Artificial Sequence
  Synthetic
cacaaauggcuuugucuuaca

SEQ ID NO: 463277 - RNA, 22 nt, Artificial Sequence
  Synthetic
gcacaaauggcuuugucuuaca

SEQ ID NO: 463278 - RNA, 23 nt, Artificial Sequence
  Synthetic
ugcacaaauggcuuugucuuaca

SEQ ID NO: 463279 - RNA, 24 nt, Artificial Sequence
  Synthetic
cugcacaaauggcuuugucuuaca

SEQ ID NO: 463280 - RNA, 18 nt, Artificial Sequence
  Synthetic
ugaaaggcacuucuuaca

SEQ ID NO: 463281 - RNA, 19 nt, Artificial Sequence
  Synthetic
gugaaaggcacuucuuaca

SEQ ID NO: 463282 - RNA, 20 nt, Artificial Sequence
  Synthetic
ggugaaaggcacuucuuaca

SEQ ID NO: 463283 - RNA, 21 nt, Artificial Sequence
  Synthetic
aggugaaaggcacuucuuaca

SEQ ID NO: 463284 - RNA, 22 nt, Artificial Sequence
  Synthetic
gaggugaaaggcacuucuuaca

SEQ ID NO: 463285 - RNA, 23 nt, Artificial Sequence
  Synthetic
ggaggugaaaggcacuucuuaca

SEQ ID NO: 463286 - RNA, 24 nt, Artificial Sequence
  Synthetic
gggaggugaaaggcacuucuuaca

SEQ ID NO: 463287 - RNA, 18 nt, Artificial Sequence
  Synthetic
ccacuuggaguucuuaca

SEQ ID NO: 463288 - RNA, 19 nt, Artificial Sequence
  Synthetic
uccacuuggaguucuuaca

SEQ ID NO: 463289 - RNA, 20 nt, Artificial Sequence
  Synthetic
auccacuuggaguucuuaca

SEQ ID NO: 463290 - RNA, 21 nt, Artificial Sequence
  Synthetic
cauccacuuggaguucuuaca

SEQ ID NO: 463291 - RNA, 22 nt, Artificial Sequence
  Synthetic
gcauccacuuggaguucuuaca

SEQ ID NO: 463292 - RNA, 23 nt, Artificial Sequence
  Synthetic
ugcauccacuuggaguucuuaca

SEQ ID NO: 463293 - RNA, 24 nt, Artificial Sequence
  Synthetic
augcauccacuuggaguucuuaca

SEQ ID NO: 463294 - RNA, 18 nt, Artificial Sequence
  Synthetic
uagaucauuuaaguuaca

SEQ ID NO: 463295 - RNA, 19 nt, Artificial Sequence
  Synthetic
cuagaucauuuaaguuaca

SEQ ID NO: 463296 - RNA, 20 nt, Artificial Sequence
  Synthetic
gcuagaucauuuaaguuaca

SEQ ID NO: 463297 - RNA, 21 nt, Artificial Sequence
  Synthetic
ugcuagaucauuuaaguuaca

SEQ ID NO: 463298 - RNA, 22 nt, Artificial Sequence
  Synthetic
uugcuagaucauuuaaguuaca

SEQ ID NO: 463299 - RNA, 23 nt, Artificial Sequence
  Synthetic
cuugcuagaucauuuaaguuaca

SEQ ID NO: 463300 - RNA, 24 nt, Artificial Sequence
  Synthetic
ccuugcuagaucauuuaaguuaca

SEQ ID NO: 463301 - RNA, 18 nt, Artificial Sequence
  Synthetic
guaguuuuuagaguuaca

SEQ ID NO: 463302 - RNA, 19 nt, Artificial Sequence
  Synthetic
aguaguuuuuagaguuaca

SEQ ID NO: 463303 - RNA, 20 nt, Artificial Sequence
  Synthetic
aaguaguuuuuagaguuaca

SEQ ID NO: 463304 - RNA, 21 nt, Artificial Sequence
  Synthetic
uaaguaguuuuuagaguuaca

SEQ ID NO: 463305 - RNA, 22 nt, Artificial Sequence
  Synthetic
cuaaguaguuuuuagaguuaca

SEQ ID NO: 463306 - RNA, 23 nt, Artificial Sequence
  Synthetic
gcuaaguaguuuuuagaguuaca

SEQ ID NO: 463307 - RNA, 24 nt, Artificial Sequence
  Synthetic
agcuaaguaguuuuuagaguuaca

SEQ ID NO: 463308 - RNA, 18 nt, Artificial Sequence
  Synthetic
aauuagccacuaguuaca

SEQ ID NO: 463309 - RNA, 19 nt, Artificial Sequence
  Synthetic
uaauuagccacuaguuaca

SEQ ID NO: 463310 - RNA, 20 nt, Artificial Sequence
  Synthetic
cuaauuagccacuaguuaca

SEQ ID NO: 463311 - RNA, 21 nt, Artificial Sequence
  Synthetic
gcuaauuagccacuaguuaca

SEQ ID NO: 463312 - RNA, 22 nt, Artificial Sequence
  Synthetic
agcuaauuagccacuaguuaca

SEQ ID NO: 463313 - RNA, 23 nt, Artificial Sequence
  Synthetic
gagcuaauuagccacuaguuaca

SEQ ID NO: 463314 - RNA, 24 nt, Artificial Sequence
  Synthetic
ugagcuaauuagccacuaguuaca

SEQ ID NO: 463315 - RNA, 18 nt, Artificial Sequence
  Synthetic
cugccuugugagguuaca

SEQ ID NO: 463316 - RNA, 19 nt, Artificial Sequence
  Synthetic
gcugccuugugagguuaca

SEQ ID NO: 463317 - RNA, 20 nt, Artificial Sequence
  Synthetic
ugcugccuugugagguuaca

SEQ ID NO: 463318 - RNA, 21 nt, Artificial Sequence
  Synthetic
cugcugccuugugagguuaca

SEQ ID NO: 463319 - RNA, 22 nt, Artificial Sequence
  Synthetic
ccugcugccuugugagguuaca

SEQ ID NO: 463320 - RNA, 23 nt, Artificial Sequence
  Synthetic
accugcugccuugugagguuaca

SEQ ID NO: 463321 - RNA, 24 nt, Artificial Sequence
  Synthetic
gaccugcugccuugugagguuaca

SEQ ID NO: 463322 - RNA, 18 nt, Artificial Sequence
  Synthetic
aacuauuuuaauguuaca

SEQ ID NO: 463323 - RNA, 19 nt, Artificial Sequence
  Synthetic
aaacuauuuuaauguuaca

SEQ ID NO: 463324 - RNA, 20 nt, Artificial Sequence
  Synthetic
caaacuauuuuaauguuaca

SEQ ID NO: 463325 - RNA, 21 nt, Artificial Sequence
  Synthetic
gcaaacuauuuuaauguuaca

SEQ ID NO: 463326 - RNA, 22 nt, Artificial Sequence
  Synthetic
ggcaaacuauuuuaauguuaca

SEQ ID NO: 463327 - RNA, 23 nt, Artificial Sequence
  Synthetic
uggcaaacuauuuuaauguuaca

SEQ ID NO: 463328 - RNA, 24 nt, Artificial Sequence
  Synthetic
uuggcaaacuauuuuaauguuaca

SEQ ID NO: 463329 - RNA, 18 nt, Artificial Sequence
  Synthetic
aaucaaacguauguuaca

SEQ ID NO: 463330 - RNA, 19 nt, Artificial Sequence
  Synthetic
gaaucaaacguauguuaca

SEQ ID NO: 463331 - RNA, 20 nt, Artificial Sequence
  Synthetic
ggaaucaaacguauguuaca

SEQ ID NO: 463332 - RNA, 21 nt, Artificial Sequence
  Synthetic
gggaaucaaacguauguuaca

SEQ ID NO: 463333 - RNA, 22 nt, Artificial Sequence
  Synthetic
ugggaaucaaacguauguuaca

SEQ ID NO: 463334 - RNA, 23 nt, Artificial Sequence
  Synthetic
augggaaucaaacguauguuaca

SEQ ID NO: 463335 - RNA, 24 nt, Artificial Sequence
  Synthetic
caugggaaucaaacguauguuaca

SEQ ID NO: 463336 - RNA, 18 nt, Artificial Sequence
  Synthetic
acaccuuuuucuguuaca

SEQ ID NO: 463337 - RNA, 19 nt, Artificial Sequence
  Synthetic
cacaccuuuuucuguuaca

SEQ ID NO: 463338 - RNA, 20 nt, Artificial Sequence
  Synthetic
ucacaccuuuuucuguuaca

SEQ ID NO: 463339 - RNA, 21 nt, Artificial Sequence
  Synthetic
cucacaccuuuuucuguuaca

SEQ ID NO: 463340 - RNA, 22 nt, Artificial Sequence
  Synthetic
ccucacaccuuuuucuguuaca

SEQ ID NO: 463341 - RNA, 23 nt, Artificial Sequence
  Synthetic
uccucacaccuuuuucuguuaca

SEQ ID NO: 463342 - RNA, 24 nt, Artificial Sequence
  Synthetic
uuccucacaccuuuuucuguuaca

SEQ ID NO: 463343 - RNA, 18 nt, Artificial Sequence
  Synthetic
gauacaguaaguguuaca

SEQ ID NO: 463344 - RNA, 19 nt, Artificial Sequence
  Synthetic
ugauacaguaaguguuaca

SEQ ID NO: 463345 - RNA, 20 nt, Artificial Sequence
  Synthetic
gugauacaguaaguguuaca

SEQ ID NO: 463346 - RNA, 21 nt, Artificial Sequence
  Synthetic
ugugauacaguaaguguuaca

SEQ ID NO: 463347 - RNA, 22 nt, Artificial Sequence
  Synthetic
uugugauacaguaaguguuaca

SEQ ID NO: 463348 - RNA, 23 nt, Artificial Sequence
  Synthetic
auugugauacaguaaguguuaca

SEQ ID NO: 463349 - RNA, 24 nt, Artificial Sequence
  Synthetic
gauugugauacaguaaguguuaca

SEQ ID NO: 463350 - RNA, 18 nt, Artificial Sequence
  Synthetic
cucaaauaacuuguuaca

SEQ ID NO: 463351 - RNA, 19 nt, Artificial Sequence
  Synthetic
acucaaauaacuuguuaca

SEQ ID NO: 463352 - RNA, 20 nt, Artificial Sequence
  Synthetic
aacucaaauaacuuguuaca

SEQ ID NO: 463353 - RNA, 21 nt, Artificial Sequence
  Synthetic
caacucaaauaacuuguuaca

SEQ ID NO: 463354 - RNA, 22 nt, Artificial Sequence
  Synthetic
gcaacucaaauaacuuguuaca

SEQ ID NO: 463355 - RNA, 23 nt, Artificial Sequence
  Synthetic
ugcaacucaaauaacuuguuaca

SEQ ID NO: 463356 - RNA, 24 nt, Artificial Sequence
  Synthetic
augcaacucaaauaacuuguuaca

SEQ ID NO: 463357 - RNA, 18 nt, Artificial Sequence
  Synthetic
uuaggacauuuuguuaca

SEQ ID NO: 463358 - RNA, 19 nt, Artificial Sequence
  Synthetic
uuuaggacauuuuguuaca

SEQ ID NO: 463359 - RNA, 20 nt, Artificial Sequence
  Synthetic
auuuaggacauuuuguuaca

SEQ ID NO: 463360 - RNA, 21 nt, Artificial Sequence
  Synthetic
gauuuaggacauuuuguuaca

SEQ ID NO: 463361 - RNA, 22 nt, Artificial Sequence
  Synthetic
ugauuuaggacauuuuguuaca

SEQ ID NO: 463362 - RNA, 23 nt, Artificial Sequence
  Synthetic
cugauuuaggacauuuuguuaca

SEQ ID NO: 463363 - RNA, 24 nt, Artificial Sequence
  Synthetic
gcugauuuaggacauuuuguuaca

SEQ ID NO: 463364 - RNA, 18 nt, Artificial Sequence
  Synthetic
aauugguaauaauuuaca

SEQ ID NO: 463365 - RNA, 19 nt, Artificial Sequence
  Synthetic
uaauugguaauaauuuaca

SEQ ID NO: 463366 - RNA, 20 nt, Artificial Sequence
  Synthetic
auaauugguaauaauuuaca

SEQ ID NO: 463367 - RNA, 21 nt, Artificial Sequence
  Synthetic
uauaauugguaauaauuuaca

SEQ ID NO: 463368 - RNA, 22 nt, Artificial Sequence
  Synthetic
uuauaauugguaauaauuuaca

SEQ ID NO: 463369 - RNA, 23 nt, Artificial Sequence
  Synthetic
auuauaauugguaauaauuuaca

SEQ ID NO: 463370 - RNA, 24 nt, Artificial Sequence
  Synthetic
cauuauaauugguaauaauuuaca

SEQ ID NO: 463371 - RNA, 18 nt, Artificial Sequence
  Synthetic
aaaccuuucccauuuaca

SEQ ID NO: 463372 - RNA, 19 nt, Artificial Sequence
  Synthetic
aaaaccuuucccauuuaca

SEQ ID NO: 463373 - RNA, 20 nt, Artificial Sequence
  Synthetic
uaaaaccuuucccauuuaca

SEQ ID NO: 463374 - RNA, 21 nt, Artificial Sequence
  Synthetic
guaaaaccuuucccauuuaca

SEQ ID NO: 463375 - RNA, 22 nt, Artificial Sequence
  Synthetic
aguaaaaccuuucccauuuaca

SEQ ID NO: 463376 - RNA, 23 nt, Artificial Sequence
  Synthetic
aaguaaaaccuuucccauuuaca

SEQ ID NO: 463377 - RNA, 24 nt, Artificial Sequence
  Synthetic
aaaguaaaaccuuucccauuuaca

SEQ ID NO: 463378 - RNA, 18 nt, Artificial Sequence
  Synthetic
augcaguuauuauuuaca

SEQ ID NO: 463379 - RNA, 19 nt, Artificial Sequence
  Synthetic
uaugcaguuauuauuuaca

SEQ ID NO: 463380 - RNA, 20 nt, Artificial Sequence
  Synthetic
cuaugcaguuauuauuuaca

SEQ ID NO: 463381 - RNA, 21 nt, Artificial Sequence
  Synthetic
ccuaugcaguuauuauuuaca

SEQ ID NO: 463382 - RNA, 22 nt, Artificial Sequence
  Synthetic
cccuaugcaguuauuauuuaca

SEQ ID NO: 463383 - RNA, 23 nt, Artificial Sequence
  Synthetic
acccuaugcaguuauuauuuaca

SEQ ID NO: 463384 - RNA, 24 nt, Artificial Sequence
  Synthetic
aacccuaugcaguuauuauuuaca

SEQ ID NO: 463385 - RNA, 18 nt, Artificial Sequence
  Synthetic
uaaauguucuuauuuaca

SEQ ID NO: 463386 - RNA, 19 nt, Artificial Sequence
  Synthetic
auaaauguucuuauuuaca

SEQ ID NO: 463387 - RNA, 20 nt, Artificial Sequence
  Synthetic
aauaaauguucuuauuuaca

SEQ ID NO: 463388 - RNA, 21 nt, Artificial Sequence
  Synthetic
uaauaaauguucuuauuuaca

SEQ ID NO: 463389 - RNA, 22 nt, Artificial Sequence
  Synthetic
uuaauaaauguucuuauuuaca

SEQ ID NO: 463390 - RNA, 23 nt, Artificial Sequence
  Synthetic
uuuaauaaauguucuuauuuaca

SEQ ID NO: 463391 - RNA, 24 nt, Artificial Sequence
  Synthetic
uuuuaauaaauguucuuauuuaca

SEQ ID NO: 463392 - RNA, 18 nt, Artificial Sequence
  Synthetic
cuagaaucagacuuuaca

SEQ ID NO: 463393 - RNA, 19 nt, Artificial Sequence
  Synthetic
acuagaaucagacuuuaca

SEQ ID NO: 463394 - RNA, 20 nt, Artificial Sequence
  Synthetic
gacuagaaucagacuuuaca

SEQ ID NO: 463395 - RNA, 21 nt, Artificial Sequence
  Synthetic
ggacuagaaucagacuuuaca

SEQ ID NO: 463396 - RNA, 22 nt, Artificial Sequence
  Synthetic
uggacuagaaucagacuuuaca

SEQ ID NO: 463397 - RNA, 23 nt, Artificial Sequence
  Synthetic
uuggacuagaaucagacuuuaca

SEQ ID NO: 463398 - RNA, 24 nt, Artificial Sequence
  Synthetic
cuuggacuagaaucagacuuuaca

SEQ ID NO: 463399 - RNA, 18 nt, Artificial Sequence
  Synthetic
cuacugggggacuuuaca

SEQ ID NO: 463400 - RNA, 19 nt, Artificial Sequence
  Synthetic
gcuacugggggacuuuaca

SEQ ID NO: 463401 - RNA, 20 nt, Artificial Sequence
  Synthetic
agcuacugggggacuuuaca

SEQ ID NO: 463402 - RNA, 21 nt, Artificial Sequence
  Synthetic
cagcuacugggggacuuuaca

SEQ ID NO: 463403 - RNA, 22 nt, Artificial Sequence
  Synthetic
acagcuacugggggacuuuaca

SEQ ID NO: 463404 - RNA, 23 nt, Artificial Sequence
  Synthetic
uacagcuacugggggacuuuaca

SEQ ID NO: 463405 - RNA, 24 nt, Artificial Sequence
  Synthetic
guacagcuacugggggacuuuaca

SEQ ID NO: 463406 - RNA, 18 nt, Artificial Sequence
  Synthetic
aaaggagcagucuuuaca

SEQ ID NO: 463407 - RNA, 19 nt, Artificial Sequence
  Synthetic
aaaaggagcagucuuuaca

SEQ ID NO: 463408 - RNA, 20 nt, Artificial Sequence
  Synthetic
aaaaaggagcagucuuuaca

SEQ ID NO: 463409 - RNA, 21 nt, Artificial Sequence
  Synthetic
uaaaaaggagcagucuuuaca

SEQ ID NO: 463410 - RNA, 22 nt, Artificial Sequence
  Synthetic
uuaaaaaggagcagucuuuaca

SEQ ID NO: 463411 - RNA, 23 nt, Artificial Sequence
  Synthetic
uuuaaaaaggagcagucuuuaca

SEQ ID NO: 463412 - RNA, 24 nt, Artificial Sequence
  Synthetic
uuuuaaaaaggagcagucuuuaca

SEQ ID NO: 463413 - RNA, 18 nt, Artificial Sequence
  Synthetic
uuuacuagacauuuuaca

SEQ ID NO: 463414 - RNA, 19 nt, Artificial Sequence
  Synthetic
cuuuacuagacauuuuaca

SEQ ID NO: 463415 - RNA, 20 nt, Artificial Sequence
  Synthetic
gcuuuacuagacauuuuaca

SEQ ID NO: 463416 - RNA, 21 nt, Artificial Sequence
  Synthetic
ugcuuuacuagacauuuuaca

SEQ ID NO: 463417 - RNA, 22 nt, Artificial Sequence
  Synthetic
uugcuuuacuagacauuuuaca

SEQ ID NO: 463418 - RNA, 23 nt, Artificial Sequence
  Synthetic
auugcuuuacuagacauuuuaca

SEQ ID NO: 463419 - RNA, 24 nt, Artificial Sequence
  Synthetic
cauugcuuuacuagacauuuuaca

SEQ ID NO: 463420 - RNA, 18 nt, Artificial Sequence
  Synthetic
aagugagccuauuuuaca

SEQ ID NO: 463421 - RNA, 19 nt, Artificial Sequence
  Synthetic
uaagugagccuauuuuaca

SEQ ID NO: 463422 - RNA, 20 nt, Artificial Sequence
  Synthetic
auaagugagccuauuuuaca

SEQ ID NO: 463423 - RNA, 21 nt, Artificial Sequence
  Synthetic
uauaagugagccuauuuuaca

SEQ ID NO: 463424 - RNA, 22 nt, Artificial Sequence
  Synthetic
uuauaagugagccuauuuuaca

SEQ ID NO: 463425 - RNA, 23 nt, Artificial Sequence
  Synthetic
guuauaagugagccuauuuuaca

SEQ ID NO: 463426 - RNA, 24 nt, Artificial Sequence
  Synthetic
aguuauaagugagccuauuuuaca

SEQ ID NO: 463427 - RNA, 18 nt, Artificial Sequence
  Synthetic
ggugaaguuuauuuuaca

SEQ ID NO: 463428 - RNA, 19 nt, Artificial Sequence
  Synthetic
uggugaaguuuauuuuaca

SEQ ID NO: 463429 - RNA, 20 nt, Artificial Sequence
  Synthetic
uuggugaaguuuauuuuaca

SEQ ID NO: 463430 - RNA, 21 nt, Artificial Sequence
  Synthetic
auuggugaaguuuauuuuaca

SEQ ID NO: 463431 - RNA, 22 nt, Artificial Sequence
  Synthetic
aauuggugaaguuuauuuuaca

SEQ ID NO: 463432 - RNA, 23 nt, Artificial Sequence
  Synthetic
gaauuggugaaguuuauuuuaca

SEQ ID NO: 463433 - RNA, 24 nt, Artificial Sequence
  Synthetic
ggaauuggugaaguuuauuuuaca

SEQ ID NO: 463434 - RNA, 18 nt, Artificial Sequence
  Synthetic
gaaaaugucccuuuuaca

SEQ ID NO: 463435 - RNA, 19 nt, Artificial Sequence
  Synthetic
cgaaaaugucccuuuuaca

SEQ ID NO: 463436 - RNA, 20 nt, Artificial Sequence
  Synthetic
acgaaaaugucccuuuuaca

SEQ ID NO: 463437 - RNA, 21 nt, Artificial Sequence
  Synthetic
uacgaaaaugucccuuuuaca

SEQ ID NO: 463438 - RNA, 22 nt, Artificial Sequence
  Synthetic
uuacgaaaaugucccuuuuaca

SEQ ID NO: 463439 - RNA, 23 nt, Artificial Sequence
  Synthetic
cuuacgaaaaugucccuuuuaca

SEQ ID NO: 463440 - RNA, 24 nt, Artificial Sequence
  Synthetic
gcuuacgaaaaugucccuuuuaca

SEQ ID NO: 463441 - RNA, 18 nt, Artificial Sequence
  Synthetic
cuuuuauuuucuuuuaca

SEQ ID NO: 463442 - RNA, 19 nt, Artificial Sequence
  Synthetic
gcuuuuauuuucuuuuaca

SEQ ID NO: 463443 - RNA, 20 nt, Artificial Sequence
  Synthetic
agcuuuuauuuucuuuuaca

SEQ ID NO: 463444 - RNA, 21 nt, Artificial Sequence
  Synthetic
aagcuuuuauuuucuuuuaca

SEQ ID NO: 463445 - RNA, 22 nt, Artificial Sequence
  Synthetic
gaagcuuuuauuuucuuuuaca

SEQ ID NO: 463446 - RNA, 23 nt, Artificial Sequence
  Synthetic
ggaagcuuuuauuuucuuuuaca

SEQ ID NO: 463447 - RNA, 24 nt, Artificial Sequence
  Synthetic
uggaagcuuuuauuuucuuuuaca

SEQ ID NO: 463448 - RNA, 18 nt, Artificial Sequence
  Synthetic
guaacucauuguuuuaca

SEQ ID NO: 463449 - RNA, 19 nt, Artificial Sequence
  Synthetic
aguaacucauuguuuuaca

SEQ ID NO: 463450 - RNA, 20 nt, Artificial Sequence
  Synthetic
uaguaacucauuguuuuaca

SEQ ID NO: 463451 - RNA, 21 nt, Artificial Sequence
  Synthetic
auaguaacucauuguuuuaca

SEQ ID NO: 463452 - RNA, 22 nt, Artificial Sequence
  Synthetic
cauaguaacucauuguuuuaca

SEQ ID NO: 463453 - RNA, 23 nt, Artificial Sequence
  Synthetic
acauaguaacucauuguuuuaca

SEQ ID NO: 463454 - RNA, 24 nt, Artificial Sequence
  Synthetic
aacauaguaacucauuguuuuaca

SEQ ID NO: 463455 - RNA, 18 nt, Artificial Sequence
  Synthetic
ccaucauauuguuuuaca

SEQ ID NO: 463456 - RNA, 19 nt, Artificial Sequence
  Synthetic
uccaucauauuguuuuaca

SEQ ID NO: 463457 - RNA, 20 nt, Artificial Sequence
  Synthetic
uuccaucauauuguuuuaca

SEQ ID NO: 463458 - RNA, 21 nt, Artificial Sequence
  Synthetic
uuuccaucauauuguuuuaca

SEQ ID NO: 463459 - RNA, 22 nt, Artificial Sequence
  Synthetic
cuuuccaucauauuguuuuaca

SEQ ID NO: 463460 - RNA, 23 nt, Artificial Sequence
  Synthetic
gcuuuccaucauauuguuuuaca

SEQ ID NO: 463461 - RNA, 24 nt, Artificial Sequence
  Synthetic
ugcuuuccaucauauuguuuuaca

SEQ ID NO: 463462 - RNA, 18 nt, Artificial Sequence
  Synthetic
caguauucuauuuuuaca

SEQ ID NO: 463463 - RNA, 19 nt, Artificial Sequence
  Synthetic
ucaguauucuauuuuuaca

SEQ ID NO: 463464 - RNA, 20 nt, Artificial Sequence
  Synthetic
uucaguauucuauuuuuaca

SEQ ID NO: 463465 - RNA, 21 nt, Artificial Sequence
  Synthetic
uuucaguauucuauuuuuaca

SEQ ID NO: 463466 - RNA, 22 nt, Artificial Sequence
  Synthetic
guuucaguauucuauuuuuaca

SEQ ID NO: 463467 - RNA, 23 nt, Artificial Sequence
  Synthetic
uguuucaguauucuauuuuuaca

SEQ ID NO: 463468 - RNA, 24 nt, Artificial Sequence
  Synthetic
uuguuucaguauucuauuuuuaca

SEQ ID NO: 463469 - RNA, 18 nt, Artificial Sequence
  Synthetic
ucucgacaacuuuuuaca

SEQ ID NO: 463470 - RNA, 19 nt, Artificial Sequence
  Synthetic
aucucgacaacuuuuuaca

SEQ ID NO: 463471 - RNA, 20 nt, Artificial Sequence
  Synthetic
caucucgacaacuuuuuaca

SEQ ID NO: 463472 - RNA, 21 nt, Artificial Sequence
  Synthetic
gcaucucgacaacuuuuuaca

SEQ ID NO: 463473 - RNA, 22 nt, Artificial Sequence
  Synthetic
agcaucucgacaacuuuuuaca

SEQ ID NO: 463474 - RNA, 23 nt, Artificial Sequence
  Synthetic
aagcaucucgacaacuuuuuaca

SEQ ID NO: 463475 - RNA, 24 nt, Artificial Sequence
  Synthetic
caagcaucucgacaacuuuuuaca

SEQ ID NO: 463476 - RNA, 18 nt, Artificial Sequence
  Synthetic
acacacacacacaaacca

SEQ ID NO: 463477 - RNA, 19 nt, Artificial Sequence
  Synthetic
uacacacacacacaaacca

SEQ ID NO: 463478 - RNA, 20 nt, Artificial Sequence
  Synthetic
auacacacacacacaaacca

SEQ ID NO: 463479 - RNA, 21 nt, Artificial Sequence
  Synthetic
aauacacacacacacaaacca

SEQ ID NO: 463480 - RNA, 22 nt, Artificial Sequence
  Synthetic
aaauacacacacacacaaacca

SEQ ID NO: 463481 - RNA, 23 nt, Artificial Sequence
  Synthetic
caaauacacacacacacaaacca

SEQ ID NO: 463482 - RNA, 24 nt, Artificial Sequence
  Synthetic
acaaauacacacacacacaaacca

SEQ ID NO: 463483 - RNA, 18 nt, Artificial Sequence
  Synthetic
cuauaagaagacaaacca

SEQ ID NO: 463484 - RNA, 19 nt, Artificial Sequence
  Synthetic
acuauaagaagacaaacca

SEQ ID NO: 463485 - RNA, 20 nt, Artificial Sequence
  Synthetic
gacuauaagaagacaaacca

SEQ ID NO: 463486 - RNA, 21 nt, Artificial Sequence
  Synthetic
ugacuauaagaagacaaacca

SEQ ID NO: 463487 - RNA, 22 nt, Artificial Sequence
  Synthetic
cugacuauaagaagacaaacca

SEQ ID NO: 463488 - RNA, 23 nt, Artificial Sequence
  Synthetic
acugacuauaagaagacaaacca

SEQ ID NO: 463489 - RNA, 24 nt, Artificial Sequence
  Synthetic
cacugacuauaagaagacaaacca

SEQ ID NO: 463490 - RNA, 18 nt, Artificial Sequence
  Synthetic
gugaaaugcaccaaacca

SEQ ID NO: 463491 - RNA, 19 nt, Artificial Sequence
  Synthetic
agugaaaugcaccaaacca

SEQ ID NO: 463492 - RNA, 20 nt, Artificial Sequence
  Synthetic
aagugaaaugcaccaaacca

SEQ ID NO: 463493 - RNA, 21 nt, Artificial Sequence
  Synthetic
aaagugaaaugcaccaaacca

SEQ ID NO: 463494 - RNA, 22 nt, Artificial Sequence
  Synthetic
caaagugaaaugcaccaaacca

SEQ ID NO: 463495 - RNA, 23 nt, Artificial Sequence
  Synthetic
ccaaagugaaaugcaccaaacca

SEQ ID NO: 463496 - RNA, 24 nt, Artificial Sequence
  Synthetic
accaaagugaaaugcaccaaacca

SEQ ID NO: 463497 - RNA, 18 nt, Artificial Sequence
  Synthetic
cucucucucucgaaacca

SEQ ID NO: 463498 - RNA, 19 nt, Artificial Sequence
  Synthetic
ucucucucucucgaaacca

SEQ ID NO: 463499 - RNA, 20 nt, Artificial Sequence
  Synthetic
cucucucucucucgaaacca

SEQ ID NO: 463500 - RNA, 21 nt, Artificial Sequence
  Synthetic
ucucucucucucucgaaacca

SEQ ID NO: 463501 - RNA, 22 nt, Artificial Sequence
  Synthetic
cucucucucucucucgaaacca

SEQ ID NO: 463502 - RNA, 23 nt, Artificial Sequence
  Synthetic
ucucucucucucucucgaaacca

SEQ ID NO: 463503 - RNA, 24 nt, Artificial Sequence
  Synthetic
cucucucucucucucucgaaacca

SEQ ID NO: 463504 - RNA, 18 nt, Artificial Sequence
  Synthetic
aauccuaaauggaaacca

SEQ ID NO: 463505 - RNA, 19 nt, Artificial Sequence
  Synthetic
caauccuaaauggaaacca

SEQ ID NO: 463506 - RNA, 20 nt, Artificial Sequence
  Synthetic
acaauccuaaauggaaacca

SEQ ID NO: 463507 - RNA, 21 nt, Artificial Sequence
  Synthetic
aacaauccuaaauggaaacca

SEQ ID NO: 463508 - RNA, 22 nt, Artificial Sequence
  Synthetic
gaacaauccuaaauggaaacca

SEQ ID NO: 463509 - RNA, 23 nt, Artificial Sequence
  Synthetic
ggaacaauccuaaauggaaacca

SEQ ID NO: 463510 - RNA, 24 nt, Artificial Sequence
  Synthetic
aggaacaauccuaaauggaaacca

SEQ ID NO: 463511 - RNA, 18 nt, Artificial Sequence
  Synthetic
gauaagggccugaaacca

SEQ ID NO: 463512 - RNA, 19 nt, Artificial Sequence
  Synthetic
ugauaagggccugaaacca

SEQ ID NO: 463513 - RNA, 20 nt, Artificial Sequence
  Synthetic
gugauaagggccugaaacca

SEQ ID NO: 463514 - RNA, 21 nt, Artificial Sequence
  Synthetic
agugauaagggccugaaacca

SEQ ID NO: 463515 - RNA, 22 nt, Artificial Sequence
  Synthetic
cagugauaagggccugaaacca

SEQ ID NO: 463516 - RNA, 23 nt, Artificial Sequence
  Synthetic
acagugauaagggccugaaacca

SEQ ID NO: 463517 - RNA, 24 nt, Artificial Sequence
  Synthetic
cacagugauaagggccugaaacca

SEQ ID NO: 463518 - RNA, 18 nt, Artificial Sequence
  Synthetic
agauguucuuugaaacca

SEQ ID NO: 463519 - RNA, 19 nt, Artificial Sequence
  Synthetic
aagauguucuuugaaacca

SEQ ID NO: 463520 - RNA, 20 nt, Artificial Sequence
  Synthetic
aaagauguucuuugaaacca

SEQ ID NO: 463521 - RNA, 21 nt, Artificial Sequence
  Synthetic
uaaagauguucuuugaaacca

SEQ ID NO: 463522 - RNA, 22 nt, Artificial Sequence
  Synthetic
auaaagauguucuuugaaacca

SEQ ID NO: 463523 - RNA, 23 nt, Artificial Sequence
  Synthetic
aauaaagauguucuuugaaacca

SEQ ID NO: 463524 - RNA, 24 nt, Artificial Sequence
  Synthetic
aaauaaagauguucuuugaaacca

SEQ ID NO: 463525 - RNA, 18 nt, Artificial Sequence
  Synthetic
ucucagauucauaaacca

SEQ ID NO: 463526 - RNA, 19 nt, Artificial Sequence
  Synthetic
cucucagauucauaaacca

SEQ ID NO: 463527 - RNA, 20 nt, Artificial Sequence
  Synthetic
acucucagauucauaaacca

SEQ ID NO: 463528 - RNA, 21 nt, Artificial Sequence
  Synthetic
cacucucagauucauaaacca

SEQ ID NO: 463529 - RNA, 22 nt, Artificial Sequence
  Synthetic
ucacucucagauucauaaacca

SEQ ID NO: 463530 - RNA, 23 nt, Artificial Sequence
  Synthetic
cucacucucagauucauaaacca

SEQ ID NO: 463531 - RNA, 24 nt, Artificial Sequence
  Synthetic
ccucacucucagauucauaaacca

SEQ ID NO: 463532 - RNA, 18 nt, Artificial Sequence
  Synthetic
auguuuauuuauaaacca

SEQ ID NO: 463533 - RNA, 19 nt, Artificial Sequence
  Synthetic
cauguuuauuuauaaacca

SEQ ID NO: 463534 - RNA, 20 nt, Artificial Sequence
  Synthetic
ucauguuuauuuauaaacca

SEQ ID NO: 463535 - RNA, 21 nt, Artificial Sequence
  Synthetic
gucauguuuauuuauaaacca

SEQ ID NO: 463536 - RNA, 22 nt, Artificial Sequence
  Synthetic
ugucauguuuauuuauaaacca

SEQ ID NO: 463537 - RNA, 23 nt, Artificial Sequence
  Synthetic
augucauguuuauuuauaaacca

SEQ ID NO: 463538 - RNA, 24 nt, Artificial Sequence
  Synthetic
caugucauguuuauuuauaaacca

SEQ ID NO: 463539 - RNA, 18 nt, Artificial Sequence
  Synthetic
gguuaauauuuuaaacca

SEQ ID NO: 463540 - RNA, 19 nt, Artificial Sequence
  Synthetic
ugguuaauauuuuaaacca

SEQ ID NO: 463541 - RNA, 20 nt, Artificial Sequence
  Synthetic
uugguuaauauuuuaaacca

SEQ ID NO: 463542 - RNA, 21 nt, Artificial Sequence
  Synthetic
uuugguuaauauuuuaaacca

SEQ ID NO: 463543 - RNA, 22 nt, Artificial Sequence
  Synthetic
uuuugguuaauauuuuaaacca

SEQ ID NO: 463544 - RNA, 23 nt, Artificial Sequence
  Synthetic
auuuugguuaauauuuuaaacca

SEQ ID NO: 463545 - RNA, 24 nt, Artificial Sequence
  Synthetic
aauuuugguuaauauuuuaaacca

SEQ ID NO: 463546 - RNA, 18 nt, Artificial Sequence
  Synthetic
uucuuauuagaacaacca

SEQ ID NO: 463547 - RNA, 19 nt, Artificial Sequence
  Synthetic
auucuuauuagaacaacca

SEQ ID NO: 463548 - RNA, 20 nt, Artificial Sequence
  Synthetic
uauucuuauuagaacaacca

SEQ ID NO: 463549 - RNA, 21 nt, Artificial Sequence
  Synthetic
uuauucuuauuagaacaacca

SEQ ID NO: 463550 - RNA, 22 nt, Artificial Sequence
  Synthetic
guuauucuuauuagaacaacca

SEQ ID NO: 463551 - RNA, 23 nt, Artificial Sequence
  Synthetic
gguuauucuuauuagaacaacca

SEQ ID NO: 463552 - RNA, 24 nt, Artificial Sequence
  Synthetic
ugguuauucuuauuagaacaacca

SEQ ID NO: 463553 - RNA, 18 nt, Artificial Sequence
  Synthetic
acucacacuggacaacca

SEQ ID NO: 463554 - RNA, 19 nt, Artificial Sequence
  Synthetic
gacucacacuggacaacca

SEQ ID NO: 463555 - RNA, 20 nt, Artificial Sequence
  Synthetic
agacucacacuggacaacca

SEQ ID NO: 463556 - RNA, 21 nt, Artificial Sequence
  Synthetic
gagacucacacuggacaacca

SEQ ID NO: 463557 - RNA, 22 nt, Artificial Sequence
  Synthetic
ggagacucacacuggacaacca

SEQ ID NO: 463558 - RNA, 23 nt, Artificial Sequence
  Synthetic
aggagacucacacuggacaacca

SEQ ID NO: 463559 - RNA, 24 nt, Artificial Sequence
  Synthetic
caggagacucacacuggacaacca

SEQ ID NO: 463560 - RNA, 18 nt, Artificial Sequence
  Synthetic
ccagagaugugacaacca

SEQ ID NO: 463561 - RNA, 19 nt, Artificial Sequence
  Synthetic
cccagagaugugacaacca

SEQ ID NO: 463562 - RNA, 20 nt, Artificial Sequence
  Synthetic
gcccagagaugugacaacca

SEQ ID NO: 463563 - RNA, 21 nt, Artificial Sequence
  Synthetic
ugcccagagaugugacaacca

SEQ ID NO: 463564 - RNA, 22 nt, Artificial Sequence
  Synthetic
augcccagagaugugacaacca

SEQ ID NO: 463565 - RNA, 23 nt, Artificial Sequence
  Synthetic
aaugcccagagaugugacaacca

SEQ ID NO: 463566 - RNA, 24 nt, Artificial Sequence
  Synthetic
uaaugcccagagaugugacaacca

SEQ ID NO: 463567 - RNA, 18 nt, Artificial Sequence
  Synthetic
gaacacacuguacaacca

SEQ ID NO: 463568 - RNA, 19 nt, Artificial Sequence
  Synthetic
ugaacacacuguacaacca

SEQ ID NO: 463569 - RNA, 20 nt, Artificial Sequence
  Synthetic
uugaacacacuguacaacca

SEQ ID NO: 463570 - RNA, 21 nt, Artificial Sequence
  Synthetic
auugaacacacuguacaacca

SEQ ID NO: 463571 - RNA, 22 nt, Artificial Sequence
  Synthetic
aauugaacacacuguacaacca

SEQ ID NO: 463572 - RNA, 23 nt, Artificial Sequence
  Synthetic
aaauugaacacacuguacaacca

SEQ ID NO: 463573 - RNA, 24 nt, Artificial Sequence
  Synthetic
aaaauugaacacacuguacaacca

SEQ ID NO: 463574 - RNA, 18 nt, Artificial Sequence
  Synthetic
auccagcagagccaacca

SEQ ID NO: 463575 - RNA, 19 nt, Artificial Sequence
  Synthetic
cauccagcagagccaacca

SEQ ID NO: 463576 - RNA, 20 nt, Artificial Sequence
  Synthetic
gcauccagcagagccaacca

SEQ ID NO: 463577 - RNA, 21 nt, Artificial Sequence
  Synthetic
agcauccagcagagccaacca

SEQ ID NO: 463578 - RNA, 22 nt, Artificial Sequence
  Synthetic
uagcauccagcagagccaacca

SEQ ID NO: 463579 - RNA, 23 nt, Artificial Sequence
  Synthetic
auagcauccagcagagccaacca

SEQ ID NO: 463580 - RNA, 24 nt, Artificial Sequence
  Synthetic
cauagcauccagcagagccaacca

SEQ ID NO: 463581 - RNA, 18 nt, Artificial Sequence
  Synthetic
aguaugucaaagcaacca

SEQ ID NO: 463582 - RNA, 19 nt, Artificial Sequence
  Synthetic
uaguaugucaaagcaacca

SEQ ID NO: 463583 - RNA, 20 nt, Artificial Sequence
  Synthetic
uuaguaugucaaagcaacca

SEQ ID NO: 463584 - RNA, 21 nt, Artificial Sequence
  Synthetic
cuuaguaugucaaagcaacca

SEQ ID NO: 463585 - RNA, 22 nt, Artificial Sequence
  Synthetic
acuuaguaugucaaagcaacca

SEQ ID NO: 463586 - RNA, 23 nt, Artificial Sequence
  Synthetic
uacuuaguaugucaaagcaacca

SEQ ID NO: 463587 - RNA, 24 nt, Artificial Sequence
  Synthetic
cuacuuaguaugucaaagcaacca

SEQ ID NO: 463588 - RNA, 18 nt, Artificial Sequence
  Synthetic
aguguuaaaaggcaacca

SEQ ID NO: 463589 - RNA, 19 nt, Artificial Sequence
  Synthetic
aaguguuaaaaggcaacca

SEQ ID NO: 463590 - RNA, 20 nt, Artificial Sequence
  Synthetic
gaaguguuaaaaggcaacca

SEQ ID NO: 463591 - RNA, 21 nt, Artificial Sequence
  Synthetic
agaaguguuaaaaggcaacca

SEQ ID NO: 463592 - RNA, 22 nt, Artificial Sequence
  Synthetic
uagaaguguuaaaaggcaacca

SEQ ID NO: 463593 - RNA, 23 nt, Artificial Sequence
  Synthetic
uuagaaguguuaaaaggcaacca

SEQ ID NO: 463594 - RNA, 24 nt, Artificial Sequence
  Synthetic
auuagaaguguuaaaaggcaacca

SEQ ID NO: 463595 - RNA, 18 nt, Artificial Sequence
  Synthetic
uuccauuaacaucaacca

SEQ ID NO: 463596 - RNA, 19 nt, Artificial Sequence
  Synthetic
cuuccauuaacaucaacca

SEQ ID NO: 463597 - RNA, 20 nt, Artificial Sequence
  Synthetic
acuuccauuaacaucaacca

SEQ ID NO: 463598 - RNA, 21 nt, Artificial Sequence
  Synthetic
aacuuccauuaacaucaacca

SEQ ID NO: 463599 - RNA, 22 nt, Artificial Sequence
  Synthetic
aaacuuccauuaacaucaacca

SEQ ID NO: 463600 - RNA, 23 nt, Artificial Sequence
  Synthetic
caaacuuccauuaacaucaacca

SEQ ID NO: 463601 - RNA, 24 nt, Artificial Sequence
  Synthetic
acaaacuuccauuaacaucaacca

SEQ ID NO: 463602 - RNA, 18 nt, Artificial Sequence
  Synthetic
uacuugggagaucaacca

SEQ ID NO: 463603 - RNA, 19 nt, Artificial Sequence
  Synthetic
guacuugggagaucaacca

SEQ ID NO: 463604 - RNA, 20 nt, Artificial Sequence
  Synthetic
aguacuugggagaucaacca

SEQ ID NO: 463605 - RNA, 21 nt, Artificial Sequence
  Synthetic
caguacuugggagaucaacca

SEQ ID NO: 463606 - RNA, 22 nt, Artificial Sequence
  Synthetic
ccaguacuugggagaucaacca

SEQ ID NO: 463607 - RNA, 23 nt, Artificial Sequence
  Synthetic
uccaguacuugggagaucaacca

SEQ ID NO: 463608 - RNA, 24 nt, Artificial Sequence
  Synthetic
uuccaguacuugggagaucaacca

SEQ ID NO: 463609 - RNA, 18 nt, Artificial Sequence
  Synthetic
auuaacgaaauucaacca

SEQ ID NO: 463610 - RNA, 19 nt, Artificial Sequence
  Synthetic
aauuaacgaaauucaacca

SEQ ID NO: 463611 - RNA, 20 nt, Artificial Sequence
  Synthetic
aaauuaacgaaauucaacca

SEQ ID NO: 463612 - RNA, 21 nt, Artificial Sequence
  Synthetic
aaaauuaacgaaauucaacca

SEQ ID NO: 463613 - RNA, 22 nt, Artificial Sequence
  Synthetic
uaaaauuaacgaaauucaacca

SEQ ID NO: 463614 - RNA, 23 nt, Artificial Sequence
  Synthetic
auaaaauuaacgaaauucaacca

SEQ ID NO: 463615 - RNA, 24 nt, Artificial Sequence
  Synthetic
uauaaaauuaacgaaauucaacca

SEQ ID NO: 463616 - RNA, 18 nt, Artificial Sequence
  Synthetic
ggaaagagaauucaacca

SEQ ID NO: 463617 - RNA, 19 nt, Artificial Sequence
  Synthetic
gggaaagagaauucaacca

SEQ ID NO: 463618 - RNA, 20 nt, Artificial Sequence
  Synthetic
ggggaaagagaauucaacca

SEQ ID NO: 463619 - RNA, 21 nt, Artificial Sequence
  Synthetic
aggggaaagagaauucaacca

SEQ ID NO: 463620 - RNA, 22 nt, Artificial Sequence
  Synthetic
aaggggaaagagaauucaacca

SEQ ID NO: 463621 - RNA, 23 nt, Artificial Sequence
  Synthetic
uaaggggaaagagaauucaacca

SEQ ID NO: 463622 - RNA, 24 nt, Artificial Sequence
  Synthetic
auaaggggaaagagaauucaacca

SEQ ID NO: 463623 - RNA, 18 nt, Artificial Sequence
  Synthetic
uugcugcuaauucaacca

SEQ ID NO: 463624 - RNA, 19 nt, Artificial Sequence
  Synthetic
cuugcugcuaauucaacca

SEQ ID NO: 463625 - RNA, 20 nt, Artificial Sequence
  Synthetic
ucuugcugcuaauucaacca

SEQ ID NO: 463626 - RNA, 21 nt, Artificial Sequence
  Synthetic
aucuugcugcuaauucaacca

SEQ ID NO: 463627 - RNA, 22 nt, Artificial Sequence
  Synthetic
aaucuugcugcuaauucaacca

SEQ ID NO: 463628 - RNA, 23 nt, Artificial Sequence
  Synthetic
gaaucuugcugcuaauucaacca

SEQ ID NO: 463629 - RNA, 24 nt, Artificial Sequence
  Synthetic
ggaaucuugcugcuaauucaacca

SEQ ID NO: 463630 - RNA, 18 nt, Artificial Sequence
  Synthetic
agaaaacuacaagaacca

SEQ ID NO: 463631 - RNA, 19 nt, Artificial Sequence
  Synthetic
aagaaaacuacaagaacca

SEQ ID NO: 463632 - RNA, 20 nt, Artificial Sequence
  Synthetic
gaagaaaacuacaagaacca

SEQ ID NO: 463633 - RNA, 21 nt, Artificial Sequence
  Synthetic
agaagaaaacuacaagaacca

SEQ ID NO: 463634 - RNA, 22 nt, Artificial Sequence
  Synthetic
uagaagaaaacuacaagaacca

SEQ ID NO: 463635 - RNA, 23 nt, Artificial Sequence
  Synthetic
auagaagaaaacuacaagaacca

SEQ ID NO: 463636 - RNA, 24 nt, Artificial Sequence
  Synthetic
aauagaagaaaacuacaagaacca

SEQ ID NO: 463637 - RNA, 18 nt, Artificial Sequence
  Synthetic
uaaggucaaucagaacca

SEQ ID NO: 463638 - RNA, 19 nt, Artificial Sequence
  Synthetic
guaaggucaaucagaacca

SEQ ID NO: 463639 - RNA, 20 nt, Artificial Sequence
  Synthetic
aguaaggucaaucagaacca

SEQ ID NO: 463640 - RNA, 21 nt, Artificial Sequence
  Synthetic
aaguaaggucaaucagaacca

SEQ ID NO: 463641 - RNA, 22 nt, Artificial Sequence
  Synthetic
caaguaaggucaaucagaacca

SEQ ID NO: 463642 - RNA, 23 nt, Artificial Sequence
  Synthetic
ccaaguaaggucaaucagaacca

SEQ ID NO: 463643 - RNA, 24 nt, Artificial Sequence
  Synthetic
uccaaguaaggucaaucagaacca

SEQ ID NO: 463644 - RNA, 18 nt, Artificial Sequence
  Synthetic
auauuguucugggaacca

SEQ ID NO: 463645 - RNA, 19 nt, Artificial Sequence
  Synthetic
aauauuguucugggaacca

SEQ ID NO: 463646 - RNA, 20 nt, Artificial Sequence
  Synthetic
uaauauuguucugggaacca

SEQ ID NO: 463647 - RNA, 21 nt, Artificial Sequence
  Synthetic
auaauauuguucugggaacca

SEQ ID NO: 463648 - RNA, 22 nt, Artificial Sequence
  Synthetic
gauaauauuguucugggaacca

SEQ ID NO: 463649 - RNA, 23 nt, Artificial Sequence
  Synthetic
agauaauauuguucugggaacca

SEQ ID NO: 463650 - RNA, 24 nt, Artificial Sequence
  Synthetic
aagauaauauuguucugggaacca

SEQ ID NO: 463651 - RNA, 18 nt, Artificial Sequence
  Synthetic
gccauuuucauggaacca

SEQ ID NO: 463652 - RNA, 19 nt, Artificial Sequence
  Synthetic
ggccauuuucauggaacca

SEQ ID NO: 463653 - RNA, 20 nt, Artificial Sequence
  Synthetic
aggccauuuucauggaacca

SEQ ID NO: 463654 - RNA, 21 nt, Artificial Sequence
  Synthetic
gaggccauuuucauggaacca

SEQ ID NO: 463655 - RNA, 22 nt, Artificial Sequence
  Synthetic
ggaggccauuuucauggaacca

SEQ ID NO: 463656 - RNA, 23 nt, Artificial Sequence
  Synthetic
aggaggccauuuucauggaacca

SEQ ID NO: 463657 - RNA, 24 nt, Artificial Sequence
  Synthetic
aaggaggccauuuucauggaacca

SEQ ID NO: 463658 - RNA, 18 nt, Artificial Sequence
  Synthetic
uaucuaucaccugaacca

SEQ ID NO: 463659 - RNA, 19 nt, Artificial Sequence
  Synthetic
uuaucuaucaccugaacca

SEQ ID NO: 463660 - RNA, 20 nt, Artificial Sequence
  Synthetic
auuaucuaucaccugaacca

SEQ ID NO: 463661 - RNA, 21 nt, Artificial Sequence
  Synthetic
uauuaucuaucaccugaacca

SEQ ID NO: 463662 - RNA, 22 nt, Artificial Sequence
  Synthetic
uuauuaucuaucaccugaacca

SEQ ID NO: 463663 - RNA, 23 nt, Artificial Sequence
  Synthetic
auuauuaucuaucaccugaacca

SEQ ID NO: 463664 - RNA, 24 nt, Artificial Sequence
  Synthetic
cauuauuaucuaucaccugaacca

SEQ ID NO: 463665 - RNA, 18 nt, Artificial Sequence
  Synthetic
cugaaucauugauaacca

SEQ ID NO: 463666 - RNA, 19 nt, Artificial Sequence
  Synthetic
acugaaucauugauaacca

SEQ ID NO: 463667 - RNA, 20 nt, Artificial Sequence
  Synthetic
cacugaaucauugauaacca

SEQ ID NO: 463668 - RNA, 21 nt, Artificial Sequence
  Synthetic
ucacugaaucauugauaacca

SEQ ID NO: 463669 - RNA, 22 nt, Artificial Sequence
  Synthetic
aucacugaaucauugauaacca

SEQ ID NO: 463670 - RNA, 23 nt, Artificial Sequence
  Synthetic
caucacugaaucauugauaacca

SEQ ID NO: 463671 - RNA, 24 nt, Artificial Sequence
  Synthetic
acaucacugaaucauugauaacca

SEQ ID NO: 463672 - RNA, 18 nt, Artificial Sequence
  Synthetic
cuagagagauuauaacca

SEQ ID NO: 463673 - RNA, 19 nt, Artificial Sequence
  Synthetic
acuagagagauuauaacca

SEQ ID NO: 463674 - RNA, 20 nt, Artificial Sequence
  Synthetic
cacuagagagauuauaacca

SEQ ID NO: 463675 - RNA, 21 nt, Artificial Sequence
  Synthetic
acacuagagagauuauaacca

SEQ ID NO: 463676 - RNA, 22 nt, Artificial Sequence
  Synthetic
uacacuagagagauuauaacca

SEQ ID NO: 463677 - RNA, 23 nt, Artificial Sequence
  Synthetic
auacacuagagagauuauaacca

SEQ ID NO: 463678 - RNA, 24 nt, Artificial Sequence
  Synthetic
aauacacuagagagauuauaacca

SEQ ID NO: 463679 - RNA, 18 nt, Artificial Sequence
  Synthetic
ugagauguucccuaacca

SEQ ID NO: 463680 - RNA, 19 nt, Artificial Sequence
  Synthetic
augagauguucccuaacca

SEQ ID NO: 463681 - RNA, 20 nt, Artificial Sequence
  Synthetic
aaugagauguucccuaacca

SEQ ID NO: 463682 - RNA, 21 nt, Artificial Sequence
  Synthetic
caaugagauguucccuaacca

SEQ ID NO: 463683 - RNA, 22 nt, Artificial Sequence
  Synthetic
ucaaugagauguucccuaacca

SEQ ID NO: 463684 - RNA, 23 nt, Artificial Sequence
  Synthetic
cucaaugagauguucccuaacca

SEQ ID NO: 463685 - RNA, 24 nt, Artificial Sequence
  Synthetic
acucaaugagauguucccuaacca

SEQ ID NO: 463686 - RNA, 18 nt, Artificial Sequence
  Synthetic
aggauucuaaucuaacca

SEQ ID NO: 463687 - RNA, 19 nt, Artificial Sequence
  Synthetic
caggauucuaaucuaacca

SEQ ID NO: 463688 - RNA, 20 nt, Artificial Sequence
  Synthetic
ucaggauucuaaucuaacca

SEQ ID NO: 463689 - RNA, 21 nt, Artificial Sequence
  Synthetic
aucaggauucuaaucuaacca

SEQ ID NO: 463690 - RNA, 22 nt, Artificial Sequence
  Synthetic
uaucaggauucuaaucuaacca

SEQ ID NO: 463691 - RNA, 23 nt, Artificial Sequence
  Synthetic
uuaucaggauucuaaucuaacca

SEQ ID NO: 463692 - RNA, 24 nt, Artificial Sequence
  Synthetic
cuuaucaggauucuaaucuaacca

SEQ ID NO: 463693 - RNA, 18 nt, Artificial Sequence
  Synthetic
aaucaauggggguaacca

SEQ ID NO: 463694 - RNA, 19 nt, Artificial Sequence
  Synthetic
aaaucaauggggguaacca

SEQ ID NO: 463695 - RNA, 20 nt, Artificial Sequence
  Synthetic
caaaucaauggggguaacca

SEQ ID NO: 463696 - RNA, 21 nt, Artificial Sequence
  Synthetic
gcaaaucaauggggguaacca

SEQ ID NO: 463697 - RNA, 22 nt, Artificial Sequence
  Synthetic
ggcaaaucaauggggguaacca

SEQ ID NO: 463698 - RNA, 23 nt, Artificial Sequence
  Synthetic
uggcaaaucaauggggguaacca

SEQ ID NO: 463699 - RNA, 24 nt, Artificial Sequence
  Synthetic
auggcaaaucaauggggguaacca

SEQ ID NO: 463700 - RNA, 18 nt, Artificial Sequence
  Synthetic
gagguggguggguaacca

SEQ ID NO: 463701 - RNA, 19 nt, Artificial Sequence
  Synthetic
agagguggguggguaacca

SEQ ID NO: 463702 - RNA, 20 nt, Artificial Sequence
  Synthetic
gagagguggguggguaacca

SEQ ID NO: 463703 - RNA, 21 nt, Artificial Sequence
  Synthetic
agagagguggguggguaacca

SEQ ID NO: 463704 - RNA, 22 nt, Artificial Sequence
  Synthetic
cagagagguggguggguaacca

SEQ ID NO: 463705 - RNA, 23 nt, Artificial Sequence
  Synthetic
acagagagguggguggguaacca

SEQ ID NO: 463706 - RNA, 24 nt, Artificial Sequence
  Synthetic
aacagagagguggguggguaacca

SEQ ID NO: 463707 - RNA, 18 nt, Artificial Sequence
  Synthetic
gaagacauguuguaacca

SEQ ID NO: 463708 - RNA, 19 nt, Artificial Sequence
  Synthetic
agaagacauguuguaacca

SEQ ID NO: 463709 - RNA, 20 nt, Artificial Sequence
  Synthetic
uagaagacauguuguaacca

SEQ ID NO: 463710 - RNA, 21 nt, Artificial Sequence
  Synthetic
auagaagacauguuguaacca

SEQ ID NO: 463711 - RNA, 22 nt, Artificial Sequence
  Synthetic
gauagaagacauguuguaacca

SEQ ID NO: 463712 - RNA, 23 nt, Artificial Sequence
  Synthetic
agauagaagacauguuguaacca

SEQ ID NO: 463713 - RNA, 24 nt, Artificial Sequence
  Synthetic
gagauagaagacauguuguaacca

SEQ ID NO: 463714 - RNA, 18 nt, Artificial Sequence
  Synthetic
aaaugcagaaauuaacca

SEQ ID NO: 463715 - RNA, 19 nt, Artificial Sequence
  Synthetic
gaaaugcagaaauuaacca

SEQ ID NO: 463716 - RNA, 20 nt, Artificial Sequence
  Synthetic
ggaaaugcagaaauuaacca

SEQ ID NO: 463717 - RNA, 21 nt, Artificial Sequence
  Synthetic
aggaaaugcagaaauuaacca

SEQ ID NO: 463718 - RNA, 22 nt, Artificial Sequence
  Synthetic
aaggaaaugcagaaauuaacca

SEQ ID NO: 463719 - RNA, 23 nt, Artificial Sequence
  Synthetic
gaaggaaaugcagaaauuaacca

SEQ ID NO: 463720 - RNA, 24 nt, Artificial Sequence
  Synthetic
ugaaggaaaugcagaaauuaacca

SEQ ID NO: 463721 - RNA, 18 nt, Artificial Sequence
  Synthetic
cauuagcaagauuaacca

SEQ ID NO: 463722 - RNA, 19 nt, Artificial Sequence
  Synthetic
ccauuagcaagauuaacca

SEQ ID NO: 463723 - RNA, 20 nt, Artificial Sequence
  Synthetic
accauuagcaagauuaacca

SEQ ID NO: 463724 - RNA, 21 nt, Artificial Sequence
  Synthetic
gaccauuagcaagauuaacca

SEQ ID NO: 463725 - RNA, 22 nt, Artificial Sequence
  Synthetic
agaccauuagcaagauuaacca

SEQ ID NO: 463726 - RNA, 23 nt, Artificial Sequence
  Synthetic
uagaccauuagcaagauuaacca

SEQ ID NO: 463727 - RNA, 24 nt, Artificial Sequence
  Synthetic
auagaccauuagcaagauuaacca

SEQ ID NO: 463728 - RNA, 18 nt, Artificial Sequence
  Synthetic
ugccuuuccuguuaacca

SEQ ID NO: 463729 - RNA, 19 nt, Artificial Sequence
  Synthetic
gugccuuuccuguuaacca

SEQ ID NO: 463730 - RNA, 20 nt, Artificial Sequence
  Synthetic
agugccuuuccuguuaacca

SEQ ID NO: 463731 - RNA, 21 nt, Artificial Sequence
  Synthetic
uagugccuuuccuguuaacca

SEQ ID NO: 463732 - RNA, 22 nt, Artificial Sequence
  Synthetic
guagugccuuuccuguuaacca

SEQ ID NO: 463733 - RNA, 23 nt, Artificial Sequence
  Synthetic
uguagugccuuuccuguuaacca

SEQ ID NO: 463734 - RNA, 24 nt, Artificial Sequence
  Synthetic
cuguagugccuuuccuguuaacca

SEQ ID NO: 463735 - RNA, 18 nt, Artificial Sequence
  Synthetic
uuugaacgguuuuaacca

SEQ ID NO: 463736 - RNA, 19 nt, Artificial Sequence
  Synthetic
cuuugaacgguuuuaacca

SEQ ID NO: 463737 - RNA, 20 nt, Artificial Sequence
  Synthetic
ccuuugaacgguuuuaacca

SEQ ID NO: 463738 - RNA, 21 nt, Artificial Sequence
  Synthetic
accuuugaacgguuuuaacca

SEQ ID NO: 463739 - RNA, 22 nt, Artificial Sequence
  Synthetic
aaccuuugaacgguuuuaacca

SEQ ID NO: 463740 - RNA, 23 nt, Artificial Sequence
  Synthetic
gaaccuuugaacgguuuuaacca

SEQ ID NO: 463741 - RNA, 24 nt, Artificial Sequence
  Synthetic
ggaaccuuugaacgguuuuaacca

SEQ ID NO: 463742 - RNA, 18 nt, Artificial Sequence
  Synthetic
aaaggauggaaaacacca

SEQ ID NO: 463743 - RNA, 19 nt, Artificial Sequence
  Synthetic
gaaaggauggaaaacacca

SEQ ID NO: 463744 - RNA, 20 nt, Artificial Sequence
  Synthetic
ggaaaggauggaaaacacca

SEQ ID NO: 463745 - RNA, 21 nt, Artificial Sequence
  Synthetic
gggaaaggauggaaaacacca

SEQ ID NO: 463746 - RNA, 22 nt, Artificial Sequence
  Synthetic
agggaaaggauggaaaacacca

SEQ ID NO: 463747 - RNA, 23 nt, Artificial Sequence
  Synthetic
uagggaaaggauggaaaacacca

SEQ ID NO: 463748 - RNA, 24 nt, Artificial Sequence
  Synthetic
cuagggaaaggauggaaaacacca

SEQ ID NO: 463749 - RNA, 18 nt, Artificial Sequence
  Synthetic
uucaggaccugaacacca

SEQ ID NO: 463750 - RNA, 19 nt, Artificial Sequence
  Synthetic
guucaggaccugaacacca

SEQ ID NO: 463751 - RNA, 20 nt, Artificial Sequence
  Synthetic
cguucaggaccugaacacca

SEQ ID NO: 463752 - RNA, 21 nt, Artificial Sequence
  Synthetic
ucguucaggaccugaacacca

SEQ ID NO: 463753 - RNA, 22 nt, Artificial Sequence
  Synthetic
cucguucaggaccugaacacca

SEQ ID NO: 463754 - RNA, 23 nt, Artificial Sequence
  Synthetic
gcucguucaggaccugaacacca

SEQ ID NO: 463755 - RNA, 24 nt, Artificial Sequence
  Synthetic
ugcucguucaggaccugaacacca

SEQ ID NO: 463756 - RNA, 18 nt, Artificial Sequence
  Synthetic
ggcuuuaagugaacacca

SEQ ID NO: 463757 - RNA, 19 nt, Artificial Sequence
  Synthetic
gggcuuuaagugaacacca

SEQ ID NO: 463758 - RNA, 20 nt, Artificial Sequence
  Synthetic
ugggcuuuaagugaacacca

SEQ ID NO: 463759 - RNA, 21 nt, Artificial Sequence
  Synthetic
uugggcuuuaagugaacacca

SEQ ID NO: 463760 - RNA, 22 nt, Artificial Sequence
  Synthetic
cuugggcuuuaagugaacacca

SEQ ID NO: 463761 - RNA, 23 nt, Artificial Sequence
  Synthetic
ccuugggcuuuaagugaacacca

SEQ ID NO: 463762 - RNA, 24 nt, Artificial Sequence
  Synthetic
cccuugggcuuuaagugaacacca

SEQ ID NO: 463763 - RNA, 18 nt, Artificial Sequence
  Synthetic
ugaaacccucuaacacca

SEQ ID NO: 463764 - RNA, 19 nt, Artificial Sequence
  Synthetic
cugaaacccucuaacacca

SEQ ID NO: 463765 - RNA, 20 nt, Artificial Sequence
  Synthetic
acugaaacccucuaacacca

SEQ ID NO: 463766 - RNA, 21 nt, Artificial Sequence
  Synthetic
cacugaaacccucuaacacca

SEQ ID NO: 463767 - RNA, 22 nt, Artificial Sequence
  Synthetic
ccacugaaacccucuaacacca

SEQ ID NO: 463768 - RNA, 23 nt, Artificial Sequence
  Synthetic
gccacugaaacccucuaacacca

SEQ ID NO: 463769 - RNA, 24 nt, Artificial Sequence
  Synthetic
cgccacugaaacccucuaacacca

SEQ ID NO: 463770 - RNA, 18 nt, Artificial Sequence
  Synthetic
gagaaacuucccacacca

SEQ ID NO: 463771 - RNA, 19 nt, Artificial Sequence
  Synthetic
ugagaaacuucccacacca

SEQ ID NO: 463772 - RNA, 20 nt, Artificial Sequence
  Synthetic
cugagaaacuucccacacca

SEQ ID NO: 463773 - RNA, 21 nt, Artificial Sequence
  Synthetic
ccugagaaacuucccacacca

SEQ ID NO: 463774 - RNA, 22 nt, Artificial Sequence
  Synthetic
uccugagaaacuucccacacca

SEQ ID NO: 463775 - RNA, 23 nt, Artificial Sequence
  Synthetic
cuccugagaaacuucccacacca

SEQ ID NO: 463776 - RNA, 24 nt, Artificial Sequence
  Synthetic
ccuccugagaaacuucccacacca

SEQ ID NO: 463777 - RNA, 18 nt, Artificial Sequence
  Synthetic
acguaauaaaucacacca

SEQ ID NO: 463778 - RNA, 19 nt, Artificial Sequence
  Synthetic
uacguaauaaaucacacca

SEQ ID NO: 463779 - RNA, 20 nt, Artificial Sequence
  Synthetic
cuacguaauaaaucacacca

SEQ ID NO: 463780 - RNA, 21 nt, Artificial Sequence
  Synthetic
ucuacguaauaaaucacacca

SEQ ID NO: 463781 - RNA, 22 nt, Artificial Sequence
  Synthetic
gucuacguaauaaaucacacca

SEQ ID NO: 463782 - RNA, 23 nt, Artificial Sequence
  Synthetic
ugucuacguaauaaaucacacca

SEQ ID NO: 463783 - RNA, 24 nt, Artificial Sequence
  Synthetic
uugucuacguaauaaaucacacca

SEQ ID NO: 463784 - RNA, 18 nt, Artificial Sequence
  Synthetic
auaucaccaccgacacca

SEQ ID NO: 463785 - RNA, 19 nt, Artificial Sequence
  Synthetic
gauaucaccaccgacacca

SEQ ID NO: 463786 - RNA, 20 nt, Artificial Sequence
  Synthetic
ggauaucaccaccgacacca

SEQ ID NO: 463787 - RNA, 21 nt, Artificial Sequence
  Synthetic
gggauaucaccaccgacacca

SEQ ID NO: 463788 - RNA, 22 nt, Artificial Sequence
  Synthetic
ggggauaucaccaccgacacca

SEQ ID NO: 463789 - RNA, 23 nt, Artificial Sequence
  Synthetic
aggggauaucaccaccgacacca

SEQ ID NO: 463790 - RNA, 24 nt, Artificial Sequence
  Synthetic
aaggggauaucaccaccgacacca

SEQ ID NO: 463791 - RNA, 18 nt, Artificial Sequence
  Synthetic
cacugccuggggacacca

SEQ ID NO: 463792 - RNA, 19 nt, Artificial Sequence
  Synthetic
ucacugccuggggacacca

SEQ ID NO: 463793 - RNA, 20 nt, Artificial Sequence
  Synthetic
uucacugccuggggacacca

SEQ ID NO: 463794 - RNA, 21 nt, Artificial Sequence
  Synthetic
guucacugccuggggacacca

SEQ ID NO: 463795 - RNA, 22 nt, Artificial Sequence
  Synthetic
aguucacugccuggggacacca

SEQ ID NO: 463796 - RNA, 23 nt, Artificial Sequence
  Synthetic
uaguucacugccuggggacacca

SEQ ID NO: 463797 - RNA, 24 nt, Artificial Sequence
  Synthetic
auaguucacugccuggggacacca

SEQ ID NO: 463798 - RNA, 18 nt, Artificial Sequence
  Synthetic
acggauacucugacacca

SEQ ID NO: 463799 - RNA, 19 nt, Artificial Sequence
  Synthetic
aacggauacucugacacca

SEQ ID NO: 463800 - RNA, 20 nt, Artificial Sequence
  Synthetic
uaacggauacucugacacca

SEQ ID NO: 463801 - RNA, 21 nt, Artificial Sequence
  Synthetic
cuaacggauacucugacacca

SEQ ID NO: 463802 - RNA, 22 nt, Artificial Sequence
  Synthetic
ccuaacggauacucugacacca

SEQ ID NO: 463803 - RNA, 23 nt, Artificial Sequence
  Synthetic
accuaacggauacucugacacca

SEQ ID NO: 463804 - RNA, 24 nt, Artificial Sequence
  Synthetic
aaccuaacggauacucugacacca

SEQ ID NO: 463805 - RNA, 18 nt, Artificial Sequence
  Synthetic
aauaacuuuuugacacca

SEQ ID NO: 463806 - RNA, 19 nt, Artificial Sequence
  Synthetic
aaauaacuuuuugacacca

SEQ ID NO: 463807 - RNA, 20 nt, Artificial Sequence
  Synthetic
aaaauaacuuuuugacacca

SEQ ID NO: 463808 - RNA, 21 nt, Artificial Sequence
  Synthetic
caaaauaacuuuuugacacca

SEQ ID NO: 463809 - RNA, 22 nt, Artificial Sequence
  Synthetic
ccaaaauaacuuuuugacacca

SEQ ID NO: 463810 - RNA, 23 nt, Artificial Sequence
  Synthetic
uccaaaauaacuuuuugacacca

SEQ ID NO: 463811 - RNA, 24 nt, Artificial Sequence
  Synthetic
uuccaaaauaacuuuuugacacca

SEQ ID NO: 463812 - RNA, 18 nt, Artificial Sequence
  Synthetic
auugacacauauacacca

SEQ ID NO: 463813 - RNA, 19 nt, Artificial Sequence
  Synthetic
aauugacacauauacacca

SEQ ID NO: 463814 - RNA, 20 nt, Artificial Sequence
  Synthetic
aaauugacacauauacacca

SEQ ID NO: 463815 - RNA, 21 nt, Artificial Sequence
  Synthetic
aaaauugacacauauacacca

SEQ ID NO: 463816 - RNA, 22 nt, Artificial Sequence
  Synthetic
gaaaauugacacauauacacca

SEQ ID NO: 463817 - RNA, 23 nt, Artificial Sequence
  Synthetic
agaaaauugacacauauacacca

SEQ ID NO: 463818 - RNA, 24 nt, Artificial Sequence
  Synthetic
aagaaaauugacacauauacacca

SEQ ID NO: 463819 - RNA, 18 nt, Artificial Sequence
  Synthetic
aaacagagauauacacca

SEQ ID NO: 463820 - RNA, 19 nt, Artificial Sequence
  Synthetic
aaaacagagauauacacca

SEQ ID NO: 463821 - RNA, 20 nt, Artificial Sequence
  Synthetic
caaaacagagauauacacca

SEQ ID NO: 463822 - RNA, 21 nt, Artificial Sequence
  Synthetic
ccaaaacagagauauacacca

SEQ ID NO: 463823 - RNA, 22 nt, Artificial Sequence
  Synthetic
accaaaacagagauauacacca

SEQ ID NO: 463824 - RNA, 23 nt, Artificial Sequence
  Synthetic
uaccaaaacagagauauacacca

SEQ ID NO: 463825 - RNA, 24 nt, Artificial Sequence
  Synthetic
guaccaaaacagagauauacacca

SEQ ID NO: 463826 - RNA, 18 nt, Artificial Sequence
  Synthetic
accuugcaugcuacacca

SEQ ID NO: 463827 - RNA, 19 nt, Artificial Sequence
  Synthetic
gaccuugcaugcuacacca

SEQ ID NO: 463828 - RNA, 20 nt, Artificial Sequence
  Synthetic
ugaccuugcaugcuacacca

SEQ ID NO: 463829 - RNA, 21 nt, Artificial Sequence
  Synthetic
gugaccuugcaugcuacacca

SEQ ID NO: 463830 - RNA, 22 nt, Artificial Sequence
  Synthetic
ugugaccuugcaugcuacacca

SEQ ID NO: 463831 - RNA, 23 nt, Artificial Sequence
  Synthetic
gugugaccuugcaugcuacacca

SEQ ID NO: 463832 - RNA, 24 nt, Artificial Sequence
  Synthetic
ugugugaccuugcaugcuacacca

SEQ ID NO: 463833 - RNA, 18 nt, Artificial Sequence
  Synthetic
ugacaaugguguacacca

SEQ ID NO: 463834 - RNA, 19 nt, Artificial Sequence
  Synthetic
uugacaaugguguacacca

SEQ ID NO: 463835 - RNA, 20 nt, Artificial Sequence
  Synthetic
auugacaaugguguacacca

SEQ ID NO: 463836 - RNA, 21 nt, Artificial Sequence
  Synthetic
cauugacaaugguguacacca

SEQ ID NO: 463837 - RNA, 22 nt, Artificial Sequence
  Synthetic
ccauugacaaugguguacacca

SEQ ID NO: 463838 - RNA, 23 nt, Artificial Sequence
  Synthetic
uccauugacaaugguguacacca

SEQ ID NO: 463839 - RNA, 24 nt, Artificial Sequence
  Synthetic
uuccauugacaaugguguacacca

SEQ ID NO: 463840 - RNA, 18 nt, Artificial Sequence
  Synthetic
gggugcagcaaaccacca

SEQ ID NO: 463841 - RNA, 19 nt, Artificial Sequence
  Synthetic
ugggugcagcaaaccacca

SEQ ID NO: 463842 - RNA, 20 nt, Artificial Sequence
  Synthetic
augggugcagcaaaccacca

SEQ ID NO: 463843 - RNA, 21 nt, Artificial Sequence
  Synthetic
gaugggugcagcaaaccacca

SEQ ID NO: 463844 - RNA, 22 nt, Artificial Sequence
  Synthetic
ugaugggugcagcaaaccacca

SEQ ID NO: 463845 - RNA, 23 nt, Artificial Sequence
  Synthetic
uugaugggugcagcaaaccacca

SEQ ID NO: 463846 - RNA, 24 nt, Artificial Sequence
  Synthetic
guugaugggugcagcaaaccacca

SEQ ID NO: 463847 - RNA, 18 nt, Artificial Sequence
  Synthetic
gugugcagcaaaccacca

SEQ ID NO: 463848 - RNA, 19 nt, Artificial Sequence
  Synthetic
ugugugcagcaaaccacca

SEQ ID NO: 463849 - RNA, 20 nt, Artificial Sequence
  Synthetic
augugugcagcaaaccacca

SEQ ID NO: 463850 - RNA, 21 nt, Artificial Sequence
  Synthetic
gaugugugcagcaaaccacca

SEQ ID NO: 463851 - RNA, 22 nt, Artificial Sequence
  Synthetic
ugaugugugcagcaaaccacca

SEQ ID NO: 463852 - RNA, 23 nt, Artificial Sequence
  Synthetic
uugaugugugcagcaaaccacca

SEQ ID NO: 463853 - RNA, 24 nt, Artificial Sequence
  Synthetic
guugaugugugcagcaaaccacca

SEQ ID NO: 463854 - RNA, 18 nt, Artificial Sequence
  Synthetic
aggguuauagccccacca

SEQ ID NO: 463855 - RNA, 19 nt, Artificial Sequence
  Synthetic
caggguuauagccccacca

SEQ ID NO: 463856 - RNA, 20 nt, Artificial Sequence
  Synthetic
ucaggguuauagccccacca

SEQ ID NO: 463857 - RNA, 21 nt, Artificial Sequence
  Synthetic
uucaggguuauagccccacca

SEQ ID NO: 463858 - RNA, 22 nt, Artificial Sequence
  Synthetic
auucaggguuauagccccacca

SEQ ID NO: 463859 - RNA, 23 nt, Artificial Sequence
  Synthetic
aauucaggguuauagccccacca

SEQ ID NO: 463860 - RNA, 24 nt, Artificial Sequence
  Synthetic
uaauucaggguuauagccccacca

SEQ ID NO: 463861 - RNA, 18 nt, Artificial Sequence
  Synthetic
uucuucuuuaagccacca

SEQ ID NO: 463862 - RNA, 19 nt, Artificial Sequence
  Synthetic
uuucuucuuuaagccacca

SEQ ID NO: 463863 - RNA, 20 nt, Artificial Sequence
  Synthetic
guuucuucuuuaagccacca

SEQ ID NO: 463864 - RNA, 21 nt, Artificial Sequence
  Synthetic
gguuucuucuuuaagccacca

SEQ ID NO: 463865 - RNA, 22 nt, Artificial Sequence
  Synthetic
ugguuucuucuuuaagccacca

SEQ ID NO: 463866 - RNA, 23 nt, Artificial Sequence
  Synthetic
augguuucuucuuuaagccacca

SEQ ID NO: 463867 - RNA, 24 nt, Artificial Sequence
  Synthetic
caugguuucuucuuuaagccacca

SEQ ID NO: 463868 - RNA, 18 nt, Artificial Sequence
  Synthetic
caacagucaaugccacca

SEQ ID NO: 463869 - RNA, 19 nt, Artificial Sequence
  Synthetic
ccaacagucaaugccacca

SEQ ID NO: 463870 - RNA, 20 nt, Artificial Sequence
  Synthetic
accaacagucaaugccacca

SEQ ID NO: 463871 - RNA, 21 nt, Artificial Sequence
  Synthetic
uaccaacagucaaugccacca

SEQ ID NO: 463872 - RNA, 22 nt, Artificial Sequence
  Synthetic
cuaccaacagucaaugccacca

SEQ ID NO: 463873 - RNA, 23 nt, Artificial Sequence
  Synthetic
ucuaccaacagucaaugccacca

SEQ ID NO: 463874 - RNA, 24 nt, Artificial Sequence
  Synthetic
uucuaccaacagucaaugccacca

SEQ ID NO: 463875 - RNA, 18 nt, Artificial Sequence
  Synthetic
cacaagccucauccacca

SEQ ID NO: 463876 - RNA, 19 nt, Artificial Sequence
  Synthetic
ucacaagccucauccacca

SEQ ID NO: 463877 - RNA, 20 nt, Artificial Sequence
  Synthetic
cucacaagccucauccacca

SEQ ID NO: 463878 - RNA, 21 nt, Artificial Sequence
  Synthetic
ccucacaagccucauccacca

SEQ ID NO: 463879 - RNA, 22 nt, Artificial Sequence
  Synthetic
cccucacaagccucauccacca

SEQ ID NO: 463880 - RNA, 23 nt, Artificial Sequence
  Synthetic
gcccucacaagccucauccacca

SEQ ID NO: 463881 - RNA, 24 nt, Artificial Sequence
  Synthetic
ggcccucacaagccucauccacca

SEQ ID NO: 463882 - RNA, 18 nt, Artificial Sequence
  Synthetic
uuaaacucuuuuccacca

SEQ ID NO: 463883 - RNA, 19 nt, Artificial Sequence
  Synthetic
uuuaaacucuuuuccacca

SEQ ID NO: 463884 - RNA, 20 nt, Artificial Sequence
  Synthetic
uuuuaaacucuuuuccacca

SEQ ID NO: 463885 - RNA, 21 nt, Artificial Sequence
  Synthetic
cuuuuaaacucuuuuccacca

SEQ ID NO: 463886 - RNA, 22 nt, Artificial Sequence
  Synthetic
acuuuuaaacucuuuuccacca

SEQ ID NO: 463887 - RNA, 23 nt, Artificial Sequence
  Synthetic
uacuuuuaaacucuuuuccacca

SEQ ID NO: 463888 - RNA, 24 nt, Artificial Sequence
  Synthetic
cuacuuuuaaacucuuuuccacca

SEQ ID NO: 463889 - RNA, 18 nt, Artificial Sequence
  Synthetic
gugugacuccaggcacca

SEQ ID NO: 463890 - RNA, 19 nt, Artificial Sequence
  Synthetic
cgugugacuccaggcacca

SEQ ID NO: 463891 - RNA, 20 nt, Artificial Sequence
  Synthetic
gcgugugacuccaggcacca

SEQ ID NO: 463892 - RNA, 21 nt, Artificial Sequence
  Synthetic
ggcgugugacuccaggcacca

SEQ ID NO: 463893 - RNA, 22 nt, Artificial Sequence
  Synthetic
uggcgugugacuccaggcacca

SEQ ID NO: 463894 - RNA, 23 nt, Artificial Sequence
  Synthetic
auggcgugugacuccaggcacca

SEQ ID NO: 463895 - RNA, 24 nt, Artificial Sequence
  Synthetic
aauggcgugugacuccaggcacca

SEQ ID NO: 463896 - RNA, 18 nt, Artificial Sequence
  Synthetic
aaauguggcauggcacca

SEQ ID NO: 463897 - RNA, 19 nt, Artificial Sequence
  Synthetic
aaaauguggcauggcacca

SEQ ID NO: 463898 - RNA, 20 nt, Artificial Sequence
  Synthetic
uaaaauguggcauggcacca

SEQ ID NO: 463899 - RNA, 21 nt, Artificial Sequence
  Synthetic
uuaaaauguggcauggcacca

SEQ ID NO: 463900 - RNA, 22 nt, Artificial Sequence
  Synthetic
uuuaaaauguggcauggcacca

SEQ ID NO: 463901 - RNA, 23 nt, Artificial Sequence
  Synthetic
uuuuaaaauguggcauggcacca

SEQ ID NO: 463902 - RNA, 24 nt, Artificial Sequence
  Synthetic
auuuuaaaauguggcauggcacca

SEQ ID NO: 463903 - RNA, 18 nt, Artificial Sequence
  Synthetic
gaacucagcucugcacca

SEQ ID NO: 463904 - RNA, 19 nt, Artificial Sequence
  Synthetic
ugaacucagcucugcacca

SEQ ID NO: 463905 - RNA, 20 nt, Artificial Sequence
  Synthetic
uugaacucagcucugcacca

SEQ ID NO: 463906 - RNA, 21 nt, Artificial Sequence
  Synthetic
auugaacucagcucugcacca

SEQ ID NO: 463907 - RNA, 22 nt, Artificial Sequence
  Synthetic
aauugaacucagcucugcacca

SEQ ID NO: 463908 - RNA, 23 nt, Artificial Sequence
  Synthetic
gaauugaacucagcucugcacca

SEQ ID NO: 463909 - RNA, 24 nt, Artificial Sequence
  Synthetic
ggaauugaacucagcucugcacca

SEQ ID NO: 463910 - RNA, 18 nt, Artificial Sequence
  Synthetic
aaaaugguaugugcacca

SEQ ID NO: 463911 - RNA, 19 nt, Artificial Sequence
  Synthetic
aaaaaugguaugugcacca

SEQ ID NO: 463912 - RNA, 20 nt, Artificial Sequence
  Synthetic
gaaaaaugguaugugcacca

SEQ ID NO: 463913 - RNA, 21 nt, Artificial Sequence
  Synthetic
agaaaaaugguaugugcacca

SEQ ID NO: 463914 - RNA, 22 nt, Artificial Sequence
  Synthetic
cagaaaaaugguaugugcacca

SEQ ID NO: 463915 - RNA, 23 nt, Artificial Sequence
  Synthetic
acagaaaaaugguaugugcacca

SEQ ID NO: 463916 - RNA, 24 nt, Artificial Sequence
  Synthetic
cacagaaaaaugguaugugcacca

SEQ ID NO: 463917 - RNA, 18 nt, Artificial Sequence
  Synthetic
aucaagggcagcucacca

SEQ ID NO: 463918 - RNA, 19 nt, Artificial Sequence
  Synthetic
aaucaagggcagcucacca

SEQ ID NO: 463919 - RNA, 20 nt, Artificial Sequence
  Synthetic
uaaucaagggcagcucacca

SEQ ID NO: 463920 - RNA, 21 nt, Artificial Sequence
  Synthetic
cuaaucaagggcagcucacca

SEQ ID NO: 463921 - RNA, 22 nt, Artificial Sequence
  Synthetic
acuaaucaagggcagcucacca

SEQ ID NO: 463922 - RNA, 23 nt, Artificial Sequence
  Synthetic
aacuaaucaagggcagcucacca

SEQ ID NO: 463923 - RNA, 24 nt, Artificial Sequence
  Synthetic
gaacuaaucaagggcagcucacca

SEQ ID NO: 463924 - RNA, 18 nt, Artificial Sequence
  Synthetic
cugaagaauaucucacca

SEQ ID NO: 463925 - RNA, 19 nt, Artificial Sequence
  Synthetic
acugaagaauaucucacca

SEQ ID NO: 463926 - RNA, 20 nt, Artificial Sequence
  Synthetic
cacugaagaauaucucacca

SEQ ID NO: 463927 - RNA, 21 nt, Artificial Sequence
  Synthetic
acacugaagaauaucucacca

SEQ ID NO: 463928 - RNA, 22 nt, Artificial Sequence
  Synthetic
gacacugaagaauaucucacca

SEQ ID NO: 463929 - RNA, 23 nt, Artificial Sequence
  Synthetic
ugacacugaagaauaucucacca

SEQ ID NO: 463930 - RNA, 24 nt, Artificial Sequence
  Synthetic
augacacugaagaauaucucacca

SEQ ID NO: 463931 - RNA, 18 nt, Artificial Sequence
  Synthetic
uuuuaaauuuucucacca

SEQ ID NO: 463932 - RNA, 19 nt, Artificial Sequence
  Synthetic
auuuuaaauuuucucacca

SEQ ID NO: 463933 - RNA, 20 nt, Artificial Sequence
  Synthetic
aauuuuaaauuuucucacca

SEQ ID NO: 463934 - RNA, 21 nt, Artificial Sequence
  Synthetic
gaauuuuaaauuuucucacca

SEQ ID NO: 463935 - RNA, 22 nt, Artificial Sequence
  Synthetic
agaauuuuaaauuuucucacca

SEQ ID NO: 463936 - RNA, 23 nt, Artificial Sequence
  Synthetic
gagaauuuuaaauuuucucacca

SEQ ID NO: 463937 - RNA, 24 nt, Artificial Sequence
  Synthetic
agagaauuuuaaauuuucucacca

SEQ ID NO: 463938 - RNA, 18 nt, Artificial Sequence
  Synthetic
ugaacuaacuugucacca

SEQ ID NO: 463939 - RNA, 19 nt, Artificial Sequence
  Synthetic
augaacuaacuugucacca

SEQ ID NO: 463940 - RNA, 20 nt, Artificial Sequence
  Synthetic
caugaacuaacuugucacca

SEQ ID NO: 463941 - RNA, 21 nt, Artificial Sequence
  Synthetic
gcaugaacuaacuugucacca

SEQ ID NO: 463942 - RNA, 22 nt, Artificial Sequence
  Synthetic
agcaugaacuaacuugucacca

SEQ ID NO: 463943 - RNA, 23 nt, Artificial Sequence
  Synthetic
uagcaugaacuaacuugucacca

SEQ ID NO: 463944 - RNA, 24 nt, Artificial Sequence
  Synthetic
auagcaugaacuaacuugucacca

SEQ ID NO: 463945 - RNA, 18 nt, Artificial Sequence
  Synthetic
aaauccacauauucacca

SEQ ID NO: 463946 - RNA, 19 nt, Artificial Sequence
  Synthetic
aaaauccacauauucacca

SEQ ID NO: 463947 - RNA, 20 nt, Artificial Sequence
  Synthetic
aaaaauccacauauucacca

SEQ ID NO: 463948 - RNA, 21 nt, Artificial Sequence
  Synthetic
caaaaauccacauauucacca

SEQ ID NO: 463949 - RNA, 22 nt, Artificial Sequence
  Synthetic
gcaaaaauccacauauucacca

SEQ ID NO: 463950 - RNA, 23 nt, Artificial Sequence
  Synthetic
cgcaaaaauccacauauucacca

SEQ ID NO: 463951 - RNA, 24 nt, Artificial Sequence
  Synthetic
ccgcaaaaauccacauauucacca

SEQ ID NO: 463952 - RNA, 18 nt, Artificial Sequence
  Synthetic
cuagaugcagaaagacca

SEQ ID NO: 463953 - RNA, 19 nt, Artificial Sequence
  Synthetic
gcuagaugcagaaagacca

SEQ ID NO: 463954 - RNA, 20 nt, Artificial Sequence
  Synthetic
ugcuagaugcagaaagacca

SEQ ID NO: 463955 - RNA, 21 nt, Artificial Sequence
  Synthetic
augcuagaugcagaaagacca

SEQ ID NO: 463956 - RNA, 22 nt, Artificial Sequence
  Synthetic
gaugcuagaugcagaaagacca

SEQ ID NO: 463957 - RNA, 23 nt, Artificial Sequence
  Synthetic
ugaugcuagaugcagaaagacca

SEQ ID NO: 463958 - RNA, 24 nt, Artificial Sequence
  Synthetic
gugaugcuagaugcagaaagacca

SEQ ID NO: 463959 - RNA, 18 nt, Artificial Sequence
  Synthetic
gccaaaauguaaagacca

SEQ ID NO: 463960 - RNA, 19 nt, Artificial Sequence
  Synthetic
ugccaaaauguaaagacca

SEQ ID NO: 463961 - RNA, 20 nt, Artificial Sequence
  Synthetic
augccaaaauguaaagacca

SEQ ID NO: 463962 - RNA, 21 nt, Artificial Sequence
  Synthetic
caugccaaaauguaaagacca

SEQ ID NO: 463963 - RNA, 22 nt, Artificial Sequence
  Synthetic
ucaugccaaaauguaaagacca

SEQ ID NO: 463964 - RNA, 23 nt, Artificial Sequence
  Synthetic
aucaugccaaaauguaaagacca

SEQ ID NO: 463965 - RNA, 24 nt, Artificial Sequence
  Synthetic
aaucaugccaaaauguaaagacca

SEQ ID NO: 463966 - RNA, 18 nt, Artificial Sequence
  Synthetic
uggagcuuaccaagacca

SEQ ID NO: 463967 - RNA, 19 nt, Artificial Sequence
  Synthetic
guggagcuuaccaagacca

SEQ ID NO: 463968 - RNA, 20 nt, Artificial Sequence
  Synthetic
gguggagcuuaccaagacca

SEQ ID NO: 463969 - RNA, 21 nt, Artificial Sequence
  Synthetic
ggguggagcuuaccaagacca

SEQ ID NO: 463970 - RNA, 22 nt, Artificial Sequence
  Synthetic
gggguggagcuuaccaagacca

SEQ ID NO: 463971 - RNA, 23 nt, Artificial Sequence
  Synthetic
agggguggagcuuaccaagacca

SEQ ID NO: 463972 - RNA, 24 nt, Artificial Sequence
  Synthetic
cagggguggagcuuaccaagacca

SEQ ID NO: 463973 - RNA, 18 nt, Artificial Sequence
  Synthetic
agaagguauauaagacca

SEQ ID NO: 463974 - RNA, 19 nt, Artificial Sequence
  Synthetic
gagaagguauauaagacca

SEQ ID NO: 463975 - RNA, 20 nt, Artificial Sequence
  Synthetic
ggagaagguauauaagacca

SEQ ID NO: 463976 - RNA, 21 nt, Artificial Sequence
  Synthetic
gggagaagguauauaagacca

SEQ ID NO: 463977 - RNA, 22 nt, Artificial Sequence
  Synthetic
ggggagaagguauauaagacca

SEQ ID NO: 463978 - RNA, 23 nt, Artificial Sequence
  Synthetic
uggggagaagguauauaagacca

SEQ ID NO: 463979 - RNA, 24 nt, Artificial Sequence
  Synthetic
uuggggagaagguauauaagacca

SEQ ID NO: 463980 - RNA, 18 nt, Artificial Sequence
  Synthetic
guacauaaaaacagacca

SEQ ID NO: 463981 - RNA, 19 nt, Artificial Sequence
  Synthetic
aguacauaaaaacagacca

SEQ ID NO: 463982 - RNA, 20 nt, Artificial Sequence
  Synthetic
aaguacauaaaaacagacca

SEQ ID NO: 463983 - RNA, 21 nt, Artificial Sequence
  Synthetic
caaguacauaaaaacagacca

SEQ ID NO: 463984 - RNA, 22 nt, Artificial Sequence
  Synthetic
gcaaguacauaaaaacagacca

SEQ ID NO: 463985 - RNA, 23 nt, Artificial Sequence
  Synthetic
ggcaaguacauaaaaacagacca

SEQ ID NO: 463986 - RNA, 24 nt, Artificial Sequence
  Synthetic
uggcaaguacauaaaaacagacca

SEQ ID NO: 463987 - RNA, 18 nt, Artificial Sequence
  Synthetic
uguuuuguugccagacca

SEQ ID NO: 463988 - RNA, 19 nt, Artificial Sequence
  Synthetic
cuguuuuguugccagacca

SEQ ID NO: 463989 - RNA, 20 nt, Artificial Sequence
  Synthetic
gcuguuuuguugccagacca

SEQ ID NO: 463990 - RNA, 21 nt, Artificial Sequence
  Synthetic
agcuguuuuguugccagacca

SEQ ID NO: 463991 - RNA, 22 nt, Artificial Sequence
  Synthetic
cagcuguuuuguugccagacca

SEQ ID NO: 463992 - RNA, 23 nt, Artificial Sequence
  Synthetic
acagcuguuuuguugccagacca

SEQ ID NO: 463993 - RNA, 24 nt, Artificial Sequence
  Synthetic
aacagcuguuuuguugccagacca

SEQ ID NO: 463994 - RNA, 18 nt, Artificial Sequence
  Synthetic
gugagaaaacugagacca

SEQ ID NO: 463995 - RNA, 19 nt, Artificial Sequence
  Synthetic
ggugagaaaacugagacca

SEQ ID NO: 463996 - RNA, 20 nt, Artificial Sequence
  Synthetic
aggugagaaaacugagacca

SEQ ID NO: 463997 - RNA, 21 nt, Artificial Sequence
  Synthetic
caggugagaaaacugagacca

SEQ ID NO: 463998 - RNA, 22 nt, Artificial Sequence
  Synthetic
ccaggugagaaaacugagacca

SEQ ID NO: 463999 - RNA, 23 nt, Artificial Sequence
  Synthetic
uccaggugagaaaacugagacca

SEQ ID NO: 464000 - RNA, 24 nt, Artificial Sequence
  Synthetic
uuccaggugagaaaacugagacca

SEQ ID NO: 464001 - RNA, 18 nt, Artificial Sequence
  Synthetic
guagccauguugagacca

SEQ ID NO: 464002 - RNA, 19 nt, Artificial Sequence
  Synthetic
aguagccauguugagacca

SEQ ID NO: 464003 - RNA, 20 nt, Artificial Sequence
  Synthetic
gaguagccauguugagacca

SEQ ID NO: 464004 - RNA, 21 nt, Artificial Sequence
  Synthetic
agaguagccauguugagacca

SEQ ID NO: 464005 - RNA, 22 nt, Artificial Sequence
  Synthetic
cagaguagccauguugagacca

SEQ ID NO: 464006 - RNA, 23 nt, Artificial Sequence
  Synthetic
gcagaguagccauguugagacca

SEQ ID NO: 464007 - RNA, 24 nt, Artificial Sequence
  Synthetic
ggcagaguagccauguugagacca

SEQ ID NO: 464008 - RNA, 18 nt, Artificial Sequence
  Synthetic
aggcagacauauagacca

SEQ ID NO: 464009 - RNA, 19 nt, Artificial Sequence
  Synthetic
aaggcagacauauagacca

SEQ ID NO: 464010 - RNA, 20 nt, Artificial Sequence
  Synthetic
aaaggcagacauauagacca

SEQ ID NO: 464011 - RNA, 21 nt, Artificial Sequence
  Synthetic
uaaaggcagacauauagacca

SEQ ID NO: 464012 - RNA, 22 nt, Artificial Sequence
  Synthetic
auaaaggcagacauauagacca

SEQ ID NO: 464013 - RNA, 23 nt, Artificial Sequence
  Synthetic
cauaaaggcagacauauagacca

SEQ ID NO: 464014 - RNA, 24 nt, Artificial Sequence
  Synthetic
ucauaaaggcagacauauagacca

SEQ ID NO: 464015 - RNA, 18 nt, Artificial Sequence
  Synthetic
aaacagagauauagacca

SEQ ID NO: 464016 - RNA, 19 nt, Artificial Sequence
  Synthetic
aaaacagagauauagacca

SEQ ID NO: 464017 - RNA, 20 nt, Artificial Sequence
  Synthetic
caaaacagagauauagacca

SEQ ID NO: 464018 - RNA, 21 nt, Artificial Sequence
  Synthetic
ccaaaacagagauauagacca

SEQ ID NO: 464019 - RNA, 22 nt, Artificial Sequence
  Synthetic
accaaaacagagauauagacca

SEQ ID NO: 464020 - RNA, 23 nt, Artificial Sequence
  Synthetic
uaccaaaacagagauauagacca

SEQ ID NO: 464021 - RNA, 24 nt, Artificial Sequence
  Synthetic
guaccaaaacagagauauagacca

SEQ ID NO: 464022 - RNA, 21 nt, Artificial Sequence
  Synthetic
gcaaaacagauauauagacca

SEQ ID NO: 464023 - RNA, 22 nt, Artificial Sequence
  Synthetic
agcaaaacagauauauagacca

SEQ ID NO: 464024 - RNA, 23 nt, Artificial Sequence
  Synthetic
uagcaaaacagauauauagacca

SEQ ID NO: 464025 - RNA, 24 nt, Artificial Sequence
  Synthetic
auagcaaaacagauauauagacca

SEQ ID NO: 464026 - RNA, 24 nt, Artificial Sequence
  Synthetic
guagcaaaacagauauauagacca

SEQ ID NO: 464027 - RNA, 18 nt, Artificial Sequence
  Synthetic
aacgacuaacuuagacca

SEQ ID NO: 464028 - RNA, 19 nt, Artificial Sequence
  Synthetic
aaacgacuaacuuagacca

SEQ ID NO: 464029 - RNA, 20 nt, Artificial Sequence
  Synthetic
uaaacgacuaacuuagacca

SEQ ID NO: 464030 - RNA, 21 nt, Artificial Sequence
  Synthetic
guaaacgacuaacuuagacca

SEQ ID NO: 464031 - RNA, 22 nt, Artificial Sequence
  Synthetic
aguaaacgacuaacuuagacca

SEQ ID NO: 464032 - RNA, 23 nt, Artificial Sequence
  Synthetic
uaguaaacgacuaacuuagacca

SEQ ID NO: 464033 - RNA, 24 nt, Artificial Sequence
  Synthetic
uuaguaaacgacuaacuuagacca

SEQ ID NO: 464034 - RNA, 18 nt, Artificial Sequence
  Synthetic
cagccuccuccccgacca

SEQ ID NO: 464035 - RNA, 19 nt, Artificial Sequence
  Synthetic
ccagccuccuccccgacca

SEQ ID NO: 464036 - RNA, 20 nt, Artificial Sequence
  Synthetic
accagccuccuccccgacca

SEQ ID NO: 464037 - RNA, 21 nt, Artificial Sequence
  Synthetic
uaccagccuccuccccgacca

SEQ ID NO: 464038 - RNA, 22 nt, Artificial Sequence
  Synthetic
auaccagccuccuccccgacca

SEQ ID NO: 464039 - RNA, 23 nt, Artificial Sequence
  Synthetic
cauaccagccuccuccccgacca

SEQ ID NO: 464040 - RNA, 24 nt, Artificial Sequence
  Synthetic
acauaccagccuccuccccgacca

SEQ ID NO: 464041 - RNA, 18 nt, Artificial Sequence
  Synthetic
ucggcaacauuucgacca

SEQ ID NO: 464042 - RNA, 19 nt, Artificial Sequence
  Synthetic
uucggcaacauuucgacca

SEQ ID NO: 464043 - RNA, 20 nt, Artificial Sequence
  Synthetic
uuucggcaacauuucgacca

SEQ ID NO: 464044 - RNA, 21 nt, Artificial Sequence
  Synthetic
auuucggcaacauuucgacca

SEQ ID NO: 464045 - RNA, 22 nt, Artificial Sequence
  Synthetic
uauuucggcaacauuucgacca

SEQ ID NO: 464046 - RNA, 23 nt, Artificial Sequence
  Synthetic
uuauuucggcaacauuucgacca

SEQ ID NO: 464047 - RNA, 24 nt, Artificial Sequence
  Synthetic
uuuauuucggcaacauuucgacca

SEQ ID NO: 464048 - RNA, 18 nt, Artificial Sequence
  Synthetic
agugcaauuuuaggacca

SEQ ID NO: 464049 - RNA, 19 nt, Artificial Sequence
  Synthetic
cagugcaauuuuaggacca

SEQ ID NO: 464050 - RNA, 20 nt, Artificial Sequence
  Synthetic
ccagugcaauuuuaggacca

SEQ ID NO: 464051 - RNA, 21 nt, Artificial Sequence
  Synthetic
cccagugcaauuuuaggacca

SEQ ID NO: 464052 - RNA, 22 nt, Artificial Sequence
  Synthetic
ccccagugcaauuuuaggacca

SEQ ID NO: 464053 - RNA, 23 nt, Artificial Sequence
  Synthetic
uccccagugcaauuuuaggacca

SEQ ID NO: 464054 - RNA, 24 nt, Artificial Sequence
  Synthetic
cuccccagugcaauuuuaggacca

SEQ ID NO: 464055 - RNA, 18 nt, Artificial Sequence
  Synthetic
aguagagcaaggggacca

SEQ ID NO: 464056 - RNA, 19 nt, Artificial Sequence
  Synthetic
aaguagagcaaggggacca

SEQ ID NO: 464057 - RNA, 20 nt, Artificial Sequence
  Synthetic
gaaguagagcaaggggacca

SEQ ID NO: 464058 - RNA, 21 nt, Artificial Sequence
  Synthetic
agaaguagagcaaggggacca

SEQ ID NO: 464059 - RNA, 22 nt, Artificial Sequence
  Synthetic
aagaaguagagcaaggggacca

SEQ ID NO: 464060 - RNA, 23 nt, Artificial Sequence
  Synthetic
uaagaaguagagcaaggggacca

SEQ ID NO: 464061 - RNA, 24 nt, Artificial Sequence
  Synthetic
uuaagaaguagagcaaggggacca

SEQ ID NO: 464062 - RNA, 18 nt, Artificial Sequence
  Synthetic
ucuuuuccuuauggacca

SEQ ID NO: 464063 - RNA, 19 nt, Artificial Sequence
  Synthetic
uucuuuuccuuauggacca

SEQ ID NO: 464064 - RNA, 20 nt, Artificial Sequence
  Synthetic
uuucuuuuccuuauggacca

SEQ ID NO: 464065 - RNA, 21 nt, Artificial Sequence
  Synthetic
uuuucuuuuccuuauggacca

SEQ ID NO: 464066 - RNA, 22 nt, Artificial Sequence
  Synthetic
uuuuucuuuuccuuauggacca

SEQ ID NO: 464067 - RNA, 23 nt, Artificial Sequence
  Synthetic
uuuuuucuuuuccuuauggacca

SEQ ID NO: 464068 - RNA, 24 nt, Artificial Sequence
  Synthetic
uuuuuuucuuuuccuuauggacca

SEQ ID NO: 464069 - RNA, 18 nt, Artificial Sequence
  Synthetic
gguaaugcuuauggacca

SEQ ID NO: 464070 - RNA, 19 nt, Artificial Sequence
  Synthetic
agguaaugcuuauggacca

SEQ ID NO: 464071 - RNA, 20 nt, Artificial Sequence
  Synthetic
aagguaaugcuuauggacca

SEQ ID NO: 464072 - RNA, 21 nt, Artificial Sequence
  Synthetic
caagguaaugcuuauggacca

SEQ ID NO: 464073 - RNA, 22 nt, Artificial Sequence
  Synthetic
ucaagguaaugcuuauggacca

SEQ ID NO: 464074 - RNA, 23 nt, Artificial Sequence
  Synthetic
aucaagguaaugcuuauggacca

SEQ ID NO: 464075 - RNA, 24 nt, Artificial Sequence
  Synthetic
caucaagguaaugcuuauggacca

SEQ ID NO: 464076 - RNA, 18 nt, Artificial Sequence
  Synthetic
auauuucugaguggacca

SEQ ID NO: 464077 - RNA, 19 nt, Artificial Sequence
  Synthetic
uauauuucugaguggacca

SEQ ID NO: 464078 - RNA, 20 nt, Artificial Sequence
  Synthetic
auauauuucugaguggacca

SEQ ID NO: 464079 - RNA, 21 nt, Artificial Sequence
  Synthetic
gauauauuucugaguggacca

SEQ ID NO: 464080 - RNA, 22 nt, Artificial Sequence
  Synthetic
agauauauuucugaguggacca

SEQ ID NO: 464081 - RNA, 23 nt, Artificial Sequence
  Synthetic
uagauauauuucugaguggacca

SEQ ID NO: 464082 - RNA, 24 nt, Artificial Sequence
  Synthetic
uuagauauauuucugaguggacca

SEQ ID NO: 464083 - RNA, 18 nt, Artificial Sequence
  Synthetic
gaauuaggaaaaugacca

SEQ ID NO: 464084 - RNA, 19 nt, Artificial Sequence
  Synthetic
ggaauuaggaaaaugacca

SEQ ID NO: 464085 - RNA, 20 nt, Artificial Sequence
  Synthetic
aggaauuaggaaaaugacca

SEQ ID NO: 464086 - RNA, 21 nt, Artificial Sequence
  Synthetic
caggaauuaggaaaaugacca

SEQ ID NO: 464087 - RNA, 22 nt, Artificial Sequence
  Synthetic
ccaggaauuaggaaaaugacca

SEQ ID NO: 464088 - RNA, 23 nt, Artificial Sequence
  Synthetic
accaggaauuaggaaaaugacca

SEQ ID NO: 464089 - RNA, 24 nt, Artificial Sequence
  Synthetic
gaccaggaauuaggaaaaugacca

SEQ ID NO: 464090 - RNA, 18 nt, Artificial Sequence
  Synthetic
ccugagugaaaaugacca

SEQ ID NO: 464091 - RNA, 19 nt, Artificial Sequence
  Synthetic
gccugagugaaaaugacca

SEQ ID NO: 464092 - RNA, 20 nt, Artificial Sequence
  Synthetic
agccugagugaaaaugacca

SEQ ID NO: 464093 - RNA, 21 nt, Artificial Sequence
  Synthetic
cagccugagugaaaaugacca

SEQ ID NO: 464094 - RNA, 22 nt, Artificial Sequence
  Synthetic
gcagccugagugaaaaugacca

SEQ ID NO: 464095 - RNA, 23 nt, Artificial Sequence
  Synthetic
ggcagccugagugaaaaugacca

SEQ ID NO: 464096 - RNA, 24 nt, Artificial Sequence
  Synthetic
uggcagccugagugaaaaugacca

SEQ ID NO: 464097 - RNA, 18 nt, Artificial Sequence
  Synthetic
aauggaugaggaugacca

SEQ ID NO: 464098 - RNA, 19 nt, Artificial Sequence
  Synthetic
gaauggaugaggaugacca

SEQ ID NO: 464099 - RNA, 20 nt, Artificial Sequence
  Synthetic
ggaauggaugaggaugacca

SEQ ID NO: 464100 - RNA, 21 nt, Artificial Sequence
  Synthetic
cggaauggaugaggaugacca

SEQ ID NO: 464101 - RNA, 22 nt, Artificial Sequence
  Synthetic
acggaauggaugaggaugacca

SEQ ID NO: 464102 - RNA, 23 nt, Artificial Sequence
  Synthetic
cacggaauggaugaggaugacca

SEQ ID NO: 464103 - RNA, 24 nt, Artificial Sequence
  Synthetic
ucacggaauggaugaggaugacca

SEQ ID NO: 464104 - RNA, 18 nt, Artificial Sequence
  Synthetic
uaaguuucuguaugacca

SEQ ID NO: 464105 - RNA, 19 nt, Artificial Sequence
  Synthetic
uuaaguuucuguaugacca

SEQ ID NO: 464106 - RNA, 20 nt, Artificial Sequence
  Synthetic
cuuaaguuucuguaugacca

SEQ ID NO: 464107 - RNA, 21 nt, Artificial Sequence
  Synthetic
gcuuaaguuucuguaugacca

SEQ ID NO: 464108 - RNA, 22 nt, Artificial Sequence
  Synthetic
ugcuuaaguuucuguaugacca

SEQ ID NO: 464109 - RNA, 23 nt, Artificial Sequence
  Synthetic
augcuuaaguuucuguaugacca

SEQ ID NO: 464110 - RNA, 24 nt, Artificial Sequence
  Synthetic
caugcuuaaguuucuguaugacca

SEQ ID NO: 464111 - RNA, 18 nt, Artificial Sequence
  Synthetic
gaaguccccaacugacca

SEQ ID NO: 464112 - RNA, 19 nt, Artificial Sequence
  Synthetic
agaaguccccaacugacca

SEQ ID NO: 464113 - RNA, 20 nt, Artificial Sequence
  Synthetic
cagaaguccccaacugacca

SEQ ID NO: 464114 - RNA, 21 nt, Artificial Sequence
  Synthetic
gcagaaguccccaacugacca

SEQ ID NO: 464115 - RNA, 22 nt, Artificial Sequence
  Synthetic
agcagaaguccccaacugacca

SEQ ID NO: 464116 - RNA, 23 nt, Artificial Sequence
  Synthetic
gagcagaaguccccaacugacca

SEQ ID NO: 464117 - RNA, 24 nt, Artificial Sequence
  Synthetic
agagcagaaguccccaacugacca

SEQ ID NO: 464118 - RNA, 18 nt, Artificial Sequence
  Synthetic
aaugguuggaagugacca

SEQ ID NO: 464119 - RNA, 19 nt, Artificial Sequence
  Synthetic
aaaugguuggaagugacca

SEQ ID NO: 464120 - RNA, 20 nt, Artificial Sequence
  Synthetic
gaaaugguuggaagugacca

SEQ ID NO: 464121 - RNA, 21 nt, Artificial Sequence
  Synthetic
agaaaugguuggaagugacca

SEQ ID NO: 464122 - RNA, 22 nt, Artificial Sequence
  Synthetic
uagaaaugguuggaagugacca

SEQ ID NO: 464123 - RNA, 23 nt, Artificial Sequence
  Synthetic
guagaaaugguuggaagugacca

SEQ ID NO: 464124 - RNA, 24 nt, Artificial Sequence
  Synthetic
aguagaaaugguuggaagugacca

SEQ ID NO: 464125 - RNA, 18 nt, Artificial Sequence
  Synthetic
uuguggagggggugacca

SEQ ID NO: 464126 - RNA, 19 nt, Artificial Sequence
  Synthetic
uuuguggagggggugacca

SEQ ID NO: 464127 - RNA, 20 nt, Artificial Sequence
  Synthetic
auuuguggagggggugacca

SEQ ID NO: 464128 - RNA, 21 nt, Artificial Sequence
  Synthetic
aauuuguggagggggugacca

SEQ ID NO: 464129 - RNA, 22 nt, Artificial Sequence
  Synthetic
caauuuguggagggggugacca

SEQ ID NO: 464130 - RNA, 23 nt, Artificial Sequence
  Synthetic
ucaauuuguggagggggugacca

SEQ ID NO: 464131 - RNA, 24 nt, Artificial Sequence
  Synthetic
uucaauuuguggagggggugacca

SEQ ID NO: 464132 - RNA, 18 nt, Artificial Sequence
  Synthetic
ccagcaauucugugacca

SEQ ID NO: 464133 - RNA, 19 nt, Artificial Sequence
  Synthetic
uccagcaauucugugacca

SEQ ID NO: 464134 - RNA, 20 nt, Artificial Sequence
  Synthetic
cuccagcaauucugugacca

SEQ ID NO: 464135 - RNA, 21 nt, Artificial Sequence
  Synthetic
ccuccagcaauucugugacca

SEQ ID NO: 464136 - RNA, 22 nt, Artificial Sequence
  Synthetic
gccuccagcaauucugugacca

SEQ ID NO: 464137 - RNA, 23 nt, Artificial Sequence
  Synthetic
agccuccagcaauucugugacca

SEQ ID NO: 464138 - RNA, 24 nt, Artificial Sequence
  Synthetic
aagccuccagcaauucugugacca

SEQ ID NO: 464139 - RNA, 18 nt, Artificial Sequence
  Synthetic
gguuggccagauugacca

SEQ ID NO: 464140 - RNA, 19 nt, Artificial Sequence
  Synthetic
agguuggccagauugacca

SEQ ID NO: 464141 - RNA, 20 nt, Artificial Sequence
  Synthetic
aagguuggccagauugacca

SEQ ID NO: 464142 - RNA, 21 nt, Artificial Sequence
  Synthetic
aaagguuggccagauugacca

SEQ ID NO: 464143 - RNA, 22 nt, Artificial Sequence
  Synthetic
caaagguuggccagauugacca

SEQ ID NO: 464144 - RNA, 23 nt, Artificial Sequence
  Synthetic
ccaaagguuggccagauugacca

SEQ ID NO: 464145 - RNA, 24 nt, Artificial Sequence
  Synthetic
uccaaagguuggccagauugacca

SEQ ID NO: 464146 - RNA, 18 nt, Artificial Sequence
  Synthetic
ucuguuuggguuugacca

SEQ ID NO: 464147 - RNA, 19 nt, Artificial Sequence
  Synthetic
uucuguuuggguuugacca

SEQ ID NO: 464148 - RNA, 20 nt, Artificial Sequence
  Synthetic
uuucuguuuggguuugacca

SEQ ID NO: 464149 - RNA, 21 nt, Artificial Sequence
  Synthetic
uuuucuguuuggguuugacca

SEQ ID NO: 464150 - RNA, 22 nt, Artificial Sequence
  Synthetic
guuuucuguuuggguuugacca

SEQ ID NO: 464151 - RNA, 23 nt, Artificial Sequence
  Synthetic
gguuuucuguuuggguuugacca

SEQ ID NO: 464152 - RNA, 24 nt, Artificial Sequence
  Synthetic
ugguuuucuguuuggguuugacca

SEQ ID NO: 464153 - RNA, 18 nt, Artificial Sequence
  Synthetic
ucacagggcaaaauacca

SEQ ID NO: 464154 - RNA, 19 nt, Artificial Sequence
  Synthetic
aucacagggcaaaauacca

SEQ ID NO: 464155 - RNA, 20 nt, Artificial Sequence
  Synthetic
gaucacagggcaaaauacca

SEQ ID NO: 464156 - RNA, 21 nt, Artificial Sequence
  Synthetic
ugaucacagggcaaaauacca

SEQ ID NO: 464157 - RNA, 22 nt, Artificial Sequence
  Synthetic
gugaucacagggcaaaauacca

SEQ ID NO: 464158 - RNA, 23 nt, Artificial Sequence
  Synthetic
agugaucacagggcaaaauacca

SEQ ID NO: 464159 - RNA, 24 nt, Artificial Sequence
  Synthetic
uagugaucacagggcaaaauacca

SEQ ID NO: 464160 - RNA, 18 nt, Artificial Sequence
  Synthetic
aguaauagagaaauacca

SEQ ID NO: 464161 - RNA, 19 nt, Artificial Sequence
  Synthetic
caguaauagagaaauacca

SEQ ID NO: 464162 - RNA, 20 nt, Artificial Sequence
  Synthetic
acaguaauagagaaauacca

SEQ ID NO: 464163 - RNA, 21 nt, Artificial Sequence
  Synthetic
aacaguaauagagaaauacca

SEQ ID NO: 464164 - RNA, 22 nt, Artificial Sequence
  Synthetic
uaacaguaauagagaaauacca

SEQ ID NO: 464165 - RNA, 23 nt, Artificial Sequence
  Synthetic
cuaacaguaauagagaaauacca

SEQ ID NO: 464166 - RNA, 24 nt, Artificial Sequence
  Synthetic
gcuaacaguaauagagaaauacca

SEQ ID NO: 464167 - RNA, 18 nt, Artificial Sequence
  Synthetic
uggucacagccaauacca

SEQ ID NO: 464168 - RNA, 19 nt, Artificial Sequence
  Synthetic
uuggucacagccaauacca

SEQ ID NO: 464169 - RNA, 20 nt, Artificial Sequence
  Synthetic
auuggucacagccaauacca

SEQ ID NO: 464170 - RNA, 21 nt, Artificial Sequence
  Synthetic
aauuggucacagccaauacca

SEQ ID NO: 464171 - RNA, 22 nt, Artificial Sequence
  Synthetic
uaauuggucacagccaauacca

SEQ ID NO: 464172 - RNA, 23 nt, Artificial Sequence
  Synthetic
auaauuggucacagccaauacca

SEQ ID NO: 464173 - RNA, 24 nt, Artificial Sequence
  Synthetic
aauaauuggucacagccaauacca

SEQ ID NO: 464174 - RNA, 18 nt, Artificial Sequence
  Synthetic
uuuuggggaagaauacca

SEQ ID NO: 464175 - RNA, 19 nt, Artificial Sequence
  Synthetic
guuuuggggaagaauacca

SEQ ID NO: 464176 - RNA, 20 nt, Artificial Sequence
  Synthetic
gguuuuggggaagaauacca

SEQ ID NO: 464177 - RNA, 21 nt, Artificial Sequence
  Synthetic
agguuuuggggaagaauacca

SEQ ID NO: 464178 - RNA, 22 nt, Artificial Sequence
  Synthetic
cagguuuuggggaagaauacca

SEQ ID NO: 464179 - RNA, 23 nt, Artificial Sequence
  Synthetic
acagguuuuggggaagaauacca

SEQ ID NO: 464180 - RNA, 24 nt, Artificial Sequence
  Synthetic
uacagguuuuggggaagaauacca

SEQ ID NO: 464181 - RNA, 18 nt, Artificial Sequence
  Synthetic
uguagguagcucauacca

SEQ ID NO: 464182 - RNA, 19 nt, Artificial Sequence
  Synthetic
uuguagguagcucauacca

SEQ ID NO: 464183 - RNA, 20 nt, Artificial Sequence
  Synthetic
guuguagguagcucauacca

SEQ ID NO: 464184 - RNA, 21 nt, Artificial Sequence
  Synthetic
uguuguagguagcucauacca

SEQ ID NO: 464185 - RNA, 22 nt, Artificial Sequence
  Synthetic
cuguuguagguagcucauacca

SEQ ID NO: 464186 - RNA, 23 nt, Artificial Sequence
  Synthetic
acuguuguagguagcucauacca

SEQ ID NO: 464187 - RNA, 24 nt, Artificial Sequence
  Synthetic
gacuguuguagguagcucauacca

SEQ ID NO: 464188 - RNA, 18 nt, Artificial Sequence
  Synthetic
cagauguaagagauacca

SEQ ID NO: 464189 - RNA, 19 nt, Artificial Sequence
  Synthetic
acagauguaagagauacca

SEQ ID NO: 464190 - RNA, 20 nt, Artificial Sequence
  Synthetic
gacagauguaagagauacca

SEQ ID NO: 464191 - RNA, 21 nt, Artificial Sequence
  Synthetic
ggacagauguaagagauacca

SEQ ID NO: 464192 - RNA, 22 nt, Artificial Sequence
  Synthetic
uggacagauguaagagauacca

SEQ ID NO: 464193 - RNA, 23 nt, Artificial Sequence
  Synthetic
auggacagauguaagagauacca

SEQ ID NO: 464194 - RNA, 24 nt, Artificial Sequence
  Synthetic
aauggacagauguaagagauacca

SEQ ID NO: 464195 - RNA, 18 nt, Artificial Sequence
  Synthetic
auucuacccaggauacca

SEQ ID NO: 464196 - RNA, 19 nt, Artificial Sequence
  Synthetic
aauucuacccaggauacca

SEQ ID NO: 464197 - RNA, 20 nt, Artificial Sequence
  Synthetic
uaauucuacccaggauacca

SEQ ID NO: 464198 - RNA, 21 nt, Artificial Sequence
  Synthetic
uuaauucuacccaggauacca

SEQ ID NO: 464199 - RNA, 22 nt, Artificial Sequence
  Synthetic
auuaauucuacccaggauacca

SEQ ID NO: 464200 - RNA, 23 nt, Artificial Sequence
  Synthetic
aauuaauucuacccaggauacca

SEQ ID NO: 464201 - RNA, 24 nt, Artificial Sequence
  Synthetic
caauuaauucuacccaggauacca

SEQ ID NO: 464202 - RNA, 18 nt, Artificial Sequence
  Synthetic
auucaaauggauauacca

SEQ ID NO: 464203 - RNA, 19 nt, Artificial Sequence
  Synthetic
uauucaaauggauauacca

SEQ ID NO: 464204 - RNA, 20 nt, Artificial Sequence
  Synthetic
auauucaaauggauauacca

SEQ ID NO: 464205 - RNA, 21 nt, Artificial Sequence
  Synthetic
uauauucaaauggauauacca

SEQ ID NO: 464206 - RNA, 22 nt, Artificial Sequence
  Synthetic
auauauucaaauggauauacca

SEQ ID NO: 464207 - RNA, 23 nt, Artificial Sequence
  Synthetic
uauauauucaaauggauauacca

SEQ ID NO: 464208 - RNA, 24 nt, Artificial Sequence
  Synthetic
uuauauauucaaauggauauacca

SEQ ID NO: 464209 - RNA, 18 nt, Artificial Sequence
  Synthetic
aacuucgagauuauacca

SEQ ID NO: 464210 - RNA, 19 nt, Artificial Sequence
  Synthetic
uaacuucgagauuauacca

SEQ ID NO: 464211 - RNA, 20 nt, Artificial Sequence
  Synthetic
auaacuucgagauuauacca

SEQ ID NO: 464212 - RNA, 21 nt, Artificial Sequence
  Synthetic
aauaacuucgagauuauacca

SEQ ID NO: 464213 - RNA, 22 nt, Artificial Sequence
  Synthetic
aaauaacuucgagauuauacca

SEQ ID NO: 464214 - RNA, 23 nt, Artificial Sequence
  Synthetic
uaaauaacuucgagauuauacca

SEQ ID NO: 464215 - RNA, 24 nt, Artificial Sequence
  Synthetic
uuaaauaacuucgagauuauacca

SEQ ID NO: 464216 - RNA, 18 nt, Artificial Sequence
  Synthetic
caacaucacuaacuacca

SEQ ID NO: 464217 - RNA, 19 nt, Artificial Sequence
  Synthetic
ucaacaucacuaacuacca

SEQ ID NO: 464218 - RNA, 20 nt, Artificial Sequence
  Synthetic
uucaacaucacuaacuacca

SEQ ID NO: 464219 - RNA, 21 nt, Artificial Sequence
  Synthetic
guucaacaucacuaacuacca

SEQ ID NO: 464220 - RNA, 22 nt, Artificial Sequence
  Synthetic
uguucaacaucacuaacuacca

SEQ ID NO: 464221 - RNA, 23 nt, Artificial Sequence
  Synthetic
auguucaacaucacuaacuacca

SEQ ID NO: 464222 - RNA, 24 nt, Artificial Sequence
  Synthetic
gauguucaacaucacuaacuacca

SEQ ID NO: 464223 - RNA, 18 nt, Artificial Sequence
  Synthetic
augagcuagcgacuacca

SEQ ID NO: 464224 - RNA, 19 nt, Artificial Sequence
  Synthetic
uaugagcuagcgacuacca

SEQ ID NO: 464225 - RNA, 20 nt, Artificial Sequence
  Synthetic
guaugagcuagcgacuacca

SEQ ID NO: 464226 - RNA, 21 nt, Artificial Sequence
  Synthetic
uguaugagcuagcgacuacca

SEQ ID NO: 464227 - RNA, 22 nt, Artificial Sequence
  Synthetic
guguaugagcuagcgacuacca

SEQ ID NO: 464228 - RNA, 23 nt, Artificial Sequence
  Synthetic
aguguaugagcuagcgacuacca

SEQ ID NO: 464229 - RNA, 24 nt, Artificial Sequence
  Synthetic
gaguguaugagcuagcgacuacca

SEQ ID NO: 464230 - RNA, 18 nt, Artificial Sequence
  Synthetic
ccaugauucugccuacca

SEQ ID NO: 464231 - RNA, 19 nt, Artificial Sequence
  Synthetic
cccaugauucugccuacca

SEQ ID NO: 464232 - RNA, 20 nt, Artificial Sequence
  Synthetic
gcccaugauucugccuacca

SEQ ID NO: 464233 - RNA, 21 nt, Artificial Sequence
  Synthetic
ggcccaugauucugccuacca

SEQ ID NO: 464234 - RNA, 22 nt, Artificial Sequence
  Synthetic
gggcccaugauucugccuacca

SEQ ID NO: 464235 - RNA, 23 nt, Artificial Sequence
  Synthetic
ggggcccaugauucugccuacca

SEQ ID NO: 464236 - RNA, 24 nt, Artificial Sequence
  Synthetic
aggggcccaugauucugccuacca

SEQ ID NO: 464237 - RNA, 18 nt, Artificial Sequence
  Synthetic
agcagagaaaagcuacca

SEQ ID NO: 464238 - RNA, 19 nt, Artificial Sequence
  Synthetic
gagcagagaaaagcuacca

SEQ ID NO: 464239 - RNA, 20 nt, Artificial Sequence
  Synthetic
cgagcagagaaaagcuacca

SEQ ID NO: 464240 - RNA, 21 nt, Artificial Sequence
  Synthetic
ccgagcagagaaaagcuacca

SEQ ID NO: 464241 - RNA, 22 nt, Artificial Sequence
  Synthetic
cccgagcagagaaaagcuacca

SEQ ID NO: 464242 - RNA, 23 nt, Artificial Sequence
  Synthetic
acccgagcagagaaaagcuacca

SEQ ID NO: 464243 - RNA, 24 nt, Artificial Sequence
  Synthetic
aacccgagcagagaaaagcuacca

SEQ ID NO: 464244 - RNA, 18 nt, Artificial Sequence
  Synthetic
uaaggacaauaucuacca

SEQ ID NO: 464245 - RNA, 19 nt, Artificial Sequence
  Synthetic
auaaggacaauaucuacca

SEQ ID NO: 464246 - RNA, 20 nt, Artificial Sequence
  Synthetic
aauaaggacaauaucuacca

SEQ ID NO: 464247 - RNA, 21 nt, Artificial Sequence
  Synthetic
uaauaaggacaauaucuacca

SEQ ID NO: 464248 - RNA, 22 nt, Artificial Sequence
  Synthetic
uuaauaaggacaauaucuacca

SEQ ID NO: 464249 - RNA, 23 nt, Artificial Sequence
  Synthetic
cuuaauaaggacaauaucuacca

SEQ ID NO: 464250 - RNA, 24 nt, Artificial Sequence
  Synthetic
acuuaauaaggacaauaucuacca

SEQ ID NO: 464251 - RNA, 18 nt, Artificial Sequence
  Synthetic
cugaauacauuucuacca

SEQ ID NO: 464252 - RNA, 19 nt, Artificial Sequence
  Synthetic
acugaauacauuucuacca

SEQ ID NO: 464253 - RNA, 20 nt, Artificial Sequence
  Synthetic
cacugaauacauuucuacca

SEQ ID NO: 464254 - RNA, 21 nt, Artificial Sequence
  Synthetic
ucacugaauacauuucuacca

SEQ ID NO: 464255 - RNA, 22 nt, Artificial Sequence
  Synthetic
gucacugaauacauuucuacca

SEQ ID NO: 464256 - RNA, 23 nt, Artificial Sequence
  Synthetic
ggucacugaauacauuucuacca

SEQ ID NO: 464257 - RNA, 24 nt, Artificial Sequence
  Synthetic
gggucacugaauacauuucuacca

SEQ ID NO: 464258 - RNA, 18 nt, Artificial Sequence
  Synthetic
ucaauauaaaaaguacca

SEQ ID NO: 464259 - RNA, 19 nt, Artificial Sequence
  Synthetic
cucaauauaaaaaguacca

SEQ ID NO: 464260 - RNA, 20 nt, Artificial Sequence
  Synthetic
acucaauauaaaaaguacca

SEQ ID NO: 464261 - RNA, 21 nt, Artificial Sequence
  Synthetic
uacucaauauaaaaaguacca

SEQ ID NO: 464262 - RNA, 22 nt, Artificial Sequence
  Synthetic
guacucaauauaaaaaguacca

SEQ ID NO: 464263 - RNA, 23 nt, Artificial Sequence
  Synthetic
uguacucaauauaaaaaguacca

SEQ ID NO: 464264 - RNA, 24 nt, Artificial Sequence
  Synthetic
cuguacucaauauaaaaaguacca

SEQ ID NO: 464265 - RNA, 18 nt, Artificial Sequence
  Synthetic
gaaagacaucaaguacca

SEQ ID NO: 464266 - RNA, 19 nt, Artificial Sequence
  Synthetic
ugaaagacaucaaguacca

SEQ ID NO: 464267 - RNA, 20 nt, Artificial Sequence
  Synthetic
augaaagacaucaaguacca

SEQ ID NO: 464268 - RNA, 21 nt, Artificial Sequence
  Synthetic
uaugaaagacaucaaguacca

SEQ ID NO: 464269 - RNA, 22 nt, Artificial Sequence
  Synthetic
uuaugaaagacaucaaguacca

SEQ ID NO: 464270 - RNA, 23 nt, Artificial Sequence
  Synthetic
guuaugaaagacaucaaguacca

SEQ ID NO: 464271 - RNA, 24 nt, Artificial Sequence
  Synthetic
aguuaugaaagacaucaaguacca

SEQ ID NO: 464272 - RNA, 18 nt, Artificial Sequence
  Synthetic
uacaguaaauugguacca

SEQ ID NO: 464273 - RNA, 19 nt, Artificial Sequence
  Synthetic
auacaguaaauugguacca

SEQ ID NO: 464274 - RNA, 20 nt, Artificial Sequence
  Synthetic
aauacaguaaauugguacca

SEQ ID NO: 464275 - RNA, 21 nt, Artificial Sequence
  Synthetic
uaauacaguaaauugguacca

SEQ ID NO: 464276 - RNA, 22 nt, Artificial Sequence
  Synthetic
cuaauacaguaaauugguacca

SEQ ID NO: 464277 - RNA, 23 nt, Artificial Sequence
  Synthetic
acuaauacaguaaauugguacca

SEQ ID NO: 464278 - RNA, 24 nt, Artificial Sequence
  Synthetic
gacuaauacaguaaauugguacca

SEQ ID NO: 464279 - RNA, 18 nt, Artificial Sequence
  Synthetic
acuguuaacgaauuacca

SEQ ID NO: 464280 - RNA, 19 nt, Artificial Sequence
  Synthetic
cacuguuaacgaauuacca

SEQ ID NO: 464281 - RNA, 20 nt, Artificial Sequence
  Synthetic
gcacuguuaacgaauuacca

SEQ ID NO: 464282 - RNA, 21 nt, Artificial Sequence
  Synthetic
ugcacuguuaacgaauuacca

SEQ ID NO: 464283 - RNA, 22 nt, Artificial Sequence
  Synthetic
augcacuguuaacgaauuacca

SEQ ID NO: 464284 - RNA, 23 nt, Artificial Sequence
  Synthetic
uaugcacuguuaacgaauuacca

SEQ ID NO: 464285 - RNA, 24 nt, Artificial Sequence
  Synthetic
auaugcacuguuaacgaauuacca

SEQ ID NO: 464286 - RNA, 18 nt, Artificial Sequence
  Synthetic
auucccuucccauuacca

SEQ ID NO: 464287 - RNA, 19 nt, Artificial Sequence
  Synthetic
aauucccuucccauuacca

SEQ ID NO: 464288 - RNA, 20 nt, Artificial Sequence
  Synthetic
aaauucccuucccauuacca

SEQ ID NO: 464289 - RNA, 21 nt, Artificial Sequence
  Synthetic
aaaauucccuucccauuacca

SEQ ID NO: 464290 - RNA, 22 nt, Artificial Sequence
  Synthetic
uaaaauucccuucccauuacca

SEQ ID NO: 464291 - RNA, 23 nt, Artificial Sequence
  Synthetic
uuaaaauucccuucccauuacca

SEQ ID NO: 464292 - RNA, 24 nt, Artificial Sequence
  Synthetic
uuuaaaauucccuucccauuacca

SEQ ID NO: 464293 - RNA, 18 nt, Artificial Sequence
  Synthetic
uaaauuuacuuauuacca

SEQ ID NO: 464294 - RNA, 19 nt, Artificial Sequence
  Synthetic
auaaauuuacuuauuacca

SEQ ID NO: 464295 - RNA, 20 nt, Artificial Sequence
  Synthetic
cauaaauuuacuuauuacca

SEQ ID NO: 464296 - RNA, 21 nt, Artificial Sequence
  Synthetic
acauaaauuuacuuauuacca

SEQ ID NO: 464297 - RNA, 22 nt, Artificial Sequence
  Synthetic
aacauaaauuuacuuauuacca

SEQ ID NO: 464298 - RNA, 23 nt, Artificial Sequence
  Synthetic
uaacauaaauuuacuuauuacca

SEQ ID NO: 464299 - RNA, 24 nt, Artificial Sequence
  Synthetic
auaacauaaauuuacuuauuacca

SEQ ID NO: 464300 - RNA, 18 nt, Artificial Sequence
  Synthetic
aaaagaaaacucuuacca

SEQ ID NO: 464301 - RNA, 19 nt, Artificial Sequence
  Synthetic
gaaaagaaaacucuuacca

SEQ ID NO: 464302 - RNA, 20 nt, Artificial Sequence
  Synthetic
agaaaagaaaacucuuacca

SEQ ID NO: 464303 - RNA, 21 nt, Artificial Sequence
  Synthetic
aagaaaagaaaacucuuacca

SEQ ID NO: 464304 - RNA, 22 nt, Artificial Sequence
  Synthetic
uaagaaaagaaaacucuuacca

SEQ ID NO: 464305 - RNA, 23 nt, Artificial Sequence
  Synthetic
uuaagaaaagaaaacucuuacca

SEQ ID NO: 464306 - RNA, 24 nt, Artificial Sequence
  Synthetic
uuuaagaaaagaaaacucuuacca

SEQ ID NO: 464307 - RNA, 18 nt, Artificial Sequence
  Synthetic
caaaaccuguucuuacca

SEQ ID NO: 464308 - RNA, 19 nt, Artificial Sequence
  Synthetic
ucaaaaccuguucuuacca

SEQ ID NO: 464309 - RNA, 20 nt, Artificial Sequence
  Synthetic
cucaaaaccuguucuuacca

SEQ ID NO: 464310 - RNA, 21 nt, Artificial Sequence
  Synthetic
acucaaaaccuguucuuacca

SEQ ID NO: 464311 - RNA, 22 nt, Artificial Sequence
  Synthetic
cacucaaaaccuguucuuacca

SEQ ID NO: 464312 - RNA, 23 nt, Artificial Sequence
  Synthetic
acacucaaaaccuguucuuacca

SEQ ID NO: 464313 - RNA, 24 nt, Artificial Sequence
  Synthetic
aacacucaaaaccuguucuuacca

SEQ ID NO: 464314 - RNA, 18 nt, Artificial Sequence
  Synthetic
cuucuucuauuguuacca

SEQ ID NO: 464315 - RNA, 19 nt, Artificial Sequence
  Synthetic
gcuucuucuauuguuacca

SEQ ID NO: 464316 - RNA, 20 nt, Artificial Sequence
  Synthetic
agcuucuucuauuguuacca

SEQ ID NO: 464317 - RNA, 21 nt, Artificial Sequence
  Synthetic
aagcuucuucuauuguuacca

SEQ ID NO: 464318 - RNA, 22 nt, Artificial Sequence
  Synthetic
aaagcuucuucuauuguuacca

SEQ ID NO: 464319 - RNA, 23 nt, Artificial Sequence
  Synthetic
gaaagcuucuucuauuguuacca

SEQ ID NO: 464320 - RNA, 24 nt, Artificial Sequence
  Synthetic
ugaaagcuucuucuauuguuacca

SEQ ID NO: 464321 - RNA, 18 nt, Artificial Sequence
  Synthetic
augaaaugggauuuacca

SEQ ID NO: 464322 - RNA, 19 nt, Artificial Sequence
  Synthetic
uaugaaaugggauuuacca

SEQ ID NO: 464323 - RNA, 20 nt, Artificial Sequence
  Synthetic
uuaugaaaugggauuuacca

SEQ ID NO: 464324 - RNA, 21 nt, Artificial Sequence
  Synthetic
guuaugaaaugggauuuacca

SEQ ID NO: 464325 - RNA, 22 nt, Artificial Sequence
  Synthetic
aguuaugaaaugggauuuacca

SEQ ID NO: 464326 - RNA, 23 nt, Artificial Sequence
  Synthetic
aaguuaugaaaugggauuuacca

SEQ ID NO: 464327 - RNA, 24 nt, Artificial Sequence
  Synthetic
aaaguuaugaaaugggauuuacca

SEQ ID NO: 464328 - RNA, 18 nt, Artificial Sequence
  Synthetic
guaaugguaaguuuacca

SEQ ID NO: 464329 - RNA, 19 nt, Artificial Sequence
  Synthetic
uguaaugguaaguuuacca

SEQ ID NO: 464330 - RNA, 20 nt, Artificial Sequence
  Synthetic
auguaaugguaaguuuacca

SEQ ID NO: 464331 - RNA, 21 nt, Artificial Sequence
  Synthetic
aauguaaugguaaguuuacca

SEQ ID NO: 464332 - RNA, 22 nt, Artificial Sequence
  Synthetic
gaauguaaugguaaguuuacca

SEQ ID NO: 464333 - RNA, 23 nt, Artificial Sequence
  Synthetic
agaauguaaugguaaguuuacca

SEQ ID NO: 464334 - RNA, 24 nt, Artificial Sequence
  Synthetic
gagaauguaaugguaaguuuacca

SEQ ID NO: 464335 - RNA, 18 nt, Artificial Sequence
  Synthetic
acaaagauaaaaaaccca

SEQ ID NO: 464336 - RNA, 19 nt, Artificial Sequence
  Synthetic
cacaaagauaaaaaaccca

SEQ ID NO: 464337 - RNA, 20 nt, Artificial Sequence
  Synthetic
ucacaaagauaaaaaaccca

SEQ ID NO: 464338 - RNA, 21 nt, Artificial Sequence
  Synthetic
cucacaaagauaaaaaaccca

SEQ ID NO: 464339 - RNA, 22 nt, Artificial Sequence
  Synthetic
acucacaaagauaaaaaaccca

SEQ ID NO: 464340 - RNA, 23 nt, Artificial Sequence
  Synthetic
uacucacaaagauaaaaaaccca

SEQ ID NO: 464341 - RNA, 24 nt, Artificial Sequence
  Synthetic
guacucacaaagauaaaaaaccca

SEQ ID NO: 464342 - RNA, 18 nt, Artificial Sequence
  Synthetic
aagagguuccaaaaccca

SEQ ID NO: 464343 - RNA, 19 nt, Artificial Sequence
  Synthetic
aaagagguuccaaaaccca

SEQ ID NO: 464344 - RNA, 20 nt, Artificial Sequence
  Synthetic
aaaagagguuccaaaaccca

SEQ ID NO: 464345 - RNA, 21 nt, Artificial Sequence
  Synthetic
caaaagagguuccaaaaccca

SEQ ID NO: 464346 - RNA, 22 nt, Artificial Sequence
  Synthetic
acaaaagagguuccaaaaccca

SEQ ID NO: 464347 - RNA, 23 nt, Artificial Sequence
  Synthetic
uacaaaagagguuccaaaaccca

SEQ ID NO: 464348 - RNA, 24 nt, Artificial Sequence
  Synthetic
uuacaaaagagguuccaaaaccca

SEQ ID NO: 464349 - RNA, 18 nt, Artificial Sequence
  Synthetic
guacuagaagaaaaccca

SEQ ID NO: 464350 - RNA, 19 nt, Artificial Sequence
  Synthetic
aguacuagaagaaaaccca

SEQ ID NO: 464351 - RNA, 20 nt, Artificial Sequence
  Synthetic
gaguacuagaagaaaaccca

SEQ ID NO: 464352 - RNA, 21 nt, Artificial Sequence
  Synthetic
agaguacuagaagaaaaccca

SEQ ID NO: 464353 - RNA, 22 nt, Artificial Sequence
  Synthetic
cagaguacuagaagaaaaccca

SEQ ID NO: 464354 - RNA, 23 nt, Artificial Sequence
  Synthetic
ccagaguacuagaagaaaaccca

SEQ ID NO: 464355 - RNA, 24 nt, Artificial Sequence
  Synthetic
accagaguacuagaagaaaaccca

SEQ ID NO: 464356 - RNA, 18 nt, Artificial Sequence
  Synthetic
cucuacccugcaaaccca

SEQ ID NO: 464357 - RNA, 19 nt, Artificial Sequence
  Synthetic
gcucuacccugcaaaccca

SEQ ID NO: 464358 - RNA, 20 nt, Artificial Sequence
  Synthetic
ggcucuacccugcaaaccca

SEQ ID NO: 464359 - RNA, 21 nt, Artificial Sequence
  Synthetic
gggcucuacccugcaaaccca

SEQ ID NO: 464360 - RNA, 22 nt, Artificial Sequence
  Synthetic
ggggcucuacccugcaaaccca

SEQ ID NO: 464361 - RNA, 23 nt, Artificial Sequence
  Synthetic
aggggcucuacccugcaaaccca

SEQ ID NO: 464362 - RNA, 24 nt, Artificial Sequence
  Synthetic
gaggggcucuacccugcaaaccca

SEQ ID NO: 464363 - RNA, 18 nt, Artificial Sequence
  Synthetic
aacacugggcuaaaccca

SEQ ID NO: 464364 - RNA, 19 nt, Artificial Sequence
  Synthetic
aaacacugggcuaaaccca

SEQ ID NO: 464365 - RNA, 20 nt, Artificial Sequence
  Synthetic
uaaacacugggcuaaaccca

SEQ ID NO: 464366 - RNA, 21 nt, Artificial Sequence
  Synthetic
guaaacacugggcuaaaccca

SEQ ID NO: 464367 - RNA, 22 nt, Artificial Sequence
  Synthetic
aguaaacacugggcuaaaccca

SEQ ID NO: 464368 - RNA, 23 nt, Artificial Sequence
  Synthetic
caguaaacacugggcuaaaccca

SEQ ID NO: 464369 - RNA, 24 nt, Artificial Sequence
  Synthetic
gcaguaaacacugggcuaaaccca

SEQ ID NO: 464370 - RNA, 18 nt, Artificial Sequence
  Synthetic
aaugggugcaccaaccca

SEQ ID NO: 464371 - RNA, 19 nt, Artificial Sequence
  Synthetic
gaaugggugcaccaaccca

SEQ ID NO: 464372 - RNA, 20 nt, Artificial Sequence
  Synthetic
ggaaugggugcaccaaccca

SEQ ID NO: 464373 - RNA, 21 nt, Artificial Sequence
  Synthetic
aggaaugggugcaccaaccca

SEQ ID NO: 464374 - RNA, 22 nt, Artificial Sequence
  Synthetic
gaggaaugggugcaccaaccca

SEQ ID NO: 464375 - RNA, 23 nt, Artificial Sequence
  Synthetic
ugaggaaugggugcaccaaccca

SEQ ID NO: 464376 - RNA, 24 nt, Artificial Sequence
  Synthetic
cugaggaaugggugcaccaaccca

SEQ ID NO: 464377 - RNA, 18 nt, Artificial Sequence
  Synthetic
acagaaaaauagaaccca

SEQ ID NO: 464378 - RNA, 19 nt, Artificial Sequence
  Synthetic
cacagaaaaauagaaccca

SEQ ID NO: 464379 - RNA, 20 nt, Artificial Sequence
  Synthetic
acacagaaaaauagaaccca

SEQ ID NO: 464380 - RNA, 21 nt, Artificial Sequence
  Synthetic
aacacagaaaaauagaaccca

SEQ ID NO: 464381 - RNA, 22 nt, Artificial Sequence
  Synthetic
caacacagaaaaauagaaccca

SEQ ID NO: 464382 - RNA, 23 nt, Artificial Sequence
  Synthetic
ucaacacagaaaaauagaaccca

SEQ ID NO: 464383 - RNA, 24 nt, Artificial Sequence
  Synthetic
gucaacacagaaaaauagaaccca

SEQ ID NO: 464384 - RNA, 18 nt, Artificial Sequence
  Synthetic
gucuucugagugaaccca

SEQ ID NO: 464385 - RNA, 19 nt, Artificial Sequence
  Synthetic
ggucuucugagugaaccca

SEQ ID NO: 464386 - RNA, 20 nt, Artificial Sequence
  Synthetic
gggucuucugagugaaccca

SEQ ID NO: 464387 - RNA, 21 nt, Artificial Sequence
  Synthetic
agggucuucugagugaaccca

SEQ ID NO: 464388 - RNA, 22 nt, Artificial Sequence
  Synthetic
aagggucuucugagugaaccca

SEQ ID NO: 464389 - RNA, 23 nt, Artificial Sequence
  Synthetic
caagggucuucugagugaaccca

SEQ ID NO: 464390 - RNA, 24 nt, Artificial Sequence
  Synthetic
ccaagggucuucugagugaaccca

SEQ ID NO: 464391 - RNA, 18 nt, Artificial Sequence
  Synthetic
gcaaguuaguugaaccca

SEQ ID NO: 464392 - RNA, 19 nt, Artificial Sequence
  Synthetic
agcaaguuaguugaaccca

SEQ ID NO: 464393 - RNA, 20 nt, Artificial Sequence
  Synthetic
cagcaaguuaguugaaccca

SEQ ID NO: 464394 - RNA, 21 nt, Artificial Sequence
  Synthetic
ccagcaaguuaguugaaccca

SEQ ID NO: 464395 - RNA, 22 nt, Artificial Sequence
  Synthetic
uccagcaaguuaguugaaccca

SEQ ID NO: 464396 - RNA, 23 nt, Artificial Sequence
  Synthetic
cuccagcaaguuaguugaaccca

SEQ ID NO: 464397 - RNA, 24 nt, Artificial Sequence
  Synthetic
gcuccagcaaguuaguugaaccca

SEQ ID NO: 464398 - RNA, 18 nt, Artificial Sequence
  Synthetic
gaaacuauuuuuaaccca

SEQ ID NO: 464399 - RNA, 19 nt, Artificial Sequence
  Synthetic
agaaacuauuuuuaaccca

SEQ ID NO: 464400 - RNA, 20 nt, Artificial Sequence
  Synthetic
gagaaacuauuuuuaaccca

SEQ ID NO: 464401 - RNA, 21 nt, Artificial Sequence
  Synthetic
agagaaacuauuuuuaaccca

SEQ ID NO: 464402 - RNA, 22 nt, Artificial Sequence
  Synthetic
uagagaaacuauuuuuaaccca

SEQ ID NO: 464403 - RNA, 23 nt, Artificial Sequence
  Synthetic
uuagagaaacuauuuuuaaccca

SEQ ID NO: 464404 - RNA, 24 nt, Artificial Sequence
  Synthetic
uuuagagaaacuauuuuuaaccca

SEQ ID NO: 464405 - RNA, 18 nt, Artificial Sequence
  Synthetic
aaacuccuaaaacaccca

SEQ ID NO: 464406 - RNA, 19 nt, Artificial Sequence
  Synthetic
aaaacuccuaaaacaccca

SEQ ID NO: 464407 - RNA, 20 nt, Artificial Sequence
  Synthetic
aaaaacuccuaaaacaccca

SEQ ID NO: 464408 - RNA, 21 nt, Artificial Sequence
  Synthetic
gaaaaacuccuaaaacaccca

SEQ ID NO: 464409 - RNA, 22 nt, Artificial Sequence
  Synthetic
ggaaaaacuccuaaaacaccca

SEQ ID NO: 464410 - RNA, 23 nt, Artificial Sequence
  Synthetic
aggaaaaacuccuaaaacaccca

SEQ ID NO: 464411 - RNA, 24 nt, Artificial Sequence
  Synthetic
aaggaaaaacuccuaaaacaccca

SEQ ID NO: 464412 - RNA, 18 nt, Artificial Sequence
  Synthetic
uuauauauuugacaccca

SEQ ID NO: 464413 - RNA, 19 nt, Artificial Sequence
  Synthetic
uuuauauauuugacaccca

SEQ ID NO: 464414 - RNA, 20 nt, Artificial Sequence
  Synthetic
uuuuauauauuugacaccca

SEQ ID NO: 464415 - RNA, 21 nt, Artificial Sequence
  Synthetic
auuuuauauauuugacaccca

SEQ ID NO: 464416 - RNA, 22 nt, Artificial Sequence
  Synthetic
uauuuuauauauuugacaccca

SEQ ID NO: 464417 - RNA, 23 nt, Artificial Sequence
  Synthetic
auauuuuauauauuugacaccca

SEQ ID NO: 464418 - RNA, 24 nt, Artificial Sequence
  Synthetic
aauauuuuauauauuugacaccca

SEQ ID NO: 464419 - RNA, 18 nt, Artificial Sequence
  Synthetic
aaggcccaauuccaccca

SEQ ID NO: 464420 - RNA, 19 nt, Artificial Sequence
  Synthetic
uaaggcccaauuccaccca

SEQ ID NO: 464421 - RNA, 20 nt, Artificial Sequence
  Synthetic
uuaaggcccaauuccaccca

SEQ ID NO: 464422 - RNA, 21 nt, Artificial Sequence
  Synthetic
cuuaaggcccaauuccaccca

SEQ ID NO: 464423 - RNA, 22 nt, Artificial Sequence
  Synthetic
acuuaaggcccaauuccaccca

SEQ ID NO: 464424 - RNA, 23 nt, Artificial Sequence
  Synthetic
uacuuaaggcccaauuccaccca

SEQ ID NO: 464425 - RNA, 24 nt, Artificial Sequence
  Synthetic
cuacuuaaggcccaauuccaccca

SEQ ID NO: 464426 - RNA, 18 nt, Artificial Sequence
  Synthetic
cauagcuguaagcaccca

SEQ ID NO: 464427 - RNA, 19 nt, Artificial Sequence
  Synthetic
gcauagcuguaagcaccca

SEQ ID NO: 464428 - RNA, 20 nt, Artificial Sequence
  Synthetic
ugcauagcuguaagcaccca

SEQ ID NO: 464429 - RNA, 21 nt, Artificial Sequence
  Synthetic
augcauagcuguaagcaccca

SEQ ID NO: 464430 - RNA, 22 nt, Artificial Sequence
  Synthetic
aaugcauagcuguaagcaccca

SEQ ID NO: 464431 - RNA, 23 nt, Artificial Sequence
  Synthetic
aaaugcauagcuguaagcaccca

SEQ ID NO: 464432 - RNA, 24 nt, Artificial Sequence
  Synthetic
uaaaugcauagcuguaagcaccca

SEQ ID NO: 464433 - RNA, 18 nt, Artificial Sequence
  Synthetic
gggcuugagaaucaccca

SEQ ID NO: 464434 - RNA, 19 nt, Artificial Sequence
  Synthetic
ugggcuugagaaucaccca

SEQ ID NO: 464435 - RNA, 20 nt, Artificial Sequence
  Synthetic
gugggcuugagaaucaccca

SEQ ID NO: 464436 - RNA, 21 nt, Artificial Sequence
  Synthetic
agugggcuugagaaucaccca

SEQ ID NO: 464437 - RNA, 22 nt, Artificial Sequence
  Synthetic
gagugggcuugagaaucaccca

SEQ ID NO: 464438 - RNA, 23 nt, Artificial Sequence
  Synthetic
ugagugggcuugagaaucaccca

SEQ ID NO: 464439 - RNA, 24 nt, Artificial Sequence
  Synthetic
uugagugggcuugagaaucaccca

SEQ ID NO: 464440 - RNA, 18 nt, Artificial Sequence
  Synthetic
aacagacacaaagaccca

SEQ ID NO: 464441 - RNA, 19 nt, Artificial Sequence
  Synthetic
aaacagacacaaagaccca

SEQ ID NO: 464442 - RNA, 20 nt, Artificial Sequence
  Synthetic
aaaacagacacaaagaccca

SEQ ID NO: 464443 - RNA, 21 nt, Artificial Sequence
  Synthetic
aaaaacagacacaaagaccca

SEQ ID NO: 464444 - RNA, 22 nt, Artificial Sequence
  Synthetic
uaaaaacagacacaaagaccca

SEQ ID NO: 464445 - RNA, 23 nt, Artificial Sequence
  Synthetic
auaaaaacagacacaaagaccca

SEQ ID NO: 464446 - RNA, 24 nt, Artificial Sequence
  Synthetic
cauaaaaacagacacaaagaccca

SEQ ID NO: 464447 - RNA, 18 nt, Artificial Sequence
  Synthetic
gaaaagcugccagaccca

SEQ ID NO: 464448 - RNA, 19 nt, Artificial Sequence
  Synthetic
agaaaagcugccagaccca

SEQ ID NO: 464449 - RNA, 20 nt, Artificial Sequence
  Synthetic
cagaaaagcugccagaccca

SEQ ID NO: 464450 - RNA, 21 nt, Artificial Sequence
  Synthetic
acagaaaagcugccagaccca

SEQ ID NO: 464451 - RNA, 22 nt, Artificial Sequence
  Synthetic
uacagaaaagcugccagaccca

SEQ ID NO: 464452 - RNA, 23 nt, Artificial Sequence
  Synthetic
uuacagaaaagcugccagaccca

SEQ ID NO: 464453 - RNA, 24 nt, Artificial Sequence
  Synthetic
cuuacagaaaagcugccagaccca

SEQ ID NO: 464454 - RNA, 18 nt, Artificial Sequence
  Synthetic
gaccaucuuugagaccca

SEQ ID NO: 464455 - RNA, 19 nt, Artificial Sequence
  Synthetic
ggaccaucuuugagaccca

SEQ ID NO: 464456 - RNA, 20 nt, Artificial Sequence
  Synthetic
aggaccaucuuugagaccca

SEQ ID NO: 464457 - RNA, 21 nt, Artificial Sequence
  Synthetic
caggaccaucuuugagaccca

SEQ ID NO: 464458 - RNA, 22 nt, Artificial Sequence
  Synthetic
acaggaccaucuuugagaccca

SEQ ID NO: 464459 - RNA, 23 nt, Artificial Sequence
  Synthetic
aacaggaccaucuuugagaccca

SEQ ID NO: 464460 - RNA, 24 nt, Artificial Sequence
  Synthetic
aaacaggaccaucuuugagaccca

SEQ ID NO: 464461 - RNA, 18 nt, Artificial Sequence
  Synthetic
uguuaugggagggaccca

SEQ ID NO: 464462 - RNA, 19 nt, Artificial Sequence
  Synthetic
guguuaugggagggaccca

SEQ ID NO: 464463 - RNA, 20 nt, Artificial Sequence
  Synthetic
uguguuaugggagggaccca

SEQ ID NO: 464464 - RNA, 21 nt, Artificial Sequence
  Synthetic
auguguuaugggagggaccca

SEQ ID NO: 464465 - RNA, 22 nt, Artificial Sequence
  Synthetic
cauguguuaugggagggaccca

SEQ ID NO: 464466 - RNA, 23 nt, Artificial Sequence
  Synthetic
ccauguguuaugggagggaccca

SEQ ID NO: 464467 - RNA, 24 nt, Artificial Sequence
  Synthetic
cccauguguuaugggagggaccca

SEQ ID NO: 464468 - RNA, 18 nt, Artificial Sequence
  Synthetic
aaagaagccguggaccca

SEQ ID NO: 464469 - RNA, 19 nt, Artificial Sequence
  Synthetic
aaaagaagccguggaccca

SEQ ID NO: 464470 - RNA, 20 nt, Artificial Sequence
  Synthetic
aaaaagaagccguggaccca

SEQ ID NO: 464471 - RNA, 21 nt, Artificial Sequence
  Synthetic
uaaaaagaagccguggaccca

SEQ ID NO: 464472 - RNA, 22 nt, Artificial Sequence
  Synthetic
uuaaaaagaagccguggaccca

SEQ ID NO: 464473 - RNA, 23 nt, Artificial Sequence
  Synthetic
uuuaaaaagaagccguggaccca

SEQ ID NO: 464474 - RNA, 24 nt, Artificial Sequence
  Synthetic
uuuuaaaaagaagccguggaccca

SEQ ID NO: 464475 - RNA, 18 nt, Artificial Sequence
  Synthetic
aaauguccauaugaccca

SEQ ID NO: 464476 - RNA, 19 nt, Artificial Sequence
  Synthetic
gaaauguccauaugaccca

SEQ ID NO: 464477 - RNA, 20 nt, Artificial Sequence
  Synthetic
ggaaauguccauaugaccca

SEQ ID NO: 464478 - RNA, 21 nt, Artificial Sequence
  Synthetic
gggaaauguccauaugaccca

SEQ ID NO: 464479 - RNA, 22 nt, Artificial Sequence
  Synthetic
agggaaauguccauaugaccca

SEQ ID NO: 464480 - RNA, 23 nt, Artificial Sequence
  Synthetic
aagggaaauguccauaugaccca

SEQ ID NO: 464481 - RNA, 24 nt, Artificial Sequence
  Synthetic
aaagggaaauguccauaugaccca

SEQ ID NO: 464482 - RNA, 21 nt, Artificial Sequence
  Synthetic
ccauuacuggguauauaccca

SEQ ID NO: 464483 - RNA, 22 nt, Artificial Sequence
  Synthetic
cccauuacuggguauauaccca

SEQ ID NO: 464484 - RNA, 23 nt, Artificial Sequence
  Synthetic
ucccauuacuggguauauaccca

SEQ ID NO: 464485 - RNA, 24 nt, Artificial Sequence
  Synthetic
aucccauuacuggguauauaccca

SEQ ID NO: 464486 - RNA, 22 nt, Artificial Sequence
  Synthetic
gccauuacuggguauauaccca

SEQ ID NO: 464487 - RNA, 23 nt, Artificial Sequence
  Synthetic
ugccauuacuggguauauaccca

SEQ ID NO: 464488 - RNA, 24 nt, Artificial Sequence
  Synthetic
augccauuacuggguauauaccca

SEQ ID NO: 464489 - RNA, 18 nt, Artificial Sequence
  Synthetic
cugcuggguauauaccca

SEQ ID NO: 464490 - RNA, 19 nt, Artificial Sequence
  Synthetic
acugcuggguauauaccca

SEQ ID NO: 464491 - RNA, 20 nt, Artificial Sequence
  Synthetic
cacugcuggguauauaccca

SEQ ID NO: 464492 - RNA, 21 nt, Artificial Sequence
  Synthetic
ccacugcuggguauauaccca

SEQ ID NO: 464493 - RNA, 22 nt, Artificial Sequence
  Synthetic
cccacugcuggguauauaccca

SEQ ID NO: 464494 - RNA, 23 nt, Artificial Sequence
  Synthetic
ucccacugcuggguauauaccca

SEQ ID NO: 464495 - RNA, 24 nt, Artificial Sequence
  Synthetic
aucccacugcuggguauauaccca

SEQ ID NO: 464496 - RNA, 18 nt, Artificial Sequence
  Synthetic
uuauugguuauauaccca

SEQ ID NO: 464497 - RNA, 19 nt, Artificial Sequence
  Synthetic
auuauugguuauauaccca

SEQ ID NO: 464498 - RNA, 20 nt, Artificial Sequence
  Synthetic
cauuauugguuauauaccca

SEQ ID NO: 464499 - RNA, 21 nt, Artificial Sequence
  Synthetic
ccauuauugguuauauaccca

SEQ ID NO: 464500 - RNA, 22 nt, Artificial Sequence
  Synthetic
cccauuauugguuauauaccca

SEQ ID NO: 464501 - RNA, 23 nt, Artificial Sequence
  Synthetic
ucccauuauugguuauauaccca

SEQ ID NO: 464502 - RNA, 24 nt, Artificial Sequence
  Synthetic
aucccauuauugguuauauaccca

SEQ ID NO: 464503 - RNA, 18 nt, Artificial Sequence
  Synthetic
uuggagguguccuaccca

SEQ ID NO: 464504 - RNA, 19 nt, Artificial Sequence
  Synthetic
auuggagguguccuaccca

SEQ ID NO: 464505 - RNA, 20 nt, Artificial Sequence
  Synthetic
cauuggagguguccuaccca

SEQ ID NO: 464506 - RNA, 21 nt, Artificial Sequence
  Synthetic
gcauuggagguguccuaccca

SEQ ID NO: 464507 - RNA, 22 nt, Artificial Sequence
  Synthetic
ugcauuggagguguccuaccca

SEQ ID NO: 464508 - RNA, 23 nt, Artificial Sequence
  Synthetic
augcauuggagguguccuaccca

SEQ ID NO: 464509 - RNA, 24 nt, Artificial Sequence
  Synthetic
caugcauuggagguguccuaccca

SEQ ID NO: 464510 - RNA, 18 nt, Artificial Sequence
  Synthetic
ccuacaaaugucuaccca

SEQ ID NO: 464511 - RNA, 19 nt, Artificial Sequence
  Synthetic
accuacaaaugucuaccca

SEQ ID NO: 464512 - RNA, 20 nt, Artificial Sequence
  Synthetic
aaccuacaaaugucuaccca

SEQ ID NO: 464513 - RNA, 21 nt, Artificial Sequence
  Synthetic
caaccuacaaaugucuaccca

SEQ ID NO: 464514 - RNA, 22 nt, Artificial Sequence
  Synthetic
acaaccuacaaaugucuaccca

SEQ ID NO: 464515 - RNA, 23 nt, Artificial Sequence
  Synthetic
aacaaccuacaaaugucuaccca

SEQ ID NO: 464516 - RNA, 24 nt, Artificial Sequence
  Synthetic
gaacaaccuacaaaugucuaccca

SEQ ID NO: 464517 - RNA, 18 nt, Artificial Sequence
  Synthetic
uuuuauggaagguaccca

SEQ ID NO: 464518 - RNA, 19 nt, Artificial Sequence
  Synthetic
auuuuauggaagguaccca

SEQ ID NO: 464519 - RNA, 20 nt, Artificial Sequence
  Synthetic
uauuuuauggaagguaccca

SEQ ID NO: 464520 - RNA, 21 nt, Artificial Sequence
  Synthetic
cuauuuuauggaagguaccca

SEQ ID NO: 464521 - RNA, 22 nt, Artificial Sequence
  Synthetic
acuauuuuauggaagguaccca

SEQ ID NO: 464522 - RNA, 23 nt, Artificial Sequence
  Synthetic
uacuauuuuauggaagguaccca

SEQ ID NO: 464523 - RNA, 24 nt, Artificial Sequence
  Synthetic
cuacuauuuuauggaagguaccca

SEQ ID NO: 464524 - RNA, 18 nt, Artificial Sequence
  Synthetic
ucucauuuacuuuaccca

SEQ ID NO: 464525 - RNA, 19 nt, Artificial Sequence
  Synthetic
uucucauuuacuuuaccca

SEQ ID NO: 464526 - RNA, 20 nt, Artificial Sequence
  Synthetic
auucucauuuacuuuaccca

SEQ ID NO: 464527 - RNA, 21 nt, Artificial Sequence
  Synthetic
aauucucauuuacuuuaccca

SEQ ID NO: 464528 - RNA, 22 nt, Artificial Sequence
  Synthetic
aaauucucauuuacuuuaccca

SEQ ID NO: 464529 - RNA, 23 nt, Artificial Sequence
  Synthetic
aaaauucucauuuacuuuaccca

SEQ ID NO: 464530 - RNA, 24 nt, Artificial Sequence
  Synthetic
uaaaauucucauuuacuuuaccca

SEQ ID NO: 464531 - RNA, 18 nt, Artificial Sequence
  Synthetic
gaaaaaaaaaaaacccca

SEQ ID NO: 464532 - RNA, 19 nt, Artificial Sequence
  Synthetic
ggaaaaaaaaaaaacccca

SEQ ID NO: 464533 - RNA, 20 nt, Artificial Sequence
  Synthetic
uggaaaaaaaaaaaacccca

SEQ ID NO: 464534 - RNA, 21 nt, Artificial Sequence
  Synthetic
uuggaaaaaaaaaaaacccca

SEQ ID NO: 464535 - RNA, 22 nt, Artificial Sequence
  Synthetic
auuggaaaaaaaaaaaacccca

SEQ ID NO: 464536 - RNA, 23 nt, Artificial Sequence
  Synthetic
gauuggaaaaaaaaaaaacccca

SEQ ID NO: 464537 - RNA, 24 nt, Artificial Sequence
  Synthetic
agauuggaaaaaaaaaaaacccca

SEQ ID NO: 464538 - RNA, 18 nt, Artificial Sequence
  Synthetic
acagauaaugacacccca

SEQ ID NO: 464539 - RNA, 19 nt, Artificial Sequence
  Synthetic
aacagauaaugacacccca

SEQ ID NO: 464540 - RNA, 20 nt, Artificial Sequence
  Synthetic
caacagauaaugacacccca

SEQ ID NO: 464541 - RNA, 21 nt, Artificial Sequence
  Synthetic
ucaacagauaaugacacccca

SEQ ID NO: 464542 - RNA, 22 nt, Artificial Sequence
  Synthetic
cucaacagauaaugacacccca

SEQ ID NO: 464543 - RNA, 23 nt, Artificial Sequence
  Synthetic
ucucaacagauaaugacacccca

SEQ ID NO: 464544 - RNA, 24 nt, Artificial Sequence
  Synthetic
uucucaacagauaaugacacccca

SEQ ID NO: 464545 - RNA, 18 nt, Artificial Sequence
  Synthetic
gggcccagugucacccca

SEQ ID NO: 464546 - RNA, 19 nt, Artificial Sequence
  Synthetic
ugggcccagugucacccca

SEQ ID NO: 464547 - RNA, 20 nt, Artificial Sequence
  Synthetic
uugggcccagugucacccca

SEQ ID NO: 464548 - RNA, 21 nt, Artificial Sequence
  Synthetic
uuugggcccagugucacccca

SEQ ID NO: 464549 - RNA, 22 nt, Artificial Sequence
  Synthetic
cuuugggcccagugucacccca

SEQ ID NO: 464550 - RNA, 23 nt, Artificial Sequence
  Synthetic
ccuuugggcccagugucacccca

SEQ ID NO: 464551 - RNA, 24 nt, Artificial Sequence
  Synthetic
accuuugggcccagugucacccca

SEQ ID NO: 464552 - RNA, 18 nt, Artificial Sequence
  Synthetic
aaguccuaauagacccca

SEQ ID NO: 464553 - RNA, 19 nt, Artificial Sequence
  Synthetic
aaaguccuaauagacccca

SEQ ID NO: 464554 - RNA, 20 nt, Artificial Sequence
  Synthetic
caaaguccuaauagacccca

SEQ ID NO: 464555 - RNA, 21 nt, Artificial Sequence
  Synthetic
ccaaaguccuaauagacccca

SEQ ID NO: 464556 - RNA, 22 nt, Artificial Sequence
  Synthetic
uccaaaguccuaauagacccca

SEQ ID NO: 464557 - RNA, 23 nt, Artificial Sequence
  Synthetic
guccaaaguccuaauagacccca

SEQ ID NO: 464558 - RNA, 24 nt, Artificial Sequence
  Synthetic
gguccaaaguccuaauagacccca

SEQ ID NO: 464559 - RNA, 18 nt, Artificial Sequence
  Synthetic
ucacucuuccugacccca

SEQ ID NO: 464560 - RNA, 19 nt, Artificial Sequence
  Synthetic
gucacucuuccugacccca

SEQ ID NO: 464561 - RNA, 20 nt, Artificial Sequence
  Synthetic
ugucacucuuccugacccca

SEQ ID NO: 464562 - RNA, 21 nt, Artificial Sequence
  Synthetic
cugucacucuuccugacccca

SEQ ID NO: 464563 - RNA, 22 nt, Artificial Sequence
  Synthetic
ucugucacucuuccugacccca

SEQ ID NO: 464564 - RNA, 23 nt, Artificial Sequence
  Synthetic
gucugucacucuuccugacccca

SEQ ID NO: 464565 - RNA, 24 nt, Artificial Sequence
  Synthetic
cgucugucacucuuccugacccca

SEQ ID NO: 464566 - RNA, 18 nt, Artificial Sequence
  Synthetic
agauagcccccuacccca

SEQ ID NO: 464567 - RNA, 19 nt, Artificial Sequence
  Synthetic
cagauagcccccuacccca

SEQ ID NO: 464568 - RNA, 20 nt, Artificial Sequence
  Synthetic
gcagauagcccccuacccca

SEQ ID NO: 464569 - RNA, 21 nt, Artificial Sequence
  Synthetic
ugcagauagcccccuacccca

SEQ ID NO: 464570 - RNA, 22 nt, Artificial Sequence
  Synthetic
augcagauagcccccuacccca

SEQ ID NO: 464571 - RNA, 23 nt, Artificial Sequence
  Synthetic
caugcagauagcccccuacccca

SEQ ID NO: 464572 - RNA, 24 nt, Artificial Sequence
  Synthetic
gcaugcagauagcccccuacccca

SEQ ID NO: 464573 - RNA, 18 nt, Artificial Sequence
  Synthetic
cuagauuuuucuacccca

SEQ ID NO: 464574 - RNA, 19 nt, Artificial Sequence
  Synthetic
acuagauuuuucuacccca

SEQ ID NO: 464575 - RNA, 20 nt, Artificial Sequence
  Synthetic
aacuagauuuuucuacccca

SEQ ID NO: 464576 - RNA, 21 nt, Artificial Sequence
  Synthetic
caacuagauuuuucuacccca

SEQ ID NO: 464577 - RNA, 22 nt, Artificial Sequence
  Synthetic
acaacuagauuuuucuacccca

SEQ ID NO: 464578 - RNA, 23 nt, Artificial Sequence
  Synthetic
uacaacuagauuuuucuacccca

SEQ ID NO: 464579 - RNA, 24 nt, Artificial Sequence
  Synthetic
cuacaacuagauuuuucuacccca

SEQ ID NO: 464580 - RNA, 18 nt, Artificial Sequence
  Synthetic
auuuuaaaauaaccccca

SEQ ID NO: 464581 - RNA, 19 nt, Artificial Sequence
  Synthetic
cauuuuaaaauaaccccca

SEQ ID NO: 464582 - RNA, 20 nt, Artificial Sequence
  Synthetic
ucauuuuaaaauaaccccca

SEQ ID NO: 464583 - RNA, 21 nt, Artificial Sequence
  Synthetic
uucauuuuaaaauaaccccca

SEQ ID NO: 464584 - RNA, 22 nt, Artificial Sequence
  Synthetic
uuucauuuuaaaauaaccccca

SEQ ID NO: 464585 - RNA, 23 nt, Artificial Sequence
  Synthetic
uuuucauuuuaaaauaaccccca

SEQ ID NO: 464586 - RNA, 24 nt, Artificial Sequence
  Synthetic
cuuuucauuuuaaaauaaccccca

SEQ ID NO: 464587 - RNA, 18 nt, Artificial Sequence
  Synthetic
acauuuuauuugccccca

SEQ ID NO: 464588 - RNA, 19 nt, Artificial Sequence
  Synthetic
aacauuuuauuugccccca

SEQ ID NO: 464589 - RNA, 20 nt, Artificial Sequence
  Synthetic
gaacauuuuauuugccccca

SEQ ID NO: 464590 - RNA, 21 nt, Artificial Sequence
  Synthetic
agaacauuuuauuugccccca

SEQ ID NO: 464591 - RNA, 22 nt, Artificial Sequence
  Synthetic
gagaacauuuuauuugccccca

SEQ ID NO: 464592 - RNA, 23 nt, Artificial Sequence
  Synthetic
ugagaacauuuuauuugccccca

SEQ ID NO: 464593 - RNA, 24 nt, Artificial Sequence
  Synthetic
uugagaacauuuuauuugccccca

SEQ ID NO: 464594 - RNA, 18 nt, Artificial Sequence
  Synthetic
agggauaagcaagcccca

SEQ ID NO: 464595 - RNA, 19 nt, Artificial Sequence
  Synthetic
cagggauaagcaagcccca

SEQ ID NO: 464596 - RNA, 20 nt, Artificial Sequence
  Synthetic
acagggauaagcaagcccca

SEQ ID NO: 464597 - RNA, 21 nt, Artificial Sequence
  Synthetic
aacagggauaagcaagcccca

SEQ ID NO: 464598 - RNA, 22 nt, Artificial Sequence
  Synthetic
aaacagggauaagcaagcccca

SEQ ID NO: 464599 - RNA, 23 nt, Artificial Sequence
  Synthetic
gaaacagggauaagcaagcccca

SEQ ID NO: 464600 - RNA, 24 nt, Artificial Sequence
  Synthetic
ugaaacagggauaagcaagcccca

SEQ ID NO: 464601 - RNA, 18 nt, Artificial Sequence
  Synthetic
cuguucccacgagcccca

SEQ ID NO: 464602 - RNA, 19 nt, Artificial Sequence
  Synthetic
ccuguucccacgagcccca

SEQ ID NO: 464603 - RNA, 20 nt, Artificial Sequence
  Synthetic
accuguucccacgagcccca

SEQ ID NO: 464604 - RNA, 21 nt, Artificial Sequence
  Synthetic
caccuguucccacgagcccca

SEQ ID NO: 464605 - RNA, 22 nt, Artificial Sequence
  Synthetic
ccaccuguucccacgagcccca

SEQ ID NO: 464606 - RNA, 23 nt, Artificial Sequence
  Synthetic
accaccuguucccacgagcccca

SEQ ID NO: 464607 - RNA, 24 nt, Artificial Sequence
  Synthetic
uaccaccuguucccacgagcccca

SEQ ID NO: 464608 - RNA, 18 nt, Artificial Sequence
  Synthetic
agcaucaaucuggcccca

SEQ ID NO: 464609 - RNA, 19 nt, Artificial Sequence
  Synthetic
cagcaucaaucuggcccca

SEQ ID NO: 464610 - RNA, 20 nt, Artificial Sequence
  Synthetic
ccagcaucaaucuggcccca

SEQ ID NO: 464611 - RNA, 21 nt, Artificial Sequence
  Synthetic
accagcaucaaucuggcccca

SEQ ID NO: 464612 - RNA, 22 nt, Artificial Sequence
  Synthetic
gaccagcaucaaucuggcccca

SEQ ID NO: 464613 - RNA, 23 nt, Artificial Sequence
  Synthetic
agaccagcaucaaucuggcccca

SEQ ID NO: 464614 - RNA, 24 nt, Artificial Sequence
  Synthetic
gagaccagcaucaaucuggcccca

SEQ ID NO: 464615 - RNA, 18 nt, Artificial Sequence
  Synthetic
ccacuaggcagugcccca

SEQ ID NO: 464616 - RNA, 19 nt, Artificial Sequence
  Synthetic
uccacuaggcagugcccca

SEQ ID NO: 464617 - RNA, 20 nt, Artificial Sequence
  Synthetic
cuccacuaggcagugcccca

SEQ ID NO: 464618 - RNA, 21 nt, Artificial Sequence
  Synthetic
gcuccacuaggcagugcccca

SEQ ID NO: 464619 - RNA, 22 nt, Artificial Sequence
  Synthetic
agcuccacuaggcagugcccca

SEQ ID NO: 464620 - RNA, 23 nt, Artificial Sequence
  Synthetic
cagcuccacuaggcagugcccca

SEQ ID NO: 464621 - RNA, 24 nt, Artificial Sequence
  Synthetic
acagcuccacuaggcagugcccca

SEQ ID NO: 464622 - RNA, 18 nt, Artificial Sequence
  Synthetic
uuccacgacccaucccca

SEQ ID NO: 464623 - RNA, 19 nt, Artificial Sequence
  Synthetic
auuccacgacccaucccca

SEQ ID NO: 464624 - RNA, 20 nt, Artificial Sequence
  Synthetic
gauuccacgacccaucccca

SEQ ID NO: 464625 - RNA, 21 nt, Artificial Sequence
  Synthetic
agauuccacgacccaucccca

SEQ ID NO: 464626 - RNA, 22 nt, Artificial Sequence
  Synthetic
cagauuccacgacccaucccca

SEQ ID NO: 464627 - RNA, 23 nt, Artificial Sequence
  Synthetic
gcagauuccacgacccaucccca

SEQ ID NO: 464628 - RNA, 24 nt, Artificial Sequence
  Synthetic
ugcagauuccacgacccaucccca

SEQ ID NO: 464629 - RNA, 18 nt, Artificial Sequence
  Synthetic
uccuuauuucccucccca

SEQ ID NO: 464630 - RNA, 19 nt, Artificial Sequence
  Synthetic
guccuuauuucccucccca

SEQ ID NO: 464631 - RNA, 20 nt, Artificial Sequence
  Synthetic
aguccuuauuucccucccca

SEQ ID NO: 464632 - RNA, 21 nt, Artificial Sequence
  Synthetic
aaguccuuauuucccucccca

SEQ ID NO: 464633 - RNA, 22 nt, Artificial Sequence
  Synthetic
aaaguccuuauuucccucccca

SEQ ID NO: 464634 - RNA, 23 nt, Artificial Sequence
  Synthetic
uaaaguccuuauuucccucccca

SEQ ID NO: 464635 - RNA, 24 nt, Artificial Sequence
  Synthetic
uuaaaguccuuauuucccucccca

SEQ ID NO: 464636 - RNA, 18 nt, Artificial Sequence
  Synthetic
caucugaaauccucccca

SEQ ID NO: 464637 - RNA, 19 nt, Artificial Sequence
  Synthetic
ucaucugaaauccucccca

SEQ ID NO: 464638 - RNA, 20 nt, Artificial Sequence
  Synthetic
aucaucugaaauccucccca

SEQ ID NO: 464639 - RNA, 21 nt, Artificial Sequence
  Synthetic
aaucaucugaaauccucccca

SEQ ID NO: 464640 - RNA, 22 nt, Artificial Sequence
  Synthetic
gaaucaucugaaauccucccca

SEQ ID NO: 464641 - RNA, 23 nt, Artificial Sequence
  Synthetic
ugaaucaucugaaauccucccca

SEQ ID NO: 464642 - RNA, 24 nt, Artificial Sequence
  Synthetic
augaaucaucugaaauccucccca

SEQ ID NO: 464643 - RNA, 18 nt, Artificial Sequence
  Synthetic
agaucaucaugcucccca

SEQ ID NO: 464644 - RNA, 19 nt, Artificial Sequence
  Synthetic
uagaucaucaugcucccca

SEQ ID NO: 464645 - RNA, 20 nt, Artificial Sequence
  Synthetic
guagaucaucaugcucccca

SEQ ID NO: 464646 - RNA, 21 nt, Artificial Sequence
  Synthetic
gguagaucaucaugcucccca

SEQ ID NO: 464647 - RNA, 22 nt, Artificial Sequence
  Synthetic
agguagaucaucaugcucccca

SEQ ID NO: 464648 - RNA, 23 nt, Artificial Sequence
  Synthetic
cagguagaucaucaugcucccca

SEQ ID NO: 464649 - RNA, 24 nt, Artificial Sequence
  Synthetic
ccagguagaucaucaugcucccca

SEQ ID NO: 464650 - RNA, 18 nt, Artificial Sequence
  Synthetic
ggaugauuuugcucccca

SEQ ID NO: 464651 - RNA, 19 nt, Artificial Sequence
  Synthetic
gggaugauuuugcucccca

SEQ ID NO: 464652 - RNA, 20 nt, Artificial Sequence
  Synthetic
agggaugauuuugcucccca

SEQ ID NO: 464653 - RNA, 21 nt, Artificial Sequence
  Synthetic
uagggaugauuuugcucccca

SEQ ID NO: 464654 - RNA, 22 nt, Artificial Sequence
  Synthetic
cuagggaugauuuugcucccca

SEQ ID NO: 464655 - RNA, 23 nt, Artificial Sequence
  Synthetic
acuagggaugauuuugcucccca

SEQ ID NO: 464656 - RNA, 24 nt, Artificial Sequence
  Synthetic
aacuagggaugauuuugcucccca

SEQ ID NO: 464657 - RNA, 18 nt, Artificial Sequence
  Synthetic
uuugucuuuuucucccca

SEQ ID NO: 464658 - RNA, 19 nt, Artificial Sequence
  Synthetic
auuugucuuuuucucccca

SEQ ID NO: 464659 - RNA, 20 nt, Artificial Sequence
  Synthetic
uauuugucuuuuucucccca

SEQ ID NO: 464660 - RNA, 21 nt, Artificial Sequence
  Synthetic
auauuugucuuuuucucccca

SEQ ID NO: 464661 - RNA, 22 nt, Artificial Sequence
  Synthetic
uauauuugucuuuuucucccca

SEQ ID NO: 464662 - RNA, 23 nt, Artificial Sequence
  Synthetic
auauauuugucuuuuucucccca

SEQ ID NO: 464663 - RNA, 24 nt, Artificial Sequence
  Synthetic
uauauauuugucuuuuucucccca

SEQ ID NO: 464664 - RNA, 18 nt, Artificial Sequence
  Synthetic
cccaacacagagucccca

SEQ ID NO: 464665 - RNA, 19 nt, Artificial Sequence
  Synthetic
ccccaacacagagucccca

SEQ ID NO: 464666 - RNA, 20 nt, Artificial Sequence
  Synthetic
gccccaacacagagucccca

SEQ ID NO: 464667 - RNA, 21 nt, Artificial Sequence
  Synthetic
agccccaacacagagucccca

SEQ ID NO: 464668 - RNA, 22 nt, Artificial Sequence
  Synthetic
gagccccaacacagagucccca

SEQ ID NO: 464669 - RNA, 23 nt, Artificial Sequence
  Synthetic
ggagccccaacacagagucccca

SEQ ID NO: 464670 - RNA, 24 nt, Artificial Sequence
  Synthetic
uggagccccaacacagagucccca

SEQ ID NO: 464671 - RNA, 18 nt, Artificial Sequence
  Synthetic
ccccacauagagucccca

SEQ ID NO: 464672 - RNA, 19 nt, Artificial Sequence
  Synthetic
cccccacauagagucccca

SEQ ID NO: 464673 - RNA, 20 nt, Artificial Sequence
  Synthetic
gcccccacauagagucccca

SEQ ID NO: 464674 - RNA, 21 nt, Artificial Sequence
  Synthetic
agcccccacauagagucccca

SEQ ID NO: 464675 - RNA, 22 nt, Artificial Sequence
  Synthetic
gagcccccacauagagucccca

SEQ ID NO: 464676 - RNA, 23 nt, Artificial Sequence
  Synthetic
ggagcccccacauagagucccca

SEQ ID NO: 464677 - RNA, 24 nt, Artificial Sequence
  Synthetic
uggagcccccacauagagucccca

SEQ ID NO: 464678 - RNA, 18 nt, Artificial Sequence
  Synthetic
ccugggcaaucuucccca

SEQ ID NO: 464679 - RNA, 19 nt, Artificial Sequence
  Synthetic
gccugggcaaucuucccca

SEQ ID NO: 464680 - RNA, 20 nt, Artificial Sequence
  Synthetic
ggccugggcaaucuucccca

SEQ ID NO: 464681 - RNA, 21 nt, Artificial Sequence
  Synthetic
gggccugggcaaucuucccca

SEQ ID NO: 464682 - RNA, 22 nt, Artificial Sequence
  Synthetic
agggccugggcaaucuucccca

SEQ ID NO: 464683 - RNA, 23 nt, Artificial Sequence
  Synthetic
cagggccugggcaaucuucccca

SEQ ID NO: 464684 - RNA, 24 nt, Artificial Sequence
  Synthetic
ucagggccugggcaaucuucccca

SEQ ID NO: 464685 - RNA, 18 nt, Artificial Sequence
  Synthetic
ccauuuagaauuucccca

SEQ ID NO: 464686 - RNA, 19 nt, Artificial Sequence
  Synthetic
uccauuuagaauuucccca

SEQ ID NO: 464687 - RNA, 20 nt, Artificial Sequence
  Synthetic
auccauuuagaauuucccca

SEQ ID NO: 464688 - RNA, 21 nt, Artificial Sequence
  Synthetic
aauccauuuagaauuucccca

SEQ ID NO: 464689 - RNA, 22 nt, Artificial Sequence
  Synthetic
caauccauuuagaauuucccca

SEQ ID NO: 464690 - RNA, 23 nt, Artificial Sequence
  Synthetic
ucaauccauuuagaauuucccca

SEQ ID NO: 464691 - RNA, 24 nt, Artificial Sequence
  Synthetic
uucaauccauuuagaauuucccca

SEQ ID NO: 464692 - RNA, 18 nt, Artificial Sequence
  Synthetic
aaaaauuuccaaagccca

SEQ ID NO: 464693 - RNA, 19 nt, Artificial Sequence
  Synthetic
aaaaaauuuccaaagccca

SEQ ID NO: 464694 - RNA, 20 nt, Artificial Sequence
  Synthetic
uaaaaaauuuccaaagccca

SEQ ID NO: 464695 - RNA, 21 nt, Artificial Sequence
  Synthetic
auaaaaaauuuccaaagccca

SEQ ID NO: 464696 - RNA, 22 nt, Artificial Sequence
  Synthetic
cauaaaaaauuuccaaagccca

SEQ ID NO: 464697 - RNA, 23 nt, Artificial Sequence
  Synthetic
acauaaaaaauuuccaaagccca

SEQ ID NO: 464698 - RNA, 24 nt, Artificial Sequence
  Synthetic
uacauaaaaaauuuccaaagccca

SEQ ID NO: 464699 - RNA, 18 nt, Artificial Sequence
  Synthetic
gaggaucaucugagccca

SEQ ID NO: 464700 - RNA, 19 nt, Artificial Sequence
  Synthetic
ggaggaucaucugagccca

SEQ ID NO: 464701 - RNA, 20 nt, Artificial Sequence
  Synthetic
gggaggaucaucugagccca

SEQ ID NO: 464702 - RNA, 21 nt, Artificial Sequence
  Synthetic
ugggaggaucaucugagccca

SEQ ID NO: 464703 - RNA, 22 nt, Artificial Sequence
  Synthetic
gugggaggaucaucugagccca

SEQ ID NO: 464704 - RNA, 23 nt, Artificial Sequence
  Synthetic
ugugggaggaucaucugagccca

SEQ ID NO: 464705 - RNA, 24 nt, Artificial Sequence
  Synthetic
augugggaggaucaucugagccca

SEQ ID NO: 464706 - RNA, 18 nt, Artificial Sequence
  Synthetic
aucaguuuugugagccca

SEQ ID NO: 464707 - RNA, 19 nt, Artificial Sequence
  Synthetic
uaucaguuuugugagccca

SEQ ID NO: 464708 - RNA, 20 nt, Artificial Sequence
  Synthetic
cuaucaguuuugugagccca

SEQ ID NO: 464709 - RNA, 21 nt, Artificial Sequence
  Synthetic
ucuaucaguuuugugagccca

SEQ ID NO: 464710 - RNA, 22 nt, Artificial Sequence
  Synthetic
cucuaucaguuuugugagccca

SEQ ID NO: 464711 - RNA, 23 nt, Artificial Sequence
  Synthetic
gcucuaucaguuuugugagccca

SEQ ID NO: 464712 - RNA, 24 nt, Artificial Sequence
  Synthetic
ugcucuaucaguuuugugagccca

SEQ ID NO: 464713 - RNA, 18 nt, Artificial Sequence
  Synthetic
auuucccccuugagccca

SEQ ID NO: 464714 - RNA, 19 nt, Artificial Sequence
  Synthetic
aauuucccccuugagccca

SEQ ID NO: 464715 - RNA, 20 nt, Artificial Sequence
  Synthetic
gaauuucccccuugagccca

SEQ ID NO: 464716 - RNA, 21 nt, Artificial Sequence
  Synthetic
ugaauuucccccuugagccca

SEQ ID NO: 464717 - RNA, 22 nt, Artificial Sequence
  Synthetic
cugaauuucccccuugagccca

SEQ ID NO: 464718 - RNA, 23 nt, Artificial Sequence
  Synthetic
ccugaauuucccccuugagccca

SEQ ID NO: 464719 - RNA, 24 nt, Artificial Sequence
  Synthetic
uccugaauuucccccuugagccca

SEQ ID NO: 464720 - RNA, 18 nt, Artificial Sequence
  Synthetic
ucucugucugguagccca

SEQ ID NO: 464721 - RNA, 19 nt, Artificial Sequence
  Synthetic
cucucugucugguagccca

SEQ ID NO: 464722 - RNA, 20 nt, Artificial Sequence
  Synthetic
gcucucugucugguagccca

SEQ ID NO: 464723 - RNA, 21 nt, Artificial Sequence
  Synthetic
ggcucucugucugguagccca

SEQ ID NO: 464724 - RNA, 22 nt, Artificial Sequence
  Synthetic
aggcucucugucugguagccca

SEQ ID NO: 464725 - RNA, 23 nt, Artificial Sequence
  Synthetic
uaggcucucugucugguagccca

SEQ ID NO: 464726 - RNA, 24 nt, Artificial Sequence
  Synthetic
cuaggcucucugucugguagccca

SEQ ID NO: 464727 - RNA, 18 nt, Artificial Sequence
  Synthetic
cugauauauuaaggccca

SEQ ID NO: 464728 - RNA, 19 nt, Artificial Sequence
  Synthetic
ucugauauauuaaggccca

SEQ ID NO: 464729 - RNA, 20 nt, Artificial Sequence
  Synthetic
uucugauauauuaaggccca

SEQ ID NO: 464730 - RNA, 21 nt, Artificial Sequence
  Synthetic
guucugauauauuaaggccca

SEQ ID NO: 464731 - RNA, 22 nt, Artificial Sequence
  Synthetic
gguucugauauauuaaggccca

SEQ ID NO: 464732 - RNA, 23 nt, Artificial Sequence
  Synthetic
ugguucugauauauuaaggccca

SEQ ID NO: 464733 - RNA, 24 nt, Artificial Sequence
  Synthetic
augguucugauauauuaaggccca

SEQ ID NO: 464734 - RNA, 18 nt, Artificial Sequence
  Synthetic
auuguuguaccaggccca

SEQ ID NO: 464735 - RNA, 19 nt, Artificial Sequence
  Synthetic
uauuguuguaccaggccca

SEQ ID NO: 464736 - RNA, 20 nt, Artificial Sequence
  Synthetic
uuauuguuguaccaggccca

SEQ ID NO: 464737 - RNA, 21 nt, Artificial Sequence
  Synthetic
uuuauuguuguaccaggccca

SEQ ID NO: 464738 - RNA, 22 nt, Artificial Sequence
  Synthetic
cuuuauuguuguaccaggccca

SEQ ID NO: 464739 - RNA, 23 nt, Artificial Sequence
  Synthetic
acuuuauuguuguaccaggccca

SEQ ID NO: 464740 - RNA, 24 nt, Artificial Sequence
  Synthetic
aacuuuauuguuguaccaggccca

SEQ ID NO: 464741 - RNA, 18 nt, Artificial Sequence
  Synthetic
agggaauagggaggccca

SEQ ID NO: 464742 - RNA, 19 nt, Artificial Sequence
  Synthetic
cagggaauagggaggccca

SEQ ID NO: 464743 - RNA, 20 nt, Artificial Sequence
  Synthetic
ucagggaauagggaggccca

SEQ ID NO: 464744 - RNA, 21 nt, Artificial Sequence
  Synthetic
cucagggaauagggaggccca

SEQ ID NO: 464745 - RNA, 22 nt, Artificial Sequence
  Synthetic
ucucagggaauagggaggccca

SEQ ID NO: 464746 - RNA, 23 nt, Artificial Sequence
  Synthetic
gucucagggaauagggaggccca

SEQ ID NO: 464747 - RNA, 24 nt, Artificial Sequence
  Synthetic
ugucucagggaauagggaggccca

SEQ ID NO: 464748 - RNA, 18 nt, Artificial Sequence
  Synthetic
uaucagaauaagggccca

SEQ ID NO: 464749 - RNA, 19 nt, Artificial Sequence
  Synthetic
guaucagaauaagggccca

SEQ ID NO: 464750 - RNA, 20 nt, Artificial Sequence
  Synthetic
aguaucagaauaagggccca

SEQ ID NO: 464751 - RNA, 21 nt, Artificial Sequence
  Synthetic
aaguaucagaauaagggccca

SEQ ID NO: 464752 - RNA, 22 nt, Artificial Sequence
  Synthetic
aaaguaucagaauaagggccca

SEQ ID NO: 464753 - RNA, 23 nt, Artificial Sequence
  Synthetic
aaaaguaucagaauaagggccca

SEQ ID NO: 464754 - RNA, 24 nt, Artificial Sequence
  Synthetic
uaaaaguaucagaauaagggccca

SEQ ID NO: 464755 - RNA, 18 nt, Artificial Sequence
  Synthetic
augcaaaacuguggccca

SEQ ID NO: 464756 - RNA, 19 nt, Artificial Sequence
  Synthetic
gaugcaaaacuguggccca

SEQ ID NO: 464757 - RNA, 20 nt, Artificial Sequence
  Synthetic
agaugcaaaacuguggccca

SEQ ID NO: 464758 - RNA, 21 nt, Artificial Sequence
  Synthetic
cagaugcaaaacuguggccca

SEQ ID NO: 464759 - RNA, 22 nt, Artificial Sequence
  Synthetic
acagaugcaaaacuguggccca

SEQ ID NO: 464760 - RNA, 23 nt, Artificial Sequence
  Synthetic
uacagaugcaaaacuguggccca

SEQ ID NO: 464761 - RNA, 24 nt, Artificial Sequence
  Synthetic
uuacagaugcaaaacuguggccca

SEQ ID NO: 464762 - RNA, 18 nt, Artificial Sequence
  Synthetic
aaauccauuugaugccca

SEQ ID NO: 464763 - RNA, 19 nt, Artificial Sequence
  Synthetic
gaaauccauuugaugccca

SEQ ID NO: 464764 - RNA, 20 nt, Artificial Sequence
  Synthetic
ugaaauccauuugaugccca

SEQ ID NO: 464765 - RNA, 21 nt, Artificial Sequence
  Synthetic
gugaaauccauuugaugccca

SEQ ID NO: 464766 - RNA, 22 nt, Artificial Sequence
  Synthetic
cgugaaauccauuugaugccca

SEQ ID NO: 464767 - RNA, 23 nt, Artificial Sequence
  Synthetic
ucgugaaauccauuugaugccca

SEQ ID NO: 464768 - RNA, 24 nt, Artificial Sequence
  Synthetic
cucgugaaauccauuugaugccca

SEQ ID NO: 464769 - RNA, 18 nt, Artificial Sequence
  Synthetic
uccuagaaucacugccca

SEQ ID NO: 464770 - RNA, 19 nt, Artificial Sequence
  Synthetic
uuccuagaaucacugccca

SEQ ID NO: 464771 - RNA, 20 nt, Artificial Sequence
  Synthetic
cuuccuagaaucacugccca

SEQ ID NO: 464772 - RNA, 21 nt, Artificial Sequence
  Synthetic
gcuuccuagaaucacugccca

SEQ ID NO: 464773 - RNA, 22 nt, Artificial Sequence
  Synthetic
agcuuccuagaaucacugccca

SEQ ID NO: 464774 - RNA, 23 nt, Artificial Sequence
  Synthetic
cagcuuccuagaaucacugccca

SEQ ID NO: 464775 - RNA, 24 nt, Artificial Sequence
  Synthetic
acagcuuccuagaaucacugccca

SEQ ID NO: 464776 - RNA, 18 nt, Artificial Sequence
  Synthetic
aaauggccauacugccca

SEQ ID NO: 464777 - RNA, 19 nt, Artificial Sequence
  Synthetic
aaaauggccauacugccca

SEQ ID NO: 464778 - RNA, 20 nt, Artificial Sequence
  Synthetic
gaaaauggccauacugccca

SEQ ID NO: 464779 - RNA, 21 nt, Artificial Sequence
  Synthetic
ugaaaauggccauacugccca

SEQ ID NO: 464780 - RNA, 22 nt, Artificial Sequence
  Synthetic
gugaaaauggccauacugccca

SEQ ID NO: 464781 - RNA, 23 nt, Artificial Sequence
  Synthetic
cgugaaaauggccauacugccca

SEQ ID NO: 464782 - RNA, 24 nt, Artificial Sequence
  Synthetic
ucgugaaaauggccauacugccca

SEQ ID NO: 464783 - RNA, 18 nt, Artificial Sequence
  Synthetic
ucagagaugcccugccca

SEQ ID NO: 464784 - RNA, 19 nt, Artificial Sequence
  Synthetic
uucagagaugcccugccca

SEQ ID NO: 464785 - RNA, 20 nt, Artificial Sequence
  Synthetic
uuucagagaugcccugccca

SEQ ID NO: 464786 - RNA, 21 nt, Artificial Sequence
  Synthetic
cuuucagagaugcccugccca

SEQ ID NO: 464787 - RNA, 22 nt, Artificial Sequence
  Synthetic
ucuuucagagaugcccugccca

SEQ ID NO: 464788 - RNA, 23 nt, Artificial Sequence
  Synthetic
uucuuucagagaugcccugccca

SEQ ID NO: 464789 - RNA, 24 nt, Artificial Sequence
  Synthetic
uuucuuucagagaugcccugccca

SEQ ID NO: 464790 - RNA, 18 nt, Artificial Sequence
  Synthetic
ggcaggaagaagugccca

SEQ ID NO: 464791 - RNA, 19 nt, Artificial Sequence
  Synthetic
uggcaggaagaagugccca

SEQ ID NO: 464792 - RNA, 20 nt, Artificial Sequence
  Synthetic
guggcaggaagaagugccca

SEQ ID NO: 464793 - RNA, 21 nt, Artificial Sequence
  Synthetic
gguggcaggaagaagugccca

SEQ ID NO: 464794 - RNA, 22 nt, Artificial Sequence
  Synthetic
agguggcaggaagaagugccca

SEQ ID NO: 464795 - RNA, 23 nt, Artificial Sequence
  Synthetic
cagguggcaggaagaagugccca

SEQ ID NO: 464796 - RNA, 24 nt, Artificial Sequence
  Synthetic
acagguggcaggaagaagugccca

SEQ ID NO: 464797 - RNA, 18 nt, Artificial Sequence
  Synthetic
cuuuuucuucuuugccca

SEQ ID NO: 464798 - RNA, 19 nt, Artificial Sequence
  Synthetic
ccuuuuucuucuuugccca

SEQ ID NO: 464799 - RNA, 20 nt, Artificial Sequence
  Synthetic
gccuuuuucuucuuugccca

SEQ ID NO: 464800 - RNA, 21 nt, Artificial Sequence
  Synthetic
ugccuuuuucuucuuugccca

SEQ ID NO: 464801 - RNA, 22 nt, Artificial Sequence
  Synthetic
gugccuuuuucuucuuugccca

SEQ ID NO: 464802 - RNA, 23 nt, Artificial Sequence
  Synthetic
agugccuuuuucuucuuugccca

SEQ ID NO: 464803 - RNA, 24 nt, Artificial Sequence
  Synthetic
cagugccuuuuucuucuuugccca

SEQ ID NO: 464804 - RNA, 18 nt, Artificial Sequence
  Synthetic
cagucccguuuuugccca

SEQ ID NO: 464805 - RNA, 19 nt, Artificial Sequence
  Synthetic
ccagucccguuuuugccca

SEQ ID NO: 464806 - RNA, 20 nt, Artificial Sequence
  Synthetic
cccagucccguuuuugccca

SEQ ID NO: 464807 - RNA, 21 nt, Artificial Sequence
  Synthetic
ccccagucccguuuuugccca

SEQ ID NO: 464808 - RNA, 22 nt, Artificial Sequence
  Synthetic
accccagucccguuuuugccca

SEQ ID NO: 464809 - RNA, 23 nt, Artificial Sequence
  Synthetic
aaccccagucccguuuuugccca

SEQ ID NO: 464810 - RNA, 24 nt, Artificial Sequence
  Synthetic
aaaccccagucccguuuuugccca

SEQ ID NO: 464811 - RNA, 18 nt, Artificial Sequence
  Synthetic
uaaauagagagaauccca

SEQ ID NO: 464812 - RNA, 19 nt, Artificial Sequence
  Synthetic
uuaaauagagagaauccca

SEQ ID NO: 464813 - RNA, 20 nt, Artificial Sequence
  Synthetic
uuuaaauagagagaauccca

SEQ ID NO: 464814 - RNA, 21 nt, Artificial Sequence
  Synthetic
cuuuaaauagagagaauccca

SEQ ID NO: 464815 - RNA, 22 nt, Artificial Sequence
  Synthetic
ucuuuaaauagagagaauccca

SEQ ID NO: 464816 - RNA, 23 nt, Artificial Sequence
  Synthetic
cucuuuaaauagagagaauccca

SEQ ID NO: 464817 - RNA, 24 nt, Artificial Sequence
  Synthetic
ucucuuuaaauagagagaauccca

SEQ ID NO: 464818 - RNA, 18 nt, Artificial Sequence
  Synthetic
uugcuuugccuaauccca

SEQ ID NO: 464819 - RNA, 19 nt, Artificial Sequence
  Synthetic
cuugcuuugccuaauccca

SEQ ID NO: 464820 - RNA, 20 nt, Artificial Sequence
  Synthetic
ccuugcuuugccuaauccca

SEQ ID NO: 464821 - RNA, 21 nt, Artificial Sequence
  Synthetic
gccuugcuuugccuaauccca

SEQ ID NO: 464822 - RNA, 22 nt, Artificial Sequence
  Synthetic
cgccuugcuuugccuaauccca

SEQ ID NO: 464823 - RNA, 23 nt, Artificial Sequence
  Synthetic
gcgccuugcuuugccuaauccca

SEQ ID NO: 464824 - RNA, 24 nt, Artificial Sequence
  Synthetic
ugcgccuugcuuugccuaauccca

SEQ ID NO: 464825 - RNA, 18 nt, Artificial Sequence
  Synthetic
ucccacagaguaauccca

SEQ ID NO: 464826 - RNA, 19 nt, Artificial Sequence
  Synthetic
uucccacagaguaauccca

SEQ ID NO: 464827 - RNA, 20 nt, Artificial Sequence
  Synthetic
guucccacagaguaauccca

SEQ ID NO: 464828 - RNA, 21 nt, Artificial Sequence
  Synthetic
aguucccacagaguaauccca

SEQ ID NO: 464829 - RNA, 22 nt, Artificial Sequence
  Synthetic
caguucccacagaguaauccca

SEQ ID NO: 464830 - RNA, 23 nt, Artificial Sequence
  Synthetic
ccaguucccacagaguaauccca

SEQ ID NO: 464831 - RNA, 24 nt, Artificial Sequence
  Synthetic
gccaguucccacagaguaauccca

SEQ ID NO: 464832 - RNA, 18 nt, Artificial Sequence
  Synthetic
gacugccgaguaauccca

SEQ ID NO: 464833 - RNA, 19 nt, Artificial Sequence
  Synthetic
ugacugccgaguaauccca

SEQ ID NO: 464834 - RNA, 20 nt, Artificial Sequence
  Synthetic
augacugccgaguaauccca

SEQ ID NO: 464835 - RNA, 21 nt, Artificial Sequence
  Synthetic
gaugacugccgaguaauccca

SEQ ID NO: 464836 - RNA, 22 nt, Artificial Sequence
  Synthetic
ugaugacugccgaguaauccca

SEQ ID NO: 464837 - RNA, 23 nt, Artificial Sequence
  Synthetic
cugaugacugccgaguaauccca

SEQ ID NO: 464838 - RNA, 24 nt, Artificial Sequence
  Synthetic
ucugaugacugccgaguaauccca

SEQ ID NO: 464839 - RNA, 18 nt, Artificial Sequence
  Synthetic
uaccucuacuuaauccca

SEQ ID NO: 464840 - RNA, 19 nt, Artificial Sequence
  Synthetic
uuaccucuacuuaauccca

SEQ ID NO: 464841 - RNA, 20 nt, Artificial Sequence
  Synthetic
guuaccucuacuuaauccca

SEQ ID NO: 464842 - RNA, 21 nt, Artificial Sequence
  Synthetic
uguuaccucuacuuaauccca

SEQ ID NO: 464843 - RNA, 22 nt, Artificial Sequence
  Synthetic
cuguuaccucuacuuaauccca

SEQ ID NO: 464844 - RNA, 23 nt, Artificial Sequence
  Synthetic
acuguuaccucuacuuaauccca

SEQ ID NO: 464845 - RNA, 24 nt, Artificial Sequence
  Synthetic
aacuguuaccucuacuuaauccca

SEQ ID NO: 464846 - RNA, 18 nt, Artificial Sequence
  Synthetic
ugcuugggagacauccca

SEQ ID NO: 464847 - RNA, 19 nt, Artificial Sequence
  Synthetic
gugcuugggagacauccca

SEQ ID NO: 464848 - RNA, 20 nt, Artificial Sequence
  Synthetic
agugcuugggagacauccca

SEQ ID NO: 464849 - RNA, 21 nt, Artificial Sequence
  Synthetic
cagugcuugggagacauccca

SEQ ID NO: 464850 - RNA, 22 nt, Artificial Sequence
  Synthetic
gcagugcuugggagacauccca

SEQ ID NO: 464851 - RNA, 23 nt, Artificial Sequence
  Synthetic
ggcagugcuugggagacauccca

SEQ ID NO: 464852 - RNA, 24 nt, Artificial Sequence
  Synthetic
gggcagugcuugggagacauccca

SEQ ID NO: 464853 - RNA, 18 nt, Artificial Sequence
  Synthetic
cuuggggugugcauccca

SEQ ID NO: 464854 - RNA, 19 nt, Artificial Sequence
  Synthetic
ccuuggggugugcauccca

SEQ ID NO: 464855 - RNA, 20 nt, Artificial Sequence
  Synthetic
uccuuggggugugcauccca

SEQ ID NO: 464856 - RNA, 21 nt, Artificial Sequence
  Synthetic
cuccuuggggugugcauccca

SEQ ID NO: 464857 - RNA, 22 nt, Artificial Sequence
  Synthetic
gcuccuuggggugugcauccca

SEQ ID NO: 464858 - RNA, 23 nt, Artificial Sequence
  Synthetic
ggcuccuuggggugugcauccca

SEQ ID NO: 464859 - RNA, 24 nt, Artificial Sequence
  Synthetic
uggcuccuuggggugugcauccca

SEQ ID NO: 464860 - RNA, 18 nt, Artificial Sequence
  Synthetic
ucuggaagcuucauccca

SEQ ID NO: 464861 - RNA, 19 nt, Artificial Sequence
  Synthetic
cucuggaagcuucauccca

SEQ ID NO: 464862 - RNA, 20 nt, Artificial Sequence
  Synthetic
ccucuggaagcuucauccca

SEQ ID NO: 464863 - RNA, 21 nt, Artificial Sequence
  Synthetic
uccucuggaagcuucauccca

SEQ ID NO: 464864 - RNA, 22 nt, Artificial Sequence
  Synthetic
uuccucuggaagcuucauccca

SEQ ID NO: 464865 - RNA, 23 nt, Artificial Sequence
  Synthetic
cuuccucuggaagcuucauccca

SEQ ID NO: 464866 - RNA, 24 nt, Artificial Sequence
  Synthetic
ccuuccucuggaagcuucauccca

SEQ ID NO: 464867 - RNA, 18 nt, Artificial Sequence
  Synthetic
auaucaccaccgauccca

SEQ ID NO: 464868 - RNA, 19 nt, Artificial Sequence
  Synthetic
gauaucaccaccgauccca

SEQ ID NO: 464869 - RNA, 20 nt, Artificial Sequence
  Synthetic
ggauaucaccaccgauccca

SEQ ID NO: 464870 - RNA, 21 nt, Artificial Sequence
  Synthetic
gggauaucaccaccgauccca

SEQ ID NO: 464871 - RNA, 22 nt, Artificial Sequence
  Synthetic
ggggauaucaccaccgauccca

SEQ ID NO: 464872 - RNA, 23 nt, Artificial Sequence
  Synthetic
aggggauaucaccaccgauccca

SEQ ID NO: 464873 - RNA, 24 nt, Artificial Sequence
  Synthetic
aaggggauaucaccaccgauccca

SEQ ID NO: 464874 - RNA, 18 nt, Artificial Sequence
  Synthetic
gcacuuuggaauauccca

SEQ ID NO: 464875 - RNA, 19 nt, Artificial Sequence
  Synthetic
agcacuuuggaauauccca

SEQ ID NO: 464876 - RNA, 20 nt, Artificial Sequence
  Synthetic
cagcacuuuggaauauccca

SEQ ID NO: 464877 - RNA, 21 nt, Artificial Sequence
  Synthetic
acagcacuuuggaauauccca

SEQ ID NO: 464878 - RNA, 22 nt, Artificial Sequence
  Synthetic
gacagcacuuuggaauauccca

SEQ ID NO: 464879 - RNA, 23 nt, Artificial Sequence
  Synthetic
ugacagcacuuuggaauauccca

SEQ ID NO: 464880 - RNA, 24 nt, Artificial Sequence
  Synthetic
cugacagcacuuuggaauauccca

SEQ ID NO: 464881 - RNA, 18 nt, Artificial Sequence
  Synthetic
caaacagugcauauccca

SEQ ID NO: 464882 - RNA, 19 nt, Artificial Sequence
  Synthetic
gcaaacagugcauauccca

SEQ ID NO: 464883 - RNA, 20 nt, Artificial Sequence
  Synthetic
ggcaaacagugcauauccca

SEQ ID NO: 464884 - RNA, 21 nt, Artificial Sequence
  Synthetic
uggcaaacagugcauauccca

SEQ ID NO: 464885 - RNA, 22 nt, Artificial Sequence
  Synthetic
uuggcaaacagugcauauccca

SEQ ID NO: 464886 - RNA, 23 nt, Artificial Sequence
  Synthetic
uuuggcaaacagugcauauccca

SEQ ID NO: 464887 - RNA, 24 nt, Artificial Sequence
  Synthetic
auuuggcaaacagugcauauccca

SEQ ID NO: 464888 - RNA, 18 nt, Artificial Sequence
  Synthetic
gcucuuaaugauauccca

SEQ ID NO: 464889 - RNA, 19 nt, Artificial Sequence
  Synthetic
ugcucuuaaugauauccca

SEQ ID NO: 464890 - RNA, 20 nt, Artificial Sequence
  Synthetic
cugcucuuaaugauauccca

SEQ ID NO: 464891 - RNA, 21 nt, Artificial Sequence
  Synthetic
ucugcucuuaaugauauccca

SEQ ID NO: 464892 - RNA, 22 nt, Artificial Sequence
  Synthetic
uucugcucuuaaugauauccca

SEQ ID NO: 464893 - RNA, 23 nt, Artificial Sequence
  Synthetic
uuucugcucuuaaugauauccca

SEQ ID NO: 464894 - RNA, 24 nt, Artificial Sequence
  Synthetic
auuucugcucuuaaugauauccca

SEQ ID NO: 464895 - RNA, 18 nt, Artificial Sequence
  Synthetic
ugcuggguauauauccca

SEQ ID NO: 464896 - RNA, 19 nt, Artificial Sequence
  Synthetic
cugcuggguauauauccca

SEQ ID NO: 464897 - RNA, 20 nt, Artificial Sequence
  Synthetic
acugcuggguauauauccca

SEQ ID NO: 464898 - RNA, 21 nt, Artificial Sequence
  Synthetic
cacugcuggguauauauccca

SEQ ID NO: 464899 - RNA, 22 nt, Artificial Sequence
  Synthetic
ccacugcuggguauauauccca

SEQ ID NO: 464900 - RNA, 23 nt, Artificial Sequence
  Synthetic
cccacugcuggguauauauccca

SEQ ID NO: 464901 - RNA, 24 nt, Artificial Sequence
  Synthetic
ucccacugcuggguauauauccca

SEQ ID NO: 464902 - RNA, 18 nt, Artificial Sequence
  Synthetic
agcauagaaucuauccca

SEQ ID NO: 464903 - RNA, 19 nt, Artificial Sequence
  Synthetic
uagcauagaaucuauccca

SEQ ID NO: 464904 - RNA, 20 nt, Artificial Sequence
  Synthetic
cuagcauagaaucuauccca

SEQ ID NO: 464905 - RNA, 21 nt, Artificial Sequence
  Synthetic
ccuagcauagaaucuauccca

SEQ ID NO: 464906 - RNA, 22 nt, Artificial Sequence
  Synthetic
accuagcauagaaucuauccca

SEQ ID NO: 464907 - RNA, 23 nt, Artificial Sequence
  Synthetic
gaccuagcauagaaucuauccca

SEQ ID NO: 464908 - RNA, 24 nt, Artificial Sequence
  Synthetic
ugaccuagcauagaaucuauccca

SEQ ID NO: 464909 - RNA, 18 nt, Artificial Sequence
  Synthetic
uaucucaaaauuauccca

SEQ ID NO: 464910 - RNA, 19 nt, Artificial Sequence
  Synthetic
auaucucaaaauuauccca

SEQ ID NO: 464911 - RNA, 20 nt, Artificial Sequence
  Synthetic
uauaucucaaaauuauccca

SEQ ID NO: 464912 - RNA, 21 nt, Artificial Sequence
  Synthetic
auauaucucaaaauuauccca

SEQ ID NO: 464913 - RNA, 22 nt, Artificial Sequence
  Synthetic
aauauaucucaaaauuauccca

SEQ ID NO: 464914 - RNA, 23 nt, Artificial Sequence
  Synthetic
gaauauaucucaaaauuauccca

SEQ ID NO: 464915 - RNA, 24 nt, Artificial Sequence
  Synthetic
ggaauauaucucaaaauuauccca

SEQ ID NO: 464916 - RNA, 18 nt, Artificial Sequence
  Synthetic
gagauguacuaacuccca

SEQ ID NO: 464917 - RNA, 19 nt, Artificial Sequence
  Synthetic
ugagauguacuaacuccca

SEQ ID NO: 464918 - RNA, 20 nt, Artificial Sequence
  Synthetic
uugagauguacuaacuccca

SEQ ID NO: 464919 - RNA, 21 nt, Artificial Sequence
  Synthetic
auugagauguacuaacuccca

SEQ ID NO: 464920 - RNA, 22 nt, Artificial Sequence
  Synthetic
uauugagauguacuaacuccca

SEQ ID NO: 464921 - RNA, 23 nt, Artificial Sequence
  Synthetic
guauugagauguacuaacuccca

SEQ ID NO: 464922 - RNA, 24 nt, Artificial Sequence
  Synthetic
aguauugagauguacuaacuccca

SEQ ID NO: 464923 - RNA, 18 nt, Artificial Sequence
  Synthetic
ccaagcuucauacuccca

SEQ ID NO: 464924 - RNA, 19 nt, Artificial Sequence
  Synthetic
accaagcuucauacuccca

SEQ ID NO: 464925 - RNA, 20 nt, Artificial Sequence
  Synthetic
aaccaagcuucauacuccca

SEQ ID NO: 464926 - RNA, 21 nt, Artificial Sequence
  Synthetic
aaaccaagcuucauacuccca

SEQ ID NO: 464927 - RNA, 22 nt, Artificial Sequence
  Synthetic
uaaaccaagcuucauacuccca

SEQ ID NO: 464928 - RNA, 23 nt, Artificial Sequence
  Synthetic
uuaaaccaagcuucauacuccca

SEQ ID NO: 464929 - RNA, 24 nt, Artificial Sequence
  Synthetic
cuuaaaccaagcuucauacuccca

SEQ ID NO: 464930 - RNA, 18 nt, Artificial Sequence
  Synthetic
gucuuagaauuacuccca

SEQ ID NO: 464931 - RNA, 19 nt, Artificial Sequence
  Synthetic
ugucuuagaauuacuccca

SEQ ID NO: 464932 - RNA, 20 nt, Artificial Sequence
  Synthetic
uugucuuagaauuacuccca

SEQ ID NO: 464933 - RNA, 21 nt, Artificial Sequence
  Synthetic
guugucuuagaauuacuccca

SEQ ID NO: 464934 - RNA, 22 nt, Artificial Sequence
  Synthetic
aguugucuuagaauuacuccca

SEQ ID NO: 464935 - RNA, 23 nt, Artificial Sequence
  Synthetic
uaguugucuuagaauuacuccca

SEQ ID NO: 464936 - RNA, 24 nt, Artificial Sequence
  Synthetic
uuaguugucuuagaauuacuccca

SEQ ID NO: 464937 - RNA, 18 nt, Artificial Sequence
  Synthetic
ucuccguggcuucuccca

SEQ ID NO: 464938 - RNA, 19 nt, Artificial Sequence
  Synthetic
uucuccguggcuucuccca

SEQ ID NO: 464939 - RNA, 20 nt, Artificial Sequence
  Synthetic
uuucuccguggcuucuccca

SEQ ID NO: 464940 - RNA, 21 nt, Artificial Sequence
  Synthetic
guuucuccguggcuucuccca

SEQ ID NO: 464941 - RNA, 22 nt, Artificial Sequence
  Synthetic
cguuucuccguggcuucuccca

SEQ ID NO: 464942 - RNA, 23 nt, Artificial Sequence
  Synthetic
ucguuucuccguggcuucuccca

SEQ ID NO: 464943 - RNA, 24 nt, Artificial Sequence
  Synthetic
uucguuucuccguggcuucuccca

SEQ ID NO: 464944 - RNA, 18 nt, Artificial Sequence
  Synthetic
uaugaugcccaaguccca

SEQ ID NO: 464945 - RNA, 19 nt, Artificial Sequence
  Synthetic
uuaugaugcccaaguccca

SEQ ID NO: 464946 - RNA, 20 nt, Artificial Sequence
  Synthetic
auuaugaugcccaaguccca

SEQ ID NO: 464947 - RNA, 21 nt, Artificial Sequence
  Synthetic
aauuaugaugcccaaguccca

SEQ ID NO: 464948 - RNA, 22 nt, Artificial Sequence
  Synthetic
gaauuaugaugcccaaguccca

SEQ ID NO: 464949 - RNA, 23 nt, Artificial Sequence
  Synthetic
agaauuaugaugcccaaguccca

SEQ ID NO: 464950 - RNA, 24 nt, Artificial Sequence
  Synthetic
aagaauuaugaugcccaaguccca

SEQ ID NO: 464951 - RNA, 18 nt, Artificial Sequence
  Synthetic
acugucuaaccaguccca

SEQ ID NO: 464952 - RNA, 19 nt, Artificial Sequence
  Synthetic
cacugucuaaccaguccca

SEQ ID NO: 464953 - RNA, 20 nt, Artificial Sequence
  Synthetic
ccacugucuaaccaguccca

SEQ ID NO: 464954 - RNA, 21 nt, Artificial Sequence
  Synthetic
cccacugucuaaccaguccca

SEQ ID NO: 464955 - RNA, 22 nt, Artificial Sequence
  Synthetic
acccacugucuaaccaguccca

SEQ ID NO: 464956 - RNA, 23 nt, Artificial Sequence
  Synthetic
cacccacugucuaaccaguccca

SEQ ID NO: 464957 - RNA, 24 nt, Artificial Sequence
  Synthetic
gcacccacugucuaaccaguccca

SEQ ID NO: 464958 - RNA, 18 nt, Artificial Sequence
  Synthetic
uuaucuaacagaguccca

SEQ ID NO: 464959 - RNA, 19 nt, Artificial Sequence
  Synthetic
cuuaucuaacagaguccca

SEQ ID NO: 464960 - RNA, 20 nt, Artificial Sequence
  Synthetic
ccuuaucuaacagaguccca

SEQ ID NO: 464961 - RNA, 21 nt, Artificial Sequence
  Synthetic
gccuuaucuaacagaguccca

SEQ ID NO: 464962 - RNA, 22 nt, Artificial Sequence
  Synthetic
ugccuuaucuaacagaguccca

SEQ ID NO: 464963 - RNA, 23 nt, Artificial Sequence
  Synthetic
uugccuuaucuaacagaguccca

SEQ ID NO: 464964 - RNA, 24 nt, Artificial Sequence
  Synthetic
uuugccuuaucuaacagaguccca

SEQ ID NO: 464965 - RNA, 18 nt, Artificial Sequence
  Synthetic
aacacucaaguaguccca

SEQ ID NO: 464966 - RNA, 19 nt, Artificial Sequence
  Synthetic
gaacacucaaguaguccca

SEQ ID NO: 464967 - RNA, 20 nt, Artificial Sequence
  Synthetic
agaacacucaaguaguccca

SEQ ID NO: 464968 - RNA, 21 nt, Artificial Sequence
  Synthetic
aagaacacucaaguaguccca

SEQ ID NO: 464969 - RNA, 22 nt, Artificial Sequence
  Synthetic
uaagaacacucaaguaguccca

SEQ ID NO: 464970 - RNA, 23 nt, Artificial Sequence
  Synthetic
auaagaacacucaaguaguccca

SEQ ID NO: 464971 - RNA, 24 nt, Artificial Sequence
  Synthetic
cauaagaacacucaaguaguccca

SEQ ID NO: 464972 - RNA, 18 nt, Artificial Sequence
  Synthetic
cccucaccucagguccca

SEQ ID NO: 464973 - RNA, 19 nt, Artificial Sequence
  Synthetic
ucccucaccucagguccca

SEQ ID NO: 464974 - RNA, 20 nt, Artificial Sequence
  Synthetic
uucccucaccucagguccca

SEQ ID NO: 464975 - RNA, 21 nt, Artificial Sequence
  Synthetic
auucccucaccucagguccca

SEQ ID NO: 464976 - RNA, 22 nt, Artificial Sequence
  Synthetic
uauucccucaccucagguccca

SEQ ID NO: 464977 - RNA, 23 nt, Artificial Sequence
  Synthetic
uuauucccucaccucagguccca

SEQ ID NO: 464978 - RNA, 24 nt, Artificial Sequence
  Synthetic
uuuauucccucaccucagguccca

SEQ ID NO: 464979 - RNA, 18 nt, Artificial Sequence
  Synthetic
gugauuuauuagguccca

SEQ ID NO: 464980 - RNA, 19 nt, Artificial Sequence
  Synthetic
agugauuuauuagguccca

SEQ ID NO: 464981 - RNA, 20 nt, Artificial Sequence
  Synthetic
cagugauuuauuagguccca

SEQ ID NO: 464982 - RNA, 21 nt, Artificial Sequence
  Synthetic
acagugauuuauuagguccca

SEQ ID NO: 464983 - RNA, 22 nt, Artificial Sequence
  Synthetic
aacagugauuuauuagguccca

SEQ ID NO: 464984 - RNA, 23 nt, Artificial Sequence
  Synthetic
aaacagugauuuauuagguccca

SEQ ID NO: 464985 - RNA, 24 nt, Artificial Sequence
  Synthetic
aaaacagugauuuauuagguccca

SEQ ID NO: 464986 - RNA, 18 nt, Artificial Sequence
  Synthetic
cuuaacguuaggguccca

SEQ ID NO: 464987 - RNA, 19 nt, Artificial Sequence
  Synthetic
ucuuaacguuaggguccca

SEQ ID NO: 464988 - RNA, 20 nt, Artificial Sequence
  Synthetic
uucuuaacguuaggguccca

SEQ ID NO: 464989 - RNA, 21 nt, Artificial Sequence
  Synthetic
auucuuaacguuaggguccca

SEQ ID NO: 464990 - RNA, 22 nt, Artificial Sequence
  Synthetic
uauucuuaacguuaggguccca

SEQ ID NO: 464991 - RNA, 23 nt, Artificial Sequence
  Synthetic
uuauucuuaacguuaggguccca

SEQ ID NO: 464992 - RNA, 24 nt, Artificial Sequence
  Synthetic
auuauucuuaacguuaggguccca

SEQ ID NO: 464993 - RNA, 18 nt, Artificial Sequence
  Synthetic
gaaugaauucauguccca

SEQ ID NO: 464994 - RNA, 19 nt, Artificial Sequence
  Synthetic
ugaaugaauucauguccca

SEQ ID NO: 464995 - RNA, 20 nt, Artificial Sequence
  Synthetic
gugaaugaauucauguccca

SEQ ID NO: 464996 - RNA, 21 nt, Artificial Sequence
  Synthetic
ugugaaugaauucauguccca

SEQ ID NO: 464997 - RNA, 22 nt, Artificial Sequence
  Synthetic
cugugaaugaauucauguccca

SEQ ID NO: 464998 - RNA, 23 nt, Artificial Sequence
  Synthetic
acugugaaugaauucauguccca

SEQ ID NO: 464999 - RNA, 24 nt, Artificial Sequence
  Synthetic
cacugugaaugaauucauguccca

SEQ ID NO: 465000 - RNA, 18 nt, Artificial Sequence
  Synthetic
ccguggugcucuguccca

SEQ ID NO: 465001 - RNA, 19 nt, Artificial Sequence
  Synthetic
cccguggugcucuguccca

SEQ ID NO: 465002 - RNA, 20 nt, Artificial Sequence
  Synthetic
ccccguggugcucuguccca

SEQ ID NO: 465003 - RNA, 21 nt, Artificial Sequence
  Synthetic
uccccguggugcucuguccca

SEQ ID NO: 465004 - RNA, 22 nt, Artificial Sequence
  Synthetic
uuccccguggugcucuguccca

SEQ ID NO: 465005 - RNA, 23 nt, Artificial Sequence
  Synthetic
cuuccccguggugcucuguccca

SEQ ID NO: 465006 - RNA, 24 nt, Artificial Sequence
  Synthetic
ccuuccccguggugcucuguccca

SEQ ID NO: 465007 - RNA, 18 nt, Artificial Sequence
  Synthetic
uauacaucggcauuccca

SEQ ID NO: 465008 - RNA, 19 nt, Artificial Sequence
  Synthetic
uuauacaucggcauuccca

SEQ ID NO: 465009 - RNA, 20 nt, Artificial Sequence
  Synthetic
auuauacaucggcauuccca

SEQ ID NO: 465010 - RNA, 21 nt, Artificial Sequence
  Synthetic
gauuauacaucggcauuccca

SEQ ID NO: 465011 - RNA, 22 nt, Artificial Sequence
  Synthetic
agauuauacaucggcauuccca

SEQ ID NO: 465012 - RNA, 23 nt, Artificial Sequence
  Synthetic
aagauuauacaucggcauuccca

SEQ ID NO: 465013 - RNA, 24 nt, Artificial Sequence
  Synthetic
gaagauuauacaucggcauuccca

SEQ ID NO: 465014 - RNA, 18 nt, Artificial Sequence
  Synthetic
cuacccuccagauuccca

SEQ ID NO: 465015 - RNA, 19 nt, Artificial Sequence
  Synthetic
gcuacccuccagauuccca

SEQ ID NO: 465016 - RNA, 20 nt, Artificial Sequence
  Synthetic
agcuacccuccagauuccca

SEQ ID NO: 465017 - RNA, 21 nt, Artificial Sequence
  Synthetic
cagcuacccuccagauuccca

SEQ ID NO: 465018 - RNA, 22 nt, Artificial Sequence
  Synthetic
ucagcuacccuccagauuccca

SEQ ID NO: 465019 - RNA, 23 nt, Artificial Sequence
  Synthetic
cucagcuacccuccagauuccca

SEQ ID NO: 465020 - RNA, 24 nt, Artificial Sequence
  Synthetic
ucucagcuacccuccagauuccca

SEQ ID NO: 465021 - RNA, 18 nt, Artificial Sequence
  Synthetic
ggaggcaguauauuccca

SEQ ID NO: 465022 - RNA, 19 nt, Artificial Sequence
  Synthetic
uggaggcaguauauuccca

SEQ ID NO: 465023 - RNA, 20 nt, Artificial Sequence
  Synthetic
guggaggcaguauauuccca

SEQ ID NO: 465024 - RNA, 21 nt, Artificial Sequence
  Synthetic
uguggaggcaguauauuccca

SEQ ID NO: 465025 - RNA, 22 nt, Artificial Sequence
  Synthetic
auguggaggcaguauauuccca

SEQ ID NO: 465026 - RNA, 23 nt, Artificial Sequence
  Synthetic
aauguggaggcaguauauuccca

SEQ ID NO: 465027 - RNA, 24 nt, Artificial Sequence
  Synthetic
caauguggaggcaguauauuccca

SEQ ID NO: 465028 - RNA, 18 nt, Artificial Sequence
  Synthetic
acauuacaaauguuccca

SEQ ID NO: 465029 - RNA, 19 nt, Artificial Sequence
  Synthetic
uacauuacaaauguuccca

SEQ ID NO: 465030 - RNA, 20 nt, Artificial Sequence
  Synthetic
uuacauuacaaauguuccca

SEQ ID NO: 465031 - RNA, 21 nt, Artificial Sequence
  Synthetic
uuuacauuacaaauguuccca

SEQ ID NO: 465032 - RNA, 22 nt, Artificial Sequence
  Synthetic
auuuacauuacaaauguuccca

SEQ ID NO: 465033 - RNA, 23 nt, Artificial Sequence
  Synthetic
cauuuacauuacaaauguuccca

SEQ ID NO: 465034 - RNA, 24 nt, Artificial Sequence
  Synthetic
ccauuuacauuacaaauguuccca

SEQ ID NO: 465035 - RNA, 18 nt, Artificial Sequence
  Synthetic
ucaugacauguguuccca

SEQ ID NO: 465036 - RNA, 19 nt, Artificial Sequence
  Synthetic
cucaugacauguguuccca

SEQ ID NO: 465037 - RNA, 20 nt, Artificial Sequence
  Synthetic
gcucaugacauguguuccca

SEQ ID NO: 465038 - RNA, 21 nt, Artificial Sequence
  Synthetic
ugcucaugacauguguuccca

SEQ ID NO: 465039 - RNA, 22 nt, Artificial Sequence
  Synthetic
cugcucaugacauguguuccca

SEQ ID NO: 465040 - RNA, 23 nt, Artificial Sequence
  Synthetic
gcugcucaugacauguguuccca

SEQ ID NO: 465041 - RNA, 24 nt, Artificial Sequence
  Synthetic
ggcugcucaugacauguguuccca

SEQ ID NO: 465042 - RNA, 18 nt, Artificial Sequence
  Synthetic
cuuugucuccguuuccca

SEQ ID NO: 465043 - RNA, 19 nt, Artificial Sequence
  Synthetic
ccuuugucuccguuuccca

SEQ ID NO: 465044 - RNA, 20 nt, Artificial Sequence
  Synthetic
uccuuugucuccguuuccca

SEQ ID NO: 465045 - RNA, 21 nt, Artificial Sequence
  Synthetic
cuccuuugucuccguuuccca

SEQ ID NO: 465046 - RNA, 22 nt, Artificial Sequence
  Synthetic
ucuccuuugucuccguuuccca

SEQ ID NO: 465047 - RNA, 23 nt, Artificial Sequence
  Synthetic
aucuccuuugucuccguuuccca

SEQ ID NO: 465048 - RNA, 24 nt, Artificial Sequence
  Synthetic
uaucuccuuugucuccguuuccca

SEQ ID NO: 465049 - RNA, 18 nt, Artificial Sequence
  Synthetic
uuuagagucuguuuccca

SEQ ID NO: 465050 - RNA, 19 nt, Artificial Sequence
  Synthetic
uuuuagagucuguuuccca

SEQ ID NO: 465051 - RNA, 20 nt, Artificial Sequence
  Synthetic
guuuuagagucuguuuccca

SEQ ID NO: 465052 - RNA, 21 nt, Artificial Sequence
  Synthetic
uguuuuagagucuguuuccca

SEQ ID NO: 465053 - RNA, 22 nt, Artificial Sequence
  Synthetic
auguuuuagagucuguuuccca

SEQ ID NO: 465054 - RNA, 23 nt, Artificial Sequence
  Synthetic
aauguuuuagagucuguuuccca

SEQ ID NO: 465055 - RNA, 24 nt, Artificial Sequence
  Synthetic
aaauguuuuagagucuguuuccca

SEQ ID NO: 465056 - RNA, 18 nt, Artificial Sequence
  Synthetic
agucaauguauuuuccca

SEQ ID NO: 465057 - RNA, 19 nt, Artificial Sequence
  Synthetic
aagucaauguauuuuccca

SEQ ID NO: 465058 - RNA, 20 nt, Artificial Sequence
  Synthetic
caagucaauguauuuuccca

SEQ ID NO: 465059 - RNA, 21 nt, Artificial Sequence
  Synthetic
ccaagucaauguauuuuccca

SEQ ID NO: 465060 - RNA, 22 nt, Artificial Sequence
  Synthetic
gccaagucaauguauuuuccca

SEQ ID NO: 465061 - RNA, 23 nt, Artificial Sequence
  Synthetic
ggccaagucaauguauuuuccca

SEQ ID NO: 465062 - RNA, 24 nt, Artificial Sequence
  Synthetic
gggccaagucaauguauuuuccca

SEQ ID NO: 465063 - RNA, 18 nt, Artificial Sequence
  Synthetic
cagaaguaccuuuuccca

SEQ ID NO: 465064 - RNA, 19 nt, Artificial Sequence
  Synthetic
ucagaaguaccuuuuccca

SEQ ID NO: 465065 - RNA, 20 nt, Artificial Sequence
  Synthetic
gucagaaguaccuuuuccca

SEQ ID NO: 465066 - RNA, 21 nt, Artificial Sequence
  Synthetic
agucagaaguaccuuuuccca

SEQ ID NO: 465067 - RNA, 22 nt, Artificial Sequence
  Synthetic
aagucagaaguaccuuuuccca

SEQ ID NO: 465068 - RNA, 23 nt, Artificial Sequence
  Synthetic
aaagucagaaguaccuuuuccca

SEQ ID NO: 465069 - RNA, 24 nt, Artificial Sequence
  Synthetic
gaaagucagaaguaccuuuuccca

SEQ ID NO: 465070 - RNA, 18 nt, Artificial Sequence
  Synthetic
uuuguuaacuuuuuccca

SEQ ID NO: 465071 - RNA, 19 nt, Artificial Sequence
  Synthetic
uuuuguuaacuuuuuccca

SEQ ID NO: 465072 - RNA, 20 nt, Artificial Sequence
  Synthetic
auuuuguuaacuuuuuccca

SEQ ID NO: 465073 - RNA, 21 nt, Artificial Sequence
  Synthetic
cauuuuguuaacuuuuuccca

SEQ ID NO: 465074 - RNA, 22 nt, Artificial Sequence
  Synthetic
acauuuuguuaacuuuuuccca

SEQ ID NO: 465075 - RNA, 23 nt, Artificial Sequence
  Synthetic
uacauuuuguuaacuuuuuccca

SEQ ID NO: 465076 - RNA, 24 nt, Artificial Sequence
  Synthetic
guacauuuuguuaacuuuuuccca

SEQ ID NO: 465077 - RNA, 18 nt, Artificial Sequence
  Synthetic
aauagaaagcaaaagcca

SEQ ID NO: 465078 - RNA, 19 nt, Artificial Sequence
  Synthetic
aaauagaaagcaaaagcca

SEQ ID NO: 465079 - RNA, 20 nt, Artificial Sequence
  Synthetic
gaaauagaaagcaaaagcca

SEQ ID NO: 465080 - RNA, 21 nt, Artificial Sequence
  Synthetic
agaaauagaaagcaaaagcca

SEQ ID NO: 465081 - RNA, 22 nt, Artificial Sequence
  Synthetic
uagaaauagaaagcaaaagcca

SEQ ID NO: 465082 - RNA, 23 nt, Artificial Sequence
  Synthetic
guagaaauagaaagcaaaagcca

SEQ ID NO: 465083 - RNA, 24 nt, Artificial Sequence
  Synthetic
aguagaaauagaaagcaaaagcca

SEQ ID NO: 465084 - RNA, 18 nt, Artificial Sequence
  Synthetic
cuucaguggcaaaagcca

SEQ ID NO: 465085 - RNA, 19 nt, Artificial Sequence
  Synthetic
ucuucaguggcaaaagcca

SEQ ID NO: 465086 - RNA, 20 nt, Artificial Sequence
  Synthetic
gucuucaguggcaaaagcca

SEQ ID NO: 465087 - RNA, 21 nt, Artificial Sequence
  Synthetic
ugucuucaguggcaaaagcca

SEQ ID NO: 465088 - RNA, 22 nt, Artificial Sequence
  Synthetic
augucuucaguggcaaaagcca

SEQ ID NO: 465089 - RNA, 23 nt, Artificial Sequence
  Synthetic
aaugucuucaguggcaaaagcca

SEQ ID NO: 465090 - RNA, 24 nt, Artificial Sequence
  Synthetic
aaaugucuucaguggcaaaagcca

SEQ ID NO: 465091 - RNA, 18 nt, Artificial Sequence
  Synthetic
ggacgguaugaaaagcca

SEQ ID NO: 465092 - RNA, 19 nt, Artificial Sequence
  Synthetic
aggacgguaugaaaagcca

SEQ ID NO: 465093 - RNA, 20 nt, Artificial Sequence
  Synthetic
uaggacgguaugaaaagcca

SEQ ID NO: 465094 - RNA, 21 nt, Artificial Sequence
  Synthetic
guaggacgguaugaaaagcca

SEQ ID NO: 465095 - RNA, 22 nt, Artificial Sequence
  Synthetic
aguaggacgguaugaaaagcca

SEQ ID NO: 465096 - RNA, 23 nt, Artificial Sequence
  Synthetic
caguaggacgguaugaaaagcca

SEQ ID NO: 465097 - RNA, 24 nt, Artificial Sequence
  Synthetic
acaguaggacgguaugaaaagcca

SEQ ID NO: 465098 - RNA, 18 nt, Artificial Sequence
  Synthetic
uuaaugcccuaaaagcca

SEQ ID NO: 465099 - RNA, 19 nt, Artificial Sequence
  Synthetic
auuaaugcccuaaaagcca

SEQ ID NO: 465100 - RNA, 20 nt, Artificial Sequence
  Synthetic
uauuaaugcccuaaaagcca

SEQ ID NO: 465101 - RNA, 21 nt, Artificial Sequence
  Synthetic
uuauuaaugcccuaaaagcca

SEQ ID NO: 465102 - RNA, 22 nt, Artificial Sequence
  Synthetic
guuauuaaugcccuaaaagcca

SEQ ID NO: 465103 - RNA, 23 nt, Artificial Sequence
  Synthetic
uguuauuaaugcccuaaaagcca

SEQ ID NO: 465104 - RNA, 24 nt, Artificial Sequence
  Synthetic
cuguuauuaaugcccuaaaagcca

SEQ ID NO: 465105 - RNA, 18 nt, Artificial Sequence
  Synthetic
auugcauccuaaaagcca

SEQ ID NO: 465106 - RNA, 19 nt, Artificial Sequence
  Synthetic
cauugcauccuaaaagcca

SEQ ID NO: 465107 - RNA, 20 nt, Artificial Sequence
  Synthetic
ucauugcauccuaaaagcca

SEQ ID NO: 465108 - RNA, 21 nt, Artificial Sequence
  Synthetic
aucauugcauccuaaaagcca

SEQ ID NO: 465109 - RNA, 22 nt, Artificial Sequence
  Synthetic
aaucauugcauccuaaaagcca

SEQ ID NO: 465110 - RNA, 23 nt, Artificial Sequence
  Synthetic
uaaucauugcauccuaaaagcca

SEQ ID NO: 465111 - RNA, 24 nt, Artificial Sequence
  Synthetic
auaaucauugcauccuaaaagcca

SEQ ID NO: 465112 - RNA, 18 nt, Artificial Sequence
  Synthetic
cuauaguguuaaaagcca

SEQ ID NO: 465113 - RNA, 19 nt, Artificial Sequence
  Synthetic
ucuauaguguuaaaagcca

SEQ ID NO: 465114 - RNA, 20 nt, Artificial Sequence
  Synthetic
cucuauaguguuaaaagcca

SEQ ID NO: 465115 - RNA, 21 nt, Artificial Sequence
  Synthetic
gcucuauaguguuaaaagcca

SEQ ID NO: 465116 - RNA, 22 nt, Artificial Sequence
  Synthetic
ugcucuauaguguuaaaagcca

SEQ ID NO: 465117 - RNA, 23 nt, Artificial Sequence
  Synthetic
uugcucuauaguguuaaaagcca

SEQ ID NO: 465118 - RNA, 24 nt, Artificial Sequence
  Synthetic
cuugcucuauaguguuaaaagcca

SEQ ID NO: 465119 - RNA, 18 nt, Artificial Sequence
  Synthetic
caaaaaaacccaaagcca

SEQ ID NO: 465120 - RNA, 19 nt, Artificial Sequence
  Synthetic
ucaaaaaaacccaaagcca

SEQ ID NO: 465121 - RNA, 20 nt, Artificial Sequence
  Synthetic
cucaaaaaaacccaaagcca

SEQ ID NO: 465122 - RNA, 21 nt, Artificial Sequence
  Synthetic
ucucaaaaaaacccaaagcca

SEQ ID NO: 465123 - RNA, 22 nt, Artificial Sequence
  Synthetic
uucucaaaaaaacccaaagcca

SEQ ID NO: 465124 - RNA, 23 nt, Artificial Sequence
  Synthetic
uuucucaaaaaaacccaaagcca

SEQ ID NO: 465125 - RNA, 24 nt, Artificial Sequence
  Synthetic
auuucucaaaaaaacccaaagcca

SEQ ID NO: 465126 - RNA, 18 nt, Artificial Sequence
  Synthetic
cuagggaaaucaaagcca

SEQ ID NO: 465127 - RNA, 19 nt, Artificial Sequence
  Synthetic
ccuagggaaaucaaagcca

SEQ ID NO: 465128 - RNA, 20 nt, Artificial Sequence
  Synthetic
cccuagggaaaucaaagcca

SEQ ID NO: 465129 - RNA, 21 nt, Artificial Sequence
  Synthetic
acccuagggaaaucaaagcca

SEQ ID NO: 465130 - RNA, 22 nt, Artificial Sequence
  Synthetic
gacccuagggaaaucaaagcca

SEQ ID NO: 465131 - RNA, 23 nt, Artificial Sequence
  Synthetic
ggacccuagggaaaucaaagcca

SEQ ID NO: 465132 - RNA, 24 nt, Artificial Sequence
  Synthetic
uggacccuagggaaaucaaagcca

SEQ ID NO: 465133 - RNA, 18 nt, Artificial Sequence
  Synthetic
gcagaauagucaaagcca

SEQ ID NO: 465134 - RNA, 19 nt, Artificial Sequence
  Synthetic
agcagaauagucaaagcca

SEQ ID NO: 465135 - RNA, 20 nt, Artificial Sequence
  Synthetic
cagcagaauagucaaagcca

SEQ ID NO: 465136 - RNA, 21 nt, Artificial Sequence
  Synthetic
ccagcagaauagucaaagcca

SEQ ID NO: 465137 - RNA, 22 nt, Artificial Sequence
  Synthetic
cccagcagaauagucaaagcca

SEQ ID NO: 465138 - RNA, 23 nt, Artificial Sequence
  Synthetic
ucccagcagaauagucaaagcca

SEQ ID NO: 465139 - RNA, 24 nt, Artificial Sequence
  Synthetic
uucccagcagaauagucaaagcca

SEQ ID NO: 465140 - RNA, 18 nt, Artificial Sequence
  Synthetic
gcauuuuuuucaaagcca

SEQ ID NO: 465141 - RNA, 19 nt, Artificial Sequence
  Synthetic
ggcauuuuuuucaaagcca

SEQ ID NO: 465142 - RNA, 20 nt, Artificial Sequence
  Synthetic
aggcauuuuuuucaaagcca

SEQ ID NO: 465143 - RNA, 21 nt, Artificial Sequence
  Synthetic
caggcauuuuuuucaaagcca

SEQ ID NO: 465144 - RNA, 22 nt, Artificial Sequence
  Synthetic
gcaggcauuuuuuucaaagcca

SEQ ID NO: 465145 - RNA, 23 nt, Artificial Sequence
  Synthetic
agcaggcauuuuuuucaaagcca

SEQ ID NO: 465146 - RNA, 24 nt, Artificial Sequence
  Synthetic
cagcaggcauuuuuuucaaagcca

SEQ ID NO: 465147 - RNA, 18 nt, Artificial Sequence
  Synthetic
cuuggccauggaaagcca

SEQ ID NO: 465148 - RNA, 19 nt, Artificial Sequence
  Synthetic
gcuuggccauggaaagcca

SEQ ID NO: 465149 - RNA, 20 nt, Artificial Sequence
  Synthetic
ugcuuggccauggaaagcca

SEQ ID NO: 465150 - RNA, 21 nt, Artificial Sequence
  Synthetic
gugcuuggccauggaaagcca

SEQ ID NO: 465151 - RNA, 22 nt, Artificial Sequence
  Synthetic
ugugcuuggccauggaaagcca

SEQ ID NO: 465152 - RNA, 23 nt, Artificial Sequence
  Synthetic
augugcuuggccauggaaagcca

SEQ ID NO: 465153 - RNA, 24 nt, Artificial Sequence
  Synthetic
uaugugcuuggccauggaaagcca

SEQ ID NO: 465154 - RNA, 18 nt, Artificial Sequence
  Synthetic
acaguuccaugaaagcca

SEQ ID NO: 465155 - RNA, 19 nt, Artificial Sequence
  Synthetic
aacaguuccaugaaagcca

SEQ ID NO: 465156 - RNA, 20 nt, Artificial Sequence
  Synthetic
gaacaguuccaugaaagcca

SEQ ID NO: 465157 - RNA, 21 nt, Artificial Sequence
  Synthetic
ggaacaguuccaugaaagcca

SEQ ID NO: 465158 - RNA, 22 nt, Artificial Sequence
  Synthetic
uggaacaguuccaugaaagcca

SEQ ID NO: 465159 - RNA, 23 nt, Artificial Sequence
  Synthetic
auggaacaguuccaugaaagcca

SEQ ID NO: 465160 - RNA, 24 nt, Artificial Sequence
  Synthetic
gauggaacaguuccaugaaagcca

SEQ ID NO: 465161 - RNA, 18 nt, Artificial Sequence
  Synthetic
aaaaaaucaaacaagcca

SEQ ID NO: 465162 - RNA, 19 nt, Artificial Sequence
  Synthetic
uaaaaaaucaaacaagcca

SEQ ID NO: 465163 - RNA, 20 nt, Artificial Sequence
  Synthetic
auaaaaaaucaaacaagcca

SEQ ID NO: 465164 - RNA, 21 nt, Artificial Sequence
  Synthetic
cauaaaaaaucaaacaagcca

SEQ ID NO: 465165 - RNA, 22 nt, Artificial Sequence
  Synthetic
acauaaaaaaucaaacaagcca

SEQ ID NO: 465166 - RNA, 23 nt, Artificial Sequence
  Synthetic
uacauaaaaaaucaaacaagcca

SEQ ID NO: 465167 - RNA, 24 nt, Artificial Sequence
  Synthetic
uuacauaaaaaaucaaacaagcca

SEQ ID NO: 465168 - RNA, 18 nt, Artificial Sequence
  Synthetic
aagucuaauaacaagcca

SEQ ID NO: 465169 - RNA, 19 nt, Artificial Sequence
  Synthetic
gaagucuaauaacaagcca

SEQ ID NO: 465170 - RNA, 20 nt, Artificial Sequence
  Synthetic
ggaagucuaauaacaagcca

SEQ ID NO: 465171 - RNA, 21 nt, Artificial Sequence
  Synthetic
cggaagucuaauaacaagcca

SEQ ID NO: 465172 - RNA, 22 nt, Artificial Sequence
  Synthetic
acggaagucuaauaacaagcca

SEQ ID NO: 465173 - RNA, 23 nt, Artificial Sequence
  Synthetic
aacggaagucuaauaacaagcca

SEQ ID NO: 465174 - RNA, 24 nt, Artificial Sequence
  Synthetic
caacggaagucuaauaacaagcca

SEQ ID NO: 465175 - RNA, 18 nt, Artificial Sequence
  Synthetic
auauucuaucacaagcca

SEQ ID NO: 465176 - RNA, 19 nt, Artificial Sequence
  Synthetic
uauauucuaucacaagcca

SEQ ID NO: 465177 - RNA, 20 nt, Artificial Sequence
  Synthetic
uuauauucuaucacaagcca

SEQ ID NO: 465178 - RNA, 21 nt, Artificial Sequence
  Synthetic
cuuauauucuaucacaagcca

SEQ ID NO: 465179 - RNA, 22 nt, Artificial Sequence
  Synthetic
ccuuauauucuaucacaagcca

SEQ ID NO: 465180 - RNA, 23 nt, Artificial Sequence
  Synthetic
cccuuauauucuaucacaagcca

SEQ ID NO: 465181 - RNA, 24 nt, Artificial Sequence
  Synthetic
gcccuuauauucuaucacaagcca

SEQ ID NO: 465182 - RNA, 18 nt, Artificial Sequence
  Synthetic
uuacccccauacaagcca

SEQ ID NO: 465183 - RNA, 19 nt, Artificial Sequence
  Synthetic
auuacccccauacaagcca

SEQ ID NO: 465184 - RNA, 20 nt, Artificial Sequence
  Synthetic
uauuacccccauacaagcca

SEQ ID NO: 465185 - RNA, 21 nt, Artificial Sequence
  Synthetic
cuauuacccccauacaagcca

SEQ ID NO: 465186 - RNA, 22 nt, Artificial Sequence
  Synthetic
ccuauuacccccauacaagcca

SEQ ID NO: 465187 - RNA, 23 nt, Artificial Sequence
  Synthetic
cccuauuacccccauacaagcca

SEQ ID NO: 465188 - RNA, 24 nt, Artificial Sequence
  Synthetic
gcccuauuacccccauacaagcca

SEQ ID NO: 465189 - RNA, 18 nt, Artificial Sequence
  Synthetic
ucugcccucgccaagcca

SEQ ID NO: 465190 - RNA, 19 nt, Artificial Sequence
  Synthetic
uucugcccucgccaagcca

SEQ ID NO: 465191 - RNA, 20 nt, Artificial Sequence
  Synthetic
cuucugcccucgccaagcca

SEQ ID NO: 465192 - RNA, 21 nt, Artificial Sequence
  Synthetic
ccuucugcccucgccaagcca

SEQ ID NO: 465193 - RNA, 22 nt, Artificial Sequence
  Synthetic
uccuucugcccucgccaagcca

SEQ ID NO: 465194 - RNA, 23 nt, Artificial Sequence
  Synthetic
uuccuucugcccucgccaagcca

SEQ ID NO: 465195 - RNA, 24 nt, Artificial Sequence
  Synthetic
uuuccuucugcccucgccaagcca

SEQ ID NO: 465196 - RNA, 18 nt, Artificial Sequence
  Synthetic
gcggcuaucugcaagcca

SEQ ID NO: 465197 - RNA, 19 nt, Artificial Sequence
  Synthetic
ggcggcuaucugcaagcca

SEQ ID NO: 465198 - RNA, 20 nt, Artificial Sequence
  Synthetic
aggcggcuaucugcaagcca

SEQ ID NO: 465199 - RNA, 21 nt, Artificial Sequence
  Synthetic
aaggcggcuaucugcaagcca

SEQ ID NO: 465200 - RNA, 22 nt, Artificial Sequence
  Synthetic
gaaggcggcuaucugcaagcca

SEQ ID NO: 465201 - RNA, 23 nt, Artificial Sequence
  Synthetic
agaaggcggcuaucugcaagcca

SEQ ID NO: 465202 - RNA, 24 nt, Artificial Sequence
  Synthetic
gagaaggcggcuaucugcaagcca

SEQ ID NO: 465203 - RNA, 18 nt, Artificial Sequence
  Synthetic
acagcugaaaagaagcca

SEQ ID NO: 465204 - RNA, 19 nt, Artificial Sequence
  Synthetic
aacagcugaaaagaagcca

SEQ ID NO: 465205 - RNA, 20 nt, Artificial Sequence
  Synthetic
aaacagcugaaaagaagcca

SEQ ID NO: 465206 - RNA, 21 nt, Artificial Sequence
  Synthetic
gaaacagcugaaaagaagcca

SEQ ID NO: 465207 - RNA, 22 nt, Artificial Sequence
  Synthetic
agaaacagcugaaaagaagcca

SEQ ID NO: 465208 - RNA, 23 nt, Artificial Sequence
  Synthetic
cagaaacagcugaaaagaagcca

SEQ ID NO: 465209 - RNA, 24 nt, Artificial Sequence
  Synthetic
gcagaaacagcugaaaagaagcca

SEQ ID NO: 465210 - RNA, 18 nt, Artificial Sequence
  Synthetic
gaaucuaaaaggaagcca

SEQ ID NO: 465211 - RNA, 19 nt, Artificial Sequence
  Synthetic
ggaaucuaaaaggaagcca

SEQ ID NO: 465212 - RNA, 20 nt, Artificial Sequence
  Synthetic
gggaaucuaaaaggaagcca

SEQ ID NO: 465213 - RNA, 21 nt, Artificial Sequence
  Synthetic
agggaaucuaaaaggaagcca

SEQ ID NO: 465214 - RNA, 22 nt, Artificial Sequence
  Synthetic
cagggaaucuaaaaggaagcca

SEQ ID NO: 465215 - RNA, 23 nt, Artificial Sequence
  Synthetic
gcagggaaucuaaaaggaagcca

SEQ ID NO: 465216 - RNA, 24 nt, Artificial Sequence
  Synthetic
ugcagggaaucuaaaaggaagcca

SEQ ID NO: 465217 - RNA, 18 nt, Artificial Sequence
  Synthetic
ucuuccuuuaggaagcca

SEQ ID NO: 465218 - RNA, 19 nt, Artificial Sequence
  Synthetic
gucuuccuuuaggaagcca

SEQ ID NO: 465219 - RNA, 20 nt, Artificial Sequence
  Synthetic
agucuuccuuuaggaagcca

SEQ ID NO: 465220 - RNA, 21 nt, Artificial Sequence
  Synthetic
aagucuuccuuuaggaagcca

SEQ ID NO: 465221 - RNA, 22 nt, Artificial Sequence
  Synthetic
aaagucuuccuuuaggaagcca

SEQ ID NO: 465222 - RNA, 23 nt, Artificial Sequence
  Synthetic
uaaagucuuccuuuaggaagcca

SEQ ID NO: 465223 - RNA, 24 nt, Artificial Sequence
  Synthetic
auaaagucuuccuuuaggaagcca

SEQ ID NO: 465224 - RNA, 18 nt, Artificial Sequence
  Synthetic
caagcuguggggaagcca

SEQ ID NO: 465225 - RNA, 19 nt, Artificial Sequence
  Synthetic
ccaagcuguggggaagcca

SEQ ID NO: 465226 - RNA, 20 nt, Artificial Sequence
  Synthetic
accaagcuguggggaagcca

SEQ ID NO: 465227 - RNA, 21 nt, Artificial Sequence
  Synthetic
caccaagcuguggggaagcca

SEQ ID NO: 465228 - RNA, 22 nt, Artificial Sequence
  Synthetic
ccaccaagcuguggggaagcca

SEQ ID NO: 465229 - RNA, 23 nt, Artificial Sequence
  Synthetic
accaccaagcuguggggaagcca

SEQ ID NO: 465230 - RNA, 24 nt, Artificial Sequence
  Synthetic
aaccaccaagcuguggggaagcca

SEQ ID NO: 465231 - RNA, 18 nt, Artificial Sequence
  Synthetic
uaaaccaacuggaagcca

SEQ ID NO: 465232 - RNA, 19 nt, Artificial Sequence
  Synthetic
cuaaaccaacuggaagcca

SEQ ID NO: 465233 - RNA, 20 nt, Artificial Sequence
  Synthetic
ccuaaaccaacuggaagcca

SEQ ID NO: 465234 - RNA, 21 nt, Artificial Sequence
  Synthetic
gccuaaaccaacuggaagcca

SEQ ID NO: 465235 - RNA, 22 nt, Artificial Sequence
  Synthetic
ugccuaaaccaacuggaagcca

SEQ ID NO: 465236 - RNA, 23 nt, Artificial Sequence
  Synthetic
gugccuaaaccaacuggaagcca

SEQ ID NO: 465237 - RNA, 24 nt, Artificial Sequence
  Synthetic
ggugccuaaaccaacuggaagcca

SEQ ID NO: 465238 - RNA, 18 nt, Artificial Sequence
  Synthetic
auugucacaaauaagcca

SEQ ID NO: 465239 - RNA, 19 nt, Artificial Sequence
  Synthetic
gauugucacaaauaagcca

SEQ ID NO: 465240 - RNA, 20 nt, Artificial Sequence
  Synthetic
agauugucacaaauaagcca

SEQ ID NO: 465241 - RNA, 21 nt, Artificial Sequence
  Synthetic
aagauugucacaaauaagcca

SEQ ID NO: 465242 - RNA, 22 nt, Artificial Sequence
  Synthetic
caagauugucacaaauaagcca

SEQ ID NO: 465243 - RNA, 23 nt, Artificial Sequence
  Synthetic
ucaagauugucacaaauaagcca

SEQ ID NO: 465244 - RNA, 24 nt, Artificial Sequence
  Synthetic
uucaagauugucacaaauaagcca

SEQ ID NO: 465245 - RNA, 18 nt, Artificial Sequence
  Synthetic
uauucacagcauaagcca

SEQ ID NO: 465246 - RNA, 19 nt, Artificial Sequence
  Synthetic
uuauucacagcauaagcca

SEQ ID NO: 465247 - RNA, 20 nt, Artificial Sequence
  Synthetic
uuuauucacagcauaagcca

SEQ ID NO: 465248 - RNA, 21 nt, Artificial Sequence
  Synthetic
uuuuauucacagcauaagcca

SEQ ID NO: 465249 - RNA, 22 nt, Artificial Sequence
  Synthetic
auuuuauucacagcauaagcca

SEQ ID NO: 465250 - RNA, 23 nt, Artificial Sequence
  Synthetic
uauuuuauucacagcauaagcca

SEQ ID NO: 465251 - RNA, 24 nt, Artificial Sequence
  Synthetic
auauuuuauucacagcauaagcca

SEQ ID NO: 465252 - RNA, 18 nt, Artificial Sequence
  Synthetic
ugaacaauauauaagcca

SEQ ID NO: 465253 - RNA, 19 nt, Artificial Sequence
  Synthetic
uugaacaauauauaagcca

SEQ ID NO: 465254 - RNA, 20 nt, Artificial Sequence
  Synthetic
auugaacaauauauaagcca

SEQ ID NO: 465255 - RNA, 21 nt, Artificial Sequence
  Synthetic
uauugaacaauauauaagcca

SEQ ID NO: 465256 - RNA, 22 nt, Artificial Sequence
  Synthetic
uuauugaacaauauauaagcca

SEQ ID NO: 465257 - RNA, 23 nt, Artificial Sequence
  Synthetic
uuuauugaacaauauauaagcca

SEQ ID NO: 465258 - RNA, 24 nt, Artificial Sequence
  Synthetic
uuuuauugaacaauauauaagcca

SEQ ID NO: 465259 - RNA, 18 nt, Artificial Sequence
  Synthetic
aagauuguaauuaagcca

SEQ ID NO: 465260 - RNA, 19 nt, Artificial Sequence
  Synthetic
aaagauuguaauuaagcca

SEQ ID NO: 465261 - RNA, 20 nt, Artificial Sequence
  Synthetic
aaaagauuguaauuaagcca

SEQ ID NO: 465262 - RNA, 21 nt, Artificial Sequence
  Synthetic
aaaaagauuguaauuaagcca

SEQ ID NO: 465263 - RNA, 22 nt, Artificial Sequence
  Synthetic
aaaaaagauuguaauuaagcca

SEQ ID NO: 465264 - RNA, 23 nt, Artificial Sequence
  Synthetic
aaaaaaagauuguaauuaagcca

SEQ ID NO: 465265 - RNA, 24 nt, Artificial Sequence
  Synthetic
aaaaaaaagauuguaauuaagcca

SEQ ID NO: 465266 - RNA, 18 nt, Artificial Sequence
  Synthetic
ugugguuugguuaagcca

SEQ ID NO: 465267 - RNA, 19 nt, Artificial Sequence
  Synthetic
cugugguuugguuaagcca

SEQ ID NO: 465268 - RNA, 20 nt, Artificial Sequence
  Synthetic
acugugguuugguuaagcca

SEQ ID NO: 465269 - RNA, 21 nt, Artificial Sequence
  Synthetic
aacugugguuugguuaagcca

SEQ ID NO: 465270 - RNA, 22 nt, Artificial Sequence
  Synthetic
aaacugugguuugguuaagcca

SEQ ID NO: 465271 - RNA, 23 nt, Artificial Sequence
  Synthetic
uaaacugugguuugguuaagcca

SEQ ID NO: 465272 - RNA, 24 nt, Artificial Sequence
  Synthetic
auaaacugugguuugguuaagcca

SEQ ID NO: 465273 - RNA, 18 nt, Artificial Sequence
  Synthetic
uucuauuauguuaagcca

SEQ ID NO: 465274 - RNA, 19 nt, Artificial Sequence
  Synthetic
uuucuauuauguuaagcca

SEQ ID NO: 465275 - RNA, 20 nt, Artificial Sequence
  Synthetic
guuucuauuauguuaagcca

SEQ ID NO: 465276 - RNA, 21 nt, Artificial Sequence
  Synthetic
aguuucuauuauguuaagcca

SEQ ID NO: 465277 - RNA, 22 nt, Artificial Sequence
  Synthetic
aaguuucuauuauguuaagcca

SEQ ID NO: 465278 - RNA, 23 nt, Artificial Sequence
  Synthetic
aaaguuucuauuauguuaagcca

SEQ ID NO: 465279 - RNA, 24 nt, Artificial Sequence
  Synthetic
gaaaguuucuauuauguuaagcca

SEQ ID NO: 465280 - RNA, 18 nt, Artificial Sequence
  Synthetic
uccuauuguguuaagcca

SEQ ID NO: 465281 - RNA, 19 nt, Artificial Sequence
  Synthetic
cuccuauuguguuaagcca

SEQ ID NO: 465282 - RNA, 20 nt, Artificial Sequence
  Synthetic
acuccuauuguguuaagcca

SEQ ID NO: 465283 - RNA, 21 nt, Artificial Sequence
  Synthetic
aacuccuauuguguuaagcca

SEQ ID NO: 465284 - RNA, 22 nt, Artificial Sequence
  Synthetic
gaacuccuauuguguuaagcca

SEQ ID NO: 465285 - RNA, 23 nt, Artificial Sequence
  Synthetic
agaacuccuauuguguuaagcca

SEQ ID NO: 465286 - RNA, 24 nt, Artificial Sequence
  Synthetic
aagaacuccuauuguguuaagcca

SEQ ID NO: 465287 - RNA, 18 nt, Artificial Sequence
  Synthetic
uuugaaaauacacagcca

SEQ ID NO: 465288 - RNA, 19 nt, Artificial Sequence
  Synthetic
auuugaaaauacacagcca

SEQ ID NO: 465289 - RNA, 20 nt, Artificial Sequence
  Synthetic
uauuugaaaauacacagcca

SEQ ID NO: 465290 - RNA, 21 nt, Artificial Sequence
  Synthetic
cuauuugaaaauacacagcca

SEQ ID NO: 465291 - RNA, 22 nt, Artificial Sequence
  Synthetic
ccuauuugaaaauacacagcca

SEQ ID NO: 465292 - RNA, 23 nt, Artificial Sequence
  Synthetic
gccuauuugaaaauacacagcca

SEQ ID NO: 465293 - RNA, 24 nt, Artificial Sequence
  Synthetic
agccuauuugaaaauacacagcca

SEQ ID NO: 465294 - RNA, 18 nt, Artificial Sequence
  Synthetic
acuuauucaccacagcca

SEQ ID NO: 465295 - RNA, 19 nt, Artificial Sequence
  Synthetic
cacuuauucaccacagcca

SEQ ID NO: 465296 - RNA, 20 nt, Artificial Sequence
  Synthetic
ccacuuauucaccacagcca

SEQ ID NO: 465297 - RNA, 21 nt, Artificial Sequence
  Synthetic
uccacuuauucaccacagcca

SEQ ID NO: 465298 - RNA, 22 nt, Artificial Sequence
  Synthetic
guccacuuauucaccacagcca

SEQ ID NO: 465299 - RNA, 23 nt, Artificial Sequence
  Synthetic
gguccacuuauucaccacagcca

SEQ ID NO: 465300 - RNA, 24 nt, Artificial Sequence
  Synthetic
ggguccacuuauucaccacagcca

SEQ ID NO: 465301 - RNA, 18 nt, Artificial Sequence
  Synthetic
acgacccaaccccagcca

SEQ ID NO: 465302 - RNA, 19 nt, Artificial Sequence
  Synthetic
uacgacccaaccccagcca

SEQ ID NO: 465303 - RNA, 20 nt, Artificial Sequence
  Synthetic
guacgacccaaccccagcca

SEQ ID NO: 465304 - RNA, 21 nt, Artificial Sequence
  Synthetic
uguacgacccaaccccagcca

SEQ ID NO: 465305 - RNA, 22 nt, Artificial Sequence
  Synthetic
uuguacgacccaaccccagcca

SEQ ID NO: 465306 - RNA, 23 nt, Artificial Sequence
  Synthetic
auuguacgacccaaccccagcca

SEQ ID NO: 465307 - RNA, 24 nt, Artificial Sequence
  Synthetic
gauuguacgacccaaccccagcca

SEQ ID NO: 465308 - RNA, 18 nt, Artificial Sequence
  Synthetic
cuauacuauuugcagcca

SEQ ID NO: 465309 - RNA, 19 nt, Artificial Sequence
  Synthetic
ccuauacuauuugcagcca

SEQ ID NO: 465310 - RNA, 20 nt, Artificial Sequence
  Synthetic
gccuauacuauuugcagcca

SEQ ID NO: 465311 - RNA, 21 nt, Artificial Sequence
  Synthetic
ugccuauacuauuugcagcca

SEQ ID NO: 465312 - RNA, 22 nt, Artificial Sequence
  Synthetic
uugccuauacuauuugcagcca

SEQ ID NO: 465313 - RNA, 23 nt, Artificial Sequence
  Synthetic
uuugccuauacuauuugcagcca

SEQ ID NO: 465314 - RNA, 24 nt, Artificial Sequence
  Synthetic
uuuugccuauacuauuugcagcca

SEQ ID NO: 465315 - RNA, 18 nt, Artificial Sequence
  Synthetic
aucuuuagaacucagcca

SEQ ID NO: 465316 - RNA, 19 nt, Artificial Sequence
  Synthetic
gaucuuuagaacucagcca

SEQ ID NO: 465317 - RNA, 20 nt, Artificial Sequence
  Synthetic
agaucuuuagaacucagcca

SEQ ID NO: 465318 - RNA, 21 nt, Artificial Sequence
  Synthetic
gagaucuuuagaacucagcca

SEQ ID NO: 465319 - RNA, 22 nt, Artificial Sequence
  Synthetic
ugagaucuuuagaacucagcca

SEQ ID NO: 465320 - RNA, 23 nt, Artificial Sequence
  Synthetic
cugagaucuuuagaacucagcca

SEQ ID NO: 465321 - RNA, 24 nt, Artificial Sequence
  Synthetic
ucugagaucuuuagaacucagcca

SEQ ID NO: 465322 - RNA, 18 nt, Artificial Sequence
  Synthetic
uagguaccagcucagcca

SEQ ID NO: 465323 - RNA, 19 nt, Artificial Sequence
  Synthetic
uuagguaccagcucagcca

SEQ ID NO: 465324 - RNA, 20 nt, Artificial Sequence
  Synthetic
cuuagguaccagcucagcca

SEQ ID NO: 465325 - RNA, 21 nt, Artificial Sequence
  Synthetic
ccuuagguaccagcucagcca

SEQ ID NO: 465326 - RNA, 22 nt, Artificial Sequence
  Synthetic
cccuuagguaccagcucagcca

SEQ ID NO: 465327 - RNA, 23 nt, Artificial Sequence
  Synthetic
ccccuuagguaccagcucagcca

SEQ ID NO: 465328 - RNA, 24 nt, Artificial Sequence
  Synthetic
gccccuuagguaccagcucagcca

SEQ ID NO: 465329 - RNA, 18 nt, Artificial Sequence
  Synthetic
gagcaugucagucagcca

SEQ ID NO: 465330 - RNA, 19 nt, Artificial Sequence
  Synthetic
agagcaugucagucagcca

SEQ ID NO: 465331 - RNA, 20 nt, Artificial Sequence
  Synthetic
cagagcaugucagucagcca

SEQ ID NO: 465332 - RNA, 21 nt, Artificial Sequence
  Synthetic
ucagagcaugucagucagcca

SEQ ID NO: 465333 - RNA, 22 nt, Artificial Sequence
  Synthetic
aucagagcaugucagucagcca

SEQ ID NO: 465334 - RNA, 23 nt, Artificial Sequence
  Synthetic
aaucagagcaugucagucagcca

SEQ ID NO: 465335 - RNA, 24 nt, Artificial Sequence
  Synthetic
caaucagagcaugucagucagcca

SEQ ID NO: 465336 - RNA, 18 nt, Artificial Sequence
  Synthetic
accaccgauacagagcca

SEQ ID NO: 465337 - RNA, 19 nt, Artificial Sequence
  Synthetic
aaccaccgauacagagcca

SEQ ID NO: 465338 - RNA, 20 nt, Artificial Sequence
  Synthetic
aaaccaccgauacagagcca

SEQ ID NO: 465339 - RNA, 21 nt, Artificial Sequence
  Synthetic
aaaaccaccgauacagagcca

SEQ ID NO: 465340 - RNA, 22 nt, Artificial Sequence
  Synthetic
gaaaaccaccgauacagagcca

SEQ ID NO: 465341 - RNA, 23 nt, Artificial Sequence
  Synthetic
ugaaaaccaccgauacagagcca

SEQ ID NO: 465342 - RNA, 24 nt, Artificial Sequence
  Synthetic
uugaaaaccaccgauacagagcca

SEQ ID NO: 465343 - RNA, 18 nt, Artificial Sequence
  Synthetic
aacaaauagcuagagcca

SEQ ID NO: 465344 - RNA, 19 nt, Artificial Sequence
  Synthetic
gaacaaauagcuagagcca

SEQ ID NO: 465345 - RNA, 20 nt, Artificial Sequence
  Synthetic
ugaacaaauagcuagagcca

SEQ ID NO: 465346 - RNA, 21 nt, Artificial Sequence
  Synthetic
uugaacaaauagcuagagcca

SEQ ID NO: 465347 - RNA, 22 nt, Artificial Sequence
  Synthetic
uuugaacaaauagcuagagcca

SEQ ID NO: 465348 - RNA, 23 nt, Artificial Sequence
  Synthetic
uuuugaacaaauagcuagagcca

SEQ ID NO: 465349 - RNA, 24 nt, Artificial Sequence
  Synthetic
cuuuugaacaaauagcuagagcca

SEQ ID NO: 465350 - RNA, 18 nt, Artificial Sequence
  Synthetic
augacugaguucgagcca

SEQ ID NO: 465351 - RNA, 19 nt, Artificial Sequence
  Synthetic
caugacugaguucgagcca

SEQ ID NO: 465352 - RNA, 20 nt, Artificial Sequence
  Synthetic
acaugacugaguucgagcca

SEQ ID NO: 465353 - RNA, 21 nt, Artificial Sequence
  Synthetic
uacaugacugaguucgagcca

SEQ ID NO: 465354 - RNA, 22 nt, Artificial Sequence
  Synthetic
cuacaugacugaguucgagcca

SEQ ID NO: 465355 - RNA, 23 nt, Artificial Sequence
  Synthetic
gcuacaugacugaguucgagcca

SEQ ID NO: 465356 - RNA, 24 nt, Artificial Sequence
  Synthetic
ggcuacaugacugaguucgagcca

SEQ ID NO: 465357 - RNA, 18 nt, Artificial Sequence
  Synthetic
aaauaaaucagggagcca

SEQ ID NO: 465358 - RNA, 19 nt, Artificial Sequence
  Synthetic
uaaauaaaucagggagcca

SEQ ID NO: 465359 - RNA, 20 nt, Artificial Sequence
  Synthetic
uuaaauaaaucagggagcca

SEQ ID NO: 465360 - RNA, 21 nt, Artificial Sequence
  Synthetic
auuaaauaaaucagggagcca

SEQ ID NO: 465361 - RNA, 22 nt, Artificial Sequence
  Synthetic
uauuaaauaaaucagggagcca

SEQ ID NO: 465362 - RNA, 23 nt, Artificial Sequence
  Synthetic
auauuaaauaaaucagggagcca

SEQ ID NO: 465363 - RNA, 24 nt, Artificial Sequence
  Synthetic
cauauuaaauaaaucagggagcca

SEQ ID NO: 465364 - RNA, 18 nt, Artificial Sequence
  Synthetic
acuauguugaaugagcca

SEQ ID NO: 465365 - RNA, 19 nt, Artificial Sequence
  Synthetic
aacuauguugaaugagcca

SEQ ID NO: 465366 - RNA, 20 nt, Artificial Sequence
  Synthetic
aaacuauguugaaugagcca

SEQ ID NO: 465367 - RNA, 21 nt, Artificial Sequence
  Synthetic
aaaacuauguugaaugagcca

SEQ ID NO: 465368 - RNA, 22 nt, Artificial Sequence
  Synthetic
gaaaacuauguugaaugagcca

SEQ ID NO: 465369 - RNA, 23 nt, Artificial Sequence
  Synthetic
agaaaacuauguugaaugagcca

SEQ ID NO: 465370 - RNA, 24 nt, Artificial Sequence
  Synthetic
aagaaaacuauguugaaugagcca

SEQ ID NO: 465371 - RNA, 18 nt, Artificial Sequence
  Synthetic
gauaucucuuaugagcca

SEQ ID NO: 465372 - RNA, 19 nt, Artificial Sequence
  Synthetic
ggauaucucuuaugagcca

SEQ ID NO: 465373 - RNA, 20 nt, Artificial Sequence
  Synthetic
aggauaucucuuaugagcca

SEQ ID NO: 465374 - RNA, 21 nt, Artificial Sequence
  Synthetic
aaggauaucucuuaugagcca

SEQ ID NO: 465375 - RNA, 22 nt, Artificial Sequence
  Synthetic
caaggauaucucuuaugagcca

SEQ ID NO: 465376 - RNA, 23 nt, Artificial Sequence
  Synthetic
acaaggauaucucuuaugagcca

SEQ ID NO: 465377 - RNA, 24 nt, Artificial Sequence
  Synthetic
cacaaggauaucucuuaugagcca

SEQ ID NO: 465378 - RNA, 18 nt, Artificial Sequence
  Synthetic
gcauugucaaaauagcca

SEQ ID NO: 465379 - RNA, 19 nt, Artificial Sequence
  Synthetic
agcauugucaaaauagcca

SEQ ID NO: 465380 - RNA, 20 nt, Artificial Sequence
  Synthetic
cagcauugucaaaauagcca

SEQ ID NO: 465381 - RNA, 21 nt, Artificial Sequence
  Synthetic
ucagcauugucaaaauagcca

SEQ ID NO: 465382 - RNA, 22 nt, Artificial Sequence
  Synthetic
cucagcauugucaaaauagcca

SEQ ID NO: 465383 - RNA, 23 nt, Artificial Sequence
  Synthetic
ucucagcauugucaaaauagcca

SEQ ID NO: 465384 - RNA, 24 nt, Artificial Sequence
  Synthetic
cucucagcauugucaaaauagcca

SEQ ID NO: 465385 - RNA, 18 nt, Artificial Sequence
  Synthetic
uuuaaaagaauauagcca

SEQ ID NO: 465386 - RNA, 19 nt, Artificial Sequence
  Synthetic
cuuuaaaagaauauagcca

SEQ ID NO: 465387 - RNA, 20 nt, Artificial Sequence
  Synthetic
ucuuuaaaagaauauagcca

SEQ ID NO: 465388 - RNA, 21 nt, Artificial Sequence
  Synthetic
uucuuuaaaagaauauagcca

SEQ ID NO: 465389 - RNA, 22 nt, Artificial Sequence
  Synthetic
auucuuuaaaagaauauagcca

SEQ ID NO: 465390 - RNA, 23 nt, Artificial Sequence
  Synthetic
uauucuuuaaaagaauauagcca

SEQ ID NO: 465391 - RNA, 24 nt, Artificial Sequence
  Synthetic
cuauucuuuaaaagaauauagcca

SEQ ID NO: 465392 - RNA, 18 nt, Artificial Sequence
  Synthetic
agacuuuagagcuagcca

SEQ ID NO: 465393 - RNA, 19 nt, Artificial Sequence
  Synthetic
aagacuuuagagcuagcca

SEQ ID NO: 465394 - RNA, 20 nt, Artificial Sequence
  Synthetic
uaagacuuuagagcuagcca

SEQ ID NO: 465395 - RNA, 21 nt, Artificial Sequence
  Synthetic
cuaagacuuuagagcuagcca

SEQ ID NO: 465396 - RNA, 22 nt, Artificial Sequence
  Synthetic
gcuaagacuuuagagcuagcca

SEQ ID NO: 465397 - RNA, 23 nt, Artificial Sequence
  Synthetic
ugcuaagacuuuagagcuagcca

SEQ ID NO: 465398 - RNA, 24 nt, Artificial Sequence
  Synthetic
uugcuaagacuuuagagcuagcca

SEQ ID NO: 465399 - RNA, 18 nt, Artificial Sequence
  Synthetic
uucuugauuggcuagcca

SEQ ID NO: 465400 - RNA, 19 nt, Artificial Sequence
  Synthetic
auucuugauuggcuagcca

SEQ ID NO: 465401 - RNA, 20 nt, Artificial Sequence
  Synthetic
uauucuugauuggcuagcca

SEQ ID NO: 465402 - RNA, 21 nt, Artificial Sequence
  Synthetic
cuauucuugauuggcuagcca

SEQ ID NO: 465403 - RNA, 22 nt, Artificial Sequence
  Synthetic
acuauucuugauuggcuagcca

SEQ ID NO: 465404 - RNA, 23 nt, Artificial Sequence
  Synthetic
uacuauucuugauuggcuagcca

SEQ ID NO: 465405 - RNA, 24 nt, Artificial Sequence
  Synthetic
auacuauucuugauuggcuagcca

SEQ ID NO: 465406 - RNA, 18 nt, Artificial Sequence
  Synthetic
aguucuaaaugcuagcca

SEQ ID NO: 465407 - RNA, 19 nt, Artificial Sequence
  Synthetic
uaguucuaaaugcuagcca

SEQ ID NO: 465408 - RNA, 20 nt, Artificial Sequence
  Synthetic
auaguucuaaaugcuagcca

SEQ ID NO: 465409 - RNA, 21 nt, Artificial Sequence
  Synthetic
uauaguucuaaaugcuagcca

SEQ ID NO: 465410 - RNA, 22 nt, Artificial Sequence
  Synthetic
cuauaguucuaaaugcuagcca

SEQ ID NO: 465411 - RNA, 23 nt, Artificial Sequence
  Synthetic
gcuauaguucuaaaugcuagcca

SEQ ID NO: 465412 - RNA, 24 nt, Artificial Sequence
  Synthetic
agcuauaguucuaaaugcuagcca

SEQ ID NO: 465413 - RNA, 18 nt, Artificial Sequence
  Synthetic
caggacuguagguagcca

SEQ ID NO: 465414 - RNA, 19 nt, Artificial Sequence
  Synthetic
gcaggacuguagguagcca

SEQ ID NO: 465415 - RNA, 20 nt, Artificial Sequence
  Synthetic
agcaggacuguagguagcca

SEQ ID NO: 465416 - RNA, 21 nt, Artificial Sequence
  Synthetic
cagcaggacuguagguagcca

SEQ ID NO: 465417 - RNA, 22 nt, Artificial Sequence
  Synthetic
gcagcaggacuguagguagcca

SEQ ID NO: 465418 - RNA, 23 nt, Artificial Sequence
  Synthetic
agcagcaggacuguagguagcca

SEQ ID NO: 465419 - RNA, 24 nt, Artificial Sequence
  Synthetic
cagcagcaggacuguagguagcca

SEQ ID NO: 465420 - RNA, 18 nt, Artificial Sequence
  Synthetic
aaggguacaguguagcca

SEQ ID NO: 465421 - RNA, 19 nt, Artificial Sequence
  Synthetic
aaaggguacaguguagcca

SEQ ID NO: 465422 - RNA, 20 nt, Artificial Sequence
  Synthetic
caaaggguacaguguagcca

SEQ ID NO: 465423 - RNA, 21 nt, Artificial Sequence
  Synthetic
ucaaaggguacaguguagcca

SEQ ID NO: 465424 - RNA, 22 nt, Artificial Sequence
  Synthetic
uucaaaggguacaguguagcca

SEQ ID NO: 465425 - RNA, 23 nt, Artificial Sequence
  Synthetic
guucaaaggguacaguguagcca

SEQ ID NO: 465426 - RNA, 24 nt, Artificial Sequence
  Synthetic
gguucaaaggguacaguguagcca

SEQ ID NO: 465427 - RNA, 18 nt, Artificial Sequence
  Synthetic
augaugcugaauuagcca

SEQ ID NO: 465428 - RNA, 19 nt, Artificial Sequence
  Synthetic
gaugaugcugaauuagcca

SEQ ID NO: 465429 - RNA, 20 nt, Artificial Sequence
  Synthetic
ugaugaugcugaauuagcca

SEQ ID NO: 465430 - RNA, 21 nt, Artificial Sequence
  Synthetic
augaugaugcugaauuagcca

SEQ ID NO: 465431 - RNA, 22 nt, Artificial Sequence
  Synthetic
gaugaugaugcugaauuagcca

SEQ ID NO: 465432 - RNA, 23 nt, Artificial Sequence
  Synthetic
ggaugaugaugcugaauuagcca

SEQ ID NO: 465433 - RNA, 24 nt, Artificial Sequence
  Synthetic
aggaugaugaugcugaauuagcca

SEQ ID NO: 465434 - RNA, 18 nt, Artificial Sequence
  Synthetic
uaaaagaaauauuagcca

SEQ ID NO: 465435 - RNA, 19 nt, Artificial Sequence
  Synthetic
uuaaaagaaauauuagcca

SEQ ID NO: 465436 - RNA, 20 nt, Artificial Sequence
  Synthetic
cuuaaaagaaauauuagcca

SEQ ID NO: 465437 - RNA, 21 nt, Artificial Sequence
  Synthetic
ucuuaaaagaaauauuagcca

SEQ ID NO: 465438 - RNA, 22 nt, Artificial Sequence
  Synthetic
cucuuaaaagaaauauuagcca

SEQ ID NO: 465439 - RNA, 23 nt, Artificial Sequence
  Synthetic
acucuuaaaagaaauauuagcca

SEQ ID NO: 465440 - RNA, 24 nt, Artificial Sequence
  Synthetic
uacucuuaaaagaaauauuagcca

SEQ ID NO: 465441 - RNA, 18 nt, Artificial Sequence
  Synthetic
ggcagcagaauuuagcca

SEQ ID NO: 465442 - RNA, 19 nt, Artificial Sequence
  Synthetic
aggcagcagaauuuagcca

SEQ ID NO: 465443 - RNA, 20 nt, Artificial Sequence
  Synthetic
aaggcagcagaauuuagcca

SEQ ID NO: 465444 - RNA, 21 nt, Artificial Sequence
  Synthetic
aaaggcagcagaauuuagcca

SEQ ID NO: 465445 - RNA, 22 nt, Artificial Sequence
  Synthetic
caaaggcagcagaauuuagcca

SEQ ID NO: 465446 - RNA, 23 nt, Artificial Sequence
  Synthetic
gcaaaggcagcagaauuuagcca

SEQ ID NO: 465447 - RNA, 24 nt, Artificial Sequence
  Synthetic
agcaaaggcagcagaauuuagcca

SEQ ID NO: 465448 - RNA, 18 nt, Artificial Sequence
  Synthetic
uccuguuuguuuuagcca

SEQ ID NO: 465449 - RNA, 19 nt, Artificial Sequence
  Synthetic
cuccuguuuguuuuagcca

SEQ ID NO: 465450 - RNA, 20 nt, Artificial Sequence
  Synthetic
gcuccuguuuguuuuagcca

SEQ ID NO: 465451 - RNA, 21 nt, Artificial Sequence
  Synthetic
agcuccuguuuguuuuagcca

SEQ ID NO: 465452 - RNA, 22 nt, Artificial Sequence
  Synthetic
aagcuccuguuuguuuuagcca

SEQ ID NO: 465453 - RNA, 23 nt, Artificial Sequence
  Synthetic
aaagcuccuguuuguuuuagcca

SEQ ID NO: 465454 - RNA, 24 nt, Artificial Sequence
  Synthetic
aaaagcuccuguuuguuuuagcca

SEQ ID NO: 465455 - RNA, 18 nt, Artificial Sequence
  Synthetic
cuguacccugcaacgcca

SEQ ID NO: 465456 - RNA, 19 nt, Artificial Sequence
  Synthetic
gcuguacccugcaacgcca

SEQ ID NO: 465457 - RNA, 20 nt, Artificial Sequence
  Synthetic
ggcuguacccugcaacgcca

SEQ ID NO: 465458 - RNA, 21 nt, Artificial Sequence
  Synthetic
gggcuguacccugcaacgcca

SEQ ID NO: 465459 - RNA, 22 nt, Artificial Sequence
  Synthetic
ggggcuguacccugcaacgcca

SEQ ID NO: 465460 - RNA, 23 nt, Artificial Sequence
  Synthetic
gggggcuguacccugcaacgcca

SEQ ID NO: 465461 - RNA, 24 nt, Artificial Sequence
  Synthetic
agggggcuguacccugcaacgcca

SEQ ID NO: 465462 - RNA, 18 nt, Artificial Sequence
  Synthetic
aauauuuuacuuccgcca

SEQ ID NO: 465463 - RNA, 19 nt, Artificial Sequence
  Synthetic
aaauauuuuacuuccgcca

SEQ ID NO: 465464 - RNA, 20 nt, Artificial Sequence
  Synthetic
uaaauauuuuacuuccgcca

SEQ ID NO: 465465 - RNA, 21 nt, Artificial Sequence
  Synthetic
cuaaauauuuuacuuccgcca

SEQ ID NO: 465466 - RNA, 22 nt, Artificial Sequence
  Synthetic
gcuaaauauuuuacuuccgcca

SEQ ID NO: 465467 - RNA, 23 nt, Artificial Sequence
  Synthetic
cgcuaaauauuuuacuuccgcca

SEQ ID NO: 465468 - RNA, 24 nt, Artificial Sequence
  Synthetic
ccgcuaaauauuuuacuuccgcca

SEQ ID NO: 465469 - RNA, 18 nt, Artificial Sequence
  Synthetic
acugaagaaaaagcgcca

SEQ ID NO: 465470 - RNA, 19 nt, Artificial Sequence
  Synthetic
aacugaagaaaaagcgcca

SEQ ID NO: 465471 - RNA, 20 nt, Artificial Sequence
  Synthetic
aaacugaagaaaaagcgcca

SEQ ID NO: 465472 - RNA, 21 nt, Artificial Sequence
  Synthetic
gaaacugaagaaaaagcgcca

SEQ ID NO: 465473 - RNA, 22 nt, Artificial Sequence
  Synthetic
ggaaacugaagaaaaagcgcca

SEQ ID NO: 465474 - RNA, 23 nt, Artificial Sequence
  Synthetic
aggaaacugaagaaaaagcgcca

SEQ ID NO: 465475 - RNA, 24 nt, Artificial Sequence
  Synthetic
gaggaaacugaagaaaaagcgcca

SEQ ID NO: 465476 - RNA, 18 nt, Artificial Sequence
  Synthetic
uugaaauguucaaggcca

SEQ ID NO: 465477 - RNA, 19 nt, Artificial Sequence
  Synthetic
cuugaaauguucaaggcca

SEQ ID NO: 465478 - RNA, 20 nt, Artificial Sequence
  Synthetic
acuugaaauguucaaggcca

SEQ ID NO: 465479 - RNA, 21 nt, Artificial Sequence
  Synthetic
uacuugaaauguucaaggcca

SEQ ID NO: 465480 - RNA, 22 nt, Artificial Sequence
  Synthetic
auacuugaaauguucaaggcca

SEQ ID NO: 465481 - RNA, 23 nt, Artificial Sequence
  Synthetic
cauacuugaaauguucaaggcca

SEQ ID NO: 465482 - RNA, 24 nt, Artificial Sequence
  Synthetic
gcauacuugaaauguucaaggcca

SEQ ID NO: 465483 - RNA, 18 nt, Artificial Sequence
  Synthetic
gagguccuuggaaggcca

SEQ ID NO: 465484 - RNA, 19 nt, Artificial Sequence
  Synthetic
ugagguccuuggaaggcca

SEQ ID NO: 465485 - RNA, 20 nt, Artificial Sequence
  Synthetic
uugagguccuuggaaggcca

SEQ ID NO: 465486 - RNA, 21 nt, Artificial Sequence
  Synthetic
cuugagguccuuggaaggcca

SEQ ID NO: 465487 - RNA, 22 nt, Artificial Sequence
  Synthetic
ucuugagguccuuggaaggcca

SEQ ID NO: 465488 - RNA, 23 nt, Artificial Sequence
  Synthetic
aucuugagguccuuggaaggcca

SEQ ID NO: 465489 - RNA, 24 nt, Artificial Sequence
  Synthetic
caucuugagguccuuggaaggcca

SEQ ID NO: 465490 - RNA, 18 nt, Artificial Sequence
  Synthetic
acaucauguugaaggcca

SEQ ID NO: 465491 - RNA, 19 nt, Artificial Sequence
  Synthetic
gacaucauguugaaggcca

SEQ ID NO: 465492 - RNA, 20 nt, Artificial Sequence
  Synthetic
ggacaucauguugaaggcca

SEQ ID NO: 465493 - RNA, 21 nt, Artificial Sequence
  Synthetic
aggacaucauguugaaggcca

SEQ ID NO: 465494 - RNA, 22 nt, Artificial Sequence
  Synthetic
aaggacaucauguugaaggcca

SEQ ID NO: 465495 - RNA, 23 nt, Artificial Sequence
  Synthetic
uaaggacaucauguugaaggcca

SEQ ID NO: 465496 - RNA, 24 nt, Artificial Sequence
  Synthetic
auaaggacaucauguugaaggcca

SEQ ID NO: 465497 - RNA, 18 nt, Artificial Sequence
  Synthetic
uagugcuuugggaggcca

SEQ ID NO: 465498 - RNA, 19 nt, Artificial Sequence
  Synthetic
cuagugcuuugggaggcca

SEQ ID NO: 465499 - RNA, 20 nt, Artificial Sequence
  Synthetic
ccuagugcuuugggaggcca

SEQ ID NO: 465500 - RNA, 21 nt, Artificial Sequence
  Synthetic
uccuagugcuuugggaggcca

SEQ ID NO: 465501 - RNA, 22 nt, Artificial Sequence
  Synthetic
auccuagugcuuugggaggcca

SEQ ID NO: 465502 - RNA, 23 nt, Artificial Sequence
  Synthetic
aauccuagugcuuugggaggcca

SEQ ID NO: 465503 - RNA, 24 nt, Artificial Sequence
  Synthetic
uaauccuagugcuuugggaggcca

SEQ ID NO: 465504 - RNA, 18 nt, Artificial Sequence
  Synthetic
aagauuaaaaugaggcca

SEQ ID NO: 465505 - RNA, 19 nt, Artificial Sequence
  Synthetic
gaagauuaaaaugaggcca

SEQ ID NO: 465506 - RNA, 20 nt, Artificial Sequence
  Synthetic
ugaagauuaaaaugaggcca

SEQ ID NO: 465507 - RNA, 21 nt, Artificial Sequence
  Synthetic
uugaagauuaaaaugaggcca

SEQ ID NO: 465508 - RNA, 22 nt, Artificial Sequence
  Synthetic
auugaagauuaaaaugaggcca

SEQ ID NO: 465509 - RNA, 23 nt, Artificial Sequence
  Synthetic
cauugaagauuaaaaugaggcca

SEQ ID NO: 465510 - RNA, 24 nt, Artificial Sequence
  Synthetic
ucauugaagauuaaaaugaggcca

SEQ ID NO: 465511 - RNA, 18 nt, Artificial Sequence
  Synthetic
uucuaccacaugaggcca

SEQ ID NO: 465512 - RNA, 19 nt, Artificial Sequence
  Synthetic
guucuaccacaugaggcca

SEQ ID NO: 465513 - RNA, 20 nt, Artificial Sequence
  Synthetic
uguucuaccacaugaggcca

SEQ ID NO: 465514 - RNA, 21 nt, Artificial Sequence
  Synthetic
auguucuaccacaugaggcca

SEQ ID NO: 465515 - RNA, 22 nt, Artificial Sequence
  Synthetic
gauguucuaccacaugaggcca

SEQ ID NO: 465516 - RNA, 23 nt, Artificial Sequence
  Synthetic
ugauguucuaccacaugaggcca

SEQ ID NO: 465517 - RNA, 24 nt, Artificial Sequence
  Synthetic
augauguucuaccacaugaggcca

SEQ ID NO: 465518 - RNA, 18 nt, Artificial Sequence
  Synthetic
ccacagaucucuaggcca

SEQ ID NO: 465519 - RNA, 19 nt, Artificial Sequence
  Synthetic
uccacagaucucuaggcca

SEQ ID NO: 465520 - RNA, 20 nt, Artificial Sequence
  Synthetic
uuccacagaucucuaggcca

SEQ ID NO: 465521 - RNA, 21 nt, Artificial Sequence
  Synthetic
uuuccacagaucucuaggcca

SEQ ID NO: 465522 - RNA, 22 nt, Artificial Sequence
  Synthetic
auuuccacagaucucuaggcca

SEQ ID NO: 465523 - RNA, 23 nt, Artificial Sequence
  Synthetic
aauuuccacagaucucuaggcca

SEQ ID NO: 465524 - RNA, 24 nt, Artificial Sequence
  Synthetic
aaauuuccacagaucucuaggcca

SEQ ID NO: 465525 - RNA, 18 nt, Artificial Sequence
  Synthetic
uuagaaaaaugacggcca

SEQ ID NO: 465526 - RNA, 19 nt, Artificial Sequence
  Synthetic
uuuagaaaaaugacggcca

SEQ ID NO: 465527 - RNA, 20 nt, Artificial Sequence
  Synthetic
cuuuagaaaaaugacggcca

SEQ ID NO: 465528 - RNA, 21 nt, Artificial Sequence
  Synthetic
acuuuagaaaaaugacggcca

SEQ ID NO: 465529 - RNA, 22 nt, Artificial Sequence
  Synthetic
cacuuuagaaaaaugacggcca

SEQ ID NO: 465530 - RNA, 23 nt, Artificial Sequence
  Synthetic
acacuuuagaaaaaugacggcca

SEQ ID NO: 465531 - RNA, 24 nt, Artificial Sequence
  Synthetic
uacacuuuagaaaaaugacggcca

SEQ ID NO: 465532 - RNA, 18 nt, Artificial Sequence
  Synthetic
aggguaggaggagggcca

SEQ ID NO: 465533 - RNA, 19 nt, Artificial Sequence
  Synthetic
aaggguaggaggagggcca

SEQ ID NO: 465534 - RNA, 20 nt, Artificial Sequence
  Synthetic
gaaggguaggaggagggcca

SEQ ID NO: 465535 - RNA, 21 nt, Artificial Sequence
  Synthetic
ggaaggguaggaggagggcca

SEQ ID NO: 465536 - RNA, 22 nt, Artificial Sequence
  Synthetic
uggaaggguaggaggagggcca

SEQ ID NO: 465537 - RNA, 23 nt, Artificial Sequence
  Synthetic
uuggaaggguaggaggagggcca

SEQ ID NO: 465538 - RNA, 24 nt, Artificial Sequence
  Synthetic
cuuggaaggguaggaggagggcca

SEQ ID NO: 465539 - RNA, 18 nt, Artificial Sequence
  Synthetic
ucaugguggugagggcca

SEQ ID NO: 465540 - RNA, 19 nt, Artificial Sequence
  Synthetic
cucaugguggugagggcca

SEQ ID NO: 465541 - RNA, 20 nt, Artificial Sequence
  Synthetic
ccucaugguggugagggcca

SEQ ID NO: 465542 - RNA, 21 nt, Artificial Sequence
  Synthetic
cccucaugguggugagggcca

SEQ ID NO: 465543 - RNA, 22 nt, Artificial Sequence
  Synthetic
acccucaugguggugagggcca

SEQ ID NO: 465544 - RNA, 23 nt, Artificial Sequence
  Synthetic
aacccucaugguggugagggcca

SEQ ID NO: 465545 - RNA, 24 nt, Artificial Sequence
  Synthetic
gaacccucaugguggugagggcca

SEQ ID NO: 465546 - RNA, 18 nt, Artificial Sequence
  Synthetic
agcuuuacgaaugggcca

SEQ ID NO: 465547 - RNA, 19 nt, Artificial Sequence
  Synthetic
uagcuuuacgaaugggcca

SEQ ID NO: 465548 - RNA, 20 nt, Artificial Sequence
  Synthetic
auagcuuuacgaaugggcca

SEQ ID NO: 465549 - RNA, 21 nt, Artificial Sequence
  Synthetic
uauagcuuuacgaaugggcca

SEQ ID NO: 465550 - RNA, 22 nt, Artificial Sequence
  Synthetic
uuauagcuuuacgaaugggcca

SEQ ID NO: 465551 - RNA, 23 nt, Artificial Sequence
  Synthetic
uuuauagcuuuacgaaugggcca

SEQ ID NO: 465552 - RNA, 24 nt, Artificial Sequence
  Synthetic
auuuauagcuuuacgaaugggcca

SEQ ID NO: 465553 - RNA, 18 nt, Artificial Sequence
  Synthetic
uccuuauuaucugggcca

SEQ ID NO: 465554 - RNA, 19 nt, Artificial Sequence
  Synthetic
guccuuauuaucugggcca

SEQ ID NO: 465555 - RNA, 20 nt, Artificial Sequence
  Synthetic
aguccuuauuaucugggcca

SEQ ID NO: 465556 - RNA, 21 nt, Artificial Sequence
  Synthetic
aaguccuuauuaucugggcca

SEQ ID NO: 465557 - RNA, 22 nt, Artificial Sequence
  Synthetic
caaguccuuauuaucugggcca

SEQ ID NO: 465558 - RNA, 23 nt, Artificial Sequence
  Synthetic
ucaaguccuuauuaucugggcca

SEQ ID NO: 465559 - RNA, 24 nt, Artificial Sequence
  Synthetic
uucaaguccuuauuaucugggcca

SEQ ID NO: 465560 - RNA, 18 nt, Artificial Sequence
  Synthetic
cauuucugcagugggcca

SEQ ID NO: 465561 - RNA, 19 nt, Artificial Sequence
  Synthetic
ucauuucugcagugggcca

SEQ ID NO: 465562 - RNA, 20 nt, Artificial Sequence
  Synthetic
cucauuucugcagugggcca

SEQ ID NO: 465563 - RNA, 21 nt, Artificial Sequence
  Synthetic
ccucauuucugcagugggcca

SEQ ID NO: 465564 - RNA, 22 nt, Artificial Sequence
  Synthetic
cccucauuucugcagugggcca

SEQ ID NO: 465565 - RNA, 23 nt, Artificial Sequence
  Synthetic
ucccucauuucugcagugggcca

SEQ ID NO: 465566 - RNA, 24 nt, Artificial Sequence
  Synthetic
uucccucauuucugcagugggcca

SEQ ID NO: 465567 - RNA, 18 nt, Artificial Sequence
  Synthetic
ugguccugccuugggcca

SEQ ID NO: 465568 - RNA, 19 nt, Artificial Sequence
  Synthetic
uugguccugccuugggcca

SEQ ID NO: 465569 - RNA, 20 nt, Artificial Sequence
  Synthetic
uuugguccugccuugggcca

SEQ ID NO: 465570 - RNA, 21 nt, Artificial Sequence
  Synthetic
uuuugguccugccuugggcca

SEQ ID NO: 465571 - RNA, 22 nt, Artificial Sequence
  Synthetic
uuuuugguccugccuugggcca

SEQ ID NO: 465572 - RNA, 23 nt, Artificial Sequence
  Synthetic
auuuuugguccugccuugggcca

SEQ ID NO: 465573 - RNA, 24 nt, Artificial Sequence
  Synthetic
cauuuuugguccugccuugggcca

SEQ ID NO: 465574 - RNA, 18 nt, Artificial Sequence
  Synthetic
ggaaaauccuaauggcca

SEQ ID NO: 465575 - RNA, 19 nt, Artificial Sequence
  Synthetic
uggaaaauccuaauggcca

SEQ ID NO: 465576 - RNA, 20 nt, Artificial Sequence
  Synthetic
guggaaaauccuaauggcca

SEQ ID NO: 465577 - RNA, 21 nt, Artificial Sequence
  Synthetic
aguggaaaauccuaauggcca

SEQ ID NO: 465578 - RNA, 22 nt, Artificial Sequence
  Synthetic
aaguggaaaauccuaauggcca

SEQ ID NO: 465579 - RNA, 23 nt, Artificial Sequence
  Synthetic
uaaguggaaaauccuaauggcca

SEQ ID NO: 465580 - RNA, 24 nt, Artificial Sequence
  Synthetic
auaaguggaaaauccuaauggcca

SEQ ID NO: 465581 - RNA, 18 nt, Artificial Sequence
  Synthetic
ucucauggcaacuggcca

SEQ ID NO: 465582 - RNA, 19 nt, Artificial Sequence
  Synthetic
cucucauggcaacuggcca

SEQ ID NO: 465583 - RNA, 20 nt, Artificial Sequence
  Synthetic
gcucucauggcaacuggcca

SEQ ID NO: 465584 - RNA, 21 nt, Artificial Sequence
  Synthetic
ugcucucauggcaacuggcca

SEQ ID NO: 465585 - RNA, 22 nt, Artificial Sequence
  Synthetic
gugcucucauggcaacuggcca

SEQ ID NO: 465586 - RNA, 23 nt, Artificial Sequence
  Synthetic
ugugcucucauggcaacuggcca

SEQ ID NO: 465587 - RNA, 24 nt, Artificial Sequence
  Synthetic
gugugcucucauggcaacuggcca

SEQ ID NO: 465588 - RNA, 18 nt, Artificial Sequence
  Synthetic
augaguagcagcuggcca

SEQ ID NO: 465589 - RNA, 19 nt, Artificial Sequence
  Synthetic
gaugaguagcagcuggcca

SEQ ID NO: 465590 - RNA, 20 nt, Artificial Sequence
  Synthetic
ggaugaguagcagcuggcca

SEQ ID NO: 465591 - RNA, 21 nt, Artificial Sequence
  Synthetic
gggaugaguagcagcuggcca

SEQ ID NO: 465592 - RNA, 22 nt, Artificial Sequence
  Synthetic
agggaugaguagcagcuggcca

SEQ ID NO: 465593 - RNA, 23 nt, Artificial Sequence
  Synthetic
gagggaugaguagcagcuggcca

SEQ ID NO: 465594 - RNA, 24 nt, Artificial Sequence
  Synthetic
ugagggaugaguagcagcuggcca

SEQ ID NO: 465595 - RNA, 18 nt, Artificial Sequence
  Synthetic
cagccaagaugcuggcca

SEQ ID NO: 465596 - RNA, 19 nt, Artificial Sequence
  Synthetic
ucagccaagaugcuggcca

SEQ ID NO: 465597 - RNA, 20 nt, Artificial Sequence
  Synthetic
aucagccaagaugcuggcca

SEQ ID NO: 465598 - RNA, 21 nt, Artificial Sequence
  Synthetic
aaucagccaagaugcuggcca

SEQ ID NO: 465599 - RNA, 22 nt, Artificial Sequence
  Synthetic
caaucagccaagaugcuggcca

SEQ ID NO: 465600 - RNA, 23 nt, Artificial Sequence
  Synthetic
ccaaucagccaagaugcuggcca

SEQ ID NO: 465601 - RNA, 24 nt, Artificial Sequence
  Synthetic
gccaaucagccaagaugcuggcca

SEQ ID NO: 465602 - RNA, 18 nt, Artificial Sequence
  Synthetic
gugacagacaucuggcca

SEQ ID NO: 465603 - RNA, 19 nt, Artificial Sequence
  Synthetic
ugugacagacaucuggcca

SEQ ID NO: 465604 - RNA, 20 nt, Artificial Sequence
  Synthetic
augugacagacaucuggcca

SEQ ID NO: 465605 - RNA, 21 nt, Artificial Sequence
  Synthetic
caugugacagacaucuggcca

SEQ ID NO: 465606 - RNA, 22 nt, Artificial Sequence
  Synthetic
ccaugugacagacaucuggcca

SEQ ID NO: 465607 - RNA, 23 nt, Artificial Sequence
  Synthetic
gccaugugacagacaucuggcca

SEQ ID NO: 465608 - RNA, 24 nt, Artificial Sequence
  Synthetic
ggccaugugacagacaucuggcca

SEQ ID NO: 465609 - RNA, 18 nt, Artificial Sequence
  Synthetic
caaugguuucucuggcca

SEQ ID NO: 465610 - RNA, 19 nt, Artificial Sequence
  Synthetic
gcaaugguuucucuggcca

SEQ ID NO: 465611 - RNA, 20 nt, Artificial Sequence
  Synthetic
ggcaaugguuucucuggcca

SEQ ID NO: 465612 - RNA, 21 nt, Artificial Sequence
  Synthetic
aggcaaugguuucucuggcca

SEQ ID NO: 465613 - RNA, 22 nt, Artificial Sequence
  Synthetic
gaggcaaugguuucucuggcca

SEQ ID NO: 465614 - RNA, 23 nt, Artificial Sequence
  Synthetic
ggaggcaaugguuucucuggcca

SEQ ID NO: 465615 - RNA, 24 nt, Artificial Sequence
  Synthetic
aggaggcaaugguuucucuggcca

SEQ ID NO: 465616 - RNA, 18 nt, Artificial Sequence
  Synthetic
ugccuggaggaguggcca

SEQ ID NO: 465617 - RNA, 19 nt, Artificial Sequence
  Synthetic
gugccuggaggaguggcca

SEQ ID NO: 465618 - RNA, 20 nt, Artificial Sequence
  Synthetic
ugugccuggaggaguggcca

SEQ ID NO: 465619 - RNA, 21 nt, Artificial Sequence
  Synthetic
augugccuggaggaguggcca

SEQ ID NO: 465620 - RNA, 22 nt, Artificial Sequence
  Synthetic
aaugugccuggaggaguggcca

SEQ ID NO: 465621 - RNA, 23 nt, Artificial Sequence
  Synthetic
gaaugugccuggaggaguggcca

SEQ ID NO: 465622 - RNA, 24 nt, Artificial Sequence
  Synthetic
ggaaugugccuggaggaguggcca

SEQ ID NO: 465623 - RNA, 18 nt, Artificial Sequence
  Synthetic
agacuauuaggguggcca

SEQ ID NO: 465624 - RNA, 19 nt, Artificial Sequence
  Synthetic
cagacuauuaggguggcca

SEQ ID NO: 465625 - RNA, 20 nt, Artificial Sequence
  Synthetic
ucagacuauuaggguggcca

SEQ ID NO: 465626 - RNA, 21 nt, Artificial Sequence
  Synthetic
aucagacuauuaggguggcca

SEQ ID NO: 465627 - RNA, 22 nt, Artificial Sequence
  Synthetic
uaucagacuauuaggguggcca

SEQ ID NO: 465628 - RNA, 23 nt, Artificial Sequence
  Synthetic
cuaucagacuauuaggguggcca

SEQ ID NO: 465629 - RNA, 24 nt, Artificial Sequence
  Synthetic
acuaucagacuauuaggguggcca

SEQ ID NO: 465630 - RNA, 18 nt, Artificial Sequence
  Synthetic
ugcuguuacauguggcca

SEQ ID NO: 465631 - RNA, 19 nt, Artificial Sequence
  Synthetic
cugcuguuacauguggcca

SEQ ID NO: 465632 - RNA, 20 nt, Artificial Sequence
  Synthetic
ucugcuguuacauguggcca

SEQ ID NO: 465633 - RNA, 21 nt, Artificial Sequence
  Synthetic
cucugcuguuacauguggcca

SEQ ID NO: 465634 - RNA, 22 nt, Artificial Sequence
  Synthetic
ccucugcuguuacauguggcca

SEQ ID NO: 465635 - RNA, 23 nt, Artificial Sequence
  Synthetic
cccucugcuguuacauguggcca

SEQ ID NO: 465636 - RNA, 24 nt, Artificial Sequence
  Synthetic
ccccucugcuguuacauguggcca

SEQ ID NO: 465637 - RNA, 18 nt, Artificial Sequence
  Synthetic
acucuaugugcuuggcca

SEQ ID NO: 465638 - RNA, 19 nt, Artificial Sequence
  Synthetic
uacucuaugugcuuggcca

SEQ ID NO: 465639 - RNA, 20 nt, Artificial Sequence
  Synthetic
cuacucuaugugcuuggcca

SEQ ID NO: 465640 - RNA, 21 nt, Artificial Sequence
  Synthetic
ucuacucuaugugcuuggcca

SEQ ID NO: 465641 - RNA, 22 nt, Artificial Sequence
  Synthetic
uucuacucuaugugcuuggcca

SEQ ID NO: 465642 - RNA, 23 nt, Artificial Sequence
  Synthetic
cuucuacucuaugugcuuggcca

SEQ ID NO: 465643 - RNA, 24 nt, Artificial Sequence
  Synthetic
ucuucuacucuaugugcuuggcca

SEQ ID NO: 465644 - RNA, 18 nt, Artificial Sequence
  Synthetic
ugcuuguaaucuuggcca

SEQ ID NO: 465645 - RNA, 19 nt, Artificial Sequence
  Synthetic
uugcuuguaaucuuggcca

SEQ ID NO: 465646 - RNA, 20 nt, Artificial Sequence
  Synthetic
guugcuuguaaucuuggcca

SEQ ID NO: 465647 - RNA, 21 nt, Artificial Sequence
  Synthetic
uguugcuuguaaucuuggcca

SEQ ID NO: 465648 - RNA, 22 nt, Artificial Sequence
  Synthetic
auguugcuuguaaucuuggcca

SEQ ID NO: 465649 - RNA, 23 nt, Artificial Sequence
  Synthetic
uauguugcuuguaaucuuggcca

SEQ ID NO: 465650 - RNA, 24 nt, Artificial Sequence
  Synthetic
auauguugcuuguaaucuuggcca

SEQ ID NO: 465651 - RNA, 18 nt, Artificial Sequence
  Synthetic
uaugccuggcuuuggcca

SEQ ID NO: 465652 - RNA, 19 nt, Artificial Sequence
  Synthetic
auaugccuggcuuuggcca

SEQ ID NO: 465653 - RNA, 20 nt, Artificial Sequence
  Synthetic
cauaugccuggcuuuggcca

SEQ ID NO: 465654 - RNA, 21 nt, Artificial Sequence
  Synthetic
ccauaugccuggcuuuggcca

SEQ ID NO: 465655 - RNA, 22 nt, Artificial Sequence
  Synthetic
gccauaugccuggcuuuggcca

SEQ ID NO: 465656 - RNA, 23 nt, Artificial Sequence
  Synthetic
ggccauaugccuggcuuuggcca

SEQ ID NO: 465657 - RNA, 24 nt, Artificial Sequence
  Synthetic
uggccauaugccuggcuuuggcca

SEQ ID NO: 465658 - RNA, 18 nt, Artificial Sequence
  Synthetic
gcuaaacaucuuuggcca

SEQ ID NO: 465659 - RNA, 19 nt, Artificial Sequence
  Synthetic
ugcuaaacaucuuuggcca

SEQ ID NO: 465660 - RNA, 20 nt, Artificial Sequence
  Synthetic
gugcuaaacaucuuuggcca

SEQ ID NO: 465661 - RNA, 21 nt, Artificial Sequence
  Synthetic
agugcuaaacaucuuuggcca

SEQ ID NO: 465662 - RNA, 22 nt, Artificial Sequence
  Synthetic
aagugcuaaacaucuuuggcca

SEQ ID NO: 465663 - RNA, 23 nt, Artificial Sequence
  Synthetic
aaagugcuaaacaucuuuggcca

SEQ ID NO: 465664 - RNA, 24 nt, Artificial Sequence
  Synthetic
aaaagugcuaaacaucuuuggcca

SEQ ID NO: 465665 - RNA, 18 nt, Artificial Sequence
  Synthetic
auccuaugugaaaugcca

SEQ ID NO: 465666 - RNA, 19 nt, Artificial Sequence
  Synthetic
aauccuaugugaaaugcca

SEQ ID NO: 465667 - RNA, 20 nt, Artificial Sequence
  Synthetic
aaauccuaugugaaaugcca

SEQ ID NO: 465668 - RNA, 21 nt, Artificial Sequence
  Synthetic
gaaauccuaugugaaaugcca

SEQ ID NO: 465669 - RNA, 22 nt, Artificial Sequence
  Synthetic
agaaauccuaugugaaaugcca

SEQ ID NO: 465670 - RNA, 23 nt, Artificial Sequence
  Synthetic
aagaaauccuaugugaaaugcca

SEQ ID NO: 465671 - RNA, 24 nt, Artificial Sequence
  Synthetic
uaagaaauccuaugugaaaugcca

SEQ ID NO: 465672 - RNA, 18 nt, Artificial Sequence
  Synthetic
ugguuguaauaaaugcca

SEQ ID NO: 465673 - RNA, 19 nt, Artificial Sequence
  Synthetic
augguuguaauaaaugcca

SEQ ID NO: 465674 - RNA, 20 nt, Artificial Sequence
  Synthetic
gaugguuguaauaaaugcca

SEQ ID NO: 465675 - RNA, 21 nt, Artificial Sequence
  Synthetic
ugaugguuguaauaaaugcca

SEQ ID NO: 465676 - RNA, 22 nt, Artificial Sequence
  Synthetic
gugaugguuguaauaaaugcca

SEQ ID NO: 465677 - RNA, 23 nt, Artificial Sequence
  Synthetic
ggugaugguuguaauaaaugcca

SEQ ID NO: 465678 - RNA, 24 nt, Artificial Sequence
  Synthetic
uggugaugguuguaauaaaugcca

SEQ ID NO: 465679 - RNA, 18 nt, Artificial Sequence
  Synthetic
agcacauuuuaaaugcca

SEQ ID NO: 465680 - RNA, 19 nt, Artificial Sequence
  Synthetic
aagcacauuuuaaaugcca

SEQ ID NO: 465681 - RNA, 20 nt, Artificial Sequence
  Synthetic
aaagcacauuuuaaaugcca

SEQ ID NO: 465682 - RNA, 21 nt, Artificial Sequence
  Synthetic
aaaagcacauuuuaaaugcca

SEQ ID NO: 465683 - RNA, 22 nt, Artificial Sequence
  Synthetic
uaaaagcacauuuuaaaugcca

SEQ ID NO: 465684 - RNA, 23 nt, Artificial Sequence
  Synthetic
auaaaagcacauuuuaaaugcca

SEQ ID NO: 465685 - RNA, 24 nt, Artificial Sequence
  Synthetic
uauaaaagcacauuuuaaaugcca

SEQ ID NO: 465686 - RNA, 18 nt, Artificial Sequence
  Synthetic
auuccagaaacaaugcca

SEQ ID NO: 465687 - RNA, 19 nt, Artificial Sequence
  Synthetic
gauuccagaaacaaugcca

SEQ ID NO: 465688 - RNA, 20 nt, Artificial Sequence
  Synthetic
cgauuccagaaacaaugcca

SEQ ID NO: 465689 - RNA, 21 nt, Artificial Sequence
  Synthetic
acgauuccagaaacaaugcca

SEQ ID NO: 465690 - RNA, 22 nt, Artificial Sequence
  Synthetic
aacgauuccagaaacaaugcca

SEQ ID NO: 465691 - RNA, 23 nt, Artificial Sequence
  Synthetic
aaacgauuccagaaacaaugcca

SEQ ID NO: 465692 - RNA, 24 nt, Artificial Sequence
  Synthetic
gaaacgauuccagaaacaaugcca

SEQ ID NO: 465693 - RNA, 18 nt, Artificial Sequence
  Synthetic
aauaugguaacaaugcca

SEQ ID NO: 465694 - RNA, 19 nt, Artificial Sequence
  Synthetic
caauaugguaacaaugcca

SEQ ID NO: 465695 - RNA, 20 nt, Artificial Sequence
  Synthetic
ucaauaugguaacaaugcca

SEQ ID NO: 465696 - RNA, 21 nt, Artificial Sequence
  Synthetic
gucaauaugguaacaaugcca

SEQ ID NO: 465697 - RNA, 22 nt, Artificial Sequence
  Synthetic
agucaauaugguaacaaugcca

SEQ ID NO: 465698 - RNA, 23 nt, Artificial Sequence
  Synthetic
cagucaauaugguaacaaugcca

SEQ ID NO: 465699 - RNA, 24 nt, Artificial Sequence
  Synthetic
ccagucaauaugguaacaaugcca

SEQ ID NO: 465700 - RNA, 18 nt, Artificial Sequence
  Synthetic
uaaauguauguaaugcca

SEQ ID NO: 465701 - RNA, 19 nt, Artificial Sequence
  Synthetic
guaaauguauguaaugcca

SEQ ID NO: 465702 - RNA, 20 nt, Artificial Sequence
  Synthetic
cguaaauguauguaaugcca

SEQ ID NO: 465703 - RNA, 21 nt, Artificial Sequence
  Synthetic
acguaaauguauguaaugcca

SEQ ID NO: 465704 - RNA, 22 nt, Artificial Sequence
  Synthetic
aacguaaauguauguaaugcca

SEQ ID NO: 465705 - RNA, 23 nt, Artificial Sequence
  Synthetic
caacguaaauguauguaaugcca

SEQ ID NO: 465706 - RNA, 24 nt, Artificial Sequence
  Synthetic
acaacguaaauguauguaaugcca

SEQ ID NO: 465707 - RNA, 18 nt, Artificial Sequence
  Synthetic
cuucagggaaacaugcca

SEQ ID NO: 465708 - RNA, 19 nt, Artificial Sequence
  Synthetic
acuucagggaaacaugcca

SEQ ID NO: 465709 - RNA, 20 nt, Artificial Sequence
  Synthetic
gacuucagggaaacaugcca

SEQ ID NO: 465710 - RNA, 21 nt, Artificial Sequence
  Synthetic
cgacuucagggaaacaugcca

SEQ ID NO: 465711 - RNA, 22 nt, Artificial Sequence
  Synthetic
acgacuucagggaaacaugcca

SEQ ID NO: 465712 - RNA, 23 nt, Artificial Sequence
  Synthetic
gacgacuucagggaaacaugcca

SEQ ID NO: 465713 - RNA, 24 nt, Artificial Sequence
  Synthetic
ugacgacuucagggaaacaugcca

SEQ ID NO: 465714 - RNA, 18 nt, Artificial Sequence
  Synthetic
auacucaccaacaugcca

SEQ ID NO: 465715 - RNA, 19 nt, Artificial Sequence
  Synthetic
gauacucaccaacaugcca

SEQ ID NO: 465716 - RNA, 20 nt, Artificial Sequence
  Synthetic
agauacucaccaacaugcca

SEQ ID NO: 465717 - RNA, 21 nt, Artificial Sequence
  Synthetic
gagauacucaccaacaugcca

SEQ ID NO: 465718 - RNA, 22 nt, Artificial Sequence
  Synthetic
agagauacucaccaacaugcca

SEQ ID NO: 465719 - RNA, 23 nt, Artificial Sequence
  Synthetic
cagagauacucaccaacaugcca

SEQ ID NO: 465720 - RNA, 24 nt, Artificial Sequence
  Synthetic
acagagauacucaccaacaugcca

SEQ ID NO: 465721 - RNA, 18 nt, Artificial Sequence
  Synthetic
aaaagauauuccaugcca

SEQ ID NO: 465722 - RNA, 19 nt, Artificial Sequence
  Synthetic
aaaaagauauuccaugcca

SEQ ID NO: 465723 - RNA, 20 nt, Artificial Sequence
  Synthetic
gaaaaagauauuccaugcca

SEQ ID NO: 465724 - RNA, 21 nt, Artificial Sequence
  Synthetic
ggaaaaagauauuccaugcca

SEQ ID NO: 465725 - RNA, 22 nt, Artificial Sequence
  Synthetic
uggaaaaagauauuccaugcca

SEQ ID NO: 465726 - RNA, 23 nt, Artificial Sequence
  Synthetic
auggaaaaagauauuccaugcca

SEQ ID NO: 465727 - RNA, 24 nt, Artificial Sequence
  Synthetic
gauggaaaaagauauuccaugcca

SEQ ID NO: 465728 - RNA, 18 nt, Artificial Sequence
  Synthetic
ccauuucuccagaugcca

SEQ ID NO: 465729 - RNA, 19 nt, Artificial Sequence
  Synthetic
cccauuucuccagaugcca

SEQ ID NO: 465730 - RNA, 20 nt, Artificial Sequence
  Synthetic
gcccauuucuccagaugcca

SEQ ID NO: 465731 - RNA, 21 nt, Artificial Sequence
  Synthetic
ugcccauuucuccagaugcca

SEQ ID NO: 465732 - RNA, 22 nt, Artificial Sequence
  Synthetic
cugcccauuucuccagaugcca

SEQ ID NO: 465733 - RNA, 23 nt, Artificial Sequence
  Synthetic
ccugcccauuucuccagaugcca

SEQ ID NO: 465734 - RNA, 24 nt, Artificial Sequence
  Synthetic
accugcccauuucuccagaugcca

SEQ ID NO: 465735 - RNA, 18 nt, Artificial Sequence
  Synthetic
ggcucuaacuagaugcca

SEQ ID NO: 465736 - RNA, 19 nt, Artificial Sequence
  Synthetic
uggcucuaacuagaugcca

SEQ ID NO: 465737 - RNA, 20 nt, Artificial Sequence
  Synthetic
auggcucuaacuagaugcca

SEQ ID NO: 465738 - RNA, 21 nt, Artificial Sequence
  Synthetic
cauggcucuaacuagaugcca

SEQ ID NO: 465739 - RNA, 22 nt, Artificial Sequence
  Synthetic
acauggcucuaacuagaugcca

SEQ ID NO: 465740 - RNA, 23 nt, Artificial Sequence
  Synthetic
cacauggcucuaacuagaugcca

SEQ ID NO: 465741 - RNA, 24 nt, Artificial Sequence
  Synthetic
ucacauggcucuaacuagaugcca

SEQ ID NO: 465742 - RNA, 18 nt, Artificial Sequence
  Synthetic
auccauagggugaugcca

SEQ ID NO: 465743 - RNA, 19 nt, Artificial Sequence
  Synthetic
cauccauagggugaugcca

SEQ ID NO: 465744 - RNA, 20 nt, Artificial Sequence
  Synthetic
ccauccauagggugaugcca

SEQ ID NO: 465745 - RNA, 21 nt, Artificial Sequence
  Synthetic
uccauccauagggugaugcca

SEQ ID NO: 465746 - RNA, 22 nt, Artificial Sequence
  Synthetic
cuccauccauagggugaugcca

SEQ ID NO: 465747 - RNA, 23 nt, Artificial Sequence
  Synthetic
acuccauccauagggugaugcca

SEQ ID NO: 465748 - RNA, 24 nt, Artificial Sequence
  Synthetic
uacuccauccauagggugaugcca

SEQ ID NO: 465749 - RNA, 18 nt, Artificial Sequence
  Synthetic
ugaugacuaaauaugcca

SEQ ID NO: 465750 - RNA, 19 nt, Artificial Sequence
  Synthetic
augaugacuaaauaugcca

SEQ ID NO: 465751 - RNA, 20 nt, Artificial Sequence
  Synthetic
caugaugacuaaauaugcca

SEQ ID NO: 465752 - RNA, 21 nt, Artificial Sequence
  Synthetic
ucaugaugacuaaauaugcca

SEQ ID NO: 465753 - RNA, 22 nt, Artificial Sequence
  Synthetic
uucaugaugacuaaauaugcca

SEQ ID NO: 465754 - RNA, 23 nt, Artificial Sequence
  Synthetic
guucaugaugacuaaauaugcca

SEQ ID NO: 465755 - RNA, 24 nt, Artificial Sequence
  Synthetic
gguucaugaugacuaaauaugcca

SEQ ID NO: 465756 - RNA, 18 nt, Artificial Sequence
  Synthetic
uuucucuuuaauaugcca

SEQ ID NO: 465757 - RNA, 19 nt, Artificial Sequence
  Synthetic
cuuucucuuuaauaugcca

SEQ ID NO: 465758 - RNA, 20 nt, Artificial Sequence
  Synthetic
ucuuucucuuuaauaugcca

SEQ ID NO: 465759 - RNA, 21 nt, Artificial Sequence
  Synthetic
uucuuucucuuuaauaugcca

SEQ ID NO: 465760 - RNA, 22 nt, Artificial Sequence
  Synthetic
uuucuuucucuuuaauaugcca

SEQ ID NO: 465761 - RNA, 23 nt, Artificial Sequence
  Synthetic
uuuucuuucucuuuaauaugcca

SEQ ID NO: 465762 - RNA, 24 nt, Artificial Sequence
  Synthetic
uuuuucuuucucuuuaauaugcca

SEQ ID NO: 465763 - RNA, 18 nt, Artificial Sequence
  Synthetic
ucccagacucauaugcca

SEQ ID NO: 465764 - RNA, 19 nt, Artificial Sequence
  Synthetic
uucccagacucauaugcca

SEQ ID NO: 465765 - RNA, 20 nt, Artificial Sequence
  Synthetic
uuucccagacucauaugcca

SEQ ID NO: 465766 - RNA, 21 nt, Artificial Sequence
  Synthetic
auuucccagacucauaugcca

SEQ ID NO: 465767 - RNA, 22 nt, Artificial Sequence
  Synthetic
cauuucccagacucauaugcca

SEQ ID NO: 465768 - RNA, 23 nt, Artificial Sequence
  Synthetic
acauuucccagacucauaugcca

SEQ ID NO: 465769 - RNA, 24 nt, Artificial Sequence
  Synthetic
uacauuucccagacucauaugcca

SEQ ID NO: 465770 - RNA, 18 nt, Artificial Sequence
  Synthetic
cgacaauaaauuaugcca

SEQ ID NO: 465771 - RNA, 19 nt, Artificial Sequence
  Synthetic
ucgacaauaaauuaugcca

SEQ ID NO: 465772 - RNA, 20 nt, Artificial Sequence
  Synthetic
cucgacaauaaauuaugcca

SEQ ID NO: 465773 - RNA, 21 nt, Artificial Sequence
  Synthetic
ucucgacaauaaauuaugcca

SEQ ID NO: 465774 - RNA, 22 nt, Artificial Sequence
  Synthetic
uucucgacaauaaauuaugcca

SEQ ID NO: 465775 - RNA, 23 nt, Artificial Sequence
  Synthetic
auucucgacaauaaauuaugcca

SEQ ID NO: 465776 - RNA, 24 nt, Artificial Sequence
  Synthetic
cauucucgacaauaaauuaugcca

SEQ ID NO: 465777 - RNA, 18 nt, Artificial Sequence
  Synthetic
auuaauucccuacugcca

SEQ ID NO: 465778 - RNA, 19 nt, Artificial Sequence
  Synthetic
uauuaauucccuacugcca

SEQ ID NO: 465779 - RNA, 20 nt, Artificial Sequence
  Synthetic
auauuaauucccuacugcca

SEQ ID NO: 465780 - RNA, 21 nt, Artificial Sequence
  Synthetic
aauauuaauucccuacugcca

SEQ ID NO: 465781 - RNA, 22 nt, Artificial Sequence
  Synthetic
gaauauuaauucccuacugcca

SEQ ID NO: 465782 - RNA, 23 nt, Artificial Sequence
  Synthetic
ggaauauuaauucccuacugcca

SEQ ID NO: 465783 - RNA, 24 nt, Artificial Sequence
  Synthetic
uggaauauuaauucccuacugcca

SEQ ID NO: 465784 - RNA, 18 nt, Artificial Sequence
  Synthetic
acacacucaagccugcca

SEQ ID NO: 465785 - RNA, 19 nt, Artificial Sequence
  Synthetic
aacacacucaagccugcca

SEQ ID NO: 465786 - RNA, 20 nt, Artificial Sequence
  Synthetic
caacacacucaagccugcca

SEQ ID NO: 465787 - RNA, 21 nt, Artificial Sequence
  Synthetic
acaacacacucaagccugcca

SEQ ID NO: 465788 - RNA, 22 nt, Artificial Sequence
  Synthetic
cacaacacacucaagccugcca

SEQ ID NO: 465789 - RNA, 23 nt, Artificial Sequence
  Synthetic
ucacaacacacucaagccugcca

SEQ ID NO: 465790 - RNA, 24 nt, Artificial Sequence
  Synthetic
gucacaacacacucaagccugcca

SEQ ID NO: 465791 - RNA, 18 nt, Artificial Sequence
  Synthetic
aaagcaaacauccugcca

SEQ ID NO: 465792 - RNA, 19 nt, Artificial Sequence
  Synthetic
caaagcaaacauccugcca

SEQ ID NO: 465793 - RNA, 20 nt, Artificial Sequence
  Synthetic
ccaaagcaaacauccugcca

SEQ ID NO: 465794 - RNA, 21 nt, Artificial Sequence
  Synthetic
uccaaagcaaacauccugcca

SEQ ID NO: 465795 - RNA, 22 nt, Artificial Sequence
  Synthetic
uuccaaagcaaacauccugcca

SEQ ID NO: 465796 - RNA, 23 nt, Artificial Sequence
  Synthetic
uuuccaaagcaaacauccugcca

SEQ ID NO: 465797 - RNA, 24 nt, Artificial Sequence
  Synthetic
uuuuccaaagcaaacauccugcca

SEQ ID NO: 465798 - RNA, 18 nt, Artificial Sequence
  Synthetic
auacaauauuagcugcca

SEQ ID NO: 465799 - RNA, 19 nt, Artificial Sequence
  Synthetic
aauacaauauuagcugcca

SEQ ID NO: 465800 - RNA, 20 nt, Artificial Sequence
  Synthetic
aaauacaauauuagcugcca

SEQ ID NO: 465801 - RNA, 21 nt, Artificial Sequence
  Synthetic
aaaauacaauauuagcugcca

SEQ ID NO: 465802 - RNA, 22 nt, Artificial Sequence
  Synthetic
gaaaauacaauauuagcugcca

SEQ ID NO: 465803 - RNA, 23 nt, Artificial Sequence
  Synthetic
agaaaauacaauauuagcugcca

SEQ ID NO: 465804 - RNA, 24 nt, Artificial Sequence
  Synthetic
uagaaaauacaauauuagcugcca

SEQ ID NO: 465805 - RNA, 18 nt, Artificial Sequence
  Synthetic
gcauauauaaggcugcca

SEQ ID NO: 465806 - RNA, 19 nt, Artificial Sequence
  Synthetic
agcauauauaaggcugcca

SEQ ID NO: 465807 - RNA, 20 nt, Artificial Sequence
  Synthetic
aagcauauauaaggcugcca

SEQ ID NO: 465808 - RNA, 21 nt, Artificial Sequence
  Synthetic
uaagcauauauaaggcugcca

SEQ ID NO: 465809 - RNA, 22 nt, Artificial Sequence
  Synthetic
cuaagcauauauaaggcugcca

SEQ ID NO: 465810 - RNA, 23 nt, Artificial Sequence
  Synthetic
acuaagcauauauaaggcugcca

SEQ ID NO: 465811 - RNA, 24 nt, Artificial Sequence
  Synthetic
gacuaagcauauauaaggcugcca

SEQ ID NO: 465812 - RNA, 18 nt, Artificial Sequence
  Synthetic
uggaguacuauucugcca

SEQ ID NO: 465813 - RNA, 19 nt, Artificial Sequence
  Synthetic
auggaguacuauucugcca

SEQ ID NO: 465814 - RNA, 20 nt, Artificial Sequence
  Synthetic
aauggaguacuauucugcca

SEQ ID NO: 465815 - RNA, 21 nt, Artificial Sequence
  Synthetic
aaauggaguacuauucugcca

SEQ ID NO: 465816 - RNA, 22 nt, Artificial Sequence
  Synthetic
caaauggaguacuauucugcca

SEQ ID NO: 465817 - RNA, 23 nt, Artificial Sequence
  Synthetic
acaaauggaguacuauucugcca

SEQ ID NO: 465818 - RNA, 24 nt, Artificial Sequence
  Synthetic
cacaaauggaguacuauucugcca

SEQ ID NO: 465819 - RNA, 18 nt, Artificial Sequence
  Synthetic
uacauguaacuagugcca

SEQ ID NO: 465820 - RNA, 19 nt, Artificial Sequence
  Synthetic
uuacauguaacuagugcca

SEQ ID NO: 465821 - RNA, 20 nt, Artificial Sequence
  Synthetic
auuacauguaacuagugcca

SEQ ID NO: 465822 - RNA, 21 nt, Artificial Sequence
  Synthetic
uauuacauguaacuagugcca

SEQ ID NO: 465823 - RNA, 22 nt, Artificial Sequence
  Synthetic
uuauuacauguaacuagugcca

SEQ ID NO: 465824 - RNA, 23 nt, Artificial Sequence
  Synthetic
cuuauuacauguaacuagugcca

SEQ ID NO: 465825 - RNA, 24 nt, Artificial Sequence
  Synthetic
acuuauuacauguaacuagugcca

SEQ ID NO: 465826 - RNA, 18 nt, Artificial Sequence
  Synthetic
aacaacauccuagugcca

SEQ ID NO: 465827 - RNA, 19 nt, Artificial Sequence
  Synthetic
caacaacauccuagugcca

SEQ ID NO: 465828 - RNA, 20 nt, Artificial Sequence
  Synthetic
ucaacaacauccuagugcca

SEQ ID NO: 465829 - RNA, 21 nt, Artificial Sequence
  Synthetic
cucaacaacauccuagugcca

SEQ ID NO: 465830 - RNA, 22 nt, Artificial Sequence
  Synthetic
acucaacaacauccuagugcca

SEQ ID NO: 465831 - RNA, 23 nt, Artificial Sequence
  Synthetic
uacucaacaacauccuagugcca

SEQ ID NO: 465832 - RNA, 24 nt, Artificial Sequence
  Synthetic
auacucaacaacauccuagugcca

SEQ ID NO: 465833 - RNA, 18 nt, Artificial Sequence
  Synthetic
gcaacccuauacgugcca

SEQ ID NO: 465834 - RNA, 19 nt, Artificial Sequence
  Synthetic
ugcaacccuauacgugcca

SEQ ID NO: 465835 - RNA, 20 nt, Artificial Sequence
  Synthetic
gugcaacccuauacgugcca

SEQ ID NO: 465836 - RNA, 21 nt, Artificial Sequence
  Synthetic
agugcaacccuauacgugcca

SEQ ID NO: 465837 - RNA, 22 nt, Artificial Sequence
  Synthetic
uagugcaacccuauacgugcca

SEQ ID NO: 465838 - RNA, 23 nt, Artificial Sequence
  Synthetic
uuagugcaacccuauacgugcca

SEQ ID NO: 465839 - RNA, 24 nt, Artificial Sequence
  Synthetic
cuuagugcaacccuauacgugcca

SEQ ID NO: 465840 - RNA, 18 nt, Artificial Sequence
  Synthetic
ccauacaucaucgugcca

SEQ ID NO: 465841 - RNA, 19 nt, Artificial Sequence
  Synthetic
accauacaucaucgugcca

SEQ ID NO: 465842 - RNA, 20 nt, Artificial Sequence
  Synthetic
gaccauacaucaucgugcca

SEQ ID NO: 465843 - RNA, 21 nt, Artificial Sequence
  Synthetic
ugaccauacaucaucgugcca

SEQ ID NO: 465844 - RNA, 22 nt, Artificial Sequence
  Synthetic
gugaccauacaucaucgugcca

SEQ ID NO: 465845 - RNA, 23 nt, Artificial Sequence
  Synthetic
agugaccauacaucaucgugcca

SEQ ID NO: 465846 - RNA, 24 nt, Artificial Sequence
  Synthetic
cagugaccauacaucaucgugcca

SEQ ID NO: 465847 - RNA, 18 nt, Artificial Sequence
  Synthetic
gguucagggaaggugcca

SEQ ID NO: 465848 - RNA, 19 nt, Artificial Sequence
  Synthetic
agguucagggaaggugcca

SEQ ID NO: 465849 - RNA, 20 nt, Artificial Sequence
  Synthetic
cagguucagggaaggugcca

SEQ ID NO: 465850 - RNA, 21 nt, Artificial Sequence
  Synthetic
ccagguucagggaaggugcca

SEQ ID NO: 465851 - RNA, 22 nt, Artificial Sequence
  Synthetic
accagguucagggaaggugcca

SEQ ID NO: 465852 - RNA, 23 nt, Artificial Sequence
  Synthetic
gaccagguucagggaaggugcca

SEQ ID NO: 465853 - RNA, 24 nt, Artificial Sequence
  Synthetic
ggaccagguucagggaaggugcca

SEQ ID NO: 465854 - RNA, 18 nt, Artificial Sequence
  Synthetic
agacagauaguggugcca

SEQ ID NO: 465855 - RNA, 19 nt, Artificial Sequence
  Synthetic
gagacagauaguggugcca

SEQ ID NO: 465856 - RNA, 20 nt, Artificial Sequence
  Synthetic
agagacagauaguggugcca

SEQ ID NO: 465857 - RNA, 21 nt, Artificial Sequence
  Synthetic
aagagacagauaguggugcca

SEQ ID NO: 465858 - RNA, 22 nt, Artificial Sequence
  Synthetic
aaagagacagauaguggugcca

SEQ ID NO: 465859 - RNA, 23 nt, Artificial Sequence
  Synthetic
aaaagagacagauaguggugcca

SEQ ID NO: 465860 - RNA, 24 nt, Artificial Sequence
  Synthetic
caaaagagacagauaguggugcca

SEQ ID NO: 465861 - RNA, 18 nt, Artificial Sequence
  Synthetic
gaacacuguggugugcca

SEQ ID NO: 465862 - RNA, 19 nt, Artificial Sequence
  Synthetic
cgaacacuguggugugcca

SEQ ID NO: 465863 - RNA, 20 nt, Artificial Sequence
  Synthetic
gcgaacacuguggugugcca

SEQ ID NO: 465864 - RNA, 21 nt, Artificial Sequence
  Synthetic
agcgaacacuguggugugcca

SEQ ID NO: 465865 - RNA, 22 nt, Artificial Sequence
  Synthetic
uagcgaacacuguggugugcca

SEQ ID NO: 465866 - RNA, 23 nt, Artificial Sequence
  Synthetic
guagcgaacacuguggugugcca

SEQ ID NO: 465867 - RNA, 24 nt, Artificial Sequence
  Synthetic
cguagcgaacacuguggugugcca

SEQ ID NO: 465868 - RNA, 18 nt, Artificial Sequence
  Synthetic
aggugagaaccauugcca

SEQ ID NO: 465869 - RNA, 19 nt, Artificial Sequence
  Synthetic
gaggugagaaccauugcca

SEQ ID NO: 465870 - RNA, 20 nt, Artificial Sequence
  Synthetic
ugaggugagaaccauugcca

SEQ ID NO: 465871 - RNA, 21 nt, Artificial Sequence
  Synthetic
cugaggugagaaccauugcca

SEQ ID NO: 465872 - RNA, 22 nt, Artificial Sequence
  Synthetic
gcugaggugagaaccauugcca

SEQ ID NO: 465873 - RNA, 23 nt, Artificial Sequence
  Synthetic
ugcugaggugagaaccauugcca

SEQ ID NO: 465874 - RNA, 24 nt, Artificial Sequence
  Synthetic
augcugaggugagaaccauugcca

SEQ ID NO: 465875 - RNA, 18 nt, Artificial Sequence
  Synthetic
uaccugauuucauugcca

SEQ ID NO: 465876 - RNA, 19 nt, Artificial Sequence
  Synthetic
cuaccugauuucauugcca

SEQ ID NO: 465877 - RNA, 20 nt, Artificial Sequence
  Synthetic
acuaccugauuucauugcca

SEQ ID NO: 465878 - RNA, 21 nt, Artificial Sequence
  Synthetic
uacuaccugauuucauugcca

SEQ ID NO: 465879 - RNA, 22 nt, Artificial Sequence
  Synthetic
cuacuaccugauuucauugcca

SEQ ID NO: 465880 - RNA, 23 nt, Artificial Sequence
  Synthetic
ucuacuaccugauuucauugcca

SEQ ID NO: 465881 - RNA, 24 nt, Artificial Sequence
  Synthetic
uucuacuaccugauuucauugcca

SEQ ID NO: 465882 - RNA, 18 nt, Artificial Sequence
  Synthetic
ucuaaaauuauauugcca

SEQ ID NO: 465883 - RNA, 19 nt, Artificial Sequence
  Synthetic
cucuaaaauuauauugcca

SEQ ID NO: 465884 - RNA, 20 nt, Artificial Sequence
  Synthetic
acucuaaaauuauauugcca

SEQ ID NO: 465885 - RNA, 21 nt, Artificial Sequence
  Synthetic
aacucuaaaauuauauugcca

SEQ ID NO: 465886 - RNA, 22 nt, Artificial Sequence
  Synthetic
gaacucuaaaauuauauugcca

SEQ ID NO: 465887 - RNA, 23 nt, Artificial Sequence
  Synthetic
ggaacucuaaaauuauauugcca

SEQ ID NO: 465888 - RNA, 24 nt, Artificial Sequence
  Synthetic
aggaacucuaaaauuauauugcca

SEQ ID NO: 465889 - RNA, 18 nt, Artificial Sequence
  Synthetic
aguuuucagaccuugcca

SEQ ID NO: 465890 - RNA, 19 nt, Artificial Sequence
  Synthetic
aaguuuucagaccuugcca

SEQ ID NO: 465891 - RNA, 20 nt, Artificial Sequence
  Synthetic
aaaguuuucagaccuugcca

SEQ ID NO: 465892 - RNA, 21 nt, Artificial Sequence
  Synthetic
aaaaguuuucagaccuugcca

SEQ ID NO: 465893 - RNA, 22 nt, Artificial Sequence
  Synthetic
caaaaguuuucagaccuugcca

SEQ ID NO: 465894 - RNA, 23 nt, Artificial Sequence
  Synthetic
acaaaaguuuucagaccuugcca

SEQ ID NO: 465895 - RNA, 24 nt, Artificial Sequence
  Synthetic
aacaaaaguuuucagaccuugcca

SEQ ID NO: 465896 - RNA, 18 nt, Artificial Sequence
  Synthetic
aaaguccaagccuugcca

SEQ ID NO: 465897 - RNA, 19 nt, Artificial Sequence
  Synthetic
gaaaguccaagccuugcca

SEQ ID NO: 465898 - RNA, 20 nt, Artificial Sequence
  Synthetic
agaaaguccaagccuugcca

SEQ ID NO: 465899 - RNA, 21 nt, Artificial Sequence
  Synthetic
aagaaaguccaagccuugcca

SEQ ID NO: 465900 - RNA, 22 nt, Artificial Sequence
  Synthetic
gaagaaaguccaagccuugcca

SEQ ID NO: 465901 - RNA, 23 nt, Artificial Sequence
  Synthetic
agaagaaaguccaagccuugcca

SEQ ID NO: 465902 - RNA, 24 nt, Artificial Sequence
  Synthetic
gagaagaaaguccaagccuugcca

SEQ ID NO: 465903 - RNA, 18 nt, Artificial Sequence
  Synthetic
ccuucucuagaguugcca

SEQ ID NO: 465904 - RNA, 19 nt, Artificial Sequence
  Synthetic
cccuucucuagaguugcca

SEQ ID NO: 465905 - RNA, 20 nt, Artificial Sequence
  Synthetic
ccccuucucuagaguugcca

SEQ ID NO: 465906 - RNA, 21 nt, Artificial Sequence
  Synthetic
accccuucucuagaguugcca

SEQ ID NO: 465907 - RNA, 22 nt, Artificial Sequence
  Synthetic
uaccccuucucuagaguugcca

SEQ ID NO: 465908 - RNA, 23 nt, Artificial Sequence
  Synthetic
cuaccccuucucuagaguugcca

SEQ ID NO: 465909 - RNA, 24 nt, Artificial Sequence
  Synthetic
ucuaccccuucucuagaguugcca

SEQ ID NO: 465910 - RNA, 18 nt, Artificial Sequence
  Synthetic
uuaguggugggguugcca

SEQ ID NO: 465911 - RNA, 19 nt, Artificial Sequence
  Synthetic
auuaguggugggguugcca

SEQ ID NO: 465912 - RNA, 20 nt, Artificial Sequence
  Synthetic
uauuaguggugggguugcca

SEQ ID NO: 465913 - RNA, 21 nt, Artificial Sequence
  Synthetic
auauuaguggugggguugcca

SEQ ID NO: 465914 - RNA, 22 nt, Artificial Sequence
  Synthetic
cauauuaguggugggguugcca

SEQ ID NO: 465915 - RNA, 23 nt, Artificial Sequence
  Synthetic
ucauauuaguggugggguugcca

SEQ ID NO: 465916 - RNA, 24 nt, Artificial Sequence
  Synthetic
uucauauuaguggugggguugcca

SEQ ID NO: 465917 - RNA, 18 nt, Artificial Sequence
  Synthetic
ucagugucuugguugcca

SEQ ID NO: 465918 - RNA, 19 nt, Artificial Sequence
  Synthetic
cucagugucuugguugcca

SEQ ID NO: 465919 - RNA, 20 nt, Artificial Sequence
  Synthetic
acucagugucuugguugcca

SEQ ID NO: 465920 - RNA, 21 nt, Artificial Sequence
  Synthetic
aacucagugucuugguugcca

SEQ ID NO: 465921 - RNA, 22 nt, Artificial Sequence
  Synthetic
uaacucagugucuugguugcca

SEQ ID NO: 465922 - RNA, 23 nt, Artificial Sequence
  Synthetic
auaacucagugucuugguugcca

SEQ ID NO: 465923 - RNA, 24 nt, Artificial Sequence
  Synthetic
aauaacucagugucuugguugcca

SEQ ID NO: 465924 - RNA, 18 nt, Artificial Sequence
  Synthetic
gcuaugggacuguugcca

SEQ ID NO: 465925 - RNA, 19 nt, Artificial Sequence
  Synthetic
ugcuaugggacuguugcca

SEQ ID NO: 465926 - RNA, 20 nt, Artificial Sequence
  Synthetic
cugcuaugggacuguugcca

SEQ ID NO: 465927 - RNA, 21 nt, Artificial Sequence
  Synthetic
ucugcuaugggacuguugcca

SEQ ID NO: 465928 - RNA, 22 nt, Artificial Sequence
  Synthetic
uucugcuaugggacuguugcca

SEQ ID NO: 465929 - RNA, 23 nt, Artificial Sequence
  Synthetic
uuucugcuaugggacuguugcca

SEQ ID NO: 465930 - RNA, 24 nt, Artificial Sequence
  Synthetic
cuuucugcuaugggacuguugcca

SEQ ID NO: 465931 - RNA, 18 nt, Artificial Sequence
  Synthetic
gaaggcuuucuguugcca

SEQ ID NO: 465932 - RNA, 19 nt, Artificial Sequence
  Synthetic
ugaaggcuuucuguugcca

SEQ ID NO: 465933 - RNA, 20 nt, Artificial Sequence
  Synthetic
cugaaggcuuucuguugcca

SEQ ID NO: 465934 - RNA, 21 nt, Artificial Sequence
  Synthetic
ccugaaggcuuucuguugcca

SEQ ID NO: 465935 - RNA, 22 nt, Artificial Sequence
  Synthetic
gccugaaggcuuucuguugcca

SEQ ID NO: 465936 - RNA, 23 nt, Artificial Sequence
  Synthetic
ugccugaaggcuuucuguugcca

SEQ ID NO: 465937 - RNA, 24 nt, Artificial Sequence
  Synthetic
uugccugaaggcuuucuguugcca

SEQ ID NO: 465938 - RNA, 18 nt, Artificial Sequence
  Synthetic
acguuuuggcuuuugcca

SEQ ID NO: 465939 - RNA, 19 nt, Artificial Sequence
  Synthetic
uacguuuuggcuuuugcca

SEQ ID NO: 465940 - RNA, 20 nt, Artificial Sequence
  Synthetic
uuacguuuuggcuuuugcca

SEQ ID NO: 465941 - RNA, 21 nt, Artificial Sequence
  Synthetic
auuacguuuuggcuuuugcca

SEQ ID NO: 465942 - RNA, 22 nt, Artificial Sequence
  Synthetic
cauuacguuuuggcuuuugcca

SEQ ID NO: 465943 - RNA, 23 nt, Artificial Sequence
  Synthetic
ccauuacguuuuggcuuuugcca

SEQ ID NO: 465944 - RNA, 24 nt, Artificial Sequence
  Synthetic
accauuacguuuuggcuuuugcca

SEQ ID NO: 465945 - RNA, 18 nt, Artificial Sequence
  Synthetic
caggccagcuuuuugcca

SEQ ID NO: 465946 - RNA, 19 nt, Artificial Sequence
  Synthetic
ccaggccagcuuuuugcca

SEQ ID NO: 465947 - RNA, 20 nt, Artificial Sequence
  Synthetic
cccaggccagcuuuuugcca

SEQ ID NO: 465948 - RNA, 21 nt, Artificial Sequence
  Synthetic
ucccaggccagcuuuuugcca

SEQ ID NO: 465949 - RNA, 22 nt, Artificial Sequence
  Synthetic
aucccaggccagcuuuuugcca

SEQ ID NO: 465950 - RNA, 23 nt, Artificial Sequence
  Synthetic
uaucccaggccagcuuuuugcca

SEQ ID NO: 465951 - RNA, 24 nt, Artificial Sequence
  Synthetic
uuaucccaggccagcuuuuugcca

SEQ ID NO: 465952 - RNA, 18 nt, Artificial Sequence
  Synthetic
cuuuauuuuuuuuugcca

SEQ ID NO: 465953 - RNA, 19 nt, Artificial Sequence
  Synthetic
acuuuauuuuuuuuugcca

SEQ ID NO: 465954 - RNA, 20 nt, Artificial Sequence
  Synthetic
cacuuuauuuuuuuuugcca

SEQ ID NO: 465955 - RNA, 21 nt, Artificial Sequence
  Synthetic
ucacuuuauuuuuuuuugcca

SEQ ID NO: 465956 - RNA, 22 nt, Artificial Sequence
  Synthetic
cucacuuuauuuuuuuuugcca

SEQ ID NO: 465957 - RNA, 23 nt, Artificial Sequence
  Synthetic
ucucacuuuauuuuuuuuugcca

SEQ ID NO: 465958 - RNA, 24 nt, Artificial Sequence
  Synthetic
aucucacuuuauuuuuuuuugcca

SEQ ID NO: 465959 - RNA, 18 nt, Artificial Sequence
  Synthetic
uacugcaucuaaaaucca

SEQ ID NO: 465960 - RNA, 19 nt, Artificial Sequence
  Synthetic
auacugcaucuaaaaucca

SEQ ID NO: 465961 - RNA, 20 nt, Artificial Sequence
  Synthetic
aauacugcaucuaaaaucca

SEQ ID NO: 465962 - RNA, 21 nt, Artificial Sequence
  Synthetic
uaauacugcaucuaaaaucca

SEQ ID NO: 465963 - RNA, 22 nt, Artificial Sequence
  Synthetic
uuaauacugcaucuaaaaucca

SEQ ID NO: 465964 - RNA, 23 nt, Artificial Sequence
  Synthetic
uuuaauacugcaucuaaaaucca

SEQ ID NO: 465965 - RNA, 24 nt, Artificial Sequence
  Synthetic
uuuuaauacugcaucuaaaaucca

SEQ ID NO: 465966 - RNA, 18 nt, Artificial Sequence
  Synthetic
gauuuuucuccaaaucca

SEQ ID NO: 465967 - RNA, 19 nt, Artificial Sequence
  Synthetic
ugauuuuucuccaaaucca

SEQ ID NO: 465968 - RNA, 20 nt, Artificial Sequence
  Synthetic
uugauuuuucuccaaaucca

SEQ ID NO: 465969 - RNA, 21 nt, Artificial Sequence
  Synthetic
guugauuuuucuccaaaucca

SEQ ID NO: 465970 - RNA, 22 nt, Artificial Sequence
  Synthetic
uguugauuuuucuccaaaucca

SEQ ID NO: 465971 - RNA, 23 nt, Artificial Sequence
  Synthetic
auguugauuuuucuccaaaucca

SEQ ID NO: 465972 - RNA, 24 nt, Artificial Sequence
  Synthetic
uauguugauuuuucuccaaaucca

SEQ ID NO: 465973 - RNA, 18 nt, Artificial Sequence
  Synthetic
auaagcaugagaaaucca

SEQ ID NO: 465974 - RNA, 19 nt, Artificial Sequence
  Synthetic
aauaagcaugagaaaucca

SEQ ID NO: 465975 - RNA, 20 nt, Artificial Sequence
  Synthetic
caauaagcaugagaaaucca

SEQ ID NO: 465976 - RNA, 21 nt, Artificial Sequence
  Synthetic
acaauaagcaugagaaaucca

SEQ ID NO: 465977 - RNA, 22 nt, Artificial Sequence
  Synthetic
uacaauaagcaugagaaaucca

SEQ ID NO: 465978 - RNA, 23 nt, Artificial Sequence
  Synthetic
auacaauaagcaugagaaaucca

SEQ ID NO: 465979 - RNA, 24 nt, Artificial Sequence
  Synthetic
uauacaauaagcaugagaaaucca

SEQ ID NO: 465980 - RNA, 18 nt, Artificial Sequence
  Synthetic
gagaaaguaaacaaucca

SEQ ID NO: 465981 - RNA, 19 nt, Artificial Sequence
  Synthetic
agagaaaguaaacaaucca

SEQ ID NO: 465982 - RNA, 20 nt, Artificial Sequence
  Synthetic
aagagaaaguaaacaaucca

SEQ ID NO: 465983 - RNA, 21 nt, Artificial Sequence
  Synthetic
uaagagaaaguaaacaaucca

SEQ ID NO: 465984 - RNA, 22 nt, Artificial Sequence
  Synthetic
guaagagaaaguaaacaaucca

SEQ ID NO: 465985 - RNA, 23 nt, Artificial Sequence
  Synthetic
gguaagagaaaguaaacaaucca

SEQ ID NO: 465986 - RNA, 24 nt, Artificial Sequence
  Synthetic
cgguaagagaaaguaaacaaucca

SEQ ID NO: 465987 - RNA, 18 nt, Artificial Sequence
  Synthetic
gcuuacaaguacaaucca

SEQ ID NO: 465988 - RNA, 19 nt, Artificial Sequence
  Synthetic
ugcuuacaaguacaaucca

SEQ ID NO: 465989 - RNA, 20 nt, Artificial Sequence
  Synthetic
uugcuuacaaguacaaucca

SEQ ID NO: 465990 - RNA, 21 nt, Artificial Sequence
  Synthetic
auugcuuacaaguacaaucca

SEQ ID NO: 465991 - RNA, 22 nt, Artificial Sequence
  Synthetic
aauugcuuacaaguacaaucca

SEQ ID NO: 465992 - RNA, 23 nt, Artificial Sequence
  Synthetic
aaauugcuuacaaguacaaucca

SEQ ID NO: 465993 - RNA, 24 nt, Artificial Sequence
  Synthetic
aaaauugcuuacaaguacaaucca

SEQ ID NO: 465994 - RNA, 18 nt, Artificial Sequence
  Synthetic
gagacccccaagaaucca

SEQ ID NO: 465995 - RNA, 19 nt, Artificial Sequence
  Synthetic
ugagacccccaagaaucca

SEQ ID NO: 465996 - RNA, 20 nt, Artificial Sequence
  Synthetic
uugagacccccaagaaucca

SEQ ID NO: 465997 - RNA, 21 nt, Artificial Sequence
  Synthetic
uuugagacccccaagaaucca

SEQ ID NO: 465998 - RNA, 22 nt, Artificial Sequence
  Synthetic
auuugagacccccaagaaucca

SEQ ID NO: 465999 - RNA, 23 nt, Artificial Sequence
  Synthetic
uauuugagacccccaagaaucca

SEQ ID NO: 466000 - RNA, 24 nt, Artificial Sequence
  Synthetic
cuauuugagacccccaagaaucca

SEQ ID NO: 466001 - RNA, 18 nt, Artificial Sequence
  Synthetic
uuuuucgagaagaaucca

SEQ ID NO: 466002 - RNA, 19 nt, Artificial Sequence
  Synthetic
guuuuucgagaagaaucca

SEQ ID NO: 466003 - RNA, 20 nt, Artificial Sequence
  Synthetic
aguuuuucgagaagaaucca

SEQ ID NO: 466004 - RNA, 21 nt, Artificial Sequence
  Synthetic
aaguuuuucgagaagaaucca

SEQ ID NO: 466005 - RNA, 22 nt, Artificial Sequence
  Synthetic
caaguuuuucgagaagaaucca

SEQ ID NO: 466006 - RNA, 23 nt, Artificial Sequence
  Synthetic
acaaguuuuucgagaagaaucca

SEQ ID NO: 466007 - RNA, 24 nt, Artificial Sequence
  Synthetic
aacaaguuuuucgagaagaaucca

SEQ ID NO: 466008 - RNA, 18 nt, Artificial Sequence
  Synthetic
cagugcaaugggaaucca

SEQ ID NO: 466009 - RNA, 19 nt, Artificial Sequence
  Synthetic
ucagugcaaugggaaucca

SEQ ID NO: 466010 - RNA, 20 nt, Artificial Sequence
  Synthetic
cucagugcaaugggaaucca

SEQ ID NO: 466011 - RNA, 21 nt, Artificial Sequence
  Synthetic
ccucagugcaaugggaaucca

SEQ ID NO: 466012 - RNA, 22 nt, Artificial Sequence
  Synthetic
accucagugcaaugggaaucca

SEQ ID NO: 466013 - RNA, 23 nt, Artificial Sequence
  Synthetic
aaccucagugcaaugggaaucca

SEQ ID NO: 466014 - RNA, 24 nt, Artificial Sequence
  Synthetic
caaccucagugcaaugggaaucca

SEQ ID NO: 466015 - RNA, 18 nt, Artificial Sequence
  Synthetic
cuaaaaucuaaacaucca

SEQ ID NO: 466016 - RNA, 19 nt, Artificial Sequence
  Synthetic
acuaaaaucuaaacaucca

SEQ ID NO: 466017 - RNA, 20 nt, Artificial Sequence
  Synthetic
cacuaaaaucuaaacaucca

SEQ ID NO: 466018 - RNA, 21 nt, Artificial Sequence
  Synthetic
ucacuaaaaucuaaacaucca

SEQ ID NO: 466019 - RNA, 22 nt, Artificial Sequence
  Synthetic
gucacuaaaaucuaaacaucca

SEQ ID NO: 466020 - RNA, 23 nt, Artificial Sequence
  Synthetic
ugucacuaaaaucuaaacaucca

SEQ ID NO: 466021 - RNA, 24 nt, Artificial Sequence
  Synthetic
cugucacuaaaaucuaaacaucca

SEQ ID NO: 466022 - RNA, 18 nt, Artificial Sequence
  Synthetic
aucauaacuauacaucca

SEQ ID NO: 466023 - RNA, 19 nt, Artificial Sequence
  Synthetic
aaucauaacuauacaucca

SEQ ID NO: 466024 - RNA, 20 nt, Artificial Sequence
  Synthetic
aaaucauaacuauacaucca

SEQ ID NO: 466025 - RNA, 21 nt, Artificial Sequence
  Synthetic
aaaaucauaacuauacaucca

SEQ ID NO: 466026 - RNA, 22 nt, Artificial Sequence
  Synthetic
gaaaaucauaacuauacaucca

SEQ ID NO: 466027 - RNA, 23 nt, Artificial Sequence
  Synthetic
ggaaaaucauaacuauacaucca

SEQ ID NO: 466028 - RNA, 24 nt, Artificial Sequence
  Synthetic
uggaaaaucauaacuauacaucca

SEQ ID NO: 466029 - RNA, 18 nt, Artificial Sequence
  Synthetic
uucuguugcuugcaucca

SEQ ID NO: 466030 - RNA, 19 nt, Artificial Sequence
  Synthetic
uuucuguugcuugcaucca

SEQ ID NO: 466031 - RNA, 20 nt, Artificial Sequence
  Synthetic
auuucuguugcuugcaucca

SEQ ID NO: 466032 - RNA, 21 nt, Artificial Sequence
  Synthetic
gauuucuguugcuugcaucca

SEQ ID NO: 466033 - RNA, 22 nt, Artificial Sequence
  Synthetic
ugauuucuguugcuugcaucca

SEQ ID NO: 466034 - RNA, 23 nt, Artificial Sequence
  Synthetic
augauuucuguugcuugcaucca

SEQ ID NO: 466035 - RNA, 24 nt, Artificial Sequence
  Synthetic
aaugauuucuguugcuugcaucca

SEQ ID NO: 466036 - RNA, 18 nt, Artificial Sequence
  Synthetic
uuauauaccuaucaucca

SEQ ID NO: 466037 - RNA, 19 nt, Artificial Sequence
  Synthetic
auuauauaccuaucaucca

SEQ ID NO: 466038 - RNA, 20 nt, Artificial Sequence
  Synthetic
uauuauauaccuaucaucca

SEQ ID NO: 466039 - RNA, 21 nt, Artificial Sequence
  Synthetic
auauuauauaccuaucaucca

SEQ ID NO: 466040 - RNA, 22 nt, Artificial Sequence
  Synthetic
uauauuauauaccuaucaucca

SEQ ID NO: 466041 - RNA, 23 nt, Artificial Sequence
  Synthetic
auauauuauauaccuaucaucca

SEQ ID NO: 466042 - RNA, 24 nt, Artificial Sequence
  Synthetic
uauauauuauauaccuaucaucca

SEQ ID NO: 466043 - RNA, 18 nt, Artificial Sequence
  Synthetic
uucaucuaugcucaucca

SEQ ID NO: 466044 - RNA, 19 nt, Artificial Sequence
  Synthetic
auucaucuaugcucaucca

SEQ ID NO: 466045 - RNA, 20 nt, Artificial Sequence
  Synthetic
aauucaucuaugcucaucca

SEQ ID NO: 466046 - RNA, 21 nt, Artificial Sequence
  Synthetic
uaauucaucuaugcucaucca

SEQ ID NO: 466047 - RNA, 22 nt, Artificial Sequence
  Synthetic
cuaauucaucuaugcucaucca

SEQ ID NO: 466048 - RNA, 23 nt, Artificial Sequence
  Synthetic
ccuaauucaucuaugcucaucca

SEQ ID NO: 466049 - RNA, 24 nt, Artificial Sequence
  Synthetic
uccuaauucaucuaugcucaucca

SEQ ID NO: 466050 - RNA, 18 nt, Artificial Sequence
  Synthetic
aaaauuaccagucaucca

SEQ ID NO: 466051 - RNA, 19 nt, Artificial Sequence
  Synthetic
aaaaauuaccagucaucca

SEQ ID NO: 466052 - RNA, 20 nt, Artificial Sequence
  Synthetic
caaaaauuaccagucaucca

SEQ ID NO: 466053 - RNA, 21 nt, Artificial Sequence
  Synthetic
ucaaaaauuaccagucaucca

SEQ ID NO: 466054 - RNA, 22 nt, Artificial Sequence
  Synthetic
gucaaaaauuaccagucaucca

SEQ ID NO: 466055 - RNA, 23 nt, Artificial Sequence
  Synthetic
agucaaaaauuaccagucaucca

SEQ ID NO: 466056 - RNA, 24 nt, Artificial Sequence
  Synthetic
uagucaaaaauuaccagucaucca

SEQ ID NO: 466057 - RNA, 18 nt, Artificial Sequence
  Synthetic
uaaucauuuuuucaucca

SEQ ID NO: 466058 - RNA, 19 nt, Artificial Sequence
  Synthetic
cuaaucauuuuuucaucca

SEQ ID NO: 466059 - RNA, 20 nt, Artificial Sequence
  Synthetic
ccuaaucauuuuuucaucca

SEQ ID NO: 466060 - RNA, 21 nt, Artificial Sequence
  Synthetic
accuaaucauuuuuucaucca

SEQ ID NO: 466061 - RNA, 22 nt, Artificial Sequence
  Synthetic
uaccuaaucauuuuuucaucca

SEQ ID NO: 466062 - RNA, 23 nt, Artificial Sequence
  Synthetic
uuaccuaaucauuuuuucaucca

SEQ ID NO: 466063 - RNA, 24 nt, Artificial Sequence
  Synthetic
auuaccuaaucauuuuuucaucca

SEQ ID NO: 466064 - RNA, 18 nt, Artificial Sequence
  Synthetic
aaaaaguuucuagaucca

SEQ ID NO: 466065 - RNA, 19 nt, Artificial Sequence
  Synthetic
caaaaaguuucuagaucca

SEQ ID NO: 466066 - RNA, 20 nt, Artificial Sequence
  Synthetic
ucaaaaaguuucuagaucca

SEQ ID NO: 466067 - RNA, 21 nt, Artificial Sequence
  Synthetic
uucaaaaaguuucuagaucca

SEQ ID NO: 466068 - RNA, 22 nt, Artificial Sequence
  Synthetic
cuucaaaaaguuucuagaucca

SEQ ID NO: 466069 - RNA, 23 nt, Artificial Sequence
  Synthetic
ccuucaaaaaguuucuagaucca

SEQ ID NO: 466070 - RNA, 24 nt, Artificial Sequence
  Synthetic
gccuucaaaaaguuucuagaucca

SEQ ID NO: 466071 - RNA, 18 nt, Artificial Sequence
  Synthetic
auggugaaucaggaucca

SEQ ID NO: 466072 - RNA, 19 nt, Artificial Sequence
  Synthetic
gauggugaaucaggaucca

SEQ ID NO: 466073 - RNA, 20 nt, Artificial Sequence
  Synthetic
ugauggugaaucaggaucca

SEQ ID NO: 466074 - RNA, 21 nt, Artificial Sequence
  Synthetic
cugauggugaaucaggaucca

SEQ ID NO: 466075 - RNA, 22 nt, Artificial Sequence
  Synthetic
gcugauggugaaucaggaucca

SEQ ID NO: 466076 - RNA, 23 nt, Artificial Sequence
  Synthetic
agcugauggugaaucaggaucca

SEQ ID NO: 466077 - RNA, 24 nt, Artificial Sequence
  Synthetic
aagcugauggugaaucaggaucca

SEQ ID NO: 466078 - RNA, 18 nt, Artificial Sequence
  Synthetic
ugucaugggagggaucca

SEQ ID NO: 466079 - RNA, 19 nt, Artificial Sequence
  Synthetic
augucaugggagggaucca

SEQ ID NO: 466080 - RNA, 20 nt, Artificial Sequence
  Synthetic
gaugucaugggagggaucca

SEQ ID NO: 466081 - RNA, 21 nt, Artificial Sequence
  Synthetic
agaugucaugggagggaucca

SEQ ID NO: 466082 - RNA, 22 nt, Artificial Sequence
  Synthetic
cagaugucaugggagggaucca

SEQ ID NO: 466083 - RNA, 23 nt, Artificial Sequence
  Synthetic
ccagaugucaugggagggaucca

SEQ ID NO: 466084 - RNA, 24 nt, Artificial Sequence
  Synthetic
cccagaugucaugggagggaucca

SEQ ID NO: 466085 - RNA, 18 nt, Artificial Sequence
  Synthetic
cguugggggugggaucca

SEQ ID NO: 466086 - RNA, 19 nt, Artificial Sequence
  Synthetic
ccguugggggugggaucca

SEQ ID NO: 466087 - RNA, 20 nt, Artificial Sequence
  Synthetic
uccguugggggugggaucca

SEQ ID NO: 466088 - RNA, 21 nt, Artificial Sequence
  Synthetic
cuccguugggggugggaucca

SEQ ID NO: 466089 - RNA, 22 nt, Artificial Sequence
  Synthetic
gcuccguugggggugggaucca

SEQ ID NO: 466090 - RNA, 23 nt, Artificial Sequence
  Synthetic
ggcuccguugggggugggaucca

SEQ ID NO: 466091 - RNA, 24 nt, Artificial Sequence
  Synthetic
gggcuccguugggggugggaucca

SEQ ID NO: 466092 - RNA, 18 nt, Artificial Sequence
  Synthetic
gucuuugggaaugaucca

SEQ ID NO: 466093 - RNA, 19 nt, Artificial Sequence
  Synthetic
ugucuuugggaaugaucca

SEQ ID NO: 466094 - RNA, 20 nt, Artificial Sequence
  Synthetic
augucuuugggaaugaucca

SEQ ID NO: 466095 - RNA, 21 nt, Artificial Sequence
  Synthetic
gaugucuuugggaaugaucca

SEQ ID NO: 466096 - RNA, 22 nt, Artificial Sequence
  Synthetic
ggaugucuuugggaaugaucca

SEQ ID NO: 466097 - RNA, 23 nt, Artificial Sequence
  Synthetic
gggaugucuuugggaaugaucca

SEQ ID NO: 466098 - RNA, 24 nt, Artificial Sequence
  Synthetic
agggaugucuuugggaaugaucca

SEQ ID NO: 466099 - RNA, 18 nt, Artificial Sequence
  Synthetic
aaaggagcuaaauaucca

SEQ ID NO: 466100 - RNA, 19 nt, Artificial Sequence
  Synthetic
gaaaggagcuaaauaucca

SEQ ID NO: 466101 - RNA, 20 nt, Artificial Sequence
  Synthetic
ggaaaggagcuaaauaucca

SEQ ID NO: 466102 - RNA, 21 nt, Artificial Sequence
  Synthetic
aggaaaggagcuaaauaucca

SEQ ID NO: 466103 - RNA, 22 nt, Artificial Sequence
  Synthetic
caggaaaggagcuaaauaucca

SEQ ID NO: 466104 - RNA, 23 nt, Artificial Sequence
  Synthetic
ccaggaaaggagcuaaauaucca

SEQ ID NO: 466105 - RNA, 24 nt, Artificial Sequence
  Synthetic
uccaggaaaggagcuaaauaucca

SEQ ID NO: 466106 - RNA, 18 nt, Artificial Sequence
  Synthetic
uccacuucuuaauaucca

SEQ ID NO: 466107 - RNA, 19 nt, Artificial Sequence
  Synthetic
cuccacuucuuaauaucca

SEQ ID NO: 466108 - RNA, 20 nt, Artificial Sequence
  Synthetic
acuccacuucuuaauaucca

SEQ ID NO: 466109 - RNA, 21 nt, Artificial Sequence
  Synthetic
uacuccacuucuuaauaucca

SEQ ID NO: 466110 - RNA, 22 nt, Artificial Sequence
  Synthetic
uuacuccacuucuuaauaucca

SEQ ID NO: 466111 - RNA, 23 nt, Artificial Sequence
  Synthetic
auuacuccacuucuuaauaucca

SEQ ID NO: 466112 - RNA, 24 nt, Artificial Sequence
  Synthetic
uauuacuccacuucuuaauaucca

SEQ ID NO: 466113 - RNA, 18 nt, Artificial Sequence
  Synthetic
caucaugcacuauaucca

SEQ ID NO: 466114 - RNA, 19 nt, Artificial Sequence
  Synthetic
ucaucaugcacuauaucca

SEQ ID NO: 466115 - RNA, 20 nt, Artificial Sequence
  Synthetic
aucaucaugcacuauaucca

SEQ ID NO: 466116 - RNA, 21 nt, Artificial Sequence
  Synthetic
caucaucaugcacuauaucca

SEQ ID NO: 466117 - RNA, 22 nt, Artificial Sequence
  Synthetic
ucaucaucaugcacuauaucca

SEQ ID NO: 466118 - RNA, 23 nt, Artificial Sequence
  Synthetic
cucaucaucaugcacuauaucca

SEQ ID NO: 466119 - RNA, 24 nt, Artificial Sequence
  Synthetic
ccucaucaucaugcacuauaucca

SEQ ID NO: 466120 - RNA, 18 nt, Artificial Sequence
  Synthetic
acugaaacuuuauaucca

SEQ ID NO: 466121 - RNA, 19 nt, Artificial Sequence
  Synthetic
aacugaaacuuuauaucca

SEQ ID NO: 466122 - RNA, 20 nt, Artificial Sequence
  Synthetic
uaacugaaacuuuauaucca

SEQ ID NO: 466123 - RNA, 21 nt, Artificial Sequence
  Synthetic
auaacugaaacuuuauaucca

SEQ ID NO: 466124 - RNA, 22 nt, Artificial Sequence
  Synthetic
cauaacugaaacuuuauaucca

SEQ ID NO: 466125 - RNA, 23 nt, Artificial Sequence
  Synthetic
gcauaacugaaacuuuauaucca

SEQ ID NO: 466126 - RNA, 24 nt, Artificial Sequence
  Synthetic
ugcauaacugaaacuuuauaucca

SEQ ID NO: 466127 - RNA, 18 nt, Artificial Sequence
  Synthetic
aaucugguagacuaucca

SEQ ID NO: 466128 - RNA, 19 nt, Artificial Sequence
  Synthetic
aaaucugguagacuaucca

SEQ ID NO: 466129 - RNA, 20 nt, Artificial Sequence
  Synthetic
uaaaucugguagacuaucca

SEQ ID NO: 466130 - RNA, 21 nt, Artificial Sequence
  Synthetic
auaaaucugguagacuaucca

SEQ ID NO: 466131 - RNA, 22 nt, Artificial Sequence
  Synthetic
gauaaaucugguagacuaucca

SEQ ID NO: 466132 - RNA, 23 nt, Artificial Sequence
  Synthetic
agauaaaucugguagacuaucca

SEQ ID NO: 466133 - RNA, 24 nt, Artificial Sequence
  Synthetic
gagauaaaucugguagacuaucca

SEQ ID NO: 466134 - RNA, 18 nt, Artificial Sequence
  Synthetic
auguaaucccaguaucca

SEQ ID NO: 466135 - RNA, 19 nt, Artificial Sequence
  Synthetic
aauguaaucccaguaucca

SEQ ID NO: 466136 - RNA, 20 nt, Artificial Sequence
  Synthetic
caauguaaucccaguaucca

SEQ ID NO: 466137 - RNA, 21 nt, Artificial Sequence
  Synthetic
ucaauguaaucccaguaucca

SEQ ID NO: 466138 - RNA, 22 nt, Artificial Sequence
  Synthetic
aucaauguaaucccaguaucca

SEQ ID NO: 466139 - RNA, 23 nt, Artificial Sequence
  Synthetic
aaucaauguaaucccaguaucca

SEQ ID NO: 466140 - RNA, 24 nt, Artificial Sequence
  Synthetic
aaaucaauguaaucccaguaucca

SEQ ID NO: 466141 - RNA, 18 nt, Artificial Sequence
  Synthetic
auugucccucaguaucca

SEQ ID NO: 466142 - RNA, 19 nt, Artificial Sequence
  Synthetic
aauugucccucaguaucca

SEQ ID NO: 466143 - RNA, 20 nt, Artificial Sequence
  Synthetic
caauugucccucaguaucca

SEQ ID NO: 466144 - RNA, 21 nt, Artificial Sequence
  Synthetic
acaauugucccucaguaucca

SEQ ID NO: 466145 - RNA, 22 nt, Artificial Sequence
  Synthetic
uacaauugucccucaguaucca

SEQ ID NO: 466146 - RNA, 23 nt, Artificial Sequence
  Synthetic
auacaauugucccucaguaucca

SEQ ID NO: 466147 - RNA, 24 nt, Artificial Sequence
  Synthetic
aauacaauugucccucaguaucca

SEQ ID NO: 466148 - RNA, 18 nt, Artificial Sequence
  Synthetic
gaauugcaaacguaucca

SEQ ID NO: 466149 - RNA, 19 nt, Artificial Sequence
  Synthetic
agaauugcaaacguaucca

SEQ ID NO: 466150 - RNA, 20 nt, Artificial Sequence
  Synthetic
uagaauugcaaacguaucca

SEQ ID NO: 466151 - RNA, 21 nt, Artificial Sequence
  Synthetic
cuagaauugcaaacguaucca

SEQ ID NO: 466152 - RNA, 22 nt, Artificial Sequence
  Synthetic
ucuagaauugcaaacguaucca

SEQ ID NO: 466153 - RNA, 23 nt, Artificial Sequence
  Synthetic
uucuagaauugcaaacguaucca

SEQ ID NO: 466154 - RNA, 24 nt, Artificial Sequence
  Synthetic
uuucuagaauugcaaacguaucca

SEQ ID NO: 466155 - RNA, 18 nt, Artificial Sequence
  Synthetic
ucuugaacucuguaucca

SEQ ID NO: 466156 - RNA, 19 nt, Artificial Sequence
  Synthetic
cucuugaacucuguaucca

SEQ ID NO: 466157 - RNA, 20 nt, Artificial Sequence
  Synthetic
ucucuugaacucuguaucca

SEQ ID NO: 466158 - RNA, 21 nt, Artificial Sequence
  Synthetic
gucucuugaacucuguaucca

SEQ ID NO: 466159 - RNA, 22 nt, Artificial Sequence
  Synthetic
ugucucuugaacucuguaucca

SEQ ID NO: 466160 - RNA, 23 nt, Artificial Sequence
  Synthetic
uugucucuugaacucuguaucca

SEQ ID NO: 466161 - RNA, 24 nt, Artificial Sequence
  Synthetic
auugucucuugaacucuguaucca

SEQ ID NO: 466162 - RNA, 18 nt, Artificial Sequence
  Synthetic
cacgauaaugcuuaucca

SEQ ID NO: 466163 - RNA, 19 nt, Artificial Sequence
  Synthetic
ucacgauaaugcuuaucca

SEQ ID NO: 466164 - RNA, 20 nt, Artificial Sequence
  Synthetic
aucacgauaaugcuuaucca

SEQ ID NO: 466165 - RNA, 21 nt, Artificial Sequence
  Synthetic
aaucacgauaaugcuuaucca

SEQ ID NO: 466166 - RNA, 22 nt, Artificial Sequence
  Synthetic
aaaucacgauaaugcuuaucca

SEQ ID NO: 466167 - RNA, 23 nt, Artificial Sequence
  Synthetic
gaaaucacgauaaugcuuaucca

SEQ ID NO: 466168 - RNA, 24 nt, Artificial Sequence
  Synthetic
agaaaucacgauaaugcuuaucca

SEQ ID NO: 466169 - RNA, 18 nt, Artificial Sequence
  Synthetic
augucuaaccuuuaucca

SEQ ID NO: 466170 - RNA, 19 nt, Artificial Sequence
  Synthetic
aaugucuaaccuuuaucca

SEQ ID NO: 466171 - RNA, 20 nt, Artificial Sequence
  Synthetic
uaaugucuaaccuuuaucca

SEQ ID NO: 466172 - RNA, 21 nt, Artificial Sequence
  Synthetic
uuaaugucuaaccuuuaucca

SEQ ID NO: 466173 - RNA, 22 nt, Artificial Sequence
  Synthetic
guuaaugucuaaccuuuaucca

SEQ ID NO: 466174 - RNA, 23 nt, Artificial Sequence
  Synthetic
gguuaaugucuaaccuuuaucca

SEQ ID NO: 466175 - RNA, 24 nt, Artificial Sequence
  Synthetic
ugguuaaugucuaaccuuuaucca

SEQ ID NO: 466176 - RNA, 18 nt, Artificial Sequence
  Synthetic
acuagaaugcaaacucca

SEQ ID NO: 466177 - RNA, 19 nt, Artificial Sequence
  Synthetic
aacuagaaugcaaacucca

SEQ ID NO: 466178 - RNA, 20 nt, Artificial Sequence
  Synthetic
caacuagaaugcaaacucca

SEQ ID NO: 466179 - RNA, 21 nt, Artificial Sequence
  Synthetic
ccaacuagaaugcaaacucca

SEQ ID NO: 466180 - RNA, 22 nt, Artificial Sequence
  Synthetic
cccaacuagaaugcaaacucca

SEQ ID NO: 466181 - RNA, 23 nt, Artificial Sequence
  Synthetic
ucccaacuagaaugcaaacucca

SEQ ID NO: 466182 - RNA, 24 nt, Artificial Sequence
  Synthetic
uucccaacuagaaugcaaacucca

SEQ ID NO: 466183 - RNA, 18 nt, Artificial Sequence
  Synthetic
aagcaagaaacaacucca

SEQ ID NO: 466184 - RNA, 19 nt, Artificial Sequence
  Synthetic
aaagcaagaaacaacucca

SEQ ID NO: 466185 - RNA, 20 nt, Artificial Sequence
  Synthetic
caaagcaagaaacaacucca

SEQ ID NO: 466186 - RNA, 21 nt, Artificial Sequence
  Synthetic
acaaagcaagaaacaacucca

SEQ ID NO: 466187 - RNA, 22 nt, Artificial Sequence
  Synthetic
aacaaagcaagaaacaacucca

SEQ ID NO: 466188 - RNA, 23 nt, Artificial Sequence
  Synthetic
aaacaaagcaagaaacaacucca

SEQ ID NO: 466189 - RNA, 24 nt, Artificial Sequence
  Synthetic
aaaacaaagcaagaaacaacucca

SEQ ID NO: 466190 - RNA, 18 nt, Artificial Sequence
  Synthetic
ucuauuuuuugaacucca

SEQ ID NO: 466191 - RNA, 19 nt, Artificial Sequence
  Synthetic
uucuauuuuuugaacucca

SEQ ID NO: 466192 - RNA, 20 nt, Artificial Sequence
  Synthetic
uuucuauuuuuugaacucca

SEQ ID NO: 466193 - RNA, 21 nt, Artificial Sequence
  Synthetic
cuuucuauuuuuugaacucca

SEQ ID NO: 466194 - RNA, 22 nt, Artificial Sequence
  Synthetic
ucuuucuauuuuuugaacucca

SEQ ID NO: 466195 - RNA, 23 nt, Artificial Sequence
  Synthetic
uucuuucuauuuuuugaacucca

SEQ ID NO: 466196 - RNA, 24 nt, Artificial Sequence
  Synthetic
uuucuuucuauuuuuugaacucca

SEQ ID NO: 466197 - RNA, 18 nt, Artificial Sequence
  Synthetic
auauaaaauuacacucca

SEQ ID NO: 466198 - RNA, 19 nt, Artificial Sequence
  Synthetic
uauauaaaauuacacucca

SEQ ID NO: 466199 - RNA, 20 nt, Artificial Sequence
  Synthetic
auauauaaaauuacacucca

SEQ ID NO: 466200 - RNA, 21 nt, Artificial Sequence
  Synthetic
uauauauaaaauuacacucca

SEQ ID NO: 466201 - RNA, 22 nt, Artificial Sequence
  Synthetic
uuauauauaaaauuacacucca

SEQ ID NO: 466202 - RNA, 23 nt, Artificial Sequence
  Synthetic
uuuauauauaaaauuacacucca

SEQ ID NO: 466203 - RNA, 24 nt, Artificial Sequence
  Synthetic
uuuuauauauaaaauuacacucca

SEQ ID NO: 466204 - RNA, 18 nt, Artificial Sequence
  Synthetic
caaauccuaaggacucca

SEQ ID NO: 466205 - RNA, 19 nt, Artificial Sequence
  Synthetic
gcaaauccuaaggacucca

SEQ ID NO: 466206 - RNA, 20 nt, Artificial Sequence
  Synthetic
agcaaauccuaaggacucca

SEQ ID NO: 466207 - RNA, 21 nt, Artificial Sequence
  Synthetic
cagcaaauccuaaggacucca

SEQ ID NO: 466208 - RNA, 22 nt, Artificial Sequence
  Synthetic
acagcaaauccuaaggacucca

SEQ ID NO: 466209 - RNA, 23 nt, Artificial Sequence
  Synthetic
uacagcaaauccuaaggacucca

SEQ ID NO: 466210 - RNA, 24 nt, Artificial Sequence
  Synthetic
auacagcaaauccuaaggacucca

SEQ ID NO: 466211 - RNA, 18 nt, Artificial Sequence
  Synthetic
aacaacugcucuacucca

SEQ ID NO: 466212 - RNA, 19 nt, Artificial Sequence
  Synthetic
aaacaacugcucuacucca

SEQ ID NO: 466213 - RNA, 20 nt, Artificial Sequence
  Synthetic
aaaacaacugcucuacucca

SEQ ID NO: 466214 - RNA, 21 nt, Artificial Sequence
  Synthetic
gaaaacaacugcucuacucca

SEQ ID NO: 466215 - RNA, 22 nt, Artificial Sequence
  Synthetic
ugaaaacaacugcucuacucca

SEQ ID NO: 466216 - RNA, 23 nt, Artificial Sequence
  Synthetic
uugaaaacaacugcucuacucca

SEQ ID NO: 466217 - RNA, 24 nt, Artificial Sequence
  Synthetic
uuugaaaacaacugcucuacucca

SEQ ID NO: 466218 - RNA, 18 nt, Artificial Sequence
  Synthetic
aggaggaugucuacucca

SEQ ID NO: 466219 - RNA, 19 nt, Artificial Sequence
  Synthetic
gaggaggaugucuacucca

SEQ ID NO: 466220 - RNA, 20 nt, Artificial Sequence
  Synthetic
agaggaggaugucuacucca

SEQ ID NO: 466221 - RNA, 21 nt, Artificial Sequence
  Synthetic
cagaggaggaugucuacucca

SEQ ID NO: 466222 - RNA, 22 nt, Artificial Sequence
  Synthetic
gcagaggaggaugucuacucca

SEQ ID NO: 466223 - RNA, 23 nt, Artificial Sequence
  Synthetic
ugcagaggaggaugucuacucca

SEQ ID NO: 466224 - RNA, 24 nt, Artificial Sequence
  Synthetic
uugcagaggaggaugucuacucca

SEQ ID NO: 466225 - RNA, 18 nt, Artificial Sequence
  Synthetic
acguucucaauuacucca

SEQ ID NO: 466226 - RNA, 19 nt, Artificial Sequence
  Synthetic
uacguucucaauuacucca

SEQ ID NO: 466227 - RNA, 20 nt, Artificial Sequence
  Synthetic
guacguucucaauuacucca

SEQ ID NO: 466228 - RNA, 21 nt, Artificial Sequence
  Synthetic
uguacguucucaauuacucca

SEQ ID NO: 466229 - RNA, 22 nt, Artificial Sequence
  Synthetic
auguacguucucaauuacucca

SEQ ID NO: 466230 - RNA, 23 nt, Artificial Sequence
  Synthetic
uauguacguucucaauuacucca

SEQ ID NO: 466231 - RNA, 24 nt, Artificial Sequence
  Synthetic
auauguacguucucaauuacucca

SEQ ID NO: 466232 - RNA, 18 nt, Artificial Sequence
  Synthetic
gugguccacccaccucca

SEQ ID NO: 466233 - RNA, 19 nt, Artificial Sequence
  Synthetic
agugguccacccaccucca

SEQ ID NO: 466234 - RNA, 20 nt, Artificial Sequence
  Synthetic
aagugguccacccaccucca

SEQ ID NO: 466235 - RNA, 21 nt, Artificial Sequence
  Synthetic
caagugguccacccaccucca

SEQ ID NO: 466236 - RNA, 22 nt, Artificial Sequence
  Synthetic
ucaagugguccacccaccucca

SEQ ID NO: 466237 - RNA, 23 nt, Artificial Sequence
  Synthetic
aucaagugguccacccaccucca

SEQ ID NO: 466238 - RNA, 24 nt, Artificial Sequence
  Synthetic
caucaagugguccacccaccucca

SEQ ID NO: 466239 - RNA, 18 nt, Artificial Sequence
  Synthetic
uaugaauugcccccucca

SEQ ID NO: 466240 - RNA, 19 nt, Artificial Sequence
  Synthetic
auaugaauugcccccucca

SEQ ID NO: 466241 - RNA, 20 nt, Artificial Sequence
  Synthetic
gauaugaauugcccccucca

SEQ ID NO: 466242 - RNA, 21 nt, Artificial Sequence
  Synthetic
ggauaugaauugcccccucca

SEQ ID NO: 466243 - RNA, 22 nt, Artificial Sequence
  Synthetic
uggauaugaauugcccccucca

SEQ ID NO: 466244 - RNA, 23 nt, Artificial Sequence
  Synthetic
guggauaugaauugcccccucca

SEQ ID NO: 466245 - RNA, 24 nt, Artificial Sequence
  Synthetic
aguggauaugaauugcccccucca

SEQ ID NO: 466246 - RNA, 18 nt, Artificial Sequence
  Synthetic
acaggucuuaucccucca

SEQ ID NO: 466247 - RNA, 19 nt, Artificial Sequence
  Synthetic
cacaggucuuaucccucca

SEQ ID NO: 466248 - RNA, 20 nt, Artificial Sequence
  Synthetic
acacaggucuuaucccucca

SEQ ID NO: 466249 - RNA, 21 nt, Artificial Sequence
  Synthetic
gacacaggucuuaucccucca

SEQ ID NO: 466250 - RNA, 22 nt, Artificial Sequence
  Synthetic
agacacaggucuuaucccucca

SEQ ID NO: 466251 - RNA, 23 nt, Artificial Sequence
  Synthetic
uagacacaggucuuaucccucca

SEQ ID NO: 466252 - RNA, 24 nt, Artificial Sequence
  Synthetic
auagacacaggucuuaucccucca

SEQ ID NO: 466253 - RNA, 18 nt, Artificial Sequence
  Synthetic
agcuucccgaagccucca

SEQ ID NO: 466254 - RNA, 19 nt, Artificial Sequence
  Synthetic
aagcuucccgaagccucca

SEQ ID NO: 466255 - RNA, 20 nt, Artificial Sequence
  Synthetic
gaagcuucccgaagccucca

SEQ ID NO: 466256 - RNA, 21 nt, Artificial Sequence
  Synthetic
ggaagcuucccgaagccucca

SEQ ID NO: 466257 - RNA, 22 nt, Artificial Sequence
  Synthetic
uggaagcuucccgaagccucca

SEQ ID NO: 466258 - RNA, 23 nt, Artificial Sequence
  Synthetic
cuggaagcuucccgaagccucca

SEQ ID NO: 466259 - RNA, 24 nt, Artificial Sequence
  Synthetic
acuggaagcuucccgaagccucca

SEQ ID NO: 466260 - RNA, 18 nt, Artificial Sequence
  Synthetic
guaauucagacgccucca

SEQ ID NO: 466261 - RNA, 19 nt, Artificial Sequence
  Synthetic
uguaauucagacgccucca

SEQ ID NO: 466262 - RNA, 20 nt, Artificial Sequence
  Synthetic
auguaauucagacgccucca

SEQ ID NO: 466263 - RNA, 21 nt, Artificial Sequence
  Synthetic
cauguaauucagacgccucca

SEQ ID NO: 466264 - RNA, 22 nt, Artificial Sequence
  Synthetic
ucauguaauucagacgccucca

SEQ ID NO: 466265 - RNA, 23 nt, Artificial Sequence
  Synthetic
uucauguaauucagacgccucca

SEQ ID NO: 466266 - RNA, 24 nt, Artificial Sequence
  Synthetic
uuucauguaauucagacgccucca

SEQ ID NO: 466267 - RNA, 18 nt, Artificial Sequence
  Synthetic
uauccuuuuguuccucca

SEQ ID NO: 466268 - RNA, 19 nt, Artificial Sequence
  Synthetic
cuauccuuuuguuccucca

SEQ ID NO: 466269 - RNA, 20 nt, Artificial Sequence
  Synthetic
ucuauccuuuuguuccucca

SEQ ID NO: 466270 - RNA, 21 nt, Artificial Sequence
  Synthetic
cucuauccuuuuguuccucca

SEQ ID NO: 466271 - RNA, 22 nt, Artificial Sequence
  Synthetic
ucucuauccuuuuguuccucca

SEQ ID NO: 466272 - RNA, 23 nt, Artificial Sequence
  Synthetic
aucucuauccuuuuguuccucca

SEQ ID NO: 466273 - RNA, 24 nt, Artificial Sequence
  Synthetic
uaucucuauccuuuuguuccucca

SEQ ID NO: 466274 - RNA, 18 nt, Artificial Sequence
  Synthetic
gagcacauaaaagcucca

SEQ ID NO: 466275 - RNA, 19 nt, Artificial Sequence
  Synthetic
ugagcacauaaaagcucca

SEQ ID NO: 466276 - RNA, 20 nt, Artificial Sequence
  Synthetic
augagcacauaaaagcucca

SEQ ID NO: 466277 - RNA, 21 nt, Artificial Sequence
  Synthetic
caugagcacauaaaagcucca

SEQ ID NO: 466278 - RNA, 22 nt, Artificial Sequence
  Synthetic
ucaugagcacauaaaagcucca

SEQ ID NO: 466279 - RNA, 23 nt, Artificial Sequence
  Synthetic
aucaugagcacauaaaagcucca

SEQ ID NO: 466280 - RNA, 24 nt, Artificial Sequence
  Synthetic
aaucaugagcacauaaaagcucca

SEQ ID NO: 466281 - RNA, 18 nt, Artificial Sequence
  Synthetic
cugaucccuagagcucca

SEQ ID NO: 466282 - RNA, 19 nt, Artificial Sequence
  Synthetic
ucugaucccuagagcucca

SEQ ID NO: 466283 - RNA, 20 nt, Artificial Sequence
  Synthetic
cucugaucccuagagcucca

SEQ ID NO: 466284 - RNA, 21 nt, Artificial Sequence
  Synthetic
ucucugaucccuagagcucca

SEQ ID NO: 466285 - RNA, 22 nt, Artificial Sequence
  Synthetic
aucucugaucccuagagcucca

SEQ ID NO: 466286 - RNA, 23 nt, Artificial Sequence
  Synthetic
aaucucugaucccuagagcucca

SEQ ID NO: 466287 - RNA, 24 nt, Artificial Sequence
  Synthetic
caaucucugaucccuagagcucca

SEQ ID NO: 466288 - RNA, 18 nt, Artificial Sequence
  Synthetic
aauaccauuugcgcucca

SEQ ID NO: 466289 - RNA, 19 nt, Artificial Sequence
  Synthetic
caauaccauuugcgcucca

SEQ ID NO: 466290 - RNA, 20 nt, Artificial Sequence
  Synthetic
gcaauaccauuugcgcucca

SEQ ID NO: 466291 - RNA, 21 nt, Artificial Sequence
  Synthetic
agcaauaccauuugcgcucca

SEQ ID NO: 466292 - RNA, 22 nt, Artificial Sequence
  Synthetic
gagcaauaccauuugcgcucca

SEQ ID NO: 466293 - RNA, 23 nt, Artificial Sequence
  Synthetic
agagcaauaccauuugcgcucca

SEQ ID NO: 466294 - RNA, 24 nt, Artificial Sequence
  Synthetic
uagagcaauaccauuugcgcucca

SEQ ID NO: 466295 - RNA, 18 nt, Artificial Sequence
  Synthetic
aaagcccaaacugcucca

SEQ ID NO: 466296 - RNA, 19 nt, Artificial Sequence
  Synthetic
aaaagcccaaacugcucca

SEQ ID NO: 466297 - RNA, 20 nt, Artificial Sequence
  Synthetic
aaaaagcccaaacugcucca

SEQ ID NO: 466298 - RNA, 21 nt, Artificial Sequence
  Synthetic
gaaaaagcccaaacugcucca

SEQ ID NO: 466299 - RNA, 22 nt, Artificial Sequence
  Synthetic
ugaaaaagcccaaacugcucca

SEQ ID NO: 466300 - RNA, 23 nt, Artificial Sequence
  Synthetic
gugaaaaagcccaaacugcucca

SEQ ID NO: 466301 - RNA, 24 nt, Artificial Sequence
  Synthetic
ugugaaaaagcccaaacugcucca

SEQ ID NO: 466302 - RNA, 18 nt, Artificial Sequence
  Synthetic
gcaucuaggccaucucca

SEQ ID NO: 466303 - RNA, 19 nt, Artificial Sequence
  Synthetic
ggcaucuaggccaucucca

SEQ ID NO: 466304 - RNA, 20 nt, Artificial Sequence
  Synthetic
aggcaucuaggccaucucca

SEQ ID NO: 466305 - RNA, 21 nt, Artificial Sequence
  Synthetic
caggcaucuaggccaucucca

SEQ ID NO: 466306 - RNA, 22 nt, Artificial Sequence
  Synthetic
gcaggcaucuaggccaucucca

SEQ ID NO: 466307 - RNA, 23 nt, Artificial Sequence
  Synthetic
agcaggcaucuaggccaucucca

SEQ ID NO: 466308 - RNA, 24 nt, Artificial Sequence
  Synthetic
gagcaggcaucuaggccaucucca

SEQ ID NO: 466309 - RNA, 18 nt, Artificial Sequence
  Synthetic
agcauacgugcaucucca

SEQ ID NO: 466310 - RNA, 19 nt, Artificial Sequence
  Synthetic
cagcauacgugcaucucca

SEQ ID NO: 466311 - RNA, 20 nt, Artificial Sequence
  Synthetic
ucagcauacgugcaucucca

SEQ ID NO: 466312 - RNA, 21 nt, Artificial Sequence
  Synthetic
cucagcauacgugcaucucca

SEQ ID NO: 466313 - RNA, 22 nt, Artificial Sequence
  Synthetic
ucucagcauacgugcaucucca

SEQ ID NO: 466314 - RNA, 23 nt, Artificial Sequence
  Synthetic
uucucagcauacgugcaucucca

SEQ ID NO: 466315 - RNA, 24 nt, Artificial Sequence
  Synthetic
uuucucagcauacgugcaucucca

SEQ ID NO: 466316 - RNA, 18 nt, Artificial Sequence
  Synthetic
agacuaauaugaucucca

SEQ ID NO: 466317 - RNA, 19 nt, Artificial Sequence
  Synthetic
uagacuaauaugaucucca

SEQ ID NO: 466318 - RNA, 20 nt, Artificial Sequence
  Synthetic
cuagacuaauaugaucucca

SEQ ID NO: 466319 - RNA, 21 nt, Artificial Sequence
  Synthetic
ucuagacuaauaugaucucca

SEQ ID NO: 466320 - RNA, 22 nt, Artificial Sequence
  Synthetic
aucuagacuaauaugaucucca

SEQ ID NO: 466321 - RNA, 23 nt, Artificial Sequence
  Synthetic
caucuagacuaauaugaucucca

SEQ ID NO: 466322 - RNA, 24 nt, Artificial Sequence
  Synthetic
ccaucuagacuaauaugaucucca

SEQ ID NO: 466323 - RNA, 18 nt, Artificial Sequence
  Synthetic
ccuuuggcuguaucucca

SEQ ID NO: 466324 - RNA, 19 nt, Artificial Sequence
  Synthetic
accuuuggcuguaucucca

SEQ ID NO: 466325 - RNA, 20 nt, Artificial Sequence
  Synthetic
caccuuuggcuguaucucca

SEQ ID NO: 466326 - RNA, 21 nt, Artificial Sequence
  Synthetic
ccaccuuuggcuguaucucca

SEQ ID NO: 466327 - RNA, 22 nt, Artificial Sequence
  Synthetic
gccaccuuuggcuguaucucca

SEQ ID NO: 466328 - RNA, 23 nt, Artificial Sequence
  Synthetic
ugccaccuuuggcuguaucucca

SEQ ID NO: 466329 - RNA, 24 nt, Artificial Sequence
  Synthetic
augccaccuuuggcuguaucucca

SEQ ID NO: 466330 - RNA, 18 nt, Artificial Sequence
  Synthetic
cuuguggguguaucucca

SEQ ID NO: 466331 - RNA, 19 nt, Artificial Sequence
  Synthetic
ccuuguggguguaucucca

SEQ ID NO: 466332 - RNA, 20 nt, Artificial Sequence
  Synthetic
uccuuguggguguaucucca

SEQ ID NO: 466333 - RNA, 21 nt, Artificial Sequence
  Synthetic
uuccuuguggguguaucucca

SEQ ID NO: 466334 - RNA, 22 nt, Artificial Sequence
  Synthetic
cuuccuuguggguguaucucca

SEQ ID NO: 466335 - RNA, 23 nt, Artificial Sequence
  Synthetic
ucuuccuuguggguguaucucca

SEQ ID NO: 466336 - RNA, 24 nt, Artificial Sequence
  Synthetic
cucuuccuuguggguguaucucca

SEQ ID NO: 466337 - RNA, 18 nt, Artificial Sequence
  Synthetic
ucuauaaaccccucucca

SEQ ID NO: 466338 - RNA, 19 nt, Artificial Sequence
  Synthetic
uucuauaaaccccucucca

SEQ ID NO: 466339 - RNA, 20 nt, Artificial Sequence
  Synthetic
uuucuauaaaccccucucca

SEQ ID NO: 466340 - RNA, 21 nt, Artificial Sequence
  Synthetic
auuucuauaaaccccucucca

SEQ ID NO: 466341 - RNA, 22 nt, Artificial Sequence
  Synthetic
gauuucuauaaaccccucucca

SEQ ID NO: 466342 - RNA, 23 nt, Artificial Sequence
  Synthetic
agauuucuauaaaccccucucca

SEQ ID NO: 466343 - RNA, 24 nt, Artificial Sequence
  Synthetic
cagauuucuauaaaccccucucca

SEQ ID NO: 466344 - RNA, 18 nt, Artificial Sequence
  Synthetic
uguucugcaggcucucca

SEQ ID NO: 466345 - RNA, 19 nt, Artificial Sequence
  Synthetic
auguucugcaggcucucca

SEQ ID NO: 466346 - RNA, 20 nt, Artificial Sequence
  Synthetic
uauguucugcaggcucucca

SEQ ID NO: 466347 - RNA, 21 nt, Artificial Sequence
  Synthetic
uuauguucugcaggcucucca

SEQ ID NO: 466348 - RNA, 22 nt, Artificial Sequence
  Synthetic
guuauguucugcaggcucucca

SEQ ID NO: 466349 - RNA, 23 nt, Artificial Sequence
  Synthetic
gguuauguucugcaggcucucca

SEQ ID NO: 466350 - RNA, 24 nt, Artificial Sequence
  Synthetic
ugguuauguucugcaggcucucca

SEQ ID NO: 466351 - RNA, 18 nt, Artificial Sequence
  Synthetic
aauauuuaacucucucca

SEQ ID NO: 466352 - RNA, 19 nt, Artificial Sequence
  Synthetic
aaauauuuaacucucucca

SEQ ID NO: 466353 - RNA, 20 nt, Artificial Sequence
  Synthetic
caaauauuuaacucucucca

SEQ ID NO: 466354 - RNA, 21 nt, Artificial Sequence
  Synthetic
ucaaauauuuaacucucucca

SEQ ID NO: 466355 - RNA, 22 nt, Artificial Sequence
  Synthetic
uucaaauauuuaacucucucca

SEQ ID NO: 466356 - RNA, 23 nt, Artificial Sequence
  Synthetic
uuucaaauauuuaacucucucca

SEQ ID NO: 466357 - RNA, 24 nt, Artificial Sequence
  Synthetic
cuuucaaauauuuaacucucucca

SEQ ID NO: 466358 - RNA, 18 nt, Artificial Sequence
  Synthetic
uggaugguauagucucca

SEQ ID NO: 466359 - RNA, 19 nt, Artificial Sequence
  Synthetic
guggaugguauagucucca

SEQ ID NO: 466360 - RNA, 20 nt, Artificial Sequence
  Synthetic
uguggaugguauagucucca

SEQ ID NO: 466361 - RNA, 21 nt, Artificial Sequence
  Synthetic
auguggaugguauagucucca

SEQ ID NO: 466362 - RNA, 22 nt, Artificial Sequence
  Synthetic
uauguggaugguauagucucca

SEQ ID NO: 466363 - RNA, 23 nt, Artificial Sequence
  Synthetic
auauguggaugguauagucucca

SEQ ID NO: 466364 - RNA, 24 nt, Artificial Sequence
  Synthetic
aauauguggaugguauagucucca

SEQ ID NO: 466365 - RNA, 18 nt, Artificial Sequence
  Synthetic
uaagucaucuagucucca

SEQ ID NO: 466366 - RNA, 19 nt, Artificial Sequence
  Synthetic
auaagucaucuagucucca

SEQ ID NO: 466367 - RNA, 20 nt, Artificial Sequence
  Synthetic
cauaagucaucuagucucca

SEQ ID NO: 466368 - RNA, 21 nt, Artificial Sequence
  Synthetic
acauaagucaucuagucucca

SEQ ID NO: 466369 - RNA, 22 nt, Artificial Sequence
  Synthetic
aacauaagucaucuagucucca

SEQ ID NO: 466370 - RNA, 23 nt, Artificial Sequence
  Synthetic
uaacauaagucaucuagucucca

SEQ ID NO: 466371 - RNA, 24 nt, Artificial Sequence
  Synthetic
auaacauaagucaucuagucucca

SEQ ID NO: 466372 - RNA, 18 nt, Artificial Sequence
  Synthetic
aaauauauguggucucca

SEQ ID NO: 466373 - RNA, 19 nt, Artificial Sequence
  Synthetic
gaaauauauguggucucca

SEQ ID NO: 466374 - RNA, 20 nt, Artificial Sequence
  Synthetic
agaaauauauguggucucca

SEQ ID NO: 466375 - RNA, 21 nt, Artificial Sequence
  Synthetic
aagaaauauauguggucucca

SEQ ID NO: 466376 - RNA, 22 nt, Artificial Sequence
  Synthetic
uaagaaauauauguggucucca

SEQ ID NO: 466377 - RNA, 23 nt, Artificial Sequence
  Synthetic
cuaagaaauauauguggucucca

SEQ ID NO: 466378 - RNA, 24 nt, Artificial Sequence
  Synthetic
ccuaagaaauauauguggucucca

SEQ ID NO: 466379 - RNA, 18 nt, Artificial Sequence
  Synthetic
auuacuucuuggucucca

SEQ ID NO: 466380 - RNA, 19 nt, Artificial Sequence
  Synthetic
cauuacuucuuggucucca

SEQ ID NO: 466381 - RNA, 20 nt, Artificial Sequence
  Synthetic
acauuacuucuuggucucca

SEQ ID NO: 466382 - RNA, 21 nt, Artificial Sequence
  Synthetic
aacauuacuucuuggucucca

SEQ ID NO: 466383 - RNA, 22 nt, Artificial Sequence
  Synthetic
aaacauuacuucuuggucucca

SEQ ID NO: 466384 - RNA, 23 nt, Artificial Sequence
  Synthetic
caaacauuacuucuuggucucca

SEQ ID NO: 466385 - RNA, 24 nt, Artificial Sequence
  Synthetic
ccaaacauuacuucuuggucucca

SEQ ID NO: 466386 - RNA, 18 nt, Artificial Sequence
  Synthetic
caaauuucccugucucca

SEQ ID NO: 466387 - RNA, 19 nt, Artificial Sequence
  Synthetic
gcaaauuucccugucucca

SEQ ID NO: 466388 - RNA, 20 nt, Artificial Sequence
  Synthetic
ugcaaauuucccugucucca

SEQ ID NO: 466389 - RNA, 21 nt, Artificial Sequence
  Synthetic
cugcaaauuucccugucucca

SEQ ID NO: 466390 - RNA, 22 nt, Artificial Sequence
  Synthetic
acugcaaauuucccugucucca

SEQ ID NO: 466391 - RNA, 23 nt, Artificial Sequence
  Synthetic
aacugcaaauuucccugucucca

SEQ ID NO: 466392 - RNA, 24 nt, Artificial Sequence
  Synthetic
gaacugcaaauuucccugucucca

SEQ ID NO: 466393 - RNA, 18 nt, Artificial Sequence
  Synthetic
cauuaacuaacuucucca

SEQ ID NO: 466394 - RNA, 19 nt, Artificial Sequence
  Synthetic
ccauuaacuaacuucucca

SEQ ID NO: 466395 - RNA, 20 nt, Artificial Sequence
  Synthetic
uccauuaacuaacuucucca

SEQ ID NO: 466396 - RNA, 21 nt, Artificial Sequence
  Synthetic
auccauuaacuaacuucucca

SEQ ID NO: 466397 - RNA, 22 nt, Artificial Sequence
  Synthetic
cauccauuaacuaacuucucca

SEQ ID NO: 466398 - RNA, 23 nt, Artificial Sequence
  Synthetic
gcauccauuaacuaacuucucca

SEQ ID NO: 466399 - RNA, 24 nt, Artificial Sequence
  Synthetic
ugcauccauuaacuaacuucucca

SEQ ID NO: 466400 - RNA, 18 nt, Artificial Sequence
  Synthetic
cuuuuugauacuucucca

SEQ ID NO: 466401 - RNA, 19 nt, Artificial Sequence
  Synthetic
acuuuuugauacuucucca

SEQ ID NO: 466402 - RNA, 20 nt, Artificial Sequence
  Synthetic
aacuuuuugauacuucucca

SEQ ID NO: 466403 - RNA, 21 nt, Artificial Sequence
  Synthetic
aaacuuuuugauacuucucca

SEQ ID NO: 466404 - RNA, 22 nt, Artificial Sequence
  Synthetic
aaaacuuuuugauacuucucca

SEQ ID NO: 466405 - RNA, 23 nt, Artificial Sequence
  Synthetic
caaaacuuuuugauacuucucca

SEQ ID NO: 466406 - RNA, 24 nt, Artificial Sequence
  Synthetic
ucaaaacuuuuugauacuucucca

SEQ ID NO: 466407 - RNA, 18 nt, Artificial Sequence
  Synthetic
agguaauuuucuucucca

SEQ ID NO: 466408 - RNA, 19 nt, Artificial Sequence
  Synthetic
uagguaauuuucuucucca

SEQ ID NO: 466409 - RNA, 20 nt, Artificial Sequence
  Synthetic
auagguaauuuucuucucca

SEQ ID NO: 466410 - RNA, 21 nt, Artificial Sequence
  Synthetic
aauagguaauuuucuucucca

SEQ ID NO: 466411 - RNA, 22 nt, Artificial Sequence
  Synthetic
aaauagguaauuuucuucucca

SEQ ID NO: 466412 - RNA, 23 nt, Artificial Sequence
  Synthetic
caaauagguaauuuucuucucca

SEQ ID NO: 466413 - RNA, 24 nt, Artificial Sequence
  Synthetic
acaaauagguaauuuucuucucca

SEQ ID NO: 466414 - RNA, 18 nt, Artificial Sequence
  Synthetic
aaauaaaggaguucucca

SEQ ID NO: 466415 - RNA, 19 nt, Artificial Sequence
  Synthetic
aaaauaaaggaguucucca

SEQ ID NO: 466416 - RNA, 20 nt, Artificial Sequence
  Synthetic
gaaaauaaaggaguucucca

SEQ ID NO: 466417 - RNA, 21 nt, Artificial Sequence
  Synthetic
agaaaauaaaggaguucucca

SEQ ID NO: 466418 - RNA, 22 nt, Artificial Sequence
  Synthetic
gagaaaauaaaggaguucucca

SEQ ID NO: 466419 - RNA, 23 nt, Artificial Sequence
  Synthetic
agagaaaauaaaggaguucucca

SEQ ID NO: 466420 - RNA, 24 nt, Artificial Sequence
  Synthetic
aagagaaaauaaaggaguucucca

SEQ ID NO: 466421 - RNA, 18 nt, Artificial Sequence
  Synthetic
uaaauagacauuucucca

SEQ ID NO: 466422 - RNA, 19 nt, Artificial Sequence
  Synthetic
uuaaauagacauuucucca

SEQ ID NO: 466423 - RNA, 20 nt, Artificial Sequence
  Synthetic
uuuaaauagacauuucucca

SEQ ID NO: 466424 - RNA, 21 nt, Artificial Sequence
  Synthetic
auuuaaauagacauuucucca

SEQ ID NO: 466425 - RNA, 22 nt, Artificial Sequence
  Synthetic
gauuuaaauagacauuucucca

SEQ ID NO: 466426 - RNA, 23 nt, Artificial Sequence
  Synthetic
ggauuuaaauagacauuucucca

SEQ ID NO: 466427 - RNA, 24 nt, Artificial Sequence
  Synthetic
aggauuuaaauagacauuucucca

SEQ ID NO: 466428 - RNA, 18 nt, Artificial Sequence
  Synthetic
ugaauagacauuucucca

SEQ ID NO: 466429 - RNA, 19 nt, Artificial Sequence
  Synthetic
cugaauagacauuucucca

SEQ ID NO: 466430 - RNA, 20 nt, Artificial Sequence
  Synthetic
ccugaauagacauuucucca

SEQ ID NO: 466431 - RNA, 21 nt, Artificial Sequence
  Synthetic
accugaauagacauuucucca

SEQ ID NO: 466432 - RNA, 22 nt, Artificial Sequence
  Synthetic
aaccugaauagacauuucucca

SEQ ID NO: 466433 - RNA, 23 nt, Artificial Sequence
  Synthetic
uaaccugaauagacauuucucca

SEQ ID NO: 466434 - RNA, 24 nt, Artificial Sequence
  Synthetic
guaaccugaauagacauuucucca

SEQ ID NO: 466435 - RNA, 18 nt, Artificial Sequence
  Synthetic
ugaauagauauuucucca

SEQ ID NO: 466436 - RNA, 19 nt, Artificial Sequence
  Synthetic
uugaauagauauuucucca

SEQ ID NO: 466437 - RNA, 20 nt, Artificial Sequence
  Synthetic
auugaauagauauuucucca

SEQ ID NO: 466438 - RNA, 21 nt, Artificial Sequence
  Synthetic
aauugaauagauauuucucca

SEQ ID NO: 466439 - RNA, 22 nt, Artificial Sequence
  Synthetic
gaauugaauagauauuucucca

SEQ ID NO: 466440 - RNA, 23 nt, Artificial Sequence
  Synthetic
ggaauugaauagauauuucucca

SEQ ID NO: 466441 - RNA, 24 nt, Artificial Sequence
  Synthetic
aggaauugaauagauauuucucca

SEQ ID NO: 466442 - RNA, 18 nt, Artificial Sequence
  Synthetic
agcgaguaucuuucucca

SEQ ID NO: 466443 - RNA, 19 nt, Artificial Sequence
  Synthetic
cagcgaguaucuuucucca

SEQ ID NO: 466444 - RNA, 20 nt, Artificial Sequence
  Synthetic
gcagcgaguaucuuucucca

SEQ ID NO: 466445 - RNA, 21 nt, Artificial Sequence
  Synthetic
ugcagcgaguaucuuucucca

SEQ ID NO: 466446 - RNA, 22 nt, Artificial Sequence
  Synthetic
augcagcgaguaucuuucucca

SEQ ID NO: 466447 - RNA, 23 nt, Artificial Sequence
  Synthetic
uaugcagcgaguaucuuucucca

SEQ ID NO: 466448 - RNA, 24 nt, Artificial Sequence
  Synthetic
uuaugcagcgaguaucuuucucca

SEQ ID NO: 466449 - RNA, 18 nt, Artificial Sequence
  Synthetic
uuuuuuuuuuuuucucca

SEQ ID NO: 466450 - RNA, 19 nt, Artificial Sequence
  Synthetic
guuuuuuuuuuuuucucca

SEQ ID NO: 466451 - RNA, 20 nt, Artificial Sequence
  Synthetic
aguuuuuuuuuuuuucucca

SEQ ID NO: 466452 - RNA, 21 nt, Artificial Sequence
  Synthetic
gaguuuuuuuuuuuuucucca

SEQ ID NO: 466453 - RNA, 22 nt, Artificial Sequence
  Synthetic
ggaguuuuuuuuuuuuucucca

SEQ ID NO: 466454 - RNA, 23 nt, Artificial Sequence
  Synthetic
gggaguuuuuuuuuuuuucucca

SEQ ID NO: 466455 - RNA, 24 nt, Artificial Sequence
  Synthetic
agggaguuuuuuuuuuuuucucca

SEQ ID NO: 466456 - RNA, 18 nt, Artificial Sequence
  Synthetic
guauucuucucaagucca

SEQ ID NO: 466457 - RNA, 19 nt, Artificial Sequence
  Synthetic
gguauucuucucaagucca

SEQ ID NO: 466458 - RNA, 20 nt, Artificial Sequence
  Synthetic
ggguauucuucucaagucca

SEQ ID NO: 466459 - RNA, 21 nt, Artificial Sequence
  Synthetic
aggguauucuucucaagucca

SEQ ID NO: 466460 - RNA, 22 nt, Artificial Sequence
  Synthetic
aaggguauucuucucaagucca

SEQ ID NO: 466461 - RNA, 23 nt, Artificial Sequence
  Synthetic
uaaggguauucuucucaagucca

SEQ ID NO: 466462 - RNA, 24 nt, Artificial Sequence
  Synthetic
cuaaggguauucuucucaagucca

SEQ ID NO: 466463 - RNA, 18 nt, Artificial Sequence
  Synthetic
uugcaggagcuaagucca

SEQ ID NO: 466464 - RNA, 19 nt, Artificial Sequence
  Synthetic
guugcaggagcuaagucca

SEQ ID NO: 466465 - RNA, 20 nt, Artificial Sequence
  Synthetic
aguugcaggagcuaagucca

SEQ ID NO: 466466 - RNA, 21 nt, Artificial Sequence
  Synthetic
gaguugcaggagcuaagucca

SEQ ID NO: 466467 - RNA, 22 nt, Artificial Sequence
  Synthetic
agaguugcaggagcuaagucca

SEQ ID NO: 466468 - RNA, 23 nt, Artificial Sequence
  Synthetic
gagaguugcaggagcuaagucca

SEQ ID NO: 466469 - RNA, 24 nt, Artificial Sequence
  Synthetic
ggagaguugcaggagcuaagucca

SEQ ID NO: 466470 - RNA, 18 nt, Artificial Sequence
  Synthetic
caaagaggacagagucca

SEQ ID NO: 466471 - RNA, 19 nt, Artificial Sequence
  Synthetic
acaaagaggacagagucca

SEQ ID NO: 466472 - RNA, 20 nt, Artificial Sequence
  Synthetic
aacaaagaggacagagucca

SEQ ID NO: 466473 - RNA, 21 nt, Artificial Sequence
  Synthetic
aaacaaagaggacagagucca

SEQ ID NO: 466474 - RNA, 22 nt, Artificial Sequence
  Synthetic
aaaacaaagaggacagagucca

SEQ ID NO: 466475 - RNA, 23 nt, Artificial Sequence
  Synthetic
aaaaacaaagaggacagagucca

SEQ ID NO: 466476 - RNA, 24 nt, Artificial Sequence
  Synthetic
aaaaaacaaagaggacagagucca

SEQ ID NO: 466477 - RNA, 18 nt, Artificial Sequence
  Synthetic
ggugaccaagugagucca

SEQ ID NO: 466478 - RNA, 19 nt, Artificial Sequence
  Synthetic
gggugaccaagugagucca

SEQ ID NO: 466479 - RNA, 20 nt, Artificial Sequence
  Synthetic
agggugaccaagugagucca

SEQ ID NO: 466480 - RNA, 21 nt, Artificial Sequence
  Synthetic
gagggugaccaagugagucca

SEQ ID NO: 466481 - RNA, 22 nt, Artificial Sequence
  Synthetic
agagggugaccaagugagucca

SEQ ID NO: 466482 - RNA, 23 nt, Artificial Sequence
  Synthetic
aagagggugaccaagugagucca

SEQ ID NO: 466483 - RNA, 24 nt, Artificial Sequence
  Synthetic
gaagagggugaccaagugagucca

SEQ ID NO: 466484 - RNA, 18 nt, Artificial Sequence
  Synthetic
uuuuaugaacauagucca

SEQ ID NO: 466485 - RNA, 19 nt, Artificial Sequence
  Synthetic
auuuuaugaacauagucca

SEQ ID NO: 466486 - RNA, 20 nt, Artificial Sequence
  Synthetic
uauuuuaugaacauagucca

SEQ ID NO: 466487 - RNA, 21 nt, Artificial Sequence
  Synthetic
uuauuuuaugaacauagucca

SEQ ID NO: 466488 - RNA, 22 nt, Artificial Sequence
  Synthetic
auuauuuuaugaacauagucca

SEQ ID NO: 466489 - RNA, 23 nt, Artificial Sequence
  Synthetic
uauuauuuuaugaacauagucca

SEQ ID NO: 466490 - RNA, 24 nt, Artificial Sequence
  Synthetic
cuauuauuuuaugaacauagucca

SEQ ID NO: 466491 - RNA, 18 nt, Artificial Sequence
  Synthetic
ccuauucaggcuagucca

SEQ ID NO: 466492 - RNA, 19 nt, Artificial Sequence
  Synthetic
uccuauucaggcuagucca

SEQ ID NO: 466493 - RNA, 20 nt, Artificial Sequence
  Synthetic
uuccuauucaggcuagucca

SEQ ID NO: 466494 - RNA, 21 nt, Artificial Sequence
  Synthetic
guuccuauucaggcuagucca

SEQ ID NO: 466495 - RNA, 22 nt, Artificial Sequence
  Synthetic
aguuccuauucaggcuagucca

SEQ ID NO: 466496 - RNA, 23 nt, Artificial Sequence
  Synthetic
aaguuccuauucaggcuagucca

SEQ ID NO: 466497 - RNA, 24 nt, Artificial Sequence
  Synthetic
caaguuccuauucaggcuagucca

SEQ ID NO: 466498 - RNA, 18 nt, Artificial Sequence
  Synthetic
aauuauacauaaggucca

SEQ ID NO: 466499 - RNA, 19 nt, Artificial Sequence
  Synthetic
aaauuauacauaaggucca

SEQ ID NO: 466500 - RNA, 20 nt, Artificial Sequence
  Synthetic
uaaauuauacauaaggucca

SEQ ID NO: 466501 - RNA, 21 nt, Artificial Sequence
  Synthetic
cuaaauuauacauaaggucca

SEQ ID NO: 466502 - RNA, 22 nt, Artificial Sequence
  Synthetic
ucuaaauuauacauaaggucca

SEQ ID NO: 466503 - RNA, 23 nt, Artificial Sequence
  Synthetic
aucuaaauuauacauaaggucca

SEQ ID NO: 466504 - RNA, 24 nt, Artificial Sequence
  Synthetic
caucuaaauuauacauaaggucca

SEQ ID NO: 466505 - RNA, 18 nt, Artificial Sequence
  Synthetic
gcugauguugcuggucca

SEQ ID NO: 466506 - RNA, 19 nt, Artificial Sequence
  Synthetic
ugcugauguugcuggucca

SEQ ID NO: 466507 - RNA, 20 nt, Artificial Sequence
  Synthetic
gugcugauguugcuggucca

SEQ ID NO: 466508 - RNA, 21 nt, Artificial Sequence
  Synthetic
ggugcugauguugcuggucca

SEQ ID NO: 466509 - RNA, 22 nt, Artificial Sequence
  Synthetic
uggugcugauguugcuggucca

SEQ ID NO: 466510 - RNA, 23 nt, Artificial Sequence
  Synthetic
auggugcugauguugcuggucca

SEQ ID NO: 466511 - RNA, 24 nt, Artificial Sequence
  Synthetic
gauggugcugauguugcuggucca

SEQ ID NO: 466512 - RNA, 18 nt, Artificial Sequence
  Synthetic
ugaauauguauuggucca

SEQ ID NO: 466513 - RNA, 19 nt, Artificial Sequence
  Synthetic
uugaauauguauuggucca

SEQ ID NO: 466514 - RNA, 20 nt, Artificial Sequence
  Synthetic
cuugaauauguauuggucca

SEQ ID NO: 466515 - RNA, 21 nt, Artificial Sequence
  Synthetic
ucuugaauauguauuggucca

SEQ ID NO: 466516 - RNA, 22 nt, Artificial Sequence
  Synthetic
cucuugaauauguauuggucca

SEQ ID NO: 466517 - RNA, 23 nt, Artificial Sequence
  Synthetic
ucucuugaauauguauuggucca

SEQ ID NO: 466518 - RNA, 24 nt, Artificial Sequence
  Synthetic
cucucuugaauauguauuggucca

SEQ ID NO: 466519 - RNA, 18 nt, Artificial Sequence
  Synthetic
uaaaacugcuuaugucca

SEQ ID NO: 466520 - RNA, 19 nt, Artificial Sequence
  Synthetic
uuaaaacugcuuaugucca

SEQ ID NO: 466521 - RNA, 20 nt, Artificial Sequence
  Synthetic
guuaaaacugcuuaugucca

SEQ ID NO: 466522 - RNA, 21 nt, Artificial Sequence
  Synthetic
aguuaaaacugcuuaugucca

SEQ ID NO: 466523 - RNA, 22 nt, Artificial Sequence
  Synthetic
aaguuaaaacugcuuaugucca

SEQ ID NO: 466524 - RNA, 23 nt, Artificial Sequence
  Synthetic
uaaguuaaaacugcuuaugucca

SEQ ID NO: 466525 - RNA, 24 nt, Artificial Sequence
  Synthetic
cuaaguuaaaacugcuuaugucca

SEQ ID NO: 466526 - RNA, 18 nt, Artificial Sequence
  Synthetic
cuacucagucucugucca

SEQ ID NO: 466527 - RNA, 19 nt, Artificial Sequence
  Synthetic
ucuacucagucucugucca

SEQ ID NO: 466528 - RNA, 20 nt, Artificial Sequence
  Synthetic
uucuacucagucucugucca

SEQ ID NO: 466529 - RNA, 21 nt, Artificial Sequence
  Synthetic
auucuacucagucucugucca

SEQ ID NO: 466530 - RNA, 22 nt, Artificial Sequence
  Synthetic
uauucuacucagucucugucca

SEQ ID NO: 466531 - RNA, 23 nt, Artificial Sequence
  Synthetic
uuauucuacucagucucugucca

SEQ ID NO: 466532 - RNA, 24 nt, Artificial Sequence
  Synthetic
uuuauucuacucagucucugucca

SEQ ID NO: 466533 - RNA, 18 nt, Artificial Sequence
  Synthetic
ucccauacaaguugucca

SEQ ID NO: 466534 - RNA, 19 nt, Artificial Sequence
  Synthetic
aucccauacaaguugucca

SEQ ID NO: 466535 - RNA, 20 nt, Artificial Sequence
  Synthetic
aaucccauacaaguugucca

SEQ ID NO: 466536 - RNA, 21 nt, Artificial Sequence
  Synthetic
aaaucccauacaaguugucca

SEQ ID NO: 466537 - RNA, 22 nt, Artificial Sequence
  Synthetic
aaaaucccauacaaguugucca

SEQ ID NO: 466538 - RNA, 23 nt, Artificial Sequence
  Synthetic
aaaaaucccauacaaguugucca

SEQ ID NO: 466539 - RNA, 24 nt, Artificial Sequence
  Synthetic
uaaaaaucccauacaaguugucca

SEQ ID NO: 466540 - RNA, 18 nt, Artificial Sequence
  Synthetic
augauucuaacaauucca

SEQ ID NO: 466541 - RNA, 19 nt, Artificial Sequence
  Synthetic
gaugauucuaacaauucca

SEQ ID NO: 466542 - RNA, 20 nt, Artificial Sequence
  Synthetic
ugaugauucuaacaauucca

SEQ ID NO: 466543 - RNA, 21 nt, Artificial Sequence
  Synthetic
uugaugauucuaacaauucca

SEQ ID NO: 466544 - RNA, 22 nt, Artificial Sequence
  Synthetic
auugaugauucuaacaauucca

SEQ ID NO: 466545 - RNA, 23 nt, Artificial Sequence
  Synthetic
aauugaugauucuaacaauucca

SEQ ID NO: 466546 - RNA, 24 nt, Artificial Sequence
  Synthetic
uaauugaugauucuaacaauucca

SEQ ID NO: 466547 - RNA, 18 nt, Artificial Sequence
  Synthetic
auccuaccuacaauucca

SEQ ID NO: 466548 - RNA, 19 nt, Artificial Sequence
  Synthetic
gauccuaccuacaauucca

SEQ ID NO: 466549 - RNA, 20 nt, Artificial Sequence
  Synthetic
ugauccuaccuacaauucca

SEQ ID NO: 466550 - RNA, 21 nt, Artificial Sequence
  Synthetic
augauccuaccuacaauucca

SEQ ID NO: 466551 - RNA, 22 nt, Artificial Sequence
  Synthetic
aaugauccuaccuacaauucca

SEQ ID NO: 466552 - RNA, 23 nt, Artificial Sequence
  Synthetic
aaaugauccuaccuacaauucca

SEQ ID NO: 466553 - RNA, 24 nt, Artificial Sequence
  Synthetic
uaaaugauccuaccuacaauucca

SEQ ID NO: 466554 - RNA, 18 nt, Artificial Sequence
  Synthetic
auguggaauggaauucca

SEQ ID NO: 466555 - RNA, 19 nt, Artificial Sequence
  Synthetic
aauguggaauggaauucca

SEQ ID NO: 466556 - RNA, 20 nt, Artificial Sequence
  Synthetic
aaauguggaauggaauucca

SEQ ID NO: 466557 - RNA, 21 nt, Artificial Sequence
  Synthetic
aaaauguggaauggaauucca

SEQ ID NO: 466558 - RNA, 22 nt, Artificial Sequence
  Synthetic
uaaaauguggaauggaauucca

SEQ ID NO: 466559 - RNA, 23 nt, Artificial Sequence
  Synthetic
uuaaaauguggaauggaauucca

SEQ ID NO: 466560 - RNA, 24 nt, Artificial Sequence
  Synthetic
guuaaaauguggaauggaauucca

SEQ ID NO: 466561 - RNA, 18 nt, Artificial Sequence
  Synthetic
guuacuguguuaauucca

SEQ ID NO: 466562 - RNA, 19 nt, Artificial Sequence
  Synthetic
gguuacuguguuaauucca

SEQ ID NO: 466563 - RNA, 20 nt, Artificial Sequence
  Synthetic
ggguuacuguguuaauucca

SEQ ID NO: 466564 - RNA, 21 nt, Artificial Sequence
  Synthetic
gggguuacuguguuaauucca

SEQ ID NO: 466565 - RNA, 22 nt, Artificial Sequence
  Synthetic
ggggguuacuguguuaauucca

SEQ ID NO: 466566 - RNA, 23 nt, Artificial Sequence
  Synthetic
gggggguuacuguguuaauucca

SEQ ID NO: 466567 - RNA, 24 nt, Artificial Sequence
  Synthetic
agggggguuacuguguuaauucca

SEQ ID NO: 466568 - RNA, 18 nt, Artificial Sequence
  Synthetic
aaaggugcacacauucca

SEQ ID NO: 466569 - RNA, 19 nt, Artificial Sequence
  Synthetic
gaaaggugcacacauucca

SEQ ID NO: 466570 - RNA, 20 nt, Artificial Sequence
  Synthetic
agaaaggugcacacauucca

SEQ ID NO: 466571 - RNA, 21 nt, Artificial Sequence
  Synthetic
cagaaaggugcacacauucca

SEQ ID NO: 466572 - RNA, 22 nt, Artificial Sequence
  Synthetic
ccagaaaggugcacacauucca

SEQ ID NO: 466573 - RNA, 23 nt, Artificial Sequence
  Synthetic
gccagaaaggugcacacauucca

SEQ ID NO: 466574 - RNA, 24 nt, Artificial Sequence
  Synthetic
ugccagaaaggugcacacauucca

SEQ ID NO: 466575 - RNA, 18 nt, Artificial Sequence
  Synthetic
uccucacaagacauucca

SEQ ID NO: 466576 - RNA, 19 nt, Artificial Sequence
  Synthetic
uuccucacaagacauucca

SEQ ID NO: 466577 - RNA, 20 nt, Artificial Sequence
  Synthetic
auuccucacaagacauucca

SEQ ID NO: 466578 - RNA, 21 nt, Artificial Sequence
  Synthetic
uauuccucacaagacauucca

SEQ ID NO: 466579 - RNA, 22 nt, Artificial Sequence
  Synthetic
auauuccucacaagacauucca

SEQ ID NO: 466580 - RNA, 23 nt, Artificial Sequence
  Synthetic
aauauuccucacaagacauucca

SEQ ID NO: 466581 - RNA, 24 nt, Artificial Sequence
  Synthetic
caauauuccucacaagacauucca

SEQ ID NO: 466582 - RNA, 18 nt, Artificial Sequence
  Synthetic
ugccuucaauacauucca

SEQ ID NO: 466583 - RNA, 19 nt, Artificial Sequence
  Synthetic
gugccuucaauacauucca

SEQ ID NO: 466584 - RNA, 20 nt, Artificial Sequence
  Synthetic
ugugccuucaauacauucca

SEQ ID NO: 466585 - RNA, 21 nt, Artificial Sequence
  Synthetic
cugugccuucaauacauucca

SEQ ID NO: 466586 - RNA, 22 nt, Artificial Sequence
  Synthetic
ucugugccuucaauacauucca

SEQ ID NO: 466587 - RNA, 23 nt, Artificial Sequence
  Synthetic
uucugugccuucaauacauucca

SEQ ID NO: 466588 - RNA, 24 nt, Artificial Sequence
  Synthetic
uuucugugccuucaauacauucca

SEQ ID NO: 466589 - RNA, 18 nt, Artificial Sequence
  Synthetic
aggucagcauccauucca

SEQ ID NO: 466590 - RNA, 19 nt, Artificial Sequence
  Synthetic
aaggucagcauccauucca

SEQ ID NO: 466591 - RNA, 20 nt, Artificial Sequence
  Synthetic
caaggucagcauccauucca

SEQ ID NO: 466592 - RNA, 21 nt, Artificial Sequence
  Synthetic
acaaggucagcauccauucca

SEQ ID NO: 466593 - RNA, 22 nt, Artificial Sequence
  Synthetic
gacaaggucagcauccauucca

SEQ ID NO: 466594 - RNA, 23 nt, Artificial Sequence
  Synthetic
ugacaaggucagcauccauucca

SEQ ID NO: 466595 - RNA, 24 nt, Artificial Sequence
  Synthetic
augacaaggucagcauccauucca

SEQ ID NO: 466596 - RNA, 18 nt, Artificial Sequence
  Synthetic
gaauagccauucauucca

SEQ ID NO: 466597 - RNA, 19 nt, Artificial Sequence
  Synthetic
ugaauagccauucauucca

SEQ ID NO: 466598 - RNA, 20 nt, Artificial Sequence
  Synthetic
cugaauagccauucauucca

SEQ ID NO: 466599 - RNA, 21 nt, Artificial Sequence
  Synthetic
ccugaauagccauucauucca

SEQ ID NO: 466600 - RNA, 22 nt, Artificial Sequence
  Synthetic
gccugaauagccauucauucca

SEQ ID NO: 466601 - RNA, 23 nt, Artificial Sequence
  Synthetic
ugccugaauagccauucauucca

SEQ ID NO: 466602 - RNA, 24 nt, Artificial Sequence
  Synthetic
cugccugaauagccauucauucca

SEQ ID NO: 466603 - RNA, 18 nt, Artificial Sequence
  Synthetic
gcugugaaacagauucca

SEQ ID NO: 466604 - RNA, 19 nt, Artificial Sequence
  Synthetic
agcugugaaacagauucca

SEQ ID NO: 466605 - RNA, 20 nt, Artificial Sequence
  Synthetic
gagcugugaaacagauucca

SEQ ID NO: 466606 - RNA, 21 nt, Artificial Sequence
  Synthetic
agagcugugaaacagauucca

SEQ ID NO: 466607 - RNA, 22 nt, Artificial Sequence
  Synthetic
aagagcugugaaacagauucca

SEQ ID NO: 466608 - RNA, 23 nt, Artificial Sequence
  Synthetic
uaagagcugugaaacagauucca

SEQ ID NO: 466609 - RNA, 24 nt, Artificial Sequence
  Synthetic
uuaagagcugugaaacagauucca

SEQ ID NO: 466610 - RNA, 18 nt, Artificial Sequence
  Synthetic
guuuuccaggagauucca

SEQ ID NO: 466611 - RNA, 19 nt, Artificial Sequence
  Synthetic
aguuuuccaggagauucca

SEQ ID NO: 466612 - RNA, 20 nt, Artificial Sequence
  Synthetic
aaguuuuccaggagauucca

SEQ ID NO: 466613 - RNA, 21 nt, Artificial Sequence
  Synthetic
caaguuuuccaggagauucca

SEQ ID NO: 466614 - RNA, 22 nt, Artificial Sequence
  Synthetic
acaaguuuuccaggagauucca

SEQ ID NO: 466615 - RNA, 23 nt, Artificial Sequence
  Synthetic
aacaaguuuuccaggagauucca

SEQ ID NO: 466616 - RNA, 24 nt, Artificial Sequence
  Synthetic
uaacaaguuuuccaggagauucca

SEQ ID NO: 466617 - RNA, 18 nt, Artificial Sequence
  Synthetic
uugaagagacauauucca

SEQ ID NO: 466618 - RNA, 19 nt, Artificial Sequence
  Synthetic
auugaagagacauauucca

SEQ ID NO: 466619 - RNA, 20 nt, Artificial Sequence
  Synthetic
gauugaagagacauauucca

SEQ ID NO: 466620 - RNA, 21 nt, Artificial Sequence
  Synthetic
ggauugaagagacauauucca

SEQ ID NO: 466621 - RNA, 22 nt, Artificial Sequence
  Synthetic
uggauugaagagacauauucca

SEQ ID NO: 466622 - RNA, 23 nt, Artificial Sequence
  Synthetic
auggauugaagagacauauucca

SEQ ID NO: 466623 - RNA, 24 nt, Artificial Sequence
  Synthetic
aauggauugaagagacauauucca

SEQ ID NO: 466624 - RNA, 18 nt, Artificial Sequence
  Synthetic
aagcaauuugauauucca

SEQ ID NO: 466625 - RNA, 19 nt, Artificial Sequence
  Synthetic
aaagcaauuugauauucca

SEQ ID NO: 466626 - RNA, 20 nt, Artificial Sequence
  Synthetic
caaagcaauuugauauucca

SEQ ID NO: 466627 - RNA, 21 nt, Artificial Sequence
  Synthetic
acaaagcaauuugauauucca

SEQ ID NO: 466628 - RNA, 22 nt, Artificial Sequence
  Synthetic
cacaaagcaauuugauauucca

SEQ ID NO: 466629 - RNA, 23 nt, Artificial Sequence
  Synthetic
acacaaagcaauuugauauucca

SEQ ID NO: 466630 - RNA, 24 nt, Artificial Sequence
  Synthetic
gacacaaagcaauuugauauucca

SEQ ID NO: 466631 - RNA, 18 nt, Artificial Sequence
  Synthetic
guauauagguuuauucca

SEQ ID NO: 466632 - RNA, 19 nt, Artificial Sequence
  Synthetic
uguauauagguuuauucca

SEQ ID NO: 466633 - RNA, 20 nt, Artificial Sequence
  Synthetic
auguauauagguuuauucca

SEQ ID NO: 466634 - RNA, 21 nt, Artificial Sequence
  Synthetic
cauguauauagguuuauucca

SEQ ID NO: 466635 - RNA, 22 nt, Artificial Sequence
  Synthetic
ccauguauauagguuuauucca

SEQ ID NO: 466636 - RNA, 23 nt, Artificial Sequence
  Synthetic
gccauguauauagguuuauucca

SEQ ID NO: 466637 - RNA, 24 nt, Artificial Sequence
  Synthetic
ggccauguauauagguuuauucca

SEQ ID NO: 466638 - RNA, 18 nt, Artificial Sequence
  Synthetic
uucuuuuuccaccuucca

SEQ ID NO: 466639 - RNA, 19 nt, Artificial Sequence
  Synthetic
cuucuuuuuccaccuucca

SEQ ID NO: 466640 - RNA, 20 nt, Artificial Sequence
  Synthetic
ccuucuuuuuccaccuucca

SEQ ID NO: 466641 - RNA, 21 nt, Artificial Sequence
  Synthetic
cccuucuuuuuccaccuucca

SEQ ID NO: 466642 - RNA, 22 nt, Artificial Sequence
  Synthetic
ucccuucuuuuuccaccuucca

SEQ ID NO: 466643 - RNA, 23 nt, Artificial Sequence
  Synthetic
uucccuucuuuuuccaccuucca

SEQ ID NO: 466644 - RNA, 24 nt, Artificial Sequence
  Synthetic
uuucccuucuuuuuccaccuucca

SEQ ID NO: 466645 - RNA, 18 nt, Artificial Sequence
  Synthetic
gcccaugaagaccuucca

SEQ ID NO: 466646 - RNA, 19 nt, Artificial Sequence
  Synthetic
ugcccaugaagaccuucca

SEQ ID NO: 466647 - RNA, 20 nt, Artificial Sequence
  Synthetic
uugcccaugaagaccuucca

SEQ ID NO: 466648 - RNA, 21 nt, Artificial Sequence
  Synthetic
auugcccaugaagaccuucca

SEQ ID NO: 466649 - RNA, 22 nt, Artificial Sequence
  Synthetic
cauugcccaugaagaccuucca

SEQ ID NO: 466650 - RNA, 23 nt, Artificial Sequence
  Synthetic
ucauugcccaugaagaccuucca

SEQ ID NO: 466651 - RNA, 24 nt, Artificial Sequence
  Synthetic
uucauugcccaugaagaccuucca

SEQ ID NO: 466652 - RNA, 18 nt, Artificial Sequence
  Synthetic
auauucuuagcccuucca

SEQ ID NO: 466653 - RNA, 19 nt, Artificial Sequence
  Synthetic
cauauucuuagcccuucca

SEQ ID NO: 466654 - RNA, 20 nt, Artificial Sequence
  Synthetic
acauauucuuagcccuucca

SEQ ID NO: 466655 - RNA, 21 nt, Artificial Sequence
  Synthetic
uacauauucuuagcccuucca

SEQ ID NO: 466656 - RNA, 22 nt, Artificial Sequence
  Synthetic
cuacauauucuuagcccuucca

SEQ ID NO: 466657 - RNA, 23 nt, Artificial Sequence
  Synthetic
ucuacauauucuuagcccuucca

SEQ ID NO: 466658 - RNA, 24 nt, Artificial Sequence
  Synthetic
uucuacauauucuuagcccuucca

SEQ ID NO: 466659 - RNA, 18 nt, Artificial Sequence
  Synthetic
uacaaauguugccuucca

SEQ ID NO: 466660 - RNA, 19 nt, Artificial Sequence
  Synthetic
uuacaaauguugccuucca

SEQ ID NO: 466661 - RNA, 20 nt, Artificial Sequence
  Synthetic
auuacaaauguugccuucca

SEQ ID NO: 466662 - RNA, 21 nt, Artificial Sequence
  Synthetic
uauuacaaauguugccuucca

SEQ ID NO: 466663 - RNA, 22 nt, Artificial Sequence
  Synthetic
guauuacaaauguugccuucca

SEQ ID NO: 466664 - RNA, 23 nt, Artificial Sequence
  Synthetic
uguauuacaaauguugccuucca

SEQ ID NO: 466665 - RNA, 24 nt, Artificial Sequence
  Synthetic
cuguauuacaaauguugccuucca

SEQ ID NO: 466666 - RNA, 18 nt, Artificial Sequence
  Synthetic
cuccuuucucagcuucca

SEQ ID NO: 466667 - RNA, 19 nt, Artificial Sequence
  Synthetic
ucuccuuucucagcuucca

SEQ ID NO: 466668 - RNA, 20 nt, Artificial Sequence
  Synthetic
aucuccuuucucagcuucca

SEQ ID NO: 466669 - RNA, 21 nt, Artificial Sequence
  Synthetic
aaucuccuuucucagcuucca

SEQ ID NO: 466670 - RNA, 22 nt, Artificial Sequence
  Synthetic
gaaucuccuuucucagcuucca

SEQ ID NO: 466671 - RNA, 23 nt, Artificial Sequence
  Synthetic
ugaaucuccuuucucagcuucca

SEQ ID NO: 466672 - RNA, 24 nt, Artificial Sequence
  Synthetic
gugaaucuccuuucucagcuucca

SEQ ID NO: 466673 - RNA, 18 nt, Artificial Sequence
  Synthetic
aacuauguguagcuucca

SEQ ID NO: 466674 - RNA, 19 nt, Artificial Sequence
  Synthetic
gaacuauguguagcuucca

SEQ ID NO: 466675 - RNA, 20 nt, Artificial Sequence
  Synthetic
ggaacuauguguagcuucca

SEQ ID NO: 466676 - RNA, 21 nt, Artificial Sequence
  Synthetic
gggaacuauguguagcuucca

SEQ ID NO: 466677 - RNA, 22 nt, Artificial Sequence
  Synthetic
ugggaacuauguguagcuucca

SEQ ID NO: 466678 - RNA, 23 nt, Artificial Sequence
  Synthetic
uugggaacuauguguagcuucca

SEQ ID NO: 466679 - RNA, 24 nt, Artificial Sequence
  Synthetic
uuugggaacuauguguagcuucca

SEQ ID NO: 466680 - RNA, 18 nt, Artificial Sequence
  Synthetic
uuuugaugcaugcuucca

SEQ ID NO: 466681 - RNA, 19 nt, Artificial Sequence
  Synthetic
uuuuugaugcaugcuucca

SEQ ID NO: 466682 - RNA, 20 nt, Artificial Sequence
  Synthetic
uuuuuugaugcaugcuucca

SEQ ID NO: 466683 - RNA, 21 nt, Artificial Sequence
  Synthetic
guuuuuugaugcaugcuucca

SEQ ID NO: 466684 - RNA, 22 nt, Artificial Sequence
  Synthetic
aguuuuuugaugcaugcuucca

SEQ ID NO: 466685 - RNA, 23 nt, Artificial Sequence
  Synthetic
uaguuuuuugaugcaugcuucca

SEQ ID NO: 466686 - RNA, 24 nt, Artificial Sequence
  Synthetic
auaguuuuuugaugcaugcuucca

SEQ ID NO: 466687 - RNA, 18 nt, Artificial Sequence
  Synthetic
gcuuacccucugcuucca

SEQ ID NO: 466688 - RNA, 19 nt, Artificial Sequence
  Synthetic
cgcuuacccucugcuucca

SEQ ID NO: 466689 - RNA, 20 nt, Artificial Sequence
  Synthetic
ccgcuuacccucugcuucca

SEQ ID NO: 466690 - RNA, 21 nt, Artificial Sequence
  Synthetic
gccgcuuacccucugcuucca

SEQ ID NO: 466691 - RNA, 22 nt, Artificial Sequence
  Synthetic
ugccgcuuacccucugcuucca

SEQ ID NO: 466692 - RNA, 23 nt, Artificial Sequence
  Synthetic
augccgcuuacccucugcuucca

SEQ ID NO: 466693 - RNA, 24 nt, Artificial Sequence
  Synthetic
aaugccgcuuacccucugcuucca

SEQ ID NO: 466694 - RNA, 18 nt, Artificial Sequence
  Synthetic
uccauuuucauucuucca

SEQ ID NO: 466695 - RNA, 19 nt, Artificial Sequence
  Synthetic
uuccauuuucauucuucca

SEQ ID NO: 466696 - RNA, 20 nt, Artificial Sequence
  Synthetic
auuccauuuucauucuucca

SEQ ID NO: 466697 - RNA, 21 nt, Artificial Sequence
  Synthetic
uauuccauuuucauucuucca

SEQ ID NO: 466698 - RNA, 22 nt, Artificial Sequence
  Synthetic
auauuccauuuucauucuucca

SEQ ID NO: 466699 - RNA, 23 nt, Artificial Sequence
  Synthetic
aauauuccauuuucauucuucca

SEQ ID NO: 466700 - RNA, 24 nt, Artificial Sequence
  Synthetic
uaauauuccauuuucauucuucca

SEQ ID NO: 466701 - RNA, 18 nt, Artificial Sequence
  Synthetic
augagaaacauaguucca

SEQ ID NO: 466702 - RNA, 19 nt, Artificial Sequence
  Synthetic
uaugagaaacauaguucca

SEQ ID NO: 466703 - RNA, 20 nt, Artificial Sequence
  Synthetic
auaugagaaacauaguucca

SEQ ID NO: 466704 - RNA, 21 nt, Artificial Sequence
  Synthetic
aauaugagaaacauaguucca

SEQ ID NO: 466705 - RNA, 22 nt, Artificial Sequence
  Synthetic
uaauaugagaaacauaguucca

SEQ ID NO: 466706 - RNA, 23 nt, Artificial Sequence
  Synthetic
cuaauaugagaaacauaguucca

SEQ ID NO: 466707 - RNA, 24 nt, Artificial Sequence
  Synthetic
ucuaauaugagaaacauaguucca

SEQ ID NO: 466708 - RNA, 18 nt, Artificial Sequence
  Synthetic
uuaacuaauuuaguucca

SEQ ID NO: 466709 - RNA, 19 nt, Artificial Sequence
  Synthetic
auuaacuaauuuaguucca

SEQ ID NO: 466710 - RNA, 20 nt, Artificial Sequence
  Synthetic
uauuaacuaauuuaguucca

SEQ ID NO: 466711 - RNA, 21 nt, Artificial Sequence
  Synthetic
auauuaacuaauuuaguucca

SEQ ID NO: 466712 - RNA, 22 nt, Artificial Sequence
  Synthetic
cauauuaacuaauuuaguucca

SEQ ID NO: 466713 - RNA, 23 nt, Artificial Sequence
  Synthetic
acauauuaacuaauuuaguucca

SEQ ID NO: 466714 - RNA, 24 nt, Artificial Sequence
  Synthetic
gacauauuaacuaauuuaguucca

SEQ ID NO: 466715 - RNA, 18 nt, Artificial Sequence
  Synthetic
ggugguagcaagguucca

SEQ ID NO: 466716 - RNA, 19 nt, Artificial Sequence
  Synthetic
aggugguagcaagguucca

SEQ ID NO: 466717 - RNA, 20 nt, Artificial Sequence
  Synthetic
gaggugguagcaagguucca

SEQ ID NO: 466718 - RNA, 21 nt, Artificial Sequence
  Synthetic
ggaggugguagcaagguucca

SEQ ID NO: 466719 - RNA, 22 nt, Artificial Sequence
  Synthetic
uggaggugguagcaagguucca

SEQ ID NO: 466720 - RNA, 23 nt, Artificial Sequence
  Synthetic
cuggaggugguagcaagguucca

SEQ ID NO: 466721 - RNA, 24 nt, Artificial Sequence
  Synthetic
ccuggaggugguagcaagguucca

SEQ ID NO: 466722 - RNA, 18 nt, Artificial Sequence
  Synthetic
ugaucauagaagguucca

SEQ ID NO: 466723 - RNA, 19 nt, Artificial Sequence
  Synthetic
gugaucauagaagguucca

SEQ ID NO: 466724 - RNA, 20 nt, Artificial Sequence
  Synthetic
ggugaucauagaagguucca

SEQ ID NO: 466725 - RNA, 21 nt, Artificial Sequence
  Synthetic
gggugaucauagaagguucca

SEQ ID NO: 466726 - RNA, 22 nt, Artificial Sequence
  Synthetic
agggugaucauagaagguucca

SEQ ID NO: 466727 - RNA, 23 nt, Artificial Sequence
  Synthetic
aagggugaucauagaagguucca

SEQ ID NO: 466728 - RNA, 24 nt, Artificial Sequence
  Synthetic
aaagggugaucauagaagguucca

SEQ ID NO: 466729 - RNA, 18 nt, Artificial Sequence
  Synthetic
acaagaggcacuguucca

SEQ ID NO: 466730 - RNA, 19 nt, Artificial Sequence
  Synthetic
gacaagaggcacuguucca

SEQ ID NO: 466731 - RNA, 20 nt, Artificial Sequence
  Synthetic
agacaagaggcacuguucca

SEQ ID NO: 466732 - RNA, 21 nt, Artificial Sequence
  Synthetic
cagacaagaggcacuguucca

SEQ ID NO: 466733 - RNA, 22 nt, Artificial Sequence
  Synthetic
gcagacaagaggcacuguucca

SEQ ID NO: 466734 - RNA, 23 nt, Artificial Sequence
  Synthetic
ggcagacaagaggcacuguucca

SEQ ID NO: 466735 - RNA, 24 nt, Artificial Sequence
  Synthetic
aggcagacaagaggcacuguucca

SEQ ID NO: 466736 - RNA, 18 nt, Artificial Sequence
  Synthetic
uagaaagaccaauuucca

SEQ ID NO: 466737 - RNA, 19 nt, Artificial Sequence
  Synthetic
guagaaagaccaauuucca

SEQ ID NO: 466738 - RNA, 20 nt, Artificial Sequence
  Synthetic
gguagaaagaccaauuucca

SEQ ID NO: 466739 - RNA, 21 nt, Artificial Sequence
  Synthetic
agguagaaagaccaauuucca

SEQ ID NO: 466740 - RNA, 22 nt, Artificial Sequence
  Synthetic
uagguagaaagaccaauuucca

SEQ ID NO: 466741 - RNA, 23 nt, Artificial Sequence
  Synthetic
cuagguagaaagaccaauuucca

SEQ ID NO: 466742 - RNA, 24 nt, Artificial Sequence
  Synthetic
gcuagguagaaagaccaauuucca

SEQ ID NO: 466743 - RNA, 18 nt, Artificial Sequence
  Synthetic
uaaaguguugaauuucca

SEQ ID NO: 466744 - RNA, 19 nt, Artificial Sequence
  Synthetic
uuaaaguguugaauuucca

SEQ ID NO: 466745 - RNA, 20 nt, Artificial Sequence
  Synthetic
auuaaaguguugaauuucca

SEQ ID NO: 466746 - RNA, 21 nt, Artificial Sequence
  Synthetic
uauuaaaguguugaauuucca

SEQ ID NO: 466747 - RNA, 22 nt, Artificial Sequence
  Synthetic
uuauuaaaguguugaauuucca

SEQ ID NO: 466748 - RNA, 23 nt, Artificial Sequence
  Synthetic
auuauuaaaguguugaauuucca

SEQ ID NO: 466749 - RNA, 24 nt, Artificial Sequence
  Synthetic
uauuauuaaaguguugaauuucca

SEQ ID NO: 466750 - RNA, 18 nt, Artificial Sequence
  Synthetic
cggggccuaagauuucca

SEQ ID NO: 466751 - RNA, 19 nt, Artificial Sequence
  Synthetic
ccggggccuaagauuucca

SEQ ID NO: 466752 - RNA, 20 nt, Artificial Sequence
  Synthetic
cccggggccuaagauuucca

SEQ ID NO: 466753 - RNA, 21 nt, Artificial Sequence
  Synthetic
gcccggggccuaagauuucca

SEQ ID NO: 466754 - RNA, 22 nt, Artificial Sequence
  Synthetic
ugcccggggccuaagauuucca

SEQ ID NO: 466755 - RNA, 23 nt, Artificial Sequence
  Synthetic
augcccggggccuaagauuucca

SEQ ID NO: 466756 - RNA, 24 nt, Artificial Sequence
  Synthetic
uaugcccggggccuaagauuucca

SEQ ID NO: 466757 - RNA, 18 nt, Artificial Sequence
  Synthetic
aaacugcagggauuucca

SEQ ID NO: 466758 - RNA, 19 nt, Artificial Sequence
  Synthetic
gaaacugcagggauuucca

SEQ ID NO: 466759 - RNA, 20 nt, Artificial Sequence
  Synthetic
ugaaacugcagggauuucca

SEQ ID NO: 466760 - RNA, 21 nt, Artificial Sequence
  Synthetic
cugaaacugcagggauuucca

SEQ ID NO: 466761 - RNA, 22 nt, Artificial Sequence
  Synthetic
ucugaaacugcagggauuucca

SEQ ID NO: 466762 - RNA, 23 nt, Artificial Sequence
  Synthetic
cucugaaacugcagggauuucca

SEQ ID NO: 466763 - RNA, 24 nt, Artificial Sequence
  Synthetic
acucugaaacugcagggauuucca

SEQ ID NO: 466764 - RNA, 18 nt, Artificial Sequence
  Synthetic
acucacauuauauuucca

SEQ ID NO: 466765 - RNA, 19 nt, Artificial Sequence
  Synthetic
gacucacauuauauuucca

SEQ ID NO: 466766 - RNA, 20 nt, Artificial Sequence
  Synthetic
ugacucacauuauauuucca

SEQ ID NO: 466767 - RNA, 21 nt, Artificial Sequence
  Synthetic
uugacucacauuauauuucca

SEQ ID NO: 466768 - RNA, 22 nt, Artificial Sequence
  Synthetic
uuugacucacauuauauuucca

SEQ ID NO: 466769 - RNA, 23 nt, Artificial Sequence
  Synthetic
auuugacucacauuauauuucca

SEQ ID NO: 466770 - RNA, 24 nt, Artificial Sequence
  Synthetic
uauuugacucacauuauauuucca

SEQ ID NO: 466771 - RNA, 18 nt, Artificial Sequence
  Synthetic
uaucuuagucuauuucca

SEQ ID NO: 466772 - RNA, 19 nt, Artificial Sequence
  Synthetic
cuaucuuagucuauuucca

SEQ ID NO: 466773 - RNA, 20 nt, Artificial Sequence
  Synthetic
ucuaucuuagucuauuucca

SEQ ID NO: 466774 - RNA, 21 nt, Artificial Sequence
  Synthetic
cucuaucuuagucuauuucca

SEQ ID NO: 466775 - RNA, 22 nt, Artificial Sequence
  Synthetic
ucucuaucuuagucuauuucca

SEQ ID NO: 466776 - RNA, 23 nt, Artificial Sequence
  Synthetic
cucucuaucuuagucuauuucca

SEQ ID NO: 466777 - RNA, 24 nt, Artificial Sequence
  Synthetic
acucucuaucuuagucuauuucca

SEQ ID NO: 466778 - RNA, 18 nt, Artificial Sequence
  Synthetic
gcaugaccauuauuucca

SEQ ID NO: 466779 - RNA, 19 nt, Artificial Sequence
  Synthetic
ugcaugaccauuauuucca

SEQ ID NO: 466780 - RNA, 20 nt, Artificial Sequence
  Synthetic
gugcaugaccauuauuucca

SEQ ID NO: 466781 - RNA, 21 nt, Artificial Sequence
  Synthetic
ggugcaugaccauuauuucca

SEQ ID NO: 466782 - RNA, 22 nt, Artificial Sequence
  Synthetic
gggugcaugaccauuauuucca

SEQ ID NO: 466783 - RNA, 23 nt, Artificial Sequence
  Synthetic
agggugcaugaccauuauuucca

SEQ ID NO: 466784 - RNA, 24 nt, Artificial Sequence
  Synthetic
uagggugcaugaccauuauuucca

SEQ ID NO: 466785 - RNA, 18 nt, Artificial Sequence
  Synthetic
cacuaacaccacuuucca

SEQ ID NO: 466786 - RNA, 19 nt, Artificial Sequence
  Synthetic
ucacuaacaccacuuucca

SEQ ID NO: 466787 - RNA, 20 nt, Artificial Sequence
  Synthetic
aucacuaacaccacuuucca

SEQ ID NO: 466788 - RNA, 21 nt, Artificial Sequence
  Synthetic
aaucacuaacaccacuuucca

SEQ ID NO: 466789 - RNA, 22 nt, Artificial Sequence
  Synthetic
gaaucacuaacaccacuuucca

SEQ ID NO: 466790 - RNA, 23 nt, Artificial Sequence
  Synthetic
ugaaucacuaacaccacuuucca

SEQ ID NO: 466791 - RNA, 24 nt, Artificial Sequence
  Synthetic
cugaaucacuaacaccacuuucca

SEQ ID NO: 466792 - RNA, 18 nt, Artificial Sequence
  Synthetic
aagauccuagacuuucca

SEQ ID NO: 466793 - RNA, 19 nt, Artificial Sequence
  Synthetic
aaagauccuagacuuucca

SEQ ID NO: 466794 - RNA, 20 nt, Artificial Sequence
  Synthetic
aaaagauccuagacuuucca

SEQ ID NO: 466795 - RNA, 21 nt, Artificial Sequence
  Synthetic
gaaaagauccuagacuuucca

SEQ ID NO: 466796 - RNA, 22 nt, Artificial Sequence
  Synthetic
agaaaagauccuagacuuucca

SEQ ID NO: 466797 - RNA, 23 nt, Artificial Sequence
  Synthetic
aagaaaagauccuagacuuucca

SEQ ID NO: 466798 - RNA, 24 nt, Artificial Sequence
  Synthetic
uaagaaaagauccuagacuuucca

SEQ ID NO: 466799 - RNA, 18 nt, Artificial Sequence
  Synthetic
uagaagcuguacuuucca

SEQ ID NO: 466800 - RNA, 19 nt, Artificial Sequence
  Synthetic
auagaagcuguacuuucca

SEQ ID NO: 466801 - RNA, 20 nt, Artificial Sequence
  Synthetic
uauagaagcuguacuuucca

SEQ ID NO: 466802 - RNA, 21 nt, Artificial Sequence
  Synthetic
guauagaagcuguacuuucca

SEQ ID NO: 466803 - RNA, 22 nt, Artificial Sequence
  Synthetic
uguauagaagcuguacuuucca

SEQ ID NO: 466804 - RNA, 23 nt, Artificial Sequence
  Synthetic
uuguauagaagcuguacuuucca

SEQ ID NO: 466805 - RNA, 24 nt, Artificial Sequence
  Synthetic
auuguauagaagcuguacuuucca

SEQ ID NO: 466806 - RNA, 18 nt, Artificial Sequence
  Synthetic
acuucaguccccuuucca

SEQ ID NO: 466807 - RNA, 19 nt, Artificial Sequence
  Synthetic
gacuucaguccccuuucca

SEQ ID NO: 466808 - RNA, 20 nt, Artificial Sequence
  Synthetic
ugacuucaguccccuuucca

SEQ ID NO: 466809 - RNA, 21 nt, Artificial Sequence
  Synthetic
cugacuucaguccccuuucca

SEQ ID NO: 466810 - RNA, 22 nt, Artificial Sequence
  Synthetic
ccugacuucaguccccuuucca

SEQ ID NO: 466811 - RNA, 23 nt, Artificial Sequence
  Synthetic
cccugacuucaguccccuuucca

SEQ ID NO: 466812 - RNA, 24 nt, Artificial Sequence
  Synthetic
ucccugacuucaguccccuuucca

SEQ ID NO: 466813 - RNA, 18 nt, Artificial Sequence
  Synthetic
ucgaaaucuacguuucca

SEQ ID NO: 466814 - RNA, 19 nt, Artificial Sequence
  Synthetic
uucgaaaucuacguuucca

SEQ ID NO: 466815 - RNA, 20 nt, Artificial Sequence
  Synthetic
uuucgaaaucuacguuucca

SEQ ID NO: 466816 - RNA, 21 nt, Artificial Sequence
  Synthetic
auuucgaaaucuacguuucca

SEQ ID NO: 466817 - RNA, 22 nt, Artificial Sequence
  Synthetic
aauuucgaaaucuacguuucca

SEQ ID NO: 466818 - RNA, 23 nt, Artificial Sequence
  Synthetic
aaauuucgaaaucuacguuucca

SEQ ID NO: 466819 - RNA, 24 nt, Artificial Sequence
  Synthetic
uaaauuucgaaaucuacguuucca

SEQ ID NO: 466820 - RNA, 18 nt, Artificial Sequence
  Synthetic
cuacacaaaugguuucca

SEQ ID NO: 466821 - RNA, 19 nt, Artificial Sequence
  Synthetic
ucuacacaaaugguuucca

SEQ ID NO: 466822 - RNA, 20 nt, Artificial Sequence
  Synthetic
cucuacacaaaugguuucca

SEQ ID NO: 466823 - RNA, 21 nt, Artificial Sequence
  Synthetic
gcucuacacaaaugguuucca

SEQ ID NO: 466824 - RNA, 22 nt, Artificial Sequence
  Synthetic
ugcucuacacaaaugguuucca

SEQ ID NO: 466825 - RNA, 23 nt, Artificial Sequence
  Synthetic
augcucuacacaaaugguuucca

SEQ ID NO: 466826 - RNA, 24 nt, Artificial Sequence
  Synthetic
gaugcucuacacaaaugguuucca

SEQ ID NO: 466827 - RNA, 18 nt, Artificial Sequence
  Synthetic
aaacuauguauguuucca

SEQ ID NO: 466828 - RNA, 19 nt, Artificial Sequence
  Synthetic
caaacuauguauguuucca

SEQ ID NO: 466829 - RNA, 20 nt, Artificial Sequence
  Synthetic
ucaaacuauguauguuucca

SEQ ID NO: 466830 - RNA, 21 nt, Artificial Sequence
  Synthetic
cucaaacuauguauguuucca

SEQ ID NO: 466831 - RNA, 22 nt, Artificial Sequence
  Synthetic
ucucaaacuauguauguuucca

SEQ ID NO: 466832 - RNA, 23 nt, Artificial Sequence
  Synthetic
uucucaaacuauguauguuucca

SEQ ID NO: 466833 - RNA, 24 nt, Artificial Sequence
  Synthetic
uuucucaaacuauguauguuucca

SEQ ID NO: 466834 - RNA, 18 nt, Artificial Sequence
  Synthetic
aggccuguuauguuucca

SEQ ID NO: 466835 - RNA, 19 nt, Artificial Sequence
  Synthetic
caggccuguuauguuucca

SEQ ID NO: 466836 - RNA, 20 nt, Artificial Sequence
  Synthetic
ucaggccuguuauguuucca

SEQ ID NO: 466837 - RNA, 21 nt, Artificial Sequence
  Synthetic
cucaggccuguuauguuucca

SEQ ID NO: 466838 - RNA, 22 nt, Artificial Sequence
  Synthetic
acucaggccuguuauguuucca

SEQ ID NO: 466839 - RNA, 23 nt, Artificial Sequence
  Synthetic
gacucaggccuguuauguuucca

SEQ ID NO: 466840 - RNA, 24 nt, Artificial Sequence
  Synthetic
ggacucaggccuguuauguuucca

SEQ ID NO: 466841 - RNA, 18 nt, Artificial Sequence
  Synthetic
acaaaaaagaauuuucca

SEQ ID NO: 466842 - RNA, 19 nt, Artificial Sequence
  Synthetic
cacaaaaaagaauuuucca

SEQ ID NO: 466843 - RNA, 20 nt, Artificial Sequence
  Synthetic
acacaaaaaagaauuuucca

SEQ ID NO: 466844 - RNA, 21 nt, Artificial Sequence
  Synthetic
aacacaaaaaagaauuuucca

SEQ ID NO: 466845 - RNA, 22 nt, Artificial Sequence
  Synthetic
gaacacaaaaaagaauuuucca

SEQ ID NO: 466846 - RNA, 23 nt, Artificial Sequence
  Synthetic
ugaacacaaaaaagaauuuucca

SEQ ID NO: 466847 - RNA, 24 nt, Artificial Sequence
  Synthetic
cugaacacaaaaaagaauuuucca

SEQ ID NO: 466848 - RNA, 18 nt, Artificial Sequence
  Synthetic
uuauaaaauaauuuucca

SEQ ID NO: 466849 - RNA, 19 nt, Artificial Sequence
  Synthetic
auuauaaaauaauuuucca

SEQ ID NO: 466850 - RNA, 20 nt, Artificial Sequence
  Synthetic
aauuauaaaauaauuuucca

SEQ ID NO: 466851 - RNA, 21 nt, Artificial Sequence
  Synthetic
caauuauaaaauaauuuucca

SEQ ID NO: 466852 - RNA, 22 nt, Artificial Sequence
  Synthetic
ucaauuauaaaauaauuuucca

SEQ ID NO: 466853 - RNA, 23 nt, Artificial Sequence
  Synthetic
cucaauuauaaaauaauuuucca

SEQ ID NO: 466854 - RNA, 24 nt, Artificial Sequence
  Synthetic
ucucaauuauaaaauaauuuucca

SEQ ID NO: 466855 - RNA, 18 nt, Artificial Sequence
  Synthetic
uauuauucccauuuucca

SEQ ID NO: 466856 - RNA, 19 nt, Artificial Sequence
  Synthetic
uuauuauucccauuuucca

SEQ ID NO: 466857 - RNA, 20 nt, Artificial Sequence
  Synthetic
auuauuauucccauuuucca

SEQ ID NO: 466858 - RNA, 21 nt, Artificial Sequence
  Synthetic
aauuauuauucccauuuucca

SEQ ID NO: 466859 - RNA, 22 nt, Artificial Sequence
  Synthetic
caauuauuauucccauuuucca

SEQ ID NO: 466860 - RNA, 23 nt, Artificial Sequence
  Synthetic
acaauuauuauucccauuuucca

SEQ ID NO: 466861 - RNA, 24 nt, Artificial Sequence
  Synthetic
aacaauuauuauucccauuuucca

SEQ ID NO: 466862 - RNA, 18 nt, Artificial Sequence
  Synthetic
agcuauuuccauuuucca

SEQ ID NO: 466863 - RNA, 19 nt, Artificial Sequence
  Synthetic
uagcuauuuccauuuucca

SEQ ID NO: 466864 - RNA, 20 nt, Artificial Sequence
  Synthetic
auagcuauuuccauuuucca

SEQ ID NO: 466865 - RNA, 21 nt, Artificial Sequence
  Synthetic
cauagcuauuuccauuuucca

SEQ ID NO: 466866 - RNA, 22 nt, Artificial Sequence
  Synthetic
ccauagcuauuuccauuuucca

SEQ ID NO: 466867 - RNA, 23 nt, Artificial Sequence
  Synthetic
accauagcuauuuccauuuucca

SEQ ID NO: 466868 - RNA, 24 nt, Artificial Sequence
  Synthetic
gaccauagcuauuuccauuuucca

SEQ ID NO: 466869 - RNA, 18 nt, Artificial Sequence
  Synthetic
ugguaccgagauuuucca

SEQ ID NO: 466870 - RNA, 19 nt, Artificial Sequence
  Synthetic
uugguaccgagauuuucca

SEQ ID NO: 466871 - RNA, 20 nt, Artificial Sequence
  Synthetic
auugguaccgagauuuucca

SEQ ID NO: 466872 - RNA, 21 nt, Artificial Sequence
  Synthetic
uauugguaccgagauuuucca

SEQ ID NO: 466873 - RNA, 22 nt, Artificial Sequence
  Synthetic
uuauugguaccgagauuuucca

SEQ ID NO: 466874 - RNA, 23 nt, Artificial Sequence
  Synthetic
uuuauugguaccgagauuuucca

SEQ ID NO: 466875 - RNA, 24 nt, Artificial Sequence
  Synthetic
uuuuauugguaccgagauuuucca

SEQ ID NO: 466876 - RNA, 18 nt, Artificial Sequence
  Synthetic
aaaucaccauauuuucca

SEQ ID NO: 466877 - RNA, 19 nt, Artificial Sequence
  Synthetic
uaaaucaccauauuuucca

SEQ ID NO: 466878 - RNA, 20 nt, Artificial Sequence
  Synthetic
auaaaucaccauauuuucca

SEQ ID NO: 466879 - RNA, 21 nt, Artificial Sequence
  Synthetic
aauaaaucaccauauuuucca

SEQ ID NO: 466880 - RNA, 22 nt, Artificial Sequence
  Synthetic
uaauaaaucaccauauuuucca

SEQ ID NO: 466881 - RNA, 23 nt, Artificial Sequence
  Synthetic
guaauaaaucaccauauuuucca

SEQ ID NO: 466882 - RNA, 24 nt, Artificial Sequence
  Synthetic
uguaauaaaucaccauauuuucca

SEQ ID NO: 466883 - RNA, 18 nt, Artificial Sequence
  Synthetic
cacaguucagcuuuucca

SEQ ID NO: 466884 - RNA, 19 nt, Artificial Sequence
  Synthetic
ccacaguucagcuuuucca

SEQ ID NO: 466885 - RNA, 20 nt, Artificial Sequence
  Synthetic
uccacaguucagcuuuucca

SEQ ID NO: 466886 - RNA, 21 nt, Artificial Sequence
  Synthetic
guccacaguucagcuuuucca

SEQ ID NO: 466887 - RNA, 22 nt, Artificial Sequence
  Synthetic
aguccacaguucagcuuuucca

SEQ ID NO: 466888 - RNA, 23 nt, Artificial Sequence
  Synthetic
caguccacaguucagcuuuucca

SEQ ID NO: 466889 - RNA, 24 nt, Artificial Sequence
  Synthetic
acaguccacaguucagcuuuucca

SEQ ID NO: 466890 - RNA, 18 nt, Artificial Sequence
  Synthetic
gccuaacucaguuuucca

SEQ ID NO: 466891 - RNA, 19 nt, Artificial Sequence
  Synthetic
ugccuaacucaguuuucca

SEQ ID NO: 466892 - RNA, 20 nt, Artificial Sequence
  Synthetic
uugccuaacucaguuuucca

SEQ ID NO: 466893 - RNA, 21 nt, Artificial Sequence
  Synthetic
guugccuaacucaguuuucca

SEQ ID NO: 466894 - RNA, 22 nt, Artificial Sequence
  Synthetic
uguugccuaacucaguuuucca

SEQ ID NO: 466895 - RNA, 23 nt, Artificial Sequence
  Synthetic
uuguugccuaacucaguuuucca

SEQ ID NO: 466896 - RNA, 24 nt, Artificial Sequence
  Synthetic
guuguugccuaacucaguuuucca

SEQ ID NO: 466897 - RNA, 18 nt, Artificial Sequence
  Synthetic
uucccugucuuuuuucca

SEQ ID NO: 466898 - RNA, 19 nt, Artificial Sequence
  Synthetic
uuucccugucuuuuuucca

SEQ ID NO: 466899 - RNA, 20 nt, Artificial Sequence
  Synthetic
uuuucccugucuuuuuucca

SEQ ID NO: 466900 - RNA, 21 nt, Artificial Sequence
  Synthetic
uuuuucccugucuuuuuucca

SEQ ID NO: 466901 - RNA, 22 nt, Artificial Sequence
  Synthetic
cuuuuucccugucuuuuuucca

SEQ ID NO: 466902 - RNA, 23 nt, Artificial Sequence
  Synthetic
ucuuuuucccugucuuuuuucca

SEQ ID NO: 466903 - RNA, 24 nt, Artificial Sequence
  Synthetic
uucuuuuucccugucuuuuuucca

SEQ ID NO: 466904 - RNA, 18 nt, Artificial Sequence
  Synthetic
gaggguaaaaaaaaagca

SEQ ID NO: 466905 - RNA, 19 nt, Artificial Sequence
  Synthetic
ggaggguaaaaaaaaagca

SEQ ID NO: 466906 - RNA, 20 nt, Artificial Sequence
  Synthetic
aggaggguaaaaaaaaagca

SEQ ID NO: 466907 - RNA, 21 nt, Artificial Sequence
  Synthetic
caggaggguaaaaaaaaagca

SEQ ID NO: 466908 - RNA, 22 nt, Artificial Sequence
  Synthetic
ucaggaggguaaaaaaaaagca

SEQ ID NO: 466909 - RNA, 23 nt, Artificial Sequence
  Synthetic
cucaggaggguaaaaaaaaagca

SEQ ID NO: 466910 - RNA, 24 nt, Artificial Sequence
  Synthetic
ucucaggaggguaaaaaaaaagca

SEQ ID NO: 466911 - RNA, 18 nt, Artificial Sequence
  Synthetic
uuaaaaacagaaaaagca

SEQ ID NO: 466912 - RNA, 19 nt, Artificial Sequence
  Synthetic
uuuaaaaacagaaaaagca

SEQ ID NO: 466913 - RNA, 20 nt, Artificial Sequence
  Synthetic
uuuuaaaaacagaaaaagca

SEQ ID NO: 466914 - RNA, 21 nt, Artificial Sequence
  Synthetic
auuuuaaaaacagaaaaagca

SEQ ID NO: 466915 - RNA, 22 nt, Artificial Sequence
  Synthetic
uauuuuaaaaacagaaaaagca

SEQ ID NO: 466916 - RNA, 23 nt, Artificial Sequence
  Synthetic
uuauuuuaaaaacagaaaaagca

SEQ ID NO: 466917 - RNA, 24 nt, Artificial Sequence
  Synthetic
uuuauuuuaaaaacagaaaaagca

SEQ ID NO: 466918 - RNA, 18 nt, Artificial Sequence
  Synthetic
guggccuuaacaaaagca

SEQ ID NO: 466919 - RNA, 19 nt, Artificial Sequence
  Synthetic
gguggccuuaacaaaagca

SEQ ID NO: 466920 - RNA, 20 nt, Artificial Sequence
  Synthetic
ggguggccuuaacaaaagca

SEQ ID NO: 466921 - RNA, 21 nt, Artificial Sequence
  Synthetic
uggguggccuuaacaaaagca

SEQ ID NO: 466922 - RNA, 22 nt, Artificial Sequence
  Synthetic
cuggguggccuuaacaaaagca

SEQ ID NO: 466923 - RNA, 23 nt, Artificial Sequence
  Synthetic
ucuggguggccuuaacaaaagca

SEQ ID NO: 466924 - RNA, 24 nt, Artificial Sequence
  Synthetic
aucuggguggccuuaacaaaagca

SEQ ID NO: 466925 - RNA, 18 nt, Artificial Sequence
  Synthetic
cuuuauccugcaaaagca

SEQ ID NO: 466926 - RNA, 19 nt, Artificial Sequence
  Synthetic
ucuuuauccugcaaaagca

SEQ ID NO: 466927 - RNA, 20 nt, Artificial Sequence
  Synthetic
uucuuuauccugcaaaagca

SEQ ID NO: 466928 - RNA, 21 nt, Artificial Sequence
  Synthetic
uuucuuuauccugcaaaagca

SEQ ID NO: 466929 - RNA, 22 nt, Artificial Sequence
  Synthetic
auuucuuuauccugcaaaagca

SEQ ID NO: 466930 - RNA, 23 nt, Artificial Sequence
  Synthetic
cauuucuuuauccugcaaaagca

SEQ ID NO: 466931 - RNA, 24 nt, Artificial Sequence
  Synthetic
ucauuucuuuauccugcaaaagca

SEQ ID NO: 466932 - RNA, 18 nt, Artificial Sequence
  Synthetic
cucaaucauucaaaagca

SEQ ID NO: 466933 - RNA, 19 nt, Artificial Sequence
  Synthetic
ccucaaucauucaaaagca

SEQ ID NO: 466934 - RNA, 20 nt, Artificial Sequence
  Synthetic
accucaaucauucaaaagca

SEQ ID NO: 466935 - RNA, 21 nt, Artificial Sequence
  Synthetic
uaccucaaucauucaaaagca

SEQ ID NO: 466936 - RNA, 22 nt, Artificial Sequence
  Synthetic
uuaccucaaucauucaaaagca

SEQ ID NO: 466937 - RNA, 23 nt, Artificial Sequence
  Synthetic
auuaccucaaucauucaaaagca

SEQ ID NO: 466938 - RNA, 24 nt, Artificial Sequence
  Synthetic
cauuaccucaaucauucaaaagca

SEQ ID NO: 466939 - RNA, 18 nt, Artificial Sequence
  Synthetic
uccuuuugaagaaaagca

SEQ ID NO: 466940 - RNA, 19 nt, Artificial Sequence
  Synthetic
uuccuuuugaagaaaagca

SEQ ID NO: 466941 - RNA, 20 nt, Artificial Sequence
  Synthetic
uuuccuuuugaagaaaagca

SEQ ID NO: 466942 - RNA, 21 nt, Artificial Sequence
  Synthetic
uuuuccuuuugaagaaaagca

SEQ ID NO: 466943 - RNA, 22 nt, Artificial Sequence
  Synthetic
cuuuuccuuuugaagaaaagca

SEQ ID NO: 466944 - RNA, 23 nt, Artificial Sequence
  Synthetic
ccuuuuccuuuugaagaaaagca

SEQ ID NO: 466945 - RNA, 24 nt, Artificial Sequence
  Synthetic
gccuuuuccuuuugaagaaaagca

SEQ ID NO: 466946 - RNA, 18 nt, Artificial Sequence
  Synthetic
gaugauugcagaaaagca

SEQ ID NO: 466947 - RNA, 19 nt, Artificial Sequence
  Synthetic
agaugauugcagaaaagca

SEQ ID NO: 466948 - RNA, 20 nt, Artificial Sequence
  Synthetic
cagaugauugcagaaaagca

SEQ ID NO: 466949 - RNA, 21 nt, Artificial Sequence
  Synthetic
ucagaugauugcagaaaagca

SEQ ID NO: 466950 - RNA, 22 nt, Artificial Sequence
  Synthetic
uucagaugauugcagaaaagca

SEQ ID NO: 466951 - RNA, 23 nt, Artificial Sequence
  Synthetic
auucagaugauugcagaaaagca

SEQ ID NO: 466952 - RNA, 24 nt, Artificial Sequence
  Synthetic
uauucagaugauugcagaaaagca

SEQ ID NO: 466953 - RNA, 18 nt, Artificial Sequence
  Synthetic
uuuuacuuuugaaaagca

SEQ ID NO: 466954 - RNA, 19 nt, Artificial Sequence
  Synthetic
auuuuacuuuugaaaagca

SEQ ID NO: 466955 - RNA, 20 nt, Artificial Sequence
  Synthetic
aauuuuacuuuugaaaagca

SEQ ID NO: 466956 - RNA, 21 nt, Artificial Sequence
  Synthetic
aaauuuuacuuuugaaaagca

SEQ ID NO: 466957 - RNA, 22 nt, Artificial Sequence
  Synthetic
gaaauuuuacuuuugaaaagca

SEQ ID NO: 466958 - RNA, 23 nt, Artificial Sequence
  Synthetic
ggaaauuuuacuuuugaaaagca

SEQ ID NO: 466959 - RNA, 24 nt, Artificial Sequence
  Synthetic
uggaaauuuuacuuuugaaaagca

SEQ ID NO: 466960 - RNA, 18 nt, Artificial Sequence
  Synthetic
gacagaauacuaaaagca

SEQ ID NO: 466961 - RNA, 19 nt, Artificial Sequence
  Synthetic
agacagaauacuaaaagca

SEQ ID NO: 466962 - RNA, 20 nt, Artificial Sequence
  Synthetic
aagacagaauacuaaaagca

SEQ ID NO: 466963 - RNA, 21 nt, Artificial Sequence
  Synthetic
aaagacagaauacuaaaagca

SEQ ID NO: 466964 - RNA, 22 nt, Artificial Sequence
  Synthetic
caaagacagaauacuaaaagca

SEQ ID NO: 466965 - RNA, 23 nt, Artificial Sequence
  Synthetic
acaaagacagaauacuaaaagca

SEQ ID NO: 466966 - RNA, 24 nt, Artificial Sequence
  Synthetic
uacaaagacagaauacuaaaagca

SEQ ID NO: 466967 - RNA, 18 nt, Artificial Sequence
  Synthetic
uaauuuucauuaaaagca

SEQ ID NO: 466968 - RNA, 19 nt, Artificial Sequence
  Synthetic
cuaauuuucauuaaaagca

SEQ ID NO: 466969 - RNA, 20 nt, Artificial Sequence
  Synthetic
gcuaauuuucauuaaaagca

SEQ ID NO: 466970 - RNA, 21 nt, Artificial Sequence
  Synthetic
ggcuaauuuucauuaaaagca

SEQ ID NO: 466971 - RNA, 22 nt, Artificial Sequence
  Synthetic
aggcuaauuuucauuaaaagca

SEQ ID NO: 466972 - RNA, 23 nt, Artificial Sequence
  Synthetic
uaggcuaauuuucauuaaaagca

SEQ ID NO: 466973 - RNA, 24 nt, Artificial Sequence
  Synthetic
uuaggcuaauuuucauuaaaagca

SEQ ID NO: 466974 - RNA, 18 nt, Artificial Sequence
  Synthetic
cuggagaggaacaaagca

SEQ ID NO: 466975 - RNA, 19 nt, Artificial Sequence
  Synthetic
acuggagaggaacaaagca

SEQ ID NO: 466976 - RNA, 20 nt, Artificial Sequence
  Synthetic
gacuggagaggaacaaagca

SEQ ID NO: 466977 - RNA, 21 nt, Artificial Sequence
  Synthetic
cgacuggagaggaacaaagca

SEQ ID NO: 466978 - RNA, 22 nt, Artificial Sequence
  Synthetic
ucgacuggagaggaacaaagca

SEQ ID NO: 466979 - RNA, 23 nt, Artificial Sequence
  Synthetic
aucgacuggagaggaacaaagca

SEQ ID NO: 466980 - RNA, 24 nt, Artificial Sequence
  Synthetic
aaucgacuggagaggaacaaagca

SEQ ID NO: 466981 - RNA, 18 nt, Artificial Sequence
  Synthetic
aaucuuuauaacaaagca

SEQ ID NO: 466982 - RNA, 19 nt, Artificial Sequence
  Synthetic
aaaucuuuauaacaaagca

SEQ ID NO: 466983 - RNA, 20 nt, Artificial Sequence
  Synthetic
caaaucuuuauaacaaagca

SEQ ID NO: 466984 - RNA, 21 nt, Artificial Sequence
  Synthetic
ccaaaucuuuauaacaaagca

SEQ ID NO: 466985 - RNA, 22 nt, Artificial Sequence
  Synthetic
cccaaaucuuuauaacaaagca

SEQ ID NO: 466986 - RNA, 23 nt, Artificial Sequence
  Synthetic
gcccaaaucuuuauaacaaagca

SEQ ID NO: 466987 - RNA, 24 nt, Artificial Sequence
  Synthetic
ugcccaaaucuuuauaacaaagca

SEQ ID NO: 466988 - RNA, 18 nt, Artificial Sequence
  Synthetic
uccgcaccugacaaagca

SEQ ID NO: 466989 - RNA, 19 nt, Artificial Sequence
  Synthetic
cuccgcaccugacaaagca

SEQ ID NO: 466990 - RNA, 20 nt, Artificial Sequence
  Synthetic
gcuccgcaccugacaaagca

SEQ ID NO: 466991 - RNA, 21 nt, Artificial Sequence
  Synthetic
ggcuccgcaccugacaaagca

SEQ ID NO: 466992 - RNA, 22 nt, Artificial Sequence
  Synthetic
gggcuccgcaccugacaaagca

SEQ ID NO: 466993 - RNA, 23 nt, Artificial Sequence
  Synthetic
ugggcuccgcaccugacaaagca

SEQ ID NO: 466994 - RNA, 24 nt, Artificial Sequence
  Synthetic
gugggcuccgcaccugacaaagca

SEQ ID NO: 466995 - RNA, 18 nt, Artificial Sequence
  Synthetic
aaaagcuucuacaaagca

SEQ ID NO: 466996 - RNA, 19 nt, Artificial Sequence
  Synthetic
aaaaagcuucuacaaagca

SEQ ID NO: 466997 - RNA, 20 nt, Artificial Sequence
  Synthetic
uaaaaagcuucuacaaagca

SEQ ID NO: 466998 - RNA, 21 nt, Artificial Sequence
  Synthetic
cuaaaaagcuucuacaaagca

SEQ ID NO: 466999 - RNA, 22 nt, Artificial Sequence
  Synthetic
acuaaaaagcuucuacaaagca

SEQ ID NO: 467000 - RNA, 23 nt, Artificial Sequence
  Synthetic
aacuaaaaagcuucuacaaagca

SEQ ID NO: 467001 - RNA, 24 nt, Artificial Sequence
  Synthetic
aaacuaaaaagcuucuacaaagca

SEQ ID NO: 467002 - RNA, 18 nt, Artificial Sequence
  Synthetic
cagcuguugcccaaagca

SEQ ID NO: 467003 - RNA, 19 nt, Artificial Sequence
  Synthetic
ucagcuguugcccaaagca

SEQ ID NO: 467004 - RNA, 20 nt, Artificial Sequence
  Synthetic
aucagcuguugcccaaagca

SEQ ID NO: 467005 - RNA, 21 nt, Artificial Sequence
  Synthetic
uaucagcuguugcccaaagca

SEQ ID NO: 467006 - RNA, 22 nt, Artificial Sequence
  Synthetic
guaucagcuguugcccaaagca

SEQ ID NO: 467007 - RNA, 23 nt, Artificial Sequence
  Synthetic
uguaucagcuguugcccaaagca

SEQ ID NO: 467008 - RNA, 24 nt, Artificial Sequence
  Synthetic
cuguaucagcuguugcccaaagca

SEQ ID NO: 467009 - RNA, 18 nt, Artificial Sequence
  Synthetic
ccucagccucccaaagca

SEQ ID NO: 467010 - RNA, 19 nt, Artificial Sequence
  Synthetic
gccucagccucccaaagca

SEQ ID NO: 467011 - RNA, 20 nt, Artificial Sequence
  Synthetic
cgccucagccucccaaagca

SEQ ID NO: 467012 - RNA, 21 nt, Artificial Sequence
  Synthetic
ccgccucagccucccaaagca

SEQ ID NO: 467013 - RNA, 22 nt, Artificial Sequence
  Synthetic
cccgccucagccucccaaagca

SEQ ID NO: 467014 - RNA, 23 nt, Artificial Sequence
  Synthetic
ucccgccucagccucccaaagca

SEQ ID NO: 467015 - RNA, 24 nt, Artificial Sequence
  Synthetic
cucccgccucagccucccaaagca

SEQ ID NO: 467016 - RNA, 20 nt, Artificial Sequence
  Synthetic
ugccucagccucccaaagca

SEQ ID NO: 467017 - RNA, 21 nt, Artificial Sequence
  Synthetic
cugccucagccucccaaagca

SEQ ID NO: 467018 - RNA, 22 nt, Artificial Sequence
  Synthetic
ccugccucagccucccaaagca

SEQ ID NO: 467019 - RNA, 23 nt, Artificial Sequence
  Synthetic
uccugccucagccucccaaagca

SEQ ID NO: 467020 - RNA, 24 nt, Artificial Sequence
  Synthetic
cuccugccucagccucccaaagca

SEQ ID NO: 467021 - RNA, 18 nt, Artificial Sequence
  Synthetic
ccuuggccucccaaagca

SEQ ID NO: 467022 - RNA, 19 nt, Artificial Sequence
  Synthetic
gccuuggccucccaaagca

SEQ ID NO: 467023 - RNA, 20 nt, Artificial Sequence
  Synthetic
ugccuuggccucccaaagca

SEQ ID NO: 467024 - RNA, 21 nt, Artificial Sequence
  Synthetic
uugccuuggccucccaaagca

SEQ ID NO: 467025 - RNA, 22 nt, Artificial Sequence
  Synthetic
cuugccuuggccucccaaagca

SEQ ID NO: 467026 - RNA, 23 nt, Artificial Sequence
  Synthetic
ucuugccuuggccucccaaagca

SEQ ID NO: 467027 - RNA, 24 nt, Artificial Sequence
  Synthetic
cucuugccuuggccucccaaagca

SEQ ID NO: 467028 - RNA, 18 nt, Artificial Sequence
  Synthetic
uugugcguuuccaaagca

SEQ ID NO: 467029 - RNA, 19 nt, Artificial Sequence
  Synthetic
guugugcguuuccaaagca

SEQ ID NO: 467030 - RNA, 20 nt, Artificial Sequence
  Synthetic
aguugugcguuuccaaagca

SEQ ID NO: 467031 - RNA, 21 nt, Artificial Sequence
  Synthetic
aaguugugcguuuccaaagca

SEQ ID NO: 467032 - RNA, 22 nt, Artificial Sequence
  Synthetic
gaaguugugcguuuccaaagca

SEQ ID NO: 467033 - RNA, 23 nt, Artificial Sequence
  Synthetic
agaaguugugcguuuccaaagca

SEQ ID NO: 467034 - RNA, 24 nt, Artificial Sequence
  Synthetic
aagaaguugugcguuuccaaagca

SEQ ID NO: 467035 - RNA, 18 nt, Artificial Sequence
  Synthetic
cauuccuacugcaaagca

SEQ ID NO: 467036 - RNA, 19 nt, Artificial Sequence
  Synthetic
acauuccuacugcaaagca

SEQ ID NO: 467037 - RNA, 20 nt, Artificial Sequence
  Synthetic
aacauuccuacugcaaagca

SEQ ID NO: 467038 - RNA, 21 nt, Artificial Sequence
  Synthetic
gaacauuccuacugcaaagca

SEQ ID NO: 467039 - RNA, 22 nt, Artificial Sequence
  Synthetic
agaacauuccuacugcaaagca

SEQ ID NO: 467040 - RNA, 23 nt, Artificial Sequence
  Synthetic
gagaacauuccuacugcaaagca

SEQ ID NO: 467041 - RNA, 24 nt, Artificial Sequence
  Synthetic
agagaacauuccuacugcaaagca

SEQ ID NO: 467042 - RNA, 18 nt, Artificial Sequence
  Synthetic
gucagauaauucaaagca

SEQ ID NO: 467043 - RNA, 19 nt, Artificial Sequence
  Synthetic
agucagauaauucaaagca

SEQ ID NO: 467044 - RNA, 20 nt, Artificial Sequence
  Synthetic
uagucagauaauucaaagca

SEQ ID NO: 467045 - RNA, 21 nt, Artificial Sequence
  Synthetic
guagucagauaauucaaagca

SEQ ID NO: 467046 - RNA, 22 nt, Artificial Sequence
  Synthetic
aguagucagauaauucaaagca

SEQ ID NO: 467047 - RNA, 23 nt, Artificial Sequence
  Synthetic
uaguagucagauaauucaaagca

SEQ ID NO: 467048 - RNA, 24 nt, Artificial Sequence
  Synthetic
uuaguagucagauaauucaaagca

SEQ ID NO: 467049 - RNA, 18 nt, Artificial Sequence
  Synthetic
aagcagugaaagaaagca

SEQ ID NO: 467050 - RNA, 19 nt, Artificial Sequence
  Synthetic
aaagcagugaaagaaagca

SEQ ID NO: 467051 - RNA, 20 nt, Artificial Sequence
  Synthetic
aaaagcagugaaagaaagca

SEQ ID NO: 467052 - RNA, 21 nt, Artificial Sequence
  Synthetic
gaaaagcagugaaagaaagca

SEQ ID NO: 467053 - RNA, 22 nt, Artificial Sequence
  Synthetic
ugaaaagcagugaaagaaagca

SEQ ID NO: 467054 - RNA, 23 nt, Artificial Sequence
  Synthetic
uugaaaagcagugaaagaaagca

SEQ ID NO: 467055 - RNA, 24 nt, Artificial Sequence
  Synthetic
uuugaaaagcagugaaagaaagca

SEQ ID NO: 467056 - RNA, 18 nt, Artificial Sequence
  Synthetic
aagcaagcgaagaaagca

SEQ ID NO: 467057 - RNA, 19 nt, Artificial Sequence
  Synthetic
aaagcaagcgaagaaagca

SEQ ID NO: 467058 - RNA, 20 nt, Artificial Sequence
  Synthetic
gaaagcaagcgaagaaagca

SEQ ID NO: 467059 - RNA, 21 nt, Artificial Sequence
  Synthetic
agaaagcaagcgaagaaagca

SEQ ID NO: 467060 - RNA, 22 nt, Artificial Sequence
  Synthetic
aagaaagcaagcgaagaaagca

SEQ ID NO: 467061 - RNA, 23 nt, Artificial Sequence
  Synthetic
aaagaaagcaagcgaagaaagca

SEQ ID NO: 467062 - RNA, 24 nt, Artificial Sequence
  Synthetic
aaaagaaagcaagcgaagaaagca

SEQ ID NO: 467063 - RNA, 18 nt, Artificial Sequence
  Synthetic
uuacaacugaagaaagca

SEQ ID NO: 467064 - RNA, 19 nt, Artificial Sequence
  Synthetic
uuuacaacugaagaaagca

SEQ ID NO: 467065 - RNA, 20 nt, Artificial Sequence
  Synthetic
uuuuacaacugaagaaagca

SEQ ID NO: 467066 - RNA, 21 nt, Artificial Sequence
  Synthetic
auuuuacaacugaagaaagca

SEQ ID NO: 467067 - RNA, 22 nt, Artificial Sequence
  Synthetic
gauuuuacaacugaagaaagca

SEQ ID NO: 467068 - RNA, 23 nt, Artificial Sequence
  Synthetic
agauuuuacaacugaagaaagca

SEQ ID NO: 467069 - RNA, 24 nt, Artificial Sequence
  Synthetic
cagauuuuacaacugaagaaagca

SEQ ID NO: 467070 - RNA, 18 nt, Artificial Sequence
  Synthetic
cuggugccugagaaagca

SEQ ID NO: 467071 - RNA, 19 nt, Artificial Sequence
  Synthetic
ccuggugccugagaaagca

SEQ ID NO: 467072 - RNA, 20 nt, Artificial Sequence
  Synthetic
gccuggugccugagaaagca

SEQ ID NO: 467073 - RNA, 21 nt, Artificial Sequence
  Synthetic
ugccuggugccugagaaagca

SEQ ID NO: 467074 - RNA, 22 nt, Artificial Sequence
  Synthetic
cugccuggugccugagaaagca

SEQ ID NO: 467075 - RNA, 23 nt, Artificial Sequence
  Synthetic
acugccuggugccugagaaagca

SEQ ID NO: 467076 - RNA, 24 nt, Artificial Sequence
  Synthetic
aacugccuggugccugagaaagca

SEQ ID NO: 467077 - RNA, 18 nt, Artificial Sequence
  Synthetic
cucacaaucuagaaagca

SEQ ID NO: 467078 - RNA, 19 nt, Artificial Sequence
  Synthetic
ucucacaaucuagaaagca

SEQ ID NO: 467079 - RNA, 20 nt, Artificial Sequence
  Synthetic
aucucacaaucuagaaagca

SEQ ID NO: 467080 - RNA, 21 nt, Artificial Sequence
  Synthetic
uaucucacaaucuagaaagca

SEQ ID NO: 467081 - RNA, 22 nt, Artificial Sequence
  Synthetic
guaucucacaaucuagaaagca

SEQ ID NO: 467082 - RNA, 23 nt, Artificial Sequence
  Synthetic
aguaucucacaaucuagaaagca

SEQ ID NO: 467083 - RNA, 24 nt, Artificial Sequence
  Synthetic
caguaucucacaaucuagaaagca

SEQ ID NO: 467084 - RNA, 18 nt, Artificial Sequence
  Synthetic
aagaaagcaaggaaagca

SEQ ID NO: 467085 - RNA, 19 nt, Artificial Sequence
  Synthetic
gaagaaagcaaggaaagca

SEQ ID NO: 467086 - RNA, 20 nt, Artificial Sequence
  Synthetic
cgaagaaagcaaggaaagca

SEQ ID NO: 467087 - RNA, 21 nt, Artificial Sequence
  Synthetic
gcgaagaaagcaaggaaagca

SEQ ID NO: 467088 - RNA, 22 nt, Artificial Sequence
  Synthetic
agcgaagaaagcaaggaaagca

SEQ ID NO: 467089 - RNA, 23 nt, Artificial Sequence
  Synthetic
aagcgaagaaagcaaggaaagca

SEQ ID NO: 467090 - RNA, 24 nt, Artificial Sequence
  Synthetic
caagcgaagaaagcaaggaaagca

SEQ ID NO: 467091 - RNA, 18 nt, Artificial Sequence
  Synthetic
uucagggaacggaaagca

SEQ ID NO: 467092 - RNA, 19 nt, Artificial Sequence
  Synthetic
auucagggaacggaaagca

SEQ ID NO: 467093 - RNA, 20 nt, Artificial Sequence
  Synthetic
cauucagggaacggaaagca

SEQ ID NO: 467094 - RNA, 21 nt, Artificial Sequence
  Synthetic
acauucagggaacggaaagca

SEQ ID NO: 467095 - RNA, 22 nt, Artificial Sequence
  Synthetic
uacauucagggaacggaaagca

SEQ ID NO: 467096 - RNA, 23 nt, Artificial Sequence
  Synthetic
uuacauucagggaacggaaagca

SEQ ID NO: 467097 - RNA, 24 nt, Artificial Sequence
  Synthetic
cuuacauucagggaacggaaagca

SEQ ID NO: 467098 - RNA, 18 nt, Artificial Sequence
  Synthetic
acuuuugcuaugaaagca

SEQ ID NO: 467099 - RNA, 19 nt, Artificial Sequence
  Synthetic
gacuuuugcuaugaaagca

SEQ ID NO: 467100 - RNA, 20 nt, Artificial Sequence
  Synthetic
ugacuuuugcuaugaaagca

SEQ ID NO: 467101 - RNA, 21 nt, Artificial Sequence
  Synthetic
cugacuuuugcuaugaaagca

SEQ ID NO: 467102 - RNA, 22 nt, Artificial Sequence
  Synthetic
acugacuuuugcuaugaaagca

SEQ ID NO: 467103 - RNA, 23 nt, Artificial Sequence
  Synthetic
cacugacuuuugcuaugaaagca

SEQ ID NO: 467104 - RNA, 24 nt, Artificial Sequence
  Synthetic
ucacugacuuuugcuaugaaagca

SEQ ID NO: 467105 - RNA, 18 nt, Artificial Sequence
  Synthetic
aaugauucaaauaaagca

SEQ ID NO: 467106 - RNA, 19 nt, Artificial Sequence
  Synthetic
aaaugauucaaauaaagca

SEQ ID NO: 467107 - RNA, 20 nt, Artificial Sequence
  Synthetic
aaaaugauucaaauaaagca

SEQ ID NO: 467108 - RNA, 21 nt, Artificial Sequence
  Synthetic
aaaaaugauucaaauaaagca

SEQ ID NO: 467109 - RNA, 22 nt, Artificial Sequence
  Synthetic
aaaaaaugauucaaauaaagca

SEQ ID NO: 467110 - RNA, 23 nt, Artificial Sequence
  Synthetic
uaaaaaaugauucaaauaaagca

SEQ ID NO: 467111 - RNA, 24 nt, Artificial Sequence
  Synthetic
uuaaaaaaugauucaaauaaagca

SEQ ID NO: 467112 - RNA, 18 nt, Artificial Sequence
  Synthetic
auccugagucauaaagca

SEQ ID NO: 467113 - RNA, 19 nt, Artificial Sequence
  Synthetic
aauccugagucauaaagca

SEQ ID NO: 467114 - RNA, 20 nt, Artificial Sequence
  Synthetic
aaauccugagucauaaagca

SEQ ID NO: 467115 - RNA, 21 nt, Artificial Sequence
  Synthetic
uaaauccugagucauaaagca

SEQ ID NO: 467116 - RNA, 22 nt, Artificial Sequence
  Synthetic
uuaaauccugagucauaaagca

SEQ ID NO: 467117 - RNA, 23 nt, Artificial Sequence
  Synthetic
cuuaaauccugagucauaaagca

SEQ ID NO: 467118 - RNA, 24 nt, Artificial Sequence
  Synthetic
ucuuaaauccugagucauaaagca

SEQ ID NO: 467119 - RNA, 18 nt, Artificial Sequence
  Synthetic
aggagcaaaacuaaagca

SEQ ID NO: 467120 - RNA, 19 nt, Artificial Sequence
  Synthetic
gaggagcaaaacuaaagca

SEQ ID NO: 467121 - RNA, 20 nt, Artificial Sequence
  Synthetic
ugaggagcaaaacuaaagca

SEQ ID NO: 467122 - RNA, 21 nt, Artificial Sequence
  Synthetic
cugaggagcaaaacuaaagca

SEQ ID NO: 467123 - RNA, 22 nt, Artificial Sequence
  Synthetic
gcugaggagcaaaacuaaagca

SEQ ID NO: 467124 - RNA, 23 nt, Artificial Sequence
  Synthetic
ugcugaggagcaaaacuaaagca

SEQ ID NO: 467125 - RNA, 24 nt, Artificial Sequence
  Synthetic
gugcugaggagcaaaacuaaagca

SEQ ID NO: 467126 - RNA, 18 nt, Artificial Sequence
  Synthetic
ggugcuccugguaaagca

SEQ ID NO: 467127 - RNA, 19 nt, Artificial Sequence
  Synthetic
uggugcuccugguaaagca

SEQ ID NO: 467128 - RNA, 20 nt, Artificial Sequence
  Synthetic
auggugcuccugguaaagca

SEQ ID NO: 467129 - RNA, 21 nt, Artificial Sequence
  Synthetic
aauggugcuccugguaaagca

SEQ ID NO: 467130 - RNA, 22 nt, Artificial Sequence
  Synthetic
caauggugcuccugguaaagca

SEQ ID NO: 467131 - RNA, 23 nt, Artificial Sequence
  Synthetic
gcaauggugcuccugguaaagca

SEQ ID NO: 467132 - RNA, 24 nt, Artificial Sequence
  Synthetic
ugcaauggugcuccugguaaagca

SEQ ID NO: 467133 - RNA, 18 nt, Artificial Sequence
  Synthetic
acugaaagguuuaaagca

SEQ ID NO: 467134 - RNA, 19 nt, Artificial Sequence
  Synthetic
cacugaaagguuuaaagca

SEQ ID NO: 467135 - RNA, 20 nt, Artificial Sequence
  Synthetic
ccacugaaagguuuaaagca

SEQ ID NO: 467136 - RNA, 21 nt, Artificial Sequence
  Synthetic
uccacugaaagguuuaaagca

SEQ ID NO: 467137 - RNA, 22 nt, Artificial Sequence
  Synthetic
auccacugaaagguuuaaagca

SEQ ID NO: 467138 - RNA, 23 nt, Artificial Sequence
  Synthetic
aauccacugaaagguuuaaagca

SEQ ID NO: 467139 - RNA, 24 nt, Artificial Sequence
  Synthetic
gaauccacugaaagguuuaaagca

SEQ ID NO: 467140 - RNA, 18 nt, Artificial Sequence
  Synthetic
acuugacuuuuuaaagca

SEQ ID NO: 467141 - RNA, 19 nt, Artificial Sequence
  Synthetic
aacuugacuuuuuaaagca

SEQ ID NO: 467142 - RNA, 20 nt, Artificial Sequence
  Synthetic
gaacuugacuuuuuaaagca

SEQ ID NO: 467143 - RNA, 21 nt, Artificial Sequence
  Synthetic
ugaacuugacuuuuuaaagca

SEQ ID NO: 467144 - RNA, 22 nt, Artificial Sequence
  Synthetic
cugaacuugacuuuuuaaagca

SEQ ID NO: 467145 - RNA, 23 nt, Artificial Sequence
  Synthetic
gcugaacuugacuuuuuaaagca

SEQ ID NO: 467146 - RNA, 24 nt, Artificial Sequence
  Synthetic
agcugaacuugacuuuuuaaagca

SEQ ID NO: 467147 - RNA, 24 nt, Artificial Sequence
  Synthetic
ugacaaaccugacaaaaacaagca

SEQ ID NO: 467148 - RNA, 23 nt, Artificial Sequence
  Synthetic
gacaaaccugagaaaaacaagca

SEQ ID NO: 467149 - RNA, 24 nt, Artificial Sequence
  Synthetic
ugacaaaccugagaaaaacaagca

SEQ ID NO: 467150 - RNA, 18 nt, Artificial Sequence
  Synthetic
uugcugaucugacaagca

SEQ ID NO: 467151 - RNA, 19 nt, Artificial Sequence
  Synthetic
guugcugaucugacaagca

SEQ ID NO: 467152 - RNA, 20 nt, Artificial Sequence
  Synthetic
aguugcugaucugacaagca

SEQ ID NO: 467153 - RNA, 21 nt, Artificial Sequence
  Synthetic
caguugcugaucugacaagca

SEQ ID NO: 467154 - RNA, 22 nt, Artificial Sequence
  Synthetic
gcaguugcugaucugacaagca

SEQ ID NO: 467155 - RNA, 23 nt, Artificial Sequence
  Synthetic
ggcaguugcugaucugacaagca

SEQ ID NO: 467156 - RNA, 24 nt, Artificial Sequence
  Synthetic
gggcaguugcugaucugacaagca

SEQ ID NO: 467157 - RNA, 18 nt, Artificial Sequence
  Synthetic
cagagauagccccaagca

SEQ ID NO: 467158 - RNA, 19 nt, Artificial Sequence
  Synthetic
gcagagauagccccaagca

SEQ ID NO: 467159 - RNA, 20 nt, Artificial Sequence
  Synthetic
agcagagauagccccaagca

SEQ ID NO: 467160 - RNA, 21 nt, Artificial Sequence
  Synthetic
gagcagagauagccccaagca

SEQ ID NO: 467161 - RNA, 22 nt, Artificial Sequence
  Synthetic
ugagcagagauagccccaagca

SEQ ID NO: 467162 - RNA, 23 nt, Artificial Sequence
  Synthetic
augagcagagauagccccaagca

SEQ ID NO: 467163 - RNA, 24 nt, Artificial Sequence
  Synthetic
aaugagcagagauagccccaagca

SEQ ID NO: 467164 - RNA, 18 nt, Artificial Sequence
  Synthetic
agcaaaauaagccaagca

SEQ ID NO: 467165 - RNA, 19 nt, Artificial Sequence
  Synthetic
aagcaaaauaagccaagca

SEQ ID NO: 467166 - RNA, 20 nt, Artificial Sequence
  Synthetic
uaagcaaaauaagccaagca

SEQ ID NO: 467167 - RNA, 21 nt, Artificial Sequence
  Synthetic
uuaagcaaaauaagccaagca

SEQ ID NO: 467168 - RNA, 22 nt, Artificial Sequence
  Synthetic
cuuaagcaaaauaagccaagca

SEQ ID NO: 467169 - RNA, 23 nt, Artificial Sequence
  Synthetic
ucuuaagcaaaauaagccaagca

SEQ ID NO: 467170 - RNA, 24 nt, Artificial Sequence
  Synthetic
aucuuaagcaaaauaagccaagca

SEQ ID NO: 467171 - RNA, 18 nt, Artificial Sequence
  Synthetic
uauccaggaauccaagca

SEQ ID NO: 467172 - RNA, 19 nt, Artificial Sequence
  Synthetic
auauccaggaauccaagca

SEQ ID NO: 467173 - RNA, 20 nt, Artificial Sequence
  Synthetic
cauauccaggaauccaagca

SEQ ID NO: 467174 - RNA, 21 nt, Artificial Sequence
  Synthetic
acauauccaggaauccaagca

SEQ ID NO: 467175 - RNA, 22 nt, Artificial Sequence
  Synthetic
uacauauccaggaauccaagca

SEQ ID NO: 467176 - RNA, 23 nt, Artificial Sequence
  Synthetic
cuacauauccaggaauccaagca

SEQ ID NO: 467177 - RNA, 24 nt, Artificial Sequence
  Synthetic
ucuacauauccaggaauccaagca

SEQ ID NO: 467178 - RNA, 18 nt, Artificial Sequence
  Synthetic
cucucaaaggggcaagca

SEQ ID NO: 467179 - RNA, 19 nt, Artificial Sequence
  Synthetic
ucucucaaaggggcaagca

SEQ ID NO: 467180 - RNA, 20 nt, Artificial Sequence
  Synthetic
uucucucaaaggggcaagca

SEQ ID NO: 467181 - RNA, 21 nt, Artificial Sequence
  Synthetic
cuucucucaaaggggcaagca

SEQ ID NO: 467182 - RNA, 22 nt, Artificial Sequence
  Synthetic
ccuucucucaaaggggcaagca

SEQ ID NO: 467183 - RNA, 23 nt, Artificial Sequence
  Synthetic
uccuucucucaaaggggcaagca

SEQ ID NO: 467184 - RNA, 24 nt, Artificial Sequence
  Synthetic
uuccuucucucaaaggggcaagca

SEQ ID NO: 467185 - RNA, 18 nt, Artificial Sequence
  Synthetic
uuaacuuauuaagaagca

SEQ ID NO: 467186 - RNA, 19 nt, Artificial Sequence
  Synthetic
guuaacuuauuaagaagca

SEQ ID NO: 467187 - RNA, 20 nt, Artificial Sequence
  Synthetic
aguuaacuuauuaagaagca

SEQ ID NO: 467188 - RNA, 21 nt, Artificial Sequence
  Synthetic
aaguuaacuuauuaagaagca

SEQ ID NO: 467189 - RNA, 22 nt, Artificial Sequence
  Synthetic
aaaguuaacuuauuaagaagca

SEQ ID NO: 467190 - RNA, 23 nt, Artificial Sequence
  Synthetic
caaaguuaacuuauuaagaagca

SEQ ID NO: 467191 - RNA, 24 nt, Artificial Sequence
  Synthetic
acaaaguuaacuuauuaagaagca

SEQ ID NO: 467192 - RNA, 18 nt, Artificial Sequence
  Synthetic
uucauaaacuuagaagca

SEQ ID NO: 467193 - RNA, 19 nt, Artificial Sequence
  Synthetic
uuucauaaacuuagaagca

SEQ ID NO: 467194 - RNA, 20 nt, Artificial Sequence
  Synthetic
uuuucauaaacuuagaagca

SEQ ID NO: 467195 - RNA, 21 nt, Artificial Sequence
  Synthetic
guuuucauaaacuuagaagca

SEQ ID NO: 467196 - RNA, 22 nt, Artificial Sequence
  Synthetic
aguuuucauaaacuuagaagca

SEQ ID NO: 467197 - RNA, 23 nt, Artificial Sequence
  Synthetic
caguuuucauaaacuuagaagca

SEQ ID NO: 467198 - RNA, 24 nt, Artificial Sequence
  Synthetic
ccaguuuucauaaacuuagaagca

SEQ ID NO: 467199 - RNA, 18 nt, Artificial Sequence
  Synthetic
ggcugggggcaggaagca

SEQ ID NO: 467200 - RNA, 19 nt, Artificial Sequence
  Synthetic
gggcugggggcaggaagca

SEQ ID NO: 467201 - RNA, 20 nt, Artificial Sequence
  Synthetic
ggggcugggggcaggaagca

SEQ ID NO: 467202 - RNA, 21 nt, Artificial Sequence
  Synthetic
aggggcugggggcaggaagca

SEQ ID NO: 467203 - RNA, 22 nt, Artificial Sequence
  Synthetic
caggggcugggggcaggaagca

SEQ ID NO: 467204 - RNA, 23 nt, Artificial Sequence
  Synthetic
ccaggggcugggggcaggaagca

SEQ ID NO: 467205 - RNA, 24 nt, Artificial Sequence
  Synthetic
uccaggggcugggggcaggaagca

SEQ ID NO: 467206 - RNA, 18 nt, Artificial Sequence
  Synthetic
gagugagauuaggaagca

SEQ ID NO: 467207 - RNA, 19 nt, Artificial Sequence
  Synthetic
ugagugagauuaggaagca

SEQ ID NO: 467208 - RNA, 20 nt, Artificial Sequence
  Synthetic
cugagugagauuaggaagca

SEQ ID NO: 467209 - RNA, 21 nt, Artificial Sequence
  Synthetic
ccugagugagauuaggaagca

SEQ ID NO: 467210 - RNA, 22 nt, Artificial Sequence
  Synthetic
uccugagugagauuaggaagca

SEQ ID NO: 467211 - RNA, 23 nt, Artificial Sequence
  Synthetic
auccugagugagauuaggaagca

SEQ ID NO: 467212 - RNA, 24 nt, Artificial Sequence
  Synthetic
uauccugagugagauuaggaagca

SEQ ID NO: 467213 - RNA, 18 nt, Artificial Sequence
  Synthetic
aaggacaacugggaagca

SEQ ID NO: 467214 - RNA, 19 nt, Artificial Sequence
  Synthetic
caaggacaacugggaagca

SEQ ID NO: 467215 - RNA, 20 nt, Artificial Sequence
  Synthetic
acaaggacaacugggaagca

SEQ ID NO: 467216 - RNA, 21 nt, Artificial Sequence
  Synthetic
cacaaggacaacugggaagca

SEQ ID NO: 467217 - RNA, 22 nt, Artificial Sequence
  Synthetic
ucacaaggacaacugggaagca

SEQ ID NO: 467218 - RNA, 23 nt, Artificial Sequence
  Synthetic
aucacaaggacaacugggaagca

SEQ ID NO: 467219 - RNA, 24 nt, Artificial Sequence
  Synthetic
uaucacaaggacaacugggaagca

SEQ ID NO: 467220 - RNA, 18 nt, Artificial Sequence
  Synthetic
aaugaauuuguggaagca

SEQ ID NO: 467221 - RNA, 19 nt, Artificial Sequence
  Synthetic
aaaugaauuuguggaagca

SEQ ID NO: 467222 - RNA, 20 nt, Artificial Sequence
  Synthetic
gaaaugaauuuguggaagca

SEQ ID NO: 467223 - RNA, 21 nt, Artificial Sequence
  Synthetic
agaaaugaauuuguggaagca

SEQ ID NO: 467224 - RNA, 22 nt, Artificial Sequence
  Synthetic
uagaaaugaauuuguggaagca

SEQ ID NO: 467225 - RNA, 23 nt, Artificial Sequence
  Synthetic
uuagaaaugaauuuguggaagca

SEQ ID NO: 467226 - RNA, 24 nt, Artificial Sequence
  Synthetic
uuuagaaaugaauuuguggaagca

SEQ ID NO: 467227 - RNA, 18 nt, Artificial Sequence
  Synthetic
gaggaaaaaaaugaagca

SEQ ID NO: 467228 - RNA, 19 nt, Artificial Sequence
  Synthetic
agaggaaaaaaaugaagca

SEQ ID NO: 467229 - RNA, 20 nt, Artificial Sequence
  Synthetic
cagaggaaaaaaaugaagca

SEQ ID NO: 467230 - RNA, 21 nt, Artificial Sequence
  Synthetic
acagaggaaaaaaaugaagca

SEQ ID NO: 467231 - RNA, 22 nt, Artificial Sequence
  Synthetic
uacagaggaaaaaaaugaagca

SEQ ID NO: 467232 - RNA, 23 nt, Artificial Sequence
  Synthetic
uuacagaggaaaaaaaugaagca

SEQ ID NO: 467233 - RNA, 24 nt, Artificial Sequence
  Synthetic
guuacagaggaaaaaaaugaagca

SEQ ID NO: 467234 - RNA, 18 nt, Artificial Sequence
  Synthetic
ucaaagggcccugaagca

SEQ ID NO: 467235 - RNA, 19 nt, Artificial Sequence
  Synthetic
cucaaagggcccugaagca

SEQ ID NO: 467236 - RNA, 20 nt, Artificial Sequence
  Synthetic
ucucaaagggcccugaagca

SEQ ID NO: 467237 - RNA, 21 nt, Artificial Sequence
  Synthetic
cucucaaagggcccugaagca

SEQ ID NO: 467238 - RNA, 22 nt, Artificial Sequence
  Synthetic
ucucucaaagggcccugaagca

SEQ ID NO: 467239 - RNA, 23 nt, Artificial Sequence
  Synthetic
gucucucaaagggcccugaagca

SEQ ID NO: 467240 - RNA, 24 nt, Artificial Sequence
  Synthetic
agucucucaaagggcccugaagca

SEQ ID NO: 467241 - RNA, 18 nt, Artificial Sequence
  Synthetic
ucaguuuugagugaagca

SEQ ID NO: 467242 - RNA, 19 nt, Artificial Sequence
  Synthetic
uucaguuuugagugaagca

SEQ ID NO: 467243 - RNA, 20 nt, Artificial Sequence
  Synthetic
guucaguuuugagugaagca

SEQ ID NO: 467244 - RNA, 21 nt, Artificial Sequence
  Synthetic
uguucaguuuugagugaagca

SEQ ID NO: 467245 - RNA, 22 nt, Artificial Sequence
  Synthetic
cuguucaguuuugagugaagca

SEQ ID NO: 467246 - RNA, 23 nt, Artificial Sequence
  Synthetic
ucuguucaguuuugagugaagca

SEQ ID NO: 467247 - RNA, 24 nt, Artificial Sequence
  Synthetic
aucuguucaguuuugagugaagca

SEQ ID NO: 467248 - RNA, 18 nt, Artificial Sequence
  Synthetic
agagugaaauuugaagca

SEQ ID NO: 467249 - RNA, 19 nt, Artificial Sequence
  Synthetic
gagagugaaauuugaagca

SEQ ID NO: 467250 - RNA, 20 nt, Artificial Sequence
  Synthetic
ggagagugaaauuugaagca

SEQ ID NO: 467251 - RNA, 21 nt, Artificial Sequence
  Synthetic
gggagagugaaauuugaagca

SEQ ID NO: 467252 - RNA, 22 nt, Artificial Sequence
  Synthetic
ugggagagugaaauuugaagca

SEQ ID NO: 467253 - RNA, 23 nt, Artificial Sequence
  Synthetic
gugggagagugaaauuugaagca

SEQ ID NO: 467254 - RNA, 24 nt, Artificial Sequence
  Synthetic
agugggagagugaaauuugaagca

SEQ ID NO: 467255 - RNA, 18 nt, Artificial Sequence
  Synthetic
uauugaagaaaauaagca

SEQ ID NO: 467256 - RNA, 19 nt, Artificial Sequence
  Synthetic
guauugaagaaaauaagca

SEQ ID NO: 467257 - RNA, 20 nt, Artificial Sequence
  Synthetic
uguauugaagaaaauaagca

SEQ ID NO: 467258 - RNA, 21 nt, Artificial Sequence
  Synthetic
auguauugaagaaaauaagca

SEQ ID NO: 467259 - RNA, 22 nt, Artificial Sequence
  Synthetic
uauguauugaagaaaauaagca

SEQ ID NO: 467260 - RNA, 23 nt, Artificial Sequence
  Synthetic
uuauguauugaagaaaauaagca

SEQ ID NO: 467261 - RNA, 24 nt, Artificial Sequence
  Synthetic
uuuauguauugaagaaaauaagca

SEQ ID NO: 467262 - RNA, 18 nt, Artificial Sequence
  Synthetic
ggcacgaagaaauaagca

SEQ ID NO: 467263 - RNA, 19 nt, Artificial Sequence
  Synthetic
aggcacgaagaaauaagca

SEQ ID NO: 467264 - RNA, 20 nt, Artificial Sequence
  Synthetic
caggcacgaagaaauaagca

SEQ ID NO: 467265 - RNA, 21 nt, Artificial Sequence
  Synthetic
gcaggcacgaagaaauaagca

SEQ ID NO: 467266 - RNA, 22 nt, Artificial Sequence
  Synthetic
ggcaggcacgaagaaauaagca

SEQ ID NO: 467267 - RNA, 23 nt, Artificial Sequence
  Synthetic
gggcaggcacgaagaaauaagca

SEQ ID NO: 467268 - RNA, 24 nt, Artificial Sequence
  Synthetic
agggcaggcacgaagaaauaagca

SEQ ID NO: 467269 - RNA, 18 nt, Artificial Sequence
  Synthetic
cacaugaggaaauaagca

SEQ ID NO: 467270 - RNA, 19 nt, Artificial Sequence
  Synthetic
acacaugaggaaauaagca

SEQ ID NO: 467271 - RNA, 20 nt, Artificial Sequence
  Synthetic
uacacaugaggaaauaagca

SEQ ID NO: 467272 - RNA, 21 nt, Artificial Sequence
  Synthetic
uuacacaugaggaaauaagca

SEQ ID NO: 467273 - RNA, 22 nt, Artificial Sequence
  Synthetic
uuuacacaugaggaaauaagca

SEQ ID NO: 467274 - RNA, 23 nt, Artificial Sequence
  Synthetic
uuuuacacaugaggaaauaagca

SEQ ID NO: 467275 - RNA, 24 nt, Artificial Sequence
  Synthetic
uuuuuacacaugaggaaauaagca

SEQ ID NO: 467276 - RNA, 18 nt, Artificial Sequence
  Synthetic
gggagaggggaauaagca

SEQ ID NO: 467277 - RNA, 19 nt, Artificial Sequence
  Synthetic
agggagaggggaauaagca

SEQ ID NO: 467278 - RNA, 20 nt, Artificial Sequence
  Synthetic
gagggagaggggaauaagca

SEQ ID NO: 467279 - RNA, 21 nt, Artificial Sequence
  Synthetic
ggagggagaggggaauaagca

SEQ ID NO: 467280 - RNA, 22 nt, Artificial Sequence
  Synthetic
gggagggagaggggaauaagca

SEQ ID NO: 467281 - RNA, 23 nt, Artificial Sequence
  Synthetic
agggagggagaggggaauaagca

SEQ ID NO: 467282 - RNA, 24 nt, Artificial Sequence
  Synthetic
gagggagggagaggggaauaagca

SEQ ID NO: 467283 - RNA, 18 nt, Artificial Sequence
  Synthetic
ucagacauggcauaagca

SEQ ID NO: 467284 - RNA, 19 nt, Artificial Sequence
  Synthetic
uucagacauggcauaagca

SEQ ID NO: 467285 - RNA, 20 nt, Artificial Sequence
  Synthetic
auucagacauggcauaagca

SEQ ID NO: 467286 - RNA, 21 nt, Artificial Sequence
  Synthetic
uauucagacauggcauaagca

SEQ ID NO: 467287 - RNA, 22 nt, Artificial Sequence
  Synthetic
auauucagacauggcauaagca

SEQ ID NO: 467288 - RNA, 23 nt, Artificial Sequence
  Synthetic
uauauucagacauggcauaagca

SEQ ID NO: 467289 - RNA, 24 nt, Artificial Sequence
  Synthetic
auauauucagacauggcauaagca

SEQ ID NO: 467290 - RNA, 18 nt, Artificial Sequence
  Synthetic
acauauuacagauaagca

SEQ ID NO: 467291 - RNA, 19 nt, Artificial Sequence
  Synthetic
uacauauuacagauaagca

SEQ ID NO: 467292 - RNA, 20 nt, Artificial Sequence
  Synthetic
uuacauauuacagauaagca

SEQ ID NO: 467293 - RNA, 21 nt, Artificial Sequence
  Synthetic
guuacauauuacagauaagca

SEQ ID NO: 467294 - RNA, 22 nt, Artificial Sequence
  Synthetic
uguuacauauuacagauaagca

SEQ ID NO: 467295 - RNA, 23 nt, Artificial Sequence
  Synthetic
auguuacauauuacagauaagca

SEQ ID NO: 467296 - RNA, 24 nt, Artificial Sequence
  Synthetic
cauguuacauauuacagauaagca

SEQ ID NO: 467297 - RNA, 18 nt, Artificial Sequence
  Synthetic
auuaaaaugcgauaagca

SEQ ID NO: 467298 - RNA, 19 nt, Artificial Sequence
  Synthetic
gauuaaaaugcgauaagca

SEQ ID NO: 467299 - RNA, 20 nt, Artificial Sequence
  Synthetic
ggauuaaaaugcgauaagca

SEQ ID NO: 467300 - RNA, 21 nt, Artificial Sequence
  Synthetic
gggauuaaaaugcgauaagca

SEQ ID NO: 467301 - RNA, 22 nt, Artificial Sequence
  Synthetic
ugggauuaaaaugcgauaagca

SEQ ID NO: 467302 - RNA, 23 nt, Artificial Sequence
  Synthetic
cugggauuaaaaugcgauaagca

SEQ ID NO: 467303 - RNA, 24 nt, Artificial Sequence
  Synthetic
gcugggauuaaaaugcgauaagca

SEQ ID NO: 467304 - RNA, 18 nt, Artificial Sequence
  Synthetic
uuucucaccugauaagca

SEQ ID NO: 467305 - RNA, 19 nt, Artificial Sequence
  Synthetic
uuuucucaccugauaagca

SEQ ID NO: 467306 - RNA, 20 nt, Artificial Sequence
  Synthetic
guuuucucaccugauaagca

SEQ ID NO: 467307 - RNA, 21 nt, Artificial Sequence
  Synthetic
aguuuucucaccugauaagca

SEQ ID NO: 467308 - RNA, 22 nt, Artificial Sequence
  Synthetic
caguuuucucaccugauaagca

SEQ ID NO: 467309 - RNA, 23 nt, Artificial Sequence
  Synthetic
acaguuuucucaccugauaagca

SEQ ID NO: 467310 - RNA, 24 nt, Artificial Sequence
  Synthetic
uacaguuuucucaccugauaagca

SEQ ID NO: 467311 - RNA, 18 nt, Artificial Sequence
  Synthetic
uguagagucauauaagca

SEQ ID NO: 467312 - RNA, 19 nt, Artificial Sequence
  Synthetic
guguagagucauauaagca

SEQ ID NO: 467313 - RNA, 20 nt, Artificial Sequence
  Synthetic
aguguagagucauauaagca

SEQ ID NO: 467314 - RNA, 21 nt, Artificial Sequence
  Synthetic
gaguguagagucauauaagca

SEQ ID NO: 467315 - RNA, 22 nt, Artificial Sequence
  Synthetic
agaguguagagucauauaagca

SEQ ID NO: 467316 - RNA, 23 nt, Artificial Sequence
  Synthetic
aagaguguagagucauauaagca

SEQ ID NO: 467317 - RNA, 24 nt, Artificial Sequence
  Synthetic
uaagaguguagagucauauaagca

SEQ ID NO: 467318 - RNA, 18 nt, Artificial Sequence
  Synthetic
aggcuucauauauaagca

SEQ ID NO: 467319 - RNA, 19 nt, Artificial Sequence
  Synthetic
uaggcuucauauauaagca

SEQ ID NO: 467320 - RNA, 20 nt, Artificial Sequence
  Synthetic
uuaggcuucauauauaagca

SEQ ID NO: 467321 - RNA, 21 nt, Artificial Sequence
  Synthetic
uuuaggcuucauauauaagca

SEQ ID NO: 467322 - RNA, 22 nt, Artificial Sequence
  Synthetic
auuuaggcuucauauauaagca

SEQ ID NO: 467323 - RNA, 23 nt, Artificial Sequence
  Synthetic
cauuuaggcuucauauauaagca

SEQ ID NO: 467324 - RNA, 24 nt, Artificial Sequence
  Synthetic
ucauuuaggcuucauauauaagca

SEQ ID NO: 467325 - RNA, 18 nt, Artificial Sequence
  Synthetic
gaaagaacgcccuaagca

SEQ ID NO: 467326 - RNA, 19 nt, Artificial Sequence
  Synthetic
ggaaagaacgcccuaagca

SEQ ID NO: 467327 - RNA, 20 nt, Artificial Sequence
  Synthetic
gggaaagaacgcccuaagca

SEQ ID NO: 467328 - RNA, 21 nt, Artificial Sequence
  Synthetic
cgggaaagaacgcccuaagca

SEQ ID NO: 467329 - RNA, 22 nt, Artificial Sequence
  Synthetic
gcgggaaagaacgcccuaagca

SEQ ID NO: 467330 - RNA, 23 nt, Artificial Sequence
  Synthetic
ugcgggaaagaacgcccuaagca

SEQ ID NO: 467331 - RNA, 24 nt, Artificial Sequence
  Synthetic
uugcgggaaagaacgcccuaagca

SEQ ID NO: 467332 - RNA, 18 nt, Artificial Sequence
  Synthetic
auaagugggagcuaagca

SEQ ID NO: 467333 - RNA, 19 nt, Artificial Sequence
  Synthetic
uauaagugggagcuaagca

SEQ ID NO: 467334 - RNA, 20 nt, Artificial Sequence
  Synthetic
uuauaagugggagcuaagca

SEQ ID NO: 467335 - RNA, 21 nt, Artificial Sequence
  Synthetic
cuuauaagugggagcuaagca

SEQ ID NO: 467336 - RNA, 22 nt, Artificial Sequence
  Synthetic
acuuauaagugggagcuaagca

SEQ ID NO: 467337 - RNA, 23 nt, Artificial Sequence
  Synthetic
uacuuauaagugggagcuaagca

SEQ ID NO: 467338 - RNA, 24 nt, Artificial Sequence
  Synthetic
uuacuuauaagugggagcuaagca

SEQ ID NO: 467339 - RNA, 18 nt, Artificial Sequence
  Synthetic
caguguugcauguaagca

SEQ ID NO: 467340 - RNA, 19 nt, Artificial Sequence
  Synthetic
acaguguugcauguaagca

SEQ ID NO: 467341 - RNA, 20 nt, Artificial Sequence
  Synthetic
aacaguguugcauguaagca

SEQ ID NO: 467342 - RNA, 21 nt, Artificial Sequence
  Synthetic
caacaguguugcauguaagca

SEQ ID NO: 467343 - RNA, 22 nt, Artificial Sequence
  Synthetic
ccaacaguguugcauguaagca

SEQ ID NO: 467344 - RNA, 23 nt, Artificial Sequence
  Synthetic
uccaacaguguugcauguaagca

SEQ ID NO: 467345 - RNA, 24 nt, Artificial Sequence
  Synthetic
cuccaacaguguugcauguaagca

SEQ ID NO: 467346 - RNA, 18 nt, Artificial Sequence
  Synthetic
uggcaggugauguaagca

SEQ ID NO: 467347 - RNA, 19 nt, Artificial Sequence
  Synthetic
auggcaggugauguaagca

SEQ ID NO: 467348 - RNA, 20 nt, Artificial Sequence
  Synthetic
cauggcaggugauguaagca

SEQ ID NO: 467349 - RNA, 21 nt, Artificial Sequence
  Synthetic
acauggcaggugauguaagca

SEQ ID NO: 467350 - RNA, 22 nt, Artificial Sequence
  Synthetic
uacauggcaggugauguaagca

SEQ ID NO: 467351 - RNA, 23 nt, Artificial Sequence
  Synthetic
auacauggcaggugauguaagca

SEQ ID NO: 467352 - RNA, 24 nt, Artificial Sequence
  Synthetic
aauacauggcaggugauguaagca

SEQ ID NO: 467353 - RNA, 18 nt, Artificial Sequence
  Synthetic
ccaugagggccuuaagca

SEQ ID NO: 467354 - RNA, 19 nt, Artificial Sequence
  Synthetic
uccaugagggccuuaagca

SEQ ID NO: 467355 - RNA, 20 nt, Artificial Sequence
  Synthetic
auccaugagggccuuaagca

SEQ ID NO: 467356 - RNA, 21 nt, Artificial Sequence
  Synthetic
aauccaugagggccuuaagca

SEQ ID NO: 467357 - RNA, 22 nt, Artificial Sequence
  Synthetic
aaauccaugagggccuuaagca

SEQ ID NO: 467358 - RNA, 23 nt, Artificial Sequence
  Synthetic
uaaauccaugagggccuuaagca

SEQ ID NO: 467359 - RNA, 24 nt, Artificial Sequence
  Synthetic
auaaauccaugagggccuuaagca

SEQ ID NO: 467360 - RNA, 18 nt, Artificial Sequence
  Synthetic
guuuaauuccuuuaagca

SEQ ID NO: 467361 - RNA, 19 nt, Artificial Sequence
  Synthetic
aguuuaauuccuuuaagca

SEQ ID NO: 467362 - RNA, 20 nt, Artificial Sequence
  Synthetic
uaguuuaauuccuuuaagca

SEQ ID NO: 467363 - RNA, 21 nt, Artificial Sequence
  Synthetic
auaguuuaauuccuuuaagca

SEQ ID NO: 467364 - RNA, 22 nt, Artificial Sequence
  Synthetic
aauaguuuaauuccuuuaagca

SEQ ID NO: 467365 - RNA, 23 nt, Artificial Sequence
  Synthetic
aaauaguuuaauuccuuuaagca

SEQ ID NO: 467366 - RNA, 24 nt, Artificial Sequence
  Synthetic
aaaauaguuuaauuccuuuaagca

SEQ ID NO: 467367 - RNA, 18 nt, Artificial Sequence
  Synthetic
ugagugggucuuuaagca

SEQ ID NO: 467368 - RNA, 19 nt, Artificial Sequence
  Synthetic
augagugggucuuuaagca

SEQ ID NO: 467369 - RNA, 20 nt, Artificial Sequence
  Synthetic
caugagugggucuuuaagca

SEQ ID NO: 467370 - RNA, 21 nt, Artificial Sequence
  Synthetic
acaugagugggucuuuaagca

SEQ ID NO: 467371 - RNA, 22 nt, Artificial Sequence
  Synthetic
aacaugagugggucuuuaagca

SEQ ID NO: 467372 - RNA, 23 nt, Artificial Sequence
  Synthetic
aaacaugagugggucuuuaagca

SEQ ID NO: 467373 - RNA, 24 nt, Artificial Sequence
  Synthetic
caaacaugagugggucuuuaagca

SEQ ID NO: 467374 - RNA, 18 nt, Artificial Sequence
  Synthetic
gcuggcauccaaacagca

SEQ ID NO: 467375 - RNA, 19 nt, Artificial Sequence
  Synthetic
ggcuggcauccaaacagca

SEQ ID NO: 467376 - RNA, 20 nt, Artificial Sequence
  Synthetic
uggcuggcauccaaacagca

SEQ ID NO: 467377 - RNA, 21 nt, Artificial Sequence
  Synthetic
auggcuggcauccaaacagca

SEQ ID NO: 467378 - RNA, 22 nt, Artificial Sequence
  Synthetic
uauggcuggcauccaaacagca

SEQ ID NO: 467379 - RNA, 23 nt, Artificial Sequence
  Synthetic
guauggcuggcauccaaacagca

SEQ ID NO: 467380 - RNA, 24 nt, Artificial Sequence
  Synthetic
aguauggcuggcauccaaacagca

SEQ ID NO: 467381 - RNA, 18 nt, Artificial Sequence
  Synthetic
acuaucacgacaacagca

SEQ ID NO: 467382 - RNA, 19 nt, Artificial Sequence
  Synthetic
cacuaucacgacaacagca

SEQ ID NO: 467383 - RNA, 20 nt, Artificial Sequence
  Synthetic
ucacuaucacgacaacagca

SEQ ID NO: 467384 - RNA, 21 nt, Artificial Sequence
  Synthetic
uucacuaucacgacaacagca

SEQ ID NO: 467385 - RNA, 22 nt, Artificial Sequence
  Synthetic
auucacuaucacgacaacagca

SEQ ID NO: 467386 - RNA, 23 nt, Artificial Sequence
  Synthetic
cauucacuaucacgacaacagca

SEQ ID NO: 467387 - RNA, 24 nt, Artificial Sequence
  Synthetic
ucauucacuaucacgacaacagca

SEQ ID NO: 467388 - RNA, 18 nt, Artificial Sequence
  Synthetic
uuaagcacugcaacagca

SEQ ID NO: 467389 - RNA, 19 nt, Artificial Sequence
  Synthetic
cuuaagcacugcaacagca

SEQ ID NO: 467390 - RNA, 20 nt, Artificial Sequence
  Synthetic
acuuaagcacugcaacagca

SEQ ID NO: 467391 - RNA, 21 nt, Artificial Sequence
  Synthetic
cacuuaagcacugcaacagca

SEQ ID NO: 467392 - RNA, 22 nt, Artificial Sequence
  Synthetic
acacuuaagcacugcaacagca

SEQ ID NO: 467393 - RNA, 23 nt, Artificial Sequence
  Synthetic
cacacuuaagcacugcaacagca

SEQ ID NO: 467394 - RNA, 24 nt, Artificial Sequence
  Synthetic
ucacacuuaagcacugcaacagca

SEQ ID NO: 467395 - RNA, 21 nt, Artificial Sequence
  Synthetic
cucacuaucaggagaacagca

SEQ ID NO: 467396 - RNA, 22 nt, Artificial Sequence
  Synthetic
acucacuaucaggagaacagca

SEQ ID NO: 467397 - RNA, 23 nt, Artificial Sequence
  Synthetic
cacucacuaucaggagaacagca

SEQ ID NO: 467398 - RNA, 24 nt, Artificial Sequence
  Synthetic
ucacucacuaucaggagaacagca

SEQ ID NO: 467399 - RNA, 18 nt, Artificial Sequence
  Synthetic
ucagcacuuggaacagca

SEQ ID NO: 467400 - RNA, 19 nt, Artificial Sequence
  Synthetic
gucagcacuuggaacagca

SEQ ID NO: 467401 - RNA, 20 nt, Artificial Sequence
  Synthetic
ugucagcacuuggaacagca

SEQ ID NO: 467402 - RNA, 21 nt, Artificial Sequence
  Synthetic
cugucagcacuuggaacagca

SEQ ID NO: 467403 - RNA, 22 nt, Artificial Sequence
  Synthetic
gcugucagcacuuggaacagca

SEQ ID NO: 467404 - RNA, 23 nt, Artificial Sequence
  Synthetic
ugcugucagcacuuggaacagca

SEQ ID NO: 467405 - RNA, 24 nt, Artificial Sequence
  Synthetic
cugcugucagcacuuggaacagca

SEQ ID NO: 467406 - RNA, 18 nt, Artificial Sequence
  Synthetic
caguaucgacacacagca

SEQ ID NO: 467407 - RNA, 19 nt, Artificial Sequence
  Synthetic
ucaguaucgacacacagca

SEQ ID NO: 467408 - RNA, 20 nt, Artificial Sequence
  Synthetic
aucaguaucgacacacagca

SEQ ID NO: 467409 - RNA, 21 nt, Artificial Sequence
  Synthetic
uaucaguaucgacacacagca

SEQ ID NO: 467410 - RNA, 22 nt, Artificial Sequence
  Synthetic
auaucaguaucgacacacagca

SEQ ID NO: 467411 - RNA, 23 nt, Artificial Sequence
  Synthetic
cauaucaguaucgacacacagca

SEQ ID NO: 467412 - RNA, 24 nt, Artificial Sequence
  Synthetic
acauaucaguaucgacacacagca

SEQ ID NO: 467413 - RNA, 18 nt, Artificial Sequence
  Synthetic
gguguugaggacacagca

SEQ ID NO: 467414 - RNA, 19 nt, Artificial Sequence
  Synthetic
ggguguugaggacacagca

SEQ ID NO: 467415 - RNA, 20 nt, Artificial Sequence
  Synthetic
uggguguugaggacacagca

SEQ ID NO: 467416 - RNA, 21 nt, Artificial Sequence
  Synthetic
uuggguguugaggacacagca

SEQ ID NO: 467417 - RNA, 22 nt, Artificial Sequence
  Synthetic
uuuggguguugaggacacagca

SEQ ID NO: 467418 - RNA, 23 nt, Artificial Sequence
  Synthetic
uuuuggguguugaggacacagca

SEQ ID NO: 467419 - RNA, 24 nt, Artificial Sequence
  Synthetic
guuuuggguguugaggacacagca

SEQ ID NO: 467420 - RNA, 18 nt, Artificial Sequence
  Synthetic
acucuuuagcccacagca

SEQ ID NO: 467421 - RNA, 19 nt, Artificial Sequence
  Synthetic
uacucuuuagcccacagca

SEQ ID NO: 467422 - RNA, 20 nt, Artificial Sequence
  Synthetic
guacucuuuagcccacagca

SEQ ID NO: 467423 - RNA, 21 nt, Artificial Sequence
  Synthetic
gguacucuuuagcccacagca

SEQ ID NO: 467424 - RNA, 22 nt, Artificial Sequence
  Synthetic
ggguacucuuuagcccacagca

SEQ ID NO: 467425 - RNA, 23 nt, Artificial Sequence
  Synthetic
uggguacucuuuagcccacagca

SEQ ID NO: 467426 - RNA, 24 nt, Artificial Sequence
  Synthetic
guggguacucuuuagcccacagca

SEQ ID NO: 467427 - RNA, 18 nt, Artificial Sequence
  Synthetic
uguaaauguuccacagca

SEQ ID NO: 467428 - RNA, 19 nt, Artificial Sequence
  Synthetic
cuguaaauguuccacagca

SEQ ID NO: 467429 - RNA, 20 nt, Artificial Sequence
  Synthetic
acuguaaauguuccacagca

SEQ ID NO: 467430 - RNA, 21 nt, Artificial Sequence
  Synthetic
aacuguaaauguuccacagca

SEQ ID NO: 467431 - RNA, 22 nt, Artificial Sequence
  Synthetic
caacuguaaauguuccacagca

SEQ ID NO: 467432 - RNA, 23 nt, Artificial Sequence
  Synthetic
acaacuguaaauguuccacagca

SEQ ID NO: 467433 - RNA, 24 nt, Artificial Sequence
  Synthetic
cacaacuguaaauguuccacagca

SEQ ID NO: 467434 - RNA, 18 nt, Artificial Sequence
  Synthetic
gggaguaaaagcacagca

SEQ ID NO: 467435 - RNA, 19 nt, Artificial Sequence
  Synthetic
ugggaguaaaagcacagca

SEQ ID NO: 467436 - RNA, 20 nt, Artificial Sequence
  Synthetic
uugggaguaaaagcacagca

SEQ ID NO: 467437 - RNA, 21 nt, Artificial Sequence
  Synthetic
guugggaguaaaagcacagca

SEQ ID NO: 467438 - RNA, 22 nt, Artificial Sequence
  Synthetic
uguugggaguaaaagcacagca

SEQ ID NO: 467439 - RNA, 23 nt, Artificial Sequence
  Synthetic
uuguugggaguaaaagcacagca

SEQ ID NO: 467440 - RNA, 24 nt, Artificial Sequence
  Synthetic
guuguugggaguaaaagcacagca

SEQ ID NO: 467441 - RNA, 18 nt, Artificial Sequence
  Synthetic
aaaaagcuuugcacagca

SEQ ID NO: 467442 - RNA, 19 nt, Artificial Sequence
  Synthetic
uaaaaagcuuugcacagca

SEQ ID NO: 467443 - RNA, 20 nt, Artificial Sequence
  Synthetic
cuaaaaagcuuugcacagca

SEQ ID NO: 467444 - RNA, 21 nt, Artificial Sequence
  Synthetic
acuaaaaagcuuugcacagca

SEQ ID NO: 467445 - RNA, 22 nt, Artificial Sequence
  Synthetic
aacuaaaaagcuuugcacagca

SEQ ID NO: 467446 - RNA, 23 nt, Artificial Sequence
  Synthetic
aaacuaaaaagcuuugcacagca

SEQ ID NO: 467447 - RNA, 24 nt, Artificial Sequence
  Synthetic
caaacuaaaaagcuuugcacagca

SEQ ID NO: 467448 - RNA, 18 nt, Artificial Sequence
  Synthetic
guguucuuuugcacagca

SEQ ID NO: 467449 - RNA, 19 nt, Artificial Sequence
  Synthetic
gguguucuuuugcacagca

SEQ ID NO: 467450 - RNA, 20 nt, Artificial Sequence
  Synthetic
ugguguucuuuugcacagca

SEQ ID NO: 467451 - RNA, 21 nt, Artificial Sequence
  Synthetic
cugguguucuuuugcacagca

SEQ ID NO: 467452 - RNA, 22 nt, Artificial Sequence
  Synthetic
ucugguguucuuuugcacagca

SEQ ID NO: 467453 - RNA, 23 nt, Artificial Sequence
  Synthetic
uucugguguucuuuugcacagca

SEQ ID NO: 467454 - RNA, 24 nt, Artificial Sequence
  Synthetic
guucugguguucuuuugcacagca

SEQ ID NO: 467455 - RNA, 18 nt, Artificial Sequence
  Synthetic
gguauccauuagacagca

SEQ ID NO: 467456 - RNA, 19 nt, Artificial Sequence
  Synthetic
agguauccauuagacagca

SEQ ID NO: 467457 - RNA, 20 nt, Artificial Sequence
  Synthetic
uagguauccauuagacagca

SEQ ID NO: 467458 - RNA, 21 nt, Artificial Sequence
  Synthetic
auagguauccauuagacagca

SEQ ID NO: 467459 - RNA, 22 nt, Artificial Sequence
  Synthetic
gauagguauccauuagacagca

SEQ ID NO: 467460 - RNA, 23 nt, Artificial Sequence
  Synthetic
ugauagguauccauuagacagca

SEQ ID NO: 467461 - RNA, 24 nt, Artificial Sequence
  Synthetic
uugauagguauccauuagacagca

SEQ ID NO: 467462 - RNA, 18 nt, Artificial Sequence
  Synthetic
aaaauuucagcgacagca

SEQ ID NO: 467463 - RNA, 19 nt, Artificial Sequence
  Synthetic
aaaaauuucagcgacagca

SEQ ID NO: 467464 - RNA, 20 nt, Artificial Sequence
  Synthetic
uaaaaauuucagcgacagca

SEQ ID NO: 467465 - RNA, 21 nt, Artificial Sequence
  Synthetic
auaaaaauuucagcgacagca

SEQ ID NO: 467466 - RNA, 22 nt, Artificial Sequence
  Synthetic
gauaaaaauuucagcgacagca

SEQ ID NO: 467467 - RNA, 23 nt, Artificial Sequence
  Synthetic
ggauaaaaauuucagcgacagca

SEQ ID NO: 467468 - RNA, 24 nt, Artificial Sequence
  Synthetic
gggauaaaaauuucagcgacagca

SEQ ID NO: 467469 - RNA, 18 nt, Artificial Sequence
  Synthetic
gcucacucagggacagca

SEQ ID NO: 467470 - RNA, 19 nt, Artificial Sequence
  Synthetic
agcucacucagggacagca

SEQ ID NO: 467471 - RNA, 20 nt, Artificial Sequence
  Synthetic
aagcucacucagggacagca

SEQ ID NO: 467472 - RNA, 21 nt, Artificial Sequence
  Synthetic
gaagcucacucagggacagca

SEQ ID NO: 467473 - RNA, 22 nt, Artificial Sequence
  Synthetic
agaagcucacucagggacagca

SEQ ID NO: 467474 - RNA, 23 nt, Artificial Sequence
  Synthetic
cagaagcucacucagggacagca

SEQ ID NO: 467475 - RNA, 24 nt, Artificial Sequence
  Synthetic
gcagaagcucacucagggacagca

SEQ ID NO: 467476 - RNA, 18 nt, Artificial Sequence
  Synthetic
cuguuguauuggacagca

SEQ ID NO: 467477 - RNA, 19 nt, Artificial Sequence
  Synthetic
gcuguuguauuggacagca

SEQ ID NO: 467478 - RNA, 20 nt, Artificial Sequence
  Synthetic
ggcuguuguauuggacagca

SEQ ID NO: 467479 - RNA, 21 nt, Artificial Sequence
  Synthetic
uggcuguuguauuggacagca

SEQ ID NO: 467480 - RNA, 22 nt, Artificial Sequence
  Synthetic
guggcuguuguauuggacagca

SEQ ID NO: 467481 - RNA, 23 nt, Artificial Sequence
  Synthetic
aguggcuguuguauuggacagca

SEQ ID NO: 467482 - RNA, 24 nt, Artificial Sequence
  Synthetic
uaguggcuguuguauuggacagca

SEQ ID NO: 467483 - RNA, 18 nt, Artificial Sequence
  Synthetic
uuauggaaugguacagca

SEQ ID NO: 467484 - RNA, 19 nt, Artificial Sequence
  Synthetic
auuauggaaugguacagca

SEQ ID NO: 467485 - RNA, 20 nt, Artificial Sequence
  Synthetic
aauuauggaaugguacagca

SEQ ID NO: 467486 - RNA, 21 nt, Artificial Sequence
  Synthetic
uaauuauggaaugguacagca

SEQ ID NO: 467487 - RNA, 22 nt, Artificial Sequence
  Synthetic
cuaauuauggaaugguacagca

SEQ ID NO: 467488 - RNA, 23 nt, Artificial Sequence
  Synthetic
ccuaauuauggaaugguacagca

SEQ ID NO: 467489 - RNA, 24 nt, Artificial Sequence
  Synthetic
gccuaauuauggaaugguacagca

SEQ ID NO: 467490 - RNA, 18 nt, Artificial Sequence
  Synthetic
cagaucuaauguacagca

SEQ ID NO: 467491 - RNA, 19 nt, Artificial Sequence
  Synthetic
gcagaucuaauguacagca

SEQ ID NO: 467492 - RNA, 20 nt, Artificial Sequence
  Synthetic
ggcagaucuaauguacagca

SEQ ID NO: 467493 - RNA, 21 nt, Artificial Sequence
  Synthetic
uggcagaucuaauguacagca

SEQ ID NO: 467494 - RNA, 22 nt, Artificial Sequence
  Synthetic
auggcagaucuaauguacagca

SEQ ID NO: 467495 - RNA, 23 nt, Artificial Sequence
  Synthetic
aauggcagaucuaauguacagca

SEQ ID NO: 467496 - RNA, 24 nt, Artificial Sequence
  Synthetic
gaauggcagaucuaauguacagca

SEQ ID NO: 467497 - RNA, 18 nt, Artificial Sequence
  Synthetic
ugugacgggagaccagca

SEQ ID NO: 467498 - RNA, 19 nt, Artificial Sequence
  Synthetic
augugacgggagaccagca

SEQ ID NO: 467499 - RNA, 20 nt, Artificial Sequence
  Synthetic
aaugugacgggagaccagca

SEQ ID NO: 467500 - RNA, 21 nt, Artificial Sequence
  Synthetic
caaugugacgggagaccagca

SEQ ID NO: 467501 - RNA, 22 nt, Artificial Sequence
  Synthetic
gcaaugugacgggagaccagca

SEQ ID NO: 467502 - RNA, 23 nt, Artificial Sequence
  Synthetic
ugcaaugugacgggagaccagca

SEQ ID NO: 467503 - RNA, 24 nt, Artificial Sequence
  Synthetic
cugcaaugugacgggagaccagca

SEQ ID NO: 467504 - RNA, 18 nt, Artificial Sequence
  Synthetic
auauuugugggaccagca

SEQ ID NO: 467505 - RNA, 19 nt, Artificial Sequence
  Synthetic
gauauuugugggaccagca

SEQ ID NO: 467506 - RNA, 20 nt, Artificial Sequence
  Synthetic
ggauauuugugggaccagca

SEQ ID NO: 467507 - RNA, 21 nt, Artificial Sequence
  Synthetic
uggauauuugugggaccagca

SEQ ID NO: 467508 - RNA, 22 nt, Artificial Sequence
  Synthetic
auggauauuugugggaccagca

SEQ ID NO: 467509 - RNA, 23 nt, Artificial Sequence
  Synthetic
cauggauauuugugggaccagca

SEQ ID NO: 467510 - RNA, 24 nt, Artificial Sequence
  Synthetic
gcauggauauuugugggaccagca

SEQ ID NO: 467511 - RNA, 18 nt, Artificial Sequence
  Synthetic
cuucccaaucacccagca

SEQ ID NO: 467512 - RNA, 19 nt, Artificial Sequence
  Synthetic
ccuucccaaucacccagca

SEQ ID NO: 467513 - RNA, 20 nt, Artificial Sequence
  Synthetic
accuucccaaucacccagca

SEQ ID NO: 467514 - RNA, 21 nt, Artificial Sequence
  Synthetic
caccuucccaaucacccagca

SEQ ID NO: 467515 - RNA, 22 nt, Artificial Sequence
  Synthetic
acaccuucccaaucacccagca

SEQ ID NO: 467516 - RNA, 23 nt, Artificial Sequence
  Synthetic
cacaccuucccaaucacccagca

SEQ ID NO: 467517 - RNA, 24 nt, Artificial Sequence
  Synthetic
ccacaccuucccaaucacccagca

SEQ ID NO: 467518 - RNA, 18 nt, Artificial Sequence
  Synthetic
cuccacuuuuccccagca

SEQ ID NO: 467519 - RNA, 19 nt, Artificial Sequence
  Synthetic
ccuccacuuuuccccagca

SEQ ID NO: 467520 - RNA, 20 nt, Artificial Sequence
  Synthetic
uccuccacuuuuccccagca

SEQ ID NO: 467521 - RNA, 21 nt, Artificial Sequence
  Synthetic
cuccuccacuuuuccccagca

SEQ ID NO: 467522 - RNA, 22 nt, Artificial Sequence
  Synthetic
ccuccuccacuuuuccccagca

SEQ ID NO: 467523 - RNA, 23 nt, Artificial Sequence
  Synthetic
uccuccuccacuuuuccccagca

SEQ ID NO: 467524 - RNA, 24 nt, Artificial Sequence
  Synthetic
uuccuccuccacuuuuccccagca

SEQ ID NO: 467525 - RNA, 18 nt, Artificial Sequence
  Synthetic
gguucacuuagcccagca

SEQ ID NO: 467526 - RNA, 19 nt, Artificial Sequence
  Synthetic
ugguucacuuagcccagca

SEQ ID NO: 467527 - RNA, 20 nt, Artificial Sequence
  Synthetic
uugguucacuuagcccagca

SEQ ID NO: 467528 - RNA, 21 nt, Artificial Sequence
  Synthetic
guugguucacuuagcccagca

SEQ ID NO: 467529 - RNA, 22 nt, Artificial Sequence
  Synthetic
aguugguucacuuagcccagca

SEQ ID NO: 467530 - RNA, 23 nt, Artificial Sequence
  Synthetic
uaguugguucacuuagcccagca

SEQ ID NO: 467531 - RNA, 24 nt, Artificial Sequence
  Synthetic
auaguugguucacuuagcccagca

SEQ ID NO: 467532 - RNA, 18 nt, Artificial Sequence
  Synthetic
ccuccccuacucccagca

SEQ ID NO: 467533 - RNA, 19 nt, Artificial Sequence
  Synthetic
accuccccuacucccagca

SEQ ID NO: 467534 - RNA, 20 nt, Artificial Sequence
  Synthetic
uaccuccccuacucccagca

SEQ ID NO: 467535 - RNA, 21 nt, Artificial Sequence
  Synthetic
auaccuccccuacucccagca

SEQ ID NO: 467536 - RNA, 22 nt, Artificial Sequence
  Synthetic
cauaccuccccuacucccagca

SEQ ID NO: 467537 - RNA, 23 nt, Artificial Sequence
  Synthetic
ccauaccuccccuacucccagca

SEQ ID NO: 467538 - RNA, 24 nt, Artificial Sequence
  Synthetic
accauaccuccccuacucccagca

SEQ ID NO: 467539 - RNA, 18 nt, Artificial Sequence
  Synthetic
uucugcacugucccagca

SEQ ID NO: 467540 - RNA, 19 nt, Artificial Sequence
  Synthetic
cuucugcacugucccagca

SEQ ID NO: 467541 - RNA, 20 nt, Artificial Sequence
  Synthetic
ccuucugcacugucccagca

SEQ ID NO: 467542 - RNA, 21 nt, Artificial Sequence
  Synthetic
uccuucugcacugucccagca

SEQ ID NO: 467543 - RNA, 22 nt, Artificial Sequence
  Synthetic
uuccuucugcacugucccagca

SEQ ID NO: 467544 - RNA, 23 nt, Artificial Sequence
  Synthetic
uuuccuucugcacugucccagca

SEQ ID NO: 467545 - RNA, 24 nt, Artificial Sequence
  Synthetic
uuuuccuucugcacugucccagca

SEQ ID NO: 467546 - RNA, 18 nt, Artificial Sequence
  Synthetic
guaaauuuucagccagca

SEQ ID NO: 467547 - RNA, 19 nt, Artificial Sequence
  Synthetic
aguaaauuuucagccagca

SEQ ID NO: 467548 - RNA, 20 nt, Artificial Sequence
  Synthetic
aaguaaauuuucagccagca

SEQ ID NO: 467549 - RNA, 21 nt, Artificial Sequence
  Synthetic
aaaguaaauuuucagccagca

SEQ ID NO: 467550 - RNA, 22 nt, Artificial Sequence
  Synthetic
caaaguaaauuuucagccagca

SEQ ID NO: 467551 - RNA, 23 nt, Artificial Sequence
  Synthetic
ccaaaguaaauuuucagccagca

SEQ ID NO: 467552 - RNA, 24 nt, Artificial Sequence
  Synthetic
gccaaaguaaauuuucagccagca

SEQ ID NO: 467553 - RNA, 18 nt, Artificial Sequence
  Synthetic
uuaguaaacuggccagca

SEQ ID NO: 467554 - RNA, 19 nt, Artificial Sequence
  Synthetic
guuaguaaacuggccagca

SEQ ID NO: 467555 - RNA, 20 nt, Artificial Sequence
  Synthetic
uguuaguaaacuggccagca

SEQ ID NO: 467556 - RNA, 21 nt, Artificial Sequence
  Synthetic
uuguuaguaaacuggccagca

SEQ ID NO: 467557 - RNA, 22 nt, Artificial Sequence
  Synthetic
auuguuaguaaacuggccagca

SEQ ID NO: 467558 - RNA, 23 nt, Artificial Sequence
  Synthetic
gauuguuaguaaacuggccagca

SEQ ID NO: 467559 - RNA, 24 nt, Artificial Sequence
  Synthetic
agauuguuaguaaacuggccagca

SEQ ID NO: 467560 - RNA, 18 nt, Artificial Sequence
  Synthetic
agagaaugagugccagca

SEQ ID NO: 467561 - RNA, 19 nt, Artificial Sequence
  Synthetic
gagagaaugagugccagca

SEQ ID NO: 467562 - RNA, 20 nt, Artificial Sequence
  Synthetic
agagagaaugagugccagca

SEQ ID NO: 467563 - RNA, 21 nt, Artificial Sequence
  Synthetic
gagagagaaugagugccagca

SEQ ID NO: 467564 - RNA, 22 nt, Artificial Sequence
  Synthetic
ggagagagaaugagugccagca

SEQ ID NO: 467565 - RNA, 23 nt, Artificial Sequence
  Synthetic
aggagagagaaugagugccagca

SEQ ID NO: 467566 - RNA, 24 nt, Artificial Sequence
  Synthetic
uaggagagagaaugagugccagca

SEQ ID NO: 467567 - RNA, 18 nt, Artificial Sequence
  Synthetic
ggagaaugagugccagca

SEQ ID NO: 467568 - RNA, 19 nt, Artificial Sequence
  Synthetic
gggagaaugagugccagca

SEQ ID NO: 467569 - RNA, 20 nt, Artificial Sequence
  Synthetic
agggagaaugagugccagca

SEQ ID NO: 467570 - RNA, 21 nt, Artificial Sequence
  Synthetic
gagggagaaugagugccagca

SEQ ID NO: 467571 - RNA, 22 nt, Artificial Sequence
  Synthetic
ggagggagaaugagugccagca

SEQ ID NO: 467572 - RNA, 23 nt, Artificial Sequence
  Synthetic
aggagggagaaugagugccagca

SEQ ID NO: 467573 - RNA, 24 nt, Artificial Sequence
  Synthetic
caggagggagaaugagugccagca

SEQ ID NO: 467574 - RNA, 18 nt, Artificial Sequence
  Synthetic
gcuuggggaaauccagca

SEQ ID NO: 467575 - RNA, 19 nt, Artificial Sequence
  Synthetic
ggcuuggggaaauccagca

SEQ ID NO: 467576 - RNA, 20 nt, Artificial Sequence
  Synthetic
aggcuuggggaaauccagca

SEQ ID NO: 467577 - RNA, 21 nt, Artificial Sequence
  Synthetic
aaggcuuggggaaauccagca

SEQ ID NO: 467578 - RNA, 22 nt, Artificial Sequence
  Synthetic
aaaggcuuggggaaauccagca

SEQ ID NO: 467579 - RNA, 23 nt, Artificial Sequence
  Synthetic
aaaaggcuuggggaaauccagca

SEQ ID NO: 467580 - RNA, 24 nt, Artificial Sequence
  Synthetic
aaaaaggcuuggggaaauccagca

SEQ ID NO: 467581 - RNA, 18 nt, Artificial Sequence
  Synthetic
aaaaaugcuuauccagca

SEQ ID NO: 467582 - RNA, 19 nt, Artificial Sequence
  Synthetic
gaaaaaugcuuauccagca

SEQ ID NO: 467583 - RNA, 20 nt, Artificial Sequence
  Synthetic
agaaaaaugcuuauccagca

SEQ ID NO: 467584 - RNA, 21 nt, Artificial Sequence
  Synthetic
aagaaaaaugcuuauccagca

SEQ ID NO: 467585 - RNA, 22 nt, Artificial Sequence
  Synthetic
aaagaaaaaugcuuauccagca

SEQ ID NO: 467586 - RNA, 23 nt, Artificial Sequence
  Synthetic
aaaagaaaaaugcuuauccagca

SEQ ID NO: 467587 - RNA, 24 nt, Artificial Sequence
  Synthetic
uaaaagaaaaaugcuuauccagca

SEQ ID NO: 467588 - RNA, 18 nt, Artificial Sequence
  Synthetic
aacuuucucgaagcagca

SEQ ID NO: 467589 - RNA, 19 nt, Artificial Sequence
  Synthetic
uaacuuucucgaagcagca

SEQ ID NO: 467590 - RNA, 20 nt, Artificial Sequence
  Synthetic
guaacuuucucgaagcagca

SEQ ID NO: 467591 - RNA, 21 nt, Artificial Sequence
  Synthetic
uguaacuuucucgaagcagca

SEQ ID NO: 467592 - RNA, 22 nt, Artificial Sequence
  Synthetic
cuguaacuuucucgaagcagca

SEQ ID NO: 467593 - RNA, 23 nt, Artificial Sequence
  Synthetic
acuguaacuuucucgaagcagca

SEQ ID NO: 467594 - RNA, 24 nt, Artificial Sequence
  Synthetic
cacuguaacuuucucgaagcagca

SEQ ID NO: 467595 - RNA, 18 nt, Artificial Sequence
  Synthetic
ucugugaaagcagcagca

SEQ ID NO: 467596 - RNA, 19 nt, Artificial Sequence
  Synthetic
aucugugaaagcagcagca

SEQ ID NO: 467597 - RNA, 20 nt, Artificial Sequence
  Synthetic
gaucugugaaagcagcagca

SEQ ID NO: 467598 - RNA, 21 nt, Artificial Sequence
  Synthetic
agaucugugaaagcagcagca

SEQ ID NO: 467599 - RNA, 22 nt, Artificial Sequence
  Synthetic
cagaucugugaaagcagcagca

SEQ ID NO: 467600 - RNA, 23 nt, Artificial Sequence
  Synthetic
ucagaucugugaaagcagcagca

SEQ ID NO: 467601 - RNA, 24 nt, Artificial Sequence
  Synthetic
gucagaucugugaaagcagcagca

SEQ ID NO: 467602 - RNA, 18 nt, Artificial Sequence
  Synthetic
ucugguuuaauagcagca

SEQ ID NO: 467603 - RNA, 19 nt, Artificial Sequence
  Synthetic
gucugguuuaauagcagca

SEQ ID NO: 467604 - RNA, 20 nt, Artificial Sequence
  Synthetic
ggucugguuuaauagcagca

SEQ ID NO: 467605 - RNA, 21 nt, Artificial Sequence
  Synthetic
uggucugguuuaauagcagca

SEQ ID NO: 467606 - RNA, 22 nt, Artificial Sequence
  Synthetic
cuggucugguuuaauagcagca

SEQ ID NO: 467607 - RNA, 23 nt, Artificial Sequence
  Synthetic
ucuggucugguuuaauagcagca

SEQ ID NO: 467608 - RNA, 24 nt, Artificial Sequence
  Synthetic
cucuggucugguuuaauagcagca

SEQ ID NO: 467609 - RNA, 18 nt, Artificial Sequence
  Synthetic
ugguacuccagggcagca

SEQ ID NO: 467610 - RNA, 19 nt, Artificial Sequence
  Synthetic
cugguacuccagggcagca

SEQ ID NO: 467611 - RNA, 20 nt, Artificial Sequence
  Synthetic
acugguacuccagggcagca

SEQ ID NO: 467612 - RNA, 21 nt, Artificial Sequence
  Synthetic
aacugguacuccagggcagca

SEQ ID NO: 467613 - RNA, 22 nt, Artificial Sequence
  Synthetic
caacugguacuccagggcagca

SEQ ID NO: 467614 - RNA, 23 nt, Artificial Sequence
  Synthetic
acaacugguacuccagggcagca

SEQ ID NO: 467615 - RNA, 24 nt, Artificial Sequence
  Synthetic
uacaacugguacuccagggcagca

SEQ ID NO: 467616 - RNA, 18 nt, Artificial Sequence
  Synthetic
acauucuacauggcagca

SEQ ID NO: 467617 - RNA, 19 nt, Artificial Sequence
  Synthetic
cacauucuacauggcagca

SEQ ID NO: 467618 - RNA, 20 nt, Artificial Sequence
  Synthetic
acacauucuacauggcagca

SEQ ID NO: 467619 - RNA, 21 nt, Artificial Sequence
  Synthetic
aacacauucuacauggcagca

SEQ ID NO: 467620 - RNA, 22 nt, Artificial Sequence
  Synthetic
aaacacauucuacauggcagca

SEQ ID NO: 467621 - RNA, 23 nt, Artificial Sequence
  Synthetic
aaaacacauucuacauggcagca

SEQ ID NO: 467622 - RNA, 24 nt, Artificial Sequence
  Synthetic
aaaaacacauucuacauggcagca

SEQ ID NO: 467623 - RNA, 18 nt, Artificial Sequence
  Synthetic
auccccaacguggcagca

SEQ ID NO: 467624 - RNA, 19 nt, Artificial Sequence
  Synthetic
aauccccaacguggcagca

SEQ ID NO: 467625 - RNA, 20 nt, Artificial Sequence
  Synthetic
uaauccccaacguggcagca

SEQ ID NO: 467626 - RNA, 21 nt, Artificial Sequence
  Synthetic
uuaauccccaacguggcagca

SEQ ID NO: 467627 - RNA, 22 nt, Artificial Sequence
  Synthetic
cuuaauccccaacguggcagca

SEQ ID NO: 467628 - RNA, 23 nt, Artificial Sequence
  Synthetic
acuuaauccccaacguggcagca

SEQ ID NO: 467629 - RNA, 24 nt, Artificial Sequence
  Synthetic
aacuuaauccccaacguggcagca

SEQ ID NO: 467630 - RNA, 18 nt, Artificial Sequence
  Synthetic
uuaauaagagaugcagca

SEQ ID NO: 467631 - RNA, 19 nt, Artificial Sequence
  Synthetic
uuuaauaagagaugcagca

SEQ ID NO: 467632 - RNA, 20 nt, Artificial Sequence
  Synthetic
cuuuaauaagagaugcagca

SEQ ID NO: 467633 - RNA, 21 nt, Artificial Sequence
  Synthetic
ucuuuaauaagagaugcagca

SEQ ID NO: 467634 - RNA, 22 nt, Artificial Sequence
  Synthetic
uucuuuaauaagagaugcagca

SEQ ID NO: 467635 - RNA, 23 nt, Artificial Sequence
  Synthetic
uuucuuuaauaagagaugcagca

SEQ ID NO: 467636 - RNA, 24 nt, Artificial Sequence
  Synthetic
auuucuuuaauaagagaugcagca

SEQ ID NO: 467637 - RNA, 18 nt, Artificial Sequence
  Synthetic
auauacauauaugcagca

SEQ ID NO: 467638 - RNA, 19 nt, Artificial Sequence
  Synthetic
uauauacauauaugcagca

SEQ ID NO: 467639 - RNA, 20 nt, Artificial Sequence
  Synthetic
auauauacauauaugcagca

SEQ ID NO: 467640 - RNA, 21 nt, Artificial Sequence
  Synthetic
aauauauacauauaugcagca

SEQ ID NO: 467641 - RNA, 22 nt, Artificial Sequence
  Synthetic
aaauauauacauauaugcagca

SEQ ID NO: 467642 - RNA, 23 nt, Artificial Sequence
  Synthetic
uaaauauauacauauaugcagca

SEQ ID NO: 467643 - RNA, 24 nt, Artificial Sequence
  Synthetic
auaaauauauacauauaugcagca

SEQ ID NO: 467644 - RNA, 18 nt, Artificial Sequence
  Synthetic
aaaccuaaaugugcagca

SEQ ID NO: 467645 - RNA, 19 nt, Artificial Sequence
  Synthetic
uaaaccuaaaugugcagca

SEQ ID NO: 467646 - RNA, 20 nt, Artificial Sequence
  Synthetic
auaaaccuaaaugugcagca

SEQ ID NO: 467647 - RNA, 21 nt, Artificial Sequence
  Synthetic
gauaaaccuaaaugugcagca

SEQ ID NO: 467648 - RNA, 22 nt, Artificial Sequence
  Synthetic
ggauaaaccuaaaugugcagca

SEQ ID NO: 467649 - RNA, 23 nt, Artificial Sequence
  Synthetic
uggauaaaccuaaaugugcagca

SEQ ID NO: 467650 - RNA, 24 nt, Artificial Sequence
  Synthetic
uuggauaaaccuaaaugugcagca

SEQ ID NO: 467651 - RNA, 18 nt, Artificial Sequence
  Synthetic
uuucugucaaaaucagca

SEQ ID NO: 467652 - RNA, 19 nt, Artificial Sequence
  Synthetic
auuucugucaaaaucagca

SEQ ID NO: 467653 - RNA, 20 nt, Artificial Sequence
  Synthetic
uauuucugucaaaaucagca

SEQ ID NO: 467654 - RNA, 21 nt, Artificial Sequence
  Synthetic
cuauuucugucaaaaucagca

SEQ ID NO: 467655 - RNA, 22 nt, Artificial Sequence
  Synthetic
ccuauuucugucaaaaucagca

SEQ ID NO: 467656 - RNA, 23 nt, Artificial Sequence
  Synthetic
uccuauuucugucaaaaucagca

SEQ ID NO: 467657 - RNA, 24 nt, Artificial Sequence
  Synthetic
guccuauuucugucaaaaucagca

SEQ ID NO: 467658 - RNA, 18 nt, Artificial Sequence
  Synthetic
caaccucacuaaucagca

SEQ ID NO: 467659 - RNA, 19 nt, Artificial Sequence
  Synthetic
ucaaccucacuaaucagca

SEQ ID NO: 467660 - RNA, 20 nt, Artificial Sequence
  Synthetic
aucaaccucacuaaucagca

SEQ ID NO: 467661 - RNA, 21 nt, Artificial Sequence
  Synthetic
gaucaaccucacuaaucagca

SEQ ID NO: 467662 - RNA, 22 nt, Artificial Sequence
  Synthetic
ugaucaaccucacuaaucagca

SEQ ID NO: 467663 - RNA, 23 nt, Artificial Sequence
  Synthetic
augaucaaccucacuaaucagca

SEQ ID NO: 467664 - RNA, 24 nt, Artificial Sequence
  Synthetic
aaugaucaaccucacuaaucagca

SEQ ID NO: 467665 - RNA, 18 nt, Artificial Sequence
  Synthetic
aaugcaggaacaucagca

SEQ ID NO: 467666 - RNA, 19 nt, Artificial Sequence
  Synthetic
uaaugcaggaacaucagca

SEQ ID NO: 467667 - RNA, 20 nt, Artificial Sequence
  Synthetic
guaaugcaggaacaucagca

SEQ ID NO: 467668 - RNA, 21 nt, Artificial Sequence
  Synthetic
gguaaugcaggaacaucagca

SEQ ID NO: 467669 - RNA, 22 nt, Artificial Sequence
  Synthetic
ggguaaugcaggaacaucagca

SEQ ID NO: 467670 - RNA, 23 nt, Artificial Sequence
  Synthetic
uggguaaugcaggaacaucagca

SEQ ID NO: 467671 - RNA, 24 nt, Artificial Sequence
  Synthetic
cuggguaaugcaggaacaucagca

SEQ ID NO: 467672 - RNA, 18 nt, Artificial Sequence
  Synthetic
gaagaaaggguaucagca

SEQ ID NO: 467673 - RNA, 19 nt, Artificial Sequence
  Synthetic
ggaagaaaggguaucagca

SEQ ID NO: 467674 - RNA, 20 nt, Artificial Sequence
  Synthetic
uggaagaaaggguaucagca

SEQ ID NO: 467675 - RNA, 21 nt, Artificial Sequence
  Synthetic
cuggaagaaaggguaucagca

SEQ ID NO: 467676 - RNA, 22 nt, Artificial Sequence
  Synthetic
acuggaagaaaggguaucagca

SEQ ID NO: 467677 - RNA, 23 nt, Artificial Sequence
  Synthetic
aacuggaagaaaggguaucagca

SEQ ID NO: 467678 - RNA, 24 nt, Artificial Sequence
  Synthetic
caacuggaagaaaggguaucagca

SEQ ID NO: 467679 - RNA, 18 nt, Artificial Sequence
  Synthetic
cggucuggaaacucagca

SEQ ID NO: 467680 - RNA, 19 nt, Artificial Sequence
  Synthetic
ucggucuggaaacucagca

SEQ ID NO: 467681 - RNA, 20 nt, Artificial Sequence
  Synthetic
uucggucuggaaacucagca

SEQ ID NO: 467682 - RNA, 21 nt, Artificial Sequence
  Synthetic
cuucggucuggaaacucagca

SEQ ID NO: 467683 - RNA, 22 nt, Artificial Sequence
  Synthetic
acuucggucuggaaacucagca

SEQ ID NO: 467684 - RNA, 23 nt, Artificial Sequence
  Synthetic
uacuucggucuggaaacucagca

SEQ ID NO: 467685 - RNA, 24 nt, Artificial Sequence
  Synthetic
auacuucggucuggaaacucagca

SEQ ID NO: 467686 - RNA, 18 nt, Artificial Sequence
  Synthetic
guguugugugacucagca

SEQ ID NO: 467687 - RNA, 19 nt, Artificial Sequence
  Synthetic
aguguugugugacucagca

SEQ ID NO: 467688 - RNA, 20 nt, Artificial Sequence
  Synthetic
uaguguugugugacucagca

SEQ ID NO: 467689 - RNA, 21 nt, Artificial Sequence
  Synthetic
uuaguguugugugacucagca

SEQ ID NO: 467690 - RNA, 22 nt, Artificial Sequence
  Synthetic
uuuaguguugugugacucagca

SEQ ID NO: 467691 - RNA, 23 nt, Artificial Sequence
  Synthetic
cuuuaguguugugugacucagca

SEQ ID NO: 467692 - RNA, 24 nt, Artificial Sequence
  Synthetic
gcuuuaguguugugugacucagca

SEQ ID NO: 467693 - RNA, 18 nt, Artificial Sequence
  Synthetic
aggauuuccuccucagca

SEQ ID NO: 467694 - RNA, 19 nt, Artificial Sequence
  Synthetic
uaggauuuccuccucagca

SEQ ID NO: 467695 - RNA, 20 nt, Artificial Sequence
  Synthetic
auaggauuuccuccucagca

SEQ ID NO: 467696 - RNA, 21 nt, Artificial Sequence
  Synthetic
gauaggauuuccuccucagca

SEQ ID NO: 467697 - RNA, 22 nt, Artificial Sequence
  Synthetic
ugauaggauuuccuccucagca

SEQ ID NO: 467698 - RNA, 23 nt, Artificial Sequence
  Synthetic
gugauaggauuuccuccucagca

SEQ ID NO: 467699 - RNA, 24 nt, Artificial Sequence
  Synthetic
ggugauaggauuuccuccucagca

SEQ ID NO: 467700 - RNA, 18 nt, Artificial Sequence
  Synthetic
gucaguuguaucucagca

SEQ ID NO: 467701 - RNA, 19 nt, Artificial Sequence
  Synthetic
ugucaguuguaucucagca

SEQ ID NO: 467702 - RNA, 20 nt, Artificial Sequence
  Synthetic
cugucaguuguaucucagca

SEQ ID NO: 467703 - RNA, 21 nt, Artificial Sequence
  Synthetic
ucugucaguuguaucucagca

SEQ ID NO: 467704 - RNA, 22 nt, Artificial Sequence
  Synthetic
aucugucaguuguaucucagca

SEQ ID NO: 467705 - RNA, 23 nt, Artificial Sequence
  Synthetic
uaucugucaguuguaucucagca

SEQ ID NO: 467706 - RNA, 24 nt, Artificial Sequence
  Synthetic
auaucugucaguuguaucucagca

SEQ ID NO: 467707 - RNA, 18 nt, Artificial Sequence
  Synthetic
ggauaugcucucucagca

SEQ ID NO: 467708 - RNA, 19 nt, Artificial Sequence
  Synthetic
gggauaugcucucucagca

SEQ ID NO: 467709 - RNA, 20 nt, Artificial Sequence
  Synthetic
agggauaugcucucucagca

SEQ ID NO: 467710 - RNA, 21 nt, Artificial Sequence
  Synthetic
aagggauaugcucucucagca

SEQ ID NO: 467711 - RNA, 22 nt, Artificial Sequence
  Synthetic
gaagggauaugcucucucagca

SEQ ID NO: 467712 - RNA, 23 nt, Artificial Sequence
  Synthetic
agaagggauaugcucucucagca

SEQ ID NO: 467713 - RNA, 24 nt, Artificial Sequence
  Synthetic
gagaagggauaugcucucucagca

SEQ ID NO: 467714 - RNA, 18 nt, Artificial Sequence
  Synthetic
gucagcugugucucagca

SEQ ID NO: 467715 - RNA, 19 nt, Artificial Sequence
  Synthetic
ugucagcugugucucagca

SEQ ID NO: 467716 - RNA, 20 nt, Artificial Sequence
  Synthetic
cugucagcugugucucagca

SEQ ID NO: 467717 - RNA, 21 nt, Artificial Sequence
  Synthetic
ucugucagcugugucucagca

SEQ ID NO: 467718 - RNA, 22 nt, Artificial Sequence
  Synthetic
aucugucagcugugucucagca

SEQ ID NO: 467719 - RNA, 23 nt, Artificial Sequence
  Synthetic
uaucugucagcugugucucagca

SEQ ID NO: 467720 - RNA, 24 nt, Artificial Sequence
  Synthetic
auaucugucagcugugucucagca

SEQ ID NO: 467721 - RNA, 18 nt, Artificial Sequence
  Synthetic
uaacugauauagucagca

SEQ ID NO: 467722 - RNA, 19 nt, Artificial Sequence
  Synthetic
guaacugauauagucagca

SEQ ID NO: 467723 - RNA, 20 nt, Artificial Sequence
  Synthetic
aguaacugauauagucagca

SEQ ID NO: 467724 - RNA, 21 nt, Artificial Sequence
  Synthetic
uaguaacugauauagucagca

SEQ ID NO: 467725 - RNA, 22 nt, Artificial Sequence
  Synthetic
uuaguaacugauauagucagca

SEQ ID NO: 467726 - RNA, 23 nt, Artificial Sequence
  Synthetic
uuuaguaacugauauagucagca

SEQ ID NO: 467727 - RNA, 24 nt, Artificial Sequence
  Synthetic
cuuuaguaacugauauagucagca

SEQ ID NO: 467728 - RNA, 18 nt, Artificial Sequence
  Synthetic
agccaguaagugucagca

SEQ ID NO: 467729 - RNA, 19 nt, Artificial Sequence
  Synthetic
aagccaguaagugucagca

SEQ ID NO: 467730 - RNA, 20 nt, Artificial Sequence
  Synthetic
aaagccaguaagugucagca

SEQ ID NO: 467731 - RNA, 21 nt, Artificial Sequence
  Synthetic
uaaagccaguaagugucagca

SEQ ID NO: 467732 - RNA, 22 nt, Artificial Sequence
  Synthetic
guaaagccaguaagugucagca

SEQ ID NO: 467733 - RNA, 23 nt, Artificial Sequence
  Synthetic
cguaaagccaguaagugucagca

SEQ ID NO: 467734 - RNA, 24 nt, Artificial Sequence
  Synthetic
ucguaaagccaguaagugucagca

SEQ ID NO: 467735 - RNA, 18 nt, Artificial Sequence
  Synthetic
uuagaaggcgauucagca

SEQ ID NO: 467736 - RNA, 19 nt, Artificial Sequence
  Synthetic
auuagaaggcgauucagca

SEQ ID NO: 467737 - RNA, 20 nt, Artificial Sequence
  Synthetic
aauuagaaggcgauucagca

SEQ ID NO: 467738 - RNA, 21 nt, Artificial Sequence
  Synthetic
aaauuagaaggcgauucagca

SEQ ID NO: 467739 - RNA, 22 nt, Artificial Sequence
  Synthetic
gaaauuagaaggcgauucagca

SEQ ID NO: 467740 - RNA, 23 nt, Artificial Sequence
  Synthetic
ugaaauuagaaggcgauucagca

SEQ ID NO: 467741 - RNA, 24 nt, Artificial Sequence
  Synthetic
uugaaauuagaaggcgauucagca

SEQ ID NO: 467742 - RNA, 18 nt, Artificial Sequence
  Synthetic
uaaaauccagguucagca

SEQ ID NO: 467743 - RNA, 19 nt, Artificial Sequence
  Synthetic
guaaaauccagguucagca

SEQ ID NO: 467744 - RNA, 20 nt, Artificial Sequence
  Synthetic
uguaaaauccagguucagca

SEQ ID NO: 467745 - RNA, 21 nt, Artificial Sequence
  Synthetic
cuguaaaauccagguucagca

SEQ ID NO: 467746 - RNA, 22 nt, Artificial Sequence
  Synthetic
ccuguaaaauccagguucagca

SEQ ID NO: 467747 - RNA, 23 nt, Artificial Sequence
  Synthetic
cccuguaaaauccagguucagca

SEQ ID NO: 467748 - RNA, 24 nt, Artificial Sequence
  Synthetic
ccccuguaaaauccagguucagca

SEQ ID NO: 467749 - RNA, 18 nt, Artificial Sequence
  Synthetic
cggagauaucuuucagca

SEQ ID NO: 467750 - RNA, 19 nt, Artificial Sequence
  Synthetic
acggagauaucuuucagca

SEQ ID NO: 467751 - RNA, 20 nt, Artificial Sequence
  Synthetic
aacggagauaucuuucagca

SEQ ID NO: 467752 - RNA, 21 nt, Artificial Sequence
  Synthetic
gaacggagauaucuuucagca

SEQ ID NO: 467753 - RNA, 22 nt, Artificial Sequence
  Synthetic
ggaacggagauaucuuucagca

SEQ ID NO: 467754 - RNA, 23 nt, Artificial Sequence
  Synthetic
gggaacggagauaucuuucagca

SEQ ID NO: 467755 - RNA, 24 nt, Artificial Sequence
  Synthetic
ggggaacggagauaucuuucagca

SEQ ID NO: 467756 - RNA, 18 nt, Artificial Sequence
  Synthetic
auaggagaguuuucagca

SEQ ID NO: 467757 - RNA, 19 nt, Artificial Sequence
  Synthetic
cauaggagaguuuucagca

SEQ ID NO: 467758 - RNA, 20 nt, Artificial Sequence
  Synthetic
gcauaggagaguuuucagca

SEQ ID NO: 467759 - RNA, 21 nt, Artificial Sequence
  Synthetic
agcauaggagaguuuucagca

SEQ ID NO: 467760 - RNA, 22 nt, Artificial Sequence
  Synthetic
aagcauaggagaguuuucagca

SEQ ID NO: 467761 - RNA, 23 nt, Artificial Sequence
  Synthetic
gaagcauaggagaguuuucagca

SEQ ID NO: 467762 - RNA, 24 nt, Artificial Sequence
  Synthetic
ggaagcauaggagaguuuucagca

SEQ ID NO: 467763 - RNA, 18 nt, Artificial Sequence
  Synthetic
gagauggggaaaagagca

SEQ ID NO: 467764 - RNA, 19 nt, Artificial Sequence
  Synthetic
cgagauggggaaaagagca

SEQ ID NO: 467765 - RNA, 20 nt, Artificial Sequence
  Synthetic
acgagauggggaaaagagca

SEQ ID NO: 467766 - RNA, 21 nt, Artificial Sequence
  Synthetic
gacgagauggggaaaagagca

SEQ ID NO: 467767 - RNA, 22 nt, Artificial Sequence
  Synthetic
agacgagauggggaaaagagca

SEQ ID NO: 467768 - RNA, 23 nt, Artificial Sequence
  Synthetic
gagacgagauggggaaaagagca

SEQ ID NO: 467769 - RNA, 24 nt, Artificial Sequence
  Synthetic
agagacgagauggggaaaagagca

SEQ ID NO: 467770 - RNA, 18 nt, Artificial Sequence
  Synthetic
uaacauauacaaagagca

SEQ ID NO: 467771 - RNA, 19 nt, Artificial Sequence
  Synthetic
auaacauauacaaagagca

SEQ ID NO: 467772 - RNA, 20 nt, Artificial Sequence
  Synthetic
uauaacauauacaaagagca

SEQ ID NO: 467773 - RNA, 21 nt, Artificial Sequence
  Synthetic
auauaacauauacaaagagca

SEQ ID NO: 467774 - RNA, 22 nt, Artificial Sequence
  Synthetic
cauauaacauauacaaagagca

SEQ ID NO: 467775 - RNA, 23 nt, Artificial Sequence
  Synthetic
acauauaacauauacaaagagca

SEQ ID NO: 467776 - RNA, 24 nt, Artificial Sequence
  Synthetic
cacauauaacauauacaaagagca

SEQ ID NO: 467777 - RNA, 18 nt, Artificial Sequence
  Synthetic
auuggcaggcaaagagca

SEQ ID NO: 467778 - RNA, 19 nt, Artificial Sequence
  Synthetic
uauuggcaggcaaagagca

SEQ ID NO: 467779 - RNA, 20 nt, Artificial Sequence
  Synthetic
guauuggcaggcaaagagca

SEQ ID NO: 467780 - RNA, 21 nt, Artificial Sequence
  Synthetic
gguauuggcaggcaaagagca

SEQ ID NO: 467781 - RNA, 22 nt, Artificial Sequence
  Synthetic
ggguauuggcaggcaaagagca

SEQ ID NO: 467782 - RNA, 23 nt, Artificial Sequence
  Synthetic
aggguauuggcaggcaaagagca

SEQ ID NO: 467783 - RNA, 24 nt, Artificial Sequence
  Synthetic
uaggguauuggcaggcaaagagca

SEQ ID NO: 467784 - RNA, 18 nt, Artificial Sequence
  Synthetic
cucccagaauaaagagca

SEQ ID NO: 467785 - RNA, 19 nt, Artificial Sequence
  Synthetic
ccucccagaauaaagagca

SEQ ID NO: 467786 - RNA, 20 nt, Artificial Sequence
  Synthetic
gccucccagaauaaagagca

SEQ ID NO: 467787 - RNA, 21 nt, Artificial Sequence
  Synthetic
agccucccagaauaaagagca

SEQ ID NO: 467788 - RNA, 22 nt, Artificial Sequence
  Synthetic
cagccucccagaauaaagagca

SEQ ID NO: 467789 - RNA, 23 nt, Artificial Sequence
  Synthetic
ucagccucccagaauaaagagca

SEQ ID NO: 467790 - RNA, 24 nt, Artificial Sequence
  Synthetic
gucagccucccagaauaaagagca

SEQ ID NO: 467791 - RNA, 18 nt, Artificial Sequence
  Synthetic
ggucuuuuuccaagagca

SEQ ID NO: 467792 - RNA, 19 nt, Artificial Sequence
  Synthetic
uggucuuuuuccaagagca

SEQ ID NO: 467793 - RNA, 20 nt, Artificial Sequence
  Synthetic
uuggucuuuuuccaagagca

SEQ ID NO: 467794 - RNA, 21 nt, Artificial Sequence
  Synthetic
uuuggucuuuuuccaagagca

SEQ ID NO: 467795 - RNA, 22 nt, Artificial Sequence
  Synthetic
uuuuggucuuuuuccaagagca

SEQ ID NO: 467796 - RNA, 23 nt, Artificial Sequence
  Synthetic
auuuuggucuuuuuccaagagca

SEQ ID NO: 467797 - RNA, 24 nt, Artificial Sequence
  Synthetic
gauuuuggucuuuuuccaagagca

SEQ ID NO: 467798 - RNA, 18 nt, Artificial Sequence
  Synthetic
gggacaaaaggaagagca

SEQ ID NO: 467799 - RNA, 19 nt, Artificial Sequence
  Synthetic
ggggacaaaaggaagagca

SEQ ID NO: 467800 - RNA, 20 nt, Artificial Sequence
  Synthetic
gggggacaaaaggaagagca

SEQ ID NO: 467801 - RNA, 21 nt, Artificial Sequence
  Synthetic
ugggggacaaaaggaagagca

SEQ ID NO: 467802 - RNA, 22 nt, Artificial Sequence
  Synthetic
uugggggacaaaaggaagagca

SEQ ID NO: 467803 - RNA, 23 nt, Artificial Sequence
  Synthetic
uuugggggacaaaaggaagagca

SEQ ID NO: 467804 - RNA, 24 nt, Artificial Sequence
  Synthetic
uuuugggggacaaaaggaagagca

SEQ ID NO: 467805 - RNA, 18 nt, Artificial Sequence
  Synthetic
aaagggcaaggaagagca

SEQ ID NO: 467806 - RNA, 19 nt, Artificial Sequence
  Synthetic
aaaagggcaaggaagagca

SEQ ID NO: 467807 - RNA, 20 nt, Artificial Sequence
  Synthetic
uaaaagggcaaggaagagca

SEQ ID NO: 467808 - RNA, 21 nt, Artificial Sequence
  Synthetic
uuaaaagggcaaggaagagca

SEQ ID NO: 467809 - RNA, 22 nt, Artificial Sequence
  Synthetic
uuuaaaagggcaaggaagagca

SEQ ID NO: 467810 - RNA, 23 nt, Artificial Sequence
  Synthetic
uuuuaaaagggcaaggaagagca

SEQ ID NO: 467811 - RNA, 24 nt, Artificial Sequence
  Synthetic
cuuuuaaaagggcaaggaagagca

SEQ ID NO: 467812 - RNA, 18 nt, Artificial Sequence
  Synthetic
uaagaaugcugaagagca

SEQ ID NO: 467813 - RNA, 19 nt, Artificial Sequence
  Synthetic
auaagaaugcugaagagca

SEQ ID NO: 467814 - RNA, 20 nt, Artificial Sequence
  Synthetic
uauaagaaugcugaagagca

SEQ ID NO: 467815 - RNA, 21 nt, Artificial Sequence
  Synthetic
auauaagaaugcugaagagca

SEQ ID NO: 467816 - RNA, 22 nt, Artificial Sequence
  Synthetic
uauauaagaaugcugaagagca

SEQ ID NO: 467817 - RNA, 23 nt, Artificial Sequence
  Synthetic
auauauaagaaugcugaagagca

SEQ ID NO: 467818 - RNA, 24 nt, Artificial Sequence
  Synthetic
gauauauaagaaugcugaagagca

SEQ ID NO: 467819 - RNA, 18 nt, Artificial Sequence
  Synthetic
gaaugaaauuuaagagca

SEQ ID NO: 467820 - RNA, 19 nt, Artificial Sequence
  Synthetic
agaaugaaauuuaagagca

SEQ ID NO: 467821 - RNA, 20 nt, Artificial Sequence
  Synthetic
aagaaugaaauuuaagagca

SEQ ID NO: 467822 - RNA, 21 nt, Artificial Sequence
  Synthetic
aaagaaugaaauuuaagagca

SEQ ID NO: 467823 - RNA, 22 nt, Artificial Sequence
  Synthetic
gaaagaaugaaauuuaagagca

SEQ ID NO: 467824 - RNA, 23 nt, Artificial Sequence
  Synthetic
ugaaagaaugaaauuuaagagca

SEQ ID NO: 467825 - RNA, 24 nt, Artificial Sequence
  Synthetic
gugaaagaaugaaauuuaagagca

SEQ ID NO: 467826 - RNA, 18 nt, Artificial Sequence
  Synthetic
cagcagcuaaccagagca

SEQ ID NO: 467827 - RNA, 19 nt, Artificial Sequence
  Synthetic
ucagcagcuaaccagagca

SEQ ID NO: 467828 - RNA, 20 nt, Artificial Sequence
  Synthetic
gucagcagcuaaccagagca

SEQ ID NO: 467829 - RNA, 21 nt, Artificial Sequence
  Synthetic
agucagcagcuaaccagagca

SEQ ID NO: 467830 - RNA, 22 nt, Artificial Sequence
  Synthetic
cagucagcagcuaaccagagca

SEQ ID NO: 467831 - RNA, 23 nt, Artificial Sequence
  Synthetic
acagucagcagcuaaccagagca

SEQ ID NO: 467832 - RNA, 24 nt, Artificial Sequence
  Synthetic
aacagucagcagcuaaccagagca

SEQ ID NO: 467833 - RNA, 18 nt, Artificial Sequence
  Synthetic
ucacguucuaucagagca

SEQ ID NO: 467834 - RNA, 19 nt, Artificial Sequence
  Synthetic
uucacguucuaucagagca

SEQ ID NO: 467835 - RNA, 20 nt, Artificial Sequence
  Synthetic
guucacguucuaucagagca

SEQ ID NO: 467836 - RNA, 21 nt, Artificial Sequence
  Synthetic
uguucacguucuaucagagca

SEQ ID NO: 467837 - RNA, 22 nt, Artificial Sequence
  Synthetic
uuguucacguucuaucagagca

SEQ ID NO: 467838 - RNA, 23 nt, Artificial Sequence
  Synthetic
uuuguucacguucuaucagagca

SEQ ID NO: 467839 - RNA, 24 nt, Artificial Sequence
  Synthetic
cuuuguucacguucuaucagagca

SEQ ID NO: 467840 - RNA, 18 nt, Artificial Sequence
  Synthetic
ccagaagagaagagagca

SEQ ID NO: 467841 - RNA, 19 nt, Artificial Sequence
  Synthetic
gccagaagagaagagagca

SEQ ID NO: 467842 - RNA, 20 nt, Artificial Sequence
  Synthetic
ggccagaagagaagagagca

SEQ ID NO: 467843 - RNA, 21 nt, Artificial Sequence
  Synthetic
uggccagaagagaagagagca

SEQ ID NO: 467844 - RNA, 22 nt, Artificial Sequence
  Synthetic
cuggccagaagagaagagagca

SEQ ID NO: 467845 - RNA, 23 nt, Artificial Sequence
  Synthetic
gcuggccagaagagaagagagca

SEQ ID NO: 467846 - RNA, 24 nt, Artificial Sequence
  Synthetic
ugcuggccagaagagaagagagca

SEQ ID NO: 467847 - RNA, 18 nt, Artificial Sequence
  Synthetic
auggcgaacaggagagca

SEQ ID NO: 467848 - RNA, 19 nt, Artificial Sequence
  Synthetic
aauggcgaacaggagagca

SEQ ID NO: 467849 - RNA, 20 nt, Artificial Sequence
  Synthetic
aaauggcgaacaggagagca

SEQ ID NO: 467850 - RNA, 21 nt, Artificial Sequence
  Synthetic
uaaauggcgaacaggagagca

SEQ ID NO: 467851 - RNA, 22 nt, Artificial Sequence
  Synthetic
guaaauggcgaacaggagagca

SEQ ID NO: 467852 - RNA, 23 nt, Artificial Sequence
  Synthetic
gguaaauggcgaacaggagagca

SEQ ID NO: 467853 - RNA, 24 nt, Artificial Sequence
  Synthetic
ggguaaauggcgaacaggagagca

SEQ ID NO: 467854 - RNA, 18 nt, Artificial Sequence
  Synthetic
aggagcaggaggagagca

SEQ ID NO: 467855 - RNA, 19 nt, Artificial Sequence
  Synthetic
gaggagcaggaggagagca

SEQ ID NO: 467856 - RNA, 20 nt, Artificial Sequence
  Synthetic
agaggagcaggaggagagca

SEQ ID NO: 467857 - RNA, 21 nt, Artificial Sequence
  Synthetic
gagaggagcaggaggagagca

SEQ ID NO: 467858 - RNA, 22 nt, Artificial Sequence
  Synthetic
ggagaggagcaggaggagagca

SEQ ID NO: 467859 - RNA, 23 nt, Artificial Sequence
  Synthetic
uggagaggagcaggaggagagca

SEQ ID NO: 467860 - RNA, 24 nt, Artificial Sequence
  Synthetic
uuggagaggagcaggaggagagca

SEQ ID NO: 467861 - RNA, 18 nt, Artificial Sequence
  Synthetic
uuaugcaagaugagagca

SEQ ID NO: 467862 - RNA, 19 nt, Artificial Sequence
  Synthetic
guuaugcaagaugagagca

SEQ ID NO: 467863 - RNA, 20 nt, Artificial Sequence
  Synthetic
cguuaugcaagaugagagca

SEQ ID NO: 467864 - RNA, 21 nt, Artificial Sequence
  Synthetic
acguuaugcaagaugagagca

SEQ ID NO: 467865 - RNA, 22 nt, Artificial Sequence
  Synthetic
aacguuaugcaagaugagagca

SEQ ID NO: 467866 - RNA, 23 nt, Artificial Sequence
  Synthetic
gaacguuaugcaagaugagagca

SEQ ID NO: 467867 - RNA, 24 nt, Artificial Sequence
  Synthetic
ugaacguuaugcaagaugagagca

SEQ ID NO: 467868 - RNA, 18 nt, Artificial Sequence
  Synthetic
guuuugcagaugagagca

SEQ ID NO: 467869 - RNA, 19 nt, Artificial Sequence
  Synthetic
uguuuugcagaugagagca

SEQ ID NO: 467870 - RNA, 20 nt, Artificial Sequence
  Synthetic
cuguuuugcagaugagagca

SEQ ID NO: 467871 - RNA, 21 nt, Artificial Sequence
  Synthetic
ucuguuuugcagaugagagca

SEQ ID NO: 467872 - RNA, 22 nt, Artificial Sequence
  Synthetic
uucuguuuugcagaugagagca

SEQ ID NO: 467873 - RNA, 23 nt, Artificial Sequence
  Synthetic
uuucuguuuugcagaugagagca

SEQ ID NO: 467874 - RNA, 24 nt, Artificial Sequence
  Synthetic
uuuucuguuuugcagaugagagca

SEQ ID NO: 467875 - RNA, 18 nt, Artificial Sequence
  Synthetic
cauuuaagaaguagagca

SEQ ID NO: 467876 - RNA, 19 nt, Artificial Sequence
  Synthetic
ccauuuaagaaguagagca

SEQ ID NO: 467877 - RNA, 20 nt, Artificial Sequence
  Synthetic
accauuuaagaaguagagca

SEQ ID NO: 467878 - RNA, 21 nt, Artificial Sequence
  Synthetic
uaccauuuaagaaguagagca

SEQ ID NO: 467879 - RNA, 22 nt, Artificial Sequence
  Synthetic
cuaccauuuaagaaguagagca

SEQ ID NO: 467880 - RNA, 23 nt, Artificial Sequence
  Synthetic
ccuaccauuuaagaaguagagca

SEQ ID NO: 467881 - RNA, 24 nt, Artificial Sequence
  Synthetic
cccuaccauuuaagaaguagagca

SEQ ID NO: 467882 - RNA, 18 nt, Artificial Sequence
  Synthetic
aagguuaacauuagagca

SEQ ID NO: 467883 - RNA, 19 nt, Artificial Sequence
  Synthetic
aaagguuaacauuagagca

SEQ ID NO: 467884 - RNA, 20 nt, Artificial Sequence
  Synthetic
aaaagguuaacauuagagca

SEQ ID NO: 467885 - RNA, 21 nt, Artificial Sequence
  Synthetic
uaaaagguuaacauuagagca

SEQ ID NO: 467886 - RNA, 22 nt, Artificial Sequence
  Synthetic
uuaaaagguuaacauuagagca

SEQ ID NO: 467887 - RNA, 23 nt, Artificial Sequence
  Synthetic
auuaaaagguuaacauuagagca

SEQ ID NO: 467888 - RNA, 24 nt, Artificial Sequence
  Synthetic
cauuaaaagguuaacauuagagca

SEQ ID NO: 467889 - RNA, 18 nt, Artificial Sequence
  Synthetic
gccaaaaggauuagagca

SEQ ID NO: 467890 - RNA, 19 nt, Artificial Sequence
  Synthetic
agccaaaaggauuagagca

SEQ ID NO: 467891 - RNA, 20 nt, Artificial Sequence
  Synthetic
aagccaaaaggauuagagca

SEQ ID NO: 467892 - RNA, 21 nt, Artificial Sequence
  Synthetic
aaagccaaaaggauuagagca

SEQ ID NO: 467893 - RNA, 22 nt, Artificial Sequence
  Synthetic
aaaagccaaaaggauuagagca

SEQ ID NO: 467894 - RNA, 23 nt, Artificial Sequence
  Synthetic
aaaaagccaaaaggauuagagca

SEQ ID NO: 467895 - RNA, 24 nt, Artificial Sequence
  Synthetic
aaaaaagccaaaaggauuagagca

SEQ ID NO: 467896 - RNA, 18 nt, Artificial Sequence
  Synthetic
ucuugcgaaacccgagca

SEQ ID NO: 467897 - RNA, 19 nt, Artificial Sequence
  Synthetic
cucuugcgaaacccgagca

SEQ ID NO: 467898 - RNA, 20 nt, Artificial Sequence
  Synthetic
ccucuugcgaaacccgagca

SEQ ID NO: 467899 - RNA, 21 nt, Artificial Sequence
  Synthetic
uccucuugcgaaacccgagca

SEQ ID NO: 467900 - RNA, 22 nt, Artificial Sequence
  Synthetic
auccucuugcgaaacccgagca

SEQ ID NO: 467901 - RNA, 23 nt, Artificial Sequence
  Synthetic
cauccucuugcgaaacccgagca

SEQ ID NO: 467902 - RNA, 24 nt, Artificial Sequence
  Synthetic
ucauccucuugcgaaacccgagca

SEQ ID NO: 467903 - RNA, 18 nt, Artificial Sequence
  Synthetic
uuuuucacucaucgagca

SEQ ID NO: 467904 - RNA, 19 nt, Artificial Sequence
  Synthetic
cuuuuucacucaucgagca

SEQ ID NO: 467905 - RNA, 20 nt, Artificial Sequence
  Synthetic
ucuuuuucacucaucgagca

SEQ ID NO: 467906 - RNA, 21 nt, Artificial Sequence
  Synthetic
uucuuuuucacucaucgagca

SEQ ID NO: 467907 - RNA, 22 nt, Artificial Sequence
  Synthetic
uuucuuuuucacucaucgagca

SEQ ID NO: 467908 - RNA, 23 nt, Artificial Sequence
  Synthetic
uuuucuuuuucacucaucgagca

SEQ ID NO: 467909 - RNA, 24 nt, Artificial Sequence
  Synthetic
cuuuucuuuuucacucaucgagca

SEQ ID NO: 467910 - RNA, 18 nt, Artificial Sequence
  Synthetic
ugucaucccuaaggagca

SEQ ID NO: 467911 - RNA, 19 nt, Artificial Sequence
  Synthetic
uugucaucccuaaggagca

SEQ ID NO: 467912 - RNA, 20 nt, Artificial Sequence
  Synthetic
guugucaucccuaaggagca

SEQ ID NO: 467913 - RNA, 21 nt, Artificial Sequence
  Synthetic
uguugucaucccuaaggagca

SEQ ID NO: 467914 - RNA, 22 nt, Artificial Sequence
  Synthetic
cuguugucaucccuaaggagca

SEQ ID NO: 467915 - RNA, 23 nt, Artificial Sequence
  Synthetic
ccuguugucaucccuaaggagca

SEQ ID NO: 467916 - RNA, 24 nt, Artificial Sequence
  Synthetic
uccuguugucaucccuaaggagca

SEQ ID NO: 467917 - RNA, 18 nt, Artificial Sequence
  Synthetic
gaaagaacuuacggagca

SEQ ID NO: 467918 - RNA, 19 nt, Artificial Sequence
  Synthetic
agaaagaacuuacggagca

SEQ ID NO: 467919 - RNA, 20 nt, Artificial Sequence
  Synthetic
cagaaagaacuuacggagca

SEQ ID NO: 467920 - RNA, 21 nt, Artificial Sequence
  Synthetic
ucagaaagaacuuacggagca

SEQ ID NO: 467921 - RNA, 22 nt, Artificial Sequence
  Synthetic
cucagaaagaacuuacggagca

SEQ ID NO: 467922 - RNA, 23 nt, Artificial Sequence
  Synthetic
acucagaaagaacuuacggagca

SEQ ID NO: 467923 - RNA, 24 nt, Artificial Sequence
  Synthetic
gacucagaaagaacuuacggagca

SEQ ID NO: 467924 - RNA, 18 nt, Artificial Sequence
  Synthetic
uuaguacaacagggagca

SEQ ID NO: 467925 - RNA, 19 nt, Artificial Sequence
  Synthetic
guuaguacaacagggagca

SEQ ID NO: 467926 - RNA, 20 nt, Artificial Sequence
  Synthetic
uguuaguacaacagggagca

SEQ ID NO: 467927 - RNA, 21 nt, Artificial Sequence
  Synthetic
auguuaguacaacagggagca

SEQ ID NO: 467928 - RNA, 22 nt, Artificial Sequence
  Synthetic
cauguuaguacaacagggagca

SEQ ID NO: 467929 - RNA, 23 nt, Artificial Sequence
  Synthetic
acauguuaguacaacagggagca

SEQ ID NO: 467930 - RNA, 24 nt, Artificial Sequence
  Synthetic
aacauguuaguacaacagggagca

SEQ ID NO: 467931 - RNA, 18 nt, Artificial Sequence
  Synthetic
gcugggguacagggagca

SEQ ID NO: 467932 - RNA, 19 nt, Artificial Sequence
  Synthetic
ugcugggguacagggagca

SEQ ID NO: 467933 - RNA, 20 nt, Artificial Sequence
  Synthetic
gugcugggguacagggagca

SEQ ID NO: 467934 - RNA, 21 nt, Artificial Sequence
  Synthetic
agugcugggguacagggagca

SEQ ID NO: 467935 - RNA, 22 nt, Artificial Sequence
  Synthetic
cagugcugggguacagggagca

SEQ ID NO: 467936 - RNA, 23 nt, Artificial Sequence
  Synthetic
ccagugcugggguacagggagca

SEQ ID NO: 467937 - RNA, 24 nt, Artificial Sequence
  Synthetic
gccagugcugggguacagggagca

SEQ ID NO: 467938 - RNA, 18 nt, Artificial Sequence
  Synthetic
ugagggggauggggagca

SEQ ID NO: 467939 - RNA, 19 nt, Artificial Sequence
  Synthetic
uugagggggauggggagca

SEQ ID NO: 467940 - RNA, 20 nt, Artificial Sequence
  Synthetic
uuugagggggauggggagca

SEQ ID NO: 467941 - RNA, 21 nt, Artificial Sequence
  Synthetic
cuuugagggggauggggagca

SEQ ID NO: 467942 - RNA, 22 nt, Artificial Sequence
  Synthetic
acuuugagggggauggggagca

SEQ ID NO: 467943 - RNA, 23 nt, Artificial Sequence
  Synthetic
uacuuugagggggauggggagca

SEQ ID NO: 467944 - RNA, 24 nt, Artificial Sequence
  Synthetic
uuacuuugagggggauggggagca

SEQ ID NO: 467945 - RNA, 18 nt, Artificial Sequence
  Synthetic
uacuaguugaauggagca

SEQ ID NO: 467946 - RNA, 19 nt, Artificial Sequence
  Synthetic
cuacuaguugaauggagca

SEQ ID NO: 467947 - RNA, 20 nt, Artificial Sequence
  Synthetic
ucuacuaguugaauggagca

SEQ ID NO: 467948 - RNA, 21 nt, Artificial Sequence
  Synthetic
cucuacuaguugaauggagca

SEQ ID NO: 467949 - RNA, 22 nt, Artificial Sequence
  Synthetic
ucucuacuaguugaauggagca

SEQ ID NO: 467950 - RNA, 23 nt, Artificial Sequence
  Synthetic
uucucuacuaguugaauggagca

SEQ ID NO: 467951 - RNA, 24 nt, Artificial Sequence
  Synthetic
auucucuacuaguugaauggagca

SEQ ID NO: 467952 - RNA, 18 nt, Artificial Sequence
  Synthetic
gcaauguauaauggagca

SEQ ID NO: 467953 - RNA, 19 nt, Artificial Sequence
  Synthetic
ugcaauguauaauggagca

SEQ ID NO: 467954 - RNA, 20 nt, Artificial Sequence
  Synthetic
gugcaauguauaauggagca

SEQ ID NO: 467955 - RNA, 21 nt, Artificial Sequence
  Synthetic
agugcaauguauaauggagca

SEQ ID NO: 467956 - RNA, 22 nt, Artificial Sequence
  Synthetic
aagugcaauguauaauggagca

SEQ ID NO: 467957 - RNA, 23 nt, Artificial Sequence
  Synthetic
aaagugcaauguauaauggagca

SEQ ID NO: 467958 - RNA, 24 nt, Artificial Sequence
  Synthetic
uaaagugcaauguauaauggagca

SEQ ID NO: 467959 - RNA, 18 nt, Artificial Sequence
  Synthetic
gucaacauagguggagca

SEQ ID NO: 467960 - RNA, 19 nt, Artificial Sequence
  Synthetic
ggucaacauagguggagca

SEQ ID NO: 467961 - RNA, 20 nt, Artificial Sequence
  Synthetic
gggucaacauagguggagca

SEQ ID NO: 467962 - RNA, 21 nt, Artificial Sequence
  Synthetic
ggggucaacauagguggagca

SEQ ID NO: 467963 - RNA, 22 nt, Artificial Sequence
  Synthetic
aggggucaacauagguggagca

SEQ ID NO: 467964 - RNA, 23 nt, Artificial Sequence
  Synthetic
aaggggucaacauagguggagca

SEQ ID NO: 467965 - RNA, 24 nt, Artificial Sequence
  Synthetic
aaaggggucaacauagguggagca

SEQ ID NO: 467966 - RNA, 18 nt, Artificial Sequence
  Synthetic
aacuggagugcaugagca

SEQ ID NO: 467967 - RNA, 19 nt, Artificial Sequence
  Synthetic
gaacuggagugcaugagca

SEQ ID NO: 467968 - RNA, 20 nt, Artificial Sequence
  Synthetic
ggaacuggagugcaugagca

SEQ ID NO: 467969 - RNA, 21 nt, Artificial Sequence
  Synthetic
gggaacuggagugcaugagca

SEQ ID NO: 467970 - RNA, 22 nt, Artificial Sequence
  Synthetic
ugggaacuggagugcaugagca

SEQ ID NO: 467971 - RNA, 23 nt, Artificial Sequence
  Synthetic
gugggaacuggagugcaugagca

SEQ ID NO: 467972 - RNA, 24 nt, Artificial Sequence
  Synthetic
ggugggaacuggagugcaugagca

SEQ ID NO: 467973 - RNA, 18 nt, Artificial Sequence
  Synthetic
cuauucauucacugagca

SEQ ID NO: 467974 - RNA, 19 nt, Artificial Sequence
  Synthetic
gcuauucauucacugagca

SEQ ID NO: 467975 - RNA, 20 nt, Artificial Sequence
  Synthetic
ugcuauucauucacugagca

SEQ ID NO: 467976 - RNA, 21 nt, Artificial Sequence
  Synthetic
gugcuauucauucacugagca

SEQ ID NO: 467977 - RNA, 22 nt, Artificial Sequence
  Synthetic
ugugcuauucauucacugagca

SEQ ID NO: 467978 - RNA, 23 nt, Artificial Sequence
  Synthetic
gugugcuauucauucacugagca

SEQ ID NO: 467979 - RNA, 24 nt, Artificial Sequence
  Synthetic
agugugcuauucauucacugagca

SEQ ID NO: 467980 - RNA, 18 nt, Artificial Sequence
  Synthetic
gugcccaaggacugagca

SEQ ID NO: 467981 - RNA, 19 nt, Artificial Sequence
  Synthetic
agugcccaaggacugagca

SEQ ID NO: 467982 - RNA, 20 nt, Artificial Sequence
  Synthetic
aagugcccaaggacugagca

SEQ ID NO: 467983 - RNA, 21 nt, Artificial Sequence
  Synthetic
caagugcccaaggacugagca

SEQ ID NO: 467984 - RNA, 22 nt, Artificial Sequence
  Synthetic
gcaagugcccaaggacugagca

SEQ ID NO: 467985 - RNA, 23 nt, Artificial Sequence
  Synthetic
ggcaagugcccaaggacugagca

SEQ ID NO: 467986 - RNA, 24 nt, Artificial Sequence
  Synthetic
uggcaagugcccaaggacugagca

SEQ ID NO: 467987 - RNA, 18 nt, Artificial Sequence
  Synthetic
caguuuucuaucugagca

SEQ ID NO: 467988 - RNA, 19 nt, Artificial Sequence
  Synthetic
acaguuuucuaucugagca

SEQ ID NO: 467989 - RNA, 20 nt, Artificial Sequence
  Synthetic
aacaguuuucuaucugagca

SEQ ID NO: 467990 - RNA, 21 nt, Artificial Sequence
  Synthetic
caacaguuuucuaucugagca

SEQ ID NO: 467991 - RNA, 22 nt, Artificial Sequence
  Synthetic
ccaacaguuuucuaucugagca

SEQ ID NO: 467992 - RNA, 23 nt, Artificial Sequence
  Synthetic
accaacaguuuucuaucugagca

SEQ ID NO: 467993 - RNA, 24 nt, Artificial Sequence
  Synthetic
uaccaacaguuuucuaucugagca

SEQ ID NO: 467994 - RNA, 18 nt, Artificial Sequence
  Synthetic
aagaaugcagagugagca

SEQ ID NO: 467995 - RNA, 19 nt, Artificial Sequence
  Synthetic
aaagaaugcagagugagca

SEQ ID NO: 467996 - RNA, 20 nt, Artificial Sequence
  Synthetic
caaagaaugcagagugagca

SEQ ID NO: 467997 - RNA, 21 nt, Artificial Sequence
  Synthetic
ccaaagaaugcagagugagca

SEQ ID NO: 467998 - RNA, 22 nt, Artificial Sequence
  Synthetic
uccaaagaaugcagagugagca

SEQ ID NO: 467999 - RNA, 23 nt, Artificial Sequence
  Synthetic
auccaaagaaugcagagugagca

SEQ ID NO: 468000 - RNA, 24 nt, Artificial Sequence
  Synthetic
uauccaaagaaugcagagugagca

SEQ ID NO: 468001 - RNA, 18 nt, Artificial Sequence
  Synthetic
aguggaaucuagugagca

SEQ ID NO: 468002 - RNA, 19 nt, Artificial Sequence
  Synthetic
gaguggaaucuagugagca

SEQ ID NO: 468003 - RNA, 20 nt, Artificial Sequence
  Synthetic
ugaguggaaucuagugagca

SEQ ID NO: 468004 - RNA, 21 nt, Artificial Sequence
  Synthetic
gugaguggaaucuagugagca

SEQ ID NO: 468005 - RNA, 22 nt, Artificial Sequence
  Synthetic
ggugaguggaaucuagugagca

SEQ ID NO: 468006 - RNA, 23 nt, Artificial Sequence
  Synthetic
gggugaguggaaucuagugagca

SEQ ID NO: 468007 - RNA, 24 nt, Artificial Sequence
  Synthetic
agggugaguggaaucuagugagca

SEQ ID NO: 468008 - RNA, 18 nt, Artificial Sequence
  Synthetic
uuuuaggcaaugugagca

SEQ ID NO: 468009 - RNA, 19 nt, Artificial Sequence
  Synthetic
auuuuaggcaaugugagca

SEQ ID NO: 468010 - RNA, 20 nt, Artificial Sequence
  Synthetic
uauuuuaggcaaugugagca

SEQ ID NO: 468011 - RNA, 21 nt, Artificial Sequence
  Synthetic
cuauuuuaggcaaugugagca

SEQ ID NO: 468012 - RNA, 22 nt, Artificial Sequence
  Synthetic
ucuauuuuaggcaaugugagca

SEQ ID NO: 468013 - RNA, 23 nt, Artificial Sequence
  Synthetic
cucuauuuuaggcaaugugagca

SEQ ID NO: 468014 - RNA, 24 nt, Artificial Sequence
  Synthetic
gcucuauuuuaggcaaugugagca

SEQ ID NO: 468015 - RNA, 18 nt, Artificial Sequence
  Synthetic
aauaauaguuauugagca

SEQ ID NO: 468016 - RNA, 19 nt, Artificial Sequence
  Synthetic
uaauaauaguuauugagca

SEQ ID NO: 468017 - RNA, 20 nt, Artificial Sequence
  Synthetic
auaauaauaguuauugagca

SEQ ID NO: 468018 - RNA, 21 nt, Artificial Sequence
  Synthetic
gauaauaauaguuauugagca

SEQ ID NO: 468019 - RNA, 22 nt, Artificial Sequence
  Synthetic
ugauaauaauaguuauugagca

SEQ ID NO: 468020 - RNA, 23 nt, Artificial Sequence
  Synthetic
augauaauaauaguuauugagca

SEQ ID NO: 468021 - RNA, 24 nt, Artificial Sequence
  Synthetic
caugauaauaauaguuauugagca

SEQ ID NO: 468022 - RNA, 18 nt, Artificial Sequence
  Synthetic
gggguuguuuauugagca

SEQ ID NO: 468023 - RNA, 19 nt, Artificial Sequence
  Synthetic
ugggguuguuuauugagca

SEQ ID NO: 468024 - RNA, 20 nt, Artificial Sequence
  Synthetic
uugggguuguuuauugagca

SEQ ID NO: 468025 - RNA, 21 nt, Artificial Sequence
  Synthetic
guugggguuguuuauugagca

SEQ ID NO: 468026 - RNA, 22 nt, Artificial Sequence
  Synthetic
uguugggguuguuuauugagca

SEQ ID NO: 468027 - RNA, 23 nt, Artificial Sequence
  Synthetic
uuguugggguuguuuauugagca

SEQ ID NO: 468028 - RNA, 24 nt, Artificial Sequence
  Synthetic
cuuguugggguuguuuauugagca

SEQ ID NO: 468029 - RNA, 18 nt, Artificial Sequence
  Synthetic
caagaaacuccuugagca

SEQ ID NO: 468030 - RNA, 19 nt, Artificial Sequence
  Synthetic
acaagaaacuccuugagca

SEQ ID NO: 468031 - RNA, 20 nt, Artificial Sequence
  Synthetic
aacaagaaacuccuugagca

SEQ ID NO: 468032 - RNA, 21 nt, Artificial Sequence
  Synthetic
caacaagaaacuccuugagca

SEQ ID NO: 468033 - RNA, 22 nt, Artificial Sequence
  Synthetic
gcaacaagaaacuccuugagca

SEQ ID NO: 468034 - RNA, 23 nt, Artificial Sequence
  Synthetic
ggcaacaagaaacuccuugagca

SEQ ID NO: 468035 - RNA, 24 nt, Artificial Sequence
  Synthetic
aggcaacaagaaacuccuugagca

SEQ ID NO: 468036 - RNA, 18 nt, Artificial Sequence
  Synthetic
acuuuugugcuuugagca

SEQ ID NO: 468037 - RNA, 19 nt, Artificial Sequence
  Synthetic
cacuuuugugcuuugagca

SEQ ID NO: 468038 - RNA, 20 nt, Artificial Sequence
  Synthetic
ucacuuuugugcuuugagca

SEQ ID NO: 468039 - RNA, 21 nt, Artificial Sequence
  Synthetic
gucacuuuugugcuuugagca

SEQ ID NO: 468040 - RNA, 22 nt, Artificial Sequence
  Synthetic
ugucacuuuugugcuuugagca

SEQ ID NO: 468041 - RNA, 23 nt, Artificial Sequence
  Synthetic
augucacuuuugugcuuugagca

SEQ ID NO: 468042 - RNA, 24 nt, Artificial Sequence
  Synthetic
uaugucacuuuugugcuuugagca

SEQ ID NO: 468043 - RNA, 18 nt, Artificial Sequence
  Synthetic
uuaaaagaaaaaauagca

SEQ ID NO: 468044 - RNA, 19 nt, Artificial Sequence
  Synthetic
uuuaaaagaaaaaauagca

SEQ ID NO: 468045 - RNA, 20 nt, Artificial Sequence
  Synthetic
uuuuaaaagaaaaaauagca

SEQ ID NO: 468046 - RNA, 21 nt, Artificial Sequence
  Synthetic
auuuuaaaagaaaaaauagca

SEQ ID NO: 468047 - RNA, 22 nt, Artificial Sequence
  Synthetic
aauuuuaaaagaaaaaauagca

SEQ ID NO: 468048 - RNA, 23 nt, Artificial Sequence
  Synthetic
caauuuuaaaagaaaaaauagca

SEQ ID NO: 468049 - RNA, 24 nt, Artificial Sequence
  Synthetic
ucaauuuuaaaagaaaaaauagca

SEQ ID NO: 468050 - RNA, 18 nt, Artificial Sequence
  Synthetic
ugcauagaaaaaauagca

SEQ ID NO: 468051 - RNA, 19 nt, Artificial Sequence
  Synthetic
gugcauagaaaaaauagca

SEQ ID NO: 468052 - RNA, 20 nt, Artificial Sequence
  Synthetic
cgugcauagaaaaaauagca

SEQ ID NO: 468053 - RNA, 21 nt, Artificial Sequence
  Synthetic
ccgugcauagaaaaaauagca

SEQ ID NO: 468054 - RNA, 22 nt, Artificial Sequence
  Synthetic
accgugcauagaaaaaauagca

SEQ ID NO: 468055 - RNA, 23 nt, Artificial Sequence
  Synthetic
gaccgugcauagaaaaaauagca

SEQ ID NO: 468056 - RNA, 24 nt, Artificial Sequence
  Synthetic
ugaccgugcauagaaaaaauagca

SEQ ID NO: 468057 - RNA, 18 nt, Artificial Sequence
  Synthetic
agaauaaaacaaauagca

SEQ ID NO: 468058 - RNA, 19 nt, Artificial Sequence
  Synthetic
aagaauaaaacaaauagca

SEQ ID NO: 468059 - RNA, 20 nt, Artificial Sequence
  Synthetic
aaagaauaaaacaaauagca

SEQ ID NO: 468060 - RNA, 21 nt, Artificial Sequence
  Synthetic
caaagaauaaaacaaauagca

SEQ ID NO: 468061 - RNA, 22 nt, Artificial Sequence
  Synthetic
gcaaagaauaaaacaaauagca

SEQ ID NO: 468062 - RNA, 23 nt, Artificial Sequence
  Synthetic
ugcaaagaauaaaacaaauagca

SEQ ID NO: 468063 - RNA, 24 nt, Artificial Sequence
  Synthetic
cugcaaagaauaaaacaaauagca

SEQ ID NO: 468064 - RNA, 18 nt, Artificial Sequence
  Synthetic
uuucaacuagaaauagca

SEQ ID NO: 468065 - RNA, 19 nt, Artificial Sequence
  Synthetic
auuucaacuagaaauagca

SEQ ID NO: 468066 - RNA, 20 nt, Artificial Sequence
  Synthetic
cauuucaacuagaaauagca

SEQ ID NO: 468067 - RNA, 21 nt, Artificial Sequence
  Synthetic
gcauuucaacuagaaauagca

SEQ ID NO: 468068 - RNA, 22 nt, Artificial Sequence
  Synthetic
agcauuucaacuagaaauagca

SEQ ID NO: 468069 - RNA, 23 nt, Artificial Sequence
  Synthetic
uagcauuucaacuagaaauagca

SEQ ID NO: 468070 - RNA, 24 nt, Artificial Sequence
  Synthetic
uuagcauuucaacuagaaauagca

SEQ ID NO: 468071 - RNA, 18 nt, Artificial Sequence
  Synthetic
caauguguggcaauagca

SEQ ID NO: 468072 - RNA, 19 nt, Artificial Sequence
  Synthetic
ucaauguguggcaauagca

SEQ ID NO: 468073 - RNA, 20 nt, Artificial Sequence
  Synthetic
gucaauguguggcaauagca

SEQ ID NO: 468074 - RNA, 21 nt, Artificial Sequence
  Synthetic
cgucaauguguggcaauagca

SEQ ID NO: 468075 - RNA, 22 nt, Artificial Sequence
  Synthetic
acgucaauguguggcaauagca

SEQ ID NO: 468076 - RNA, 23 nt, Artificial Sequence
  Synthetic
uacgucaauguguggcaauagca

SEQ ID NO: 468077 - RNA, 24 nt, Artificial Sequence
  Synthetic
auacgucaauguguggcaauagca

SEQ ID NO: 468078 - RNA, 18 nt, Artificial Sequence
  Synthetic
ugaauggcuucaauagca

SEQ ID NO: 468079 - RNA, 19 nt, Artificial Sequence
  Synthetic
uugaauggcuucaauagca

SEQ ID NO: 468080 - RNA, 20 nt, Artificial Sequence
  Synthetic
uuugaauggcuucaauagca

SEQ ID NO: 468081 - RNA, 21 nt, Artificial Sequence
  Synthetic
guuugaauggcuucaauagca

SEQ ID NO: 468082 - RNA, 22 nt, Artificial Sequence
  Synthetic
aguuugaauggcuucaauagca

SEQ ID NO: 468083 - RNA, 23 nt, Artificial Sequence
  Synthetic
gaguuugaauggcuucaauagca

SEQ ID NO: 468084 - RNA, 24 nt, Artificial Sequence
  Synthetic
agaguuugaauggcuucaauagca

SEQ ID NO: 468085 - RNA, 18 nt, Artificial Sequence
  Synthetic
cagguaaaaagaauagca

SEQ ID NO: 468086 - RNA, 19 nt, Artificial Sequence
  Synthetic
ccagguaaaaagaauagca

SEQ ID NO: 468087 - RNA, 20 nt, Artificial Sequence
  Synthetic
uccagguaaaaagaauagca

SEQ ID NO: 468088 - RNA, 21 nt, Artificial Sequence
  Synthetic
uuccagguaaaaagaauagca

SEQ ID NO: 468089 - RNA, 22 nt, Artificial Sequence
  Synthetic
auuccagguaaaaagaauagca

SEQ ID NO: 468090 - RNA, 23 nt, Artificial Sequence
  Synthetic
uauuccagguaaaaagaauagca

SEQ ID NO: 468091 - RNA, 24 nt, Artificial Sequence
  Synthetic
auauuccagguaaaaagaauagca

SEQ ID NO: 468092 - RNA, 18 nt, Artificial Sequence
  Synthetic
acuaucaugagaauagca

SEQ ID NO: 468093 - RNA, 19 nt, Artificial Sequence
  Synthetic
cacuaucaugagaauagca

SEQ ID NO: 468094 - RNA, 20 nt, Artificial Sequence
  Synthetic
ccacuaucaugagaauagca

SEQ ID NO: 468095 - RNA, 21 nt, Artificial Sequence
  Synthetic
cccacuaucaugagaauagca

SEQ ID NO: 468096 - RNA, 22 nt, Artificial Sequence
  Synthetic
acccacuaucaugagaauagca

SEQ ID NO: 468097 - RNA, 23 nt, Artificial Sequence
  Synthetic
cacccacuaucaugagaauagca

SEQ ID NO: 468098 - RNA, 24 nt, Artificial Sequence
  Synthetic
ucacccacuaucaugagaauagca

SEQ ID NO: 468099 - RNA, 18 nt, Artificial Sequence
  Synthetic
aauacugccaacauagca

SEQ ID NO: 468100 - RNA, 19 nt, Artificial Sequence
  Synthetic
aaauacugccaacauagca

SEQ ID NO: 468101 - RNA, 20 nt, Artificial Sequence
  Synthetic
aaaauacugccaacauagca

SEQ ID NO: 468102 - RNA, 21 nt, Artificial Sequence
  Synthetic
aaaaauacugccaacauagca

SEQ ID NO: 468103 - RNA, 22 nt, Artificial Sequence
  Synthetic
aaaaaauacugccaacauagca

SEQ ID NO: 468104 - RNA, 23 nt, Artificial Sequence
  Synthetic
uaaaaaauacugccaacauagca

SEQ ID NO: 468105 - RNA, 24 nt, Artificial Sequence
  Synthetic
guaaaaaauacugccaacauagca

SEQ ID NO: 468106 - RNA, 18 nt, Artificial Sequence
  Synthetic
gaagggggagggauagca

SEQ ID NO: 468107 - RNA, 19 nt, Artificial Sequence
  Synthetic
ggaagggggagggauagca

SEQ ID NO: 468108 - RNA, 20 nt, Artificial Sequence
  Synthetic
gggaagggggagggauagca

SEQ ID NO: 468109 - RNA, 21 nt, Artificial Sequence
  Synthetic
ggggaagggggagggauagca

SEQ ID NO: 468110 - RNA, 22 nt, Artificial Sequence
  Synthetic
gggggaagggggagggauagca

SEQ ID NO: 468111 - RNA, 23 nt, Artificial Sequence
  Synthetic
ggggggaagggggagggauagca

SEQ ID NO: 468112 - RNA, 24 nt, Artificial Sequence
  Synthetic
uggggggaagggggagggauagca

SEQ ID NO: 468113 - RNA, 18 nt, Artificial Sequence
  Synthetic
gacgggggagggauagca

SEQ ID NO: 468114 - RNA, 19 nt, Artificial Sequence
  Synthetic
ggacgggggagggauagca

SEQ ID NO: 468115 - RNA, 20 nt, Artificial Sequence
  Synthetic
gggacgggggagggauagca

SEQ ID NO: 468116 - RNA, 21 nt, Artificial Sequence
  Synthetic
ggggacgggggagggauagca

SEQ ID NO: 468117 - RNA, 22 nt, Artificial Sequence
  Synthetic
aggggacgggggagggauagca

SEQ ID NO: 468118 - RNA, 23 nt, Artificial Sequence
  Synthetic
gaggggacgggggagggauagca

SEQ ID NO: 468119 - RNA, 24 nt, Artificial Sequence
  Synthetic
ugaggggacgggggagggauagca

SEQ ID NO: 468120 - RNA, 18 nt, Artificial Sequence
  Synthetic
acauuuacugcuauagca

SEQ ID NO: 468121 - RNA, 19 nt, Artificial Sequence
  Synthetic
uacauuuacugcuauagca

SEQ ID NO: 468122 - RNA, 20 nt, Artificial Sequence
  Synthetic
guacauuuacugcuauagca

SEQ ID NO: 468123 - RNA, 21 nt, Artificial Sequence
  Synthetic
gguacauuuacugcuauagca

SEQ ID NO: 468124 - RNA, 22 nt, Artificial Sequence
  Synthetic
ugguacauuuacugcuauagca

SEQ ID NO: 468125 - RNA, 23 nt, Artificial Sequence
  Synthetic
gugguacauuuacugcuauagca

SEQ ID NO: 468126 - RNA, 24 nt, Artificial Sequence
  Synthetic
ggugguacauuuacugcuauagca

SEQ ID NO: 468127 - RNA, 18 nt, Artificial Sequence
  Synthetic
auucaauaauguauagca

SEQ ID NO: 468128 - RNA, 19 nt, Artificial Sequence
  Synthetic
aauucaauaauguauagca

SEQ ID NO: 468129 - RNA, 20 nt, Artificial Sequence
  Synthetic
aaauucaauaauguauagca

SEQ ID NO: 468130 - RNA, 21 nt, Artificial Sequence
  Synthetic
aaaauucaauaauguauagca

SEQ ID NO: 468131 - RNA, 22 nt, Artificial Sequence
  Synthetic
aaaaauucaauaauguauagca

SEQ ID NO: 468132 - RNA, 23 nt, Artificial Sequence
  Synthetic
gaaaaauucaauaauguauagca

SEQ ID NO: 468133 - RNA, 24 nt, Artificial Sequence
  Synthetic
ggaaaaauucaauaauguauagca

SEQ ID NO: 468134 - RNA, 18 nt, Artificial Sequence
  Synthetic
uccaaaaaguguauagca

SEQ ID NO: 468135 - RNA, 19 nt, Artificial Sequence
  Synthetic
auccaaaaaguguauagca

SEQ ID NO: 468136 - RNA, 20 nt, Artificial Sequence
  Synthetic
cauccaaaaaguguauagca

SEQ ID NO: 468137 - RNA, 21 nt, Artificial Sequence
  Synthetic
acauccaaaaaguguauagca

SEQ ID NO: 468138 - RNA, 22 nt, Artificial Sequence
  Synthetic
cacauccaaaaaguguauagca

SEQ ID NO: 468139 - RNA, 23 nt, Artificial Sequence
  Synthetic
acacauccaaaaaguguauagca

SEQ ID NO: 468140 - RNA, 24 nt, Artificial Sequence
  Synthetic
gacacauccaaaaaguguauagca

SEQ ID NO: 468141 - RNA, 18 nt, Artificial Sequence
  Synthetic
accugugauguacuagca

SEQ ID NO: 468142 - RNA, 19 nt, Artificial Sequence
  Synthetic
aaccugugauguacuagca

SEQ ID NO: 468143 - RNA, 20 nt, Artificial Sequence
  Synthetic
aaaccugugauguacuagca

SEQ ID NO: 468144 - RNA, 21 nt, Artificial Sequence
  Synthetic
aaaaccugugauguacuagca

SEQ ID NO: 468145 - RNA, 22 nt, Artificial Sequence
  Synthetic
uaaaaccugugauguacuagca

SEQ ID NO: 468146 - RNA, 23 nt, Artificial Sequence
  Synthetic
uuaaaaccugugauguacuagca

SEQ ID NO: 468147 - RNA, 24 nt, Artificial Sequence
  Synthetic
auuaaaaccugugauguacuagca

SEQ ID NO: 468148 - RNA, 18 nt, Artificial Sequence
  Synthetic
uauccugagcaccuagca

SEQ ID NO: 468149 - RNA, 19 nt, Artificial Sequence
  Synthetic
auauccugagcaccuagca

SEQ ID NO: 468150 - RNA, 20 nt, Artificial Sequence
  Synthetic
aauauccugagcaccuagca

SEQ ID NO: 468151 - RNA, 21 nt, Artificial Sequence
  Synthetic
caauauccugagcaccuagca

SEQ ID NO: 468152 - RNA, 22 nt, Artificial Sequence
  Synthetic
ucaauauccugagcaccuagca

SEQ ID NO: 468153 - RNA, 23 nt, Artificial Sequence
  Synthetic
uucaauauccugagcaccuagca

SEQ ID NO: 468154 - RNA, 24 nt, Artificial Sequence
  Synthetic
uuucaauauccugagcaccuagca

SEQ ID NO: 468155 - RNA, 18 nt, Artificial Sequence
  Synthetic
gauuacagaacccuagca

SEQ ID NO: 468156 - RNA, 19 nt, Artificial Sequence
  Synthetic
agauuacagaacccuagca

SEQ ID NO: 468157 - RNA, 20 nt, Artificial Sequence
  Synthetic
gagauuacagaacccuagca

SEQ ID NO: 468158 - RNA, 21 nt, Artificial Sequence
  Synthetic
ugagauuacagaacccuagca

SEQ ID NO: 468159 - RNA, 22 nt, Artificial Sequence
  Synthetic
gugagauuacagaacccuagca

SEQ ID NO: 468160 - RNA, 23 nt, Artificial Sequence
  Synthetic
ggugagauuacagaacccuagca

SEQ ID NO: 468161 - RNA, 24 nt, Artificial Sequence
  Synthetic
gggugagauuacagaacccuagca

SEQ ID NO: 468162 - RNA, 18 nt, Artificial Sequence
  Synthetic
acuccaauccugcuagca

SEQ ID NO: 468163 - RNA, 19 nt, Artificial Sequence
  Synthetic
gacuccaauccugcuagca

SEQ ID NO: 468164 - RNA, 20 nt, Artificial Sequence
  Synthetic
ugacuccaauccugcuagca

SEQ ID NO: 468165 - RNA, 21 nt, Artificial Sequence
  Synthetic
augacuccaauccugcuagca

SEQ ID NO: 468166 - RNA, 22 nt, Artificial Sequence
  Synthetic
caugacuccaauccugcuagca

SEQ ID NO: 468167 - RNA, 23 nt, Artificial Sequence
  Synthetic
ccaugacuccaauccugcuagca

SEQ ID NO: 468168 - RNA, 24 nt, Artificial Sequence
  Synthetic
gccaugacuccaauccugcuagca

SEQ ID NO: 468169 - RNA, 18 nt, Artificial Sequence
  Synthetic
aacuguauucaaguagca

SEQ ID NO: 468170 - RNA, 19 nt, Artificial Sequence
  Synthetic
caacuguauucaaguagca

SEQ ID NO: 468171 - RNA, 20 nt, Artificial Sequence
  Synthetic
ccaacuguauucaaguagca

SEQ ID NO: 468172 - RNA, 21 nt, Artificial Sequence
  Synthetic
gccaacuguauucaaguagca

SEQ ID NO: 468173 - RNA, 22 nt, Artificial Sequence
  Synthetic
ggccaacuguauucaaguagca

SEQ ID NO: 468174 - RNA, 23 nt, Artificial Sequence
  Synthetic
gggccaacuguauucaaguagca

SEQ ID NO: 468175 - RNA, 24 nt, Artificial Sequence
  Synthetic
agggccaacuguauucaaguagca

SEQ ID NO: 468176 - RNA, 18 nt, Artificial Sequence
  Synthetic
uuauccauggggguagca

SEQ ID NO: 468177 - RNA, 19 nt, Artificial Sequence
  Synthetic
cuuauccauggggguagca

SEQ ID NO: 468178 - RNA, 20 nt, Artificial Sequence
  Synthetic
gcuuauccauggggguagca

SEQ ID NO: 468179 - RNA, 21 nt, Artificial Sequence
  Synthetic
ugcuuauccauggggguagca

SEQ ID NO: 468180 - RNA, 22 nt, Artificial Sequence
  Synthetic
augcuuauccauggggguagca

SEQ ID NO: 468181 - RNA, 23 nt, Artificial Sequence
  Synthetic
aaugcuuauccauggggguagca

SEQ ID NO: 468182 - RNA, 24 nt, Artificial Sequence
  Synthetic
uaaugcuuauccauggggguagca

SEQ ID NO: 468183 - RNA, 18 nt, Artificial Sequence
  Synthetic
ggugcaggggcuguagca

SEQ ID NO: 468184 - RNA, 19 nt, Artificial Sequence
  Synthetic
aggugcaggggcuguagca

SEQ ID NO: 468185 - RNA, 20 nt, Artificial Sequence
  Synthetic
uaggugcaggggcuguagca

SEQ ID NO: 468186 - RNA, 21 nt, Artificial Sequence
  Synthetic
cuaggugcaggggcuguagca

SEQ ID NO: 468187 - RNA, 22 nt, Artificial Sequence
  Synthetic
gcuaggugcaggggcuguagca

SEQ ID NO: 468188 - RNA, 23 nt, Artificial Sequence
  Synthetic
agcuaggugcaggggcuguagca

SEQ ID NO: 468189 - RNA, 24 nt, Artificial Sequence
  Synthetic
gagcuaggugcaggggcuguagca

SEQ ID NO: 468190 - RNA, 18 nt, Artificial Sequence
  Synthetic
uaaguauaauuuguagca

SEQ ID NO: 468191 - RNA, 19 nt, Artificial Sequence
  Synthetic
cuaaguauaauuuguagca

SEQ ID NO: 468192 - RNA, 20 nt, Artificial Sequence
  Synthetic
gcuaaguauaauuuguagca

SEQ ID NO: 468193 - RNA, 21 nt, Artificial Sequence
  Synthetic
ugcuaaguauaauuuguagca

SEQ ID NO: 468194 - RNA, 22 nt, Artificial Sequence
  Synthetic
gugcuaaguauaauuuguagca

SEQ ID NO: 468195 - RNA, 23 nt, Artificial Sequence
  Synthetic
ugugcuaaguauaauuuguagca

SEQ ID NO: 468196 - RNA, 24 nt, Artificial Sequence
  Synthetic
uugugcuaaguauaauuuguagca

SEQ ID NO: 468197 - RNA, 18 nt, Artificial Sequence
  Synthetic
ucuguggucuuuguagca

SEQ ID NO: 468198 - RNA, 19 nt, Artificial Sequence
  Synthetic
aucuguggucuuuguagca

SEQ ID NO: 468199 - RNA, 20 nt, Artificial Sequence
  Synthetic
caucuguggucuuuguagca

SEQ ID NO: 468200 - RNA, 21 nt, Artificial Sequence
  Synthetic
acaucuguggucuuuguagca

SEQ ID NO: 468201 - RNA, 22 nt, Artificial Sequence
  Synthetic
aacaucuguggucuuuguagca

SEQ ID NO: 468202 - RNA, 23 nt, Artificial Sequence
  Synthetic
gaacaucuguggucuuuguagca

SEQ ID NO: 468203 - RNA, 24 nt, Artificial Sequence
  Synthetic
ugaacaucuguggucuuuguagca

SEQ ID NO: 468204 - RNA, 18 nt, Artificial Sequence
  Synthetic
acucaugcaucauuagca

SEQ ID NO: 468205 - RNA, 19 nt, Artificial Sequence
  Synthetic
uacucaugcaucauuagca

SEQ ID NO: 468206 - RNA, 20 nt, Artificial Sequence
  Synthetic
auacucaugcaucauuagca

SEQ ID NO: 468207 - RNA, 21 nt, Artificial Sequence
  Synthetic
gauacucaugcaucauuagca

SEQ ID NO: 468208 - RNA, 22 nt, Artificial Sequence
  Synthetic
agauacucaugcaucauuagca

SEQ ID NO: 468209 - RNA, 23 nt, Artificial Sequence
  Synthetic
uagauacucaugcaucauuagca

SEQ ID NO: 468210 - RNA, 24 nt, Artificial Sequence
  Synthetic
auagauacucaugcaucauuagca

SEQ ID NO: 468211 - RNA, 18 nt, Artificial Sequence
  Synthetic
auugaaauacacuuagca

SEQ ID NO: 468212 - RNA, 19 nt, Artificial Sequence
  Synthetic
aauugaaauacacuuagca

SEQ ID NO: 468213 - RNA, 20 nt, Artificial Sequence
  Synthetic
uaauugaaauacacuuagca

SEQ ID NO: 468214 - RNA, 21 nt, Artificial Sequence
  Synthetic
auaauugaaauacacuuagca

SEQ ID NO: 468215 - RNA, 22 nt, Artificial Sequence
  Synthetic
gauaauugaaauacacuuagca

SEQ ID NO: 468216 - RNA, 23 nt, Artificial Sequence
  Synthetic
ugauaauugaaauacacuuagca

SEQ ID NO: 468217 - RNA, 24 nt, Artificial Sequence
  Synthetic
uugauaauugaaauacacuuagca

SEQ ID NO: 468218 - RNA, 18 nt, Artificial Sequence
  Synthetic
cuaagcccaaaguuagca

SEQ ID NO: 468219 - RNA, 19 nt, Artificial Sequence
  Synthetic
acuaagcccaaaguuagca

SEQ ID NO: 468220 - RNA, 20 nt, Artificial Sequence
  Synthetic
aacuaagcccaaaguuagca

SEQ ID NO: 468221 - RNA, 21 nt, Artificial Sequence
  Synthetic
aaacuaagcccaaaguuagca

SEQ ID NO: 468222 - RNA, 22 nt, Artificial Sequence
  Synthetic
caaacuaagcccaaaguuagca

SEQ ID NO: 468223 - RNA, 23 nt, Artificial Sequence
  Synthetic
acaaacuaagcccaaaguuagca

SEQ ID NO: 468224 - RNA, 24 nt, Artificial Sequence
  Synthetic
gacaaacuaagcccaaaguuagca

SEQ ID NO: 468225 - RNA, 18 nt, Artificial Sequence
  Synthetic
augcuuccaagguuagca

SEQ ID NO: 468226 - RNA, 19 nt, Artificial Sequence
  Synthetic
aaugcuuccaagguuagca

SEQ ID NO: 468227 - RNA, 20 nt, Artificial Sequence
  Synthetic
gaaugcuuccaagguuagca

SEQ ID NO: 468228 - RNA, 21 nt, Artificial Sequence
  Synthetic
ggaaugcuuccaagguuagca

SEQ ID NO: 468229 - RNA, 22 nt, Artificial Sequence
  Synthetic
gggaaugcuuccaagguuagca

SEQ ID NO: 468230 - RNA, 23 nt, Artificial Sequence
  Synthetic
ugggaaugcuuccaagguuagca

SEQ ID NO: 468231 - RNA, 24 nt, Artificial Sequence
  Synthetic
uugggaaugcuuccaagguuagca

SEQ ID NO: 468232 - RNA, 18 nt, Artificial Sequence
  Synthetic
cagaguaagauguuagca

SEQ ID NO: 468233 - RNA, 19 nt, Artificial Sequence
  Synthetic
acagaguaagauguuagca

SEQ ID NO: 468234 - RNA, 20 nt, Artificial Sequence
  Synthetic
aacagaguaagauguuagca

SEQ ID NO: 468235 - RNA, 21 nt, Artificial Sequence
  Synthetic
aaacagaguaagauguuagca

SEQ ID NO: 468236 - RNA, 22 nt, Artificial Sequence
  Synthetic
aaaacagaguaagauguuagca

SEQ ID NO: 468237 - RNA, 23 nt, Artificial Sequence
  Synthetic
aaaaacagaguaagauguuagca

SEQ ID NO: 468238 - RNA, 24 nt, Artificial Sequence
  Synthetic
gaaaaacagaguaagauguuagca

SEQ ID NO: 468239 - RNA, 18 nt, Artificial Sequence
  Synthetic
cauuucagaguguuagca

SEQ ID NO: 468240 - RNA, 19 nt, Artificial Sequence
  Synthetic
acauuucagaguguuagca

SEQ ID NO: 468241 - RNA, 20 nt, Artificial Sequence
  Synthetic
cacauuucagaguguuagca

SEQ ID NO: 468242 - RNA, 21 nt, Artificial Sequence
  Synthetic
ucacauuucagaguguuagca

SEQ ID NO: 468243 - RNA, 22 nt, Artificial Sequence
  Synthetic
aucacauuucagaguguuagca

SEQ ID NO: 468244 - RNA, 23 nt, Artificial Sequence
  Synthetic
uaucacauuucagaguguuagca

SEQ ID NO: 468245 - RNA, 24 nt, Artificial Sequence
  Synthetic
auaucacauuucagaguguuagca

SEQ ID NO: 468246 - RNA, 18 nt, Artificial Sequence
  Synthetic
cauauauguuuguuagca

SEQ ID NO: 468247 - RNA, 19 nt, Artificial Sequence
  Synthetic
ucauauauguuuguuagca

SEQ ID NO: 468248 - RNA, 20 nt, Artificial Sequence
  Synthetic
gucauauauguuuguuagca

SEQ ID NO: 468249 - RNA, 21 nt, Artificial Sequence
  Synthetic
ugucauauauguuuguuagca

SEQ ID NO: 468250 - RNA, 22 nt, Artificial Sequence
  Synthetic
augucauauauguuuguuagca

SEQ ID NO: 468251 - RNA, 23 nt, Artificial Sequence
  Synthetic
uaugucauauauguuuguuagca

SEQ ID NO: 468252 - RNA, 24 nt, Artificial Sequence
  Synthetic
guaugucauauauguuuguuagca

SEQ ID NO: 468253 - RNA, 18 nt, Artificial Sequence
  Synthetic
uucacuucucauuuagca

SEQ ID NO: 468254 - RNA, 19 nt, Artificial Sequence
  Synthetic
uuucacuucucauuuagca

SEQ ID NO: 468255 - RNA, 20 nt, Artificial Sequence
  Synthetic
uuuucacuucucauuuagca

SEQ ID NO: 468256 - RNA, 21 nt, Artificial Sequence
  Synthetic
cuuuucacuucucauuuagca

SEQ ID NO: 468257 - RNA, 22 nt, Artificial Sequence
  Synthetic
ucuuuucacuucucauuuagca

SEQ ID NO: 468258 - RNA, 23 nt, Artificial Sequence
  Synthetic
cucuuuucacuucucauuuagca

SEQ ID NO: 468259 - RNA, 24 nt, Artificial Sequence
  Synthetic
gcucuuuucacuucucauuuagca

SEQ ID NO: 468260 - RNA, 18 nt, Artificial Sequence
  Synthetic
gcuaacguauauuuagca

SEQ ID NO: 468261 - RNA, 19 nt, Artificial Sequence
  Synthetic
ugcuaacguauauuuagca

SEQ ID NO: 468262 - RNA, 20 nt, Artificial Sequence
  Synthetic
cugcuaacguauauuuagca

SEQ ID NO: 468263 - RNA, 21 nt, Artificial Sequence
  Synthetic
acugcuaacguauauuuagca

SEQ ID NO: 468264 - RNA, 22 nt, Artificial Sequence
  Synthetic
uacugcuaacguauauuuagca

SEQ ID NO: 468265 - RNA, 23 nt, Artificial Sequence
  Synthetic
cuacugcuaacguauauuuagca

SEQ ID NO: 468266 - RNA, 24 nt, Artificial Sequence
  Synthetic
ccuacugcuaacguauauuuagca

SEQ ID NO: 468267 - RNA, 18 nt, Artificial Sequence
  Synthetic
gagaaaaacacuuuagca

SEQ ID NO: 468268 - RNA, 19 nt, Artificial Sequence
  Synthetic
ugagaaaaacacuuuagca

SEQ ID NO: 468269 - RNA, 20 nt, Artificial Sequence
  Synthetic
gugagaaaaacacuuuagca

SEQ ID NO: 468270 - RNA, 21 nt, Artificial Sequence
  Synthetic
ugugagaaaaacacuuuagca

SEQ ID NO: 468271 - RNA, 22 nt, Artificial Sequence
  Synthetic
uugugagaaaaacacuuuagca

SEQ ID NO: 468272 - RNA, 23 nt, Artificial Sequence
  Synthetic
guugugagaaaaacacuuuagca

SEQ ID NO: 468273 - RNA, 24 nt, Artificial Sequence
  Synthetic
aguugugagaaaaacacuuuagca

SEQ ID NO: 468274 - RNA, 18 nt, Artificial Sequence
  Synthetic
uuuugcuacgcuuuagca

SEQ ID NO: 468275 - RNA, 19 nt, Artificial Sequence
  Synthetic
cuuuugcuacgcuuuagca

SEQ ID NO: 468276 - RNA, 20 nt, Artificial Sequence
  Synthetic
acuuuugcuacgcuuuagca

SEQ ID NO: 468277 - RNA, 21 nt, Artificial Sequence
  Synthetic
cacuuuugcuacgcuuuagca

SEQ ID NO: 468278 - RNA, 22 nt, Artificial Sequence
  Synthetic
ucacuuuugcuacgcuuuagca

SEQ ID NO: 468279 - RNA, 23 nt, Artificial Sequence
  Synthetic
gucacuuuugcuacgcuuuagca

SEQ ID NO: 468280 - RNA, 24 nt, Artificial Sequence
  Synthetic
ggucacuuuugcuacgcuuuagca

SEQ ID NO: 468281 - RNA, 18 nt, Artificial Sequence
  Synthetic
aagaaguucuuuuuagca

SEQ ID NO: 468282 - RNA, 19 nt, Artificial Sequence
  Synthetic
uaagaaguucuuuuuagca

SEQ ID NO: 468283 - RNA, 20 nt, Artificial Sequence
  Synthetic
auaagaaguucuuuuuagca

SEQ ID NO: 468284 - RNA, 21 nt, Artificial Sequence
  Synthetic
gauaagaaguucuuuuuagca

SEQ ID NO: 468285 - RNA, 22 nt, Artificial Sequence
  Synthetic
ggauaagaaguucuuuuuagca

SEQ ID NO: 468286 - RNA, 23 nt, Artificial Sequence
  Synthetic
gggauaagaaguucuuuuuagca

SEQ ID NO: 468287 - RNA, 24 nt, Artificial Sequence
  Synthetic
agggauaagaaguucuuuuuagca

SEQ ID NO: 468288 - RNA, 18 nt, Artificial Sequence
  Synthetic
ucguaaguguuuuuagca

SEQ ID NO: 468289 - RNA, 19 nt, Artificial Sequence
  Synthetic
gucguaaguguuuuuagca

SEQ ID NO: 468290 - RNA, 20 nt, Artificial Sequence
  Synthetic
ugucguaaguguuuuuagca

SEQ ID NO: 468291 - RNA, 21 nt, Artificial Sequence
  Synthetic
augucguaaguguuuuuagca

SEQ ID NO: 468292 - RNA, 22 nt, Artificial Sequence
  Synthetic
caugucguaaguguuuuuagca

SEQ ID NO: 468293 - RNA, 23 nt, Artificial Sequence
  Synthetic
ccaugucguaaguguuuuuagca

SEQ ID NO: 468294 - RNA, 24 nt, Artificial Sequence
  Synthetic
gccaugucguaaguguuuuuagca

SEQ ID NO: 468295 - RNA, 18 nt, Artificial Sequence
  Synthetic
agcuagaaaggaaacgca

SEQ ID NO: 468296 - RNA, 19 nt, Artificial Sequence
  Synthetic
gagcuagaaaggaaacgca

SEQ ID NO: 468297 - RNA, 20 nt, Artificial Sequence
  Synthetic
ugagcuagaaaggaaacgca

SEQ ID NO: 468298 - RNA, 21 nt, Artificial Sequence
  Synthetic
augagcuagaaaggaaacgca

SEQ ID NO: 468299 - RNA, 22 nt, Artificial Sequence
  Synthetic
gaugagcuagaaaggaaacgca

SEQ ID NO: 468300 - RNA, 23 nt, Artificial Sequence
  Synthetic
ugaugagcuagaaaggaaacgca

SEQ ID NO: 468301 - RNA, 24 nt, Artificial Sequence
  Synthetic
augaugagcuagaaaggaaacgca

SEQ ID NO: 468302 - RNA, 18 nt, Artificial Sequence
  Synthetic
ggaaagcaaaggaacgca

SEQ ID NO: 468303 - RNA, 19 nt, Artificial Sequence
  Synthetic
aggaaagcaaaggaacgca

SEQ ID NO: 468304 - RNA, 20 nt, Artificial Sequence
  Synthetic
aaggaaagcaaaggaacgca

SEQ ID NO: 468305 - RNA, 21 nt, Artificial Sequence
  Synthetic
caaggaaagcaaaggaacgca

SEQ ID NO: 468306 - RNA, 22 nt, Artificial Sequence
  Synthetic
gcaaggaaagcaaaggaacgca

SEQ ID NO: 468307 - RNA, 23 nt, Artificial Sequence
  Synthetic
agcaaggaaagcaaaggaacgca

SEQ ID NO: 468308 - RNA, 24 nt, Artificial Sequence
  Synthetic
aagcaaggaaagcaaaggaacgca

SEQ ID NO: 468309 - RNA, 18 nt, Artificial Sequence
  Synthetic
gaggucaaagcugacgca

SEQ ID NO: 468310 - RNA, 19 nt, Artificial Sequence
  Synthetic
ggaggucaaagcugacgca

SEQ ID NO: 468311 - RNA, 20 nt, Artificial Sequence
  Synthetic
aggaggucaaagcugacgca

SEQ ID NO: 468312 - RNA, 21 nt, Artificial Sequence
  Synthetic
gaggaggucaaagcugacgca

SEQ ID NO: 468313 - RNA, 22 nt, Artificial Sequence
  Synthetic
ugaggaggucaaagcugacgca

SEQ ID NO: 468314 - RNA, 23 nt, Artificial Sequence
  Synthetic
gugaggaggucaaagcugacgca

SEQ ID NO: 468315 - RNA, 24 nt, Artificial Sequence
  Synthetic
agugaggaggucaaagcugacgca

SEQ ID NO: 468316 - RNA, 18 nt, Artificial Sequence
  Synthetic
aggcccuuuaauuacgca

SEQ ID NO: 468317 - RNA, 19 nt, Artificial Sequence
  Synthetic
uaggcccuuuaauuacgca

SEQ ID NO: 468318 - RNA, 20 nt, Artificial Sequence
  Synthetic
auaggcccuuuaauuacgca

SEQ ID NO: 468319 - RNA, 21 nt, Artificial Sequence
  Synthetic
cauaggcccuuuaauuacgca

SEQ ID NO: 468320 - RNA, 22 nt, Artificial Sequence
  Synthetic
ucauaggcccuuuaauuacgca

SEQ ID NO: 468321 - RNA, 23 nt, Artificial Sequence
  Synthetic
gucauaggcccuuuaauuacgca

SEQ ID NO: 468322 - RNA, 24 nt, Artificial Sequence
  Synthetic
ugucauaggcccuuuaauuacgca

SEQ ID NO: 468323 - RNA, 18 nt, Artificial Sequence
  Synthetic
gaaucagacaugaccgca

SEQ ID NO: 468324 - RNA, 19 nt, Artificial Sequence
  Synthetic
ugaaucagacaugaccgca

SEQ ID NO: 468325 - RNA, 20 nt, Artificial Sequence
  Synthetic
augaaucagacaugaccgca

SEQ ID NO: 468326 - RNA, 21 nt, Artificial Sequence
  Synthetic
aaugaaucagacaugaccgca

SEQ ID NO: 468327 - RNA, 22 nt, Artificial Sequence
  Synthetic
uaaugaaucagacaugaccgca

SEQ ID NO: 468328 - RNA, 23 nt, Artificial Sequence
  Synthetic
uuaaugaaucagacaugaccgca

SEQ ID NO: 468329 - RNA, 24 nt, Artificial Sequence
  Synthetic
uuuaaugaaucagacaugaccgca

SEQ ID NO: 468330 - RNA, 18 nt, Artificial Sequence
  Synthetic
aggaagcaagcuaccgca

SEQ ID NO: 468331 - RNA, 19 nt, Artificial Sequence
  Synthetic
aaggaagcaagcuaccgca

SEQ ID NO: 468332 - RNA, 20 nt, Artificial Sequence
  Synthetic
gaaggaagcaagcuaccgca

SEQ ID NO: 468333 - RNA, 21 nt, Artificial Sequence
  Synthetic
agaaggaagcaagcuaccgca

SEQ ID NO: 468334 - RNA, 22 nt, Artificial Sequence
  Synthetic
aagaaggaagcaagcuaccgca

SEQ ID NO: 468335 - RNA, 23 nt, Artificial Sequence
  Synthetic
aaagaaggaagcaagcuaccgca

SEQ ID NO: 468336 - RNA, 24 nt, Artificial Sequence
  Synthetic
gaaagaaggaagcaagcuaccgca

SEQ ID NO: 468337 - RNA, 18 nt, Artificial Sequence
  Synthetic
uucucuuucaguaccgca

SEQ ID NO: 468338 - RNA, 19 nt, Artificial Sequence
  Synthetic
uuucucuuucaguaccgca

SEQ ID NO: 468339 - RNA, 20 nt, Artificial Sequence
  Synthetic
cuuucucuuucaguaccgca

SEQ ID NO: 468340 - RNA, 21 nt, Artificial Sequence
  Synthetic
ucuuucucuuucaguaccgca

SEQ ID NO: 468341 - RNA, 22 nt, Artificial Sequence
  Synthetic
cucuuucucuuucaguaccgca

SEQ ID NO: 468342 - RNA, 23 nt, Artificial Sequence
  Synthetic
ucucuuucucuuucaguaccgca

SEQ ID NO: 468343 - RNA, 24 nt, Artificial Sequence
  Synthetic
gucucuuucucuuucaguaccgca

SEQ ID NO: 468344 - RNA, 18 nt, Artificial Sequence
  Synthetic
uuaaaaagcuccuccgca

SEQ ID NO: 468345 - RNA, 19 nt, Artificial Sequence
  Synthetic
guuaaaaagcuccuccgca

SEQ ID NO: 468346 - RNA, 20 nt, Artificial Sequence
  Synthetic
aguuaaaaagcuccuccgca

SEQ ID NO: 468347 - RNA, 21 nt, Artificial Sequence
  Synthetic
aaguuaaaaagcuccuccgca

SEQ ID NO: 468348 - RNA, 22 nt, Artificial Sequence
  Synthetic
caaguuaaaaagcuccuccgca

SEQ ID NO: 468349 - RNA, 23 nt, Artificial Sequence
  Synthetic
ucaaguuaaaaagcuccuccgca

SEQ ID NO: 468350 - RNA, 24 nt, Artificial Sequence
  Synthetic
aucaaguuaaaaagcuccuccgca

SEQ ID NO: 468351 - RNA, 18 nt, Artificial Sequence
  Synthetic
aagcuugggccaagcgca

SEQ ID NO: 468352 - RNA, 19 nt, Artificial Sequence
  Synthetic
gaagcuugggccaagcgca

SEQ ID NO: 468353 - RNA, 20 nt, Artificial Sequence
  Synthetic
ugaagcuugggccaagcgca

SEQ ID NO: 468354 - RNA, 21 nt, Artificial Sequence
  Synthetic
augaagcuugggccaagcgca

SEQ ID NO: 468355 - RNA, 22 nt, Artificial Sequence
  Synthetic
aaugaagcuugggccaagcgca

SEQ ID NO: 468356 - RNA, 23 nt, Artificial Sequence
  Synthetic
aaaugaagcuugggccaagcgca

SEQ ID NO: 468357 - RNA, 24 nt, Artificial Sequence
  Synthetic
gaaaugaagcuugggccaagcgca

SEQ ID NO: 468358 - RNA, 18 nt, Artificial Sequence
  Synthetic
gucuuacaaggaagcgca

SEQ ID NO: 468359 - RNA, 19 nt, Artificial Sequence
  Synthetic
ugucuuacaaggaagcgca

SEQ ID NO: 468360 - RNA, 20 nt, Artificial Sequence
  Synthetic
uugucuuacaaggaagcgca

SEQ ID NO: 468361 - RNA, 21 nt, Artificial Sequence
  Synthetic
guugucuuacaaggaagcgca

SEQ ID NO: 468362 - RNA, 22 nt, Artificial Sequence
  Synthetic
aguugucuuacaaggaagcgca

SEQ ID NO: 468363 - RNA, 23 nt, Artificial Sequence
  Synthetic
caguugucuuacaaggaagcgca

SEQ ID NO: 468364 - RNA, 24 nt, Artificial Sequence
  Synthetic
acaguugucuuacaaggaagcgca

SEQ ID NO: 468365 - RNA, 18 nt, Artificial Sequence
  Synthetic
aaguugaggacaggcgca

SEQ ID NO: 468366 - RNA, 19 nt, Artificial Sequence
  Synthetic
aaaguugaggacaggcgca

SEQ ID NO: 468367 - RNA, 20 nt, Artificial Sequence
  Synthetic
caaaguugaggacaggcgca

SEQ ID NO: 468368 - RNA, 21 nt, Artificial Sequence
  Synthetic
gcaaaguugaggacaggcgca

SEQ ID NO: 468369 - RNA, 22 nt, Artificial Sequence
  Synthetic
ggcaaaguugaggacaggcgca

SEQ ID NO: 468370 - RNA, 23 nt, Artificial Sequence
  Synthetic
aggcaaaguugaggacaggcgca

SEQ ID NO: 468371 - RNA, 24 nt, Artificial Sequence
  Synthetic
gaggcaaaguugaggacaggcgca

SEQ ID NO: 468372 - RNA, 18 nt, Artificial Sequence
  Synthetic
acugagcugagaggcgca

SEQ ID NO: 468373 - RNA, 19 nt, Artificial Sequence
  Synthetic
cacugagcugagaggcgca

SEQ ID NO: 468374 - RNA, 20 nt, Artificial Sequence
  Synthetic
gcacugagcugagaggcgca

SEQ ID NO: 468375 - RNA, 21 nt, Artificial Sequence
  Synthetic
ggcacugagcugagaggcgca

SEQ ID NO: 468376 - RNA, 22 nt, Artificial Sequence
  Synthetic
aggcacugagcugagaggcgca

SEQ ID NO: 468377 - RNA, 23 nt, Artificial Sequence
  Synthetic
gaggcacugagcugagaggcgca

SEQ ID NO: 468378 - RNA, 24 nt, Artificial Sequence
  Synthetic
agaggcacugagcugagaggcgca

SEQ ID NO: 468379 - RNA, 18 nt, Artificial Sequence
  Synthetic
gugauuacauugggcgca

SEQ ID NO: 468380 - RNA, 19 nt, Artificial Sequence
  Synthetic
ugugauuacauugggcgca

SEQ ID NO: 468381 - RNA, 20 nt, Artificial Sequence
  Synthetic
uugugauuacauugggcgca

SEQ ID NO: 468382 - RNA, 21 nt, Artificial Sequence
  Synthetic
cuugugauuacauugggcgca

SEQ ID NO: 468383 - RNA, 22 nt, Artificial Sequence
  Synthetic
ucuugugauuacauugggcgca

SEQ ID NO: 468384 - RNA, 23 nt, Artificial Sequence
  Synthetic
cucuugugauuacauugggcgca

SEQ ID NO: 468385 - RNA, 24 nt, Artificial Sequence
  Synthetic
acucuugugauuacauugggcgca

SEQ ID NO: 468386 - RNA, 18 nt, Artificial Sequence
  Synthetic
acauuuaaaauaaucgca

SEQ ID NO: 468387 - RNA, 19 nt, Artificial Sequence
  Synthetic
uacauuuaaaauaaucgca

SEQ ID NO: 468388 - RNA, 20 nt, Artificial Sequence
  Synthetic
auacauuuaaaauaaucgca

SEQ ID NO: 468389 - RNA, 21 nt, Artificial Sequence
  Synthetic
aauacauuuaaaauaaucgca

SEQ ID NO: 468390 - RNA, 22 nt, Artificial Sequence
  Synthetic
caauacauuuaaaauaaucgca

SEQ ID NO: 468391 - RNA, 23 nt, Artificial Sequence
  Synthetic
gcaauacauuuaaaauaaucgca

SEQ ID NO: 468392 - RNA, 24 nt, Artificial Sequence
  Synthetic
ugcaauacauuuaaaauaaucgca

SEQ ID NO: 468393 - RNA, 18 nt, Artificial Sequence
  Synthetic
ccuaacauucuugucgca

SEQ ID NO: 468394 - RNA, 19 nt, Artificial Sequence
  Synthetic
uccuaacauucuugucgca

SEQ ID NO: 468395 - RNA, 20 nt, Artificial Sequence
  Synthetic
auccuaacauucuugucgca

SEQ ID NO: 468396 - RNA, 21 nt, Artificial Sequence
  Synthetic
cauccuaacauucuugucgca

SEQ ID NO: 468397 - RNA, 22 nt, Artificial Sequence
  Synthetic
acauccuaacauucuugucgca

SEQ ID NO: 468398 - RNA, 23 nt, Artificial Sequence
  Synthetic
gacauccuaacauucuugucgca

SEQ ID NO: 468399 - RNA, 24 nt, Artificial Sequence
  Synthetic
agacauccuaacauucuugucgca

SEQ ID NO: 468400 - RNA, 18 nt, Artificial Sequence
  Synthetic
gccauacagaaaaaggca

SEQ ID NO: 468401 - RNA, 19 nt, Artificial Sequence
  Synthetic
ggccauacagaaaaaggca

SEQ ID NO: 468402 - RNA, 20 nt, Artificial Sequence
  Synthetic
uggccauacagaaaaaggca

SEQ ID NO: 468403 - RNA, 21 nt, Artificial Sequence
  Synthetic
uuggccauacagaaaaaggca

SEQ ID NO: 468404 - RNA, 22 nt, Artificial Sequence
  Synthetic
uuuggccauacagaaaaaggca

SEQ ID NO: 468405 - RNA, 23 nt, Artificial Sequence
  Synthetic
cuuuggccauacagaaaaaggca

SEQ ID NO: 468406 - RNA, 24 nt, Artificial Sequence
  Synthetic
gcuuuggccauacagaaaaaggca

SEQ ID NO: 468407 - RNA, 18 nt, Artificial Sequence
  Synthetic
gucauaaaugaaaaggca

SEQ ID NO: 468408 - RNA, 19 nt, Artificial Sequence
  Synthetic
ggucauaaaugaaaaggca

SEQ ID NO: 468409 - RNA, 20 nt, Artificial Sequence
  Synthetic
gggucauaaaugaaaaggca

SEQ ID NO: 468410 - RNA, 21 nt, Artificial Sequence
  Synthetic
ugggucauaaaugaaaaggca

SEQ ID NO: 468411 - RNA, 22 nt, Artificial Sequence
  Synthetic
augggucauaaaugaaaaggca

SEQ ID NO: 468412 - RNA, 23 nt, Artificial Sequence
  Synthetic
gaugggucauaaaugaaaaggca

SEQ ID NO: 468413 - RNA, 24 nt, Artificial Sequence
  Synthetic
ugaugggucauaaaugaaaaggca

SEQ ID NO: 468414 - RNA, 18 nt, Artificial Sequence
  Synthetic
cucagccacagaaaggca

SEQ ID NO: 468415 - RNA, 19 nt, Artificial Sequence
  Synthetic
gcucagccacagaaaggca

SEQ ID NO: 468416 - RNA, 20 nt, Artificial Sequence
  Synthetic
agcucagccacagaaaggca

SEQ ID NO: 468417 - RNA, 21 nt, Artificial Sequence
  Synthetic
cagcucagccacagaaaggca

SEQ ID NO: 468418 - RNA, 22 nt, Artificial Sequence
  Synthetic
ccagcucagccacagaaaggca

SEQ ID NO: 468419 - RNA, 23 nt, Artificial Sequence
  Synthetic
accagcucagccacagaaaggca

SEQ ID NO: 468420 - RNA, 24 nt, Artificial Sequence
  Synthetic
uaccagcucagccacagaaaggca

SEQ ID NO: 468421 - RNA, 18 nt, Artificial Sequence
  Synthetic
cacaugacuagaaaggca

SEQ ID NO: 468422 - RNA, 19 nt, Artificial Sequence
  Synthetic
gcacaugacuagaaaggca

SEQ ID NO: 468423 - RNA, 20 nt, Artificial Sequence
  Synthetic
ugcacaugacuagaaaggca

SEQ ID NO: 468424 - RNA, 21 nt, Artificial Sequence
  Synthetic
uugcacaugacuagaaaggca

SEQ ID NO: 468425 - RNA, 22 nt, Artificial Sequence
  Synthetic
auugcacaugacuagaaaggca

SEQ ID NO: 468426 - RNA, 23 nt, Artificial Sequence
  Synthetic
gauugcacaugacuagaaaggca

SEQ ID NO: 468427 - RNA, 24 nt, Artificial Sequence
  Synthetic
agauugcacaugacuagaaaggca

SEQ ID NO: 468428 - RNA, 18 nt, Artificial Sequence
  Synthetic
ggacagugucuaaaggca

SEQ ID NO: 468429 - RNA, 19 nt, Artificial Sequence
  Synthetic
aggacagugucuaaaggca

SEQ ID NO: 468430 - RNA, 20 nt, Artificial Sequence
  Synthetic
gaggacagugucuaaaggca

SEQ ID NO: 468431 - RNA, 21 nt, Artificial Sequence
  Synthetic
agaggacagugucuaaaggca

SEQ ID NO: 468432 - RNA, 22 nt, Artificial Sequence
  Synthetic
cagaggacagugucuaaaggca

SEQ ID NO: 468433 - RNA, 23 nt, Artificial Sequence
  Synthetic
gcagaggacagugucuaaaggca

SEQ ID NO: 468434 - RNA, 24 nt, Artificial Sequence
  Synthetic
agcagaggacagugucuaaaggca

SEQ ID NO: 468435 - RNA, 18 nt, Artificial Sequence
  Synthetic
uuauuuugcuuaaaggca

SEQ ID NO: 468436 - RNA, 19 nt, Artificial Sequence
  Synthetic
auuauuuugcuuaaaggca

SEQ ID NO: 468437 - RNA, 20 nt, Artificial Sequence
  Synthetic
cauuauuuugcuuaaaggca

SEQ ID NO: 468438 - RNA, 21 nt, Artificial Sequence
  Synthetic
acauuauuuugcuuaaaggca

SEQ ID NO: 468439 - RNA, 22 nt, Artificial Sequence
  Synthetic
aacauuauuuugcuuaaaggca

SEQ ID NO: 468440 - RNA, 23 nt, Artificial Sequence
  Synthetic
aaacauuauuuugcuuaaaggca

SEQ ID NO: 468441 - RNA, 24 nt, Artificial Sequence
  Synthetic
uaaacauuauuuugcuuaaaggca

SEQ ID NO: 468442 - RNA, 18 nt, Artificial Sequence
  Synthetic
uaagacuauuuaaaggca

SEQ ID NO: 468443 - RNA, 19 nt, Artificial Sequence
  Synthetic
guaagacuauuuaaaggca

SEQ ID NO: 468444 - RNA, 20 nt, Artificial Sequence
  Synthetic
gguaagacuauuuaaaggca

SEQ ID NO: 468445 - RNA, 21 nt, Artificial Sequence
  Synthetic
ggguaagacuauuuaaaggca

SEQ ID NO: 468446 - RNA, 22 nt, Artificial Sequence
  Synthetic
uggguaagacuauuuaaaggca

SEQ ID NO: 468447 - RNA, 23 nt, Artificial Sequence
  Synthetic
uuggguaagacuauuuaaaggca

SEQ ID NO: 468448 - RNA, 24 nt, Artificial Sequence
  Synthetic
cuuggguaagacuauuuaaaggca

SEQ ID NO: 468449 - RNA, 18 nt, Artificial Sequence
  Synthetic
uauuuauagaacaaggca

SEQ ID NO: 468450 - RNA, 19 nt, Artificial Sequence
  Synthetic
auauuuauagaacaaggca

SEQ ID NO: 468451 - RNA, 20 nt, Artificial Sequence
  Synthetic
aauauuuauagaacaaggca

SEQ ID NO: 468452 - RNA, 21 nt, Artificial Sequence
  Synthetic
aaauauuuauagaacaaggca

SEQ ID NO: 468453 - RNA, 22 nt, Artificial Sequence
  Synthetic
uaaauauuuauagaacaaggca

SEQ ID NO: 468454 - RNA, 23 nt, Artificial Sequence
  Synthetic
uuaaauauuuauagaacaaggca

SEQ ID NO: 468455 - RNA, 24 nt, Artificial Sequence
  Synthetic
uuuaaauauuuauagaacaaggca

SEQ ID NO: 468456 - RNA, 18 nt, Artificial Sequence
  Synthetic
aauaauguacacaaggca

SEQ ID NO: 468457 - RNA, 19 nt, Artificial Sequence
  Synthetic
aaauaauguacacaaggca

SEQ ID NO: 468458 - RNA, 20 nt, Artificial Sequence
  Synthetic
gaaauaauguacacaaggca

SEQ ID NO: 468459 - RNA, 21 nt, Artificial Sequence
  Synthetic
ggaaauaauguacacaaggca

SEQ ID NO: 468460 - RNA, 22 nt, Artificial Sequence
  Synthetic
aggaaauaauguacacaaggca

SEQ ID NO: 468461 - RNA, 23 nt, Artificial Sequence
  Synthetic
aaggaaauaauguacacaaggca

SEQ ID NO: 468462 - RNA, 24 nt, Artificial Sequence
  Synthetic
aaaggaaauaauguacacaaggca

SEQ ID NO: 468463 - RNA, 18 nt, Artificial Sequence
  Synthetic
auguuaaucaccaaggca

SEQ ID NO: 468464 - RNA, 19 nt, Artificial Sequence
  Synthetic
aauguuaaucaccaaggca

SEQ ID NO: 468465 - RNA, 20 nt, Artificial Sequence
  Synthetic
aaauguuaaucaccaaggca

SEQ ID NO: 468466 - RNA, 21 nt, Artificial Sequence
  Synthetic
caaauguuaaucaccaaggca

SEQ ID NO: 468467 - RNA, 22 nt, Artificial Sequence
  Synthetic
ccaaauguuaaucaccaaggca

SEQ ID NO: 468468 - RNA, 23 nt, Artificial Sequence
  Synthetic
gccaaauguuaaucaccaaggca

SEQ ID NO: 468469 - RNA, 24 nt, Artificial Sequence
  Synthetic
agccaaauguuaaucaccaaggca

SEQ ID NO: 468470 - RNA, 18 nt, Artificial Sequence
  Synthetic
ucuacugcaggcaaggca

SEQ ID NO: 468471 - RNA, 19 nt, Artificial Sequence
  Synthetic
uucuacugcaggcaaggca

SEQ ID NO: 468472 - RNA, 20 nt, Artificial Sequence
  Synthetic
uuucuacugcaggcaaggca

SEQ ID NO: 468473 - RNA, 21 nt, Artificial Sequence
  Synthetic
uuuucuacugcaggcaaggca

SEQ ID NO: 468474 - RNA, 22 nt, Artificial Sequence
  Synthetic
uuuuucuacugcaggcaaggca

SEQ ID NO: 468475 - RNA, 23 nt, Artificial Sequence
  Synthetic
uuuuuucuacugcaggcaaggca

SEQ ID NO: 468476 - RNA, 24 nt, Artificial Sequence
  Synthetic
uuuuuuucuacugcaggcaaggca

SEQ ID NO: 468477 - RNA, 18 nt, Artificial Sequence
  Synthetic
auucacauaaucaaggca

SEQ ID NO: 468478 - RNA, 19 nt, Artificial Sequence
  Synthetic
uauucacauaaucaaggca

SEQ ID NO: 468479 - RNA, 20 nt, Artificial Sequence
  Synthetic
uuauucacauaaucaaggca

SEQ ID NO: 468480 - RNA, 21 nt, Artificial Sequence
  Synthetic
cuuauucacauaaucaaggca

SEQ ID NO: 468481 - RNA, 22 nt, Artificial Sequence
  Synthetic
gcuuauucacauaaucaaggca

SEQ ID NO: 468482 - RNA, 23 nt, Artificial Sequence
  Synthetic
ugcuuauucacauaaucaaggca

SEQ ID NO: 468483 - RNA, 24 nt, Artificial Sequence
  Synthetic
gugcuuauucacauaaucaaggca

SEQ ID NO: 468484 - RNA, 18 nt, Artificial Sequence
  Synthetic
uguuguuauuucaaggca

SEQ ID NO: 468485 - RNA, 19 nt, Artificial Sequence
  Synthetic
uuguuguuauuucaaggca

SEQ ID NO: 468486 - RNA, 20 nt, Artificial Sequence
  Synthetic
uuuguuguuauuucaaggca

SEQ ID NO: 468487 - RNA, 21 nt, Artificial Sequence
  Synthetic
cuuuguuguuauuucaaggca

SEQ ID NO: 468488 - RNA, 22 nt, Artificial Sequence
  Synthetic
ucuuuguuguuauuucaaggca

SEQ ID NO: 468489 - RNA, 23 nt, Artificial Sequence
  Synthetic
aucuuuguuguuauuucaaggca

SEQ ID NO: 468490 - RNA, 24 nt, Artificial Sequence
  Synthetic
aaucuuuguuguuauuucaaggca

SEQ ID NO: 468491 - RNA, 18 nt, Artificial Sequence
  Synthetic
caaucauggcagaaggca

SEQ ID NO: 468492 - RNA, 19 nt, Artificial Sequence
  Synthetic
acaaucauggcagaaggca

SEQ ID NO: 468493 - RNA, 20 nt, Artificial Sequence
  Synthetic
cacaaucauggcagaaggca

SEQ ID NO: 468494 - RNA, 21 nt, Artificial Sequence
  Synthetic
ucacaaucauggcagaaggca

SEQ ID NO: 468495 - RNA, 22 nt, Artificial Sequence
  Synthetic
cucacaaucauggcagaaggca

SEQ ID NO: 468496 - RNA, 23 nt, Artificial Sequence
  Synthetic
ccucacaaucauggcagaaggca

SEQ ID NO: 468497 - RNA, 24 nt, Artificial Sequence
  Synthetic
gccucacaaucauggcagaaggca

SEQ ID NO: 468498 - RNA, 18 nt, Artificial Sequence
  Synthetic
ucuacaggggagaaggca

SEQ ID NO: 468499 - RNA, 19 nt, Artificial Sequence
  Synthetic
gucuacaggggagaaggca

SEQ ID NO: 468500 - RNA, 20 nt, Artificial Sequence
  Synthetic
agucuacaggggagaaggca

SEQ ID NO: 468501 - RNA, 21 nt, Artificial Sequence
  Synthetic
gagucuacaggggagaaggca

SEQ ID NO: 468502 - RNA, 22 nt, Artificial Sequence
  Synthetic
agagucuacaggggagaaggca

SEQ ID NO: 468503 - RNA, 23 nt, Artificial Sequence
  Synthetic
uagagucuacaggggagaaggca

SEQ ID NO: 468504 - RNA, 24 nt, Artificial Sequence
  Synthetic
guagagucuacaggggagaaggca

SEQ ID NO: 468505 - RNA, 18 nt, Artificial Sequence
  Synthetic
uauauccaugagaaggca

SEQ ID NO: 468506 - RNA, 19 nt, Artificial Sequence
  Synthetic
cuauauccaugagaaggca

SEQ ID NO: 468507 - RNA, 20 nt, Artificial Sequence
  Synthetic
acuauauccaugagaaggca

SEQ ID NO: 468508 - RNA, 21 nt, Artificial Sequence
  Synthetic
cacuauauccaugagaaggca

SEQ ID NO: 468509 - RNA, 22 nt, Artificial Sequence
  Synthetic
acacuauauccaugagaaggca

SEQ ID NO: 468510 - RNA, 23 nt, Artificial Sequence
  Synthetic
cacacuauauccaugagaaggca

SEQ ID NO: 468511 - RNA, 24 nt, Artificial Sequence
  Synthetic
ucacacuauauccaugagaaggca

SEQ ID NO: 468512 - RNA, 18 nt, Artificial Sequence
  Synthetic
caaccaugguggaaggca

SEQ ID NO: 468513 - RNA, 19 nt, Artificial Sequence
  Synthetic
ccaaccaugguggaaggca

SEQ ID NO: 468514 - RNA, 20 nt, Artificial Sequence
  Synthetic
accaaccaugguggaaggca

SEQ ID NO: 468515 - RNA, 21 nt, Artificial Sequence
  Synthetic
aaccaaccaugguggaaggca

SEQ ID NO: 468516 - RNA, 22 nt, Artificial Sequence
  Synthetic
caaccaaccaugguggaaggca

SEQ ID NO: 468517 - RNA, 23 nt, Artificial Sequence
  Synthetic
acaaccaaccaugguggaaggca

SEQ ID NO: 468518 - RNA, 24 nt, Artificial Sequence
  Synthetic
uacaaccaaccaugguggaaggca

SEQ ID NO: 468519 - RNA, 18 nt, Artificial Sequence
  Synthetic
aaacaaguacauaaggca

SEQ ID NO: 468520 - RNA, 19 nt, Artificial Sequence
  Synthetic
gaaacaaguacauaaggca

SEQ ID NO: 468521 - RNA, 20 nt, Artificial Sequence
  Synthetic
agaaacaaguacauaaggca

SEQ ID NO: 468522 - RNA, 21 nt, Artificial Sequence
  Synthetic
gagaaacaaguacauaaggca

SEQ ID NO: 468523 - RNA, 22 nt, Artificial Sequence
  Synthetic
agagaaacaaguacauaaggca

SEQ ID NO: 468524 - RNA, 23 nt, Artificial Sequence
  Synthetic
uagagaaacaaguacauaaggca

SEQ ID NO: 468525 - RNA, 24 nt, Artificial Sequence
  Synthetic
uuagagaaacaaguacauaaggca

SEQ ID NO: 468526 - RNA, 18 nt, Artificial Sequence
  Synthetic
aguugcacccauaaggca

SEQ ID NO: 468527 - RNA, 19 nt, Artificial Sequence
  Synthetic
gaguugcacccauaaggca

SEQ ID NO: 468528 - RNA, 20 nt, Artificial Sequence
  Synthetic
ggaguugcacccauaaggca

SEQ ID NO: 468529 - RNA, 21 nt, Artificial Sequence
  Synthetic
gggaguugcacccauaaggca

SEQ ID NO: 468530 - RNA, 22 nt, Artificial Sequence
  Synthetic
cgggaguugcacccauaaggca

SEQ ID NO: 468531 - RNA, 23 nt, Artificial Sequence
  Synthetic
ccgggaguugcacccauaaggca

SEQ ID NO: 468532 - RNA, 24 nt, Artificial Sequence
  Synthetic
gccgggaguugcacccauaaggca

SEQ ID NO: 468533 - RNA, 18 nt, Artificial Sequence
  Synthetic
ggugggaauacuaaggca

SEQ ID NO: 468534 - RNA, 19 nt, Artificial Sequence
  Synthetic
uggugggaauacuaaggca

SEQ ID NO: 468535 - RNA, 20 nt, Artificial Sequence
  Synthetic
guggugggaauacuaaggca

SEQ ID NO: 468536 - RNA, 21 nt, Artificial Sequence
  Synthetic
uguggugggaauacuaaggca

SEQ ID NO: 468537 - RNA, 22 nt, Artificial Sequence
  Synthetic
guguggugggaauacuaaggca

SEQ ID NO: 468538 - RNA, 23 nt, Artificial Sequence
  Synthetic
gguguggugggaauacuaaggca

SEQ ID NO: 468539 - RNA, 24 nt, Artificial Sequence
  Synthetic
ggguguggugggaauacuaaggca

SEQ ID NO: 468540 - RNA, 18 nt, Artificial Sequence
  Synthetic
uugacugggagacaggca

SEQ ID NO: 468541 - RNA, 19 nt, Artificial Sequence
  Synthetic
uuugacugggagacaggca

SEQ ID NO: 468542 - RNA, 20 nt, Artificial Sequence
  Synthetic
cuuugacugggagacaggca

SEQ ID NO: 468543 - RNA, 21 nt, Artificial Sequence
  Synthetic
ucuuugacugggagacaggca

SEQ ID NO: 468544 - RNA, 22 nt, Artificial Sequence
  Synthetic
cucuuugacugggagacaggca

SEQ ID NO: 468545 - RNA, 23 nt, Artificial Sequence
  Synthetic
ucucuuugacugggagacaggca

SEQ ID NO: 468546 - RNA, 24 nt, Artificial Sequence
  Synthetic
uucucuuugacugggagacaggca

SEQ ID NO: 468547 - RNA, 18 nt, Artificial Sequence
  Synthetic
gagcuacuccuacaggca

SEQ ID NO: 468548 - RNA, 19 nt, Artificial Sequence
  Synthetic
agagcuacuccuacaggca

SEQ ID NO: 468549 - RNA, 20 nt, Artificial Sequence
  Synthetic
gagagcuacuccuacaggca

SEQ ID NO: 468550 - RNA, 21 nt, Artificial Sequence
  Synthetic
ggagagcuacuccuacaggca

SEQ ID NO: 468551 - RNA, 22 nt, Artificial Sequence
  Synthetic
gggagagcuacuccuacaggca

SEQ ID NO: 468552 - RNA, 23 nt, Artificial Sequence
  Synthetic
ugggagagcuacuccuacaggca

SEQ ID NO: 468553 - RNA, 24 nt, Artificial Sequence
  Synthetic
gugggagagcuacuccuacaggca

SEQ ID NO: 468554 - RNA, 18 nt, Artificial Sequence
  Synthetic
ccacagggaguacaggca

SEQ ID NO: 468555 - RNA, 19 nt, Artificial Sequence
  Synthetic
gccacagggaguacaggca

SEQ ID NO: 468556 - RNA, 20 nt, Artificial Sequence
  Synthetic
agccacagggaguacaggca

SEQ ID NO: 468557 - RNA, 21 nt, Artificial Sequence
  Synthetic
uagccacagggaguacaggca

SEQ ID NO: 468558 - RNA, 22 nt, Artificial Sequence
  Synthetic
guagccacagggaguacaggca

SEQ ID NO: 468559 - RNA, 23 nt, Artificial Sequence
  Synthetic
gguagccacagggaguacaggca

SEQ ID NO: 468560 - RNA, 24 nt, Artificial Sequence
  Synthetic
agguagccacagggaguacaggca

SEQ ID NO: 468561 - RNA, 18 nt, Artificial Sequence
  Synthetic
aguaagguaaaccaggca

SEQ ID NO: 468562 - RNA, 19 nt, Artificial Sequence
  Synthetic
aaguaagguaaaccaggca

SEQ ID NO: 468563 - RNA, 20 nt, Artificial Sequence
  Synthetic
uaaguaagguaaaccaggca

SEQ ID NO: 468564 - RNA, 21 nt, Artificial Sequence
  Synthetic
uuaaguaagguaaaccaggca

SEQ ID NO: 468565 - RNA, 22 nt, Artificial Sequence
  Synthetic
uuuaaguaagguaaaccaggca

SEQ ID NO: 468566 - RNA, 23 nt, Artificial Sequence
  Synthetic
uuuuaaguaagguaaaccaggca

SEQ ID NO: 468567 - RNA, 24 nt, Artificial Sequence
  Synthetic
auuuuaaguaagguaaaccaggca

SEQ ID NO: 468568 - RNA, 21 nt, Artificial Sequence
  Synthetic
uuaaaugaaauaagccaggca

SEQ ID NO: 468569 - RNA, 22 nt, Artificial Sequence
  Synthetic
guuaaaugaaauaagccaggca

SEQ ID NO: 468570 - RNA, 23 nt, Artificial Sequence
  Synthetic
uguuaaaugaaauaagccaggca

SEQ ID NO: 468571 - RNA, 24 nt, Artificial Sequence
  Synthetic
guguuaaaugaaauaagccaggca

SEQ ID NO: 468572 - RNA, 18 nt, Artificial Sequence
  Synthetic
guuacuaauagccaggca

SEQ ID NO: 468573 - RNA, 19 nt, Artificial Sequence
  Synthetic
aguuacuaauagccaggca

SEQ ID NO: 468574 - RNA, 20 nt, Artificial Sequence
  Synthetic
caguuacuaauagccaggca

SEQ ID NO: 468575 - RNA, 21 nt, Artificial Sequence
  Synthetic
acaguuacuaauagccaggca

SEQ ID NO: 468576 - RNA, 22 nt, Artificial Sequence
  Synthetic
aacaguuacuaauagccaggca

SEQ ID NO: 468577 - RNA, 23 nt, Artificial Sequence
  Synthetic
aaacaguuacuaauagccaggca

SEQ ID NO: 468578 - RNA, 24 nt, Artificial Sequence
  Synthetic
uaaacaguuacuaauagccaggca

SEQ ID NO: 468579 - RNA, 18 nt, Artificial Sequence
  Synthetic
cagauagauagccaggca

SEQ ID NO: 468580 - RNA, 19 nt, Artificial Sequence
  Synthetic
acagauagauagccaggca

SEQ ID NO: 468581 - RNA, 20 nt, Artificial Sequence
  Synthetic
uacagauagauagccaggca

SEQ ID NO: 468582 - RNA, 21 nt, Artificial Sequence
  Synthetic
auacagauagauagccaggca

SEQ ID NO: 468583 - RNA, 22 nt, Artificial Sequence
  Synthetic
aauacagauagauagccaggca

SEQ ID NO: 468584 - RNA, 23 nt, Artificial Sequence
  Synthetic
aaauacagauagauagccaggca

SEQ ID NO: 468585 - RNA, 24 nt, Artificial Sequence
  Synthetic
aaaauacagauagauagccaggca

SEQ ID NO: 468586 - RNA, 18 nt, Artificial Sequence
  Synthetic
auggauaccgagcaggca

SEQ ID NO: 468587 - RNA, 19 nt, Artificial Sequence
  Synthetic
aauggauaccgagcaggca

SEQ ID NO: 468588 - RNA, 20 nt, Artificial Sequence
  Synthetic
aaauggauaccgagcaggca

SEQ ID NO: 468589 - RNA, 21 nt, Artificial Sequence
  Synthetic
caaauggauaccgagcaggca

SEQ ID NO: 468590 - RNA, 22 nt, Artificial Sequence
  Synthetic
acaaauggauaccgagcaggca

SEQ ID NO: 468591 - RNA, 23 nt, Artificial Sequence
  Synthetic
aacaaauggauaccgagcaggca

SEQ ID NO: 468592 - RNA, 24 nt, Artificial Sequence
  Synthetic
caacaaauggauaccgagcaggca

SEQ ID NO: 468593 - RNA, 18 nt, Artificial Sequence
  Synthetic
caugauauugggcaggca

SEQ ID NO: 468594 - RNA, 19 nt, Artificial Sequence
  Synthetic
acaugauauugggcaggca

SEQ ID NO: 468595 - RNA, 20 nt, Artificial Sequence
  Synthetic
aacaugauauugggcaggca

SEQ ID NO: 468596 - RNA, 21 nt, Artificial Sequence
  Synthetic
caacaugauauugggcaggca

SEQ ID NO: 468597 - RNA, 22 nt, Artificial Sequence
  Synthetic
ccaacaugauauugggcaggca

SEQ ID NO: 468598 - RNA, 23 nt, Artificial Sequence
  Synthetic
uccaacaugauauugggcaggca

SEQ ID NO: 468599 - RNA, 24 nt, Artificial Sequence
  Synthetic
uuccaacaugauauugggcaggca

SEQ ID NO: 468600 - RNA, 18 nt, Artificial Sequence
  Synthetic
ccaagggaauggcaggca

SEQ ID NO: 468601 - RNA, 19 nt, Artificial Sequence
  Synthetic
accaagggaauggcaggca

SEQ ID NO: 468602 - RNA, 20 nt, Artificial Sequence
  Synthetic
uaccaagggaauggcaggca

SEQ ID NO: 468603 - RNA, 21 nt, Artificial Sequence
  Synthetic
cuaccaagggaauggcaggca

SEQ ID NO: 468604 - RNA, 22 nt, Artificial Sequence
  Synthetic
gcuaccaagggaauggcaggca

SEQ ID NO: 468605 - RNA, 23 nt, Artificial Sequence
  Synthetic
agcuaccaagggaauggcaggca

SEQ ID NO: 468606 - RNA, 24 nt, Artificial Sequence
  Synthetic
aagcuaccaagggaauggcaggca

SEQ ID NO: 468607 - RNA, 18 nt, Artificial Sequence
  Synthetic
uuaggguauuggcaggca

SEQ ID NO: 468608 - RNA, 19 nt, Artificial Sequence
  Synthetic
auuaggguauuggcaggca

SEQ ID NO: 468609 - RNA, 20 nt, Artificial Sequence
  Synthetic
aauuaggguauuggcaggca

SEQ ID NO: 468610 - RNA, 21 nt, Artificial Sequence
  Synthetic
uaauuaggguauuggcaggca

SEQ ID NO: 468611 - RNA, 22 nt, Artificial Sequence
  Synthetic
auaauuaggguauuggcaggca

SEQ ID NO: 468612 - RNA, 23 nt, Artificial Sequence
  Synthetic
aauaauuaggguauuggcaggca

SEQ ID NO: 468613 - RNA, 24 nt, Artificial Sequence
  Synthetic
caauaauuaggguauuggcaggca

SEQ ID NO: 468614 - RNA, 18 nt, Artificial Sequence
  Synthetic
accaccuaaugucaggca

SEQ ID NO: 468615 - RNA, 19 nt, Artificial Sequence
  Synthetic
caccaccuaaugucaggca

SEQ ID NO: 468616 - RNA, 20 nt, Artificial Sequence
  Synthetic
gcaccaccuaaugucaggca

SEQ ID NO: 468617 - RNA, 21 nt, Artificial Sequence
  Synthetic
agcaccaccuaaugucaggca

SEQ ID NO: 468618 - RNA, 22 nt, Artificial Sequence
  Synthetic
cagcaccaccuaaugucaggca

SEQ ID NO: 468619 - RNA, 23 nt, Artificial Sequence
  Synthetic
ccagcaccaccuaaugucaggca

SEQ ID NO: 468620 - RNA, 24 nt, Artificial Sequence
  Synthetic
accagcaccaccuaaugucaggca

SEQ ID NO: 468621 - RNA, 18 nt, Artificial Sequence
  Synthetic
ugaagacuauuucaggca

SEQ ID NO: 468622 - RNA, 19 nt, Artificial Sequence
  Synthetic
cugaagacuauuucaggca

SEQ ID NO: 468623 - RNA, 20 nt, Artificial Sequence
  Synthetic
acugaagacuauuucaggca

SEQ ID NO: 468624 - RNA, 21 nt, Artificial Sequence
  Synthetic
uacugaagacuauuucaggca

SEQ ID NO: 468625 - RNA, 22 nt, Artificial Sequence
  Synthetic
auacugaagacuauuucaggca

SEQ ID NO: 468626 - RNA, 23 nt, Artificial Sequence
  Synthetic
cauacugaagacuauuucaggca

SEQ ID NO: 468627 - RNA, 24 nt, Artificial Sequence
  Synthetic
acauacugaagacuauuucaggca

SEQ ID NO: 468628 - RNA, 18 nt, Artificial Sequence
  Synthetic
aucuugcuaaaagaggca

SEQ ID NO: 468629 - RNA, 19 nt, Artificial Sequence
  Synthetic
caucuugcuaaaagaggca

SEQ ID NO: 468630 - RNA, 20 nt, Artificial Sequence
  Synthetic
ucaucuugcuaaaagaggca

SEQ ID NO: 468631 - RNA, 21 nt, Artificial Sequence
  Synthetic
uucaucuugcuaaaagaggca

SEQ ID NO: 468632 - RNA, 22 nt, Artificial Sequence
  Synthetic
cuucaucuugcuaaaagaggca

SEQ ID NO: 468633 - RNA, 23 nt, Artificial Sequence
  Synthetic
acuucaucuugcuaaaagaggca

SEQ ID NO: 468634 - RNA, 24 nt, Artificial Sequence
  Synthetic
aacuucaucuugcuaaaagaggca

SEQ ID NO: 468635 - RNA, 18 nt, Artificial Sequence
  Synthetic
aauuugaagaaagaggca

SEQ ID NO: 468636 - RNA, 19 nt, Artificial Sequence
  Synthetic
aaauuugaagaaagaggca

SEQ ID NO: 468637 - RNA, 20 nt, Artificial Sequence
  Synthetic
aaaauuugaagaaagaggca

SEQ ID NO: 468638 - RNA, 21 nt, Artificial Sequence
  Synthetic
aaaaauuugaagaaagaggca

SEQ ID NO: 468639 - RNA, 22 nt, Artificial Sequence
  Synthetic
aaaaaauuugaagaaagaggca

SEQ ID NO: 468640 - RNA, 23 nt, Artificial Sequence
  Synthetic
aaaaaaauuugaagaaagaggca

SEQ ID NO: 468641 - RNA, 24 nt, Artificial Sequence
  Synthetic
gaaaaaaauuugaagaaagaggca

SEQ ID NO: 468642 - RNA, 18 nt, Artificial Sequence
  Synthetic
cagaagcuggaagaggca

SEQ ID NO: 468643 - RNA, 19 nt, Artificial Sequence
  Synthetic
ccagaagcuggaagaggca

SEQ ID NO: 468644 - RNA, 20 nt, Artificial Sequence
  Synthetic
accagaagcuggaagaggca

SEQ ID NO: 468645 - RNA, 21 nt, Artificial Sequence
  Synthetic
uaccagaagcuggaagaggca

SEQ ID NO: 468646 - RNA, 22 nt, Artificial Sequence
  Synthetic
cuaccagaagcuggaagaggca

SEQ ID NO: 468647 - RNA, 23 nt, Artificial Sequence
  Synthetic
gcuaccagaagcuggaagaggca

SEQ ID NO: 468648 - RNA, 24 nt, Artificial Sequence
  Synthetic
ggcuaccagaagcuggaagaggca

SEQ ID NO: 468649 - RNA, 18 nt, Artificial Sequence
  Synthetic
agaacgugaacagaggca

SEQ ID NO: 468650 - RNA, 19 nt, Artificial Sequence
  Synthetic
aagaacgugaacagaggca

SEQ ID NO: 468651 - RNA, 20 nt, Artificial Sequence
  Synthetic
caagaacgugaacagaggca

SEQ ID NO: 468652 - RNA, 21 nt, Artificial Sequence
  Synthetic
acaagaacgugaacagaggca

SEQ ID NO: 468653 - RNA, 22 nt, Artificial Sequence
  Synthetic
uacaagaacgugaacagaggca

SEQ ID NO: 468654 - RNA, 23 nt, Artificial Sequence
  Synthetic
auacaagaacgugaacagaggca

SEQ ID NO: 468655 - RNA, 24 nt, Artificial Sequence
  Synthetic
aauacaagaacgugaacagaggca

SEQ ID NO: 468656 - RNA, 18 nt, Artificial Sequence
  Synthetic
aaauugcuuccagaggca

SEQ ID NO: 468657 - RNA, 19 nt, Artificial Sequence
  Synthetic
uaaauugcuuccagaggca

SEQ ID NO: 468658 - RNA, 20 nt, Artificial Sequence
  Synthetic
guaaauugcuuccagaggca

SEQ ID NO: 468659 - RNA, 21 nt, Artificial Sequence
  Synthetic
uguaaauugcuuccagaggca

SEQ ID NO: 468660 - RNA, 22 nt, Artificial Sequence
  Synthetic
uuguaaauugcuuccagaggca

SEQ ID NO: 468661 - RNA, 23 nt, Artificial Sequence
  Synthetic
guuguaaauugcuuccagaggca

SEQ ID NO: 468662 - RNA, 24 nt, Artificial Sequence
  Synthetic
aguuguaaauugcuuccagaggca

SEQ ID NO: 468663 - RNA, 18 nt, Artificial Sequence
  Synthetic
uauggaggguuagaggca

SEQ ID NO: 468664 - RNA, 19 nt, Artificial Sequence
  Synthetic
auauggaggguuagaggca

SEQ ID NO: 468665 - RNA, 20 nt, Artificial Sequence
  Synthetic
cauauggaggguuagaggca

SEQ ID NO: 468666 - RNA, 21 nt, Artificial Sequence
  Synthetic
gcauauggaggguuagaggca

SEQ ID NO: 468667 - RNA, 22 nt, Artificial Sequence
  Synthetic
ggcauauggaggguuagaggca

SEQ ID NO: 468668 - RNA, 23 nt, Artificial Sequence
  Synthetic
aggcauauggaggguuagaggca

SEQ ID NO: 468669 - RNA, 24 nt, Artificial Sequence
  Synthetic
uaggcauauggaggguuagaggca

SEQ ID NO: 468670 - RNA, 18 nt, Artificial Sequence
  Synthetic
aagcuauacuacgaggca

SEQ ID NO: 468671 - RNA, 19 nt, Artificial Sequence
  Synthetic
caagcuauacuacgaggca

SEQ ID NO: 468672 - RNA, 20 nt, Artificial Sequence
  Synthetic
ccaagcuauacuacgaggca

SEQ ID NO: 468673 - RNA, 21 nt, Artificial Sequence
  Synthetic
uccaagcuauacuacgaggca

SEQ ID NO: 468674 - RNA, 22 nt, Artificial Sequence
  Synthetic
uuccaagcuauacuacgaggca

SEQ ID NO: 468675 - RNA, 23 nt, Artificial Sequence
  Synthetic
uuuccaagcuauacuacgaggca

SEQ ID NO: 468676 - RNA, 24 nt, Artificial Sequence
  Synthetic
cuuuccaagcuauacuacgaggca

SEQ ID NO: 468677 - RNA, 18 nt, Artificial Sequence
  Synthetic
caacuggagcaggaggca

SEQ ID NO: 468678 - RNA, 19 nt, Artificial Sequence
  Synthetic
ucaacuggagcaggaggca

SEQ ID NO: 468679 - RNA, 20 nt, Artificial Sequence
  Synthetic
cucaacuggagcaggaggca

SEQ ID NO: 468680 - RNA, 21 nt, Artificial Sequence
  Synthetic
ccucaacuggagcaggaggca

SEQ ID NO: 468681 - RNA, 22 nt, Artificial Sequence
  Synthetic
uccucaacuggagcaggaggca

SEQ ID NO: 468682 - RNA, 23 nt, Artificial Sequence
  Synthetic
guccucaacuggagcaggaggca

SEQ ID NO: 468683 - RNA, 24 nt, Artificial Sequence
  Synthetic
gguccucaacuggagcaggaggca

SEQ ID NO: 468684 - RNA, 18 nt, Artificial Sequence
  Synthetic
ucucccagucaggaggca

SEQ ID NO: 468685 - RNA, 19 nt, Artificial Sequence
  Synthetic
gucucccagucaggaggca

SEQ ID NO: 468686 - RNA, 20 nt, Artificial Sequence
  Synthetic
ugucucccagucaggaggca

SEQ ID NO: 468687 - RNA, 21 nt, Artificial Sequence
  Synthetic
gugucucccagucaggaggca

SEQ ID NO: 468688 - RNA, 22 nt, Artificial Sequence
  Synthetic
ggugucucccagucaggaggca

SEQ ID NO: 468689 - RNA, 23 nt, Artificial Sequence
  Synthetic
aggugucucccagucaggaggca

SEQ ID NO: 468690 - RNA, 24 nt, Artificial Sequence
  Synthetic
gaggugucucccagucaggaggca

SEQ ID NO: 468691 - RNA, 18 nt, Artificial Sequence
  Synthetic
uaauuaaaaagggaggca

SEQ ID NO: 468692 - RNA, 19 nt, Artificial Sequence
  Synthetic
uuaauuaaaaagggaggca

SEQ ID NO: 468693 - RNA, 20 nt, Artificial Sequence
  Synthetic
cuuaauuaaaaagggaggca

SEQ ID NO: 468694 - RNA, 21 nt, Artificial Sequence
  Synthetic
gcuuaauuaaaaagggaggca

SEQ ID NO: 468695 - RNA, 22 nt, Artificial Sequence
  Synthetic
ugcuuaauuaaaaagggaggca

SEQ ID NO: 468696 - RNA, 23 nt, Artificial Sequence
  Synthetic
uugcuuaauuaaaaagggaggca

SEQ ID NO: 468697 - RNA, 24 nt, Artificial Sequence
  Synthetic
uuugcuuaauuaaaaagggaggca

SEQ ID NO: 468698 - RNA, 18 nt, Artificial Sequence
  Synthetic
aauugcagaugggaggca

SEQ ID NO: 468699 - RNA, 19 nt, Artificial Sequence
  Synthetic
aaauugcagaugggaggca

SEQ ID NO: 468700 - RNA, 20 nt, Artificial Sequence
  Synthetic
gaaauugcagaugggaggca

SEQ ID NO: 468701 - RNA, 21 nt, Artificial Sequence
  Synthetic
ugaaauugcagaugggaggca

SEQ ID NO: 468702 - RNA, 22 nt, Artificial Sequence
  Synthetic
uugaaauugcagaugggaggca

SEQ ID NO: 468703 - RNA, 23 nt, Artificial Sequence
  Synthetic
guugaaauugcagaugggaggca

SEQ ID NO: 468704 - RNA, 24 nt, Artificial Sequence
  Synthetic
gguugaaauugcagaugggaggca

SEQ ID NO: 468705 - RNA, 18 nt, Artificial Sequence
  Synthetic
ucaaguucacaugaggca

SEQ ID NO: 468706 - RNA, 19 nt, Artificial Sequence
  Synthetic
aucaaguucacaugaggca

SEQ ID NO: 468707 - RNA, 20 nt, Artificial Sequence
  Synthetic
uaucaaguucacaugaggca

SEQ ID NO: 468708 - RNA, 21 nt, Artificial Sequence
  Synthetic
uuaucaaguucacaugaggca

SEQ ID NO: 468709 - RNA, 22 nt, Artificial Sequence
  Synthetic
uuuaucaaguucacaugaggca

SEQ ID NO: 468710 - RNA, 23 nt, Artificial Sequence
  Synthetic
uuuuaucaaguucacaugaggca

SEQ ID NO: 468711 - RNA, 24 nt, Artificial Sequence
  Synthetic
auuuuaucaaguucacaugaggca

SEQ ID NO: 468712 - RNA, 18 nt, Artificial Sequence
  Synthetic
uacaauuaccaugaggca

SEQ ID NO: 468713 - RNA, 19 nt, Artificial Sequence
  Synthetic
guacaauuaccaugaggca

SEQ ID NO: 468714 - RNA, 20 nt, Artificial Sequence
  Synthetic
gguacaauuaccaugaggca

SEQ ID NO: 468715 - RNA, 21 nt, Artificial Sequence
  Synthetic
agguacaauuaccaugaggca

SEQ ID NO: 468716 - RNA, 22 nt, Artificial Sequence
  Synthetic
cagguacaauuaccaugaggca

SEQ ID NO: 468717 - RNA, 23 nt, Artificial Sequence
  Synthetic
gcagguacaauuaccaugaggca

SEQ ID NO: 468718 - RNA, 24 nt, Artificial Sequence
  Synthetic
ggcagguacaauuaccaugaggca

SEQ ID NO: 468719 - RNA, 18 nt, Artificial Sequence
  Synthetic
caggacugagaugaggca

SEQ ID NO: 468720 - RNA, 19 nt, Artificial Sequence
  Synthetic
ccaggacugagaugaggca

SEQ ID NO: 468721 - RNA, 20 nt, Artificial Sequence
  Synthetic
uccaggacugagaugaggca

SEQ ID NO: 468722 - RNA, 21 nt, Artificial Sequence
  Synthetic
uuccaggacugagaugaggca

SEQ ID NO: 468723 - RNA, 22 nt, Artificial Sequence
  Synthetic
uuuccaggacugagaugaggca

SEQ ID NO: 468724 - RNA, 23 nt, Artificial Sequence
  Synthetic
cuuuccaggacugagaugaggca

SEQ ID NO: 468725 - RNA, 24 nt, Artificial Sequence
  Synthetic
ucuuuccaggacugagaugaggca

SEQ ID NO: 468726 - RNA, 18 nt, Artificial Sequence
  Synthetic
aggugccaugaugaggca

SEQ ID NO: 468727 - RNA, 19 nt, Artificial Sequence
  Synthetic
caggugccaugaugaggca

SEQ ID NO: 468728 - RNA, 20 nt, Artificial Sequence
  Synthetic
gcaggugccaugaugaggca

SEQ ID NO: 468729 - RNA, 21 nt, Artificial Sequence
  Synthetic
agcaggugccaugaugaggca

SEQ ID NO: 468730 - RNA, 22 nt, Artificial Sequence
  Synthetic
cagcaggugccaugaugaggca

SEQ ID NO: 468731 - RNA, 23 nt, Artificial Sequence
  Synthetic
acagcaggugccaugaugaggca

SEQ ID NO: 468732 - RNA, 24 nt, Artificial Sequence
  Synthetic
aacagcaggugccaugaugaggca

SEQ ID NO: 468733 - RNA, 18 nt, Artificial Sequence
  Synthetic
auuuuguuuuaugaggca

SEQ ID NO: 468734 - RNA, 19 nt, Artificial Sequence
  Synthetic
aauuuuguuuuaugaggca

SEQ ID NO: 468735 - RNA, 20 nt, Artificial Sequence
  Synthetic
uaauuuuguuuuaugaggca

SEQ ID NO: 468736 - RNA, 21 nt, Artificial Sequence
  Synthetic
auaauuuuguuuuaugaggca

SEQ ID NO: 468737 - RNA, 22 nt, Artificial Sequence
  Synthetic
cauaauuuuguuuuaugaggca

SEQ ID NO: 468738 - RNA, 23 nt, Artificial Sequence
  Synthetic
ucauaauuuuguuuuaugaggca

SEQ ID NO: 468739 - RNA, 24 nt, Artificial Sequence
  Synthetic
aucauaauuuuguuuuaugaggca

SEQ ID NO: 468740 - RNA, 18 nt, Artificial Sequence
  Synthetic
acuucggaggcugaggca

SEQ ID NO: 468741 - RNA, 19 nt, Artificial Sequence
  Synthetic
uacuucggaggcugaggca

SEQ ID NO: 468742 - RNA, 20 nt, Artificial Sequence
  Synthetic
guacuucggaggcugaggca

SEQ ID NO: 468743 - RNA, 21 nt, Artificial Sequence
  Synthetic
gguacuucggaggcugaggca

SEQ ID NO: 468744 - RNA, 22 nt, Artificial Sequence
  Synthetic
agguacuucggaggcugaggca

SEQ ID NO: 468745 - RNA, 23 nt, Artificial Sequence
  Synthetic
cagguacuucggaggcugaggca

SEQ ID NO: 468746 - RNA, 24 nt, Artificial Sequence
  Synthetic
ccagguacuucggaggcugaggca

SEQ ID NO: 468747 - RNA, 18 nt, Artificial Sequence
  Synthetic
aacuucauuucugaggca

SEQ ID NO: 468748 - RNA, 19 nt, Artificial Sequence
  Synthetic
aaacuucauuucugaggca

SEQ ID NO: 468749 - RNA, 20 nt, Artificial Sequence
  Synthetic
aaaacuucauuucugaggca

SEQ ID NO: 468750 - RNA, 21 nt, Artificial Sequence
  Synthetic
uaaaacuucauuucugaggca

SEQ ID NO: 468751 - RNA, 22 nt, Artificial Sequence
  Synthetic
auaaaacuucauuucugaggca

SEQ ID NO: 468752 - RNA, 23 nt, Artificial Sequence
  Synthetic
cauaaaacuucauuucugaggca

SEQ ID NO: 468753 - RNA, 24 nt, Artificial Sequence
  Synthetic
acauaaaacuucauuucugaggca

SEQ ID NO: 468754 - RNA, 18 nt, Artificial Sequence
  Synthetic
uaguagagaagugaggca

SEQ ID NO: 468755 - RNA, 19 nt, Artificial Sequence
  Synthetic
uuaguagagaagugaggca

SEQ ID NO: 468756 - RNA, 20 nt, Artificial Sequence
  Synthetic
uuuaguagagaagugaggca

SEQ ID NO: 468757 - RNA, 21 nt, Artificial Sequence
  Synthetic
uuuuaguagagaagugaggca

SEQ ID NO: 468758 - RNA, 22 nt, Artificial Sequence
  Synthetic
auuuuaguagagaagugaggca

SEQ ID NO: 468759 - RNA, 23 nt, Artificial Sequence
  Synthetic
cauuuuaguagagaagugaggca

SEQ ID NO: 468760 - RNA, 24 nt, Artificial Sequence
  Synthetic
acauuuuaguagagaagugaggca

SEQ ID NO: 468761 - RNA, 18 nt, Artificial Sequence
  Synthetic
gccuggaugguugaggca

SEQ ID NO: 468762 - RNA, 19 nt, Artificial Sequence
  Synthetic
agccuggaugguugaggca

SEQ ID NO: 468763 - RNA, 20 nt, Artificial Sequence
  Synthetic
gagccuggaugguugaggca

SEQ ID NO: 468764 - RNA, 21 nt, Artificial Sequence
  Synthetic
ugagccuggaugguugaggca

SEQ ID NO: 468765 - RNA, 22 nt, Artificial Sequence
  Synthetic
cugagccuggaugguugaggca

SEQ ID NO: 468766 - RNA, 23 nt, Artificial Sequence
  Synthetic
ccugagccuggaugguugaggca

SEQ ID NO: 468767 - RNA, 24 nt, Artificial Sequence
  Synthetic
accugagccuggaugguugaggca

SEQ ID NO: 468768 - RNA, 18 nt, Artificial Sequence
  Synthetic
aggguugguguugaggca

SEQ ID NO: 468769 - RNA, 19 nt, Artificial Sequence
  Synthetic
aaggguugguguugaggca

SEQ ID NO: 468770 - RNA, 20 nt, Artificial Sequence
  Synthetic
gaaggguugguguugaggca

SEQ ID NO: 468771 - RNA, 21 nt, Artificial Sequence
  Synthetic
agaaggguugguguugaggca

SEQ ID NO: 468772 - RNA, 22 nt, Artificial Sequence
  Synthetic
uagaaggguugguguugaggca

SEQ ID NO: 468773 - RNA, 23 nt, Artificial Sequence
  Synthetic
auagaaggguugguguugaggca

SEQ ID NO: 468774 - RNA, 24 nt, Artificial Sequence
  Synthetic
gauagaaggguugguguugaggca

SEQ ID NO: 468775 - RNA, 18 nt, Artificial Sequence
  Synthetic
aaagaggaaacauaggca

SEQ ID NO: 468776 - RNA, 19 nt, Artificial Sequence
  Synthetic
gaaagaggaaacauaggca

SEQ ID NO: 468777 - RNA, 20 nt, Artificial Sequence
  Synthetic
ggaaagaggaaacauaggca

SEQ ID NO: 468778 - RNA, 21 nt, Artificial Sequence
  Synthetic
aggaaagaggaaacauaggca

SEQ ID NO: 468779 - RNA, 22 nt, Artificial Sequence
  Synthetic
aaggaaagaggaaacauaggca

SEQ ID NO: 468780 - RNA, 23 nt, Artificial Sequence
  Synthetic
gaaggaaagaggaaacauaggca

SEQ ID NO: 468781 - RNA, 24 nt, Artificial Sequence
  Synthetic
ggaaggaaagaggaaacauaggca

SEQ ID NO: 468782 - RNA, 18 nt, Artificial Sequence
  Synthetic
agggacaacacauaggca

SEQ ID NO: 468783 - RNA, 19 nt, Artificial Sequence
  Synthetic
aagggacaacacauaggca

SEQ ID NO: 468784 - RNA, 20 nt, Artificial Sequence
  Synthetic
gaagggacaacacauaggca

SEQ ID NO: 468785 - RNA, 21 nt, Artificial Sequence
  Synthetic
cgaagggacaacacauaggca

SEQ ID NO: 468786 - RNA, 22 nt, Artificial Sequence
  Synthetic
gcgaagggacaacacauaggca

SEQ ID NO: 468787 - RNA, 23 nt, Artificial Sequence
  Synthetic
ugcgaagggacaacacauaggca

SEQ ID NO: 468788 - RNA, 24 nt, Artificial Sequence
  Synthetic
cugcgaagggacaacacauaggca

SEQ ID NO: 468789 - RNA, 18 nt, Artificial Sequence
  Synthetic
agugaaauaagcuaggca

SEQ ID NO: 468790 - RNA, 19 nt, Artificial Sequence
  Synthetic
aagugaaauaagcuaggca

SEQ ID NO: 468791 - RNA, 20 nt, Artificial Sequence
  Synthetic
caagugaaauaagcuaggca

SEQ ID NO: 468792 - RNA, 21 nt, Artificial Sequence
  Synthetic
ucaagugaaauaagcuaggca

SEQ ID NO: 468793 - RNA, 22 nt, Artificial Sequence
  Synthetic
gucaagugaaauaagcuaggca

SEQ ID NO: 468794 - RNA, 23 nt, Artificial Sequence
  Synthetic
ugucaagugaaauaagcuaggca

SEQ ID NO: 468795 - RNA, 24 nt, Artificial Sequence
  Synthetic
augucaagugaaauaagcuaggca

SEQ ID NO: 468796 - RNA, 18 nt, Artificial Sequence
  Synthetic
gggcagaccaucuaggca

SEQ ID NO: 468797 - RNA, 19 nt, Artificial Sequence
  Synthetic
ugggcagaccaucuaggca

SEQ ID NO: 468798 - RNA, 20 nt, Artificial Sequence
  Synthetic
uugggcagaccaucuaggca

SEQ ID NO: 468799 - RNA, 21 nt, Artificial Sequence
  Synthetic
guugggcagaccaucuaggca

SEQ ID NO: 468800 - RNA, 22 nt, Artificial Sequence
  Synthetic
aguugggcagaccaucuaggca

SEQ ID NO: 468801 - RNA, 23 nt, Artificial Sequence
  Synthetic
uaguugggcagaccaucuaggca

SEQ ID NO: 468802 - RNA, 24 nt, Artificial Sequence
  Synthetic
uuaguugggcagaccaucuaggca

SEQ ID NO: 468803 - RNA, 18 nt, Artificial Sequence
  Synthetic
aauguaaaacucuaggca

SEQ ID NO: 468804 - RNA, 19 nt, Artificial Sequence
  Synthetic
gaauguaaaacucuaggca

SEQ ID NO: 468805 - RNA, 20 nt, Artificial Sequence
  Synthetic
ugaauguaaaacucuaggca

SEQ ID NO: 468806 - RNA, 21 nt, Artificial Sequence
  Synthetic
cugaauguaaaacucuaggca

SEQ ID NO: 468807 - RNA, 22 nt, Artificial Sequence
  Synthetic
acugaauguaaaacucuaggca

SEQ ID NO: 468808 - RNA, 23 nt, Artificial Sequence
  Synthetic
aacugaauguaaaacucuaggca

SEQ ID NO: 468809 - RNA, 24 nt, Artificial Sequence
  Synthetic
uaacugaauguaaaacucuaggca

SEQ ID NO: 468810 - RNA, 18 nt, Artificial Sequence
  Synthetic
ugggcaccauucuaggca

SEQ ID NO: 468811 - RNA, 19 nt, Artificial Sequence
  Synthetic
cugggcaccauucuaggca

SEQ ID NO: 468812 - RNA, 20 nt, Artificial Sequence
  Synthetic
ucugggcaccauucuaggca

SEQ ID NO: 468813 - RNA, 21 nt, Artificial Sequence
  Synthetic
aucugggcaccauucuaggca

SEQ ID NO: 468814 - RNA, 22 nt, Artificial Sequence
  Synthetic
gaucugggcaccauucuaggca

SEQ ID NO: 468815 - RNA, 23 nt, Artificial Sequence
  Synthetic
ugaucugggcaccauucuaggca

SEQ ID NO: 468816 - RNA, 24 nt, Artificial Sequence
  Synthetic
uugaucugggcaccauucuaggca

SEQ ID NO: 468817 - RNA, 18 nt, Artificial Sequence
  Synthetic
cagggaauguucuaggca

SEQ ID NO: 468818 - RNA, 19 nt, Artificial Sequence
  Synthetic
ccagggaauguucuaggca

SEQ ID NO: 468819 - RNA, 20 nt, Artificial Sequence
  Synthetic
gccagggaauguucuaggca

SEQ ID NO: 468820 - RNA, 21 nt, Artificial Sequence
  Synthetic
ugccagggaauguucuaggca

SEQ ID NO: 468821 - RNA, 22 nt, Artificial Sequence
  Synthetic
augccagggaauguucuaggca

SEQ ID NO: 468822 - RNA, 23 nt, Artificial Sequence
  Synthetic
uaugccagggaauguucuaggca

SEQ ID NO: 468823 - RNA, 24 nt, Artificial Sequence
  Synthetic
auaugccagggaauguucuaggca

SEQ ID NO: 468824 - RNA, 18 nt, Artificial Sequence
  Synthetic
cagacacuguucuaggca

SEQ ID NO: 468825 - RNA, 19 nt, Artificial Sequence
  Synthetic
ucagacacuguucuaggca

SEQ ID NO: 468826 - RNA, 20 nt, Artificial Sequence
  Synthetic
aucagacacuguucuaggca

SEQ ID NO: 468827 - RNA, 21 nt, Artificial Sequence
  Synthetic
uaucagacacuguucuaggca

SEQ ID NO: 468828 - RNA, 22 nt, Artificial Sequence
  Synthetic
guaucagacacuguucuaggca

SEQ ID NO: 468829 - RNA, 23 nt, Artificial Sequence
  Synthetic
uguaucagacacuguucuaggca

SEQ ID NO: 468830 - RNA, 24 nt, Artificial Sequence
  Synthetic
auguaucagacacuguucuaggca

SEQ ID NO: 468831 - RNA, 18 nt, Artificial Sequence
  Synthetic
ggagaugucaauuaggca

SEQ ID NO: 468832 - RNA, 19 nt, Artificial Sequence
  Synthetic
uggagaugucaauuaggca

SEQ ID NO: 468833 - RNA, 20 nt, Artificial Sequence
  Synthetic
guggagaugucaauuaggca

SEQ ID NO: 468834 - RNA, 21 nt, Artificial Sequence
  Synthetic
aguggagaugucaauuaggca

SEQ ID NO: 468835 - RNA, 22 nt, Artificial Sequence
  Synthetic
aaguggagaugucaauuaggca

SEQ ID NO: 468836 - RNA, 23 nt, Artificial Sequence
  Synthetic
uaaguggagaugucaauuaggca

SEQ ID NO: 468837 - RNA, 24 nt, Artificial Sequence
  Synthetic
uuaaguggagaugucaauuaggca

SEQ ID NO: 468838 - RNA, 18 nt, Artificial Sequence
  Synthetic
aguuaaccugcuuaggca

SEQ ID NO: 468839 - RNA, 19 nt, Artificial Sequence
  Synthetic
aaguuaaccugcuuaggca

SEQ ID NO: 468840 - RNA, 20 nt, Artificial Sequence
  Synthetic
caaguuaaccugcuuaggca

SEQ ID NO: 468841 - RNA, 21 nt, Artificial Sequence
  Synthetic
ccaaguuaaccugcuuaggca

SEQ ID NO: 468842 - RNA, 22 nt, Artificial Sequence
  Synthetic
accaaguuaaccugcuuaggca

SEQ ID NO: 468843 - RNA, 23 nt, Artificial Sequence
  Synthetic
caccaaguuaaccugcuuaggca

SEQ ID NO: 468844 - RNA, 24 nt, Artificial Sequence
  Synthetic
acaccaaguuaaccugcuuaggca

SEQ ID NO: 468845 - RNA, 18 nt, Artificial Sequence
  Synthetic
auaaggggauggacggca

SEQ ID NO: 468846 - RNA, 19 nt, Artificial Sequence
  Synthetic
uauaaggggauggacggca

SEQ ID NO: 468847 - RNA, 20 nt, Artificial Sequence
  Synthetic
uuauaaggggauggacggca

SEQ ID NO: 468848 - RNA, 21 nt, Artificial Sequence
  Synthetic
auuauaaggggauggacggca

SEQ ID NO: 468849 - RNA, 22 nt, Artificial Sequence
  Synthetic
cauuauaaggggauggacggca

SEQ ID NO: 468850 - RNA, 23 nt, Artificial Sequence
  Synthetic
ucauuauaaggggauggacggca

SEQ ID NO: 468851 - RNA, 24 nt, Artificial Sequence
  Synthetic
cucauuauaaggggauggacggca

SEQ ID NO: 468852 - RNA, 18 nt, Artificial Sequence
  Synthetic
uguucuaaagauacggca

SEQ ID NO: 468853 - RNA, 19 nt, Artificial Sequence
  Synthetic
auguucuaaagauacggca

SEQ ID NO: 468854 - RNA, 20 nt, Artificial Sequence
  Synthetic
cauguucuaaagauacggca

SEQ ID NO: 468855 - RNA, 21 nt, Artificial Sequence
  Synthetic
ccauguucuaaagauacggca

SEQ ID NO: 468856 - RNA, 22 nt, Artificial Sequence
  Synthetic
uccauguucuaaagauacggca

SEQ ID NO: 468857 - RNA, 23 nt, Artificial Sequence
  Synthetic
uuccauguucuaaagauacggca

SEQ ID NO: 468858 - RNA, 24 nt, Artificial Sequence
  Synthetic
guuccauguucuaaagauacggca

SEQ ID NO: 468859 - RNA, 18 nt, Artificial Sequence
  Synthetic
aguguuuaauacucggca

SEQ ID NO: 468860 - RNA, 19 nt, Artificial Sequence
  Synthetic
uaguguuuaauacucggca

SEQ ID NO: 468861 - RNA, 20 nt, Artificial Sequence
  Synthetic
uuaguguuuaauacucggca

SEQ ID NO: 468862 - RNA, 21 nt, Artificial Sequence
  Synthetic
uuuaguguuuaauacucggca

SEQ ID NO: 468863 - RNA, 22 nt, Artificial Sequence
  Synthetic
uuuuaguguuuaauacucggca

SEQ ID NO: 468864 - RNA, 23 nt, Artificial Sequence
  Synthetic
uuuuuaguguuuaauacucggca

SEQ ID NO: 468865 - RNA, 24 nt, Artificial Sequence
  Synthetic
uuuuuuaguguuuaauacucggca

SEQ ID NO: 468866 - RNA, 18 nt, Artificial Sequence
  Synthetic
cugccuuuuaaaagggca

SEQ ID NO: 468867 - RNA, 19 nt, Artificial Sequence
  Synthetic
ucugccuuuuaaaagggca

SEQ ID NO: 468868 - RNA, 20 nt, Artificial Sequence
  Synthetic
cucugccuuuuaaaagggca

SEQ ID NO: 468869 - RNA, 21 nt, Artificial Sequence
  Synthetic
ccucugccuuuuaaaagggca

SEQ ID NO: 468870 - RNA, 22 nt, Artificial Sequence
  Synthetic
uccucugccuuuuaaaagggca

SEQ ID NO: 468871 - RNA, 23 nt, Artificial Sequence
  Synthetic
auccucugccuuuuaaaagggca

SEQ ID NO: 468872 - RNA, 24 nt, Artificial Sequence
  Synthetic
gauccucugccuuuuaaaagggca

SEQ ID NO: 468873 - RNA, 18 nt, Artificial Sequence
  Synthetic
acuggaagccaaagggca

SEQ ID NO: 468874 - RNA, 19 nt, Artificial Sequence
  Synthetic
aacuggaagccaaagggca

SEQ ID NO: 468875 - RNA, 20 nt, Artificial Sequence
  Synthetic
caacuggaagccaaagggca

SEQ ID NO: 468876 - RNA, 21 nt, Artificial Sequence
  Synthetic
ccaacuggaagccaaagggca

SEQ ID NO: 468877 - RNA, 22 nt, Artificial Sequence
  Synthetic
accaacuggaagccaaagggca

SEQ ID NO: 468878 - RNA, 23 nt, Artificial Sequence
  Synthetic
aaccaacuggaagccaaagggca

SEQ ID NO: 468879 - RNA, 24 nt, Artificial Sequence
  Synthetic
aaaccaacuggaagccaaagggca

SEQ ID NO: 468880 - RNA, 18 nt, Artificial Sequence
  Synthetic
ccuccaccagcaagggca

SEQ ID NO: 468881 - RNA, 19 nt, Artificial Sequence
  Synthetic
cccuccaccagcaagggca

SEQ ID NO: 468882 - RNA, 20 nt, Artificial Sequence
  Synthetic
gcccuccaccagcaagggca

SEQ ID NO: 468883 - RNA, 21 nt, Artificial Sequence
  Synthetic
ugcccuccaccagcaagggca

SEQ ID NO: 468884 - RNA, 22 nt, Artificial Sequence
  Synthetic
cugcccuccaccagcaagggca

SEQ ID NO: 468885 - RNA, 23 nt, Artificial Sequence
  Synthetic
gcugcccuccaccagcaagggca

SEQ ID NO: 468886 - RNA, 24 nt, Artificial Sequence
  Synthetic
agcugcccuccaccagcaagggca

SEQ ID NO: 468887 - RNA, 18 nt, Artificial Sequence
  Synthetic
gcggagagcagaagggca

SEQ ID NO: 468888 - RNA, 19 nt, Artificial Sequence
  Synthetic
ugcggagagcagaagggca

SEQ ID NO: 468889 - RNA, 20 nt, Artificial Sequence
  Synthetic
cugcggagagcagaagggca

SEQ ID NO: 468890 - RNA, 21 nt, Artificial Sequence
  Synthetic
ucugcggagagcagaagggca

SEQ ID NO: 468891 - RNA, 22 nt, Artificial Sequence
  Synthetic
aucugcggagagcagaagggca

SEQ ID NO: 468892 - RNA, 23 nt, Artificial Sequence
  Synthetic
uaucugcggagagcagaagggca

SEQ ID NO: 468893 - RNA, 24 nt, Artificial Sequence
  Synthetic
guaucugcggagagcagaagggca

SEQ ID NO: 468894 - RNA, 18 nt, Artificial Sequence
  Synthetic
gguaaauauggaagggca

SEQ ID NO: 468895 - RNA, 19 nt, Artificial Sequence
  Synthetic
agguaaauauggaagggca

SEQ ID NO: 468896 - RNA, 20 nt, Artificial Sequence
  Synthetic
gagguaaauauggaagggca

SEQ ID NO: 468897 - RNA, 21 nt, Artificial Sequence
  Synthetic
ggagguaaauauggaagggca

SEQ ID NO: 468898 - RNA, 22 nt, Artificial Sequence
  Synthetic
aggagguaaauauggaagggca

SEQ ID NO: 468899 - RNA, 23 nt, Artificial Sequence
  Synthetic
aaggagguaaauauggaagggca

SEQ ID NO: 468900 - RNA, 24 nt, Artificial Sequence
  Synthetic
gaaggagguaaauauggaagggca

SEQ ID NO: 468901 - RNA, 18 nt, Artificial Sequence
  Synthetic
uauuagaucugaagggca

SEQ ID NO: 468902 - RNA, 19 nt, Artificial Sequence
  Synthetic
uuauuagaucugaagggca

SEQ ID NO: 468903 - RNA, 20 nt, Artificial Sequence
  Synthetic
guuauuagaucugaagggca

SEQ ID NO: 468904 - RNA, 21 nt, Artificial Sequence
  Synthetic
aguuauuagaucugaagggca

SEQ ID NO: 468905 - RNA, 22 nt, Artificial Sequence
  Synthetic
gaguuauuagaucugaagggca

SEQ ID NO: 468906 - RNA, 23 nt, Artificial Sequence
  Synthetic
ggaguuauuagaucugaagggca

SEQ ID NO: 468907 - RNA, 24 nt, Artificial Sequence
  Synthetic
uggaguuauuagaucugaagggca

SEQ ID NO: 468908 - RNA, 18 nt, Artificial Sequence
  Synthetic
uaaaccguuaacagggca

SEQ ID NO: 468909 - RNA, 19 nt, Artificial Sequence
  Synthetic
guaaaccguuaacagggca

SEQ ID NO: 468910 - RNA, 20 nt, Artificial Sequence
  Synthetic
aguaaaccguuaacagggca

SEQ ID NO: 468911 - RNA, 21 nt, Artificial Sequence
  Synthetic
gaguaaaccguuaacagggca

SEQ ID NO: 468912 - RNA, 22 nt, Artificial Sequence
  Synthetic
ugaguaaaccguuaacagggca

SEQ ID NO: 468913 - RNA, 23 nt, Artificial Sequence
  Synthetic
uugaguaaaccguuaacagggca

SEQ ID NO: 468914 - RNA, 24 nt, Artificial Sequence
  Synthetic
auugaguaaaccguuaacagggca

SEQ ID NO: 468915 - RNA, 18 nt, Artificial Sequence
  Synthetic
auuguauuagacagggca

SEQ ID NO: 468916 - RNA, 19 nt, Artificial Sequence
  Synthetic
cauuguauuagacagggca

SEQ ID NO: 468917 - RNA, 20 nt, Artificial Sequence
  Synthetic
acauuguauuagacagggca

SEQ ID NO: 468918 - RNA, 21 nt, Artificial Sequence
  Synthetic
cacauuguauuagacagggca

SEQ ID NO: 468919 - RNA, 22 nt, Artificial Sequence
  Synthetic
ccacauuguauuagacagggca

SEQ ID NO: 468920 - RNA, 23 nt, Artificial Sequence
  Synthetic
cccacauuguauuagacagggca

SEQ ID NO: 468921 - RNA, 24 nt, Artificial Sequence
  Synthetic
acccacauuguauuagacagggca

SEQ ID NO: 468922 - RNA, 18 nt, Artificial Sequence
  Synthetic
uagcaucugagcagggca

SEQ ID NO: 468923 - RNA, 19 nt, Artificial Sequence
  Synthetic
guagcaucugagcagggca

SEQ ID NO: 468924 - RNA, 20 nt, Artificial Sequence
  Synthetic
uguagcaucugagcagggca

SEQ ID NO: 468925 - RNA, 21 nt, Artificial Sequence
  Synthetic
auguagcaucugagcagggca

SEQ ID NO: 468926 - RNA, 22 nt, Artificial Sequence
  Synthetic
aauguagcaucugagcagggca

SEQ ID NO: 468927 - RNA, 23 nt, Artificial Sequence
  Synthetic
aaauguagcaucugagcagggca

SEQ ID NO: 468928 - RNA, 24 nt, Artificial Sequence
  Synthetic
aaaauguagcaucugagcagggca

SEQ ID NO: 468929 - RNA, 18 nt, Artificial Sequence
  Synthetic
gugcacucagggagggca

SEQ ID NO: 468930 - RNA, 19 nt, Artificial Sequence
  Synthetic
ggugcacucagggagggca

SEQ ID NO: 468931 - RNA, 20 nt, Artificial Sequence
  Synthetic
uggugcacucagggagggca

SEQ ID NO: 468932 - RNA, 21 nt, Artificial Sequence
  Synthetic
guggugcacucagggagggca

SEQ ID NO: 468933 - RNA, 22 nt, Artificial Sequence
  Synthetic
gguggugcacucagggagggca

SEQ ID NO: 468934 - RNA, 23 nt, Artificial Sequence
  Synthetic
ggguggugcacucagggagggca

SEQ ID NO: 468935 - RNA, 24 nt, Artificial Sequence
  Synthetic
aggguggugcacucagggagggca

SEQ ID NO: 468936 - RNA, 18 nt, Artificial Sequence
  Synthetic
uuacauggugggagggca

SEQ ID NO: 468937 - RNA, 19 nt, Artificial Sequence
  Synthetic
cuuacauggugggagggca

SEQ ID NO: 468938 - RNA, 20 nt, Artificial Sequence
  Synthetic
ccuuacauggugggagggca

SEQ ID NO: 468939 - RNA, 21 nt, Artificial Sequence
  Synthetic
uccuuacauggugggagggca

SEQ ID NO: 468940 - RNA, 22 nt, Artificial Sequence
  Synthetic
guccuuacauggugggagggca

SEQ ID NO: 468941 - RNA, 23 nt, Artificial Sequence
  Synthetic
uguccuuacauggugggagggca

SEQ ID NO: 468942 - RNA, 24 nt, Artificial Sequence
  Synthetic
guguccuuacauggugggagggca

SEQ ID NO: 468943 - RNA, 18 nt, Artificial Sequence
  Synthetic
cauucuggcuggagggca

SEQ ID NO: 468944 - RNA, 19 nt, Artificial Sequence
  Synthetic
ucauucuggcuggagggca

SEQ ID NO: 468945 - RNA, 20 nt, Artificial Sequence
  Synthetic
gucauucuggcuggagggca

SEQ ID NO: 468946 - RNA, 21 nt, Artificial Sequence
  Synthetic
ugucauucuggcuggagggca

SEQ ID NO: 468947 - RNA, 22 nt, Artificial Sequence
  Synthetic
cugucauucuggcuggagggca

SEQ ID NO: 468948 - RNA, 23 nt, Artificial Sequence
  Synthetic
ucugucauucuggcuggagggca

SEQ ID NO: 468949 - RNA, 24 nt, Artificial Sequence
  Synthetic
cucugucauucuggcuggagggca

SEQ ID NO: 468950 - RNA, 18 nt, Artificial Sequence
  Synthetic
gaaggggauuggagggca

SEQ ID NO: 468951 - RNA, 19 nt, Artificial Sequence
  Synthetic
agaaggggauuggagggca

SEQ ID NO: 468952 - RNA, 20 nt, Artificial Sequence
  Synthetic
aagaaggggauuggagggca

SEQ ID NO: 468953 - RNA, 21 nt, Artificial Sequence
  Synthetic
aaagaaggggauuggagggca

SEQ ID NO: 468954 - RNA, 22 nt, Artificial Sequence
  Synthetic
aaaagaaggggauuggagggca

SEQ ID NO: 468955 - RNA, 23 nt, Artificial Sequence
  Synthetic
aaaaagaaggggauuggagggca

SEQ ID NO: 468956 - RNA, 24 nt, Artificial Sequence
  Synthetic
caaaaagaaggggauuggagggca

SEQ ID NO: 468957 - RNA, 18 nt, Artificial Sequence
  Synthetic
ucaaauaaaaugagggca

SEQ ID NO: 468958 - RNA, 19 nt, Artificial Sequence
  Synthetic
aucaaauaaaaugagggca

SEQ ID NO: 468959 - RNA, 20 nt, Artificial Sequence
  Synthetic
aaucaaauaaaaugagggca

SEQ ID NO: 468960 - RNA, 21 nt, Artificial Sequence
  Synthetic
aaaucaaauaaaaugagggca

SEQ ID NO: 468961 - RNA, 22 nt, Artificial Sequence
  Synthetic
aaaaucaaauaaaaugagggca

SEQ ID NO: 468962 - RNA, 23 nt, Artificial Sequence
  Synthetic
aaaaaucaaauaaaaugagggca

SEQ ID NO: 468963 - RNA, 24 nt, Artificial Sequence
  Synthetic
aaaaaaucaaauaaaaugagggca

SEQ ID NO: 468964 - RNA, 18 nt, Artificial Sequence
  Synthetic
uuuaugaggcauagggca

SEQ ID NO: 468965 - RNA, 19 nt, Artificial Sequence
  Synthetic
uuuuaugaggcauagggca

SEQ ID NO: 468966 - RNA, 20 nt, Artificial Sequence
  Synthetic
guuuuaugaggcauagggca

SEQ ID NO: 468967 - RNA, 21 nt, Artificial Sequence
  Synthetic
uguuuuaugaggcauagggca

SEQ ID NO: 468968 - RNA, 22 nt, Artificial Sequence
  Synthetic
uuguuuuaugaggcauagggca

SEQ ID NO: 468969 - RNA, 23 nt, Artificial Sequence
  Synthetic
uuuguuuuaugaggcauagggca

SEQ ID NO: 468970 - RNA, 24 nt, Artificial Sequence
  Synthetic
uuuuguuuuaugaggcauagggca

SEQ ID NO: 468971 - RNA, 18 nt, Artificial Sequence
  Synthetic
ucacaguaggauagggca

SEQ ID NO: 468972 - RNA, 19 nt, Artificial Sequence
  Synthetic
gucacaguaggauagggca

SEQ ID NO: 468973 - RNA, 20 nt, Artificial Sequence
  Synthetic
agucacaguaggauagggca

SEQ ID NO: 468974 - RNA, 21 nt, Artificial Sequence
  Synthetic
uagucacaguaggauagggca

SEQ ID NO: 468975 - RNA, 22 nt, Artificial Sequence
  Synthetic
uuagucacaguaggauagggca

SEQ ID NO: 468976 - RNA, 23 nt, Artificial Sequence
  Synthetic
cuuagucacaguaggauagggca

SEQ ID NO: 468977 - RNA, 24 nt, Artificial Sequence
  Synthetic
gcuuagucacaguaggauagggca

SEQ ID NO: 468978 - RNA, 18 nt, Artificial Sequence
  Synthetic
gaguagauuucuagggca

SEQ ID NO: 468979 - RNA, 19 nt, Artificial Sequence
  Synthetic
ugaguagauuucuagggca

SEQ ID NO: 468980 - RNA, 20 nt, Artificial Sequence
  Synthetic
augaguagauuucuagggca

SEQ ID NO: 468981 - RNA, 21 nt, Artificial Sequence
  Synthetic
uaugaguagauuucuagggca

SEQ ID NO: 468982 - RNA, 22 nt, Artificial Sequence
  Synthetic
auaugaguagauuucuagggca

SEQ ID NO: 468983 - RNA, 23 nt, Artificial Sequence
  Synthetic
aauaugaguagauuucuagggca

SEQ ID NO: 468984 - RNA, 24 nt, Artificial Sequence
  Synthetic
aaauaugaguagauuucuagggca

SEQ ID NO: 468985 - RNA, 18 nt, Artificial Sequence
  Synthetic
ggaaauuuauuuagggca

SEQ ID NO: 468986 - RNA, 19 nt, Artificial Sequence
  Synthetic
uggaaauuuauuuagggca

SEQ ID NO: 468987 - RNA, 20 nt, Artificial Sequence
  Synthetic
uuggaaauuuauuuagggca

SEQ ID NO: 468988 - RNA, 21 nt, Artificial Sequence
  Synthetic
uuuggaaauuuauuuagggca

SEQ ID NO: 468989 - RNA, 22 nt, Artificial Sequence
  Synthetic
uuuuggaaauuuauuuagggca

SEQ ID NO: 468990 - RNA, 23 nt, Artificial Sequence
  Synthetic
uuuuuggaaauuuauuuagggca

SEQ ID NO: 468991 - RNA, 24 nt, Artificial Sequence
  Synthetic
cuuuuuggaaauuuauuuagggca

SEQ ID NO: 468992 - RNA, 18 nt, Artificial Sequence
  Synthetic
caagaaugauaacgggca

SEQ ID NO: 468993 - RNA, 19 nt, Artificial Sequence
  Synthetic
ucaagaaugauaacgggca

SEQ ID NO: 468994 - RNA, 20 nt, Artificial Sequence
  Synthetic
gucaagaaugauaacgggca

SEQ ID NO: 468995 - RNA, 21 nt, Artificial Sequence
  Synthetic
ugucaagaaugauaacgggca

SEQ ID NO: 468996 - RNA, 22 nt, Artificial Sequence
  Synthetic
uugucaagaaugauaacgggca

SEQ ID NO: 468997 - RNA, 23 nt, Artificial Sequence
  Synthetic
uuugucaagaaugauaacgggca

SEQ ID NO: 468998 - RNA, 24 nt, Artificial Sequence
  Synthetic
guuugucaagaaugauaacgggca

SEQ ID NO: 468999 - RNA, 18 nt, Artificial Sequence
  Synthetic
auggcgugaacccgggca

SEQ ID NO: 469000 - RNA, 19 nt, Artificial Sequence
  Synthetic
aauggcgugaacccgggca

SEQ ID NO: 469001 - RNA, 20 nt, Artificial Sequence
  Synthetic
gaauggcgugaacccgggca

SEQ ID NO: 469002 - RNA, 21 nt, Artificial Sequence
  Synthetic
agaauggcgugaacccgggca

SEQ ID NO: 469003 - RNA, 22 nt, Artificial Sequence
  Synthetic
gagaauggcgugaacccgggca

SEQ ID NO: 469004 - RNA, 23 nt, Artificial Sequence
  Synthetic
ggagaauggcgugaacccgggca

SEQ ID NO: 469005 - RNA, 24 nt, Artificial Sequence
  Synthetic
aggagaauggcgugaacccgggca

SEQ ID NO: 469006 - RNA, 18 nt, Artificial Sequence
  Synthetic
agugaaggacagcgggca

SEQ ID NO: 469007 - RNA, 19 nt, Artificial Sequence
  Synthetic
uagugaaggacagcgggca

SEQ ID NO: 469008 - RNA, 20 nt, Artificial Sequence
  Synthetic
auagugaaggacagcgggca

SEQ ID NO: 469009 - RNA, 21 nt, Artificial Sequence
  Synthetic
cauagugaaggacagcgggca

SEQ ID NO: 469010 - RNA, 22 nt, Artificial Sequence
  Synthetic
acauagugaaggacagcgggca

SEQ ID NO: 469011 - RNA, 23 nt, Artificial Sequence
  Synthetic
aacauagugaaggacagcgggca

SEQ ID NO: 469012 - RNA, 24 nt, Artificial Sequence
  Synthetic
aaacauagugaaggacagcgggca

SEQ ID NO: 469013 - RNA, 18 nt, Artificial Sequence
  Synthetic
aauagguggcaaggggca

SEQ ID NO: 469014 - RNA, 19 nt, Artificial Sequence
  Synthetic
aaauagguggcaaggggca

SEQ ID NO: 469015 - RNA, 20 nt, Artificial Sequence
  Synthetic
aaaauagguggcaaggggca

SEQ ID NO: 469016 - RNA, 21 nt, Artificial Sequence
  Synthetic
aaaaauagguggcaaggggca

SEQ ID NO: 469017 - RNA, 22 nt, Artificial Sequence
  Synthetic
gaaaaauagguggcaaggggca

SEQ ID NO: 469018 - RNA, 23 nt, Artificial Sequence
  Synthetic
ugaaaaauagguggcaaggggca

SEQ ID NO: 469019 - RNA, 24 nt, Artificial Sequence
  Synthetic
cugaaaaauagguggcaaggggca

SEQ ID NO: 469020 - RNA, 18 nt, Artificial Sequence
  Synthetic
gucaaggggugaggggca

SEQ ID NO: 469021 - RNA, 19 nt, Artificial Sequence
  Synthetic
ugucaaggggugaggggca

SEQ ID NO: 469022 - RNA, 20 nt, Artificial Sequence
  Synthetic
cugucaaggggugaggggca

SEQ ID NO: 469023 - RNA, 21 nt, Artificial Sequence
  Synthetic
ccugucaaggggugaggggca

SEQ ID NO: 469024 - RNA, 22 nt, Artificial Sequence
  Synthetic
gccugucaaggggugaggggca

SEQ ID NO: 469025 - RNA, 23 nt, Artificial Sequence
  Synthetic
ggccugucaaggggugaggggca

SEQ ID NO: 469026 - RNA, 24 nt, Artificial Sequence
  Synthetic
gggccugucaaggggugaggggca

SEQ ID NO: 469027 - RNA, 18 nt, Artificial Sequence
  Synthetic
caggucuucaagggggca

SEQ ID NO: 469028 - RNA, 19 nt, Artificial Sequence
  Synthetic
gcaggucuucaagggggca

SEQ ID NO: 469029 - RNA, 20 nt, Artificial Sequence
  Synthetic
ggcaggucuucaagggggca

SEQ ID NO: 469030 - RNA, 21 nt, Artificial Sequence
  Synthetic
uggcaggucuucaagggggca

SEQ ID NO: 469031 - RNA, 22 nt, Artificial Sequence
  Synthetic
guggcaggucuucaagggggca

SEQ ID NO: 469032 - RNA, 23 nt, Artificial Sequence
  Synthetic
uguggcaggucuucaagggggca

SEQ ID NO: 469033 - RNA, 24 nt, Artificial Sequence
  Synthetic
guguggcaggucuucaagggggca

SEQ ID NO: 469034 - RNA, 18 nt, Artificial Sequence
  Synthetic
ggagucggggagggggca

SEQ ID NO: 469035 - RNA, 19 nt, Artificial Sequence
  Synthetic
aggagucggggagggggca

SEQ ID NO: 469036 - RNA, 20 nt, Artificial Sequence
  Synthetic
gaggagucggggagggggca

SEQ ID NO: 469037 - RNA, 21 nt, Artificial Sequence
  Synthetic
ggaggagucggggagggggca

SEQ ID NO: 469038 - RNA, 22 nt, Artificial Sequence
  Synthetic
uggaggagucggggagggggca

SEQ ID NO: 469039 - RNA, 23 nt, Artificial Sequence
  Synthetic
guggaggagucggggagggggca

SEQ ID NO: 469040 - RNA, 24 nt, Artificial Sequence
  Synthetic
aguggaggagucggggagggggca

SEQ ID NO: 469041 - RNA, 18 nt, Artificial Sequence
  Synthetic
guuggcggguggggggca

SEQ ID NO: 469042 - RNA, 19 nt, Artificial Sequence
  Synthetic
uguuggcggguggggggca

SEQ ID NO: 469043 - RNA, 20 nt, Artificial Sequence
  Synthetic
cuguuggcggguggggggca

SEQ ID NO: 469044 - RNA, 21 nt, Artificial Sequence
  Synthetic
ccuguuggcggguggggggca

SEQ ID NO: 469045 - RNA, 22 nt, Artificial Sequence
  Synthetic
gccuguuggcggguggggggca

SEQ ID NO: 469046 - RNA, 23 nt, Artificial Sequence
  Synthetic
ggccuguuggcggguggggggca

SEQ ID NO: 469047 - RNA, 24 nt, Artificial Sequence
  Synthetic
gggccuguuggcggguggggggca

SEQ ID NO: 469048 - RNA, 18 nt, Artificial Sequence
  Synthetic
agacuuagguauggggca

SEQ ID NO: 469049 - RNA, 19 nt, Artificial Sequence
  Synthetic
gagacuuagguauggggca

SEQ ID NO: 469050 - RNA, 20 nt, Artificial Sequence
  Synthetic
agagacuuagguauggggca

SEQ ID NO: 469051 - RNA, 21 nt, Artificial Sequence
  Synthetic
aagagacuuagguauggggca

SEQ ID NO: 469052 - RNA, 22 nt, Artificial Sequence
  Synthetic
uaagagacuuagguauggggca

SEQ ID NO: 469053 - RNA, 23 nt, Artificial Sequence
  Synthetic
auaagagacuuagguauggggca

SEQ ID NO: 469054 - RNA, 24 nt, Artificial Sequence
  Synthetic
aauaagagacuuagguauggggca

SEQ ID NO: 469055 - RNA, 18 nt, Artificial Sequence
  Synthetic
aacgaacuaaaaugggca

SEQ ID NO: 469056 - RNA, 19 nt, Artificial Sequence
  Synthetic
aaacgaacuaaaaugggca

SEQ ID NO: 469057 - RNA, 20 nt, Artificial Sequence
  Synthetic
aaaacgaacuaaaaugggca

SEQ ID NO: 469058 - RNA, 21 nt, Artificial Sequence
  Synthetic
aaaaacgaacuaaaaugggca

SEQ ID NO: 469059 - RNA, 22 nt, Artificial Sequence
  Synthetic
aaaaaacgaacuaaaaugggca

SEQ ID NO: 469060 - RNA, 23 nt, Artificial Sequence
  Synthetic
uaaaaaacgaacuaaaaugggca

SEQ ID NO: 469061 - RNA, 24 nt, Artificial Sequence
  Synthetic
uuaaaaaacgaacuaaaaugggca

SEQ ID NO: 469062 - RNA, 18 nt, Artificial Sequence
  Synthetic
auguggaaagcaugggca

SEQ ID NO: 469063 - RNA, 19 nt, Artificial Sequence
  Synthetic
uauguggaaagcaugggca

SEQ ID NO: 469064 - RNA, 20 nt, Artificial Sequence
  Synthetic
cuauguggaaagcaugggca

SEQ ID NO: 469065 - RNA, 21 nt, Artificial Sequence
  Synthetic
ccuauguggaaagcaugggca

SEQ ID NO: 469066 - RNA, 22 nt, Artificial Sequence
  Synthetic
accuauguggaaagcaugggca

SEQ ID NO: 469067 - RNA, 23 nt, Artificial Sequence
  Synthetic
aaccuauguggaaagcaugggca

SEQ ID NO: 469068 - RNA, 24 nt, Artificial Sequence
  Synthetic
gaaccuauguggaaagcaugggca

SEQ ID NO: 469069 - RNA, 18 nt, Artificial Sequence
  Synthetic
guguagccuugaugggca

SEQ ID NO: 469070 - RNA, 19 nt, Artificial Sequence
  Synthetic
cguguagccuugaugggca

SEQ ID NO: 469071 - RNA, 20 nt, Artificial Sequence
  Synthetic
acguguagccuugaugggca

SEQ ID NO: 469072 - RNA, 21 nt, Artificial Sequence
  Synthetic
uacguguagccuugaugggca

SEQ ID NO: 469073 - RNA, 22 nt, Artificial Sequence
  Synthetic
uuacguguagccuugaugggca

SEQ ID NO: 469074 - RNA, 23 nt, Artificial Sequence
  Synthetic
auuacguguagccuugaugggca

SEQ ID NO: 469075 - RNA, 24 nt, Artificial Sequence
  Synthetic
aauuacguguagccuugaugggca

SEQ ID NO: 469076 - RNA, 18 nt, Artificial Sequence
  Synthetic
uaucaugcccccugggca

SEQ ID NO: 469077 - RNA, 19 nt, Artificial Sequence
  Synthetic
uuaucaugcccccugggca

SEQ ID NO: 469078 - RNA, 20 nt, Artificial Sequence
  Synthetic
uuuaucaugcccccugggca

SEQ ID NO: 469079 - RNA, 21 nt, Artificial Sequence
  Synthetic
cuuuaucaugcccccugggca

SEQ ID NO: 469080 - RNA, 22 nt, Artificial Sequence
  Synthetic
ucuuuaucaugcccccugggca

SEQ ID NO: 469081 - RNA, 23 nt, Artificial Sequence
  Synthetic
uucuuuaucaugcccccugggca

SEQ ID NO: 469082 - RNA, 24 nt, Artificial Sequence
  Synthetic
cuucuuuaucaugcccccugggca

SEQ ID NO: 469083 - RNA, 18 nt, Artificial Sequence
  Synthetic
ugcacuccagccugggca

SEQ ID NO: 469084 - RNA, 19 nt, Artificial Sequence
  Synthetic
cugcacuccagccugggca

SEQ ID NO: 469085 - RNA, 20 nt, Artificial Sequence
  Synthetic
acugcacuccagccugggca

SEQ ID NO: 469086 - RNA, 21 nt, Artificial Sequence
  Synthetic
cacugcacuccagccugggca

SEQ ID NO: 469087 - RNA, 22 nt, Artificial Sequence
  Synthetic
ccacugcacuccagccugggca

SEQ ID NO: 469088 - RNA, 23 nt, Artificial Sequence
  Synthetic
accacugcacuccagccugggca

SEQ ID NO: 469089 - RNA, 24 nt, Artificial Sequence
  Synthetic
caccacugcacuccagccugggca

SEQ ID NO: 469090 - RNA, 18 nt, Artificial Sequence
  Synthetic
uauauuggggccugggca

SEQ ID NO: 469091 - RNA, 19 nt, Artificial Sequence
  Synthetic
guauauuggggccugggca

SEQ ID NO: 469092 - RNA, 20 nt, Artificial Sequence
  Synthetic
uguauauuggggccugggca

SEQ ID NO: 469093 - RNA, 21 nt, Artificial Sequence
  Synthetic
guguauauuggggccugggca

SEQ ID NO: 469094 - RNA, 22 nt, Artificial Sequence
  Synthetic
gguguauauuggggccugggca

SEQ ID NO: 469095 - RNA, 23 nt, Artificial Sequence
  Synthetic
cgguguauauuggggccugggca

SEQ ID NO: 469096 - RNA, 24 nt, Artificial Sequence
  Synthetic
ucgguguauauuggggccugggca

SEQ ID NO: 469097 - RNA, 18 nt, Artificial Sequence
  Synthetic
cuacugauguccugggca

SEQ ID NO: 469098 - RNA, 19 nt, Artificial Sequence
  Synthetic
ccuacugauguccugggca

SEQ ID NO: 469099 - RNA, 20 nt, Artificial Sequence
  Synthetic
gccuacugauguccugggca

SEQ ID NO: 469100 - RNA, 21 nt, Artificial Sequence
  Synthetic
ugccuacugauguccugggca

SEQ ID NO: 469101 - RNA, 22 nt, Artificial Sequence
  Synthetic
cugccuacugauguccugggca

SEQ ID NO: 469102 - RNA, 23 nt, Artificial Sequence
  Synthetic
ucugccuacugauguccugggca

SEQ ID NO: 469103 - RNA, 24 nt, Artificial Sequence
  Synthetic
aucugccuacugauguccugggca

SEQ ID NO: 469104 - RNA, 18 nt, Artificial Sequence
  Synthetic
cuacucaugugcugggca

SEQ ID NO: 469105 - RNA, 19 nt, Artificial Sequence
  Synthetic
ccuacucaugugcugggca

SEQ ID NO: 469106 - RNA, 20 nt, Artificial Sequence
  Synthetic
accuacucaugugcugggca

SEQ ID NO: 469107 - RNA, 21 nt, Artificial Sequence
  Synthetic
caccuacucaugugcugggca

SEQ ID NO: 469108 - RNA, 22 nt, Artificial Sequence
  Synthetic
gcaccuacucaugugcugggca

SEQ ID NO: 469109 - RNA, 23 nt, Artificial Sequence
  Synthetic
agcaccuacucaugugcugggca

SEQ ID NO: 469110 - RNA, 24 nt, Artificial Sequence
  Synthetic
aagcaccuacucaugugcugggca

SEQ ID NO: 469111 - RNA, 18 nt, Artificial Sequence
  Synthetic
acaaagcccuucugggca

SEQ ID NO: 469112 - RNA, 19 nt, Artificial Sequence
  Synthetic
gacaaagcccuucugggca

SEQ ID NO: 469113 - RNA, 20 nt, Artificial Sequence
  Synthetic
ugacaaagcccuucugggca

SEQ ID NO: 469114 - RNA, 21 nt, Artificial Sequence
  Synthetic
gugacaaagcccuucugggca

SEQ ID NO: 469115 - RNA, 22 nt, Artificial Sequence
  Synthetic
cgugacaaagcccuucugggca

SEQ ID NO: 469116 - RNA, 23 nt, Artificial Sequence
  Synthetic
acgugacaaagcccuucugggca

SEQ ID NO: 469117 - RNA, 24 nt, Artificial Sequence
  Synthetic
cacgugacaaagcccuucugggca

SEQ ID NO: 469118 - RNA, 18 nt, Artificial Sequence
  Synthetic
ccaccugcaaggugggca

SEQ ID NO: 469119 - RNA, 19 nt, Artificial Sequence
  Synthetic
uccaccugcaaggugggca

SEQ ID NO: 469120 - RNA, 20 nt, Artificial Sequence
  Synthetic
auccaccugcaaggugggca

SEQ ID NO: 469121 - RNA, 21 nt, Artificial Sequence
  Synthetic
gauccaccugcaaggugggca

SEQ ID NO: 469122 - RNA, 22 nt, Artificial Sequence
  Synthetic
ggauccaccugcaaggugggca

SEQ ID NO: 469123 - RNA, 23 nt, Artificial Sequence
  Synthetic
uggauccaccugcaaggugggca

SEQ ID NO: 469124 - RNA, 24 nt, Artificial Sequence
  Synthetic
auggauccaccugcaaggugggca

SEQ ID NO: 469125 - RNA, 18 nt, Artificial Sequence
  Synthetic
caacaggagacuugggca

SEQ ID NO: 469126 - RNA, 19 nt, Artificial Sequence
  Synthetic
ucaacaggagacuugggca

SEQ ID NO: 469127 - RNA, 20 nt, Artificial Sequence
  Synthetic
uucaacaggagacuugggca

SEQ ID NO: 469128 - RNA, 21 nt, Artificial Sequence
  Synthetic
uuucaacaggagacuugggca

SEQ ID NO: 469129 - RNA, 22 nt, Artificial Sequence
  Synthetic
auuucaacaggagacuugggca

SEQ ID NO: 469130 - RNA, 23 nt, Artificial Sequence
  Synthetic
cauuucaacaggagacuugggca

SEQ ID NO: 469131 - RNA, 24 nt, Artificial Sequence
  Synthetic
ccauuucaacaggagacuugggca

SEQ ID NO: 469132 - RNA, 18 nt, Artificial Sequence
  Synthetic
gggguaagucuuugggca

SEQ ID NO: 469133 - RNA, 19 nt, Artificial Sequence
  Synthetic
agggguaagucuuugggca

SEQ ID NO: 469134 - RNA, 20 nt, Artificial Sequence
  Synthetic
uagggguaagucuuugggca

SEQ ID NO: 469135 - RNA, 21 nt, Artificial Sequence
  Synthetic
cuagggguaagucuuugggca

SEQ ID NO: 469136 - RNA, 22 nt, Artificial Sequence
  Synthetic
ccuagggguaagucuuugggca

SEQ ID NO: 469137 - RNA, 23 nt, Artificial Sequence
  Synthetic
cccuagggguaagucuuugggca

SEQ ID NO: 469138 - RNA, 24 nt, Artificial Sequence
  Synthetic
gcccuagggguaagucuuugggca

SEQ ID NO: 469139 - RNA, 18 nt, Artificial Sequence
  Synthetic
gaacaagauaaaauggca

SEQ ID NO: 469140 - RNA, 19 nt, Artificial Sequence
  Synthetic
ugaacaagauaaaauggca

SEQ ID NO: 469141 - RNA, 20 nt, Artificial Sequence
  Synthetic
uugaacaagauaaaauggca

SEQ ID NO: 469142 - RNA, 21 nt, Artificial Sequence
  Synthetic
auugaacaagauaaaauggca

SEQ ID NO: 469143 - RNA, 22 nt, Artificial Sequence
  Synthetic
uauugaacaagauaaaauggca

SEQ ID NO: 469144 - RNA, 23 nt, Artificial Sequence
  Synthetic
guauugaacaagauaaaauggca

SEQ ID NO: 469145 - RNA, 24 nt, Artificial Sequence
  Synthetic
gguauugaacaagauaaaauggca

SEQ ID NO: 469146 - RNA, 18 nt, Artificial Sequence
  Synthetic
gcagggaacuaaauggca

SEQ ID NO: 469147 - RNA, 19 nt, Artificial Sequence
  Synthetic
agcagggaacuaaauggca

SEQ ID NO: 469148 - RNA, 20 nt, Artificial Sequence
  Synthetic
uagcagggaacuaaauggca

SEQ ID NO: 469149 - RNA, 21 nt, Artificial Sequence
  Synthetic
auagcagggaacuaaauggca

SEQ ID NO: 469150 - RNA, 22 nt, Artificial Sequence
  Synthetic
aauagcagggaacuaaauggca

SEQ ID NO: 469151 - RNA, 23 nt, Artificial Sequence
  Synthetic
caauagcagggaacuaaauggca

SEQ ID NO: 469152 - RNA, 24 nt, Artificial Sequence
  Synthetic
gcaauagcagggaacuaaauggca

SEQ ID NO: 469153 - RNA, 18 nt, Artificial Sequence
  Synthetic
uaacuuuuuuaaauggca

SEQ ID NO: 469154 - RNA, 19 nt, Artificial Sequence
  Synthetic
cuaacuuuuuuaaauggca

SEQ ID NO: 469155 - RNA, 20 nt, Artificial Sequence
  Synthetic
acuaacuuuuuuaaauggca

SEQ ID NO: 469156 - RNA, 21 nt, Artificial Sequence
  Synthetic
aacuaacuuuuuuaaauggca

SEQ ID NO: 469157 - RNA, 22 nt, Artificial Sequence
  Synthetic
aaacuaacuuuuuuaaauggca

SEQ ID NO: 469158 - RNA, 23 nt, Artificial Sequence
  Synthetic
caaacuaacuuuuuuaaauggca

SEQ ID NO: 469159 - RNA, 24 nt, Artificial Sequence
  Synthetic
acaaacuaacuuuuuuaaauggca

SEQ ID NO: 469160 - RNA, 18 nt, Artificial Sequence
  Synthetic
ugacucacaugcauggca

SEQ ID NO: 469161 - RNA, 19 nt, Artificial Sequence
  Synthetic
uugacucacaugcauggca

SEQ ID NO: 469162 - RNA, 20 nt, Artificial Sequence
  Synthetic
auugacucacaugcauggca

SEQ ID NO: 469163 - RNA, 21 nt, Artificial Sequence
  Synthetic
aauugacucacaugcauggca

SEQ ID NO: 469164 - RNA, 22 nt, Artificial Sequence
  Synthetic
aaauugacucacaugcauggca

SEQ ID NO: 469165 - RNA, 23 nt, Artificial Sequence
  Synthetic
aaaauugacucacaugcauggca

SEQ ID NO: 469166 - RNA, 24 nt, Artificial Sequence
  Synthetic
aaaaauugacucacaugcauggca

SEQ ID NO: 469167 - RNA, 18 nt, Artificial Sequence
  Synthetic
ccuuuugguaugauggca

SEQ ID NO: 469168 - RNA, 19 nt, Artificial Sequence
  Synthetic
uccuuuugguaugauggca

SEQ ID NO: 469169 - RNA, 20 nt, Artificial Sequence
  Synthetic
uuccuuuugguaugauggca

SEQ ID NO: 469170 - RNA, 21 nt, Artificial Sequence
  Synthetic
cuuccuuuugguaugauggca

SEQ ID NO: 469171 - RNA, 22 nt, Artificial Sequence
  Synthetic
acuuccuuuugguaugauggca

SEQ ID NO: 469172 - RNA, 23 nt, Artificial Sequence
  Synthetic
uacuuccuuuugguaugauggca

SEQ ID NO: 469173 - RNA, 24 nt, Artificial Sequence
  Synthetic
uuacuuccuuuugguaugauggca

SEQ ID NO: 469174 - RNA, 18 nt, Artificial Sequence
  Synthetic
aacaaaauguauauggca

SEQ ID NO: 469175 - RNA, 19 nt, Artificial Sequence
  Synthetic
aaacaaaauguauauggca

SEQ ID NO: 469176 - RNA, 20 nt, Artificial Sequence
  Synthetic
caaacaaaauguauauggca

SEQ ID NO: 469177 - RNA, 21 nt, Artificial Sequence
  Synthetic
acaaacaaaauguauauggca

SEQ ID NO: 469178 - RNA, 22 nt, Artificial Sequence
  Synthetic
gacaaacaaaauguauauggca

SEQ ID NO: 469179 - RNA, 23 nt, Artificial Sequence
  Synthetic
ggacaaacaaaauguauauggca

SEQ ID NO: 469180 - RNA, 24 nt, Artificial Sequence
  Synthetic
uggacaaacaaaauguauauggca

SEQ ID NO: 469181 - RNA, 18 nt, Artificial Sequence
  Synthetic
ucaaggucuaaacuggca

SEQ ID NO: 469182 - RNA, 19 nt, Artificial Sequence
  Synthetic
gucaaggucuaaacuggca

SEQ ID NO: 469183 - RNA, 20 nt, Artificial Sequence
  Synthetic
agucaaggucuaaacuggca

SEQ ID NO: 469184 - RNA, 21 nt, Artificial Sequence
  Synthetic
gagucaaggucuaaacuggca

SEQ ID NO: 469185 - RNA, 22 nt, Artificial Sequence
  Synthetic
agagucaaggucuaaacuggca

SEQ ID NO: 469186 - RNA, 23 nt, Artificial Sequence
  Synthetic
gagagucaaggucuaaacuggca

SEQ ID NO: 469187 - RNA, 24 nt, Artificial Sequence
  Synthetic
ggagagucaaggucuaaacuggca

SEQ ID NO: 469188 - RNA, 18 nt, Artificial Sequence
  Synthetic
gagaacagaugacuggca

SEQ ID NO: 469189 - RNA, 19 nt, Artificial Sequence
  Synthetic
ggagaacagaugacuggca

SEQ ID NO: 469190 - RNA, 20 nt, Artificial Sequence
  Synthetic
aggagaacagaugacuggca

SEQ ID NO: 469191 - RNA, 21 nt, Artificial Sequence
  Synthetic
aaggagaacagaugacuggca

SEQ ID NO: 469192 - RNA, 22 nt, Artificial Sequence
  Synthetic
gaaggagaacagaugacuggca

SEQ ID NO: 469193 - RNA, 23 nt, Artificial Sequence
  Synthetic
ggaaggagaacagaugacuggca

SEQ ID NO: 469194 - RNA, 24 nt, Artificial Sequence
  Synthetic
gggaaggagaacagaugacuggca

SEQ ID NO: 469195 - RNA, 18 nt, Artificial Sequence
  Synthetic
caugcaguuguacuggca

SEQ ID NO: 469196 - RNA, 19 nt, Artificial Sequence
  Synthetic
acaugcaguuguacuggca

SEQ ID NO: 469197 - RNA, 20 nt, Artificial Sequence
  Synthetic
cacaugcaguuguacuggca

SEQ ID NO: 469198 - RNA, 21 nt, Artificial Sequence
  Synthetic
ccacaugcaguuguacuggca

SEQ ID NO: 469199 - RNA, 22 nt, Artificial Sequence
  Synthetic
accacaugcaguuguacuggca

SEQ ID NO: 469200 - RNA, 23 nt, Artificial Sequence
  Synthetic
uaccacaugcaguuguacuggca

SEQ ID NO: 469201 - RNA, 24 nt, Artificial Sequence
  Synthetic
cuaccacaugcaguuguacuggca

SEQ ID NO: 469202 - RNA, 18 nt, Artificial Sequence
  Synthetic
auggcaaagugccuggca

SEQ ID NO: 469203 - RNA, 19 nt, Artificial Sequence
  Synthetic
aauggcaaagugccuggca

SEQ ID NO: 469204 - RNA, 20 nt, Artificial Sequence
  Synthetic
aaauggcaaagugccuggca

SEQ ID NO: 469205 - RNA, 21 nt, Artificial Sequence
  Synthetic
caaauggcaaagugccuggca

SEQ ID NO: 469206 - RNA, 22 nt, Artificial Sequence
  Synthetic
ccaaauggcaaagugccuggca

SEQ ID NO: 469207 - RNA, 23 nt, Artificial Sequence
  Synthetic
accaaauggcaaagugccuggca

SEQ ID NO: 469208 - RNA, 24 nt, Artificial Sequence
  Synthetic
uaccaaauggcaaagugccuggca

SEQ ID NO: 469209 - RNA, 18 nt, Artificial Sequence
  Synthetic
uccuagcagugccuggca

SEQ ID NO: 469210 - RNA, 19 nt, Artificial Sequence
  Synthetic
uuccuagcagugccuggca

SEQ ID NO: 469211 - RNA, 20 nt, Artificial Sequence
  Synthetic
cuuccuagcagugccuggca

SEQ ID NO: 469212 - RNA, 21 nt, Artificial Sequence
  Synthetic
acuuccuagcagugccuggca

SEQ ID NO: 469213 - RNA, 22 nt, Artificial Sequence
  Synthetic
cacuuccuagcagugccuggca

SEQ ID NO: 469214 - RNA, 23 nt, Artificial Sequence
  Synthetic
gcacuuccuagcagugccuggca

SEQ ID NO: 469215 - RNA, 24 nt, Artificial Sequence
  Synthetic
agcacuuccuagcagugccuggca

SEQ ID NO: 469216 - RNA, 18 nt, Artificial Sequence
  Synthetic
acaaaguaaguccuggca

SEQ ID NO: 469217 - RNA, 19 nt, Artificial Sequence
  Synthetic
gacaaaguaaguccuggca

SEQ ID NO: 469218 - RNA, 20 nt, Artificial Sequence
  Synthetic
agacaaaguaaguccuggca

SEQ ID NO: 469219 - RNA, 21 nt, Artificial Sequence
  Synthetic
aagacaaaguaaguccuggca

SEQ ID NO: 469220 - RNA, 22 nt, Artificial Sequence
  Synthetic
gaagacaaaguaaguccuggca

SEQ ID NO: 469221 - RNA, 23 nt, Artificial Sequence
  Synthetic
agaagacaaaguaaguccuggca

SEQ ID NO: 469222 - RNA, 24 nt, Artificial Sequence
  Synthetic
uagaagacaaaguaaguccuggca

SEQ ID NO: 469223 - RNA, 18 nt, Artificial Sequence
  Synthetic
gcaaaaugcaagcuggca

SEQ ID NO: 469224 - RNA, 19 nt, Artificial Sequence
  Synthetic
agcaaaaugcaagcuggca

SEQ ID NO: 469225 - RNA, 20 nt, Artificial Sequence
  Synthetic
aagcaaaaugcaagcuggca

SEQ ID NO: 469226 - RNA, 21 nt, Artificial Sequence
  Synthetic
aaagcaaaaugcaagcuggca

SEQ ID NO: 469227 - RNA, 22 nt, Artificial Sequence
  Synthetic
caaagcaaaaugcaagcuggca

SEQ ID NO: 469228 - RNA, 23 nt, Artificial Sequence
  Synthetic
ccaaagcaaaaugcaagcuggca

SEQ ID NO: 469229 - RNA, 24 nt, Artificial Sequence
  Synthetic
cccaaagcaaaaugcaagcuggca

SEQ ID NO: 469230 - RNA, 18 nt, Artificial Sequence
  Synthetic
cagacugcugugcuggca

SEQ ID NO: 469231 - RNA, 19 nt, Artificial Sequence
  Synthetic
ucagacugcugugcuggca

SEQ ID NO: 469232 - RNA, 20 nt, Artificial Sequence
  Synthetic
uucagacugcugugcuggca

SEQ ID NO: 469233 - RNA, 21 nt, Artificial Sequence
  Synthetic
cuucagacugcugugcuggca

SEQ ID NO: 469234 - RNA, 22 nt, Artificial Sequence
  Synthetic
acuucagacugcugugcuggca

SEQ ID NO: 469235 - RNA, 23 nt, Artificial Sequence
  Synthetic
cacuucagacugcugugcuggca

SEQ ID NO: 469236 - RNA, 24 nt, Artificial Sequence
  Synthetic
ccacuucagacugcugugcuggca

SEQ ID NO: 469237 - RNA, 18 nt, Artificial Sequence
  Synthetic
cuggacauugugcuggca

SEQ ID NO: 469238 - RNA, 19 nt, Artificial Sequence
  Synthetic
ucuggacauugugcuggca

SEQ ID NO: 469239 - RNA, 20 nt, Artificial Sequence
  Synthetic
uucuggacauugugcuggca

SEQ ID NO: 469240 - RNA, 21 nt, Artificial Sequence
  Synthetic
guucuggacauugugcuggca

SEQ ID NO: 469241 - RNA, 22 nt, Artificial Sequence
  Synthetic
uguucuggacauugugcuggca

SEQ ID NO: 469242 - RNA, 23 nt, Artificial Sequence
  Synthetic
cuguucuggacauugugcuggca

SEQ ID NO: 469243 - RNA, 24 nt, Artificial Sequence
  Synthetic
acuguucuggacauugugcuggca

SEQ ID NO: 469244 - RNA, 18 nt, Artificial Sequence
  Synthetic
uauuuucauuugcuggca

SEQ ID NO: 469245 - RNA, 19 nt, Artificial Sequence
  Synthetic
uuauuuucauuugcuggca

SEQ ID NO: 469246 - RNA, 20 nt, Artificial Sequence
  Synthetic
auuauuuucauuugcuggca

SEQ ID NO: 469247 - RNA, 21 nt, Artificial Sequence
  Synthetic
uauuauuuucauuugcuggca

SEQ ID NO: 469248 - RNA, 22 nt, Artificial Sequence
  Synthetic
guauuauuuucauuugcuggca

SEQ ID NO: 469249 - RNA, 23 nt, Artificial Sequence
  Synthetic
uguauuauuuucauuugcuggca

SEQ ID NO: 469250 - RNA, 24 nt, Artificial Sequence
  Synthetic
auguauuauuuucauuugcuggca

SEQ ID NO: 469251 - RNA, 18 nt, Artificial Sequence
  Synthetic
uauucaagaucucuggca

SEQ ID NO: 469252 - RNA, 19 nt, Artificial Sequence
  Synthetic
cuauucaagaucucuggca

SEQ ID NO: 469253 - RNA, 20 nt, Artificial Sequence
  Synthetic
gcuauucaagaucucuggca

SEQ ID NO: 469254 - RNA, 21 nt, Artificial Sequence
  Synthetic
ggcuauucaagaucucuggca

SEQ ID NO: 469255 - RNA, 22 nt, Artificial Sequence
  Synthetic
aggcuauucaagaucucuggca

SEQ ID NO: 469256 - RNA, 23 nt, Artificial Sequence
  Synthetic
gaggcuauucaagaucucuggca

SEQ ID NO: 469257 - RNA, 24 nt, Artificial Sequence
  Synthetic
agaggcuauucaagaucucuggca

SEQ ID NO: 469258 - RNA, 18 nt, Artificial Sequence
  Synthetic
auuuuucaaccaguggca

SEQ ID NO: 469259 - RNA, 19 nt, Artificial Sequence
  Synthetic
uauuuuucaaccaguggca

SEQ ID NO: 469260 - RNA, 20 nt, Artificial Sequence
  Synthetic
auauuuuucaaccaguggca

SEQ ID NO: 469261 - RNA, 21 nt, Artificial Sequence
  Synthetic
cauauuuuucaaccaguggca

SEQ ID NO: 469262 - RNA, 22 nt, Artificial Sequence
  Synthetic
gcauauuuuucaaccaguggca

SEQ ID NO: 469263 - RNA, 23 nt, Artificial Sequence
  Synthetic
agcauauuuuucaaccaguggca

SEQ ID NO: 469264 - RNA, 24 nt, Artificial Sequence
  Synthetic
gagcauauuuuucaaccaguggca

SEQ ID NO: 469265 - RNA, 18 nt, Artificial Sequence
  Synthetic
uuaaccaagggaguggca

SEQ ID NO: 469266 - RNA, 19 nt, Artificial Sequence
  Synthetic
uuuaaccaagggaguggca

SEQ ID NO: 469267 - RNA, 20 nt, Artificial Sequence
  Synthetic
uuuuaaccaagggaguggca

SEQ ID NO: 469268 - RNA, 21 nt, Artificial Sequence
  Synthetic
guuuuaaccaagggaguggca

SEQ ID NO: 469269 - RNA, 22 nt, Artificial Sequence
  Synthetic
gguuuuaaccaagggaguggca

SEQ ID NO: 469270 - RNA, 23 nt, Artificial Sequence
  Synthetic
cgguuuuaaccaagggaguggca

SEQ ID NO: 469271 - RNA, 24 nt, Artificial Sequence
  Synthetic
acgguuuuaaccaagggaguggca

SEQ ID NO: 469272 - RNA, 18 nt, Artificial Sequence
  Synthetic
ucugaaaaauagguggca

SEQ ID NO: 469273 - RNA, 19 nt, Artificial Sequence
  Synthetic
gucugaaaaauagguggca

SEQ ID NO: 469274 - RNA, 20 nt, Artificial Sequence
  Synthetic
agucugaaaaauagguggca

SEQ ID NO: 469275 - RNA, 21 nt, Artificial Sequence
  Synthetic
gagucugaaaaauagguggca

SEQ ID NO: 469276 - RNA, 22 nt, Artificial Sequence
  Synthetic
agagucugaaaaauagguggca

SEQ ID NO: 469277 - RNA, 23 nt, Artificial Sequence
  Synthetic
cagagucugaaaaauagguggca

SEQ ID NO: 469278 - RNA, 24 nt, Artificial Sequence
  Synthetic
ccagagucugaaaaauagguggca

SEQ ID NO: 469279 - RNA, 18 nt, Artificial Sequence
  Synthetic
uggagaagggugguggca

SEQ ID NO: 469280 - RNA, 19 nt, Artificial Sequence
  Synthetic
cuggagaagggugguggca

SEQ ID NO: 469281 - RNA, 20 nt, Artificial Sequence
  Synthetic
acuggagaagggugguggca

SEQ ID NO: 469282 - RNA, 21 nt, Artificial Sequence
  Synthetic
gacuggagaagggugguggca

SEQ ID NO: 469283 - RNA, 22 nt, Artificial Sequence
  Synthetic
ugacuggagaagggugguggca

SEQ ID NO: 469284 - RNA, 23 nt, Artificial Sequence
  Synthetic
augacuggagaagggugguggca

SEQ ID NO: 469285 - RNA, 24 nt, Artificial Sequence
  Synthetic
uaugacuggagaagggugguggca

SEQ ID NO: 469286 - RNA, 18 nt, Artificial Sequence
  Synthetic
ugggagagggugguggca

SEQ ID NO: 469287 - RNA, 19 nt, Artificial Sequence
  Synthetic
uugggagagggugguggca

SEQ ID NO: 469288 - RNA, 20 nt, Artificial Sequence
  Synthetic
uuugggagagggugguggca

SEQ ID NO: 469289 - RNA, 21 nt, Artificial Sequence
  Synthetic
cuuugggagagggugguggca

SEQ ID NO: 469290 - RNA, 22 nt, Artificial Sequence
  Synthetic
ucuuugggagagggugguggca

SEQ ID NO: 469291 - RNA, 23 nt, Artificial Sequence
  Synthetic
aucuuugggagagggugguggca

SEQ ID NO: 469292 - RNA, 24 nt, Artificial Sequence
  Synthetic
uaucuuugggagagggugguggca

SEQ ID NO: 469293 - RNA, 18 nt, Artificial Sequence
  Synthetic
aacaucaucuugguggca

SEQ ID NO: 469294 - RNA, 19 nt, Artificial Sequence
  Synthetic
uaacaucaucuugguggca

SEQ ID NO: 469295 - RNA, 20 nt, Artificial Sequence
  Synthetic
guaacaucaucuugguggca

SEQ ID NO: 469296 - RNA, 21 nt, Artificial Sequence
  Synthetic
gguaacaucaucuugguggca

SEQ ID NO: 469297 - RNA, 22 nt, Artificial Sequence
  Synthetic
ugguaacaucaucuugguggca

SEQ ID NO: 469298 - RNA, 23 nt, Artificial Sequence
  Synthetic
uugguaacaucaucuugguggca

SEQ ID NO: 469299 - RNA, 24 nt, Artificial Sequence
  Synthetic
uuugguaacaucaucuugguggca

SEQ ID NO: 469300 - RNA, 18 nt, Artificial Sequence
  Synthetic
gggacuaugcauguggca

SEQ ID NO: 469301 - RNA, 19 nt, Artificial Sequence
  Synthetic
agggacuaugcauguggca

SEQ ID NO: 469302 - RNA, 20 nt, Artificial Sequence
  Synthetic
uagggacuaugcauguggca

SEQ ID NO: 469303 - RNA, 21 nt, Artificial Sequence
  Synthetic
cuagggacuaugcauguggca

SEQ ID NO: 469304 - RNA, 22 nt, Artificial Sequence
  Synthetic
ucuagggacuaugcauguggca

SEQ ID NO: 469305 - RNA, 23 nt, Artificial Sequence
  Synthetic
uucuagggacuaugcauguggca

SEQ ID NO: 469306 - RNA, 24 nt, Artificial Sequence
  Synthetic
auucuagggacuaugcauguggca

SEQ ID NO: 469307 - RNA, 18 nt, Artificial Sequence
  Synthetic
cacagaagagauguggca

SEQ ID NO: 469308 - RNA, 19 nt, Artificial Sequence
  Synthetic
ucacagaagagauguggca

SEQ ID NO: 469309 - RNA, 20 nt, Artificial Sequence
  Synthetic
aucacagaagagauguggca

SEQ ID NO: 469310 - RNA, 21 nt, Artificial Sequence
  Synthetic
gaucacagaagagauguggca

SEQ ID NO: 469311 - RNA, 22 nt, Artificial Sequence
  Synthetic
agaucacagaagagauguggca

SEQ ID NO: 469312 - RNA, 23 nt, Artificial Sequence
  Synthetic
gagaucacagaagagauguggca

SEQ ID NO: 469313 - RNA, 24 nt, Artificial Sequence
  Synthetic
ugagaucacagaagagauguggca

SEQ ID NO: 469314 - RNA, 18 nt, Artificial Sequence
  Synthetic
ugagcgaaagcuguggca

SEQ ID NO: 469315 - RNA, 19 nt, Artificial Sequence
  Synthetic
cugagcgaaagcuguggca

SEQ ID NO: 469316 - RNA, 20 nt, Artificial Sequence
  Synthetic
acugagcgaaagcuguggca

SEQ ID NO: 469317 - RNA, 21 nt, Artificial Sequence
  Synthetic
aacugagcgaaagcuguggca

SEQ ID NO: 469318 - RNA, 22 nt, Artificial Sequence
  Synthetic
caacugagcgaaagcuguggca

SEQ ID NO: 469319 - RNA, 23 nt, Artificial Sequence
  Synthetic
ccaacugagcgaaagcuguggca

SEQ ID NO: 469320 - RNA, 24 nt, Artificial Sequence
  Synthetic
accaacugagcgaaagcuguggca

SEQ ID NO: 469321 - RNA, 18 nt, Artificial Sequence
  Synthetic
caaaauauccuuguggca

SEQ ID NO: 469322 - RNA, 19 nt, Artificial Sequence
  Synthetic
acaaaauauccuuguggca

SEQ ID NO: 469323 - RNA, 20 nt, Artificial Sequence
  Synthetic
aacaaaauauccuuguggca

SEQ ID NO: 469324 - RNA, 21 nt, Artificial Sequence
  Synthetic
aaacaaaauauccuuguggca

SEQ ID NO: 469325 - RNA, 22 nt, Artificial Sequence
  Synthetic
gaaacaaaauauccuuguggca

SEQ ID NO: 469326 - RNA, 23 nt, Artificial Sequence
  Synthetic
ggaaacaaaauauccuuguggca

SEQ ID NO: 469327 - RNA, 24 nt, Artificial Sequence
  Synthetic
aggaaacaaaauauccuuguggca

SEQ ID NO: 469328 - RNA, 18 nt, Artificial Sequence
  Synthetic
aaaaacacucaauuggca

SEQ ID NO: 469329 - RNA, 19 nt, Artificial Sequence
  Synthetic
gaaaaacacucaauuggca

SEQ ID NO: 469330 - RNA, 20 nt, Artificial Sequence
  Synthetic
agaaaaacacucaauuggca

SEQ ID NO: 469331 - RNA, 21 nt, Artificial Sequence
  Synthetic
aagaaaaacacucaauuggca

SEQ ID NO: 469332 - RNA, 22 nt, Artificial Sequence
  Synthetic
uaagaaaaacacucaauuggca

SEQ ID NO: 469333 - RNA, 23 nt, Artificial Sequence
  Synthetic
auaagaaaaacacucaauuggca

SEQ ID NO: 469334 - RNA, 24 nt, Artificial Sequence
  Synthetic
aauaagaaaaacacucaauuggca

SEQ ID NO: 469335 - RNA, 18 nt, Artificial Sequence
  Synthetic
aaucacugaauauuggca

SEQ ID NO: 469336 - RNA, 19 nt, Artificial Sequence
  Synthetic
aaaucacugaauauuggca

SEQ ID NO: 469337 - RNA, 20 nt, Artificial Sequence
  Synthetic
caaaucacugaauauuggca

SEQ ID NO: 469338 - RNA, 21 nt, Artificial Sequence
  Synthetic
ucaaaucacugaauauuggca

SEQ ID NO: 469339 - RNA, 22 nt, Artificial Sequence
  Synthetic
uucaaaucacugaauauuggca

SEQ ID NO: 469340 - RNA, 23 nt, Artificial Sequence
  Synthetic
auucaaaucacugaauauuggca

SEQ ID NO: 469341 - RNA, 24 nt, Artificial Sequence
  Synthetic
uauucaaaucacugaauauuggca

SEQ ID NO: 469342 - RNA, 18 nt, Artificial Sequence
  Synthetic
auucugguguuauuggca

SEQ ID NO: 469343 - RNA, 19 nt, Artificial Sequence
  Synthetic
uauucugguguuauuggca

SEQ ID NO: 469344 - RNA, 20 nt, Artificial Sequence
  Synthetic
uuauucugguguuauuggca

SEQ ID NO: 469345 - RNA, 21 nt, Artificial Sequence
  Synthetic
cuuauucugguguuauuggca

SEQ ID NO: 469346 - RNA, 22 nt, Artificial Sequence
  Synthetic
acuuauucugguguuauuggca

SEQ ID NO: 469347 - RNA, 23 nt, Artificial Sequence
  Synthetic
aacuuauucugguguuauuggca

SEQ ID NO: 469348 - RNA, 24 nt, Artificial Sequence
  Synthetic
caacuuauucugguguuauuggca

SEQ ID NO: 469349 - RNA, 18 nt, Artificial Sequence
  Synthetic
agugaaauaaacuuggca

SEQ ID NO: 469350 - RNA, 19 nt, Artificial Sequence
  Synthetic
aagugaaauaaacuuggca

SEQ ID NO: 469351 - RNA, 20 nt, Artificial Sequence
  Synthetic
uaagugaaauaaacuuggca

SEQ ID NO: 469352 - RNA, 21 nt, Artificial Sequence
  Synthetic
uuaagugaaauaaacuuggca

SEQ ID NO: 469353 - RNA, 22 nt, Artificial Sequence
  Synthetic
guuaagugaaauaaacuuggca

SEQ ID NO: 469354 - RNA, 23 nt, Artificial Sequence
  Synthetic
gguuaagugaaauaaacuuggca

SEQ ID NO: 469355 - RNA, 24 nt, Artificial Sequence
  Synthetic
agguuaagugaaauaaacuuggca

SEQ ID NO: 469356 - RNA, 18 nt, Artificial Sequence
  Synthetic
aauugguuaggcuuggca

SEQ ID NO: 469357 - RNA, 19 nt, Artificial Sequence
  Synthetic
aaauugguuaggcuuggca

SEQ ID NO: 469358 - RNA, 20 nt, Artificial Sequence
  Synthetic
caaauugguuaggcuuggca

SEQ ID NO: 469359 - RNA, 21 nt, Artificial Sequence
  Synthetic
ccaaauugguuaggcuuggca

SEQ ID NO: 469360 - RNA, 22 nt, Artificial Sequence
  Synthetic
accaaauugguuaggcuuggca

SEQ ID NO: 469361 - RNA, 23 nt, Artificial Sequence
  Synthetic
uaccaaauugguuaggcuuggca

SEQ ID NO: 469362 - RNA, 24 nt, Artificial Sequence
  Synthetic
cuaccaaauugguuaggcuuggca

SEQ ID NO: 469363 - RNA, 18 nt, Artificial Sequence
  Synthetic
cucuuccuuggcuuggca

SEQ ID NO: 469364 - RNA, 19 nt, Artificial Sequence
  Synthetic
ccucuuccuuggcuuggca

SEQ ID NO: 469365 - RNA, 20 nt, Artificial Sequence
  Synthetic
cccucuuccuuggcuuggca

SEQ ID NO: 469366 - RNA, 21 nt, Artificial Sequence
  Synthetic
gcccucuuccuuggcuuggca

SEQ ID NO: 469367 - RNA, 22 nt, Artificial Sequence
  Synthetic
agcccucuuccuuggcuuggca

SEQ ID NO: 469368 - RNA, 23 nt, Artificial Sequence
  Synthetic
aagcccucuuccuuggcuuggca

SEQ ID NO: 469369 - RNA, 24 nt, Artificial Sequence
  Synthetic
gaagcccucuuccuuggcuuggca

SEQ ID NO: 469370 - RNA, 18 nt, Artificial Sequence
  Synthetic
uauuaggcacaguuggca

SEQ ID NO: 469371 - RNA, 19 nt, Artificial Sequence
  Synthetic
uuauuaggcacaguuggca

SEQ ID NO: 469372 - RNA, 20 nt, Artificial Sequence
  Synthetic
cuuauuaggcacaguuggca

SEQ ID NO: 469373 - RNA, 21 nt, Artificial Sequence
  Synthetic
acuuauuaggcacaguuggca

SEQ ID NO: 469374 - RNA, 22 nt, Artificial Sequence
  Synthetic
gacuuauuaggcacaguuggca

SEQ ID NO: 469375 - RNA, 23 nt, Artificial Sequence
  Synthetic
ggacuuauuaggcacaguuggca

SEQ ID NO: 469376 - RNA, 24 nt, Artificial Sequence
  Synthetic
aggacuuauuaggcacaguuggca

SEQ ID NO: 469377 - RNA, 18 nt, Artificial Sequence
  Synthetic
auuagcaaucaguuggca

SEQ ID NO: 469378 - RNA, 19 nt, Artificial Sequence
  Synthetic
cauuagcaaucaguuggca

SEQ ID NO: 469379 - RNA, 20 nt, Artificial Sequence
  Synthetic
ucauuagcaaucaguuggca

SEQ ID NO: 469380 - RNA, 21 nt, Artificial Sequence
  Synthetic
gucauuagcaaucaguuggca

SEQ ID NO: 469381 - RNA, 22 nt, Artificial Sequence
  Synthetic
agucauuagcaaucaguuggca

SEQ ID NO: 469382 - RNA, 23 nt, Artificial Sequence
  Synthetic
uagucauuagcaaucaguuggca

SEQ ID NO: 469383 - RNA, 24 nt, Artificial Sequence
  Synthetic
uuagucauuagcaaucaguuggca

SEQ ID NO: 469384 - RNA, 18 nt, Artificial Sequence
  Synthetic
gaugauguaaauuuggca

SEQ ID NO: 469385 - RNA, 19 nt, Artificial Sequence
  Synthetic
ggaugauguaaauuuggca

SEQ ID NO: 469386 - RNA, 20 nt, Artificial Sequence
  Synthetic
gggaugauguaaauuuggca

SEQ ID NO: 469387 - RNA, 21 nt, Artificial Sequence
  Synthetic
ggggaugauguaaauuuggca

SEQ ID NO: 469388 - RNA, 22 nt, Artificial Sequence
  Synthetic
gggggaugauguaaauuuggca

SEQ ID NO: 469389 - RNA, 23 nt, Artificial Sequence
  Synthetic
ugggggaugauguaaauuuggca

SEQ ID NO: 469390 - RNA, 24 nt, Artificial Sequence
  Synthetic
augggggaugauguaaauuuggca

SEQ ID NO: 469391 - RNA, 18 nt, Artificial Sequence
  Synthetic
cuagaacugcguuuggca

SEQ ID NO: 469392 - RNA, 19 nt, Artificial Sequence
  Synthetic
gcuagaacugcguuuggca

SEQ ID NO: 469393 - RNA, 20 nt, Artificial Sequence
  Synthetic
agcuagaacugcguuuggca

SEQ ID NO: 469394 - RNA, 21 nt, Artificial Sequence
  Synthetic
cagcuagaacugcguuuggca

SEQ ID NO: 469395 - RNA, 22 nt, Artificial Sequence
  Synthetic
gcagcuagaacugcguuuggca

SEQ ID NO: 469396 - RNA, 23 nt, Artificial Sequence
  Synthetic
agcagcuagaacugcguuuggca

SEQ ID NO: 469397 - RNA, 24 nt, Artificial Sequence
  Synthetic
cagcagcuagaacugcguuuggca

SEQ ID NO: 469398 - RNA, 18 nt, Artificial Sequence
  Synthetic
aaaauuauaauuuuggca

SEQ ID NO: 469399 - RNA, 19 nt, Artificial Sequence
  Synthetic
uaaaauuauaauuuuggca

SEQ ID NO: 469400 - RNA, 20 nt, Artificial Sequence
  Synthetic
uuaaaauuauaauuuuggca

SEQ ID NO: 469401 - RNA, 21 nt, Artificial Sequence
  Synthetic
auuaaaauuauaauuuuggca

SEQ ID NO: 469402 - RNA, 22 nt, Artificial Sequence
  Synthetic
cauuaaaauuauaauuuuggca

SEQ ID NO: 469403 - RNA, 23 nt, Artificial Sequence
  Synthetic
gcauuaaaauuauaauuuuggca

SEQ ID NO: 469404 - RNA, 24 nt, Artificial Sequence
  Synthetic
ugcauuaaaauuauaauuuuggca

SEQ ID NO: 469405 - RNA, 18 nt, Artificial Sequence
  Synthetic
caaauaaagaaaaaugca

SEQ ID NO: 469406 - RNA, 19 nt, Artificial Sequence
  Synthetic
acaaauaaagaaaaaugca

SEQ ID NO: 469407 - RNA, 20 nt, Artificial Sequence
  Synthetic
aacaaauaaagaaaaaugca

SEQ ID NO: 469408 - RNA, 21 nt, Artificial Sequence
  Synthetic
aaacaaauaaagaaaaaugca

SEQ ID NO: 469409 - RNA, 22 nt, Artificial Sequence
  Synthetic
aaaacaaauaaagaaaaaugca

SEQ ID NO: 469410 - RNA, 23 nt, Artificial Sequence
  Synthetic
aaaaacaaauaaagaaaaaugca

SEQ ID NO: 469411 - RNA, 24 nt, Artificial Sequence
  Synthetic
caaaaacaaauaaagaaaaaugca

SEQ ID NO: 469412 - RNA, 18 nt, Artificial Sequence
  Synthetic
ugauuaggccaaaaugca

SEQ ID NO: 469413 - RNA, 19 nt, Artificial Sequence
  Synthetic
uugauuaggccaaaaugca

SEQ ID NO: 469414 - RNA, 20 nt, Artificial Sequence
  Synthetic
uuugauuaggccaaaaugca

SEQ ID NO: 469415 - RNA, 21 nt, Artificial Sequence
  Synthetic
auuugauuaggccaaaaugca

SEQ ID NO: 469416 - RNA, 22 nt, Artificial Sequence
  Synthetic
aauuugauuaggccaaaaugca

SEQ ID NO: 469417 - RNA, 23 nt, Artificial Sequence
  Synthetic
aaauuugauuaggccaaaaugca

SEQ ID NO: 469418 - RNA, 24 nt, Artificial Sequence
  Synthetic
caaauuugauuaggccaaaaugca

SEQ ID NO: 469419 - RNA, 18 nt, Artificial Sequence
  Synthetic
acaaguuaggaaaaugca

SEQ ID NO: 469420 - RNA, 19 nt, Artificial Sequence
  Synthetic
aacaaguuaggaaaaugca

SEQ ID NO: 469421 - RNA, 20 nt, Artificial Sequence
  Synthetic
aaacaaguuaggaaaaugca

SEQ ID NO: 469422 - RNA, 21 nt, Artificial Sequence
  Synthetic
gaaacaaguuaggaaaaugca

SEQ ID NO: 469423 - RNA, 22 nt, Artificial Sequence
  Synthetic
agaaacaaguuaggaaaaugca

SEQ ID NO: 469424 - RNA, 23 nt, Artificial Sequence
  Synthetic
gagaaacaaguuaggaaaaugca

SEQ ID NO: 469425 - RNA, 24 nt, Artificial Sequence
  Synthetic
ugagaaacaaguuaggaaaaugca

SEQ ID NO: 469426 - RNA, 18 nt, Artificial Sequence
  Synthetic
aacuauaaugaaaaugca

SEQ ID NO: 469427 - RNA, 19 nt, Artificial Sequence
  Synthetic
aaacuauaaugaaaaugca

SEQ ID NO: 469428 - RNA, 20 nt, Artificial Sequence
  Synthetic
gaaacuauaaugaaaaugca

SEQ ID NO: 469429 - RNA, 21 nt, Artificial Sequence
  Synthetic
agaaacuauaaugaaaaugca

SEQ ID NO: 469430 - RNA, 22 nt, Artificial Sequence
  Synthetic
cagaaacuauaaugaaaaugca

SEQ ID NO: 469431 - RNA, 23 nt, Artificial Sequence
  Synthetic
gcagaaacuauaaugaaaaugca

SEQ ID NO: 469432 - RNA, 24 nt, Artificial Sequence
  Synthetic
ggcagaaacuauaaugaaaaugca

SEQ ID NO: 469433 - RNA, 18 nt, Artificial Sequence
  Synthetic
cauacaccaccaaaugca

SEQ ID NO: 469434 - RNA, 19 nt, Artificial Sequence
  Synthetic
acauacaccaccaaaugca

SEQ ID NO: 469435 - RNA, 20 nt, Artificial Sequence
  Synthetic
uacauacaccaccaaaugca

SEQ ID NO: 469436 - RNA, 21 nt, Artificial Sequence
  Synthetic
uuacauacaccaccaaaugca

SEQ ID NO: 469437 - RNA, 22 nt, Artificial Sequence
  Synthetic
uuuacauacaccaccaaaugca

SEQ ID NO: 469438 - RNA, 23 nt, Artificial Sequence
  Synthetic
uuuuacauacaccaccaaaugca

SEQ ID NO: 469439 - RNA, 24 nt, Artificial Sequence
  Synthetic
guuuuacauacaccaccaaaugca

SEQ ID NO: 469440 - RNA, 18 nt, Artificial Sequence
  Synthetic
aguaaucaaugaaaugca

SEQ ID NO: 469441 - RNA, 19 nt, Artificial Sequence
  Synthetic
uaguaaucaaugaaaugca

SEQ ID NO: 469442 - RNA, 20 nt, Artificial Sequence
  Synthetic
uuaguaaucaaugaaaugca

SEQ ID NO: 469443 - RNA, 21 nt, Artificial Sequence
  Synthetic
guuaguaaucaaugaaaugca

SEQ ID NO: 469444 - RNA, 22 nt, Artificial Sequence
  Synthetic
aguuaguaaucaaugaaaugca

SEQ ID NO: 469445 - RNA, 23 nt, Artificial Sequence
  Synthetic
caguuaguaaucaaugaaaugca

SEQ ID NO: 469446 - RNA, 24 nt, Artificial Sequence
  Synthetic
acaguuaguaaucaaugaaaugca

SEQ ID NO: 469447 - RNA, 18 nt, Artificial Sequence
  Synthetic
cuuucuccuuuaaaugca

SEQ ID NO: 469448 - RNA, 19 nt, Artificial Sequence
  Synthetic
ucuuucuccuuuaaaugca

SEQ ID NO: 469449 - RNA, 20 nt, Artificial Sequence
  Synthetic
uucuuucuccuuuaaaugca

SEQ ID NO: 469450 - RNA, 21 nt, Artificial Sequence
  Synthetic
cuucuuucuccuuuaaaugca

SEQ ID NO: 469451 - RNA, 22 nt, Artificial Sequence
  Synthetic
acuucuuucuccuuuaaaugca

SEQ ID NO: 469452 - RNA, 23 nt, Artificial Sequence
  Synthetic
gacuucuuucuccuuuaaaugca

SEQ ID NO: 469453 - RNA, 24 nt, Artificial Sequence
  Synthetic
agacuucuuucuccuuuaaaugca

SEQ ID NO: 469454 - RNA, 18 nt, Artificial Sequence
  Synthetic
aucaaguuaagcaaugca

SEQ ID NO: 469455 - RNA, 19 nt, Artificial Sequence
  Synthetic
aaucaaguuaagcaaugca

SEQ ID NO: 469456 - RNA, 20 nt, Artificial Sequence
  Synthetic
caaucaaguuaagcaaugca

SEQ ID NO: 469457 - RNA, 21 nt, Artificial Sequence
  Synthetic
ucaaucaaguuaagcaaugca

SEQ ID NO: 469458 - RNA, 22 nt, Artificial Sequence
  Synthetic
gucaaucaaguuaagcaaugca

SEQ ID NO: 469459 - RNA, 23 nt, Artificial Sequence
  Synthetic
ugucaaucaaguuaagcaaugca

SEQ ID NO: 469460 - RNA, 24 nt, Artificial Sequence
  Synthetic
uugucaaucaaguuaagcaaugca

SEQ ID NO: 469461 - RNA, 18 nt, Artificial Sequence
  Synthetic
gcuagaaaaugcaaugca

SEQ ID NO: 469462 - RNA, 19 nt, Artificial Sequence
  Synthetic
ggcuagaaaaugcaaugca

SEQ ID NO: 469463 - RNA, 20 nt, Artificial Sequence
  Synthetic
uggcuagaaaaugcaaugca

SEQ ID NO: 469464 - RNA, 21 nt, Artificial Sequence
  Synthetic
uuggcuagaaaaugcaaugca

SEQ ID NO: 469465 - RNA, 22 nt, Artificial Sequence
  Synthetic
uuuggcuagaaaaugcaaugca

SEQ ID NO: 469466 - RNA, 23 nt, Artificial Sequence
  Synthetic
auuuggcuagaaaaugcaaugca

SEQ ID NO: 469467 - RNA, 24 nt, Artificial Sequence
  Synthetic
gauuuggcuagaaaaugcaaugca

SEQ ID NO: 469468 - RNA, 18 nt, Artificial Sequence
  Synthetic
ucuuaguucaucaaugca

SEQ ID NO: 469469 - RNA, 19 nt, Artificial Sequence
  Synthetic
aucuuaguucaucaaugca

SEQ ID NO: 469470 - RNA, 20 nt, Artificial Sequence
  Synthetic
aaucuuaguucaucaaugca

SEQ ID NO: 469471 - RNA, 21 nt, Artificial Sequence
  Synthetic
aaaucuuaguucaucaaugca

SEQ ID NO: 469472 - RNA, 22 nt, Artificial Sequence
  Synthetic
aaaaucuuaguucaucaaugca

SEQ ID NO: 469473 - RNA, 23 nt, Artificial Sequence
  Synthetic
aaaaaucuuaguucaucaaugca

SEQ ID NO: 469474 - RNA, 24 nt, Artificial Sequence
  Synthetic
uaaaaaucuuaguucaucaaugca

SEQ ID NO: 469475 - RNA, 18 nt, Artificial Sequence
  Synthetic
aggcaaacuaucaaugca

SEQ ID NO: 469476 - RNA, 19 nt, Artificial Sequence
  Synthetic
caggcaaacuaucaaugca

SEQ ID NO: 469477 - RNA, 20 nt, Artificial Sequence
  Synthetic
ucaggcaaacuaucaaugca

SEQ ID NO: 469478 - RNA, 21 nt, Artificial Sequence
  Synthetic
uucaggcaaacuaucaaugca

SEQ ID NO: 469479 - RNA, 22 nt, Artificial Sequence
  Synthetic
uuucaggcaaacuaucaaugca

SEQ ID NO: 469480 - RNA, 23 nt, Artificial Sequence
  Synthetic
uuuucaggcaaacuaucaaugca

SEQ ID NO: 469481 - RNA, 24 nt, Artificial Sequence
  Synthetic
guuuucaggcaaacuaucaaugca

SEQ ID NO: 469482 - RNA, 18 nt, Artificial Sequence
  Synthetic
gugaaauggaagaaugca

SEQ ID NO: 469483 - RNA, 19 nt, Artificial Sequence
  Synthetic
agugaaauggaagaaugca

SEQ ID NO: 469484 - RNA, 20 nt, Artificial Sequence
  Synthetic
uagugaaauggaagaaugca

SEQ ID NO: 469485 - RNA, 21 nt, Artificial Sequence
  Synthetic
cuagugaaauggaagaaugca

SEQ ID NO: 469486 - RNA, 22 nt, Artificial Sequence
  Synthetic
acuagugaaauggaagaaugca

SEQ ID NO: 469487 - RNA, 23 nt, Artificial Sequence
  Synthetic
aacuagugaaauggaagaaugca

SEQ ID NO: 469488 - RNA, 24 nt, Artificial Sequence
  Synthetic
aaacuagugaaauggaagaaugca

SEQ ID NO: 469489 - RNA, 18 nt, Artificial Sequence
  Synthetic
uuagacuuuaagaaugca

SEQ ID NO: 469490 - RNA, 19 nt, Artificial Sequence
  Synthetic
auuagacuuuaagaaugca

SEQ ID NO: 469491 - RNA, 20 nt, Artificial Sequence
  Synthetic
gauuagacuuuaagaaugca

SEQ ID NO: 469492 - RNA, 21 nt, Artificial Sequence
  Synthetic
agauuagacuuuaagaaugca

SEQ ID NO: 469493 - RNA, 22 nt, Artificial Sequence
  Synthetic
aagauuagacuuuaagaaugca

SEQ ID NO: 469494 - RNA, 23 nt, Artificial Sequence
  Synthetic
uaagauuagacuuuaagaaugca

SEQ ID NO: 469495 - RNA, 24 nt, Artificial Sequence
  Synthetic
uuaagauuagacuuuaagaaugca

SEQ ID NO: 469496 - RNA, 18 nt, Artificial Sequence
  Synthetic
gagauauagaggaaugca

SEQ ID NO: 469497 - RNA, 19 nt, Artificial Sequence
  Synthetic
agagauauagaggaaugca

SEQ ID NO: 469498 - RNA, 20 nt, Artificial Sequence
  Synthetic
gagagauauagaggaaugca

SEQ ID NO: 469499 - RNA, 21 nt, Artificial Sequence
  Synthetic
agagagauauagaggaaugca

SEQ ID NO: 469500 - RNA, 22 nt, Artificial Sequence
  Synthetic
cagagagauauagaggaaugca

SEQ ID NO: 469501 - RNA, 23 nt, Artificial Sequence
  Synthetic
gcagagagauauagaggaaugca

SEQ ID NO: 469502 - RNA, 24 nt, Artificial Sequence
  Synthetic
agcagagagauauagaggaaugca

SEQ ID NO: 469503 - RNA, 18 nt, Artificial Sequence
  Synthetic
uuuaauaguaggaaugca

SEQ ID NO: 469504 - RNA, 19 nt, Artificial Sequence
  Synthetic
auuuaauaguaggaaugca

SEQ ID NO: 469505 - RNA, 20 nt, Artificial Sequence
  Synthetic
uauuuaauaguaggaaugca

SEQ ID NO: 469506 - RNA, 21 nt, Artificial Sequence
  Synthetic
auauuuaauaguaggaaugca

SEQ ID NO: 469507 - RNA, 22 nt, Artificial Sequence
  Synthetic
cauauuuaauaguaggaaugca

SEQ ID NO: 469508 - RNA, 23 nt, Artificial Sequence
  Synthetic
acauauuuaauaguaggaaugca

SEQ ID NO: 469509 - RNA, 24 nt, Artificial Sequence
  Synthetic
uacauauuuaauaguaggaaugca

SEQ ID NO: 469510 - RNA, 18 nt, Artificial Sequence
  Synthetic
aacauucccgugaaugca

SEQ ID NO: 469511 - RNA, 19 nt, Artificial Sequence
  Synthetic
aaacauucccgugaaugca

SEQ ID NO: 469512 - RNA, 20 nt, Artificial Sequence
  Synthetic
gaaacauucccgugaaugca

SEQ ID NO: 469513 - RNA, 21 nt, Artificial Sequence
  Synthetic
agaaacauucccgugaaugca

SEQ ID NO: 469514 - RNA, 22 nt, Artificial Sequence
  Synthetic
uagaaacauucccgugaaugca

SEQ ID NO: 469515 - RNA, 23 nt, Artificial Sequence
  Synthetic
auagaaacauucccgugaaugca

SEQ ID NO: 469516 - RNA, 24 nt, Artificial Sequence
  Synthetic
cauagaaacauucccgugaaugca

SEQ ID NO: 469517 - RNA, 18 nt, Artificial Sequence
  Synthetic
agcuaaguugugaaugca

SEQ ID NO: 469518 - RNA, 19 nt, Artificial Sequence
  Synthetic
uagcuaaguugugaaugca

SEQ ID NO: 469519 - RNA, 20 nt, Artificial Sequence
  Synthetic
uuagcuaaguugugaaugca

SEQ ID NO: 469520 - RNA, 21 nt, Artificial Sequence
  Synthetic
guuagcuaaguugugaaugca

SEQ ID NO: 469521 - RNA, 22 nt, Artificial Sequence
  Synthetic
cguuagcuaaguugugaaugca

SEQ ID NO: 469522 - RNA, 23 nt, Artificial Sequence
  Synthetic
ccguuagcuaaguugugaaugca

SEQ ID NO: 469523 - RNA, 24 nt, Artificial Sequence
  Synthetic
cccguuagcuaaguugugaaugca

SEQ ID NO: 469524 - RNA, 18 nt, Artificial Sequence
  Synthetic
ggacaaauaccuaaugca

SEQ ID NO: 469525 - RNA, 19 nt, Artificial Sequence
  Synthetic
aggacaaauaccuaaugca

SEQ ID NO: 469526 - RNA, 20 nt, Artificial Sequence
  Synthetic
uaggacaaauaccuaaugca

SEQ ID NO: 469527 - RNA, 21 nt, Artificial Sequence
  Synthetic
uuaggacaaauaccuaaugca

SEQ ID NO: 469528 - RNA, 22 nt, Artificial Sequence
  Synthetic
auuaggacaaauaccuaaugca

SEQ ID NO: 469529 - RNA, 23 nt, Artificial Sequence
  Synthetic
cauuaggacaaauaccuaaugca

SEQ ID NO: 469530 - RNA, 24 nt, Artificial Sequence
  Synthetic
gcauuaggacaaauaccuaaugca

SEQ ID NO: 469531 - RNA, 18 nt, Artificial Sequence
  Synthetic
aaauggaaauguaaugca

SEQ ID NO: 469532 - RNA, 19 nt, Artificial Sequence
  Synthetic
aaaauggaaauguaaugca

SEQ ID NO: 469533 - RNA, 20 nt, Artificial Sequence
  Synthetic
uaaaauggaaauguaaugca

SEQ ID NO: 469534 - RNA, 21 nt, Artificial Sequence
  Synthetic
uuaaaauggaaauguaaugca

SEQ ID NO: 469535 - RNA, 22 nt, Artificial Sequence
  Synthetic
uuuaaaauggaaauguaaugca

SEQ ID NO: 469536 - RNA, 23 nt, Artificial Sequence
  Synthetic
auuuaaaauggaaauguaaugca

SEQ ID NO: 469537 - RNA, 24 nt, Artificial Sequence
  Synthetic
gauuuaaaauggaaauguaaugca

SEQ ID NO: 469538 - RNA, 18 nt, Artificial Sequence
  Synthetic
uacacaggacuuaaugca

SEQ ID NO: 469539 - RNA, 19 nt, Artificial Sequence
  Synthetic
auacacaggacuuaaugca

SEQ ID NO: 469540 - RNA, 20 nt, Artificial Sequence
  Synthetic
aauacacaggacuuaaugca

SEQ ID NO: 469541 - RNA, 21 nt, Artificial Sequence
  Synthetic
aaauacacaggacuuaaugca

SEQ ID NO: 469542 - RNA, 22 nt, Artificial Sequence
  Synthetic
uaaauacacaggacuuaaugca

SEQ ID NO: 469543 - RNA, 23 nt, Artificial Sequence
  Synthetic
guaaauacacaggacuuaaugca

SEQ ID NO: 469544 - RNA, 24 nt, Artificial Sequence
  Synthetic
aguaaauacacaggacuuaaugca

SEQ ID NO: 469545 - RNA, 18 nt, Artificial Sequence
  Synthetic
cuguacauauuuaaugca

SEQ ID NO: 469546 - RNA, 19 nt, Artificial Sequence
  Synthetic
gcuguacauauuuaaugca

SEQ ID NO: 469547 - RNA, 20 nt, Artificial Sequence
  Synthetic
agcuguacauauuuaaugca

SEQ ID NO: 469548 - RNA, 21 nt, Artificial Sequence
  Synthetic
aagcuguacauauuuaaugca

SEQ ID NO: 469549 - RNA, 22 nt, Artificial Sequence
  Synthetic
aaagcuguacauauuuaaugca

SEQ ID NO: 469550 - RNA, 23 nt, Artificial Sequence
  Synthetic
gaaagcuguacauauuuaaugca

SEQ ID NO: 469551 - RNA, 24 nt, Artificial Sequence
  Synthetic
agaaagcuguacauauuuaaugca

SEQ ID NO: 469552 - RNA, 18 nt, Artificial Sequence
  Synthetic
uuuaguguggaacaugca

SEQ ID NO: 469553 - RNA, 19 nt, Artificial Sequence
  Synthetic
uuuuaguguggaacaugca

SEQ ID NO: 469554 - RNA, 20 nt, Artificial Sequence
  Synthetic
uuuuuaguguggaacaugca

SEQ ID NO: 469555 - RNA, 21 nt, Artificial Sequence
  Synthetic
auuuuuaguguggaacaugca

SEQ ID NO: 469556 - RNA, 22 nt, Artificial Sequence
  Synthetic
gauuuuuaguguggaacaugca

SEQ ID NO: 469557 - RNA, 23 nt, Artificial Sequence
  Synthetic
agauuuuuaguguggaacaugca

SEQ ID NO: 469558 - RNA, 24 nt, Artificial Sequence
  Synthetic
gagauuuuuaguguggaacaugca

SEQ ID NO: 469559 - RNA, 18 nt, Artificial Sequence
  Synthetic
cauuggauuugacaugca

SEQ ID NO: 469560 - RNA, 19 nt, Artificial Sequence
  Synthetic
ucauuggauuugacaugca

SEQ ID NO: 469561 - RNA, 20 nt, Artificial Sequence
  Synthetic
cucauuggauuugacaugca

SEQ ID NO: 469562 - RNA, 21 nt, Artificial Sequence
  Synthetic
ccucauuggauuugacaugca

SEQ ID NO: 469563 - RNA, 22 nt, Artificial Sequence
  Synthetic
gccucauuggauuugacaugca

SEQ ID NO: 469564 - RNA, 23 nt, Artificial Sequence
  Synthetic
ugccucauuggauuugacaugca

SEQ ID NO: 469565 - RNA, 24 nt, Artificial Sequence
  Synthetic
cugccucauuggauuugacaugca

SEQ ID NO: 469566 - RNA, 18 nt, Artificial Sequence
  Synthetic
ggggagcagagccaugca

SEQ ID NO: 469567 - RNA, 19 nt, Artificial Sequence
  Synthetic
uggggagcagagccaugca

SEQ ID NO: 469568 - RNA, 20 nt, Artificial Sequence
  Synthetic
cuggggagcagagccaugca

SEQ ID NO: 469569 - RNA, 21 nt, Artificial Sequence
  Synthetic
acuggggagcagagccaugca

SEQ ID NO: 469570 - RNA, 22 nt, Artificial Sequence
  Synthetic
uacuggggagcagagccaugca

SEQ ID NO: 469571 - RNA, 23 nt, Artificial Sequence
  Synthetic
auacuggggagcagagccaugca

SEQ ID NO: 469572 - RNA, 24 nt, Artificial Sequence
  Synthetic
aauacuggggagcagagccaugca

SEQ ID NO: 469573 - RNA, 18 nt, Artificial Sequence
  Synthetic
gaaagagcucagcaugca

SEQ ID NO: 469574 - RNA, 19 nt, Artificial Sequence
  Synthetic
agaaagagcucagcaugca

SEQ ID NO: 469575 - RNA, 20 nt, Artificial Sequence
  Synthetic
cagaaagagcucagcaugca

SEQ ID NO: 469576 - RNA, 21 nt, Artificial Sequence
  Synthetic
ccagaaagagcucagcaugca

SEQ ID NO: 469577 - RNA, 22 nt, Artificial Sequence
  Synthetic
gccagaaagagcucagcaugca

SEQ ID NO: 469578 - RNA, 23 nt, Artificial Sequence
  Synthetic
ggccagaaagagcucagcaugca

SEQ ID NO: 469579 - RNA, 24 nt, Artificial Sequence
  Synthetic
aggccagaaagagcucagcaugca

SEQ ID NO: 469580 - RNA, 18 nt, Artificial Sequence
  Synthetic
uuuugauacacgcaugca

SEQ ID NO: 469581 - RNA, 19 nt, Artificial Sequence
  Synthetic
auuuugauacacgcaugca

SEQ ID NO: 469582 - RNA, 20 nt, Artificial Sequence
  Synthetic
uauuuugauacacgcaugca

SEQ ID NO: 469583 - RNA, 21 nt, Artificial Sequence
  Synthetic
auauuuugauacacgcaugca

SEQ ID NO: 469584 - RNA, 22 nt, Artificial Sequence
  Synthetic
gauauuuugauacacgcaugca

SEQ ID NO: 469585 - RNA, 23 nt, Artificial Sequence
  Synthetic
agauauuuugauacacgcaugca

SEQ ID NO: 469586 - RNA, 24 nt, Artificial Sequence
  Synthetic
gagauauuuugauacacgcaugca

SEQ ID NO: 469587 - RNA, 18 nt, Artificial Sequence
  Synthetic
acacuagugcugcaugca

SEQ ID NO: 469588 - RNA, 19 nt, Artificial Sequence
  Synthetic
uacacuagugcugcaugca

SEQ ID NO: 469589 - RNA, 20 nt, Artificial Sequence
  Synthetic
uuacacuagugcugcaugca

SEQ ID NO: 469590 - RNA, 21 nt, Artificial Sequence
  Synthetic
auuacacuagugcugcaugca

SEQ ID NO: 469591 - RNA, 22 nt, Artificial Sequence
  Synthetic
gauuacacuagugcugcaugca

SEQ ID NO: 469592 - RNA, 23 nt, Artificial Sequence
  Synthetic
ggauuacacuagugcugcaugca

SEQ ID NO: 469593 - RNA, 24 nt, Artificial Sequence
  Synthetic
gggauuacacuagugcugcaugca

SEQ ID NO: 469594 - RNA, 18 nt, Artificial Sequence
  Synthetic
gaagaaaacuuucaugca

SEQ ID NO: 469595 - RNA, 19 nt, Artificial Sequence
  Synthetic
cgaagaaaacuuucaugca

SEQ ID NO: 469596 - RNA, 20 nt, Artificial Sequence
  Synthetic
acgaagaaaacuuucaugca

SEQ ID NO: 469597 - RNA, 21 nt, Artificial Sequence
  Synthetic
gacgaagaaaacuuucaugca

SEQ ID NO: 469598 - RNA, 22 nt, Artificial Sequence
  Synthetic
agacgaagaaaacuuucaugca

SEQ ID NO: 469599 - RNA, 23 nt, Artificial Sequence
  Synthetic
gagacgaagaaaacuuucaugca

SEQ ID NO: 469600 - RNA, 24 nt, Artificial Sequence
  Synthetic
ggagacgaagaaaacuuucaugca

SEQ ID NO: 469601 - RNA, 18 nt, Artificial Sequence
  Synthetic
cagugucaauaagaugca

SEQ ID NO: 469602 - RNA, 19 nt, Artificial Sequence
  Synthetic
ccagugucaauaagaugca

SEQ ID NO: 469603 - RNA, 20 nt, Artificial Sequence
  Synthetic
cccagugucaauaagaugca

SEQ ID NO: 469604 - RNA, 21 nt, Artificial Sequence
  Synthetic
acccagugucaauaagaugca

SEQ ID NO: 469605 - RNA, 22 nt, Artificial Sequence
  Synthetic
aacccagugucaauaagaugca

SEQ ID NO: 469606 - RNA, 23 nt, Artificial Sequence
  Synthetic
aaacccagugucaauaagaugca

SEQ ID NO: 469607 - RNA, 24 nt, Artificial Sequence
  Synthetic
caaacccagugucaauaagaugca

SEQ ID NO: 469608 - RNA, 18 nt, Artificial Sequence
  Synthetic
ucacacagcuaagaugca

SEQ ID NO: 469609 - RNA, 19 nt, Artificial Sequence
  Synthetic
uucacacagcuaagaugca

SEQ ID NO: 469610 - RNA, 20 nt, Artificial Sequence
  Synthetic
uuucacacagcuaagaugca

SEQ ID NO: 469611 - RNA, 21 nt, Artificial Sequence
  Synthetic
uuuucacacagcuaagaugca

SEQ ID NO: 469612 - RNA, 22 nt, Artificial Sequence
  Synthetic
auuuucacacagcuaagaugca

SEQ ID NO: 469613 - RNA, 23 nt, Artificial Sequence
  Synthetic
aauuuucacacagcuaagaugca

SEQ ID NO: 469614 - RNA, 24 nt, Artificial Sequence
  Synthetic
gaauuuucacacagcuaagaugca

SEQ ID NO: 469615 - RNA, 18 nt, Artificial Sequence
  Synthetic
uaagaugggggagaugca

SEQ ID NO: 469616 - RNA, 19 nt, Artificial Sequence
  Synthetic
cuaagaugggggagaugca

SEQ ID NO: 469617 - RNA, 20 nt, Artificial Sequence
  Synthetic
ccuaagaugggggagaugca

SEQ ID NO: 469618 - RNA, 21 nt, Artificial Sequence
  Synthetic
gccuaagaugggggagaugca

SEQ ID NO: 469619 - RNA, 22 nt, Artificial Sequence
  Synthetic
ggccuaagaugggggagaugca

SEQ ID NO: 469620 - RNA, 23 nt, Artificial Sequence
  Synthetic
uggccuaagaugggggagaugca

SEQ ID NO: 469621 - RNA, 24 nt, Artificial Sequence
  Synthetic
cuggccuaagaugggggagaugca

SEQ ID NO: 469622 - RNA, 18 nt, Artificial Sequence
  Synthetic
cagagauacaaggaugca

SEQ ID NO: 469623 - RNA, 19 nt, Artificial Sequence
  Synthetic
ccagagauacaaggaugca

SEQ ID NO: 469624 - RNA, 20 nt, Artificial Sequence
  Synthetic
accagagauacaaggaugca

SEQ ID NO: 469625 - RNA, 21 nt, Artificial Sequence
  Synthetic
aaccagagauacaaggaugca

SEQ ID NO: 469626 - RNA, 22 nt, Artificial Sequence
  Synthetic
uaaccagagauacaaggaugca

SEQ ID NO: 469627 - RNA, 23 nt, Artificial Sequence
  Synthetic
auaaccagagauacaaggaugca

SEQ ID NO: 469628 - RNA, 24 nt, Artificial Sequence
  Synthetic
aauaaccagagauacaaggaugca

SEQ ID NO: 469629 - RNA, 18 nt, Artificial Sequence
  Synthetic
aguacaaugucugaugca

SEQ ID NO: 469630 - RNA, 19 nt, Artificial Sequence
  Synthetic
uaguacaaugucugaugca

SEQ ID NO: 469631 - RNA, 20 nt, Artificial Sequence
  Synthetic
uuaguacaaugucugaugca

SEQ ID NO: 469632 - RNA, 21 nt, Artificial Sequence
  Synthetic
uuuaguacaaugucugaugca

SEQ ID NO: 469633 - RNA, 22 nt, Artificial Sequence
  Synthetic
guuuaguacaaugucugaugca

SEQ ID NO: 469634 - RNA, 23 nt, Artificial Sequence
  Synthetic
uguuuaguacaaugucugaugca

SEQ ID NO: 469635 - RNA, 24 nt, Artificial Sequence
  Synthetic
uuguuuaguacaaugucugaugca

SEQ ID NO: 469636 - RNA, 18 nt, Artificial Sequence
  Synthetic
auagacugaaaauaugca

SEQ ID NO: 469637 - RNA, 19 nt, Artificial Sequence
  Synthetic
aauagacugaaaauaugca

SEQ ID NO: 469638 - RNA, 20 nt, Artificial Sequence
  Synthetic
aaauagacugaaaauaugca

SEQ ID NO: 469639 - RNA, 21 nt, Artificial Sequence
  Synthetic
aaaauagacugaaaauaugca

SEQ ID NO: 469640 - RNA, 22 nt, Artificial Sequence
  Synthetic
uaaaauagacugaaaauaugca

SEQ ID NO: 469641 - RNA, 23 nt, Artificial Sequence
  Synthetic
auaaaauagacugaaaauaugca

SEQ ID NO: 469642 - RNA, 24 nt, Artificial Sequence
  Synthetic
aauaaaauagacugaaaauaugca

SEQ ID NO: 469643 - RNA, 18 nt, Artificial Sequence
  Synthetic
cucaaauuuuaauaugca

SEQ ID NO: 469644 - RNA, 19 nt, Artificial Sequence
  Synthetic
ucucaaauuuuaauaugca

SEQ ID NO: 469645 - RNA, 20 nt, Artificial Sequence
  Synthetic
uucucaaauuuuaauaugca

SEQ ID NO: 469646 - RNA, 21 nt, Artificial Sequence
  Synthetic
guucucaaauuuuaauaugca

SEQ ID NO: 469647 - RNA, 22 nt, Artificial Sequence
  Synthetic
gguucucaaauuuuaauaugca

SEQ ID NO: 469648 - RNA, 23 nt, Artificial Sequence
  Synthetic
ugguucucaaauuuuaauaugca

SEQ ID NO: 469649 - RNA, 24 nt, Artificial Sequence
  Synthetic
gugguucucaaauuuuaauaugca

SEQ ID NO: 469650 - RNA, 18 nt, Artificial Sequence
  Synthetic
acaaggauuugauaugca

SEQ ID NO: 469651 - RNA, 19 nt, Artificial Sequence
  Synthetic
aacaaggauuugauaugca

SEQ ID NO: 469652 - RNA, 20 nt, Artificial Sequence
  Synthetic
aaacaaggauuugauaugca

SEQ ID NO: 469653 - RNA, 21 nt, Artificial Sequence
  Synthetic
aaaacaaggauuugauaugca

SEQ ID NO: 469654 - RNA, 22 nt, Artificial Sequence
  Synthetic
gaaaacaaggauuugauaugca

SEQ ID NO: 469655 - RNA, 23 nt, Artificial Sequence
  Synthetic
agaaaacaaggauuugauaugca

SEQ ID NO: 469656 - RNA, 24 nt, Artificial Sequence
  Synthetic
cagaaaacaaggauuugauaugca

SEQ ID NO: 469657 - RNA, 18 nt, Artificial Sequence
  Synthetic
auauugcauauauaugca

SEQ ID NO: 469658 - RNA, 19 nt, Artificial Sequence
  Synthetic
aauauugcauauauaugca

SEQ ID NO: 469659 - RNA, 20 nt, Artificial Sequence
  Synthetic
aaauauugcauauauaugca

SEQ ID NO: 469660 - RNA, 21 nt, Artificial Sequence
  Synthetic
aaaauauugcauauauaugca

SEQ ID NO: 469661 - RNA, 22 nt, Artificial Sequence
  Synthetic
gaaaauauugcauauauaugca

SEQ ID NO: 469662 - RNA, 23 nt, Artificial Sequence
  Synthetic
agaaaauauugcauauauaugca

SEQ ID NO: 469663 - RNA, 24 nt, Artificial Sequence
  Synthetic
aagaaaauauugcauauauaugca

SEQ ID NO: 469664 - RNA, 18 nt, Artificial Sequence
  Synthetic
ugcagaaacagcuaugca

SEQ ID NO: 469665 - RNA, 19 nt, Artificial Sequence
  Synthetic
cugcagaaacagcuaugca

SEQ ID NO: 469666 - RNA, 20 nt, Artificial Sequence
  Synthetic
ccugcagaaacagcuaugca

SEQ ID NO: 469667 - RNA, 21 nt, Artificial Sequence
  Synthetic
accugcagaaacagcuaugca

SEQ ID NO: 469668 - RNA, 22 nt, Artificial Sequence
  Synthetic
uaccugcagaaacagcuaugca

SEQ ID NO: 469669 - RNA, 23 nt, Artificial Sequence
  Synthetic
auaccugcagaaacagcuaugca

SEQ ID NO: 469670 - RNA, 24 nt, Artificial Sequence
  Synthetic
aauaccugcagaaacagcuaugca

SEQ ID NO: 469671 - RNA, 18 nt, Artificial Sequence
  Synthetic
uggauuuucaauuaugca

SEQ ID NO: 469672 - RNA, 19 nt, Artificial Sequence
  Synthetic
cuggauuuucaauuaugca

SEQ ID NO: 469673 - RNA, 20 nt, Artificial Sequence
  Synthetic
ucuggauuuucaauuaugca

SEQ ID NO: 469674 - RNA, 21 nt, Artificial Sequence
  Synthetic
uucuggauuuucaauuaugca

SEQ ID NO: 469675 - RNA, 22 nt, Artificial Sequence
  Synthetic
uuucuggauuuucaauuaugca

SEQ ID NO: 469676 - RNA, 23 nt, Artificial Sequence
  Synthetic
guuucuggauuuucaauuaugca

SEQ ID NO: 469677 - RNA, 24 nt, Artificial Sequence
  Synthetic
uguuucuggauuuucaauuaugca

SEQ ID NO: 469678 - RNA, 18 nt, Artificial Sequence
  Synthetic
ugcauaggauauuaugca

SEQ ID NO: 469679 - RNA, 19 nt, Artificial Sequence
  Synthetic
uugcauaggauauuaugca

SEQ ID NO: 469680 - RNA, 20 nt, Artificial Sequence
  Synthetic
uuugcauaggauauuaugca

SEQ ID NO: 469681 - RNA, 21 nt, Artificial Sequence
  Synthetic
cuuugcauaggauauuaugca

SEQ ID NO: 469682 - RNA, 22 nt, Artificial Sequence
  Synthetic
ucuuugcauaggauauuaugca

SEQ ID NO: 469683 - RNA, 23 nt, Artificial Sequence
  Synthetic
uucuuugcauaggauauuaugca

SEQ ID NO: 469684 - RNA, 24 nt, Artificial Sequence
  Synthetic
guucuuugcauaggauauuaugca

SEQ ID NO: 469685 - RNA, 18 nt, Artificial Sequence
  Synthetic
ucuccucaaguuuaugca

SEQ ID NO: 469686 - RNA, 19 nt, Artificial Sequence
  Synthetic
cucuccucaaguuuaugca

SEQ ID NO: 469687 - RNA, 20 nt, Artificial Sequence
  Synthetic
gcucuccucaaguuuaugca

SEQ ID NO: 469688 - RNA, 21 nt, Artificial Sequence
  Synthetic
agcucuccucaaguuuaugca

SEQ ID NO: 469689 - RNA, 22 nt, Artificial Sequence
  Synthetic
aagcucuccucaaguuuaugca

SEQ ID NO: 469690 - RNA, 23 nt, Artificial Sequence
  Synthetic
gaagcucuccucaaguuuaugca

SEQ ID NO: 469691 - RNA, 24 nt, Artificial Sequence
  Synthetic
ugaagcucuccucaaguuuaugca

SEQ ID NO: 469692 - RNA, 18 nt, Artificial Sequence
  Synthetic
auggacaguuuuuaugca

SEQ ID NO: 469693 - RNA, 19 nt, Artificial Sequence
  Synthetic
cauggacaguuuuuaugca

SEQ ID NO: 469694 - RNA, 20 nt, Artificial Sequence
  Synthetic
gcauggacaguuuuuaugca

SEQ ID NO: 469695 - RNA, 21 nt, Artificial Sequence
  Synthetic
ggcauggacaguuuuuaugca

SEQ ID NO: 469696 - RNA, 22 nt, Artificial Sequence
  Synthetic
aggcauggacaguuuuuaugca

SEQ ID NO: 469697 - RNA, 23 nt, Artificial Sequence
  Synthetic
gaggcauggacaguuuuuaugca

SEQ ID NO: 469698 - RNA, 24 nt, Artificial Sequence
  Synthetic
ggaggcauggacaguuuuuaugca

SEQ ID NO: 469699 - RNA, 18 nt, Artificial Sequence
  Synthetic
agacugaggaacacugca

SEQ ID NO: 469700 - RNA, 19 nt, Artificial Sequence
  Synthetic
aagacugaggaacacugca

SEQ ID NO: 469701 - RNA, 20 nt, Artificial Sequence
  Synthetic
aaagacugaggaacacugca

SEQ ID NO: 469702 - RNA, 21 nt, Artificial Sequence
  Synthetic
aaaagacugaggaacacugca

SEQ ID NO: 469703 - RNA, 22 nt, Artificial Sequence
  Synthetic
aaaaagacugaggaacacugca

SEQ ID NO: 469704 - RNA, 23 nt, Artificial Sequence
  Synthetic
caaaaagacugaggaacacugca

SEQ ID NO: 469705 - RNA, 24 nt, Artificial Sequence
  Synthetic
ucaaaaagacugaggaacacugca

SEQ ID NO: 469706 - RNA, 18 nt, Artificial Sequence
  Synthetic
gacuagcaaaccacugca

SEQ ID NO: 469707 - RNA, 19 nt, Artificial Sequence
  Synthetic
ggacuagcaaaccacugca

SEQ ID NO: 469708 - RNA, 20 nt, Artificial Sequence
  Synthetic
aggacuagcaaaccacugca

SEQ ID NO: 469709 - RNA, 21 nt, Artificial Sequence
  Synthetic
gaggacuagcaaaccacugca

SEQ ID NO: 469710 - RNA, 22 nt, Artificial Sequence
  Synthetic
agaggacuagcaaaccacugca

SEQ ID NO: 469711 - RNA, 23 nt, Artificial Sequence
  Synthetic
gagaggacuagcaaaccacugca

SEQ ID NO: 469712 - RNA, 24 nt, Artificial Sequence
  Synthetic
ggagaggacuagcaaaccacugca

SEQ ID NO: 469713 - RNA, 18 nt, Artificial Sequence
  Synthetic
ggcaggagacugacugca

SEQ ID NO: 469714 - RNA, 19 nt, Artificial Sequence
  Synthetic
gggcaggagacugacugca

SEQ ID NO: 469715 - RNA, 20 nt, Artificial Sequence
  Synthetic
ggggcaggagacugacugca

SEQ ID NO: 469716 - RNA, 21 nt, Artificial Sequence
  Synthetic
uggggcaggagacugacugca

SEQ ID NO: 469717 - RNA, 22 nt, Artificial Sequence
  Synthetic
guggggcaggagacugacugca

SEQ ID NO: 469718 - RNA, 23 nt, Artificial Sequence
  Synthetic
gguggggcaggagacugacugca

SEQ ID NO: 469719 - RNA, 24 nt, Artificial Sequence
  Synthetic
ggguggggcaggagacugacugca

SEQ ID NO: 469720 - RNA, 18 nt, Artificial Sequence
  Synthetic
auucugcuagauacugca

SEQ ID NO: 469721 - RNA, 19 nt, Artificial Sequence
  Synthetic
cauucugcuagauacugca

SEQ ID NO: 469722 - RNA, 20 nt, Artificial Sequence
  Synthetic
gcauucugcuagauacugca

SEQ ID NO: 469723 - RNA, 21 nt, Artificial Sequence
  Synthetic
ggcauucugcuagauacugca

SEQ ID NO: 469724 - RNA, 22 nt, Artificial Sequence
  Synthetic
aggcauucugcuagauacugca

SEQ ID NO: 469725 - RNA, 23 nt, Artificial Sequence
  Synthetic
aaggcauucugcuagauacugca

SEQ ID NO: 469726 - RNA, 24 nt, Artificial Sequence
  Synthetic
aaaggcauucugcuagauacugca

SEQ ID NO: 469727 - RNA, 18 nt, Artificial Sequence
  Synthetic
uaugcuccuuauacugca

SEQ ID NO: 469728 - RNA, 19 nt, Artificial Sequence
  Synthetic
uuaugcuccuuauacugca

SEQ ID NO: 469729 - RNA, 20 nt, Artificial Sequence
  Synthetic
auuaugcuccuuauacugca

SEQ ID NO: 469730 - RNA, 21 nt, Artificial Sequence
  Synthetic
aauuaugcuccuuauacugca

SEQ ID NO: 469731 - RNA, 22 nt, Artificial Sequence
  Synthetic
caauuaugcuccuuauacugca

SEQ ID NO: 469732 - RNA, 23 nt, Artificial Sequence
  Synthetic
gcaauuaugcuccuuauacugca

SEQ ID NO: 469733 - RNA, 24 nt, Artificial Sequence
  Synthetic
ggcaauuaugcuccuuauacugca

SEQ ID NO: 469734 - RNA, 18 nt, Artificial Sequence
  Synthetic
acuuuauaaauuacugca

SEQ ID NO: 469735 - RNA, 19 nt, Artificial Sequence
  Synthetic
aacuuuauaaauuacugca

SEQ ID NO: 469736 - RNA, 20 nt, Artificial Sequence
  Synthetic
caacuuuauaaauuacugca

SEQ ID NO: 469737 - RNA, 21 nt, Artificial Sequence
  Synthetic
ccaacuuuauaaauuacugca

SEQ ID NO: 469738 - RNA, 22 nt, Artificial Sequence
  Synthetic
accaacuuuauaaauuacugca

SEQ ID NO: 469739 - RNA, 23 nt, Artificial Sequence
  Synthetic
aaccaacuuuauaaauuacugca

SEQ ID NO: 469740 - RNA, 24 nt, Artificial Sequence
  Synthetic
aaaccaacuuuauaaauuacugca

SEQ ID NO: 469741 - RNA, 18 nt, Artificial Sequence
  Synthetic
ugguugccaagaccugca

SEQ ID NO: 469742 - RNA, 19 nt, Artificial Sequence
  Synthetic
augguugccaagaccugca

SEQ ID NO: 469743 - RNA, 20 nt, Artificial Sequence
  Synthetic
gaugguugccaagaccugca

SEQ ID NO: 469744 - RNA, 21 nt, Artificial Sequence
  Synthetic
ggaugguugccaagaccugca

SEQ ID NO: 469745 - RNA, 22 nt, Artificial Sequence
  Synthetic
uggaugguugccaagaccugca

SEQ ID NO: 469746 - RNA, 23 nt, Artificial Sequence
  Synthetic
guggaugguugccaagaccugca

SEQ ID NO: 469747 - RNA, 24 nt, Artificial Sequence
  Synthetic
gguggaugguugccaagaccugca

SEQ ID NO: 469748 - RNA, 18 nt, Artificial Sequence
  Synthetic
agacugcaaguaccugca

SEQ ID NO: 469749 - RNA, 19 nt, Artificial Sequence
  Synthetic
gagacugcaaguaccugca

SEQ ID NO: 469750 - RNA, 20 nt, Artificial Sequence
  Synthetic
ggagacugcaaguaccugca

SEQ ID NO: 469751 - RNA, 21 nt, Artificial Sequence
  Synthetic
aggagacugcaaguaccugca

SEQ ID NO: 469752 - RNA, 22 nt, Artificial Sequence
  Synthetic
gaggagacugcaaguaccugca

SEQ ID NO: 469753 - RNA, 23 nt, Artificial Sequence
  Synthetic
agaggagacugcaaguaccugca

SEQ ID NO: 469754 - RNA, 24 nt, Artificial Sequence
  Synthetic
cagaggagacugcaaguaccugca

SEQ ID NO: 469755 - RNA, 18 nt, Artificial Sequence
  Synthetic
ucgcucacucacccugca

SEQ ID NO: 469756 - RNA, 19 nt, Artificial Sequence
  Synthetic
cucgcucacucacccugca

SEQ ID NO: 469757 - RNA, 20 nt, Artificial Sequence
  Synthetic
ucucgcucacucacccugca

SEQ ID NO: 469758 - RNA, 21 nt, Artificial Sequence
  Synthetic
cucucgcucacucacccugca

SEQ ID NO: 469759 - RNA, 22 nt, Artificial Sequence
  Synthetic
ccucucgcucacucacccugca

SEQ ID NO: 469760 - RNA, 23 nt, Artificial Sequence
  Synthetic
gccucucgcucacucacccugca

SEQ ID NO: 469761 - RNA, 24 nt, Artificial Sequence
  Synthetic
agccucucgcucacucacccugca

SEQ ID NO: 469762 - RNA, 18 nt, Artificial Sequence
  Synthetic
ggaaaaguguagccugca

SEQ ID NO: 469763 - RNA, 19 nt, Artificial Sequence
  Synthetic
aggaaaaguguagccugca

SEQ ID NO: 469764 - RNA, 20 nt, Artificial Sequence
  Synthetic
aaggaaaaguguagccugca

SEQ ID NO: 469765 - RNA, 21 nt, Artificial Sequence
  Synthetic
gaaggaaaaguguagccugca

SEQ ID NO: 469766 - RNA, 22 nt, Artificial Sequence
  Synthetic
agaaggaaaaguguagccugca

SEQ ID NO: 469767 - RNA, 23 nt, Artificial Sequence
  Synthetic
gagaaggaaaaguguagccugca

SEQ ID NO: 469768 - RNA, 24 nt, Artificial Sequence
  Synthetic
ugagaaggaaaaguguagccugca

SEQ ID NO: 469769 - RNA, 18 nt, Artificial Sequence
  Synthetic
guuuagaaagugccugca

SEQ ID NO: 469770 - RNA, 19 nt, Artificial Sequence
  Synthetic
aguuuagaaagugccugca

SEQ ID NO: 469771 - RNA, 20 nt, Artificial Sequence
  Synthetic
gaguuuagaaagugccugca

SEQ ID NO: 469772 - RNA, 21 nt, Artificial Sequence
  Synthetic
agaguuuagaaagugccugca

SEQ ID NO: 469773 - RNA, 22 nt, Artificial Sequence
  Synthetic
gagaguuuagaaagugccugca

SEQ ID NO: 469774 - RNA, 23 nt, Artificial Sequence
  Synthetic
ggagaguuuagaaagugccugca

SEQ ID NO: 469775 - RNA, 24 nt, Artificial Sequence
  Synthetic
uggagaguuuagaaagugccugca

SEQ ID NO: 469776 - RNA, 18 nt, Artificial Sequence
  Synthetic
gauggcaagcaagcugca

SEQ ID NO: 469777 - RNA, 19 nt, Artificial Sequence
  Synthetic
ggauggcaagcaagcugca

SEQ ID NO: 469778 - RNA, 20 nt, Artificial Sequence
  Synthetic
uggauggcaagcaagcugca

SEQ ID NO: 469779 - RNA, 21 nt, Artificial Sequence
  Synthetic
cuggauggcaagcaagcugca

SEQ ID NO: 469780 - RNA, 22 nt, Artificial Sequence
  Synthetic
ccuggauggcaagcaagcugca

SEQ ID NO: 469781 - RNA, 23 nt, Artificial Sequence
  Synthetic
uccuggauggcaagcaagcugca

SEQ ID NO: 469782 - RNA, 24 nt, Artificial Sequence
  Synthetic
cuccuggauggcaagcaagcugca

SEQ ID NO: 469783 - RNA, 18 nt, Artificial Sequence
  Synthetic
aguuugucuucagcugca

SEQ ID NO: 469784 - RNA, 19 nt, Artificial Sequence
  Synthetic
caguuugucuucagcugca

SEQ ID NO: 469785 - RNA, 20 nt, Artificial Sequence
  Synthetic
ccaguuugucuucagcugca

SEQ ID NO: 469786 - RNA, 21 nt, Artificial Sequence
  Synthetic
cccaguuugucuucagcugca

SEQ ID NO: 469787 - RNA, 22 nt, Artificial Sequence
  Synthetic
ccccaguuugucuucagcugca

SEQ ID NO: 469788 - RNA, 23 nt, Artificial Sequence
  Synthetic
accccaguuugucuucagcugca

SEQ ID NO: 469789 - RNA, 24 nt, Artificial Sequence
  Synthetic
aaccccaguuugucuucagcugca

SEQ ID NO: 469790 - RNA, 18 nt, Artificial Sequence
  Synthetic
gggacugccugagcugca

SEQ ID NO: 469791 - RNA, 19 nt, Artificial Sequence
  Synthetic
agggacugccugagcugca

SEQ ID NO: 469792 - RNA, 20 nt, Artificial Sequence
  Synthetic
cagggacugccugagcugca

SEQ ID NO: 469793 - RNA, 21 nt, Artificial Sequence
  Synthetic
ucagggacugccugagcugca

SEQ ID NO: 469794 - RNA, 22 nt, Artificial Sequence
  Synthetic
uucagggacugccugagcugca

SEQ ID NO: 469795 - RNA, 23 nt, Artificial Sequence
  Synthetic
cuucagggacugccugagcugca

SEQ ID NO: 469796 - RNA, 24 nt, Artificial Sequence
  Synthetic
ccuucagggacugccugagcugca

SEQ ID NO: 469797 - RNA, 18 nt, Artificial Sequence
  Synthetic
aaaugcugaauagcugca

SEQ ID NO: 469798 - RNA, 19 nt, Artificial Sequence
  Synthetic
caaaugcugaauagcugca

SEQ ID NO: 469799 - RNA, 20 nt, Artificial Sequence
  Synthetic
ccaaaugcugaauagcugca

SEQ ID NO: 469800 - RNA, 21 nt, Artificial Sequence
  Synthetic
accaaaugcugaauagcugca

SEQ ID NO: 469801 - RNA, 22 nt, Artificial Sequence
  Synthetic
caccaaaugcugaauagcugca

SEQ ID NO: 469802 - RNA, 23 nt, Artificial Sequence
  Synthetic
acaccaaaugcugaauagcugca

SEQ ID NO: 469803 - RNA, 24 nt, Artificial Sequence
  Synthetic
uacaccaaaugcugaauagcugca

SEQ ID NO: 469804 - RNA, 18 nt, Artificial Sequence
  Synthetic
uauauauauauagcugca

SEQ ID NO: 469805 - RNA, 19 nt, Artificial Sequence
  Synthetic
auauauauauauagcugca

SEQ ID NO: 469806 - RNA, 20 nt, Artificial Sequence
  Synthetic
uauauauauauauagcugca

SEQ ID NO: 469807 - RNA, 21 nt, Artificial Sequence
  Synthetic
auauauauauauauagcugca

SEQ ID NO: 469808 - RNA, 22 nt, Artificial Sequence
  Synthetic
uauauauauauauauagcugca

SEQ ID NO: 469809 - RNA, 23 nt, Artificial Sequence
  Synthetic
auauauauauauauauagcugca

SEQ ID NO: 469810 - RNA, 24 nt, Artificial Sequence
  Synthetic
uauauauauauauauauagcugca

SEQ ID NO: 469811 - RNA, 18 nt, Artificial Sequence
  Synthetic
uccauccaugucgcugca

SEQ ID NO: 469812 - RNA, 19 nt, Artificial Sequence
  Synthetic
cuccauccaugucgcugca

SEQ ID NO: 469813 - RNA, 20 nt, Artificial Sequence
  Synthetic
gcuccauccaugucgcugca

SEQ ID NO: 469814 - RNA, 21 nt, Artificial Sequence
  Synthetic
ggcuccauccaugucgcugca

SEQ ID NO: 469815 - RNA, 22 nt, Artificial Sequence
  Synthetic
uggcuccauccaugucgcugca

SEQ ID NO: 469816 - RNA, 23 nt, Artificial Sequence
  Synthetic
cuggcuccauccaugucgcugca

SEQ ID NO: 469817 - RNA, 24 nt, Artificial Sequence
  Synthetic
acuggcuccauccaugucgcugca

SEQ ID NO: 469818 - RNA, 18 nt, Artificial Sequence
  Synthetic
ugggagaucaaggcugca

SEQ ID NO: 469819 - RNA, 19 nt, Artificial Sequence
  Synthetic
cugggagaucaaggcugca

SEQ ID NO: 469820 - RNA, 20 nt, Artificial Sequence
  Synthetic
ccugggagaucaaggcugca

SEQ ID NO: 469821 - RNA, 21 nt, Artificial Sequence
  Synthetic
accugggagaucaaggcugca

SEQ ID NO: 469822 - RNA, 22 nt, Artificial Sequence
  Synthetic
aaccugggagaucaaggcugca

SEQ ID NO: 469823 - RNA, 23 nt, Artificial Sequence
  Synthetic
gaaccugggagaucaaggcugca

SEQ ID NO: 469824 - RNA, 24 nt, Artificial Sequence
  Synthetic
ugaaccugggagaucaaggcugca

SEQ ID NO: 469825 - RNA, 18 nt, Artificial Sequence
  Synthetic
agggaggucaaggcugca

SEQ ID NO: 469826 - RNA, 19 nt, Artificial Sequence
  Synthetic
cagggaggucaaggcugca

SEQ ID NO: 469827 - RNA, 20 nt, Artificial Sequence
  Synthetic
ccagggaggucaaggcugca

SEQ ID NO: 469828 - RNA, 21 nt, Artificial Sequence
  Synthetic
cccagggaggucaaggcugca

SEQ ID NO: 469829 - RNA, 22 nt, Artificial Sequence
  Synthetic
gcccagggaggucaaggcugca

SEQ ID NO: 469830 - RNA, 23 nt, Artificial Sequence
  Synthetic
agcccagggaggucaaggcugca

SEQ ID NO: 469831 - RNA, 24 nt, Artificial Sequence
  Synthetic
gagcccagggaggucaaggcugca

SEQ ID NO: 469832 - RNA, 18 nt, Artificial Sequence
  Synthetic
aaggaguucaaggcugca

SEQ ID NO: 469833 - RNA, 19 nt, Artificial Sequence
  Synthetic
caaggaguucaaggcugca

SEQ ID NO: 469834 - RNA, 20 nt, Artificial Sequence
  Synthetic
ccaaggaguucaaggcugca

SEQ ID NO: 469835 - RNA, 21 nt, Artificial Sequence
  Synthetic
cccaaggaguucaaggcugca

SEQ ID NO: 469836 - RNA, 22 nt, Artificial Sequence
  Synthetic
gcccaaggaguucaaggcugca

SEQ ID NO: 469837 - RNA, 23 nt, Artificial Sequence
  Synthetic
agcccaaggaguucaaggcugca

SEQ ID NO: 469838 - RNA, 24 nt, Artificial Sequence
  Synthetic
gagcccaaggaguucaaggcugca

SEQ ID NO: 469839 - RNA, 18 nt, Artificial Sequence
  Synthetic
caggaggcggaggcugca

SEQ ID NO: 469840 - RNA, 19 nt, Artificial Sequence
  Synthetic
ccaggaggcggaggcugca

SEQ ID NO: 469841 - RNA, 20 nt, Artificial Sequence
  Synthetic
cccaggaggcggaggcugca

SEQ ID NO: 469842 - RNA, 21 nt, Artificial Sequence
  Synthetic
acccaggaggcggaggcugca

SEQ ID NO: 469843 - RNA, 22 nt, Artificial Sequence
  Synthetic
aacccaggaggcggaggcugca

SEQ ID NO: 469844 - RNA, 23 nt, Artificial Sequence
  Synthetic
gaacccaggaggcggaggcugca

SEQ ID NO: 469845 - RNA, 24 nt, Artificial Sequence
  Synthetic
ugaacccaggaggcggaggcugca

SEQ ID NO: 469846 - RNA, 18 nt, Artificial Sequence
  Synthetic
caggaguuugaggcugca

SEQ ID NO: 469847 - RNA, 19 nt, Artificial Sequence
  Synthetic
ucaggaguuugaggcugca

SEQ ID NO: 469848 - RNA, 20 nt, Artificial Sequence
  Synthetic
cucaggaguuugaggcugca

SEQ ID NO: 469849 - RNA, 21 nt, Artificial Sequence
  Synthetic
gcucaggaguuugaggcugca

SEQ ID NO: 469850 - RNA, 22 nt, Artificial Sequence
  Synthetic
agcucaggaguuugaggcugca

SEQ ID NO: 469851 - RNA, 23 nt, Artificial Sequence
  Synthetic
gagcucaggaguuugaggcugca

SEQ ID NO: 469852 - RNA, 24 nt, Artificial Sequence
  Synthetic
ugagcucaggaguuugaggcugca

SEQ ID NO: 469853 - RNA, 18 nt, Artificial Sequence
  Synthetic
uuaaagggaggggcugca

SEQ ID NO: 469854 - RNA, 19 nt, Artificial Sequence
  Synthetic
cuuaaagggaggggcugca

SEQ ID NO: 469855 - RNA, 20 nt, Artificial Sequence
  Synthetic
ucuuaaagggaggggcugca

SEQ ID NO: 469856 - RNA, 21 nt, Artificial Sequence
  Synthetic
cucuuaaagggaggggcugca

SEQ ID NO: 469857 - RNA, 22 nt, Artificial Sequence
  Synthetic
ucucuuaaagggaggggcugca

SEQ ID NO: 469858 - RNA, 23 nt, Artificial Sequence
  Synthetic
gucucuuaaagggaggggcugca

SEQ ID NO: 469859 - RNA, 24 nt, Artificial Sequence
  Synthetic
agucucuuaaagggaggggcugca

SEQ ID NO: 469860 - RNA, 18 nt, Artificial Sequence
  Synthetic
uaggaguugguggcugca

SEQ ID NO: 469861 - RNA, 19 nt, Artificial Sequence
  Synthetic
cuaggaguugguggcugca

SEQ ID NO: 469862 - RNA, 20 nt, Artificial Sequence
  Synthetic
ccuaggaguugguggcugca

SEQ ID NO: 469863 - RNA, 21 nt, Artificial Sequence
  Synthetic
gccuaggaguugguggcugca

SEQ ID NO: 469864 - RNA, 22 nt, Artificial Sequence
  Synthetic
agccuaggaguugguggcugca

SEQ ID NO: 469865 - RNA, 23 nt, Artificial Sequence
  Synthetic
gagccuaggaguugguggcugca

SEQ ID NO: 469866 - RNA, 24 nt, Artificial Sequence
  Synthetic
ugagccuaggaguugguggcugca

SEQ ID NO: 469867 - RNA, 18 nt, Artificial Sequence
  Synthetic
uagucaagugcugcugca

SEQ ID NO: 469868 - RNA, 19 nt, Artificial Sequence
  Synthetic
uuagucaagugcugcugca

SEQ ID NO: 469869 - RNA, 20 nt, Artificial Sequence
  Synthetic
cuuagucaagugcugcugca

SEQ ID NO: 469870 - RNA, 21 nt, Artificial Sequence
  Synthetic
ccuuagucaagugcugcugca

SEQ ID NO: 469871 - RNA, 22 nt, Artificial Sequence
  Synthetic
accuuagucaagugcugcugca

SEQ ID NO: 469872 - RNA, 23 nt, Artificial Sequence
  Synthetic
aaccuuagucaagugcugcugca

SEQ ID NO: 469873 - RNA, 24 nt, Artificial Sequence
  Synthetic
gaaccuuagucaagugcugcugca

SEQ ID NO: 469874 - RNA, 21 nt, Artificial Sequence
  Synthetic
ucuauugugaauagugcugca

SEQ ID NO: 469875 - RNA, 22 nt, Artificial Sequence
  Synthetic
uucuauugugaauagugcugca

SEQ ID NO: 469876 - RNA, 23 nt, Artificial Sequence
  Synthetic
uuucuauugugaauagugcugca

SEQ ID NO: 469877 - RNA, 24 nt, Artificial Sequence
  Synthetic
uuuucuauugugaauagugcugca

SEQ ID NO: 469878 - RNA, 18 nt, Artificial Sequence
  Synthetic
caucacugaggugcugca

SEQ ID NO: 469879 - RNA, 19 nt, Artificial Sequence
  Synthetic
ucaucacugaggugcugca

SEQ ID NO: 469880 - RNA, 20 nt, Artificial Sequence
  Synthetic
gucaucacugaggugcugca

SEQ ID NO: 469881 - RNA, 21 nt, Artificial Sequence
  Synthetic
agucaucacugaggugcugca

SEQ ID NO: 469882 - RNA, 22 nt, Artificial Sequence
  Synthetic
uagucaucacugaggugcugca

SEQ ID NO: 469883 - RNA, 23 nt, Artificial Sequence
  Synthetic
guagucaucacugaggugcugca

SEQ ID NO: 469884 - RNA, 24 nt, Artificial Sequence
  Synthetic
uguagucaucacugaggugcugca

SEQ ID NO: 469885 - RNA, 18 nt, Artificial Sequence
  Synthetic
acuaagaaaccaucugca

SEQ ID NO: 469886 - RNA, 19 nt, Artificial Sequence
  Synthetic
cacuaagaaaccaucugca

SEQ ID NO: 469887 - RNA, 20 nt, Artificial Sequence
  Synthetic
ucacuaagaaaccaucugca

SEQ ID NO: 469888 - RNA, 21 nt, Artificial Sequence
  Synthetic
cucacuaagaaaccaucugca

SEQ ID NO: 469889 - RNA, 22 nt, Artificial Sequence
  Synthetic
acucacuaagaaaccaucugca

SEQ ID NO: 469890 - RNA, 23 nt, Artificial Sequence
  Synthetic
cacucacuaagaaaccaucugca

SEQ ID NO: 469891 - RNA, 24 nt, Artificial Sequence
  Synthetic
gcacucacuaagaaaccaucugca

SEQ ID NO: 469892 - RNA, 18 nt, Artificial Sequence
  Synthetic
uagagacaagacucugca

SEQ ID NO: 469893 - RNA, 19 nt, Artificial Sequence
  Synthetic
uuagagacaagacucugca

SEQ ID NO: 469894 - RNA, 20 nt, Artificial Sequence
  Synthetic
guuagagacaagacucugca

SEQ ID NO: 469895 - RNA, 21 nt, Artificial Sequence
  Synthetic
uguuagagacaagacucugca

SEQ ID NO: 469896 - RNA, 22 nt, Artificial Sequence
  Synthetic
auguuagagacaagacucugca

SEQ ID NO: 469897 - RNA, 23 nt, Artificial Sequence
  Synthetic
aauguuagagacaagacucugca

SEQ ID NO: 469898 - RNA, 24 nt, Artificial Sequence
  Synthetic
gaauguuagagacaagacucugca

SEQ ID NO: 469899 - RNA, 18 nt, Artificial Sequence
  Synthetic
uaaaugugguacucugca

SEQ ID NO: 469900 - RNA, 19 nt, Artificial Sequence
  Synthetic
uuaaaugugguacucugca

SEQ ID NO: 469901 - RNA, 20 nt, Artificial Sequence
  Synthetic
uuuaaaugugguacucugca

SEQ ID NO: 469902 - RNA, 21 nt, Artificial Sequence
  Synthetic
cuuuaaaugugguacucugca

SEQ ID NO: 469903 - RNA, 22 nt, Artificial Sequence
  Synthetic
ucuuuaaaugugguacucugca

SEQ ID NO: 469904 - RNA, 23 nt, Artificial Sequence
  Synthetic
cucuuuaaaugugguacucugca

SEQ ID NO: 469905 - RNA, 24 nt, Artificial Sequence
  Synthetic
gcucuuuaaaugugguacucugca

SEQ ID NO: 469906 - RNA, 18 nt, Artificial Sequence
  Synthetic
uaaacaggaaccucugca

SEQ ID NO: 469907 - RNA, 19 nt, Artificial Sequence
  Synthetic
guaaacaggaaccucugca

SEQ ID NO: 469908 - RNA, 20 nt, Artificial Sequence
  Synthetic
uguaaacaggaaccucugca

SEQ ID NO: 469909 - RNA, 21 nt, Artificial Sequence
  Synthetic
cuguaaacaggaaccucugca

SEQ ID NO: 469910 - RNA, 22 nt, Artificial Sequence
  Synthetic
acuguaaacaggaaccucugca

SEQ ID NO: 469911 - RNA, 23 nt, Artificial Sequence
  Synthetic
aacuguaaacaggaaccucugca

SEQ ID NO: 469912 - RNA, 24 nt, Artificial Sequence
  Synthetic
aaacuguaaacaggaaccucugca

SEQ ID NO: 469913 - RNA, 18 nt, Artificial Sequence
  Synthetic
uggauggcugugucugca

SEQ ID NO: 469914 - RNA, 19 nt, Artificial Sequence
  Synthetic
auggauggcugugucugca

SEQ ID NO: 469915 - RNA, 20 nt, Artificial Sequence
  Synthetic
cauggauggcugugucugca

SEQ ID NO: 469916 - RNA, 21 nt, Artificial Sequence
  Synthetic
acauggauggcugugucugca

SEQ ID NO: 469917 - RNA, 22 nt, Artificial Sequence
  Synthetic
uacauggauggcugugucugca

SEQ ID NO: 469918 - RNA, 23 nt, Artificial Sequence
  Synthetic
auacauggauggcugugucugca

SEQ ID NO: 469919 - RNA, 24 nt, Artificial Sequence
  Synthetic
aauacauggauggcugugucugca

SEQ ID NO: 469920 - RNA, 18 nt, Artificial Sequence
  Synthetic
agguaaacuuugucugca

SEQ ID NO: 469921 - RNA, 19 nt, Artificial Sequence
  Synthetic
cagguaaacuuugucugca

SEQ ID NO: 469922 - RNA, 20 nt, Artificial Sequence
  Synthetic
ucagguaaacuuugucugca

SEQ ID NO: 469923 - RNA, 21 nt, Artificial Sequence
  Synthetic
uucagguaaacuuugucugca

SEQ ID NO: 469924 - RNA, 22 nt, Artificial Sequence
  Synthetic
auucagguaaacuuugucugca

SEQ ID NO: 469925 - RNA, 23 nt, Artificial Sequence
  Synthetic
gauucagguaaacuuugucugca

SEQ ID NO: 469926 - RNA, 24 nt, Artificial Sequence
  Synthetic
agauucagguaaacuuugucugca

SEQ ID NO: 469927 - RNA, 18 nt, Artificial Sequence
  Synthetic
guaauuguacauucugca

SEQ ID NO: 469928 - RNA, 19 nt, Artificial Sequence
  Synthetic
gguaauuguacauucugca

SEQ ID NO: 469929 - RNA, 20 nt, Artificial Sequence
  Synthetic
agguaauuguacauucugca

SEQ ID NO: 469930 - RNA, 21 nt, Artificial Sequence
  Synthetic
aagguaauuguacauucugca

SEQ ID NO: 469931 - RNA, 22 nt, Artificial Sequence
  Synthetic
caagguaauuguacauucugca

SEQ ID NO: 469932 - RNA, 23 nt, Artificial Sequence
  Synthetic
acaagguaauuguacauucugca

SEQ ID NO: 469933 - RNA, 24 nt, Artificial Sequence
  Synthetic
cacaagguaauuguacauucugca

SEQ ID NO: 469934 - RNA, 18 nt, Artificial Sequence
  Synthetic
uuuucccucauuucugca

SEQ ID NO: 469935 - RNA, 19 nt, Artificial Sequence
  Synthetic
auuuucccucauuucugca

SEQ ID NO: 469936 - RNA, 20 nt, Artificial Sequence
  Synthetic
gauuuucccucauuucugca

SEQ ID NO: 469937 - RNA, 21 nt, Artificial Sequence
  Synthetic
ugauuuucccucauuucugca

SEQ ID NO: 469938 - RNA, 22 nt, Artificial Sequence
  Synthetic
augauuuucccucauuucugca

SEQ ID NO: 469939 - RNA, 23 nt, Artificial Sequence
  Synthetic
aaugauuuucccucauuucugca

SEQ ID NO: 469940 - RNA, 24 nt, Artificial Sequence
  Synthetic
uaaugauuuucccucauuucugca

SEQ ID NO: 469941 - RNA, 18 nt, Artificial Sequence
  Synthetic
uaguuucucuuuucugca

SEQ ID NO: 469942 - RNA, 19 nt, Artificial Sequence
  Synthetic
guaguuucucuuuucugca

SEQ ID NO: 469943 - RNA, 20 nt, Artificial Sequence
  Synthetic
aguaguuucucuuuucugca

SEQ ID NO: 469944 - RNA, 21 nt, Artificial Sequence
  Synthetic
gaguaguuucucuuuucugca

SEQ ID NO: 469945 - RNA, 22 nt, Artificial Sequence
  Synthetic
agaguaguuucucuuuucugca

SEQ ID NO: 469946 - RNA, 23 nt, Artificial Sequence
  Synthetic
uagaguaguuucucuuuucugca

SEQ ID NO: 469947 - RNA, 24 nt, Artificial Sequence
  Synthetic
cuagaguaguuucucuuuucugca

SEQ ID NO: 469948 - RNA, 18 nt, Artificial Sequence
  Synthetic
auauucaauuaaagugca

SEQ ID NO: 469949 - RNA, 19 nt, Artificial Sequence
  Synthetic
aauauucaauuaaagugca

SEQ ID NO: 469950 - RNA, 20 nt, Artificial Sequence
  Synthetic
aaauauucaauuaaagugca

SEQ ID NO: 469951 - RNA, 21 nt, Artificial Sequence
  Synthetic
aaaauauucaauuaaagugca

SEQ ID NO: 469952 - RNA, 22 nt, Artificial Sequence
  Synthetic
caaaauauucaauuaaagugca

SEQ ID NO: 469953 - RNA, 23 nt, Artificial Sequence
  Synthetic
gcaaaauauucaauuaaagugca

SEQ ID NO: 469954 - RNA, 24 nt, Artificial Sequence
  Synthetic
ggcaaaauauucaauuaaagugca

SEQ ID NO: 469955 - RNA, 18 nt, Artificial Sequence
  Synthetic
aacgucauuuaaagugca

SEQ ID NO: 469956 - RNA, 19 nt, Artificial Sequence
  Synthetic
aaacgucauuuaaagugca

SEQ ID NO: 469957 - RNA, 20 nt, Artificial Sequence
  Synthetic
uaaacgucauuuaaagugca

SEQ ID NO: 469958 - RNA, 21 nt, Artificial Sequence
  Synthetic
cuaaacgucauuuaaagugca

SEQ ID NO: 469959 - RNA, 22 nt, Artificial Sequence
  Synthetic
acuaaacgucauuuaaagugca

SEQ ID NO: 469960 - RNA, 23 nt, Artificial Sequence
  Synthetic
uacuaaacgucauuuaaagugca

SEQ ID NO: 469961 - RNA, 24 nt, Artificial Sequence
  Synthetic
guacuaaacgucauuuaaagugca

SEQ ID NO: 469962 - RNA, 18 nt, Artificial Sequence
  Synthetic
aacauuucugcaagugca

SEQ ID NO: 469963 - RNA, 19 nt, Artificial Sequence
  Synthetic
aaacauuucugcaagugca

SEQ ID NO: 469964 - RNA, 20 nt, Artificial Sequence
  Synthetic
uaaacauuucugcaagugca

SEQ ID NO: 469965 - RNA, 21 nt, Artificial Sequence
  Synthetic
uuaaacauuucugcaagugca

SEQ ID NO: 469966 - RNA, 22 nt, Artificial Sequence
  Synthetic
auuaaacauuucugcaagugca

SEQ ID NO: 469967 - RNA, 23 nt, Artificial Sequence
  Synthetic
uauuaaacauuucugcaagugca

SEQ ID NO: 469968 - RNA, 24 nt, Artificial Sequence
  Synthetic
cuauuaaacauuucugcaagugca

SEQ ID NO: 469969 - RNA, 18 nt, Artificial Sequence
  Synthetic
gaaauggagagaagugca

SEQ ID NO: 469970 - RNA, 19 nt, Artificial Sequence
  Synthetic
agaaauggagagaagugca

SEQ ID NO: 469971 - RNA, 20 nt, Artificial Sequence
  Synthetic
cagaaauggagagaagugca

SEQ ID NO: 469972 - RNA, 21 nt, Artificial Sequence
  Synthetic
gcagaaauggagagaagugca

SEQ ID NO: 469973 - RNA, 22 nt, Artificial Sequence
  Synthetic
ggcagaaauggagagaagugca

SEQ ID NO: 469974 - RNA, 23 nt, Artificial Sequence
  Synthetic
uggcagaaauggagagaagugca

SEQ ID NO: 469975 - RNA, 24 nt, Artificial Sequence
  Synthetic
guggcagaaauggagagaagugca

SEQ ID NO: 469976 - RNA, 18 nt, Artificial Sequence
  Synthetic
gauuuauauguaagugca

SEQ ID NO: 469977 - RNA, 19 nt, Artificial Sequence
  Synthetic
agauuuauauguaagugca

SEQ ID NO: 469978 - RNA, 20 nt, Artificial Sequence
  Synthetic
aagauuuauauguaagugca

SEQ ID NO: 469979 - RNA, 21 nt, Artificial Sequence
  Synthetic
uaagauuuauauguaagugca

SEQ ID NO: 469980 - RNA, 22 nt, Artificial Sequence
  Synthetic
cuaagauuuauauguaagugca

SEQ ID NO: 469981 - RNA, 23 nt, Artificial Sequence
  Synthetic
ccuaagauuuauauguaagugca

SEQ ID NO: 469982 - RNA, 24 nt, Artificial Sequence
  Synthetic
uccuaagauuuauauguaagugca

SEQ ID NO: 469983 - RNA, 18 nt, Artificial Sequence
  Synthetic
aaaguagcaaacagugca

SEQ ID NO: 469984 - RNA, 19 nt, Artificial Sequence
  Synthetic
aaaaguagcaaacagugca

SEQ ID NO: 469985 - RNA, 20 nt, Artificial Sequence
  Synthetic
aaaaaguagcaaacagugca

SEQ ID NO: 469986 - RNA, 21 nt, Artificial Sequence
  Synthetic
aaaaaaguagcaaacagugca

SEQ ID NO: 469987 - RNA, 22 nt, Artificial Sequence
  Synthetic
caaaaaaguagcaaacagugca

SEQ ID NO: 469988 - RNA, 23 nt, Artificial Sequence
  Synthetic
acaaaaaaguagcaaacagugca

SEQ ID NO: 469989 - RNA, 24 nt, Artificial Sequence
  Synthetic
aacaaaaaaguagcaaacagugca

SEQ ID NO: 469990 - RNA, 18 nt, Artificial Sequence
  Synthetic
aauugauucgacagugca

SEQ ID NO: 469991 - RNA, 19 nt, Artificial Sequence
  Synthetic
gaauugauucgacagugca

SEQ ID NO: 469992 - RNA, 20 nt, Artificial Sequence
  Synthetic
ggaauugauucgacagugca

SEQ ID NO: 469993 - RNA, 21 nt, Artificial Sequence
  Synthetic
gggaauugauucgacagugca

SEQ ID NO: 469994 - RNA, 22 nt, Artificial Sequence
  Synthetic
ggggaauugauucgacagugca

SEQ ID NO: 469995 - RNA, 23 nt, Artificial Sequence
  Synthetic
aggggaauugauucgacagugca

SEQ ID NO: 469996 - RNA, 24 nt, Artificial Sequence
  Synthetic
uaggggaauugauucgacagugca

SEQ ID NO: 469997 - RNA, 18 nt, Artificial Sequence
  Synthetic
cacuggacgugcagugca

SEQ ID NO: 469998 - RNA, 19 nt, Artificial Sequence
  Synthetic
gcacuggacgugcagugca

SEQ ID NO: 469999 - RNA, 20 nt, Artificial Sequence
  Synthetic
agcacuggacgugcagugca

SEQ ID NO: 470000 - RNA, 21 nt, Artificial Sequence
  Synthetic
cagcacuggacgugcagugca

SEQ ID NO: 470001 - RNA, 22 nt, Artificial Sequence
  Synthetic
ccagcacuggacgugcagugca

SEQ ID NO: 470002 - RNA, 23 nt, Artificial Sequence
  Synthetic
cccagcacuggacgugcagugca

SEQ ID NO: 470003 - RNA, 24 nt, Artificial Sequence
  Synthetic
acccagcacuggacgugcagugca

SEQ ID NO: 470004 - RNA, 18 nt, Artificial Sequence
  Synthetic
gucuucaaccucagugca

SEQ ID NO: 470005 - RNA, 19 nt, Artificial Sequence
  Synthetic
ggucuucaaccucagugca

SEQ ID NO: 470006 - RNA, 20 nt, Artificial Sequence
  Synthetic
uggucuucaaccucagugca

SEQ ID NO: 470007 - RNA, 21 nt, Artificial Sequence
  Synthetic
uuggucuucaaccucagugca

SEQ ID NO: 470008 - RNA, 22 nt, Artificial Sequence
  Synthetic
uuuggucuucaaccucagugca

SEQ ID NO: 470009 - RNA, 23 nt, Artificial Sequence
  Synthetic
uuuuggucuucaaccucagugca

SEQ ID NO: 470010 - RNA, 24 nt, Artificial Sequence
  Synthetic
auuuuggucuucaaccucagugca

SEQ ID NO: 470011 - RNA, 18 nt, Artificial Sequence
  Synthetic
gagaugcaguagagugca

SEQ ID NO: 470012 - RNA, 19 nt, Artificial Sequence
  Synthetic
agagaugcaguagagugca

SEQ ID NO: 470013 - RNA, 20 nt, Artificial Sequence
  Synthetic
aagagaugcaguagagugca

SEQ ID NO: 470014 - RNA, 21 nt, Artificial Sequence
  Synthetic
gaagagaugcaguagagugca

SEQ ID NO: 470015 - RNA, 22 nt, Artificial Sequence
  Synthetic
ggaagagaugcaguagagugca

SEQ ID NO: 470016 - RNA, 23 nt, Artificial Sequence
  Synthetic
gggaagagaugcaguagagugca

SEQ ID NO: 470017 - RNA, 24 nt, Artificial Sequence
  Synthetic
cgggaagagaugcaguagagugca

SEQ ID NO: 470018 - RNA, 18 nt, Artificial Sequence
  Synthetic
uccccgaacccuagugca

SEQ ID NO: 470019 - RNA, 19 nt, Artificial Sequence
  Synthetic
uuccccgaacccuagugca

SEQ ID NO: 470020 - RNA, 20 nt, Artificial Sequence
  Synthetic
uuuccccgaacccuagugca

SEQ ID NO: 470021 - RNA, 21 nt, Artificial Sequence
  Synthetic
auuuccccgaacccuagugca

SEQ ID NO: 470022 - RNA, 22 nt, Artificial Sequence
  Synthetic
aauuuccccgaacccuagugca

SEQ ID NO: 470023 - RNA, 23 nt, Artificial Sequence
  Synthetic
aaauuuccccgaacccuagugca

SEQ ID NO: 470024 - RNA, 24 nt, Artificial Sequence
  Synthetic
uaaauuuccccgaacccuagugca

SEQ ID NO: 470025 - RNA, 18 nt, Artificial Sequence
  Synthetic
ggcaauauuaaacgugca

SEQ ID NO: 470026 - RNA, 19 nt, Artificial Sequence
  Synthetic
aggcaauauuaaacgugca

SEQ ID NO: 470027 - RNA, 20 nt, Artificial Sequence
  Synthetic
aaggcaauauuaaacgugca

SEQ ID NO: 470028 - RNA, 21 nt, Artificial Sequence
  Synthetic
aaaggcaauauuaaacgugca

SEQ ID NO: 470029 - RNA, 22 nt, Artificial Sequence
  Synthetic
gaaaggcaauauuaaacgugca

SEQ ID NO: 470030 - RNA, 23 nt, Artificial Sequence
  Synthetic
agaaaggcaauauuaaacgugca

SEQ ID NO: 470031 - RNA, 24 nt, Artificial Sequence
  Synthetic
gagaaaggcaauauuaaacgugca

SEQ ID NO: 470032 - RNA, 18 nt, Artificial Sequence
  Synthetic
gggcuacauacacgugca

SEQ ID NO: 470033 - RNA, 19 nt, Artificial Sequence
  Synthetic
ugggcuacauacacgugca

SEQ ID NO: 470034 - RNA, 20 nt, Artificial Sequence
  Synthetic
uugggcuacauacacgugca

SEQ ID NO: 470035 - RNA, 21 nt, Artificial Sequence
  Synthetic
cuugggcuacauacacgugca

SEQ ID NO: 470036 - RNA, 22 nt, Artificial Sequence
  Synthetic
ucuugggcuacauacacgugca

SEQ ID NO: 470037 - RNA, 23 nt, Artificial Sequence
  Synthetic
uucuugggcuacauacacgugca

SEQ ID NO: 470038 - RNA, 24 nt, Artificial Sequence
  Synthetic
auucuugggcuacauacacgugca

SEQ ID NO: 470039 - RNA, 18 nt, Artificial Sequence
  Synthetic
aacggaauaguacgugca

SEQ ID NO: 470040 - RNA, 19 nt, Artificial Sequence
  Synthetic
aaacggaauaguacgugca

SEQ ID NO: 470041 - RNA, 20 nt, Artificial Sequence
  Synthetic
caaacggaauaguacgugca

SEQ ID NO: 470042 - RNA, 21 nt, Artificial Sequence
  Synthetic
acaaacggaauaguacgugca

SEQ ID NO: 470043 - RNA, 22 nt, Artificial Sequence
  Synthetic
gacaaacggaauaguacgugca

SEQ ID NO: 470044 - RNA, 23 nt, Artificial Sequence
  Synthetic
ugacaaacggaauaguacgugca

SEQ ID NO: 470045 - RNA, 24 nt, Artificial Sequence
  Synthetic
cugacaaacggaauaguacgugca

SEQ ID NO: 470046 - RNA, 18 nt, Artificial Sequence
  Synthetic
auugguuaugaccgugca

SEQ ID NO: 470047 - RNA, 19 nt, Artificial Sequence
  Synthetic
uauugguuaugaccgugca

SEQ ID NO: 470048 - RNA, 20 nt, Artificial Sequence
  Synthetic
auauugguuaugaccgugca

SEQ ID NO: 470049 - RNA, 21 nt, Artificial Sequence
  Synthetic
cauauugguuaugaccgugca

SEQ ID NO: 470050 - RNA, 22 nt, Artificial Sequence
  Synthetic
gcauauugguuaugaccgugca

SEQ ID NO: 470051 - RNA, 23 nt, Artificial Sequence
  Synthetic
agcauauugguuaugaccgugca

SEQ ID NO: 470052 - RNA, 24 nt, Artificial Sequence
  Synthetic
aagcauauugguuaugaccgugca

SEQ ID NO: 470053 - RNA, 18 nt, Artificial Sequence
  Synthetic
ccugcccuggaaggugca

SEQ ID NO: 470054 - RNA, 19 nt, Artificial Sequence
  Synthetic
accugcccuggaaggugca

SEQ ID NO: 470055 - RNA, 20 nt, Artificial Sequence
  Synthetic
caccugcccuggaaggugca

SEQ ID NO: 470056 - RNA, 21 nt, Artificial Sequence
  Synthetic
gcaccugcccuggaaggugca

SEQ ID NO: 470057 - RNA, 22 nt, Artificial Sequence
  Synthetic
cgcaccugcccuggaaggugca

SEQ ID NO: 470058 - RNA, 23 nt, Artificial Sequence
  Synthetic
ccgcaccugcccuggaaggugca

SEQ ID NO: 470059 - RNA, 24 nt, Artificial Sequence
  Synthetic
accgcaccugcccuggaaggugca

SEQ ID NO: 470060 - RNA, 18 nt, Artificial Sequence
  Synthetic
agggguuuggaaggugca

SEQ ID NO: 470061 - RNA, 19 nt, Artificial Sequence
  Synthetic
uagggguuuggaaggugca

SEQ ID NO: 470062 - RNA, 20 nt, Artificial Sequence
  Synthetic
auagggguuuggaaggugca

SEQ ID NO: 470063 - RNA, 21 nt, Artificial Sequence
  Synthetic
cauagggguuuggaaggugca

SEQ ID NO: 470064 - RNA, 22 nt, Artificial Sequence
  Synthetic
ucauagggguuuggaaggugca

SEQ ID NO: 470065 - RNA, 23 nt, Artificial Sequence
  Synthetic
gucauagggguuuggaaggugca

SEQ ID NO: 470066 - RNA, 24 nt, Artificial Sequence
  Synthetic
agucauagggguuuggaaggugca

SEQ ID NO: 470067 - RNA, 18 nt, Artificial Sequence
  Synthetic
guaggaguugaaggugca

SEQ ID NO: 470068 - RNA, 19 nt, Artificial Sequence
  Synthetic
aguaggaguugaaggugca

SEQ ID NO: 470069 - RNA, 20 nt, Artificial Sequence
  Synthetic
uaguaggaguugaaggugca

SEQ ID NO: 470070 - RNA, 21 nt, Artificial Sequence
  Synthetic
uuaguaggaguugaaggugca

SEQ ID NO: 470071 - RNA, 22 nt, Artificial Sequence
  Synthetic
uuuaguaggaguugaaggugca

SEQ ID NO: 470072 - RNA, 23 nt, Artificial Sequence
  Synthetic
uuuuaguaggaguugaaggugca

SEQ ID NO: 470073 - RNA, 24 nt, Artificial Sequence
  Synthetic
auuuuaguaggaguugaaggugca

SEQ ID NO: 470074 - RNA, 18 nt, Artificial Sequence
  Synthetic
aauucuaccagaggugca

SEQ ID NO: 470075 - RNA, 19 nt, Artificial Sequence
  Synthetic
gaauucuaccagaggugca

SEQ ID NO: 470076 - RNA, 20 nt, Artificial Sequence
  Synthetic
cgaauucuaccagaggugca

SEQ ID NO: 470077 - RNA, 21 nt, Artificial Sequence
  Synthetic
ccgaauucuaccagaggugca

SEQ ID NO: 470078 - RNA, 22 nt, Artificial Sequence
  Synthetic
gccgaauucuaccagaggugca

SEQ ID NO: 470079 - RNA, 23 nt, Artificial Sequence
  Synthetic
agccgaauucuaccagaggugca

SEQ ID NO: 470080 - RNA, 24 nt, Artificial Sequence
  Synthetic
cagccgaauucuaccagaggugca

SEQ ID NO: 470081 - RNA, 18 nt, Artificial Sequence
  Synthetic
ugggagacagagggugca

SEQ ID NO: 470082 - RNA, 19 nt, Artificial Sequence
  Synthetic
cugggagacagagggugca

SEQ ID NO: 470083 - RNA, 20 nt, Artificial Sequence
  Synthetic
ccugggagacagagggugca

SEQ ID NO: 470084 - RNA, 21 nt, Artificial Sequence
  Synthetic
accugggagacagagggugca

SEQ ID NO: 470085 - RNA, 22 nt, Artificial Sequence
  Synthetic
aaccugggagacagagggugca

SEQ ID NO: 470086 - RNA, 23 nt, Artificial Sequence
  Synthetic
gaaccugggagacagagggugca

SEQ ID NO: 470087 - RNA, 24 nt, Artificial Sequence
  Synthetic
ugaaccugggagacagagggugca

SEQ ID NO: 470088 - RNA, 18 nt, Artificial Sequence
  Synthetic
ucagcaugugagggugca

SEQ ID NO: 470089 - RNA, 19 nt, Artificial Sequence
  Synthetic
uucagcaugugagggugca

SEQ ID NO: 470090 - RNA, 20 nt, Artificial Sequence
  Synthetic
uuucagcaugugagggugca

SEQ ID NO: 470091 - RNA, 21 nt, Artificial Sequence
  Synthetic
cuuucagcaugugagggugca

SEQ ID NO: 470092 - RNA, 22 nt, Artificial Sequence
  Synthetic
ccuuucagcaugugagggugca

SEQ ID NO: 470093 - RNA, 23 nt, Artificial Sequence
  Synthetic
uccuuucagcaugugagggugca

SEQ ID NO: 470094 - RNA, 24 nt, Artificial Sequence
  Synthetic
cuccuuucagcaugugagggugca

SEQ ID NO: 470095 - RNA, 18 nt, Artificial Sequence
  Synthetic
gugcgcuaggggggugca

SEQ ID NO: 470096 - RNA, 19 nt, Artificial Sequence
  Synthetic
cgugcgcuaggggggugca

SEQ ID NO: 470097 - RNA, 20 nt, Artificial Sequence
  Synthetic
gcgugcgcuaggggggugca

SEQ ID NO: 470098 - RNA, 21 nt, Artificial Sequence
  Synthetic
cgcgugcgcuaggggggugca

SEQ ID NO: 470099 - RNA, 22 nt, Artificial Sequence
  Synthetic
gcgcgugcgcuaggggggugca

SEQ ID NO: 470100 - RNA, 23 nt, Artificial Sequence
  Synthetic
cgcgcgugcgcuaggggggugca

SEQ ID NO: 470101 - RNA, 24 nt, Artificial Sequence
  Synthetic
gcgcgcgugcgcuaggggggugca

SEQ ID NO: 470102 - RNA, 18 nt, Artificial Sequence
  Synthetic
ggacaguucuugggugca

SEQ ID NO: 470103 - RNA, 19 nt, Artificial Sequence
  Synthetic
aggacaguucuugggugca

SEQ ID NO: 470104 - RNA, 20 nt, Artificial Sequence
  Synthetic
aaggacaguucuugggugca

SEQ ID NO: 470105 - RNA, 21 nt, Artificial Sequence
  Synthetic
aaaggacaguucuugggugca

SEQ ID NO: 470106 - RNA, 22 nt, Artificial Sequence
  Synthetic
caaaggacaguucuugggugca

SEQ ID NO: 470107 - RNA, 23 nt, Artificial Sequence
  Synthetic
ucaaaggacaguucuugggugca

SEQ ID NO: 470108 - RNA, 24 nt, Artificial Sequence
  Synthetic
gucaaaggacaguucuugggugca

SEQ ID NO: 470109 - RNA, 18 nt, Artificial Sequence
  Synthetic
auguuagaggauggugca

SEQ ID NO: 470110 - RNA, 19 nt, Artificial Sequence
  Synthetic
aauguuagaggauggugca

SEQ ID NO: 470111 - RNA, 20 nt, Artificial Sequence
  Synthetic
uaauguuagaggauggugca

SEQ ID NO: 470112 - RNA, 21 nt, Artificial Sequence
  Synthetic
auaauguuagaggauggugca

SEQ ID NO: 470113 - RNA, 22 nt, Artificial Sequence
  Synthetic
aauaauguuagaggauggugca

SEQ ID NO: 470114 - RNA, 23 nt, Artificial Sequence
  Synthetic
gaauaauguuagaggauggugca

SEQ ID NO: 470115 - RNA, 24 nt, Artificial Sequence
  Synthetic
agaauaauguuagaggauggugca

SEQ ID NO: 470116 - RNA, 18 nt, Artificial Sequence
  Synthetic
aaaacacacaguggugca

SEQ ID NO: 470117 - RNA, 19 nt, Artificial Sequence
  Synthetic
aaaaacacacaguggugca

SEQ ID NO: 470118 - RNA, 20 nt, Artificial Sequence
  Synthetic
caaaaacacacaguggugca

SEQ ID NO: 470119 - RNA, 21 nt, Artificial Sequence
  Synthetic
acaaaaacacacaguggugca

SEQ ID NO: 470120 - RNA, 22 nt, Artificial Sequence
  Synthetic
cacaaaaacacacaguggugca

SEQ ID NO: 470121 - RNA, 23 nt, Artificial Sequence
  Synthetic
ccacaaaaacacacaguggugca

SEQ ID NO: 470122 - RNA, 24 nt, Artificial Sequence
  Synthetic
gccacaaaaacacacaguggugca

SEQ ID NO: 470123 - RNA, 18 nt, Artificial Sequence
  Synthetic
aguaaaggagguggugca

SEQ ID NO: 470124 - RNA, 19 nt, Artificial Sequence
  Synthetic
aaguaaaggagguggugca

SEQ ID NO: 470125 - RNA, 20 nt, Artificial Sequence
  Synthetic
caaguaaaggagguggugca

SEQ ID NO: 470126 - RNA, 21 nt, Artificial Sequence
  Synthetic
acaaguaaaggagguggugca

SEQ ID NO: 470127 - RNA, 22 nt, Artificial Sequence
  Synthetic
aacaaguaaaggagguggugca

SEQ ID NO: 470128 - RNA, 23 nt, Artificial Sequence
  Synthetic
caacaaguaaaggagguggugca

SEQ ID NO: 470129 - RNA, 24 nt, Artificial Sequence
  Synthetic
ucaacaaguaaaggagguggugca

SEQ ID NO: 470130 - RNA, 18 nt, Artificial Sequence
  Synthetic
aauguagcuuuuggugca

SEQ ID NO: 470131 - RNA, 19 nt, Artificial Sequence
  Synthetic
aaauguagcuuuuggugca

SEQ ID NO: 470132 - RNA, 20 nt, Artificial Sequence
  Synthetic
aaaauguagcuuuuggugca

SEQ ID NO: 470133 - RNA, 21 nt, Artificial Sequence
  Synthetic
aaaaauguagcuuuuggugca

SEQ ID NO: 470134 - RNA, 22 nt, Artificial Sequence
  Synthetic
caaaaauguagcuuuuggugca

SEQ ID NO: 470135 - RNA, 23 nt, Artificial Sequence
  Synthetic
acaaaaauguagcuuuuggugca

SEQ ID NO: 470136 - RNA, 24 nt, Artificial Sequence
  Synthetic
cacaaaaauguagcuuuuggugca

SEQ ID NO: 470137 - RNA, 18 nt, Artificial Sequence
  Synthetic
cacucuaaaaaaugugca

SEQ ID NO: 470138 - RNA, 19 nt, Artificial Sequence
  Synthetic
ucacucuaaaaaaugugca

SEQ ID NO: 470139 - RNA, 20 nt, Artificial Sequence
  Synthetic
gucacucuaaaaaaugugca

SEQ ID NO: 470140 - RNA, 21 nt, Artificial Sequence
  Synthetic
ugucacucuaaaaaaugugca

SEQ ID NO: 470141 - RNA, 22 nt, Artificial Sequence
  Synthetic
augucacucuaaaaaaugugca

SEQ ID NO: 470142 - RNA, 23 nt, Artificial Sequence
  Synthetic
aaugucacucuaaaaaaugugca

SEQ ID NO: 470143 - RNA, 24 nt, Artificial Sequence
  Synthetic
aaaugucacucuaaaaaaugugca

SEQ ID NO: 470144 - RNA, 18 nt, Artificial Sequence
  Synthetic
agcuacucaaaaugugca

SEQ ID NO: 470145 - RNA, 19 nt, Artificial Sequence
  Synthetic
aagcuacucaaaaugugca

SEQ ID NO: 470146 - RNA, 20 nt, Artificial Sequence
  Synthetic
aaagcuacucaaaaugugca

SEQ ID NO: 470147 - RNA, 21 nt, Artificial Sequence
  Synthetic
caaagcuacucaaaaugugca

SEQ ID NO: 470148 - RNA, 22 nt, Artificial Sequence
  Synthetic
acaaagcuacucaaaaugugca

SEQ ID NO: 470149 - RNA, 23 nt, Artificial Sequence
  Synthetic
gacaaagcuacucaaaaugugca

SEQ ID NO: 470150 - RNA, 24 nt, Artificial Sequence
  Synthetic
agacaaagcuacucaaaaugugca

SEQ ID NO: 470151 - RNA, 18 nt, Artificial Sequence
  Synthetic
ucuaaugcuaaaugugca

SEQ ID NO: 470152 - RNA, 19 nt, Artificial Sequence
  Synthetic
cucuaaugcuaaaugugca

SEQ ID NO: 470153 - RNA, 20 nt, Artificial Sequence
  Synthetic
ccucuaaugcuaaaugugca

SEQ ID NO: 470154 - RNA, 21 nt, Artificial Sequence
  Synthetic
uccucuaaugcuaaaugugca

SEQ ID NO: 470155 - RNA, 22 nt, Artificial Sequence
  Synthetic
guccucuaaugcuaaaugugca

SEQ ID NO: 470156 - RNA, 23 nt, Artificial Sequence
  Synthetic
uguccucuaaugcuaaaugugca

SEQ ID NO: 470157 - RNA, 24 nt, Artificial Sequence
  Synthetic
guguccucuaaugcuaaaugugca

SEQ ID NO: 470158 - RNA, 18 nt, Artificial Sequence
  Synthetic
aauuaagguuaaugugca

SEQ ID NO: 470159 - RNA, 19 nt, Artificial Sequence
  Synthetic
gaauuaagguuaaugugca

SEQ ID NO: 470160 - RNA, 20 nt, Artificial Sequence
  Synthetic
agaauuaagguuaaugugca

SEQ ID NO: 470161 - RNA, 21 nt, Artificial Sequence
  Synthetic
uagaauuaagguuaaugugca

SEQ ID NO: 470162 - RNA, 22 nt, Artificial Sequence
  Synthetic
cuagaauuaagguuaaugugca

SEQ ID NO: 470163 - RNA, 23 nt, Artificial Sequence
  Synthetic
ucuagaauuaagguuaaugugca

SEQ ID NO: 470164 - RNA, 24 nt, Artificial Sequence
  Synthetic
uucuagaauuaagguuaaugugca

SEQ ID NO: 470165 - RNA, 18 nt, Artificial Sequence
  Synthetic
cagcuugaaauaugugca

SEQ ID NO: 470166 - RNA, 19 nt, Artificial Sequence
  Synthetic
acagcuugaaauaugugca

SEQ ID NO: 470167 - RNA, 20 nt, Artificial Sequence
  Synthetic
uacagcuugaaauaugugca

SEQ ID NO: 470168 - RNA, 21 nt, Artificial Sequence
  Synthetic
cuacagcuugaaauaugugca

SEQ ID NO: 470169 - RNA, 22 nt, Artificial Sequence
  Synthetic
ucuacagcuugaaauaugugca

SEQ ID NO: 470170 - RNA, 23 nt, Artificial Sequence
  Synthetic
aucuacagcuugaaauaugugca

SEQ ID NO: 470171 - RNA, 24 nt, Artificial Sequence
  Synthetic
uaucuacagcuugaaauaugugca

SEQ ID NO: 470172 - RNA, 18 nt, Artificial Sequence
  Synthetic
agcaauuugguaugugca

SEQ ID NO: 470173 - RNA, 19 nt, Artificial Sequence
  Synthetic
aagcaauuugguaugugca

SEQ ID NO: 470174 - RNA, 20 nt, Artificial Sequence
  Synthetic
caagcaauuugguaugugca

SEQ ID NO: 470175 - RNA, 21 nt, Artificial Sequence
  Synthetic
ccaagcaauuugguaugugca

SEQ ID NO: 470176 - RNA, 22 nt, Artificial Sequence
  Synthetic
gccaagcaauuugguaugugca

SEQ ID NO: 470177 - RNA, 23 nt, Artificial Sequence
  Synthetic
ugccaagcaauuugguaugugca

SEQ ID NO: 470178 - RNA, 24 nt, Artificial Sequence
  Synthetic
augccaagcaauuugguaugugca

SEQ ID NO: 470179 - RNA, 18 nt, Artificial Sequence
  Synthetic
caauauauuuuaugugca

SEQ ID NO: 470180 - RNA, 19 nt, Artificial Sequence
  Synthetic
ucaauauauuuuaugugca

SEQ ID NO: 470181 - RNA, 20 nt, Artificial Sequence
  Synthetic
gucaauauauuuuaugugca

SEQ ID NO: 470182 - RNA, 21 nt, Artificial Sequence
  Synthetic
agucaauauauuuuaugugca

SEQ ID NO: 470183 - RNA, 22 nt, Artificial Sequence
  Synthetic
aagucaauauauuuuaugugca

SEQ ID NO: 470184 - RNA, 23 nt, Artificial Sequence
  Synthetic
uaagucaauauauuuuaugugca

SEQ ID NO: 470185 - RNA, 24 nt, Artificial Sequence
  Synthetic
auaagucaauauauuuuaugugca

SEQ ID NO: 470186 - RNA, 18 nt, Artificial Sequence
  Synthetic
ucagucagugccugugca

SEQ ID NO: 470187 - RNA, 19 nt, Artificial Sequence
  Synthetic
cucagucagugccugugca

SEQ ID NO: 470188 - RNA, 20 nt, Artificial Sequence
  Synthetic
ccucagucagugccugugca

SEQ ID NO: 470189 - RNA, 21 nt, Artificial Sequence
  Synthetic
gccucagucagugccugugca

SEQ ID NO: 470190 - RNA, 22 nt, Artificial Sequence
  Synthetic
ggccucagucagugccugugca

SEQ ID NO: 470191 - RNA, 23 nt, Artificial Sequence
  Synthetic
uggccucagucagugccugugca

SEQ ID NO: 470192 - RNA, 24 nt, Artificial Sequence
  Synthetic
cuggccucagucagugccugugca

SEQ ID NO: 470193 - RNA, 18 nt, Artificial Sequence
  Synthetic
uaugaacaggucugugca

SEQ ID NO: 470194 - RNA, 19 nt, Artificial Sequence
  Synthetic
uuaugaacaggucugugca

SEQ ID NO: 470195 - RNA, 20 nt, Artificial Sequence
  Synthetic
cuuaugaacaggucugugca

SEQ ID NO: 470196 - RNA, 21 nt, Artificial Sequence
  Synthetic
ucuuaugaacaggucugugca

SEQ ID NO: 470197 - RNA, 22 nt, Artificial Sequence
  Synthetic
aucuuaugaacaggucugugca

SEQ ID NO: 470198 - RNA, 23 nt, Artificial Sequence
  Synthetic
uaucuuaugaacaggucugugca

SEQ ID NO: 470199 - RNA, 24 nt, Artificial Sequence
  Synthetic
uuaucuuaugaacaggucugugca

SEQ ID NO: 470200 - RNA, 18 nt, Artificial Sequence
  Synthetic
ggggggguguucugugca

SEQ ID NO: 470201 - RNA, 19 nt, Artificial Sequence
  Synthetic
gggggggguguucugugca

SEQ ID NO: 470202 - RNA, 20 nt, Artificial Sequence
  Synthetic
ugggggggguguucugugca

SEQ ID NO: 470203 - RNA, 21 nt, Artificial Sequence
  Synthetic
gugggggggguguucugugca

SEQ ID NO: 470204 - RNA, 22 nt, Artificial Sequence
  Synthetic
ugugggggggguguucugugca

SEQ ID NO: 470205 - RNA, 23 nt, Artificial Sequence
  Synthetic
gugugggggggguguucugugca

SEQ ID NO: 470206 - RNA, 24 nt, Artificial Sequence
  Synthetic
ugugugggggggguguucugugca

SEQ ID NO: 470207 - RNA, 18 nt, Artificial Sequence
  Synthetic
cuugauccaccgugugca

SEQ ID NO: 470208 - RNA, 19 nt, Artificial Sequence
  Synthetic
gcuugauccaccgugugca

SEQ ID NO: 470209 - RNA, 20 nt, Artificial Sequence
  Synthetic
ggcuugauccaccgugugca

SEQ ID NO: 470210 - RNA, 21 nt, Artificial Sequence
  Synthetic
gggcuugauccaccgugugca

SEQ ID NO: 470211 - RNA, 22 nt, Artificial Sequence
  Synthetic
agggcuugauccaccgugugca

SEQ ID NO: 470212 - RNA, 23 nt, Artificial Sequence
  Synthetic
gagggcuugauccaccgugugca

SEQ ID NO: 470213 - RNA, 24 nt, Artificial Sequence
  Synthetic
agagggcuugauccaccgugugca

SEQ ID NO: 470214 - RNA, 18 nt, Artificial Sequence
  Synthetic
aaaauaaaagugugugca

SEQ ID NO: 470215 - RNA, 19 nt, Artificial Sequence
  Synthetic
aaaaauaaaagugugugca

SEQ ID NO: 470216 - RNA, 20 nt, Artificial Sequence
  Synthetic
gaaaaauaaaagugugugca

SEQ ID NO: 470217 - RNA, 21 nt, Artificial Sequence
  Synthetic
agaaaaauaaaagugugugca

SEQ ID NO: 470218 - RNA, 22 nt, Artificial Sequence
  Synthetic
cagaaaaauaaaagugugugca

SEQ ID NO: 470219 - RNA, 23 nt, Artificial Sequence
  Synthetic
gcagaaaaauaaaagugugugca

SEQ ID NO: 470220 - RNA, 24 nt, Artificial Sequence
  Synthetic
agcagaaaaauaaaagugugugca

SEQ ID NO: 470221 - RNA, 18 nt, Artificial Sequence
  Synthetic
ucaacauuuaaaauugca

SEQ ID NO: 470222 - RNA, 19 nt, Artificial Sequence
  Synthetic
aucaacauuuaaaauugca

SEQ ID NO: 470223 - RNA, 20 nt, Artificial Sequence
  Synthetic
caucaacauuuaaaauugca

SEQ ID NO: 470224 - RNA, 21 nt, Artificial Sequence
  Synthetic
acaucaacauuuaaaauugca

SEQ ID NO: 470225 - RNA, 22 nt, Artificial Sequence
  Synthetic
aacaucaacauuuaaaauugca

SEQ ID NO: 470226 - RNA, 23 nt, Artificial Sequence
  Synthetic
gaacaucaacauuuaaaauugca

SEQ ID NO: 470227 - RNA, 24 nt, Artificial Sequence
  Synthetic
ggaacaucaacauuuaaaauugca

SEQ ID NO: 470228 - RNA, 18 nt, Artificial Sequence
  Synthetic
auagaagacacgauugca

SEQ ID NO: 470229 - RNA, 19 nt, Artificial Sequence
  Synthetic
uauagaagacacgauugca

SEQ ID NO: 470230 - RNA, 20 nt, Artificial Sequence
  Synthetic
auauagaagacacgauugca

SEQ ID NO: 470231 - RNA, 21 nt, Artificial Sequence
  Synthetic
uauauagaagacacgauugca

SEQ ID NO: 470232 - RNA, 22 nt, Artificial Sequence
  Synthetic
cuauauagaagacacgauugca

SEQ ID NO: 470233 - RNA, 23 nt, Artificial Sequence
  Synthetic
gcuauauagaagacacgauugca

SEQ ID NO: 470234 - RNA, 24 nt, Artificial Sequence
  Synthetic
ggcuauauagaagacacgauugca

SEQ ID NO: 470235 - RNA, 18 nt, Artificial Sequence
  Synthetic
gggagacuaaugauugca

SEQ ID NO: 470236 - RNA, 19 nt, Artificial Sequence
  Synthetic
ugggagacuaaugauugca

SEQ ID NO: 470237 - RNA, 20 nt, Artificial Sequence
  Synthetic
uugggagacuaaugauugca

SEQ ID NO: 470238 - RNA, 21 nt, Artificial Sequence
  Synthetic
cuugggagacuaaugauugca

SEQ ID NO: 470239 - RNA, 22 nt, Artificial Sequence
  Synthetic
ucuugggagacuaaugauugca

SEQ ID NO: 470240 - RNA, 23 nt, Artificial Sequence
  Synthetic
cucuugggagacuaaugauugca

SEQ ID NO: 470241 - RNA, 24 nt, Artificial Sequence
  Synthetic
acucuugggagacuaaugauugca

SEQ ID NO: 470242 - RNA, 18 nt, Artificial Sequence
  Synthetic
aagaaccacaauauugca

SEQ ID NO: 470243 - RNA, 19 nt, Artificial Sequence
  Synthetic
caagaaccacaauauugca

SEQ ID NO: 470244 - RNA, 20 nt, Artificial Sequence
  Synthetic
ucaagaaccacaauauugca

SEQ ID NO: 470245 - RNA, 21 nt, Artificial Sequence
  Synthetic
gucaagaaccacaauauugca

SEQ ID NO: 470246 - RNA, 22 nt, Artificial Sequence
  Synthetic
ugucaagaaccacaauauugca

SEQ ID NO: 470247 - RNA, 23 nt, Artificial Sequence
  Synthetic
augucaagaaccacaauauugca

SEQ ID NO: 470248 - RNA, 24 nt, Artificial Sequence
  Synthetic
caugucaagaaccacaauauugca

SEQ ID NO: 470249 - RNA, 18 nt, Artificial Sequence
  Synthetic
aaaugaggggauauugca

SEQ ID NO: 470250 - RNA, 19 nt, Artificial Sequence
  Synthetic
aaaaugaggggauauugca

SEQ ID NO: 470251 - RNA, 20 nt, Artificial Sequence
  Synthetic
gaaaaugaggggauauugca

SEQ ID NO: 470252 - RNA, 21 nt, Artificial Sequence
  Synthetic
ggaaaaugaggggauauugca

SEQ ID NO: 470253 - RNA, 22 nt, Artificial Sequence
  Synthetic
aggaaaaugaggggauauugca

SEQ ID NO: 470254 - RNA, 23 nt, Artificial Sequence
  Synthetic
aaggaaaaugaggggauauugca

SEQ ID NO: 470255 - RNA, 24 nt, Artificial Sequence
  Synthetic
gaaggaaaaugaggggauauugca

SEQ ID NO: 470256 - RNA, 18 nt, Artificial Sequence
  Synthetic
aauauacaauauauugca

SEQ ID NO: 470257 - RNA, 19 nt, Artificial Sequence
  Synthetic
caauauacaauauauugca

SEQ ID NO: 470258 - RNA, 20 nt, Artificial Sequence
  Synthetic
gcaauauacaauauauugca

SEQ ID NO: 470259 - RNA, 21 nt, Artificial Sequence
  Synthetic
ugcaauauacaauauauugca

SEQ ID NO: 470260 - RNA, 22 nt, Artificial Sequence
  Synthetic
uugcaauauacaauauauugca

SEQ ID NO: 470261 - RNA, 23 nt, Artificial Sequence
  Synthetic
cuugcaauauacaauauauugca

SEQ ID NO: 470262 - RNA, 24 nt, Artificial Sequence
  Synthetic
ucuugcaauauacaauauauugca

SEQ ID NO: 470263 - RNA, 18 nt, Artificial Sequence
  Synthetic
cuggccauaccuauugca

SEQ ID NO: 470264 - RNA, 19 nt, Artificial Sequence
  Synthetic
acuggccauaccuauugca

SEQ ID NO: 470265 - RNA, 20 nt, Artificial Sequence
  Synthetic
cacuggccauaccuauugca

SEQ ID NO: 470266 - RNA, 21 nt, Artificial Sequence
  Synthetic
ccacuggccauaccuauugca

SEQ ID NO: 470267 - RNA, 22 nt, Artificial Sequence
  Synthetic
cccacuggccauaccuauugca

SEQ ID NO: 470268 - RNA, 23 nt, Artificial Sequence
  Synthetic
gcccacuggccauaccuauugca

SEQ ID NO: 470269 - RNA, 24 nt, Artificial Sequence
  Synthetic
ggcccacuggccauaccuauugca

SEQ ID NO: 470270 - RNA, 18 nt, Artificial Sequence
  Synthetic
aguguuaauauacuugca

SEQ ID NO: 470271 - RNA, 19 nt, Artificial Sequence
  Synthetic
gaguguuaauauacuugca

SEQ ID NO: 470272 - RNA, 20 nt, Artificial Sequence
  Synthetic
agaguguuaauauacuugca

SEQ ID NO: 470273 - RNA, 21 nt, Artificial Sequence
  Synthetic
uagaguguuaauauacuugca

SEQ ID NO: 470274 - RNA, 22 nt, Artificial Sequence
  Synthetic
auagaguguuaauauacuugca

SEQ ID NO: 470275 - RNA, 23 nt, Artificial Sequence
  Synthetic
uauagaguguuaauauacuugca

SEQ ID NO: 470276 - RNA, 24 nt, Artificial Sequence
  Synthetic
uuauagaguguuaauauacuugca

SEQ ID NO: 470277 - RNA, 18 nt, Artificial Sequence
  Synthetic
acaucaagaagccuugca

SEQ ID NO: 470278 - RNA, 19 nt, Artificial Sequence
  Synthetic
gacaucaagaagccuugca

SEQ ID NO: 470279 - RNA, 20 nt, Artificial Sequence
  Synthetic
ugacaucaagaagccuugca

SEQ ID NO: 470280 - RNA, 21 nt, Artificial Sequence
  Synthetic
augacaucaagaagccuugca

SEQ ID NO: 470281 - RNA, 22 nt, Artificial Sequence
  Synthetic
aaugacaucaagaagccuugca

SEQ ID NO: 470282 - RNA, 23 nt, Artificial Sequence
  Synthetic
caaugacaucaagaagccuugca

SEQ ID NO: 470283 - RNA, 24 nt, Artificial Sequence
  Synthetic
acaaugacaucaagaagccuugca

SEQ ID NO: 470284 - RNA, 23 nt, Artificial Sequence
  Synthetic
aaacccgggaggcagagcuugca

SEQ ID NO: 470285 - RNA, 24 nt, Artificial Sequence
  Synthetic
uaaacccgggaggcagagcuugca

SEQ ID NO: 470286 - RNA, 18 nt, Artificial Sequence
  Synthetic
caggaggcggagcuugca

SEQ ID NO: 470287 - RNA, 19 nt, Artificial Sequence
  Synthetic
ccaggaggcggagcuugca

SEQ ID NO: 470288 - RNA, 20 nt, Artificial Sequence
  Synthetic
cccaggaggcggagcuugca

SEQ ID NO: 470289 - RNA, 21 nt, Artificial Sequence
  Synthetic
acccaggaggcggagcuugca

SEQ ID NO: 470290 - RNA, 22 nt, Artificial Sequence
  Synthetic
aacccaggaggcggagcuugca

SEQ ID NO: 470291 - RNA, 23 nt, Artificial Sequence
  Synthetic
gaacccaggaggcggagcuugca

SEQ ID NO: 470292 - RNA, 24 nt, Artificial Sequence
  Synthetic
ugaacccaggaggcggagcuugca

SEQ ID NO: 470293 - RNA, 21 nt, Artificial Sequence
  Synthetic
acccgggaggcggagcuugca

SEQ ID NO: 470294 - RNA, 22 nt, Artificial Sequence
  Synthetic
aacccgggaggcggagcuugca

SEQ ID NO: 470295 - RNA, 23 nt, Artificial Sequence
  Synthetic
gaacccgggaggcggagcuugca

SEQ ID NO: 470296 - RNA, 24 nt, Artificial Sequence
  Synthetic
ugaacccgggaggcggagcuugca

SEQ ID NO: 470297 - RNA, 18 nt, Artificial Sequence
  Synthetic
cgggcaguggagcuugca

SEQ ID NO: 470298 - RNA, 19 nt, Artificial Sequence
  Synthetic
ccgggcaguggagcuugca

SEQ ID NO: 470299 - RNA, 20 nt, Artificial Sequence
  Synthetic
cccgggcaguggagcuugca

SEQ ID NO: 470300 - RNA, 21 nt, Artificial Sequence
  Synthetic
acccgggcaguggagcuugca

SEQ ID NO: 470301 - RNA, 22 nt, Artificial Sequence
  Synthetic
aacccgggcaguggagcuugca

SEQ ID NO: 470302 - RNA, 23 nt, Artificial Sequence
  Synthetic
gaacccgggcaguggagcuugca

SEQ ID NO: 470303 - RNA, 24 nt, Artificial Sequence
  Synthetic
ugaacccgggcaguggagcuugca

SEQ ID NO: 470304 - RNA, 18 nt, Artificial Sequence
  Synthetic
caggagguggagcuugca

SEQ ID NO: 470305 - RNA, 19 nt, Artificial Sequence
  Synthetic
ccaggagguggagcuugca

SEQ ID NO: 470306 - RNA, 20 nt, Artificial Sequence
  Synthetic
cccaggagguggagcuugca

SEQ ID NO: 470307 - RNA, 21 nt, Artificial Sequence
  Synthetic
acccaggagguggagcuugca

SEQ ID NO: 470308 - RNA, 22 nt, Artificial Sequence
  Synthetic
aacccaggagguggagcuugca

SEQ ID NO: 470309 - RNA, 23 nt, Artificial Sequence
  Synthetic
gaacccaggagguggagcuugca

SEQ ID NO: 470310 - RNA, 24 nt, Artificial Sequence
  Synthetic
ugaacccaggagguggagcuugca

SEQ ID NO: 470311 - RNA, 18 nt, Artificial Sequence
  Synthetic
augcaaaacaggcuugca

SEQ ID NO: 470312 - RNA, 19 nt, Artificial Sequence
  Synthetic
gaugcaaaacaggcuugca

SEQ ID NO: 470313 - RNA, 20 nt, Artificial Sequence
  Synthetic
agaugcaaaacaggcuugca

SEQ ID NO: 470314 - RNA, 21 nt, Artificial Sequence
  Synthetic
uagaugcaaaacaggcuugca

SEQ ID NO: 470315 - RNA, 22 nt, Artificial Sequence
  Synthetic
uuagaugcaaaacaggcuugca

SEQ ID NO: 470316 - RNA, 23 nt, Artificial Sequence
  Synthetic
uuuagaugcaaaacaggcuugca

SEQ ID NO: 470317 - RNA, 24 nt, Artificial Sequence
  Synthetic
auuuagaugcaaaacaggcuugca

SEQ ID NO: 470318 - RNA, 18 nt, Artificial Sequence
  Synthetic
aggggccaaaaaguugca

SEQ ID NO: 470319 - RNA, 19 nt, Artificial Sequence
  Synthetic
uaggggccaaaaaguugca

SEQ ID NO: 470320 - RNA, 20 nt, Artificial Sequence
  Synthetic
auaggggccaaaaaguugca

SEQ ID NO: 470321 - RNA, 21 nt, Artificial Sequence
  Synthetic
gauaggggccaaaaaguugca

SEQ ID NO: 470322 - RNA, 22 nt, Artificial Sequence
  Synthetic
ggauaggggccaaaaaguugca

SEQ ID NO: 470323 - RNA, 23 nt, Artificial Sequence
  Synthetic
uggauaggggccaaaaaguugca

SEQ ID NO: 470324 - RNA, 24 nt, Artificial Sequence
  Synthetic
auggauaggggccaaaaaguugca

SEQ ID NO: 470325 - RNA, 18 nt, Artificial Sequence
  Synthetic
agggaugucgaaguugca

SEQ ID NO: 470326 - RNA, 19 nt, Artificial Sequence
  Synthetic
cagggaugucgaaguugca

SEQ ID NO: 470327 - RNA, 20 nt, Artificial Sequence
  Synthetic
ccagggaugucgaaguugca

SEQ ID NO: 470328 - RNA, 21 nt, Artificial Sequence
  Synthetic
cccagggaugucgaaguugca

SEQ ID NO: 470329 - RNA, 22 nt, Artificial Sequence
  Synthetic
gcccagggaugucgaaguugca

SEQ ID NO: 470330 - RNA, 23 nt, Artificial Sequence
  Synthetic
agcccagggaugucgaaguugca

SEQ ID NO: 470331 - RNA, 24 nt, Artificial Sequence
  Synthetic
gagcccagggaugucgaaguugca

SEQ ID NO: 470332 - RNA, 18 nt, Artificial Sequence
  Synthetic
ugggaggcggaaguugca

SEQ ID NO: 470333 - RNA, 19 nt, Artificial Sequence
  Synthetic
cugggaggcggaaguugca

SEQ ID NO: 470334 - RNA, 20 nt, Artificial Sequence
  Synthetic
ccugggaggcggaaguugca

SEQ ID NO: 470335 - RNA, 21 nt, Artificial Sequence
  Synthetic
accugggaggcggaaguugca

SEQ ID NO: 470336 - RNA, 22 nt, Artificial Sequence
  Synthetic
aaccugggaggcggaaguugca

SEQ ID NO: 470337 - RNA, 23 nt, Artificial Sequence
  Synthetic
gaaccugggaggcggaaguugca

SEQ ID NO: 470338 - RNA, 24 nt, Artificial Sequence
  Synthetic
ugaaccugggaggcggaaguugca

SEQ ID NO: 470339 - RNA, 18 nt, Artificial Sequence
  Synthetic
caggagauggaaguugca

SEQ ID NO: 470340 - RNA, 19 nt, Artificial Sequence
  Synthetic
ccaggagauggaaguugca

SEQ ID NO: 470341 - RNA, 20 nt, Artificial Sequence
  Synthetic
cccaggagauggaaguugca

SEQ ID NO: 470342 - RNA, 21 nt, Artificial Sequence
  Synthetic
acccaggagauggaaguugca

SEQ ID NO: 470343 - RNA, 22 nt, Artificial Sequence
  Synthetic
aacccaggagauggaaguugca

SEQ ID NO: 470344 - RNA, 23 nt, Artificial Sequence
  Synthetic
gaacccaggagauggaaguugca

SEQ ID NO: 470345 - RNA, 24 nt, Artificial Sequence
  Synthetic
ugaacccaggagauggaaguugca

SEQ ID NO: 470346 - RNA, 18 nt, Artificial Sequence
  Synthetic
auucagacaacaguugca

SEQ ID NO: 470347 - RNA, 19 nt, Artificial Sequence
  Synthetic
cauucagacaacaguugca

SEQ ID NO: 470348 - RNA, 20 nt, Artificial Sequence
  Synthetic
ccauucagacaacaguugca

SEQ ID NO: 470349 - RNA, 21 nt, Artificial Sequence
  Synthetic
accauucagacaacaguugca

SEQ ID NO: 470350 - RNA, 22 nt, Artificial Sequence
  Synthetic
gaccauucagacaacaguugca

SEQ ID NO: 470351 - RNA, 23 nt, Artificial Sequence
  Synthetic
agaccauucagacaacaguugca

SEQ ID NO: 470352 - RNA, 24 nt, Artificial Sequence
  Synthetic
gagaccauucagacaacaguugca

SEQ ID NO: 470353 - RNA, 18 nt, Artificial Sequence
  Synthetic
uacggacauacaguugca

SEQ ID NO: 470354 - RNA, 19 nt, Artificial Sequence
  Synthetic
guacggacauacaguugca

SEQ ID NO: 470355 - RNA, 20 nt, Artificial Sequence
  Synthetic
gguacggacauacaguugca

SEQ ID NO: 470356 - RNA, 21 nt, Artificial Sequence
  Synthetic
ggguacggacauacaguugca

SEQ ID NO: 470357 - RNA, 22 nt, Artificial Sequence
  Synthetic
uggguacggacauacaguugca

SEQ ID NO: 470358 - RNA, 23 nt, Artificial Sequence
  Synthetic
cuggguacggacauacaguugca

SEQ ID NO: 470359 - RNA, 24 nt, Artificial Sequence
  Synthetic
acuggguacggacauacaguugca

SEQ ID NO: 470360 - RNA, 18 nt, Artificial Sequence
  Synthetic
aaaaaaaauagaguugca

SEQ ID NO: 470361 - RNA, 19 nt, Artificial Sequence
  Synthetic
gaaaaaaaauagaguugca

SEQ ID NO: 470362 - RNA, 20 nt, Artificial Sequence
  Synthetic
ggaaaaaaaauagaguugca

SEQ ID NO: 470363 - RNA, 21 nt, Artificial Sequence
  Synthetic
aggaaaaaaaauagaguugca

SEQ ID NO: 470364 - RNA, 22 nt, Artificial Sequence
  Synthetic
gaggaaaaaaaauagaguugca

SEQ ID NO: 470365 - RNA, 23 nt, Artificial Sequence
  Synthetic
agaggaaaaaaaauagaguugca

SEQ ID NO: 470366 - RNA, 24 nt, Artificial Sequence
  Synthetic
cagaggaaaaaaaauagaguugca

SEQ ID NO: 470367 - RNA, 18 nt, Artificial Sequence
  Synthetic
uuuugcuguagaguugca

SEQ ID NO: 470368 - RNA, 19 nt, Artificial Sequence
  Synthetic
auuuugcuguagaguugca

SEQ ID NO: 470369 - RNA, 20 nt, Artificial Sequence
  Synthetic
cauuuugcuguagaguugca

SEQ ID NO: 470370 - RNA, 21 nt, Artificial Sequence
  Synthetic
acauuuugcuguagaguugca

SEQ ID NO: 470371 - RNA, 22 nt, Artificial Sequence
  Synthetic
uacauuuugcuguagaguugca

SEQ ID NO: 470372 - RNA, 23 nt, Artificial Sequence
  Synthetic
guacauuuugcuguagaguugca

SEQ ID NO: 470373 - RNA, 24 nt, Artificial Sequence
  Synthetic
aguacauuuugcuguagaguugca

SEQ ID NO: 470374 - RNA, 18 nt, Artificial Sequence
  Synthetic
cugggaggcggaguugca

SEQ ID NO: 470375 - RNA, 19 nt, Artificial Sequence
  Synthetic
ucugggaggcggaguugca

SEQ ID NO: 470376 - RNA, 20 nt, Artificial Sequence
  Synthetic
aucugggaggcggaguugca

SEQ ID NO: 470377 - RNA, 21 nt, Artificial Sequence
  Synthetic
aaucugggaggcggaguugca

SEQ ID NO: 470378 - RNA, 22 nt, Artificial Sequence
  Synthetic
gaaucugggaggcggaguugca

SEQ ID NO: 470379 - RNA, 23 nt, Artificial Sequence
  Synthetic
ugaaucugggaggcggaguugca

SEQ ID NO: 470380 - RNA, 24 nt, Artificial Sequence
  Synthetic
uugaaucugggaggcggaguugca

SEQ ID NO: 470381 - RNA, 18 nt, Artificial Sequence
  Synthetic
guuuacuuauuaguugca

SEQ ID NO: 470382 - RNA, 19 nt, Artificial Sequence
  Synthetic
gguuuacuuauuaguugca

SEQ ID NO: 470383 - RNA, 20 nt, Artificial Sequence
  Synthetic
agguuuacuuauuaguugca

SEQ ID NO: 470384 - RNA, 21 nt, Artificial Sequence
  Synthetic
uagguuuacuuauuaguugca

SEQ ID NO: 470385 - RNA, 22 nt, Artificial Sequence
  Synthetic
cuagguuuacuuauuaguugca

SEQ ID NO: 470386 - RNA, 23 nt, Artificial Sequence
  Synthetic
acuagguuuacuuauuaguugca

SEQ ID NO: 470387 - RNA, 24 nt, Artificial Sequence
  Synthetic
uacuagguuuacuuauuaguugca

SEQ ID NO: 470388 - RNA, 18 nt, Artificial Sequence
  Synthetic
acaucugcuugcguugca

SEQ ID NO: 470389 - RNA, 19 nt, Artificial Sequence
  Synthetic
aacaucugcuugcguugca

SEQ ID NO: 470390 - RNA, 20 nt, Artificial Sequence
  Synthetic
uaacaucugcuugcguugca

SEQ ID NO: 470391 - RNA, 21 nt, Artificial Sequence
  Synthetic
cuaacaucugcuugcguugca

SEQ ID NO: 470392 - RNA, 22 nt, Artificial Sequence
  Synthetic
ucuaacaucugcuugcguugca

SEQ ID NO: 470393 - RNA, 23 nt, Artificial Sequence
  Synthetic
uucuaacaucugcuugcguugca

SEQ ID NO: 470394 - RNA, 24 nt, Artificial Sequence
  Synthetic
cuucuaacaucugcuugcguugca

SEQ ID NO: 470395 - RNA, 21 nt, Artificial Sequence
  Synthetic
acccgggaggcagagguugca

SEQ ID NO: 470396 - RNA, 22 nt, Artificial Sequence
  Synthetic
aacccgggaggcagagguugca

SEQ ID NO: 470397 - RNA, 23 nt, Artificial Sequence
  Synthetic
gaacccgggaggcagagguugca

SEQ ID NO: 470398 - RNA, 24 nt, Artificial Sequence
  Synthetic
ugaacccgggaggcagagguugca

SEQ ID NO: 470399 - RNA, 18 nt, Artificial Sequence
  Synthetic
ugggaggcagagguugca

SEQ ID NO: 470400 - RNA, 19 nt, Artificial Sequence
  Synthetic
augggaggcagagguugca

SEQ ID NO: 470401 - RNA, 20 nt, Artificial Sequence
  Synthetic
caugggaggcagagguugca

SEQ ID NO: 470402 - RNA, 21 nt, Artificial Sequence
  Synthetic
acaugggaggcagagguugca

SEQ ID NO: 470403 - RNA, 22 nt, Artificial Sequence
  Synthetic
aacaugggaggcagagguugca

SEQ ID NO: 470404 - RNA, 23 nt, Artificial Sequence
  Synthetic
gaacaugggaggcagagguugca

SEQ ID NO: 470405 - RNA, 24 nt, Artificial Sequence
  Synthetic
ugaacaugggaggcagagguugca

SEQ ID NO: 470406 - RNA, 18 nt, Artificial Sequence
  Synthetic
cuggaggcagagguugca

SEQ ID NO: 470407 - RNA, 19 nt, Artificial Sequence
  Synthetic
ccuggaggcagagguugca

SEQ ID NO: 470408 - RNA, 20 nt, Artificial Sequence
  Synthetic
gccuggaggcagagguugca

SEQ ID NO: 470409 - RNA, 21 nt, Artificial Sequence
  Synthetic
agccuggaggcagagguugca

SEQ ID NO: 470410 - RNA, 22 nt, Artificial Sequence
  Synthetic
aagccuggaggcagagguugca

SEQ ID NO: 470411 - RNA, 23 nt, Artificial Sequence
  Synthetic
gaagccuggaggcagagguugca

SEQ ID NO: 470412 - RNA, 24 nt, Artificial Sequence
  Synthetic
ugaagccuggaggcagagguugca

SEQ ID NO: 470413 - RNA, 18 nt, Artificial Sequence
  Synthetic
cgggcggcagagguugca

SEQ ID NO: 470414 - RNA, 19 nt, Artificial Sequence
  Synthetic
ccgggcggcagagguugca

SEQ ID NO: 470415 - RNA, 20 nt, Artificial Sequence
  Synthetic
cccgggcggcagagguugca

SEQ ID NO: 470416 - RNA, 21 nt, Artificial Sequence
  Synthetic
acccgggcggcagagguugca

SEQ ID NO: 470417 - RNA, 22 nt, Artificial Sequence
  Synthetic
aacccgggcggcagagguugca

SEQ ID NO: 470418 - RNA, 23 nt, Artificial Sequence
  Synthetic
gaacccgggcggcagagguugca

SEQ ID NO: 470419 - RNA, 24 nt, Artificial Sequence
  Synthetic
ugaacccgggcggcagagguugca

SEQ ID NO: 470420 - RNA, 18 nt, Artificial Sequence
  Synthetic
caggagggagagguugca

SEQ ID NO: 470421 - RNA, 19 nt, Artificial Sequence
  Synthetic
ccaggagggagagguugca

SEQ ID NO: 470422 - RNA, 20 nt, Artificial Sequence
  Synthetic
cccaggagggagagguugca

SEQ ID NO: 470423 - RNA, 21 nt, Artificial Sequence
  Synthetic
acccaggagggagagguugca

SEQ ID NO: 470424 - RNA, 22 nt, Artificial Sequence
  Synthetic
aacccaggagggagagguugca

SEQ ID NO: 470425 - RNA, 23 nt, Artificial Sequence
  Synthetic
gaacccaggagggagagguugca

SEQ ID NO: 470426 - RNA, 24 nt, Artificial Sequence
  Synthetic
ugaacccaggagggagagguugca

SEQ ID NO: 470427 - RNA, 18 nt, Artificial Sequence
  Synthetic
caggaagcggagguugca

SEQ ID NO: 470428 - RNA, 19 nt, Artificial Sequence
  Synthetic
ccaggaagcggagguugca

SEQ ID NO: 470429 - RNA, 20 nt, Artificial Sequence
  Synthetic
cccaggaagcggagguugca

SEQ ID NO: 470430 - RNA, 21 nt, Artificial Sequence
  Synthetic
ccccaggaagcggagguugca

SEQ ID NO: 470431 - RNA, 22 nt, Artificial Sequence
  Synthetic
accccaggaagcggagguugca

SEQ ID NO: 470432 - RNA, 23 nt, Artificial Sequence
  Synthetic
gaccccaggaagcggagguugca

SEQ ID NO: 470433 - RNA, 24 nt, Artificial Sequence
  Synthetic
ugaccccaggaagcggagguugca

SEQ ID NO: 470434 - RNA, 18 nt, Artificial Sequence
  Synthetic
caggaggcggagguugca

SEQ ID NO: 470435 - RNA, 19 nt, Artificial Sequence
  Synthetic
ccaggaggcggagguugca

SEQ ID NO: 470436 - RNA, 20 nt, Artificial Sequence
  Synthetic
accaggaggcggagguugca

SEQ ID NO: 470437 - RNA, 21 nt, Artificial Sequence
  Synthetic
aaccaggaggcggagguugca

SEQ ID NO: 470438 - RNA, 22 nt, Artificial Sequence
  Synthetic
gaaccaggaggcggagguugca

SEQ ID NO: 470439 - RNA, 23 nt, Artificial Sequence
  Synthetic
ugaaccaggaggcggagguugca

SEQ ID NO: 470440 - RNA, 24 nt, Artificial Sequence
  Synthetic
uugaaccaggaggcggagguugca

SEQ ID NO: 470441 - RNA, 21 nt, Artificial Sequence
  Synthetic
accugggaggcggagguugca

SEQ ID NO: 470442 - RNA, 22 nt, Artificial Sequence
  Synthetic
aaccugggaggcggagguugca

SEQ ID NO: 470443 - RNA, 23 nt, Artificial Sequence
  Synthetic
gaaccugggaggcggagguugca

SEQ ID NO: 470444 - RNA, 24 nt, Artificial Sequence
  Synthetic
ugaaccugggaggcggagguugca

SEQ ID NO: 470445 - RNA, 18 nt, Artificial Sequence
  Synthetic
uagguggcggagguugca

SEQ ID NO: 470446 - RNA, 19 nt, Artificial Sequence
  Synthetic
cuagguggcggagguugca

SEQ ID NO: 470447 - RNA, 20 nt, Artificial Sequence
  Synthetic
ccuagguggcggagguugca

SEQ ID NO: 470448 - RNA, 21 nt, Artificial Sequence
  Synthetic
accuagguggcggagguugca

SEQ ID NO: 470449 - RNA, 22 nt, Artificial Sequence
  Synthetic
aaccuagguggcggagguugca

SEQ ID NO: 470450 - RNA, 23 nt, Artificial Sequence
  Synthetic
gaaccuagguggcggagguugca

SEQ ID NO: 470451 - RNA, 24 nt, Artificial Sequence
  Synthetic
ugaaccuagguggcggagguugca

SEQ ID NO: 470452 - RNA, 18 nt, Artificial Sequence
  Synthetic
cacgauggggagguugca

SEQ ID NO: 470453 - RNA, 19 nt, Artificial Sequence
  Synthetic
ccacgauggggagguugca

SEQ ID NO: 470454 - RNA, 20 nt, Artificial Sequence
  Synthetic
cccacgauggggagguugca

SEQ ID NO: 470455 - RNA, 21 nt, Artificial Sequence
  Synthetic
gcccacgauggggagguugca

SEQ ID NO: 470456 - RNA, 22 nt, Artificial Sequence
  Synthetic
agcccacgauggggagguugca

SEQ ID NO: 470457 - RNA, 23 nt, Artificial Sequence
  Synthetic
gagcccacgauggggagguugca

SEQ ID NO: 470458 - RNA, 24 nt, Artificial Sequence
  Synthetic
ugagcccacgauggggagguugca

SEQ ID NO: 470459 - RNA, 18 nt, Artificial Sequence
  Synthetic
uggaagguggagguugca

SEQ ID NO: 470460 - RNA, 19 nt, Artificial Sequence
  Synthetic
cuggaagguggagguugca

SEQ ID NO: 470461 - RNA, 20 nt, Artificial Sequence
  Synthetic
acuggaagguggagguugca

SEQ ID NO: 470462 - RNA, 21 nt, Artificial Sequence
  Synthetic
aacuggaagguggagguugca

SEQ ID NO: 470463 - RNA, 22 nt, Artificial Sequence
  Synthetic
aaacuggaagguggagguugca

SEQ ID NO: 470464 - RNA, 23 nt, Artificial Sequence
  Synthetic
gaaacuggaagguggagguugca

SEQ ID NO: 470465 - RNA, 24 nt, Artificial Sequence
  Synthetic
ugaaacuggaagguggagguugca

SEQ ID NO: 470466 - RNA, 18 nt, Artificial Sequence
  Synthetic
uaagagguggagguugca

SEQ ID NO: 470467 - RNA, 19 nt, Artificial Sequence
  Synthetic
cuaagagguggagguugca

SEQ ID NO: 470468 - RNA, 20 nt, Artificial Sequence
  Synthetic
acuaagagguggagguugca

SEQ ID NO: 470469 - RNA, 21 nt, Artificial Sequence
  Synthetic
aacuaagagguggagguugca

SEQ ID NO: 470470 - RNA, 22 nt, Artificial Sequence
  Synthetic
aaacuaagagguggagguugca

SEQ ID NO: 470471 - RNA, 23 nt, Artificial Sequence
  Synthetic
gaaacuaagagguggagguugca

SEQ ID NO: 470472 - RNA, 24 nt, Artificial Sequence
  Synthetic
ugaaacuaagagguggagguugca

SEQ ID NO: 470473 - RNA, 18 nt, Artificial Sequence
  Synthetic
caggagguggagguugca

SEQ ID NO: 470474 - RNA, 19 nt, Artificial Sequence
  Synthetic
acaggagguggagguugca

SEQ ID NO: 470475 - RNA, 20 nt, Artificial Sequence
  Synthetic
aacaggagguggagguugca

SEQ ID NO: 470476 - RNA, 21 nt, Artificial Sequence
  Synthetic
aaacaggagguggagguugca

SEQ ID NO: 470477 - RNA, 22 nt, Artificial Sequence
  Synthetic
gaaacaggagguggagguugca

SEQ ID NO: 470478 - RNA, 23 nt, Artificial Sequence
  Synthetic
cgaaacaggagguggagguugca

SEQ ID NO: 470479 - RNA, 24 nt, Artificial Sequence
  Synthetic
ucgaaacaggagguggagguugca

SEQ ID NO: 470480 - RNA, 21 nt, Artificial Sequence
  Synthetic
gcccaggagguggagguugca

SEQ ID NO: 470481 - RNA, 22 nt, Artificial Sequence
  Synthetic
agcccaggagguggagguugca

SEQ ID NO: 470482 - RNA, 23 nt, Artificial Sequence
  Synthetic
gagcccaggagguggagguugca

SEQ ID NO: 470483 - RNA, 24 nt, Artificial Sequence
  Synthetic
cgagcccaggagguggagguugca

SEQ ID NO: 470484 - RNA, 24 nt, Artificial Sequence
  Synthetic
ugagcccaggagguggagguugca

SEQ ID NO: 470485 - RNA, 18 nt, Artificial Sequence
  Synthetic
cgggagguggagguugca

SEQ ID NO: 470486 - RNA, 19 nt, Artificial Sequence
  Synthetic
ucgggagguggagguugca

SEQ ID NO: 470487 - RNA, 20 nt, Artificial Sequence
  Synthetic
cucgggagguggagguugca

SEQ ID NO: 470488 - RNA, 21 nt, Artificial Sequence
  Synthetic
acucgggagguggagguugca

SEQ ID NO: 470489 - RNA, 22 nt, Artificial Sequence
  Synthetic
aacucgggagguggagguugca

SEQ ID NO: 470490 - RNA, 23 nt, Artificial Sequence
  Synthetic
gaacucgggagguggagguugca

SEQ ID NO: 470491 - RNA, 24 nt, Artificial Sequence
  Synthetic
ugaacucgggagguggagguugca

SEQ ID NO: 470492 - RNA, 21 nt, Artificial Sequence
  Synthetic
accugggagguggagguugca

SEQ ID NO: 470493 - RNA, 22 nt, Artificial Sequence
  Synthetic
aaccugggagguggagguugca

SEQ ID NO: 470494 - RNA, 23 nt, Artificial Sequence
  Synthetic
gaaccugggagguggagguugca

SEQ ID NO: 470495 - RNA, 24 nt, Artificial Sequence
  Synthetic
ugaaccugggagguggagguugca

SEQ ID NO: 470496 - RNA, 18 nt, Artificial Sequence
  Synthetic
cgggaggcagugguugca

SEQ ID NO: 470497 - RNA, 19 nt, Artificial Sequence
  Synthetic
ccgggaggcagugguugca

SEQ ID NO: 470498 - RNA, 20 nt, Artificial Sequence
  Synthetic
cccgggaggcagugguugca

SEQ ID NO: 470499 - RNA, 21 nt, Artificial Sequence
  Synthetic
acccgggaggcagugguugca

SEQ ID NO: 470500 - RNA, 22 nt, Artificial Sequence
  Synthetic
aacccgggaggcagugguugca

SEQ ID NO: 470501 - RNA, 23 nt, Artificial Sequence
  Synthetic
gaacccgggaggcagugguugca

SEQ ID NO: 470502 - RNA, 24 nt, Artificial Sequence
  Synthetic
ugaacccgggaggcagugguugca

SEQ ID NO: 470503 - RNA, 18 nt, Artificial Sequence
  Synthetic
auugugaguaguguugca

SEQ ID NO: 470504 - RNA, 19 nt, Artificial Sequence
  Synthetic
uauugugaguaguguugca

SEQ ID NO: 470505 - RNA, 20 nt, Artificial Sequence
  Synthetic
cuauugugaguaguguugca

SEQ ID NO: 470506 - RNA, 21 nt, Artificial Sequence
  Synthetic
gcuauugugaguaguguugca

SEQ ID NO: 470507 - RNA, 22 nt, Artificial Sequence
  Synthetic
ugcuauugugaguaguguugca

SEQ ID NO: 470508 - RNA, 23 nt, Artificial Sequence
  Synthetic
uugcuauugugaguaguguugca

SEQ ID NO: 470509 - RNA, 24 nt, Artificial Sequence
  Synthetic
uuugcuauugugaguaguguugca

SEQ ID NO: 470510 - RNA, 18 nt, Artificial Sequence
  Synthetic
uucucuuuucuuguugca

SEQ ID NO: 470511 - RNA, 19 nt, Artificial Sequence
  Synthetic
uuucucuuuucuuguugca

SEQ ID NO: 470512 - RNA, 20 nt, Artificial Sequence
  Synthetic
uuuucucuuuucuuguugca

SEQ ID NO: 470513 - RNA, 21 nt, Artificial Sequence
  Synthetic
guuuucucuuuucuuguugca

SEQ ID NO: 470514 - RNA, 22 nt, Artificial Sequence
  Synthetic
uguuuucucuuuucuuguugca

SEQ ID NO: 470515 - RNA, 23 nt, Artificial Sequence
  Synthetic
uuguuuucucuuuucuuguugca

SEQ ID NO: 470516 - RNA, 24 nt, Artificial Sequence
  Synthetic
auuguuuucucuuuucuuguugca

SEQ ID NO: 470517 - RNA, 18 nt, Artificial Sequence
  Synthetic
aaaauccuaaaauuugca

SEQ ID NO: 470518 - RNA, 19 nt, Artificial Sequence
  Synthetic
aaaaauccuaaaauuugca

SEQ ID NO: 470519 - RNA, 20 nt, Artificial Sequence
  Synthetic
aaaaaauccuaaaauuugca

SEQ ID NO: 470520 - RNA, 21 nt, Artificial Sequence
  Synthetic
uaaaaaauccuaaaauuugca

SEQ ID NO: 470521 - RNA, 22 nt, Artificial Sequence
  Synthetic
uuaaaaaauccuaaaauuugca

SEQ ID NO: 470522 - RNA, 23 nt, Artificial Sequence
  Synthetic
uuuaaaaaauccuaaaauuugca

SEQ ID NO: 470523 - RNA, 24 nt, Artificial Sequence
  Synthetic
uuuuaaaaaauccuaaaauuugca

SEQ ID NO: 470524 - RNA, 18 nt, Artificial Sequence
  Synthetic
uuuuauuaguaauuugca

SEQ ID NO: 470525 - RNA, 19 nt, Artificial Sequence
  Synthetic
cuuuuauuaguaauuugca

SEQ ID NO: 470526 - RNA, 20 nt, Artificial Sequence
  Synthetic
ucuuuuauuaguaauuugca

SEQ ID NO: 470527 - RNA, 21 nt, Artificial Sequence
  Synthetic
aucuuuuauuaguaauuugca

SEQ ID NO: 470528 - RNA, 22 nt, Artificial Sequence
  Synthetic
gaucuuuuauuaguaauuugca

SEQ ID NO: 470529 - RNA, 23 nt, Artificial Sequence
  Synthetic
agaucuuuuauuaguaauuugca

SEQ ID NO: 470530 - RNA, 24 nt, Artificial Sequence
  Synthetic
cagaucuuuuauuaguaauuugca

SEQ ID NO: 470531 - RNA, 18 nt, Artificial Sequence
  Synthetic
uuuugguuuccauuugca

SEQ ID NO: 470532 - RNA, 19 nt, Artificial Sequence
  Synthetic
cuuuugguuuccauuugca

SEQ ID NO: 470533 - RNA, 20 nt, Artificial Sequence
  Synthetic
ucuuuugguuuccauuugca

SEQ ID NO: 470534 - RNA, 21 nt, Artificial Sequence
  Synthetic
cucuuuugguuuccauuugca

SEQ ID NO: 470535 - RNA, 22 nt, Artificial Sequence
  Synthetic
ucucuuuugguuuccauuugca

SEQ ID NO: 470536 - RNA, 23 nt, Artificial Sequence
  Synthetic
uucucuuuugguuuccauuugca

SEQ ID NO: 470537 - RNA, 24 nt, Artificial Sequence
  Synthetic
auucucuuuugguuuccauuugca

SEQ ID NO: 470538 - RNA, 18 nt, Artificial Sequence
  Synthetic
cauuuacuuagauuugca

SEQ ID NO: 470539 - RNA, 19 nt, Artificial Sequence
  Synthetic
ccauuuacuuagauuugca

SEQ ID NO: 470540 - RNA, 20 nt, Artificial Sequence
  Synthetic
uccauuuacuuagauuugca

SEQ ID NO: 470541 - RNA, 21 nt, Artificial Sequence
  Synthetic
cuccauuuacuuagauuugca

SEQ ID NO: 470542 - RNA, 22 nt, Artificial Sequence
  Synthetic
ucuccauuuacuuagauuugca

SEQ ID NO: 470543 - RNA, 23 nt, Artificial Sequence
  Synthetic
cucuccauuuacuuagauuugca

SEQ ID NO: 470544 - RNA, 24 nt, Artificial Sequence
  Synthetic
ucucuccauuuacuuagauuugca

SEQ ID NO: 470545 - RNA, 18 nt, Artificial Sequence
  Synthetic
aaaauuuaggccuuugca

SEQ ID NO: 470546 - RNA, 19 nt, Artificial Sequence
  Synthetic
gaaaauuuaggccuuugca

SEQ ID NO: 470547 - RNA, 20 nt, Artificial Sequence
  Synthetic
agaaaauuuaggccuuugca

SEQ ID NO: 470548 - RNA, 21 nt, Artificial Sequence
  Synthetic
aagaaaauuuaggccuuugca

SEQ ID NO: 470549 - RNA, 22 nt, Artificial Sequence
  Synthetic
gaagaaaauuuaggccuuugca

SEQ ID NO: 470550 - RNA, 23 nt, Artificial Sequence
  Synthetic
ggaagaaaauuuaggccuuugca

SEQ ID NO: 470551 - RNA, 24 nt, Artificial Sequence
  Synthetic
uggaagaaaauuuaggccuuugca

SEQ ID NO: 470552 - RNA, 18 nt, Artificial Sequence
  Synthetic
cuaguaauuuucuuugca

SEQ ID NO: 470553 - RNA, 19 nt, Artificial Sequence
  Synthetic
acuaguaauuuucuuugca

SEQ ID NO: 470554 - RNA, 20 nt, Artificial Sequence
  Synthetic
cacuaguaauuuucuuugca

SEQ ID NO: 470555 - RNA, 21 nt, Artificial Sequence
  Synthetic
ucacuaguaauuuucuuugca

SEQ ID NO: 470556 - RNA, 22 nt, Artificial Sequence
  Synthetic
gucacuaguaauuuucuuugca

SEQ ID NO: 470557 - RNA, 23 nt, Artificial Sequence
  Synthetic
ugucacuaguaauuuucuuugca

SEQ ID NO: 470558 - RNA, 24 nt, Artificial Sequence
  Synthetic
uugucacuaguaauuuucuuugca

SEQ ID NO: 470559 - RNA, 18 nt, Artificial Sequence
  Synthetic
acuaugaagcaguuugca

SEQ ID NO: 470560 - RNA, 19 nt, Artificial Sequence
  Synthetic
aacuaugaagcaguuugca

SEQ ID NO: 470561 - RNA, 20 nt, Artificial Sequence
  Synthetic
gaacuaugaagcaguuugca

SEQ ID NO: 470562 - RNA, 21 nt, Artificial Sequence
  Synthetic
ggaacuaugaagcaguuugca

SEQ ID NO: 470563 - RNA, 22 nt, Artificial Sequence
  Synthetic
aggaacuaugaagcaguuugca

SEQ ID NO: 470564 - RNA, 23 nt, Artificial Sequence
  Synthetic
aaggaacuaugaagcaguuugca

SEQ ID NO: 470565 - RNA, 24 nt, Artificial Sequence
  Synthetic
aaaggaacuaugaagcaguuugca

SEQ ID NO: 470566 - RNA, 18 nt, Artificial Sequence
  Synthetic
uaggagguggaguuugca

SEQ ID NO: 470567 - RNA, 19 nt, Artificial Sequence
  Synthetic
uuaggagguggaguuugca

SEQ ID NO: 470568 - RNA, 20 nt, Artificial Sequence
  Synthetic
cuuaggagguggaguuugca

SEQ ID NO: 470569 - RNA, 21 nt, Artificial Sequence
  Synthetic
acuuaggagguggaguuugca

SEQ ID NO: 470570 - RNA, 22 nt, Artificial Sequence
  Synthetic
aacuuaggagguggaguuugca

SEQ ID NO: 470571 - RNA, 23 nt, Artificial Sequence
  Synthetic
gaacuuaggagguggaguuugca

SEQ ID NO: 470572 - RNA, 24 nt, Artificial Sequence
  Synthetic
ugaacuuaggagguggaguuugca

SEQ ID NO: 470573 - RNA, 18 nt, Artificial Sequence
  Synthetic
auuuuuaaugaguuugca

SEQ ID NO: 470574 - RNA, 19 nt, Artificial Sequence
  Synthetic
aauuuuuaaugaguuugca

SEQ ID NO: 470575 - RNA, 20 nt, Artificial Sequence
  Synthetic
aaauuuuuaaugaguuugca

SEQ ID NO: 470576 - RNA, 21 nt, Artificial Sequence
  Synthetic
aaaauuuuuaaugaguuugca

SEQ ID NO: 470577 - RNA, 22 nt, Artificial Sequence
  Synthetic
gaaaauuuuuaaugaguuugca

SEQ ID NO: 470578 - RNA, 23 nt, Artificial Sequence
  Synthetic
ugaaaauuuuuaaugaguuugca

SEQ ID NO: 470579 - RNA, 24 nt, Artificial Sequence
  Synthetic
cugaaaauuuuuaaugaguuugca

SEQ ID NO: 470580 - RNA, 18 nt, Artificial Sequence
  Synthetic
aggguaaaacuguuugca

SEQ ID NO: 470581 - RNA, 19 nt, Artificial Sequence
  Synthetic
aaggguaaaacuguuugca

SEQ ID NO: 470582 - RNA, 20 nt, Artificial Sequence
  Synthetic
aaaggguaaaacuguuugca

SEQ ID NO: 470583 - RNA, 21 nt, Artificial Sequence
  Synthetic
aaaaggguaaaacuguuugca

SEQ ID NO: 470584 - RNA, 22 nt, Artificial Sequence
  Synthetic
uaaaaggguaaaacuguuugca

SEQ ID NO: 470585 - RNA, 23 nt, Artificial Sequence
  Synthetic
cuaaaaggguaaaacuguuugca

SEQ ID NO: 470586 - RNA, 24 nt, Artificial Sequence
  Synthetic
gcuaaaaggguaaaacuguuugca

SEQ ID NO: 470587 - RNA, 18 nt, Artificial Sequence
  Synthetic
acaauauuagauuuugca

SEQ ID NO: 470588 - RNA, 19 nt, Artificial Sequence
  Synthetic
uacaauauuagauuuugca

SEQ ID NO: 470589 - RNA, 20 nt, Artificial Sequence
  Synthetic
auacaauauuagauuuugca

SEQ ID NO: 470590 - RNA, 21 nt, Artificial Sequence
  Synthetic
uauacaauauuagauuuugca

SEQ ID NO: 470591 - RNA, 22 nt, Artificial Sequence
  Synthetic
cuauacaauauuagauuuugca

SEQ ID NO: 470592 - RNA, 23 nt, Artificial Sequence
  Synthetic
acuauacaauauuagauuuugca

SEQ ID NO: 470593 - RNA, 24 nt, Artificial Sequence
  Synthetic
uacuauacaauauuagauuuugca

SEQ ID NO: 470594 - RNA, 18 nt, Artificial Sequence
  Synthetic
acauuaaaaccuuuugca

SEQ ID NO: 470595 - RNA, 19 nt, Artificial Sequence
  Synthetic
uacauuaaaaccuuuugca

SEQ ID NO: 470596 - RNA, 20 nt, Artificial Sequence
  Synthetic
auacauuaaaaccuuuugca

SEQ ID NO: 470597 - RNA, 21 nt, Artificial Sequence
  Synthetic
uauacauuaaaaccuuuugca

SEQ ID NO: 470598 - RNA, 22 nt, Artificial Sequence
  Synthetic
uuauacauuaaaaccuuuugca

SEQ ID NO: 470599 - RNA, 23 nt, Artificial Sequence
  Synthetic
uuuauacauuaaaaccuuuugca

SEQ ID NO: 470600 - RNA, 24 nt, Artificial Sequence
  Synthetic
auuuauacauuaaaaccuuuugca

SEQ ID NO: 470601 - RNA, 18 nt, Artificial Sequence
  Synthetic
uaaugacuccuuuuugca

SEQ ID NO: 470602 - RNA, 19 nt, Artificial Sequence
  Synthetic
uuaaugacuccuuuuugca

SEQ ID NO: 470603 - RNA, 20 nt, Artificial Sequence
  Synthetic
uuuaaugacuccuuuuugca

SEQ ID NO: 470604 - RNA, 21 nt, Artificial Sequence
  Synthetic
auuuaaugacuccuuuuugca

SEQ ID NO: 470605 - RNA, 22 nt, Artificial Sequence
  Synthetic
uauuuaaugacuccuuuuugca

SEQ ID NO: 470606 - RNA, 23 nt, Artificial Sequence
  Synthetic
guauuuaaugacuccuuuuugca

SEQ ID NO: 470607 - RNA, 24 nt, Artificial Sequence
  Synthetic
aguauuuaaugacuccuuuuugca

SEQ ID NO: 470608 - RNA, 18 nt, Artificial Sequence
  Synthetic
gagcacagaaaaaaauca

SEQ ID NO: 470609 - RNA, 19 nt, Artificial Sequence
  Synthetic
agagcacagaaaaaaauca

SEQ ID NO: 470610 - RNA, 20 nt, Artificial Sequence
  Synthetic
aagagcacagaaaaaaauca

SEQ ID NO: 470611 - RNA, 21 nt, Artificial Sequence
  Synthetic
gaagagcacagaaaaaaauca

SEQ ID NO: 470612 - RNA, 22 nt, Artificial Sequence
  Synthetic
ggaagagcacagaaaaaaauca

SEQ ID NO: 470613 - RNA, 23 nt, Artificial Sequence
  Synthetic
aggaagagcacagaaaaaaauca

SEQ ID NO: 470614 - RNA, 24 nt, Artificial Sequence
  Synthetic
aaggaagagcacagaaaaaaauca

SEQ ID NO: 470615 - RNA, 18 nt, Artificial Sequence
  Synthetic
auuauggcuaaaaaauca

SEQ ID NO: 470616 - RNA, 19 nt, Artificial Sequence
  Synthetic
cauuauggcuaaaaaauca

SEQ ID NO: 470617 - RNA, 20 nt, Artificial Sequence
  Synthetic
acauuauggcuaaaaaauca

SEQ ID NO: 470618 - RNA, 21 nt, Artificial Sequence
  Synthetic
aacauuauggcuaaaaaauca

SEQ ID NO: 470619 - RNA, 22 nt, Artificial Sequence
  Synthetic
aaacauuauggcuaaaaaauca

SEQ ID NO: 470620 - RNA, 23 nt, Artificial Sequence
  Synthetic
uaaacauuauggcuaaaaaauca

SEQ ID NO: 470621 - RNA, 24 nt, Artificial Sequence
  Synthetic
auaaacauuauggcuaaaaaauca

SEQ ID NO: 470622 - RNA, 18 nt, Artificial Sequence
  Synthetic
agacuggaacaaaaauca

SEQ ID NO: 470623 - RNA, 19 nt, Artificial Sequence
  Synthetic
aagacuggaacaaaaauca

SEQ ID NO: 470624 - RNA, 20 nt, Artificial Sequence
  Synthetic
aaagacuggaacaaaaauca

SEQ ID NO: 470625 - RNA, 21 nt, Artificial Sequence
  Synthetic
gaaagacuggaacaaaaauca

SEQ ID NO: 470626 - RNA, 22 nt, Artificial Sequence
  Synthetic
ugaaagacuggaacaaaaauca

SEQ ID NO: 470627 - RNA, 23 nt, Artificial Sequence
  Synthetic
augaaagacuggaacaaaaauca

SEQ ID NO: 470628 - RNA, 24 nt, Artificial Sequence
  Synthetic
aaugaaagacuggaacaaaaauca

SEQ ID NO: 470629 - RNA, 18 nt, Artificial Sequence
  Synthetic
aguuuuacugaaaaauca

SEQ ID NO: 470630 - RNA, 19 nt, Artificial Sequence
  Synthetic
aaguuuuacugaaaaauca

SEQ ID NO: 470631 - RNA, 20 nt, Artificial Sequence
  Synthetic
caaguuuuacugaaaaauca

SEQ ID NO: 470632 - RNA, 21 nt, Artificial Sequence
  Synthetic
ucaaguuuuacugaaaaauca

SEQ ID NO: 470633 - RNA, 22 nt, Artificial Sequence
  Synthetic
aucaaguuuuacugaaaaauca

SEQ ID NO: 470634 - RNA, 23 nt, Artificial Sequence
  Synthetic
aaucaaguuuuacugaaaaauca

SEQ ID NO: 470635 - RNA, 24 nt, Artificial Sequence
  Synthetic
gaaucaaguuuuacugaaaaauca

SEQ ID NO: 470636 - RNA, 18 nt, Artificial Sequence
  Synthetic
acuucuuguuaaaaauca

SEQ ID NO: 470637 - RNA, 19 nt, Artificial Sequence
  Synthetic
uacuucuuguuaaaaauca

SEQ ID NO: 470638 - RNA, 20 nt, Artificial Sequence
  Synthetic
uuacuucuuguuaaaaauca

SEQ ID NO: 470639 - RNA, 21 nt, Artificial Sequence
  Synthetic
uuuacuucuuguuaaaaauca

SEQ ID NO: 470640 - RNA, 22 nt, Artificial Sequence
  Synthetic
uuuuacuucuuguuaaaaauca

SEQ ID NO: 470641 - RNA, 23 nt, Artificial Sequence
  Synthetic
cuuuuacuucuuguuaaaaauca

SEQ ID NO: 470642 - RNA, 24 nt, Artificial Sequence
  Synthetic
acuuuuacuucuuguuaaaaauca

SEQ ID NO: 470643 - RNA, 18 nt, Artificial Sequence
  Synthetic
cuugaaaagacaaaauca

SEQ ID NO: 470644 - RNA, 19 nt, Artificial Sequence
  Synthetic
ccuugaaaagacaaaauca

SEQ ID NO: 470645 - RNA, 20 nt, Artificial Sequence
  Synthetic
cccuugaaaagacaaaauca

SEQ ID NO: 470646 - RNA, 21 nt, Artificial Sequence
  Synthetic
ucccuugaaaagacaaaauca

SEQ ID NO: 470647 - RNA, 22 nt, Artificial Sequence
  Synthetic
cucccuugaaaagacaaaauca

SEQ ID NO: 470648 - RNA, 23 nt, Artificial Sequence
  Synthetic
acucccuugaaaagacaaaauca

SEQ ID NO: 470649 - RNA, 24 nt, Artificial Sequence
  Synthetic
aacucccuugaaaagacaaaauca

SEQ ID NO: 470650 - RNA, 18 nt, Artificial Sequence
  Synthetic
uguuuguuuacaaaauca

SEQ ID NO: 470651 - RNA, 19 nt, Artificial Sequence
  Synthetic
auguuuguuuacaaaauca

SEQ ID NO: 470652 - RNA, 20 nt, Artificial Sequence
  Synthetic
cauguuuguuuacaaaauca

SEQ ID NO: 470653 - RNA, 21 nt, Artificial Sequence
  Synthetic
acauguuuguuuacaaaauca

SEQ ID NO: 470654 - RNA, 22 nt, Artificial Sequence
  Synthetic
aacauguuuguuuacaaaauca

SEQ ID NO: 470655 - RNA, 23 nt, Artificial Sequence
  Synthetic
aaacauguuuguuuacaaaauca

SEQ ID NO: 470656 - RNA, 24 nt, Artificial Sequence
  Synthetic
aaaacauguuuguuuacaaaauca

SEQ ID NO: 470657 - RNA, 18 nt, Artificial Sequence
  Synthetic
gcacugacaucaaaauca

SEQ ID NO: 470658 - RNA, 19 nt, Artificial Sequence
  Synthetic
agcacugacaucaaaauca

SEQ ID NO: 470659 - RNA, 20 nt, Artificial Sequence
  Synthetic
aagcacugacaucaaaauca

SEQ ID NO: 470660 - RNA, 21 nt, Artificial Sequence
  Synthetic
caagcacugacaucaaaauca

SEQ ID NO: 470661 - RNA, 22 nt, Artificial Sequence
  Synthetic
ucaagcacugacaucaaaauca

SEQ ID NO: 470662 - RNA, 23 nt, Artificial Sequence
  Synthetic
cucaagcacugacaucaaaauca

SEQ ID NO: 470663 - RNA, 24 nt, Artificial Sequence
  Synthetic
acucaagcacugacaucaaaauca

SEQ ID NO: 470664 - RNA, 18 nt, Artificial Sequence
  Synthetic
ccagcggcaucaaaauca

SEQ ID NO: 470665 - RNA, 19 nt, Artificial Sequence
  Synthetic
accagcggcaucaaaauca

SEQ ID NO: 470666 - RNA, 20 nt, Artificial Sequence
  Synthetic
caccagcggcaucaaaauca

SEQ ID NO: 470667 - RNA, 21 nt, Artificial Sequence
  Synthetic
ucaccagcggcaucaaaauca

SEQ ID NO: 470668 - RNA, 22 nt, Artificial Sequence
  Synthetic
cucaccagcggcaucaaaauca

SEQ ID NO: 470669 - RNA, 23 nt, Artificial Sequence
  Synthetic
ccucaccagcggcaucaaaauca

SEQ ID NO: 470670 - RNA, 24 nt, Artificial Sequence
  Synthetic
cccucaccagcggcaucaaaauca

SEQ ID NO: 470671 - RNA, 18 nt, Artificial Sequence
  Synthetic
caaaagagaucaaaauca

SEQ ID NO: 470672 - RNA, 19 nt, Artificial Sequence
  Synthetic
acaaaagagaucaaaauca

SEQ ID NO: 470673 - RNA, 20 nt, Artificial Sequence
  Synthetic
uacaaaagagaucaaaauca

SEQ ID NO: 470674 - RNA, 21 nt, Artificial Sequence
  Synthetic
auacaaaagagaucaaaauca

SEQ ID NO: 470675 - RNA, 22 nt, Artificial Sequence
  Synthetic
cauacaaaagagaucaaaauca

SEQ ID NO: 470676 - RNA, 23 nt, Artificial Sequence
  Synthetic
ccauacaaaagagaucaaaauca

SEQ ID NO: 470677 - RNA, 24 nt, Artificial Sequence
  Synthetic
accauacaaaagagaucaaaauca

SEQ ID NO: 470678 - RNA, 18 nt, Artificial Sequence
  Synthetic
uuuugagucucaaaauca

SEQ ID NO: 470679 - RNA, 19 nt, Artificial Sequence
  Synthetic
cuuuugagucucaaaauca

SEQ ID NO: 470680 - RNA, 20 nt, Artificial Sequence
  Synthetic
acuuuugagucucaaaauca

SEQ ID NO: 470681 - RNA, 21 nt, Artificial Sequence
  Synthetic
uacuuuugagucucaaaauca

SEQ ID NO: 470682 - RNA, 22 nt, Artificial Sequence
  Synthetic
guacuuuugagucucaaaauca

SEQ ID NO: 470683 - RNA, 23 nt, Artificial Sequence
  Synthetic
gguacuuuugagucucaaaauca

SEQ ID NO: 470684 - RNA, 24 nt, Artificial Sequence
  Synthetic
ugguacuuuugagucucaaaauca

SEQ ID NO: 470685 - RNA, 18 nt, Artificial Sequence
  Synthetic
uuacccacccgaaaauca

SEQ ID NO: 470686 - RNA, 19 nt, Artificial Sequence
  Synthetic
guuacccacccgaaaauca

SEQ ID NO: 470687 - RNA, 20 nt, Artificial Sequence
  Synthetic
aguuacccacccgaaaauca

SEQ ID NO: 470688 - RNA, 21 nt, Artificial Sequence
  Synthetic
uaguuacccacccgaaaauca

SEQ ID NO: 470689 - RNA, 22 nt, Artificial Sequence
  Synthetic
uuaguuacccacccgaaaauca

SEQ ID NO: 470690 - RNA, 23 nt, Artificial Sequence
  Synthetic
guuaguuacccacccgaaaauca

SEQ ID NO: 470691 - RNA, 24 nt, Artificial Sequence
  Synthetic
aguuaguuacccacccgaaaauca

SEQ ID NO: 470692 - RNA, 18 nt, Artificial Sequence
  Synthetic
auugaaauuguaaaauca

SEQ ID NO: 470693 - RNA, 19 nt, Artificial Sequence
  Synthetic
uauugaaauuguaaaauca

SEQ ID NO: 470694 - RNA, 20 nt, Artificial Sequence
  Synthetic
auauugaaauuguaaaauca

SEQ ID NO: 470695 - RNA, 21 nt, Artificial Sequence
  Synthetic
aauauugaaauuguaaaauca

SEQ ID NO: 470696 - RNA, 22 nt, Artificial Sequence
  Synthetic
gaauauugaaauuguaaaauca

SEQ ID NO: 470697 - RNA, 23 nt, Artificial Sequence
  Synthetic
ugaauauugaaauuguaaaauca

SEQ ID NO: 470698 - RNA, 24 nt, Artificial Sequence
  Synthetic
augaauauugaaauuguaaaauca

SEQ ID NO: 470699 - RNA, 18 nt, Artificial Sequence
  Synthetic
aacuauugaaacaaauca

SEQ ID NO: 470700 - RNA, 19 nt, Artificial Sequence
  Synthetic
caacuauugaaacaaauca

SEQ ID NO: 470701 - RNA, 20 nt, Artificial Sequence
  Synthetic
acaacuauugaaacaaauca

SEQ ID NO: 470702 - RNA, 21 nt, Artificial Sequence
  Synthetic
aacaacuauugaaacaaauca

SEQ ID NO: 470703 - RNA, 22 nt, Artificial Sequence
  Synthetic
caacaacuauugaaacaaauca

SEQ ID NO: 470704 - RNA, 23 nt, Artificial Sequence
  Synthetic
gcaacaacuauugaaacaaauca

SEQ ID NO: 470705 - RNA, 24 nt, Artificial Sequence
  Synthetic
ggcaacaacuauugaaacaaauca

SEQ ID NO: 470706 - RNA, 18 nt, Artificial Sequence
  Synthetic
aaaacaugagacaaauca

SEQ ID NO: 470707 - RNA, 19 nt, Artificial Sequence
  Synthetic
aaaaacaugagacaaauca

SEQ ID NO: 470708 - RNA, 20 nt, Artificial Sequence
  Synthetic
gaaaaacaugagacaaauca

SEQ ID NO: 470709 - RNA, 21 nt, Artificial Sequence
  Synthetic
agaaaaacaugagacaaauca

SEQ ID NO: 470710 - RNA, 22 nt, Artificial Sequence
  Synthetic
uagaaaaacaugagacaaauca

SEQ ID NO: 470711 - RNA, 23 nt, Artificial Sequence
  Synthetic
cuagaaaaacaugagacaaauca

SEQ ID NO: 470712 - RNA, 24 nt, Artificial Sequence
  Synthetic
gcuagaaaaacaugagacaaauca

SEQ ID NO: 470713 - RNA, 18 nt, Artificial Sequence
  Synthetic
uuguacucucccaaauca

SEQ ID NO: 470714 - RNA, 19 nt, Artificial Sequence
  Synthetic
uuuguacucucccaaauca

SEQ ID NO: 470715 - RNA, 20 nt, Artificial Sequence
  Synthetic
auuuguacucucccaaauca

SEQ ID NO: 470716 - RNA, 21 nt, Artificial Sequence
  Synthetic
aauuuguacucucccaaauca

SEQ ID NO: 470717 - RNA, 22 nt, Artificial Sequence
  Synthetic
caauuuguacucucccaaauca

SEQ ID NO: 470718 - RNA, 23 nt, Artificial Sequence
  Synthetic
gcaauuuguacucucccaaauca

SEQ ID NO: 470719 - RNA, 24 nt, Artificial Sequence
  Synthetic
cgcaauuuguacucucccaaauca

SEQ ID NO: 470720 - RNA, 18 nt, Artificial Sequence
  Synthetic
gacauucauggcaaauca

SEQ ID NO: 470721 - RNA, 19 nt, Artificial Sequence
  Synthetic
agacauucauggcaaauca

SEQ ID NO: 470722 - RNA, 20 nt, Artificial Sequence
  Synthetic
gagacauucauggcaaauca

SEQ ID NO: 470723 - RNA, 21 nt, Artificial Sequence
  Synthetic
agagacauucauggcaaauca

SEQ ID NO: 470724 - RNA, 22 nt, Artificial Sequence
  Synthetic
aagagacauucauggcaaauca

SEQ ID NO: 470725 - RNA, 23 nt, Artificial Sequence
  Synthetic
gaagagacauucauggcaaauca

SEQ ID NO: 470726 - RNA, 24 nt, Artificial Sequence
  Synthetic
ugaagagacauucauggcaaauca

SEQ ID NO: 470727 - RNA, 18 nt, Artificial Sequence
  Synthetic
aggaaaugcaucaaauca

SEQ ID NO: 470728 - RNA, 19 nt, Artificial Sequence
  Synthetic
aaggaaaugcaucaaauca

SEQ ID NO: 470729 - RNA, 20 nt, Artificial Sequence
  Synthetic
caaggaaaugcaucaaauca

SEQ ID NO: 470730 - RNA, 21 nt, Artificial Sequence
  Synthetic
acaaggaaaugcaucaaauca

SEQ ID NO: 470731 - RNA, 22 nt, Artificial Sequence
  Synthetic
uacaaggaaaugcaucaaauca

SEQ ID NO: 470732 - RNA, 23 nt, Artificial Sequence
  Synthetic
auacaaggaaaugcaucaaauca

SEQ ID NO: 470733 - RNA, 24 nt, Artificial Sequence
  Synthetic
aauacaaggaaaugcaucaaauca

SEQ ID NO: 470734 - RNA, 18 nt, Artificial Sequence
  Synthetic
guccaggagaagaaauca

SEQ ID NO: 470735 - RNA, 19 nt, Artificial Sequence
  Synthetic
aguccaggagaagaaauca

SEQ ID NO: 470736 - RNA, 20 nt, Artificial Sequence
  Synthetic
caguccaggagaagaaauca

SEQ ID NO: 470737 - RNA, 21 nt, Artificial Sequence
  Synthetic
acaguccaggagaagaaauca

SEQ ID NO: 470738 - RNA, 22 nt, Artificial Sequence
  Synthetic
cacaguccaggagaagaaauca

SEQ ID NO: 470739 - RNA, 23 nt, Artificial Sequence
  Synthetic
ucacaguccaggagaagaaauca

SEQ ID NO: 470740 - RNA, 24 nt, Artificial Sequence
  Synthetic
gucacaguccaggagaagaaauca

SEQ ID NO: 470741 - RNA, 18 nt, Artificial Sequence
  Synthetic
aaaucaaaucagaaauca

SEQ ID NO: 470742 - RNA, 19 nt, Artificial Sequence
  Synthetic
uaaaucaaaucagaaauca

SEQ ID NO: 470743 - RNA, 20 nt, Artificial Sequence
  Synthetic
auaaaucaaaucagaaauca

SEQ ID NO: 470744 - RNA, 21 nt, Artificial Sequence
  Synthetic
aauaaaucaaaucagaaauca

SEQ ID NO: 470745 - RNA, 22 nt, Artificial Sequence
  Synthetic
aaauaaaucaaaucagaaauca

SEQ ID NO: 470746 - RNA, 23 nt, Artificial Sequence
  Synthetic
caaauaaaucaaaucagaaauca

SEQ ID NO: 470747 - RNA, 24 nt, Artificial Sequence
  Synthetic
ucaaauaaaucaaaucagaaauca

SEQ ID NO: 470748 - RNA, 18 nt, Artificial Sequence
  Synthetic
guuuccauggagaaauca

SEQ ID NO: 470749 - RNA, 19 nt, Artificial Sequence
  Synthetic
gguuuccauggagaaauca

SEQ ID NO: 470750 - RNA, 20 nt, Artificial Sequence
  Synthetic
ugguuuccauggagaaauca

SEQ ID NO: 470751 - RNA, 21 nt, Artificial Sequence
  Synthetic
augguuuccauggagaaauca

SEQ ID NO: 470752 - RNA, 22 nt, Artificial Sequence
  Synthetic
aaugguuuccauggagaaauca

SEQ ID NO: 470753 - RNA, 23 nt, Artificial Sequence
  Synthetic
aaaugguuuccauggagaaauca

SEQ ID NO: 470754 - RNA, 24 nt, Artificial Sequence
  Synthetic
caaaugguuuccauggagaaauca

SEQ ID NO: 470755 - RNA, 18 nt, Artificial Sequence
  Synthetic
uugugcugcuugaaauca

SEQ ID NO: 470756 - RNA, 19 nt, Artificial Sequence
  Synthetic
cuugugcugcuugaaauca

SEQ ID NO: 470757 - RNA, 20 nt, Artificial Sequence
  Synthetic
acuugugcugcuugaaauca

SEQ ID NO: 470758 - RNA, 21 nt, Artificial Sequence
  Synthetic
aacuugugcugcuugaaauca

SEQ ID NO: 470759 - RNA, 22 nt, Artificial Sequence
  Synthetic
gaacuugugcugcuugaaauca

SEQ ID NO: 470760 - RNA, 23 nt, Artificial Sequence
  Synthetic
ugaacuugugcugcuugaaauca

SEQ ID NO: 470761 - RNA, 24 nt, Artificial Sequence
  Synthetic
uugaacuugugcugcuugaaauca

SEQ ID NO: 470762 - RNA, 18 nt, Artificial Sequence
  Synthetic
gucauauuaaauaaauca

SEQ ID NO: 470763 - RNA, 19 nt, Artificial Sequence
  Synthetic
ggucauauuaaauaaauca

SEQ ID NO: 470764 - RNA, 20 nt, Artificial Sequence
  Synthetic
uggucauauuaaauaaauca

SEQ ID NO: 470765 - RNA, 21 nt, Artificial Sequence
  Synthetic
guggucauauuaaauaaauca

SEQ ID NO: 470766 - RNA, 22 nt, Artificial Sequence
  Synthetic
gguggucauauuaaauaaauca

SEQ ID NO: 470767 - RNA, 23 nt, Artificial Sequence
  Synthetic
ugguggucauauuaaauaaauca

SEQ ID NO: 470768 - RNA, 24 nt, Artificial Sequence
  Synthetic
augguggucauauuaaauaaauca

SEQ ID NO: 470769 - RNA, 18 nt, Artificial Sequence
  Synthetic
cuuuucuugaauaaauca

SEQ ID NO: 470770 - RNA, 19 nt, Artificial Sequence
  Synthetic
ucuuuucuugaauaaauca

SEQ ID NO: 470771 - RNA, 20 nt, Artificial Sequence
  Synthetic
uucuuuucuugaauaaauca

SEQ ID NO: 470772 - RNA, 21 nt, Artificial Sequence
  Synthetic
auucuuuucuugaauaaauca

SEQ ID NO: 470773 - RNA, 22 nt, Artificial Sequence
  Synthetic
uauucuuuucuugaauaaauca

SEQ ID NO: 470774 - RNA, 23 nt, Artificial Sequence
  Synthetic
auauucuuuucuugaauaaauca

SEQ ID NO: 470775 - RNA, 24 nt, Artificial Sequence
  Synthetic
uauauucuuuucuugaauaaauca

SEQ ID NO: 470776 - RNA, 18 nt, Artificial Sequence
  Synthetic
aucugauuccauaaauca

SEQ ID NO: 470777 - RNA, 19 nt, Artificial Sequence
  Synthetic
aaucugauuccauaaauca

SEQ ID NO: 470778 - RNA, 20 nt, Artificial Sequence
  Synthetic
aaaucugauuccauaaauca

SEQ ID NO: 470779 - RNA, 21 nt, Artificial Sequence
  Synthetic
aaaaucugauuccauaaauca

SEQ ID NO: 470780 - RNA, 22 nt, Artificial Sequence
  Synthetic
aaaaaucugauuccauaaauca

SEQ ID NO: 470781 - RNA, 23 nt, Artificial Sequence
  Synthetic
aaaaaaucugauuccauaaauca

SEQ ID NO: 470782 - RNA, 24 nt, Artificial Sequence
  Synthetic
aaaaaaaucugauuccauaaauca

SEQ ID NO: 470783 - RNA, 18 nt, Artificial Sequence
  Synthetic
auuucaacucauaaauca

SEQ ID NO: 470784 - RNA, 19 nt, Artificial Sequence
  Synthetic
uauuucaacucauaaauca

SEQ ID NO: 470785 - RNA, 20 nt, Artificial Sequence
  Synthetic
guauuucaacucauaaauca

SEQ ID NO: 470786 - RNA, 21 nt, Artificial Sequence
  Synthetic
uguauuucaacucauaaauca

SEQ ID NO: 470787 - RNA, 22 nt, Artificial Sequence
  Synthetic
uuguauuucaacucauaaauca

SEQ ID NO: 470788 - RNA, 23 nt, Artificial Sequence
  Synthetic
uuuguauuucaacucauaaauca

SEQ ID NO: 470789 - RNA, 24 nt, Artificial Sequence
  Synthetic
auuuguauuucaacucauaaauca

SEQ ID NO: 470790 - RNA, 18 nt, Artificial Sequence
  Synthetic
gguuuucucuauaaauca

SEQ ID NO: 470791 - RNA, 19 nt, Artificial Sequence
  Synthetic
ugguuuucucuauaaauca

SEQ ID NO: 470792 - RNA, 20 nt, Artificial Sequence
  Synthetic
cugguuuucucuauaaauca

SEQ ID NO: 470793 - RNA, 21 nt, Artificial Sequence
  Synthetic
ccugguuuucucuauaaauca

SEQ ID NO: 470794 - RNA, 22 nt, Artificial Sequence
  Synthetic
gccugguuuucucuauaaauca

SEQ ID NO: 470795 - RNA, 23 nt, Artificial Sequence
  Synthetic
ugccugguuuucucuauaaauca

SEQ ID NO: 470796 - RNA, 24 nt, Artificial Sequence
  Synthetic
uugccugguuuucucuauaaauca

SEQ ID NO: 470797 - RNA, 18 nt, Artificial Sequence
  Synthetic
gacuauauaccuaaauca

SEQ ID NO: 470798 - RNA, 19 nt, Artificial Sequence
  Synthetic
agacuauauaccuaaauca

SEQ ID NO: 470799 - RNA, 20 nt, Artificial Sequence
  Synthetic
aagacuauauaccuaaauca

SEQ ID NO: 470800 - RNA, 21 nt, Artificial Sequence
  Synthetic
aaagacuauauaccuaaauca

SEQ ID NO: 470801 - RNA, 22 nt, Artificial Sequence
  Synthetic
aaaagacuauauaccuaaauca

SEQ ID NO: 470802 - RNA, 23 nt, Artificial Sequence
  Synthetic
aaaaagacuauauaccuaaauca

SEQ ID NO: 470803 - RNA, 24 nt, Artificial Sequence
  Synthetic
aaaaaagacuauauaccuaaauca

SEQ ID NO: 470804 - RNA, 18 nt, Artificial Sequence
  Synthetic
ccuuacagcucuaaauca

SEQ ID NO: 470805 - RNA, 19 nt, Artificial Sequence
  Synthetic
cccuuacagcucuaaauca

SEQ ID NO: 470806 - RNA, 20 nt, Artificial Sequence
  Synthetic
gcccuuacagcucuaaauca

SEQ ID NO: 470807 - RNA, 21 nt, Artificial Sequence
  Synthetic
agcccuuacagcucuaaauca

SEQ ID NO: 470808 - RNA, 22 nt, Artificial Sequence
  Synthetic
cagcccuuacagcucuaaauca

SEQ ID NO: 470809 - RNA, 23 nt, Artificial Sequence
  Synthetic
ucagcccuuacagcucuaaauca

SEQ ID NO: 470810 - RNA, 24 nt, Artificial Sequence
  Synthetic
aucagcccuuacagcucuaaauca

SEQ ID NO: 470811 - RNA, 18 nt, Artificial Sequence
  Synthetic
uaagccuugucuaaauca

SEQ ID NO: 470812 - RNA, 19 nt, Artificial Sequence
  Synthetic
auaagccuugucuaaauca

SEQ ID NO: 470813 - RNA, 20 nt, Artificial Sequence
  Synthetic
aauaagccuugucuaaauca

SEQ ID NO: 470814 - RNA, 21 nt, Artificial Sequence
  Synthetic
gaauaagccuugucuaaauca

SEQ ID NO: 470815 - RNA, 22 nt, Artificial Sequence
  Synthetic
agaauaagccuugucuaaauca

SEQ ID NO: 470816 - RNA, 23 nt, Artificial Sequence
  Synthetic
aagaauaagccuugucuaaauca

SEQ ID NO: 470817 - RNA, 24 nt, Artificial Sequence
  Synthetic
gaagaauaagccuugucuaaauca

SEQ ID NO: 470818 - RNA, 18 nt, Artificial Sequence
  Synthetic
gauuuauggaguaaauca

SEQ ID NO: 470819 - RNA, 19 nt, Artificial Sequence
  Synthetic
ggauuuauggaguaaauca

SEQ ID NO: 470820 - RNA, 20 nt, Artificial Sequence
  Synthetic
aggauuuauggaguaaauca

SEQ ID NO: 470821 - RNA, 21 nt, Artificial Sequence
  Synthetic
aaggauuuauggaguaaauca

SEQ ID NO: 470822 - RNA, 22 nt, Artificial Sequence
  Synthetic
aaaggauuuauggaguaaauca

SEQ ID NO: 470823 - RNA, 23 nt, Artificial Sequence
  Synthetic
aaaaggauuuauggaguaaauca

SEQ ID NO: 470824 - RNA, 24 nt, Artificial Sequence
  Synthetic
aaaaaggauuuauggaguaaauca

SEQ ID NO: 470825 - RNA, 18 nt, Artificial Sequence
  Synthetic
uaaucccaguguaaauca

SEQ ID NO: 470826 - RNA, 19 nt, Artificial Sequence
  Synthetic
guaaucccaguguaaauca

SEQ ID NO: 470827 - RNA, 20 nt, Artificial Sequence
  Synthetic
uguaaucccaguguaaauca

SEQ ID NO: 470828 - RNA, 21 nt, Artificial Sequence
  Synthetic
auguaaucccaguguaaauca

SEQ ID NO: 470829 - RNA, 22 nt, Artificial Sequence
  Synthetic
gauguaaucccaguguaaauca

SEQ ID NO: 470830 - RNA, 23 nt, Artificial Sequence
  Synthetic
ggauguaaucccaguguaaauca

SEQ ID NO: 470831 - RNA, 24 nt, Artificial Sequence
  Synthetic
gggauguaaucccaguguaaauca

SEQ ID NO: 470832 - RNA, 18 nt, Artificial Sequence
  Synthetic
ucaacagaacuuaaauca

SEQ ID NO: 470833 - RNA, 19 nt, Artificial Sequence
  Synthetic
uucaacagaacuuaaauca

SEQ ID NO: 470834 - RNA, 20 nt, Artificial Sequence
  Synthetic
uuucaacagaacuuaaauca

SEQ ID NO: 470835 - RNA, 21 nt, Artificial Sequence
  Synthetic
auuucaacagaacuuaaauca

SEQ ID NO: 470836 - RNA, 22 nt, Artificial Sequence
  Synthetic
cauuucaacagaacuuaaauca

SEQ ID NO: 470837 - RNA, 23 nt, Artificial Sequence
  Synthetic
gcauuucaacagaacuuaaauca

SEQ ID NO: 470838 - RNA, 24 nt, Artificial Sequence
  Synthetic
agcauuucaacagaacuuaaauca

SEQ ID NO: 470839 - RNA, 18 nt, Artificial Sequence
  Synthetic
ggcugcuuccaacaauca

SEQ ID NO: 470840 - RNA, 19 nt, Artificial Sequence
  Synthetic
gggcugcuuccaacaauca

SEQ ID NO: 470841 - RNA, 20 nt, Artificial Sequence
  Synthetic
ugggcugcuuccaacaauca

SEQ ID NO: 470842 - RNA, 21 nt, Artificial Sequence
  Synthetic
cugggcugcuuccaacaauca

SEQ ID NO: 470843 - RNA, 22 nt, Artificial Sequence
  Synthetic
gcugggcugcuuccaacaauca

SEQ ID NO: 470844 - RNA, 23 nt, Artificial Sequence
  Synthetic
ggcugggcugcuuccaacaauca

SEQ ID NO: 470845 - RNA, 24 nt, Artificial Sequence
  Synthetic
aggcugggcugcuuccaacaauca

SEQ ID NO: 470846 - RNA, 18 nt, Artificial Sequence
  Synthetic
ugcuauggauaacaauca

SEQ ID NO: 470847 - RNA, 19 nt, Artificial Sequence
  Synthetic
uugcuauggauaacaauca

SEQ ID NO: 470848 - RNA, 20 nt, Artificial Sequence
  Synthetic
guugcuauggauaacaauca

SEQ ID NO: 470849 - RNA, 21 nt, Artificial Sequence
  Synthetic
uguugcuauggauaacaauca

SEQ ID NO: 470850 - RNA, 22 nt, Artificial Sequence
  Synthetic
uuguugcuauggauaacaauca

SEQ ID NO: 470851 - RNA, 23 nt, Artificial Sequence
  Synthetic
uuuguugcuauggauaacaauca

SEQ ID NO: 470852 - RNA, 24 nt, Artificial Sequence
  Synthetic
auuuguugcuauggauaacaauca

SEQ ID NO: 470853 - RNA, 18 nt, Artificial Sequence
  Synthetic
aagaaaacuucacaauca

SEQ ID NO: 470854 - RNA, 19 nt, Artificial Sequence
  Synthetic
gaagaaaacuucacaauca

SEQ ID NO: 470855 - RNA, 20 nt, Artificial Sequence
  Synthetic
ugaagaaaacuucacaauca

SEQ ID NO: 470856 - RNA, 21 nt, Artificial Sequence
  Synthetic
cugaagaaaacuucacaauca

SEQ ID NO: 470857 - RNA, 22 nt, Artificial Sequence
  Synthetic
ucugaagaaaacuucacaauca

SEQ ID NO: 470858 - RNA, 23 nt, Artificial Sequence
  Synthetic
cucugaagaaaacuucacaauca

SEQ ID NO: 470859 - RNA, 24 nt, Artificial Sequence
  Synthetic
gcucugaagaaaacuucacaauca

SEQ ID NO: 470860 - RNA, 18 nt, Artificial Sequence
  Synthetic
uccggaaacuuacaauca

SEQ ID NO: 470861 - RNA, 19 nt, Artificial Sequence
  Synthetic
cuccggaaacuuacaauca

SEQ ID NO: 470862 - RNA, 20 nt, Artificial Sequence
  Synthetic
ccuccggaaacuuacaauca

SEQ ID NO: 470863 - RNA, 21 nt, Artificial Sequence
  Synthetic
gccuccggaaacuuacaauca

SEQ ID NO: 470864 - RNA, 22 nt, Artificial Sequence
  Synthetic
ggccuccggaaacuuacaauca

SEQ ID NO: 470865 - RNA, 23 nt, Artificial Sequence
  Synthetic
aggccuccggaaacuuacaauca

SEQ ID NO: 470866 - RNA, 24 nt, Artificial Sequence
  Synthetic
gaggccuccggaaacuuacaauca

SEQ ID NO: 470867 - RNA, 18 nt, Artificial Sequence
  Synthetic
accgauugagaccaauca

SEQ ID NO: 470868 - RNA, 19 nt, Artificial Sequence
  Synthetic
gaccgauugagaccaauca

SEQ ID NO: 470869 - RNA, 20 nt, Artificial Sequence
  Synthetic
ugaccgauugagaccaauca

SEQ ID NO: 470870 - RNA, 21 nt, Artificial Sequence
  Synthetic
augaccgauugagaccaauca

SEQ ID NO: 470871 - RNA, 22 nt, Artificial Sequence
  Synthetic
aaugaccgauugagaccaauca

SEQ ID NO: 470872 - RNA, 23 nt, Artificial Sequence
  Synthetic
caaugaccgauugagaccaauca

SEQ ID NO: 470873 - RNA, 24 nt, Artificial Sequence
  Synthetic
acaaugaccgauugagaccaauca

SEQ ID NO: 470874 - RNA, 18 nt, Artificial Sequence
  Synthetic
uuauaacaacaucaauca

SEQ ID NO: 470875 - RNA, 19 nt, Artificial Sequence
  Synthetic
auuauaacaacaucaauca

SEQ ID NO: 470876 - RNA, 20 nt, Artificial Sequence
  Synthetic
cauuauaacaacaucaauca

SEQ ID NO: 470877 - RNA, 21 nt, Artificial Sequence
  Synthetic
ucauuauaacaacaucaauca

SEQ ID NO: 470878 - RNA, 22 nt, Artificial Sequence
  Synthetic
uucauuauaacaacaucaauca

SEQ ID NO: 470879 - RNA, 23 nt, Artificial Sequence
  Synthetic
auucauuauaacaacaucaauca

SEQ ID NO: 470880 - RNA, 24 nt, Artificial Sequence
  Synthetic
uauucauuauaacaacaucaauca

SEQ ID NO: 470881 - RNA, 18 nt, Artificial Sequence
  Synthetic
aggauagugucucaauca

SEQ ID NO: 470882 - RNA, 19 nt, Artificial Sequence
  Synthetic
aaggauagugucucaauca

SEQ ID NO: 470883 - RNA, 20 nt, Artificial Sequence
  Synthetic
aaaggauagugucucaauca

SEQ ID NO: 470884 - RNA, 21 nt, Artificial Sequence
  Synthetic
aaaaggauagugucucaauca

SEQ ID NO: 470885 - RNA, 22 nt, Artificial Sequence
  Synthetic
caaaaggauagugucucaauca

SEQ ID NO: 470886 - RNA, 23 nt, Artificial Sequence
  Synthetic
ucaaaaggauagugucucaauca

SEQ ID NO: 470887 - RNA, 24 nt, Artificial Sequence
  Synthetic
uucaaaaggauagugucucaauca

SEQ ID NO: 470888 - RNA, 18 nt, Artificial Sequence
  Synthetic
acucaacaucgucaauca

SEQ ID NO: 470889 - RNA, 19 nt, Artificial Sequence
  Synthetic
uacucaacaucgucaauca

SEQ ID NO: 470890 - RNA, 20 nt, Artificial Sequence
  Synthetic
auacucaacaucgucaauca

SEQ ID NO: 470891 - RNA, 21 nt, Artificial Sequence
  Synthetic
cauacucaacaucgucaauca

SEQ ID NO: 470892 - RNA, 22 nt, Artificial Sequence
  Synthetic
acauacucaacaucgucaauca

SEQ ID NO: 470893 - RNA, 23 nt, Artificial Sequence
  Synthetic
aacauacucaacaucgucaauca

SEQ ID NO: 470894 - RNA, 24 nt, Artificial Sequence
  Synthetic
aaacauacucaacaucgucaauca

SEQ ID NO: 470895 - RNA, 18 nt, Artificial Sequence
  Synthetic
uuaagcuuuggucaauca

SEQ ID NO: 470896 - RNA, 19 nt, Artificial Sequence
  Synthetic
auuaagcuuuggucaauca

SEQ ID NO: 470897 - RNA, 20 nt, Artificial Sequence
  Synthetic
aauuaagcuuuggucaauca

SEQ ID NO: 470898 - RNA, 21 nt, Artificial Sequence
  Synthetic
uaauuaagcuuuggucaauca

SEQ ID NO: 470899 - RNA, 22 nt, Artificial Sequence
  Synthetic
guaauuaagcuuuggucaauca

SEQ ID NO: 470900 - RNA, 23 nt, Artificial Sequence
  Synthetic
gguaauuaagcuuuggucaauca

SEQ ID NO: 470901 - RNA, 24 nt, Artificial Sequence
  Synthetic
agguaauuaagcuuuggucaauca

SEQ ID NO: 470902 - RNA, 18 nt, Artificial Sequence
  Synthetic
ccaauuugaauucaauca

SEQ ID NO: 470903 - RNA, 19 nt, Artificial Sequence
  Synthetic
uccaauuugaauucaauca

SEQ ID NO: 470904 - RNA, 20 nt, Artificial Sequence
  Synthetic
auccaauuugaauucaauca

SEQ ID NO: 470905 - RNA, 21 nt, Artificial Sequence
  Synthetic
aauccaauuugaauucaauca

SEQ ID NO: 470906 - RNA, 22 nt, Artificial Sequence
  Synthetic
aaauccaauuugaauucaauca

SEQ ID NO: 470907 - RNA, 23 nt, Artificial Sequence
  Synthetic
aaaauccaauuugaauucaauca

SEQ ID NO: 470908 - RNA, 24 nt, Artificial Sequence
  Synthetic
gaaaauccaauuugaauucaauca

SEQ ID NO: 470909 - RNA, 18 nt, Artificial Sequence
  Synthetic
gaaaagagaaaagaauca

SEQ ID NO: 470910 - RNA, 19 nt, Artificial Sequence
  Synthetic
agaaaagagaaaagaauca

SEQ ID NO: 470911 - RNA, 20 nt, Artificial Sequence
  Synthetic
aagaaaagagaaaagaauca

SEQ ID NO: 470912 - RNA, 21 nt, Artificial Sequence
  Synthetic
gaagaaaagagaaaagaauca

SEQ ID NO: 470913 - RNA, 22 nt, Artificial Sequence
  Synthetic
agaagaaaagagaaaagaauca

SEQ ID NO: 470914 - RNA, 23 nt, Artificial Sequence
  Synthetic
aagaagaaaagagaaaagaauca

SEQ ID NO: 470915 - RNA, 24 nt, Artificial Sequence
  Synthetic
aaagaagaaaagagaaaagaauca

SEQ ID NO: 470916 - RNA, 18 nt, Artificial Sequence
  Synthetic
caugaagguaaagaauca

SEQ ID NO: 470917 - RNA, 19 nt, Artificial Sequence
  Synthetic
acaugaagguaaagaauca

SEQ ID NO: 470918 - RNA, 20 nt, Artificial Sequence
  Synthetic
cacaugaagguaaagaauca

SEQ ID NO: 470919 - RNA, 21 nt, Artificial Sequence
  Synthetic
gcacaugaagguaaagaauca

SEQ ID NO: 470920 - RNA, 22 nt, Artificial Sequence
  Synthetic
ugcacaugaagguaaagaauca

SEQ ID NO: 470921 - RNA, 23 nt, Artificial Sequence
  Synthetic
cugcacaugaagguaaagaauca

SEQ ID NO: 470922 - RNA, 24 nt, Artificial Sequence
  Synthetic
acugcacaugaagguaaagaauca

SEQ ID NO: 470923 - RNA, 18 nt, Artificial Sequence
  Synthetic
ggaauuguacaagaauca

SEQ ID NO: 470924 - RNA, 19 nt, Artificial Sequence
  Synthetic
aggaauuguacaagaauca

SEQ ID NO: 470925 - RNA, 20 nt, Artificial Sequence
  Synthetic
uaggaauuguacaagaauca

SEQ ID NO: 470926 - RNA, 21 nt, Artificial Sequence
  Synthetic
cuaggaauuguacaagaauca

SEQ ID NO: 470927 - RNA, 22 nt, Artificial Sequence
  Synthetic
ccuaggaauuguacaagaauca

SEQ ID NO: 470928 - RNA, 23 nt, Artificial Sequence
  Synthetic
uccuaggaauuguacaagaauca

SEQ ID NO: 470929 - RNA, 24 nt, Artificial Sequence
  Synthetic
cuccuaggaauuguacaagaauca

SEQ ID NO: 470930 - RNA, 18 nt, Artificial Sequence
  Synthetic
cgugguuaggaagaauca

SEQ ID NO: 470931 - RNA, 19 nt, Artificial Sequence
  Synthetic
ucgugguuaggaagaauca

SEQ ID NO: 470932 - RNA, 20 nt, Artificial Sequence
  Synthetic
cucgugguuaggaagaauca

SEQ ID NO: 470933 - RNA, 21 nt, Artificial Sequence
  Synthetic
gcucgugguuaggaagaauca

SEQ ID NO: 470934 - RNA, 22 nt, Artificial Sequence
  Synthetic
ugcucgugguuaggaagaauca

SEQ ID NO: 470935 - RNA, 23 nt, Artificial Sequence
  Synthetic
augcucgugguuaggaagaauca

SEQ ID NO: 470936 - RNA, 24 nt, Artificial Sequence
  Synthetic
caugcucgugguuaggaagaauca

SEQ ID NO: 470937 - RNA, 18 nt, Artificial Sequence
  Synthetic
acauauuucuaagaauca

SEQ ID NO: 470938 - RNA, 19 nt, Artificial Sequence
  Synthetic
cacauauuucuaagaauca

SEQ ID NO: 470939 - RNA, 20 nt, Artificial Sequence
  Synthetic
gcacauauuucuaagaauca

SEQ ID NO: 470940 - RNA, 21 nt, Artificial Sequence
  Synthetic
ugcacauauuucuaagaauca

SEQ ID NO: 470941 - RNA, 22 nt, Artificial Sequence
  Synthetic
cugcacauauuucuaagaauca

SEQ ID NO: 470942 - RNA, 23 nt, Artificial Sequence
  Synthetic
acugcacauauuucuaagaauca

SEQ ID NO: 470943 - RNA, 24 nt, Artificial Sequence
  Synthetic
cacugcacauauuucuaagaauca

SEQ ID NO: 470944 - RNA, 18 nt, Artificial Sequence
  Synthetic
uggaaauccccagaauca

SEQ ID NO: 470945 - RNA, 19 nt, Artificial Sequence
  Synthetic
auggaaauccccagaauca

SEQ ID NO: 470946 - RNA, 20 nt, Artificial Sequence
  Synthetic
gauggaaauccccagaauca

SEQ ID NO: 470947 - RNA, 21 nt, Artificial Sequence
  Synthetic
agauggaaauccccagaauca

SEQ ID NO: 470948 - RNA, 22 nt, Artificial Sequence
  Synthetic
aagauggaaauccccagaauca

SEQ ID NO: 470949 - RNA, 23 nt, Artificial Sequence
  Synthetic
caagauggaaauccccagaauca

SEQ ID NO: 470950 - RNA, 24 nt, Artificial Sequence
  Synthetic
ucaagauggaaauccccagaauca

SEQ ID NO: 470951 - RNA, 18 nt, Artificial Sequence
  Synthetic
aauaauuauucagaauca

SEQ ID NO: 470952 - RNA, 19 nt, Artificial Sequence
  Synthetic
gaauaauuauucagaauca

SEQ ID NO: 470953 - RNA, 20 nt, Artificial Sequence
  Synthetic
agaauaauuauucagaauca

SEQ ID NO: 470954 - RNA, 21 nt, Artificial Sequence
  Synthetic
cagaauaauuauucagaauca

SEQ ID NO: 470955 - RNA, 22 nt, Artificial Sequence
  Synthetic
ucagaauaauuauucagaauca

SEQ ID NO: 470956 - RNA, 23 nt, Artificial Sequence
  Synthetic
cucagaauaauuauucagaauca

SEQ ID NO: 470957 - RNA, 24 nt, Artificial Sequence
  Synthetic
ucucagaauaauuauucagaauca

SEQ ID NO: 470958 - RNA, 18 nt, Artificial Sequence
  Synthetic
gcaguggcuucagaauca

SEQ ID NO: 470959 - RNA, 19 nt, Artificial Sequence
  Synthetic
agcaguggcuucagaauca

SEQ ID NO: 470960 - RNA, 20 nt, Artificial Sequence
  Synthetic
cagcaguggcuucagaauca

SEQ ID NO: 470961 - RNA, 21 nt, Artificial Sequence
  Synthetic
acagcaguggcuucagaauca

SEQ ID NO: 470962 - RNA, 22 nt, Artificial Sequence
  Synthetic
aacagcaguggcuucagaauca

SEQ ID NO: 470963 - RNA, 23 nt, Artificial Sequence
  Synthetic
aaacagcaguggcuucagaauca

SEQ ID NO: 470964 - RNA, 24 nt, Artificial Sequence
  Synthetic
aaaacagcaguggcuucagaauca

SEQ ID NO: 470965 - RNA, 18 nt, Artificial Sequence
  Synthetic
ugaaaccauagagaauca

SEQ ID NO: 470966 - RNA, 19 nt, Artificial Sequence
  Synthetic
cugaaaccauagagaauca

SEQ ID NO: 470967 - RNA, 20 nt, Artificial Sequence
  Synthetic
ccugaaaccauagagaauca

SEQ ID NO: 470968 - RNA, 21 nt, Artificial Sequence
  Synthetic
gccugaaaccauagagaauca

SEQ ID NO: 470969 - RNA, 22 nt, Artificial Sequence
  Synthetic
ggccugaaaccauagagaauca

SEQ ID NO: 470970 - RNA, 23 nt, Artificial Sequence
  Synthetic
gggccugaaaccauagagaauca

SEQ ID NO: 470971 - RNA, 24 nt, Artificial Sequence
  Synthetic
agggccugaaaccauagagaauca

SEQ ID NO: 470972 - RNA, 18 nt, Artificial Sequence
  Synthetic
guauguuccugagaauca

SEQ ID NO: 470973 - RNA, 19 nt, Artificial Sequence
  Synthetic
uguauguuccugagaauca

SEQ ID NO: 470974 - RNA, 20 nt, Artificial Sequence
  Synthetic
uuguauguuccugagaauca

SEQ ID NO: 470975 - RNA, 21 nt, Artificial Sequence
  Synthetic
uuuguauguuccugagaauca

SEQ ID NO: 470976 - RNA, 22 nt, Artificial Sequence
  Synthetic
uuuuguauguuccugagaauca

SEQ ID NO: 470977 - RNA, 23 nt, Artificial Sequence
  Synthetic
cuuuuguauguuccugagaauca

SEQ ID NO: 470978 - RNA, 24 nt, Artificial Sequence
  Synthetic
acuuuuguauguuccugagaauca

SEQ ID NO: 470979 - RNA, 18 nt, Artificial Sequence
  Synthetic
caccuauuuuuagaauca

SEQ ID NO: 470980 - RNA, 19 nt, Artificial Sequence
  Synthetic
acaccuauuuuuagaauca

SEQ ID NO: 470981 - RNA, 20 nt, Artificial Sequence
  Synthetic
aacaccuauuuuuagaauca

SEQ ID NO: 470982 - RNA, 21 nt, Artificial Sequence
  Synthetic
uaacaccuauuuuuagaauca

SEQ ID NO: 470983 - RNA, 22 nt, Artificial Sequence
  Synthetic
cuaacaccuauuuuuagaauca

SEQ ID NO: 470984 - RNA, 23 nt, Artificial Sequence
  Synthetic
ucuaacaccuauuuuuagaauca

SEQ ID NO: 470985 - RNA, 24 nt, Artificial Sequence
  Synthetic
aucuaacaccuauuuuuagaauca

SEQ ID NO: 470986 - RNA, 18 nt, Artificial Sequence
  Synthetic
gugguaaccugggaauca

SEQ ID NO: 470987 - RNA, 19 nt, Artificial Sequence
  Synthetic
agugguaaccugggaauca

SEQ ID NO: 470988 - RNA, 20 nt, Artificial Sequence
  Synthetic
cagugguaaccugggaauca

SEQ ID NO: 470989 - RNA, 21 nt, Artificial Sequence
  Synthetic
ucagugguaaccugggaauca

SEQ ID NO: 470990 - RNA, 22 nt, Artificial Sequence
  Synthetic
aucagugguaaccugggaauca

SEQ ID NO: 470991 - RNA, 23 nt, Artificial Sequence
  Synthetic
caucagugguaaccugggaauca

SEQ ID NO: 470992 - RNA, 24 nt, Artificial Sequence
  Synthetic
gcaucagugguaaccugggaauca

SEQ ID NO: 470993 - RNA, 18 nt, Artificial Sequence
  Synthetic
aaaugcauuugggaauca

SEQ ID NO: 470994 - RNA, 19 nt, Artificial Sequence
  Synthetic
aaaaugcauuugggaauca

SEQ ID NO: 470995 - RNA, 20 nt, Artificial Sequence
  Synthetic
aaaaaugcauuugggaauca

SEQ ID NO: 470996 - RNA, 21 nt, Artificial Sequence
  Synthetic
aaaaaaugcauuugggaauca

SEQ ID NO: 470997 - RNA, 22 nt, Artificial Sequence
  Synthetic
uaaaaaaugcauuugggaauca

SEQ ID NO: 470998 - RNA, 23 nt, Artificial Sequence
  Synthetic
cuaaaaaaugcauuugggaauca

SEQ ID NO: 470999 - RNA, 24 nt, Artificial Sequence
  Synthetic
acuaaaaaaugcauuugggaauca

SEQ ID NO: 471000 - RNA, 18 nt, Artificial Sequence
  Synthetic
agaacagaaauggaauca

SEQ ID NO: 471001 - RNA, 19 nt, Artificial Sequence
  Synthetic
aagaacagaaauggaauca

SEQ ID NO: 471002 - RNA, 20 nt, Artificial Sequence
  Synthetic
gaagaacagaaauggaauca

SEQ ID NO: 471003 - RNA, 21 nt, Artificial Sequence
  Synthetic
agaagaacagaaauggaauca

SEQ ID NO: 471004 - RNA, 22 nt, Artificial Sequence
  Synthetic
gagaagaacagaaauggaauca

SEQ ID NO: 471005 - RNA, 23 nt, Artificial Sequence
  Synthetic
ugagaagaacagaaauggaauca

SEQ ID NO: 471006 - RNA, 24 nt, Artificial Sequence
  Synthetic
uugagaagaacagaaauggaauca

SEQ ID NO: 471007 - RNA, 18 nt, Artificial Sequence
  Synthetic
aaaaaagcacuggaauca

SEQ ID NO: 471008 - RNA, 19 nt, Artificial Sequence
  Synthetic
aaaaaaagcacuggaauca

SEQ ID NO: 471009 - RNA, 20 nt, Artificial Sequence
  Synthetic
aaaaaaaagcacuggaauca

SEQ ID NO: 471010 - RNA, 21 nt, Artificial Sequence
  Synthetic
aaaaaaaaagcacuggaauca

SEQ ID NO: 471011 - RNA, 22 nt, Artificial Sequence
  Synthetic
uaaaaaaaaagcacuggaauca

SEQ ID NO: 471012 - RNA, 23 nt, Artificial Sequence
  Synthetic
guaaaaaaaaagcacuggaauca

SEQ ID NO: 471013 - RNA, 24 nt, Artificial Sequence
  Synthetic
gguaaaaaaaaagcacuggaauca

SEQ ID NO: 471014 - RNA, 18 nt, Artificial Sequence
  Synthetic
gcauaagcucuggaauca

SEQ ID NO: 471015 - RNA, 19 nt, Artificial Sequence
  Synthetic
agcauaagcucuggaauca

SEQ ID NO: 471016 - RNA, 20 nt, Artificial Sequence
  Synthetic
uagcauaagcucuggaauca

SEQ ID NO: 471017 - RNA, 21 nt, Artificial Sequence
  Synthetic
auagcauaagcucuggaauca

SEQ ID NO: 471018 - RNA, 22 nt, Artificial Sequence
  Synthetic
aauagcauaagcucuggaauca

SEQ ID NO: 471019 - RNA, 23 nt, Artificial Sequence
  Synthetic
uaauagcauaagcucuggaauca

SEQ ID NO: 471020 - RNA, 24 nt, Artificial Sequence
  Synthetic
uuaauagcauaagcucuggaauca

SEQ ID NO: 471021 - RNA, 18 nt, Artificial Sequence
  Synthetic
uguuugggcuuggaauca

SEQ ID NO: 471022 - RNA, 19 nt, Artificial Sequence
  Synthetic
uuguuugggcuuggaauca

SEQ ID NO: 471023 - RNA, 20 nt, Artificial Sequence
  Synthetic
uuuguuugggcuuggaauca

SEQ ID NO: 471024 - RNA, 21 nt, Artificial Sequence
  Synthetic
auuuguuugggcuuggaauca

SEQ ID NO: 471025 - RNA, 22 nt, Artificial Sequence
  Synthetic
gauuuguuugggcuuggaauca

SEQ ID NO: 471026 - RNA, 23 nt, Artificial Sequence
  Synthetic
ggauuuguuugggcuuggaauca

SEQ ID NO: 471027 - RNA, 24 nt, Artificial Sequence
  Synthetic
aggauuuguuugggcuuggaauca

SEQ ID NO: 471028 - RNA, 18 nt, Artificial Sequence
  Synthetic
ugggagguaacugaauca

SEQ ID NO: 471029 - RNA, 19 nt, Artificial Sequence
  Synthetic
gugggagguaacugaauca

SEQ ID NO: 471030 - RNA, 20 nt, Artificial Sequence
  Synthetic
agugggagguaacugaauca

SEQ ID NO: 471031 - RNA, 21 nt, Artificial Sequence
  Synthetic
cagugggagguaacugaauca

SEQ ID NO: 471032 - RNA, 22 nt, Artificial Sequence
  Synthetic
ccagugggagguaacugaauca

SEQ ID NO: 471033 - RNA, 23 nt, Artificial Sequence
  Synthetic
uccagugggagguaacugaauca

SEQ ID NO: 471034 - RNA, 24 nt, Artificial Sequence
  Synthetic
auccagugggagguaacugaauca

SEQ ID NO: 471035 - RNA, 20 nt, Artificial Sequence
  Synthetic
ugugggagguaacugaauca

SEQ ID NO: 471036 - RNA, 21 nt, Artificial Sequence
  Synthetic
augugggagguaacugaauca

SEQ ID NO: 471037 - RNA, 22 nt, Artificial Sequence
  Synthetic
caugugggagguaacugaauca

SEQ ID NO: 471038 - RNA, 23 nt, Artificial Sequence
  Synthetic
ccaugugggagguaacugaauca

SEQ ID NO: 471039 - RNA, 24 nt, Artificial Sequence
  Synthetic
accaugugggagguaacugaauca

SEQ ID NO: 471040 - RNA, 18 nt, Artificial Sequence
  Synthetic
ugggagguaauugaauca

SEQ ID NO: 471041 - RNA, 19 nt, Artificial Sequence
  Synthetic
gugggagguaauugaauca

SEQ ID NO: 471042 - RNA, 20 nt, Artificial Sequence
  Synthetic
cgugggagguaauugaauca

SEQ ID NO: 471043 - RNA, 21 nt, Artificial Sequence
  Synthetic
ucgugggagguaauugaauca

SEQ ID NO: 471044 - RNA, 22 nt, Artificial Sequence
  Synthetic
cucgugggagguaauugaauca

SEQ ID NO: 471045 - RNA, 23 nt, Artificial Sequence
  Synthetic
ccucgugggagguaauugaauca

SEQ ID NO: 471046 - RNA, 24 nt, Artificial Sequence
  Synthetic
accucgugggagguaauugaauca

SEQ ID NO: 471047 - RNA, 20 nt, Artificial Sequence
  Synthetic
ggugggagguaauugaauca

SEQ ID NO: 471048 - RNA, 21 nt, Artificial Sequence
  Synthetic
uggugggagguaauugaauca

SEQ ID NO: 471049 - RNA, 22 nt, Artificial Sequence
  Synthetic
cuggugggagguaauugaauca

SEQ ID NO: 471050 - RNA, 23 nt, Artificial Sequence
  Synthetic
ccuggugggagguaauugaauca

SEQ ID NO: 471051 - RNA, 24 nt, Artificial Sequence
  Synthetic
accuggugggagguaauugaauca

SEQ ID NO: 471052 - RNA, 18 nt, Artificial Sequence
  Synthetic
uacaaaauguuugaauca

SEQ ID NO: 471053 - RNA, 19 nt, Artificial Sequence
  Synthetic
guacaaaauguuugaauca

SEQ ID NO: 471054 - RNA, 20 nt, Artificial Sequence
  Synthetic
uguacaaaauguuugaauca

SEQ ID NO: 471055 - RNA, 21 nt, Artificial Sequence
  Synthetic
auguacaaaauguuugaauca

SEQ ID NO: 471056 - RNA, 22 nt, Artificial Sequence
  Synthetic
aauguacaaaauguuugaauca

SEQ ID NO: 471057 - RNA, 23 nt, Artificial Sequence
  Synthetic
aaauguacaaaauguuugaauca

SEQ ID NO: 471058 - RNA, 24 nt, Artificial Sequence
  Synthetic
caaauguacaaaauguuugaauca

SEQ ID NO: 471059 - RNA, 18 nt, Artificial Sequence
  Synthetic
guaucauaagaauaauca

SEQ ID NO: 471060 - RNA, 19 nt, Artificial Sequence
  Synthetic
uguaucauaagaauaauca

SEQ ID NO: 471061 - RNA, 20 nt, Artificial Sequence
  Synthetic
uuguaucauaagaauaauca

SEQ ID NO: 471062 - RNA, 21 nt, Artificial Sequence
  Synthetic
cuuguaucauaagaauaauca

SEQ ID NO: 471063 - RNA, 22 nt, Artificial Sequence
  Synthetic
gcuuguaucauaagaauaauca

SEQ ID NO: 471064 - RNA, 23 nt, Artificial Sequence
  Synthetic
ggcuuguaucauaagaauaauca

SEQ ID NO: 471065 - RNA, 24 nt, Artificial Sequence
  Synthetic
aggcuuguaucauaagaauaauca

SEQ ID NO: 471066 - RNA, 18 nt, Artificial Sequence
  Synthetic
accuaaaauccauaauca

SEQ ID NO: 471067 - RNA, 19 nt, Artificial Sequence
  Synthetic
aaccuaaaauccauaauca

SEQ ID NO: 471068 - RNA, 20 nt, Artificial Sequence
  Synthetic
aaaccuaaaauccauaauca

SEQ ID NO: 471069 - RNA, 21 nt, Artificial Sequence
  Synthetic
uaaaccuaaaauccauaauca

SEQ ID NO: 471070 - RNA, 22 nt, Artificial Sequence
  Synthetic
uuaaaccuaaaauccauaauca

SEQ ID NO: 471071 - RNA, 23 nt, Artificial Sequence
  Synthetic
uuuaaaccuaaaauccauaauca

SEQ ID NO: 471072 - RNA, 24 nt, Artificial Sequence
  Synthetic
guuuaaaccuaaaauccauaauca

SEQ ID NO: 471073 - RNA, 18 nt, Artificial Sequence
  Synthetic
agcccgugcugauaauca

SEQ ID NO: 471074 - RNA, 19 nt, Artificial Sequence
  Synthetic
cagcccgugcugauaauca

SEQ ID NO: 471075 - RNA, 20 nt, Artificial Sequence
  Synthetic
ucagcccgugcugauaauca

SEQ ID NO: 471076 - RNA, 21 nt, Artificial Sequence
  Synthetic
gucagcccgugcugauaauca

SEQ ID NO: 471077 - RNA, 22 nt, Artificial Sequence
  Synthetic
ugucagcccgugcugauaauca

SEQ ID NO: 471078 - RNA, 23 nt, Artificial Sequence
  Synthetic
augucagcccgugcugauaauca

SEQ ID NO: 471079 - RNA, 24 nt, Artificial Sequence
  Synthetic
gaugucagcccgugcugauaauca

SEQ ID NO: 471080 - RNA, 18 nt, Artificial Sequence
  Synthetic
uucaguugcaccuaauca

SEQ ID NO: 471081 - RNA, 19 nt, Artificial Sequence
  Synthetic
guucaguugcaccuaauca

SEQ ID NO: 471082 - RNA, 20 nt, Artificial Sequence
  Synthetic
uguucaguugcaccuaauca

SEQ ID NO: 471083 - RNA, 21 nt, Artificial Sequence
  Synthetic
uuguucaguugcaccuaauca

SEQ ID NO: 471084 - RNA, 22 nt, Artificial Sequence
  Synthetic
auuguucaguugcaccuaauca

SEQ ID NO: 471085 - RNA, 23 nt, Artificial Sequence
  Synthetic
uauuguucaguugcaccuaauca

SEQ ID NO: 471086 - RNA, 24 nt, Artificial Sequence
  Synthetic
guauuguucaguugcaccuaauca

SEQ ID NO: 471087 - RNA, 18 nt, Artificial Sequence
  Synthetic
uaacuauccagcuaauca

SEQ ID NO: 471088 - RNA, 19 nt, Artificial Sequence
  Synthetic
auaacuauccagcuaauca

SEQ ID NO: 471089 - RNA, 20 nt, Artificial Sequence
  Synthetic
aauaacuauccagcuaauca

SEQ ID NO: 471090 - RNA, 21 nt, Artificial Sequence
  Synthetic
gaauaacuauccagcuaauca

SEQ ID NO: 471091 - RNA, 22 nt, Artificial Sequence
  Synthetic
agaauaacuauccagcuaauca

SEQ ID NO: 471092 - RNA, 23 nt, Artificial Sequence
  Synthetic
cagaauaacuauccagcuaauca

SEQ ID NO: 471093 - RNA, 24 nt, Artificial Sequence
  Synthetic
ucagaauaacuauccagcuaauca

SEQ ID NO: 471094 - RNA, 18 nt, Artificial Sequence
  Synthetic
gagagucuuaaguaauca

SEQ ID NO: 471095 - RNA, 19 nt, Artificial Sequence
  Synthetic
ugagagucuuaaguaauca

SEQ ID NO: 471096 - RNA, 20 nt, Artificial Sequence
  Synthetic
augagagucuuaaguaauca

SEQ ID NO: 471097 - RNA, 21 nt, Artificial Sequence
  Synthetic
aaugagagucuuaaguaauca

SEQ ID NO: 471098 - RNA, 22 nt, Artificial Sequence
  Synthetic
caaugagagucuuaaguaauca

SEQ ID NO: 471099 - RNA, 23 nt, Artificial Sequence
  Synthetic
acaaugagagucuuaaguaauca

SEQ ID NO: 471100 - RNA, 24 nt, Artificial Sequence
  Synthetic
uacaaugagagucuuaaguaauca

SEQ ID NO: 471101 - RNA, 18 nt, Artificial Sequence
  Synthetic
uaaaacacagaguaauca

SEQ ID NO: 471102 - RNA, 19 nt, Artificial Sequence
  Synthetic
auaaaacacagaguaauca

SEQ ID NO: 471103 - RNA, 20 nt, Artificial Sequence
  Synthetic
uauaaaacacagaguaauca

SEQ ID NO: 471104 - RNA, 21 nt, Artificial Sequence
  Synthetic
guauaaaacacagaguaauca

SEQ ID NO: 471105 - RNA, 22 nt, Artificial Sequence
  Synthetic
uguauaaaacacagaguaauca

SEQ ID NO: 471106 - RNA, 23 nt, Artificial Sequence
  Synthetic
auguauaaaacacagaguaauca

SEQ ID NO: 471107 - RNA, 24 nt, Artificial Sequence
  Synthetic
aauguauaaaacacagaguaauca

SEQ ID NO: 471108 - RNA, 18 nt, Artificial Sequence
  Synthetic
uaauagugcuaguaauca

SEQ ID NO: 471109 - RNA, 19 nt, Artificial Sequence
  Synthetic
uuaauagugcuaguaauca

SEQ ID NO: 471110 - RNA, 20 nt, Artificial Sequence
  Synthetic
cuuaauagugcuaguaauca

SEQ ID NO: 471111 - RNA, 21 nt, Artificial Sequence
  Synthetic
gcuuaauagugcuaguaauca

SEQ ID NO: 471112 - RNA, 22 nt, Artificial Sequence
  Synthetic
ugcuuaauagugcuaguaauca

SEQ ID NO: 471113 - RNA, 23 nt, Artificial Sequence
  Synthetic
augcuuaauagugcuaguaauca

SEQ ID NO: 471114 - RNA, 24 nt, Artificial Sequence
  Synthetic
gaugcuuaauagugcuaguaauca

SEQ ID NO: 471115 - RNA, 18 nt, Artificial Sequence
  Synthetic
ccagacaguuaguaauca

SEQ ID NO: 471116 - RNA, 19 nt, Artificial Sequence
  Synthetic
uccagacaguuaguaauca

SEQ ID NO: 471117 - RNA, 20 nt, Artificial Sequence
  Synthetic
auccagacaguuaguaauca

SEQ ID NO: 471118 - RNA, 21 nt, Artificial Sequence
  Synthetic
aauccagacaguuaguaauca

SEQ ID NO: 471119 - RNA, 22 nt, Artificial Sequence
  Synthetic
aaauccagacaguuaguaauca

SEQ ID NO: 471120 - RNA, 23 nt, Artificial Sequence
  Synthetic
aaaauccagacaguuaguaauca

SEQ ID NO: 471121 - RNA, 24 nt, Artificial Sequence
  Synthetic
aaaaauccagacaguuaguaauca

SEQ ID NO: 471122 - RNA, 18 nt, Artificial Sequence
  Synthetic
ggauaggcaggguaauca

SEQ ID NO: 471123 - RNA, 19 nt, Artificial Sequence
  Synthetic
gggauaggcaggguaauca

SEQ ID NO: 471124 - RNA, 20 nt, Artificial Sequence
  Synthetic
agggauaggcaggguaauca

SEQ ID NO: 471125 - RNA, 21 nt, Artificial Sequence
  Synthetic
gagggauaggcaggguaauca

SEQ ID NO: 471126 - RNA, 22 nt, Artificial Sequence
  Synthetic
ggagggauaggcaggguaauca

SEQ ID NO: 471127 - RNA, 23 nt, Artificial Sequence
  Synthetic
aggagggauaggcaggguaauca

SEQ ID NO: 471128 - RNA, 24 nt, Artificial Sequence
  Synthetic
uaggagggauaggcaggguaauca

SEQ ID NO: 471129 - RNA, 18 nt, Artificial Sequence
  Synthetic
uacaaauucuuguaauca

SEQ ID NO: 471130 - RNA, 19 nt, Artificial Sequence
  Synthetic
uuacaaauucuuguaauca

SEQ ID NO: 471131 - RNA, 20 nt, Artificial Sequence
  Synthetic
uuuacaaauucuuguaauca

SEQ ID NO: 471132 - RNA, 21 nt, Artificial Sequence
  Synthetic
auuuacaaauucuuguaauca

SEQ ID NO: 471133 - RNA, 22 nt, Artificial Sequence
  Synthetic
aauuuacaaauucuuguaauca

SEQ ID NO: 471134 - RNA, 23 nt, Artificial Sequence
  Synthetic
caauuuacaaauucuuguaauca

SEQ ID NO: 471135 - RNA, 24 nt, Artificial Sequence
  Synthetic
gcaauuuacaaauucuuguaauca

SEQ ID NO: 471136 - RNA, 18 nt, Artificial Sequence
  Synthetic
aaauaagaaucuuaauca

SEQ ID NO: 471137 - RNA, 19 nt, Artificial Sequence
  Synthetic
uaaauaagaaucuuaauca

SEQ ID NO: 471138 - RNA, 20 nt, Artificial Sequence
  Synthetic
uuaaauaagaaucuuaauca

SEQ ID NO: 471139 - RNA, 21 nt, Artificial Sequence
  Synthetic
cuuaaauaagaaucuuaauca

SEQ ID NO: 471140 - RNA, 22 nt, Artificial Sequence
  Synthetic
acuuaaauaagaaucuuaauca

SEQ ID NO: 471141 - RNA, 23 nt, Artificial Sequence
  Synthetic
gacuuaaauaagaaucuuaauca

SEQ ID NO: 471142 - RNA, 24 nt, Artificial Sequence
  Synthetic
ugacuuaaauaagaaucuuaauca

SEQ ID NO: 471143 - RNA, 18 nt, Artificial Sequence
  Synthetic
cucucucuagguuaauca

SEQ ID NO: 471144 - RNA, 19 nt, Artificial Sequence
  Synthetic
acucucucuagguuaauca

SEQ ID NO: 471145 - RNA, 20 nt, Artificial Sequence
  Synthetic
aacucucucuagguuaauca

SEQ ID NO: 471146 - RNA, 21 nt, Artificial Sequence
  Synthetic
aaacucucucuagguuaauca

SEQ ID NO: 471147 - RNA, 22 nt, Artificial Sequence
  Synthetic
aaaacucucucuagguuaauca

SEQ ID NO: 471148 - RNA, 23 nt, Artificial Sequence
  Synthetic
uaaaacucucucuagguuaauca

SEQ ID NO: 471149 - RNA, 24 nt, Artificial Sequence
  Synthetic
uuaaaacucucucuagguuaauca

SEQ ID NO: 471150 - RNA, 18 nt, Artificial Sequence
  Synthetic
ugggagguaauuuaauca

SEQ ID NO: 471151 - RNA, 19 nt, Artificial Sequence
  Synthetic
gugggagguaauuuaauca

SEQ ID NO: 471152 - RNA, 20 nt, Artificial Sequence
  Synthetic
agugggagguaauuuaauca

SEQ ID NO: 471153 - RNA, 21 nt, Artificial Sequence
  Synthetic
cagugggagguaauuuaauca

SEQ ID NO: 471154 - RNA, 22 nt, Artificial Sequence
  Synthetic
ccagugggagguaauuuaauca

SEQ ID NO: 471155 - RNA, 23 nt, Artificial Sequence
  Synthetic
cccagugggagguaauuuaauca

SEQ ID NO: 471156 - RNA, 24 nt, Artificial Sequence
  Synthetic
acccagugggagguaauuuaauca

SEQ ID NO: 471157 - RNA, 18 nt, Artificial Sequence
  Synthetic
uguuuuguuguuuaauca

SEQ ID NO: 471158 - RNA, 19 nt, Artificial Sequence
  Synthetic
uuguuuuguuguuuaauca

SEQ ID NO: 471159 - RNA, 20 nt, Artificial Sequence
  Synthetic
uuuguuuuguuguuuaauca

SEQ ID NO: 471160 - RNA, 21 nt, Artificial Sequence
  Synthetic
auuuguuuuguuguuuaauca

SEQ ID NO: 471161 - RNA, 22 nt, Artificial Sequence
  Synthetic
aauuuguuuuguuguuuaauca

SEQ ID NO: 471162 - RNA, 23 nt, Artificial Sequence
  Synthetic
uaauuuguuuuguuguuuaauca

SEQ ID NO: 471163 - RNA, 24 nt, Artificial Sequence
  Synthetic
uuaauuuguuuuguuguuuaauca

SEQ ID NO: 471164 - RNA, 18 nt, Artificial Sequence
  Synthetic
caaacuuauaaaacauca

SEQ ID NO: 471165 - RNA, 19 nt, Artificial Sequence
  Synthetic
acaaacuuauaaaacauca

SEQ ID NO: 471166 - RNA, 20 nt, Artificial Sequence
  Synthetic
aacaaacuuauaaaacauca

SEQ ID NO: 471167 - RNA, 21 nt, Artificial Sequence
  Synthetic
uaacaaacuuauaaaacauca

SEQ ID NO: 471168 - RNA, 22 nt, Artificial Sequence
  Synthetic
uuaacaaacuuauaaaacauca

SEQ ID NO: 471169 - RNA, 23 nt, Artificial Sequence
  Synthetic
uuuaacaaacuuauaaaacauca

SEQ ID NO: 471170 - RNA, 24 nt, Artificial Sequence
  Synthetic
guuuaacaaacuuauaaaacauca

SEQ ID NO: 471171 - RNA, 18 nt, Artificial Sequence
  Synthetic
cauguagugcaaacauca

SEQ ID NO: 471172 - RNA, 19 nt, Artificial Sequence
  Synthetic
ccauguagugcaaacauca

SEQ ID NO: 471173 - RNA, 20 nt, Artificial Sequence
  Synthetic
accauguagugcaaacauca

SEQ ID NO: 471174 - RNA, 21 nt, Artificial Sequence
  Synthetic
caccauguagugcaaacauca

SEQ ID NO: 471175 - RNA, 22 nt, Artificial Sequence
  Synthetic
gcaccauguagugcaaacauca

SEQ ID NO: 471176 - RNA, 23 nt, Artificial Sequence
  Synthetic
agcaccauguagugcaaacauca

SEQ ID NO: 471177 - RNA, 24 nt, Artificial Sequence
  Synthetic
cagcaccauguagugcaaacauca

SEQ ID NO: 471178 - RNA, 18 nt, Artificial Sequence
  Synthetic
ucugauggugaaacauca

SEQ ID NO: 471179 - RNA, 19 nt, Artificial Sequence
  Synthetic
aucugauggugaaacauca

SEQ ID NO: 471180 - RNA, 20 nt, Artificial Sequence
  Synthetic
caucugauggugaaacauca

SEQ ID NO: 471181 - RNA, 21 nt, Artificial Sequence
  Synthetic
ucaucugauggugaaacauca

SEQ ID NO: 471182 - RNA, 22 nt, Artificial Sequence
  Synthetic
aucaucugauggugaaacauca

SEQ ID NO: 471183 - RNA, 23 nt, Artificial Sequence
  Synthetic
aaucaucugauggugaaacauca

SEQ ID NO: 471184 - RNA, 24 nt, Artificial Sequence
  Synthetic
aaaucaucugauggugaaacauca

SEQ ID NO: 471185 - RNA, 18 nt, Artificial Sequence
  Synthetic
ccacaucacucaacauca

SEQ ID NO: 471186 - RNA, 19 nt, Artificial Sequence
  Synthetic
uccacaucacucaacauca

SEQ ID NO: 471187 - RNA, 20 nt, Artificial Sequence
  Synthetic
cuccacaucacucaacauca

SEQ ID NO: 471188 - RNA, 21 nt, Artificial Sequence
  Synthetic
gcuccacaucacucaacauca

SEQ ID NO: 471189 - RNA, 22 nt, Artificial Sequence
  Synthetic
ugcuccacaucacucaacauca

SEQ ID NO: 471190 - RNA, 23 nt, Artificial Sequence
  Synthetic
augcuccacaucacucaacauca

SEQ ID NO: 471191 - RNA, 24 nt, Artificial Sequence
  Synthetic
aaugcuccacaucacucaacauca

SEQ ID NO: 471192 - RNA, 18 nt, Artificial Sequence
  Synthetic
ucuggaucuucaacauca

SEQ ID NO: 471193 - RNA, 19 nt, Artificial Sequence
  Synthetic
aucuggaucuucaacauca

SEQ ID NO: 471194 - RNA, 20 nt, Artificial Sequence
  Synthetic
gaucuggaucuucaacauca

SEQ ID NO: 471195 - RNA, 21 nt, Artificial Sequence
  Synthetic
ggaucuggaucuucaacauca

SEQ ID NO: 471196 - RNA, 22 nt, Artificial Sequence
  Synthetic
gggaucuggaucuucaacauca

SEQ ID NO: 471197 - RNA, 23 nt, Artificial Sequence
  Synthetic
agggaucuggaucuucaacauca

SEQ ID NO: 471198 - RNA, 24 nt, Artificial Sequence
  Synthetic
aagggaucuggaucuucaacauca

SEQ ID NO: 471199 - RNA, 18 nt, Artificial Sequence
  Synthetic
aauaaaacaagaacauca

SEQ ID NO: 471200 - RNA, 19 nt, Artificial Sequence
  Synthetic
aaauaaaacaagaacauca

SEQ ID NO: 471201 - RNA, 20 nt, Artificial Sequence
  Synthetic
aaaauaaaacaagaacauca

SEQ ID NO: 471202 - RNA, 21 nt, Artificial Sequence
  Synthetic
aaaaauaaaacaagaacauca

SEQ ID NO: 471203 - RNA, 22 nt, Artificial Sequence
  Synthetic
aaaaaauaaaacaagaacauca

SEQ ID NO: 471204 - RNA, 23 nt, Artificial Sequence
  Synthetic
uaaaaaauaaaacaagaacauca

SEQ ID NO: 471205 - RNA, 24 nt, Artificial Sequence
  Synthetic
uuaaaaaauaaaacaagaacauca

SEQ ID NO: 471206 - RNA, 18 nt, Artificial Sequence
  Synthetic
gcuuucuucagaacauca

SEQ ID NO: 471207 - RNA, 19 nt, Artificial Sequence
  Synthetic
ggcuuucuucagaacauca

SEQ ID NO: 471208 - RNA, 20 nt, Artificial Sequence
  Synthetic
uggcuuucuucagaacauca

SEQ ID NO: 471209 - RNA, 21 nt, Artificial Sequence
  Synthetic
cuggcuuucuucagaacauca

SEQ ID NO: 471210 - RNA, 22 nt, Artificial Sequence
  Synthetic
gcuggcuuucuucagaacauca

SEQ ID NO: 471211 - RNA, 23 nt, Artificial Sequence
  Synthetic
ggcuggcuuucuucagaacauca

SEQ ID NO: 471212 - RNA, 24 nt, Artificial Sequence
  Synthetic
gggcuggcuuucuucagaacauca

SEQ ID NO: 471213 - RNA, 18 nt, Artificial Sequence
  Synthetic
aaguaccagagaacauca

SEQ ID NO: 471214 - RNA, 19 nt, Artificial Sequence
  Synthetic
caaguaccagagaacauca

SEQ ID NO: 471215 - RNA, 20 nt, Artificial Sequence
  Synthetic
ucaaguaccagagaacauca

SEQ ID NO: 471216 - RNA, 21 nt, Artificial Sequence
  Synthetic
aucaaguaccagagaacauca

SEQ ID NO: 471217 - RNA, 22 nt, Artificial Sequence
  Synthetic
caucaaguaccagagaacauca

SEQ ID NO: 471218 - RNA, 23 nt, Artificial Sequence
  Synthetic
acaucaaguaccagagaacauca

SEQ ID NO: 471219 - RNA, 24 nt, Artificial Sequence
  Synthetic
gacaucaaguaccagagaacauca

SEQ ID NO: 471220 - RNA, 18 nt, Artificial Sequence
  Synthetic
uuaaaacuucccacauca

SEQ ID NO: 471221 - RNA, 19 nt, Artificial Sequence
  Synthetic
auuaaaacuucccacauca

SEQ ID NO: 471222 - RNA, 20 nt, Artificial Sequence
  Synthetic
uauuaaaacuucccacauca

SEQ ID NO: 471223 - RNA, 21 nt, Artificial Sequence
  Synthetic
guauuaaaacuucccacauca

SEQ ID NO: 471224 - RNA, 22 nt, Artificial Sequence
  Synthetic
uguauuaaaacuucccacauca

SEQ ID NO: 471225 - RNA, 23 nt, Artificial Sequence
  Synthetic
uuguauuaaaacuucccacauca

SEQ ID NO: 471226 - RNA, 24 nt, Artificial Sequence
  Synthetic
auuguauuaaaacuucccacauca

SEQ ID NO: 471227 - RNA, 18 nt, Artificial Sequence
  Synthetic
uggguaauaaucacauca

SEQ ID NO: 471228 - RNA, 19 nt, Artificial Sequence
  Synthetic
auggguaauaaucacauca

SEQ ID NO: 471229 - RNA, 20 nt, Artificial Sequence
  Synthetic
aauggguaauaaucacauca

SEQ ID NO: 471230 - RNA, 21 nt, Artificial Sequence
  Synthetic
caauggguaauaaucacauca

SEQ ID NO: 471231 - RNA, 22 nt, Artificial Sequence
  Synthetic
gcaauggguaauaaucacauca

SEQ ID NO: 471232 - RNA, 23 nt, Artificial Sequence
  Synthetic
ggcaauggguaauaaucacauca

SEQ ID NO: 471233 - RNA, 24 nt, Artificial Sequence
  Synthetic
aggcaauggguaauaaucacauca

SEQ ID NO: 471234 - RNA, 18 nt, Artificial Sequence
  Synthetic
uguucaaauaucacauca

SEQ ID NO: 471235 - RNA, 19 nt, Artificial Sequence
  Synthetic
cuguucaaauaucacauca

SEQ ID NO: 471236 - RNA, 20 nt, Artificial Sequence
  Synthetic
ucuguucaaauaucacauca

SEQ ID NO: 471237 - RNA, 21 nt, Artificial Sequence
  Synthetic
uucuguucaaauaucacauca

SEQ ID NO: 471238 - RNA, 22 nt, Artificial Sequence
  Synthetic
uuucuguucaaauaucacauca

SEQ ID NO: 471239 - RNA, 23 nt, Artificial Sequence
  Synthetic
auuucuguucaaauaucacauca

SEQ ID NO: 471240 - RNA, 24 nt, Artificial Sequence
  Synthetic
gauuucuguucaaauaucacauca

SEQ ID NO: 471241 - RNA, 18 nt, Artificial Sequence
  Synthetic
uuaaaaguucucacauca

SEQ ID NO: 471242 - RNA, 19 nt, Artificial Sequence
  Synthetic
uuuaaaaguucucacauca

SEQ ID NO: 471243 - RNA, 20 nt, Artificial Sequence
  Synthetic
auuuaaaaguucucacauca

SEQ ID NO: 471244 - RNA, 21 nt, Artificial Sequence
  Synthetic
uauuuaaaaguucucacauca

SEQ ID NO: 471245 - RNA, 22 nt, Artificial Sequence
  Synthetic
guauuuaaaaguucucacauca

SEQ ID NO: 471246 - RNA, 23 nt, Artificial Sequence
  Synthetic
aguauuuaaaaguucucacauca

SEQ ID NO: 471247 - RNA, 24 nt, Artificial Sequence
  Synthetic
caguauuuaaaaguucucacauca

SEQ ID NO: 471248 - RNA, 18 nt, Artificial Sequence
  Synthetic
aucauucacaggacauca

SEQ ID NO: 471249 - RNA, 19 nt, Artificial Sequence
  Synthetic
uaucauucacaggacauca

SEQ ID NO: 471250 - RNA, 20 nt, Artificial Sequence
  Synthetic
uuaucauucacaggacauca

SEQ ID NO: 471251 - RNA, 21 nt, Artificial Sequence
  Synthetic
uuuaucauucacaggacauca

SEQ ID NO: 471252 - RNA, 22 nt, Artificial Sequence
  Synthetic
uuuuaucauucacaggacauca

SEQ ID NO: 471253 - RNA, 23 nt, Artificial Sequence
  Synthetic
auuuuaucauucacaggacauca

SEQ ID NO: 471254 - RNA, 24 nt, Artificial Sequence
  Synthetic
aauuuuaucauucacaggacauca

SEQ ID NO: 471255 - RNA, 18 nt, Artificial Sequence
  Synthetic
guaaugaaacugacauca

SEQ ID NO: 471256 - RNA, 19 nt, Artificial Sequence
  Synthetic
gguaaugaaacugacauca

SEQ ID NO: 471257 - RNA, 20 nt, Artificial Sequence
  Synthetic
ugguaaugaaacugacauca

SEQ ID NO: 471258 - RNA, 21 nt, Artificial Sequence
  Synthetic
augguaaugaaacugacauca

SEQ ID NO: 471259 - RNA, 22 nt, Artificial Sequence
  Synthetic
gaugguaaugaaacugacauca

SEQ ID NO: 471260 - RNA, 23 nt, Artificial Sequence
  Synthetic
agaugguaaugaaacugacauca

SEQ ID NO: 471261 - RNA, 24 nt, Artificial Sequence
  Synthetic
aagaugguaaugaaacugacauca

SEQ ID NO: 471262 - RNA, 18 nt, Artificial Sequence
  Synthetic
uuuucuuccccuacauca

SEQ ID NO: 471263 - RNA, 19 nt, Artificial Sequence
  Synthetic
uuuuucuuccccuacauca

SEQ ID NO: 471264 - RNA, 20 nt, Artificial Sequence
  Synthetic
auuuuucuuccccuacauca

SEQ ID NO: 471265 - RNA, 21 nt, Artificial Sequence
  Synthetic
uauuuuucuuccccuacauca

SEQ ID NO: 471266 - RNA, 22 nt, Artificial Sequence
  Synthetic
auauuuuucuuccccuacauca

SEQ ID NO: 471267 - RNA, 23 nt, Artificial Sequence
  Synthetic
cauauuuuucuuccccuacauca

SEQ ID NO: 471268 - RNA, 24 nt, Artificial Sequence
  Synthetic
acauauuuuucuuccccuacauca

SEQ ID NO: 471269 - RNA, 18 nt, Artificial Sequence
  Synthetic
caccaaaugccuacauca

SEQ ID NO: 471270 - RNA, 19 nt, Artificial Sequence
  Synthetic
gcaccaaaugccuacauca

SEQ ID NO: 471271 - RNA, 20 nt, Artificial Sequence
  Synthetic
agcaccaaaugccuacauca

SEQ ID NO: 471272 - RNA, 21 nt, Artificial Sequence
  Synthetic
uagcaccaaaugccuacauca

SEQ ID NO: 471273 - RNA, 22 nt, Artificial Sequence
  Synthetic
cuagcaccaaaugccuacauca

SEQ ID NO: 471274 - RNA, 23 nt, Artificial Sequence
  Synthetic
ucuagcaccaaaugccuacauca

SEQ ID NO: 471275 - RNA, 24 nt, Artificial Sequence
  Synthetic
uucuagcaccaaaugccuacauca

SEQ ID NO: 471276 - RNA, 18 nt, Artificial Sequence
  Synthetic
agguuggcauaaccauca

SEQ ID NO: 471277 - RNA, 19 nt, Artificial Sequence
  Synthetic
gagguuggcauaaccauca

SEQ ID NO: 471278 - RNA, 20 nt, Artificial Sequence
  Synthetic
agagguuggcauaaccauca

SEQ ID NO: 471279 - RNA, 21 nt, Artificial Sequence
  Synthetic
cagagguuggcauaaccauca

SEQ ID NO: 471280 - RNA, 22 nt, Artificial Sequence
  Synthetic
acagagguuggcauaaccauca

SEQ ID NO: 471281 - RNA, 23 nt, Artificial Sequence
  Synthetic
uacagagguuggcauaaccauca

SEQ ID NO: 471282 - RNA, 24 nt, Artificial Sequence
  Synthetic
auacagagguuggcauaaccauca

SEQ ID NO: 471283 - RNA, 18 nt, Artificial Sequence
  Synthetic
acaugaaauuaaccauca

SEQ ID NO: 471284 - RNA, 19 nt, Artificial Sequence
  Synthetic
cacaugaaauuaaccauca

SEQ ID NO: 471285 - RNA, 20 nt, Artificial Sequence
  Synthetic
acacaugaaauuaaccauca

SEQ ID NO: 471286 - RNA, 21 nt, Artificial Sequence
  Synthetic
gacacaugaaauuaaccauca

SEQ ID NO: 471287 - RNA, 22 nt, Artificial Sequence
  Synthetic
ugacacaugaaauuaaccauca

SEQ ID NO: 471288 - RNA, 23 nt, Artificial Sequence
  Synthetic
uugacacaugaaauuaaccauca

SEQ ID NO: 471289 - RNA, 24 nt, Artificial Sequence
  Synthetic
guugacacaugaaauuaaccauca

SEQ ID NO: 471290 - RNA, 18 nt, Artificial Sequence
  Synthetic
aguuaaaucaucccauca

SEQ ID NO: 471291 - RNA, 19 nt, Artificial Sequence
  Synthetic
aaguuaaaucaucccauca

SEQ ID NO: 471292 - RNA, 20 nt, Artificial Sequence
  Synthetic
caaguuaaaucaucccauca

SEQ ID NO: 471293 - RNA, 21 nt, Artificial Sequence
  Synthetic
acaaguuaaaucaucccauca

SEQ ID NO: 471294 - RNA, 22 nt, Artificial Sequence
  Synthetic
aacaaguuaaaucaucccauca

SEQ ID NO: 471295 - RNA, 23 nt, Artificial Sequence
  Synthetic
gaacaaguuaaaucaucccauca

SEQ ID NO: 471296 - RNA, 24 nt, Artificial Sequence
  Synthetic
agaacaaguuaaaucaucccauca

SEQ ID NO: 471297 - RNA, 18 nt, Artificial Sequence
  Synthetic
uggcagccccucccauca

SEQ ID NO: 471298 - RNA, 19 nt, Artificial Sequence
  Synthetic
auggcagccccucccauca

SEQ ID NO: 471299 - RNA, 20 nt, Artificial Sequence
  Synthetic
cauggcagccccucccauca

SEQ ID NO: 471300 - RNA, 21 nt, Artificial Sequence
  Synthetic
ucauggcagccccucccauca

SEQ ID NO: 471301 - RNA, 22 nt, Artificial Sequence
  Synthetic
uucauggcagccccucccauca

SEQ ID NO: 471302 - RNA, 23 nt, Artificial Sequence
  Synthetic
uuucauggcagccccucccauca

SEQ ID NO: 471303 - RNA, 24 nt, Artificial Sequence
  Synthetic
uuuucauggcagccccucccauca

SEQ ID NO: 471304 - RNA, 18 nt, Artificial Sequence
  Synthetic
agcagagauuucccauca

SEQ ID NO: 471305 - RNA, 19 nt, Artificial Sequence
  Synthetic
cagcagagauuucccauca

SEQ ID NO: 471306 - RNA, 20 nt, Artificial Sequence
  Synthetic
acagcagagauuucccauca

SEQ ID NO: 471307 - RNA, 21 nt, Artificial Sequence
  Synthetic
cacagcagagauuucccauca

SEQ ID NO: 471308 - RNA, 22 nt, Artificial Sequence
  Synthetic
ucacagcagagauuucccauca

SEQ ID NO: 471309 - RNA, 23 nt, Artificial Sequence
  Synthetic
gucacagcagagauuucccauca

SEQ ID NO: 471310 - RNA, 24 nt, Artificial Sequence
  Synthetic
ugucacagcagagauuucccauca

SEQ ID NO: 471311 - RNA, 18 nt, Artificial Sequence
  Synthetic
acauaucuaaagccauca

SEQ ID NO: 471312 - RNA, 19 nt, Artificial Sequence
  Synthetic
aacauaucuaaagccauca

SEQ ID NO: 471313 - RNA, 20 nt, Artificial Sequence
  Synthetic
uaacauaucuaaagccauca

SEQ ID NO: 471314 - RNA, 21 nt, Artificial Sequence
  Synthetic
auaacauaucuaaagccauca

SEQ ID NO: 471315 - RNA, 22 nt, Artificial Sequence
  Synthetic
uauaacauaucuaaagccauca

SEQ ID NO: 471316 - RNA, 23 nt, Artificial Sequence
  Synthetic
guauaacauaucuaaagccauca

SEQ ID NO: 471317 - RNA, 24 nt, Artificial Sequence
  Synthetic
gguauaacauaucuaaagccauca

SEQ ID NO: 471318 - RNA, 18 nt, Artificial Sequence
  Synthetic
uuauuuaauuagccauca

SEQ ID NO: 471319 - RNA, 19 nt, Artificial Sequence
  Synthetic
uuuauuuaauuagccauca

SEQ ID NO: 471320 - RNA, 20 nt, Artificial Sequence
  Synthetic
uuuuauuuaauuagccauca

SEQ ID NO: 471321 - RNA, 21 nt, Artificial Sequence
  Synthetic
uuuuuauuuaauuagccauca

SEQ ID NO: 471322 - RNA, 22 nt, Artificial Sequence
  Synthetic
auuuuuauuuaauuagccauca

SEQ ID NO: 471323 - RNA, 23 nt, Artificial Sequence
  Synthetic
uauuuuuauuuaauuagccauca

SEQ ID NO: 471324 - RNA, 24 nt, Artificial Sequence
  Synthetic
auauuuuuauuuaauuagccauca

SEQ ID NO: 471325 - RNA, 18 nt, Artificial Sequence
  Synthetic
gaguggcuugggccauca

SEQ ID NO: 471326 - RNA, 19 nt, Artificial Sequence
  Synthetic
agaguggcuugggccauca

SEQ ID NO: 471327 - RNA, 20 nt, Artificial Sequence
  Synthetic
gagaguggcuugggccauca

SEQ ID NO: 471328 - RNA, 21 nt, Artificial Sequence
  Synthetic
agagaguggcuugggccauca

SEQ ID NO: 471329 - RNA, 22 nt, Artificial Sequence
  Synthetic
gagagaguggcuugggccauca

SEQ ID NO: 471330 - RNA, 23 nt, Artificial Sequence
  Synthetic
ugagagaguggcuugggccauca

SEQ ID NO: 471331 - RNA, 24 nt, Artificial Sequence
  Synthetic
cugagagaguggcuugggccauca

SEQ ID NO: 471332 - RNA, 24 nt, Artificial Sequence
  Synthetic
aaugcucaccaucacuggccauca

SEQ ID NO: 471333 - RNA, 21 nt, Artificial Sequence
  Synthetic
gcucaucaucacuggccauca

SEQ ID NO: 471334 - RNA, 22 nt, Artificial Sequence
  Synthetic
ugcucaucaucacuggccauca

SEQ ID NO: 471335 - RNA, 23 nt, Artificial Sequence
  Synthetic
augcucaucaucacuggccauca

SEQ ID NO: 471336 - RNA, 24 nt, Artificial Sequence
  Synthetic
aaugcucaucaucacuggccauca

SEQ ID NO: 471337 - RNA, 18 nt, Artificial Sequence
  Synthetic
agccaucaugugccauca

SEQ ID NO: 471338 - RNA, 19 nt, Artificial Sequence
  Synthetic
gagccaucaugugccauca

SEQ ID NO: 471339 - RNA, 20 nt, Artificial Sequence
  Synthetic
ugagccaucaugugccauca

SEQ ID NO: 471340 - RNA, 21 nt, Artificial Sequence
  Synthetic
augagccaucaugugccauca

SEQ ID NO: 471341 - RNA, 22 nt, Artificial Sequence
  Synthetic
caugagccaucaugugccauca

SEQ ID NO: 471342 - RNA, 23 nt, Artificial Sequence
  Synthetic
acaugagccaucaugugccauca

SEQ ID NO: 471343 - RNA, 24 nt, Artificial Sequence
  Synthetic
aacaugagccaucaugugccauca

SEQ ID NO: 471344 - RNA, 18 nt, Artificial Sequence
  Synthetic
cuuuauccagauccauca

SEQ ID NO: 471345 - RNA, 19 nt, Artificial Sequence
  Synthetic
acuuuauccagauccauca

SEQ ID NO: 471346 - RNA, 20 nt, Artificial Sequence
  Synthetic
uacuuuauccagauccauca

SEQ ID NO: 471347 - RNA, 21 nt, Artificial Sequence
  Synthetic
uuacuuuauccagauccauca

SEQ ID NO: 471348 - RNA, 22 nt, Artificial Sequence
  Synthetic
uuuacuuuauccagauccauca

SEQ ID NO: 471349 - RNA, 23 nt, Artificial Sequence
  Synthetic
guuuacuuuauccagauccauca

SEQ ID NO: 471350 - RNA, 24 nt, Artificial Sequence
  Synthetic
aguuuacuuuauccagauccauca

SEQ ID NO: 471351 - RNA, 18 nt, Artificial Sequence
  Synthetic
gaugcuuacuguccauca

SEQ ID NO: 471352 - RNA, 19 nt, Artificial Sequence
  Synthetic
ugaugcuuacuguccauca

SEQ ID NO: 471353 - RNA, 20 nt, Artificial Sequence
  Synthetic
uugaugcuuacuguccauca

SEQ ID NO: 471354 - RNA, 21 nt, Artificial Sequence
  Synthetic
uuugaugcuuacuguccauca

SEQ ID NO: 471355 - RNA, 22 nt, Artificial Sequence
  Synthetic
guuugaugcuuacuguccauca

SEQ ID NO: 471356 - RNA, 23 nt, Artificial Sequence
  Synthetic
cguuugaugcuuacuguccauca

SEQ ID NO: 471357 - RNA, 24 nt, Artificial Sequence
  Synthetic
ccguuugaugcuuacuguccauca

SEQ ID NO: 471358 - RNA, 18 nt, Artificial Sequence
  Synthetic
cucauaauguuuccauca

SEQ ID NO: 471359 - RNA, 19 nt, Artificial Sequence
  Synthetic
ccucauaauguuuccauca

SEQ ID NO: 471360 - RNA, 20 nt, Artificial Sequence
  Synthetic
cccucauaauguuuccauca

SEQ ID NO: 471361 - RNA, 21 nt, Artificial Sequence
  Synthetic
ccccucauaauguuuccauca

SEQ ID NO: 471362 - RNA, 22 nt, Artificial Sequence
  Synthetic
gccccucauaauguuuccauca

SEQ ID NO: 471363 - RNA, 23 nt, Artificial Sequence
  Synthetic
agccccucauaauguuuccauca

SEQ ID NO: 471364 - RNA, 24 nt, Artificial Sequence
  Synthetic
cagccccucauaauguuuccauca

SEQ ID NO: 471365 - RNA, 18 nt, Artificial Sequence
  Synthetic
uuaauccaacaugcauca

SEQ ID NO: 471366 - RNA, 19 nt, Artificial Sequence
  Synthetic
cuuaauccaacaugcauca

SEQ ID NO: 471367 - RNA, 20 nt, Artificial Sequence
  Synthetic
ccuuaauccaacaugcauca

SEQ ID NO: 471368 - RNA, 21 nt, Artificial Sequence
  Synthetic
accuuaauccaacaugcauca

SEQ ID NO: 471369 - RNA, 22 nt, Artificial Sequence
  Synthetic
gaccuuaauccaacaugcauca

SEQ ID NO: 471370 - RNA, 23 nt, Artificial Sequence
  Synthetic
agaccuuaauccaacaugcauca

SEQ ID NO: 471371 - RNA, 24 nt, Artificial Sequence
  Synthetic
cagaccuuaauccaacaugcauca

SEQ ID NO: 471372 - RNA, 18 nt, Artificial Sequence
  Synthetic
augguguggucugcauca

SEQ ID NO: 471373 - RNA, 19 nt, Artificial Sequence
  Synthetic
aaugguguggucugcauca

SEQ ID NO: 471374 - RNA, 20 nt, Artificial Sequence
  Synthetic
uaaugguguggucugcauca

SEQ ID NO: 471375 - RNA, 21 nt, Artificial Sequence
  Synthetic
cuaaugguguggucugcauca

SEQ ID NO: 471376 - RNA, 22 nt, Artificial Sequence
  Synthetic
acuaaugguguggucugcauca

SEQ ID NO: 471377 - RNA, 23 nt, Artificial Sequence
  Synthetic
gacuaaugguguggucugcauca

SEQ ID NO: 471378 - RNA, 24 nt, Artificial Sequence
  Synthetic
ugacuaaugguguggucugcauca

SEQ ID NO: 471379 - RNA, 18 nt, Artificial Sequence
  Synthetic
acacaguggauugcauca

SEQ ID NO: 471380 - RNA, 19 nt, Artificial Sequence
  Synthetic
cacacaguggauugcauca

SEQ ID NO: 471381 - RNA, 20 nt, Artificial Sequence
  Synthetic
acacacaguggauugcauca

SEQ ID NO: 471382 - RNA, 21 nt, Artificial Sequence
  Synthetic
uacacacaguggauugcauca

SEQ ID NO: 471383 - RNA, 22 nt, Artificial Sequence
  Synthetic
guacacacaguggauugcauca

SEQ ID NO: 471384 - RNA, 23 nt, Artificial Sequence
  Synthetic
uguacacacaguggauugcauca

SEQ ID NO: 471385 - RNA, 24 nt, Artificial Sequence
  Synthetic
cuguacacacaguggauugcauca

SEQ ID NO: 471386 - RNA, 18 nt, Artificial Sequence
  Synthetic
uuacaugcauuugcauca

SEQ ID NO: 471387 - RNA, 19 nt, Artificial Sequence
  Synthetic
guuacaugcauuugcauca

SEQ ID NO: 471388 - RNA, 20 nt, Artificial Sequence
  Synthetic
uguuacaugcauuugcauca

SEQ ID NO: 471389 - RNA, 21 nt, Artificial Sequence
  Synthetic
auguuacaugcauuugcauca

SEQ ID NO: 471390 - RNA, 22 nt, Artificial Sequence
  Synthetic
uauguuacaugcauuugcauca

SEQ ID NO: 471391 - RNA, 23 nt, Artificial Sequence
  Synthetic
auauguuacaugcauuugcauca

SEQ ID NO: 471392 - RNA, 24 nt, Artificial Sequence
  Synthetic
cauauguuacaugcauuugcauca

SEQ ID NO: 471393 - RNA, 18 nt, Artificial Sequence
  Synthetic
aggcuaaucaaaucauca

SEQ ID NO: 471394 - RNA, 19 nt, Artificial Sequence
  Synthetic
caggcuaaucaaaucauca

SEQ ID NO: 471395 - RNA, 20 nt, Artificial Sequence
  Synthetic
ccaggcuaaucaaaucauca

SEQ ID NO: 471396 - RNA, 21 nt, Artificial Sequence
  Synthetic
uccaggcuaaucaaaucauca

SEQ ID NO: 471397 - RNA, 22 nt, Artificial Sequence
  Synthetic
guccaggcuaaucaaaucauca

SEQ ID NO: 471398 - RNA, 23 nt, Artificial Sequence
  Synthetic
gguccaggcuaaucaaaucauca

SEQ ID NO: 471399 - RNA, 24 nt, Artificial Sequence
  Synthetic
ggguccaggcuaaucaaaucauca

SEQ ID NO: 471400 - RNA, 18 nt, Artificial Sequence
  Synthetic
acaaagugacaaucauca

SEQ ID NO: 471401 - RNA, 19 nt, Artificial Sequence
  Synthetic
gacaaagugacaaucauca

SEQ ID NO: 471402 - RNA, 20 nt, Artificial Sequence
  Synthetic
ugacaaagugacaaucauca

SEQ ID NO: 471403 - RNA, 21 nt, Artificial Sequence
  Synthetic
gugacaaagugacaaucauca

SEQ ID NO: 471404 - RNA, 22 nt, Artificial Sequence
  Synthetic
agugacaaagugacaaucauca

SEQ ID NO: 471405 - RNA, 23 nt, Artificial Sequence
  Synthetic
cagugacaaagugacaaucauca

SEQ ID NO: 471406 - RNA, 24 nt, Artificial Sequence
  Synthetic
ucagugacaaagugacaaucauca

SEQ ID NO: 471407 - RNA, 18 nt, Artificial Sequence
  Synthetic
cagcaucacuaaucauca

SEQ ID NO: 471408 - RNA, 19 nt, Artificial Sequence
  Synthetic
ucagcaucacuaaucauca

SEQ ID NO: 471409 - RNA, 20 nt, Artificial Sequence
  Synthetic
cucagcaucacuaaucauca

SEQ ID NO: 471410 - RNA, 21 nt, Artificial Sequence
  Synthetic
gcucagcaucacuaaucauca

SEQ ID NO: 471411 - RNA, 22 nt, Artificial Sequence
  Synthetic
ugcucagcaucacuaaucauca

SEQ ID NO: 471412 - RNA, 23 nt, Artificial Sequence
  Synthetic
augcucagcaucacuaaucauca

SEQ ID NO: 471413 - RNA, 24 nt, Artificial Sequence
  Synthetic
uaugcucagcaucacuaaucauca

SEQ ID NO: 471414 - RNA, 18 nt, Artificial Sequence
  Synthetic
ucacuacccccaucauca

SEQ ID NO: 471415 - RNA, 19 nt, Artificial Sequence
  Synthetic
aucacuacccccaucauca

SEQ ID NO: 471416 - RNA, 20 nt, Artificial Sequence
  Synthetic
gaucacuacccccaucauca

SEQ ID NO: 471417 - RNA, 21 nt, Artificial Sequence
  Synthetic
cgaucacuacccccaucauca

SEQ ID NO: 471418 - RNA, 22 nt, Artificial Sequence
  Synthetic
acgaucacuacccccaucauca

SEQ ID NO: 471419 - RNA, 23 nt, Artificial Sequence
  Synthetic
cacgaucacuacccccaucauca

SEQ ID NO: 471420 - RNA, 24 nt, Artificial Sequence
  Synthetic
ccacgaucacuacccccaucauca

SEQ ID NO: 471421 - RNA, 18 nt, Artificial Sequence
  Synthetic
agaauauuuucaucauca

SEQ ID NO: 471422 - RNA, 19 nt, Artificial Sequence
  Synthetic
cagaauauuuucaucauca

SEQ ID NO: 471423 - RNA, 20 nt, Artificial Sequence
  Synthetic
gcagaauauuuucaucauca

SEQ ID NO: 471424 - RNA, 21 nt, Artificial Sequence
  Synthetic
ugcagaauauuuucaucauca

SEQ ID NO: 471425 - RNA, 22 nt, Artificial Sequence
  Synthetic
augcagaauauuuucaucauca

SEQ ID NO: 471426 - RNA, 23 nt, Artificial Sequence
  Synthetic
gaugcagaauauuuucaucauca

SEQ ID NO: 471427 - RNA, 24 nt, Artificial Sequence
  Synthetic
ugaugcagaauauuuucaucauca

SEQ ID NO: 471428 - RNA, 18 nt, Artificial Sequence
  Synthetic
gugaagagugacucauca

SEQ ID NO: 471429 - RNA, 19 nt, Artificial Sequence
  Synthetic
agugaagagugacucauca

SEQ ID NO: 471430 - RNA, 20 nt, Artificial Sequence
  Synthetic
cagugaagagugacucauca

SEQ ID NO: 471431 - RNA, 21 nt, Artificial Sequence
  Synthetic
gcagugaagagugacucauca

SEQ ID NO: 471432 - RNA, 22 nt, Artificial Sequence
  Synthetic
agcagugaagagugacucauca

SEQ ID NO: 471433 - RNA, 23 nt, Artificial Sequence
  Synthetic
uagcagugaagagugacucauca

SEQ ID NO: 471434 - RNA, 24 nt, Artificial Sequence
  Synthetic
uuagcagugaagagugacucauca

SEQ ID NO: 471435 - RNA, 18 nt, Artificial Sequence
  Synthetic
ccaacaccuuccucauca

SEQ ID NO: 471436 - RNA, 19 nt, Artificial Sequence
  Synthetic
uccaacaccuuccucauca

SEQ ID NO: 471437 - RNA, 20 nt, Artificial Sequence
  Synthetic
cuccaacaccuuccucauca

SEQ ID NO: 471438 - RNA, 21 nt, Artificial Sequence
  Synthetic
acuccaacaccuuccucauca

SEQ ID NO: 471439 - RNA, 22 nt, Artificial Sequence
  Synthetic
gacuccaacaccuuccucauca

SEQ ID NO: 471440 - RNA, 23 nt, Artificial Sequence
  Synthetic
agacuccaacaccuuccucauca

SEQ ID NO: 471441 - RNA, 24 nt, Artificial Sequence
  Synthetic
cagacuccaacaccuuccucauca

SEQ ID NO: 471442 - RNA, 18 nt, Artificial Sequence
  Synthetic
gcuuuucaagagucauca

SEQ ID NO: 471443 - RNA, 19 nt, Artificial Sequence
  Synthetic
agcuuuucaagagucauca

SEQ ID NO: 471444 - RNA, 20 nt, Artificial Sequence
  Synthetic
aagcuuuucaagagucauca

SEQ ID NO: 471445 - RNA, 21 nt, Artificial Sequence
  Synthetic
aaagcuuuucaagagucauca

SEQ ID NO: 471446 - RNA, 22 nt, Artificial Sequence
  Synthetic
gaaagcuuuucaagagucauca

SEQ ID NO: 471447 - RNA, 23 nt, Artificial Sequence
  Synthetic
ugaaagcuuuucaagagucauca

SEQ ID NO: 471448 - RNA, 24 nt, Artificial Sequence
  Synthetic
uugaaagcuuuucaagagucauca

SEQ ID NO: 471449 - RNA, 18 nt, Artificial Sequence
  Synthetic
gaguuaguguagucauca

SEQ ID NO: 471450 - RNA, 19 nt, Artificial Sequence
  Synthetic
agaguuaguguagucauca

SEQ ID NO: 471451 - RNA, 20 nt, Artificial Sequence
  Synthetic
gagaguuaguguagucauca

SEQ ID NO: 471452 - RNA, 21 nt, Artificial Sequence
  Synthetic
ugagaguuaguguagucauca

SEQ ID NO: 471453 - RNA, 22 nt, Artificial Sequence
  Synthetic
gugagaguuaguguagucauca

SEQ ID NO: 471454 - RNA, 23 nt, Artificial Sequence
  Synthetic
agugagaguuaguguagucauca

SEQ ID NO: 471455 - RNA, 24 nt, Artificial Sequence
  Synthetic
uagugagaguuaguguagucauca

SEQ ID NO: 471456 - RNA, 18 nt, Artificial Sequence
  Synthetic
caucaucacuggucauca

SEQ ID NO: 471457 - RNA, 19 nt, Artificial Sequence
  Synthetic
ucaucaucacuggucauca

SEQ ID NO: 471458 - RNA, 20 nt, Artificial Sequence
  Synthetic
cucaucaucacuggucauca

SEQ ID NO: 471459 - RNA, 21 nt, Artificial Sequence
  Synthetic
gcucaucaucacuggucauca

SEQ ID NO: 471460 - RNA, 22 nt, Artificial Sequence
  Synthetic
ugcucaucaucacuggucauca

SEQ ID NO: 471461 - RNA, 23 nt, Artificial Sequence
  Synthetic
augcucaucaucacuggucauca

SEQ ID NO: 471462 - RNA, 24 nt, Artificial Sequence
  Synthetic
aaugcucaucaucacuggucauca

SEQ ID NO: 471463 - RNA, 18 nt, Artificial Sequence
  Synthetic
uuuugacccuugucauca

SEQ ID NO: 471464 - RNA, 19 nt, Artificial Sequence
  Synthetic
auuuugacccuugucauca

SEQ ID NO: 471465 - RNA, 20 nt, Artificial Sequence
  Synthetic
cauuuugacccuugucauca

SEQ ID NO: 471466 - RNA, 21 nt, Artificial Sequence
  Synthetic
ccauuuugacccuugucauca

SEQ ID NO: 471467 - RNA, 22 nt, Artificial Sequence
  Synthetic
uccauuuugacccuugucauca

SEQ ID NO: 471468 - RNA, 23 nt, Artificial Sequence
  Synthetic
cuccauuuugacccuugucauca

SEQ ID NO: 471469 - RNA, 24 nt, Artificial Sequence
  Synthetic
ucuccauuuugacccuugucauca

SEQ ID NO: 471470 - RNA, 18 nt, Artificial Sequence
  Synthetic
caaucuagaacuucauca

SEQ ID NO: 471471 - RNA, 19 nt, Artificial Sequence
  Synthetic
ucaaucuagaacuucauca

SEQ ID NO: 471472 - RNA, 20 nt, Artificial Sequence
  Synthetic
uucaaucuagaacuucauca

SEQ ID NO: 471473 - RNA, 21 nt, Artificial Sequence
  Synthetic
uuucaaucuagaacuucauca

SEQ ID NO: 471474 - RNA, 22 nt, Artificial Sequence
  Synthetic
guuucaaucuagaacuucauca

SEQ ID NO: 471475 - RNA, 23 nt, Artificial Sequence
  Synthetic
aguuucaaucuagaacuucauca

SEQ ID NO: 471476 - RNA, 24 nt, Artificial Sequence
  Synthetic
gaguuucaaucuagaacuucauca

SEQ ID NO: 471477 - RNA, 18 nt, Artificial Sequence
  Synthetic
gaaccaugcaguucauca

SEQ ID NO: 471478 - RNA, 19 nt, Artificial Sequence
  Synthetic
ugaaccaugcaguucauca

SEQ ID NO: 471479 - RNA, 20 nt, Artificial Sequence
  Synthetic
gugaaccaugcaguucauca

SEQ ID NO: 471480 - RNA, 21 nt, Artificial Sequence
  Synthetic
ggugaaccaugcaguucauca

SEQ ID NO: 471481 - RNA, 22 nt, Artificial Sequence
  Synthetic
aggugaaccaugcaguucauca

SEQ ID NO: 471482 - RNA, 23 nt, Artificial Sequence
  Synthetic
aaggugaaccaugcaguucauca

SEQ ID NO: 471483 - RNA, 24 nt, Artificial Sequence
  Synthetic
gaaggugaaccaugcaguucauca

SEQ ID NO: 471484 - RNA, 18 nt, Artificial Sequence
  Synthetic
uauuuuguguuuucauca

SEQ ID NO: 471485 - RNA, 19 nt, Artificial Sequence
  Synthetic
guauuuuguguuuucauca

SEQ ID NO: 471486 - RNA, 20 nt, Artificial Sequence
  Synthetic
aguauuuuguguuuucauca

SEQ ID NO: 471487 - RNA, 21 nt, Artificial Sequence
  Synthetic
caguauuuuguguuuucauca

SEQ ID NO: 471488 - RNA, 22 nt, Artificial Sequence
  Synthetic
gcaguauuuuguguuuucauca

SEQ ID NO: 471489 - RNA, 23 nt, Artificial Sequence
  Synthetic
ugcaguauuuuguguuuucauca

SEQ ID NO: 471490 - RNA, 24 nt, Artificial Sequence
  Synthetic
uugcaguauuuuguguuuucauca

SEQ ID NO: 471491 - RNA, 18 nt, Artificial Sequence
  Synthetic
caaaaauauaaaagauca

SEQ ID NO: 471492 - RNA, 19 nt, Artificial Sequence
  Synthetic
acaaaaauauaaaagauca

SEQ ID NO: 471493 - RNA, 20 nt, Artificial Sequence
  Synthetic
aacaaaaauauaaaagauca

SEQ ID NO: 471494 - RNA, 21 nt, Artificial Sequence
  Synthetic
aaacaaaaauauaaaagauca

SEQ ID NO: 471495 - RNA, 22 nt, Artificial Sequence
  Synthetic
gaaacaaaaauauaaaagauca

SEQ ID NO: 471496 - RNA, 23 nt, Artificial Sequence
  Synthetic
ugaaacaaaaauauaaaagauca

SEQ ID NO: 471497 - RNA, 24 nt, Artificial Sequence
  Synthetic
uugaaacaaaaauauaaaagauca

SEQ ID NO: 471498 - RNA, 18 nt, Artificial Sequence
  Synthetic
ggaucaaaucaaagauca

SEQ ID NO: 471499 - RNA, 19 nt, Artificial Sequence
  Synthetic
uggaucaaaucaaagauca

SEQ ID NO: 471500 - RNA, 20 nt, Artificial Sequence
  Synthetic
guggaucaaaucaaagauca

SEQ ID NO: 471501 - RNA, 21 nt, Artificial Sequence
  Synthetic
uguggaucaaaucaaagauca

SEQ ID NO: 471502 - RNA, 22 nt, Artificial Sequence
  Synthetic
cuguggaucaaaucaaagauca

SEQ ID NO: 471503 - RNA, 23 nt, Artificial Sequence
  Synthetic
gcuguggaucaaaucaaagauca

SEQ ID NO: 471504 - RNA, 24 nt, Artificial Sequence
  Synthetic
agcuguggaucaaaucaaagauca

SEQ ID NO: 471505 - RNA, 18 nt, Artificial Sequence
  Synthetic
agacaaaaaacaagauca

SEQ ID NO: 471506 - RNA, 19 nt, Artificial Sequence
  Synthetic
aagacaaaaaacaagauca

SEQ ID NO: 471507 - RNA, 20 nt, Artificial Sequence
  Synthetic
caagacaaaaaacaagauca

SEQ ID NO: 471508 - RNA, 21 nt, Artificial Sequence
  Synthetic
ucaagacaaaaaacaagauca

SEQ ID NO: 471509 - RNA, 22 nt, Artificial Sequence
  Synthetic
cucaagacaaaaaacaagauca

SEQ ID NO: 471510 - RNA, 23 nt, Artificial Sequence
  Synthetic
ucucaagacaaaaaacaagauca

SEQ ID NO: 471511 - RNA, 24 nt, Artificial Sequence
  Synthetic
aucucaagacaaaaaacaagauca

SEQ ID NO: 471512 - RNA, 18 nt, Artificial Sequence
  Synthetic
ggaaacaguucaagauca

SEQ ID NO: 471513 - RNA, 19 nt, Artificial Sequence
  Synthetic
gggaaacaguucaagauca

SEQ ID NO: 471514 - RNA, 20 nt, Artificial Sequence
  Synthetic
agggaaacaguucaagauca

SEQ ID NO: 471515 - RNA, 21 nt, Artificial Sequence
  Synthetic
cagggaaacaguucaagauca

SEQ ID NO: 471516 - RNA, 22 nt, Artificial Sequence
  Synthetic
ccagggaaacaguucaagauca

SEQ ID NO: 471517 - RNA, 23 nt, Artificial Sequence
  Synthetic
cccagggaaacaguucaagauca

SEQ ID NO: 471518 - RNA, 24 nt, Artificial Sequence
  Synthetic
gcccagggaaacaguucaagauca

SEQ ID NO: 471519 - RNA, 18 nt, Artificial Sequence
  Synthetic
aaaggguuaugaagauca

SEQ ID NO: 471520 - RNA, 19 nt, Artificial Sequence
  Synthetic
gaaaggguuaugaagauca

SEQ ID NO: 471521 - RNA, 20 nt, Artificial Sequence
  Synthetic
ggaaaggguuaugaagauca

SEQ ID NO: 471522 - RNA, 21 nt, Artificial Sequence
  Synthetic
gggaaaggguuaugaagauca

SEQ ID NO: 471523 - RNA, 22 nt, Artificial Sequence
  Synthetic
ugggaaaggguuaugaagauca

SEQ ID NO: 471524 - RNA, 23 nt, Artificial Sequence
  Synthetic
augggaaaggguuaugaagauca

SEQ ID NO: 471525 - RNA, 24 nt, Artificial Sequence
  Synthetic
uaugggaaaggguuaugaagauca

SEQ ID NO: 471526 - RNA, 18 nt, Artificial Sequence
  Synthetic
ucaacauuagacagauca

SEQ ID NO: 471527 - RNA, 19 nt, Artificial Sequence
  Synthetic
gucaacauuagacagauca

SEQ ID NO: 471528 - RNA, 20 nt, Artificial Sequence
  Synthetic
ugucaacauuagacagauca

SEQ ID NO: 471529 - RNA, 21 nt, Artificial Sequence
  Synthetic
cugucaacauuagacagauca

SEQ ID NO: 471530 - RNA, 22 nt, Artificial Sequence
  Synthetic
acugucaacauuagacagauca

SEQ ID NO: 471531 - RNA, 23 nt, Artificial Sequence
  Synthetic
cacugucaacauuagacagauca

SEQ ID NO: 471532 - RNA, 24 nt, Artificial Sequence
  Synthetic
ccacugucaacauuagacagauca

SEQ ID NO: 471533 - RNA, 18 nt, Artificial Sequence
  Synthetic
ccacuaaacuacagauca

SEQ ID NO: 471534 - RNA, 19 nt, Artificial Sequence
  Synthetic
cccacuaaacuacagauca

SEQ ID NO: 471535 - RNA, 20 nt, Artificial Sequence
  Synthetic
ccccacuaaacuacagauca

SEQ ID NO: 471536 - RNA, 21 nt, Artificial Sequence
  Synthetic
cccccacuaaacuacagauca

SEQ ID NO: 471537 - RNA, 22 nt, Artificial Sequence
  Synthetic
ucccccacuaaacuacagauca

SEQ ID NO: 471538 - RNA, 23 nt, Artificial Sequence
  Synthetic
cucccccacuaaacuacagauca

SEQ ID NO: 471539 - RNA, 24 nt, Artificial Sequence
  Synthetic
ccucccccacuaaacuacagauca

SEQ ID NO: 471540 - RNA, 18 nt, Artificial Sequence
  Synthetic
agaacuacacagagauca

SEQ ID NO: 471541 - RNA, 19 nt, Artificial Sequence
  Synthetic
aagaacuacacagagauca

SEQ ID NO: 471542 - RNA, 20 nt, Artificial Sequence
  Synthetic
caagaacuacacagagauca

SEQ ID NO: 471543 - RNA, 21 nt, Artificial Sequence
  Synthetic
ucaagaacuacacagagauca

SEQ ID NO: 471544 - RNA, 22 nt, Artificial Sequence
  Synthetic
gucaagaacuacacagagauca

SEQ ID NO: 471545 - RNA, 23 nt, Artificial Sequence
  Synthetic
agucaagaacuacacagagauca

SEQ ID NO: 471546 - RNA, 24 nt, Artificial Sequence
  Synthetic
uagucaagaacuacacagagauca

SEQ ID NO: 471547 - RNA, 18 nt, Artificial Sequence
  Synthetic
aagugaccacagagauca

SEQ ID NO: 471548 - RNA, 19 nt, Artificial Sequence
  Synthetic
gaagugaccacagagauca

SEQ ID NO: 471549 - RNA, 20 nt, Artificial Sequence
  Synthetic
ggaagugaccacagagauca

SEQ ID NO: 471550 - RNA, 21 nt, Artificial Sequence
  Synthetic
uggaagugaccacagagauca

SEQ ID NO: 471551 - RNA, 22 nt, Artificial Sequence
  Synthetic
uuggaagugaccacagagauca

SEQ ID NO: 471552 - RNA, 23 nt, Artificial Sequence
  Synthetic
guuggaagugaccacagagauca

SEQ ID NO: 471553 - RNA, 24 nt, Artificial Sequence
  Synthetic
gguuggaagugaccacagagauca

SEQ ID NO: 471554 - RNA, 18 nt, Artificial Sequence
  Synthetic
gggaggagagagagauca

SEQ ID NO: 471555 - RNA, 19 nt, Artificial Sequence
  Synthetic
ggggaggagagagagauca

SEQ ID NO: 471556 - RNA, 20 nt, Artificial Sequence
  Synthetic
aggggaggagagagagauca

SEQ ID NO: 471557 - RNA, 21 nt, Artificial Sequence
  Synthetic
gaggggaggagagagagauca

SEQ ID NO: 471558 - RNA, 22 nt, Artificial Sequence
  Synthetic
ggaggggaggagagagagauca

SEQ ID NO: 471559 - RNA, 23 nt, Artificial Sequence
  Synthetic
gggaggggaggagagagagauca

SEQ ID NO: 471560 - RNA, 24 nt, Artificial Sequence
  Synthetic
ggggaggggaggagagagagauca

SEQ ID NO: 471561 - RNA, 18 nt, Artificial Sequence
  Synthetic
caagggacugagagauca

SEQ ID NO: 471562 - RNA, 19 nt, Artificial Sequence
  Synthetic
ucaagggacugagagauca

SEQ ID NO: 471563 - RNA, 20 nt, Artificial Sequence
  Synthetic
cucaagggacugagagauca

SEQ ID NO: 471564 - RNA, 21 nt, Artificial Sequence
  Synthetic
ccucaagggacugagagauca

SEQ ID NO: 471565 - RNA, 22 nt, Artificial Sequence
  Synthetic
accucaagggacugagagauca

SEQ ID NO: 471566 - RNA, 23 nt, Artificial Sequence
  Synthetic
aaccucaagggacugagagauca

SEQ ID NO: 471567 - RNA, 24 nt, Artificial Sequence
  Synthetic
caaccucaagggacugagagauca

SEQ ID NO: 471568 - RNA, 18 nt, Artificial Sequence
  Synthetic
agguucuaauggagauca

SEQ ID NO: 471569 - RNA, 19 nt, Artificial Sequence
  Synthetic
cagguucuaauggagauca

SEQ ID NO: 471570 - RNA, 20 nt, Artificial Sequence
  Synthetic
ccagguucuaauggagauca

SEQ ID NO: 471571 - RNA, 21 nt, Artificial Sequence
  Synthetic
uccagguucuaauggagauca

SEQ ID NO: 471572 - RNA, 22 nt, Artificial Sequence
  Synthetic
guccagguucuaauggagauca

SEQ ID NO: 471573 - RNA, 23 nt, Artificial Sequence
  Synthetic
uguccagguucuaauggagauca

SEQ ID NO: 471574 - RNA, 24 nt, Artificial Sequence
  Synthetic
uuguccagguucuaauggagauca

SEQ ID NO: 471575 - RNA, 18 nt, Artificial Sequence
  Synthetic
uggaugaagaugagauca

SEQ ID NO: 471576 - RNA, 19 nt, Artificial Sequence
  Synthetic
guggaugaagaugagauca

SEQ ID NO: 471577 - RNA, 20 nt, Artificial Sequence
  Synthetic
cguggaugaagaugagauca

SEQ ID NO: 471578 - RNA, 21 nt, Artificial Sequence
  Synthetic
ccguggaugaagaugagauca

SEQ ID NO: 471579 - RNA, 22 nt, Artificial Sequence
  Synthetic
gccguggaugaagaugagauca

SEQ ID NO: 471580 - RNA, 23 nt, Artificial Sequence
  Synthetic
agccguggaugaagaugagauca

SEQ ID NO: 471581 - RNA, 24 nt, Artificial Sequence
  Synthetic
gagccguggaugaagaugagauca

SEQ ID NO: 471582 - RNA, 18 nt, Artificial Sequence
  Synthetic
uacacagcuaauagauca

SEQ ID NO: 471583 - RNA, 19 nt, Artificial Sequence
  Synthetic
uuacacagcuaauagauca

SEQ ID NO: 471584 - RNA, 20 nt, Artificial Sequence
  Synthetic
guuacacagcuaauagauca

SEQ ID NO: 471585 - RNA, 21 nt, Artificial Sequence
  Synthetic
gguuacacagcuaauagauca

SEQ ID NO: 471586 - RNA, 22 nt, Artificial Sequence
  Synthetic
agguuacacagcuaauagauca

SEQ ID NO: 471587 - RNA, 23 nt, Artificial Sequence
  Synthetic
aagguuacacagcuaauagauca

SEQ ID NO: 471588 - RNA, 24 nt, Artificial Sequence
  Synthetic
uaagguuacacagcuaauagauca

SEQ ID NO: 471589 - RNA, 21 nt, Artificial Sequence
  Synthetic
ccaaaacagagauauagauca

SEQ ID NO: 471590 - RNA, 22 nt, Artificial Sequence
  Synthetic
accaaaacagagauauagauca

SEQ ID NO: 471591 - RNA, 23 nt, Artificial Sequence
  Synthetic
uaccaaaacagagauauagauca

SEQ ID NO: 471592 - RNA, 24 nt, Artificial Sequence
  Synthetic
guaccaaaacagagauauagauca

SEQ ID NO: 471593 - RNA, 18 nt, Artificial Sequence
  Synthetic
aagacaaacacaggauca

SEQ ID NO: 471594 - RNA, 19 nt, Artificial Sequence
  Synthetic
uaagacaaacacaggauca

SEQ ID NO: 471595 - RNA, 20 nt, Artificial Sequence
  Synthetic
uuaagacaaacacaggauca

SEQ ID NO: 471596 - RNA, 21 nt, Artificial Sequence
  Synthetic
auuaagacaaacacaggauca

SEQ ID NO: 471597 - RNA, 22 nt, Artificial Sequence
  Synthetic
uauuaagacaaacacaggauca

SEQ ID NO: 471598 - RNA, 23 nt, Artificial Sequence
  Synthetic
uuauuaagacaaacacaggauca

SEQ ID NO: 471599 - RNA, 24 nt, Artificial Sequence
  Synthetic
auuauuaagacaaacacaggauca

SEQ ID NO: 471600 - RNA, 18 nt, Artificial Sequence
  Synthetic
cucugaaaaugaggauca

SEQ ID NO: 471601 - RNA, 19 nt, Artificial Sequence
  Synthetic
ccucugaaaaugaggauca

SEQ ID NO: 471602 - RNA, 20 nt, Artificial Sequence
  Synthetic
accucugaaaaugaggauca

SEQ ID NO: 471603 - RNA, 21 nt, Artificial Sequence
  Synthetic
aaccucugaaaaugaggauca

SEQ ID NO: 471604 - RNA, 22 nt, Artificial Sequence
  Synthetic
caaccucugaaaaugaggauca

SEQ ID NO: 471605 - RNA, 23 nt, Artificial Sequence
  Synthetic
ucaaccucugaaaaugaggauca

SEQ ID NO: 471606 - RNA, 24 nt, Artificial Sequence
  Synthetic
uucaaccucugaaaaugaggauca

SEQ ID NO: 471607 - RNA, 18 nt, Artificial Sequence
  Synthetic
ugaucgugggagggauca

SEQ ID NO: 471608 - RNA, 19 nt, Artificial Sequence
  Synthetic
augaucgugggagggauca

SEQ ID NO: 471609 - RNA, 20 nt, Artificial Sequence
  Synthetic
caugaucgugggagggauca

SEQ ID NO: 471610 - RNA, 21 nt, Artificial Sequence
  Synthetic
acaugaucgugggagggauca

SEQ ID NO: 471611 - RNA, 22 nt, Artificial Sequence
  Synthetic
uacaugaucgugggagggauca

SEQ ID NO: 471612 - RNA, 23 nt, Artificial Sequence
  Synthetic
auacaugaucgugggagggauca

SEQ ID NO: 471613 - RNA, 24 nt, Artificial Sequence
  Synthetic
aauacaugaucgugggagggauca

SEQ ID NO: 471614 - RNA, 18 nt, Artificial Sequence
  Synthetic
ugggaggugauuggauca

SEQ ID NO: 471615 - RNA, 19 nt, Artificial Sequence
  Synthetic
gugggaggugauuggauca

SEQ ID NO: 471616 - RNA, 20 nt, Artificial Sequence
  Synthetic
ggugggaggugauuggauca

SEQ ID NO: 471617 - RNA, 21 nt, Artificial Sequence
  Synthetic
uggugggaggugauuggauca

SEQ ID NO: 471618 - RNA, 22 nt, Artificial Sequence
  Synthetic
cuggugggaggugauuggauca

SEQ ID NO: 471619 - RNA, 23 nt, Artificial Sequence
  Synthetic
ccuggugggaggugauuggauca

SEQ ID NO: 471620 - RNA, 24 nt, Artificial Sequence
  Synthetic
accuggugggaggugauuggauca

SEQ ID NO: 471621 - RNA, 18 nt, Artificial Sequence
  Synthetic
gugacuuggagaugauca

SEQ ID NO: 471622 - RNA, 19 nt, Artificial Sequence
  Synthetic
ugugacuuggagaugauca

SEQ ID NO: 471623 - RNA, 20 nt, Artificial Sequence
  Synthetic
cugugacuuggagaugauca

SEQ ID NO: 471624 - RNA, 21 nt, Artificial Sequence
  Synthetic
acugugacuuggagaugauca

SEQ ID NO: 471625 - RNA, 22 nt, Artificial Sequence
  Synthetic
aacugugacuuggagaugauca

SEQ ID NO: 471626 - RNA, 23 nt, Artificial Sequence
  Synthetic
caacugugacuuggagaugauca

SEQ ID NO: 471627 - RNA, 24 nt, Artificial Sequence
  Synthetic
ucaacugugacuuggagaugauca

SEQ ID NO: 471628 - RNA, 18 nt, Artificial Sequence
  Synthetic
cauagaaugagaugauca

SEQ ID NO: 471629 - RNA, 19 nt, Artificial Sequence
  Synthetic
ucauagaaugagaugauca

SEQ ID NO: 471630 - RNA, 20 nt, Artificial Sequence
  Synthetic
aucauagaaugagaugauca

SEQ ID NO: 471631 - RNA, 21 nt, Artificial Sequence
  Synthetic
gaucauagaaugagaugauca

SEQ ID NO: 471632 - RNA, 22 nt, Artificial Sequence
  Synthetic
agaucauagaaugagaugauca

SEQ ID NO: 471633 - RNA, 23 nt, Artificial Sequence
  Synthetic
aagaucauagaaugagaugauca

SEQ ID NO: 471634 - RNA, 24 nt, Artificial Sequence
  Synthetic
gaagaucauagaaugagaugauca

SEQ ID NO: 471635 - RNA, 18 nt, Artificial Sequence
  Synthetic
ucuuuaaauauaugauca

SEQ ID NO: 471636 - RNA, 19 nt, Artificial Sequence
  Synthetic
gucuuuaaauauaugauca

SEQ ID NO: 471637 - RNA, 20 nt, Artificial Sequence
  Synthetic
agucuuuaaauauaugauca

SEQ ID NO: 471638 - RNA, 21 nt, Artificial Sequence
  Synthetic
aagucuuuaaauauaugauca

SEQ ID NO: 471639 - RNA, 22 nt, Artificial Sequence
  Synthetic
aaagucuuuaaauauaugauca

SEQ ID NO: 471640 - RNA, 23 nt, Artificial Sequence
  Synthetic
aaaagucuuuaaauauaugauca

SEQ ID NO: 471641 - RNA, 24 nt, Artificial Sequence
  Synthetic
aaaaagucuuuaaauauaugauca

SEQ ID NO: 471642 - RNA, 18 nt, Artificial Sequence
  Synthetic
uauuagucauuaugauca

SEQ ID NO: 471643 - RNA, 19 nt, Artificial Sequence
  Synthetic
uuauuagucauuaugauca

SEQ ID NO: 471644 - RNA, 20 nt, Artificial Sequence
  Synthetic
auuauuagucauuaugauca

SEQ ID NO: 471645 - RNA, 21 nt, Artificial Sequence
  Synthetic
aauuauuagucauuaugauca

SEQ ID NO: 471646 - RNA, 22 nt, Artificial Sequence
  Synthetic
uaauuauuagucauuaugauca

SEQ ID NO: 471647 - RNA, 23 nt, Artificial Sequence
  Synthetic
uuaauuauuagucauuaugauca

SEQ ID NO: 471648 - RNA, 24 nt, Artificial Sequence
  Synthetic
guuaauuauuagucauuaugauca

SEQ ID NO: 471649 - RNA, 18 nt, Artificial Sequence
  Synthetic
gcucaacaucacugauca

SEQ ID NO: 471650 - RNA, 19 nt, Artificial Sequence
  Synthetic
agcucaacaucacugauca

SEQ ID NO: 471651 - RNA, 20 nt, Artificial Sequence
  Synthetic
aagcucaacaucacugauca

SEQ ID NO: 471652 - RNA, 21 nt, Artificial Sequence
  Synthetic
aaagcucaacaucacugauca

SEQ ID NO: 471653 - RNA, 22 nt, Artificial Sequence
  Synthetic
aaaagcucaacaucacugauca

SEQ ID NO: 471654 - RNA, 23 nt, Artificial Sequence
  Synthetic
aaaaagcucaacaucacugauca

SEQ ID NO: 471655 - RNA, 24 nt, Artificial Sequence
  Synthetic
aaaaaagcucaacaucacugauca

SEQ ID NO: 471656 - RNA, 18 nt, Artificial Sequence
  Synthetic
ccuuuuccauacugauca

SEQ ID NO: 471657 - RNA, 19 nt, Artificial Sequence
  Synthetic
gccuuuuccauacugauca

SEQ ID NO: 471658 - RNA, 20 nt, Artificial Sequence
  Synthetic
ugccuuuuccauacugauca

SEQ ID NO: 471659 - RNA, 21 nt, Artificial Sequence
  Synthetic
augccuuuuccauacugauca

SEQ ID NO: 471660 - RNA, 22 nt, Artificial Sequence
  Synthetic
caugccuuuuccauacugauca

SEQ ID NO: 471661 - RNA, 23 nt, Artificial Sequence
  Synthetic
acaugccuuuuccauacugauca

SEQ ID NO: 471662 - RNA, 24 nt, Artificial Sequence
  Synthetic
gacaugccuuuuccauacugauca

SEQ ID NO: 471663 - RNA, 18 nt, Artificial Sequence
  Synthetic
ucuuaaagauacugauca

SEQ ID NO: 471664 - RNA, 19 nt, Artificial Sequence
  Synthetic
cucuuaaagauacugauca

SEQ ID NO: 471665 - RNA, 20 nt, Artificial Sequence
  Synthetic
ucucuuaaagauacugauca

SEQ ID NO: 471666 - RNA, 21 nt, Artificial Sequence
  Synthetic
uucucuuaaagauacugauca

SEQ ID NO: 471667 - RNA, 22 nt, Artificial Sequence
  Synthetic
cuucucuuaaagauacugauca

SEQ ID NO: 471668 - RNA, 23 nt, Artificial Sequence
  Synthetic
ccuucucuuaaagauacugauca

SEQ ID NO: 471669 - RNA, 24 nt, Artificial Sequence
  Synthetic
accuucucuuaaagauacugauca

SEQ ID NO: 471670 - RNA, 18 nt, Artificial Sequence
  Synthetic
ugagggaauggcugauca

SEQ ID NO: 471671 - RNA, 19 nt, Artificial Sequence
  Synthetic
augagggaauggcugauca

SEQ ID NO: 471672 - RNA, 20 nt, Artificial Sequence
  Synthetic
gaugagggaauggcugauca

SEQ ID NO: 471673 - RNA, 21 nt, Artificial Sequence
  Synthetic
agaugagggaauggcugauca

SEQ ID NO: 471674 - RNA, 22 nt, Artificial Sequence
  Synthetic
gagaugagggaauggcugauca

SEQ ID NO: 471675 - RNA, 23 nt, Artificial Sequence
  Synthetic
agagaugagggaauggcugauca

SEQ ID NO: 471676 - RNA, 24 nt, Artificial Sequence
  Synthetic
gagagaugagggaauggcugauca

SEQ ID NO: 471677 - RNA, 18 nt, Artificial Sequence
  Synthetic
aaggcugacuagugauca

SEQ ID NO: 471678 - RNA, 19 nt, Artificial Sequence
  Synthetic
caaggcugacuagugauca

SEQ ID NO: 471679 - RNA, 20 nt, Artificial Sequence
  Synthetic
ccaaggcugacuagugauca

SEQ ID NO: 471680 - RNA, 21 nt, Artificial Sequence
  Synthetic
cccaaggcugacuagugauca

SEQ ID NO: 471681 - RNA, 22 nt, Artificial Sequence
  Synthetic
gcccaaggcugacuagugauca

SEQ ID NO: 471682 - RNA, 23 nt, Artificial Sequence
  Synthetic
agcccaaggcugacuagugauca

SEQ ID NO: 471683 - RNA, 24 nt, Artificial Sequence
  Synthetic
cagcccaaggcugacuagugauca

SEQ ID NO: 471684 - RNA, 18 nt, Artificial Sequence
  Synthetic
uuuuauaaagggugauca

SEQ ID NO: 471685 - RNA, 19 nt, Artificial Sequence
  Synthetic
auuuuauaaagggugauca

SEQ ID NO: 471686 - RNA, 20 nt, Artificial Sequence
  Synthetic
gauuuuauaaagggugauca

SEQ ID NO: 471687 - RNA, 21 nt, Artificial Sequence
  Synthetic
ugauuuuauaaagggugauca

SEQ ID NO: 471688 - RNA, 22 nt, Artificial Sequence
  Synthetic
gugauuuuauaaagggugauca

SEQ ID NO: 471689 - RNA, 23 nt, Artificial Sequence
  Synthetic
ugugauuuuauaaagggugauca

SEQ ID NO: 471690 - RNA, 24 nt, Artificial Sequence
  Synthetic
uugugauuuuauaaagggugauca

SEQ ID NO: 471691 - RNA, 18 nt, Artificial Sequence
  Synthetic
aauauuaaaaauugauca

SEQ ID NO: 471692 - RNA, 19 nt, Artificial Sequence
  Synthetic
gaauauuaaaaauugauca

SEQ ID NO: 471693 - RNA, 20 nt, Artificial Sequence
  Synthetic
agaauauuaaaaauugauca

SEQ ID NO: 471694 - RNA, 21 nt, Artificial Sequence
  Synthetic
uagaauauuaaaaauugauca

SEQ ID NO: 471695 - RNA, 22 nt, Artificial Sequence
  Synthetic
uuagaauauuaaaaauugauca

SEQ ID NO: 471696 - RNA, 23 nt, Artificial Sequence
  Synthetic
auuagaauauuaaaaauugauca

SEQ ID NO: 471697 - RNA, 24 nt, Artificial Sequence
  Synthetic
uauuagaauauuaaaaauugauca

SEQ ID NO: 471698 - RNA, 18 nt, Artificial Sequence
  Synthetic
gagagacucacuugauca

SEQ ID NO: 471699 - RNA, 19 nt, Artificial Sequence
  Synthetic
ugagagacucacuugauca

SEQ ID NO: 471700 - RNA, 20 nt, Artificial Sequence
  Synthetic
cugagagacucacuugauca

SEQ ID NO: 471701 - RNA, 21 nt, Artificial Sequence
  Synthetic
gcugagagacucacuugauca

SEQ ID NO: 471702 - RNA, 22 nt, Artificial Sequence
  Synthetic
ugcugagagacucacuugauca

SEQ ID NO: 471703 - RNA, 23 nt, Artificial Sequence
  Synthetic
augcugagagacucacuugauca

SEQ ID NO: 471704 - RNA, 24 nt, Artificial Sequence
  Synthetic
gaugcugagagacucacuugauca

SEQ ID NO: 471705 - RNA, 18 nt, Artificial Sequence
  Synthetic
auaaggacauuuugauca

SEQ ID NO: 471706 - RNA, 19 nt, Artificial Sequence
  Synthetic
cauaaggacauuuugauca

SEQ ID NO: 471707 - RNA, 20 nt, Artificial Sequence
  Synthetic
gcauaaggacauuuugauca

SEQ ID NO: 471708 - RNA, 21 nt, Artificial Sequence
  Synthetic
ugcauaaggacauuuugauca

SEQ ID NO: 471709 - RNA, 22 nt, Artificial Sequence
  Synthetic
cugcauaaggacauuuugauca

SEQ ID NO: 471710 - RNA, 23 nt, Artificial Sequence
  Synthetic
gcugcauaaggacauuuugauca

SEQ ID NO: 471711 - RNA, 24 nt, Artificial Sequence
  Synthetic
ugcugcauaaggacauuuugauca

SEQ ID NO: 471712 - RNA, 18 nt, Artificial Sequence
  Synthetic
uguguguagcaaauauca

SEQ ID NO: 471713 - RNA, 19 nt, Artificial Sequence
  Synthetic
cuguguguagcaaauauca

SEQ ID NO: 471714 - RNA, 20 nt, Artificial Sequence
  Synthetic
acuguguguagcaaauauca

SEQ ID NO: 471715 - RNA, 21 nt, Artificial Sequence
  Synthetic
cacuguguguagcaaauauca

SEQ ID NO: 471716 - RNA, 22 nt, Artificial Sequence
  Synthetic
ccacuguguguagcaaauauca

SEQ ID NO: 471717 - RNA, 23 nt, Artificial Sequence
  Synthetic
cccacuguguguagcaaauauca

SEQ ID NO: 471718 - RNA, 24 nt, Artificial Sequence
  Synthetic
ccccacuguguguagcaaauauca

SEQ ID NO: 471719 - RNA, 18 nt, Artificial Sequence
  Synthetic
aucacccacacaauauca

SEQ ID NO: 471720 - RNA, 19 nt, Artificial Sequence
  Synthetic
caucacccacacaauauca

SEQ ID NO: 471721 - RNA, 20 nt, Artificial Sequence
  Synthetic
gcaucacccacacaauauca

SEQ ID NO: 471722 - RNA, 21 nt, Artificial Sequence
  Synthetic
agcaucacccacacaauauca

SEQ ID NO: 471723 - RNA, 22 nt, Artificial Sequence
  Synthetic
cagcaucacccacacaauauca

SEQ ID NO: 471724 - RNA, 23 nt, Artificial Sequence
  Synthetic
acagcaucacccacacaauauca

SEQ ID NO: 471725 - RNA, 24 nt, Artificial Sequence
  Synthetic
aacagcaucacccacacaauauca

SEQ ID NO: 471726 - RNA, 18 nt, Artificial Sequence
  Synthetic
ugcaucauaccaauauca

SEQ ID NO: 471727 - RNA, 19 nt, Artificial Sequence
  Synthetic
uugcaucauaccaauauca

SEQ ID NO: 471728 - RNA, 20 nt, Artificial Sequence
  Synthetic
uuugcaucauaccaauauca

SEQ ID NO: 471729 - RNA, 21 nt, Artificial Sequence
  Synthetic
auuugcaucauaccaauauca

SEQ ID NO: 471730 - RNA, 22 nt, Artificial Sequence
  Synthetic
aauuugcaucauaccaauauca

SEQ ID NO: 471731 - RNA, 23 nt, Artificial Sequence
  Synthetic
aaauuugcaucauaccaauauca

SEQ ID NO: 471732 - RNA, 24 nt, Artificial Sequence
  Synthetic
uaaauuugcaucauaccaauauca

SEQ ID NO: 471733 - RNA, 18 nt, Artificial Sequence
  Synthetic
aaaaugaaaguaauauca

SEQ ID NO: 471734 - RNA, 19 nt, Artificial Sequence
  Synthetic
gaaaaugaaaguaauauca

SEQ ID NO: 471735 - RNA, 20 nt, Artificial Sequence
  Synthetic
agaaaaugaaaguaauauca

SEQ ID NO: 471736 - RNA, 21 nt, Artificial Sequence
  Synthetic
uagaaaaugaaaguaauauca

SEQ ID NO: 471737 - RNA, 22 nt, Artificial Sequence
  Synthetic
auagaaaaugaaaguaauauca

SEQ ID NO: 471738 - RNA, 23 nt, Artificial Sequence
  Synthetic
cauagaaaaugaaaguaauauca

SEQ ID NO: 471739 - RNA, 24 nt, Artificial Sequence
  Synthetic
ucauagaaaaugaaaguaauauca

SEQ ID NO: 471740 - RNA, 18 nt, Artificial Sequence
  Synthetic
acuuuccagggcauauca

SEQ ID NO: 471741 - RNA, 19 nt, Artificial Sequence
  Synthetic
uacuuuccagggcauauca

SEQ ID NO: 471742 - RNA, 20 nt, Artificial Sequence
  Synthetic
auacuuuccagggcauauca

SEQ ID NO: 471743 - RNA, 21 nt, Artificial Sequence
  Synthetic
cauacuuuccagggcauauca

SEQ ID NO: 471744 - RNA, 22 nt, Artificial Sequence
  Synthetic
ccauacuuuccagggcauauca

SEQ ID NO: 471745 - RNA, 23 nt, Artificial Sequence
  Synthetic
cccauacuuuccagggcauauca

SEQ ID NO: 471746 - RNA, 24 nt, Artificial Sequence
  Synthetic
gcccauacuuuccagggcauauca

SEQ ID NO: 471747 - RNA, 18 nt, Artificial Sequence
  Synthetic
uuucaugacaucauauca

SEQ ID NO: 471748 - RNA, 19 nt, Artificial Sequence
  Synthetic
uuuucaugacaucauauca

SEQ ID NO: 471749 - RNA, 20 nt, Artificial Sequence
  Synthetic
cuuuucaugacaucauauca

SEQ ID NO: 471750 - RNA, 21 nt, Artificial Sequence
  Synthetic
ccuuuucaugacaucauauca

SEQ ID NO: 471751 - RNA, 22 nt, Artificial Sequence
  Synthetic
uccuuuucaugacaucauauca

SEQ ID NO: 471752 - RNA, 23 nt, Artificial Sequence
  Synthetic
guccuuuucaugacaucauauca

SEQ ID NO: 471753 - RNA, 24 nt, Artificial Sequence
  Synthetic
uguccuuuucaugacaucauauca

SEQ ID NO: 471754 - RNA, 18 nt, Artificial Sequence
  Synthetic
aauuuacuggagauauca

SEQ ID NO: 471755 - RNA, 19 nt, Artificial Sequence
  Synthetic
aaauuuacuggagauauca

SEQ ID NO: 471756 - RNA, 20 nt, Artificial Sequence
  Synthetic
uaaauuuacuggagauauca

SEQ ID NO: 471757 - RNA, 21 nt, Artificial Sequence
  Synthetic
cuaaauuuacuggagauauca

SEQ ID NO: 471758 - RNA, 22 nt, Artificial Sequence
  Synthetic
ucuaaauuuacuggagauauca

SEQ ID NO: 471759 - RNA, 23 nt, Artificial Sequence
  Synthetic
aucuaaauuuacuggagauauca

SEQ ID NO: 471760 - RNA, 24 nt, Artificial Sequence
  Synthetic
uaucuaaauuuacuggagauauca

SEQ ID NO: 471761 - RNA, 18 nt, Artificial Sequence
  Synthetic
caauagcaugggauauca

SEQ ID NO: 471762 - RNA, 19 nt, Artificial Sequence
  Synthetic
acaauagcaugggauauca

SEQ ID NO: 471763 - RNA, 20 nt, Artificial Sequence
  Synthetic
aacaauagcaugggauauca

SEQ ID NO: 471764 - RNA, 21 nt, Artificial Sequence
  Synthetic
aaacaauagcaugggauauca

SEQ ID NO: 471765 - RNA, 22 nt, Artificial Sequence
  Synthetic
gaaacaauagcaugggauauca

SEQ ID NO: 471766 - RNA, 23 nt, Artificial Sequence
  Synthetic
ggaaacaauagcaugggauauca

SEQ ID NO: 471767 - RNA, 24 nt, Artificial Sequence
  Synthetic
aggaaacaauagcaugggauauca

SEQ ID NO: 471768 - RNA, 18 nt, Artificial Sequence
  Synthetic
accuuggguuggauauca

SEQ ID NO: 471769 - RNA, 19 nt, Artificial Sequence
  Synthetic
uaccuuggguuggauauca

SEQ ID NO: 471770 - RNA, 20 nt, Artificial Sequence
  Synthetic
cuaccuuggguuggauauca

SEQ ID NO: 471771 - RNA, 21 nt, Artificial Sequence
  Synthetic
acuaccuuggguuggauauca

SEQ ID NO: 471772 - RNA, 22 nt, Artificial Sequence
  Synthetic
aacuaccuuggguuggauauca

SEQ ID NO: 471773 - RNA, 23 nt, Artificial Sequence
  Synthetic
uaacuaccuuggguuggauauca

SEQ ID NO: 471774 - RNA, 24 nt, Artificial Sequence
  Synthetic
auaacuaccuuggguuggauauca

SEQ ID NO: 471775 - RNA, 18 nt, Artificial Sequence
  Synthetic
gaagaaaggaauauauca

SEQ ID NO: 471776 - RNA, 19 nt, Artificial Sequence
  Synthetic
ugaagaaaggaauauauca

SEQ ID NO: 471777 - RNA, 20 nt, Artificial Sequence
  Synthetic
cugaagaaaggaauauauca

SEQ ID NO: 471778 - RNA, 21 nt, Artificial Sequence
  Synthetic
ccugaagaaaggaauauauca

SEQ ID NO: 471779 - RNA, 22 nt, Artificial Sequence
  Synthetic
accugaagaaaggaauauauca

SEQ ID NO: 471780 - RNA, 23 nt, Artificial Sequence
  Synthetic
aaccugaagaaaggaauauauca

SEQ ID NO: 471781 - RNA, 24 nt, Artificial Sequence
  Synthetic
aaaccugaagaaaggaauauauca

SEQ ID NO: 471782 - RNA, 18 nt, Artificial Sequence
  Synthetic
uauuuuuccaguauauca

SEQ ID NO: 471783 - RNA, 19 nt, Artificial Sequence
  Synthetic
cuauuuuuccaguauauca

SEQ ID NO: 471784 - RNA, 20 nt, Artificial Sequence
  Synthetic
ccuauuuuuccaguauauca

SEQ ID NO: 471785 - RNA, 21 nt, Artificial Sequence
  Synthetic
gccuauuuuuccaguauauca

SEQ ID NO: 471786 - RNA, 22 nt, Artificial Sequence
  Synthetic
ggccuauuuuuccaguauauca

SEQ ID NO: 471787 - RNA, 23 nt, Artificial Sequence
  Synthetic
aggccuauuuuuccaguauauca

SEQ ID NO: 471788 - RNA, 24 nt, Artificial Sequence
  Synthetic
caggccuauuuuuccaguauauca

SEQ ID NO: 471789 - RNA, 18 nt, Artificial Sequence
  Synthetic
aagcaaaucaguauauca

SEQ ID NO: 471790 - RNA, 19 nt, Artificial Sequence
  Synthetic
aaagcaaaucaguauauca

SEQ ID NO: 471791 - RNA, 20 nt, Artificial Sequence
  Synthetic
gaaagcaaaucaguauauca

SEQ ID NO: 471792 - RNA, 21 nt, Artificial Sequence
  Synthetic
agaaagcaaaucaguauauca

SEQ ID NO: 471793 - RNA, 22 nt, Artificial Sequence
  Synthetic
aagaaagcaaaucaguauauca

SEQ ID NO: 471794 - RNA, 23 nt, Artificial Sequence
  Synthetic
aaagaaagcaaaucaguauauca

SEQ ID NO: 471795 - RNA, 24 nt, Artificial Sequence
  Synthetic
caaagaaagcaaaucaguauauca

SEQ ID NO: 471796 - RNA, 18 nt, Artificial Sequence
  Synthetic
auggaacugacacuauca

SEQ ID NO: 471797 - RNA, 19 nt, Artificial Sequence
  Synthetic
aauggaacugacacuauca

SEQ ID NO: 471798 - RNA, 20 nt, Artificial Sequence
  Synthetic
aaauggaacugacacuauca

SEQ ID NO: 471799 - RNA, 21 nt, Artificial Sequence
  Synthetic
uaaauggaacugacacuauca

SEQ ID NO: 471800 - RNA, 22 nt, Artificial Sequence
  Synthetic
uuaaauggaacugacacuauca

SEQ ID NO: 471801 - RNA, 23 nt, Artificial Sequence
  Synthetic
auuaaauggaacugacacuauca

SEQ ID NO: 471802 - RNA, 24 nt, Artificial Sequence
  Synthetic
aauuaaauggaacugacacuauca

SEQ ID NO: 471803 - RNA, 18 nt, Artificial Sequence
  Synthetic
aaggccuuucugcuauca

SEQ ID NO: 471804 - RNA, 19 nt, Artificial Sequence
  Synthetic
caaggccuuucugcuauca

SEQ ID NO: 471805 - RNA, 20 nt, Artificial Sequence
  Synthetic
acaaggccuuucugcuauca

SEQ ID NO: 471806 - RNA, 21 nt, Artificial Sequence
  Synthetic
gacaaggccuuucugcuauca

SEQ ID NO: 471807 - RNA, 22 nt, Artificial Sequence
  Synthetic
agacaaggccuuucugcuauca

SEQ ID NO: 471808 - RNA, 23 nt, Artificial Sequence
  Synthetic
gagacaaggccuuucugcuauca

SEQ ID NO: 471809 - RNA, 24 nt, Artificial Sequence
  Synthetic
agagacaaggccuuucugcuauca

SEQ ID NO: 471810 - RNA, 18 nt, Artificial Sequence
  Synthetic
uuauauguuuugcuauca

SEQ ID NO: 471811 - RNA, 19 nt, Artificial Sequence
  Synthetic
uuuauauguuuugcuauca

SEQ ID NO: 471812 - RNA, 20 nt, Artificial Sequence
  Synthetic
guuuauauguuuugcuauca

SEQ ID NO: 471813 - RNA, 21 nt, Artificial Sequence
  Synthetic
uguuuauauguuuugcuauca

SEQ ID NO: 471814 - RNA, 22 nt, Artificial Sequence
  Synthetic
auguuuauauguuuugcuauca

SEQ ID NO: 471815 - RNA, 23 nt, Artificial Sequence
  Synthetic
aauguuuauauguuuugcuauca

SEQ ID NO: 471816 - RNA, 24 nt, Artificial Sequence
  Synthetic
uaauguuuauauguuuugcuauca

SEQ ID NO: 471817 - RNA, 18 nt, Artificial Sequence
  Synthetic
aagauacuaucucuauca

SEQ ID NO: 471818 - RNA, 19 nt, Artificial Sequence
  Synthetic
aaagauacuaucucuauca

SEQ ID NO: 471819 - RNA, 20 nt, Artificial Sequence
  Synthetic
aaaagauacuaucucuauca

SEQ ID NO: 471820 - RNA, 21 nt, Artificial Sequence
  Synthetic
aaaaagauacuaucucuauca

SEQ ID NO: 471821 - RNA, 22 nt, Artificial Sequence
  Synthetic
gaaaaagauacuaucucuauca

SEQ ID NO: 471822 - RNA, 23 nt, Artificial Sequence
  Synthetic
ugaaaaagauacuaucucuauca

SEQ ID NO: 471823 - RNA, 24 nt, Artificial Sequence
  Synthetic
cugaaaaagauacuaucucuauca

SEQ ID NO: 471824 - RNA, 18 nt, Artificial Sequence
  Synthetic
agugccuguguucuauca

SEQ ID NO: 471825 - RNA, 19 nt, Artificial Sequence
  Synthetic
aagugccuguguucuauca

SEQ ID NO: 471826 - RNA, 20 nt, Artificial Sequence
  Synthetic
caagugccuguguucuauca

SEQ ID NO: 471827 - RNA, 21 nt, Artificial Sequence
  Synthetic
acaagugccuguguucuauca

SEQ ID NO: 471828 - RNA, 22 nt, Artificial Sequence
  Synthetic
gacaagugccuguguucuauca

SEQ ID NO: 471829 - RNA, 23 nt, Artificial Sequence
  Synthetic
ggacaagugccuguguucuauca

SEQ ID NO: 471830 - RNA, 24 nt, Artificial Sequence
  Synthetic
aggacaagugccuguguucuauca

SEQ ID NO: 471831 - RNA, 18 nt, Artificial Sequence
  Synthetic
uauuuaaauagcguauca

SEQ ID NO: 471832 - RNA, 19 nt, Artificial Sequence
  Synthetic
uuauuuaaauagcguauca

SEQ ID NO: 471833 - RNA, 20 nt, Artificial Sequence
  Synthetic
cuuauuuaaauagcguauca

SEQ ID NO: 471834 - RNA, 21 nt, Artificial Sequence
  Synthetic
acuuauuuaaauagcguauca

SEQ ID NO: 471835 - RNA, 22 nt, Artificial Sequence
  Synthetic
aacuuauuuaaauagcguauca

SEQ ID NO: 471836 - RNA, 23 nt, Artificial Sequence
  Synthetic
caacuuauuuaaauagcguauca

SEQ ID NO: 471837 - RNA, 24 nt, Artificial Sequence
  Synthetic
ccaacuuauuuaaauagcguauca

SEQ ID NO: 471838 - RNA, 18 nt, Artificial Sequence
  Synthetic
aggcuaucacugguauca

SEQ ID NO: 471839 - RNA, 19 nt, Artificial Sequence
  Synthetic
gaggcuaucacugguauca

SEQ ID NO: 471840 - RNA, 20 nt, Artificial Sequence
  Synthetic
ugaggcuaucacugguauca

SEQ ID NO: 471841 - RNA, 21 nt, Artificial Sequence
  Synthetic
uugaggcuaucacugguauca

SEQ ID NO: 471842 - RNA, 22 nt, Artificial Sequence
  Synthetic
auugaggcuaucacugguauca

SEQ ID NO: 471843 - RNA, 23 nt, Artificial Sequence
  Synthetic
uauugaggcuaucacugguauca

SEQ ID NO: 471844 - RNA, 24 nt, Artificial Sequence
  Synthetic
auauugaggcuaucacugguauca

SEQ ID NO: 471845 - RNA, 18 nt, Artificial Sequence
  Synthetic
ugauauauugaauuauca

SEQ ID NO: 471846 - RNA, 19 nt, Artificial Sequence
  Synthetic
uugauauauugaauuauca

SEQ ID NO: 471847 - RNA, 20 nt, Artificial Sequence
  Synthetic
guugauauauugaauuauca

SEQ ID NO: 471848 - RNA, 21 nt, Artificial Sequence
  Synthetic
aguugauauauugaauuauca

SEQ ID NO: 471849 - RNA, 22 nt, Artificial Sequence
  Synthetic
gaguugauauauugaauuauca

SEQ ID NO: 471850 - RNA, 23 nt, Artificial Sequence
  Synthetic
ugaguugauauauugaauuauca

SEQ ID NO: 471851 - RNA, 24 nt, Artificial Sequence
  Synthetic
gugaguugauauauugaauuauca

SEQ ID NO: 471852 - RNA, 18 nt, Artificial Sequence
  Synthetic
agaaucuaaacauuauca

SEQ ID NO: 471853 - RNA, 19 nt, Artificial Sequence
  Synthetic
aagaaucuaaacauuauca

SEQ ID NO: 471854 - RNA, 20 nt, Artificial Sequence
  Synthetic
uaagaaucuaaacauuauca

SEQ ID NO: 471855 - RNA, 21 nt, Artificial Sequence
  Synthetic
uuaagaaucuaaacauuauca

SEQ ID NO: 471856 - RNA, 22 nt, Artificial Sequence
  Synthetic
guuaagaaucuaaacauuauca

SEQ ID NO: 471857 - RNA, 23 nt, Artificial Sequence
  Synthetic
uguuaagaaucuaaacauuauca

SEQ ID NO: 471858 - RNA, 24 nt, Artificial Sequence
  Synthetic
auguuaagaaucuaaacauuauca

SEQ ID NO: 471859 - RNA, 18 nt, Artificial Sequence
  Synthetic
auuugcacuagauuauca

SEQ ID NO: 471860 - RNA, 19 nt, Artificial Sequence
  Synthetic
aauuugcacuagauuauca

SEQ ID NO: 471861 - RNA, 20 nt, Artificial Sequence
  Synthetic
aaauuugcacuagauuauca

SEQ ID NO: 471862 - RNA, 21 nt, Artificial Sequence
  Synthetic
gaaauuugcacuagauuauca

SEQ ID NO: 471863 - RNA, 22 nt, Artificial Sequence
  Synthetic
agaaauuugcacuagauuauca

SEQ ID NO: 471864 - RNA, 23 nt, Artificial Sequence
  Synthetic
gagaaauuugcacuagauuauca

SEQ ID NO: 471865 - RNA, 24 nt, Artificial Sequence
  Synthetic
ugagaaauuugcacuagauuauca

SEQ ID NO: 471866 - RNA, 18 nt, Artificial Sequence
  Synthetic
uuuaagaccugauuauca

SEQ ID NO: 471867 - RNA, 19 nt, Artificial Sequence
  Synthetic
uuuuaagaccugauuauca

SEQ ID NO: 471868 - RNA, 20 nt, Artificial Sequence
  Synthetic
uuuuuaagaccugauuauca

SEQ ID NO: 471869 - RNA, 21 nt, Artificial Sequence
  Synthetic
cuuuuuaagaccugauuauca

SEQ ID NO: 471870 - RNA, 22 nt, Artificial Sequence
  Synthetic
ucuuuuuaagaccugauuauca

SEQ ID NO: 471871 - RNA, 23 nt, Artificial Sequence
  Synthetic
uucuuuuuaagaccugauuauca

SEQ ID NO: 471872 - RNA, 24 nt, Artificial Sequence
  Synthetic
uuucuuuuuaagaccugauuauca

SEQ ID NO: 471873 - RNA, 18 nt, Artificial Sequence
  Synthetic
cuuuagacuauauuauca

SEQ ID NO: 471874 - RNA, 19 nt, Artificial Sequence
  Synthetic
ccuuuagacuauauuauca

SEQ ID NO: 471875 - RNA, 20 nt, Artificial Sequence
  Synthetic
gccuuuagacuauauuauca

SEQ ID NO: 471876 - RNA, 21 nt, Artificial Sequence
  Synthetic
agccuuuagacuauauuauca

SEQ ID NO: 471877 - RNA, 22 nt, Artificial Sequence
  Synthetic
aagccuuuagacuauauuauca

SEQ ID NO: 471878 - RNA, 23 nt, Artificial Sequence
  Synthetic
aaagccuuuagacuauauuauca

SEQ ID NO: 471879 - RNA, 24 nt, Artificial Sequence
  Synthetic
aaaagccuuuagacuauauuauca

SEQ ID NO: 471880 - RNA, 18 nt, Artificial Sequence
  Synthetic
uaaucacaugacuuauca

SEQ ID NO: 471881 - RNA, 19 nt, Artificial Sequence
  Synthetic
uuaaucacaugacuuauca

SEQ ID NO: 471882 - RNA, 20 nt, Artificial Sequence
  Synthetic
cuuaaucacaugacuuauca

SEQ ID NO: 471883 - RNA, 21 nt, Artificial Sequence
  Synthetic
ucuuaaucacaugacuuauca

SEQ ID NO: 471884 - RNA, 22 nt, Artificial Sequence
  Synthetic
uucuuaaucacaugacuuauca

SEQ ID NO: 471885 - RNA, 23 nt, Artificial Sequence
  Synthetic
guucuuaaucacaugacuuauca

SEQ ID NO: 471886 - RNA, 24 nt, Artificial Sequence
  Synthetic
gguucuuaaucacaugacuuauca

SEQ ID NO: 471887 - RNA, 18 nt, Artificial Sequence
  Synthetic
acuuuaggucccuuauca

SEQ ID NO: 471888 - RNA, 19 nt, Artificial Sequence
  Synthetic
cacuuuaggucccuuauca

SEQ ID NO: 471889 - RNA, 20 nt, Artificial Sequence
  Synthetic
ucacuuuaggucccuuauca

SEQ ID NO: 471890 - RNA, 21 nt, Artificial Sequence
  Synthetic
aucacuuuaggucccuuauca

SEQ ID NO: 471891 - RNA, 22 nt, Artificial Sequence
  Synthetic
aaucacuuuaggucccuuauca

SEQ ID NO: 471892 - RNA, 23 nt, Artificial Sequence
  Synthetic
uaaucacuuuaggucccuuauca

SEQ ID NO: 471893 - RNA, 24 nt, Artificial Sequence
  Synthetic
cuaaucacuuuaggucccuuauca

SEQ ID NO: 471894 - RNA, 18 nt, Artificial Sequence
  Synthetic
uuucaauuauccuuauca

SEQ ID NO: 471895 - RNA, 19 nt, Artificial Sequence
  Synthetic
cuuucaauuauccuuauca

SEQ ID NO: 471896 - RNA, 20 nt, Artificial Sequence
  Synthetic
ucuuucaauuauccuuauca

SEQ ID NO: 471897 - RNA, 21 nt, Artificial Sequence
  Synthetic
cucuuucaauuauccuuauca

SEQ ID NO: 471898 - RNA, 22 nt, Artificial Sequence
  Synthetic
ucucuuucaauuauccuuauca

SEQ ID NO: 471899 - RNA, 23 nt, Artificial Sequence
  Synthetic
cucucuuucaauuauccuuauca

SEQ ID NO: 471900 - RNA, 24 nt, Artificial Sequence
  Synthetic
gcucucuuucaauuauccuuauca

SEQ ID NO: 471901 - RNA, 18 nt, Artificial Sequence
  Synthetic
gcuuccuucagcuuauca

SEQ ID NO: 471902 - RNA, 19 nt, Artificial Sequence
  Synthetic
cgcuuccuucagcuuauca

SEQ ID NO: 471903 - RNA, 20 nt, Artificial Sequence
  Synthetic
acgcuuccuucagcuuauca

SEQ ID NO: 471904 - RNA, 21 nt, Artificial Sequence
  Synthetic
aacgcuuccuucagcuuauca

SEQ ID NO: 471905 - RNA, 22 nt, Artificial Sequence
  Synthetic
gaacgcuuccuucagcuuauca

SEQ ID NO: 471906 - RNA, 23 nt, Artificial Sequence
  Synthetic
agaacgcuuccuucagcuuauca

SEQ ID NO: 471907 - RNA, 24 nt, Artificial Sequence
  Synthetic
cagaacgcuuccuucagcuuauca

SEQ ID NO: 471908 - RNA, 18 nt, Artificial Sequence
  Synthetic
gaaaggcugcucuuauca

SEQ ID NO: 471909 - RNA, 19 nt, Artificial Sequence
  Synthetic
ggaaaggcugcucuuauca

SEQ ID NO: 471910 - RNA, 20 nt, Artificial Sequence
  Synthetic
gggaaaggcugcucuuauca

SEQ ID NO: 471911 - RNA, 21 nt, Artificial Sequence
  Synthetic
ggggaaaggcugcucuuauca

SEQ ID NO: 471912 - RNA, 22 nt, Artificial Sequence
  Synthetic
uggggaaaggcugcucuuauca

SEQ ID NO: 471913 - RNA, 23 nt, Artificial Sequence
  Synthetic
uuggggaaaggcugcucuuauca

SEQ ID NO: 471914 - RNA, 24 nt, Artificial Sequence
  Synthetic
uuuggggaaaggcugcucuuauca

SEQ ID NO: 471915 - RNA, 18 nt, Artificial Sequence
  Synthetic
ggugaauuagaguuauca

SEQ ID NO: 471916 - RNA, 19 nt, Artificial Sequence
  Synthetic
aggugaauuagaguuauca

SEQ ID NO: 471917 - RNA, 20 nt, Artificial Sequence
  Synthetic
caggugaauuagaguuauca

SEQ ID NO: 471918 - RNA, 21 nt, Artificial Sequence
  Synthetic
ucaggugaauuagaguuauca

SEQ ID NO: 471919 - RNA, 22 nt, Artificial Sequence
  Synthetic
uucaggugaauuagaguuauca

SEQ ID NO: 471920 - RNA, 23 nt, Artificial Sequence
  Synthetic
auucaggugaauuagaguuauca

SEQ ID NO: 471921 - RNA, 24 nt, Artificial Sequence
  Synthetic
aauucaggugaauuagaguuauca

SEQ ID NO: 471922 - RNA, 18 nt, Artificial Sequence
  Synthetic
uagguuaauggguuauca

SEQ ID NO: 471923 - RNA, 19 nt, Artificial Sequence
  Synthetic
auagguuaauggguuauca

SEQ ID NO: 471924 - RNA, 20 nt, Artificial Sequence
  Synthetic
aauagguuaauggguuauca

SEQ ID NO: 471925 - RNA, 21 nt, Artificial Sequence
  Synthetic
uaauagguuaauggguuauca

SEQ ID NO: 471926 - RNA, 22 nt, Artificial Sequence
  Synthetic
uuaauagguuaauggguuauca

SEQ ID NO: 471927 - RNA, 23 nt, Artificial Sequence
  Synthetic
auuaauagguuaauggguuauca

SEQ ID NO: 471928 - RNA, 24 nt, Artificial Sequence
  Synthetic
aauuaauagguuaauggguuauca

SEQ ID NO: 471929 - RNA, 18 nt, Artificial Sequence
  Synthetic
uaaaggagaaauuuauca

SEQ ID NO: 471930 - RNA, 19 nt, Artificial Sequence
  Synthetic
cuaaaggagaaauuuauca

SEQ ID NO: 471931 - RNA, 20 nt, Artificial Sequence
  Synthetic
gcuaaaggagaaauuuauca

SEQ ID NO: 471932 - RNA, 21 nt, Artificial Sequence
  Synthetic
ggcuaaaggagaaauuuauca

SEQ ID NO: 471933 - RNA, 22 nt, Artificial Sequence
  Synthetic
gggcuaaaggagaaauuuauca

SEQ ID NO: 471934 - RNA, 23 nt, Artificial Sequence
  Synthetic
agggcuaaaggagaaauuuauca

SEQ ID NO: 471935 - RNA, 24 nt, Artificial Sequence
  Synthetic
cagggcuaaaggagaaauuuauca

SEQ ID NO: 471936 - RNA, 18 nt, Artificial Sequence
  Synthetic
aaucuuagucauuuauca

SEQ ID NO: 471937 - RNA, 19 nt, Artificial Sequence
  Synthetic
uaaucuuagucauuuauca

SEQ ID NO: 471938 - RNA, 20 nt, Artificial Sequence
  Synthetic
guaaucuuagucauuuauca

SEQ ID NO: 471939 - RNA, 21 nt, Artificial Sequence
  Synthetic
gguaaucuuagucauuuauca

SEQ ID NO: 471940 - RNA, 22 nt, Artificial Sequence
  Synthetic
ugguaaucuuagucauuuauca

SEQ ID NO: 471941 - RNA, 23 nt, Artificial Sequence
  Synthetic
gugguaaucuuagucauuuauca

SEQ ID NO: 471942 - RNA, 24 nt, Artificial Sequence
  Synthetic
ugugguaaucuuagucauuuauca

SEQ ID NO: 471943 - RNA, 18 nt, Artificial Sequence
  Synthetic
ugaggugucacuuuauca

SEQ ID NO: 471944 - RNA, 19 nt, Artificial Sequence
  Synthetic
uugaggugucacuuuauca

SEQ ID NO: 471945 - RNA, 20 nt, Artificial Sequence
  Synthetic
auugaggugucacuuuauca

SEQ ID NO: 471946 - RNA, 21 nt, Artificial Sequence
  Synthetic
uauugaggugucacuuuauca

SEQ ID NO: 471947 - RNA, 22 nt, Artificial Sequence
  Synthetic
uuauugaggugucacuuuauca

SEQ ID NO: 471948 - RNA, 23 nt, Artificial Sequence
  Synthetic
uuuauugaggugucacuuuauca

SEQ ID NO: 471949 - RNA, 24 nt, Artificial Sequence
  Synthetic
uuuuauugaggugucacuuuauca

SEQ ID NO: 471950 - RNA, 18 nt, Artificial Sequence
  Synthetic
ucauuaaaaccuuuauca

SEQ ID NO: 471951 - RNA, 19 nt, Artificial Sequence
  Synthetic
uucauuaaaaccuuuauca

SEQ ID NO: 471952 - RNA, 20 nt, Artificial Sequence
  Synthetic
auucauuaaaaccuuuauca

SEQ ID NO: 471953 - RNA, 21 nt, Artificial Sequence
  Synthetic
cauucauuaaaaccuuuauca

SEQ ID NO: 471954 - RNA, 22 nt, Artificial Sequence
  Synthetic
acauucauuaaaaccuuuauca

SEQ ID NO: 471955 - RNA, 23 nt, Artificial Sequence
  Synthetic
aacauucauuaaaaccuuuauca

SEQ ID NO: 471956 - RNA, 24 nt, Artificial Sequence
  Synthetic
aaacauucauuaaaaccuuuauca

SEQ ID NO: 471957 - RNA, 18 nt, Artificial Sequence
  Synthetic
gcuuaaaaaaaaaacuca

SEQ ID NO: 471958 - RNA, 19 nt, Artificial Sequence
  Synthetic
agcuuaaaaaaaaaacuca

SEQ ID NO: 471959 - RNA, 20 nt, Artificial Sequence
  Synthetic
cagcuuaaaaaaaaaacuca

SEQ ID NO: 471960 - RNA, 21 nt, Artificial Sequence
  Synthetic
ucagcuuaaaaaaaaaacuca

SEQ ID NO: 471961 - RNA, 22 nt, Artificial Sequence
  Synthetic
cucagcuuaaaaaaaaaacuca

SEQ ID NO: 471962 - RNA, 23 nt, Artificial Sequence
  Synthetic
gcucagcuuaaaaaaaaaacuca

SEQ ID NO: 471963 - RNA, 24 nt, Artificial Sequence
  Synthetic
agcucagcuuaaaaaaaaaacuca

SEQ ID NO: 471964 - RNA, 18 nt, Artificial Sequence
  Synthetic
ggcaguagaacaaacuca

SEQ ID NO: 471965 - RNA, 19 nt, Artificial Sequence
  Synthetic
uggcaguagaacaaacuca

SEQ ID NO: 471966 - RNA, 20 nt, Artificial Sequence
  Synthetic
uuggcaguagaacaaacuca

SEQ ID NO: 471967 - RNA, 21 nt, Artificial Sequence
  Synthetic
guuggcaguagaacaaacuca

SEQ ID NO: 471968 - RNA, 22 nt, Artificial Sequence
  Synthetic
uguuggcaguagaacaaacuca

SEQ ID NO: 471969 - RNA, 23 nt, Artificial Sequence
  Synthetic
auguuggcaguagaacaaacuca

SEQ ID NO: 471970 - RNA, 24 nt, Artificial Sequence
  Synthetic
gauguuggcaguagaacaaacuca

SEQ ID NO: 471971 - RNA, 18 nt, Artificial Sequence
  Synthetic
cuaaaaaugucaaacuca

SEQ ID NO: 471972 - RNA, 19 nt, Artificial Sequence
  Synthetic
ucuaaaaaugucaaacuca

SEQ ID NO: 471973 - RNA, 20 nt, Artificial Sequence
  Synthetic
aucuaaaaaugucaaacuca

SEQ ID NO: 471974 - RNA, 21 nt, Artificial Sequence
  Synthetic
aaucuaaaaaugucaaacuca

SEQ ID NO: 471975 - RNA, 22 nt, Artificial Sequence
  Synthetic
aaaucuaaaaaugucaaacuca

SEQ ID NO: 471976 - RNA, 23 nt, Artificial Sequence
  Synthetic
gaaaucuaaaaaugucaaacuca

SEQ ID NO: 471977 - RNA, 24 nt, Artificial Sequence
  Synthetic
ugaaaucuaaaaaugucaaacuca

SEQ ID NO: 471978 - RNA, 18 nt, Artificial Sequence
  Synthetic
gagcacaacagaaacuca

SEQ ID NO: 471979 - RNA, 19 nt, Artificial Sequence
  Synthetic
agagcacaacagaaacuca

SEQ ID NO: 471980 - RNA, 20 nt, Artificial Sequence
  Synthetic
aagagcacaacagaaacuca

SEQ ID NO: 471981 - RNA, 21 nt, Artificial Sequence
  Synthetic
aaagagcacaacagaaacuca

SEQ ID NO: 471982 - RNA, 22 nt, Artificial Sequence
  Synthetic
gaaagagcacaacagaaacuca

SEQ ID NO: 471983 - RNA, 23 nt, Artificial Sequence
  Synthetic
agaaagagcacaacagaaacuca

SEQ ID NO: 471984 - RNA, 24 nt, Artificial Sequence
  Synthetic
aagaaagagcacaacagaaacuca

SEQ ID NO: 471985 - RNA, 18 nt, Artificial Sequence
  Synthetic
cgucccgggggaaacuca

SEQ ID NO: 471986 - RNA, 19 nt, Artificial Sequence
  Synthetic
acgucccgggggaaacuca

SEQ ID NO: 471987 - RNA, 20 nt, Artificial Sequence
  Synthetic
uacgucccgggggaaacuca

SEQ ID NO: 471988 - RNA, 21 nt, Artificial Sequence
  Synthetic
uuacgucccgggggaaacuca

SEQ ID NO: 471989 - RNA, 22 nt, Artificial Sequence
  Synthetic
cuuacgucccgggggaaacuca

SEQ ID NO: 471990 - RNA, 23 nt, Artificial Sequence
  Synthetic
ccuuacgucccgggggaaacuca

SEQ ID NO: 471991 - RNA, 24 nt, Artificial Sequence
  Synthetic
accuuacgucccgggggaaacuca

SEQ ID NO: 471992 - RNA, 18 nt, Artificial Sequence
  Synthetic
cugaaacuaugaaacuca

SEQ ID NO: 471993 - RNA, 19 nt, Artificial Sequence
  Synthetic
ucugaaacuaugaaacuca

SEQ ID NO: 471994 - RNA, 20 nt, Artificial Sequence
  Synthetic
aucugaaacuaugaaacuca

SEQ ID NO: 471995 - RNA, 21 nt, Artificial Sequence
  Synthetic
gaucugaaacuaugaaacuca

SEQ ID NO: 471996 - RNA, 22 nt, Artificial Sequence
  Synthetic
agaucugaaacuaugaaacuca

SEQ ID NO: 471997 - RNA, 23 nt, Artificial Sequence
  Synthetic
aagaucugaaacuaugaaacuca

SEQ ID NO: 471998 - RNA, 24 nt, Artificial Sequence
  Synthetic
uaagaucugaaacuaugaaacuca

SEQ ID NO: 471999 - RNA, 18 nt, Artificial Sequence
  Synthetic
ggaauuuggaacaacuca

SEQ ID NO: 472000 - RNA, 19 nt, Artificial Sequence
  Synthetic
aggaauuuggaacaacuca

SEQ ID NO: 472001 - RNA, 20 nt, Artificial Sequence
  Synthetic
gaggaauuuggaacaacuca

SEQ ID NO: 472002 - RNA, 21 nt, Artificial Sequence
  Synthetic
cgaggaauuuggaacaacuca

SEQ ID NO: 472003 - RNA, 22 nt, Artificial Sequence
  Synthetic
ccgaggaauuuggaacaacuca

SEQ ID NO: 472004 - RNA, 23 nt, Artificial Sequence
  Synthetic
uccgaggaauuuggaacaacuca

SEQ ID NO: 472005 - RNA, 24 nt, Artificial Sequence
  Synthetic
cuccgaggaauuuggaacaacuca

SEQ ID NO: 472006 - RNA, 18 nt, Artificial Sequence
  Synthetic
gacagaaauaacaacuca

SEQ ID NO: 472007 - RNA, 19 nt, Artificial Sequence
  Synthetic
ugacagaaauaacaacuca

SEQ ID NO: 472008 - RNA, 20 nt, Artificial Sequence
  Synthetic
augacagaaauaacaacuca

SEQ ID NO: 472009 - RNA, 21 nt, Artificial Sequence
  Synthetic
aaugacagaaauaacaacuca

SEQ ID NO: 472010 - RNA, 22 nt, Artificial Sequence
  Synthetic
aaaugacagaaauaacaacuca

SEQ ID NO: 472011 - RNA, 23 nt, Artificial Sequence
  Synthetic
gaaaugacagaaauaacaacuca

SEQ ID NO: 472012 - RNA, 24 nt, Artificial Sequence
  Synthetic
ggaaaugacagaaauaacaacuca

SEQ ID NO: 472013 - RNA, 18 nt, Artificial Sequence
  Synthetic
auaugaagagucaacuca

SEQ ID NO: 472014 - RNA, 19 nt, Artificial Sequence
  Synthetic
uauaugaagagucaacuca

SEQ ID NO: 472015 - RNA, 20 nt, Artificial Sequence
  Synthetic
auauaugaagagucaacuca

SEQ ID NO: 472016 - RNA, 21 nt, Artificial Sequence
  Synthetic
aauauaugaagagucaacuca

SEQ ID NO: 472017 - RNA, 22 nt, Artificial Sequence
  Synthetic
aaauauaugaagagucaacuca

SEQ ID NO: 472018 - RNA, 23 nt, Artificial Sequence
  Synthetic
uaaauauaugaagagucaacuca

SEQ ID NO: 472019 - RNA, 24 nt, Artificial Sequence
  Synthetic
guaaauauaugaagagucaacuca

SEQ ID NO: 472020 - RNA, 18 nt, Artificial Sequence
  Synthetic
cauugaaugaagaacuca

SEQ ID NO: 472021 - RNA, 19 nt, Artificial Sequence
  Synthetic
ucauugaaugaagaacuca

SEQ ID NO: 472022 - RNA, 20 nt, Artificial Sequence
  Synthetic
gucauugaaugaagaacuca

SEQ ID NO: 472023 - RNA, 21 nt, Artificial Sequence
  Synthetic
ugucauugaaugaagaacuca

SEQ ID NO: 472024 - RNA, 22 nt, Artificial Sequence
  Synthetic
augucauugaaugaagaacuca

SEQ ID NO: 472025 - RNA, 23 nt, Artificial Sequence
  Synthetic
gaugucauugaaugaagaacuca

SEQ ID NO: 472026 - RNA, 24 nt, Artificial Sequence
  Synthetic
ugaugucauugaaugaagaacuca

SEQ ID NO: 472027 - RNA, 18 nt, Artificial Sequence
  Synthetic
auacuggucuggaacuca

SEQ ID NO: 472028 - RNA, 19 nt, Artificial Sequence
  Synthetic
gauacuggucuggaacuca

SEQ ID NO: 472029 - RNA, 20 nt, Artificial Sequence
  Synthetic
agauacuggucuggaacuca

SEQ ID NO: 472030 - RNA, 21 nt, Artificial Sequence
  Synthetic
aagauacuggucuggaacuca

SEQ ID NO: 472031 - RNA, 22 nt, Artificial Sequence
  Synthetic
gaagauacuggucuggaacuca

SEQ ID NO: 472032 - RNA, 23 nt, Artificial Sequence
  Synthetic
ugaagauacuggucuggaacuca

SEQ ID NO: 472033 - RNA, 24 nt, Artificial Sequence
  Synthetic
uugaagauacuggucuggaacuca

SEQ ID NO: 472034 - RNA, 18 nt, Artificial Sequence
  Synthetic
uuaaaacuauugaacuca

SEQ ID NO: 472035 - RNA, 19 nt, Artificial Sequence
  Synthetic
auuaaaacuauugaacuca

SEQ ID NO: 472036 - RNA, 20 nt, Artificial Sequence
  Synthetic
aauuaaaacuauugaacuca

SEQ ID NO: 472037 - RNA, 21 nt, Artificial Sequence
  Synthetic
aaauuaaaacuauugaacuca

SEQ ID NO: 472038 - RNA, 22 nt, Artificial Sequence
  Synthetic
aaaauuaaaacuauugaacuca

SEQ ID NO: 472039 - RNA, 23 nt, Artificial Sequence
  Synthetic
aaaaauuaaaacuauugaacuca

SEQ ID NO: 472040 - RNA, 24 nt, Artificial Sequence
  Synthetic
uaaaaauuaaaacuauugaacuca

SEQ ID NO: 472041 - RNA, 18 nt, Artificial Sequence
  Synthetic
uaaaaaaaguugaacuca

SEQ ID NO: 472042 - RNA, 19 nt, Artificial Sequence
  Synthetic
uuaaaaaaaguugaacuca

SEQ ID NO: 472043 - RNA, 20 nt, Artificial Sequence
  Synthetic
uuuaaaaaaaguugaacuca

SEQ ID NO: 472044 - RNA, 21 nt, Artificial Sequence
  Synthetic
guuuaaaaaaaguugaacuca

SEQ ID NO: 472045 - RNA, 22 nt, Artificial Sequence
  Synthetic
aguuuaaaaaaaguugaacuca

SEQ ID NO: 472046 - RNA, 23 nt, Artificial Sequence
  Synthetic
caguuuaaaaaaaguugaacuca

SEQ ID NO: 472047 - RNA, 24 nt, Artificial Sequence
  Synthetic
gcaguuuaaaaaaaguugaacuca

SEQ ID NO: 472048 - RNA, 18 nt, Artificial Sequence
  Synthetic
caucuaagcaauaacuca

SEQ ID NO: 472049 - RNA, 19 nt, Artificial Sequence
  Synthetic
ucaucuaagcaauaacuca

SEQ ID NO: 472050 - RNA, 20 nt, Artificial Sequence
  Synthetic
gucaucuaagcaauaacuca

SEQ ID NO: 472051 - RNA, 21 nt, Artificial Sequence
  Synthetic
agucaucuaagcaauaacuca

SEQ ID NO: 472052 - RNA, 22 nt, Artificial Sequence
  Synthetic
gagucaucuaagcaauaacuca

SEQ ID NO: 472053 - RNA, 23 nt, Artificial Sequence
  Synthetic
ugagucaucuaagcaauaacuca

SEQ ID NO: 472054 - RNA, 24 nt, Artificial Sequence
  Synthetic
uugagucaucuaagcaauaacuca

SEQ ID NO: 472055 - RNA, 18 nt, Artificial Sequence
  Synthetic
gauguuaaaaaacacuca

SEQ ID NO: 472056 - RNA, 19 nt, Artificial Sequence
  Synthetic
ggauguuaaaaaacacuca

SEQ ID NO: 472057 - RNA, 20 nt, Artificial Sequence
  Synthetic
uggauguuaaaaaacacuca

SEQ ID NO: 472058 - RNA, 21 nt, Artificial Sequence
  Synthetic
cuggauguuaaaaaacacuca

SEQ ID NO: 472059 - RNA, 22 nt, Artificial Sequence
  Synthetic
gcuggauguuaaaaaacacuca

SEQ ID NO: 472060 - RNA, 23 nt, Artificial Sequence
  Synthetic
agcuggauguuaaaaaacacuca

SEQ ID NO: 472061 - RNA, 24 nt, Artificial Sequence
  Synthetic
cagcuggauguuaaaaaacacuca

SEQ ID NO: 472062 - RNA, 18 nt, Artificial Sequence
  Synthetic
ucaaggaucgaacacuca

SEQ ID NO: 472063 - RNA, 19 nt, Artificial Sequence
  Synthetic
uucaaggaucgaacacuca

SEQ ID NO: 472064 - RNA, 20 nt, Artificial Sequence
  Synthetic
guucaaggaucgaacacuca

SEQ ID NO: 472065 - RNA, 21 nt, Artificial Sequence
  Synthetic
gguucaaggaucgaacacuca

SEQ ID NO: 472066 - RNA, 22 nt, Artificial Sequence
  Synthetic
ugguucaaggaucgaacacuca

SEQ ID NO: 472067 - RNA, 23 nt, Artificial Sequence
  Synthetic
uugguucaaggaucgaacacuca

SEQ ID NO: 472068 - RNA, 24 nt, Artificial Sequence
  Synthetic
cuugguucaaggaucgaacacuca

SEQ ID NO: 472069 - RNA, 18 nt, Artificial Sequence
  Synthetic
cuuacuccuacccacuca

SEQ ID NO: 472070 - RNA, 19 nt, Artificial Sequence
  Synthetic
gcuuacuccuacccacuca

SEQ ID NO: 472071 - RNA, 20 nt, Artificial Sequence
  Synthetic
ugcuuacuccuacccacuca

SEQ ID NO: 472072 - RNA, 21 nt, Artificial Sequence
  Synthetic
cugcuuacuccuacccacuca

SEQ ID NO: 472073 - RNA, 22 nt, Artificial Sequence
  Synthetic
ucugcuuacuccuacccacuca

SEQ ID NO: 472074 - RNA, 23 nt, Artificial Sequence
  Synthetic
uucugcuuacuccuacccacuca

SEQ ID NO: 472075 - RNA, 24 nt, Artificial Sequence
  Synthetic
auucugcuuacuccuacccacuca

SEQ ID NO: 472076 - RNA, 18 nt, Artificial Sequence
  Synthetic
auauugcuuauccacuca

SEQ ID NO: 472077 - RNA, 19 nt, Artificial Sequence
  Synthetic
cauauugcuuauccacuca

SEQ ID NO: 472078 - RNA, 20 nt, Artificial Sequence
  Synthetic
gcauauugcuuauccacuca

SEQ ID NO: 472079 - RNA, 21 nt, Artificial Sequence
  Synthetic
ugcauauugcuuauccacuca

SEQ ID NO: 472080 - RNA, 22 nt, Artificial Sequence
  Synthetic
augcauauugcuuauccacuca

SEQ ID NO: 472081 - RNA, 23 nt, Artificial Sequence
  Synthetic
aaugcauauugcuuauccacuca

SEQ ID NO: 472082 - RNA, 24 nt, Artificial Sequence
  Synthetic
aaaugcauauugcuuauccacuca

SEQ ID NO: 472083 - RNA, 18 nt, Artificial Sequence
  Synthetic
aaacaccaaaagcacuca

SEQ ID NO: 472084 - RNA, 19 nt, Artificial Sequence
  Synthetic
uaaacaccaaaagcacuca

SEQ ID NO: 472085 - RNA, 20 nt, Artificial Sequence
  Synthetic
auaaacaccaaaagcacuca

SEQ ID NO: 472086 - RNA, 21 nt, Artificial Sequence
  Synthetic
gauaaacaccaaaagcacuca

SEQ ID NO: 472087 - RNA, 22 nt, Artificial Sequence
  Synthetic
agauaaacaccaaaagcacuca

SEQ ID NO: 472088 - RNA, 23 nt, Artificial Sequence
  Synthetic
cagauaaacaccaaaagcacuca

SEQ ID NO: 472089 - RNA, 24 nt, Artificial Sequence
  Synthetic
ccagauaaacaccaaaagcacuca

SEQ ID NO: 472090 - RNA, 18 nt, Artificial Sequence
  Synthetic
gaaugcccucugcacuca

SEQ ID NO: 472091 - RNA, 19 nt, Artificial Sequence
  Synthetic
agaaugcccucugcacuca

SEQ ID NO: 472092 - RNA, 20 nt, Artificial Sequence
  Synthetic
gagaaugcccucugcacuca

SEQ ID NO: 472093 - RNA, 21 nt, Artificial Sequence
  Synthetic
agagaaugcccucugcacuca

SEQ ID NO: 472094 - RNA, 22 nt, Artificial Sequence
  Synthetic
aagagaaugcccucugcacuca

SEQ ID NO: 472095 - RNA, 23 nt, Artificial Sequence
  Synthetic
uaagagaaugcccucugcacuca

SEQ ID NO: 472096 - RNA, 24 nt, Artificial Sequence
  Synthetic
auaagagaaugcccucugcacuca

SEQ ID NO: 472097 - RNA, 18 nt, Artificial Sequence
  Synthetic
uagaggguggugcacuca

SEQ ID NO: 472098 - RNA, 19 nt, Artificial Sequence
  Synthetic
cuagaggguggugcacuca

SEQ ID NO: 472099 - RNA, 20 nt, Artificial Sequence
  Synthetic
ccuagaggguggugcacuca

SEQ ID NO: 472100 - RNA, 21 nt, Artificial Sequence
  Synthetic
uccuagaggguggugcacuca

SEQ ID NO: 472101 - RNA, 22 nt, Artificial Sequence
  Synthetic
uuccuagaggguggugcacuca

SEQ ID NO: 472102 - RNA, 23 nt, Artificial Sequence
  Synthetic
auuccuagaggguggugcacuca

SEQ ID NO: 472103 - RNA, 24 nt, Artificial Sequence
  Synthetic
gauuccuagaggguggugcacuca

SEQ ID NO: 472104 - RNA, 18 nt, Artificial Sequence
  Synthetic
cuuggaagucaucacuca

SEQ ID NO: 472105 - RNA, 19 nt, Artificial Sequence
  Synthetic
ccuuggaagucaucacuca

SEQ ID NO: 472106 - RNA, 20 nt, Artificial Sequence
  Synthetic
cccuuggaagucaucacuca

SEQ ID NO: 472107 - RNA, 21 nt, Artificial Sequence
  Synthetic
acccuuggaagucaucacuca

SEQ ID NO: 472108 - RNA, 22 nt, Artificial Sequence
  Synthetic
cacccuuggaagucaucacuca

SEQ ID NO: 472109 - RNA, 23 nt, Artificial Sequence
  Synthetic
ccacccuuggaagucaucacuca

SEQ ID NO: 472110 - RNA, 24 nt, Artificial Sequence
  Synthetic
accacccuuggaagucaucacuca

SEQ ID NO: 472111 - RNA, 18 nt, Artificial Sequence
  Synthetic
ugccacauauaucacuca

SEQ ID NO: 472112 - RNA, 19 nt, Artificial Sequence
  Synthetic
cugccacauauaucacuca

SEQ ID NO: 472113 - RNA, 20 nt, Artificial Sequence
  Synthetic
ucugccacauauaucacuca

SEQ ID NO: 472114 - RNA, 21 nt, Artificial Sequence
  Synthetic
uucugccacauauaucacuca

SEQ ID NO: 472115 - RNA, 22 nt, Artificial Sequence
  Synthetic
uuucugccacauauaucacuca

SEQ ID NO: 472116 - RNA, 23 nt, Artificial Sequence
  Synthetic
uuuucugccacauauaucacuca

SEQ ID NO: 472117 - RNA, 24 nt, Artificial Sequence
  Synthetic
auuuucugccacauauaucacuca

SEQ ID NO: 472118 - RNA, 18 nt, Artificial Sequence
  Synthetic
cuucuguugugucacuca

SEQ ID NO: 472119 - RNA, 19 nt, Artificial Sequence
  Synthetic
gcuucuguugugucacuca

SEQ ID NO: 472120 - RNA, 20 nt, Artificial Sequence
  Synthetic
ugcuucuguugugucacuca

SEQ ID NO: 472121 - RNA, 21 nt, Artificial Sequence
  Synthetic
gugcuucuguugugucacuca

SEQ ID NO: 472122 - RNA, 22 nt, Artificial Sequence
  Synthetic
agugcuucuguugugucacuca

SEQ ID NO: 472123 - RNA, 23 nt, Artificial Sequence
  Synthetic
aagugcuucuguugugucacuca

SEQ ID NO: 472124 - RNA, 24 nt, Artificial Sequence
  Synthetic
uaagugcuucuguugugucacuca

SEQ ID NO: 472125 - RNA, 18 nt, Artificial Sequence
  Synthetic
gugcuaaggauucacuca

SEQ ID NO: 472126 - RNA, 19 nt, Artificial Sequence
  Synthetic
agugcuaaggauucacuca

SEQ ID NO: 472127 - RNA, 20 nt, Artificial Sequence
  Synthetic
cagugcuaaggauucacuca

SEQ ID NO: 472128 - RNA, 21 nt, Artificial Sequence
  Synthetic
ccagugcuaaggauucacuca

SEQ ID NO: 472129 - RNA, 22 nt, Artificial Sequence
  Synthetic
cccagugcuaaggauucacuca

SEQ ID NO: 472130 - RNA, 23 nt, Artificial Sequence
  Synthetic
gcccagugcuaaggauucacuca

SEQ ID NO: 472131 - RNA, 24 nt, Artificial Sequence
  Synthetic
agcccagugcuaaggauucacuca

SEQ ID NO: 472132 - RNA, 18 nt, Artificial Sequence
  Synthetic
acuuuucuuuuucacuca

SEQ ID NO: 472133 - RNA, 19 nt, Artificial Sequence
  Synthetic
cacuuuucuuuuucacuca

SEQ ID NO: 472134 - RNA, 20 nt, Artificial Sequence
  Synthetic
ucacuuuucuuuuucacuca

SEQ ID NO: 472135 - RNA, 21 nt, Artificial Sequence
  Synthetic
uucacuuuucuuuuucacuca

SEQ ID NO: 472136 - RNA, 22 nt, Artificial Sequence
  Synthetic
cuucacuuuucuuuuucacuca

SEQ ID NO: 472137 - RNA, 23 nt, Artificial Sequence
  Synthetic
acuucacuuuucuuuuucacuca

SEQ ID NO: 472138 - RNA, 24 nt, Artificial Sequence
  Synthetic
cacuucacuuuucuuuuucacuca

SEQ ID NO: 472139 - RNA, 18 nt, Artificial Sequence
  Synthetic
caaaaagauuaagacuca

SEQ ID NO: 472140 - RNA, 19 nt, Artificial Sequence
  Synthetic
gcaaaaagauuaagacuca

SEQ ID NO: 472141 - RNA, 20 nt, Artificial Sequence
  Synthetic
agcaaaaagauuaagacuca

SEQ ID NO: 472142 - RNA, 21 nt, Artificial Sequence
  Synthetic
cagcaaaaagauuaagacuca

SEQ ID NO: 472143 - RNA, 22 nt, Artificial Sequence
  Synthetic
ucagcaaaaagauuaagacuca

SEQ ID NO: 472144 - RNA, 23 nt, Artificial Sequence
  Synthetic
aucagcaaaaagauuaagacuca

SEQ ID NO: 472145 - RNA, 24 nt, Artificial Sequence
  Synthetic
caucagcaaaaagauuaagacuca

SEQ ID NO: 472146 - RNA, 18 nt, Artificial Sequence
  Synthetic
acuccuuauauagacuca

SEQ ID NO: 472147 - RNA, 19 nt, Artificial Sequence
  Synthetic
aacuccuuauauagacuca

SEQ ID NO: 472148 - RNA, 20 nt, Artificial Sequence
  Synthetic
aaacuccuuauauagacuca

SEQ ID NO: 472149 - RNA, 21 nt, Artificial Sequence
  Synthetic
uaaacuccuuauauagacuca

SEQ ID NO: 472150 - RNA, 22 nt, Artificial Sequence
  Synthetic
auaaacuccuuauauagacuca

SEQ ID NO: 472151 - RNA, 23 nt, Artificial Sequence
  Synthetic
uauaaacuccuuauauagacuca

SEQ ID NO: 472152 - RNA, 24 nt, Artificial Sequence
  Synthetic
cuauaaacuccuuauauagacuca

SEQ ID NO: 472153 - RNA, 18 nt, Artificial Sequence
  Synthetic
guguguuuccuagacuca

SEQ ID NO: 472154 - RNA, 19 nt, Artificial Sequence
  Synthetic
aguguguuuccuagacuca

SEQ ID NO: 472155 - RNA, 20 nt, Artificial Sequence
  Synthetic
caguguguuuccuagacuca

SEQ ID NO: 472156 - RNA, 21 nt, Artificial Sequence
  Synthetic
ccaguguguuuccuagacuca

SEQ ID NO: 472157 - RNA, 22 nt, Artificial Sequence
  Synthetic
cccaguguguuuccuagacuca

SEQ ID NO: 472158 - RNA, 23 nt, Artificial Sequence
  Synthetic
ccccaguguguuuccuagacuca

SEQ ID NO: 472159 - RNA, 24 nt, Artificial Sequence
  Synthetic
uccccaguguguuuccuagacuca

SEQ ID NO: 472160 - RNA, 18 nt, Artificial Sequence
  Synthetic
auagaaaccaaggacuca

SEQ ID NO: 472161 - RNA, 19 nt, Artificial Sequence
  Synthetic
cauagaaaccaaggacuca

SEQ ID NO: 472162 - RNA, 20 nt, Artificial Sequence
  Synthetic
acauagaaaccaaggacuca

SEQ ID NO: 472163 - RNA, 21 nt, Artificial Sequence
  Synthetic
aacauagaaaccaaggacuca

SEQ ID NO: 472164 - RNA, 22 nt, Artificial Sequence
  Synthetic
aaacauagaaaccaaggacuca

SEQ ID NO: 472165 - RNA, 23 nt, Artificial Sequence
  Synthetic
uaaacauagaaaccaaggacuca

SEQ ID NO: 472166 - RNA, 24 nt, Artificial Sequence
  Synthetic
auaaacauagaaaccaaggacuca

SEQ ID NO: 472167 - RNA, 18 nt, Artificial Sequence
  Synthetic
cagaguaucugggacuca

SEQ ID NO: 472168 - RNA, 19 nt, Artificial Sequence
  Synthetic
acagaguaucugggacuca

SEQ ID NO: 472169 - RNA, 20 nt, Artificial Sequence
  Synthetic
cacagaguaucugggacuca

SEQ ID NO: 472170 - RNA, 21 nt, Artificial Sequence
  Synthetic
acacagaguaucugggacuca

SEQ ID NO: 472171 - RNA, 22 nt, Artificial Sequence
  Synthetic
gacacagaguaucugggacuca

SEQ ID NO: 472172 - RNA, 23 nt, Artificial Sequence
  Synthetic
ggacacagaguaucugggacuca

SEQ ID NO: 472173 - RNA, 24 nt, Artificial Sequence
  Synthetic
uggacacagaguaucugggacuca

SEQ ID NO: 472174 - RNA, 18 nt, Artificial Sequence
  Synthetic
cuauucauaauggacuca

SEQ ID NO: 472175 - RNA, 19 nt, Artificial Sequence
  Synthetic
acuauucauaauggacuca

SEQ ID NO: 472176 - RNA, 20 nt, Artificial Sequence
  Synthetic
uacuauucauaauggacuca

SEQ ID NO: 472177 - RNA, 21 nt, Artificial Sequence
  Synthetic
cuacuauucauaauggacuca

SEQ ID NO: 472178 - RNA, 22 nt, Artificial Sequence
  Synthetic
gcuacuauucauaauggacuca

SEQ ID NO: 472179 - RNA, 23 nt, Artificial Sequence
  Synthetic
ugcuacuauucauaauggacuca

SEQ ID NO: 472180 - RNA, 24 nt, Artificial Sequence
  Synthetic
augcuacuauucauaauggacuca

SEQ ID NO: 472181 - RNA, 18 nt, Artificial Sequence
  Synthetic
ucaaaguucuaugacuca

SEQ ID NO: 472182 - RNA, 19 nt, Artificial Sequence
  Synthetic
uucaaaguucuaugacuca

SEQ ID NO: 472183 - RNA, 20 nt, Artificial Sequence
  Synthetic
uuucaaaguucuaugacuca

SEQ ID NO: 472184 - RNA, 21 nt, Artificial Sequence
  Synthetic
auuucaaaguucuaugacuca

SEQ ID NO: 472185 - RNA, 22 nt, Artificial Sequence
  Synthetic
aauuucaaaguucuaugacuca

SEQ ID NO: 472186 - RNA, 23 nt, Artificial Sequence
  Synthetic
aaauuucaaaguucuaugacuca

SEQ ID NO: 472187 - RNA, 24 nt, Artificial Sequence
  Synthetic
caaauuucaaaguucuaugacuca

SEQ ID NO: 472188 - RNA, 18 nt, Artificial Sequence
  Synthetic
gucucuacuucugacuca

SEQ ID NO: 472189 - RNA, 19 nt, Artificial Sequence
  Synthetic
agucucuacuucugacuca

SEQ ID NO: 472190 - RNA, 20 nt, Artificial Sequence
  Synthetic
aagucucuacuucugacuca

SEQ ID NO: 472191 - RNA, 21 nt, Artificial Sequence
  Synthetic
gaagucucuacuucugacuca

SEQ ID NO: 472192 - RNA, 22 nt, Artificial Sequence
  Synthetic
cgaagucucuacuucugacuca

SEQ ID NO: 472193 - RNA, 23 nt, Artificial Sequence
  Synthetic
ucgaagucucuacuucugacuca

SEQ ID NO: 472194 - RNA, 24 nt, Artificial Sequence
  Synthetic
cucgaagucucuacuucugacuca

SEQ ID NO: 472195 - RNA, 18 nt, Artificial Sequence
  Synthetic
gagaaaucaagugacuca

SEQ ID NO: 472196 - RNA, 19 nt, Artificial Sequence
  Synthetic
agagaaaucaagugacuca

SEQ ID NO: 472197 - RNA, 20 nt, Artificial Sequence
  Synthetic
uagagaaaucaagugacuca

SEQ ID NO: 472198 - RNA, 21 nt, Artificial Sequence
  Synthetic
guagagaaaucaagugacuca

SEQ ID NO: 472199 - RNA, 22 nt, Artificial Sequence
  Synthetic
uguagagaaaucaagugacuca

SEQ ID NO: 472200 - RNA, 23 nt, Artificial Sequence
  Synthetic
auguagagaaaucaagugacuca

SEQ ID NO: 472201 - RNA, 24 nt, Artificial Sequence
  Synthetic
uauguagagaaaucaagugacuca

SEQ ID NO: 472202 - RNA, 18 nt, Artificial Sequence
  Synthetic
ccuauuuuagaauacuca

SEQ ID NO: 472203 - RNA, 19 nt, Artificial Sequence
  Synthetic
cccuauuuuagaauacuca

SEQ ID NO: 472204 - RNA, 20 nt, Artificial Sequence
  Synthetic
ucccuauuuuagaauacuca

SEQ ID NO: 472205 - RNA, 21 nt, Artificial Sequence
  Synthetic
aucccuauuuuagaauacuca

SEQ ID NO: 472206 - RNA, 22 nt, Artificial Sequence
  Synthetic
caucccuauuuuagaauacuca

SEQ ID NO: 472207 - RNA, 23 nt, Artificial Sequence
  Synthetic
acaucccuauuuuagaauacuca

SEQ ID NO: 472208 - RNA, 24 nt, Artificial Sequence
  Synthetic
aacaucccuauuuuagaauacuca

SEQ ID NO: 472209 - RNA, 18 nt, Artificial Sequence
  Synthetic
acugaaacuuuauacuca

SEQ ID NO: 472210 - RNA, 19 nt, Artificial Sequence
  Synthetic
aacugaaacuuuauacuca

SEQ ID NO: 472211 - RNA, 20 nt, Artificial Sequence
  Synthetic
uaacugaaacuuuauacuca

SEQ ID NO: 472212 - RNA, 21 nt, Artificial Sequence
  Synthetic
auaacugaaacuuuauacuca

SEQ ID NO: 472213 - RNA, 22 nt, Artificial Sequence
  Synthetic
uauaacugaaacuuuauacuca

SEQ ID NO: 472214 - RNA, 23 nt, Artificial Sequence
  Synthetic
auauaacugaaacuuuauacuca

SEQ ID NO: 472215 - RNA, 24 nt, Artificial Sequence
  Synthetic
uauauaacugaaacuuuauacuca

SEQ ID NO: 472216 - RNA, 18 nt, Artificial Sequence
  Synthetic
uguaguaccagcuacuca

SEQ ID NO: 472217 - RNA, 19 nt, Artificial Sequence
  Synthetic
cuguaguaccagcuacuca

SEQ ID NO: 472218 - RNA, 20 nt, Artificial Sequence
  Synthetic
ccuguaguaccagcuacuca

SEQ ID NO: 472219 - RNA, 21 nt, Artificial Sequence
  Synthetic
gccuguaguaccagcuacuca

SEQ ID NO: 472220 - RNA, 22 nt, Artificial Sequence
  Synthetic
ugccuguaguaccagcuacuca

SEQ ID NO: 472221 - RNA, 23 nt, Artificial Sequence
  Synthetic
augccuguaguaccagcuacuca

SEQ ID NO: 472222 - RNA, 24 nt, Artificial Sequence
  Synthetic
caugccuguaguaccagcuacuca

SEQ ID NO: 472223 - RNA, 18 nt, Artificial Sequence
  Synthetic
cauaucaaccgcuacuca

SEQ ID NO: 472224 - RNA, 19 nt, Artificial Sequence
  Synthetic
ccauaucaaccgcuacuca

SEQ ID NO: 472225 - RNA, 20 nt, Artificial Sequence
  Synthetic
gccauaucaaccgcuacuca

SEQ ID NO: 472226 - RNA, 21 nt, Artificial Sequence
  Synthetic
ugccauaucaaccgcuacuca

SEQ ID NO: 472227 - RNA, 22 nt, Artificial Sequence
  Synthetic
uugccauaucaaccgcuacuca

SEQ ID NO: 472228 - RNA, 23 nt, Artificial Sequence
  Synthetic
cuugccauaucaaccgcuacuca

SEQ ID NO: 472229 - RNA, 24 nt, Artificial Sequence
  Synthetic
ucuugccauaucaaccgcuacuca

SEQ ID NO: 472230 - RNA, 18 nt, Artificial Sequence
  Synthetic
uuagaauguagguacuca

SEQ ID NO: 472231 - RNA, 19 nt, Artificial Sequence
  Synthetic
cuuagaauguagguacuca

SEQ ID NO: 472232 - RNA, 20 nt, Artificial Sequence
  Synthetic
ccuuagaauguagguacuca

SEQ ID NO: 472233 - RNA, 21 nt, Artificial Sequence
  Synthetic
uccuuagaauguagguacuca

SEQ ID NO: 472234 - RNA, 22 nt, Artificial Sequence
  Synthetic
guccuuagaauguagguacuca

SEQ ID NO: 472235 - RNA, 23 nt, Artificial Sequence
  Synthetic
aguccuuagaauguagguacuca

SEQ ID NO: 472236 - RNA, 24 nt, Artificial Sequence
  Synthetic
uaguccuuagaauguagguacuca

SEQ ID NO: 472237 - RNA, 18 nt, Artificial Sequence
  Synthetic
guugauguaacuuacuca

SEQ ID NO: 472238 - RNA, 19 nt, Artificial Sequence
  Synthetic
uguugauguaacuuacuca

SEQ ID NO: 472239 - RNA, 20 nt, Artificial Sequence
  Synthetic
auguugauguaacuuacuca

SEQ ID NO: 472240 - RNA, 21 nt, Artificial Sequence
  Synthetic
aauguugauguaacuuacuca

SEQ ID NO: 472241 - RNA, 22 nt, Artificial Sequence
  Synthetic
aaauguugauguaacuuacuca

SEQ ID NO: 472242 - RNA, 23 nt, Artificial Sequence
  Synthetic
gaaauguugauguaacuuacuca

SEQ ID NO: 472243 - RNA, 24 nt, Artificial Sequence
  Synthetic
agaaauguugauguaacuuacuca

SEQ ID NO: 472244 - RNA, 18 nt, Artificial Sequence
  Synthetic
cauuugacugaaaccuca

SEQ ID NO: 472245 - RNA, 19 nt, Artificial Sequence
  Synthetic
ucauuugacugaaaccuca

SEQ ID NO: 472246 - RNA, 20 nt, Artificial Sequence
  Synthetic
uucauuugacugaaaccuca

SEQ ID NO: 472247 - RNA, 21 nt, Artificial Sequence
  Synthetic
uuucauuugacugaaaccuca

SEQ ID NO: 472248 - RNA, 22 nt, Artificial Sequence
  Synthetic
uuuucauuugacugaaaccuca

SEQ ID NO: 472249 - RNA, 23 nt, Artificial Sequence
  Synthetic
cuuuucauuugacugaaaccuca

SEQ ID NO: 472250 - RNA, 24 nt, Artificial Sequence
  Synthetic
ccuuuucauuugacugaaaccuca

SEQ ID NO: 472251 - RNA, 18 nt, Artificial Sequence
  Synthetic
agaaaaaaaccaaccuca

SEQ ID NO: 472252 - RNA, 19 nt, Artificial Sequence
  Synthetic
aagaaaaaaaccaaccuca

SEQ ID NO: 472253 - RNA, 20 nt, Artificial Sequence
  Synthetic
caagaaaaaaaccaaccuca

SEQ ID NO: 472254 - RNA, 21 nt, Artificial Sequence
  Synthetic
acaagaaaaaaaccaaccuca

SEQ ID NO: 472255 - RNA, 22 nt, Artificial Sequence
  Synthetic
uacaagaaaaaaaccaaccuca

SEQ ID NO: 472256 - RNA, 23 nt, Artificial Sequence
  Synthetic
uuacaagaaaaaaaccaaccuca

SEQ ID NO: 472257 - RNA, 24 nt, Artificial Sequence
  Synthetic
uuuacaagaaaaaaaccaaccuca

SEQ ID NO: 472258 - RNA, 18 nt, Artificial Sequence
  Synthetic
cagccuguggcaaccuca

SEQ ID NO: 472259 - RNA, 19 nt, Artificial Sequence
  Synthetic
ucagccuguggcaaccuca

SEQ ID NO: 472260 - RNA, 20 nt, Artificial Sequence
  Synthetic
gucagccuguggcaaccuca

SEQ ID NO: 472261 - RNA, 21 nt, Artificial Sequence
  Synthetic
agucagccuguggcaaccuca

SEQ ID NO: 472262 - RNA, 22 nt, Artificial Sequence
  Synthetic
uagucagccuguggcaaccuca

SEQ ID NO: 472263 - RNA, 23 nt, Artificial Sequence
  Synthetic
auagucagccuguggcaaccuca

SEQ ID NO: 472264 - RNA, 24 nt, Artificial Sequence
  Synthetic
cauagucagccuguggcaaccuca

SEQ ID NO: 472265 - RNA, 18 nt, Artificial Sequence
  Synthetic
ucugucauaucaaccuca

SEQ ID NO: 472266 - RNA, 19 nt, Artificial Sequence
  Synthetic
aucugucauaucaaccuca

SEQ ID NO: 472267 - RNA, 20 nt, Artificial Sequence
  Synthetic
uaucugucauaucaaccuca

SEQ ID NO: 472268 - RNA, 21 nt, Artificial Sequence
  Synthetic
auaucugucauaucaaccuca

SEQ ID NO: 472269 - RNA, 22 nt, Artificial Sequence
  Synthetic
cauaucugucauaucaaccuca

SEQ ID NO: 472270 - RNA, 23 nt, Artificial Sequence
  Synthetic
gcauaucugucauaucaaccuca

SEQ ID NO: 472271 - RNA, 24 nt, Artificial Sequence
  Synthetic
agcauaucugucauaucaaccuca

SEQ ID NO: 472272 - RNA, 18 nt, Artificial Sequence
  Synthetic
gaugugggaggaaccuca

SEQ ID NO: 472273 - RNA, 19 nt, Artificial Sequence
  Synthetic
ggaugugggaggaaccuca

SEQ ID NO: 472274 - RNA, 20 nt, Artificial Sequence
  Synthetic
uggaugugggaggaaccuca

SEQ ID NO: 472275 - RNA, 21 nt, Artificial Sequence
  Synthetic
guggaugugggaggaaccuca

SEQ ID NO: 472276 - RNA, 22 nt, Artificial Sequence
  Synthetic
uguggaugugggaggaaccuca

SEQ ID NO: 472277 - RNA, 23 nt, Artificial Sequence
  Synthetic
guguggaugugggaggaaccuca

SEQ ID NO: 472278 - RNA, 24 nt, Artificial Sequence
  Synthetic
cguguggaugugggaggaaccuca

SEQ ID NO: 472279 - RNA, 18 nt, Artificial Sequence
  Synthetic
cagaggauuauaaccuca

SEQ ID NO: 472280 - RNA, 19 nt, Artificial Sequence
  Synthetic
ccagaggauuauaaccuca

SEQ ID NO: 472281 - RNA, 20 nt, Artificial Sequence
  Synthetic
uccagaggauuauaaccuca

SEQ ID NO: 472282 - RNA, 21 nt, Artificial Sequence
  Synthetic
cuccagaggauuauaaccuca

SEQ ID NO: 472283 - RNA, 22 nt, Artificial Sequence
  Synthetic
ccuccagaggauuauaaccuca

SEQ ID NO: 472284 - RNA, 23 nt, Artificial Sequence
  Synthetic
cccuccagaggauuauaaccuca

SEQ ID NO: 472285 - RNA, 24 nt, Artificial Sequence
  Synthetic
acccuccagaggauuauaaccuca

SEQ ID NO: 472286 - RNA, 18 nt, Artificial Sequence
  Synthetic
uguuuuuuuuccaccuca

SEQ ID NO: 472287 - RNA, 19 nt, Artificial Sequence
  Synthetic
cuguuuuuuuuccaccuca

SEQ ID NO: 472288 - RNA, 20 nt, Artificial Sequence
  Synthetic
ucuguuuuuuuuccaccuca

SEQ ID NO: 472289 - RNA, 21 nt, Artificial Sequence
  Synthetic
cucuguuuuuuuuccaccuca

SEQ ID NO: 472290 - RNA, 22 nt, Artificial Sequence
  Synthetic
acucuguuuuuuuuccaccuca

SEQ ID NO: 472291 - RNA, 23 nt, Artificial Sequence
  Synthetic
uacucuguuuuuuuuccaccuca

SEQ ID NO: 472292 - RNA, 24 nt, Artificial Sequence
  Synthetic
auacucuguuuuuuuuccaccuca

SEQ ID NO: 472293 - RNA, 18 nt, Artificial Sequence
  Synthetic
uguucaaaugucaccuca

SEQ ID NO: 472294 - RNA, 19 nt, Artificial Sequence
  Synthetic
cuguucaaaugucaccuca

SEQ ID NO: 472295 - RNA, 20 nt, Artificial Sequence
  Synthetic
ucuguucaaaugucaccuca

SEQ ID NO: 472296 - RNA, 21 nt, Artificial Sequence
  Synthetic
uucuguucaaaugucaccuca

SEQ ID NO: 472297 - RNA, 22 nt, Artificial Sequence
  Synthetic
uuucuguucaaaugucaccuca

SEQ ID NO: 472298 - RNA, 23 nt, Artificial Sequence
  Synthetic
auuucuguucaaaugucaccuca

SEQ ID NO: 472299 - RNA, 24 nt, Artificial Sequence
  Synthetic
gauuucuguucaaaugucaccuca

SEQ ID NO: 472300 - RNA, 18 nt, Artificial Sequence
  Synthetic
gcaggaaugaagaccuca

SEQ ID NO: 472301 - RNA, 19 nt, Artificial Sequence
  Synthetic
ugcaggaaugaagaccuca

SEQ ID NO: 472302 - RNA, 20 nt, Artificial Sequence
  Synthetic
cugcaggaaugaagaccuca

SEQ ID NO: 472303 - RNA, 21 nt, Artificial Sequence
  Synthetic
gcugcaggaaugaagaccuca

SEQ ID NO: 472304 - RNA, 22 nt, Artificial Sequence
  Synthetic
ugcugcaggaaugaagaccuca

SEQ ID NO: 472305 - RNA, 23 nt, Artificial Sequence
  Synthetic
cugcugcaggaaugaagaccuca

SEQ ID NO: 472306 - RNA, 24 nt, Artificial Sequence
  Synthetic
ucugcugcaggaaugaagaccuca

SEQ ID NO: 472307 - RNA, 18 nt, Artificial Sequence
  Synthetic
cuuauaaaagagaccuca

SEQ ID NO: 472308 - RNA, 19 nt, Artificial Sequence
  Synthetic
ccuuauaaaagagaccuca

SEQ ID NO: 472309 - RNA, 20 nt, Artificial Sequence
  Synthetic
cccuuauaaaagagaccuca

SEQ ID NO: 472310 - RNA, 21 nt, Artificial Sequence
  Synthetic
gcccuuauaaaagagaccuca

SEQ ID NO: 472311 - RNA, 22 nt, Artificial Sequence
  Synthetic
cgcccuuauaaaagagaccuca

SEQ ID NO: 472312 - RNA, 23 nt, Artificial Sequence
  Synthetic
gcgcccuuauaaaagagaccuca

SEQ ID NO: 472313 - RNA, 24 nt, Artificial Sequence
  Synthetic
agcgcccuuauaaaagagaccuca

SEQ ID NO: 472314 - RNA, 18 nt, Artificial Sequence
  Synthetic
aauguuugucuuaccuca

SEQ ID NO: 472315 - RNA, 19 nt, Artificial Sequence
  Synthetic
uaauguuugucuuaccuca

SEQ ID NO: 472316 - RNA, 20 nt, Artificial Sequence
  Synthetic
auaauguuugucuuaccuca

SEQ ID NO: 472317 - RNA, 21 nt, Artificial Sequence
  Synthetic
aauaauguuugucuuaccuca

SEQ ID NO: 472318 - RNA, 22 nt, Artificial Sequence
  Synthetic
uaauaauguuugucuuaccuca

SEQ ID NO: 472319 - RNA, 23 nt, Artificial Sequence
  Synthetic
auaauaauguuugucuuaccuca

SEQ ID NO: 472320 - RNA, 24 nt, Artificial Sequence
  Synthetic
cauaauaauguuugucuuaccuca

SEQ ID NO: 472321 - RNA, 18 nt, Artificial Sequence
  Synthetic
aaggucgaguuacccuca

SEQ ID NO: 472322 - RNA, 19 nt, Artificial Sequence
  Synthetic
aaaggucgaguuacccuca

SEQ ID NO: 472323 - RNA, 20 nt, Artificial Sequence
  Synthetic
gaaaggucgaguuacccuca

SEQ ID NO: 472324 - RNA, 21 nt, Artificial Sequence
  Synthetic
agaaaggucgaguuacccuca

SEQ ID NO: 472325 - RNA, 22 nt, Artificial Sequence
  Synthetic
gagaaaggucgaguuacccuca

SEQ ID NO: 472326 - RNA, 23 nt, Artificial Sequence
  Synthetic
agagaaaggucgaguuacccuca

SEQ ID NO: 472327 - RNA, 24 nt, Artificial Sequence
  Synthetic
gagagaaaggucgaguuacccuca

SEQ ID NO: 472328 - RNA, 18 nt, Artificial Sequence
  Synthetic
aaaaaggacgcccccuca

SEQ ID NO: 472329 - RNA, 19 nt, Artificial Sequence
  Synthetic
uaaaaaggacgcccccuca

SEQ ID NO: 472330 - RNA, 20 nt, Artificial Sequence
  Synthetic
guaaaaaggacgcccccuca

SEQ ID NO: 472331 - RNA, 21 nt, Artificial Sequence
  Synthetic
gguaaaaaggacgcccccuca

SEQ ID NO: 472332 - RNA, 22 nt, Artificial Sequence
  Synthetic
ugguaaaaaggacgcccccuca

SEQ ID NO: 472333 - RNA, 23 nt, Artificial Sequence
  Synthetic
augguaaaaaggacgcccccuca

SEQ ID NO: 472334 - RNA, 24 nt, Artificial Sequence
  Synthetic
aaugguaaaaaggacgcccccuca

SEQ ID NO: 472335 - RNA, 18 nt, Artificial Sequence
  Synthetic
uaggauguguuccccuca

SEQ ID NO: 472336 - RNA, 19 nt, Artificial Sequence
  Synthetic
cuaggauguguuccccuca

SEQ ID NO: 472337 - RNA, 20 nt, Artificial Sequence
  Synthetic
acuaggauguguuccccuca

SEQ ID NO: 472338 - RNA, 21 nt, Artificial Sequence
  Synthetic
gacuaggauguguuccccuca

SEQ ID NO: 472339 - RNA, 22 nt, Artificial Sequence
  Synthetic
agacuaggauguguuccccuca

SEQ ID NO: 472340 - RNA, 23 nt, Artificial Sequence
  Synthetic
gagacuaggauguguuccccuca

SEQ ID NO: 472341 - RNA, 24 nt, Artificial Sequence
  Synthetic
ggagacuaggauguguuccccuca

SEQ ID NO: 472342 - RNA, 18 nt, Artificial Sequence
  Synthetic
gcagagauggggcccuca

SEQ ID NO: 472343 - RNA, 19 nt, Artificial Sequence
  Synthetic
ugcagagauggggcccuca

SEQ ID NO: 472344 - RNA, 20 nt, Artificial Sequence
  Synthetic
cugcagagauggggcccuca

SEQ ID NO: 472345 - RNA, 21 nt, Artificial Sequence
  Synthetic
gcugcagagauggggcccuca

SEQ ID NO: 472346 - RNA, 22 nt, Artificial Sequence
  Synthetic
ugcugcagagauggggcccuca

SEQ ID NO: 472347 - RNA, 23 nt, Artificial Sequence
  Synthetic
uugcugcagagauggggcccuca

SEQ ID NO: 472348 - RNA, 24 nt, Artificial Sequence
  Synthetic
uuugcugcagagauggggcccuca

SEQ ID NO: 472349 - RNA, 18 nt, Artificial Sequence
  Synthetic
uauaacuaaucucccuca

SEQ ID NO: 472350 - RNA, 19 nt, Artificial Sequence
  Synthetic
auauaacuaaucucccuca

SEQ ID NO: 472351 - RNA, 20 nt, Artificial Sequence
  Synthetic
uauauaacuaaucucccuca

SEQ ID NO: 472352 - RNA, 21 nt, Artificial Sequence
  Synthetic
cuauauaacuaaucucccuca

SEQ ID NO: 472353 - RNA, 22 nt, Artificial Sequence
  Synthetic
ccuauauaacuaaucucccuca

SEQ ID NO: 472354 - RNA, 23 nt, Artificial Sequence
  Synthetic
gccuauauaacuaaucucccuca

SEQ ID NO: 472355 - RNA, 24 nt, Artificial Sequence
  Synthetic
agccuauauaacuaaucucccuca

SEQ ID NO: 472356 - RNA, 18 nt, Artificial Sequence
  Synthetic
aaaaacuaaauucccuca

SEQ ID NO: 472357 - RNA, 19 nt, Artificial Sequence
  Synthetic
aaaaaacuaaauucccuca

SEQ ID NO: 472358 - RNA, 20 nt, Artificial Sequence
  Synthetic
aaaaaaacuaaauucccuca

SEQ ID NO: 472359 - RNA, 21 nt, Artificial Sequence
  Synthetic
caaaaaaacuaaauucccuca

SEQ ID NO: 472360 - RNA, 22 nt, Artificial Sequence
  Synthetic
acaaaaaaacuaaauucccuca

SEQ ID NO: 472361 - RNA, 23 nt, Artificial Sequence
  Synthetic
aacaaaaaaacuaaauucccuca

SEQ ID NO: 472362 - RNA, 24 nt, Artificial Sequence
  Synthetic
caacaaaaaaacuaaauucccuca

SEQ ID NO: 472363 - RNA, 18 nt, Artificial Sequence
  Synthetic
gcguuauccacagccuca

SEQ ID NO: 472364 - RNA, 19 nt, Artificial Sequence
  Synthetic
agcguuauccacagccuca

SEQ ID NO: 472365 - RNA, 20 nt, Artificial Sequence
  Synthetic
cagcguuauccacagccuca

SEQ ID NO: 472366 - RNA, 21 nt, Artificial Sequence
  Synthetic
ucagcguuauccacagccuca

SEQ ID NO: 472367 - RNA, 22 nt, Artificial Sequence
  Synthetic
gucagcguuauccacagccuca

SEQ ID NO: 472368 - RNA, 23 nt, Artificial Sequence
  Synthetic
cgucagcguuauccacagccuca

SEQ ID NO: 472369 - RNA, 24 nt, Artificial Sequence
  Synthetic
ucgucagcguuauccacagccuca

SEQ ID NO: 472370 - RNA, 18 nt, Artificial Sequence
  Synthetic
gcaugcaaacuagccuca

SEQ ID NO: 472371 - RNA, 19 nt, Artificial Sequence
  Synthetic
ugcaugcaaacuagccuca

SEQ ID NO: 472372 - RNA, 20 nt, Artificial Sequence
  Synthetic
cugcaugcaaacuagccuca

SEQ ID NO: 472373 - RNA, 21 nt, Artificial Sequence
  Synthetic
acugcaugcaaacuagccuca

SEQ ID NO: 472374 - RNA, 22 nt, Artificial Sequence
  Synthetic
aacugcaugcaaacuagccuca

SEQ ID NO: 472375 - RNA, 23 nt, Artificial Sequence
  Synthetic
caacugcaugcaaacuagccuca

SEQ ID NO: 472376 - RNA, 24 nt, Artificial Sequence
  Synthetic
gcaacugcaugcaaacuagccuca

SEQ ID NO: 472377 - RNA, 18 nt, Artificial Sequence
  Synthetic
acagaaagcuuagccuca

SEQ ID NO: 472378 - RNA, 19 nt, Artificial Sequence
  Synthetic
gacagaaagcuuagccuca

SEQ ID NO: 472379 - RNA, 20 nt, Artificial Sequence
  Synthetic
ugacagaaagcuuagccuca

SEQ ID NO: 472380 - RNA, 21 nt, Artificial Sequence
  Synthetic
augacagaaagcuuagccuca

SEQ ID NO: 472381 - RNA, 22 nt, Artificial Sequence
  Synthetic
caugacagaaagcuuagccuca

SEQ ID NO: 472382 - RNA, 23 nt, Artificial Sequence
  Synthetic
acaugacagaaagcuuagccuca

SEQ ID NO: 472383 - RNA, 24 nt, Artificial Sequence
  Synthetic
aacaugacagaaagcuuagccuca

SEQ ID NO: 472384 - RNA, 18 nt, Artificial Sequence
  Synthetic
gaaaaagauuuggccuca

SEQ ID NO: 472385 - RNA, 19 nt, Artificial Sequence
  Synthetic
agaaaaagauuuggccuca

SEQ ID NO: 472386 - RNA, 20 nt, Artificial Sequence
  Synthetic
aagaaaaagauuuggccuca

SEQ ID NO: 472387 - RNA, 21 nt, Artificial Sequence
  Synthetic
gaagaaaaagauuuggccuca

SEQ ID NO: 472388 - RNA, 22 nt, Artificial Sequence
  Synthetic
ggaagaaaaagauuuggccuca

SEQ ID NO: 472389 - RNA, 23 nt, Artificial Sequence
  Synthetic
aggaagaaaaagauuuggccuca

SEQ ID NO: 472390 - RNA, 24 nt, Artificial Sequence
  Synthetic
gaggaagaaaaagauuuggccuca

SEQ ID NO: 472391 - RNA, 18 nt, Artificial Sequence
  Synthetic
guacaggcucuugccuca

SEQ ID NO: 472392 - RNA, 19 nt, Artificial Sequence
  Synthetic
gguacaggcucuugccuca

SEQ ID NO: 472393 - RNA, 20 nt, Artificial Sequence
  Synthetic
ugguacaggcucuugccuca

SEQ ID NO: 472394 - RNA, 21 nt, Artificial Sequence
  Synthetic
cugguacaggcucuugccuca

SEQ ID NO: 472395 - RNA, 22 nt, Artificial Sequence
  Synthetic
gcugguacaggcucuugccuca

SEQ ID NO: 472396 - RNA, 23 nt, Artificial Sequence
  Synthetic
ugcugguacaggcucuugccuca

SEQ ID NO: 472397 - RNA, 24 nt, Artificial Sequence
  Synthetic
uugcugguacaggcucuugccuca

SEQ ID NO: 472398 - RNA, 18 nt, Artificial Sequence
  Synthetic
gcagauauaucauccuca

SEQ ID NO: 472399 - RNA, 19 nt, Artificial Sequence
  Synthetic
agcagauauaucauccuca

SEQ ID NO: 472400 - RNA, 20 nt, Artificial Sequence
  Synthetic
cagcagauauaucauccuca

SEQ ID NO: 472401 - RNA, 21 nt, Artificial Sequence
  Synthetic
ucagcagauauaucauccuca

SEQ ID NO: 472402 - RNA, 22 nt, Artificial Sequence
  Synthetic
cucagcagauauaucauccuca

SEQ ID NO: 472403 - RNA, 23 nt, Artificial Sequence
  Synthetic
ucucagcagauauaucauccuca

SEQ ID NO: 472404 - RNA, 24 nt, Artificial Sequence
  Synthetic
uucucagcagauauaucauccuca

SEQ ID NO: 472405 - RNA, 18 nt, Artificial Sequence
  Synthetic
acugcucucaacuccuca

SEQ ID NO: 472406 - RNA, 19 nt, Artificial Sequence
  Synthetic
cacugcucucaacuccuca

SEQ ID NO: 472407 - RNA, 20 nt, Artificial Sequence
  Synthetic
ccacugcucucaacuccuca

SEQ ID NO: 472408 - RNA, 21 nt, Artificial Sequence
  Synthetic
cccacugcucucaacuccuca

SEQ ID NO: 472409 - RNA, 22 nt, Artificial Sequence
  Synthetic
gcccacugcucucaacuccuca

SEQ ID NO: 472410 - RNA, 23 nt, Artificial Sequence
  Synthetic
agcccacugcucucaacuccuca

SEQ ID NO: 472411 - RNA, 24 nt, Artificial Sequence
  Synthetic
uagcccacugcucucaacuccuca

SEQ ID NO: 472412 - RNA, 18 nt, Artificial Sequence
  Synthetic
aaaaguuccaccuccuca

SEQ ID NO: 472413 - RNA, 19 nt, Artificial Sequence
  Synthetic
uaaaaguuccaccuccuca

SEQ ID NO: 472414 - RNA, 20 nt, Artificial Sequence
  Synthetic
auaaaaguuccaccuccuca

SEQ ID NO: 472415 - RNA, 21 nt, Artificial Sequence
  Synthetic
aauaaaaguuccaccuccuca

SEQ ID NO: 472416 - RNA, 22 nt, Artificial Sequence
  Synthetic
uaauaaaaguuccaccuccuca

SEQ ID NO: 472417 - RNA, 23 nt, Artificial Sequence
  Synthetic
guaauaaaaguuccaccuccuca

SEQ ID NO: 472418 - RNA, 24 nt, Artificial Sequence
  Synthetic
gguaauaaaaguuccaccuccuca

SEQ ID NO: 472419 - RNA, 18 nt, Artificial Sequence
  Synthetic
uuuuacaggaaguccuca

SEQ ID NO: 472420 - RNA, 19 nt, Artificial Sequence
  Synthetic
cuuuuacaggaaguccuca

SEQ ID NO: 472421 - RNA, 20 nt, Artificial Sequence
  Synthetic
ccuuuuacaggaaguccuca

SEQ ID NO: 472422 - RNA, 21 nt, Artificial Sequence
  Synthetic
accuuuuacaggaaguccuca

SEQ ID NO: 472423 - RNA, 22 nt, Artificial Sequence
  Synthetic
gaccuuuuacaggaaguccuca

SEQ ID NO: 472424 - RNA, 23 nt, Artificial Sequence
  Synthetic
ugaccuuuuacaggaaguccuca

SEQ ID NO: 472425 - RNA, 24 nt, Artificial Sequence
  Synthetic
uugaccuuuuacaggaaguccuca

SEQ ID NO: 472426 - RNA, 18 nt, Artificial Sequence
  Synthetic
ucuucuggauaguccuca

SEQ ID NO: 472427 - RNA, 19 nt, Artificial Sequence
  Synthetic
gucuucuggauaguccuca

SEQ ID NO: 472428 - RNA, 20 nt, Artificial Sequence
  Synthetic
ggucuucuggauaguccuca

SEQ ID NO: 472429 - RNA, 21 nt, Artificial Sequence
  Synthetic
uggucuucuggauaguccuca

SEQ ID NO: 472430 - RNA, 22 nt, Artificial Sequence
  Synthetic
uuggucuucuggauaguccuca

SEQ ID NO: 472431 - RNA, 23 nt, Artificial Sequence
  Synthetic
uuuggucuucuggauaguccuca

SEQ ID NO: 472432 - RNA, 24 nt, Artificial Sequence
  Synthetic
auuuggucuucuggauaguccuca

SEQ ID NO: 472433 - RNA, 18 nt, Artificial Sequence
  Synthetic
acauggagaauguccuca

SEQ ID NO: 472434 - RNA, 19 nt, Artificial Sequence
  Synthetic
uacauggagaauguccuca

SEQ ID NO: 472435 - RNA, 20 nt, Artificial Sequence
  Synthetic
cuacauggagaauguccuca

SEQ ID NO: 472436 - RNA, 21 nt, Artificial Sequence
  Synthetic
acuacauggagaauguccuca

SEQ ID NO: 472437 - RNA, 22 nt, Artificial Sequence
  Synthetic
uacuacauggagaauguccuca

SEQ ID NO: 472438 - RNA, 23 nt, Artificial Sequence
  Synthetic
auacuacauggagaauguccuca

SEQ ID NO: 472439 - RNA, 24 nt, Artificial Sequence
  Synthetic
uauacuacauggagaauguccuca

SEQ ID NO: 472440 - RNA, 18 nt, Artificial Sequence
  Synthetic
aucauucugcuguccuca

SEQ ID NO: 472441 - RNA, 19 nt, Artificial Sequence
  Synthetic
gaucauucugcuguccuca

SEQ ID NO: 472442 - RNA, 20 nt, Artificial Sequence
  Synthetic
ugaucauucugcuguccuca

SEQ ID NO: 472443 - RNA, 21 nt, Artificial Sequence
  Synthetic
gugaucauucugcuguccuca

SEQ ID NO: 472444 - RNA, 22 nt, Artificial Sequence
  Synthetic
agugaucauucugcuguccuca

SEQ ID NO: 472445 - RNA, 23 nt, Artificial Sequence
  Synthetic
aagugaucauucugcuguccuca

SEQ ID NO: 472446 - RNA, 24 nt, Artificial Sequence
  Synthetic
gaagugaucauucugcuguccuca

SEQ ID NO: 472447 - RNA, 18 nt, Artificial Sequence
  Synthetic
ccaagggaacauuccuca

SEQ ID NO: 472448 - RNA, 19 nt, Artificial Sequence
  Synthetic
gccaagggaacauuccuca

SEQ ID NO: 472449 - RNA, 20 nt, Artificial Sequence
  Synthetic
agccaagggaacauuccuca

SEQ ID NO: 472450 - RNA, 21 nt, Artificial Sequence
  Synthetic
aagccaagggaacauuccuca

SEQ ID NO: 472451 - RNA, 22 nt, Artificial Sequence
  Synthetic
aaagccaagggaacauuccuca

SEQ ID NO: 472452 - RNA, 23 nt, Artificial Sequence
  Synthetic
caaagccaagggaacauuccuca

SEQ ID NO: 472453 - RNA, 24 nt, Artificial Sequence
  Synthetic
ucaaagccaagggaacauuccuca

SEQ ID NO: 472454 - RNA, 18 nt, Artificial Sequence
  Synthetic
aaagacucccauuccuca

SEQ ID NO: 472455 - RNA, 19 nt, Artificial Sequence
  Synthetic
aaaagacucccauuccuca

SEQ ID NO: 472456 - RNA, 20 nt, Artificial Sequence
  Synthetic
uaaaagacucccauuccuca

SEQ ID NO: 472457 - RNA, 21 nt, Artificial Sequence
  Synthetic
auaaaagacucccauuccuca

SEQ ID NO: 472458 - RNA, 22 nt, Artificial Sequence
  Synthetic
aauaaaagacucccauuccuca

SEQ ID NO: 472459 - RNA, 23 nt, Artificial Sequence
  Synthetic
gaauaaaagacucccauuccuca

SEQ ID NO: 472460 - RNA, 24 nt, Artificial Sequence
  Synthetic
ugaauaaaagacucccauuccuca

SEQ ID NO: 472461 - RNA, 18 nt, Artificial Sequence
  Synthetic
auaauaccaccuuccuca

SEQ ID NO: 472462 - RNA, 19 nt, Artificial Sequence
  Synthetic
gauaauaccaccuuccuca

SEQ ID NO: 472463 - RNA, 20 nt, Artificial Sequence
  Synthetic
ugauaauaccaccuuccuca

SEQ ID NO: 472464 - RNA, 21 nt, Artificial Sequence
  Synthetic
augauaauaccaccuuccuca

SEQ ID NO: 472465 - RNA, 22 nt, Artificial Sequence
  Synthetic
gaugauaauaccaccuuccuca

SEQ ID NO: 472466 - RNA, 23 nt, Artificial Sequence
  Synthetic
agaugauaauaccaccuuccuca

SEQ ID NO: 472467 - RNA, 24 nt, Artificial Sequence
  Synthetic
gagaugauaauaccaccuuccuca

SEQ ID NO: 472468 - RNA, 18 nt, Artificial Sequence
  Synthetic
ucugauuaucuuuccuca

SEQ ID NO: 472469 - RNA, 19 nt, Artificial Sequence
  Synthetic
aucugauuaucuuuccuca

SEQ ID NO: 472470 - RNA, 20 nt, Artificial Sequence
  Synthetic
uaucugauuaucuuuccuca

SEQ ID NO: 472471 - RNA, 21 nt, Artificial Sequence
  Synthetic
guaucugauuaucuuuccuca

SEQ ID NO: 472472 - RNA, 22 nt, Artificial Sequence
  Synthetic
uguaucugauuaucuuuccuca

SEQ ID NO: 472473 - RNA, 23 nt, Artificial Sequence
  Synthetic
uuguaucugauuaucuuuccuca

SEQ ID NO: 472474 - RNA, 24 nt, Artificial Sequence
  Synthetic
uuuguaucugauuaucuuuccuca

SEQ ID NO: 472475 - RNA, 18 nt, Artificial Sequence
  Synthetic
aacaaaaugugaagcuca

SEQ ID NO: 472476 - RNA, 19 nt, Artificial Sequence
  Synthetic
aaacaaaaugugaagcuca

SEQ ID NO: 472477 - RNA, 20 nt, Artificial Sequence
  Synthetic
gaaacaaaaugugaagcuca

SEQ ID NO: 472478 - RNA, 21 nt, Artificial Sequence
  Synthetic
ugaaacaaaaugugaagcuca

SEQ ID NO: 472479 - RNA, 22 nt, Artificial Sequence
  Synthetic
uugaaacaaaaugugaagcuca

SEQ ID NO: 472480 - RNA, 23 nt, Artificial Sequence
  Synthetic
auugaaacaaaaugugaagcuca

SEQ ID NO: 472481 - RNA, 24 nt, Artificial Sequence
  Synthetic
uauugaaacaaaaugugaagcuca

SEQ ID NO: 472482 - RNA, 18 nt, Artificial Sequence
  Synthetic
gaacaacacaacagcuca

SEQ ID NO: 472483 - RNA, 19 nt, Artificial Sequence
  Synthetic
agaacaacacaacagcuca

SEQ ID NO: 472484 - RNA, 20 nt, Artificial Sequence
  Synthetic
cagaacaacacaacagcuca

SEQ ID NO: 472485 - RNA, 21 nt, Artificial Sequence
  Synthetic
ccagaacaacacaacagcuca

SEQ ID NO: 472486 - RNA, 22 nt, Artificial Sequence
  Synthetic
gccagaacaacacaacagcuca

SEQ ID NO: 472487 - RNA, 23 nt, Artificial Sequence
  Synthetic
agccagaacaacacaacagcuca

SEQ ID NO: 472488 - RNA, 24 nt, Artificial Sequence
  Synthetic
gagccagaacaacacaacagcuca

SEQ ID NO: 472489 - RNA, 18 nt, Artificial Sequence
  Synthetic
uuaggcguuaacagcuca

SEQ ID NO: 472490 - RNA, 19 nt, Artificial Sequence
  Synthetic
cuuaggcguuaacagcuca

SEQ ID NO: 472491 - RNA, 20 nt, Artificial Sequence
  Synthetic
gcuuaggcguuaacagcuca

SEQ ID NO: 472492 - RNA, 21 nt, Artificial Sequence
  Synthetic
agcuuaggcguuaacagcuca

SEQ ID NO: 472493 - RNA, 22 nt, Artificial Sequence
  Synthetic
cagcuuaggcguuaacagcuca

SEQ ID NO: 472494 - RNA, 23 nt, Artificial Sequence
  Synthetic
acagcuuaggcguuaacagcuca

SEQ ID NO: 472495 - RNA, 24 nt, Artificial Sequence
  Synthetic
gacagcuuaggcguuaacagcuca

SEQ ID NO: 472496 - RNA, 18 nt, Artificial Sequence
  Synthetic
aaucaauauggcagcuca

SEQ ID NO: 472497 - RNA, 19 nt, Artificial Sequence
  Synthetic
uaaucaauauggcagcuca

SEQ ID NO: 472498 - RNA, 20 nt, Artificial Sequence
  Synthetic
auaaucaauauggcagcuca

SEQ ID NO: 472499 - RNA, 21 nt, Artificial Sequence
  Synthetic
aauaaucaauauggcagcuca

SEQ ID NO: 472500 - RNA, 22 nt, Artificial Sequence
  Synthetic
caauaaucaauauggcagcuca

SEQ ID NO: 472501 - RNA, 23 nt, Artificial Sequence
  Synthetic
acaauaaucaauauggcagcuca

SEQ ID NO: 472502 - RNA, 24 nt, Artificial Sequence
  Synthetic
aacaauaaucaauauggcagcuca

SEQ ID NO: 472503 - RNA, 18 nt, Artificial Sequence
  Synthetic
uggugugaucucagcuca

SEQ ID NO: 472504 - RNA, 19 nt, Artificial Sequence
  Synthetic
auggugugaucucagcuca

SEQ ID NO: 472505 - RNA, 20 nt, Artificial Sequence
  Synthetic
aauggugugaucucagcuca

SEQ ID NO: 472506 - RNA, 21 nt, Artificial Sequence
  Synthetic
caauggugugaucucagcuca

SEQ ID NO: 472507 - RNA, 22 nt, Artificial Sequence
  Synthetic
gcaauggugugaucucagcuca

SEQ ID NO: 472508 - RNA, 23 nt, Artificial Sequence
  Synthetic
ugcaauggugugaucucagcuca

SEQ ID NO: 472509 - RNA, 24 nt, Artificial Sequence
  Synthetic
gugcaauggugugaucucagcuca

SEQ ID NO: 472510 - RNA, 18 nt, Artificial Sequence
  Synthetic
acagugugcaagagcuca

SEQ ID NO: 472511 - RNA, 19 nt, Artificial Sequence
  Synthetic
gacagugugcaagagcuca

SEQ ID NO: 472512 - RNA, 20 nt, Artificial Sequence
  Synthetic
ugacagugugcaagagcuca

SEQ ID NO: 472513 - RNA, 21 nt, Artificial Sequence
  Synthetic
cugacagugugcaagagcuca

SEQ ID NO: 472514 - RNA, 22 nt, Artificial Sequence
  Synthetic
gcugacagugugcaagagcuca

SEQ ID NO: 472515 - RNA, 23 nt, Artificial Sequence
  Synthetic
agcugacagugugcaagagcuca

SEQ ID NO: 472516 - RNA, 24 nt, Artificial Sequence
  Synthetic
aagcugacagugugcaagagcuca

SEQ ID NO: 472517 - RNA, 18 nt, Artificial Sequence
  Synthetic
cugaaagguuagagcuca

SEQ ID NO: 472518 - RNA, 19 nt, Artificial Sequence
  Synthetic
ucugaaagguuagagcuca

SEQ ID NO: 472519 - RNA, 20 nt, Artificial Sequence
  Synthetic
uucugaaagguuagagcuca

SEQ ID NO: 472520 - RNA, 21 nt, Artificial Sequence
  Synthetic
uuucugaaagguuagagcuca

SEQ ID NO: 472521 - RNA, 22 nt, Artificial Sequence
  Synthetic
uuuucugaaagguuagagcuca

SEQ ID NO: 472522 - RNA, 23 nt, Artificial Sequence
  Synthetic
uuuuucugaaagguuagagcuca

SEQ ID NO: 472523 - RNA, 24 nt, Artificial Sequence
  Synthetic
uuuuuucugaaagguuagagcuca

SEQ ID NO: 472524 - RNA, 18 nt, Artificial Sequence
  Synthetic
uucaucuacaugcgcuca

SEQ ID NO: 472525 - RNA, 19 nt, Artificial Sequence
  Synthetic
auucaucuacaugcgcuca

SEQ ID NO: 472526 - RNA, 20 nt, Artificial Sequence
  Synthetic
aauucaucuacaugcgcuca

SEQ ID NO: 472527 - RNA, 21 nt, Artificial Sequence
  Synthetic
gaauucaucuacaugcgcuca

SEQ ID NO: 472528 - RNA, 22 nt, Artificial Sequence
  Synthetic
ugaauucaucuacaugcgcuca

SEQ ID NO: 472529 - RNA, 23 nt, Artificial Sequence
  Synthetic
augaauucaucuacaugcgcuca

SEQ ID NO: 472530 - RNA, 24 nt, Artificial Sequence
  Synthetic
uaugaauucaucuacaugcgcuca

SEQ ID NO: 472531 - RNA, 18 nt, Artificial Sequence
  Synthetic
uugacagaacaaggcuca

SEQ ID NO: 472532 - RNA, 19 nt, Artificial Sequence
  Synthetic
cuugacagaacaaggcuca

SEQ ID NO: 472533 - RNA, 20 nt, Artificial Sequence
  Synthetic
ucuugacagaacaaggcuca

SEQ ID NO: 472534 - RNA, 21 nt, Artificial Sequence
  Synthetic
uucuugacagaacaaggcuca

SEQ ID NO: 472535 - RNA, 22 nt, Artificial Sequence
  Synthetic
auucuugacagaacaaggcuca

SEQ ID NO: 472536 - RNA, 23 nt, Artificial Sequence
  Synthetic
gauucuugacagaacaaggcuca

SEQ ID NO: 472537 - RNA, 24 nt, Artificial Sequence
  Synthetic
agauucuugacagaacaaggcuca

SEQ ID NO: 472538 - RNA, 18 nt, Artificial Sequence
  Synthetic
cccagaguucaaggcuca

SEQ ID NO: 472539 - RNA, 19 nt, Artificial Sequence
  Synthetic
ccccagaguucaaggcuca

SEQ ID NO: 472540 - RNA, 20 nt, Artificial Sequence
  Synthetic
gccccagaguucaaggcuca

SEQ ID NO: 472541 - RNA, 21 nt, Artificial Sequence
  Synthetic
agccccagaguucaaggcuca

SEQ ID NO: 472542 - RNA, 22 nt, Artificial Sequence
  Synthetic
gagccccagaguucaaggcuca

SEQ ID NO: 472543 - RNA, 23 nt, Artificial Sequence
  Synthetic
ugagccccagaguucaaggcuca

SEQ ID NO: 472544 - RNA, 24 nt, Artificial Sequence
  Synthetic
uugagccccagaguucaaggcuca

SEQ ID NO: 472545 - RNA, 18 nt, Artificial Sequence
  Synthetic
agacaaaacugaggcuca

SEQ ID NO: 472546 - RNA, 19 nt, Artificial Sequence
  Synthetic
cagacaaaacugaggcuca

SEQ ID NO: 472547 - RNA, 20 nt, Artificial Sequence
  Synthetic
gcagacaaaacugaggcuca

SEQ ID NO: 472548 - RNA, 21 nt, Artificial Sequence
  Synthetic
agcagacaaaacugaggcuca

SEQ ID NO: 472549 - RNA, 22 nt, Artificial Sequence
  Synthetic
aagcagacaaaacugaggcuca

SEQ ID NO: 472550 - RNA, 23 nt, Artificial Sequence
  Synthetic
caagcagacaaaacugaggcuca

SEQ ID NO: 472551 - RNA, 24 nt, Artificial Sequence
  Synthetic
ccaagcagacaaaacugaggcuca

SEQ ID NO: 472552 - RNA, 18 nt, Artificial Sequence
  Synthetic
uuccagcuugggggcuca

SEQ ID NO: 472553 - RNA, 19 nt, Artificial Sequence
  Synthetic
cuuccagcuugggggcuca

SEQ ID NO: 472554 - RNA, 20 nt, Artificial Sequence
  Synthetic
ucuuccagcuugggggcuca

SEQ ID NO: 472555 - RNA, 21 nt, Artificial Sequence
  Synthetic
gucuuccagcuugggggcuca

SEQ ID NO: 472556 - RNA, 22 nt, Artificial Sequence
  Synthetic
ugucuuccagcuugggggcuca

SEQ ID NO: 472557 - RNA, 23 nt, Artificial Sequence
  Synthetic
augucuuccagcuugggggcuca

SEQ ID NO: 472558 - RNA, 24 nt, Artificial Sequence
  Synthetic
gaugucuuccagcuugggggcuca

SEQ ID NO: 472559 - RNA, 18 nt, Artificial Sequence
  Synthetic
uagucaguaauuggcuca

SEQ ID NO: 472560 - RNA, 19 nt, Artificial Sequence
  Synthetic
cuagucaguaauuggcuca

SEQ ID NO: 472561 - RNA, 20 nt, Artificial Sequence
  Synthetic
ccuagucaguaauuggcuca

SEQ ID NO: 472562 - RNA, 21 nt, Artificial Sequence
  Synthetic
gccuagucaguaauuggcuca

SEQ ID NO: 472563 - RNA, 22 nt, Artificial Sequence
  Synthetic
ugccuagucaguaauuggcuca

SEQ ID NO: 472564 - RNA, 23 nt, Artificial Sequence
  Synthetic
gugccuagucaguaauuggcuca

SEQ ID NO: 472565 - RNA, 24 nt, Artificial Sequence
  Synthetic
agugccuagucaguaauuggcuca

SEQ ID NO: 472566 - RNA, 18 nt, Artificial Sequence
  Synthetic
ucucaaaguaaaugcuca

SEQ ID NO: 472567 - RNA, 19 nt, Artificial Sequence
  Synthetic
uucucaaaguaaaugcuca

SEQ ID NO: 472568 - RNA, 20 nt, Artificial Sequence
  Synthetic
auucucaaaguaaaugcuca

SEQ ID NO: 472569 - RNA, 21 nt, Artificial Sequence
  Synthetic
gauucucaaaguaaaugcuca

SEQ ID NO: 472570 - RNA, 22 nt, Artificial Sequence
  Synthetic
ugauucucaaaguaaaugcuca

SEQ ID NO: 472571 - RNA, 23 nt, Artificial Sequence
  Synthetic
augauucucaaaguaaaugcuca

SEQ ID NO: 472572 - RNA, 24 nt, Artificial Sequence
  Synthetic
caugauucucaaaguaaaugcuca

SEQ ID NO: 472573 - RNA, 18 nt, Artificial Sequence
  Synthetic
uuuccuuauuaaugcuca

SEQ ID NO: 472574 - RNA, 19 nt, Artificial Sequence
  Synthetic
auuuccuuauuaaugcuca

SEQ ID NO: 472575 - RNA, 20 nt, Artificial Sequence
  Synthetic
cauuuccuuauuaaugcuca

SEQ ID NO: 472576 - RNA, 21 nt, Artificial Sequence
  Synthetic
ucauuuccuuauuaaugcuca

SEQ ID NO: 472577 - RNA, 22 nt, Artificial Sequence
  Synthetic
uucauuuccuuauuaaugcuca

SEQ ID NO: 472578 - RNA, 23 nt, Artificial Sequence
  Synthetic
auucauuuccuuauuaaugcuca

SEQ ID NO: 472579 - RNA, 24 nt, Artificial Sequence
  Synthetic
uauucauuuccuuauuaaugcuca

SEQ ID NO: 472580 - RNA, 18 nt, Artificial Sequence
  Synthetic
aaagaaauuucaugcuca

SEQ ID NO: 472581 - RNA, 19 nt, Artificial Sequence
  Synthetic
caaagaaauuucaugcuca

SEQ ID NO: 472582 - RNA, 20 nt, Artificial Sequence
  Synthetic
ucaaagaaauuucaugcuca

SEQ ID NO: 472583 - RNA, 21 nt, Artificial Sequence
  Synthetic
aucaaagaaauuucaugcuca

SEQ ID NO: 472584 - RNA, 22 nt, Artificial Sequence
  Synthetic
caucaaagaaauuucaugcuca

SEQ ID NO: 472585 - RNA, 23 nt, Artificial Sequence
  Synthetic
acaucaaagaaauuucaugcuca

SEQ ID NO: 472586 - RNA, 24 nt, Artificial Sequence
  Synthetic
aacaucaaagaaauuucaugcuca

SEQ ID NO: 472587 - RNA, 18 nt, Artificial Sequence
  Synthetic
auaacacagugaugcuca

SEQ ID NO: 472588 - RNA, 19 nt, Artificial Sequence
  Synthetic
uauaacacagugaugcuca

SEQ ID NO: 472589 - RNA, 20 nt, Artificial Sequence
  Synthetic
uuauaacacagugaugcuca

SEQ ID NO: 472590 - RNA, 21 nt, Artificial Sequence
  Synthetic
auuauaacacagugaugcuca

SEQ ID NO: 472591 - RNA, 22 nt, Artificial Sequence
  Synthetic
uauuauaacacagugaugcuca

SEQ ID NO: 472592 - RNA, 23 nt, Artificial Sequence
  Synthetic
auauuauaacacagugaugcuca

SEQ ID NO: 472593 - RNA, 24 nt, Artificial Sequence
  Synthetic
aauauuauaacacagugaugcuca

SEQ ID NO: 472594 - RNA, 21 nt, Artificial Sequence
  Synthetic
agaacuacaaaccacugcuca

SEQ ID NO: 472595 - RNA, 22 nt, Artificial Sequence
  Synthetic
gagaacuacaaaccacugcuca

SEQ ID NO: 472596 - RNA, 23 nt, Artificial Sequence
  Synthetic
ggagaacuacaaaccacugcuca

SEQ ID NO: 472597 - RNA, 24 nt, Artificial Sequence
  Synthetic
aggagaacuacaaaccacugcuca

SEQ ID NO: 472598 - RNA, 18 nt, Artificial Sequence
  Synthetic
ggguuaacauacugcuca

SEQ ID NO: 472599 - RNA, 19 nt, Artificial Sequence
  Synthetic
uggguuaacauacugcuca

SEQ ID NO: 472600 - RNA, 20 nt, Artificial Sequence
  Synthetic
uuggguuaacauacugcuca

SEQ ID NO: 472601 - RNA, 21 nt, Artificial Sequence
  Synthetic
cuuggguuaacauacugcuca

SEQ ID NO: 472602 - RNA, 22 nt, Artificial Sequence
  Synthetic
ucuuggguuaacauacugcuca

SEQ ID NO: 472603 - RNA, 23 nt, Artificial Sequence
  Synthetic
gucuuggguuaacauacugcuca

SEQ ID NO: 472604 - RNA, 24 nt, Artificial Sequence
  Synthetic
ugucuuggguuaacauacugcuca

SEQ ID NO: 472605 - RNA, 18 nt, Artificial Sequence
  Synthetic
cagugcauggccugcuca

SEQ ID NO: 472606 - RNA, 19 nt, Artificial Sequence
  Synthetic
acagugcauggccugcuca

SEQ ID NO: 472607 - RNA, 20 nt, Artificial Sequence
  Synthetic
uacagugcauggccugcuca

SEQ ID NO: 472608 - RNA, 21 nt, Artificial Sequence
  Synthetic
uuacagugcauggccugcuca

SEQ ID NO: 472609 - RNA, 22 nt, Artificial Sequence
  Synthetic
uuuacagugcauggccugcuca

SEQ ID NO: 472610 - RNA, 23 nt, Artificial Sequence
  Synthetic
auuuacagugcauggccugcuca

SEQ ID NO: 472611 - RNA, 24 nt, Artificial Sequence
  Synthetic
uauuuacagugcauggccugcuca

SEQ ID NO: 472612 - RNA, 18 nt, Artificial Sequence
  Synthetic
gauauuaugcgcugcuca

SEQ ID NO: 472613 - RNA, 19 nt, Artificial Sequence
  Synthetic
agauauuaugcgcugcuca

SEQ ID NO: 472614 - RNA, 20 nt, Artificial Sequence
  Synthetic
uagauauuaugcgcugcuca

SEQ ID NO: 472615 - RNA, 21 nt, Artificial Sequence
  Synthetic
uuagauauuaugcgcugcuca

SEQ ID NO: 472616 - RNA, 22 nt, Artificial Sequence
  Synthetic
guuagauauuaugcgcugcuca

SEQ ID NO: 472617 - RNA, 23 nt, Artificial Sequence
  Synthetic
gguuagauauuaugcgcugcuca

SEQ ID NO: 472618 - RNA, 24 nt, Artificial Sequence
  Synthetic
ugguuagauauuaugcgcugcuca

SEQ ID NO: 472619 - RNA, 18 nt, Artificial Sequence
  Synthetic
aaacucggaaugugcuca

SEQ ID NO: 472620 - RNA, 19 nt, Artificial Sequence
  Synthetic
gaaacucggaaugugcuca

SEQ ID NO: 472621 - RNA, 20 nt, Artificial Sequence
  Synthetic
agaaacucggaaugugcuca

SEQ ID NO: 472622 - RNA, 21 nt, Artificial Sequence
  Synthetic
aagaaacucggaaugugcuca

SEQ ID NO: 472623 - RNA, 22 nt, Artificial Sequence
  Synthetic
uaagaaacucggaaugugcuca

SEQ ID NO: 472624 - RNA, 23 nt, Artificial Sequence
  Synthetic
auaagaaacucggaaugugcuca

SEQ ID NO: 472625 - RNA, 24 nt, Artificial Sequence
  Synthetic
gauaagaaacucggaaugugcuca

SEQ ID NO: 472626 - RNA, 18 nt, Artificial Sequence
  Synthetic
cacugacacuauugcuca

SEQ ID NO: 472627 - RNA, 19 nt, Artificial Sequence
  Synthetic
ccacugacacuauugcuca

SEQ ID NO: 472628 - RNA, 20 nt, Artificial Sequence
  Synthetic
cccacugacacuauugcuca

SEQ ID NO: 472629 - RNA, 21 nt, Artificial Sequence
  Synthetic
ucccacugacacuauugcuca

SEQ ID NO: 472630 - RNA, 22 nt, Artificial Sequence
  Synthetic
aucccacugacacuauugcuca

SEQ ID NO: 472631 - RNA, 23 nt, Artificial Sequence
  Synthetic
aaucccacugacacuauugcuca

SEQ ID NO: 472632 - RNA, 24 nt, Artificial Sequence
  Synthetic
uaaucccacugacacuauugcuca

SEQ ID NO: 472633 - RNA, 18 nt, Artificial Sequence
  Synthetic
gggaagagagcuugcuca

SEQ ID NO: 472634 - RNA, 19 nt, Artificial Sequence
  Synthetic
agggaagagagcuugcuca

SEQ ID NO: 472635 - RNA, 20 nt, Artificial Sequence
  Synthetic
cagggaagagagcuugcuca

SEQ ID NO: 472636 - RNA, 21 nt, Artificial Sequence
  Synthetic
gcagggaagagagcuugcuca

SEQ ID NO: 472637 - RNA, 22 nt, Artificial Sequence
  Synthetic
agcagggaagagagcuugcuca

SEQ ID NO: 472638 - RNA, 23 nt, Artificial Sequence
  Synthetic
cagcagggaagagagcuugcuca

SEQ ID NO: 472639 - RNA, 24 nt, Artificial Sequence
  Synthetic
gcagcagggaagagagcuugcuca

SEQ ID NO: 472640 - RNA, 18 nt, Artificial Sequence
  Synthetic
acgauucccuuuugcuca

SEQ ID NO: 472641 - RNA, 19 nt, Artificial Sequence
  Synthetic
aacgauucccuuuugcuca

SEQ ID NO: 472642 - RNA, 20 nt, Artificial Sequence
  Synthetic
gaacgauucccuuuugcuca

SEQ ID NO: 472643 - RNA, 21 nt, Artificial Sequence
  Synthetic
agaacgauucccuuuugcuca

SEQ ID NO: 472644 - RNA, 22 nt, Artificial Sequence
  Synthetic
cagaacgauucccuuuugcuca

SEQ ID NO: 472645 - RNA, 23 nt, Artificial Sequence
  Synthetic
gcagaacgauucccuuuugcuca

SEQ ID NO: 472646 - RNA, 24 nt, Artificial Sequence
  Synthetic
ggcagaacgauucccuuuugcuca

SEQ ID NO: 472647 - RNA, 18 nt, Artificial Sequence
  Synthetic
aaugacacaaaaaucuca

SEQ ID NO: 472648 - RNA, 19 nt, Artificial Sequence
  Synthetic
aaaugacacaaaaaucuca

SEQ ID NO: 472649 - RNA, 20 nt, Artificial Sequence
  Synthetic
gaaaugacacaaaaaucuca

SEQ ID NO: 472650 - RNA, 21 nt, Artificial Sequence
  Synthetic
ugaaaugacacaaaaaucuca

SEQ ID NO: 472651 - RNA, 22 nt, Artificial Sequence
  Synthetic
uugaaaugacacaaaaaucuca

SEQ ID NO: 472652 - RNA, 23 nt, Artificial Sequence
  Synthetic
cuugaaaugacacaaaaaucuca

SEQ ID NO: 472653 - RNA, 24 nt, Artificial Sequence
  Synthetic
acuugaaaugacacaaaaaucuca

SEQ ID NO: 472654 - RNA, 18 nt, Artificial Sequence
  Synthetic
ugugcccacaaaaucuca

SEQ ID NO: 472655 - RNA, 19 nt, Artificial Sequence
  Synthetic
uugugcccacaaaaucuca

SEQ ID NO: 472656 - RNA, 20 nt, Artificial Sequence
  Synthetic
cuugugcccacaaaaucuca

SEQ ID NO: 472657 - RNA, 21 nt, Artificial Sequence
  Synthetic
ucuugugcccacaaaaucuca

SEQ ID NO: 472658 - RNA, 22 nt, Artificial Sequence
  Synthetic
aucuugugcccacaaaaucuca

SEQ ID NO: 472659 - RNA, 23 nt, Artificial Sequence
  Synthetic
aaucuugugcccacaaaaucuca

SEQ ID NO: 472660 - RNA, 24 nt, Artificial Sequence
  Synthetic
caaucuugugcccacaaaaucuca

SEQ ID NO: 472661 - RNA, 18 nt, Artificial Sequence
  Synthetic
acagaaugcuaaaucuca

SEQ ID NO: 472662 - RNA, 19 nt, Artificial Sequence
  Synthetic
uacagaaugcuaaaucuca

SEQ ID NO: 472663 - RNA, 20 nt, Artificial Sequence
  Synthetic
uuacagaaugcuaaaucuca

SEQ ID NO: 472664 - RNA, 21 nt, Artificial Sequence
  Synthetic
auuacagaaugcuaaaucuca

SEQ ID NO: 472665 - RNA, 22 nt, Artificial Sequence
  Synthetic
aauuacagaaugcuaaaucuca

SEQ ID NO: 472666 - RNA, 23 nt, Artificial Sequence
  Synthetic
caauuacagaaugcuaaaucuca

SEQ ID NO: 472667 - RNA, 24 nt, Artificial Sequence
  Synthetic
acaauuacagaaugcuaaaucuca

SEQ ID NO: 472668 - RNA, 18 nt, Artificial Sequence
  Synthetic
auggaaguugcaaucuca

SEQ ID NO: 472669 - RNA, 19 nt, Artificial Sequence
  Synthetic
cauggaaguugcaaucuca

SEQ ID NO: 472670 - RNA, 20 nt, Artificial Sequence
  Synthetic
acauggaaguugcaaucuca

SEQ ID NO: 472671 - RNA, 21 nt, Artificial Sequence
  Synthetic
cacauggaaguugcaaucuca

SEQ ID NO: 472672 - RNA, 22 nt, Artificial Sequence
  Synthetic
ccacauggaaguugcaaucuca

SEQ ID NO: 472673 - RNA, 23 nt, Artificial Sequence
  Synthetic
gccacauggaaguugcaaucuca

SEQ ID NO: 472674 - RNA, 24 nt, Artificial Sequence
  Synthetic
ugccacauggaaguugcaaucuca

SEQ ID NO: 472675 - RNA, 18 nt, Artificial Sequence
  Synthetic
gggcagaacagaaucuca

SEQ ID NO: 472676 - RNA, 19 nt, Artificial Sequence
  Synthetic
ugggcagaacagaaucuca

SEQ ID NO: 472677 - RNA, 20 nt, Artificial Sequence
  Synthetic
cugggcagaacagaaucuca

SEQ ID NO: 472678 - RNA, 21 nt, Artificial Sequence
  Synthetic
gcugggcagaacagaaucuca

SEQ ID NO: 472679 - RNA, 22 nt, Artificial Sequence
  Synthetic
ggcugggcagaacagaaucuca

SEQ ID NO: 472680 - RNA, 23 nt, Artificial Sequence
  Synthetic
aggcugggcagaacagaaucuca

SEQ ID NO: 472681 - RNA, 24 nt, Artificial Sequence
  Synthetic
gaggcugggcagaacagaaucuca

SEQ ID NO: 472682 - RNA, 18 nt, Artificial Sequence
  Synthetic
uagcuuucaaccaucuca

SEQ ID NO: 472683 - RNA, 19 nt, Artificial Sequence
  Synthetic
cuagcuuucaaccaucuca

SEQ ID NO: 472684 - RNA, 20 nt, Artificial Sequence
  Synthetic
ucuagcuuucaaccaucuca

SEQ ID NO: 472685 - RNA, 21 nt, Artificial Sequence
  Synthetic
aucuagcuuucaaccaucuca

SEQ ID NO: 472686 - RNA, 22 nt, Artificial Sequence
  Synthetic
uaucuagcuuucaaccaucuca

SEQ ID NO: 472687 - RNA, 23 nt, Artificial Sequence
  Synthetic
cuaucuagcuuucaaccaucuca

SEQ ID NO: 472688 - RNA, 24 nt, Artificial Sequence
  Synthetic
ucuaucuagcuuucaaccaucuca

SEQ ID NO: 472689 - RNA, 18 nt, Artificial Sequence
  Synthetic
gacccuuagaccaucuca

SEQ ID NO: 472690 - RNA, 19 nt, Artificial Sequence
  Synthetic
agacccuuagaccaucuca

SEQ ID NO: 472691 - RNA, 20 nt, Artificial Sequence
  Synthetic
gagacccuuagaccaucuca

SEQ ID NO: 472692 - RNA, 21 nt, Artificial Sequence
  Synthetic
agagacccuuagaccaucuca

SEQ ID NO: 472693 - RNA, 22 nt, Artificial Sequence
  Synthetic
uagagacccuuagaccaucuca

SEQ ID NO: 472694 - RNA, 23 nt, Artificial Sequence
  Synthetic
cuagagacccuuagaccaucuca

SEQ ID NO: 472695 - RNA, 24 nt, Artificial Sequence
  Synthetic
gcuagagacccuuagaccaucuca

SEQ ID NO: 472696 - RNA, 18 nt, Artificial Sequence
  Synthetic
guacuuugucccaucuca

SEQ ID NO: 472697 - RNA, 19 nt, Artificial Sequence
  Synthetic
uguacuuugucccaucuca

SEQ ID NO: 472698 - RNA, 20 nt, Artificial Sequence
  Synthetic
cuguacuuugucccaucuca

SEQ ID NO: 472699 - RNA, 21 nt, Artificial Sequence
  Synthetic
gcuguacuuugucccaucuca

SEQ ID NO: 472700 - RNA, 22 nt, Artificial Sequence
  Synthetic
ugcuguacuuugucccaucuca

SEQ ID NO: 472701 - RNA, 23 nt, Artificial Sequence
  Synthetic
augcuguacuuugucccaucuca

SEQ ID NO: 472702 - RNA, 24 nt, Artificial Sequence
  Synthetic
uaugcuguacuuugucccaucuca

SEQ ID NO: 472703 - RNA, 18 nt, Artificial Sequence
  Synthetic
ucuacacuauccaucuca

SEQ ID NO: 472704 - RNA, 19 nt, Artificial Sequence
  Synthetic
aucuacacuauccaucuca

SEQ ID NO: 472705 - RNA, 20 nt, Artificial Sequence
  Synthetic
uaucuacacuauccaucuca

SEQ ID NO: 472706 - RNA, 21 nt, Artificial Sequence
  Synthetic
uuaucuacacuauccaucuca

SEQ ID NO: 472707 - RNA, 22 nt, Artificial Sequence
  Synthetic
uuuaucuacacuauccaucuca

SEQ ID NO: 472708 - RNA, 23 nt, Artificial Sequence
  Synthetic
uuuuaucuacacuauccaucuca

SEQ ID NO: 472709 - RNA, 24 nt, Artificial Sequence
  Synthetic
auuuuaucuacacuauccaucuca

SEQ ID NO: 472710 - RNA, 18 nt, Artificial Sequence
  Synthetic
augauaguguucaucuca

SEQ ID NO: 472711 - RNA, 19 nt, Artificial Sequence
  Synthetic
gaugauaguguucaucuca

SEQ ID NO: 472712 - RNA, 20 nt, Artificial Sequence
  Synthetic
agaugauaguguucaucuca

SEQ ID NO: 472713 - RNA, 21 nt, Artificial Sequence
  Synthetic
gagaugauaguguucaucuca

SEQ ID NO: 472714 - RNA, 22 nt, Artificial Sequence
  Synthetic
ugagaugauaguguucaucuca

SEQ ID NO: 472715 - RNA, 23 nt, Artificial Sequence
  Synthetic
gugagaugauaguguucaucuca

SEQ ID NO: 472716 - RNA, 24 nt, Artificial Sequence
  Synthetic
ggugagaugauaguguucaucuca

SEQ ID NO: 472717 - RNA, 18 nt, Artificial Sequence
  Synthetic
ucacagcacuggaucuca

SEQ ID NO: 472718 - RNA, 19 nt, Artificial Sequence
  Synthetic
uucacagcacuggaucuca

SEQ ID NO: 472719 - RNA, 20 nt, Artificial Sequence
  Synthetic
auucacagcacuggaucuca

SEQ ID NO: 472720 - RNA, 21 nt, Artificial Sequence
  Synthetic
cauucacagcacuggaucuca

SEQ ID NO: 472721 - RNA, 22 nt, Artificial Sequence
  Synthetic
gcauucacagcacuggaucuca

SEQ ID NO: 472722 - RNA, 23 nt, Artificial Sequence
  Synthetic
agcauucacagcacuggaucuca

SEQ ID NO: 472723 - RNA, 24 nt, Artificial Sequence
  Synthetic
uagcauucacagcacuggaucuca

SEQ ID NO: 472724 - RNA, 18 nt, Artificial Sequence
  Synthetic
agaagagggaugaucuca

SEQ ID NO: 472725 - RNA, 19 nt, Artificial Sequence
  Synthetic
cagaagagggaugaucuca

SEQ ID NO: 472726 - RNA, 20 nt, Artificial Sequence
  Synthetic
ccagaagagggaugaucuca

SEQ ID NO: 472727 - RNA, 21 nt, Artificial Sequence
  Synthetic
gccagaagagggaugaucuca

SEQ ID NO: 472728 - RNA, 22 nt, Artificial Sequence
  Synthetic
ggccagaagagggaugaucuca

SEQ ID NO: 472729 - RNA, 23 nt, Artificial Sequence
  Synthetic
aggccagaagagggaugaucuca

SEQ ID NO: 472730 - RNA, 24 nt, Artificial Sequence
  Synthetic
uaggccagaagagggaugaucuca

SEQ ID NO: 472731 - RNA, 18 nt, Artificial Sequence
  Synthetic
uggagagcacugaucuca

SEQ ID NO: 472732 - RNA, 19 nt, Artificial Sequence
  Synthetic
uuggagagcacugaucuca

SEQ ID NO: 472733 - RNA, 20 nt, Artificial Sequence
  Synthetic
auuggagagcacugaucuca

SEQ ID NO: 472734 - RNA, 21 nt, Artificial Sequence
  Synthetic
cauuggagagcacugaucuca

SEQ ID NO: 472735 - RNA, 22 nt, Artificial Sequence
  Synthetic
acauuggagagcacugaucuca

SEQ ID NO: 472736 - RNA, 23 nt, Artificial Sequence
  Synthetic
cacauuggagagcacugaucuca

SEQ ID NO: 472737 - RNA, 24 nt, Artificial Sequence
  Synthetic
ccacauuggagagcacugaucuca

SEQ ID NO: 472738 - RNA, 18 nt, Artificial Sequence
  Synthetic
uuuauugcauauaucuca

SEQ ID NO: 472739 - RNA, 19 nt, Artificial Sequence
  Synthetic
uuuuauugcauauaucuca

SEQ ID NO: 472740 - RNA, 20 nt, Artificial Sequence
  Synthetic
uuuuuauugcauauaucuca

SEQ ID NO: 472741 - RNA, 21 nt, Artificial Sequence
  Synthetic
guuuuuauugcauauaucuca

SEQ ID NO: 472742 - RNA, 22 nt, Artificial Sequence
  Synthetic
uguuuuuauugcauauaucuca

SEQ ID NO: 472743 - RNA, 23 nt, Artificial Sequence
  Synthetic
guguuuuuauugcauauaucuca

SEQ ID NO: 472744 - RNA, 24 nt, Artificial Sequence
  Synthetic
aguguuuuuauugcauauaucuca

SEQ ID NO: 472745 - RNA, 18 nt, Artificial Sequence
  Synthetic
ccuuacacauguaucuca

SEQ ID NO: 472746 - RNA, 19 nt, Artificial Sequence
  Synthetic
accuuacacauguaucuca

SEQ ID NO: 472747 - RNA, 20 nt, Artificial Sequence
  Synthetic
aaccuuacacauguaucuca

SEQ ID NO: 472748 - RNA, 21 nt, Artificial Sequence
  Synthetic
caaccuuacacauguaucuca

SEQ ID NO: 472749 - RNA, 22 nt, Artificial Sequence
  Synthetic
acaaccuuacacauguaucuca

SEQ ID NO: 472750 - RNA, 23 nt, Artificial Sequence
  Synthetic
uacaaccuuacacauguaucuca

SEQ ID NO: 472751 - RNA, 24 nt, Artificial Sequence
  Synthetic
uuacaaccuuacacauguaucuca

SEQ ID NO: 472752 - RNA, 18 nt, Artificial Sequence
  Synthetic
uauuugagacaacucuca

SEQ ID NO: 472753 - RNA, 19 nt, Artificial Sequence
  Synthetic
cuauuugagacaacucuca

SEQ ID NO: 472754 - RNA, 20 nt, Artificial Sequence
  Synthetic
ucuauuugagacaacucuca

SEQ ID NO: 472755 - RNA, 21 nt, Artificial Sequence
  Synthetic
aucuauuugagacaacucuca

SEQ ID NO: 472756 - RNA, 22 nt, Artificial Sequence
  Synthetic
uaucuauuugagacaacucuca

SEQ ID NO: 472757 - RNA, 23 nt, Artificial Sequence
  Synthetic
guaucuauuugagacaacucuca

SEQ ID NO: 472758 - RNA, 24 nt, Artificial Sequence
  Synthetic
uguaucuauuugagacaacucuca

SEQ ID NO: 472759 - RNA, 18 nt, Artificial Sequence
  Synthetic
auaguuaaugcccucuca

SEQ ID NO: 472760 - RNA, 19 nt, Artificial Sequence
  Synthetic
gauaguuaaugcccucuca

SEQ ID NO: 472761 - RNA, 20 nt, Artificial Sequence
  Synthetic
ggauaguuaaugcccucuca

SEQ ID NO: 472762 - RNA, 21 nt, Artificial Sequence
  Synthetic
uggauaguuaaugcccucuca

SEQ ID NO: 472763 - RNA, 22 nt, Artificial Sequence
  Synthetic
cuggauaguuaaugcccucuca

SEQ ID NO: 472764 - RNA, 23 nt, Artificial Sequence
  Synthetic
ucuggauaguuaaugcccucuca

SEQ ID NO: 472765 - RNA, 24 nt, Artificial Sequence
  Synthetic
uucuggauaguuaaugcccucuca

SEQ ID NO: 472766 - RNA, 18 nt, Artificial Sequence
  Synthetic
cgaugaaaguggcucuca

SEQ ID NO: 472767 - RNA, 19 nt, Artificial Sequence
  Synthetic
ccgaugaaaguggcucuca

SEQ ID NO: 472768 - RNA, 20 nt, Artificial Sequence
  Synthetic
gccgaugaaaguggcucuca

SEQ ID NO: 472769 - RNA, 21 nt, Artificial Sequence
  Synthetic
ugccgaugaaaguggcucuca

SEQ ID NO: 472770 - RNA, 22 nt, Artificial Sequence
  Synthetic
cugccgaugaaaguggcucuca

SEQ ID NO: 472771 - RNA, 23 nt, Artificial Sequence
  Synthetic
acugccgaugaaaguggcucuca

SEQ ID NO: 472772 - RNA, 24 nt, Artificial Sequence
  Synthetic
uacugccgaugaaaguggcucuca

SEQ ID NO: 472773 - RNA, 18 nt, Artificial Sequence
  Synthetic
agguagucucugcucuca

SEQ ID NO: 472774 - RNA, 19 nt, Artificial Sequence
  Synthetic
uagguagucucugcucuca

SEQ ID NO: 472775 - RNA, 20 nt, Artificial Sequence
  Synthetic
auagguagucucugcucuca

SEQ ID NO: 472776 - RNA, 21 nt, Artificial Sequence
  Synthetic
aauagguagucucugcucuca

SEQ ID NO: 472777 - RNA, 22 nt, Artificial Sequence
  Synthetic
caauagguagucucugcucuca

SEQ ID NO: 472778 - RNA, 23 nt, Artificial Sequence
  Synthetic
ucaauagguagucucugcucuca

SEQ ID NO: 472779 - RNA, 24 nt, Artificial Sequence
  Synthetic
aucaauagguagucucugcucuca

SEQ ID NO: 472780 - RNA, 18 nt, Artificial Sequence
  Synthetic
gauuaaucaucucucuca

SEQ ID NO: 472781 - RNA, 19 nt, Artificial Sequence
  Synthetic
ggauuaaucaucucucuca

SEQ ID NO: 472782 - RNA, 20 nt, Artificial Sequence
  Synthetic
uggauuaaucaucucucuca

SEQ ID NO: 472783 - RNA, 21 nt, Artificial Sequence
  Synthetic
cuggauuaaucaucucucuca

SEQ ID NO: 472784 - RNA, 22 nt, Artificial Sequence
  Synthetic
ccuggauuaaucaucucucuca

SEQ ID NO: 472785 - RNA, 23 nt, Artificial Sequence
  Synthetic
uccuggauuaaucaucucucuca

SEQ ID NO: 472786 - RNA, 24 nt, Artificial Sequence
  Synthetic
guccuggauuaaucaucucucuca

SEQ ID NO: 472787 - RNA, 18 nt, Artificial Sequence
  Synthetic
gcucuuuugagucucuca

SEQ ID NO: 472788 - RNA, 19 nt, Artificial Sequence
  Synthetic
agcucuuuugagucucuca

SEQ ID NO: 472789 - RNA, 20 nt, Artificial Sequence
  Synthetic
aagcucuuuugagucucuca

SEQ ID NO: 472790 - RNA, 21 nt, Artificial Sequence
  Synthetic
gaagcucuuuugagucucuca

SEQ ID NO: 472791 - RNA, 22 nt, Artificial Sequence
  Synthetic
agaagcucuuuugagucucuca

SEQ ID NO: 472792 - RNA, 23 nt, Artificial Sequence
  Synthetic
uagaagcucuuuugagucucuca

SEQ ID NO: 472793 - RNA, 24 nt, Artificial Sequence
  Synthetic
uuagaagcucuuuugagucucuca

SEQ ID NO: 472794 - RNA, 18 nt, Artificial Sequence
  Synthetic
aaaaaaaaaauucucuca

SEQ ID NO: 472795 - RNA, 19 nt, Artificial Sequence
  Synthetic
aaaaaaaaaaauucucuca

SEQ ID NO: 472796 - RNA, 20 nt, Artificial Sequence
  Synthetic
aaaaaaaaaaaauucucuca

SEQ ID NO: 472797 - RNA, 21 nt, Artificial Sequence
  Synthetic
aaaaaaaaaaaaauucucuca

SEQ ID NO: 472798 - RNA, 22 nt, Artificial Sequence
  Synthetic
aaaaaaaaaaaaaauucucuca

SEQ ID NO: 472799 - RNA, 23 nt, Artificial Sequence
  Synthetic
aaaaaaaaaaaaaaauucucuca

SEQ ID NO: 472800 - RNA, 24 nt, Artificial Sequence
  Synthetic
caaaaaaaaaaaaaaauucucuca

SEQ ID NO: 472801 - RNA, 18 nt, Artificial Sequence
  Synthetic
ucuccuuuccuucucuca

SEQ ID NO: 472802 - RNA, 19 nt, Artificial Sequence
  Synthetic
gucuccuuuccuucucuca

SEQ ID NO: 472803 - RNA, 20 nt, Artificial Sequence
  Synthetic
ugucuccuuuccuucucuca

SEQ ID NO: 472804 - RNA, 21 nt, Artificial Sequence
  Synthetic
augucuccuuuccuucucuca

SEQ ID NO: 472805 - RNA, 22 nt, Artificial Sequence
  Synthetic
aaugucuccuuuccuucucuca

SEQ ID NO: 472806 - RNA, 23 nt, Artificial Sequence
  Synthetic
aaaugucuccuuuccuucucuca

SEQ ID NO: 472807 - RNA, 24 nt, Artificial Sequence
  Synthetic
caaaugucuccuuuccuucucuca

SEQ ID NO: 472808 - RNA, 18 nt, Artificial Sequence
  Synthetic
uaaauuaccccagucuca

SEQ ID NO: 472809 - RNA, 19 nt, Artificial Sequence
  Synthetic
auaaauuaccccagucuca

SEQ ID NO: 472810 - RNA, 20 nt, Artificial Sequence
  Synthetic
aauaaauuaccccagucuca

SEQ ID NO: 472811 - RNA, 21 nt, Artificial Sequence
  Synthetic
aaauaaauuaccccagucuca

SEQ ID NO: 472812 - RNA, 22 nt, Artificial Sequence
  Synthetic
uaaauaaauuaccccagucuca

SEQ ID NO: 472813 - RNA, 23 nt, Artificial Sequence
  Synthetic
uuaaauaaauuaccccagucuca

SEQ ID NO: 472814 - RNA, 24 nt, Artificial Sequence
  Synthetic
uuuaaauaaauuaccccagucuca

SEQ ID NO: 472815 - RNA, 18 nt, Artificial Sequence
  Synthetic
uugcagauagcagucuca

SEQ ID NO: 472816 - RNA, 19 nt, Artificial Sequence
  Synthetic
auugcagauagcagucuca

SEQ ID NO: 472817 - RNA, 20 nt, Artificial Sequence
  Synthetic
uauugcagauagcagucuca

SEQ ID NO: 472818 - RNA, 21 nt, Artificial Sequence
  Synthetic
auauugcagauagcagucuca

SEQ ID NO: 472819 - RNA, 22 nt, Artificial Sequence
  Synthetic
aauauugcagauagcagucuca

SEQ ID NO: 472820 - RNA, 23 nt, Artificial Sequence
  Synthetic
uaauauugcagauagcagucuca

SEQ ID NO: 472821 - RNA, 24 nt, Artificial Sequence
  Synthetic
auaauauugcagauagcagucuca

SEQ ID NO: 472822 - RNA, 18 nt, Artificial Sequence
  Synthetic
uccuucucucuagucuca

SEQ ID NO: 472823 - RNA, 19 nt, Artificial Sequence
  Synthetic
auccuucucucuagucuca

SEQ ID NO: 472824 - RNA, 20 nt, Artificial Sequence
  Synthetic
cauccuucucucuagucuca

SEQ ID NO: 472825 - RNA, 21 nt, Artificial Sequence
  Synthetic
gcauccuucucucuagucuca

SEQ ID NO: 472826 - RNA, 22 nt, Artificial Sequence
  Synthetic
ugcauccuucucucuagucuca

SEQ ID NO: 472827 - RNA, 23 nt, Artificial Sequence
  Synthetic
uugcauccuucucucuagucuca

SEQ ID NO: 472828 - RNA, 24 nt, Artificial Sequence
  Synthetic
cuugcauccuucucucuagucuca

SEQ ID NO: 472829 - RNA, 18 nt, Artificial Sequence
  Synthetic
agacgcuagcgggucuca

SEQ ID NO: 472830 - RNA, 19 nt, Artificial Sequence
  Synthetic
aagacgcuagcgggucuca

SEQ ID NO: 472831 - RNA, 20 nt, Artificial Sequence
  Synthetic
gaagacgcuagcgggucuca

SEQ ID NO: 472832 - RNA, 21 nt, Artificial Sequence
  Synthetic
ggaagacgcuagcgggucuca

SEQ ID NO: 472833 - RNA, 22 nt, Artificial Sequence
  Synthetic
gggaagacgcuagcgggucuca

SEQ ID NO: 472834 - RNA, 23 nt, Artificial Sequence
  Synthetic
agggaagacgcuagcgggucuca

SEQ ID NO: 472835 - RNA, 24 nt, Artificial Sequence
  Synthetic
cagggaagacgcuagcgggucuca

SEQ ID NO: 472836 - RNA, 18 nt, Artificial Sequence
  Synthetic
agcacuaaaugggucuca

SEQ ID NO: 472837 - RNA, 19 nt, Artificial Sequence
  Synthetic
aagcacuaaaugggucuca

SEQ ID NO: 472838 - RNA, 20 nt, Artificial Sequence
  Synthetic
aaagcacuaaaugggucuca

SEQ ID NO: 472839 - RNA, 21 nt, Artificial Sequence
  Synthetic
aaaagcacuaaaugggucuca

SEQ ID NO: 472840 - RNA, 22 nt, Artificial Sequence
  Synthetic
gaaaagcacuaaaugggucuca

SEQ ID NO: 472841 - RNA, 23 nt, Artificial Sequence
  Synthetic
cgaaaagcacuaaaugggucuca

SEQ ID NO: 472842 - RNA, 24 nt, Artificial Sequence
  Synthetic
ccgaaaagcacuaaaugggucuca

SEQ ID NO: 472843 - RNA, 18 nt, Artificial Sequence
  Synthetic
gccacaaaaguggucuca

SEQ ID NO: 472844 - RNA, 19 nt, Artificial Sequence
  Synthetic
ugccacaaaaguggucuca

SEQ ID NO: 472845 - RNA, 20 nt, Artificial Sequence
  Synthetic
augccacaaaaguggucuca

SEQ ID NO: 472846 - RNA, 21 nt, Artificial Sequence
  Synthetic
uaugccacaaaaguggucuca

SEQ ID NO: 472847 - RNA, 22 nt, Artificial Sequence
  Synthetic
guaugccacaaaaguggucuca

SEQ ID NO: 472848 - RNA, 23 nt, Artificial Sequence
  Synthetic
aguaugccacaaaaguggucuca

SEQ ID NO: 472849 - RNA, 24 nt, Artificial Sequence
  Synthetic
aaguaugccacaaaaguggucuca

SEQ ID NO: 472850 - RNA, 18 nt, Artificial Sequence
  Synthetic
cagacugagguggucuca

SEQ ID NO: 472851 - RNA, 19 nt, Artificial Sequence
  Synthetic
ccagacugagguggucuca

SEQ ID NO: 472852 - RNA, 20 nt, Artificial Sequence
  Synthetic
uccagacugagguggucuca

SEQ ID NO: 472853 - RNA, 21 nt, Artificial Sequence
  Synthetic
guccagacugagguggucuca

SEQ ID NO: 472854 - RNA, 22 nt, Artificial Sequence
  Synthetic
aguccagacugagguggucuca

SEQ ID NO: 472855 - RNA, 23 nt, Artificial Sequence
  Synthetic
aaguccagacugagguggucuca

SEQ ID NO: 472856 - RNA, 24 nt, Artificial Sequence
  Synthetic
aaaguccagacugagguggucuca

SEQ ID NO: 472857 - RNA, 18 nt, Artificial Sequence
  Synthetic
auuauaaaaugugucuca

SEQ ID NO: 472858 - RNA, 19 nt, Artificial Sequence
  Synthetic
aauuauaaaaugugucuca

SEQ ID NO: 472859 - RNA, 20 nt, Artificial Sequence
  Synthetic
uaauuauaaaaugugucuca

SEQ ID NO: 472860 - RNA, 21 nt, Artificial Sequence
  Synthetic
cuaauuauaaaaugugucuca

SEQ ID NO: 472861 - RNA, 22 nt, Artificial Sequence
  Synthetic
ucuaauuauaaaaugugucuca

SEQ ID NO: 472862 - RNA, 23 nt, Artificial Sequence
  Synthetic
uucuaauuauaaaaugugucuca

SEQ ID NO: 472863 - RNA, 24 nt, Artificial Sequence
  Synthetic
uuucuaauuauaaaaugugucuca

SEQ ID NO: 472864 - RNA, 18 nt, Artificial Sequence
  Synthetic
uuuaaugacugugucuca

SEQ ID NO: 472865 - RNA, 19 nt, Artificial Sequence
  Synthetic
uuuuaaugacugugucuca

SEQ ID NO: 472866 - RNA, 20 nt, Artificial Sequence
  Synthetic
uuuuuaaugacugugucuca

SEQ ID NO: 472867 - RNA, 21 nt, Artificial Sequence
  Synthetic
auuuuuaaugacugugucuca

SEQ ID NO: 472868 - RNA, 22 nt, Artificial Sequence
  Synthetic
aauuuuuaaugacugugucuca

SEQ ID NO: 472869 - RNA, 23 nt, Artificial Sequence
  Synthetic
aaauuuuuaaugacugugucuca

SEQ ID NO: 472870 - RNA, 24 nt, Artificial Sequence
  Synthetic
uaaauuuuuaaugacugugucuca

SEQ ID NO: 472871 - RNA, 18 nt, Artificial Sequence
  Synthetic
uagaugcaaaaauucuca

SEQ ID NO: 472872 - RNA, 19 nt, Artificial Sequence
  Synthetic
uuagaugcaaaaauucuca

SEQ ID NO: 472873 - RNA, 20 nt, Artificial Sequence
  Synthetic
auuagaugcaaaaauucuca

SEQ ID NO: 472874 - RNA, 21 nt, Artificial Sequence
  Synthetic
aauuagaugcaaaaauucuca

SEQ ID NO: 472875 - RNA, 22 nt, Artificial Sequence
  Synthetic
aaauuagaugcaaaaauucuca

SEQ ID NO: 472876 - RNA, 23 nt, Artificial Sequence
  Synthetic
gaaauuagaugcaaaaauucuca

SEQ ID NO: 472877 - RNA, 24 nt, Artificial Sequence
  Synthetic
ugaaauuagaugcaaaaauucuca

SEQ ID NO: 472878 - RNA, 18 nt, Artificial Sequence
  Synthetic
gucaggguuucauucuca

SEQ ID NO: 472879 - RNA, 19 nt, Artificial Sequence
  Synthetic
agucaggguuucauucuca

SEQ ID NO: 472880 - RNA, 20 nt, Artificial Sequence
  Synthetic
gagucaggguuucauucuca

SEQ ID NO: 472881 - RNA, 21 nt, Artificial Sequence
  Synthetic
ggagucaggguuucauucuca

SEQ ID NO: 472882 - RNA, 22 nt, Artificial Sequence
  Synthetic
aggagucaggguuucauucuca

SEQ ID NO: 472883 - RNA, 23 nt, Artificial Sequence
  Synthetic
aaggagucaggguuucauucuca

SEQ ID NO: 472884 - RNA, 24 nt, Artificial Sequence
  Synthetic
uaaggagucaggguuucauucuca

SEQ ID NO: 472885 - RNA, 18 nt, Artificial Sequence
  Synthetic
ucaaaugucaccuucuca

SEQ ID NO: 472886 - RNA, 19 nt, Artificial Sequence
  Synthetic
cucaaaugucaccuucuca

SEQ ID NO: 472887 - RNA, 20 nt, Artificial Sequence
  Synthetic
gcucaaaugucaccuucuca

SEQ ID NO: 472888 - RNA, 21 nt, Artificial Sequence
  Synthetic
ugcucaaaugucaccuucuca

SEQ ID NO: 472889 - RNA, 22 nt, Artificial Sequence
  Synthetic
uugcucaaaugucaccuucuca

SEQ ID NO: 472890 - RNA, 23 nt, Artificial Sequence
  Synthetic
uuugcucaaaugucaccuucuca

SEQ ID NO: 472891 - RNA, 24 nt, Artificial Sequence
  Synthetic
cuuugcucaaaugucaccuucuca

SEQ ID NO: 472892 - RNA, 18 nt, Artificial Sequence
  Synthetic
uuuuauagaaucuucuca

SEQ ID NO: 472893 - RNA, 19 nt, Artificial Sequence
  Synthetic
guuuuauagaaucuucuca

SEQ ID NO: 472894 - RNA, 20 nt, Artificial Sequence
  Synthetic
aguuuuauagaaucuucuca

SEQ ID NO: 472895 - RNA, 21 nt, Artificial Sequence
  Synthetic
uaguuuuauagaaucuucuca

SEQ ID NO: 472896 - RNA, 22 nt, Artificial Sequence
  Synthetic
auaguuuuauagaaucuucuca

SEQ ID NO: 472897 - RNA, 23 nt, Artificial Sequence
  Synthetic
uauaguuuuauagaaucuucuca

SEQ ID NO: 472898 - RNA, 24 nt, Artificial Sequence
  Synthetic
uuauaguuuuauagaaucuucuca

SEQ ID NO: 472899 - RNA, 18 nt, Artificial Sequence
  Synthetic
aaauuuuuucucuucuca

SEQ ID NO: 472900 - RNA, 19 nt, Artificial Sequence
  Synthetic
uaaauuuuuucucuucuca

SEQ ID NO: 472901 - RNA, 20 nt, Artificial Sequence
  Synthetic
auaaauuuuuucucuucuca

SEQ ID NO: 472902 - RNA, 21 nt, Artificial Sequence
  Synthetic
uauaaauuuuuucucuucuca

SEQ ID NO: 472903 - RNA, 22 nt, Artificial Sequence
  Synthetic
uuauaaauuuuuucucuucuca

SEQ ID NO: 472904 - RNA, 23 nt, Artificial Sequence
  Synthetic
auuauaaauuuuuucucuucuca

SEQ ID NO: 472905 - RNA, 24 nt, Artificial Sequence
  Synthetic
uauuauaaauuuuuucucuucuca

SEQ ID NO: 472906 - RNA, 18 nt, Artificial Sequence
  Synthetic
uucucucuguaguucuca

SEQ ID NO: 472907 - RNA, 19 nt, Artificial Sequence
  Synthetic
cuucucucuguaguucuca

SEQ ID NO: 472908 - RNA, 20 nt, Artificial Sequence
  Synthetic
ucuucucucuguaguucuca

SEQ ID NO: 472909 - RNA, 21 nt, Artificial Sequence
  Synthetic
uucuucucucuguaguucuca

SEQ ID NO: 472910 - RNA, 22 nt, Artificial Sequence
  Synthetic
auucuucucucuguaguucuca

SEQ ID NO: 472911 - RNA, 23 nt, Artificial Sequence
  Synthetic
aauucuucucucuguaguucuca

SEQ ID NO: 472912 - RNA, 24 nt, Artificial Sequence
  Synthetic
uaauucuucucucuguaguucuca

SEQ ID NO: 472913 - RNA, 18 nt, Artificial Sequence
  Synthetic
gucuuuguuucguucuca

SEQ ID NO: 472914 - RNA, 19 nt, Artificial Sequence
  Synthetic
ugucuuuguuucguucuca

SEQ ID NO: 472915 - RNA, 20 nt, Artificial Sequence
  Synthetic
augucuuuguuucguucuca

SEQ ID NO: 472916 - RNA, 21 nt, Artificial Sequence
  Synthetic
uaugucuuuguuucguucuca

SEQ ID NO: 472917 - RNA, 22 nt, Artificial Sequence
  Synthetic
auaugucuuuguuucguucuca

SEQ ID NO: 472918 - RNA, 23 nt, Artificial Sequence
  Synthetic
cauaugucuuuguuucguucuca

SEQ ID NO: 472919 - RNA, 24 nt, Artificial Sequence
  Synthetic
ucauaugucuuuguuucguucuca

SEQ ID NO: 472920 - RNA, 18 nt, Artificial Sequence
  Synthetic
ucuaaacagagguucuca

SEQ ID NO: 472921 - RNA, 19 nt, Artificial Sequence
  Synthetic
cucuaaacagagguucuca

SEQ ID NO: 472922 - RNA, 20 nt, Artificial Sequence
  Synthetic
ucucuaaacagagguucuca

SEQ ID NO: 472923 - RNA, 21 nt, Artificial Sequence
  Synthetic
uucucuaaacagagguucuca

SEQ ID NO: 472924 - RNA, 22 nt, Artificial Sequence
  Synthetic
uuucucuaaacagagguucuca

SEQ ID NO: 472925 - RNA, 23 nt, Artificial Sequence
  Synthetic
cuuucucuaaacagagguucuca

SEQ ID NO: 472926 - RNA, 24 nt, Artificial Sequence
  Synthetic
acuuucucuaaacagagguucuca

SEQ ID NO: 472927 - RNA, 18 nt, Artificial Sequence
  Synthetic
uauagucagagguucuca

SEQ ID NO: 472928 - RNA, 19 nt, Artificial Sequence
  Synthetic
uuauagucagagguucuca

SEQ ID NO: 472929 - RNA, 20 nt, Artificial Sequence
  Synthetic
auuauagucagagguucuca

SEQ ID NO: 472930 - RNA, 21 nt, Artificial Sequence
  Synthetic
cauuauagucagagguucuca

SEQ ID NO: 472931 - RNA, 22 nt, Artificial Sequence
  Synthetic
gcauuauagucagagguucuca

SEQ ID NO: 472932 - RNA, 23 nt, Artificial Sequence
  Synthetic
agcauuauagucagagguucuca

SEQ ID NO: 472933 - RNA, 24 nt, Artificial Sequence
  Synthetic
gagcauuauagucagagguucuca

SEQ ID NO: 472934 - RNA, 18 nt, Artificial Sequence
  Synthetic
aaauaauuccuguucuca

SEQ ID NO: 472935 - RNA, 19 nt, Artificial Sequence
  Synthetic
aaaauaauuccuguucuca

SEQ ID NO: 472936 - RNA, 20 nt, Artificial Sequence
  Synthetic
gaaaauaauuccuguucuca

SEQ ID NO: 472937 - RNA, 21 nt, Artificial Sequence
  Synthetic
agaaaauaauuccuguucuca

SEQ ID NO: 472938 - RNA, 22 nt, Artificial Sequence
  Synthetic
gagaaaauaauuccuguucuca

SEQ ID NO: 472939 - RNA, 23 nt, Artificial Sequence
  Synthetic
ggagaaaauaauuccuguucuca

SEQ ID NO: 472940 - RNA, 24 nt, Artificial Sequence
  Synthetic
aggagaaaauaauuccuguucuca

SEQ ID NO: 472941 - RNA, 18 nt, Artificial Sequence
  Synthetic
uuuauguagaauuucuca

SEQ ID NO: 472942 - RNA, 19 nt, Artificial Sequence
  Synthetic
uuuuauguagaauuucuca

SEQ ID NO: 472943 - RNA, 20 nt, Artificial Sequence
  Synthetic
uuuuuauguagaauuucuca

SEQ ID NO: 472944 - RNA, 21 nt, Artificial Sequence
  Synthetic
auuuuuauguagaauuucuca

SEQ ID NO: 472945 - RNA, 22 nt, Artificial Sequence
  Synthetic
aauuuuuauguagaauuucuca

SEQ ID NO: 472946 - RNA, 23 nt, Artificial Sequence
  Synthetic
uaauuuuuauguagaauuucuca

SEQ ID NO: 472947 - RNA, 24 nt, Artificial Sequence
  Synthetic
cuaauuuuuauguagaauuucuca

SEQ ID NO: 472948 - RNA, 18 nt, Artificial Sequence
  Synthetic
caguuugaagauuucuca

SEQ ID NO: 472949 - RNA, 19 nt, Artificial Sequence
  Synthetic
acaguuugaagauuucuca

SEQ ID NO: 472950 - RNA, 20 nt, Artificial Sequence
  Synthetic
aacaguuugaagauuucuca

SEQ ID NO: 472951 - RNA, 21 nt, Artificial Sequence
  Synthetic
aaacaguuugaagauuucuca

SEQ ID NO: 472952 - RNA, 22 nt, Artificial Sequence
  Synthetic
gaaacaguuugaagauuucuca

SEQ ID NO: 472953 - RNA, 23 nt, Artificial Sequence
  Synthetic
ugaaacaguuugaagauuucuca

SEQ ID NO: 472954 - RNA, 24 nt, Artificial Sequence
  Synthetic
gugaaacaguuugaagauuucuca

SEQ ID NO: 472955 - RNA, 18 nt, Artificial Sequence
  Synthetic
uucguaaacaguuucuca

SEQ ID NO: 472956 - RNA, 19 nt, Artificial Sequence
  Synthetic
cuucguaaacaguuucuca

SEQ ID NO: 472957 - RNA, 20 nt, Artificial Sequence
  Synthetic
gcuucguaaacaguuucuca

SEQ ID NO: 472958 - RNA, 21 nt, Artificial Sequence
  Synthetic
ugcuucguaaacaguuucuca

SEQ ID NO: 472959 - RNA, 22 nt, Artificial Sequence
  Synthetic
cugcuucguaaacaguuucuca

SEQ ID NO: 472960 - RNA, 23 nt, Artificial Sequence
  Synthetic
acugcuucguaaacaguuucuca

SEQ ID NO: 472961 - RNA, 24 nt, Artificial Sequence
  Synthetic
gacugcuucguaaacaguuucuca

SEQ ID NO: 472962 - RNA, 18 nt, Artificial Sequence
  Synthetic
uauauuccagguuucuca

SEQ ID NO: 472963 - RNA, 19 nt, Artificial Sequence
  Synthetic
auauauuccagguuucuca

SEQ ID NO: 472964 - RNA, 20 nt, Artificial Sequence
  Synthetic
cauauauuccagguuucuca

SEQ ID NO: 472965 - RNA, 21 nt, Artificial Sequence
  Synthetic
gcauauauuccagguuucuca

SEQ ID NO: 472966 - RNA, 22 nt, Artificial Sequence
  Synthetic
ugcauauauuccagguuucuca

SEQ ID NO: 472967 - RNA, 23 nt, Artificial Sequence
  Synthetic
gugcauauauuccagguuucuca

SEQ ID NO: 472968 - RNA, 24 nt, Artificial Sequence
  Synthetic
ugugcauauauuccagguuucuca

SEQ ID NO: 472969 - RNA, 18 nt, Artificial Sequence
  Synthetic
gccaguaaaauuuucuca

SEQ ID NO: 472970 - RNA, 19 nt, Artificial Sequence
  Synthetic
ugccaguaaaauuuucuca

SEQ ID NO: 472971 - RNA, 20 nt, Artificial Sequence
  Synthetic
augccaguaaaauuuucuca

SEQ ID NO: 472972 - RNA, 21 nt, Artificial Sequence
  Synthetic
gaugccaguaaaauuuucuca

SEQ ID NO: 472973 - RNA, 22 nt, Artificial Sequence
  Synthetic
agaugccaguaaaauuuucuca

SEQ ID NO: 472974 - RNA, 23 nt, Artificial Sequence
  Synthetic
uagaugccaguaaaauuuucuca

SEQ ID NO: 472975 - RNA, 24 nt, Artificial Sequence
  Synthetic
cuagaugccaguaaaauuuucuca

SEQ ID NO: 472976 - RNA, 18 nt, Artificial Sequence
  Synthetic
acauuuauaauuuucuca

SEQ ID NO: 472977 - RNA, 19 nt, Artificial Sequence
  Synthetic
aacauuuauaauuuucuca

SEQ ID NO: 472978 - RNA, 20 nt, Artificial Sequence
  Synthetic
caacauuuauaauuuucuca

SEQ ID NO: 472979 - RNA, 21 nt, Artificial Sequence
  Synthetic
ucaacauuuauaauuuucuca

SEQ ID NO: 472980 - RNA, 22 nt, Artificial Sequence
  Synthetic
cucaacauuuauaauuuucuca

SEQ ID NO: 472981 - RNA, 23 nt, Artificial Sequence
  Synthetic
ccucaacauuuauaauuuucuca

SEQ ID NO: 472982 - RNA, 24 nt, Artificial Sequence
  Synthetic
uccucaacauuuauaauuuucuca

SEQ ID NO: 472983 - RNA, 18 nt, Artificial Sequence
  Synthetic
cccccuucaaaaaaguca

SEQ ID NO: 472984 - RNA, 19 nt, Artificial Sequence
  Synthetic
ucccccuucaaaaaaguca

SEQ ID NO: 472985 - RNA, 20 nt, Artificial Sequence
  Synthetic
aucccccuucaaaaaaguca

SEQ ID NO: 472986 - RNA, 21 nt, Artificial Sequence
  Synthetic
uaucccccuucaaaaaaguca

SEQ ID NO: 472987 - RNA, 22 nt, Artificial Sequence
  Synthetic
cuaucccccuucaaaaaaguca

SEQ ID NO: 472988 - RNA, 23 nt, Artificial Sequence
  Synthetic
acuaucccccuucaaaaaaguca

SEQ ID NO: 472989 - RNA, 24 nt, Artificial Sequence
  Synthetic
aacuaucccccuucaaaaaaguca

SEQ ID NO: 472990 - RNA, 18 nt, Artificial Sequence
  Synthetic
gagaaagcagaaaaguca

SEQ ID NO: 472991 - RNA, 19 nt, Artificial Sequence
  Synthetic
ugagaaagcagaaaaguca

SEQ ID NO: 472992 - RNA, 20 nt, Artificial Sequence
  Synthetic
uugagaaagcagaaaaguca

SEQ ID NO: 472993 - RNA, 21 nt, Artificial Sequence
  Synthetic
cuugagaaagcagaaaaguca

SEQ ID NO: 472994 - RNA, 22 nt, Artificial Sequence
  Synthetic
ccuugagaaagcagaaaaguca

SEQ ID NO: 472995 - RNA, 23 nt, Artificial Sequence
  Synthetic
uccuugagaaagcagaaaaguca

SEQ ID NO: 472996 - RNA, 24 nt, Artificial Sequence
  Synthetic
auccuugagaaagcagaaaaguca

SEQ ID NO: 472997 - RNA, 18 nt, Artificial Sequence
  Synthetic
agauuguacuaaaaguca

SEQ ID NO: 472998 - RNA, 19 nt, Artificial Sequence
  Synthetic
gagauuguacuaaaaguca

SEQ ID NO: 472999 - RNA, 20 nt, Artificial Sequence
  Synthetic
ugagauuguacuaaaaguca

SEQ ID NO: 473000 - RNA, 21 nt, Artificial Sequence
  Synthetic
cugagauuguacuaaaaguca

SEQ ID NO: 473001 - RNA, 22 nt, Artificial Sequence
  Synthetic
ucugagauuguacuaaaaguca

SEQ ID NO: 473002 - RNA, 23 nt, Artificial Sequence
  Synthetic
aucugagauuguacuaaaaguca

SEQ ID NO: 473003 - RNA, 24 nt, Artificial Sequence
  Synthetic
uaucugagauuguacuaaaaguca

SEQ ID NO: 473004 - RNA, 18 nt, Artificial Sequence
  Synthetic
agggaacaguaaaaguca

SEQ ID NO: 473005 - RNA, 19 nt, Artificial Sequence
  Synthetic
aagggaacaguaaaaguca

SEQ ID NO: 473006 - RNA, 20 nt, Artificial Sequence
  Synthetic
aaagggaacaguaaaaguca

SEQ ID NO: 473007 - RNA, 21 nt, Artificial Sequence
  Synthetic
gaaagggaacaguaaaaguca

SEQ ID NO: 473008 - RNA, 22 nt, Artificial Sequence
  Synthetic
agaaagggaacaguaaaaguca

SEQ ID NO: 473009 - RNA, 23 nt, Artificial Sequence
  Synthetic
aagaaagggaacaguaaaaguca

SEQ ID NO: 473010 - RNA, 24 nt, Artificial Sequence
  Synthetic
uaagaaagggaacaguaaaaguca

SEQ ID NO: 473011 - RNA, 18 nt, Artificial Sequence
  Synthetic
auacagcacucaaaguca

SEQ ID NO: 473012 - RNA, 19 nt, Artificial Sequence
  Synthetic
cauacagcacucaaaguca

SEQ ID NO: 473013 - RNA, 20 nt, Artificial Sequence
  Synthetic
ucauacagcacucaaaguca

SEQ ID NO: 473014 - RNA, 21 nt, Artificial Sequence
  Synthetic
aucauacagcacucaaaguca

SEQ ID NO: 473015 - RNA, 22 nt, Artificial Sequence
  Synthetic
gaucauacagcacucaaaguca

SEQ ID NO: 473016 - RNA, 23 nt, Artificial Sequence
  Synthetic
ugaucauacagcacucaaaguca

SEQ ID NO: 473017 - RNA, 24 nt, Artificial Sequence
  Synthetic
cugaucauacagcacucaaaguca

SEQ ID NO: 473018 - RNA, 18 nt, Artificial Sequence
  Synthetic
ucaggacaaagaaaguca

SEQ ID NO: 473019 - RNA, 19 nt, Artificial Sequence
  Synthetic
aucaggacaaagaaaguca

SEQ ID NO: 473020 - RNA, 20 nt, Artificial Sequence
  Synthetic
aaucaggacaaagaaaguca

SEQ ID NO: 473021 - RNA, 21 nt, Artificial Sequence
  Synthetic
aaaucaggacaaagaaaguca

SEQ ID NO: 473022 - RNA, 22 nt, Artificial Sequence
  Synthetic
aaaaucaggacaaagaaaguca

SEQ ID NO: 473023 - RNA, 23 nt, Artificial Sequence
  Synthetic
aaaaaucaggacaaagaaaguca

SEQ ID NO: 473024 - RNA, 24 nt, Artificial Sequence
  Synthetic
aaaaaaucaggacaaagaaaguca

SEQ ID NO: 473025 - RNA, 18 nt, Artificial Sequence
  Synthetic
aaggaaagaagaaaguca

SEQ ID NO: 473026 - RNA, 19 nt, Artificial Sequence
  Synthetic
gaaggaaagaagaaaguca

SEQ ID NO: 473027 - RNA, 20 nt, Artificial Sequence
  Synthetic
agaaggaaagaagaaaguca

SEQ ID NO: 473028 - RNA, 21 nt, Artificial Sequence
  Synthetic
aagaaggaaagaagaaaguca

SEQ ID NO: 473029 - RNA, 22 nt, Artificial Sequence
  Synthetic
gaagaaggaaagaagaaaguca

SEQ ID NO: 473030 - RNA, 23 nt, Artificial Sequence
  Synthetic
ggaagaaggaaagaagaaaguca

SEQ ID NO: 473031 - RNA, 24 nt, Artificial Sequence
  Synthetic
aggaagaaggaaagaagaaaguca

SEQ ID NO: 473032 - RNA, 18 nt, Artificial Sequence
  Synthetic
uaaccccaucacaaguca

SEQ ID NO: 473033 - RNA, 19 nt, Artificial Sequence
  Synthetic
auaaccccaucacaaguca

SEQ ID NO: 473034 - RNA, 20 nt, Artificial Sequence
  Synthetic
uauaaccccaucacaaguca

SEQ ID NO: 473035 - RNA, 21 nt, Artificial Sequence
  Synthetic
auauaaccccaucacaaguca

SEQ ID NO: 473036 - RNA, 22 nt, Artificial Sequence
  Synthetic
gauauaaccccaucacaaguca

SEQ ID NO: 473037 - RNA, 23 nt, Artificial Sequence
  Synthetic
ggauauaaccccaucacaaguca

SEQ ID NO: 473038 - RNA, 24 nt, Artificial Sequence
  Synthetic
uggauauaaccccaucacaaguca

SEQ ID NO: 473039 - RNA, 18 nt, Artificial Sequence
  Synthetic
uaggucacuuacaaguca

SEQ ID NO: 473040 - RNA, 19 nt, Artificial Sequence
  Synthetic
uuaggucacuuacaaguca

SEQ ID NO: 473041 - RNA, 20 nt, Artificial Sequence
  Synthetic
cuuaggucacuuacaaguca

SEQ ID NO: 473042 - RNA, 21 nt, Artificial Sequence
  Synthetic
ucuuaggucacuuacaaguca

SEQ ID NO: 473043 - RNA, 22 nt, Artificial Sequence
  Synthetic
aucuuaggucacuuacaaguca

SEQ ID NO: 473044 - RNA, 23 nt, Artificial Sequence
  Synthetic
caucuuaggucacuuacaaguca

SEQ ID NO: 473045 - RNA, 24 nt, Artificial Sequence
  Synthetic
ucaucuuaggucacuuacaaguca

SEQ ID NO: 473046 - RNA, 18 nt, Artificial Sequence
  Synthetic
aaauagaggcccaaguca

SEQ ID NO: 473047 - RNA, 19 nt, Artificial Sequence
  Synthetic
gaaauagaggcccaaguca

SEQ ID NO: 473048 - RNA, 20 nt, Artificial Sequence
  Synthetic
agaaauagaggcccaaguca

SEQ ID NO: 473049 - RNA, 21 nt, Artificial Sequence
  Synthetic
cagaaauagaggcccaaguca

SEQ ID NO: 473050 - RNA, 22 nt, Artificial Sequence
  Synthetic
ccagaaauagaggcccaaguca

SEQ ID NO: 473051 - RNA, 23 nt, Artificial Sequence
  Synthetic
uccagaaauagaggcccaaguca

SEQ ID NO: 473052 - RNA, 24 nt, Artificial Sequence
  Synthetic
auccagaaauagaggcccaaguca

SEQ ID NO: 473053 - RNA, 18 nt, Artificial Sequence
  Synthetic
cugcuucaaagcaaguca

SEQ ID NO: 473054 - RNA, 19 nt, Artificial Sequence
  Synthetic
gcugcuucaaagcaaguca

SEQ ID NO: 473055 - RNA, 20 nt, Artificial Sequence
  Synthetic
agcugcuucaaagcaaguca

SEQ ID NO: 473056 - RNA, 21 nt, Artificial Sequence
  Synthetic
cagcugcuucaaagcaaguca

SEQ ID NO: 473057 - RNA, 22 nt, Artificial Sequence
  Synthetic
ucagcugcuucaaagcaaguca

SEQ ID NO: 473058 - RNA, 23 nt, Artificial Sequence
  Synthetic
gucagcugcuucaaagcaaguca

SEQ ID NO: 473059 - RNA, 24 nt, Artificial Sequence
  Synthetic
agucagcugcuucaaagcaaguca

SEQ ID NO: 473060 - RNA, 18 nt, Artificial Sequence
  Synthetic
ggagaaauacucaaguca

SEQ ID NO: 473061 - RNA, 19 nt, Artificial Sequence
  Synthetic
uggagaaauacucaaguca

SEQ ID NO: 473062 - RNA, 20 nt, Artificial Sequence
  Synthetic
cuggagaaauacucaaguca

SEQ ID NO: 473063 - RNA, 21 nt, Artificial Sequence
  Synthetic
ucuggagaaauacucaaguca

SEQ ID NO: 473064 - RNA, 22 nt, Artificial Sequence
  Synthetic
aucuggagaaauacucaaguca

SEQ ID NO: 473065 - RNA, 23 nt, Artificial Sequence
  Synthetic
uaucuggagaaauacucaaguca

SEQ ID NO: 473066 - RNA, 24 nt, Artificial Sequence
  Synthetic
auaucuggagaaauacucaaguca

SEQ ID NO: 473067 - RNA, 18 nt, Artificial Sequence
  Synthetic
gauauuaaagucaaguca

SEQ ID NO: 473068 - RNA, 19 nt, Artificial Sequence
  Synthetic
agauauuaaagucaaguca

SEQ ID NO: 473069 - RNA, 20 nt, Artificial Sequence
  Synthetic
aagauauuaaagucaaguca

SEQ ID NO: 473070 - RNA, 21 nt, Artificial Sequence
  Synthetic
uaagauauuaaagucaaguca

SEQ ID NO: 473071 - RNA, 22 nt, Artificial Sequence
  Synthetic
uuaagauauuaaagucaaguca

SEQ ID NO: 473072 - RNA, 23 nt, Artificial Sequence
  Synthetic
guuaagauauuaaagucaaguca

SEQ ID NO: 473073 - RNA, 24 nt, Artificial Sequence
  Synthetic
uguuaagauauuaaagucaaguca

SEQ ID NO: 473074 - RNA, 18 nt, Artificial Sequence
  Synthetic
cuauuauucuucaaguca

SEQ ID NO: 473075 - RNA, 19 nt, Artificial Sequence
  Synthetic
gcuauuauucuucaaguca

SEQ ID NO: 473076 - RNA, 20 nt, Artificial Sequence
  Synthetic
agcuauuauucuucaaguca

SEQ ID NO: 473077 - RNA, 21 nt, Artificial Sequence
  Synthetic
aagcuauuauucuucaaguca

SEQ ID NO: 473078 - RNA, 22 nt, Artificial Sequence
  Synthetic
uaagcuauuauucuucaaguca

SEQ ID NO: 473079 - RNA, 23 nt, Artificial Sequence
  Synthetic
uuaagcuauuauucuucaaguca

SEQ ID NO: 473080 - RNA, 24 nt, Artificial Sequence
  Synthetic
auuaagcuauuauucuucaaguca

SEQ ID NO: 473081 - RNA, 18 nt, Artificial Sequence
  Synthetic
uagacauacuagaaguca

SEQ ID NO: 473082 - RNA, 19 nt, Artificial Sequence
  Synthetic
uuagacauacuagaaguca

SEQ ID NO: 473083 - RNA, 20 nt, Artificial Sequence
  Synthetic
auuagacauacuagaaguca

SEQ ID NO: 473084 - RNA, 21 nt, Artificial Sequence
  Synthetic
aauuagacauacuagaaguca

SEQ ID NO: 473085 - RNA, 22 nt, Artificial Sequence
  Synthetic
aaauuagacauacuagaaguca

SEQ ID NO: 473086 - RNA, 23 nt, Artificial Sequence
  Synthetic
uaaauuagacauacuagaaguca

SEQ ID NO: 473087 - RNA, 24 nt, Artificial Sequence
  Synthetic
uuaaauuagacauacuagaaguca

SEQ ID NO: 473088 - RNA, 18 nt, Artificial Sequence
  Synthetic
auuauaagaaggaaguca

SEQ ID NO: 473089 - RNA, 19 nt, Artificial Sequence
  Synthetic
cauuauaagaaggaaguca

SEQ ID NO: 473090 - RNA, 20 nt, Artificial Sequence
  Synthetic
ucauuauaagaaggaaguca

SEQ ID NO: 473091 - RNA, 21 nt, Artificial Sequence
  Synthetic
aucauuauaagaaggaaguca

SEQ ID NO: 473092 - RNA, 22 nt, Artificial Sequence
  Synthetic
gaucauuauaagaaggaaguca

SEQ ID NO: 473093 - RNA, 23 nt, Artificial Sequence
  Synthetic
agaucauuauaagaaggaaguca

SEQ ID NO: 473094 - RNA, 24 nt, Artificial Sequence
  Synthetic
uagaucauuauaagaaggaaguca

SEQ ID NO: 473095 - RNA, 18 nt, Artificial Sequence
  Synthetic
caugcucuccugaaguca

SEQ ID NO: 473096 - RNA, 19 nt, Artificial Sequence
  Synthetic
ucaugcucuccugaaguca

SEQ ID NO: 473097 - RNA, 20 nt, Artificial Sequence
  Synthetic
cucaugcucuccugaaguca

SEQ ID NO: 473098 - RNA, 21 nt, Artificial Sequence
  Synthetic
ucucaugcucuccugaaguca

SEQ ID NO: 473099 - RNA, 22 nt, Artificial Sequence
  Synthetic
uucucaugcucuccugaaguca

SEQ ID NO: 473100 - RNA, 23 nt, Artificial Sequence
  Synthetic
auucucaugcucuccugaaguca

SEQ ID NO: 473101 - RNA, 24 nt, Artificial Sequence
  Synthetic
cauucucaugcucuccugaaguca

SEQ ID NO: 473102 - RNA, 18 nt, Artificial Sequence
  Synthetic
gcuucguucuugaaguca

SEQ ID NO: 473103 - RNA, 19 nt, Artificial Sequence
  Synthetic
ggcuucguucuugaaguca

SEQ ID NO: 473104 - RNA, 20 nt, Artificial Sequence
  Synthetic
uggcuucguucuugaaguca

SEQ ID NO: 473105 - RNA, 21 nt, Artificial Sequence
  Synthetic
guggcuucguucuugaaguca

SEQ ID NO: 473106 - RNA, 22 nt, Artificial Sequence
  Synthetic
cguggcuucguucuugaaguca

SEQ ID NO: 473107 - RNA, 23 nt, Artificial Sequence
  Synthetic
ccguggcuucguucuugaaguca

SEQ ID NO: 473108 - RNA, 24 nt, Artificial Sequence
  Synthetic
uccguggcuucguucuugaaguca

SEQ ID NO: 473109 - RNA, 18 nt, Artificial Sequence
  Synthetic
uauagcagcucuaaguca

SEQ ID NO: 473110 - RNA, 19 nt, Artificial Sequence
  Synthetic
guauagcagcucuaaguca

SEQ ID NO: 473111 - RNA, 20 nt, Artificial Sequence
  Synthetic
aguauagcagcucuaaguca

SEQ ID NO: 473112 - RNA, 21 nt, Artificial Sequence
  Synthetic
aaguauagcagcucuaaguca

SEQ ID NO: 473113 - RNA, 22 nt, Artificial Sequence
  Synthetic
caaguauagcagcucuaaguca

SEQ ID NO: 473114 - RNA, 23 nt, Artificial Sequence
  Synthetic
ccaaguauagcagcucuaaguca

SEQ ID NO: 473115 - RNA, 24 nt, Artificial Sequence
  Synthetic
cccaaguauagcagcucuaaguca

SEQ ID NO: 473116 - RNA, 18 nt, Artificial Sequence
  Synthetic
aaauuggugaguaaguca

SEQ ID NO: 473117 - RNA, 19 nt, Artificial Sequence
  Synthetic
aaaauuggugaguaaguca

SEQ ID NO: 473118 - RNA, 20 nt, Artificial Sequence
  Synthetic
gaaaauuggugaguaaguca

SEQ ID NO: 473119 - RNA, 21 nt, Artificial Sequence
  Synthetic
agaaaauuggugaguaaguca

SEQ ID NO: 473120 - RNA, 22 nt, Artificial Sequence
  Synthetic
uagaaaauuggugaguaaguca

SEQ ID NO: 473121 - RNA, 23 nt, Artificial Sequence
  Synthetic
uuagaaaauuggugaguaaguca

SEQ ID NO: 473122 - RNA, 24 nt, Artificial Sequence
  Synthetic
auuagaaaauuggugaguaaguca

SEQ ID NO: 473123 - RNA, 18 nt, Artificial Sequence
  Synthetic
gauuguacauuuaaguca

SEQ ID NO: 473124 - RNA, 19 nt, Artificial Sequence
  Synthetic
agauuguacauuuaaguca

SEQ ID NO: 473125 - RNA, 20 nt, Artificial Sequence
  Synthetic
uagauuguacauuuaaguca

SEQ ID NO: 473126 - RNA, 21 nt, Artificial Sequence
  Synthetic
cuagauuguacauuuaaguca

SEQ ID NO: 473127 - RNA, 22 nt, Artificial Sequence
  Synthetic
ccuagauuguacauuuaaguca

SEQ ID NO: 473128 - RNA, 23 nt, Artificial Sequence
  Synthetic
cccuagauuguacauuuaaguca

SEQ ID NO: 473129 - RNA, 24 nt, Artificial Sequence
  Synthetic
acccuagauuguacauuuaaguca

SEQ ID NO: 473130 - RNA, 18 nt, Artificial Sequence
  Synthetic
aaaacaauaagacaguca

SEQ ID NO: 473131 - RNA, 19 nt, Artificial Sequence
  Synthetic
aaaaacaauaagacaguca

SEQ ID NO: 473132 - RNA, 20 nt, Artificial Sequence
  Synthetic
aaaaaacaauaagacaguca

SEQ ID NO: 473133 - RNA, 21 nt, Artificial Sequence
  Synthetic
uaaaaaacaauaagacaguca

SEQ ID NO: 473134 - RNA, 22 nt, Artificial Sequence
  Synthetic
uuaaaaaacaauaagacaguca

SEQ ID NO: 473135 - RNA, 23 nt, Artificial Sequence
  Synthetic
cuuaaaaaacaauaagacaguca

SEQ ID NO: 473136 - RNA, 24 nt, Artificial Sequence
  Synthetic
acuuaaaaaacaauaagacaguca

SEQ ID NO: 473137 - RNA, 18 nt, Artificial Sequence
  Synthetic
cuuucaacugcccaguca

SEQ ID NO: 473138 - RNA, 19 nt, Artificial Sequence
  Synthetic
acuuucaacugcccaguca

SEQ ID NO: 473139 - RNA, 20 nt, Artificial Sequence
  Synthetic
aacuuucaacugcccaguca

SEQ ID NO: 473140 - RNA, 21 nt, Artificial Sequence
  Synthetic
gaacuuucaacugcccaguca

SEQ ID NO: 473141 - RNA, 22 nt, Artificial Sequence
  Synthetic
agaacuuucaacugcccaguca

SEQ ID NO: 473142 - RNA, 23 nt, Artificial Sequence
  Synthetic
cagaacuuucaacugcccaguca

SEQ ID NO: 473143 - RNA, 24 nt, Artificial Sequence
  Synthetic
ccagaacuuucaacugcccaguca

SEQ ID NO: 473144 - RNA, 18 nt, Artificial Sequence
  Synthetic
aaugaaauaagccaguca

SEQ ID NO: 473145 - RNA, 19 nt, Artificial Sequence
  Synthetic
aaaugaaauaagccaguca

SEQ ID NO: 473146 - RNA, 20 nt, Artificial Sequence
  Synthetic
uaaaugaaauaagccaguca

SEQ ID NO: 473147 - RNA, 21 nt, Artificial Sequence
  Synthetic
uuaaaugaaauaagccaguca

SEQ ID NO: 473148 - RNA, 22 nt, Artificial Sequence
  Synthetic
auuaaaugaaauaagccaguca

SEQ ID NO: 473149 - RNA, 23 nt, Artificial Sequence
  Synthetic
cauuaaaugaaauaagccaguca

SEQ ID NO: 473150 - RNA, 24 nt, Artificial Sequence
  Synthetic
acauuaaaugaaauaagccaguca

SEQ ID NO: 473151 - RNA, 18 nt, Artificial Sequence
  Synthetic
uaccaaugcugccaguca

SEQ ID NO: 473152 - RNA, 19 nt, Artificial Sequence
  Synthetic
auaccaaugcugccaguca

SEQ ID NO: 473153 - RNA, 20 nt, Artificial Sequence
  Synthetic
gauaccaaugcugccaguca

SEQ ID NO: 473154 - RNA, 21 nt, Artificial Sequence
  Synthetic
ugauaccaaugcugccaguca

SEQ ID NO: 473155 - RNA, 22 nt, Artificial Sequence
  Synthetic
gugauaccaaugcugccaguca

SEQ ID NO: 473156 - RNA, 23 nt, Artificial Sequence
  Synthetic
ggugauaccaaugcugccaguca

SEQ ID NO: 473157 - RNA, 24 nt, Artificial Sequence
  Synthetic
aggugauaccaaugcugccaguca

SEQ ID NO: 473158 - RNA, 18 nt, Artificial Sequence
  Synthetic
auuucacuauugcaguca

SEQ ID NO: 473159 - RNA, 19 nt, Artificial Sequence
  Synthetic
uauuucacuauugcaguca

SEQ ID NO: 473160 - RNA, 20 nt, Artificial Sequence
  Synthetic
guauuucacuauugcaguca

SEQ ID NO: 473161 - RNA, 21 nt, Artificial Sequence
  Synthetic
gguauuucacuauugcaguca

SEQ ID NO: 473162 - RNA, 22 nt, Artificial Sequence
  Synthetic
ugguauuucacuauugcaguca

SEQ ID NO: 473163 - RNA, 23 nt, Artificial Sequence
  Synthetic
gugguauuucacuauugcaguca

SEQ ID NO: 473164 - RNA, 24 nt, Artificial Sequence
  Synthetic
ugugguauuucacuauugcaguca

SEQ ID NO: 473165 - RNA, 18 nt, Artificial Sequence
  Synthetic
augugagacacagaguca

SEQ ID NO: 473166 - RNA, 19 nt, Artificial Sequence
  Synthetic
gaugugagacacagaguca

SEQ ID NO: 473167 - RNA, 20 nt, Artificial Sequence
  Synthetic
ggaugugagacacagaguca

SEQ ID NO: 473168 - RNA, 21 nt, Artificial Sequence
  Synthetic
uggaugugagacacagaguca

SEQ ID NO: 473169 - RNA, 22 nt, Artificial Sequence
  Synthetic
cuggaugugagacacagaguca

SEQ ID NO: 473170 - RNA, 23 nt, Artificial Sequence
  Synthetic
ccuggaugugagacacagaguca

SEQ ID NO: 473171 - RNA, 24 nt, Artificial Sequence
  Synthetic
accuggaugugagacacagaguca

SEQ ID NO: 473172 - RNA, 18 nt, Artificial Sequence
  Synthetic
uaugaugugacagaguca

SEQ ID NO: 473173 - RNA, 19 nt, Artificial Sequence
  Synthetic
uuaugaugugacagaguca

SEQ ID NO: 473174 - RNA, 20 nt, Artificial Sequence
  Synthetic
uuuaugaugugacagaguca

SEQ ID NO: 473175 - RNA, 21 nt, Artificial Sequence
  Synthetic
cuuuaugaugugacagaguca

SEQ ID NO: 473176 - RNA, 22 nt, Artificial Sequence
  Synthetic
acuuuaugaugugacagaguca

SEQ ID NO: 473177 - RNA, 23 nt, Artificial Sequence
  Synthetic
gacuuuaugaugugacagaguca

SEQ ID NO: 473178 - RNA, 24 nt, Artificial Sequence
  Synthetic
agacuuuaugaugugacagaguca

SEQ ID NO: 473179 - RNA, 18 nt, Artificial Sequence
  Synthetic
uguacauguacagaguca

SEQ ID NO: 473180 - RNA, 19 nt, Artificial Sequence
  Synthetic
uuguacauguacagaguca

SEQ ID NO: 473181 - RNA, 20 nt, Artificial Sequence
  Synthetic
uuuguacauguacagaguca

SEQ ID NO: 473182 - RNA, 21 nt, Artificial Sequence
  Synthetic
guuuguacauguacagaguca

SEQ ID NO: 473183 - RNA, 22 nt, Artificial Sequence
  Synthetic
uguuuguacauguacagaguca

SEQ ID NO: 473184 - RNA, 23 nt, Artificial Sequence
  Synthetic
uuguuuguacauguacagaguca

SEQ ID NO: 473185 - RNA, 24 nt, Artificial Sequence
  Synthetic
guuguuuguacauguacagaguca

SEQ ID NO: 473186 - RNA, 18 nt, Artificial Sequence
  Synthetic
aaugcaagugcagaguca

SEQ ID NO: 473187 - RNA, 19 nt, Artificial Sequence
  Synthetic
aaaugcaagugcagaguca

SEQ ID NO: 473188 - RNA, 20 nt, Artificial Sequence
  Synthetic
aaaaugcaagugcagaguca

SEQ ID NO: 473189 - RNA, 21 nt, Artificial Sequence
  Synthetic
gaaaaugcaagugcagaguca

SEQ ID NO: 473190 - RNA, 22 nt, Artificial Sequence
  Synthetic
ggaaaaugcaagugcagaguca

SEQ ID NO: 473191 - RNA, 23 nt, Artificial Sequence
  Synthetic
aggaaaaugcaagugcagaguca

SEQ ID NO: 473192 - RNA, 24 nt, Artificial Sequence
  Synthetic
gaggaaaaugcaagugcagaguca

SEQ ID NO: 473193 - RNA, 18 nt, Artificial Sequence
  Synthetic
agcuaauacucagaguca

SEQ ID NO: 473194 - RNA, 19 nt, Artificial Sequence
  Synthetic
cagcuaauacucagaguca

SEQ ID NO: 473195 - RNA, 20 nt, Artificial Sequence
  Synthetic
gcagcuaauacucagaguca

SEQ ID NO: 473196 - RNA, 21 nt, Artificial Sequence
  Synthetic
agcagcuaauacucagaguca

SEQ ID NO: 473197 - RNA, 22 nt, Artificial Sequence
  Synthetic
uagcagcuaauacucagaguca

SEQ ID NO: 473198 - RNA, 23 nt, Artificial Sequence
  Synthetic
uuagcagcuaauacucagaguca

SEQ ID NO: 473199 - RNA, 24 nt, Artificial Sequence
  Synthetic
uuuagcagcuaauacucagaguca

SEQ ID NO: 473200 - RNA, 18 nt, Artificial Sequence
  Synthetic
ugaucuuggagagaguca

SEQ ID NO: 473201 - RNA, 19 nt, Artificial Sequence
  Synthetic
gugaucuuggagagaguca

SEQ ID NO: 473202 - RNA, 20 nt, Artificial Sequence
  Synthetic
ggugaucuuggagagaguca

SEQ ID NO: 473203 - RNA, 21 nt, Artificial Sequence
  Synthetic
aggugaucuuggagagaguca

SEQ ID NO: 473204 - RNA, 22 nt, Artificial Sequence
  Synthetic
gaggugaucuuggagagaguca

SEQ ID NO: 473205 - RNA, 23 nt, Artificial Sequence
  Synthetic
cgaggugaucuuggagagaguca

SEQ ID NO: 473206 - RNA, 24 nt, Artificial Sequence
  Synthetic
ucgaggugaucuuggagagaguca

SEQ ID NO: 473207 - RNA, 18 nt, Artificial Sequence
  Synthetic
uuagaaggauuagaguca

SEQ ID NO: 473208 - RNA, 19 nt, Artificial Sequence
  Synthetic
uuuagaaggauuagaguca

SEQ ID NO: 473209 - RNA, 20 nt, Artificial Sequence
  Synthetic
cuuuagaaggauuagaguca

SEQ ID NO: 473210 - RNA, 21 nt, Artificial Sequence
  Synthetic
acuuuagaaggauuagaguca

SEQ ID NO: 473211 - RNA, 22 nt, Artificial Sequence
  Synthetic
gacuuuagaaggauuagaguca

SEQ ID NO: 473212 - RNA, 23 nt, Artificial Sequence
  Synthetic
ugacuuuagaaggauuagaguca

SEQ ID NO: 473213 - RNA, 24 nt, Artificial Sequence
  Synthetic
uugacuuuagaaggauuagaguca

SEQ ID NO: 473214 - RNA, 18 nt, Artificial Sequence
  Synthetic
gaaauacuuagcgaguca

SEQ ID NO: 473215 - RNA, 19 nt, Artificial Sequence
  Synthetic
agaaauacuuagcgaguca

SEQ ID NO: 473216 - RNA, 20 nt, Artificial Sequence
  Synthetic
aagaaauacuuagcgaguca

SEQ ID NO: 473217 - RNA, 21 nt, Artificial Sequence
  Synthetic
gaagaaauacuuagcgaguca

SEQ ID NO: 473218 - RNA, 22 nt, Artificial Sequence
  Synthetic
agaagaaauacuuagcgaguca

SEQ ID NO: 473219 - RNA, 23 nt, Artificial Sequence
  Synthetic
uagaagaaauacuuagcgaguca

SEQ ID NO: 473220 - RNA, 24 nt, Artificial Sequence
  Synthetic
guagaagaaauacuuagcgaguca

SEQ ID NO: 473221 - RNA, 18 nt, Artificial Sequence
  Synthetic
acagccuuggaggaguca

SEQ ID NO: 473222 - RNA, 19 nt, Artificial Sequence
  Synthetic
aacagccuuggaggaguca

SEQ ID NO: 473223 - RNA, 20 nt, Artificial Sequence
  Synthetic
uaacagccuuggaggaguca

SEQ ID NO: 473224 - RNA, 21 nt, Artificial Sequence
  Synthetic
auaacagccuuggaggaguca

SEQ ID NO: 473225 - RNA, 22 nt, Artificial Sequence
  Synthetic
aauaacagccuuggaggaguca

SEQ ID NO: 473226 - RNA, 23 nt, Artificial Sequence
  Synthetic
gaauaacagccuuggaggaguca

SEQ ID NO: 473227 - RNA, 24 nt, Artificial Sequence
  Synthetic
agaauaacagccuuggaggaguca

SEQ ID NO: 473228 - RNA, 18 nt, Artificial Sequence
  Synthetic
augugagaaauggaguca

SEQ ID NO: 473229 - RNA, 19 nt, Artificial Sequence
  Synthetic
gaugugagaaauggaguca

SEQ ID NO: 473230 - RNA, 20 nt, Artificial Sequence
  Synthetic
ggaugugagaaauggaguca

SEQ ID NO: 473231 - RNA, 21 nt, Artificial Sequence
  Synthetic
uggaugugagaaauggaguca

SEQ ID NO: 473232 - RNA, 22 nt, Artificial Sequence
  Synthetic
cuggaugugagaaauggaguca

SEQ ID NO: 473233 - RNA, 23 nt, Artificial Sequence
  Synthetic
ccuggaugugagaaauggaguca

SEQ ID NO: 473234 - RNA, 24 nt, Artificial Sequence
  Synthetic
accuggaugugagaaauggaguca

SEQ ID NO: 473235 - RNA, 18 nt, Artificial Sequence
  Synthetic
aguauugguauggaguca

SEQ ID NO: 473236 - RNA, 19 nt, Artificial Sequence
  Synthetic
aaguauugguauggaguca

SEQ ID NO: 473237 - RNA, 20 nt, Artificial Sequence
  Synthetic
uaaguauugguauggaguca

SEQ ID NO: 473238 - RNA, 21 nt, Artificial Sequence
  Synthetic
uuaaguauugguauggaguca

SEQ ID NO: 473239 - RNA, 22 nt, Artificial Sequence
  Synthetic
auuaaguauugguauggaguca

SEQ ID NO: 473240 - RNA, 23 nt, Artificial Sequence
  Synthetic
gauuaaguauugguauggaguca

SEQ ID NO: 473241 - RNA, 24 nt, Artificial Sequence
  Synthetic
cgauuaaguauugguauggaguca

SEQ ID NO: 473242 - RNA, 18 nt, Artificial Sequence
  Synthetic
guggggacgguggaguca

SEQ ID NO: 473243 - RNA, 19 nt, Artificial Sequence
  Synthetic
aguggggacgguggaguca

SEQ ID NO: 473244 - RNA, 20 nt, Artificial Sequence
  Synthetic
aaguggggacgguggaguca

SEQ ID NO: 473245 - RNA, 21 nt, Artificial Sequence
  Synthetic
aaaguggggacgguggaguca

SEQ ID NO: 473246 - RNA, 22 nt, Artificial Sequence
  Synthetic
uaaaguggggacgguggaguca

SEQ ID NO: 473247 - RNA, 23 nt, Artificial Sequence
  Synthetic
guaaaguggggacgguggaguca

SEQ ID NO: 473248 - RNA, 24 nt, Artificial Sequence
  Synthetic
aguaaaguggggacgguggaguca

SEQ ID NO: 473249 - RNA, 18 nt, Artificial Sequence
  Synthetic
uuucuuaaauaugaguca

SEQ ID NO: 473250 - RNA, 19 nt, Artificial Sequence
  Synthetic
auuucuuaaauaugaguca

SEQ ID NO: 473251 - RNA, 20 nt, Artificial Sequence
  Synthetic
cauuucuuaaauaugaguca

SEQ ID NO: 473252 - RNA, 21 nt, Artificial Sequence
  Synthetic
ucauuucuuaaauaugaguca

SEQ ID NO: 473253 - RNA, 22 nt, Artificial Sequence
  Synthetic
uucauuucuuaaauaugaguca

SEQ ID NO: 473254 - RNA, 23 nt, Artificial Sequence
  Synthetic
guucauuucuuaaauaugaguca

SEQ ID NO: 473255 - RNA, 24 nt, Artificial Sequence
  Synthetic
aguucauuucuuaaauaugaguca

SEQ ID NO: 473256 - RNA, 18 nt, Artificial Sequence
  Synthetic
aaauacgccucugaguca

SEQ ID NO: 473257 - RNA, 19 nt, Artificial Sequence
  Synthetic
aaaauacgccucugaguca

SEQ ID NO: 473258 - RNA, 20 nt, Artificial Sequence
  Synthetic
gaaaauacgccucugaguca

SEQ ID NO: 473259 - RNA, 21 nt, Artificial Sequence
  Synthetic
ggaaaauacgccucugaguca

SEQ ID NO: 473260 - RNA, 22 nt, Artificial Sequence
  Synthetic
gggaaaauacgccucugaguca

SEQ ID NO: 473261 - RNA, 23 nt, Artificial Sequence
  Synthetic
agggaaaauacgccucugaguca

SEQ ID NO: 473262 - RNA, 24 nt, Artificial Sequence
  Synthetic
uagggaaaauacgccucugaguca

SEQ ID NO: 473263 - RNA, 18 nt, Artificial Sequence
  Synthetic
uuaugagaaguugaguca

SEQ ID NO: 473264 - RNA, 19 nt, Artificial Sequence
  Synthetic
auuaugagaaguugaguca

SEQ ID NO: 473265 - RNA, 20 nt, Artificial Sequence
  Synthetic
uauuaugagaaguugaguca

SEQ ID NO: 473266 - RNA, 21 nt, Artificial Sequence
  Synthetic
auauuaugagaaguugaguca

SEQ ID NO: 473267 - RNA, 22 nt, Artificial Sequence
  Synthetic
cauauuaugagaaguugaguca

SEQ ID NO: 473268 - RNA, 23 nt, Artificial Sequence
  Synthetic
ccauauuaugagaaguugaguca

SEQ ID NO: 473269 - RNA, 24 nt, Artificial Sequence
  Synthetic
uccauauuaugagaaguugaguca

SEQ ID NO: 473270 - RNA, 18 nt, Artificial Sequence
  Synthetic
caguagaagguugaguca

SEQ ID NO: 473271 - RNA, 19 nt, Artificial Sequence
  Synthetic
ccaguagaagguugaguca

SEQ ID NO: 473272 - RNA, 20 nt, Artificial Sequence
  Synthetic
gccaguagaagguugaguca

SEQ ID NO: 473273 - RNA, 21 nt, Artificial Sequence
  Synthetic
agccaguagaagguugaguca

SEQ ID NO: 473274 - RNA, 22 nt, Artificial Sequence
  Synthetic
uagccaguagaagguugaguca

SEQ ID NO: 473275 - RNA, 23 nt, Artificial Sequence
  Synthetic
cuagccaguagaagguugaguca

SEQ ID NO: 473276 - RNA, 24 nt, Artificial Sequence
  Synthetic
ucuagccaguagaagguugaguca

SEQ ID NO: 473277 - RNA, 18 nt, Artificial Sequence
  Synthetic
ugugagauguuugaguca

SEQ ID NO: 473278 - RNA, 19 nt, Artificial Sequence
  Synthetic
gugugagauguuugaguca

SEQ ID NO: 473279 - RNA, 20 nt, Artificial Sequence
  Synthetic
ggugugagauguuugaguca

SEQ ID NO: 473280 - RNA, 21 nt, Artificial Sequence
  Synthetic
uggugugagauguuugaguca

SEQ ID NO: 473281 - RNA, 22 nt, Artificial Sequence
  Synthetic
cuggugugagauguuugaguca

SEQ ID NO: 473282 - RNA, 23 nt, Artificial Sequence
  Synthetic
ccuggugugagauguuugaguca

SEQ ID NO: 473283 - RNA, 24 nt, Artificial Sequence
  Synthetic
gccuggugugagauguuugaguca

SEQ ID NO: 473284 - RNA, 18 nt, Artificial Sequence
  Synthetic
aaaauaugguaauaguca

SEQ ID NO: 473285 - RNA, 19 nt, Artificial Sequence
  Synthetic
caaaauaugguaauaguca

SEQ ID NO: 473286 - RNA, 20 nt, Artificial Sequence
  Synthetic
gcaaaauaugguaauaguca

SEQ ID NO: 473287 - RNA, 21 nt, Artificial Sequence
  Synthetic
ugcaaaauaugguaauaguca

SEQ ID NO: 473288 - RNA, 22 nt, Artificial Sequence
  Synthetic
uugcaaaauaugguaauaguca

SEQ ID NO: 473289 - RNA, 23 nt, Artificial Sequence
  Synthetic
uuugcaaaauaugguaauaguca

SEQ ID NO: 473290 - RNA, 24 nt, Artificial Sequence
  Synthetic
cuuugcaaaauaugguaauaguca

SEQ ID NO: 473291 - RNA, 18 nt, Artificial Sequence
  Synthetic
uugaggauuucauaguca

SEQ ID NO: 473292 - RNA, 19 nt, Artificial Sequence
  Synthetic
cuugaggauuucauaguca

SEQ ID NO: 473293 - RNA, 20 nt, Artificial Sequence
  Synthetic
ucuugaggauuucauaguca

SEQ ID NO: 473294 - RNA, 21 nt, Artificial Sequence
  Synthetic
gucuugaggauuucauaguca

SEQ ID NO: 473295 - RNA, 22 nt, Artificial Sequence
  Synthetic
ugucuugaggauuucauaguca

SEQ ID NO: 473296 - RNA, 23 nt, Artificial Sequence
  Synthetic
uugucuugaggauuucauaguca

SEQ ID NO: 473297 - RNA, 24 nt, Artificial Sequence
  Synthetic
cuugucuugaggauuucauaguca

SEQ ID NO: 473298 - RNA, 18 nt, Artificial Sequence
  Synthetic
auagagaauugauaguca

SEQ ID NO: 473299 - RNA, 19 nt, Artificial Sequence
  Synthetic
cauagagaauugauaguca

SEQ ID NO: 473300 - RNA, 20 nt, Artificial Sequence
  Synthetic
acauagagaauugauaguca

SEQ ID NO: 473301 - RNA, 21 nt, Artificial Sequence
  Synthetic
cacauagagaauugauaguca

SEQ ID NO: 473302 - RNA, 22 nt, Artificial Sequence
  Synthetic
ucacauagagaauugauaguca

SEQ ID NO: 473303 - RNA, 23 nt, Artificial Sequence
  Synthetic
uucacauagagaauugauaguca

SEQ ID NO: 473304 - RNA, 24 nt, Artificial Sequence
  Synthetic
uuucacauagagaauugauaguca

SEQ ID NO: 473305 - RNA, 18 nt, Artificial Sequence
  Synthetic
aaaaucuaauuauaguca

SEQ ID NO: 473306 - RNA, 19 nt, Artificial Sequence
  Synthetic
aaaaaucuaauuauaguca

SEQ ID NO: 473307 - RNA, 20 nt, Artificial Sequence
  Synthetic
uaaaaaucuaauuauaguca

SEQ ID NO: 473308 - RNA, 21 nt, Artificial Sequence
  Synthetic
uuaaaaaucuaauuauaguca

SEQ ID NO: 473309 - RNA, 22 nt, Artificial Sequence
  Synthetic
uuuaaaaaucuaauuauaguca

SEQ ID NO: 473310 - RNA, 23 nt, Artificial Sequence
  Synthetic
uuuuaaaaaucuaauuauaguca

SEQ ID NO: 473311 - RNA, 24 nt, Artificial Sequence
  Synthetic
uuuuuaaaaaucuaauuauaguca

SEQ ID NO: 473312 - RNA, 18 nt, Artificial Sequence
  Synthetic
aggugacauagcuaguca

SEQ ID NO: 473313 - RNA, 19 nt, Artificial Sequence
  Synthetic
aaggugacauagcuaguca

SEQ ID NO: 473314 - RNA, 20 nt, Artificial Sequence
  Synthetic
caaggugacauagcuaguca

SEQ ID NO: 473315 - RNA, 21 nt, Artificial Sequence
  Synthetic
ucaaggugacauagcuaguca

SEQ ID NO: 473316 - RNA, 22 nt, Artificial Sequence
  Synthetic
uucaaggugacauagcuaguca

SEQ ID NO: 473317 - RNA, 23 nt, Artificial Sequence
  Synthetic
guucaaggugacauagcuaguca

SEQ ID NO: 473318 - RNA, 24 nt, Artificial Sequence
  Synthetic
uguucaaggugacauagcuaguca

SEQ ID NO: 473319 - RNA, 18 nt, Artificial Sequence
  Synthetic
auuaagagcugcuaguca

SEQ ID NO: 473320 - RNA, 19 nt, Artificial Sequence
  Synthetic
aauuaagagcugcuaguca

SEQ ID NO: 473321 - RNA, 20 nt, Artificial Sequence
  Synthetic
aaauuaagagcugcuaguca

SEQ ID NO: 473322 - RNA, 21 nt, Artificial Sequence
  Synthetic
aaaauuaagagcugcuaguca

SEQ ID NO: 473323 - RNA, 22 nt, Artificial Sequence
  Synthetic
caaaauuaagagcugcuaguca

SEQ ID NO: 473324 - RNA, 23 nt, Artificial Sequence
  Synthetic
ucaaaauuaagagcugcuaguca

SEQ ID NO: 473325 - RNA, 24 nt, Artificial Sequence
  Synthetic
uucaaaauuaagagcugcuaguca

SEQ ID NO: 473326 - RNA, 18 nt, Artificial Sequence
  Synthetic
ucuuuaaaacucuaguca

SEQ ID NO: 473327 - RNA, 19 nt, Artificial Sequence
  Synthetic
uucuuuaaaacucuaguca

SEQ ID NO: 473328 - RNA, 20 nt, Artificial Sequence
  Synthetic
cuucuuuaaaacucuaguca

SEQ ID NO: 473329 - RNA, 21 nt, Artificial Sequence
  Synthetic
ccuucuuuaaaacucuaguca

SEQ ID NO: 473330 - RNA, 22 nt, Artificial Sequence
  Synthetic
uccuucuuuaaaacucuaguca

SEQ ID NO: 473331 - RNA, 23 nt, Artificial Sequence
  Synthetic
auccuucuuuaaaacucuaguca

SEQ ID NO: 473332 - RNA, 24 nt, Artificial Sequence
  Synthetic
cauccuucuuuaaaacucuaguca

SEQ ID NO: 473333 - RNA, 18 nt, Artificial Sequence
  Synthetic
uauaauacacaguaguca

SEQ ID NO: 473334 - RNA, 19 nt, Artificial Sequence
  Synthetic
auauaauacacaguaguca

SEQ ID NO: 473335 - RNA, 20 nt, Artificial Sequence
  Synthetic
gauauaauacacaguaguca

SEQ ID NO: 473336 - RNA, 21 nt, Artificial Sequence
  Synthetic
ggauauaauacacaguaguca

SEQ ID NO: 473337 - RNA, 22 nt, Artificial Sequence
  Synthetic
uggauauaauacacaguaguca

SEQ ID NO: 473338 - RNA, 23 nt, Artificial Sequence
  Synthetic
uuggauauaauacacaguaguca

SEQ ID NO: 473339 - RNA, 24 nt, Artificial Sequence
  Synthetic
auuggauauaauacacaguaguca

SEQ ID NO: 473340 - RNA, 18 nt, Artificial Sequence
  Synthetic
acagcaaagcaguaguca

SEQ ID NO: 473341 - RNA, 19 nt, Artificial Sequence
  Synthetic
cacagcaaagcaguaguca

SEQ ID NO: 473342 - RNA, 20 nt, Artificial Sequence
  Synthetic
ucacagcaaagcaguaguca

SEQ ID NO: 473343 - RNA, 21 nt, Artificial Sequence
  Synthetic
cucacagcaaagcaguaguca

SEQ ID NO: 473344 - RNA, 22 nt, Artificial Sequence
  Synthetic
acucacagcaaagcaguaguca

SEQ ID NO: 473345 - RNA, 23 nt, Artificial Sequence
  Synthetic
uacucacagcaaagcaguaguca

SEQ ID NO: 473346 - RNA, 24 nt, Artificial Sequence
  Synthetic
uuacucacagcaaagcaguaguca

SEQ ID NO: 473347 - RNA, 18 nt, Artificial Sequence
  Synthetic
cuuagagccuuguaguca

SEQ ID NO: 473348 - RNA, 19 nt, Artificial Sequence
  Synthetic
acuuagagccuuguaguca

SEQ ID NO: 473349 - RNA, 20 nt, Artificial Sequence
  Synthetic
uacuuagagccuuguaguca

SEQ ID NO: 473350 - RNA, 21 nt, Artificial Sequence
  Synthetic
auacuuagagccuuguaguca

SEQ ID NO: 473351 - RNA, 22 nt, Artificial Sequence
  Synthetic
aauacuuagagccuuguaguca

SEQ ID NO: 473352 - RNA, 23 nt, Artificial Sequence
  Synthetic
aaauacuuagagccuuguaguca

SEQ ID NO: 473353 - RNA, 24 nt, Artificial Sequence
  Synthetic
aaaauacuuagagccuuguaguca

SEQ ID NO: 473354 - RNA, 18 nt, Artificial Sequence
  Synthetic
guaagaaggacuuaguca

SEQ ID NO: 473355 - RNA, 19 nt, Artificial Sequence
  Synthetic
aguaagaaggacuuaguca

SEQ ID NO: 473356 - RNA, 20 nt, Artificial Sequence
  Synthetic
uaguaagaaggacuuaguca

SEQ ID NO: 473357 - RNA, 21 nt, Artificial Sequence
  Synthetic
uuaguaagaaggacuuaguca

SEQ ID NO: 473358 - RNA, 22 nt, Artificial Sequence
  Synthetic
guuaguaagaaggacuuaguca

SEQ ID NO: 473359 - RNA, 23 nt, Artificial Sequence
  Synthetic
aguuaguaagaaggacuuaguca

SEQ ID NO: 473360 - RNA, 24 nt, Artificial Sequence
  Synthetic
gaguuaguaagaaggacuuaguca

SEQ ID NO: 473361 - RNA, 18 nt, Artificial Sequence
  Synthetic
uguuccucuacuuaguca

SEQ ID NO: 473362 - RNA, 19 nt, Artificial Sequence
  Synthetic
cuguuccucuacuuaguca

SEQ ID NO: 473363 - RNA, 20 nt, Artificial Sequence
  Synthetic
ucuguuccucuacuuaguca

SEQ ID NO: 473364 - RNA, 21 nt, Artificial Sequence
  Synthetic
aucuguuccucuacuuaguca

SEQ ID NO: 473365 - RNA, 22 nt, Artificial Sequence
  Synthetic
caucuguuccucuacuuaguca

SEQ ID NO: 473366 - RNA, 23 nt, Artificial Sequence
  Synthetic
acaucuguuccucuacuuaguca

SEQ ID NO: 473367 - RNA, 24 nt, Artificial Sequence
  Synthetic
cacaucuguuccucuacuuaguca

SEQ ID NO: 473368 - RNA, 18 nt, Artificial Sequence
  Synthetic
uguuggcgagcuuaguca

SEQ ID NO: 473369 - RNA, 19 nt, Artificial Sequence
  Synthetic
cuguuggcgagcuuaguca

SEQ ID NO: 473370 - RNA, 20 nt, Artificial Sequence
  Synthetic
ucuguuggcgagcuuaguca

SEQ ID NO: 473371 - RNA, 21 nt, Artificial Sequence
  Synthetic
uucuguuggcgagcuuaguca

SEQ ID NO: 473372 - RNA, 22 nt, Artificial Sequence
  Synthetic
uuucuguuggcgagcuuaguca

SEQ ID NO: 473373 - RNA, 23 nt, Artificial Sequence
  Synthetic
auuucuguuggcgagcuuaguca

SEQ ID NO: 473374 - RNA, 24 nt, Artificial Sequence
  Synthetic
uauuucuguuggcgagcuuaguca

SEQ ID NO: 473375 - RNA, 18 nt, Artificial Sequence
  Synthetic
uucuacugguucacguca

SEQ ID NO: 473376 - RNA, 19 nt, Artificial Sequence
  Synthetic
auucuacugguucacguca

SEQ ID NO: 473377 - RNA, 20 nt, Artificial Sequence
  Synthetic
gauucuacugguucacguca

SEQ ID NO: 473378 - RNA, 21 nt, Artificial Sequence
  Synthetic
ggauucuacugguucacguca

SEQ ID NO: 473379 - RNA, 22 nt, Artificial Sequence
  Synthetic
gggauucuacugguucacguca

SEQ ID NO: 473380 - RNA, 23 nt, Artificial Sequence
  Synthetic
agggauucuacugguucacguca

SEQ ID NO: 473381 - RNA, 24 nt, Artificial Sequence
  Synthetic
aagggauucuacugguucacguca

SEQ ID NO: 473382 - RNA, 18 nt, Artificial Sequence
  Synthetic
ucucacaaagguccguca

SEQ ID NO: 473383 - RNA, 19 nt, Artificial Sequence
  Synthetic
uucucacaaagguccguca

SEQ ID NO: 473384 - RNA, 20 nt, Artificial Sequence
  Synthetic
uuucucacaaagguccguca

SEQ ID NO: 473385 - RNA, 21 nt, Artificial Sequence
  Synthetic
uuuucucacaaagguccguca

SEQ ID NO: 473386 - RNA, 22 nt, Artificial Sequence
  Synthetic
uuuuucucacaaagguccguca

SEQ ID NO: 473387 - RNA, 23 nt, Artificial Sequence
  Synthetic
uuuuuucucacaaagguccguca

SEQ ID NO: 473388 - RNA, 24 nt, Artificial Sequence
  Synthetic
uuuuuuucucacaaagguccguca

SEQ ID NO: 473389 - RNA, 18 nt, Artificial Sequence
  Synthetic
gaaauuccgucaucguca

SEQ ID NO: 473390 - RNA, 19 nt, Artificial Sequence
  Synthetic
ugaaauuccgucaucguca

SEQ ID NO: 473391 - RNA, 20 nt, Artificial Sequence
  Synthetic
augaaauuccgucaucguca

SEQ ID NO: 473392 - RNA, 21 nt, Artificial Sequence
  Synthetic
uaugaaauuccgucaucguca

SEQ ID NO: 473393 - RNA, 22 nt, Artificial Sequence
  Synthetic
guaugaaauuccgucaucguca

SEQ ID NO: 473394 - RNA, 23 nt, Artificial Sequence
  Synthetic
gguaugaaauuccgucaucguca

SEQ ID NO: 473395 - RNA, 24 nt, Artificial Sequence
  Synthetic
ggguaugaaauuccgucaucguca

SEQ ID NO: 473396 - RNA, 18 nt, Artificial Sequence
  Synthetic
gcauaaauuacaagguca

SEQ ID NO: 473397 - RNA, 19 nt, Artificial Sequence
  Synthetic
agcauaaauuacaagguca

SEQ ID NO: 473398 - RNA, 20 nt, Artificial Sequence
  Synthetic
aagcauaaauuacaagguca

SEQ ID NO: 473399 - RNA, 21 nt, Artificial Sequence
  Synthetic
caagcauaaauuacaagguca

SEQ ID NO: 473400 - RNA, 22 nt, Artificial Sequence
  Synthetic
acaagcauaaauuacaagguca

SEQ ID NO: 473401 - RNA, 23 nt, Artificial Sequence
  Synthetic
gacaagcauaaauuacaagguca

SEQ ID NO: 473402 - RNA, 24 nt, Artificial Sequence
  Synthetic
agacaagcauaaauuacaagguca

SEQ ID NO: 473403 - RNA, 18 nt, Artificial Sequence
  Synthetic
caaaaacagccaagguca

SEQ ID NO: 473404 - RNA, 19 nt, Artificial Sequence
  Synthetic
acaaaaacagccaagguca

SEQ ID NO: 473405 - RNA, 20 nt, Artificial Sequence
  Synthetic
aacaaaaacagccaagguca

SEQ ID NO: 473406 - RNA, 21 nt, Artificial Sequence
  Synthetic
gaacaaaaacagccaagguca

SEQ ID NO: 473407 - RNA, 22 nt, Artificial Sequence
  Synthetic
ggaacaaaaacagccaagguca

SEQ ID NO: 473408 - RNA, 23 nt, Artificial Sequence
  Synthetic
gggaacaaaaacagccaagguca

SEQ ID NO: 473409 - RNA, 24 nt, Artificial Sequence
  Synthetic
ugggaacaaaaacagccaagguca

SEQ ID NO: 473410 - RNA, 18 nt, Artificial Sequence
  Synthetic
agguaagaaucaagguca

SEQ ID NO: 473411 - RNA, 19 nt, Artificial Sequence
  Synthetic
gagguaagaaucaagguca

SEQ ID NO: 473412 - RNA, 20 nt, Artificial Sequence
  Synthetic
ggagguaagaaucaagguca

SEQ ID NO: 473413 - RNA, 21 nt, Artificial Sequence
  Synthetic
aggagguaagaaucaagguca

SEQ ID NO: 473414 - RNA, 22 nt, Artificial Sequence
  Synthetic
uaggagguaagaaucaagguca

SEQ ID NO: 473415 - RNA, 23 nt, Artificial Sequence
  Synthetic
auaggagguaagaaucaagguca

SEQ ID NO: 473416 - RNA, 24 nt, Artificial Sequence
  Synthetic
uauaggagguaagaaucaagguca

SEQ ID NO: 473417 - RNA, 18 nt, Artificial Sequence
  Synthetic
acagcacuagacagguca

SEQ ID NO: 473418 - RNA, 19 nt, Artificial Sequence
  Synthetic
uacagcacuagacagguca

SEQ ID NO: 473419 - RNA, 20 nt, Artificial Sequence
  Synthetic
uuacagcacuagacagguca

SEQ ID NO: 473420 - RNA, 21 nt, Artificial Sequence
  Synthetic
uuuacagcacuagacagguca

SEQ ID NO: 473421 - RNA, 22 nt, Artificial Sequence
  Synthetic
auuuacagcacuagacagguca

SEQ ID NO: 473422 - RNA, 23 nt, Artificial Sequence
  Synthetic
cauuuacagcacuagacagguca

SEQ ID NO: 473423 - RNA, 24 nt, Artificial Sequence
  Synthetic
ccauuuacagcacuagacagguca

SEQ ID NO: 473424 - RNA, 18 nt, Artificial Sequence
  Synthetic
ccucugauauccagguca

SEQ ID NO: 473425 - RNA, 19 nt, Artificial Sequence
  Synthetic
accucugauauccagguca

SEQ ID NO: 473426 - RNA, 20 nt, Artificial Sequence
  Synthetic
aaccucugauauccagguca

SEQ ID NO: 473427 - RNA, 21 nt, Artificial Sequence
  Synthetic
aaaccucugauauccagguca

SEQ ID NO: 473428 - RNA, 22 nt, Artificial Sequence
  Synthetic
caaaccucugauauccagguca

SEQ ID NO: 473429 - RNA, 23 nt, Artificial Sequence
  Synthetic
ccaaaccucugauauccagguca

SEQ ID NO: 473430 - RNA, 24 nt, Artificial Sequence
  Synthetic
gccaaaccucugauauccagguca

SEQ ID NO: 473431 - RNA, 18 nt, Artificial Sequence
  Synthetic
ugaagaacaggcagguca

SEQ ID NO: 473432 - RNA, 19 nt, Artificial Sequence
  Synthetic
cugaagaacaggcagguca

SEQ ID NO: 473433 - RNA, 20 nt, Artificial Sequence
  Synthetic
ccugaagaacaggcagguca

SEQ ID NO: 473434 - RNA, 21 nt, Artificial Sequence
  Synthetic
accugaagaacaggcagguca

SEQ ID NO: 473435 - RNA, 22 nt, Artificial Sequence
  Synthetic
gaccugaagaacaggcagguca

SEQ ID NO: 473436 - RNA, 23 nt, Artificial Sequence
  Synthetic
agaccugaagaacaggcagguca

SEQ ID NO: 473437 - RNA, 24 nt, Artificial Sequence
  Synthetic
gagaccugaagaacaggcagguca

SEQ ID NO: 473438 - RNA, 18 nt, Artificial Sequence
  Synthetic
agaugcauauucagguca

SEQ ID NO: 473439 - RNA, 19 nt, Artificial Sequence
  Synthetic
cagaugcauauucagguca

SEQ ID NO: 473440 - RNA, 20 nt, Artificial Sequence
  Synthetic
ucagaugcauauucagguca

SEQ ID NO: 473441 - RNA, 21 nt, Artificial Sequence
  Synthetic
cucagaugcauauucagguca

SEQ ID NO: 473442 - RNA, 22 nt, Artificial Sequence
  Synthetic
gcucagaugcauauucagguca

SEQ ID NO: 473443 - RNA, 23 nt, Artificial Sequence
  Synthetic
ggcucagaugcauauucagguca

SEQ ID NO: 473444 - RNA, 24 nt, Artificial Sequence
  Synthetic
gggcucagaugcauauucagguca

SEQ ID NO: 473445 - RNA, 18 nt, Artificial Sequence
  Synthetic
aaagcauucaagagguca

SEQ ID NO: 473446 - RNA, 19 nt, Artificial Sequence
  Synthetic
caaagcauucaagagguca

SEQ ID NO: 473447 - RNA, 20 nt, Artificial Sequence
  Synthetic
gcaaagcauucaagagguca

SEQ ID NO: 473448 - RNA, 21 nt, Artificial Sequence
  Synthetic
agcaaagcauucaagagguca

SEQ ID NO: 473449 - RNA, 22 nt, Artificial Sequence
  Synthetic
cagcaaagcauucaagagguca

SEQ ID NO: 473450 - RNA, 23 nt, Artificial Sequence
  Synthetic
gcagcaaagcauucaagagguca

SEQ ID NO: 473451 - RNA, 24 nt, Artificial Sequence
  Synthetic
agcagcaaagcauucaagagguca

SEQ ID NO: 473452 - RNA, 18 nt, Artificial Sequence
  Synthetic
uuaugaguuaugagguca

SEQ ID NO: 473453 - RNA, 19 nt, Artificial Sequence
  Synthetic
uuuaugaguuaugagguca

SEQ ID NO: 473454 - RNA, 20 nt, Artificial Sequence
  Synthetic
auuuaugaguuaugagguca

SEQ ID NO: 473455 - RNA, 21 nt, Artificial Sequence
  Synthetic
cauuuaugaguuaugagguca

SEQ ID NO: 473456 - RNA, 22 nt, Artificial Sequence
  Synthetic
ccauuuaugaguuaugagguca

SEQ ID NO: 473457 - RNA, 23 nt, Artificial Sequence
  Synthetic
cccauuuaugaguuaugagguca

SEQ ID NO: 473458 - RNA, 24 nt, Artificial Sequence
  Synthetic
gcccauuuaugaguuaugagguca

SEQ ID NO: 473459 - RNA, 18 nt, Artificial Sequence
  Synthetic
uuggugagauauagguca

SEQ ID NO: 473460 - RNA, 19 nt, Artificial Sequence
  Synthetic
uuuggugagauauagguca

SEQ ID NO: 473461 - RNA, 20 nt, Artificial Sequence
  Synthetic
uuuuggugagauauagguca

SEQ ID NO: 473462 - RNA, 21 nt, Artificial Sequence
  Synthetic
uuuuuggugagauauagguca

SEQ ID NO: 473463 - RNA, 22 nt, Artificial Sequence
  Synthetic
uuuuuuggugagauauagguca

SEQ ID NO: 473464 - RNA, 23 nt, Artificial Sequence
  Synthetic
uuuuuuuggugagauauagguca

SEQ ID NO: 473465 - RNA, 24 nt, Artificial Sequence
  Synthetic
cuuuuuuuggugagauauagguca

SEQ ID NO: 473466 - RNA, 18 nt, Artificial Sequence
  Synthetic
cuuucacuuuauagguca

SEQ ID NO: 473467 - RNA, 19 nt, Artificial Sequence
  Synthetic
acuuucacuuuauagguca

SEQ ID NO: 473468 - RNA, 20 nt, Artificial Sequence
  Synthetic
aacuuucacuuuauagguca

SEQ ID NO: 473469 - RNA, 21 nt, Artificial Sequence
  Synthetic
uaacuuucacuuuauagguca

SEQ ID NO: 473470 - RNA, 22 nt, Artificial Sequence
  Synthetic
auaacuuucacuuuauagguca

SEQ ID NO: 473471 - RNA, 23 nt, Artificial Sequence
  Synthetic
cauaacuuucacuuuauagguca

SEQ ID NO: 473472 - RNA, 24 nt, Artificial Sequence
  Synthetic
gcauaacuuucacuuuauagguca

SEQ ID NO: 473473 - RNA, 18 nt, Artificial Sequence
  Synthetic
gcacuagaauguagguca

SEQ ID NO: 473474 - RNA, 19 nt, Artificial Sequence
  Synthetic
ugcacuagaauguagguca

SEQ ID NO: 473475 - RNA, 20 nt, Artificial Sequence
  Synthetic
cugcacuagaauguagguca

SEQ ID NO: 473476 - RNA, 21 nt, Artificial Sequence
  Synthetic
ucugcacuagaauguagguca

SEQ ID NO: 473477 - RNA, 22 nt, Artificial Sequence
  Synthetic
uucugcacuagaauguagguca

SEQ ID NO: 473478 - RNA, 23 nt, Artificial Sequence
  Synthetic
uuucugcacuagaauguagguca

SEQ ID NO: 473479 - RNA, 24 nt, Artificial Sequence
  Synthetic
uuuucugcacuagaauguagguca

SEQ ID NO: 473480 - RNA, 18 nt, Artificial Sequence
  Synthetic
ccagagagcagaggguca

SEQ ID NO: 473481 - RNA, 19 nt, Artificial Sequence
  Synthetic
uccagagagcagaggguca

SEQ ID NO: 473482 - RNA, 20 nt, Artificial Sequence
  Synthetic
uuccagagagcagaggguca

SEQ ID NO: 473483 - RNA, 21 nt, Artificial Sequence
  Synthetic
guuccagagagcagaggguca

SEQ ID NO: 473484 - RNA, 22 nt, Artificial Sequence
  Synthetic
uguuccagagagcagaggguca

SEQ ID NO: 473485 - RNA, 23 nt, Artificial Sequence
  Synthetic
cuguuccagagagcagaggguca

SEQ ID NO: 473486 - RNA, 24 nt, Artificial Sequence
  Synthetic
acuguuccagagagcagaggguca

SEQ ID NO: 473487 - RNA, 18 nt, Artificial Sequence
  Synthetic
aacccaaagagaggguca

SEQ ID NO: 473488 - RNA, 19 nt, Artificial Sequence
  Synthetic
gaacccaaagagaggguca

SEQ ID NO: 473489 - RNA, 20 nt, Artificial Sequence
  Synthetic
ugaacccaaagagaggguca

SEQ ID NO: 473490 - RNA, 21 nt, Artificial Sequence
  Synthetic
uugaacccaaagagaggguca

SEQ ID NO: 473491 - RNA, 22 nt, Artificial Sequence
  Synthetic
guugaacccaaagagaggguca

SEQ ID NO: 473492 - RNA, 23 nt, Artificial Sequence
  Synthetic
aguugaacccaaagagaggguca

SEQ ID NO: 473493 - RNA, 24 nt, Artificial Sequence
  Synthetic
uaguugaacccaaagagaggguca

SEQ ID NO: 473494 - RNA, 18 nt, Artificial Sequence
  Synthetic
uaucuaaaacagggguca

SEQ ID NO: 473495 - RNA, 19 nt, Artificial Sequence
  Synthetic
uuaucuaaaacagggguca

SEQ ID NO: 473496 - RNA, 20 nt, Artificial Sequence
  Synthetic
uuuaucuaaaacagggguca

SEQ ID NO: 473497 - RNA, 21 nt, Artificial Sequence
  Synthetic
auuuaucuaaaacagggguca

SEQ ID NO: 473498 - RNA, 22 nt, Artificial Sequence
  Synthetic
uauuuaucuaaaacagggguca

SEQ ID NO: 473499 - RNA, 23 nt, Artificial Sequence
  Synthetic
guauuuaucuaaaacagggguca

SEQ ID NO: 473500 - RNA, 24 nt, Artificial Sequence
  Synthetic
aguauuuaucuaaaacagggguca

SEQ ID NO: 473501 - RNA, 18 nt, Artificial Sequence
  Synthetic
cugggauuaacgggguca

SEQ ID NO: 473502 - RNA, 19 nt, Artificial Sequence
  Synthetic
acugggauuaacgggguca

SEQ ID NO: 473503 - RNA, 20 nt, Artificial Sequence
  Synthetic
aacugggauuaacgggguca

SEQ ID NO: 473504 - RNA, 21 nt, Artificial Sequence
  Synthetic
aaacugggauuaacgggguca

SEQ ID NO: 473505 - RNA, 22 nt, Artificial Sequence
  Synthetic
gaaacugggauuaacgggguca

SEQ ID NO: 473506 - RNA, 23 nt, Artificial Sequence
  Synthetic
ugaaacugggauuaacgggguca

SEQ ID NO: 473507 - RNA, 24 nt, Artificial Sequence
  Synthetic
augaaacugggauuaacgggguca

SEQ ID NO: 473508 - RNA, 18 nt, Artificial Sequence
  Synthetic
acgggaagugugggguca

SEQ ID NO: 473509 - RNA, 19 nt, Artificial Sequence
  Synthetic
aacgggaagugugggguca

SEQ ID NO: 473510 - RNA, 20 nt, Artificial Sequence
  Synthetic
uaacgggaagugugggguca

SEQ ID NO: 473511 - RNA, 21 nt, Artificial Sequence
  Synthetic
uuaacgggaagugugggguca

SEQ ID NO: 473512 - RNA, 22 nt, Artificial Sequence
  Synthetic
cuuaacgggaagugugggguca

SEQ ID NO: 473513 - RNA, 23 nt, Artificial Sequence
  Synthetic
gcuuaacgggaagugugggguca

SEQ ID NO: 473514 - RNA, 24 nt, Artificial Sequence
  Synthetic
ggcuuaacgggaagugugggguca

SEQ ID NO: 473515 - RNA, 18 nt, Artificial Sequence
  Synthetic
gcaguugaccauggguca

SEQ ID NO: 473516 - RNA, 19 nt, Artificial Sequence
  Synthetic
agcaguugaccauggguca

SEQ ID NO: 473517 - RNA, 20 nt, Artificial Sequence
  Synthetic
cagcaguugaccauggguca

SEQ ID NO: 473518 - RNA, 21 nt, Artificial Sequence
  Synthetic
acagcaguugaccauggguca

SEQ ID NO: 473519 - RNA, 22 nt, Artificial Sequence
  Synthetic
gacagcaguugaccauggguca

SEQ ID NO: 473520 - RNA, 23 nt, Artificial Sequence
  Synthetic
agacagcaguugaccauggguca

SEQ ID NO: 473521 - RNA, 24 nt, Artificial Sequence
  Synthetic
cagacagcaguugaccauggguca

SEQ ID NO: 473522 - RNA, 18 nt, Artificial Sequence
  Synthetic
gagaaucacuauggguca

SEQ ID NO: 473523 - RNA, 19 nt, Artificial Sequence
  Synthetic
agagaaucacuauggguca

SEQ ID NO: 473524 - RNA, 20 nt, Artificial Sequence
  Synthetic
uagagaaucacuauggguca

SEQ ID NO: 473525 - RNA, 21 nt, Artificial Sequence
  Synthetic
auagagaaucacuauggguca

SEQ ID NO: 473526 - RNA, 22 nt, Artificial Sequence
  Synthetic
aauagagaaucacuauggguca

SEQ ID NO: 473527 - RNA, 23 nt, Artificial Sequence
  Synthetic
uaauagagaaucacuauggguca

SEQ ID NO: 473528 - RNA, 24 nt, Artificial Sequence
  Synthetic
auaauagagaaucacuauggguca

SEQ ID NO: 473529 - RNA, 18 nt, Artificial Sequence
  Synthetic
cucauuauuaguggguca

SEQ ID NO: 473530 - RNA, 19 nt, Artificial Sequence
  Synthetic
acucauuauuaguggguca

SEQ ID NO: 473531 - RNA, 20 nt, Artificial Sequence
  Synthetic
gacucauuauuaguggguca

SEQ ID NO: 473532 - RNA, 21 nt, Artificial Sequence
  Synthetic
ugacucauuauuaguggguca

SEQ ID NO: 473533 - RNA, 22 nt, Artificial Sequence
  Synthetic
cugacucauuauuaguggguca

SEQ ID NO: 473534 - RNA, 23 nt, Artificial Sequence
  Synthetic
gcugacucauuauuaguggguca

SEQ ID NO: 473535 - RNA, 24 nt, Artificial Sequence
  Synthetic
ugcugacucauuauuaguggguca

SEQ ID NO: 473536 - RNA, 18 nt, Artificial Sequence
  Synthetic
cgggagguuuuuggguca

SEQ ID NO: 473537 - RNA, 19 nt, Artificial Sequence
  Synthetic
gcgggagguuuuuggguca

SEQ ID NO: 473538 - RNA, 20 nt, Artificial Sequence
  Synthetic
ggcgggagguuuuuggguca

SEQ ID NO: 473539 - RNA, 21 nt, Artificial Sequence
  Synthetic
uggcgggagguuuuuggguca

SEQ ID NO: 473540 - RNA, 22 nt, Artificial Sequence
  Synthetic
cuggcgggagguuuuuggguca

SEQ ID NO: 473541 - RNA, 23 nt, Artificial Sequence
  Synthetic
ccuggcgggagguuuuuggguca

SEQ ID NO: 473542 - RNA, 24 nt, Artificial Sequence
  Synthetic
gccuggcgggagguuuuuggguca

SEQ ID NO: 473543 - RNA, 18 nt, Artificial Sequence
  Synthetic
cuccauucucaaugguca

SEQ ID NO: 473544 - RNA, 19 nt, Artificial Sequence
  Synthetic
gcuccauucucaaugguca

SEQ ID NO: 473545 - RNA, 20 nt, Artificial Sequence
  Synthetic
agcuccauucucaaugguca

SEQ ID NO: 473546 - RNA, 21 nt, Artificial Sequence
  Synthetic
uagcuccauucucaaugguca

SEQ ID NO: 473547 - RNA, 22 nt, Artificial Sequence
  Synthetic
uuagcuccauucucaaugguca

SEQ ID NO: 473548 - RNA, 23 nt, Artificial Sequence
  Synthetic
cuuagcuccauucucaaugguca

SEQ ID NO: 473549 - RNA, 24 nt, Artificial Sequence
  Synthetic
acuuagcuccauucucaaugguca

SEQ ID NO: 473550 - RNA, 18 nt, Artificial Sequence
  Synthetic
aaugagaacacaugguca

SEQ ID NO: 473551 - RNA, 19 nt, Artificial Sequence
  Synthetic
caaugagaacacaugguca

SEQ ID NO: 473552 - RNA, 20 nt, Artificial Sequence
  Synthetic
acaaugagaacacaugguca

SEQ ID NO: 473553 - RNA, 21 nt, Artificial Sequence
  Synthetic
aacaaugagaacacaugguca

SEQ ID NO: 473554 - RNA, 22 nt, Artificial Sequence
  Synthetic
gaacaaugagaacacaugguca

SEQ ID NO: 473555 - RNA, 23 nt, Artificial Sequence
  Synthetic
ugaacaaugagaacacaugguca

SEQ ID NO: 473556 - RNA, 24 nt, Artificial Sequence
  Synthetic
uugaacaaugagaacacaugguca

SEQ ID NO: 473557 - RNA, 18 nt, Artificial Sequence
  Synthetic
agugaugacucaugguca

SEQ ID NO: 473558 - RNA, 19 nt, Artificial Sequence
  Synthetic
cagugaugacucaugguca

SEQ ID NO: 473559 - RNA, 20 nt, Artificial Sequence
  Synthetic
ccagugaugacucaugguca

SEQ ID NO: 473560 - RNA, 21 nt, Artificial Sequence
  Synthetic
uccagugaugacucaugguca

SEQ ID NO: 473561 - RNA, 22 nt, Artificial Sequence
  Synthetic
uuccagugaugacucaugguca

SEQ ID NO: 473562 - RNA, 23 nt, Artificial Sequence
  Synthetic
auuccagugaugacucaugguca

SEQ ID NO: 473563 - RNA, 24 nt, Artificial Sequence
  Synthetic
aauuccagugaugacucaugguca

SEQ ID NO: 473564 - RNA, 18 nt, Artificial Sequence
  Synthetic
aaaccauaucauugguca

SEQ ID NO: 473565 - RNA, 19 nt, Artificial Sequence
  Synthetic
caaaccauaucauugguca

SEQ ID NO: 473566 - RNA, 20 nt, Artificial Sequence
  Synthetic
ccaaaccauaucauugguca

SEQ ID NO: 473567 - RNA, 21 nt, Artificial Sequence
  Synthetic
gccaaaccauaucauugguca

SEQ ID NO: 473568 - RNA, 22 nt, Artificial Sequence
  Synthetic
agccaaaccauaucauugguca

SEQ ID NO: 473569 - RNA, 23 nt, Artificial Sequence
  Synthetic
cagccaaaccauaucauugguca

SEQ ID NO: 473570 - RNA, 24 nt, Artificial Sequence
  Synthetic
acagccaaaccauaucauugguca

SEQ ID NO: 473571 - RNA, 18 nt, Artificial Sequence
  Synthetic
ugaaaugcuaguugguca

SEQ ID NO: 473572 - RNA, 19 nt, Artificial Sequence
  Synthetic
cugaaaugcuaguugguca

SEQ ID NO: 473573 - RNA, 20 nt, Artificial Sequence
  Synthetic
gcugaaaugcuaguugguca

SEQ ID NO: 473574 - RNA, 21 nt, Artificial Sequence
  Synthetic
agcugaaaugcuaguugguca

SEQ ID NO: 473575 - RNA, 22 nt, Artificial Sequence
  Synthetic
uagcugaaaugcuaguugguca

SEQ ID NO: 473576 - RNA, 23 nt, Artificial Sequence
  Synthetic
uuagcugaaaugcuaguugguca

SEQ ID NO: 473577 - RNA, 24 nt, Artificial Sequence
  Synthetic
uuuagcugaaaugcuaguugguca

SEQ ID NO: 473578 - RNA, 18 nt, Artificial Sequence
  Synthetic
uuggccaaucaaauguca

SEQ ID NO: 473579 - RNA, 19 nt, Artificial Sequence
  Synthetic
uuuggccaaucaaauguca

SEQ ID NO: 473580 - RNA, 20 nt, Artificial Sequence
  Synthetic
cuuuggccaaucaaauguca

SEQ ID NO: 473581 - RNA, 21 nt, Artificial Sequence
  Synthetic
gcuuuggccaaucaaauguca

SEQ ID NO: 473582 - RNA, 22 nt, Artificial Sequence
  Synthetic
ugcuuuggccaaucaaauguca

SEQ ID NO: 473583 - RNA, 23 nt, Artificial Sequence
  Synthetic
uugcuuuggccaaucaaauguca

SEQ ID NO: 473584 - RNA, 24 nt, Artificial Sequence
  Synthetic
uuugcuuuggccaaucaaauguca

SEQ ID NO: 473585 - RNA, 18 nt, Artificial Sequence
  Synthetic
cagauuucuuaaauguca

SEQ ID NO: 473586 - RNA, 19 nt, Artificial Sequence
  Synthetic
acagauuucuuaaauguca

SEQ ID NO: 473587 - RNA, 20 nt, Artificial Sequence
  Synthetic
aacagauuucuuaaauguca

SEQ ID NO: 473588 - RNA, 21 nt, Artificial Sequence
  Synthetic
aaacagauuucuuaaauguca

SEQ ID NO: 473589 - RNA, 22 nt, Artificial Sequence
  Synthetic
aaaacagauuucuuaaauguca

SEQ ID NO: 473590 - RNA, 23 nt, Artificial Sequence
  Synthetic
gaaaacagauuucuuaaauguca

SEQ ID NO: 473591 - RNA, 24 nt, Artificial Sequence
  Synthetic
agaaaacagauuucuuaaauguca

SEQ ID NO: 473592 - RNA, 18 nt, Artificial Sequence
  Synthetic
aauuccuauagaauguca

SEQ ID NO: 473593 - RNA, 19 nt, Artificial Sequence
  Synthetic
caauuccuauagaauguca

SEQ ID NO: 473594 - RNA, 20 nt, Artificial Sequence
  Synthetic
ccaauuccuauagaauguca

SEQ ID NO: 473595 - RNA, 21 nt, Artificial Sequence
  Synthetic
accaauuccuauagaauguca

SEQ ID NO: 473596 - RNA, 22 nt, Artificial Sequence
  Synthetic
gaccaauuccuauagaauguca

SEQ ID NO: 473597 - RNA, 23 nt, Artificial Sequence
  Synthetic
ugaccaauuccuauagaauguca

SEQ ID NO: 473598 - RNA, 24 nt, Artificial Sequence
  Synthetic
cugaccaauuccuauagaauguca

SEQ ID NO: 473599 - RNA, 18 nt, Artificial Sequence
  Synthetic
cguguuaguggaauguca

SEQ ID NO: 473600 - RNA, 19 nt, Artificial Sequence
  Synthetic
ucguguuaguggaauguca

SEQ ID NO: 473601 - RNA, 20 nt, Artificial Sequence
  Synthetic
uucguguuaguggaauguca

SEQ ID NO: 473602 - RNA, 21 nt, Artificial Sequence
  Synthetic
cuucguguuaguggaauguca

SEQ ID NO: 473603 - RNA, 22 nt, Artificial Sequence
  Synthetic
acuucguguuaguggaauguca

SEQ ID NO: 473604 - RNA, 23 nt, Artificial Sequence
  Synthetic
aacuucguguuaguggaauguca

SEQ ID NO: 473605 - RNA, 24 nt, Artificial Sequence
  Synthetic
caacuucguguuaguggaauguca

SEQ ID NO: 473606 - RNA, 18 nt, Artificial Sequence
  Synthetic
aacaauaaauuaauguca

SEQ ID NO: 473607 - RNA, 19 nt, Artificial Sequence
  Synthetic
caacaauaaauuaauguca

SEQ ID NO: 473608 - RNA, 20 nt, Artificial Sequence
  Synthetic
acaacaauaaauuaauguca

SEQ ID NO: 473609 - RNA, 21 nt, Artificial Sequence
  Synthetic
aacaacaauaaauuaauguca

SEQ ID NO: 473610 - RNA, 22 nt, Artificial Sequence
  Synthetic
uaacaacaauaaauuaauguca

SEQ ID NO: 473611 - RNA, 23 nt, Artificial Sequence
  Synthetic
uuaacaacaauaaauuaauguca

SEQ ID NO: 473612 - RNA, 24 nt, Artificial Sequence
  Synthetic
cuuaacaacaauaaauuaauguca

SEQ ID NO: 473613 - RNA, 18 nt, Artificial Sequence
  Synthetic
aaauuccucuuaauguca

SEQ ID NO: 473614 - RNA, 19 nt, Artificial Sequence
  Synthetic
caaauuccucuuaauguca

SEQ ID NO: 473615 - RNA, 20 nt, Artificial Sequence
  Synthetic
ucaaauuccucuuaauguca

SEQ ID NO: 473616 - RNA, 21 nt, Artificial Sequence
  Synthetic
aucaaauuccucuuaauguca

SEQ ID NO: 473617 - RNA, 22 nt, Artificial Sequence
  Synthetic
aaucaaauuccucuuaauguca

SEQ ID NO: 473618 - RNA, 23 nt, Artificial Sequence
  Synthetic
aaaucaaauuccucuuaauguca

SEQ ID NO: 473619 - RNA, 24 nt, Artificial Sequence
  Synthetic
aaaaucaaauuccucuuaauguca

SEQ ID NO: 473620 - RNA, 18 nt, Artificial Sequence
  Synthetic
cauaauccccagauguca

SEQ ID NO: 473621 - RNA, 19 nt, Artificial Sequence
  Synthetic
ccauaauccccagauguca

SEQ ID NO: 473622 - RNA, 20 nt, Artificial Sequence
  Synthetic
cccauaauccccagauguca

SEQ ID NO: 473623 - RNA, 21 nt, Artificial Sequence
  Synthetic
ucccauaauccccagauguca

SEQ ID NO: 473624 - RNA, 22 nt, Artificial Sequence
  Synthetic
uucccauaauccccagauguca

SEQ ID NO: 473625 - RNA, 23 nt, Artificial Sequence
  Synthetic
guucccauaauccccagauguca

SEQ ID NO: 473626 - RNA, 24 nt, Artificial Sequence
  Synthetic
aguucccauaauccccagauguca

SEQ ID NO: 473627 - RNA, 18 nt, Artificial Sequence
  Synthetic
ccuaaaacauagauguca

SEQ ID NO: 473628 - RNA, 19 nt, Artificial Sequence
  Synthetic
gccuaaaacauagauguca

SEQ ID NO: 473629 - RNA, 20 nt, Artificial Sequence
  Synthetic
ugccuaaaacauagauguca

SEQ ID NO: 473630 - RNA, 21 nt, Artificial Sequence
  Synthetic
uugccuaaaacauagauguca

SEQ ID NO: 473631 - RNA, 22 nt, Artificial Sequence
  Synthetic
uuugccuaaaacauagauguca

SEQ ID NO: 473632 - RNA, 23 nt, Artificial Sequence
  Synthetic
uuuugccuaaaacauagauguca

SEQ ID NO: 473633 - RNA, 24 nt, Artificial Sequence
  Synthetic
auuuugccuaaaacauagauguca

SEQ ID NO: 473634 - RNA, 18 nt, Artificial Sequence
  Synthetic
ugggcuccugggauguca

SEQ ID NO: 473635 - RNA, 19 nt, Artificial Sequence
  Synthetic
gugggcuccugggauguca

SEQ ID NO: 473636 - RNA, 20 nt, Artificial Sequence
  Synthetic
ugugggcuccugggauguca

SEQ ID NO: 473637 - RNA, 21 nt, Artificial Sequence
  Synthetic
cugugggcuccugggauguca

SEQ ID NO: 473638 - RNA, 22 nt, Artificial Sequence
  Synthetic
ucugugggcuccugggauguca

SEQ ID NO: 473639 - RNA, 23 nt, Artificial Sequence
  Synthetic
aucugugggcuccugggauguca

SEQ ID NO: 473640 - RNA, 24 nt, Artificial Sequence
  Synthetic
aaucugugggcuccugggauguca

SEQ ID NO: 473641 - RNA, 18 nt, Artificial Sequence
  Synthetic
guuuguuguuauauguca

SEQ ID NO: 473642 - RNA, 19 nt, Artificial Sequence
  Synthetic
uguuuguuguuauauguca

SEQ ID NO: 473643 - RNA, 20 nt, Artificial Sequence
  Synthetic
auguuuguuguuauauguca

SEQ ID NO: 473644 - RNA, 21 nt, Artificial Sequence
  Synthetic
aauguuuguuguuauauguca

SEQ ID NO: 473645 - RNA, 22 nt, Artificial Sequence
  Synthetic
aaauguuuguuguuauauguca

SEQ ID NO: 473646 - RNA, 23 nt, Artificial Sequence
  Synthetic
uaaauguuuguuguuauauguca

SEQ ID NO: 473647 - RNA, 24 nt, Artificial Sequence
  Synthetic
auaaauguuuguuguuauauguca

SEQ ID NO: 473648 - RNA, 18 nt, Artificial Sequence
  Synthetic
aauaaaaucaguauguca

SEQ ID NO: 473649 - RNA, 19 nt, Artificial Sequence
  Synthetic
aaauaaaaucaguauguca

SEQ ID NO: 473650 - RNA, 20 nt, Artificial Sequence
  Synthetic
caaauaaaaucaguauguca

SEQ ID NO: 473651 - RNA, 21 nt, Artificial Sequence
  Synthetic
gcaaauaaaaucaguauguca

SEQ ID NO: 473652 - RNA, 22 nt, Artificial Sequence
  Synthetic
agcaaauaaaaucaguauguca

SEQ ID NO: 473653 - RNA, 23 nt, Artificial Sequence
  Synthetic
aagcaaauaaaaucaguauguca

SEQ ID NO: 473654 - RNA, 24 nt, Artificial Sequence
  Synthetic
aaagcaaauaaaaucaguauguca

SEQ ID NO: 473655 - RNA, 18 nt, Artificial Sequence
  Synthetic
uagcuuucuuuuauguca

SEQ ID NO: 473656 - RNA, 19 nt, Artificial Sequence
  Synthetic
cuagcuuucuuuuauguca

SEQ ID NO: 473657 - RNA, 20 nt, Artificial Sequence
  Synthetic
ucuagcuuucuuuuauguca

SEQ ID NO: 473658 - RNA, 21 nt, Artificial Sequence
  Synthetic
uucuagcuuucuuuuauguca

SEQ ID NO: 473659 - RNA, 22 nt, Artificial Sequence
  Synthetic
cuucuagcuuucuuuuauguca

SEQ ID NO: 473660 - RNA, 23 nt, Artificial Sequence
  Synthetic
gcuucuagcuuucuuuuauguca

SEQ ID NO: 473661 - RNA, 24 nt, Artificial Sequence
  Synthetic
ugcuucuagcuuucuuuuauguca

SEQ ID NO: 473662 - RNA, 18 nt, Artificial Sequence
  Synthetic
cucugagcucaacuguca

SEQ ID NO: 473663 - RNA, 19 nt, Artificial Sequence
  Synthetic
acucugagcucaacuguca

SEQ ID NO: 473664 - RNA, 20 nt, Artificial Sequence
  Synthetic
cacucugagcucaacuguca

SEQ ID NO: 473665 - RNA, 21 nt, Artificial Sequence
  Synthetic
ucacucugagcucaacuguca

SEQ ID NO: 473666 - RNA, 22 nt, Artificial Sequence
  Synthetic
uucacucugagcucaacuguca

SEQ ID NO: 473667 - RNA, 23 nt, Artificial Sequence
  Synthetic
uuucacucugagcucaacuguca

SEQ ID NO: 473668 - RNA, 24 nt, Artificial Sequence
  Synthetic
uuuucacucugagcucaacuguca

SEQ ID NO: 473669 - RNA, 18 nt, Artificial Sequence
  Synthetic
gcuuuucuuccacuguca

SEQ ID NO: 473670 - RNA, 19 nt, Artificial Sequence
  Synthetic
agcuuuucuuccacuguca

SEQ ID NO: 473671 - RNA, 20 nt, Artificial Sequence
  Synthetic
uagcuuuucuuccacuguca

SEQ ID NO: 473672 - RNA, 21 nt, Artificial Sequence
  Synthetic
cuagcuuuucuuccacuguca

SEQ ID NO: 473673 - RNA, 22 nt, Artificial Sequence
  Synthetic
ucuagcuuuucuuccacuguca

SEQ ID NO: 473674 - RNA, 23 nt, Artificial Sequence
  Synthetic
cucuagcuuuucuuccacuguca

SEQ ID NO: 473675 - RNA, 24 nt, Artificial Sequence
  Synthetic
ccucuagcuuuucuuccacuguca

SEQ ID NO: 473676 - RNA, 18 nt, Artificial Sequence
  Synthetic
ggggaaggagaccuguca

SEQ ID NO: 473677 - RNA, 19 nt, Artificial Sequence
  Synthetic
uggggaaggagaccuguca

SEQ ID NO: 473678 - RNA, 20 nt, Artificial Sequence
  Synthetic
uuggggaaggagaccuguca

SEQ ID NO: 473679 - RNA, 21 nt, Artificial Sequence
  Synthetic
uuuggggaaggagaccuguca

SEQ ID NO: 473680 - RNA, 22 nt, Artificial Sequence
  Synthetic
auuuggggaaggagaccuguca

SEQ ID NO: 473681 - RNA, 23 nt, Artificial Sequence
  Synthetic
gauuuggggaaggagaccuguca

SEQ ID NO: 473682 - RNA, 24 nt, Artificial Sequence
  Synthetic
cgauuuggggaaggagaccuguca

SEQ ID NO: 473683 - RNA, 18 nt, Artificial Sequence
  Synthetic
guaugauggauccuguca

SEQ ID NO: 473684 - RNA, 19 nt, Artificial Sequence
  Synthetic
aguaugauggauccuguca

SEQ ID NO: 473685 - RNA, 20 nt, Artificial Sequence
  Synthetic
gaguaugauggauccuguca

SEQ ID NO: 473686 - RNA, 21 nt, Artificial Sequence
  Synthetic
ggaguaugauggauccuguca

SEQ ID NO: 473687 - RNA, 22 nt, Artificial Sequence
  Synthetic
uggaguaugauggauccuguca

SEQ ID NO: 473688 - RNA, 23 nt, Artificial Sequence
  Synthetic
uuggaguaugauggauccuguca

SEQ ID NO: 473689 - RNA, 24 nt, Artificial Sequence
  Synthetic
uuuggaguaugauggauccuguca

SEQ ID NO: 473690 - RNA, 18 nt, Artificial Sequence
  Synthetic
uauaguagaguccuguca

SEQ ID NO: 473691 - RNA, 19 nt, Artificial Sequence
  Synthetic
uuauaguagaguccuguca

SEQ ID NO: 473692 - RNA, 20 nt, Artificial Sequence
  Synthetic
cuuauaguagaguccuguca

SEQ ID NO: 473693 - RNA, 21 nt, Artificial Sequence
  Synthetic
acuuauaguagaguccuguca

SEQ ID NO: 473694 - RNA, 22 nt, Artificial Sequence
  Synthetic
aacuuauaguagaguccuguca

SEQ ID NO: 473695 - RNA, 23 nt, Artificial Sequence
  Synthetic
aaacuuauaguagaguccuguca

SEQ ID NO: 473696 - RNA, 24 nt, Artificial Sequence
  Synthetic
uaaacuuauaguagaguccuguca

SEQ ID NO: 473697 - RNA, 18 nt, Artificial Sequence
  Synthetic
aagcagggcaggcuguca

SEQ ID NO: 473698 - RNA, 19 nt, Artificial Sequence
  Synthetic
aaagcagggcaggcuguca

SEQ ID NO: 473699 - RNA, 20 nt, Artificial Sequence
  Synthetic
uaaagcagggcaggcuguca

SEQ ID NO: 473700 - RNA, 21 nt, Artificial Sequence
  Synthetic
uuaaagcagggcaggcuguca

SEQ ID NO: 473701 - RNA, 22 nt, Artificial Sequence
  Synthetic
uuuaaagcagggcaggcuguca

SEQ ID NO: 473702 - RNA, 23 nt, Artificial Sequence
  Synthetic
uuuuaaagcagggcaggcuguca

SEQ ID NO: 473703 - RNA, 24 nt, Artificial Sequence
  Synthetic
uuuuuaaagcagggcaggcuguca

SEQ ID NO: 473704 - RNA, 18 nt, Artificial Sequence
  Synthetic
ugcuugucugcucuguca

SEQ ID NO: 473705 - RNA, 19 nt, Artificial Sequence
  Synthetic
uugcuugucugcucuguca

SEQ ID NO: 473706 - RNA, 20 nt, Artificial Sequence
  Synthetic
uuugcuugucugcucuguca

SEQ ID NO: 473707 - RNA, 21 nt, Artificial Sequence
  Synthetic
uuuugcuugucugcucuguca

SEQ ID NO: 473708 - RNA, 22 nt, Artificial Sequence
  Synthetic
cuuuugcuugucugcucuguca

SEQ ID NO: 473709 - RNA, 23 nt, Artificial Sequence
  Synthetic
ccuuuugcuugucugcucuguca

SEQ ID NO: 473710 - RNA, 24 nt, Artificial Sequence
  Synthetic
uccuuuugcuugucugcucuguca

SEQ ID NO: 473711 - RNA, 18 nt, Artificial Sequence
  Synthetic
auuccugggagucuguca

SEQ ID NO: 473712 - RNA, 19 nt, Artificial Sequence
  Synthetic
cauuccugggagucuguca

SEQ ID NO: 473713 - RNA, 20 nt, Artificial Sequence
  Synthetic
acauuccugggagucuguca

SEQ ID NO: 473714 - RNA, 21 nt, Artificial Sequence
  Synthetic
cacauuccugggagucuguca

SEQ ID NO: 473715 - RNA, 22 nt, Artificial Sequence
  Synthetic
gcacauuccugggagucuguca

SEQ ID NO: 473716 - RNA, 23 nt, Artificial Sequence
  Synthetic
agcacauuccugggagucuguca

SEQ ID NO: 473717 - RNA, 24 nt, Artificial Sequence
  Synthetic
cagcacauuccugggagucuguca

SEQ ID NO: 473718 - RNA, 18 nt, Artificial Sequence
  Synthetic
cugucugugaaaguguca

SEQ ID NO: 473719 - RNA, 19 nt, Artificial Sequence
  Synthetic
acugucugugaaaguguca

SEQ ID NO: 473720 - RNA, 20 nt, Artificial Sequence
  Synthetic
uacugucugugaaaguguca

SEQ ID NO: 473721 - RNA, 21 nt, Artificial Sequence
  Synthetic
auacugucugugaaaguguca

SEQ ID NO: 473722 - RNA, 22 nt, Artificial Sequence
  Synthetic
aauacugucugugaaaguguca

SEQ ID NO: 473723 - RNA, 23 nt, Artificial Sequence
  Synthetic
gaauacugucugugaaaguguca

SEQ ID NO: 473724 - RNA, 24 nt, Artificial Sequence
  Synthetic
ggaauacugucugugaaaguguca

SEQ ID NO: 473725 - RNA, 18 nt, Artificial Sequence
  Synthetic
ucuguaaauaaaguguca

SEQ ID NO: 473726 - RNA, 19 nt, Artificial Sequence
  Synthetic
uucuguaaauaaaguguca

SEQ ID NO: 473727 - RNA, 20 nt, Artificial Sequence
  Synthetic
uuucuguaaauaaaguguca

SEQ ID NO: 473728 - RNA, 21 nt, Artificial Sequence
  Synthetic
guuucuguaaauaaaguguca

SEQ ID NO: 473729 - RNA, 22 nt, Artificial Sequence
  Synthetic
cguuucuguaaauaaaguguca

SEQ ID NO: 473730 - RNA, 23 nt, Artificial Sequence
  Synthetic
ucguuucuguaaauaaaguguca

SEQ ID NO: 473731 - RNA, 24 nt, Artificial Sequence
  Synthetic
cucguuucuguaaauaaaguguca

SEQ ID NO: 473732 - RNA, 18 nt, Artificial Sequence
  Synthetic
uuuagaucuaaaguguca

SEQ ID NO: 473733 - RNA, 19 nt, Artificial Sequence
  Synthetic
auuuagaucuaaaguguca

SEQ ID NO: 473734 - RNA, 20 nt, Artificial Sequence
  Synthetic
aauuuagaucuaaaguguca

SEQ ID NO: 473735 - RNA, 21 nt, Artificial Sequence
  Synthetic
aaauuuagaucuaaaguguca

SEQ ID NO: 473736 - RNA, 22 nt, Artificial Sequence
  Synthetic
uaaauuuagaucuaaaguguca

SEQ ID NO: 473737 - RNA, 23 nt, Artificial Sequence
  Synthetic
auaaauuuagaucuaaaguguca

SEQ ID NO: 473738 - RNA, 24 nt, Artificial Sequence
  Synthetic
aauaaauuuagaucuaaaguguca

SEQ ID NO: 473739 - RNA, 18 nt, Artificial Sequence
  Synthetic
gaugaagacagaguguca

SEQ ID NO: 473740 - RNA, 19 nt, Artificial Sequence
  Synthetic
ugaugaagacagaguguca

SEQ ID NO: 473741 - RNA, 20 nt, Artificial Sequence
  Synthetic
uugaugaagacagaguguca

SEQ ID NO: 473742 - RNA, 21 nt, Artificial Sequence
  Synthetic
guugaugaagacagaguguca

SEQ ID NO: 473743 - RNA, 22 nt, Artificial Sequence
  Synthetic
uguugaugaagacagaguguca

SEQ ID NO: 473744 - RNA, 23 nt, Artificial Sequence
  Synthetic
auguugaugaagacagaguguca

SEQ ID NO: 473745 - RNA, 24 nt, Artificial Sequence
  Synthetic
aauguugaugaagacagaguguca

SEQ ID NO: 473746 - RNA, 18 nt, Artificial Sequence
  Synthetic
acagcccugaacguguca

SEQ ID NO: 473747 - RNA, 19 nt, Artificial Sequence
  Synthetic
cacagcccugaacguguca

SEQ ID NO: 473748 - RNA, 20 nt, Artificial Sequence
  Synthetic
acacagcccugaacguguca

SEQ ID NO: 473749 - RNA, 21 nt, Artificial Sequence
  Synthetic
uacacagcccugaacguguca

SEQ ID NO: 473750 - RNA, 22 nt, Artificial Sequence
  Synthetic
auacacagcccugaacguguca

SEQ ID NO: 473751 - RNA, 23 nt, Artificial Sequence
  Synthetic
uauacacagcccugaacguguca

SEQ ID NO: 473752 - RNA, 24 nt, Artificial Sequence
  Synthetic
guauacacagcccugaacguguca

SEQ ID NO: 473753 - RNA, 18 nt, Artificial Sequence
  Synthetic
cauaauccccacguguca

SEQ ID NO: 473754 - RNA, 19 nt, Artificial Sequence
  Synthetic
ccauaauccccacguguca

SEQ ID NO: 473755 - RNA, 20 nt, Artificial Sequence
  Synthetic
uccauaauccccacguguca

SEQ ID NO: 473756 - RNA, 21 nt, Artificial Sequence
  Synthetic
cuccauaauccccacguguca

SEQ ID NO: 473757 - RNA, 22 nt, Artificial Sequence
  Synthetic
ccuccauaauccccacguguca

SEQ ID NO: 473758 - RNA, 23 nt, Artificial Sequence
  Synthetic
accuccauaauccccacguguca

SEQ ID NO: 473759 - RNA, 24 nt, Artificial Sequence
  Synthetic
aaccuccauaauccccacguguca

SEQ ID NO: 473760 - RNA, 18 nt, Artificial Sequence
  Synthetic
cauaauccccagguguca

SEQ ID NO: 473761 - RNA, 19 nt, Artificial Sequence
  Synthetic
ccauaauccccagguguca

SEQ ID NO: 473762 - RNA, 20 nt, Artificial Sequence
  Synthetic
cccauaauccccagguguca

SEQ ID NO: 473763 - RNA, 21 nt, Artificial Sequence
  Synthetic
ccccauaauccccagguguca

SEQ ID NO: 473764 - RNA, 22 nt, Artificial Sequence
  Synthetic
uccccauaauccccagguguca

SEQ ID NO: 473765 - RNA, 23 nt, Artificial Sequence
  Synthetic
auccccauaauccccagguguca

SEQ ID NO: 473766 - RNA, 24 nt, Artificial Sequence
  Synthetic
aauccccauaauccccagguguca

SEQ ID NO: 473767 - RNA, 18 nt, Artificial Sequence
  Synthetic
cauaauccccauguguca

SEQ ID NO: 473768 - RNA, 19 nt, Artificial Sequence
  Synthetic
ccauaauccccauguguca

SEQ ID NO: 473769 - RNA, 20 nt, Artificial Sequence
  Synthetic
cccauaauccccauguguca

SEQ ID NO: 473770 - RNA, 21 nt, Artificial Sequence
  Synthetic
ucccauaauccccauguguca

SEQ ID NO: 473771 - RNA, 22 nt, Artificial Sequence
  Synthetic
cucccauaauccccauguguca

SEQ ID NO: 473772 - RNA, 23 nt, Artificial Sequence
  Synthetic
gcucccauaauccccauguguca

SEQ ID NO: 473773 - RNA, 24 nt, Artificial Sequence
  Synthetic
agcucccauaauccccauguguca

SEQ ID NO: 473774 - RNA, 18 nt, Artificial Sequence
  Synthetic
gacaccuuuuauguguca

SEQ ID NO: 473775 - RNA, 19 nt, Artificial Sequence
  Synthetic
agacaccuuuuauguguca

SEQ ID NO: 473776 - RNA, 20 nt, Artificial Sequence
  Synthetic
aagacaccuuuuauguguca

SEQ ID NO: 473777 - RNA, 21 nt, Artificial Sequence
  Synthetic
aaagacaccuuuuauguguca

SEQ ID NO: 473778 - RNA, 22 nt, Artificial Sequence
  Synthetic
gaaagacaccuuuuauguguca

SEQ ID NO: 473779 - RNA, 23 nt, Artificial Sequence
  Synthetic
agaaagacaccuuuuauguguca

SEQ ID NO: 473780 - RNA, 24 nt, Artificial Sequence
  Synthetic
cagaaagacaccuuuuauguguca

SEQ ID NO: 473781 - RNA, 18 nt, Artificial Sequence
  Synthetic
ugugugugugguguguca

SEQ ID NO: 473782 - RNA, 19 nt, Artificial Sequence
  Synthetic
gugugugugugguguguca

SEQ ID NO: 473783 - RNA, 20 nt, Artificial Sequence
  Synthetic
ugugugugugugguguguca

SEQ ID NO: 473784 - RNA, 21 nt, Artificial Sequence
  Synthetic
gugugugugugugguguguca

SEQ ID NO: 473785 - RNA, 22 nt, Artificial Sequence
  Synthetic
ugugugugugugugguguguca

SEQ ID NO: 473786 - RNA, 23 nt, Artificial Sequence
  Synthetic
gugugugugugugugguguguca

SEQ ID NO: 473787 - RNA, 24 nt, Artificial Sequence
  Synthetic
ugugugugugugugugguguguca

SEQ ID NO: 473788 - RNA, 18 nt, Artificial Sequence
  Synthetic
caaauauucauuguguca

SEQ ID NO: 473789 - RNA, 19 nt, Artificial Sequence
  Synthetic
ccaaauauucauuguguca

SEQ ID NO: 473790 - RNA, 20 nt, Artificial Sequence
  Synthetic
gccaaauauucauuguguca

SEQ ID NO: 473791 - RNA, 21 nt, Artificial Sequence
  Synthetic
ugccaaauauucauuguguca

SEQ ID NO: 473792 - RNA, 22 nt, Artificial Sequence
  Synthetic
cugccaaauauucauuguguca

SEQ ID NO: 473793 - RNA, 23 nt, Artificial Sequence
  Synthetic
acugccaaauauucauuguguca

SEQ ID NO: 473794 - RNA, 24 nt, Artificial Sequence
  Synthetic
aacugccaaauauucauuguguca

SEQ ID NO: 473795 - RNA, 18 nt, Artificial Sequence
  Synthetic
gggggaaagaaauuguca

SEQ ID NO: 473796 - RNA, 19 nt, Artificial Sequence
  Synthetic
ggggggaaagaaauuguca

SEQ ID NO: 473797 - RNA, 20 nt, Artificial Sequence
  Synthetic
aggggggaaagaaauuguca

SEQ ID NO: 473798 - RNA, 21 nt, Artificial Sequence
  Synthetic
caggggggaaagaaauuguca

SEQ ID NO: 473799 - RNA, 22 nt, Artificial Sequence
  Synthetic
gcaggggggaaagaaauuguca

SEQ ID NO: 473800 - RNA, 23 nt, Artificial Sequence
  Synthetic
ugcaggggggaaagaaauuguca

SEQ ID NO: 473801 - RNA, 24 nt, Artificial Sequence
  Synthetic
augcaggggggaaagaaauuguca

SEQ ID NO: 473802 - RNA, 18 nt, Artificial Sequence
  Synthetic
uccccaaguaaauuguca

SEQ ID NO: 473803 - RNA, 19 nt, Artificial Sequence
  Synthetic
guccccaaguaaauuguca

SEQ ID NO: 473804 - RNA, 20 nt, Artificial Sequence
  Synthetic
uguccccaaguaaauuguca

SEQ ID NO: 473805 - RNA, 21 nt, Artificial Sequence
  Synthetic
guguccccaaguaaauuguca

SEQ ID NO: 473806 - RNA, 22 nt, Artificial Sequence
  Synthetic
uguguccccaaguaaauuguca

SEQ ID NO: 473807 - RNA, 23 nt, Artificial Sequence
  Synthetic
uuguguccccaaguaaauuguca

SEQ ID NO: 473808 - RNA, 24 nt, Artificial Sequence
  Synthetic
uuuguguccccaaguaaauuguca

SEQ ID NO: 473809 - RNA, 18 nt, Artificial Sequence
  Synthetic
aucuagguagaauuguca

SEQ ID NO: 473810 - RNA, 19 nt, Artificial Sequence
  Synthetic
uaucuagguagaauuguca

SEQ ID NO: 473811 - RNA, 20 nt, Artificial Sequence
  Synthetic
guaucuagguagaauuguca

SEQ ID NO: 473812 - RNA, 21 nt, Artificial Sequence
  Synthetic
aguaucuagguagaauuguca

SEQ ID NO: 473813 - RNA, 22 nt, Artificial Sequence
  Synthetic
aaguaucuagguagaauuguca

SEQ ID NO: 473814 - RNA, 23 nt, Artificial Sequence
  Synthetic
uaaguaucuagguagaauuguca

SEQ ID NO: 473815 - RNA, 24 nt, Artificial Sequence
  Synthetic
auaaguaucuagguagaauuguca

SEQ ID NO: 473816 - RNA, 18 nt, Artificial Sequence
  Synthetic
augauuguauaauuguca

SEQ ID NO: 473817 - RNA, 19 nt, Artificial Sequence
  Synthetic
uaugauuguauaauuguca

SEQ ID NO: 473818 - RNA, 20 nt, Artificial Sequence
  Synthetic
uuaugauuguauaauuguca

SEQ ID NO: 473819 - RNA, 21 nt, Artificial Sequence
  Synthetic
auuaugauuguauaauuguca

SEQ ID NO: 473820 - RNA, 22 nt, Artificial Sequence
  Synthetic
cauuaugauuguauaauuguca

SEQ ID NO: 473821 - RNA, 23 nt, Artificial Sequence
  Synthetic
ucauuaugauuguauaauuguca

SEQ ID NO: 473822 - RNA, 24 nt, Artificial Sequence
  Synthetic
aucauuaugauuguauaauuguca

SEQ ID NO: 473823 - RNA, 18 nt, Artificial Sequence
  Synthetic
auaguguuuuaauuguca

SEQ ID NO: 473824 - RNA, 19 nt, Artificial Sequence
  Synthetic
aauaguguuuuaauuguca

SEQ ID NO: 473825 - RNA, 20 nt, Artificial Sequence
  Synthetic
aaauaguguuuuaauuguca

SEQ ID NO: 473826 - RNA, 21 nt, Artificial Sequence
  Synthetic
aaaauaguguuuuaauuguca

SEQ ID NO: 473827 - RNA, 22 nt, Artificial Sequence
  Synthetic
aaaaauaguguuuuaauuguca

SEQ ID NO: 473828 - RNA, 23 nt, Artificial Sequence
  Synthetic
aaaaaauaguguuuuaauuguca

SEQ ID NO: 473829 - RNA, 24 nt, Artificial Sequence
  Synthetic
aaaaaaauaguguuuuaauuguca

SEQ ID NO: 473830 - RNA, 18 nt, Artificial Sequence
  Synthetic
ugaccagggacauuguca

SEQ ID NO: 473831 - RNA, 19 nt, Artificial Sequence
  Synthetic
gugaccagggacauuguca

SEQ ID NO: 473832 - RNA, 20 nt, Artificial Sequence
  Synthetic
ggugaccagggacauuguca

SEQ ID NO: 473833 - RNA, 21 nt, Artificial Sequence
  Synthetic
gggugaccagggacauuguca

SEQ ID NO: 473834 - RNA, 22 nt, Artificial Sequence
  Synthetic
ugggugaccagggacauuguca

SEQ ID NO: 473835 - RNA, 23 nt, Artificial Sequence
  Synthetic
uugggugaccagggacauuguca

SEQ ID NO: 473836 - RNA, 24 nt, Artificial Sequence
  Synthetic
cuugggugaccagggacauuguca

SEQ ID NO: 473837 - RNA, 18 nt, Artificial Sequence
  Synthetic
guuugaaaacgauuguca

SEQ ID NO: 473838 - RNA, 19 nt, Artificial Sequence
  Synthetic
aguuugaaaacgauuguca

SEQ ID NO: 473839 - RNA, 20 nt, Artificial Sequence
  Synthetic
aaguuugaaaacgauuguca

SEQ ID NO: 473840 - RNA, 21 nt, Artificial Sequence
  Synthetic
caaguuugaaaacgauuguca

SEQ ID NO: 473841 - RNA, 22 nt, Artificial Sequence
  Synthetic
ccaaguuugaaaacgauuguca

SEQ ID NO: 473842 - RNA, 23 nt, Artificial Sequence
  Synthetic
accaaguuugaaaacgauuguca

SEQ ID NO: 473843 - RNA, 24 nt, Artificial Sequence
  Synthetic
aaccaaguuugaaaacgauuguca

SEQ ID NO: 473844 - RNA, 18 nt, Artificial Sequence
  Synthetic
ucuuuauaauauuuguca

SEQ ID NO: 473845 - RNA, 19 nt, Artificial Sequence
  Synthetic
aucuuuauaauauuuguca

SEQ ID NO: 473846 - RNA, 20 nt, Artificial Sequence
  Synthetic
caucuuuauaauauuuguca

SEQ ID NO: 473847 - RNA, 21 nt, Artificial Sequence
  Synthetic
gcaucuuuauaauauuuguca

SEQ ID NO: 473848 - RNA, 22 nt, Artificial Sequence
  Synthetic
ggcaucuuuauaauauuuguca

SEQ ID NO: 473849 - RNA, 23 nt, Artificial Sequence
  Synthetic
gggcaucuuuauaauauuuguca

SEQ ID NO: 473850 - RNA, 24 nt, Artificial Sequence
  Synthetic
ggggcaucuuuauaauauuuguca

SEQ ID NO: 473851 - RNA, 18 nt, Artificial Sequence
  Synthetic
agcaauaaccuuuuguca

SEQ ID NO: 473852 - RNA, 19 nt, Artificial Sequence
  Synthetic
gagcaauaaccuuuuguca

SEQ ID NO: 473853 - RNA, 20 nt, Artificial Sequence
  Synthetic
agagcaauaaccuuuuguca

SEQ ID NO: 473854 - RNA, 21 nt, Artificial Sequence
  Synthetic
aagagcaauaaccuuuuguca

SEQ ID NO: 473855 - RNA, 22 nt, Artificial Sequence
  Synthetic
gaagagcaauaaccuuuuguca

SEQ ID NO: 473856 - RNA, 23 nt, Artificial Sequence
  Synthetic
agaagagcaauaaccuuuuguca

SEQ ID NO: 473857 - RNA, 24 nt, Artificial Sequence
  Synthetic
gagaagagcaauaaccuuuuguca

SEQ ID NO: 473858 - RNA, 18 nt, Artificial Sequence
  Synthetic
guucaaaauaaaaauuca

SEQ ID NO: 473859 - RNA, 19 nt, Artificial Sequence
  Synthetic
uguucaaaauaaaaauuca

SEQ ID NO: 473860 - RNA, 20 nt, Artificial Sequence
  Synthetic
uuguucaaaauaaaaauuca

SEQ ID NO: 473861 - RNA, 21 nt, Artificial Sequence
  Synthetic
uuuguucaaaauaaaaauuca

SEQ ID NO: 473862 - RNA, 22 nt, Artificial Sequence
  Synthetic
uuuuguucaaaauaaaaauuca

SEQ ID NO: 473863 - RNA, 23 nt, Artificial Sequence
  Synthetic
cuuuuguucaaaauaaaaauuca

SEQ ID NO: 473864 - RNA, 24 nt, Artificial Sequence
  Synthetic
ccuuuuguucaaaauaaaaauuca

SEQ ID NO: 473865 - RNA, 18 nt, Artificial Sequence
  Synthetic
uuguuugauaaaaauuca

SEQ ID NO: 473866 - RNA, 19 nt, Artificial Sequence
  Synthetic
uuuguuugauaaaaauuca

SEQ ID NO: 473867 - RNA, 20 nt, Artificial Sequence
  Synthetic
auuuguuugauaaaaauuca

SEQ ID NO: 473868 - RNA, 21 nt, Artificial Sequence
  Synthetic
cauuuguuugauaaaaauuca

SEQ ID NO: 473869 - RNA, 22 nt, Artificial Sequence
  Synthetic
ucauuuguuugauaaaaauuca

SEQ ID NO: 473870 - RNA, 23 nt, Artificial Sequence
  Synthetic
uucauuuguuugauaaaaauuca

SEQ ID NO: 473871 - RNA, 24 nt, Artificial Sequence
  Synthetic
guucauuuguuugauaaaaauuca

SEQ ID NO: 473872 - RNA, 18 nt, Artificial Sequence
  Synthetic
gaaagaaaccaaaauuca

SEQ ID NO: 473873 - RNA, 19 nt, Artificial Sequence
  Synthetic
agaaagaaaccaaaauuca

SEQ ID NO: 473874 - RNA, 20 nt, Artificial Sequence
  Synthetic
gagaaagaaaccaaaauuca

SEQ ID NO: 473875 - RNA, 21 nt, Artificial Sequence
  Synthetic
ugagaaagaaaccaaaauuca

SEQ ID NO: 473876 - RNA, 22 nt, Artificial Sequence
  Synthetic
cugagaaagaaaccaaaauuca

SEQ ID NO: 473877 - RNA, 23 nt, Artificial Sequence
  Synthetic
acugagaaagaaaccaaaauuca

SEQ ID NO: 473878 - RNA, 24 nt, Artificial Sequence
  Synthetic
cacugagaaagaaaccaaaauuca

SEQ ID NO: 473879 - RNA, 18 nt, Artificial Sequence
  Synthetic
acagcuauugaaaauuca

SEQ ID NO: 473880 - RNA, 19 nt, Artificial Sequence
  Synthetic
uacagcuauugaaaauuca

SEQ ID NO: 473881 - RNA, 20 nt, Artificial Sequence
  Synthetic
cuacagcuauugaaaauuca

SEQ ID NO: 473882 - RNA, 21 nt, Artificial Sequence
  Synthetic
ucuacagcuauugaaaauuca

SEQ ID NO: 473883 - RNA, 22 nt, Artificial Sequence
  Synthetic
uucuacagcuauugaaaauuca

SEQ ID NO: 473884 - RNA, 23 nt, Artificial Sequence
  Synthetic
cuucuacagcuauugaaaauuca

SEQ ID NO: 473885 - RNA, 24 nt, Artificial Sequence
  Synthetic
ccuucuacagcuauugaaaauuca

SEQ ID NO: 473886 - RNA, 18 nt, Artificial Sequence
  Synthetic
aaguguugcuaaaauuca

SEQ ID NO: 473887 - RNA, 19 nt, Artificial Sequence
  Synthetic
uaaguguugcuaaaauuca

SEQ ID NO: 473888 - RNA, 20 nt, Artificial Sequence
  Synthetic
auaaguguugcuaaaauuca

SEQ ID NO: 473889 - RNA, 21 nt, Artificial Sequence
  Synthetic
uauaaguguugcuaaaauuca

SEQ ID NO: 473890 - RNA, 22 nt, Artificial Sequence
  Synthetic
auauaaguguugcuaaaauuca

SEQ ID NO: 473891 - RNA, 23 nt, Artificial Sequence
  Synthetic
uauauaaguguugcuaaaauuca

SEQ ID NO: 473892 - RNA, 24 nt, Artificial Sequence
  Synthetic
guauauaaguguugcuaaaauuca

SEQ ID NO: 473893 - RNA, 18 nt, Artificial Sequence
  Synthetic
cuagaauagccaaauuca

SEQ ID NO: 473894 - RNA, 19 nt, Artificial Sequence
  Synthetic
ucuagaauagccaaauuca

SEQ ID NO: 473895 - RNA, 20 nt, Artificial Sequence
  Synthetic
aucuagaauagccaaauuca

SEQ ID NO: 473896 - RNA, 21 nt, Artificial Sequence
  Synthetic
gaucuagaauagccaaauuca

SEQ ID NO: 473897 - RNA, 22 nt, Artificial Sequence
  Synthetic
agaucuagaauagccaaauuca

SEQ ID NO: 473898 - RNA, 23 nt, Artificial Sequence
  Synthetic
aagaucuagaauagccaaauuca

SEQ ID NO: 473899 - RNA, 24 nt, Artificial Sequence
  Synthetic
aaagaucuagaauagccaaauuca

SEQ ID NO: 473900 - RNA, 18 nt, Artificial Sequence
  Synthetic
uaaucuaaagcaaauuca

SEQ ID NO: 473901 - RNA, 19 nt, Artificial Sequence
  Synthetic
guaaucuaaagcaaauuca

SEQ ID NO: 473902 - RNA, 20 nt, Artificial Sequence
  Synthetic
aguaaucuaaagcaaauuca

SEQ ID NO: 473903 - RNA, 21 nt, Artificial Sequence
  Synthetic
caguaaucuaaagcaaauuca

SEQ ID NO: 473904 - RNA, 22 nt, Artificial Sequence
  Synthetic
ccaguaaucuaaagcaaauuca

SEQ ID NO: 473905 - RNA, 23 nt, Artificial Sequence
  Synthetic
cccaguaaucuaaagcaaauuca

SEQ ID NO: 473906 - RNA, 24 nt, Artificial Sequence
  Synthetic
ccccaguaaucuaaagcaaauuca

SEQ ID NO: 473907 - RNA, 18 nt, Artificial Sequence
  Synthetic
cccacaggcuuaaauuca

SEQ ID NO: 473908 - RNA, 19 nt, Artificial Sequence
  Synthetic
acccacaggcuuaaauuca

SEQ ID NO: 473909 - RNA, 20 nt, Artificial Sequence
  Synthetic
gacccacaggcuuaaauuca

SEQ ID NO: 473910 - RNA, 21 nt, Artificial Sequence
  Synthetic
ugacccacaggcuuaaauuca

SEQ ID NO: 473911 - RNA, 22 nt, Artificial Sequence
  Synthetic
augacccacaggcuuaaauuca

SEQ ID NO: 473912 - RNA, 23 nt, Artificial Sequence
  Synthetic
aaugacccacaggcuuaaauuca

SEQ ID NO: 473913 - RNA, 24 nt, Artificial Sequence
  Synthetic
caaugacccacaggcuuaaauuca

SEQ ID NO: 473914 - RNA, 18 nt, Artificial Sequence
  Synthetic
agagcaggucacaauuca

SEQ ID NO: 473915 - RNA, 19 nt, Artificial Sequence
  Synthetic
aagagcaggucacaauuca

SEQ ID NO: 473916 - RNA, 20 nt, Artificial Sequence
  Synthetic
gaagagcaggucacaauuca

SEQ ID NO: 473917 - RNA, 21 nt, Artificial Sequence
  Synthetic
agaagagcaggucacaauuca

SEQ ID NO: 473918 - RNA, 22 nt, Artificial Sequence
  Synthetic
gagaagagcaggucacaauuca

SEQ ID NO: 473919 - RNA, 23 nt, Artificial Sequence
  Synthetic
ugagaagagcaggucacaauuca

SEQ ID NO: 473920 - RNA, 24 nt, Artificial Sequence
  Synthetic
uugagaagagcaggucacaauuca

SEQ ID NO: 473921 - RNA, 18 nt, Artificial Sequence
  Synthetic
acauuagaauacaauuca

SEQ ID NO: 473922 - RNA, 19 nt, Artificial Sequence
  Synthetic
cacauuagaauacaauuca

SEQ ID NO: 473923 - RNA, 20 nt, Artificial Sequence
  Synthetic
ucacauuagaauacaauuca

SEQ ID NO: 473924 - RNA, 21 nt, Artificial Sequence
  Synthetic
aucacauuagaauacaauuca

SEQ ID NO: 473925 - RNA, 22 nt, Artificial Sequence
  Synthetic
uaucacauuagaauacaauuca

SEQ ID NO: 473926 - RNA, 23 nt, Artificial Sequence
  Synthetic
uuaucacauuagaauacaauuca

SEQ ID NO: 473927 - RNA, 24 nt, Artificial Sequence
  Synthetic
uuuaucacauuagaauacaauuca

SEQ ID NO: 473928 - RNA, 18 nt, Artificial Sequence
  Synthetic
ggucaacugcccaauuca

SEQ ID NO: 473929 - RNA, 19 nt, Artificial Sequence
  Synthetic
uggucaacugcccaauuca

SEQ ID NO: 473930 - RNA, 20 nt, Artificial Sequence
  Synthetic
guggucaacugcccaauuca

SEQ ID NO: 473931 - RNA, 21 nt, Artificial Sequence
  Synthetic
uguggucaacugcccaauuca

SEQ ID NO: 473932 - RNA, 22 nt, Artificial Sequence
  Synthetic
uuguggucaacugcccaauuca

SEQ ID NO: 473933 - RNA, 23 nt, Artificial Sequence
  Synthetic
auuguggucaacugcccaauuca

SEQ ID NO: 473934 - RNA, 24 nt, Artificial Sequence
  Synthetic
cauuguggucaacugcccaauuca

SEQ ID NO: 473935 - RNA, 18 nt, Artificial Sequence
  Synthetic
ccucccuuguucaauuca

SEQ ID NO: 473936 - RNA, 19 nt, Artificial Sequence
  Synthetic
gccucccuuguucaauuca

SEQ ID NO: 473937 - RNA, 20 nt, Artificial Sequence
  Synthetic
ugccucccuuguucaauuca

SEQ ID NO: 473938 - RNA, 21 nt, Artificial Sequence
  Synthetic
augccucccuuguucaauuca

SEQ ID NO: 473939 - RNA, 22 nt, Artificial Sequence
  Synthetic
aaugccucccuuguucaauuca

SEQ ID NO: 473940 - RNA, 23 nt, Artificial Sequence
  Synthetic
aaaugccucccuuguucaauuca

SEQ ID NO: 473941 - RNA, 24 nt, Artificial Sequence
  Synthetic
aaaaugccucccuuguucaauuca

SEQ ID NO: 473942 - RNA, 18 nt, Artificial Sequence
  Synthetic
uugagagaaaagaauuca

SEQ ID NO: 473943 - RNA, 19 nt, Artificial Sequence
  Synthetic
auugagagaaaagaauuca

SEQ ID NO: 473944 - RNA, 20 nt, Artificial Sequence
  Synthetic
uauugagagaaaagaauuca

SEQ ID NO: 473945 - RNA, 21 nt, Artificial Sequence
  Synthetic
guauugagagaaaagaauuca

SEQ ID NO: 473946 - RNA, 22 nt, Artificial Sequence
  Synthetic
aguauugagagaaaagaauuca

SEQ ID NO: 473947 - RNA, 23 nt, Artificial Sequence
  Synthetic
uaguauugagagaaaagaauuca

SEQ ID NO: 473948 - RNA, 24 nt, Artificial Sequence
  Synthetic
auaguauugagagaaaagaauuca

SEQ ID NO: 473949 - RNA, 18 nt, Artificial Sequence
  Synthetic
aauuaauaaaagaauuca

SEQ ID NO: 473950 - RNA, 19 nt, Artificial Sequence
  Synthetic
aaauuaauaaaagaauuca

SEQ ID NO: 473951 - RNA, 20 nt, Artificial Sequence
  Synthetic
aaaauuaauaaaagaauuca

SEQ ID NO: 473952 - RNA, 21 nt, Artificial Sequence
  Synthetic
uaaaauuaauaaaagaauuca

SEQ ID NO: 473953 - RNA, 22 nt, Artificial Sequence
  Synthetic
auaaaauuaauaaaagaauuca

SEQ ID NO: 473954 - RNA, 23 nt, Artificial Sequence
  Synthetic
aauaaaauuaauaaaagaauuca

SEQ ID NO: 473955 - RNA, 24 nt, Artificial Sequence
  Synthetic
gaauaaaauuaauaaaagaauuca

SEQ ID NO: 473956 - RNA, 18 nt, Artificial Sequence
  Synthetic
aagaaacugaagaauuca

SEQ ID NO: 473957 - RNA, 19 nt, Artificial Sequence
  Synthetic
aaagaaacugaagaauuca

SEQ ID NO: 473958 - RNA, 20 nt, Artificial Sequence
  Synthetic
gaaagaaacugaagaauuca

SEQ ID NO: 473959 - RNA, 21 nt, Artificial Sequence
  Synthetic
cgaaagaaacugaagaauuca

SEQ ID NO: 473960 - RNA, 22 nt, Artificial Sequence
  Synthetic
gcgaaagaaacugaagaauuca

SEQ ID NO: 473961 - RNA, 23 nt, Artificial Sequence
  Synthetic
cgcgaaagaaacugaagaauuca

SEQ ID NO: 473962 - RNA, 24 nt, Artificial Sequence
  Synthetic
acgcgaaagaaacugaagaauuca

SEQ ID NO: 473963 - RNA, 18 nt, Artificial Sequence
  Synthetic
guuaacuuagagaauuca

SEQ ID NO: 473964 - RNA, 19 nt, Artificial Sequence
  Synthetic
gguuaacuuagagaauuca

SEQ ID NO: 473965 - RNA, 20 nt, Artificial Sequence
  Synthetic
ggguuaacuuagagaauuca

SEQ ID NO: 473966 - RNA, 21 nt, Artificial Sequence
  Synthetic
uggguuaacuuagagaauuca

SEQ ID NO: 473967 - RNA, 22 nt, Artificial Sequence
  Synthetic
guggguuaacuuagagaauuca

SEQ ID NO: 473968 - RNA, 23 nt, Artificial Sequence
  Synthetic
gguggguuaacuuagagaauuca

SEQ ID NO: 473969 - RNA, 24 nt, Artificial Sequence
  Synthetic
agguggguuaacuuagagaauuca

SEQ ID NO: 473970 - RNA, 18 nt, Artificial Sequence
  Synthetic
ucagggugguagaauuca

SEQ ID NO: 473971 - RNA, 19 nt, Artificial Sequence
  Synthetic
aucagggugguagaauuca

SEQ ID NO: 473972 - RNA, 20 nt, Artificial Sequence
  Synthetic
gaucagggugguagaauuca

SEQ ID NO: 473973 - RNA, 21 nt, Artificial Sequence
  Synthetic
ugaucagggugguagaauuca

SEQ ID NO: 473974 - RNA, 22 nt, Artificial Sequence
  Synthetic
augaucagggugguagaauuca

SEQ ID NO: 473975 - RNA, 23 nt, Artificial Sequence
  Synthetic
aaugaucagggugguagaauuca

SEQ ID NO: 473976 - RNA, 24 nt, Artificial Sequence
  Synthetic
caaugaucagggugguagaauuca

SEQ ID NO: 473977 - RNA, 18 nt, Artificial Sequence
  Synthetic
uauguuugguagaauuca

SEQ ID NO: 473978 - RNA, 19 nt, Artificial Sequence
  Synthetic
auauguuugguagaauuca

SEQ ID NO: 473979 - RNA, 20 nt, Artificial Sequence
  Synthetic
uauauguuugguagaauuca

SEQ ID NO: 473980 - RNA, 21 nt, Artificial Sequence
  Synthetic
uuauauguuugguagaauuca

SEQ ID NO: 473981 - RNA, 22 nt, Artificial Sequence
  Synthetic
uuuauauguuugguagaauuca

SEQ ID NO: 473982 - RNA, 23 nt, Artificial Sequence
  Synthetic
guuuauauguuugguagaauuca

SEQ ID NO: 473983 - RNA, 24 nt, Artificial Sequence
  Synthetic
uguuuauauguuugguagaauuca

SEQ ID NO: 473984 - RNA, 18 nt, Artificial Sequence
  Synthetic
aaaauagaugggaauuca

SEQ ID NO: 473985 - RNA, 19 nt, Artificial Sequence
  Synthetic
aaaaauagaugggaauuca

SEQ ID NO: 473986 - RNA, 20 nt, Artificial Sequence
  Synthetic
uaaaaauagaugggaauuca

SEQ ID NO: 473987 - RNA, 21 nt, Artificial Sequence
  Synthetic
uuaaaaauagaugggaauuca

SEQ ID NO: 473988 - RNA, 22 nt, Artificial Sequence
  Synthetic
cuuaaaaauagaugggaauuca

SEQ ID NO: 473989 - RNA, 23 nt, Artificial Sequence
  Synthetic
acuuaaaaauagaugggaauuca

SEQ ID NO: 473990 - RNA, 24 nt, Artificial Sequence
  Synthetic
cacuuaaaaauagaugggaauuca

SEQ ID NO: 473991 - RNA, 18 nt, Artificial Sequence
  Synthetic
uaauugcuuuugaauuca

SEQ ID NO: 473992 - RNA, 19 nt, Artificial Sequence
  Synthetic
guaauugcuuuugaauuca

SEQ ID NO: 473993 - RNA, 20 nt, Artificial Sequence
  Synthetic
uguaauugcuuuugaauuca

SEQ ID NO: 473994 - RNA, 21 nt, Artificial Sequence
  Synthetic
uuguaauugcuuuugaauuca

SEQ ID NO: 473995 - RNA, 22 nt, Artificial Sequence
  Synthetic
cuuguaauugcuuuugaauuca

SEQ ID NO: 473996 - RNA, 23 nt, Artificial Sequence
  Synthetic
gcuuguaauugcuuuugaauuca

SEQ ID NO: 473997 - RNA, 24 nt, Artificial Sequence
  Synthetic
cgcuuguaauugcuuuugaauuca

SEQ ID NO: 473998 - RNA, 18 nt, Artificial Sequence
  Synthetic
aacagccaaaauaauuca

SEQ ID NO: 473999 - RNA, 19 nt, Artificial Sequence
  Synthetic
aaacagccaaaauaauuca

SEQ ID NO: 474000 - RNA, 20 nt, Artificial Sequence
  Synthetic
caaacagccaaaauaauuca

SEQ ID NO: 474001 - RNA, 21 nt, Artificial Sequence
  Synthetic
acaaacagccaaaauaauuca

SEQ ID NO: 474002 - RNA, 22 nt, Artificial Sequence
  Synthetic
uacaaacagccaaaauaauuca

SEQ ID NO: 474003 - RNA, 23 nt, Artificial Sequence
  Synthetic
guacaaacagccaaaauaauuca

SEQ ID NO: 474004 - RNA, 24 nt, Artificial Sequence
  Synthetic
gguacaaacagccaaaauaauuca

SEQ ID NO: 474005 - RNA, 18 nt, Artificial Sequence
  Synthetic
gcaagacucaauaauuca

SEQ ID NO: 474006 - RNA, 19 nt, Artificial Sequence
  Synthetic
agcaagacucaauaauuca

SEQ ID NO: 474007 - RNA, 20 nt, Artificial Sequence
  Synthetic
aagcaagacucaauaauuca

SEQ ID NO: 474008 - RNA, 21 nt, Artificial Sequence
  Synthetic
aaagcaagacucaauaauuca

SEQ ID NO: 474009 - RNA, 22 nt, Artificial Sequence
  Synthetic
uaaagcaagacucaauaauuca

SEQ ID NO: 474010 - RNA, 23 nt, Artificial Sequence
  Synthetic
guaaagcaagacucaauaauuca

SEQ ID NO: 474011 - RNA, 24 nt, Artificial Sequence
  Synthetic
uguaaagcaagacucaauaauuca

SEQ ID NO: 474012 - RNA, 18 nt, Artificial Sequence
  Synthetic
aaagcagaguuuaauuca

SEQ ID NO: 474013 - RNA, 19 nt, Artificial Sequence
  Synthetic
aaaagcagaguuuaauuca

SEQ ID NO: 474014 - RNA, 20 nt, Artificial Sequence
  Synthetic
aaaaagcagaguuuaauuca

SEQ ID NO: 474015 - RNA, 21 nt, Artificial Sequence
  Synthetic
aaaaaagcagaguuuaauuca

SEQ ID NO: 474016 - RNA, 22 nt, Artificial Sequence
  Synthetic
aaaaaaagcagaguuuaauuca

SEQ ID NO: 474017 - RNA, 23 nt, Artificial Sequence
  Synthetic
uaaaaaaagcagaguuuaauuca

SEQ ID NO: 474018 - RNA, 24 nt, Artificial Sequence
  Synthetic
uuaaaaaaagcagaguuuaauuca

SEQ ID NO: 474019 - RNA, 18 nt, Artificial Sequence
  Synthetic
cauggagaaaaacauuca

SEQ ID NO: 474020 - RNA, 19 nt, Artificial Sequence
  Synthetic
ccauggagaaaaacauuca

SEQ ID NO: 474021 - RNA, 20 nt, Artificial Sequence
  Synthetic
cccauggagaaaaacauuca

SEQ ID NO: 474022 - RNA, 21 nt, Artificial Sequence
  Synthetic
acccauggagaaaaacauuca

SEQ ID NO: 474023 - RNA, 22 nt, Artificial Sequence
  Synthetic
cacccauggagaaaaacauuca

SEQ ID NO: 474024 - RNA, 23 nt, Artificial Sequence
  Synthetic
gcacccauggagaaaaacauuca

SEQ ID NO: 474025 - RNA, 24 nt, Artificial Sequence
  Synthetic
agcacccauggagaaaaacauuca

SEQ ID NO: 474026 - RNA, 18 nt, Artificial Sequence
  Synthetic
gcagauuccaaacauuca

SEQ ID NO: 474027 - RNA, 19 nt, Artificial Sequence
  Synthetic
ugcagauuccaaacauuca

SEQ ID NO: 474028 - RNA, 20 nt, Artificial Sequence
  Synthetic
cugcagauuccaaacauuca

SEQ ID NO: 474029 - RNA, 21 nt, Artificial Sequence
  Synthetic
ucugcagauuccaaacauuca

SEQ ID NO: 474030 - RNA, 22 nt, Artificial Sequence
  Synthetic
gucugcagauuccaaacauuca

SEQ ID NO: 474031 - RNA, 23 nt, Artificial Sequence
  Synthetic
ggucugcagauuccaaacauuca

SEQ ID NO: 474032 - RNA, 24 nt, Artificial Sequence
  Synthetic
aggucugcagauuccaaacauuca

SEQ ID NO: 474033 - RNA, 18 nt, Artificial Sequence
  Synthetic
auaaauuaggaacauuca

SEQ ID NO: 474034 - RNA, 19 nt, Artificial Sequence
  Synthetic
gauaaauuaggaacauuca

SEQ ID NO: 474035 - RNA, 20 nt, Artificial Sequence
  Synthetic
ugauaaauuaggaacauuca

SEQ ID NO: 474036 - RNA, 21 nt, Artificial Sequence
  Synthetic
gugauaaauuaggaacauuca

SEQ ID NO: 474037 - RNA, 22 nt, Artificial Sequence
  Synthetic
ugugauaaauuaggaacauuca

SEQ ID NO: 474038 - RNA, 23 nt, Artificial Sequence
  Synthetic
augugauaaauuaggaacauuca

SEQ ID NO: 474039 - RNA, 24 nt, Artificial Sequence
  Synthetic
aaugugauaaauuaggaacauuca

SEQ ID NO: 474040 - RNA, 18 nt, Artificial Sequence
  Synthetic
aucuuaggggaacauuca

SEQ ID NO: 474041 - RNA, 19 nt, Artificial Sequence
  Synthetic
aaucuuaggggaacauuca

SEQ ID NO: 474042 - RNA, 20 nt, Artificial Sequence
  Synthetic
uaaucuuaggggaacauuca

SEQ ID NO: 474043 - RNA, 21 nt, Artificial Sequence
  Synthetic
uuaaucuuaggggaacauuca

SEQ ID NO: 474044 - RNA, 22 nt, Artificial Sequence
  Synthetic
uuuaaucuuaggggaacauuca

SEQ ID NO: 474045 - RNA, 23 nt, Artificial Sequence
  Synthetic
cuuuaaucuuaggggaacauuca

SEQ ID NO: 474046 - RNA, 24 nt, Artificial Sequence
  Synthetic
gcuuuaaucuuaggggaacauuca

SEQ ID NO: 474047 - RNA, 18 nt, Artificial Sequence
  Synthetic
cugccuagagcacauuca

SEQ ID NO: 474048 - RNA, 19 nt, Artificial Sequence
  Synthetic
gcugccuagagcacauuca

SEQ ID NO: 474049 - RNA, 20 nt, Artificial Sequence
  Synthetic
ggcugccuagagcacauuca

SEQ ID NO: 474050 - RNA, 21 nt, Artificial Sequence
  Synthetic
aggcugccuagagcacauuca

SEQ ID NO: 474051 - RNA, 22 nt, Artificial Sequence
  Synthetic
caggcugccuagagcacauuca

SEQ ID NO: 474052 - RNA, 23 nt, Artificial Sequence
  Synthetic
ucaggcugccuagagcacauuca

SEQ ID NO: 474053 - RNA, 24 nt, Artificial Sequence
  Synthetic
cucaggcugccuagagcacauuca

SEQ ID NO: 474054 - RNA, 18 nt, Artificial Sequence
  Synthetic
uuauuauauucacauuca

SEQ ID NO: 474055 - RNA, 19 nt, Artificial Sequence
  Synthetic
cuuauuauauucacauuca

SEQ ID NO: 474056 - RNA, 20 nt, Artificial Sequence
  Synthetic
gcuuauuauauucacauuca

SEQ ID NO: 474057 - RNA, 21 nt, Artificial Sequence
  Synthetic
ggcuuauuauauucacauuca

SEQ ID NO: 474058 - RNA, 22 nt, Artificial Sequence
  Synthetic
uggcuuauuauauucacauuca

SEQ ID NO: 474059 - RNA, 23 nt, Artificial Sequence
  Synthetic
cuggcuuauuauauucacauuca

SEQ ID NO: 474060 - RNA, 24 nt, Artificial Sequence
  Synthetic
acuggcuuauuauauucacauuca

SEQ ID NO: 474061 - RNA, 18 nt, Artificial Sequence
  Synthetic
guguuguuuucacauuca

SEQ ID NO: 474062 - RNA, 19 nt, Artificial Sequence
  Synthetic
aguguuguuuucacauuca

SEQ ID NO: 474063 - RNA, 20 nt, Artificial Sequence
  Synthetic
aaguguuguuuucacauuca

SEQ ID NO: 474064 - RNA, 21 nt, Artificial Sequence
  Synthetic
uaaguguuguuuucacauuca

SEQ ID NO: 474065 - RNA, 22 nt, Artificial Sequence
  Synthetic
guaaguguuguuuucacauuca

SEQ ID NO: 474066 - RNA, 23 nt, Artificial Sequence
  Synthetic
aguaaguguuguuuucacauuca

SEQ ID NO: 474067 - RNA, 24 nt, Artificial Sequence
  Synthetic
aaguaaguguuguuuucacauuca

SEQ ID NO: 474068 - RNA, 18 nt, Artificial Sequence
  Synthetic
aauucuaccagacauuca

SEQ ID NO: 474069 - RNA, 19 nt, Artificial Sequence
  Synthetic
gaauucuaccagacauuca

SEQ ID NO: 474070 - RNA, 20 nt, Artificial Sequence
  Synthetic
ugaauucuaccagacauuca

SEQ ID NO: 474071 - RNA, 21 nt, Artificial Sequence
  Synthetic
cugaauucuaccagacauuca

SEQ ID NO: 474072 - RNA, 22 nt, Artificial Sequence
  Synthetic
gcugaauucuaccagacauuca

SEQ ID NO: 474073 - RNA, 23 nt, Artificial Sequence
  Synthetic
agcugaauucuaccagacauuca

SEQ ID NO: 474074 - RNA, 24 nt, Artificial Sequence
  Synthetic
cagcugaauucuaccagacauuca

SEQ ID NO: 474075 - RNA, 18 nt, Artificial Sequence
  Synthetic
cuagagguuauacauuca

SEQ ID NO: 474076 - RNA, 19 nt, Artificial Sequence
  Synthetic
ucuagagguuauacauuca

SEQ ID NO: 474077 - RNA, 20 nt, Artificial Sequence
  Synthetic
uucuagagguuauacauuca

SEQ ID NO: 474078 - RNA, 21 nt, Artificial Sequence
  Synthetic
auucuagagguuauacauuca

SEQ ID NO: 474079 - RNA, 22 nt, Artificial Sequence
  Synthetic
aauucuagagguuauacauuca

SEQ ID NO: 474080 - RNA, 23 nt, Artificial Sequence
  Synthetic
caauucuagagguuauacauuca

SEQ ID NO: 474081 - RNA, 24 nt, Artificial Sequence
  Synthetic
ccaauucuagagguuauacauuca

SEQ ID NO: 474082 - RNA, 18 nt, Artificial Sequence
  Synthetic
accuguuucuuacauuca

SEQ ID NO: 474083 - RNA, 19 nt, Artificial Sequence
  Synthetic
caccuguuucuuacauuca

SEQ ID NO: 474084 - RNA, 20 nt, Artificial Sequence
  Synthetic
gcaccuguuucuuacauuca

SEQ ID NO: 474085 - RNA, 21 nt, Artificial Sequence
  Synthetic
ugcaccuguuucuuacauuca

SEQ ID NO: 474086 - RNA, 22 nt, Artificial Sequence
  Synthetic
cugcaccuguuucuuacauuca

SEQ ID NO: 474087 - RNA, 23 nt, Artificial Sequence
  Synthetic
acugcaccuguuucuuacauuca

SEQ ID NO: 474088 - RNA, 24 nt, Artificial Sequence
  Synthetic
cacugcaccuguuucuuacauuca

SEQ ID NO: 474089 - RNA, 18 nt, Artificial Sequence
  Synthetic
agucgucauucccauuca

SEQ ID NO: 474090 - RNA, 19 nt, Artificial Sequence
  Synthetic
cagucgucauucccauuca

SEQ ID NO: 474091 - RNA, 20 nt, Artificial Sequence
  Synthetic
acagucgucauucccauuca

SEQ ID NO: 474092 - RNA, 21 nt, Artificial Sequence
  Synthetic
aacagucgucauucccauuca

SEQ ID NO: 474093 - RNA, 22 nt, Artificial Sequence
  Synthetic
caacagucgucauucccauuca

SEQ ID NO: 474094 - RNA, 23 nt, Artificial Sequence
  Synthetic
gcaacagucgucauucccauuca

SEQ ID NO: 474095 - RNA, 24 nt, Artificial Sequence
  Synthetic
ugcaacagucgucauucccauuca

SEQ ID NO: 474096 - RNA, 18 nt, Artificial Sequence
  Synthetic
caucaaaaauagcauuca

SEQ ID NO: 474097 - RNA, 19 nt, Artificial Sequence
  Synthetic
acaucaaaaauagcauuca

SEQ ID NO: 474098 - RNA, 20 nt, Artificial Sequence
  Synthetic
gacaucaaaaauagcauuca

SEQ ID NO: 474099 - RNA, 21 nt, Artificial Sequence
  Synthetic
agacaucaaaaauagcauuca

SEQ ID NO: 474100 - RNA, 22 nt, Artificial Sequence
  Synthetic
gagacaucaaaaauagcauuca

SEQ ID NO: 474101 - RNA, 23 nt, Artificial Sequence
  Synthetic
agagacaucaaaaauagcauuca

SEQ ID NO: 474102 - RNA, 24 nt, Artificial Sequence
  Synthetic
uagagacaucaaaaauagcauuca

SEQ ID NO: 474103 - RNA, 18 nt, Artificial Sequence
  Synthetic
gucaaaauagggcauuca

SEQ ID NO: 474104 - RNA, 19 nt, Artificial Sequence
  Synthetic
ugucaaaauagggcauuca

SEQ ID NO: 474105 - RNA, 20 nt, Artificial Sequence
  Synthetic
uugucaaaauagggcauuca

SEQ ID NO: 474106 - RNA, 21 nt, Artificial Sequence
  Synthetic
uuugucaaaauagggcauuca

SEQ ID NO: 474107 - RNA, 22 nt, Artificial Sequence
  Synthetic
cuuugucaaaauagggcauuca

SEQ ID NO: 474108 - RNA, 23 nt, Artificial Sequence
  Synthetic
ucuuugucaaaauagggcauuca

SEQ ID NO: 474109 - RNA, 24 nt, Artificial Sequence
  Synthetic
cucuuugucaaaauagggcauuca

SEQ ID NO: 474110 - RNA, 18 nt, Artificial Sequence
  Synthetic
gagcugaucaugcauuca

SEQ ID NO: 474111 - RNA, 19 nt, Artificial Sequence
  Synthetic
ggagcugaucaugcauuca

SEQ ID NO: 474112 - RNA, 20 nt, Artificial Sequence
  Synthetic
uggagcugaucaugcauuca

SEQ ID NO: 474113 - RNA, 21 nt, Artificial Sequence
  Synthetic
auggagcugaucaugcauuca

SEQ ID NO: 474114 - RNA, 22 nt, Artificial Sequence
  Synthetic
aauggagcugaucaugcauuca

SEQ ID NO: 474115 - RNA, 23 nt, Artificial Sequence
  Synthetic
caauggagcugaucaugcauuca

SEQ ID NO: 474116 - RNA, 24 nt, Artificial Sequence
  Synthetic
gcaauggagcugaucaugcauuca

SEQ ID NO: 474117 - RNA, 18 nt, Artificial Sequence
  Synthetic
ggugacugaaaucauuca

SEQ ID NO: 474118 - RNA, 19 nt, Artificial Sequence
  Synthetic
aggugacugaaaucauuca

SEQ ID NO: 474119 - RNA, 20 nt, Artificial Sequence
  Synthetic
aaggugacugaaaucauuca

SEQ ID NO: 474120 - RNA, 21 nt, Artificial Sequence
  Synthetic
uaaggugacugaaaucauuca

SEQ ID NO: 474121 - RNA, 22 nt, Artificial Sequence
  Synthetic
auaaggugacugaaaucauuca

SEQ ID NO: 474122 - RNA, 23 nt, Artificial Sequence
  Synthetic
gauaaggugacugaaaucauuca

SEQ ID NO: 474123 - RNA, 24 nt, Artificial Sequence
  Synthetic
agauaaggugacugaaaucauuca

SEQ ID NO: 474124 - RNA, 18 nt, Artificial Sequence
  Synthetic
gaaaaauuuuaucauuca

SEQ ID NO: 474125 - RNA, 19 nt, Artificial Sequence
  Synthetic
ugaaaaauuuuaucauuca

SEQ ID NO: 474126 - RNA, 20 nt, Artificial Sequence
  Synthetic
gugaaaaauuuuaucauuca

SEQ ID NO: 474127 - RNA, 21 nt, Artificial Sequence
  Synthetic
agugaaaaauuuuaucauuca

SEQ ID NO: 474128 - RNA, 22 nt, Artificial Sequence
  Synthetic
cagugaaaaauuuuaucauuca

SEQ ID NO: 474129 - RNA, 23 nt, Artificial Sequence
  Synthetic
ccagugaaaaauuuuaucauuca

SEQ ID NO: 474130 - RNA, 24 nt, Artificial Sequence
  Synthetic
cccagugaaaaauuuuaucauuca

SEQ ID NO: 474131 - RNA, 18 nt, Artificial Sequence
  Synthetic
acuggauagugucauuca

SEQ ID NO: 474132 - RNA, 19 nt, Artificial Sequence
  Synthetic
aacuggauagugucauuca

SEQ ID NO: 474133 - RNA, 20 nt, Artificial Sequence
  Synthetic
uaacuggauagugucauuca

SEQ ID NO: 474134 - RNA, 21 nt, Artificial Sequence
  Synthetic
uuaacuggauagugucauuca

SEQ ID NO: 474135 - RNA, 22 nt, Artificial Sequence
  Synthetic
cuuaacuggauagugucauuca

SEQ ID NO: 474136 - RNA, 23 nt, Artificial Sequence
  Synthetic
gcuuaacuggauagugucauuca

SEQ ID NO: 474137 - RNA, 24 nt, Artificial Sequence
  Synthetic
ugcuuaacuggauagugucauuca

SEQ ID NO: 474138 - RNA, 19 nt, Artificial Sequence
  Synthetic
aaagugugcuauucauuca

SEQ ID NO: 474139 - RNA, 20 nt, Artificial Sequence
  Synthetic
uaaagugugcuauucauuca

SEQ ID NO: 474140 - RNA, 21 nt, Artificial Sequence
  Synthetic
auaaagugugcuauucauuca

SEQ ID NO: 474141 - RNA, 22 nt, Artificial Sequence
  Synthetic
aauaaagugugcuauucauuca

SEQ ID NO: 474142 - RNA, 23 nt, Artificial Sequence
  Synthetic
aaauaaagugugcuauucauuca

SEQ ID NO: 474143 - RNA, 24 nt, Artificial Sequence
  Synthetic
aaaauaaagugugcuauucauuca

SEQ ID NO: 474144 - RNA, 18 nt, Artificial Sequence
  Synthetic
cuauucaguauucauuca

SEQ ID NO: 474145 - RNA, 19 nt, Artificial Sequence
  Synthetic
ccuauucaguauucauuca

SEQ ID NO: 474146 - RNA, 20 nt, Artificial Sequence
  Synthetic
cccuauucaguauucauuca

SEQ ID NO: 474147 - RNA, 21 nt, Artificial Sequence
  Synthetic
ucccuauucaguauucauuca

SEQ ID NO: 474148 - RNA, 22 nt, Artificial Sequence
  Synthetic
cucccuauucaguauucauuca

SEQ ID NO: 474149 - RNA, 23 nt, Artificial Sequence
  Synthetic
acucccuauucaguauucauuca

SEQ ID NO: 474150 - RNA, 24 nt, Artificial Sequence
  Synthetic
aacucccuauucaguauucauuca

SEQ ID NO: 474151 - RNA, 18 nt, Artificial Sequence
  Synthetic
acacaugagaaagauuca

SEQ ID NO: 474152 - RNA, 19 nt, Artificial Sequence
  Synthetic
cacacaugagaaagauuca

SEQ ID NO: 474153 - RNA, 20 nt, Artificial Sequence
  Synthetic
gcacacaugagaaagauuca

SEQ ID NO: 474154 - RNA, 21 nt, Artificial Sequence
  Synthetic
ugcacacaugagaaagauuca

SEQ ID NO: 474155 - RNA, 22 nt, Artificial Sequence
  Synthetic
gugcacacaugagaaagauuca

SEQ ID NO: 474156 - RNA, 23 nt, Artificial Sequence
  Synthetic
ugugcacacaugagaaagauuca

SEQ ID NO: 474157 - RNA, 24 nt, Artificial Sequence
  Synthetic
augugcacacaugagaaagauuca

SEQ ID NO: 474158 - RNA, 18 nt, Artificial Sequence
  Synthetic
auaguuuauauagauuca

SEQ ID NO: 474159 - RNA, 19 nt, Artificial Sequence
  Synthetic
uauaguuuauauagauuca

SEQ ID NO: 474160 - RNA, 20 nt, Artificial Sequence
  Synthetic
uuauaguuuauauagauuca

SEQ ID NO: 474161 - RNA, 21 nt, Artificial Sequence
  Synthetic
uuuauaguuuauauagauuca

SEQ ID NO: 474162 - RNA, 22 nt, Artificial Sequence
  Synthetic
cuuuauaguuuauauagauuca

SEQ ID NO: 474163 - RNA, 23 nt, Artificial Sequence
  Synthetic
ucuuuauaguuuauauagauuca

SEQ ID NO: 474164 - RNA, 24 nt, Artificial Sequence
  Synthetic
gucuuuauaguuuauauagauuca

SEQ ID NO: 474165 - RNA, 18 nt, Artificial Sequence
  Synthetic
caccauaauguagauuca

SEQ ID NO: 474166 - RNA, 19 nt, Artificial Sequence
  Synthetic
ucaccauaauguagauuca

SEQ ID NO: 474167 - RNA, 20 nt, Artificial Sequence
  Synthetic
cucaccauaauguagauuca

SEQ ID NO: 474168 - RNA, 21 nt, Artificial Sequence
  Synthetic
acucaccauaauguagauuca

SEQ ID NO: 474169 - RNA, 22 nt, Artificial Sequence
  Synthetic
aacucaccauaauguagauuca

SEQ ID NO: 474170 - RNA, 23 nt, Artificial Sequence
  Synthetic
caacucaccauaauguagauuca

SEQ ID NO: 474171 - RNA, 24 nt, Artificial Sequence
  Synthetic
acaacucaccauaauguagauuca

SEQ ID NO: 474172 - RNA, 18 nt, Artificial Sequence
  Synthetic
caugaaccaagggauuca

SEQ ID NO: 474173 - RNA, 19 nt, Artificial Sequence
  Synthetic
ucaugaaccaagggauuca

SEQ ID NO: 474174 - RNA, 20 nt, Artificial Sequence
  Synthetic
uucaugaaccaagggauuca

SEQ ID NO: 474175 - RNA, 21 nt, Artificial Sequence
  Synthetic
auucaugaaccaagggauuca

SEQ ID NO: 474176 - RNA, 22 nt, Artificial Sequence
  Synthetic
cauucaugaaccaagggauuca

SEQ ID NO: 474177 - RNA, 23 nt, Artificial Sequence
  Synthetic
acauucaugaaccaagggauuca

SEQ ID NO: 474178 - RNA, 24 nt, Artificial Sequence
  Synthetic
uacauucaugaaccaagggauuca

SEQ ID NO: 474179 - RNA, 18 nt, Artificial Sequence
  Synthetic
ccagguaauggggauuca

SEQ ID NO: 474180 - RNA, 19 nt, Artificial Sequence
  Synthetic
cccagguaauggggauuca

SEQ ID NO: 474181 - RNA, 20 nt, Artificial Sequence
  Synthetic
ucccagguaauggggauuca

SEQ ID NO: 474182 - RNA, 21 nt, Artificial Sequence
  Synthetic
uucccagguaauggggauuca

SEQ ID NO: 474183 - RNA, 22 nt, Artificial Sequence
  Synthetic
auucccagguaauggggauuca

SEQ ID NO: 474184 - RNA, 23 nt, Artificial Sequence
  Synthetic
cauucccagguaauggggauuca

SEQ ID NO: 474185 - RNA, 24 nt, Artificial Sequence
  Synthetic
ucauucccagguaauggggauuca

SEQ ID NO: 474186 - RNA, 18 nt, Artificial Sequence
  Synthetic
aagaaaauuugugauuca

SEQ ID NO: 474187 - RNA, 19 nt, Artificial Sequence
  Synthetic
uaagaaaauuugugauuca

SEQ ID NO: 474188 - RNA, 20 nt, Artificial Sequence
  Synthetic
uuaagaaaauuugugauuca

SEQ ID NO: 474189 - RNA, 21 nt, Artificial Sequence
  Synthetic
auuaagaaaauuugugauuca

SEQ ID NO: 474190 - RNA, 22 nt, Artificial Sequence
  Synthetic
cauuaagaaaauuugugauuca

SEQ ID NO: 474191 - RNA, 23 nt, Artificial Sequence
  Synthetic
ccauuaagaaaauuugugauuca

SEQ ID NO: 474192 - RNA, 24 nt, Artificial Sequence
  Synthetic
gccauuaagaaaauuugugauuca

SEQ ID NO: 474193 - RNA, 18 nt, Artificial Sequence
  Synthetic
auaacaugacaauauuca

SEQ ID NO: 474194 - RNA, 19 nt, Artificial Sequence
  Synthetic
cauaacaugacaauauuca

SEQ ID NO: 474195 - RNA, 20 nt, Artificial Sequence
  Synthetic
acauaacaugacaauauuca

SEQ ID NO: 474196 - RNA, 21 nt, Artificial Sequence
  Synthetic
aacauaacaugacaauauuca

SEQ ID NO: 474197 - RNA, 22 nt, Artificial Sequence
  Synthetic
aaacauaacaugacaauauuca

SEQ ID NO: 474198 - RNA, 23 nt, Artificial Sequence
  Synthetic
aaaacauaacaugacaauauuca

SEQ ID NO: 474199 - RNA, 24 nt, Artificial Sequence
  Synthetic
uaaaacauaacaugacaauauuca

SEQ ID NO: 474200 - RNA, 18 nt, Artificial Sequence
  Synthetic
ucccacagaacauauuca

SEQ ID NO: 474201 - RNA, 19 nt, Artificial Sequence
  Synthetic
uucccacagaacauauuca

SEQ ID NO: 474202 - RNA, 20 nt, Artificial Sequence
  Synthetic
auucccacagaacauauuca

SEQ ID NO: 474203 - RNA, 21 nt, Artificial Sequence
  Synthetic
uauucccacagaacauauuca

SEQ ID NO: 474204 - RNA, 22 nt, Artificial Sequence
  Synthetic
auauucccacagaacauauuca

SEQ ID NO: 474205 - RNA, 23 nt, Artificial Sequence
  Synthetic
uauauucccacagaacauauuca

SEQ ID NO: 474206 - RNA, 24 nt, Artificial Sequence
  Synthetic
guauauucccacagaacauauuca

SEQ ID NO: 474207 - RNA, 18 nt, Artificial Sequence
  Synthetic
acaggaaauacauauuca

SEQ ID NO: 474208 - RNA, 19 nt, Artificial Sequence
  Synthetic
aacaggaaauacauauuca

SEQ ID NO: 474209 - RNA, 20 nt, Artificial Sequence
  Synthetic
uaacaggaaauacauauuca

SEQ ID NO: 474210 - RNA, 21 nt, Artificial Sequence
  Synthetic
uuaacaggaaauacauauuca

SEQ ID NO: 474211 - RNA, 22 nt, Artificial Sequence
  Synthetic
uuuaacaggaaauacauauuca

SEQ ID NO: 474212 - RNA, 23 nt, Artificial Sequence
  Synthetic
cuuuaacaggaaauacauauuca

SEQ ID NO: 474213 - RNA, 24 nt, Artificial Sequence
  Synthetic
ccuuuaacaggaaauacauauuca

SEQ ID NO: 474214 - RNA, 18 nt, Artificial Sequence
  Synthetic
auguugacuacauauuca

SEQ ID NO: 474215 - RNA, 19 nt, Artificial Sequence
  Synthetic
uauguugacuacauauuca

SEQ ID NO: 474216 - RNA, 20 nt, Artificial Sequence
  Synthetic
uuauguugacuacauauuca

SEQ ID NO: 474217 - RNA, 21 nt, Artificial Sequence
  Synthetic
auuauguugacuacauauuca

SEQ ID NO: 474218 - RNA, 22 nt, Artificial Sequence
  Synthetic
aauuauguugacuacauauuca

SEQ ID NO: 474219 - RNA, 23 nt, Artificial Sequence
  Synthetic
uaauuauguugacuacauauuca

SEQ ID NO: 474220 - RNA, 24 nt, Artificial Sequence
  Synthetic
guaauuauguugacuacauauuca

SEQ ID NO: 474221 - RNA, 18 nt, Artificial Sequence
  Synthetic
ucuuuaccugcauauuca

SEQ ID NO: 474222 - RNA, 19 nt, Artificial Sequence
  Synthetic
aucuuuaccugcauauuca

SEQ ID NO: 474223 - RNA, 20 nt, Artificial Sequence
  Synthetic
uaucuuuaccugcauauuca

SEQ ID NO: 474224 - RNA, 21 nt, Artificial Sequence
  Synthetic
cuaucuuuaccugcauauuca

SEQ ID NO: 474225 - RNA, 22 nt, Artificial Sequence
  Synthetic
ucuaucuuuaccugcauauuca

SEQ ID NO: 474226 - RNA, 23 nt, Artificial Sequence
  Synthetic
aucuaucuuuaccugcauauuca

SEQ ID NO: 474227 - RNA, 24 nt, Artificial Sequence
  Synthetic
aaucuaucuuuaccugcauauuca

SEQ ID NO: 474228 - RNA, 18 nt, Artificial Sequence
  Synthetic
aaagaaggcugauauuca

SEQ ID NO: 474229 - RNA, 19 nt, Artificial Sequence
  Synthetic
caaagaaggcugauauuca

SEQ ID NO: 474230 - RNA, 20 nt, Artificial Sequence
  Synthetic
ccaaagaaggcugauauuca

SEQ ID NO: 474231 - RNA, 21 nt, Artificial Sequence
  Synthetic
gccaaagaaggcugauauuca

SEQ ID NO: 474232 - RNA, 22 nt, Artificial Sequence
  Synthetic
agccaaagaaggcugauauuca

SEQ ID NO: 474233 - RNA, 23 nt, Artificial Sequence
  Synthetic
gagccaaagaaggcugauauuca

SEQ ID NO: 474234 - RNA, 24 nt, Artificial Sequence
  Synthetic
ugagccaaagaaggcugauauuca

SEQ ID NO: 474235 - RNA, 18 nt, Artificial Sequence
  Synthetic
aaaggaaaauuauauuca

SEQ ID NO: 474236 - RNA, 19 nt, Artificial Sequence
  Synthetic
caaaggaaaauuauauuca

SEQ ID NO: 474237 - RNA, 20 nt, Artificial Sequence
  Synthetic
acaaaggaaaauuauauuca

SEQ ID NO: 474238 - RNA, 21 nt, Artificial Sequence
  Synthetic
aacaaaggaaaauuauauuca

SEQ ID NO: 474239 - RNA, 22 nt, Artificial Sequence
  Synthetic
uaacaaaggaaaauuauauuca

SEQ ID NO: 474240 - RNA, 23 nt, Artificial Sequence
  Synthetic
cuaacaaaggaaaauuauauuca

SEQ ID NO: 474241 - RNA, 24 nt, Artificial Sequence
  Synthetic
gcuaacaaaggaaaauuauauuca

SEQ ID NO: 474242 - RNA, 18 nt, Artificial Sequence
  Synthetic
caauuuuaaaacuauuca

SEQ ID NO: 474243 - RNA, 19 nt, Artificial Sequence
  Synthetic
ucaauuuuaaaacuauuca

SEQ ID NO: 474244 - RNA, 20 nt, Artificial Sequence
  Synthetic
uucaauuuuaaaacuauuca

SEQ ID NO: 474245 - RNA, 21 nt, Artificial Sequence
  Synthetic
auucaauuuuaaaacuauuca

SEQ ID NO: 474246 - RNA, 22 nt, Artificial Sequence
  Synthetic
uauucaauuuuaaaacuauuca

SEQ ID NO: 474247 - RNA, 23 nt, Artificial Sequence
  Synthetic
auauucaauuuuaaaacuauuca

SEQ ID NO: 474248 - RNA, 24 nt, Artificial Sequence
  Synthetic
uauauucaauuuuaaaacuauuca

SEQ ID NO: 474249 - RNA, 18 nt, Artificial Sequence
  Synthetic
caguuuuggaccuauuca

SEQ ID NO: 474250 - RNA, 19 nt, Artificial Sequence
  Synthetic
ucaguuuuggaccuauuca

SEQ ID NO: 474251 - RNA, 20 nt, Artificial Sequence
  Synthetic
uucaguuuuggaccuauuca

SEQ ID NO: 474252 - RNA, 21 nt, Artificial Sequence
  Synthetic
guucaguuuuggaccuauuca

SEQ ID NO: 474253 - RNA, 22 nt, Artificial Sequence
  Synthetic
aguucaguuuuggaccuauuca

SEQ ID NO: 474254 - RNA, 23 nt, Artificial Sequence
  Synthetic
gaguucaguuuuggaccuauuca

SEQ ID NO: 474255 - RNA, 24 nt, Artificial Sequence
  Synthetic
ugaguucaguuuuggaccuauuca

SEQ ID NO: 474256 - RNA, 18 nt, Artificial Sequence
  Synthetic
gaauuuucacccuauuca

SEQ ID NO: 474257 - RNA, 19 nt, Artificial Sequence
  Synthetic
agaauuuucacccuauuca

SEQ ID NO: 474258 - RNA, 20 nt, Artificial Sequence
  Synthetic
cagaauuuucacccuauuca

SEQ ID NO: 474259 - RNA, 21 nt, Artificial Sequence
  Synthetic
ucagaauuuucacccuauuca

SEQ ID NO: 474260 - RNA, 22 nt, Artificial Sequence
  Synthetic
cucagaauuuucacccuauuca

SEQ ID NO: 474261 - RNA, 23 nt, Artificial Sequence
  Synthetic
ucucagaauuuucacccuauuca

SEQ ID NO: 474262 - RNA, 24 nt, Artificial Sequence
  Synthetic
aucucagaauuuucacccuauuca

SEQ ID NO: 474263 - RNA, 18 nt, Artificial Sequence
  Synthetic
uucucuugucccuauuca

SEQ ID NO: 474264 - RNA, 19 nt, Artificial Sequence
  Synthetic
auucucuugucccuauuca

SEQ ID NO: 474265 - RNA, 20 nt, Artificial Sequence
  Synthetic
aauucucuugucccuauuca

SEQ ID NO: 474266 - RNA, 21 nt, Artificial Sequence
  Synthetic
gaauucucuugucccuauuca

SEQ ID NO: 474267 - RNA, 22 nt, Artificial Sequence
  Synthetic
cgaauucucuugucccuauuca

SEQ ID NO: 474268 - RNA, 23 nt, Artificial Sequence
  Synthetic
acgaauucucuugucccuauuca

SEQ ID NO: 474269 - RNA, 24 nt, Artificial Sequence
  Synthetic
gacgaauucucuugucccuauuca

SEQ ID NO: 474270 - RNA, 18 nt, Artificial Sequence
  Synthetic
uuauuucuucccuauuca

SEQ ID NO: 474271 - RNA, 19 nt, Artificial Sequence
  Synthetic
auuauuucuucccuauuca

SEQ ID NO: 474272 - RNA, 20 nt, Artificial Sequence
  Synthetic
aauuauuucuucccuauuca

SEQ ID NO: 474273 - RNA, 21 nt, Artificial Sequence
  Synthetic
aaauuauuucuucccuauuca

SEQ ID NO: 474274 - RNA, 22 nt, Artificial Sequence
  Synthetic
aaaauuauuucuucccuauuca

SEQ ID NO: 474275 - RNA, 23 nt, Artificial Sequence
  Synthetic
uaaaauuauuucuucccuauuca

SEQ ID NO: 474276 - RNA, 24 nt, Artificial Sequence
  Synthetic
cuaaaauuauuucuucccuauuca

SEQ ID NO: 474277 - RNA, 18 nt, Artificial Sequence
  Synthetic
gaggaaguagccuauuca

SEQ ID NO: 474278 - RNA, 19 nt, Artificial Sequence
  Synthetic
agaggaaguagccuauuca

SEQ ID NO: 474279 - RNA, 20 nt, Artificial Sequence
  Synthetic
aagaggaaguagccuauuca

SEQ ID NO: 474280 - RNA, 21 nt, Artificial Sequence
  Synthetic
aaagaggaaguagccuauuca

SEQ ID NO: 474281 - RNA, 22 nt, Artificial Sequence
  Synthetic
aaaagaggaaguagccuauuca

SEQ ID NO: 474282 - RNA, 23 nt, Artificial Sequence
  Synthetic
aaaaagaggaaguagccuauuca

SEQ ID NO: 474283 - RNA, 24 nt, Artificial Sequence
  Synthetic
aaaaaagaggaaguagccuauuca

SEQ ID NO: 474284 - RNA, 18 nt, Artificial Sequence
  Synthetic
caaacucauaucuauuca

SEQ ID NO: 474285 - RNA, 19 nt, Artificial Sequence
  Synthetic
acaaacucauaucuauuca

SEQ ID NO: 474286 - RNA, 20 nt, Artificial Sequence
  Synthetic
cacaaacucauaucuauuca

SEQ ID NO: 474287 - RNA, 21 nt, Artificial Sequence
  Synthetic
ucacaaacucauaucuauuca

SEQ ID NO: 474288 - RNA, 22 nt, Artificial Sequence
  Synthetic
uucacaaacucauaucuauuca

SEQ ID NO: 474289 - RNA, 23 nt, Artificial Sequence
  Synthetic
auucacaaacucauaucuauuca

SEQ ID NO: 474290 - RNA, 24 nt, Artificial Sequence
  Synthetic
uauucacaaacucauaucuauuca

SEQ ID NO: 474291 - RNA, 18 nt, Artificial Sequence
  Synthetic
uuucacauuaucuauuca

SEQ ID NO: 474292 - RNA, 19 nt, Artificial Sequence
  Synthetic
auuucacauuaucuauuca

SEQ ID NO: 474293 - RNA, 20 nt, Artificial Sequence
  Synthetic
cauuucacauuaucuauuca

SEQ ID NO: 474294 - RNA, 21 nt, Artificial Sequence
  Synthetic
acauuucacauuaucuauuca

SEQ ID NO: 474295 - RNA, 22 nt, Artificial Sequence
  Synthetic
cacauuucacauuaucuauuca

SEQ ID NO: 474296 - RNA, 23 nt, Artificial Sequence
  Synthetic
ucacauuucacauuaucuauuca

SEQ ID NO: 474297 - RNA, 24 nt, Artificial Sequence
  Synthetic
aucacauuucacauuaucuauuca

SEQ ID NO: 474298 - RNA, 18 nt, Artificial Sequence
  Synthetic
auguauuucuucuauuca

SEQ ID NO: 474299 - RNA, 19 nt, Artificial Sequence
  Synthetic
aauguauuucuucuauuca

SEQ ID NO: 474300 - RNA, 20 nt, Artificial Sequence
  Synthetic
aaauguauuucuucuauuca

SEQ ID NO: 474301 - RNA, 21 nt, Artificial Sequence
  Synthetic
aaaauguauuucuucuauuca

SEQ ID NO: 474302 - RNA, 22 nt, Artificial Sequence
  Synthetic
aaaaauguauuucuucuauuca

SEQ ID NO: 474303 - RNA, 23 nt, Artificial Sequence
  Synthetic
uaaaaauguauuucuucuauuca

SEQ ID NO: 474304 - RNA, 24 nt, Artificial Sequence
  Synthetic
uuaaaaauguauuucuucuauuca

SEQ ID NO: 474305 - RNA, 18 nt, Artificial Sequence
  Synthetic
cauucaauuuaguauuca

SEQ ID NO: 474306 - RNA, 19 nt, Artificial Sequence
  Synthetic
gcauucaauuuaguauuca

SEQ ID NO: 474307 - RNA, 20 nt, Artificial Sequence
  Synthetic
agcauucaauuuaguauuca

SEQ ID NO: 474308 - RNA, 21 nt, Artificial Sequence
  Synthetic
aagcauucaauuuaguauuca

SEQ ID NO: 474309 - RNA, 22 nt, Artificial Sequence
  Synthetic
aaagcauucaauuuaguauuca

SEQ ID NO: 474310 - RNA, 23 nt, Artificial Sequence
  Synthetic
caaagcauucaauuuaguauuca

SEQ ID NO: 474311 - RNA, 24 nt, Artificial Sequence
  Synthetic
ccaaagcauucaauuuaguauuca

SEQ ID NO: 474312 - RNA, 18 nt, Artificial Sequence
  Synthetic
cuagguauuacguauuca

SEQ ID NO: 474313 - RNA, 19 nt, Artificial Sequence
  Synthetic
ucuagguauuacguauuca

SEQ ID NO: 474314 - RNA, 20 nt, Artificial Sequence
  Synthetic
cucuagguauuacguauuca

SEQ ID NO: 474315 - RNA, 21 nt, Artificial Sequence
  Synthetic
ccucuagguauuacguauuca

SEQ ID NO: 474316 - RNA, 22 nt, Artificial Sequence
  Synthetic
uccucuagguauuacguauuca

SEQ ID NO: 474317 - RNA, 23 nt, Artificial Sequence
  Synthetic
cuccucuagguauuacguauuca

SEQ ID NO: 474318 - RNA, 24 nt, Artificial Sequence
  Synthetic
ucuccucuagguauuacguauuca

SEQ ID NO: 474319 - RNA, 18 nt, Artificial Sequence
  Synthetic
ucuggaucuuuguauuca

SEQ ID NO: 474320 - RNA, 19 nt, Artificial Sequence
  Synthetic
cucuggaucuuuguauuca

SEQ ID NO: 474321 - RNA, 20 nt, Artificial Sequence
  Synthetic
acucuggaucuuuguauuca

SEQ ID NO: 474322 - RNA, 21 nt, Artificial Sequence
  Synthetic
aacucuggaucuuuguauuca

SEQ ID NO: 474323 - RNA, 22 nt, Artificial Sequence
  Synthetic
aaacucuggaucuuuguauuca

SEQ ID NO: 474324 - RNA, 23 nt, Artificial Sequence
  Synthetic
uaaacucuggaucuuuguauuca

SEQ ID NO: 474325 - RNA, 24 nt, Artificial Sequence
  Synthetic
uuaaacucuggaucuuuguauuca

SEQ ID NO: 474326 - RNA, 18 nt, Artificial Sequence
  Synthetic
augaacaugacuuauuca

SEQ ID NO: 474327 - RNA, 19 nt, Artificial Sequence
  Synthetic
caugaacaugacuuauuca

SEQ ID NO: 474328 - RNA, 20 nt, Artificial Sequence
  Synthetic
gcaugaacaugacuuauuca

SEQ ID NO: 474329 - RNA, 21 nt, Artificial Sequence
  Synthetic
agcaugaacaugacuuauuca

SEQ ID NO: 474330 - RNA, 22 nt, Artificial Sequence
  Synthetic
aagcaugaacaugacuuauuca

SEQ ID NO: 474331 - RNA, 23 nt, Artificial Sequence
  Synthetic
aaagcaugaacaugacuuauuca

SEQ ID NO: 474332 - RNA, 24 nt, Artificial Sequence
  Synthetic
aaaagcaugaacaugacuuauuca

SEQ ID NO: 474333 - RNA, 18 nt, Artificial Sequence
  Synthetic
uggagacagaguuauuca

SEQ ID NO: 474334 - RNA, 19 nt, Artificial Sequence
  Synthetic
auggagacagaguuauuca

SEQ ID NO: 474335 - RNA, 20 nt, Artificial Sequence
  Synthetic
uauggagacagaguuauuca

SEQ ID NO: 474336 - RNA, 21 nt, Artificial Sequence
  Synthetic
guauggagacagaguuauuca

SEQ ID NO: 474337 - RNA, 22 nt, Artificial Sequence
  Synthetic
gguauggagacagaguuauuca

SEQ ID NO: 474338 - RNA, 23 nt, Artificial Sequence
  Synthetic
agguauggagacagaguuauuca

SEQ ID NO: 474339 - RNA, 24 nt, Artificial Sequence
  Synthetic
gagguauggagacagaguuauuca

SEQ ID NO: 474340 - RNA, 18 nt, Artificial Sequence
  Synthetic
caucugcccuguuauuca

SEQ ID NO: 474341 - RNA, 19 nt, Artificial Sequence
  Synthetic
acaucugcccuguuauuca

SEQ ID NO: 474342 - RNA, 20 nt, Artificial Sequence
  Synthetic
aacaucugcccuguuauuca

SEQ ID NO: 474343 - RNA, 21 nt, Artificial Sequence
  Synthetic
caacaucugcccuguuauuca

SEQ ID NO: 474344 - RNA, 22 nt, Artificial Sequence
  Synthetic
gcaacaucugcccuguuauuca

SEQ ID NO: 474345 - RNA, 23 nt, Artificial Sequence
  Synthetic
ugcaacaucugcccuguuauuca

SEQ ID NO: 474346 - RNA, 24 nt, Artificial Sequence
  Synthetic
uugcaacaucugcccuguuauuca

SEQ ID NO: 474347 - RNA, 18 nt, Artificial Sequence
  Synthetic
aguucuaaaauuuauuca

SEQ ID NO: 474348 - RNA, 19 nt, Artificial Sequence
  Synthetic
uaguucuaaaauuuauuca

SEQ ID NO: 474349 - RNA, 20 nt, Artificial Sequence
  Synthetic
auaguucuaaaauuuauuca

SEQ ID NO: 474350 - RNA, 21 nt, Artificial Sequence
  Synthetic
uauaguucuaaaauuuauuca

SEQ ID NO: 474351 - RNA, 22 nt, Artificial Sequence
  Synthetic
auauaguucuaaaauuuauuca

SEQ ID NO: 474352 - RNA, 23 nt, Artificial Sequence
  Synthetic
aauauaguucuaaaauuuauuca

SEQ ID NO: 474353 - RNA, 24 nt, Artificial Sequence
  Synthetic
caauauaguucuaaaauuuauuca

SEQ ID NO: 474354 - RNA, 18 nt, Artificial Sequence
  Synthetic
uagauaaauguuuauuca

SEQ ID NO: 474355 - RNA, 19 nt, Artificial Sequence
  Synthetic
cuagauaaauguuuauuca

SEQ ID NO: 474356 - RNA, 20 nt, Artificial Sequence
  Synthetic
acuagauaaauguuuauuca

SEQ ID NO: 474357 - RNA, 21 nt, Artificial Sequence
  Synthetic
cacuagauaaauguuuauuca

SEQ ID NO: 474358 - RNA, 22 nt, Artificial Sequence
  Synthetic
gcacuagauaaauguuuauuca

SEQ ID NO: 474359 - RNA, 23 nt, Artificial Sequence
  Synthetic
ggcacuagauaaauguuuauuca

SEQ ID NO: 474360 - RNA, 24 nt, Artificial Sequence
  Synthetic
aggcacuagauaaauguuuauuca

SEQ ID NO: 474361 - RNA, 18 nt, Artificial Sequence
  Synthetic
aagaaaaaggaaacuuca

SEQ ID NO: 474362 - RNA, 19 nt, Artificial Sequence
  Synthetic
gaagaaaaaggaaacuuca

SEQ ID NO: 474363 - RNA, 20 nt, Artificial Sequence
  Synthetic
ggaagaaaaaggaaacuuca

SEQ ID NO: 474364 - RNA, 21 nt, Artificial Sequence
  Synthetic
gggaagaaaaaggaaacuuca

SEQ ID NO: 474365 - RNA, 22 nt, Artificial Sequence
  Synthetic
agggaagaaaaaggaaacuuca

SEQ ID NO: 474366 - RNA, 23 nt, Artificial Sequence
  Synthetic
gagggaagaaaaaggaaacuuca

SEQ ID NO: 474367 - RNA, 24 nt, Artificial Sequence
  Synthetic
agagggaagaaaaaggaaacuuca

SEQ ID NO: 474368 - RNA, 18 nt, Artificial Sequence
  Synthetic
agaaaguguucaacuuca

SEQ ID NO: 474369 - RNA, 19 nt, Artificial Sequence
  Synthetic
gagaaaguguucaacuuca

SEQ ID NO: 474370 - RNA, 20 nt, Artificial Sequence
  Synthetic
ggagaaaguguucaacuuca

SEQ ID NO: 474371 - RNA, 21 nt, Artificial Sequence
  Synthetic
aggagaaaguguucaacuuca

SEQ ID NO: 474372 - RNA, 22 nt, Artificial Sequence
  Synthetic
aaggagaaaguguucaacuuca

SEQ ID NO: 474373 - RNA, 23 nt, Artificial Sequence
  Synthetic
uaaggagaaaguguucaacuuca

SEQ ID NO: 474374 - RNA, 24 nt, Artificial Sequence
  Synthetic
guaaggagaaaguguucaacuuca

SEQ ID NO: 474375 - RNA, 18 nt, Artificial Sequence
  Synthetic
cauaaucagagaacuuca

SEQ ID NO: 474376 - RNA, 19 nt, Artificial Sequence
  Synthetic
ccauaaucagagaacuuca

SEQ ID NO: 474377 - RNA, 20 nt, Artificial Sequence
  Synthetic
uccauaaucagagaacuuca

SEQ ID NO: 474378 - RNA, 21 nt, Artificial Sequence
  Synthetic
auccauaaucagagaacuuca

SEQ ID NO: 474379 - RNA, 22 nt, Artificial Sequence
  Synthetic
aauccauaaucagagaacuuca

SEQ ID NO: 474380 - RNA, 23 nt, Artificial Sequence
  Synthetic
aaauccauaaucagagaacuuca

SEQ ID NO: 474381 - RNA, 24 nt, Artificial Sequence
  Synthetic
aaaauccauaaucagagaacuuca

SEQ ID NO: 474382 - RNA, 18 nt, Artificial Sequence
  Synthetic
uagaacuagagaacuuca

SEQ ID NO: 474383 - RNA, 19 nt, Artificial Sequence
  Synthetic
cuagaacuagagaacuuca

SEQ ID NO: 474384 - RNA, 20 nt, Artificial Sequence
  Synthetic
ucuagaacuagagaacuuca

SEQ ID NO: 474385 - RNA, 21 nt, Artificial Sequence
  Synthetic
aucuagaacuagagaacuuca

SEQ ID NO: 474386 - RNA, 22 nt, Artificial Sequence
  Synthetic
uaucuagaacuagagaacuuca

SEQ ID NO: 474387 - RNA, 23 nt, Artificial Sequence
  Synthetic
guaucuagaacuagagaacuuca

SEQ ID NO: 474388 - RNA, 24 nt, Artificial Sequence
  Synthetic
uguaucuagaacuagagaacuuca

SEQ ID NO: 474389 - RNA, 18 nt, Artificial Sequence
  Synthetic
aaaugucagugaacuuca

SEQ ID NO: 474390 - RNA, 19 nt, Artificial Sequence
  Synthetic
caaaugucagugaacuuca

SEQ ID NO: 474391 - RNA, 20 nt, Artificial Sequence
  Synthetic
ucaaaugucagugaacuuca

SEQ ID NO: 474392 - RNA, 21 nt, Artificial Sequence
  Synthetic
aucaaaugucagugaacuuca

SEQ ID NO: 474393 - RNA, 22 nt, Artificial Sequence
  Synthetic
aaucaaaugucagugaacuuca

SEQ ID NO: 474394 - RNA, 23 nt, Artificial Sequence
  Synthetic
caaucaaaugucagugaacuuca

SEQ ID NO: 474395 - RNA, 24 nt, Artificial Sequence
  Synthetic
ccaaucaaaugucagugaacuuca

SEQ ID NO: 474396 - RNA, 18 nt, Artificial Sequence
  Synthetic
ccccaaauucuaacuuca

SEQ ID NO: 474397 - RNA, 19 nt, Artificial Sequence
  Synthetic
gccccaaauucuaacuuca

SEQ ID NO: 474398 - RNA, 20 nt, Artificial Sequence
  Synthetic
agccccaaauucuaacuuca

SEQ ID NO: 474399 - RNA, 21 nt, Artificial Sequence
  Synthetic
aagccccaaauucuaacuuca

SEQ ID NO: 474400 - RNA, 22 nt, Artificial Sequence
  Synthetic
uaagccccaaauucuaacuuca

SEQ ID NO: 474401 - RNA, 23 nt, Artificial Sequence
  Synthetic
auaagccccaaauucuaacuuca

SEQ ID NO: 474402 - RNA, 24 nt, Artificial Sequence
  Synthetic
cauaagccccaaauucuaacuuca

SEQ ID NO: 474403 - RNA, 18 nt, Artificial Sequence
  Synthetic
uaaauccaauuaacuuca

SEQ ID NO: 474404 - RNA, 19 nt, Artificial Sequence
  Synthetic
guaaauccaauuaacuuca

SEQ ID NO: 474405 - RNA, 20 nt, Artificial Sequence
  Synthetic
aguaaauccaauuaacuuca

SEQ ID NO: 474406 - RNA, 21 nt, Artificial Sequence
  Synthetic
uaguaaauccaauuaacuuca

SEQ ID NO: 474407 - RNA, 22 nt, Artificial Sequence
  Synthetic
guaguaaauccaauuaacuuca

SEQ ID NO: 474408 - RNA, 23 nt, Artificial Sequence
  Synthetic
uguaguaaauccaauuaacuuca

SEQ ID NO: 474409 - RNA, 24 nt, Artificial Sequence
  Synthetic
cuguaguaaauccaauuaacuuca

SEQ ID NO: 474410 - RNA, 18 nt, Artificial Sequence
  Synthetic
accauucuccacacuuca

SEQ ID NO: 474411 - RNA, 19 nt, Artificial Sequence
  Synthetic
aaccauucuccacacuuca

SEQ ID NO: 474412 - RNA, 20 nt, Artificial Sequence
  Synthetic
gaaccauucuccacacuuca

SEQ ID NO: 474413 - RNA, 21 nt, Artificial Sequence
  Synthetic
ugaaccauucuccacacuuca

SEQ ID NO: 474414 - RNA, 22 nt, Artificial Sequence
  Synthetic
cugaaccauucuccacacuuca

SEQ ID NO: 474415 - RNA, 23 nt, Artificial Sequence
  Synthetic
ucugaaccauucuccacacuuca

SEQ ID NO: 474416 - RNA, 24 nt, Artificial Sequence
  Synthetic
cucugaaccauucuccacacuuca

SEQ ID NO: 474417 - RNA, 18 nt, Artificial Sequence
  Synthetic
auccuccaugacacuuca

SEQ ID NO: 474418 - RNA, 19 nt, Artificial Sequence
  Synthetic
aauccuccaugacacuuca

SEQ ID NO: 474419 - RNA, 20 nt, Artificial Sequence
  Synthetic
uaauccuccaugacacuuca

SEQ ID NO: 474420 - RNA, 21 nt, Artificial Sequence
  Synthetic
cuaauccuccaugacacuuca

SEQ ID NO: 474421 - RNA, 22 nt, Artificial Sequence
  Synthetic
acuaauccuccaugacacuuca

SEQ ID NO: 474422 - RNA, 23 nt, Artificial Sequence
  Synthetic
aacuaauccuccaugacacuuca

SEQ ID NO: 474423 - RNA, 24 nt, Artificial Sequence
  Synthetic
gaacuaauccuccaugacacuuca

SEQ ID NO: 474424 - RNA, 18 nt, Artificial Sequence
  Synthetic
uguuacaaauacacuuca

SEQ ID NO: 474425 - RNA, 19 nt, Artificial Sequence
  Synthetic
guguuacaaauacacuuca

SEQ ID NO: 474426 - RNA, 20 nt, Artificial Sequence
  Synthetic
uguguuacaaauacacuuca

SEQ ID NO: 474427 - RNA, 21 nt, Artificial Sequence
  Synthetic
cuguguuacaaauacacuuca

SEQ ID NO: 474428 - RNA, 22 nt, Artificial Sequence
  Synthetic
acuguguuacaaauacacuuca

SEQ ID NO: 474429 - RNA, 23 nt, Artificial Sequence
  Synthetic
aacuguguuacaaauacacuuca

SEQ ID NO: 474430 - RNA, 24 nt, Artificial Sequence
  Synthetic
gaacuguguuacaaauacacuuca

SEQ ID NO: 474431 - RNA, 18 nt, Artificial Sequence
  Synthetic
ugagcugguuccacuuca

SEQ ID NO: 474432 - RNA, 19 nt, Artificial Sequence
  Synthetic
cugagcugguuccacuuca

SEQ ID NO: 474433 - RNA, 20 nt, Artificial Sequence
  Synthetic
ccugagcugguuccacuuca

SEQ ID NO: 474434 - RNA, 21 nt, Artificial Sequence
  Synthetic
uccugagcugguuccacuuca

SEQ ID NO: 474435 - RNA, 22 nt, Artificial Sequence
  Synthetic
guccugagcugguuccacuuca

SEQ ID NO: 474436 - RNA, 23 nt, Artificial Sequence
  Synthetic
cguccugagcugguuccacuuca

SEQ ID NO: 474437 - RNA, 24 nt, Artificial Sequence
  Synthetic
ccguccugagcugguuccacuuca

SEQ ID NO: 474438 - RNA, 18 nt, Artificial Sequence
  Synthetic
aaaaaauuuuucacuuca

SEQ ID NO: 474439 - RNA, 19 nt, Artificial Sequence
  Synthetic
aaaaaaauuuuucacuuca

SEQ ID NO: 474440 - RNA, 20 nt, Artificial Sequence
  Synthetic
aaaaaaaauuuuucacuuca

SEQ ID NO: 474441 - RNA, 21 nt, Artificial Sequence
  Synthetic
uaaaaaaaauuuuucacuuca

SEQ ID NO: 474442 - RNA, 22 nt, Artificial Sequence
  Synthetic
auaaaaaaaauuuuucacuuca

SEQ ID NO: 474443 - RNA, 23 nt, Artificial Sequence
  Synthetic
uauaaaaaaaauuuuucacuuca

SEQ ID NO: 474444 - RNA, 24 nt, Artificial Sequence
  Synthetic
auauaaaaaaaauuuuucacuuca

SEQ ID NO: 474445 - RNA, 18 nt, Artificial Sequence
  Synthetic
uuuugcaugacgacuuca

SEQ ID NO: 474446 - RNA, 19 nt, Artificial Sequence
  Synthetic
auuuugcaugacgacuuca

SEQ ID NO: 474447 - RNA, 20 nt, Artificial Sequence
  Synthetic
aauuuugcaugacgacuuca

SEQ ID NO: 474448 - RNA, 21 nt, Artificial Sequence
  Synthetic
caauuuugcaugacgacuuca

SEQ ID NO: 474449 - RNA, 22 nt, Artificial Sequence
  Synthetic
ucaauuuugcaugacgacuuca

SEQ ID NO: 474450 - RNA, 23 nt, Artificial Sequence
  Synthetic
uucaauuuugcaugacgacuuca

SEQ ID NO: 474451 - RNA, 24 nt, Artificial Sequence
  Synthetic
uuucaauuuugcaugacgacuuca

SEQ ID NO: 474452 - RNA, 18 nt, Artificial Sequence
  Synthetic
gguuccugaaugacuuca

SEQ ID NO: 474453 - RNA, 19 nt, Artificial Sequence
  Synthetic
ggguuccugaaugacuuca

SEQ ID NO: 474454 - RNA, 20 nt, Artificial Sequence
  Synthetic
uggguuccugaaugacuuca

SEQ ID NO: 474455 - RNA, 21 nt, Artificial Sequence
  Synthetic
uuggguuccugaaugacuuca

SEQ ID NO: 474456 - RNA, 22 nt, Artificial Sequence
  Synthetic
cuuggguuccugaaugacuuca

SEQ ID NO: 474457 - RNA, 23 nt, Artificial Sequence
  Synthetic
gcuuggguuccugaaugacuuca

SEQ ID NO: 474458 - RNA, 24 nt, Artificial Sequence
  Synthetic
agcuuggguuccugaaugacuuca

SEQ ID NO: 474459 - RNA, 18 nt, Artificial Sequence
  Synthetic
aguauuccaaauacuuca

SEQ ID NO: 474460 - RNA, 19 nt, Artificial Sequence
  Synthetic
gaguauuccaaauacuuca

SEQ ID NO: 474461 - RNA, 20 nt, Artificial Sequence
  Synthetic
agaguauuccaaauacuuca

SEQ ID NO: 474462 - RNA, 21 nt, Artificial Sequence
  Synthetic
gagaguauuccaaauacuuca

SEQ ID NO: 474463 - RNA, 22 nt, Artificial Sequence
  Synthetic
cgagaguauuccaaauacuuca

SEQ ID NO: 474464 - RNA, 23 nt, Artificial Sequence
  Synthetic
ucgagaguauuccaaauacuuca

SEQ ID NO: 474465 - RNA, 24 nt, Artificial Sequence
  Synthetic
aucgagaguauuccaaauacuuca

SEQ ID NO: 474466 - RNA, 18 nt, Artificial Sequence
  Synthetic
gggucacugguuacuuca

SEQ ID NO: 474467 - RNA, 19 nt, Artificial Sequence
  Synthetic
agggucacugguuacuuca

SEQ ID NO: 474468 - RNA, 20 nt, Artificial Sequence
  Synthetic
aagggucacugguuacuuca

SEQ ID NO: 474469 - RNA, 21 nt, Artificial Sequence
  Synthetic
aaagggucacugguuacuuca

SEQ ID NO: 474470 - RNA, 22 nt, Artificial Sequence
  Synthetic
caaagggucacugguuacuuca

SEQ ID NO: 474471 - RNA, 23 nt, Artificial Sequence
  Synthetic
ucaaagggucacugguuacuuca

SEQ ID NO: 474472 - RNA, 24 nt, Artificial Sequence
  Synthetic
uucaaagggucacugguuacuuca

SEQ ID NO: 474473 - RNA, 18 nt, Artificial Sequence
  Synthetic
ggaguuagaauaccuuca

SEQ ID NO: 474474 - RNA, 19 nt, Artificial Sequence
  Synthetic
gggaguuagaauaccuuca

SEQ ID NO: 474475 - RNA, 20 nt, Artificial Sequence
  Synthetic
ggggaguuagaauaccuuca

SEQ ID NO: 474476 - RNA, 21 nt, Artificial Sequence
  Synthetic
aggggaguuagaauaccuuca

SEQ ID NO: 474477 - RNA, 22 nt, Artificial Sequence
  Synthetic
gaggggaguuagaauaccuuca

SEQ ID NO: 474478 - RNA, 23 nt, Artificial Sequence
  Synthetic
ggaggggaguuagaauaccuuca

SEQ ID NO: 474479 - RNA, 24 nt, Artificial Sequence
  Synthetic
aggaggggaguuagaauaccuuca

SEQ ID NO: 474480 - RNA, 18 nt, Artificial Sequence
  Synthetic
uagaaucuaaccccuuca

SEQ ID NO: 474481 - RNA, 19 nt, Artificial Sequence
  Synthetic
auagaaucuaaccccuuca

SEQ ID NO: 474482 - RNA, 20 nt, Artificial Sequence
  Synthetic
uauagaaucuaaccccuuca

SEQ ID NO: 474483 - RNA, 21 nt, Artificial Sequence
  Synthetic
cuauagaaucuaaccccuuca

SEQ ID NO: 474484 - RNA, 22 nt, Artificial Sequence
  Synthetic
ucuauagaaucuaaccccuuca

SEQ ID NO: 474485 - RNA, 23 nt, Artificial Sequence
  Synthetic
gucuauagaaucuaaccccuuca

SEQ ID NO: 474486 - RNA, 24 nt, Artificial Sequence
  Synthetic
agucuauagaaucuaaccccuuca

SEQ ID NO: 474487 - RNA, 18 nt, Artificial Sequence
  Synthetic
uacucagagcccccuuca

SEQ ID NO: 474488 - RNA, 19 nt, Artificial Sequence
  Synthetic
cuacucagagcccccuuca

SEQ ID NO: 474489 - RNA, 20 nt, Artificial Sequence
  Synthetic
gcuacucagagcccccuuca

SEQ ID NO: 474490 - RNA, 21 nt, Artificial Sequence
  Synthetic
ugcuacucagagcccccuuca

SEQ ID NO: 474491 - RNA, 22 nt, Artificial Sequence
  Synthetic
augcuacucagagcccccuuca

SEQ ID NO: 474492 - RNA, 23 nt, Artificial Sequence
  Synthetic
uaugcuacucagagcccccuuca

SEQ ID NO: 474493 - RNA, 24 nt, Artificial Sequence
  Synthetic
auaugcuacucagagcccccuuca

SEQ ID NO: 474494 - RNA, 18 nt, Artificial Sequence
  Synthetic
uuacuaacuagcccuuca

SEQ ID NO: 474495 - RNA, 19 nt, Artificial Sequence
  Synthetic
uuuacuaacuagcccuuca

SEQ ID NO: 474496 - RNA, 20 nt, Artificial Sequence
  Synthetic
auuuacuaacuagcccuuca

SEQ ID NO: 474497 - RNA, 21 nt, Artificial Sequence
  Synthetic
uauuuacuaacuagcccuuca

SEQ ID NO: 474498 - RNA, 22 nt, Artificial Sequence
  Synthetic
auauuuacuaacuagcccuuca

SEQ ID NO: 474499 - RNA, 23 nt, Artificial Sequence
  Synthetic
aauauuuacuaacuagcccuuca

SEQ ID NO: 474500 - RNA, 24 nt, Artificial Sequence
  Synthetic
aaauauuuacuaacuagcccuuca

SEQ ID NO: 474501 - RNA, 18 nt, Artificial Sequence
  Synthetic
auaacaaaaugcccuuca

SEQ ID NO: 474502 - RNA, 19 nt, Artificial Sequence
  Synthetic
aauaacaaaaugcccuuca

SEQ ID NO: 474503 - RNA, 20 nt, Artificial Sequence
  Synthetic
caauaacaaaaugcccuuca

SEQ ID NO: 474504 - RNA, 21 nt, Artificial Sequence
  Synthetic
ccaauaacaaaaugcccuuca

SEQ ID NO: 474505 - RNA, 22 nt, Artificial Sequence
  Synthetic
gccaauaacaaaaugcccuuca

SEQ ID NO: 474506 - RNA, 23 nt, Artificial Sequence
  Synthetic
ggccaauaacaaaaugcccuuca

SEQ ID NO: 474507 - RNA, 24 nt, Artificial Sequence
  Synthetic
gggccaauaacaaaaugcccuuca

SEQ ID NO: 474508 - RNA, 18 nt, Artificial Sequence
  Synthetic
ccauuauccaucccuuca

SEQ ID NO: 474509 - RNA, 19 nt, Artificial Sequence
  Synthetic
uccauuauccaucccuuca

SEQ ID NO: 474510 - RNA, 20 nt, Artificial Sequence
  Synthetic
guccauuauccaucccuuca

SEQ ID NO: 474511 - RNA, 21 nt, Artificial Sequence
  Synthetic
uguccauuauccaucccuuca

SEQ ID NO: 474512 - RNA, 22 nt, Artificial Sequence
  Synthetic
auguccauuauccaucccuuca

SEQ ID NO: 474513 - RNA, 23 nt, Artificial Sequence
  Synthetic
uauguccauuauccaucccuuca

SEQ ID NO: 474514 - RNA, 24 nt, Artificial Sequence
  Synthetic
uuauguccauuauccaucccuuca

SEQ ID NO: 474515 - RNA, 18 nt, Artificial Sequence
  Synthetic
uuuauccaugucccuuca

SEQ ID NO: 474516 - RNA, 19 nt, Artificial Sequence
  Synthetic
cuuuauccaugucccuuca

SEQ ID NO: 474517 - RNA, 20 nt, Artificial Sequence
  Synthetic
gcuuuauccaugucccuuca

SEQ ID NO: 474518 - RNA, 21 nt, Artificial Sequence
  Synthetic
agcuuuauccaugucccuuca

SEQ ID NO: 474519 - RNA, 22 nt, Artificial Sequence
  Synthetic
cagcuuuauccaugucccuuca

SEQ ID NO: 474520 - RNA, 23 nt, Artificial Sequence
  Synthetic
ccagcuuuauccaugucccuuca

SEQ ID NO: 474521 - RNA, 24 nt, Artificial Sequence
  Synthetic
uccagcuuuauccaugucccuuca

SEQ ID NO: 474522 - RNA, 18 nt, Artificial Sequence
  Synthetic
ucuuccccagagccuuca

SEQ ID NO: 474523 - RNA, 19 nt, Artificial Sequence
  Synthetic
uucuuccccagagccuuca

SEQ ID NO: 474524 - RNA, 20 nt, Artificial Sequence
  Synthetic
auucuuccccagagccuuca

SEQ ID NO: 474525 - RNA, 21 nt, Artificial Sequence
  Synthetic
aauucuuccccagagccuuca

SEQ ID NO: 474526 - RNA, 22 nt, Artificial Sequence
  Synthetic
gaauucuuccccagagccuuca

SEQ ID NO: 474527 - RNA, 23 nt, Artificial Sequence
  Synthetic
agaauucuuccccagagccuuca

SEQ ID NO: 474528 - RNA, 24 nt, Artificial Sequence
  Synthetic
aagaauucuuccccagagccuuca

SEQ ID NO: 474529 - RNA, 18 nt, Artificial Sequence
  Synthetic
gaaaaucaaaugccuuca

SEQ ID NO: 474530 - RNA, 19 nt, Artificial Sequence
  Synthetic
agaaaaucaaaugccuuca

SEQ ID NO: 474531 - RNA, 20 nt, Artificial Sequence
  Synthetic
uagaaaaucaaaugccuuca

SEQ ID NO: 474532 - RNA, 21 nt, Artificial Sequence
  Synthetic
uuagaaaaucaaaugccuuca

SEQ ID NO: 474533 - RNA, 22 nt, Artificial Sequence
  Synthetic
guuagaaaaucaaaugccuuca

SEQ ID NO: 474534 - RNA, 23 nt, Artificial Sequence
  Synthetic
gguuagaaaaucaaaugccuuca

SEQ ID NO: 474535 - RNA, 24 nt, Artificial Sequence
  Synthetic
agguuagaaaaucaaaugccuuca

SEQ ID NO: 474536 - RNA, 18 nt, Artificial Sequence
  Synthetic
gacccccuacugccuuca

SEQ ID NO: 474537 - RNA, 19 nt, Artificial Sequence
  Synthetic
ggacccccuacugccuuca

SEQ ID NO: 474538 - RNA, 20 nt, Artificial Sequence
  Synthetic
gggacccccuacugccuuca

SEQ ID NO: 474539 - RNA, 21 nt, Artificial Sequence
  Synthetic
agggacccccuacugccuuca

SEQ ID NO: 474540 - RNA, 22 nt, Artificial Sequence
  Synthetic
cagggacccccuacugccuuca

SEQ ID NO: 474541 - RNA, 23 nt, Artificial Sequence
  Synthetic
ccagggacccccuacugccuuca

SEQ ID NO: 474542 - RNA, 24 nt, Artificial Sequence
  Synthetic
accagggacccccuacugccuuca

SEQ ID NO: 474543 - RNA, 18 nt, Artificial Sequence
  Synthetic
aaauuuugccugccuuca

SEQ ID NO: 474544 - RNA, 19 nt, Artificial Sequence
  Synthetic
gaaauuuugccugccuuca

SEQ ID NO: 474545 - RNA, 20 nt, Artificial Sequence
  Synthetic
agaaauuuugccugccuuca

SEQ ID NO: 474546 - RNA, 21 nt, Artificial Sequence
  Synthetic
uagaaauuuugccugccuuca

SEQ ID NO: 474547 - RNA, 22 nt, Artificial Sequence
  Synthetic
auagaaauuuugccugccuuca

SEQ ID NO: 474548 - RNA, 23 nt, Artificial Sequence
  Synthetic
uauagaaauuuugccugccuuca

SEQ ID NO: 474549 - RNA, 24 nt, Artificial Sequence
  Synthetic
uuauagaaauuuugccugccuuca

SEQ ID NO: 474550 - RNA, 18 nt, Artificial Sequence
  Synthetic
uacugaauauauccuuca

SEQ ID NO: 474551 - RNA, 19 nt, Artificial Sequence
  Synthetic
auacugaauauauccuuca

SEQ ID NO: 474552 - RNA, 20 nt, Artificial Sequence
  Synthetic
aauacugaauauauccuuca

SEQ ID NO: 474553 - RNA, 21 nt, Artificial Sequence
  Synthetic
uaauacugaauauauccuuca

SEQ ID NO: 474554 - RNA, 22 nt, Artificial Sequence
  Synthetic
auaauacugaauauauccuuca

SEQ ID NO: 474555 - RNA, 23 nt, Artificial Sequence
  Synthetic
aauaauacugaauauauccuuca

SEQ ID NO: 474556 - RNA, 24 nt, Artificial Sequence
  Synthetic
uaauaauacugaauauauccuuca

SEQ ID NO: 474557 - RNA, 18 nt, Artificial Sequence
  Synthetic
uccaccuucaguccuuca

SEQ ID NO: 474558 - RNA, 19 nt, Artificial Sequence
  Synthetic
uuccaccuucaguccuuca

SEQ ID NO: 474559 - RNA, 20 nt, Artificial Sequence
  Synthetic
auuccaccuucaguccuuca

SEQ ID NO: 474560 - RNA, 21 nt, Artificial Sequence
  Synthetic
aauuccaccuucaguccuuca

SEQ ID NO: 474561 - RNA, 22 nt, Artificial Sequence
  Synthetic
caauuccaccuucaguccuuca

SEQ ID NO: 474562 - RNA, 23 nt, Artificial Sequence
  Synthetic
ccaauuccaccuucaguccuuca

SEQ ID NO: 474563 - RNA, 24 nt, Artificial Sequence
  Synthetic
uccaauuccaccuucaguccuuca

SEQ ID NO: 474564 - RNA, 18 nt, Artificial Sequence
  Synthetic
uauuacauuuuuccuuca

SEQ ID NO: 474565 - RNA, 19 nt, Artificial Sequence
  Synthetic
cuauuacauuuuuccuuca

SEQ ID NO: 474566 - RNA, 20 nt, Artificial Sequence
  Synthetic
gcuauuacauuuuuccuuca

SEQ ID NO: 474567 - RNA, 21 nt, Artificial Sequence
  Synthetic
ggcuauuacauuuuuccuuca

SEQ ID NO: 474568 - RNA, 22 nt, Artificial Sequence
  Synthetic
gggcuauuacauuuuuccuuca

SEQ ID NO: 474569 - RNA, 23 nt, Artificial Sequence
  Synthetic
ugggcuauuacauuuuuccuuca

SEQ ID NO: 474570 - RNA, 24 nt, Artificial Sequence
  Synthetic
augggcuauuacauuuuuccuuca

SEQ ID NO: 474571 - RNA, 18 nt, Artificial Sequence
  Synthetic
cgaguuacuuaagcuuca

SEQ ID NO: 474572 - RNA, 19 nt, Artificial Sequence
  Synthetic
ucgaguuacuuaagcuuca

SEQ ID NO: 474573 - RNA, 20 nt, Artificial Sequence
  Synthetic
aucgaguuacuuaagcuuca

SEQ ID NO: 474574 - RNA, 21 nt, Artificial Sequence
  Synthetic
uaucgaguuacuuaagcuuca

SEQ ID NO: 474575 - RNA, 22 nt, Artificial Sequence
  Synthetic
auaucgaguuacuuaagcuuca

SEQ ID NO: 474576 - RNA, 23 nt, Artificial Sequence
  Synthetic
aauaucgaguuacuuaagcuuca

SEQ ID NO: 474577 - RNA, 24 nt, Artificial Sequence
  Synthetic
gaauaucgaguuacuuaagcuuca

SEQ ID NO: 474578 - RNA, 18 nt, Artificial Sequence
  Synthetic
agcuuaaauucagcuuca

SEQ ID NO: 474579 - RNA, 19 nt, Artificial Sequence
  Synthetic
cagcuuaaauucagcuuca

SEQ ID NO: 474580 - RNA, 20 nt, Artificial Sequence
  Synthetic
ccagcuuaaauucagcuuca

SEQ ID NO: 474581 - RNA, 21 nt, Artificial Sequence
  Synthetic
accagcuuaaauucagcuuca

SEQ ID NO: 474582 - RNA, 22 nt, Artificial Sequence
  Synthetic
gaccagcuuaaauucagcuuca

SEQ ID NO: 474583 - RNA, 23 nt, Artificial Sequence
  Synthetic
ugaccagcuuaaauucagcuuca

SEQ ID NO: 474584 - RNA, 24 nt, Artificial Sequence
  Synthetic
gugaccagcuuaaauucagcuuca

SEQ ID NO: 474585 - RNA, 18 nt, Artificial Sequence
  Synthetic
ucauucuccagagcuuca

SEQ ID NO: 474586 - RNA, 19 nt, Artificial Sequence
  Synthetic
cucauucuccagagcuuca

SEQ ID NO: 474587 - RNA, 20 nt, Artificial Sequence
  Synthetic
ccucauucuccagagcuuca

SEQ ID NO: 474588 - RNA, 21 nt, Artificial Sequence
  Synthetic
accucauucuccagagcuuca

SEQ ID NO: 474589 - RNA, 22 nt, Artificial Sequence
  Synthetic
caccucauucuccagagcuuca

SEQ ID NO: 474590 - RNA, 23 nt, Artificial Sequence
  Synthetic
acaccucauucuccagagcuuca

SEQ ID NO: 474591 - RNA, 24 nt, Artificial Sequence
  Synthetic
gacaccucauucuccagagcuuca

SEQ ID NO: 474592 - RNA, 18 nt, Artificial Sequence
  Synthetic
caagaccagauggcuuca

SEQ ID NO: 474593 - RNA, 19 nt, Artificial Sequence
  Synthetic
ucaagaccagauggcuuca

SEQ ID NO: 474594 - RNA, 20 nt, Artificial Sequence
  Synthetic
cucaagaccagauggcuuca

SEQ ID NO: 474595 - RNA, 21 nt, Artificial Sequence
  Synthetic
gcucaagaccagauggcuuca

SEQ ID NO: 474596 - RNA, 22 nt, Artificial Sequence
  Synthetic
agcucaagaccagauggcuuca

SEQ ID NO: 474597 - RNA, 23 nt, Artificial Sequence
  Synthetic
aagcucaagaccagauggcuuca

SEQ ID NO: 474598 - RNA, 24 nt, Artificial Sequence
  Synthetic
aaagcucaagaccagauggcuuca

SEQ ID NO: 474599 - RNA, 18 nt, Artificial Sequence
  Synthetic
acugugaauaaugcuuca

SEQ ID NO: 474600 - RNA, 19 nt, Artificial Sequence
  Synthetic
uacugugaauaaugcuuca

SEQ ID NO: 474601 - RNA, 20 nt, Artificial Sequence
  Synthetic
cuacugugaauaaugcuuca

SEQ ID NO: 474602 - RNA, 21 nt, Artificial Sequence
  Synthetic
gcuacugugaauaaugcuuca

SEQ ID NO: 474603 - RNA, 22 nt, Artificial Sequence
  Synthetic
ggcuacugugaauaaugcuuca

SEQ ID NO: 474604 - RNA, 23 nt, Artificial Sequence
  Synthetic
uggcuacugugaauaaugcuuca

SEQ ID NO: 474605 - RNA, 24 nt, Artificial Sequence
  Synthetic
uuggcuacugugaauaaugcuuca

SEQ ID NO: 474606 - RNA, 18 nt, Artificial Sequence
  Synthetic
ucauucacaauugcuuca

SEQ ID NO: 474607 - RNA, 19 nt, Artificial Sequence
  Synthetic
cucauucacaauugcuuca

SEQ ID NO: 474608 - RNA, 20 nt, Artificial Sequence
  Synthetic
ucucauucacaauugcuuca

SEQ ID NO: 474609 - RNA, 21 nt, Artificial Sequence
  Synthetic
cucucauucacaauugcuuca

SEQ ID NO: 474610 - RNA, 22 nt, Artificial Sequence
  Synthetic
acucucauucacaauugcuuca

SEQ ID NO: 474611 - RNA, 23 nt, Artificial Sequence
  Synthetic
aacucucauucacaauugcuuca

SEQ ID NO: 474612 - RNA, 24 nt, Artificial Sequence
  Synthetic
gaacucucauucacaauugcuuca

SEQ ID NO: 474613 - RNA, 18 nt, Artificial Sequence
  Synthetic
guucggaccauugcuuca

SEQ ID NO: 474614 - RNA, 19 nt, Artificial Sequence
  Synthetic
aguucggaccauugcuuca

SEQ ID NO: 474615 - RNA, 20 nt, Artificial Sequence
  Synthetic
caguucggaccauugcuuca

SEQ ID NO: 474616 - RNA, 21 nt, Artificial Sequence
  Synthetic
acaguucggaccauugcuuca

SEQ ID NO: 474617 - RNA, 22 nt, Artificial Sequence
  Synthetic
uacaguucggaccauugcuuca

SEQ ID NO: 474618 - RNA, 23 nt, Artificial Sequence
  Synthetic
guacaguucggaccauugcuuca

SEQ ID NO: 474619 - RNA, 24 nt, Artificial Sequence
  Synthetic
gguacaguucggaccauugcuuca

SEQ ID NO: 474620 - RNA, 18 nt, Artificial Sequence
  Synthetic
gacuuuuuuuuugcuuca

SEQ ID NO: 474621 - RNA, 19 nt, Artificial Sequence
  Synthetic
agacuuuuuuuuugcuuca

SEQ ID NO: 474622 - RNA, 20 nt, Artificial Sequence
  Synthetic
uagacuuuuuuuuugcuuca

SEQ ID NO: 474623 - RNA, 21 nt, Artificial Sequence
  Synthetic
guagacuuuuuuuuugcuuca

SEQ ID NO: 474624 - RNA, 22 nt, Artificial Sequence
  Synthetic
uguagacuuuuuuuuugcuuca

SEQ ID NO: 474625 - RNA, 23 nt, Artificial Sequence
  Synthetic
uuguagacuuuuuuuuugcuuca

SEQ ID NO: 474626 - RNA, 24 nt, Artificial Sequence
  Synthetic
auuguagacuuuuuuuuugcuuca

SEQ ID NO: 474627 - RNA, 18 nt, Artificial Sequence
  Synthetic
gaaaacaaagaaucuuca

SEQ ID NO: 474628 - RNA, 19 nt, Artificial Sequence
  Synthetic
agaaaacaaagaaucuuca

SEQ ID NO: 474629 - RNA, 20 nt, Artificial Sequence
  Synthetic
aagaaaacaaagaaucuuca

SEQ ID NO: 474630 - RNA, 21 nt, Artificial Sequence
  Synthetic
caagaaaacaaagaaucuuca

SEQ ID NO: 474631 - RNA, 22 nt, Artificial Sequence
  Synthetic
ucaagaaaacaaagaaucuuca

SEQ ID NO: 474632 - RNA, 23 nt, Artificial Sequence
  Synthetic
uucaagaaaacaaagaaucuuca

SEQ ID NO: 474633 - RNA, 24 nt, Artificial Sequence
  Synthetic
uuucaagaaaacaaagaaucuuca

SEQ ID NO: 474634 - RNA, 18 nt, Artificial Sequence
  Synthetic
uggaugauuacaucuuca

SEQ ID NO: 474635 - RNA, 19 nt, Artificial Sequence
  Synthetic
uuggaugauuacaucuuca

SEQ ID NO: 474636 - RNA, 20 nt, Artificial Sequence
  Synthetic
uuuggaugauuacaucuuca

SEQ ID NO: 474637 - RNA, 21 nt, Artificial Sequence
  Synthetic
guuuggaugauuacaucuuca

SEQ ID NO: 474638 - RNA, 22 nt, Artificial Sequence
  Synthetic
aguuuggaugauuacaucuuca

SEQ ID NO: 474639 - RNA, 23 nt, Artificial Sequence
  Synthetic
aaguuuggaugauuacaucuuca

SEQ ID NO: 474640 - RNA, 24 nt, Artificial Sequence
  Synthetic
aaaguuuggaugauuacaucuuca

SEQ ID NO: 474641 - RNA, 18 nt, Artificial Sequence
  Synthetic
ccuuggcuaugaucuuca

SEQ ID NO: 474642 - RNA, 19 nt, Artificial Sequence
  Synthetic
uccuuggcuaugaucuuca

SEQ ID NO: 474643 - RNA, 20 nt, Artificial Sequence
  Synthetic
auccuuggcuaugaucuuca

SEQ ID NO: 474644 - RNA, 21 nt, Artificial Sequence
  Synthetic
aauccuuggcuaugaucuuca

SEQ ID NO: 474645 - RNA, 22 nt, Artificial Sequence
  Synthetic
aaauccuuggcuaugaucuuca

SEQ ID NO: 474646 - RNA, 23 nt, Artificial Sequence
  Synthetic
uaaauccuuggcuaugaucuuca

SEQ ID NO: 474647 - RNA, 24 nt, Artificial Sequence
  Synthetic
cuaaauccuuggcuaugaucuuca

SEQ ID NO: 474648 - RNA, 18 nt, Artificial Sequence
  Synthetic
caguucagccacucuuca

SEQ ID NO: 474649 - RNA, 19 nt, Artificial Sequence
  Synthetic
acaguucagccacucuuca

SEQ ID NO: 474650 - RNA, 20 nt, Artificial Sequence
  Synthetic
aacaguucagccacucuuca

SEQ ID NO: 474651 - RNA, 21 nt, Artificial Sequence
  Synthetic
caacaguucagccacucuuca

SEQ ID NO: 474652 - RNA, 22 nt, Artificial Sequence
  Synthetic
ucaacaguucagccacucuuca

SEQ ID NO: 474653 - RNA, 23 nt, Artificial Sequence
  Synthetic
uucaacaguucagccacucuuca

SEQ ID NO: 474654 - RNA, 24 nt, Artificial Sequence
  Synthetic
uuucaacaguucagccacucuuca

SEQ ID NO: 474655 - RNA, 20 nt, Artificial Sequence
  Synthetic
cgaugugaaggaccucuuca

SEQ ID NO: 474656 - RNA, 21 nt, Artificial Sequence
  Synthetic
gcgaugugaaggaccucuuca

SEQ ID NO: 474657 - RNA, 22 nt, Artificial Sequence
  Synthetic
agcgaugugaaggaccucuuca

SEQ ID NO: 474658 - RNA, 23 nt, Artificial Sequence
  Synthetic
aagcgaugugaaggaccucuuca

SEQ ID NO: 474659 - RNA, 24 nt, Artificial Sequence
  Synthetic
caagcgaugugaaggaccucuuca

SEQ ID NO: 474660 - RNA, 21 nt, Artificial Sequence
  Synthetic
gggaugugaaggaccucuuca

SEQ ID NO: 474661 - RNA, 22 nt, Artificial Sequence
  Synthetic
agggaugugaaggaccucuuca

SEQ ID NO: 474662 - RNA, 23 nt, Artificial Sequence
  Synthetic
aagggaugugaaggaccucuuca

SEQ ID NO: 474663 - RNA, 24 nt, Artificial Sequence
  Synthetic
caagggaugugaaggaccucuuca

SEQ ID NO: 474664 - RNA, 18 nt, Artificial Sequence
  Synthetic
augugaagggccucuuca

SEQ ID NO: 474665 - RNA, 19 nt, Artificial Sequence
  Synthetic
gaugugaagggccucuuca

SEQ ID NO: 474666 - RNA, 20 nt, Artificial Sequence
  Synthetic
ggaugugaagggccucuuca

SEQ ID NO: 474667 - RNA, 21 nt, Artificial Sequence
  Synthetic
gggaugugaagggccucuuca

SEQ ID NO: 474668 - RNA, 22 nt, Artificial Sequence
  Synthetic
agggaugugaagggccucuuca

SEQ ID NO: 474669 - RNA, 23 nt, Artificial Sequence
  Synthetic
aagggaugugaagggccucuuca

SEQ ID NO: 474670 - RNA, 24 nt, Artificial Sequence
  Synthetic
caagggaugugaagggccucuuca

SEQ ID NO: 474671 - RNA, 18 nt, Artificial Sequence
  Synthetic
cagaugcuaugcucuuca

SEQ ID NO: 474672 - RNA, 19 nt, Artificial Sequence
  Synthetic
ucagaugcuaugcucuuca

SEQ ID NO: 474673 - RNA, 20 nt, Artificial Sequence
  Synthetic
uucagaugcuaugcucuuca

SEQ ID NO: 474674 - RNA, 21 nt, Artificial Sequence
  Synthetic
auucagaugcuaugcucuuca

SEQ ID NO: 474675 - RNA, 22 nt, Artificial Sequence
  Synthetic
aauucagaugcuaugcucuuca

SEQ ID NO: 474676 - RNA, 23 nt, Artificial Sequence
  Synthetic
aaauucagaugcuaugcucuuca

SEQ ID NO: 474677 - RNA, 24 nt, Artificial Sequence
  Synthetic
uaaauucagaugcuaugcucuuca

SEQ ID NO: 474678 - RNA, 18 nt, Artificial Sequence
  Synthetic
uagccccacaagucuuca

SEQ ID NO: 474679 - RNA, 19 nt, Artificial Sequence
  Synthetic
uuagccccacaagucuuca

SEQ ID NO: 474680 - RNA, 20 nt, Artificial Sequence
  Synthetic
cuuagccccacaagucuuca

SEQ ID NO: 474681 - RNA, 21 nt, Artificial Sequence
  Synthetic
ucuuagccccacaagucuuca

SEQ ID NO: 474682 - RNA, 22 nt, Artificial Sequence
  Synthetic
cucuuagccccacaagucuuca

SEQ ID NO: 474683 - RNA, 23 nt, Artificial Sequence
  Synthetic
ucucuuagccccacaagucuuca

SEQ ID NO: 474684 - RNA, 24 nt, Artificial Sequence
  Synthetic
gucucuuagccccacaagucuuca

SEQ ID NO: 474685 - RNA, 18 nt, Artificial Sequence
  Synthetic
agguguggcaggucuuca

SEQ ID NO: 474686 - RNA, 19 nt, Artificial Sequence
  Synthetic
uagguguggcaggucuuca

SEQ ID NO: 474687 - RNA, 20 nt, Artificial Sequence
  Synthetic
guagguguggcaggucuuca

SEQ ID NO: 474688 - RNA, 21 nt, Artificial Sequence
  Synthetic
aguagguguggcaggucuuca

SEQ ID NO: 474689 - RNA, 22 nt, Artificial Sequence
  Synthetic
gaguagguguggcaggucuuca

SEQ ID NO: 474690 - RNA, 23 nt, Artificial Sequence
  Synthetic
agaguagguguggcaggucuuca

SEQ ID NO: 474691 - RNA, 24 nt, Artificial Sequence
  Synthetic
gagaguagguguggcaggucuuca

SEQ ID NO: 474692 - RNA, 18 nt, Artificial Sequence
  Synthetic
gucuauaucacuucuuca

SEQ ID NO: 474693 - RNA, 19 nt, Artificial Sequence
  Synthetic
agucuauaucacuucuuca

SEQ ID NO: 474694 - RNA, 20 nt, Artificial Sequence
  Synthetic
aagucuauaucacuucuuca

SEQ ID NO: 474695 - RNA, 21 nt, Artificial Sequence
  Synthetic
caagucuauaucacuucuuca

SEQ ID NO: 474696 - RNA, 22 nt, Artificial Sequence
  Synthetic
ccaagucuauaucacuucuuca

SEQ ID NO: 474697 - RNA, 23 nt, Artificial Sequence
  Synthetic
gccaagucuauaucacuucuuca

SEQ ID NO: 474698 - RNA, 24 nt, Artificial Sequence
  Synthetic
ggccaagucuauaucacuucuuca

SEQ ID NO: 474699 - RNA, 18 nt, Artificial Sequence
  Synthetic
uuuuggaaggcuucuuca

SEQ ID NO: 474700 - RNA, 19 nt, Artificial Sequence
  Synthetic
cuuuuggaaggcuucuuca

SEQ ID NO: 474701 - RNA, 20 nt, Artificial Sequence
  Synthetic
ucuuuuggaaggcuucuuca

SEQ ID NO: 474702 - RNA, 21 nt, Artificial Sequence
  Synthetic
uucuuuuggaaggcuucuuca

SEQ ID NO: 474703 - RNA, 22 nt, Artificial Sequence
  Synthetic
guucuuuuggaaggcuucuuca

SEQ ID NO: 474704 - RNA, 23 nt, Artificial Sequence
  Synthetic
uguucuuuuggaaggcuucuuca

SEQ ID NO: 474705 - RNA, 24 nt, Artificial Sequence
  Synthetic
uuguucuuuuggaaggcuucuuca

SEQ ID NO: 474706 - RNA, 18 nt, Artificial Sequence
  Synthetic
cauauaauuucuucuuca

SEQ ID NO: 474707 - RNA, 19 nt, Artificial Sequence
  Synthetic
ucauauaauuucuucuuca

SEQ ID NO: 474708 - RNA, 20 nt, Artificial Sequence
  Synthetic
uucauauaauuucuucuuca

SEQ ID NO: 474709 - RNA, 21 nt, Artificial Sequence
  Synthetic
guucauauaauuucuucuuca

SEQ ID NO: 474710 - RNA, 22 nt, Artificial Sequence
  Synthetic
gguucauauaauuucuucuuca

SEQ ID NO: 474711 - RNA, 23 nt, Artificial Sequence
  Synthetic
ggguucauauaauuucuucuuca

SEQ ID NO: 474712 - RNA, 24 nt, Artificial Sequence
  Synthetic
aggguucauauaauuucuucuuca

SEQ ID NO: 474713 - RNA, 18 nt, Artificial Sequence
  Synthetic
gacauuuuaauuucuuca

SEQ ID NO: 474714 - RNA, 19 nt, Artificial Sequence
  Synthetic
agacauuuuaauuucuuca

SEQ ID NO: 474715 - RNA, 20 nt, Artificial Sequence
  Synthetic
cagacauuuuaauuucuuca

SEQ ID NO: 474716 - RNA, 21 nt, Artificial Sequence
  Synthetic
acagacauuuuaauuucuuca

SEQ ID NO: 474717 - RNA, 22 nt, Artificial Sequence
  Synthetic
gacagacauuuuaauuucuuca

SEQ ID NO: 474718 - RNA, 23 nt, Artificial Sequence
  Synthetic
agacagacauuuuaauuucuuca

SEQ ID NO: 474719 - RNA, 24 nt, Artificial Sequence
  Synthetic
uagacagacauuuuaauuucuuca

SEQ ID NO: 474720 - RNA, 18 nt, Artificial Sequence
  Synthetic
ccuuaugcuguuucuuca

SEQ ID NO: 474721 - RNA, 19 nt, Artificial Sequence
  Synthetic
uccuuaugcuguuucuuca

SEQ ID NO: 474722 - RNA, 20 nt, Artificial Sequence
  Synthetic
uuccuuaugcuguuucuuca

SEQ ID NO: 474723 - RNA, 21 nt, Artificial Sequence
  Synthetic
uuuccuuaugcuguuucuuca

SEQ ID NO: 474724 - RNA, 22 nt, Artificial Sequence
  Synthetic
uuuuccuuaugcuguuucuuca

SEQ ID NO: 474725 - RNA, 23 nt, Artificial Sequence
  Synthetic
auuuuccuuaugcuguuucuuca

SEQ ID NO: 474726 - RNA, 24 nt, Artificial Sequence
  Synthetic
cauuuuccuuaugcuguuucuuca

SEQ ID NO: 474727 - RNA, 18 nt, Artificial Sequence
  Synthetic
gacauuucuuuuucuuca

SEQ ID NO: 474728 - RNA, 19 nt, Artificial Sequence
  Synthetic
ggacauuucuuuuucuuca

SEQ ID NO: 474729 - RNA, 20 nt, Artificial Sequence
  Synthetic
uggacauuucuuuuucuuca

SEQ ID NO: 474730 - RNA, 21 nt, Artificial Sequence
  Synthetic
auggacauuucuuuuucuuca

SEQ ID NO: 474731 - RNA, 22 nt, Artificial Sequence
  Synthetic
aauggacauuucuuuuucuuca

SEQ ID NO: 474732 - RNA, 23 nt, Artificial Sequence
  Synthetic
aaauggacauuucuuuuucuuca

SEQ ID NO: 474733 - RNA, 24 nt, Artificial Sequence
  Synthetic
aaaauggacauuucuuuuucuuca

SEQ ID NO: 474734 - RNA, 18 nt, Artificial Sequence
  Synthetic
uuugauaugcaaaguuca

SEQ ID NO: 474735 - RNA, 19 nt, Artificial Sequence
  Synthetic
uuuugauaugcaaaguuca

SEQ ID NO: 474736 - RNA, 20 nt, Artificial Sequence
  Synthetic
cuuuugauaugcaaaguuca

SEQ ID NO: 474737 - RNA, 21 nt, Artificial Sequence
  Synthetic
ucuuuugauaugcaaaguuca

SEQ ID NO: 474738 - RNA, 22 nt, Artificial Sequence
  Synthetic
cucuuuugauaugcaaaguuca

SEQ ID NO: 474739 - RNA, 23 nt, Artificial Sequence
  Synthetic
ucucuuuugauaugcaaaguuca

SEQ ID NO: 474740 - RNA, 24 nt, Artificial Sequence
  Synthetic
aucucuuuugauaugcaaaguuca

SEQ ID NO: 474741 - RNA, 18 nt, Artificial Sequence
  Synthetic
ucauuaugagaaaguuca

SEQ ID NO: 474742 - RNA, 19 nt, Artificial Sequence
  Synthetic
aucauuaugagaaaguuca

SEQ ID NO: 474743 - RNA, 20 nt, Artificial Sequence
  Synthetic
aaucauuaugagaaaguuca

SEQ ID NO: 474744 - RNA, 21 nt, Artificial Sequence
  Synthetic
aaaucauuaugagaaaguuca

SEQ ID NO: 474745 - RNA, 22 nt, Artificial Sequence
  Synthetic
aaaaucauuaugagaaaguuca

SEQ ID NO: 474746 - RNA, 23 nt, Artificial Sequence
  Synthetic
aaaaaucauuaugagaaaguuca

SEQ ID NO: 474747 - RNA, 24 nt, Artificial Sequence
  Synthetic
aaaaaaucauuaugagaaaguuca

SEQ ID NO: 474748 - RNA, 18 nt, Artificial Sequence
  Synthetic
ccuggcuucgaaaguuca

SEQ ID NO: 474749 - RNA, 19 nt, Artificial Sequence
  Synthetic
gccuggcuucgaaaguuca

SEQ ID NO: 474750 - RNA, 20 nt, Artificial Sequence
  Synthetic
ugccuggcuucgaaaguuca

SEQ ID NO: 474751 - RNA, 21 nt, Artificial Sequence
  Synthetic
augccuggcuucgaaaguuca

SEQ ID NO: 474752 - RNA, 22 nt, Artificial Sequence
  Synthetic
aaugccuggcuucgaaaguuca

SEQ ID NO: 474753 - RNA, 23 nt, Artificial Sequence
  Synthetic
caaugccuggcuucgaaaguuca

SEQ ID NO: 474754 - RNA, 24 nt, Artificial Sequence
  Synthetic
ucaaugccuggcuucgaaaguuca

SEQ ID NO: 474755 - RNA, 18 nt, Artificial Sequence
  Synthetic
uaucuauaggaaaguuca

SEQ ID NO: 474756 - RNA, 19 nt, Artificial Sequence
  Synthetic
guaucuauaggaaaguuca

SEQ ID NO: 474757 - RNA, 20 nt, Artificial Sequence
  Synthetic
uguaucuauaggaaaguuca

SEQ ID NO: 474758 - RNA, 21 nt, Artificial Sequence
  Synthetic
cuguaucuauaggaaaguuca

SEQ ID NO: 474759 - RNA, 22 nt, Artificial Sequence
  Synthetic
ccuguaucuauaggaaaguuca

SEQ ID NO: 474760 - RNA, 23 nt, Artificial Sequence
  Synthetic
uccuguaucuauaggaaaguuca

SEQ ID NO: 474761 - RNA, 24 nt, Artificial Sequence
  Synthetic
uuccuguaucuauaggaaaguuca

SEQ ID NO: 474762 - RNA, 18 nt, Artificial Sequence
  Synthetic
ccaggcacauaaaguuca

SEQ ID NO: 474763 - RNA, 19 nt, Artificial Sequence
  Synthetic
cccaggcacauaaaguuca

SEQ ID NO: 474764 - RNA, 20 nt, Artificial Sequence
  Synthetic
ucccaggcacauaaaguuca

SEQ ID NO: 474765 - RNA, 21 nt, Artificial Sequence
  Synthetic
uucccaggcacauaaaguuca

SEQ ID NO: 474766 - RNA, 22 nt, Artificial Sequence
  Synthetic
uuucccaggcacauaaaguuca

SEQ ID NO: 474767 - RNA, 23 nt, Artificial Sequence
  Synthetic
cuuucccaggcacauaaaguuca

SEQ ID NO: 474768 - RNA, 24 nt, Artificial Sequence
  Synthetic
acuuucccaggcacauaaaguuca

SEQ ID NO: 474769 - RNA, 18 nt, Artificial Sequence
  Synthetic
aguaaguuaccaaguuca

SEQ ID NO: 474770 - RNA, 19 nt, Artificial Sequence
  Synthetic
aaguaaguuaccaaguuca

SEQ ID NO: 474771 - RNA, 20 nt, Artificial Sequence
  Synthetic
gaaguaaguuaccaaguuca

SEQ ID NO: 474772 - RNA, 21 nt, Artificial Sequence
  Synthetic
ggaaguaaguuaccaaguuca

SEQ ID NO: 474773 - RNA, 22 nt, Artificial Sequence
  Synthetic
uggaaguaaguuaccaaguuca

SEQ ID NO: 474774 - RNA, 23 nt, Artificial Sequence
  Synthetic
cuggaaguaaguuaccaaguuca

SEQ ID NO: 474775 - RNA, 24 nt, Artificial Sequence
  Synthetic
ucuggaaguaaguuaccaaguuca

SEQ ID NO: 474776 - RNA, 18 nt, Artificial Sequence
  Synthetic
ucuaaauauagaaguuca

SEQ ID NO: 474777 - RNA, 19 nt, Artificial Sequence
  Synthetic
gucuaaauauagaaguuca

SEQ ID NO: 474778 - RNA, 20 nt, Artificial Sequence
  Synthetic
ggucuaaauauagaaguuca

SEQ ID NO: 474779 - RNA, 21 nt, Artificial Sequence
  Synthetic
uggucuaaauauagaaguuca

SEQ ID NO: 474780 - RNA, 22 nt, Artificial Sequence
  Synthetic
guggucuaaauauagaaguuca

SEQ ID NO: 474781 - RNA, 23 nt, Artificial Sequence
  Synthetic
uguggucuaaauauagaaguuca

SEQ ID NO: 474782 - RNA, 24 nt, Artificial Sequence
  Synthetic
cuguggucuaaauauagaaguuca

SEQ ID NO: 474783 - RNA, 18 nt, Artificial Sequence
  Synthetic
uagcuuugaauaaguuca

SEQ ID NO: 474784 - RNA, 19 nt, Artificial Sequence
  Synthetic
auagcuuugaauaaguuca

SEQ ID NO: 474785 - RNA, 20 nt, Artificial Sequence
  Synthetic
aauagcuuugaauaaguuca

SEQ ID NO: 474786 - RNA, 21 nt, Artificial Sequence
  Synthetic
aaauagcuuugaauaaguuca

SEQ ID NO: 474787 - RNA, 22 nt, Artificial Sequence
  Synthetic
gaaauagcuuugaauaaguuca

SEQ ID NO: 474788 - RNA, 23 nt, Artificial Sequence
  Synthetic
ggaaauagcuuugaauaaguuca

SEQ ID NO: 474789 - RNA, 24 nt, Artificial Sequence
  Synthetic
gggaaauagcuuugaauaaguuca

SEQ ID NO: 474790 - RNA, 18 nt, Artificial Sequence
  Synthetic
gcauuuugguuaaguuca

SEQ ID NO: 474791 - RNA, 19 nt, Artificial Sequence
  Synthetic
agcauuuugguuaaguuca

SEQ ID NO: 474792 - RNA, 20 nt, Artificial Sequence
  Synthetic
aagcauuuugguuaaguuca

SEQ ID NO: 474793 - RNA, 21 nt, Artificial Sequence
  Synthetic
caagcauuuugguuaaguuca

SEQ ID NO: 474794 - RNA, 22 nt, Artificial Sequence
  Synthetic
ccaagcauuuugguuaaguuca

SEQ ID NO: 474795 - RNA, 23 nt, Artificial Sequence
  Synthetic
gccaagcauuuugguuaaguuca

SEQ ID NO: 474796 - RNA, 24 nt, Artificial Sequence
  Synthetic
agccaagcauuuugguuaaguuca

SEQ ID NO: 474797 - RNA, 18 nt, Artificial Sequence
  Synthetic
aaagauaaggacaguuca

SEQ ID NO: 474798 - RNA, 19 nt, Artificial Sequence
  Synthetic
aaaagauaaggacaguuca

SEQ ID NO: 474799 - RNA, 20 nt, Artificial Sequence
  Synthetic
caaaagauaaggacaguuca

SEQ ID NO: 474800 - RNA, 21 nt, Artificial Sequence
  Synthetic
acaaaagauaaggacaguuca

SEQ ID NO: 474801 - RNA, 22 nt, Artificial Sequence
  Synthetic
gacaaaagauaaggacaguuca

SEQ ID NO: 474802 - RNA, 23 nt, Artificial Sequence
  Synthetic
ggacaaaagauaaggacaguuca

SEQ ID NO: 474803 - RNA, 24 nt, Artificial Sequence
  Synthetic
uggacaaaagauaaggacaguuca

SEQ ID NO: 474804 - RNA, 18 nt, Artificial Sequence
  Synthetic
acaauauaaaccaguuca

SEQ ID NO: 474805 - RNA, 19 nt, Artificial Sequence
  Synthetic
uacaauauaaaccaguuca

SEQ ID NO: 474806 - RNA, 20 nt, Artificial Sequence
  Synthetic
auacaauauaaaccaguuca

SEQ ID NO: 474807 - RNA, 21 nt, Artificial Sequence
  Synthetic
aauacaauauaaaccaguuca

SEQ ID NO: 474808 - RNA, 22 nt, Artificial Sequence
  Synthetic
aaauacaauauaaaccaguuca

SEQ ID NO: 474809 - RNA, 23 nt, Artificial Sequence
  Synthetic
uaaauacaauauaaaccaguuca

SEQ ID NO: 474810 - RNA, 24 nt, Artificial Sequence
  Synthetic
cuaaauacaauauaaaccaguuca

SEQ ID NO: 474811 - RNA, 18 nt, Artificial Sequence
  Synthetic
caacagcugcccaguuca

SEQ ID NO: 474812 - RNA, 19 nt, Artificial Sequence
  Synthetic
ccaacagcugcccaguuca

SEQ ID NO: 474813 - RNA, 20 nt, Artificial Sequence
  Synthetic
uccaacagcugcccaguuca

SEQ ID NO: 474814 - RNA, 21 nt, Artificial Sequence
  Synthetic
uuccaacagcugcccaguuca

SEQ ID NO: 474815 - RNA, 22 nt, Artificial Sequence
  Synthetic
guuccaacagcugcccaguuca

SEQ ID NO: 474816 - RNA, 23 nt, Artificial Sequence
  Synthetic
gguuccaacagcugcccaguuca

SEQ ID NO: 474817 - RNA, 24 nt, Artificial Sequence
  Synthetic
ugguuccaacagcugcccaguuca

SEQ ID NO: 474818 - RNA, 18 nt, Artificial Sequence
  Synthetic
uguucuugacugaguuca

SEQ ID NO: 474819 - RNA, 19 nt, Artificial Sequence
  Synthetic
auguucuugacugaguuca

SEQ ID NO: 474820 - RNA, 20 nt, Artificial Sequence
  Synthetic
cauguucuugacugaguuca

SEQ ID NO: 474821 - RNA, 21 nt, Artificial Sequence
  Synthetic
acauguucuugacugaguuca

SEQ ID NO: 474822 - RNA, 22 nt, Artificial Sequence
  Synthetic
uacauguucuugacugaguuca

SEQ ID NO: 474823 - RNA, 23 nt, Artificial Sequence
  Synthetic
cuacauguucuugacugaguuca

SEQ ID NO: 474824 - RNA, 24 nt, Artificial Sequence
  Synthetic
ucuacauguucuugacugaguuca

SEQ ID NO: 474825 - RNA, 18 nt, Artificial Sequence
  Synthetic
uuugcacuguauaguuca

SEQ ID NO: 474826 - RNA, 19 nt, Artificial Sequence
  Synthetic
cuuugcacuguauaguuca

SEQ ID NO: 474827 - RNA, 20 nt, Artificial Sequence
  Synthetic
ucuuugcacuguauaguuca

SEQ ID NO: 474828 - RNA, 21 nt, Artificial Sequence
  Synthetic
uucuuugcacuguauaguuca

SEQ ID NO: 474829 - RNA, 22 nt, Artificial Sequence
  Synthetic
uuucuuugcacuguauaguuca

SEQ ID NO: 474830 - RNA, 23 nt, Artificial Sequence
  Synthetic
cuuucuuugcacuguauaguuca

SEQ ID NO: 474831 - RNA, 24 nt, Artificial Sequence
  Synthetic
ucuuucuuugcacuguauaguuca

SEQ ID NO: 474832 - RNA, 18 nt, Artificial Sequence
  Synthetic
gauggucucucuaguuca

SEQ ID NO: 474833 - RNA, 19 nt, Artificial Sequence
  Synthetic
ugauggucucucuaguuca

SEQ ID NO: 474834 - RNA, 20 nt, Artificial Sequence
  Synthetic
cugauggucucucuaguuca

SEQ ID NO: 474835 - RNA, 21 nt, Artificial Sequence
  Synthetic
ccugauggucucucuaguuca

SEQ ID NO: 474836 - RNA, 22 nt, Artificial Sequence
  Synthetic
uccugauggucucucuaguuca

SEQ ID NO: 474837 - RNA, 23 nt, Artificial Sequence
  Synthetic
cuccugauggucucucuaguuca

SEQ ID NO: 474838 - RNA, 24 nt, Artificial Sequence
  Synthetic
ccuccugauggucucucuaguuca

SEQ ID NO: 474839 - RNA, 18 nt, Artificial Sequence
  Synthetic
acaaaauauuguaguuca

SEQ ID NO: 474840 - RNA, 19 nt, Artificial Sequence
  Synthetic
gacaaaauauuguaguuca

SEQ ID NO: 474841 - RNA, 20 nt, Artificial Sequence
  Synthetic
agacaaaauauuguaguuca

SEQ ID NO: 474842 - RNA, 21 nt, Artificial Sequence
  Synthetic
cagacaaaauauuguaguuca

SEQ ID NO: 474843 - RNA, 22 nt, Artificial Sequence
  Synthetic
acagacaaaauauuguaguuca

SEQ ID NO: 474844 - RNA, 23 nt, Artificial Sequence
  Synthetic
uacagacaaaauauuguaguuca

SEQ ID NO: 474845 - RNA, 24 nt, Artificial Sequence
  Synthetic
auacagacaaaauauuguaguuca

SEQ ID NO: 474846 - RNA, 18 nt, Artificial Sequence
  Synthetic
ugagaagcaguuaguuca

SEQ ID NO: 474847 - RNA, 19 nt, Artificial Sequence
  Synthetic
uugagaagcaguuaguuca

SEQ ID NO: 474848 - RNA, 20 nt, Artificial Sequence
  Synthetic
auugagaagcaguuaguuca

SEQ ID NO: 474849 - RNA, 21 nt, Artificial Sequence
  Synthetic
uauugagaagcaguuaguuca

SEQ ID NO: 474850 - RNA, 22 nt, Artificial Sequence
  Synthetic
uuauugagaagcaguuaguuca

SEQ ID NO: 474851 - RNA, 23 nt, Artificial Sequence
  Synthetic
cuuauugagaagcaguuaguuca

SEQ ID NO: 474852 - RNA, 24 nt, Artificial Sequence
  Synthetic
ccuuauugagaagcaguuaguuca

SEQ ID NO: 474853 - RNA, 18 nt, Artificial Sequence
  Synthetic
ucucagggucugcguuca

SEQ ID NO: 474854 - RNA, 19 nt, Artificial Sequence
  Synthetic
uucucagggucugcguuca

SEQ ID NO: 474855 - RNA, 20 nt, Artificial Sequence
  Synthetic
guucucagggucugcguuca

SEQ ID NO: 474856 - RNA, 21 nt, Artificial Sequence
  Synthetic
uguucucagggucugcguuca

SEQ ID NO: 474857 - RNA, 22 nt, Artificial Sequence
  Synthetic
cuguucucagggucugcguuca

SEQ ID NO: 474858 - RNA, 23 nt, Artificial Sequence
  Synthetic
ccuguucucagggucugcguuca

SEQ ID NO: 474859 - RNA, 24 nt, Artificial Sequence
  Synthetic
cccuguucucagggucugcguuca

SEQ ID NO: 474860 - RNA, 18 nt, Artificial Sequence
  Synthetic
gggccucgauuucguuca

SEQ ID NO: 474861 - RNA, 19 nt, Artificial Sequence
  Synthetic
agggccucgauuucguuca

SEQ ID NO: 474862 - RNA, 20 nt, Artificial Sequence
  Synthetic
cagggccucgauuucguuca

SEQ ID NO: 474863 - RNA, 21 nt, Artificial Sequence
  Synthetic
ucagggccucgauuucguuca

SEQ ID NO: 474864 - RNA, 22 nt, Artificial Sequence
  Synthetic
uucagggccucgauuucguuca

SEQ ID NO: 474865 - RNA, 23 nt, Artificial Sequence
  Synthetic
uuucagggccucgauuucguuca

SEQ ID NO: 474866 - RNA, 24 nt, Artificial Sequence
  Synthetic
uuuucagggccucgauuucguuca

SEQ ID NO: 474867 - RNA, 18 nt, Artificial Sequence
  Synthetic
gacaauucauaagguuca

SEQ ID NO: 474868 - RNA, 19 nt, Artificial Sequence
  Synthetic
ugacaauucauaagguuca

SEQ ID NO: 474869 - RNA, 20 nt, Artificial Sequence
  Synthetic
uugacaauucauaagguuca

SEQ ID NO: 474870 - RNA, 21 nt, Artificial Sequence
  Synthetic
cuugacaauucauaagguuca

SEQ ID NO: 474871 - RNA, 22 nt, Artificial Sequence
  Synthetic
acuugacaauucauaagguuca

SEQ ID NO: 474872 - RNA, 23 nt, Artificial Sequence
  Synthetic
gacuugacaauucauaagguuca

SEQ ID NO: 474873 - RNA, 24 nt, Artificial Sequence
  Synthetic
agacuugacaauucauaagguuca

SEQ ID NO: 474874 - RNA, 18 nt, Artificial Sequence
  Synthetic
uauaugggaccagguuca

SEQ ID NO: 474875 - RNA, 19 nt, Artificial Sequence
  Synthetic
uuauaugggaccagguuca

SEQ ID NO: 474876 - RNA, 20 nt, Artificial Sequence
  Synthetic
uuuauaugggaccagguuca

SEQ ID NO: 474877 - RNA, 21 nt, Artificial Sequence
  Synthetic
uuuuauaugggaccagguuca

SEQ ID NO: 474878 - RNA, 22 nt, Artificial Sequence
  Synthetic
auuuuauaugggaccagguuca

SEQ ID NO: 474879 - RNA, 23 nt, Artificial Sequence
  Synthetic
gauuuuauaugggaccagguuca

SEQ ID NO: 474880 - RNA, 24 nt, Artificial Sequence
  Synthetic
ggauuuuauaugggaccagguuca

SEQ ID NO: 474881 - RNA, 18 nt, Artificial Sequence
  Synthetic
aaacagugugcagguuca

SEQ ID NO: 474882 - RNA, 19 nt, Artificial Sequence
  Synthetic
uaaacagugugcagguuca

SEQ ID NO: 474883 - RNA, 20 nt, Artificial Sequence
  Synthetic
uuaaacagugugcagguuca

SEQ ID NO: 474884 - RNA, 21 nt, Artificial Sequence
  Synthetic
guuaaacagugugcagguuca

SEQ ID NO: 474885 - RNA, 22 nt, Artificial Sequence
  Synthetic
uguuaaacagugugcagguuca

SEQ ID NO: 474886 - RNA, 23 nt, Artificial Sequence
  Synthetic
uuguuaaacagugugcagguuca

SEQ ID NO: 474887 - RNA, 24 nt, Artificial Sequence
  Synthetic
uuuguuaaacagugugcagguuca

SEQ ID NO: 474888 - RNA, 18 nt, Artificial Sequence
  Synthetic
uugaacccaggagguuca

SEQ ID NO: 474889 - RNA, 19 nt, Artificial Sequence
  Synthetic
cuugaacccaggagguuca

SEQ ID NO: 474890 - RNA, 20 nt, Artificial Sequence
  Synthetic
gcuugaacccaggagguuca

SEQ ID NO: 474891 - RNA, 21 nt, Artificial Sequence
  Synthetic
ugcuugaacccaggagguuca

SEQ ID NO: 474892 - RNA, 22 nt, Artificial Sequence
  Synthetic
uugcuugaacccaggagguuca

SEQ ID NO: 474893 - RNA, 23 nt, Artificial Sequence
  Synthetic
auugcuugaacccaggagguuca

SEQ ID NO: 474894 - RNA, 24 nt, Artificial Sequence
  Synthetic
aauugcuugaacccaggagguuca

SEQ ID NO: 474895 - RNA, 18 nt, Artificial Sequence
  Synthetic
uaugaguauuaggguuca

SEQ ID NO: 474896 - RNA, 19 nt, Artificial Sequence
  Synthetic
auaugaguauuaggguuca

SEQ ID NO: 474897 - RNA, 20 nt, Artificial Sequence
  Synthetic
aauaugaguauuaggguuca

SEQ ID NO: 474898 - RNA, 21 nt, Artificial Sequence
  Synthetic
caauaugaguauuaggguuca

SEQ ID NO: 474899 - RNA, 22 nt, Artificial Sequence
  Synthetic
acaauaugaguauuaggguuca

SEQ ID NO: 474900 - RNA, 23 nt, Artificial Sequence
  Synthetic
cacaauaugaguauuaggguuca

SEQ ID NO: 474901 - RNA, 24 nt, Artificial Sequence
  Synthetic
ucacaauaugaguauuaggguuca

SEQ ID NO: 474902 - RNA, 18 nt, Artificial Sequence
  Synthetic
caaauucauagggguuca

SEQ ID NO: 474903 - RNA, 19 nt, Artificial Sequence
  Synthetic
gcaaauucauagggguuca

SEQ ID NO: 474904 - RNA, 20 nt, Artificial Sequence
  Synthetic
agcaaauucauagggguuca

SEQ ID NO: 474905 - RNA, 21 nt, Artificial Sequence
  Synthetic
aagcaaauucauagggguuca

SEQ ID NO: 474906 - RNA, 22 nt, Artificial Sequence
  Synthetic
aaagcaaauucauagggguuca

SEQ ID NO: 474907 - RNA, 23 nt, Artificial Sequence
  Synthetic
uaaagcaaauucauagggguuca

SEQ ID NO: 474908 - RNA, 24 nt, Artificial Sequence
  Synthetic
cuaaagcaaauucauagggguuca

SEQ ID NO: 474909 - RNA, 18 nt, Artificial Sequence
  Synthetic
uugaaccuaugggguuca

SEQ ID NO: 474910 - RNA, 19 nt, Artificial Sequence
  Synthetic
uuugaaccuaugggguuca

SEQ ID NO: 474911 - RNA, 20 nt, Artificial Sequence
  Synthetic
guuugaaccuaugggguuca

SEQ ID NO: 474912 - RNA, 21 nt, Artificial Sequence
  Synthetic
aguuugaaccuaugggguuca

SEQ ID NO: 474913 - RNA, 22 nt, Artificial Sequence
  Synthetic
uaguuugaaccuaugggguuca

SEQ ID NO: 474914 - RNA, 23 nt, Artificial Sequence
  Synthetic
cuaguuugaaccuaugggguuca

SEQ ID NO: 474915 - RNA, 24 nt, Artificial Sequence
  Synthetic
acuaguuugaaccuaugggguuca

SEQ ID NO: 474916 - RNA, 18 nt, Artificial Sequence
  Synthetic
gcucuuccucgugguuca

SEQ ID NO: 474917 - RNA, 19 nt, Artificial Sequence
  Synthetic
ggcucuuccucgugguuca

SEQ ID NO: 474918 - RNA, 20 nt, Artificial Sequence
  Synthetic
gggcucuuccucgugguuca

SEQ ID NO: 474919 - RNA, 21 nt, Artificial Sequence
  Synthetic
ggggcucuuccucgugguuca

SEQ ID NO: 474920 - RNA, 22 nt, Artificial Sequence
  Synthetic
cggggcucuuccucgugguuca

SEQ ID NO: 474921 - RNA, 23 nt, Artificial Sequence
  Synthetic
ccggggcucuuccucgugguuca

SEQ ID NO: 474922 - RNA, 24 nt, Artificial Sequence
  Synthetic
uccggggcucuuccucgugguuca

SEQ ID NO: 474923 - RNA, 18 nt, Artificial Sequence
  Synthetic
aauaaaagaggugguuca

SEQ ID NO: 474924 - RNA, 19 nt, Artificial Sequence
  Synthetic
aaauaaaagaggugguuca

SEQ ID NO: 474925 - RNA, 20 nt, Artificial Sequence
  Synthetic
aaaauaaaagaggugguuca

SEQ ID NO: 474926 - RNA, 21 nt, Artificial Sequence
  Synthetic
gaaaauaaaagaggugguuca

SEQ ID NO: 474927 - RNA, 22 nt, Artificial Sequence
  Synthetic
ggaaaauaaaagaggugguuca

SEQ ID NO: 474928 - RNA, 23 nt, Artificial Sequence
  Synthetic
cggaaaauaaaagaggugguuca

SEQ ID NO: 474929 - RNA, 24 nt, Artificial Sequence
  Synthetic
acggaaaauaaaagaggugguuca

SEQ ID NO: 474930 - RNA, 18 nt, Artificial Sequence
  Synthetic
cuauuuaauggugguuca

SEQ ID NO: 474931 - RNA, 19 nt, Artificial Sequence
  Synthetic
gcuauuuaauggugguuca

SEQ ID NO: 474932 - RNA, 20 nt, Artificial Sequence
  Synthetic
agcuauuuaauggugguuca

SEQ ID NO: 474933 - RNA, 21 nt, Artificial Sequence
  Synthetic
uagcuauuuaauggugguuca

SEQ ID NO: 474934 - RNA, 22 nt, Artificial Sequence
  Synthetic
uuagcuauuuaauggugguuca

SEQ ID NO: 474935 - RNA, 23 nt, Artificial Sequence
  Synthetic
auuagcuauuuaauggugguuca

SEQ ID NO: 474936 - RNA, 24 nt, Artificial Sequence
  Synthetic
uauuagcuauuuaauggugguuca

SEQ ID NO: 474937 - RNA, 18 nt, Artificial Sequence
  Synthetic
agagaaauaguugguuca

SEQ ID NO: 474938 - RNA, 19 nt, Artificial Sequence
  Synthetic
gagagaaauaguugguuca

SEQ ID NO: 474939 - RNA, 20 nt, Artificial Sequence
  Synthetic
agagagaaauaguugguuca

SEQ ID NO: 474940 - RNA, 21 nt, Artificial Sequence
  Synthetic
aagagagaaauaguugguuca

SEQ ID NO: 474941 - RNA, 22 nt, Artificial Sequence
  Synthetic
aaagagagaaauaguugguuca

SEQ ID NO: 474942 - RNA, 23 nt, Artificial Sequence
  Synthetic
aaaagagagaaauaguugguuca

SEQ ID NO: 474943 - RNA, 24 nt, Artificial Sequence
  Synthetic
aaaaagagagaaauaguugguuca

SEQ ID NO: 474944 - RNA, 18 nt, Artificial Sequence
  Synthetic
auggccucuaaauguuca

SEQ ID NO: 474945 - RNA, 19 nt, Artificial Sequence
  Synthetic
uauggccucuaaauguuca

SEQ ID NO: 474946 - RNA, 20 nt, Artificial Sequence
  Synthetic
cuauggccucuaaauguuca

SEQ ID NO: 474947 - RNA, 21 nt, Artificial Sequence
  Synthetic
acuauggccucuaaauguuca

SEQ ID NO: 474948 - RNA, 22 nt, Artificial Sequence
  Synthetic
uacuauggccucuaaauguuca

SEQ ID NO: 474949 - RNA, 23 nt, Artificial Sequence
  Synthetic
guacuauggccucuaaauguuca

SEQ ID NO: 474950 - RNA, 24 nt, Artificial Sequence
  Synthetic
cguacuauggccucuaaauguuca

SEQ ID NO: 474951 - RNA, 18 nt, Artificial Sequence
  Synthetic
cacccacaugcauguuca

SEQ ID NO: 474952 - RNA, 19 nt, Artificial Sequence
  Synthetic
acacccacaugcauguuca

SEQ ID NO: 474953 - RNA, 20 nt, Artificial Sequence
  Synthetic
uacacccacaugcauguuca

SEQ ID NO: 474954 - RNA, 21 nt, Artificial Sequence
  Synthetic
cuacacccacaugcauguuca

SEQ ID NO: 474955 - RNA, 22 nt, Artificial Sequence
  Synthetic
ccuacacccacaugcauguuca

SEQ ID NO: 474956 - RNA, 23 nt, Artificial Sequence
  Synthetic
uccuacacccacaugcauguuca

SEQ ID NO: 474957 - RNA, 24 nt, Artificial Sequence
  Synthetic
cuccuacacccacaugcauguuca

SEQ ID NO: 474958 - RNA, 18 nt, Artificial Sequence
  Synthetic
cacauuccuucauguuca

SEQ ID NO: 474959 - RNA, 19 nt, Artificial Sequence
  Synthetic
acacauuccuucauguuca

SEQ ID NO: 474960 - RNA, 20 nt, Artificial Sequence
  Synthetic
cacacauuccuucauguuca

SEQ ID NO: 474961 - RNA, 21 nt, Artificial Sequence
  Synthetic
gcacacauuccuucauguuca

SEQ ID NO: 474962 - RNA, 22 nt, Artificial Sequence
  Synthetic
ggcacacauuccuucauguuca

SEQ ID NO: 474963 - RNA, 23 nt, Artificial Sequence
  Synthetic
uggcacacauuccuucauguuca

SEQ ID NO: 474964 - RNA, 24 nt, Artificial Sequence
  Synthetic
auggcacacauuccuucauguuca

SEQ ID NO: 474965 - RNA, 18 nt, Artificial Sequence
  Synthetic
caauguuccagauguuca

SEQ ID NO: 474966 - RNA, 19 nt, Artificial Sequence
  Synthetic
gcaauguuccagauguuca

SEQ ID NO: 474967 - RNA, 20 nt, Artificial Sequence
  Synthetic
ugcaauguuccagauguuca

SEQ ID NO: 474968 - RNA, 21 nt, Artificial Sequence
  Synthetic
augcaauguuccagauguuca

SEQ ID NO: 474969 - RNA, 22 nt, Artificial Sequence
  Synthetic
aaugcaauguuccagauguuca

SEQ ID NO: 474970 - RNA, 23 nt, Artificial Sequence
  Synthetic
gaaugcaauguuccagauguuca

SEQ ID NO: 474971 - RNA, 24 nt, Artificial Sequence
  Synthetic
agaaugcaauguuccagauguuca

SEQ ID NO: 474972 - RNA, 18 nt, Artificial Sequence
  Synthetic
gaaucauuuaacuguuca

SEQ ID NO: 474973 - RNA, 19 nt, Artificial Sequence
  Synthetic
agaaucauuuaacuguuca

SEQ ID NO: 474974 - RNA, 20 nt, Artificial Sequence
  Synthetic
gagaaucauuuaacuguuca

SEQ ID NO: 474975 - RNA, 21 nt, Artificial Sequence
  Synthetic
ggagaaucauuuaacuguuca

SEQ ID NO: 474976 - RNA, 22 nt, Artificial Sequence
  Synthetic
gggagaaucauuuaacuguuca

SEQ ID NO: 474977 - RNA, 23 nt, Artificial Sequence
  Synthetic
ugggagaaucauuuaacuguuca

SEQ ID NO: 474978 - RNA, 24 nt, Artificial Sequence
  Synthetic
gugggagaaucauuuaacuguuca

SEQ ID NO: 474979 - RNA, 18 nt, Artificial Sequence
  Synthetic
agggagguauccuguuca

SEQ ID NO: 474980 - RNA, 19 nt, Artificial Sequence
  Synthetic
aagggagguauccuguuca

SEQ ID NO: 474981 - RNA, 20 nt, Artificial Sequence
  Synthetic
gaagggagguauccuguuca

SEQ ID NO: 474982 - RNA, 21 nt, Artificial Sequence
  Synthetic
ggaagggagguauccuguuca

SEQ ID NO: 474983 - RNA, 22 nt, Artificial Sequence
  Synthetic
aggaagggagguauccuguuca

SEQ ID NO: 474984 - RNA, 23 nt, Artificial Sequence
  Synthetic
caggaagggagguauccuguuca

SEQ ID NO: 474985 - RNA, 24 nt, Artificial Sequence
  Synthetic
acaggaagggagguauccuguuca

SEQ ID NO: 474986 - RNA, 18 nt, Artificial Sequence
  Synthetic
gcccuucuuaaguguuca

SEQ ID NO: 474987 - RNA, 19 nt, Artificial Sequence
  Synthetic
ggcccuucuuaaguguuca

SEQ ID NO: 474988 - RNA, 20 nt, Artificial Sequence
  Synthetic
aggcccuucuuaaguguuca

SEQ ID NO: 474989 - RNA, 21 nt, Artificial Sequence
  Synthetic
uaggcccuucuuaaguguuca

SEQ ID NO: 474990 - RNA, 22 nt, Artificial Sequence
  Synthetic
guaggcccuucuuaaguguuca

SEQ ID NO: 474991 - RNA, 23 nt, Artificial Sequence
  Synthetic
aguaggcccuucuuaaguguuca

SEQ ID NO: 474992 - RNA, 24 nt, Artificial Sequence
  Synthetic
uaguaggcccuucuuaaguguuca

SEQ ID NO: 474993 - RNA, 18 nt, Artificial Sequence
  Synthetic
gcaguaaaagaaauuuca

SEQ ID NO: 474994 - RNA, 19 nt, Artificial Sequence
  Synthetic
agcaguaaaagaaauuuca

SEQ ID NO: 474995 - RNA, 20 nt, Artificial Sequence
  Synthetic
aagcaguaaaagaaauuuca

SEQ ID NO: 474996 - RNA, 21 nt, Artificial Sequence
  Synthetic
gaagcaguaaaagaaauuuca

SEQ ID NO: 474997 - RNA, 22 nt, Artificial Sequence
  Synthetic
ugaagcaguaaaagaaauuuca

SEQ ID NO: 474998 - RNA, 23 nt, Artificial Sequence
  Synthetic
uugaagcaguaaaagaaauuuca

SEQ ID NO: 474999 - RNA, 24 nt, Artificial Sequence
  Synthetic
uuugaagcaguaaaagaaauuuca

SEQ ID NO: 475000 - RNA, 18 nt, Artificial Sequence
  Synthetic
aacauuccagaaauuuca

SEQ ID NO: 475001 - RNA, 19 nt, Artificial Sequence
  Synthetic
uaacauuccagaaauuuca

SEQ ID NO: 475002 - RNA, 20 nt, Artificial Sequence
  Synthetic
cuaacauuccagaaauuuca

SEQ ID NO: 475003 - RNA, 21 nt, Artificial Sequence
  Synthetic
ccuaacauuccagaaauuuca

SEQ ID NO: 475004 - RNA, 22 nt, Artificial Sequence
  Synthetic
uccuaacauuccagaaauuuca

SEQ ID NO: 475005 - RNA, 23 nt, Artificial Sequence
  Synthetic
guccuaacauuccagaaauuuca

SEQ ID NO: 475006 - RNA, 24 nt, Artificial Sequence
  Synthetic
aguccuaacauuccagaaauuuca

SEQ ID NO: 475007 - RNA, 18 nt, Artificial Sequence
  Synthetic
aggaguguagaaauuuca

SEQ ID NO: 475008 - RNA, 19 nt, Artificial Sequence
  Synthetic
gaggaguguagaaauuuca

SEQ ID NO: 475009 - RNA, 20 nt, Artificial Sequence
  Synthetic
ugaggaguguagaaauuuca

SEQ ID NO: 475010 - RNA, 21 nt, Artificial Sequence
  Synthetic
augaggaguguagaaauuuca

SEQ ID NO: 475011 - RNA, 22 nt, Artificial Sequence
  Synthetic
aaugaggaguguagaaauuuca

SEQ ID NO: 475012 - RNA, 23 nt, Artificial Sequence
  Synthetic
aaaugaggaguguagaaauuuca

SEQ ID NO: 475013 - RNA, 24 nt, Artificial Sequence
  Synthetic
gaaaugaggaguguagaaauuuca

SEQ ID NO: 475014 - RNA, 18 nt, Artificial Sequence
  Synthetic
auauuugaggaaauuuca

SEQ ID NO: 475015 - RNA, 19 nt, Artificial Sequence
  Synthetic
gauauuugaggaaauuuca

SEQ ID NO: 475016 - RNA, 20 nt, Artificial Sequence
  Synthetic
agauauuugaggaaauuuca

SEQ ID NO: 475017 - RNA, 21 nt, Artificial Sequence
  Synthetic
cagauauuugaggaaauuuca

SEQ ID NO: 475018 - RNA, 22 nt, Artificial Sequence
  Synthetic
acagauauuugaggaaauuuca

SEQ ID NO: 475019 - RNA, 23 nt, Artificial Sequence
  Synthetic
gacagauauuugaggaaauuuca

SEQ ID NO: 475020 - RNA, 24 nt, Artificial Sequence
  Synthetic
agacagauauuugaggaaauuuca

SEQ ID NO: 475021 - RNA, 18 nt, Artificial Sequence
  Synthetic
gugcugagagcaauuuca

SEQ ID NO: 475022 - RNA, 19 nt, Artificial Sequence
  Synthetic
ugugcugagagcaauuuca

SEQ ID NO: 475023 - RNA, 20 nt, Artificial Sequence
  Synthetic
augugcugagagcaauuuca

SEQ ID NO: 475024 - RNA, 21 nt, Artificial Sequence
  Synthetic
gaugugcugagagcaauuuca

SEQ ID NO: 475025 - RNA, 22 nt, Artificial Sequence
  Synthetic
agaugugcugagagcaauuuca

SEQ ID NO: 475026 - RNA, 23 nt, Artificial Sequence
  Synthetic
uagaugugcugagagcaauuuca

SEQ ID NO: 475027 - RNA, 24 nt, Artificial Sequence
  Synthetic
cuagaugugcugagagcaauuuca

SEQ ID NO: 475028 - RNA, 18 nt, Artificial Sequence
  Synthetic
ugaugugagugaauuuca

SEQ ID NO: 475029 - RNA, 19 nt, Artificial Sequence
  Synthetic
gugaugugagugaauuuca

SEQ ID NO: 475030 - RNA, 20 nt, Artificial Sequence
  Synthetic
ggugaugugagugaauuuca

SEQ ID NO: 475031 - RNA, 21 nt, Artificial Sequence
  Synthetic
gggugaugugagugaauuuca

SEQ ID NO: 475032 - RNA, 22 nt, Artificial Sequence
  Synthetic
ugggugaugugagugaauuuca

SEQ ID NO: 475033 - RNA, 23 nt, Artificial Sequence
  Synthetic
augggugaugugagugaauuuca

SEQ ID NO: 475034 - RNA, 24 nt, Artificial Sequence
  Synthetic
uaugggugaugugagugaauuuca

SEQ ID NO: 475035 - RNA, 18 nt, Artificial Sequence
  Synthetic
uaaagaaauaacauuuca

SEQ ID NO: 475036 - RNA, 19 nt, Artificial Sequence
  Synthetic
guaaagaaauaacauuuca

SEQ ID NO: 475037 - RNA, 20 nt, Artificial Sequence
  Synthetic
aguaaagaaauaacauuuca

SEQ ID NO: 475038 - RNA, 21 nt, Artificial Sequence
  Synthetic
aaguaaagaaauaacauuuca

SEQ ID NO: 475039 - RNA, 22 nt, Artificial Sequence
  Synthetic
caaguaaagaaauaacauuuca

SEQ ID NO: 475040 - RNA, 23 nt, Artificial Sequence
  Synthetic
acaaguaaagaaauaacauuuca

SEQ ID NO: 475041 - RNA, 24 nt, Artificial Sequence
  Synthetic
aacaaguaaagaaauaacauuuca

SEQ ID NO: 475042 - RNA, 18 nt, Artificial Sequence
  Synthetic
uacuuacagcacauuuca

SEQ ID NO: 475043 - RNA, 19 nt, Artificial Sequence
  Synthetic
auacuuacagcacauuuca

SEQ ID NO: 475044 - RNA, 20 nt, Artificial Sequence
  Synthetic
uauacuuacagcacauuuca

SEQ ID NO: 475045 - RNA, 21 nt, Artificial Sequence
  Synthetic
uuauacuuacagcacauuuca

SEQ ID NO: 475046 - RNA, 22 nt, Artificial Sequence
  Synthetic
uuuauacuuacagcacauuuca

SEQ ID NO: 475047 - RNA, 23 nt, Artificial Sequence
  Synthetic
uuuuauacuuacagcacauuuca

SEQ ID NO: 475048 - RNA, 24 nt, Artificial Sequence
  Synthetic
guuuuauacuuacagcacauuuca

SEQ ID NO: 475049 - RNA, 18 nt, Artificial Sequence
  Synthetic
gauuguuaucacauuuca

SEQ ID NO: 475050 - RNA, 19 nt, Artificial Sequence
  Synthetic
agauuguuaucacauuuca

SEQ ID NO: 475051 - RNA, 20 nt, Artificial Sequence
  Synthetic
cagauuguuaucacauuuca

SEQ ID NO: 475052 - RNA, 21 nt, Artificial Sequence
  Synthetic
ccagauuguuaucacauuuca

SEQ ID NO: 475053 - RNA, 22 nt, Artificial Sequence
  Synthetic
cccagauuguuaucacauuuca

SEQ ID NO: 475054 - RNA, 23 nt, Artificial Sequence
  Synthetic
ccccagauuguuaucacauuuca

SEQ ID NO: 475055 - RNA, 24 nt, Artificial Sequence
  Synthetic
gccccagauuguuaucacauuuca

SEQ ID NO: 475056 - RNA, 18 nt, Artificial Sequence
  Synthetic
accuaaugucacauuuca

SEQ ID NO: 475057 - RNA, 19 nt, Artificial Sequence
  Synthetic
aaccuaaugucacauuuca

SEQ ID NO: 475058 - RNA, 20 nt, Artificial Sequence
  Synthetic
caaccuaaugucacauuuca

SEQ ID NO: 475059 - RNA, 21 nt, Artificial Sequence
  Synthetic
acaaccuaaugucacauuuca

SEQ ID NO: 475060 - RNA, 22 nt, Artificial Sequence
  Synthetic
gacaaccuaaugucacauuuca

SEQ ID NO: 475061 - RNA, 23 nt, Artificial Sequence
  Synthetic
ugacaaccuaaugucacauuuca

SEQ ID NO: 475062 - RNA, 24 nt, Artificial Sequence
  Synthetic
uugacaaccuaaugucacauuuca

SEQ ID NO: 475063 - RNA, 18 nt, Artificial Sequence
  Synthetic
uuaaugcgaaucauuuca

SEQ ID NO: 475064 - RNA, 19 nt, Artificial Sequence
  Synthetic
uuuaaugcgaaucauuuca

SEQ ID NO: 475065 - RNA, 20 nt, Artificial Sequence
  Synthetic
auuuaaugcgaaucauuuca

SEQ ID NO: 475066 - RNA, 21 nt, Artificial Sequence
  Synthetic
aauuuaaugcgaaucauuuca

SEQ ID NO: 475067 - RNA, 22 nt, Artificial Sequence
  Synthetic
uaauuuaaugcgaaucauuuca

SEQ ID NO: 475068 - RNA, 23 nt, Artificial Sequence
  Synthetic
uuaauuuaaugcgaaucauuuca

SEQ ID NO: 475069 - RNA, 24 nt, Artificial Sequence
  Synthetic
auuaauuuaaugcgaaucauuuca

SEQ ID NO: 475070 - RNA, 18 nt, Artificial Sequence
  Synthetic
cuguauuuggucauuuca

SEQ ID NO: 475071 - RNA, 19 nt, Artificial Sequence
  Synthetic
acuguauuuggucauuuca

SEQ ID NO: 475072 - RNA, 20 nt, Artificial Sequence
  Synthetic
aacuguauuuggucauuuca

SEQ ID NO: 475073 - RNA, 21 nt, Artificial Sequence
  Synthetic
aaacuguauuuggucauuuca

SEQ ID NO: 475074 - RNA, 22 nt, Artificial Sequence
  Synthetic
aaaacuguauuuggucauuuca

SEQ ID NO: 475075 - RNA, 23 nt, Artificial Sequence
  Synthetic
gaaaacuguauuuggucauuuca

SEQ ID NO: 475076 - RNA, 24 nt, Artificial Sequence
  Synthetic
ugaaaacuguauuuggucauuuca

SEQ ID NO: 475077 - RNA, 18 nt, Artificial Sequence
  Synthetic
gcaagaagauucauuuca

SEQ ID NO: 475078 - RNA, 19 nt, Artificial Sequence
  Synthetic
agcaagaagauucauuuca

SEQ ID NO: 475079 - RNA, 20 nt, Artificial Sequence
  Synthetic
aagcaagaagauucauuuca

SEQ ID NO: 475080 - RNA, 21 nt, Artificial Sequence
  Synthetic
gaagcaagaagauucauuuca

SEQ ID NO: 475081 - RNA, 22 nt, Artificial Sequence
  Synthetic
ggaagcaagaagauucauuuca

SEQ ID NO: 475082 - RNA, 23 nt, Artificial Sequence
  Synthetic
gggaagcaagaagauucauuuca

SEQ ID NO: 475083 - RNA, 24 nt, Artificial Sequence
  Synthetic
agggaagcaagaagauucauuuca

SEQ ID NO: 475084 - RNA, 18 nt, Artificial Sequence
  Synthetic
gucaaacucuucauuuca

SEQ ID NO: 475085 - RNA, 19 nt, Artificial Sequence
  Synthetic
ggucaaacucuucauuuca

SEQ ID NO: 475086 - RNA, 20 nt, Artificial Sequence
  Synthetic
uggucaaacucuucauuuca

SEQ ID NO: 475087 - RNA, 21 nt, Artificial Sequence
  Synthetic
cuggucaaacucuucauuuca

SEQ ID NO: 475088 - RNA, 22 nt, Artificial Sequence
  Synthetic
ucuggucaaacucuucauuuca

SEQ ID NO: 475089 - RNA, 23 nt, Artificial Sequence
  Synthetic
uucuggucaaacucuucauuuca

SEQ ID NO: 475090 - RNA, 24 nt, Artificial Sequence
  Synthetic
uuucuggucaaacucuucauuuca

SEQ ID NO: 475091 - RNA, 18 nt, Artificial Sequence
  Synthetic
auagacuuguucauuuca

SEQ ID NO: 475092 - RNA, 19 nt, Artificial Sequence
  Synthetic
aauagacuuguucauuuca

SEQ ID NO: 475093 - RNA, 20 nt, Artificial Sequence
  Synthetic
aaauagacuuguucauuuca

SEQ ID NO: 475094 - RNA, 21 nt, Artificial Sequence
  Synthetic
aaaauagacuuguucauuuca

SEQ ID NO: 475095 - RNA, 22 nt, Artificial Sequence
  Synthetic
caaaauagacuuguucauuuca

SEQ ID NO: 475096 - RNA, 23 nt, Artificial Sequence
  Synthetic
ucaaaauagacuuguucauuuca

SEQ ID NO: 475097 - RNA, 24 nt, Artificial Sequence
  Synthetic
gucaaaauagacuuguucauuuca

SEQ ID NO: 475098 - RNA, 18 nt, Artificial Sequence
  Synthetic
aaaagacaaaagauuuca

SEQ ID NO: 475099 - RNA, 19 nt, Artificial Sequence
  Synthetic
uaaaagacaaaagauuuca

SEQ ID NO: 475100 - RNA, 20 nt, Artificial Sequence
  Synthetic
guaaaagacaaaagauuuca

SEQ ID NO: 475101 - RNA, 21 nt, Artificial Sequence
  Synthetic
gguaaaagacaaaagauuuca

SEQ ID NO: 475102 - RNA, 22 nt, Artificial Sequence
  Synthetic
ugguaaaagacaaaagauuuca

SEQ ID NO: 475103 - RNA, 23 nt, Artificial Sequence
  Synthetic
cugguaaaagacaaaagauuuca

SEQ ID NO: 475104 - RNA, 24 nt, Artificial Sequence
  Synthetic
ccugguaaaagacaaaagauuuca

SEQ ID NO: 475105 - RNA, 18 nt, Artificial Sequence
  Synthetic
cuuaaaguagagauuuca

SEQ ID NO: 475106 - RNA, 19 nt, Artificial Sequence
  Synthetic
acuuaaaguagagauuuca

SEQ ID NO: 475107 - RNA, 20 nt, Artificial Sequence
  Synthetic
aacuuaaaguagagauuuca

SEQ ID NO: 475108 - RNA, 21 nt, Artificial Sequence
  Synthetic
aaacuuaaaguagagauuuca

SEQ ID NO: 475109 - RNA, 22 nt, Artificial Sequence
  Synthetic
uaaacuuaaaguagagauuuca

SEQ ID NO: 475110 - RNA, 23 nt, Artificial Sequence
  Synthetic
auaaacuuaaaguagagauuuca

SEQ ID NO: 475111 - RNA, 24 nt, Artificial Sequence
  Synthetic
aauaaacuuaaaguagagauuuca

SEQ ID NO: 475112 - RNA, 18 nt, Artificial Sequence
  Synthetic
cccauuuuauagauuuca

SEQ ID NO: 475113 - RNA, 19 nt, Artificial Sequence
  Synthetic
ucccauuuuauagauuuca

SEQ ID NO: 475114 - RNA, 20 nt, Artificial Sequence
  Synthetic
aucccauuuuauagauuuca

SEQ ID NO: 475115 - RNA, 21 nt, Artificial Sequence
  Synthetic
caucccauuuuauagauuuca

SEQ ID NO: 475116 - RNA, 22 nt, Artificial Sequence
  Synthetic
ccaucccauuuuauagauuuca

SEQ ID NO: 475117 - RNA, 23 nt, Artificial Sequence
  Synthetic
uccaucccauuuuauagauuuca

SEQ ID NO: 475118 - RNA, 24 nt, Artificial Sequence
  Synthetic
uuccaucccauuuuauagauuuca

SEQ ID NO: 475119 - RNA, 18 nt, Artificial Sequence
  Synthetic
acuuacugcuagauuuca

SEQ ID NO: 475120 - RNA, 19 nt, Artificial Sequence
  Synthetic
aacuuacugcuagauuuca

SEQ ID NO: 475121 - RNA, 20 nt, Artificial Sequence
  Synthetic
caacuuacugcuagauuuca

SEQ ID NO: 475122 - RNA, 21 nt, Artificial Sequence
  Synthetic
ucaacuuacugcuagauuuca

SEQ ID NO: 475123 - RNA, 22 nt, Artificial Sequence
  Synthetic
uucaacuuacugcuagauuuca

SEQ ID NO: 475124 - RNA, 23 nt, Artificial Sequence
  Synthetic
cuucaacuuacugcuagauuuca

SEQ ID NO: 475125 - RNA, 24 nt, Artificial Sequence
  Synthetic
ucuucaacuuacugcuagauuuca

SEQ ID NO: 475126 - RNA, 18 nt, Artificial Sequence
  Synthetic
uucagaauauggauuuca

SEQ ID NO: 475127 - RNA, 19 nt, Artificial Sequence
  Synthetic
cuucagaauauggauuuca

SEQ ID NO: 475128 - RNA, 20 nt, Artificial Sequence
  Synthetic
acuucagaauauggauuuca

SEQ ID NO: 475129 - RNA, 21 nt, Artificial Sequence
  Synthetic
uacuucagaauauggauuuca

SEQ ID NO: 475130 - RNA, 22 nt, Artificial Sequence
  Synthetic
guacuucagaauauggauuuca

SEQ ID NO: 475131 - RNA, 23 nt, Artificial Sequence
  Synthetic
uguacuucagaauauggauuuca

SEQ ID NO: 475132 - RNA, 24 nt, Artificial Sequence
  Synthetic
cuguacuucagaauauggauuuca

SEQ ID NO: 475133 - RNA, 18 nt, Artificial Sequence
  Synthetic
gagagaaggaugauuuca

SEQ ID NO: 475134 - RNA, 19 nt, Artificial Sequence
  Synthetic
ggagagaaggaugauuuca

SEQ ID NO: 475135 - RNA, 20 nt, Artificial Sequence
  Synthetic
aggagagaaggaugauuuca

SEQ ID NO: 475136 - RNA, 21 nt, Artificial Sequence
  Synthetic
caggagagaaggaugauuuca

SEQ ID NO: 475137 - RNA, 22 nt, Artificial Sequence
  Synthetic
gcaggagagaaggaugauuuca

SEQ ID NO: 475138 - RNA, 23 nt, Artificial Sequence
  Synthetic
ggcaggagagaaggaugauuuca

SEQ ID NO: 475139 - RNA, 24 nt, Artificial Sequence
  Synthetic
aggcaggagagaaggaugauuuca

SEQ ID NO: 475140 - RNA, 18 nt, Artificial Sequence
  Synthetic
guaguuauggugauuuca

SEQ ID NO: 475141 - RNA, 19 nt, Artificial Sequence
  Synthetic
gguaguuauggugauuuca

SEQ ID NO: 475142 - RNA, 20 nt, Artificial Sequence
  Synthetic
ugguaguuauggugauuuca

SEQ ID NO: 475143 - RNA, 21 nt, Artificial Sequence
  Synthetic
uugguaguuauggugauuuca

SEQ ID NO: 475144 - RNA, 22 nt, Artificial Sequence
  Synthetic
uuugguaguuauggugauuuca

SEQ ID NO: 475145 - RNA, 23 nt, Artificial Sequence
  Synthetic
auuugguaguuauggugauuuca

SEQ ID NO: 475146 - RNA, 24 nt, Artificial Sequence
  Synthetic
cauuugguaguuauggugauuuca

SEQ ID NO: 475147 - RNA, 18 nt, Artificial Sequence
  Synthetic
cacuugaaacauauuuca

SEQ ID NO: 475148 - RNA, 19 nt, Artificial Sequence
  Synthetic
ucacuugaaacauauuuca

SEQ ID NO: 475149 - RNA, 20 nt, Artificial Sequence
  Synthetic
aucacuugaaacauauuuca

SEQ ID NO: 475150 - RNA, 21 nt, Artificial Sequence
  Synthetic
caucacuugaaacauauuuca

SEQ ID NO: 475151 - RNA, 22 nt, Artificial Sequence
  Synthetic
ucaucacuugaaacauauuuca

SEQ ID NO: 475152 - RNA, 23 nt, Artificial Sequence
  Synthetic
cucaucacuugaaacauauuuca

SEQ ID NO: 475153 - RNA, 24 nt, Artificial Sequence
  Synthetic
ucucaucacuugaaacauauuuca

SEQ ID NO: 475154 - RNA, 18 nt, Artificial Sequence
  Synthetic
uaaauucucuauauuuca

SEQ ID NO: 475155 - RNA, 19 nt, Artificial Sequence
  Synthetic
uuaaauucucuauauuuca

SEQ ID NO: 475156 - RNA, 20 nt, Artificial Sequence
  Synthetic
auuaaauucucuauauuuca

SEQ ID NO: 475157 - RNA, 21 nt, Artificial Sequence
  Synthetic
aauuaaauucucuauauuuca

SEQ ID NO: 475158 - RNA, 22 nt, Artificial Sequence
  Synthetic
gaauuaaauucucuauauuuca

SEQ ID NO: 475159 - RNA, 23 nt, Artificial Sequence
  Synthetic
ugaauuaaauucucuauauuuca

SEQ ID NO: 475160 - RNA, 24 nt, Artificial Sequence
  Synthetic
augaauuaaauucucuauauuuca

SEQ ID NO: 475161 - RNA, 18 nt, Artificial Sequence
  Synthetic
cuuacagauuauauuuca

SEQ ID NO: 475162 - RNA, 19 nt, Artificial Sequence
  Synthetic
acuuacagauuauauuuca

SEQ ID NO: 475163 - RNA, 20 nt, Artificial Sequence
  Synthetic
cacuuacagauuauauuuca

SEQ ID NO: 475164 - RNA, 21 nt, Artificial Sequence
  Synthetic
ucacuuacagauuauauuuca

SEQ ID NO: 475165 - RNA, 22 nt, Artificial Sequence
  Synthetic
cucacuuacagauuauauuuca

SEQ ID NO: 475166 - RNA, 23 nt, Artificial Sequence
  Synthetic
gcucacuuacagauuauauuuca

SEQ ID NO: 475167 - RNA, 24 nt, Artificial Sequence
  Synthetic
ugcucacuuacagauuauauuuca

SEQ ID NO: 475168 - RNA, 18 nt, Artificial Sequence
  Synthetic
caugaaauuuauauuuca

SEQ ID NO: 475169 - RNA, 19 nt, Artificial Sequence
  Synthetic
ucaugaaauuuauauuuca

SEQ ID NO: 475170 - RNA, 20 nt, Artificial Sequence
  Synthetic
aucaugaaauuuauauuuca

SEQ ID NO: 475171 - RNA, 21 nt, Artificial Sequence
  Synthetic
gaucaugaaauuuauauuuca

SEQ ID NO: 475172 - RNA, 22 nt, Artificial Sequence
  Synthetic
ugaucaugaaauuuauauuuca

SEQ ID NO: 475173 - RNA, 23 nt, Artificial Sequence
  Synthetic
cugaucaugaaauuuauauuuca

SEQ ID NO: 475174 - RNA, 24 nt, Artificial Sequence
  Synthetic
ucugaucaugaaauuuauauuuca

SEQ ID NO: 475175 - RNA, 18 nt, Artificial Sequence
  Synthetic
uuugauuccucuauuuca

SEQ ID NO: 475176 - RNA, 19 nt, Artificial Sequence
  Synthetic
cuuugauuccucuauuuca

SEQ ID NO: 475177 - RNA, 20 nt, Artificial Sequence
  Synthetic
acuuugauuccucuauuuca

SEQ ID NO: 475178 - RNA, 21 nt, Artificial Sequence
  Synthetic
uacuuugauuccucuauuuca

SEQ ID NO: 475179 - RNA, 22 nt, Artificial Sequence
  Synthetic
auacuuugauuccucuauuuca

SEQ ID NO: 475180 - RNA, 23 nt, Artificial Sequence
  Synthetic
cauacuuugauuccucuauuuca

SEQ ID NO: 475181 - RNA, 24 nt, Artificial Sequence
  Synthetic
acauacuuugauuccucuauuuca

SEQ ID NO: 475182 - RNA, 18 nt, Artificial Sequence
  Synthetic
caaaaauagaguauuuca

SEQ ID NO: 475183 - RNA, 19 nt, Artificial Sequence
  Synthetic
ucaaaaauagaguauuuca

SEQ ID NO: 475184 - RNA, 20 nt, Artificial Sequence
  Synthetic
gucaaaaauagaguauuuca

SEQ ID NO: 475185 - RNA, 21 nt, Artificial Sequence
  Synthetic
ugucaaaaauagaguauuuca

SEQ ID NO: 475186 - RNA, 22 nt, Artificial Sequence
  Synthetic
gugucaaaaauagaguauuuca

SEQ ID NO: 475187 - RNA, 23 nt, Artificial Sequence
  Synthetic
ggugucaaaaauagaguauuuca

SEQ ID NO: 475188 - RNA, 24 nt, Artificial Sequence
  Synthetic
uggugucaaaaauagaguauuuca

SEQ ID NO: 475189 - RNA, 18 nt, Artificial Sequence
  Synthetic
aaauuguggauuauuuca

SEQ ID NO: 475190 - RNA, 19 nt, Artificial Sequence
  Synthetic
aaaauuguggauuauuuca

SEQ ID NO: 475191 - RNA, 20 nt, Artificial Sequence
  Synthetic
gaaaauuguggauuauuuca

SEQ ID NO: 475192 - RNA, 21 nt, Artificial Sequence
  Synthetic
ugaaaauuguggauuauuuca

SEQ ID NO: 475193 - RNA, 22 nt, Artificial Sequence
  Synthetic
uugaaaauuguggauuauuuca

SEQ ID NO: 475194 - RNA, 23 nt, Artificial Sequence
  Synthetic
guugaaaauuguggauuauuuca

SEQ ID NO: 475195 - RNA, 24 nt, Artificial Sequence
  Synthetic
aguugaaaauuguggauuauuuca

SEQ ID NO: 475196 - RNA, 18 nt, Artificial Sequence
  Synthetic
uacacaauuauuauuuca

SEQ ID NO: 475197 - RNA, 19 nt, Artificial Sequence
  Synthetic
uuacacaauuauuauuuca

SEQ ID NO: 475198 - RNA, 20 nt, Artificial Sequence
  Synthetic
uuuacacaauuauuauuuca

SEQ ID NO: 475199 - RNA, 21 nt, Artificial Sequence
  Synthetic
cuuuacacaauuauuauuuca

SEQ ID NO: 475200 - RNA, 22 nt, Artificial Sequence
  Synthetic
acuuuacacaauuauuauuuca

SEQ ID NO: 475201 - RNA, 23 nt, Artificial Sequence
  Synthetic
cacuuuacacaauuauuauuuca

SEQ ID NO: 475202 - RNA, 24 nt, Artificial Sequence
  Synthetic
gcacuuuacacaauuauuauuuca

SEQ ID NO: 475203 - RNA, 18 nt, Artificial Sequence
  Synthetic
ucuuccuucuaacuuuca

SEQ ID NO: 475204 - RNA, 19 nt, Artificial Sequence
  Synthetic
gucuuccuucuaacuuuca

SEQ ID NO: 475205 - RNA, 20 nt, Artificial Sequence
  Synthetic
cgucuuccuucuaacuuuca

SEQ ID NO: 475206 - RNA, 21 nt, Artificial Sequence
  Synthetic
ucgucuuccuucuaacuuuca

SEQ ID NO: 475207 - RNA, 22 nt, Artificial Sequence
  Synthetic
uucgucuuccuucuaacuuuca

SEQ ID NO: 475208 - RNA, 23 nt, Artificial Sequence
  Synthetic
cuucgucuuccuucuaacuuuca

SEQ ID NO: 475209 - RNA, 24 nt, Artificial Sequence
  Synthetic
ucuucgucuuccuucuaacuuuca

SEQ ID NO: 475210 - RNA, 18 nt, Artificial Sequence
  Synthetic
ugaggaacuuaacuuuca

SEQ ID NO: 475211 - RNA, 19 nt, Artificial Sequence
  Synthetic
augaggaacuuaacuuuca

SEQ ID NO: 475212 - RNA, 20 nt, Artificial Sequence
  Synthetic
gaugaggaacuuaacuuuca

SEQ ID NO: 475213 - RNA, 21 nt, Artificial Sequence
  Synthetic
agaugaggaacuuaacuuuca

SEQ ID NO: 475214 - RNA, 22 nt, Artificial Sequence
  Synthetic
uagaugaggaacuuaacuuuca

SEQ ID NO: 475215 - RNA, 23 nt, Artificial Sequence
  Synthetic
auagaugaggaacuuaacuuuca

SEQ ID NO: 475216 - RNA, 24 nt, Artificial Sequence
  Synthetic
uauagaugaggaacuuaacuuuca

SEQ ID NO: 475217 - RNA, 18 nt, Artificial Sequence
  Synthetic
aaauaauguacacuuuca

SEQ ID NO: 475218 - RNA, 19 nt, Artificial Sequence
  Synthetic
aaaauaauguacacuuuca

SEQ ID NO: 475219 - RNA, 20 nt, Artificial Sequence
  Synthetic
aaaaauaauguacacuuuca

SEQ ID NO: 475220 - RNA, 21 nt, Artificial Sequence
  Synthetic
gaaaaauaauguacacuuuca

SEQ ID NO: 475221 - RNA, 22 nt, Artificial Sequence
  Synthetic
agaaaaauaauguacacuuuca

SEQ ID NO: 475222 - RNA, 23 nt, Artificial Sequence
  Synthetic
uagaaaaauaauguacacuuuca

SEQ ID NO: 475223 - RNA, 24 nt, Artificial Sequence
  Synthetic
cuagaaaaauaauguacacuuuca

SEQ ID NO: 475224 - RNA, 18 nt, Artificial Sequence
  Synthetic
aaagguauuucacuuuca

SEQ ID NO: 475225 - RNA, 19 nt, Artificial Sequence
  Synthetic
aaaagguauuucacuuuca

SEQ ID NO: 475226 - RNA, 20 nt, Artificial Sequence
  Synthetic
aaaaagguauuucacuuuca

SEQ ID NO: 475227 - RNA, 21 nt, Artificial Sequence
  Synthetic
aaaaaagguauuucacuuuca

SEQ ID NO: 475228 - RNA, 22 nt, Artificial Sequence
  Synthetic
gaaaaaagguauuucacuuuca

SEQ ID NO: 475229 - RNA, 23 nt, Artificial Sequence
  Synthetic
ggaaaaaagguauuucacuuuca

SEQ ID NO: 475230 - RNA, 24 nt, Artificial Sequence
  Synthetic
aggaaaaaagguauuucacuuuca

SEQ ID NO: 475231 - RNA, 18 nt, Artificial Sequence
  Synthetic
cugggccugagccuuuca

SEQ ID NO: 475232 - RNA, 19 nt, Artificial Sequence
  Synthetic
ucugggccugagccuuuca

SEQ ID NO: 475233 - RNA, 20 nt, Artificial Sequence
  Synthetic
uucugggccugagccuuuca

SEQ ID NO: 475234 - RNA, 21 nt, Artificial Sequence
  Synthetic
cuucugggccugagccuuuca

SEQ ID NO: 475235 - RNA, 22 nt, Artificial Sequence
  Synthetic
acuucugggccugagccuuuca

SEQ ID NO: 475236 - RNA, 23 nt, Artificial Sequence
  Synthetic
gacuucugggccugagccuuuca

SEQ ID NO: 475237 - RNA, 24 nt, Artificial Sequence
  Synthetic
agacuucugggccugagccuuuca

SEQ ID NO: 475238 - RNA, 18 nt, Artificial Sequence
  Synthetic
uuuucuuuuuagcuuuca

SEQ ID NO: 475239 - RNA, 19 nt, Artificial Sequence
  Synthetic
uuuuucuuuuuagcuuuca

SEQ ID NO: 475240 - RNA, 20 nt, Artificial Sequence
  Synthetic
uuuuuucuuuuuagcuuuca

SEQ ID NO: 475241 - RNA, 21 nt, Artificial Sequence
  Synthetic
uuuuuuucuuuuuagcuuuca

SEQ ID NO: 475242 - RNA, 22 nt, Artificial Sequence
  Synthetic
uuuuuuuucuuuuuagcuuuca

SEQ ID NO: 475243 - RNA, 23 nt, Artificial Sequence
  Synthetic
uuuuuuuuucuuuuuagcuuuca

SEQ ID NO: 475244 - RNA, 24 nt, Artificial Sequence
  Synthetic
uuuuuuuuuucuuuuuagcuuuca

SEQ ID NO: 475245 - RNA, 18 nt, Artificial Sequence
  Synthetic
aaauguucuuggcuuuca

SEQ ID NO: 475246 - RNA, 19 nt, Artificial Sequence
  Synthetic
gaaauguucuuggcuuuca

SEQ ID NO: 475247 - RNA, 20 nt, Artificial Sequence
  Synthetic
agaaauguucuuggcuuuca

SEQ ID NO: 475248 - RNA, 21 nt, Artificial Sequence
  Synthetic
aagaaauguucuuggcuuuca

SEQ ID NO: 475249 - RNA, 22 nt, Artificial Sequence
  Synthetic
aaagaaauguucuuggcuuuca

SEQ ID NO: 475250 - RNA, 23 nt, Artificial Sequence
  Synthetic
caaagaaauguucuuggcuuuca

SEQ ID NO: 475251 - RNA, 24 nt, Artificial Sequence
  Synthetic
acaaagaaauguucuuggcuuuca

SEQ ID NO: 475252 - RNA, 18 nt, Artificial Sequence
  Synthetic
aaucacgggaugcuuuca

SEQ ID NO: 475253 - RNA, 19 nt, Artificial Sequence
  Synthetic
aaaucacgggaugcuuuca

SEQ ID NO: 475254 - RNA, 20 nt, Artificial Sequence
  Synthetic
aaaaucacgggaugcuuuca

SEQ ID NO: 475255 - RNA, 21 nt, Artificial Sequence
  Synthetic
gaaaaucacgggaugcuuuca

SEQ ID NO: 475256 - RNA, 22 nt, Artificial Sequence
  Synthetic
agaaaaucacgggaugcuuuca

SEQ ID NO: 475257 - RNA, 23 nt, Artificial Sequence
  Synthetic
aagaaaaucacgggaugcuuuca

SEQ ID NO: 475258 - RNA, 24 nt, Artificial Sequence
  Synthetic
aaagaaaaucacgggaugcuuuca

SEQ ID NO: 475259 - RNA, 18 nt, Artificial Sequence
  Synthetic
gccuuuuauaugcuuuca

SEQ ID NO: 475260 - RNA, 19 nt, Artificial Sequence
  Synthetic
ugccuuuuauaugcuuuca

SEQ ID NO: 475261 - RNA, 20 nt, Artificial Sequence
  Synthetic
uugccuuuuauaugcuuuca

SEQ ID NO: 475262 - RNA, 21 nt, Artificial Sequence
  Synthetic
auugccuuuuauaugcuuuca

SEQ ID NO: 475263 - RNA, 22 nt, Artificial Sequence
  Synthetic
gauugccuuuuauaugcuuuca

SEQ ID NO: 475264 - RNA, 23 nt, Artificial Sequence
  Synthetic
ggauugccuuuuauaugcuuuca

SEQ ID NO: 475265 - RNA, 24 nt, Artificial Sequence
  Synthetic
uggauugccuuuuauaugcuuuca

SEQ ID NO: 475266 - RNA, 18 nt, Artificial Sequence
  Synthetic
auuuucaccuaucuuuca

SEQ ID NO: 475267 - RNA, 19 nt, Artificial Sequence
  Synthetic
cauuuucaccuaucuuuca

SEQ ID NO: 475268 - RNA, 20 nt, Artificial Sequence
  Synthetic
ccauuuucaccuaucuuuca

SEQ ID NO: 475269 - RNA, 21 nt, Artificial Sequence
  Synthetic
accauuuucaccuaucuuuca

SEQ ID NO: 475270 - RNA, 22 nt, Artificial Sequence
  Synthetic
aaccauuuucaccuaucuuuca

SEQ ID NO: 475271 - RNA, 23 nt, Artificial Sequence
  Synthetic
aaaccauuuucaccuaucuuuca

SEQ ID NO: 475272 - RNA, 24 nt, Artificial Sequence
  Synthetic
aaaaccauuuucaccuaucuuuca

SEQ ID NO: 475273 - RNA, 18 nt, Artificial Sequence
  Synthetic
aaauucuaaugucuuuca

SEQ ID NO: 475274 - RNA, 19 nt, Artificial Sequence
  Synthetic
gaaauucuaaugucuuuca

SEQ ID NO: 475275 - RNA, 20 nt, Artificial Sequence
  Synthetic
ggaaauucuaaugucuuuca

SEQ ID NO: 475276 - RNA, 21 nt, Artificial Sequence
  Synthetic
aggaaauucuaaugucuuuca

SEQ ID NO: 475277 - RNA, 22 nt, Artificial Sequence
  Synthetic
gaggaaauucuaaugucuuuca

SEQ ID NO: 475278 - RNA, 23 nt, Artificial Sequence
  Synthetic
ggaggaaauucuaaugucuuuca

SEQ ID NO: 475279 - RNA, 24 nt, Artificial Sequence
  Synthetic
gggaggaaauucuaaugucuuuca

SEQ ID NO: 475280 - RNA, 18 nt, Artificial Sequence
  Synthetic
uuaagcccuguucuuuca

SEQ ID NO: 475281 - RNA, 19 nt, Artificial Sequence
  Synthetic
uuuaagcccuguucuuuca

SEQ ID NO: 475282 - RNA, 20 nt, Artificial Sequence
  Synthetic
auuuaagcccuguucuuuca

SEQ ID NO: 475283 - RNA, 21 nt, Artificial Sequence
  Synthetic
aauuuaagcccuguucuuuca

SEQ ID NO: 475284 - RNA, 22 nt, Artificial Sequence
  Synthetic
gaauuuaagcccuguucuuuca

SEQ ID NO: 475285 - RNA, 23 nt, Artificial Sequence
  Synthetic
ugaauuuaagcccuguucuuuca

SEQ ID NO: 475286 - RNA, 24 nt, Artificial Sequence
  Synthetic
cugaauuuaagcccuguucuuuca

SEQ ID NO: 475287 - RNA, 18 nt, Artificial Sequence
  Synthetic
augccauuucaaguuuca

SEQ ID NO: 475288 - RNA, 19 nt, Artificial Sequence
  Synthetic
uaugccauuucaaguuuca

SEQ ID NO: 475289 - RNA, 20 nt, Artificial Sequence
  Synthetic
guaugccauuucaaguuuca

SEQ ID NO: 475290 - RNA, 21 nt, Artificial Sequence
  Synthetic
aguaugccauuucaaguuuca

SEQ ID NO: 475291 - RNA, 22 nt, Artificial Sequence
  Synthetic
aaguaugccauuucaaguuuca

SEQ ID NO: 475292 - RNA, 23 nt, Artificial Sequence
  Synthetic
caaguaugccauuucaaguuuca

SEQ ID NO: 475293 - RNA, 24 nt, Artificial Sequence
  Synthetic
acaaguaugccauuucaaguuuca

SEQ ID NO: 475294 - RNA, 18 nt, Artificial Sequence
  Synthetic
auauaacagugaguuuca

SEQ ID NO: 475295 - RNA, 19 nt, Artificial Sequence
  Synthetic
cauauaacagugaguuuca

SEQ ID NO: 475296 - RNA, 20 nt, Artificial Sequence
  Synthetic
ucauauaacagugaguuuca

SEQ ID NO: 475297 - RNA, 21 nt, Artificial Sequence
  Synthetic
cucauauaacagugaguuuca

SEQ ID NO: 475298 - RNA, 22 nt, Artificial Sequence
  Synthetic
acucauauaacagugaguuuca

SEQ ID NO: 475299 - RNA, 23 nt, Artificial Sequence
  Synthetic
aacucauauaacagugaguuuca

SEQ ID NO: 475300 - RNA, 24 nt, Artificial Sequence
  Synthetic
gaacucauauaacagugaguuuca

SEQ ID NO: 475301 - RNA, 18 nt, Artificial Sequence
  Synthetic
uuaaagucuuucguuuca

SEQ ID NO: 475302 - RNA, 19 nt, Artificial Sequence
  Synthetic
uuuaaagucuuucguuuca

SEQ ID NO: 475303 - RNA, 20 nt, Artificial Sequence
  Synthetic
guuuaaagucuuucguuuca

SEQ ID NO: 475304 - RNA, 21 nt, Artificial Sequence
  Synthetic
gguuuaaagucuuucguuuca

SEQ ID NO: 475305 - RNA, 22 nt, Artificial Sequence
  Synthetic
ugguuuaaagucuuucguuuca

SEQ ID NO: 475306 - RNA, 23 nt, Artificial Sequence
  Synthetic
gugguuuaaagucuuucguuuca

SEQ ID NO: 475307 - RNA, 24 nt, Artificial Sequence
  Synthetic
agugguuuaaagucuuucguuuca

SEQ ID NO: 475308 - RNA, 18 nt, Artificial Sequence
  Synthetic
uuggaaugaaagguuuca

SEQ ID NO: 475309 - RNA, 19 nt, Artificial Sequence
  Synthetic
uuuggaaugaaagguuuca

SEQ ID NO: 475310 - RNA, 20 nt, Artificial Sequence
  Synthetic
guuuggaaugaaagguuuca

SEQ ID NO: 475311 - RNA, 21 nt, Artificial Sequence
  Synthetic
aguuuggaaugaaagguuuca

SEQ ID NO: 475312 - RNA, 22 nt, Artificial Sequence
  Synthetic
uaguuuggaaugaaagguuuca

SEQ ID NO: 475313 - RNA, 23 nt, Artificial Sequence
  Synthetic
guaguuuggaaugaaagguuuca

SEQ ID NO: 475314 - RNA, 24 nt, Artificial Sequence
  Synthetic
uguaguuuggaaugaaagguuuca

SEQ ID NO: 475315 - RNA, 18 nt, Artificial Sequence
  Synthetic
ugggacgcggagguuuca

SEQ ID NO: 475316 - RNA, 19 nt, Artificial Sequence
  Synthetic
cugggacgcggagguuuca

SEQ ID NO: 475317 - RNA, 20 nt, Artificial Sequence
  Synthetic
ccugggacgcggagguuuca

SEQ ID NO: 475318 - RNA, 21 nt, Artificial Sequence
  Synthetic
accugggacgcggagguuuca

SEQ ID NO: 475319 - RNA, 22 nt, Artificial Sequence
  Synthetic
aaccugggacgcggagguuuca

SEQ ID NO: 475320 - RNA, 23 nt, Artificial Sequence
  Synthetic
gaaccugggacgcggagguuuca

SEQ ID NO: 475321 - RNA, 24 nt, Artificial Sequence
  Synthetic
ugaaccugggacgcggagguuuca

SEQ ID NO: 475322 - RNA, 18 nt, Artificial Sequence
  Synthetic
aucacuucugggguuuca

SEQ ID NO: 475323 - RNA, 19 nt, Artificial Sequence
  Synthetic
uaucacuucugggguuuca

SEQ ID NO: 475324 - RNA, 20 nt, Artificial Sequence
  Synthetic
auaucacuucugggguuuca

SEQ ID NO: 475325 - RNA, 21 nt, Artificial Sequence
  Synthetic
aauaucacuucugggguuuca

SEQ ID NO: 475326 - RNA, 22 nt, Artificial Sequence
  Synthetic
aaauaucacuucugggguuuca

SEQ ID NO: 475327 - RNA, 23 nt, Artificial Sequence
  Synthetic
caaauaucacuucugggguuuca

SEQ ID NO: 475328 - RNA, 24 nt, Artificial Sequence
  Synthetic
ucaaauaucacuucugggguuuca

SEQ ID NO: 475329 - RNA, 18 nt, Artificial Sequence
  Synthetic
agugcuuacuauguuuca

SEQ ID NO: 475330 - RNA, 19 nt, Artificial Sequence
  Synthetic
cagugcuuacuauguuuca

SEQ ID NO: 475331 - RNA, 20 nt, Artificial Sequence
  Synthetic
ucagugcuuacuauguuuca

SEQ ID NO: 475332 - RNA, 21 nt, Artificial Sequence
  Synthetic
uucagugcuuacuauguuuca

SEQ ID NO: 475333 - RNA, 22 nt, Artificial Sequence
  Synthetic
auucagugcuuacuauguuuca

SEQ ID NO: 475334 - RNA, 23 nt, Artificial Sequence
  Synthetic
uauucagugcuuacuauguuuca

SEQ ID NO: 475335 - RNA, 24 nt, Artificial Sequence
  Synthetic
uuauucagugcuuacuauguuuca

SEQ ID NO: 475336 - RNA, 18 nt, Artificial Sequence
  Synthetic
uuuaaucaaaguguuuca

SEQ ID NO: 475337 - RNA, 19 nt, Artificial Sequence
  Synthetic
uuuuaaucaaaguguuuca

SEQ ID NO: 475338 - RNA, 20 nt, Artificial Sequence
  Synthetic
uuuuuaaucaaaguguuuca

SEQ ID NO: 475339 - RNA, 21 nt, Artificial Sequence
  Synthetic
uuuuuuaaucaaaguguuuca

SEQ ID NO: 475340 - RNA, 22 nt, Artificial Sequence
  Synthetic
auuuuuuaaucaaaguguuuca

SEQ ID NO: 475341 - RNA, 23 nt, Artificial Sequence
  Synthetic
cauuuuuuaaucaaaguguuuca

SEQ ID NO: 475342 - RNA, 24 nt, Artificial Sequence
  Synthetic
ucauuuuuuaaucaaaguguuuca

SEQ ID NO: 475343 - RNA, 18 nt, Artificial Sequence
  Synthetic
uaguucaugaguguuuca

SEQ ID NO: 475344 - RNA, 19 nt, Artificial Sequence
  Synthetic
auaguucaugaguguuuca

SEQ ID NO: 475345 - RNA, 20 nt, Artificial Sequence
  Synthetic
gauaguucaugaguguuuca

SEQ ID NO: 475346 - RNA, 21 nt, Artificial Sequence
  Synthetic
agauaguucaugaguguuuca

SEQ ID NO: 475347 - RNA, 22 nt, Artificial Sequence
  Synthetic
aagauaguucaugaguguuuca

SEQ ID NO: 475348 - RNA, 23 nt, Artificial Sequence
  Synthetic
aaagauaguucaugaguguuuca

SEQ ID NO: 475349 - RNA, 24 nt, Artificial Sequence
  Synthetic
aaaagauaguucaugaguguuuca

SEQ ID NO: 475350 - RNA, 18 nt, Artificial Sequence
  Synthetic
uguaaaccucuuguuuca

SEQ ID NO: 475351 - RNA, 19 nt, Artificial Sequence
  Synthetic
guguaaaccucuuguuuca

SEQ ID NO: 475352 - RNA, 20 nt, Artificial Sequence
  Synthetic
gguguaaaccucuuguuuca

SEQ ID NO: 475353 - RNA, 21 nt, Artificial Sequence
  Synthetic
agguguaaaccucuuguuuca

SEQ ID NO: 475354 - RNA, 22 nt, Artificial Sequence
  Synthetic
cagguguaaaccucuuguuuca

SEQ ID NO: 475355 - RNA, 23 nt, Artificial Sequence
  Synthetic
ucagguguaaaccucuuguuuca

SEQ ID NO: 475356 - RNA, 24 nt, Artificial Sequence
  Synthetic
uucagguguaaaccucuuguuuca

SEQ ID NO: 475357 - RNA, 18 nt, Artificial Sequence
  Synthetic
uuaauggcauuuguuuca

SEQ ID NO: 475358 - RNA, 19 nt, Artificial Sequence
  Synthetic
guuaauggcauuuguuuca

SEQ ID NO: 475359 - RNA, 20 nt, Artificial Sequence
  Synthetic
gguuaauggcauuuguuuca

SEQ ID NO: 475360 - RNA, 21 nt, Artificial Sequence
  Synthetic
ggguuaauggcauuuguuuca

SEQ ID NO: 475361 - RNA, 22 nt, Artificial Sequence
  Synthetic
aggguuaauggcauuuguuuca

SEQ ID NO: 475362 - RNA, 23 nt, Artificial Sequence
  Synthetic
gaggguuaauggcauuuguuuca

SEQ ID NO: 475363 - RNA, 24 nt, Artificial Sequence
  Synthetic
ggaggguuaauggcauuuguuuca

SEQ ID NO: 475364 - RNA, 18 nt, Artificial Sequence
  Synthetic
uugaaaauaaaauuuuca

SEQ ID NO: 475365 - RNA, 19 nt, Artificial Sequence
  Synthetic
cuugaaaauaaaauuuuca

SEQ ID NO: 475366 - RNA, 20 nt, Artificial Sequence
  Synthetic
acuugaaaauaaaauuuuca

SEQ ID NO: 475367 - RNA, 21 nt, Artificial Sequence
  Synthetic
uacuugaaaauaaaauuuuca

SEQ ID NO: 475368 - RNA, 22 nt, Artificial Sequence
  Synthetic
uuacuugaaaauaaaauuuuca

SEQ ID NO: 475369 - RNA, 23 nt, Artificial Sequence
  Synthetic
guuacuugaaaauaaaauuuuca

SEQ ID NO: 475370 - RNA, 24 nt, Artificial Sequence
  Synthetic
uguuacuugaaaauaaaauuuuca

SEQ ID NO: 475371 - RNA, 18 nt, Artificial Sequence
  Synthetic
uuaaauuugaaauuuuca

SEQ ID NO: 475372 - RNA, 19 nt, Artificial Sequence
  Synthetic
auuaaauuugaaauuuuca

SEQ ID NO: 475373 - RNA, 20 nt, Artificial Sequence
  Synthetic
aauuaaauuugaaauuuuca

SEQ ID NO: 475374 - RNA, 21 nt, Artificial Sequence
  Synthetic
gaauuaaauuugaaauuuuca

SEQ ID NO: 475375 - RNA, 22 nt, Artificial Sequence
  Synthetic
agaauuaaauuugaaauuuuca

SEQ ID NO: 475376 - RNA, 23 nt, Artificial Sequence
  Synthetic
uagaauuaaauuugaaauuuuca

SEQ ID NO: 475377 - RNA, 24 nt, Artificial Sequence
  Synthetic
auagaauuaaauuugaaauuuuca

SEQ ID NO: 475378 - RNA, 18 nt, Artificial Sequence
  Synthetic
cauuuuccagaauuuuca

SEQ ID NO: 475379 - RNA, 19 nt, Artificial Sequence
  Synthetic
acauuuuccagaauuuuca

SEQ ID NO: 475380 - RNA, 20 nt, Artificial Sequence
  Synthetic
uacauuuuccagaauuuuca

SEQ ID NO: 475381 - RNA, 21 nt, Artificial Sequence
  Synthetic
cuacauuuuccagaauuuuca

SEQ ID NO: 475382 - RNA, 22 nt, Artificial Sequence
  Synthetic
acuacauuuuccagaauuuuca

SEQ ID NO: 475383 - RNA, 23 nt, Artificial Sequence
  Synthetic
uacuacauuuuccagaauuuuca

SEQ ID NO: 475384 - RNA, 24 nt, Artificial Sequence
  Synthetic
uuacuacauuuuccagaauuuuca

SEQ ID NO: 475385 - RNA, 18 nt, Artificial Sequence
  Synthetic
gacaaaggauaauuuuca

SEQ ID NO: 475386 - RNA, 19 nt, Artificial Sequence
  Synthetic
ggacaaaggauaauuuuca

SEQ ID NO: 475387 - RNA, 20 nt, Artificial Sequence
  Synthetic
uggacaaaggauaauuuuca

SEQ ID NO: 475388 - RNA, 21 nt, Artificial Sequence
  Synthetic
cuggacaaaggauaauuuuca

SEQ ID NO: 475389 - RNA, 22 nt, Artificial Sequence
  Synthetic
ucuggacaaaggauaauuuuca

SEQ ID NO: 475390 - RNA, 23 nt, Artificial Sequence
  Synthetic
aucuggacaaaggauaauuuuca

SEQ ID NO: 475391 - RNA, 24 nt, Artificial Sequence
  Synthetic
aaucuggacaaaggauaauuuuca

SEQ ID NO: 475392 - RNA, 18 nt, Artificial Sequence
  Synthetic
gaaaggaggccauuuuca

SEQ ID NO: 475393 - RNA, 19 nt, Artificial Sequence
  Synthetic
agaaaggaggccauuuuca

SEQ ID NO: 475394 - RNA, 20 nt, Artificial Sequence
  Synthetic
aagaaaggaggccauuuuca

SEQ ID NO: 475395 - RNA, 21 nt, Artificial Sequence
  Synthetic
aaagaaaggaggccauuuuca

SEQ ID NO: 475396 - RNA, 22 nt, Artificial Sequence
  Synthetic
aaaagaaaggaggccauuuuca

SEQ ID NO: 475397 - RNA, 23 nt, Artificial Sequence
  Synthetic
aaaaagaaaggaggccauuuuca

SEQ ID NO: 475398 - RNA, 24 nt, Artificial Sequence
  Synthetic
caaaaagaaaggaggccauuuuca

SEQ ID NO: 475399 - RNA, 18 nt, Artificial Sequence
  Synthetic
aguaaaucaugauuuuca

SEQ ID NO: 475400 - RNA, 19 nt, Artificial Sequence
  Synthetic
uaguaaaucaugauuuuca

SEQ ID NO: 475401 - RNA, 20 nt, Artificial Sequence
  Synthetic
uuaguaaaucaugauuuuca

SEQ ID NO: 475402 - RNA, 21 nt, Artificial Sequence
  Synthetic
cuuaguaaaucaugauuuuca

SEQ ID NO: 475403 - RNA, 22 nt, Artificial Sequence
  Synthetic
acuuaguaaaucaugauuuuca

SEQ ID NO: 475404 - RNA, 23 nt, Artificial Sequence
  Synthetic
uacuuaguaaaucaugauuuuca

SEQ ID NO: 475405 - RNA, 24 nt, Artificial Sequence
  Synthetic
uuacuuaguaaaucaugauuuuca

SEQ ID NO: 475406 - RNA, 18 nt, Artificial Sequence
  Synthetic
ugagaccaaauauuuuca

SEQ ID NO: 475407 - RNA, 19 nt, Artificial Sequence
  Synthetic
gugagaccaaauauuuuca

SEQ ID NO: 475408 - RNA, 20 nt, Artificial Sequence
  Synthetic
ggugagaccaaauauuuuca

SEQ ID NO: 475409 - RNA, 21 nt, Artificial Sequence
  Synthetic
aggugagaccaaauauuuuca

SEQ ID NO: 475410 - RNA, 22 nt, Artificial Sequence
  Synthetic
caggugagaccaaauauuuuca

SEQ ID NO: 475411 - RNA, 23 nt, Artificial Sequence
  Synthetic
gcaggugagaccaaauauuuuca

SEQ ID NO: 475412 - RNA, 24 nt, Artificial Sequence
  Synthetic
ugcaggugagaccaaauauuuuca

SEQ ID NO: 475413 - RNA, 18 nt, Artificial Sequence
  Synthetic
ucuacuuuccuauuuuca

SEQ ID NO: 475414 - RNA, 19 nt, Artificial Sequence
  Synthetic
uucuacuuuccuauuuuca

SEQ ID NO: 475415 - RNA, 20 nt, Artificial Sequence
  Synthetic
uuucuacuuuccuauuuuca

SEQ ID NO: 475416 - RNA, 21 nt, Artificial Sequence
  Synthetic
auuucuacuuuccuauuuuca

SEQ ID NO: 475417 - RNA, 22 nt, Artificial Sequence
  Synthetic
aauuucuacuuuccuauuuuca

SEQ ID NO: 475418 - RNA, 23 nt, Artificial Sequence
  Synthetic
uaauuucuacuuuccuauuuuca

SEQ ID NO: 475419 - RNA, 24 nt, Artificial Sequence
  Synthetic
auaauuucuacuuuccuauuuuca

SEQ ID NO: 475420 - RNA, 18 nt, Artificial Sequence
  Synthetic
ugggaccagcuauuuuca

SEQ ID NO: 475421 - RNA, 19 nt, Artificial Sequence
  Synthetic
gugggaccagcuauuuuca

SEQ ID NO: 475422 - RNA, 20 nt, Artificial Sequence
  Synthetic
ugugggaccagcuauuuuca

SEQ ID NO: 475423 - RNA, 21 nt, Artificial Sequence
  Synthetic
cugugggaccagcuauuuuca

SEQ ID NO: 475424 - RNA, 22 nt, Artificial Sequence
  Synthetic
acugugggaccagcuauuuuca

SEQ ID NO: 475425 - RNA, 23 nt, Artificial Sequence
  Synthetic
uacugugggaccagcuauuuuca

SEQ ID NO: 475426 - RNA, 24 nt, Artificial Sequence
  Synthetic
auacugugggaccagcuauuuuca

SEQ ID NO: 475427 - RNA, 18 nt, Artificial Sequence
  Synthetic
aagaucacgguauuuuca

SEQ ID NO: 475428 - RNA, 19 nt, Artificial Sequence
  Synthetic
uaagaucacgguauuuuca

SEQ ID NO: 475429 - RNA, 20 nt, Artificial Sequence
  Synthetic
guaagaucacgguauuuuca

SEQ ID NO: 475430 - RNA, 21 nt, Artificial Sequence
  Synthetic
uguaagaucacgguauuuuca

SEQ ID NO: 475431 - RNA, 22 nt, Artificial Sequence
  Synthetic
auguaagaucacgguauuuuca

SEQ ID NO: 475432 - RNA, 23 nt, Artificial Sequence
  Synthetic
aauguaagaucacgguauuuuca

SEQ ID NO: 475433 - RNA, 24 nt, Artificial Sequence
  Synthetic
caauguaagaucacgguauuuuca

SEQ ID NO: 475434 - RNA, 18 nt, Artificial Sequence
  Synthetic
gauguuaacuacuuuuca

SEQ ID NO: 475435 - RNA, 19 nt, Artificial Sequence
  Synthetic
ggauguuaacuacuuuuca

SEQ ID NO: 475436 - RNA, 20 nt, Artificial Sequence
  Synthetic
uggauguuaacuacuuuuca

SEQ ID NO: 475437 - RNA, 21 nt, Artificial Sequence
  Synthetic
uuggauguuaacuacuuuuca

SEQ ID NO: 475438 - RNA, 22 nt, Artificial Sequence
  Synthetic
guuggauguuaacuacuuuuca

SEQ ID NO: 475439 - RNA, 23 nt, Artificial Sequence
  Synthetic
aguuggauguuaacuacuuuuca

SEQ ID NO: 475440 - RNA, 24 nt, Artificial Sequence
  Synthetic
caguuggauguuaacuacuuuuca

SEQ ID NO: 475441 - RNA, 18 nt, Artificial Sequence
  Synthetic
gggccauuugucuuuuca

SEQ ID NO: 475442 - RNA, 19 nt, Artificial Sequence
  Synthetic
ugggccauuugucuuuuca

SEQ ID NO: 475443 - RNA, 20 nt, Artificial Sequence
  Synthetic
gugggccauuugucuuuuca

SEQ ID NO: 475444 - RNA, 21 nt, Artificial Sequence
  Synthetic
agugggccauuugucuuuuca

SEQ ID NO: 475445 - RNA, 22 nt, Artificial Sequence
  Synthetic
cagugggccauuugucuuuuca

SEQ ID NO: 475446 - RNA, 23 nt, Artificial Sequence
  Synthetic
ucagugggccauuugucuuuuca

SEQ ID NO: 475447 - RNA, 24 nt, Artificial Sequence
  Synthetic
cucagugggccauuugucuuuuca

SEQ ID NO: 475448 - RNA, 18 nt, Artificial Sequence
  Synthetic
ucuguaguuuucuuuuca

SEQ ID NO: 475449 - RNA, 19 nt, Artificial Sequence
  Synthetic
aucuguaguuuucuuuuca

SEQ ID NO: 475450 - RNA, 20 nt, Artificial Sequence
  Synthetic
gaucuguaguuuucuuuuca

SEQ ID NO: 475451 - RNA, 21 nt, Artificial Sequence
  Synthetic
agaucuguaguuuucuuuuca

SEQ ID NO: 475452 - RNA, 22 nt, Artificial Sequence
  Synthetic
cagaucuguaguuuucuuuuca

SEQ ID NO: 475453 - RNA, 23 nt, Artificial Sequence
  Synthetic
acagaucuguaguuuucuuuuca

SEQ ID NO: 475454 - RNA, 24 nt, Artificial Sequence
  Synthetic
uacagaucuguaguuuucuuuuca

SEQ ID NO: 475455 - RNA, 18 nt, Artificial Sequence
  Synthetic
ggccugguaaaguuuuca

SEQ ID NO: 475456 - RNA, 19 nt, Artificial Sequence
  Synthetic
aggccugguaaaguuuuca

SEQ ID NO: 475457 - RNA, 20 nt, Artificial Sequence
  Synthetic
gaggccugguaaaguuuuca

SEQ ID NO: 475458 - RNA, 21 nt, Artificial Sequence
  Synthetic
ugaggccugguaaaguuuuca

SEQ ID NO: 475459 - RNA, 22 nt, Artificial Sequence
  Synthetic
uugaggccugguaaaguuuuca

SEQ ID NO: 475460 - RNA, 23 nt, Artificial Sequence
  Synthetic
cuugaggccugguaaaguuuuca

SEQ ID NO: 475461 - RNA, 24 nt, Artificial Sequence
  Synthetic
ccuugaggccugguaaaguuuuca

SEQ ID NO: 475462 - RNA, 18 nt, Artificial Sequence
  Synthetic
guggccauucuguuuuca

SEQ ID NO: 475463 - RNA, 19 nt, Artificial Sequence
  Synthetic
aguggccauucuguuuuca

SEQ ID NO: 475464 - RNA, 20 nt, Artificial Sequence
  Synthetic
aaguggccauucuguuuuca

SEQ ID NO: 475465 - RNA, 21 nt, Artificial Sequence
  Synthetic
uaaguggccauucuguuuuca

SEQ ID NO: 475466 - RNA, 22 nt, Artificial Sequence
  Synthetic
cuaaguggccauucuguuuuca

SEQ ID NO: 475467 - RNA, 23 nt, Artificial Sequence
  Synthetic
ucuaaguggccauucuguuuuca

SEQ ID NO: 475468 - RNA, 24 nt, Artificial Sequence
  Synthetic
uucuaaguggccauucuguuuuca

SEQ ID NO: 475469 - RNA, 18 nt, Artificial Sequence
  Synthetic
uaccucucauuguuuuca

SEQ ID NO: 475470 - RNA, 19 nt, Artificial Sequence
  Synthetic
guaccucucauuguuuuca

SEQ ID NO: 475471 - RNA, 20 nt, Artificial Sequence
  Synthetic
uguaccucucauuguuuuca

SEQ ID NO: 475472 - RNA, 21 nt, Artificial Sequence
  Synthetic
auguaccucucauuguuuuca

SEQ ID NO: 475473 - RNA, 22 nt, Artificial Sequence
  Synthetic
cauguaccucucauuguuuuca

SEQ ID NO: 475474 - RNA, 23 nt, Artificial Sequence
  Synthetic
ccauguaccucucauuguuuuca

SEQ ID NO: 475475 - RNA, 24 nt, Artificial Sequence
  Synthetic
uccauguaccucucauuguuuuca

SEQ ID NO: 475476 - RNA, 18 nt, Artificial Sequence
  Synthetic
aguaacuuaaauuuuuca

SEQ ID NO: 475477 - RNA, 19 nt, Artificial Sequence
  Synthetic
uaguaacuuaaauuuuuca

SEQ ID NO: 475478 - RNA, 20 nt, Artificial Sequence
  Synthetic
auaguaacuuaaauuuuuca

SEQ ID NO: 475479 - RNA, 21 nt, Artificial Sequence
  Synthetic
aauaguaacuuaaauuuuuca

SEQ ID NO: 475480 - RNA, 22 nt, Artificial Sequence
  Synthetic
uaauaguaacuuaaauuuuuca

SEQ ID NO: 475481 - RNA, 23 nt, Artificial Sequence
  Synthetic
auaauaguaacuuaaauuuuuca

SEQ ID NO: 475482 - RNA, 24 nt, Artificial Sequence
  Synthetic
aauaauaguaacuuaaauuuuuca

SEQ ID NO: 475483 - RNA, 18 nt, Artificial Sequence
  Synthetic
gaagaaucuaauuuuuca

SEQ ID NO: 475484 - RNA, 19 nt, Artificial Sequence
  Synthetic
ugaagaaucuaauuuuuca

SEQ ID NO: 475485 - RNA, 20 nt, Artificial Sequence
  Synthetic
cugaagaaucuaauuuuuca

SEQ ID NO: 475486 - RNA, 21 nt, Artificial Sequence
  Synthetic
acugaagaaucuaauuuuuca

SEQ ID NO: 475487 - RNA, 22 nt, Artificial Sequence
  Synthetic
uacugaagaaucuaauuuuuca

SEQ ID NO: 475488 - RNA, 23 nt, Artificial Sequence
  Synthetic
auacugaagaaucuaauuuuuca

SEQ ID NO: 475489 - RNA, 24 nt, Artificial Sequence
  Synthetic
uauacugaagaaucuaauuuuuca

SEQ ID NO: 475490 - RNA, 18 nt, Artificial Sequence
  Synthetic
uuuacuuaccauuuuuca

SEQ ID NO: 475491 - RNA, 19 nt, Artificial Sequence
  Synthetic
uuuuacuuaccauuuuuca

SEQ ID NO: 475492 - RNA, 20 nt, Artificial Sequence
  Synthetic
auuuuacuuaccauuuuuca

SEQ ID NO: 475493 - RNA, 21 nt, Artificial Sequence
  Synthetic
cauuuuacuuaccauuuuuca

SEQ ID NO: 475494 - RNA, 22 nt, Artificial Sequence
  Synthetic
ucauuuuacuuaccauuuuuca

SEQ ID NO: 475495 - RNA, 23 nt, Artificial Sequence
  Synthetic
cucauuuuacuuaccauuuuuca

SEQ ID NO: 475496 - RNA, 24 nt, Artificial Sequence
  Synthetic
ucucauuuuacuuaccauuuuuca

SEQ ID NO: 475497 - RNA, 18 nt, Artificial Sequence
  Synthetic
cuuuugucucauuuuuca

SEQ ID NO: 475498 - RNA, 19 nt, Artificial Sequence
  Synthetic
acuuuugucucauuuuuca

SEQ ID NO: 475499 - RNA, 20 nt, Artificial Sequence
  Synthetic
gacuuuugucucauuuuuca

SEQ ID NO: 475500 - RNA, 21 nt, Artificial Sequence
  Synthetic
ugacuuuugucucauuuuuca

SEQ ID NO: 475501 - RNA, 22 nt, Artificial Sequence
  Synthetic
cugacuuuugucucauuuuuca

SEQ ID NO: 475502 - RNA, 23 nt, Artificial Sequence
  Synthetic
acugacuuuugucucauuuuuca

SEQ ID NO: 475503 - RNA, 24 nt, Artificial Sequence
  Synthetic
cacugacuuuugucucauuuuuca

SEQ ID NO: 475504 - RNA, 18 nt, Artificial Sequence
  Synthetic
cugcguuuucauuuuuca

SEQ ID NO: 475505 - RNA, 19 nt, Artificial Sequence
  Synthetic
ccugcguuuucauuuuuca

SEQ ID NO: 475506 - RNA, 20 nt, Artificial Sequence
  Synthetic
cccugcguuuucauuuuuca

SEQ ID NO: 475507 - RNA, 21 nt, Artificial Sequence
  Synthetic
gcccugcguuuucauuuuuca

SEQ ID NO: 475508 - RNA, 22 nt, Artificial Sequence
  Synthetic
ggcccugcguuuucauuuuuca

SEQ ID NO: 475509 - RNA, 23 nt, Artificial Sequence
  Synthetic
gggcccugcguuuucauuuuuca

SEQ ID NO: 475510 - RNA, 24 nt, Artificial Sequence
  Synthetic
agggcccugcguuuucauuuuuca

SEQ ID NO: 475511 - RNA, 18 nt, Artificial Sequence
  Synthetic
accacacuauauuuuuca

SEQ ID NO: 475512 - RNA, 19 nt, Artificial Sequence
  Synthetic
uaccacacuauauuuuuca

SEQ ID NO: 475513 - RNA, 20 nt, Artificial Sequence
  Synthetic
uuaccacacuauauuuuuca

SEQ ID NO: 475514 - RNA, 21 nt, Artificial Sequence
  Synthetic
auuaccacacuauauuuuuca

SEQ ID NO: 475515 - RNA, 22 nt, Artificial Sequence
  Synthetic
aauuaccacacuauauuuuuca

SEQ ID NO: 475516 - RNA, 23 nt, Artificial Sequence
  Synthetic
aaauuaccacacuauauuuuuca

SEQ ID NO: 475517 - RNA, 24 nt, Artificial Sequence
  Synthetic
uaaauuaccacacuauauuuuuca

SEQ ID NO: 475518 - RNA, 18 nt, Artificial Sequence
  Synthetic
ugcaaaucaccuuuuuca

SEQ ID NO: 475519 - RNA, 19 nt, Artificial Sequence
  Synthetic
augcaaaucaccuuuuuca

SEQ ID NO: 475520 - RNA, 20 nt, Artificial Sequence
  Synthetic
uaugcaaaucaccuuuuuca

SEQ ID NO: 475521 - RNA, 21 nt, Artificial Sequence
  Synthetic
auaugcaaaucaccuuuuuca

SEQ ID NO: 475522 - RNA, 22 nt, Artificial Sequence
  Synthetic
uauaugcaaaucaccuuuuuca

SEQ ID NO: 475523 - RNA, 23 nt, Artificial Sequence
  Synthetic
auauaugcaaaucaccuuuuuca

SEQ ID NO: 475524 - RNA, 24 nt, Artificial Sequence
  Synthetic
aauauaugcaaaucaccuuuuuca

SEQ ID NO: 475525 - RNA, 18 nt, Artificial Sequence
  Synthetic
ccaccagggucuuuuuca

SEQ ID NO: 475526 - RNA, 19 nt, Artificial Sequence
  Synthetic
uccaccagggucuuuuuca

SEQ ID NO: 475527 - RNA, 20 nt, Artificial Sequence
  Synthetic
cuccaccagggucuuuuuca

SEQ ID NO: 475528 - RNA, 21 nt, Artificial Sequence
  Synthetic
ucuccaccagggucuuuuuca

SEQ ID NO: 475529 - RNA, 22 nt, Artificial Sequence
  Synthetic
uucuccaccagggucuuuuuca

SEQ ID NO: 475530 - RNA, 23 nt, Artificial Sequence
  Synthetic
uuucuccaccagggucuuuuuca

SEQ ID NO: 475531 - RNA, 24 nt, Artificial Sequence
  Synthetic
cuuucuccaccagggucuuuuuca

SEQ ID NO: 475532 - RNA, 18 nt, Artificial Sequence
  Synthetic
gguucaagaaguuuuuca

SEQ ID NO: 475533 - RNA, 19 nt, Artificial Sequence
  Synthetic
ugguucaagaaguuuuuca

SEQ ID NO: 475534 - RNA, 20 nt, Artificial Sequence
  Synthetic
gugguucaagaaguuuuuca

SEQ ID NO: 475535 - RNA, 21 nt, Artificial Sequence
  Synthetic
ggugguucaagaaguuuuuca

SEQ ID NO: 475536 - RNA, 22 nt, Artificial Sequence
  Synthetic
uggugguucaagaaguuuuuca

SEQ ID NO: 475537 - RNA, 23 nt, Artificial Sequence
  Synthetic
guggugguucaagaaguuuuuca

SEQ ID NO: 475538 - RNA, 24 nt, Artificial Sequence
  Synthetic
aguggugguucaagaaguuuuuca

SEQ ID NO: 475539 - RNA, 18 nt, Artificial Sequence
  Synthetic
gcguuccuaaguuuuuca

SEQ ID NO: 475540 - RNA, 19 nt, Artificial Sequence
  Synthetic
ggcguuccuaaguuuuuca

SEQ ID NO: 475541 - RNA, 20 nt, Artificial Sequence
  Synthetic
uggcguuccuaaguuuuuca

SEQ ID NO: 475542 - RNA, 21 nt, Artificial Sequence
  Synthetic
cuggcguuccuaaguuuuuca

SEQ ID NO: 475543 - RNA, 22 nt, Artificial Sequence
  Synthetic
acuggcguuccuaaguuuuuca

SEQ ID NO: 475544 - RNA, 23 nt, Artificial Sequence
  Synthetic
aacuggcguuccuaaguuuuuca

SEQ ID NO: 475545 - RNA, 24 nt, Artificial Sequence
  Synthetic
gaacuggcguuccuaaguuuuuca

SEQ ID NO: 475546 - RNA, 18 nt, Artificial Sequence
  Synthetic
uaacugcaggguuuuuca

SEQ ID NO: 475547 - RNA, 19 nt, Artificial Sequence
  Synthetic
auaacugcaggguuuuuca

SEQ ID NO: 475548 - RNA, 20 nt, Artificial Sequence
  Synthetic
gauaacugcaggguuuuuca

SEQ ID NO: 475549 - RNA, 21 nt, Artificial Sequence
  Synthetic
ugauaacugcaggguuuuuca

SEQ ID NO: 475550 - RNA, 22 nt, Artificial Sequence
  Synthetic
augauaacugcaggguuuuuca

SEQ ID NO: 475551 - RNA, 23 nt, Artificial Sequence
  Synthetic
uaugauaacugcaggguuuuuca

SEQ ID NO: 475552 - RNA, 24 nt, Artificial Sequence
  Synthetic
auaugauaacugcaggguuuuuca

SEQ ID NO: 475553 - RNA, 18 nt, Artificial Sequence
  Synthetic
ucauaauuauguuuuuca

SEQ ID NO: 475554 - RNA, 19 nt, Artificial Sequence
  Synthetic
gucauaauuauguuuuuca

SEQ ID NO: 475555 - RNA, 20 nt, Artificial Sequence
  Synthetic
ugucauaauuauguuuuuca

SEQ ID NO: 475556 - RNA, 21 nt, Artificial Sequence
  Synthetic
gugucauaauuauguuuuuca

SEQ ID NO: 475557 - RNA, 22 nt, Artificial Sequence
  Synthetic
ugugucauaauuauguuuuuca

SEQ ID NO: 475558 - RNA, 23 nt, Artificial Sequence
  Synthetic
augugucauaauuauguuuuuca

SEQ ID NO: 475559 - RNA, 24 nt, Artificial Sequence
  Synthetic
caugugucauaauuauguuuuuca

SEQ ID NO: 475560 - RNA, 18 nt, Artificial Sequence
  Synthetic
acuugucuucuuuuuuca

SEQ ID NO: 475561 - RNA, 19 nt, Artificial Sequence
  Synthetic
aacuugucuucuuuuuuca

SEQ ID NO: 475562 - RNA, 20 nt, Artificial Sequence
  Synthetic
aaacuugucuucuuuuuuca

SEQ ID NO: 475563 - RNA, 21 nt, Artificial Sequence
  Synthetic
aaaacuugucuucuuuuuuca

SEQ ID NO: 475564 - RNA, 22 nt, Artificial Sequence
  Synthetic
uaaaacuugucuucuuuuuuca

SEQ ID NO: 475565 - RNA, 23 nt, Artificial Sequence
  Synthetic
auaaaacuugucuucuuuuuuca

SEQ ID NO: 475566 - RNA, 24 nt, Artificial Sequence
  Synthetic
aauaaaacuugucuucuuuuuuca

SEQ ID NO: 475567 - RNA, 18 nt, Artificial Sequence
  Synthetic
agcagaugauuuuuuuca

SEQ ID NO: 475568 - RNA, 19 nt, Artificial Sequence
  Synthetic
cagcagaugauuuuuuuca

SEQ ID NO: 475569 - RNA, 20 nt, Artificial Sequence
  Synthetic
gcagcagaugauuuuuuuca

SEQ ID NO: 475570 - RNA, 21 nt, Artificial Sequence
  Synthetic
agcagcagaugauuuuuuuca

SEQ ID NO: 475571 - RNA, 22 nt, Artificial Sequence
  Synthetic
cagcagcagaugauuuuuuuca

SEQ ID NO: 475572 - RNA, 23 nt, Artificial Sequence
  Synthetic
gcagcagcagaugauuuuuuuca

SEQ ID NO: 475573 - RNA, 24 nt, Artificial Sequence
  Synthetic
agcagcagcagaugauuuuuuuca

SEQ ID NO: 475574 - RNA, 18 nt, Artificial Sequence
  Synthetic
aaaaaaaaaaaaaaaaga

SEQ ID NO: 475575 - RNA, 21 nt, Artificial Sequence
  Synthetic
aaaaaaaaaaaaaaaaaaaga

SEQ ID NO: 475576 - RNA, 22 nt, Artificial Sequence
  Synthetic
aaaaaaaaaaaaaaaaaaaaga

SEQ ID NO: 475577 - RNA, 23 nt, Artificial Sequence
  Synthetic
aaaaaaaaaaaaaaaaaaaaaga

SEQ ID NO: 475578 - RNA, 24 nt, Artificial Sequence
  Synthetic
aaaaaaaaaaaaaaaaaaaaaaga

SEQ ID NO: 475579 - RNA, 21 nt, Artificial Sequence
  Synthetic
caaaaaaaaaaaaaaaaaaga

SEQ ID NO: 475580 - RNA, 22 nt, Artificial Sequence
  Synthetic
ucaaaaaaaaaaaaaaaaaaga

SEQ ID NO: 475581 - RNA, 23 nt, Artificial Sequence
  Synthetic
cucaaaaaaaaaaaaaaaaaaga

SEQ ID NO: 475582 - RNA, 24 nt, Artificial Sequence
  Synthetic
ucucaaaaaaaaaaaaaaaaaaga

SEQ ID NO: 475583 - RNA, 19 nt, Artificial Sequence
  Synthetic
uaaaaaaaaaaaaaaaaga

SEQ ID NO: 475584 - RNA, 20 nt, Artificial Sequence
  Synthetic
cuaaaaaaaaaaaaaaaaga

SEQ ID NO: 475585 - RNA, 21 nt, Artificial Sequence
  Synthetic
ucuaaaaaaaaaaaaaaaaga

SEQ ID NO: 475586 - RNA, 22 nt, Artificial Sequence
  Synthetic
aucuaaaaaaaaaaaaaaaaga

SEQ ID NO: 475587 - RNA, 23 nt, Artificial Sequence
  Synthetic
caucuaaaaaaaaaaaaaaaaga

SEQ ID NO: 475588 - RNA, 24 nt, Artificial Sequence
  Synthetic
acaucuaaaaaaaaaaaaaaaaga

SEQ ID NO: 475589 - RNA, 18 nt, Artificial Sequence
  Synthetic
guauagaaaaaaaaaaga

SEQ ID NO: 475590 - RNA, 19 nt, Artificial Sequence
  Synthetic
aguauagaaaaaaaaaaga

SEQ ID NO: 475591 - RNA, 20 nt, Artificial Sequence
  Synthetic
uaguauagaaaaaaaaaaga

SEQ ID NO: 475592 - RNA, 21 nt, Artificial Sequence
  Synthetic
auaguauagaaaaaaaaaaga

SEQ ID NO: 475593 - RNA, 22 nt, Artificial Sequence
  Synthetic
aauaguauagaaaaaaaaaaga

SEQ ID NO: 475594 - RNA, 23 nt, Artificial Sequence
  Synthetic
aaauaguauagaaaaaaaaaaga

SEQ ID NO: 475595 - RNA, 24 nt, Artificial Sequence
  Synthetic
aaaauaguauagaaaaaaaaaaga

SEQ ID NO: 475596 - RNA, 18 nt, Artificial Sequence
  Synthetic
cagucucaaaaaaaaaga

SEQ ID NO: 475597 - RNA, 19 nt, Artificial Sequence
  Synthetic
ucagucucaaaaaaaaaga

SEQ ID NO: 475598 - RNA, 20 nt, Artificial Sequence
  Synthetic
cucagucucaaaaaaaaaga

SEQ ID NO: 475599 - RNA, 21 nt, Artificial Sequence
  Synthetic
acucagucucaaaaaaaaaga

SEQ ID NO: 475600 - RNA, 22 nt, Artificial Sequence
  Synthetic
gacucagucucaaaaaaaaaga

SEQ ID NO: 475601 - RNA, 23 nt, Artificial Sequence
  Synthetic
agacucagucucaaaaaaaaaga

SEQ ID NO: 475602 - RNA, 24 nt, Artificial Sequence
  Synthetic
aagacucagucucaaaaaaaaaga

SEQ ID NO: 475603 - RNA, 18 nt, Artificial Sequence
  Synthetic
agaaaaagaaaaaaaaga

SEQ ID NO: 475604 - RNA, 19 nt, Artificial Sequence
  Synthetic
aagaaaaagaaaaaaaaga

SEQ ID NO: 475605 - RNA, 20 nt, Artificial Sequence
  Synthetic
aaagaaaaagaaaaaaaaga

SEQ ID NO: 475606 - RNA, 21 nt, Artificial Sequence
  Synthetic
aaaagaaaaagaaaaaaaaga

SEQ ID NO: 475607 - RNA, 22 nt, Artificial Sequence
  Synthetic
aaaaagaaaaagaaaaaaaaga

SEQ ID NO: 475608 - RNA, 23 nt, Artificial Sequence
  Synthetic
gaaaaagaaaaagaaaaaaaaga

SEQ ID NO: 475609 - RNA, 24 nt, Artificial Sequence
  Synthetic
agaaaaagaaaaagaaaaaaaaga

SEQ ID NO: 475610 - RNA, 18 nt, Artificial Sequence
  Synthetic
aaagauagaaaaaaaaga

SEQ ID NO: 475611 - RNA, 19 nt, Artificial Sequence
  Synthetic
gaaagauagaaaaaaaaga

SEQ ID NO: 475612 - RNA, 20 nt, Artificial Sequence
  Synthetic
agaaagauagaaaaaaaaga

SEQ ID NO: 475613 - RNA, 21 nt, Artificial Sequence
  Synthetic
aagaaagauagaaaaaaaaga

SEQ ID NO: 475614 - RNA, 22 nt, Artificial Sequence
  Synthetic
aaagaaagauagaaaaaaaaga

SEQ ID NO: 475615 - RNA, 23 nt, Artificial Sequence
  Synthetic
gaaagaaagauagaaaaaaaaga

SEQ ID NO: 475616 - RNA, 24 nt, Artificial Sequence
  Synthetic
agaaagaaagauagaaaaaaaaga

SEQ ID NO: 475617 - RNA, 18 nt, Artificial Sequence
  Synthetic
cucggccacaaaaaaaga

SEQ ID NO: 475618 - RNA, 19 nt, Artificial Sequence
  Synthetic
acucggccacaaaaaaaga

SEQ ID NO: 475619 - RNA, 20 nt, Artificial Sequence
  Synthetic
uacucggccacaaaaaaaga

SEQ ID NO: 475620 - RNA, 21 nt, Artificial Sequence
  Synthetic
uuacucggccacaaaaaaaga

SEQ ID NO: 475621 - RNA, 22 nt, Artificial Sequence
  Synthetic
auuacucggccacaaaaaaaga

SEQ ID NO: 475622 - RNA, 23 nt, Artificial Sequence
  Synthetic
uauuacucggccacaaaaaaaga

SEQ ID NO: 475623 - RNA, 24 nt, Artificial Sequence
  Synthetic
uuauuacucggccacaaaaaaaga

SEQ ID NO: 475624 - RNA, 18 nt, Artificial Sequence
  Synthetic
cuaauaaagaaaaaaaga

SEQ ID NO: 475625 - RNA, 19 nt, Artificial Sequence
  Synthetic
acuaauaaagaaaaaaaga

SEQ ID NO: 475626 - RNA, 20 nt, Artificial Sequence
  Synthetic
gacuaauaaagaaaaaaaga

SEQ ID NO: 475627 - RNA, 21 nt, Artificial Sequence
  Synthetic
agacuaauaaagaaaaaaaga

SEQ ID NO: 475628 - RNA, 22 nt, Artificial Sequence
  Synthetic
aagacuaauaaagaaaaaaaga

SEQ ID NO: 475629 - RNA, 23 nt, Artificial Sequence
  Synthetic
caagacuaauaaagaaaaaaaga

SEQ ID NO: 475630 - RNA, 24 nt, Artificial Sequence
  Synthetic
gcaagacuaauaaagaaaaaaaga

SEQ ID NO: 475631 - RNA, 18 nt, Artificial Sequence
  Synthetic
uuaaccaagaaaaaaaga

SEQ ID NO: 475632 - RNA, 19 nt, Artificial Sequence
  Synthetic
auuaaccaagaaaaaaaga

SEQ ID NO: 475633 - RNA, 20 nt, Artificial Sequence
  Synthetic
gauuaaccaagaaaaaaaga

SEQ ID NO: 475634 - RNA, 21 nt, Artificial Sequence
  Synthetic
agauuaaccaagaaaaaaaga

SEQ ID NO: 475635 - RNA, 22 nt, Artificial Sequence
  Synthetic
uagauuaaccaagaaaaaaaga

SEQ ID NO: 475636 - RNA, 23 nt, Artificial Sequence
  Synthetic
uuagauuaaccaagaaaaaaaga

SEQ ID NO: 475637 - RNA, 24 nt, Artificial Sequence
  Synthetic
guuagauuaaccaagaaaaaaaga

SEQ ID NO: 475638 - RNA, 18 nt, Artificial Sequence
  Synthetic
aaaaaaaggaaaaaaaga

SEQ ID NO: 475639 - RNA, 19 nt, Artificial Sequence
  Synthetic
caaaaaaaggaaaaaaaga

SEQ ID NO: 475640 - RNA, 20 nt, Artificial Sequence
  Synthetic
ucaaaaaaaggaaaaaaaga

SEQ ID NO: 475641 - RNA, 21 nt, Artificial Sequence
  Synthetic
cucaaaaaaaggaaaaaaaga

SEQ ID NO: 475642 - RNA, 22 nt, Artificial Sequence
  Synthetic
ucucaaaaaaaggaaaaaaaga

SEQ ID NO: 475643 - RNA, 23 nt, Artificial Sequence
  Synthetic
aucucaaaaaaaggaaaaaaaga

SEQ ID NO: 475644 - RNA, 24 nt, Artificial Sequence
  Synthetic
caucucaaaaaaaggaaaaaaaga

SEQ ID NO: 475645 - RNA, 18 nt, Artificial Sequence
  Synthetic
aaguagaugaaaaaaaga

SEQ ID NO: 475646 - RNA, 19 nt, Artificial Sequence
  Synthetic
uaaguagaugaaaaaaaga

SEQ ID NO: 475647 - RNA, 20 nt, Artificial Sequence
  Synthetic
auaaguagaugaaaaaaaga

SEQ ID NO: 475648 - RNA, 21 nt, Artificial Sequence
  Synthetic
cauaaguagaugaaaaaaaga

SEQ ID NO: 475649 - RNA, 22 nt, Artificial Sequence
  Synthetic
acauaaguagaugaaaaaaaga

SEQ ID NO: 475650 - RNA, 23 nt, Artificial Sequence
  Synthetic
cacauaaguagaugaaaaaaaga

SEQ ID NO: 475651 - RNA, 24 nt, Artificial Sequence
  Synthetic
ucacauaaguagaugaaaaaaaga

SEQ ID NO: 475652 - RNA, 18 nt, Artificial Sequence
  Synthetic
cguagccauaaaaaaaga

SEQ ID NO: 475653 - RNA, 19 nt, Artificial Sequence
  Synthetic
acguagccauaaaaaaaga

SEQ ID NO: 475654 - RNA, 20 nt, Artificial Sequence
  Synthetic
uacguagccauaaaaaaaga

SEQ ID NO: 475655 - RNA, 21 nt, Artificial Sequence
  Synthetic
cuacguagccauaaaaaaaga

SEQ ID NO: 475656 - RNA, 22 nt, Artificial Sequence
  Synthetic
acuacguagccauaaaaaaaga

SEQ ID NO: 475657 - RNA, 23 nt, Artificial Sequence
  Synthetic
uacuacguagccauaaaaaaaga

SEQ ID NO: 475658 - RNA, 24 nt, Artificial Sequence
  Synthetic
auacuacguagccauaaaaaaaga

SEQ ID NO: 475659 - RNA, 18 nt, Artificial Sequence
  Synthetic
uuccacaguaaaaaaaga

SEQ ID NO: 475660 - RNA, 19 nt, Artificial Sequence
  Synthetic
uuuccacaguaaaaaaaga

SEQ ID NO: 475661 - RNA, 20 nt, Artificial Sequence
  Synthetic
guuuccacaguaaaaaaaga

SEQ ID NO: 475662 - RNA, 21 nt, Artificial Sequence
  Synthetic
aguuuccacaguaaaaaaaga

SEQ ID NO: 475663 - RNA, 22 nt, Artificial Sequence
  Synthetic
uaguuuccacaguaaaaaaaga

SEQ ID NO: 475664 - RNA, 23 nt, Artificial Sequence
  Synthetic
cuaguuuccacaguaaaaaaaga

SEQ ID NO: 475665 - RNA, 24 nt, Artificial Sequence
  Synthetic
acuaguuuccacaguaaaaaaaga

SEQ ID NO: 475666 - RNA, 18 nt, Artificial Sequence
  Synthetic
acucagccacaaaaaaga

SEQ ID NO: 475667 - RNA, 19 nt, Artificial Sequence
  Synthetic
uacucagccacaaaaaaga

SEQ ID NO: 475668 - RNA, 20 nt, Artificial Sequence
  Synthetic
cuacucagccacaaaaaaga

SEQ ID NO: 475669 - RNA, 21 nt, Artificial Sequence
  Synthetic
acuacucagccacaaaaaaga

SEQ ID NO: 475670 - RNA, 22 nt, Artificial Sequence
  Synthetic
uacuacucagccacaaaaaaga

SEQ ID NO: 475671 - RNA, 23 nt, Artificial Sequence
  Synthetic
auacuacucagccacaaaaaaga

SEQ ID NO: 475672 - RNA, 24 nt, Artificial Sequence
  Synthetic
aauacuacucagccacaaaaaaga

SEQ ID NO: 475673 - RNA, 18 nt, Artificial Sequence
  Synthetic
cccaccccccaaaaaaga

SEQ ID NO: 475674 - RNA, 19 nt, Artificial Sequence
  Synthetic
acccaccccccaaaaaaga

SEQ ID NO: 475675 - RNA, 20 nt, Artificial Sequence
  Synthetic
uacccaccccccaaaaaaga

SEQ ID NO: 475676 - RNA, 21 nt, Artificial Sequence
  Synthetic
uuacccaccccccaaaaaaga

SEQ ID NO: 475677 - RNA, 22 nt, Artificial Sequence
  Synthetic
cuuacccaccccccaaaaaaga

SEQ ID NO: 475678 - RNA, 23 nt, Artificial Sequence
  Synthetic
ccuuacccaccccccaaaaaaga

SEQ ID NO: 475679 - RNA, 24 nt, Artificial Sequence
  Synthetic
cccuuacccaccccccaaaaaaga

SEQ ID NO: 475680 - RNA, 18 nt, Artificial Sequence
  Synthetic
aauguggaucaaaaaaga

SEQ ID NO: 475681 - RNA, 19 nt, Artificial Sequence
  Synthetic
caauguggaucaaaaaaga

SEQ ID NO: 475682 - RNA, 20 nt, Artificial Sequence
  Synthetic
acaauguggaucaaaaaaga

SEQ ID NO: 475683 - RNA, 21 nt, Artificial Sequence
  Synthetic
aacaauguggaucaaaaaaga

SEQ ID NO: 475684 - RNA, 22 nt, Artificial Sequence
  Synthetic
aaacaauguggaucaaaaaaga

SEQ ID NO: 475685 - RNA, 23 nt, Artificial Sequence
  Synthetic
uaaacaauguggaucaaaaaaga

SEQ ID NO: 475686 - RNA, 24 nt, Artificial Sequence
  Synthetic
auaaacaauguggaucaaaaaaga

SEQ ID NO: 475687 - RNA, 18 nt, Artificial Sequence
  Synthetic
acacacaaagaaaaaaga

SEQ ID NO: 475688 - RNA, 19 nt, Artificial Sequence
  Synthetic
cacacacaaagaaaaaaga

SEQ ID NO: 475689 - RNA, 20 nt, Artificial Sequence
  Synthetic
acacacacaaagaaaaaaga

SEQ ID NO: 475690 - RNA, 21 nt, Artificial Sequence
  Synthetic
cacacacacaaagaaaaaaga

SEQ ID NO: 475691 - RNA, 22 nt, Artificial Sequence
  Synthetic
acacacacacaaagaaaaaaga

SEQ ID NO: 475692 - RNA, 23 nt, Artificial Sequence
  Synthetic
cacacacacacaaagaaaaaaga

SEQ ID NO: 475693 - RNA, 24 nt, Artificial Sequence
  Synthetic
acacacacacacaaagaaaaaaga

SEQ ID NO: 475694 - RNA, 18 nt, Artificial Sequence
  Synthetic
gugcagccagaaaaaaga

SEQ ID NO: 475695 - RNA, 19 nt, Artificial Sequence
  Synthetic
ugugcagccagaaaaaaga

SEQ ID NO: 475696 - RNA, 20 nt, Artificial Sequence
  Synthetic
cugugcagccagaaaaaaga

SEQ ID NO: 475697 - RNA, 21 nt, Artificial Sequence
  Synthetic
acugugcagccagaaaaaaga

SEQ ID NO: 475698 - RNA, 22 nt, Artificial Sequence
  Synthetic
uacugugcagccagaaaaaaga

SEQ ID NO: 475699 - RNA, 23 nt, Artificial Sequence
  Synthetic
auacugugcagccagaaaaaaga

SEQ ID NO: 475700 - RNA, 24 nt, Artificial Sequence
  Synthetic
aauacugugcagccagaaaaaaga

SEQ ID NO: 475701 - RNA, 18 nt, Artificial Sequence
  Synthetic
guauaauaauaaaaaaga

SEQ ID NO: 475702 - RNA, 19 nt, Artificial Sequence
  Synthetic
aguauaauaauaaaaaaga

SEQ ID NO: 475703 - RNA, 20 nt, Artificial Sequence
  Synthetic
aaguauaauaauaaaaaaga

SEQ ID NO: 475704 - RNA, 21 nt, Artificial Sequence
  Synthetic
aaaguauaauaauaaaaaaga

SEQ ID NO: 475705 - RNA, 22 nt, Artificial Sequence
  Synthetic
uaaaguauaauaauaaaaaaga

SEQ ID NO: 475706 - RNA, 23 nt, Artificial Sequence
  Synthetic
uuaaaguauaauaauaaaaaaga

SEQ ID NO: 475707 - RNA, 24 nt, Artificial Sequence
  Synthetic
cuuaaaguauaauaauaaaaaaga

SEQ ID NO: 475708 - RNA, 18 nt, Artificial Sequence
  Synthetic
accaucauauaaaaaaga

SEQ ID NO: 475709 - RNA, 19 nt, Artificial Sequence
  Synthetic
aaccaucauauaaaaaaga

SEQ ID NO: 475710 - RNA, 20 nt, Artificial Sequence
  Synthetic
uaaccaucauauaaaaaaga

SEQ ID NO: 475711 - RNA, 21 nt, Artificial Sequence
  Synthetic
cuaaccaucauauaaaaaaga

SEQ ID NO: 475712 - RNA, 22 nt, Artificial Sequence
  Synthetic
ucuaaccaucauauaaaaaaga

SEQ ID NO: 475713 - RNA, 23 nt, Artificial Sequence
  Synthetic
aucuaaccaucauauaaaaaaga

SEQ ID NO: 475714 - RNA, 24 nt, Artificial Sequence
  Synthetic
gaucuaaccaucauauaaaaaaga

SEQ ID NO: 475715 - RNA, 18 nt, Artificial Sequence
  Synthetic
gagauacacuaaaaaaga

SEQ ID NO: 475716 - RNA, 19 nt, Artificial Sequence
  Synthetic
agagauacacuaaaaaaga

SEQ ID NO: 475717 - RNA, 20 nt, Artificial Sequence
  Synthetic
aagagauacacuaaaaaaga

SEQ ID NO: 475718 - RNA, 21 nt, Artificial Sequence
  Synthetic
aaagagauacacuaaaaaaga

SEQ ID NO: 475719 - RNA, 22 nt, Artificial Sequence
  Synthetic
gaaagagauacacuaaaaaaga

SEQ ID NO: 475720 - RNA, 23 nt, Artificial Sequence
  Synthetic
ugaaagagauacacuaaaaaaga

SEQ ID NO: 475721 - RNA, 24 nt, Artificial Sequence
  Synthetic
augaaagagauacacuaaaaaaga

SEQ ID NO: 475722 - RNA, 18 nt, Artificial Sequence
  Synthetic
aaaacucccacaaaaaga

SEQ ID NO: 475723 - RNA, 19 nt, Artificial Sequence
  Synthetic
uaaaacucccacaaaaaga

SEQ ID NO: 475724 - RNA, 20 nt, Artificial Sequence
  Synthetic
auaaaacucccacaaaaaga

SEQ ID NO: 475725 - RNA, 21 nt, Artificial Sequence
  Synthetic
gauaaaacucccacaaaaaga

SEQ ID NO: 475726 - RNA, 22 nt, Artificial Sequence
  Synthetic
ggauaaaacucccacaaaaaga

SEQ ID NO: 475727 - RNA, 23 nt, Artificial Sequence
  Synthetic
aggauaaaacucccacaaaaaga

SEQ ID NO: 475728 - RNA, 24 nt, Artificial Sequence
  Synthetic
aaggauaaaacucccacaaaaaga

SEQ ID NO: 475729 - RNA, 18 nt, Artificial Sequence
  Synthetic
gaggaaaagacaaaaaga

SEQ ID NO: 475730 - RNA, 19 nt, Artificial Sequence
  Synthetic
agaggaaaagacaaaaaga

SEQ ID NO: 475731 - RNA, 20 nt, Artificial Sequence
  Synthetic
uagaggaaaagacaaaaaga

SEQ ID NO: 475732 - RNA, 21 nt, Artificial Sequence
  Synthetic
cuagaggaaaagacaaaaaga

SEQ ID NO: 475733 - RNA, 22 nt, Artificial Sequence
  Synthetic
acuagaggaaaagacaaaaaga

SEQ ID NO: 475734 - RNA, 23 nt, Artificial Sequence
  Synthetic
gacuagaggaaaagacaaaaaga

SEQ ID NO: 475735 - RNA, 24 nt, Artificial Sequence
  Synthetic
agacuagaggaaaagacaaaaaga

SEQ ID NO: 475736 - RNA, 18 nt, Artificial Sequence
  Synthetic
aaguuucauacaaaaaga

SEQ ID NO: 475737 - RNA, 19 nt, Artificial Sequence
  Synthetic
uaaguuucauacaaaaaga

SEQ ID NO: 475738 - RNA, 20 nt, Artificial Sequence
  Synthetic
auaaguuucauacaaaaaga

SEQ ID NO: 475739 - RNA, 21 nt, Artificial Sequence
  Synthetic
aauaaguuucauacaaaaaga

SEQ ID NO: 475740 - RNA, 22 nt, Artificial Sequence
  Synthetic
gaauaaguuucauacaaaaaga

SEQ ID NO: 475741 - RNA, 23 nt, Artificial Sequence
  Synthetic
ggaauaaguuucauacaaaaaga

SEQ ID NO: 475742 - RNA, 24 nt, Artificial Sequence
  Synthetic
uggaauaaguuucauacaaaaaga

SEQ ID NO: 475743 - RNA, 18 nt, Artificial Sequence
  Synthetic
uguuugucuacaaaaaga

SEQ ID NO: 475744 - RNA, 19 nt, Artificial Sequence
  Synthetic
auguuugucuacaaaaaga

SEQ ID NO: 475745 - RNA, 20 nt, Artificial Sequence
  Synthetic
cauguuugucuacaaaaaga

SEQ ID NO: 475746 - RNA, 21 nt, Artificial Sequence
  Synthetic
gcauguuugucuacaaaaaga

SEQ ID NO: 475747 - RNA, 22 nt, Artificial Sequence
  Synthetic
ggcauguuugucuacaaaaaga

SEQ ID NO: 475748 - RNA, 23 nt, Artificial Sequence
  Synthetic
gggcauguuugucuacaaaaaga

SEQ ID NO: 475749 - RNA, 24 nt, Artificial Sequence
  Synthetic
agggcauguuugucuacaaaaaga

SEQ ID NO: 475750 - RNA, 18 nt, Artificial Sequence
  Synthetic
aggggaggagcaaaaaga

SEQ ID NO: 475751 - RNA, 19 nt, Artificial Sequence
  Synthetic
aaggggaggagcaaaaaga

SEQ ID NO: 475752 - RNA, 20 nt, Artificial Sequence
  Synthetic
aaaggggaggagcaaaaaga

SEQ ID NO: 475753 - RNA, 21 nt, Artificial Sequence
  Synthetic
uaaaggggaggagcaaaaaga

SEQ ID NO: 475754 - RNA, 22 nt, Artificial Sequence
  Synthetic
cuaaaggggaggagcaaaaaga

SEQ ID NO: 475755 - RNA, 23 nt, Artificial Sequence
  Synthetic
gcuaaaggggaggagcaaaaaga

SEQ ID NO: 475756 - RNA, 24 nt, Artificial Sequence
  Synthetic
ugcuaaaggggaggagcaaaaaga

SEQ ID NO: 475757 - RNA, 18 nt, Artificial Sequence
  Synthetic
gagggacuggcaaaaaga

SEQ ID NO: 475758 - RNA, 19 nt, Artificial Sequence
  Synthetic
ugagggacuggcaaaaaga

SEQ ID NO: 475759 - RNA, 20 nt, Artificial Sequence
  Synthetic
cugagggacuggcaaaaaga

SEQ ID NO: 475760 - RNA, 21 nt, Artificial Sequence
  Synthetic
acugagggacuggcaaaaaga

SEQ ID NO: 475761 - RNA, 22 nt, Artificial Sequence
  Synthetic
uacugagggacuggcaaaaaga

SEQ ID NO: 475762 - RNA, 23 nt, Artificial Sequence
  Synthetic
auacugagggacuggcaaaaaga

SEQ ID NO: 475763 - RNA, 24 nt, Artificial Sequence
  Synthetic
gauacugagggacuggcaaaaaga

SEQ ID NO: 475764 - RNA, 18 nt, Artificial Sequence
  Synthetic
aucaugauaucaaaaaga

SEQ ID NO: 475765 - RNA, 19 nt, Artificial Sequence
  Synthetic
caucaugauaucaaaaaga

SEQ ID NO: 475766 - RNA, 20 nt, Artificial Sequence
  Synthetic
ucaucaugauaucaaaaaga

SEQ ID NO: 475767 - RNA, 21 nt, Artificial Sequence
  Synthetic
uucaucaugauaucaaaaaga

SEQ ID NO: 475768 - RNA, 22 nt, Artificial Sequence
  Synthetic
guucaucaugauaucaaaaaga

SEQ ID NO: 475769 - RNA, 23 nt, Artificial Sequence
  Synthetic
uguucaucaugauaucaaaaaga

SEQ ID NO: 475770 - RNA, 24 nt, Artificial Sequence
  Synthetic
cuguucaucaugauaucaaaaaga

SEQ ID NO: 475771 - RNA, 18 nt, Artificial Sequence
  Synthetic
ugagaggcuucaaaaaga

SEQ ID NO: 475772 - RNA, 19 nt, Artificial Sequence
  Synthetic
augagaggcuucaaaaaga

SEQ ID NO: 475773 - RNA, 20 nt, Artificial Sequence
  Synthetic
aaugagaggcuucaaaaaga

SEQ ID NO: 475774 - RNA, 21 nt, Artificial Sequence
  Synthetic
gaaugagaggcuucaaaaaga

SEQ ID NO: 475775 - RNA, 22 nt, Artificial Sequence
  Synthetic
ugaaugagaggcuucaaaaaga

SEQ ID NO: 475776 - RNA, 23 nt, Artificial Sequence
  Synthetic
gugaaugagaggcuucaaaaaga

SEQ ID NO: 475777 - RNA, 24 nt, Artificial Sequence
  Synthetic
agugaaugagaggcuucaaaaaga

SEQ ID NO: 475778 - RNA, 18 nt, Artificial Sequence
  Synthetic
aaggcagaaagaaaaaga

SEQ ID NO: 475779 - RNA, 19 nt, Artificial Sequence
  Synthetic
aaaggcagaaagaaaaaga

SEQ ID NO: 475780 - RNA, 20 nt, Artificial Sequence
  Synthetic
gaaaggcagaaagaaaaaga

SEQ ID NO: 475781 - RNA, 21 nt, Artificial Sequence
  Synthetic
cgaaaggcagaaagaaaaaga

SEQ ID NO: 475782 - RNA, 22 nt, Artificial Sequence
  Synthetic
ccgaaaggcagaaagaaaaaga

SEQ ID NO: 475783 - RNA, 23 nt, Artificial Sequence
  Synthetic
uccgaaaggcagaaagaaaaaga

SEQ ID NO: 475784 - RNA, 24 nt, Artificial Sequence
  Synthetic
cuccgaaaggcagaaagaaaaaga

SEQ ID NO: 475785 - RNA, 18 nt, Artificial Sequence
  Synthetic
uucugguggagaaaaaga

SEQ ID NO: 475786 - RNA, 19 nt, Artificial Sequence
  Synthetic
guucugguggagaaaaaga

SEQ ID NO: 475787 - RNA, 20 nt, Artificial Sequence
  Synthetic
cguucugguggagaaaaaga

SEQ ID NO: 475788 - RNA, 21 nt, Artificial Sequence
  Synthetic
acguucugguggagaaaaaga

SEQ ID NO: 475789 - RNA, 22 nt, Artificial Sequence
  Synthetic
uacguucugguggagaaaaaga

SEQ ID NO: 475790 - RNA, 23 nt, Artificial Sequence
  Synthetic
auacguucugguggagaaaaaga

SEQ ID NO: 475791 - RNA, 24 nt, Artificial Sequence
  Synthetic
aauacguucugguggagaaaaaga

SEQ ID NO: 475792 - RNA, 18 nt, Artificial Sequence
  Synthetic
auuacuuugagaaaaaga

SEQ ID NO: 475793 - RNA, 19 nt, Artificial Sequence
  Synthetic
aauuacuuugagaaaaaga

SEQ ID NO: 475794 - RNA, 20 nt, Artificial Sequence
  Synthetic
caauuacuuugagaaaaaga

SEQ ID NO: 475795 - RNA, 21 nt, Artificial Sequence
  Synthetic
ucaauuacuuugagaaaaaga

SEQ ID NO: 475796 - RNA, 22 nt, Artificial Sequence
  Synthetic
uucaauuacuuugagaaaaaga

SEQ ID NO: 475797 - RNA, 23 nt, Artificial Sequence
  Synthetic
guucaauuacuuugagaaaaaga

SEQ ID NO: 475798 - RNA, 24 nt, Artificial Sequence
  Synthetic
uguucaauuacuuugagaaaaaga

SEQ ID NO: 475799 - RNA, 18 nt, Artificial Sequence
  Synthetic
gccaggcagggaaaaaga

SEQ ID NO: 475800 - RNA, 19 nt, Artificial Sequence
  Synthetic
agccaggcagggaaaaaga

SEQ ID NO: 475801 - RNA, 20 nt, Artificial Sequence
  Synthetic
uagccaggcagggaaaaaga

SEQ ID NO: 475802 - RNA, 21 nt, Artificial Sequence
  Synthetic
auagccaggcagggaaaaaga

SEQ ID NO: 475803 - RNA, 22 nt, Artificial Sequence
  Synthetic
gauagccaggcagggaaaaaga

SEQ ID NO: 475804 - RNA, 23 nt, Artificial Sequence
  Synthetic
agauagccaggcagggaaaaaga

SEQ ID NO: 475805 - RNA, 24 nt, Artificial Sequence
  Synthetic
uagauagccaggcagggaaaaaga

SEQ ID NO: 475806 - RNA, 18 nt, Artificial Sequence
  Synthetic
uuuaauccuggaaaaaga

SEQ ID NO: 475807 - RNA, 19 nt, Artificial Sequence
  Synthetic
uuuuaauccuggaaaaaga

SEQ ID NO: 475808 - RNA, 20 nt, Artificial Sequence
  Synthetic
auuuuaauccuggaaaaaga

SEQ ID NO: 475809 - RNA, 21 nt, Artificial Sequence
  Synthetic
aauuuuaauccuggaaaaaga

SEQ ID NO: 475810 - RNA, 22 nt, Artificial Sequence
  Synthetic
uaauuuuaauccuggaaaaaga

SEQ ID NO: 475811 - RNA, 23 nt, Artificial Sequence
  Synthetic
auaauuuuaauccuggaaaaaga

SEQ ID NO: 475812 - RNA, 24 nt, Artificial Sequence
  Synthetic
gauaauuuuaauccuggaaaaaga

SEQ ID NO: 475813 - RNA, 18 nt, Artificial Sequence
  Synthetic
agcacguuuggaaaaaga

SEQ ID NO: 475814 - RNA, 19 nt, Artificial Sequence
  Synthetic
aagcacguuuggaaaaaga

SEQ ID NO: 475815 - RNA, 20 nt, Artificial Sequence
  Synthetic
aaagcacguuuggaaaaaga

SEQ ID NO: 475816 - RNA, 21 nt, Artificial Sequence
  Synthetic
aaaagcacguuuggaaaaaga

SEQ ID NO: 475817 - RNA, 22 nt, Artificial Sequence
  Synthetic
gaaaagcacguuuggaaaaaga

SEQ ID NO: 475818 - RNA, 23 nt, Artificial Sequence
  Synthetic
ugaaaagcacguuuggaaaaaga

SEQ ID NO: 475819 - RNA, 24 nt, Artificial Sequence
  Synthetic
cugaaaagcacguuuggaaaaaga

SEQ ID NO: 475820 - RNA, 18 nt, Artificial Sequence
  Synthetic
cucaccauuugaaaaaga

SEQ ID NO: 475821 - RNA, 19 nt, Artificial Sequence
  Synthetic
acucaccauuugaaaaaga

SEQ ID NO: 475822 - RNA, 20 nt, Artificial Sequence
  Synthetic
aacucaccauuugaaaaaga

SEQ ID NO: 475823 - RNA, 21 nt, Artificial Sequence
  Synthetic
gaacucaccauuugaaaaaga

SEQ ID NO: 475824 - RNA, 22 nt, Artificial Sequence
  Synthetic
ugaacucaccauuugaaaaaga

SEQ ID NO: 475825 - RNA, 23 nt, Artificial Sequence
  Synthetic
cugaacucaccauuugaaaaaga

SEQ ID NO: 475826 - RNA, 24 nt, Artificial Sequence
  Synthetic
acugaacucaccauuugaaaaaga

SEQ ID NO: 475827 - RNA, 18 nt, Artificial Sequence
  Synthetic
uauucagccauaaaaaga

SEQ ID NO: 475828 - RNA, 19 nt, Artificial Sequence
  Synthetic
cuauucagccauaaaaaga

SEQ ID NO: 475829 - RNA, 20 nt, Artificial Sequence
  Synthetic
acuauucagccauaaaaaga

SEQ ID NO: 475830 - RNA, 21 nt, Artificial Sequence
  Synthetic
uacuauucagccauaaaaaga

SEQ ID NO: 475831 - RNA, 22 nt, Artificial Sequence
  Synthetic
guacuauucagccauaaaaaga

SEQ ID NO: 475832 - RNA, 23 nt, Artificial Sequence
  Synthetic
aguacuauucagccauaaaaaga

SEQ ID NO: 475833 - RNA, 24 nt, Artificial Sequence
  Synthetic
gaguacuauucagccauaaaaaga

SEQ ID NO: 475834 - RNA, 18 nt, Artificial Sequence
  Synthetic
uacauagucauaaaaaga

SEQ ID NO: 475835 - RNA, 19 nt, Artificial Sequence
  Synthetic
cuacauagucauaaaaaga

SEQ ID NO: 475836 - RNA, 20 nt, Artificial Sequence
  Synthetic
acuacauagucauaaaaaga

SEQ ID NO: 475837 - RNA, 21 nt, Artificial Sequence
  Synthetic
uacuacauagucauaaaaaga

SEQ ID NO: 475838 - RNA, 22 nt, Artificial Sequence
  Synthetic
auacuacauagucauaaaaaga

SEQ ID NO: 475839 - RNA, 23 nt, Artificial Sequence
  Synthetic
aauacuacauagucauaaaaaga

SEQ ID NO: 475840 - RNA, 24 nt, Artificial Sequence
  Synthetic
aaauacuacauagucauaaaaaga

SEQ ID NO: 475841 - RNA, 18 nt, Artificial Sequence
  Synthetic
gaaggaagaaacaaaaga

SEQ ID NO: 475842 - RNA, 19 nt, Artificial Sequence
  Synthetic
ggaaggaagaaacaaaaga

SEQ ID NO: 475843 - RNA, 20 nt, Artificial Sequence
  Synthetic
aggaaggaagaaacaaaaga

SEQ ID NO: 475844 - RNA, 21 nt, Artificial Sequence
  Synthetic
aaggaaggaagaaacaaaaga

SEQ ID NO: 475845 - RNA, 22 nt, Artificial Sequence
  Synthetic
gaaggaaggaagaaacaaaaga

SEQ ID NO: 475846 - RNA, 23 nt, Artificial Sequence
  Synthetic
ggaaggaaggaagaaacaaaaga

SEQ ID NO: 475847 - RNA, 24 nt, Artificial Sequence
  Synthetic
aggaaggaaggaagaaacaaaaga

SEQ ID NO: 475848 - RNA, 18 nt, Artificial Sequence
  Synthetic
ugcucuggacacaaaaga

SEQ ID NO: 475849 - RNA, 19 nt, Artificial Sequence
  Synthetic
augcucuggacacaaaaga

SEQ ID NO: 475850 - RNA, 20 nt, Artificial Sequence
  Synthetic
uaugcucuggacacaaaaga

SEQ ID NO: 475851 - RNA, 21 nt, Artificial Sequence
  Synthetic
uuaugcucuggacacaaaaga

SEQ ID NO: 475852 - RNA, 22 nt, Artificial Sequence
  Synthetic
cuuaugcucuggacacaaaaga

SEQ ID NO: 475853 - RNA, 23 nt, Artificial Sequence
  Synthetic
ucuuaugcucuggacacaaaaga

SEQ ID NO: 475854 - RNA, 24 nt, Artificial Sequence
  Synthetic
gucuuaugcucuggacacaaaaga

SEQ ID NO: 475855 - RNA, 18 nt, Artificial Sequence
  Synthetic
gaaucugugcacaaaaga

SEQ ID NO: 475856 - RNA, 19 nt, Artificial Sequence
  Synthetic
ugaaucugugcacaaaaga

SEQ ID NO: 475857 - RNA, 20 nt, Artificial Sequence
  Synthetic
gugaaucugugcacaaaaga

SEQ ID NO: 475858 - RNA, 21 nt, Artificial Sequence
  Synthetic
agugaaucugugcacaaaaga

SEQ ID NO: 475859 - RNA, 22 nt, Artificial Sequence
  Synthetic
aagugaaucugugcacaaaaga

SEQ ID NO: 475860 - RNA, 23 nt, Artificial Sequence
  Synthetic
gaagugaaucugugcacaaaaga

SEQ ID NO: 475861 - RNA, 24 nt, Artificial Sequence
  Synthetic
agaagugaaucugugcacaaaaga

SEQ ID NO: 475862 - RNA, 18 nt, Artificial Sequence
  Synthetic
gggguuugugacaaaaga

SEQ ID NO: 475863 - RNA, 19 nt, Artificial Sequence
  Synthetic
ugggguuugugacaaaaga

SEQ ID NO: 475864 - RNA, 20 nt, Artificial Sequence
  Synthetic
uugggguuugugacaaaaga

SEQ ID NO: 475865 - RNA, 21 nt, Artificial Sequence
  Synthetic
auugggguuugugacaaaaga

SEQ ID NO: 475866 - RNA, 22 nt, Artificial Sequence
  Synthetic
uauugggguuugugacaaaaga

SEQ ID NO: 475867 - RNA, 23 nt, Artificial Sequence
  Synthetic
auauugggguuugugacaaaaga

SEQ ID NO: 475868 - RNA, 24 nt, Artificial Sequence
  Synthetic
aauauugggguuugugacaaaaga

SEQ ID NO: 475869 - RNA, 18 nt, Artificial Sequence
  Synthetic
guauuaccauacaaaaga

SEQ ID NO: 475870 - RNA, 19 nt, Artificial Sequence
  Synthetic
gguauuaccauacaaaaga

SEQ ID NO: 475871 - RNA, 20 nt, Artificial Sequence
  Synthetic
agguauuaccauacaaaaga

SEQ ID NO: 475872 - RNA, 21 nt, Artificial Sequence
  Synthetic
cagguauuaccauacaaaaga

SEQ ID NO: 475873 - RNA, 22 nt, Artificial Sequence
  Synthetic
ucagguauuaccauacaaaaga

SEQ ID NO: 475874 - RNA, 23 nt, Artificial Sequence
  Synthetic
gucagguauuaccauacaaaaga

SEQ ID NO: 475875 - RNA, 24 nt, Artificial Sequence
  Synthetic
ggucagguauuaccauacaaaaga

SEQ ID NO: 475876 - RNA, 18 nt, Artificial Sequence
  Synthetic
gaaugaaaaaccaaaaga

SEQ ID NO: 475877 - RNA, 19 nt, Artificial Sequence
  Synthetic
agaaugaaaaaccaaaaga

SEQ ID NO: 475878 - RNA, 20 nt, Artificial Sequence
  Synthetic
aagaaugaaaaaccaaaaga

SEQ ID NO: 475879 - RNA, 21 nt, Artificial Sequence
  Synthetic
caagaaugaaaaaccaaaaga

SEQ ID NO: 475880 - RNA, 22 nt, Artificial Sequence
  Synthetic
gcaagaaugaaaaaccaaaaga

SEQ ID NO: 475881 - RNA, 23 nt, Artificial Sequence
  Synthetic
agcaagaaugaaaaaccaaaaga

SEQ ID NO: 475882 - RNA, 24 nt, Artificial Sequence
  Synthetic
aagcaagaaugaaaaaccaaaaga

SEQ ID NO: 475883 - RNA, 18 nt, Artificial Sequence
  Synthetic
cugagaggaagcaaaaga

SEQ ID NO: 475884 - RNA, 19 nt, Artificial Sequence
  Synthetic
ucugagaggaagcaaaaga

SEQ ID NO: 475885 - RNA, 20 nt, Artificial Sequence
  Synthetic
aucugagaggaagcaaaaga

SEQ ID NO: 475886 - RNA, 21 nt, Artificial Sequence
  Synthetic
aaucugagaggaagcaaaaga

SEQ ID NO: 475887 - RNA, 22 nt, Artificial Sequence
  Synthetic
aaaucugagaggaagcaaaaga

SEQ ID NO: 475888 - RNA, 23 nt, Artificial Sequence
  Synthetic
aaaaucugagaggaagcaaaaga

SEQ ID NO: 475889 - RNA, 24 nt, Artificial Sequence
  Synthetic
caaaaucugagaggaagcaaaaga

SEQ ID NO: 475890 - RNA, 18 nt, Artificial Sequence
  Synthetic
aaagcaaacagcaaaaga

SEQ ID NO: 475891 - RNA, 19 nt, Artificial Sequence
  Synthetic
aaaagcaaacagcaaaaga

SEQ ID NO: 475892 - RNA, 20 nt, Artificial Sequence
  Synthetic
caaaagcaaacagcaaaaga

SEQ ID NO: 475893 - RNA, 21 nt, Artificial Sequence
  Synthetic
ucaaaagcaaacagcaaaaga

SEQ ID NO: 475894 - RNA, 22 nt, Artificial Sequence
  Synthetic
aucaaaagcaaacagcaaaaga

SEQ ID NO: 475895 - RNA, 23 nt, Artificial Sequence
  Synthetic
gaucaaaagcaaacagcaaaaga

SEQ ID NO: 475896 - RNA, 24 nt, Artificial Sequence
  Synthetic
ggaucaaaagcaaacagcaaaaga

SEQ ID NO: 475897 - RNA, 18 nt, Artificial Sequence
  Synthetic
acauuuaauggcaaaaga

SEQ ID NO: 475898 - RNA, 19 nt, Artificial Sequence
  Synthetic
cacauuuaauggcaaaaga

SEQ ID NO: 475899 - RNA, 20 nt, Artificial Sequence
  Synthetic
ucacauuuaauggcaaaaga

SEQ ID NO: 475900 - RNA, 21 nt, Artificial Sequence
  Synthetic
aucacauuuaauggcaaaaga

SEQ ID NO: 475901 - RNA, 22 nt, Artificial Sequence
  Synthetic
uaucacauuuaauggcaaaaga

SEQ ID NO: 475902 - RNA, 23 nt, Artificial Sequence
  Synthetic
auaucacauuuaauggcaaaaga

SEQ ID NO: 475903 - RNA, 24 nt, Artificial Sequence
  Synthetic
aauaucacauuuaauggcaaaaga

SEQ ID NO: 475904 - RNA, 18 nt, Artificial Sequence
  Synthetic
caagagcuuggcaaaaga

SEQ ID NO: 475905 - RNA, 19 nt, Artificial Sequence
  Synthetic
gcaagagcuuggcaaaaga

SEQ ID NO: 475906 - RNA, 20 nt, Artificial Sequence
  Synthetic
ugcaagagcuuggcaaaaga

SEQ ID NO: 475907 - RNA, 21 nt, Artificial Sequence
  Synthetic
augcaagagcuuggcaaaaga

SEQ ID NO: 475908 - RNA, 22 nt, Artificial Sequence
  Synthetic
gaugcaagagcuuggcaaaaga

SEQ ID NO: 475909 - RNA, 23 nt, Artificial Sequence
  Synthetic
ggaugcaagagcuuggcaaaaga

SEQ ID NO: 475910 - RNA, 24 nt, Artificial Sequence
  Synthetic
gggaugcaagagcuuggcaaaaga

SEQ ID NO: 475911 - RNA, 18 nt, Artificial Sequence
  Synthetic
gugcuagaugucaaaaga

SEQ ID NO: 475912 - RNA, 19 nt, Artificial Sequence
  Synthetic
ggugcuagaugucaaaaga

SEQ ID NO: 475913 - RNA, 20 nt, Artificial Sequence
  Synthetic
aggugcuagaugucaaaaga

SEQ ID NO: 475914 - RNA, 21 nt, Artificial Sequence
  Synthetic
caggugcuagaugucaaaaga

SEQ ID NO: 475915 - RNA, 22 nt, Artificial Sequence
  Synthetic
gcaggugcuagaugucaaaaga

SEQ ID NO: 475916 - RNA, 23 nt, Artificial Sequence
  Synthetic
agcaggugcuagaugucaaaaga

SEQ ID NO: 475917 - RNA, 24 nt, Artificial Sequence
  Synthetic
cagcaggugcuagaugucaaaaga

SEQ ID NO: 475918 - RNA, 18 nt, Artificial Sequence
  Synthetic
uauguguuauucaaaaga

SEQ ID NO: 475919 - RNA, 19 nt, Artificial Sequence
  Synthetic
auauguguuauucaaaaga

SEQ ID NO: 475920 - RNA, 20 nt, Artificial Sequence
  Synthetic
uauauguguuauucaaaaga

SEQ ID NO: 475921 - RNA, 21 nt, Artificial Sequence
  Synthetic
guauauguguuauucaaaaga

SEQ ID NO: 475922 - RNA, 22 nt, Artificial Sequence
  Synthetic
aguauauguguuauucaaaaga

SEQ ID NO: 475923 - RNA, 23 nt, Artificial Sequence
  Synthetic
uaguauauguguuauucaaaaga

SEQ ID NO: 475924 - RNA, 24 nt, Artificial Sequence
  Synthetic
auaguauauguguuauucaaaaga

SEQ ID NO: 475925 - RNA, 18 nt, Artificial Sequence
  Synthetic
aaccaaaguuucaaaaga

SEQ ID NO: 475926 - RNA, 19 nt, Artificial Sequence
  Synthetic
aaaccaaaguuucaaaaga

SEQ ID NO: 475927 - RNA, 20 nt, Artificial Sequence
  Synthetic
aaaaccaaaguuucaaaaga

SEQ ID NO: 475928 - RNA, 21 nt, Artificial Sequence
  Synthetic
gaaaaccaaaguuucaaaaga

SEQ ID NO: 475929 - RNA, 22 nt, Artificial Sequence
  Synthetic
ugaaaaccaaaguuucaaaaga

SEQ ID NO: 475930 - RNA, 23 nt, Artificial Sequence
  Synthetic
gugaaaaccaaaguuucaaaaga

SEQ ID NO: 475931 - RNA, 24 nt, Artificial Sequence
  Synthetic
ugugaaaaccaaaguuucaaaaga

SEQ ID NO: 475932 - RNA, 18 nt, Artificial Sequence
  Synthetic
aagaaagaaaagaaaaga

SEQ ID NO: 475933 - RNA, 19 nt, Artificial Sequence
  Synthetic
caagaaagaaaagaaaaga

SEQ ID NO: 475934 - RNA, 20 nt, Artificial Sequence
  Synthetic
ucaagaaagaaaagaaaaga

SEQ ID NO: 475935 - RNA, 21 nt, Artificial Sequence
  Synthetic
cucaagaaagaaaagaaaaga

SEQ ID NO: 475936 - RNA, 22 nt, Artificial Sequence
  Synthetic
ucucaagaaagaaaagaaaaga

SEQ ID NO: 475937 - RNA, 23 nt, Artificial Sequence
  Synthetic
gucucaagaaagaaaagaaaaga

SEQ ID NO: 475938 - RNA, 24 nt, Artificial Sequence
  Synthetic
ugucucaagaaagaaaagaaaaga

SEQ ID NO: 475939 - RNA, 18 nt, Artificial Sequence
  Synthetic
agaaaaagaaagaaaaga

SEQ ID NO: 475940 - RNA, 19 nt, Artificial Sequence
  Synthetic
aagaaaaagaaagaaaaga

SEQ ID NO: 475941 - RNA, 20 nt, Artificial Sequence
  Synthetic
aaagaaaaagaaagaaaaga

SEQ ID NO: 475942 - RNA, 21 nt, Artificial Sequence
  Synthetic
gaaagaaaaagaaagaaaaga

SEQ ID NO: 475943 - RNA, 22 nt, Artificial Sequence
  Synthetic
agaaagaaaaagaaagaaaaga

SEQ ID NO: 475944 - RNA, 23 nt, Artificial Sequence
  Synthetic
cagaaagaaaaagaaagaaaaga

SEQ ID NO: 475945 - RNA, 24 nt, Artificial Sequence
  Synthetic
gcagaaagaaaaagaaagaaaaga

SEQ ID NO: 475946 - RNA, 18 nt, Artificial Sequence
  Synthetic
auaauaauaaagaaaaga

SEQ ID NO: 475947 - RNA, 19 nt, Artificial Sequence
  Synthetic
aauaauaauaaagaaaaga

SEQ ID NO: 475948 - RNA, 20 nt, Artificial Sequence
  Synthetic
uaauaauaauaaagaaaaga

SEQ ID NO: 475949 - RNA, 21 nt, Artificial Sequence
  Synthetic
auaauaauaauaaagaaaaga

SEQ ID NO: 475950 - RNA, 22 nt, Artificial Sequence
  Synthetic
aauaauaauaauaaagaaaaga

SEQ ID NO: 475951 - RNA, 23 nt, Artificial Sequence
  Synthetic
uaauaauaauaauaaagaaaaga

SEQ ID NO: 475952 - RNA, 24 nt, Artificial Sequence
  Synthetic
auaauaauaauaauaaagaaaaga

SEQ ID NO: 475953 - RNA, 18 nt, Artificial Sequence
  Synthetic
gaugagauaaagaaaaga

SEQ ID NO: 475954 - RNA, 19 nt, Artificial Sequence
  Synthetic
ugaugagauaaagaaaaga

SEQ ID NO: 475955 - RNA, 20 nt, Artificial Sequence
  Synthetic
gugaugagauaaagaaaaga

SEQ ID NO: 475956 - RNA, 21 nt, Artificial Sequence
  Synthetic
ggugaugagauaaagaaaaga

SEQ ID NO: 475957 - RNA, 22 nt, Artificial Sequence
  Synthetic
uggugaugagauaaagaaaaga

SEQ ID NO: 475958 - RNA, 23 nt, Artificial Sequence
  Synthetic
guggugaugagauaaagaaaaga

SEQ ID NO: 475959 - RNA, 24 nt, Artificial Sequence
  Synthetic
uguggugaugagauaaagaaaaga

SEQ ID NO: 475960 - RNA, 18 nt, Artificial Sequence
  Synthetic
gcagaaguaaagaaaaga

SEQ ID NO: 475961 - RNA, 19 nt, Artificial Sequence
  Synthetic
agcagaaguaaagaaaaga

SEQ ID NO: 475962 - RNA, 20 nt, Artificial Sequence
  Synthetic
aagcagaaguaaagaaaaga

SEQ ID NO: 475963 - RNA, 21 nt, Artificial Sequence
  Synthetic
aaagcagaaguaaagaaaaga

SEQ ID NO: 475964 - RNA, 22 nt, Artificial Sequence
  Synthetic
gaaagcagaaguaaagaaaaga

SEQ ID NO: 475965 - RNA, 23 nt, Artificial Sequence
  Synthetic
ggaaagcagaaguaaagaaaaga

SEQ ID NO: 475966 - RNA, 24 nt, Artificial Sequence
  Synthetic
aggaaagcagaaguaaagaaaaga

SEQ ID NO: 475967 - RNA, 18 nt, Artificial Sequence
  Synthetic
aguugaaccaagaaaaga

SEQ ID NO: 475968 - RNA, 19 nt, Artificial Sequence
  Synthetic
aaguugaaccaagaaaaga

SEQ ID NO: 475969 - RNA, 20 nt, Artificial Sequence
  Synthetic
aaaguugaaccaagaaaaga

SEQ ID NO: 475970 - RNA, 21 nt, Artificial Sequence
  Synthetic
gaaaguugaaccaagaaaaga

SEQ ID NO: 475971 - RNA, 22 nt, Artificial Sequence
  Synthetic
agaaaguugaaccaagaaaaga

SEQ ID NO: 475972 - RNA, 23 nt, Artificial Sequence
  Synthetic
aagaaaguugaaccaagaaaaga

SEQ ID NO: 475973 - RNA, 24 nt, Artificial Sequence
  Synthetic
gaagaaaguugaaccaagaaaaga

SEQ ID NO: 475974 - RNA, 22 nt, Artificial Sequence
  Synthetic
aagacuaauaaagaagaaaaga

SEQ ID NO: 475975 - RNA, 23 nt, Artificial Sequence
  Synthetic
uaagacuaauaaagaagaaaaga

SEQ ID NO: 475976 - RNA, 24 nt, Artificial Sequence
  Synthetic
guaagacuaauaaagaagaaaaga

SEQ ID NO: 475977 - RNA, 18 nt, Artificial Sequence
  Synthetic
gaauggaggaagaaaaga

SEQ ID NO: 475978 - RNA, 19 nt, Artificial Sequence
  Synthetic
ggaauggaggaagaaaaga

SEQ ID NO: 475979 - RNA, 20 nt, Artificial Sequence
  Synthetic
aggaauggaggaagaaaaga

SEQ ID NO: 475980 - RNA, 21 nt, Artificial Sequence
  Synthetic
aaggaauggaggaagaaaaga

SEQ ID NO: 475981 - RNA, 22 nt, Artificial Sequence
  Synthetic
gaaggaauggaggaagaaaaga

SEQ ID NO: 475982 - RNA, 23 nt, Artificial Sequence
  Synthetic
ggaaggaauggaggaagaaaaga

SEQ ID NO: 475983 - RNA, 24 nt, Artificial Sequence
  Synthetic
aggaaggaauggaggaagaaaaga

SEQ ID NO: 475984 - RNA, 18 nt, Artificial Sequence
  Synthetic
aguccuuaagagaaaaga

SEQ ID NO: 475985 - RNA, 19 nt, Artificial Sequence
  Synthetic
aaguccuuaagagaaaaga

SEQ ID NO: 475986 - RNA, 20 nt, Artificial Sequence
  Synthetic
gaaguccuuaagagaaaaga

SEQ ID NO: 475987 - RNA, 21 nt, Artificial Sequence
  Synthetic
ugaaguccuuaagagaaaaga

SEQ ID NO: 475988 - RNA, 22 nt, Artificial Sequence
  Synthetic
uugaaguccuuaagagaaaaga

SEQ ID NO: 475989 - RNA, 23 nt, Artificial Sequence
  Synthetic
uuugaaguccuuaagagaaaaga

SEQ ID NO: 475990 - RNA, 24 nt, Artificial Sequence
  Synthetic
uuuugaaguccuuaagagaaaaga

SEQ ID NO: 475991 - RNA, 18 nt, Artificial Sequence
  Synthetic
aaauuccuggagaaaaga

SEQ ID NO: 475992 - RNA, 19 nt, Artificial Sequence
  Synthetic
caaauuccuggagaaaaga

SEQ ID NO: 475993 - RNA, 20 nt, Artificial Sequence
  Synthetic
ucaaauuccuggagaaaaga

SEQ ID NO: 475994 - RNA, 21 nt, Artificial Sequence
  Synthetic
aucaaauuccuggagaaaaga

SEQ ID NO: 475995 - RNA, 22 nt, Artificial Sequence
  Synthetic
aaucaaauuccuggagaaaaga

SEQ ID NO: 475996 - RNA, 23 nt, Artificial Sequence
  Synthetic
caaucaaauuccuggagaaaaga

SEQ ID NO: 475997 - RNA, 24 nt, Artificial Sequence
  Synthetic
acaaucaaauuccuggagaaaaga

SEQ ID NO: 475998 - RNA, 18 nt, Artificial Sequence
  Synthetic
auucugccauagaaaaga

SEQ ID NO: 475999 - RNA, 19 nt, Artificial Sequence
  Synthetic
uauucugccauagaaaaga

SEQ ID NO: 476000 - RNA, 20 nt, Artificial Sequence
  Synthetic
cuauucugccauagaaaaga

SEQ ID NO: 476001 - RNA, 21 nt, Artificial Sequence
  Synthetic
acuauucugccauagaaaaga

SEQ ID NO: 476002 - RNA, 22 nt, Artificial Sequence
  Synthetic
uacuauucugccauagaaaaga

SEQ ID NO: 476003 - RNA, 23 nt, Artificial Sequence
  Synthetic
guacuauucugccauagaaaaga

SEQ ID NO: 476004 - RNA, 24 nt, Artificial Sequence
  Synthetic
aguacuauucugccauagaaaaga

SEQ ID NO: 476005 - RNA, 18 nt, Artificial Sequence
  Synthetic
ccuacaugguagaaaaga

SEQ ID NO: 476006 - RNA, 19 nt, Artificial Sequence
  Synthetic
cccuacaugguagaaaaga

SEQ ID NO: 476007 - RNA, 20 nt, Artificial Sequence
  Synthetic
acccuacaugguagaaaaga

SEQ ID NO: 476008 - RNA, 21 nt, Artificial Sequence
  Synthetic
gacccuacaugguagaaaaga

SEQ ID NO: 476009 - RNA, 22 nt, Artificial Sequence
  Synthetic
ugacccuacaugguagaaaaga

SEQ ID NO: 476010 - RNA, 23 nt, Artificial Sequence
  Synthetic
uugacccuacaugguagaaaaga

SEQ ID NO: 476011 - RNA, 24 nt, Artificial Sequence
  Synthetic
auugacccuacaugguagaaaaga

SEQ ID NO: 476012 - RNA, 18 nt, Artificial Sequence
  Synthetic
caugcaaaacggaaaaga

SEQ ID NO: 476013 - RNA, 19 nt, Artificial Sequence
  Synthetic
ucaugcaaaacggaaaaga

SEQ ID NO: 476014 - RNA, 20 nt, Artificial Sequence
  Synthetic
gucaugcaaaacggaaaaga

SEQ ID NO: 476015 - RNA, 21 nt, Artificial Sequence
  Synthetic
ugucaugcaaaacggaaaaga

SEQ ID NO: 476016 - RNA, 22 nt, Artificial Sequence
  Synthetic
augucaugcaaaacggaaaaga

SEQ ID NO: 476017 - RNA, 23 nt, Artificial Sequence
  Synthetic
gaugucaugcaaaacggaaaaga

SEQ ID NO: 476018 - RNA, 24 nt, Artificial Sequence
  Synthetic
agaugucaugcaaaacggaaaaga

SEQ ID NO: 476019 - RNA, 18 nt, Artificial Sequence
  Synthetic
acauauucacugaaaaga

SEQ ID NO: 476020 - RNA, 19 nt, Artificial Sequence
  Synthetic
uacauauucacugaaaaga

SEQ ID NO: 476021 - RNA, 20 nt, Artificial Sequence
  Synthetic
auacauauucacugaaaaga

SEQ ID NO: 476022 - RNA, 21 nt, Artificial Sequence
  Synthetic
aauacauauucacugaaaaga

SEQ ID NO: 476023 - RNA, 22 nt, Artificial Sequence
  Synthetic
aaauacauauucacugaaaaga

SEQ ID NO: 476024 - RNA, 23 nt, Artificial Sequence
  Synthetic
gaaauacauauucacugaaaaga

SEQ ID NO: 476025 - RNA, 24 nt, Artificial Sequence
  Synthetic
ggaaauacauauucacugaaaaga

SEQ ID NO: 476026 - RNA, 18 nt, Artificial Sequence
  Synthetic
guguuuagggugaaaaga

SEQ ID NO: 476027 - RNA, 19 nt, Artificial Sequence
  Synthetic
gguguuuagggugaaaaga

SEQ ID NO: 476028 - RNA, 20 nt, Artificial Sequence
  Synthetic
agguguuuagggugaaaaga

SEQ ID NO: 476029 - RNA, 21 nt, Artificial Sequence
  Synthetic
aagguguuuagggugaaaaga

SEQ ID NO: 476030 - RNA, 22 nt, Artificial Sequence
  Synthetic
aaagguguuuagggugaaaaga

SEQ ID NO: 476031 - RNA, 23 nt, Artificial Sequence
  Synthetic
gaaagguguuuagggugaaaaga

SEQ ID NO: 476032 - RNA, 24 nt, Artificial Sequence
  Synthetic
ggaaagguguuuagggugaaaaga

SEQ ID NO: 476033 - RNA, 18 nt, Artificial Sequence
  Synthetic
gucuguguacauaaaaga

SEQ ID NO: 476034 - RNA, 19 nt, Artificial Sequence
  Synthetic
ugucuguguacauaaaaga

SEQ ID NO: 476035 - RNA, 20 nt, Artificial Sequence
  Synthetic
uugucuguguacauaaaaga

SEQ ID NO: 476036 - RNA, 21 nt, Artificial Sequence
  Synthetic
uuugucuguguacauaaaaga

SEQ ID NO: 476037 - RNA, 22 nt, Artificial Sequence
  Synthetic
uuuugucuguguacauaaaaga

SEQ ID NO: 476038 - RNA, 23 nt, Artificial Sequence
  Synthetic
uuuuugucuguguacauaaaaga

SEQ ID NO: 476039 - RNA, 24 nt, Artificial Sequence
  Synthetic
cuuuuugucuguguacauaaaaga

SEQ ID NO: 476040 - RNA, 18 nt, Artificial Sequence
  Synthetic
agacauaugcauaaaaga

SEQ ID NO: 476041 - RNA, 19 nt, Artificial Sequence
  Synthetic
uagacauaugcauaaaaga

SEQ ID NO: 476042 - RNA, 20 nt, Artificial Sequence
  Synthetic
guagacauaugcauaaaaga

SEQ ID NO: 476043 - RNA, 21 nt, Artificial Sequence
  Synthetic
uguagacauaugcauaaaaga

SEQ ID NO: 476044 - RNA, 22 nt, Artificial Sequence
  Synthetic
guguagacauaugcauaaaaga

SEQ ID NO: 476045 - RNA, 23 nt, Artificial Sequence
  Synthetic
aguguagacauaugcauaaaaga

SEQ ID NO: 476046 - RNA, 24 nt, Artificial Sequence
  Synthetic
caguguagacauaugcauaaaaga

SEQ ID NO: 476047 - RNA, 18 nt, Artificial Sequence
  Synthetic
uggguaauuuauaaaaga

SEQ ID NO: 476048 - RNA, 19 nt, Artificial Sequence
  Synthetic
cuggguaauuuauaaaaga

SEQ ID NO: 476049 - RNA, 20 nt, Artificial Sequence
  Synthetic
acuggguaauuuauaaaaga

SEQ ID NO: 476050 - RNA, 21 nt, Artificial Sequence
  Synthetic
gacuggguaauuuauaaaaga

SEQ ID NO: 476051 - RNA, 22 nt, Artificial Sequence
  Synthetic
agacuggguaauuuauaaaaga

SEQ ID NO: 476052 - RNA, 23 nt, Artificial Sequence
  Synthetic
gagacuggguaauuuauaaaaga

SEQ ID NO: 476053 - RNA, 24 nt, Artificial Sequence
  Synthetic
ugagacuggguaauuuauaaaaga

SEQ ID NO: 476054 - RNA, 18 nt, Artificial Sequence
  Synthetic
aggaacucgacuaaaaga

SEQ ID NO: 476055 - RNA, 19 nt, Artificial Sequence
  Synthetic
uaggaacucgacuaaaaga

SEQ ID NO: 476056 - RNA, 20 nt, Artificial Sequence
  Synthetic
uuaggaacucgacuaaaaga

SEQ ID NO: 476057 - RNA, 21 nt, Artificial Sequence
  Synthetic
uuuaggaacucgacuaaaaga

SEQ ID NO: 476058 - RNA, 22 nt, Artificial Sequence
  Synthetic
cuuuaggaacucgacuaaaaga

SEQ ID NO: 476059 - RNA, 23 nt, Artificial Sequence
  Synthetic
acuuuaggaacucgacuaaaaga

SEQ ID NO: 476060 - RNA, 24 nt, Artificial Sequence
  Synthetic
aacuuuaggaacucgacuaaaaga

SEQ ID NO: 476061 - RNA, 18 nt, Artificial Sequence
  Synthetic
auucauuguacuaaaaga

SEQ ID NO: 476062 - RNA, 19 nt, Artificial Sequence
  Synthetic
uauucauuguacuaaaaga

SEQ ID NO: 476063 - RNA, 20 nt, Artificial Sequence
  Synthetic
auauucauuguacuaaaaga

SEQ ID NO: 476064 - RNA, 21 nt, Artificial Sequence
  Synthetic
uauauucauuguacuaaaaga

SEQ ID NO: 476065 - RNA, 22 nt, Artificial Sequence
  Synthetic
auauauucauuguacuaaaaga

SEQ ID NO: 476066 - RNA, 23 nt, Artificial Sequence
  Synthetic
gauauauucauuguacuaaaaga

SEQ ID NO: 476067 - RNA, 24 nt, Artificial Sequence
  Synthetic
ugauauauucauuguacuaaaaga

SEQ ID NO: 476068 - RNA, 18 nt, Artificial Sequence
  Synthetic
aauuaacauucuaaaaga

SEQ ID NO: 476069 - RNA, 19 nt, Artificial Sequence
  Synthetic
uaauuaacauucuaaaaga

SEQ ID NO: 476070 - RNA, 20 nt, Artificial Sequence
  Synthetic
auaauuaacauucuaaaaga

SEQ ID NO: 476071 - RNA, 21 nt, Artificial Sequence
  Synthetic
cauaauuaacauucuaaaaga

SEQ ID NO: 476072 - RNA, 22 nt, Artificial Sequence
  Synthetic
acauaauuaacauucuaaaaga

SEQ ID NO: 476073 - RNA, 23 nt, Artificial Sequence
  Synthetic
aacauaauuaacauucuaaaaga

SEQ ID NO: 476074 - RNA, 24 nt, Artificial Sequence
  Synthetic
aaacauaauuaacauucuaaaaga

SEQ ID NO: 476075 - RNA, 18 nt, Artificial Sequence
  Synthetic
ucacagaauuguaaaaga

SEQ ID NO: 476076 - RNA, 19 nt, Artificial Sequence
  Synthetic
aucacagaauuguaaaaga

SEQ ID NO: 476077 - RNA, 20 nt, Artificial Sequence
  Synthetic
aaucacagaauuguaaaaga

SEQ ID NO: 476078 - RNA, 21 nt, Artificial Sequence
  Synthetic
uaaucacagaauuguaaaaga

SEQ ID NO: 476079 - RNA, 22 nt, Artificial Sequence
  Synthetic
auaaucacagaauuguaaaaga

SEQ ID NO: 476080 - RNA, 23 nt, Artificial Sequence
  Synthetic
gauaaucacagaauuguaaaaga

SEQ ID NO: 476081 - RNA, 24 nt, Artificial Sequence
  Synthetic
ugauaaucacagaauuguaaaaga

SEQ ID NO: 476082 - RNA, 18 nt, Artificial Sequence
  Synthetic
ggguucccuuguaaaaga

SEQ ID NO: 476083 - RNA, 19 nt, Artificial Sequence
  Synthetic
aggguucccuuguaaaaga

SEQ ID NO: 476084 - RNA, 20 nt, Artificial Sequence
  Synthetic
aaggguucccuuguaaaaga

SEQ ID NO: 476085 - RNA, 21 nt, Artificial Sequence
  Synthetic
uaaggguucccuuguaaaaga

SEQ ID NO: 476086 - RNA, 22 nt, Artificial Sequence
  Synthetic
uuaaggguucccuuguaaaaga

SEQ ID NO: 476087 - RNA, 23 nt, Artificial Sequence
  Synthetic
auuaaggguucccuuguaaaaga

SEQ ID NO: 476088 - RNA, 24 nt, Artificial Sequence
  Synthetic
gauuaaggguucccuuguaaaaga

SEQ ID NO: 476089 - RNA, 18 nt, Artificial Sequence
  Synthetic
aauuuggaaauuaaaaga

SEQ ID NO: 476090 - RNA, 19 nt, Artificial Sequence
  Synthetic
aaauuuggaaauuaaaaga

SEQ ID NO: 476091 - RNA, 20 nt, Artificial Sequence
  Synthetic
uaaauuuggaaauuaaaaga

SEQ ID NO: 476092 - RNA, 21 nt, Artificial Sequence
  Synthetic
uuaaauuuggaaauuaaaaga

SEQ ID NO: 476093 - RNA, 22 nt, Artificial Sequence
  Synthetic
uuuaaauuuggaaauuaaaaga

SEQ ID NO: 476094 - RNA, 23 nt, Artificial Sequence
  Synthetic
auuuaaauuuggaaauuaaaaga

SEQ ID NO: 476095 - RNA, 24 nt, Artificial Sequence
  Synthetic
cauuuaaauuuggaaauuaaaaga

SEQ ID NO: 476096 - RNA, 18 nt, Artificial Sequence
  Synthetic
gacugacucauuaaaaga

SEQ ID NO: 476097 - RNA, 19 nt, Artificial Sequence
  Synthetic
agacugacucauuaaaaga

SEQ ID NO: 476098 - RNA, 20 nt, Artificial Sequence
  Synthetic
cagacugacucauuaaaaga

SEQ ID NO: 476099 - RNA, 21 nt, Artificial Sequence
  Synthetic
acagacugacucauuaaaaga

SEQ ID NO: 476100 - RNA, 22 nt, Artificial Sequence
  Synthetic
gacagacugacucauuaaaaga

SEQ ID NO: 476101 - RNA, 23 nt, Artificial Sequence
  Synthetic
agacagacugacucauuaaaaga

SEQ ID NO: 476102 - RNA, 24 nt, Artificial Sequence
  Synthetic
gagacagacugacucauuaaaaga

SEQ ID NO: 476103 - RNA, 18 nt, Artificial Sequence
  Synthetic
agcauacuaguuaaaaga

SEQ ID NO: 476104 - RNA, 19 nt, Artificial Sequence
  Synthetic
cagcauacuaguuaaaaga

SEQ ID NO: 476105 - RNA, 20 nt, Artificial Sequence
  Synthetic
acagcauacuaguuaaaaga

SEQ ID NO: 476106 - RNA, 21 nt, Artificial Sequence
  Synthetic
cacagcauacuaguuaaaaga

SEQ ID NO: 476107 - RNA, 22 nt, Artificial Sequence
  Synthetic
ucacagcauacuaguuaaaaga

SEQ ID NO: 476108 - RNA, 23 nt, Artificial Sequence
  Synthetic
aucacagcauacuaguuaaaaga

SEQ ID NO: 476109 - RNA, 24 nt, Artificial Sequence
  Synthetic
uaucacagcauacuaguuaaaaga

SEQ ID NO: 476110 - RNA, 18 nt, Artificial Sequence
  Synthetic
cagauucacuuuaaaaga

SEQ ID NO: 476111 - RNA, 19 nt, Artificial Sequence
  Synthetic
acagauucacuuuaaaaga

SEQ ID NO: 476112 - RNA, 20 nt, Artificial Sequence
  Synthetic
aacagauucacuuuaaaaga

SEQ ID NO: 476113 - RNA, 21 nt, Artificial Sequence
  Synthetic
caacagauucacuuuaaaaga

SEQ ID NO: 476114 - RNA, 22 nt, Artificial Sequence
  Synthetic
acaacagauucacuuuaaaaga

SEQ ID NO: 476115 - RNA, 23 nt, Artificial Sequence
  Synthetic
cacaacagauucacuuuaaaaga

SEQ ID NO: 476116 - RNA, 24 nt, Artificial Sequence
  Synthetic
acacaacagauucacuuuaaaaga

SEQ ID NO: 476117 - RNA, 18 nt, Artificial Sequence
  Synthetic
caacuuaucuuuaaaaga

SEQ ID NO: 476118 - RNA, 19 nt, Artificial Sequence
  Synthetic
acaacuuaucuuuaaaaga

SEQ ID NO: 476119 - RNA, 20 nt, Artificial Sequence
  Synthetic
uacaacuuaucuuuaaaaga

SEQ ID NO: 476120 - RNA, 21 nt, Artificial Sequence
  Synthetic
uuacaacuuaucuuuaaaaga

SEQ ID NO: 476121 - RNA, 22 nt, Artificial Sequence
  Synthetic
guuacaacuuaucuuuaaaaga

SEQ ID NO: 476122 - RNA, 23 nt, Artificial Sequence
  Synthetic
aguuacaacuuaucuuuaaaaga

SEQ ID NO: 476123 - RNA, 24 nt, Artificial Sequence
  Synthetic
gaguuacaacuuaucuuuaaaaga

SEQ ID NO: 476124 - RNA, 18 nt, Artificial Sequence
  Synthetic
uuauugcauuuuaaaaga

SEQ ID NO: 476125 - RNA, 19 nt, Artificial Sequence
  Synthetic
uuuauugcauuuuaaaaga

SEQ ID NO: 476126 - RNA, 20 nt, Artificial Sequence
  Synthetic
auuuauugcauuuuaaaaga

SEQ ID NO: 476127 - RNA, 21 nt, Artificial Sequence
  Synthetic
aauuuauugcauuuuaaaaga

SEQ ID NO: 476128 - RNA, 22 nt, Artificial Sequence
  Synthetic
uaauuuauugcauuuuaaaaga

SEQ ID NO: 476129 - RNA, 23 nt, Artificial Sequence
  Synthetic
auaauuuauugcauuuuaaaaga

SEQ ID NO: 476130 - RNA, 24 nt, Artificial Sequence
  Synthetic
uauaauuuauugcauuuuaaaaga

SEQ ID NO: 476131 - RNA, 18 nt, Artificial Sequence
  Synthetic
agucaauauuuuaaaaga

SEQ ID NO: 476132 - RNA, 19 nt, Artificial Sequence
  Synthetic
aagucaauauuuuaaaaga

SEQ ID NO: 476133 - RNA, 20 nt, Artificial Sequence
  Synthetic
uaagucaauauuuuaaaaga

SEQ ID NO: 476134 - RNA, 21 nt, Artificial Sequence
  Synthetic
uuaagucaauauuuuaaaaga

SEQ ID NO: 476135 - RNA, 22 nt, Artificial Sequence
  Synthetic
guuaagucaauauuuuaaaaga

SEQ ID NO: 476136 - RNA, 23 nt, Artificial Sequence
  Synthetic
uguuaagucaauauuuuaaaaga

SEQ ID NO: 476137 - RNA, 24 nt, Artificial Sequence
  Synthetic
cuguuaagucaauauuuuaaaaga

SEQ ID NO: 476138 - RNA, 18 nt, Artificial Sequence
  Synthetic
aaauacaguuuuaaaaga

SEQ ID NO: 476139 - RNA, 19 nt, Artificial Sequence
  Synthetic
aaaauacaguuuuaaaaga

SEQ ID NO: 476140 - RNA, 20 nt, Artificial Sequence
  Synthetic
aaaaauacaguuuuaaaaga

SEQ ID NO: 476141 - RNA, 21 nt, Artificial Sequence
  Synthetic
aaaaaauacaguuuuaaaaga

SEQ ID NO: 476142 - RNA, 22 nt, Artificial Sequence
  Synthetic
gaaaaaauacaguuuuaaaaga

SEQ ID NO: 476143 - RNA, 23 nt, Artificial Sequence
  Synthetic
ggaaaaaauacaguuuuaaaaga

SEQ ID NO: 476144 - RNA, 24 nt, Artificial Sequence
  Synthetic
uggaaaaaauacaguuuuaaaaga

SEQ ID NO: 476145 - RNA, 18 nt, Artificial Sequence
  Synthetic
ugaagugcuaaacaaaga

SEQ ID NO: 476146 - RNA, 19 nt, Artificial Sequence
  Synthetic
uugaagugcuaaacaaaga

SEQ ID NO: 476147 - RNA, 20 nt, Artificial Sequence
  Synthetic
guugaagugcuaaacaaaga

SEQ ID NO: 476148 - RNA, 21 nt, Artificial Sequence
  Synthetic
aguugaagugcuaaacaaaga

SEQ ID NO: 476149 - RNA, 22 nt, Artificial Sequence
  Synthetic
gaguugaagugcuaaacaaaga

SEQ ID NO: 476150 - RNA, 23 nt, Artificial Sequence
  Synthetic
agaguugaagugcuaaacaaaga

SEQ ID NO: 476151 - RNA, 24 nt, Artificial Sequence
  Synthetic
gagaguugaagugcuaaacaaaga

SEQ ID NO: 476152 - RNA, 18 nt, Artificial Sequence
  Synthetic
uauuuuuauuaacaaaga

SEQ ID NO: 476153 - RNA, 19 nt, Artificial Sequence
  Synthetic
uuauuuuuauuaacaaaga

SEQ ID NO: 476154 - RNA, 20 nt, Artificial Sequence
  Synthetic
cuuauuuuuauuaacaaaga

SEQ ID NO: 476155 - RNA, 21 nt, Artificial Sequence
  Synthetic
ucuuauuuuuauuaacaaaga

SEQ ID NO: 476156 - RNA, 22 nt, Artificial Sequence
  Synthetic
gucuuauuuuuauuaacaaaga

SEQ ID NO: 476157 - RNA, 23 nt, Artificial Sequence
  Synthetic
ggucuuauuuuuauuaacaaaga

SEQ ID NO: 476158 - RNA, 24 nt, Artificial Sequence
  Synthetic
gggucuuauuuuuauuaacaaaga

SEQ ID NO: 476159 - RNA, 18 nt, Artificial Sequence
  Synthetic
uacauaugaacacaaaga

SEQ ID NO: 476160 - RNA, 19 nt, Artificial Sequence
  Synthetic
guacauaugaacacaaaga

SEQ ID NO: 476161 - RNA, 20 nt, Artificial Sequence
  Synthetic
aguacauaugaacacaaaga

SEQ ID NO: 476162 - RNA, 21 nt, Artificial Sequence
  Synthetic
gaguacauaugaacacaaaga

SEQ ID NO: 476163 - RNA, 22 nt, Artificial Sequence
  Synthetic
ugaguacauaugaacacaaaga

SEQ ID NO: 476164 - RNA, 23 nt, Artificial Sequence
  Synthetic
cugaguacauaugaacacaaaga

SEQ ID NO: 476165 - RNA, 24 nt, Artificial Sequence
  Synthetic
acugaguacauaugaacacaaaga

SEQ ID NO: 476166 - RNA, 18 nt, Artificial Sequence
  Synthetic
cucugagcaugacaaaga

SEQ ID NO: 476167 - RNA, 19 nt, Artificial Sequence
  Synthetic
acucugagcaugacaaaga

SEQ ID NO: 476168 - RNA, 20 nt, Artificial Sequence
  Synthetic
aacucugagcaugacaaaga

SEQ ID NO: 476169 - RNA, 21 nt, Artificial Sequence
  Synthetic
uaacucugagcaugacaaaga

SEQ ID NO: 476170 - RNA, 22 nt, Artificial Sequence
  Synthetic
auaacucugagcaugacaaaga

SEQ ID NO: 476171 - RNA, 23 nt, Artificial Sequence
  Synthetic
cauaacucugagcaugacaaaga

SEQ ID NO: 476172 - RNA, 24 nt, Artificial Sequence
  Synthetic
ucauaacucugagcaugacaaaga

SEQ ID NO: 476173 - RNA, 18 nt, Artificial Sequence
  Synthetic
uuucaauucauacaaaga

SEQ ID NO: 476174 - RNA, 19 nt, Artificial Sequence
  Synthetic
cuuucaauucauacaaaga

SEQ ID NO: 476175 - RNA, 20 nt, Artificial Sequence
  Synthetic
gcuuucaauucauacaaaga

SEQ ID NO: 476176 - RNA, 21 nt, Artificial Sequence
  Synthetic
agcuuucaauucauacaaaga

SEQ ID NO: 476177 - RNA, 22 nt, Artificial Sequence
  Synthetic
uagcuuucaauucauacaaaga

SEQ ID NO: 476178 - RNA, 23 nt, Artificial Sequence
  Synthetic
auagcuuucaauucauacaaaga

SEQ ID NO: 476179 - RNA, 24 nt, Artificial Sequence
  Synthetic
aauagcuuucaauucauacaaaga

SEQ ID NO: 476180 - RNA, 18 nt, Artificial Sequence
  Synthetic
uauuuuaugcuacaaaga

SEQ ID NO: 476181 - RNA, 19 nt, Artificial Sequence
  Synthetic
cuauuuuaugcuacaaaga

SEQ ID NO: 476182 - RNA, 20 nt, Artificial Sequence
  Synthetic
ucuauuuuaugcuacaaaga

SEQ ID NO: 476183 - RNA, 21 nt, Artificial Sequence
  Synthetic
aucuauuuuaugcuacaaaga

SEQ ID NO: 476184 - RNA, 22 nt, Artificial Sequence
  Synthetic
aaucuauuuuaugcuacaaaga

SEQ ID NO: 476185 - RNA, 23 nt, Artificial Sequence
  Synthetic
uaaucuauuuuaugcuacaaaga

SEQ ID NO: 476186 - RNA, 24 nt, Artificial Sequence
  Synthetic
uuaaucuauuuuaugcuacaaaga

SEQ ID NO: 476187 - RNA, 18 nt, Artificial Sequence
  Synthetic
cucagaagcuaccaaaga

SEQ ID NO: 476188 - RNA, 19 nt, Artificial Sequence
  Synthetic
acucagaagcuaccaaaga

SEQ ID NO: 476189 - RNA, 20 nt, Artificial Sequence
  Synthetic
aacucagaagcuaccaaaga

SEQ ID NO: 476190 - RNA, 21 nt, Artificial Sequence
  Synthetic
aaacucagaagcuaccaaaga

SEQ ID NO: 476191 - RNA, 22 nt, Artificial Sequence
  Synthetic
aaaacucagaagcuaccaaaga

SEQ ID NO: 476192 - RNA, 23 nt, Artificial Sequence
  Synthetic
aaaaacucagaagcuaccaaaga

SEQ ID NO: 476193 - RNA, 24 nt, Artificial Sequence
  Synthetic
caaaaacucagaagcuaccaaaga

SEQ ID NO: 476194 - RNA, 18 nt, Artificial Sequence
  Synthetic
uggguauauacccaaaga

SEQ ID NO: 476195 - RNA, 19 nt, Artificial Sequence
  Synthetic
cuggguauauacccaaaga

SEQ ID NO: 476196 - RNA, 20 nt, Artificial Sequence
  Synthetic
gcuggguauauacccaaaga

SEQ ID NO: 476197 - RNA, 21 nt, Artificial Sequence
  Synthetic
ugcuggguauauacccaaaga

SEQ ID NO: 476198 - RNA, 22 nt, Artificial Sequence
  Synthetic
cugcuggguauauacccaaaga

SEQ ID NO: 476199 - RNA, 23 nt, Artificial Sequence
  Synthetic
acugcuggguauauacccaaaga

SEQ ID NO: 476200 - RNA, 24 nt, Artificial Sequence
  Synthetic
cacugcuggguauauacccaaaga

SEQ ID NO: 476201 - RNA, 18 nt, Artificial Sequence
  Synthetic
auagggugaugccaaaga

SEQ ID NO: 476202 - RNA, 19 nt, Artificial Sequence
  Synthetic
cauagggugaugccaaaga

SEQ ID NO: 476203 - RNA, 20 nt, Artificial Sequence
  Synthetic
ccauagggugaugccaaaga

SEQ ID NO: 476204 - RNA, 21 nt, Artificial Sequence
  Synthetic
uccauagggugaugccaaaga

SEQ ID NO: 476205 - RNA, 22 nt, Artificial Sequence
  Synthetic
auccauagggugaugccaaaga

SEQ ID NO: 476206 - RNA, 23 nt, Artificial Sequence
  Synthetic
cauccauagggugaugccaaaga

SEQ ID NO: 476207 - RNA, 24 nt, Artificial Sequence
  Synthetic
ccauccauagggugaugccaaaga

SEQ ID NO: 476208 - RNA, 18 nt, Artificial Sequence
  Synthetic
aguuucuagauccaaaga

SEQ ID NO: 476209 - RNA, 19 nt, Artificial Sequence
  Synthetic
aaguuucuagauccaaaga

SEQ ID NO: 476210 - RNA, 20 nt, Artificial Sequence
  Synthetic
aaaguuucuagauccaaaga

SEQ ID NO: 476211 - RNA, 21 nt, Artificial Sequence
  Synthetic
aaaaguuucuagauccaaaga

SEQ ID NO: 476212 - RNA, 22 nt, Artificial Sequence
  Synthetic
aaaaaguuucuagauccaaaga

SEQ ID NO: 476213 - RNA, 23 nt, Artificial Sequence
  Synthetic
caaaaaguuucuagauccaaaga

SEQ ID NO: 476214 - RNA, 24 nt, Artificial Sequence
  Synthetic
ucaaaaaguuucuagauccaaaga

SEQ ID NO: 476215 - RNA, 18 nt, Artificial Sequence
  Synthetic
aaaauaauuuuccaaaga

SEQ ID NO: 476216 - RNA, 19 nt, Artificial Sequence
  Synthetic
uaaaauaauuuuccaaaga

SEQ ID NO: 476217 - RNA, 20 nt, Artificial Sequence
  Synthetic
auaaaauaauuuuccaaaga

SEQ ID NO: 476218 - RNA, 21 nt, Artificial Sequence
  Synthetic
uauaaaauaauuuuccaaaga

SEQ ID NO: 476219 - RNA, 22 nt, Artificial Sequence
  Synthetic
uuauaaaauaauuuuccaaaga

SEQ ID NO: 476220 - RNA, 23 nt, Artificial Sequence
  Synthetic
auuauaaaauaauuuuccaaaga

SEQ ID NO: 476221 - RNA, 24 nt, Artificial Sequence
  Synthetic
aauuauaaaauaauuuuccaaaga

SEQ ID NO: 476222 - RNA, 18 nt, Artificial Sequence
  Synthetic
ccacuagcugagcaaaga

SEQ ID NO: 476223 - RNA, 19 nt, Artificial Sequence
  Synthetic
uccacuagcugagcaaaga

SEQ ID NO: 476224 - RNA, 20 nt, Artificial Sequence
  Synthetic
uuccacuagcugagcaaaga

SEQ ID NO: 476225 - RNA, 21 nt, Artificial Sequence
  Synthetic
auuccacuagcugagcaaaga

SEQ ID NO: 476226 - RNA, 22 nt, Artificial Sequence
  Synthetic
gauuccacuagcugagcaaaga

SEQ ID NO: 476227 - RNA, 23 nt, Artificial Sequence
  Synthetic
ggauuccacuagcugagcaaaga

SEQ ID NO: 476228 - RNA, 24 nt, Artificial Sequence
  Synthetic
uggauuccacuagcugagcaaaga

SEQ ID NO: 476229 - RNA, 18 nt, Artificial Sequence
  Synthetic
aggaaacauaggcaaaga

SEQ ID NO: 476230 - RNA, 19 nt, Artificial Sequence
  Synthetic
gaggaaacauaggcaaaga

SEQ ID NO: 476231 - RNA, 20 nt, Artificial Sequence
  Synthetic
agaggaaacauaggcaaaga

SEQ ID NO: 476232 - RNA, 21 nt, Artificial Sequence
  Synthetic
aagaggaaacauaggcaaaga

SEQ ID NO: 476233 - RNA, 22 nt, Artificial Sequence
  Synthetic
aaagaggaaacauaggcaaaga

SEQ ID NO: 476234 - RNA, 23 nt, Artificial Sequence
  Synthetic
gaaagaggaaacauaggcaaaga

SEQ ID NO: 476235 - RNA, 24 nt, Artificial Sequence
  Synthetic
ggaaagaggaaacauaggcaaaga

SEQ ID NO: 476236 - RNA, 18 nt, Artificial Sequence
  Synthetic
caguuguacuggcaaaga

SEQ ID NO: 476237 - RNA, 19 nt, Artificial Sequence
  Synthetic
gcaguuguacuggcaaaga

SEQ ID NO: 476238 - RNA, 20 nt, Artificial Sequence
  Synthetic
ugcaguuguacuggcaaaga

SEQ ID NO: 476239 - RNA, 21 nt, Artificial Sequence
  Synthetic
augcaguuguacuggcaaaga

SEQ ID NO: 476240 - RNA, 22 nt, Artificial Sequence
  Synthetic
caugcaguuguacuggcaaaga

SEQ ID NO: 476241 - RNA, 23 nt, Artificial Sequence
  Synthetic
acaugcaguuguacuggcaaaga

SEQ ID NO: 476242 - RNA, 24 nt, Artificial Sequence
  Synthetic
cacaugcaguuguacuggcaaaga

SEQ ID NO: 476243 - RNA, 18 nt, Artificial Sequence
  Synthetic
acauggaacaugcaaaga

SEQ ID NO: 476244 - RNA, 19 nt, Artificial Sequence
  Synthetic
aacauggaacaugcaaaga

SEQ ID NO: 476245 - RNA, 20 nt, Artificial Sequence
  Synthetic
gaacauggaacaugcaaaga

SEQ ID NO: 476246 - RNA, 21 nt, Artificial Sequence
  Synthetic
ggaacauggaacaugcaaaga

SEQ ID NO: 476247 - RNA, 22 nt, Artificial Sequence
  Synthetic
gggaacauggaacaugcaaaga

SEQ ID NO: 476248 - RNA, 23 nt, Artificial Sequence
  Synthetic
agggaacauggaacaugcaaaga

SEQ ID NO: 476249 - RNA, 24 nt, Artificial Sequence
  Synthetic
gagggaacauggaacaugcaaaga

SEQ ID NO: 476250 - RNA, 18 nt, Artificial Sequence
  Synthetic
acuuuaacgcugcaaaga

SEQ ID NO: 476251 - RNA, 19 nt, Artificial Sequence
  Synthetic
gacuuuaacgcugcaaaga

SEQ ID NO: 476252 - RNA, 20 nt, Artificial Sequence
  Synthetic
agacuuuaacgcugcaaaga

SEQ ID NO: 476253 - RNA, 21 nt, Artificial Sequence
  Synthetic
aagacuuuaacgcugcaaaga

SEQ ID NO: 476254 - RNA, 22 nt, Artificial Sequence
  Synthetic
aaagacuuuaacgcugcaaaga

SEQ ID NO: 476255 - RNA, 23 nt, Artificial Sequence
  Synthetic
uaaagacuuuaacgcugcaaaga

SEQ ID NO: 476256 - RNA, 24 nt, Artificial Sequence
  Synthetic
auaaagacuuuaacgcugcaaaga

SEQ ID NO: 476257 - RNA, 18 nt, Artificial Sequence
  Synthetic
auauacacauugcaaaga

SEQ ID NO: 476258 - RNA, 19 nt, Artificial Sequence
  Synthetic
gauauacacauugcaaaga

SEQ ID NO: 476259 - RNA, 20 nt, Artificial Sequence
  Synthetic
ggauauacacauugcaaaga

SEQ ID NO: 476260 - RNA, 21 nt, Artificial Sequence
  Synthetic
uggauauacacauugcaaaga

SEQ ID NO: 476261 - RNA, 22 nt, Artificial Sequence
  Synthetic
cuggauauacacauugcaaaga

SEQ ID NO: 476262 - RNA, 23 nt, Artificial Sequence
  Synthetic
acuggauauacacauugcaaaga

SEQ ID NO: 476263 - RNA, 24 nt, Artificial Sequence
  Synthetic
aacuggauauacacauugcaaaga

SEQ ID NO: 476264 - RNA, 18 nt, Artificial Sequence
  Synthetic
aacucauaaaaucaaaga

SEQ ID NO: 476265 - RNA, 19 nt, Artificial Sequence
  Synthetic
aaacucauaaaaucaaaga

SEQ ID NO: 476266 - RNA, 20 nt, Artificial Sequence
  Synthetic
caaacucauaaaaucaaaga

SEQ ID NO: 476267 - RNA, 21 nt, Artificial Sequence
  Synthetic
ucaaacucauaaaaucaaaga

SEQ ID NO: 476268 - RNA, 22 nt, Artificial Sequence
  Synthetic
gucaaacucauaaaaucaaaga

SEQ ID NO: 476269 - RNA, 23 nt, Artificial Sequence
  Synthetic
agucaaacucauaaaaucaaaga

SEQ ID NO: 476270 - RNA, 24 nt, Artificial Sequence
  Synthetic
cagucaaacucauaaaaucaaaga

SEQ ID NO: 476271 - RNA, 18 nt, Artificial Sequence
  Synthetic
ugggaggaaccucaaaga

SEQ ID NO: 476272 - RNA, 19 nt, Artificial Sequence
  Synthetic
gugggaggaaccucaaaga

SEQ ID NO: 476273 - RNA, 20 nt, Artificial Sequence
  Synthetic
ugugggaggaaccucaaaga

SEQ ID NO: 476274 - RNA, 21 nt, Artificial Sequence
  Synthetic
augugggaggaaccucaaaga

SEQ ID NO: 476275 - RNA, 22 nt, Artificial Sequence
  Synthetic
gaugugggaggaaccucaaaga

SEQ ID NO: 476276 - RNA, 23 nt, Artificial Sequence
  Synthetic
ggaugugggaggaaccucaaaga

SEQ ID NO: 476277 - RNA, 24 nt, Artificial Sequence
  Synthetic
uggaugugggaggaaccucaaaga

SEQ ID NO: 476278 - RNA, 18 nt, Artificial Sequence
  Synthetic
aauaacagaccucaaaga

SEQ ID NO: 476279 - RNA, 19 nt, Artificial Sequence
  Synthetic
aaauaacagaccucaaaga

SEQ ID NO: 476280 - RNA, 20 nt, Artificial Sequence
  Synthetic
uaaauaacagaccucaaaga

SEQ ID NO: 476281 - RNA, 21 nt, Artificial Sequence
  Synthetic
uuaaauaacagaccucaaaga

SEQ ID NO: 476282 - RNA, 22 nt, Artificial Sequence
  Synthetic
auuaaauaacagaccucaaaga

SEQ ID NO: 476283 - RNA, 23 nt, Artificial Sequence
  Synthetic
gauuaaauaacagaccucaaaga

SEQ ID NO: 476284 - RNA, 24 nt, Artificial Sequence
  Synthetic
agauuaaauaacagaccucaaaga

SEQ ID NO: 476285 - RNA, 18 nt, Artificial Sequence
  Synthetic
ugugccuuagcucaaaga

SEQ ID NO: 476286 - RNA, 19 nt, Artificial Sequence
  Synthetic
augugccuuagcucaaaga

SEQ ID NO: 476287 - RNA, 20 nt, Artificial Sequence
  Synthetic
uaugugccuuagcucaaaga

SEQ ID NO: 476288 - RNA, 21 nt, Artificial Sequence
  Synthetic
auaugugccuuagcucaaaga

SEQ ID NO: 476289 - RNA, 22 nt, Artificial Sequence
  Synthetic
aauaugugccuuagcucaaaga

SEQ ID NO: 476290 - RNA, 23 nt, Artificial Sequence
  Synthetic
uaauaugugccuuagcucaaaga

SEQ ID NO: 476291 - RNA, 24 nt, Artificial Sequence
  Synthetic
guaauaugugccuuagcucaaaga

SEQ ID NO: 476292 - RNA, 18 nt, Artificial Sequence
  Synthetic
gaaaacgauugucaaaga

SEQ ID NO: 476293 - RNA, 19 nt, Artificial Sequence
  Synthetic
ugaaaacgauugucaaaga

SEQ ID NO: 476294 - RNA, 20 nt, Artificial Sequence
  Synthetic
uugaaaacgauugucaaaga

SEQ ID NO: 476295 - RNA, 21 nt, Artificial Sequence
  Synthetic
uuugaaaacgauugucaaaga

SEQ ID NO: 476296 - RNA, 22 nt, Artificial Sequence
  Synthetic
guuugaaaacgauugucaaaga

SEQ ID NO: 476297 - RNA, 23 nt, Artificial Sequence
  Synthetic
aguuugaaaacgauugucaaaga

SEQ ID NO: 476298 - RNA, 24 nt, Artificial Sequence
  Synthetic
aaguuugaaaacgauugucaaaga

SEQ ID NO: 476299 - RNA, 18 nt, Artificial Sequence
  Synthetic
cuucaagguugucaaaga

SEQ ID NO: 476300 - RNA, 19 nt, Artificial Sequence
  Synthetic
ccuucaagguugucaaaga

SEQ ID NO: 476301 - RNA, 20 nt, Artificial Sequence
  Synthetic
gccuucaagguugucaaaga

SEQ ID NO: 476302 - RNA, 21 nt, Artificial Sequence
  Synthetic
ugccuucaagguugucaaaga

SEQ ID NO: 476303 - RNA, 22 nt, Artificial Sequence
  Synthetic
gugccuucaagguugucaaaga

SEQ ID NO: 476304 - RNA, 23 nt, Artificial Sequence
  Synthetic
agugccuucaagguugucaaaga

SEQ ID NO: 476305 - RNA, 24 nt, Artificial Sequence
  Synthetic
aagugccuucaagguugucaaaga

SEQ ID NO: 476306 - RNA, 18 nt, Artificial Sequence
  Synthetic
acacagccuguucaaaga

SEQ ID NO: 476307 - RNA, 19 nt, Artificial Sequence
  Synthetic
gacacagccuguucaaaga

SEQ ID NO: 476308 - RNA, 20 nt, Artificial Sequence
  Synthetic
agacacagccuguucaaaga

SEQ ID NO: 476309 - RNA, 21 nt, Artificial Sequence
  Synthetic
aagacacagccuguucaaaga

SEQ ID NO: 476310 - RNA, 22 nt, Artificial Sequence
  Synthetic
uaagacacagccuguucaaaga

SEQ ID NO: 476311 - RNA, 23 nt, Artificial Sequence
  Synthetic
auaagacacagccuguucaaaga

SEQ ID NO: 476312 - RNA, 24 nt, Artificial Sequence
  Synthetic
aauaagacacagccuguucaaaga

SEQ ID NO: 476313 - RNA, 18 nt, Artificial Sequence
  Synthetic
ugaaacauauuucaaaga

SEQ ID NO: 476314 - RNA, 19 nt, Artificial Sequence
  Synthetic
uugaaacauauuucaaaga

SEQ ID NO: 476315 - RNA, 20 nt, Artificial Sequence
  Synthetic
cuugaaacauauuucaaaga

SEQ ID NO: 476316 - RNA, 21 nt, Artificial Sequence
  Synthetic
acuugaaacauauuucaaaga

SEQ ID NO: 476317 - RNA, 22 nt, Artificial Sequence
  Synthetic
cacuugaaacauauuucaaaga

SEQ ID NO: 476318 - RNA, 23 nt, Artificial Sequence
  Synthetic
ucacuugaaacauauuucaaaga

SEQ ID NO: 476319 - RNA, 24 nt, Artificial Sequence
  Synthetic
aucacuugaaacauauuucaaaga

SEQ ID NO: 476320 - RNA, 18 nt, Artificial Sequence
  Synthetic
gaguuacuguuucaaaga

SEQ ID NO: 476321 - RNA, 19 nt, Artificial Sequence
  Synthetic
ugaguuacuguuucaaaga

SEQ ID NO: 476322 - RNA, 20 nt, Artificial Sequence
  Synthetic
augaguuacuguuucaaaga

SEQ ID NO: 476323 - RNA, 21 nt, Artificial Sequence
  Synthetic
aaugaguuacuguuucaaaga

SEQ ID NO: 476324 - RNA, 22 nt, Artificial Sequence
  Synthetic
gaaugaguuacuguuucaaaga

SEQ ID NO: 476325 - RNA, 23 nt, Artificial Sequence
  Synthetic
ugaaugaguuacuguuucaaaga

SEQ ID NO: 476326 - RNA, 24 nt, Artificial Sequence
  Synthetic
cugaaugaguuacuguuucaaaga

SEQ ID NO: 476327 - RNA, 18 nt, Artificial Sequence
  Synthetic
aaagaaaaaaaagaaaga

SEQ ID NO: 476328 - RNA, 19 nt, Artificial Sequence
  Synthetic
aaaagaaaaaaaagaaaga

SEQ ID NO: 476329 - RNA, 20 nt, Artificial Sequence
  Synthetic
aaaaagaaaaaaaagaaaga

SEQ ID NO: 476330 - RNA, 21 nt, Artificial Sequence
  Synthetic
gaaaaagaaaaaaaagaaaga

SEQ ID NO: 476331 - RNA, 22 nt, Artificial Sequence
  Synthetic
agaaaaagaaaaaaaagaaaga

SEQ ID NO: 476332 - RNA, 23 nt, Artificial Sequence
  Synthetic
aagaaaaagaaaaaaaagaaaga

SEQ ID NO: 476333 - RNA, 24 nt, Artificial Sequence
  Synthetic
aaagaaaaagaaaaaaaagaaaga

SEQ ID NO: 476334 - RNA, 18 nt, Artificial Sequence
  Synthetic
acaaagaaaaaagaaaga

SEQ ID NO: 476335 - RNA, 19 nt, Artificial Sequence
  Synthetic
cacaaagaaaaaagaaaga

SEQ ID NO: 476336 - RNA, 20 nt, Artificial Sequence
  Synthetic
acacaaagaaaaaagaaaga

SEQ ID NO: 476337 - RNA, 21 nt, Artificial Sequence
  Synthetic
cacacaaagaaaaaagaaaga

SEQ ID NO: 476338 - RNA, 22 nt, Artificial Sequence
  Synthetic
acacacaaagaaaaaagaaaga

SEQ ID NO: 476339 - RNA, 23 nt, Artificial Sequence
  Synthetic
cacacacaaagaaaaaagaaaga

SEQ ID NO: 476340 - RNA, 24 nt, Artificial Sequence
  Synthetic
acacacacaaagaaaaaagaaaga

SEQ ID NO: 476341 - RNA, 18 nt, Artificial Sequence
  Synthetic
aauaauaaaaaagaaaga

SEQ ID NO: 476342 - RNA, 19 nt, Artificial Sequence
  Synthetic
uaauaauaaaaaagaaaga

SEQ ID NO: 476343 - RNA, 20 nt, Artificial Sequence
  Synthetic
auaauaauaaaaaagaaaga

SEQ ID NO: 476344 - RNA, 21 nt, Artificial Sequence
  Synthetic
uauaauaauaaaaaagaaaga

SEQ ID NO: 476345 - RNA, 22 nt, Artificial Sequence
  Synthetic
guauaauaauaaaaaagaaaga

SEQ ID NO: 476346 - RNA, 23 nt, Artificial Sequence
  Synthetic
aguauaauaauaaaaaagaaaga

SEQ ID NO: 476347 - RNA, 24 nt, Artificial Sequence
  Synthetic
aaguauaauaauaaaaaagaaaga

SEQ ID NO: 476348 - RNA, 18 nt, Artificial Sequence
  Synthetic
auaauuaaaaaagaaaga

SEQ ID NO: 476349 - RNA, 19 nt, Artificial Sequence
  Synthetic
aauaauuaaaaaagaaaga

SEQ ID NO: 476350 - RNA, 20 nt, Artificial Sequence
  Synthetic
caauaauuaaaaaagaaaga

SEQ ID NO: 476351 - RNA, 21 nt, Artificial Sequence
  Synthetic
ucaauaauuaaaaaagaaaga

SEQ ID NO: 476352 - RNA, 22 nt, Artificial Sequence
  Synthetic
cucaauaauuaaaaaagaaaga

SEQ ID NO: 476353 - RNA, 23 nt, Artificial Sequence
  Synthetic
ucucaauaauuaaaaaagaaaga

SEQ ID NO: 476354 - RNA, 24 nt, Artificial Sequence
  Synthetic
uucucaauaauuaaaaaagaaaga

SEQ ID NO: 476355 - RNA, 18 nt, Artificial Sequence
  Synthetic
ucccuuguaaaagaaaga

SEQ ID NO: 476356 - RNA, 19 nt, Artificial Sequence
  Synthetic
uucccuuguaaaagaaaga

SEQ ID NO: 476357 - RNA, 20 nt, Artificial Sequence
  Synthetic
guucccuuguaaaagaaaga

SEQ ID NO: 476358 - RNA, 21 nt, Artificial Sequence
  Synthetic
gguucccuuguaaaagaaaga

SEQ ID NO: 476359 - RNA, 22 nt, Artificial Sequence
  Synthetic
ggguucccuuguaaaagaaaga

SEQ ID NO: 476360 - RNA, 23 nt, Artificial Sequence
  Synthetic
aggguucccuuguaaaagaaaga

SEQ ID NO: 476361 - RNA, 24 nt, Artificial Sequence
  Synthetic
aaggguucccuuguaaaagaaaga

SEQ ID NO: 476362 - RNA, 18 nt, Artificial Sequence
  Synthetic
aaagaaaagaaagaaaga

SEQ ID NO: 476363 - RNA, 19 nt, Artificial Sequence
  Synthetic
aaaagaaaagaaagaaaga

SEQ ID NO: 476364 - RNA, 20 nt, Artificial Sequence
  Synthetic
gaaaagaaaagaaagaaaga

SEQ ID NO: 476365 - RNA, 21 nt, Artificial Sequence
  Synthetic
agaaaagaaaagaaagaaaga

SEQ ID NO: 476366 - RNA, 22 nt, Artificial Sequence
  Synthetic
aagaaaagaaaagaaagaaaga

SEQ ID NO: 476367 - RNA, 23 nt, Artificial Sequence
  Synthetic
aaagaaaagaaaagaaagaaaga

SEQ ID NO: 476368 - RNA, 24 nt, Artificial Sequence
  Synthetic
gaaagaaaagaaaagaaagaaaga

SEQ ID NO: 476369 - RNA, 18 nt, Artificial Sequence
  Synthetic
gaaagaaagaaagaaaga

SEQ ID NO: 476370 - RNA, 19 nt, Artificial Sequence
  Synthetic
agaaagaaagaaagaaaga

SEQ ID NO: 476371 - RNA, 20 nt, Artificial Sequence
  Synthetic
aagaaagaaagaaagaaaga

SEQ ID NO: 476372 - RNA, 21 nt, Artificial Sequence
  Synthetic
aaagaaagaaagaaagaaaga

SEQ ID NO: 476373 - RNA, 22 nt, Artificial Sequence
  Synthetic
gaaagaaagaaagaaagaaaga

SEQ ID NO: 476374 - RNA, 23 nt, Artificial Sequence
  Synthetic
agaaagaaagaaagaaagaaaga

SEQ ID NO: 476375 - RNA, 24 nt, Artificial Sequence
  Synthetic
aagaaagaaagaaagaaagaaaga

SEQ ID NO: 476376 - RNA, 24 nt, Artificial Sequence
  Synthetic
cagaaagaaagaaagaaagaaaga

SEQ ID NO: 476377 - RNA, 20 nt, Artificial Sequence
  Synthetic
cagaaagaaagaaagaaaga

SEQ ID NO: 476378 - RNA, 21 nt, Artificial Sequence
  Synthetic
acagaaagaaagaaagaaaga

SEQ ID NO: 476379 - RNA, 22 nt, Artificial Sequence
  Synthetic
gacagaaagaaagaaagaaaga

SEQ ID NO: 476380 - RNA, 23 nt, Artificial Sequence
  Synthetic
agacagaaagaaagaaagaaaga

SEQ ID NO: 476381 - RNA, 24 nt, Artificial Sequence
  Synthetic
cagacagaaagaaagaaagaaaga

SEQ ID NO: 476382 - RNA, 18 nt, Artificial Sequence
  Synthetic
agaagaaagaaagaaaga

SEQ ID NO: 476383 - RNA, 19 nt, Artificial Sequence
  Synthetic
aagaagaaagaaagaaaga

SEQ ID NO: 476384 - RNA, 20 nt, Artificial Sequence
  Synthetic
aaagaagaaagaaagaaaga

SEQ ID NO: 476385 - RNA, 21 nt, Artificial Sequence
  Synthetic
gaaagaagaaagaaagaaaga

SEQ ID NO: 476386 - RNA, 22 nt, Artificial Sequence
  Synthetic
agaaagaagaaagaaagaaaga

SEQ ID NO: 476387 - RNA, 23 nt, Artificial Sequence
  Synthetic
aagaaagaagaaagaaagaaaga

SEQ ID NO: 476388 - RNA, 24 nt, Artificial Sequence
  Synthetic
aaagaaagaagaaagaaagaaaga

SEQ ID NO: 476389 - RNA, 18 nt, Artificial Sequence
  Synthetic
gacagaaagaaagaaaga

SEQ ID NO: 476390 - RNA, 19 nt, Artificial Sequence
  Synthetic
agacagaaagaaagaaaga

SEQ ID NO: 476391 - RNA, 20 nt, Artificial Sequence
  Synthetic
cagacagaaagaaagaaaga

SEQ ID NO: 476392 - RNA, 21 nt, Artificial Sequence
  Synthetic
acagacagaaagaaagaaaga

SEQ ID NO: 476393 - RNA, 22 nt, Artificial Sequence
  Synthetic
gacagacagaaagaaagaaaga

SEQ ID NO: 476394 - RNA, 23 nt, Artificial Sequence
  Synthetic
agacagacagaaagaaagaaaga

SEQ ID NO: 476395 - RNA, 24 nt, Artificial Sequence
  Synthetic
cagacagacagaaagaaagaaaga

SEQ ID NO: 476396 - RNA, 18 nt, Artificial Sequence
  Synthetic
agaaagaagaaagaaaga

SEQ ID NO: 476397 - RNA, 19 nt, Artificial Sequence
  Synthetic
aagaaagaagaaagaaaga

SEQ ID NO: 476398 - RNA, 20 nt, Artificial Sequence
  Synthetic
aaagaaagaagaaagaaaga

SEQ ID NO: 476399 - RNA, 21 nt, Artificial Sequence
  Synthetic
gaaagaaagaagaaagaaaga

SEQ ID NO: 476400 - RNA, 22 nt, Artificial Sequence
  Synthetic
agaaagaaagaagaaagaaaga

SEQ ID NO: 476401 - RNA, 23 nt, Artificial Sequence
  Synthetic
aagaaagaaagaagaaagaaaga

SEQ ID NO: 476402 - RNA, 24 nt, Artificial Sequence
  Synthetic
aaagaaagaaagaagaaagaaaga

SEQ ID NO: 476403 - RNA, 18 nt, Artificial Sequence
  Synthetic
aagaagaagaaagaaaga

SEQ ID NO: 476404 - RNA, 19 nt, Artificial Sequence
  Synthetic
aaagaagaagaaagaaaga

SEQ ID NO: 476405 - RNA, 20 nt, Artificial Sequence
  Synthetic
aaaagaagaagaaagaaaga

SEQ ID NO: 476406 - RNA, 21 nt, Artificial Sequence
  Synthetic
aaaaagaagaagaaagaaaga

SEQ ID NO: 476407 - RNA, 22 nt, Artificial Sequence
  Synthetic
aaaaaagaagaagaaagaaaga

SEQ ID NO: 476408 - RNA, 23 nt, Artificial Sequence
  Synthetic
aaaaaaagaagaagaaagaaaga

SEQ ID NO: 476409 - RNA, 24 nt, Artificial Sequence
  Synthetic
aaaaaaaagaagaagaaagaaaga

SEQ ID NO: 476410 - RNA, 18 nt, Artificial Sequence
  Synthetic
gacagacagaaagaaaga

SEQ ID NO: 476411 - RNA, 19 nt, Artificial Sequence
  Synthetic
agacagacagaaagaaaga

SEQ ID NO: 476412 - RNA, 20 nt, Artificial Sequence
  Synthetic
cagacagacagaaagaaaga

SEQ ID NO: 476413 - RNA, 21 nt, Artificial Sequence
  Synthetic
acagacagacagaaagaaaga

SEQ ID NO: 476414 - RNA, 22 nt, Artificial Sequence
  Synthetic
gacagacagacagaaagaaaga

SEQ ID NO: 476415 - RNA, 23 nt, Artificial Sequence
  Synthetic
agacagacagacagaaagaaaga

SEQ ID NO: 476416 - RNA, 24 nt, Artificial Sequence
  Synthetic
cagacagacagacagaaagaaaga

SEQ ID NO: 476417 - RNA, 18 nt, Artificial Sequence
  Synthetic
aagaaagagaaagaaaga

SEQ ID NO: 476418 - RNA, 19 nt, Artificial Sequence
  Synthetic
aaagaaagagaaagaaaga

SEQ ID NO: 476419 - RNA, 20 nt, Artificial Sequence
  Synthetic
gaaagaaagagaaagaaaga

SEQ ID NO: 476420 - RNA, 21 nt, Artificial Sequence
  Synthetic
agaaagaaagagaaagaaaga

SEQ ID NO: 476421 - RNA, 22 nt, Artificial Sequence
  Synthetic
aagaaagaaagagaaagaaaga

SEQ ID NO: 476422 - RNA, 23 nt, Artificial Sequence
  Synthetic
aaagaaagaaagagaaagaaaga

SEQ ID NO: 476423 - RNA, 24 nt, Artificial Sequence
  Synthetic
gaaagaaagaaagagaaagaaaga

SEQ ID NO: 476424 - RNA, 18 nt, Artificial Sequence
  Synthetic
aaaggaaggaaagaaaga

SEQ ID NO: 476425 - RNA, 19 nt, Artificial Sequence
  Synthetic
gaaaggaaggaaagaaaga

SEQ ID NO: 476426 - RNA, 20 nt, Artificial Sequence
  Synthetic
agaaaggaaggaaagaaaga

SEQ ID NO: 476427 - RNA, 21 nt, Artificial Sequence
  Synthetic
aagaaaggaaggaaagaaaga

SEQ ID NO: 476428 - RNA, 22 nt, Artificial Sequence
  Synthetic
aaagaaaggaaggaaagaaaga

SEQ ID NO: 476429 - RNA, 23 nt, Artificial Sequence
  Synthetic
gaaagaaaggaaggaaagaaaga

SEQ ID NO: 476430 - RNA, 24 nt, Artificial Sequence
  Synthetic
agaaagaaaggaaggaaagaaaga

SEQ ID NO: 476431 - RNA, 18 nt, Artificial Sequence
  Synthetic
uuuuugaguaaagaaaga

SEQ ID NO: 476432 - RNA, 19 nt, Artificial Sequence
  Synthetic
uuuuuugaguaaagaaaga

SEQ ID NO: 476433 - RNA, 20 nt, Artificial Sequence
  Synthetic
uuuuuuugaguaaagaaaga

SEQ ID NO: 476434 - RNA, 21 nt, Artificial Sequence
  Synthetic
cuuuuuuugaguaaagaaaga

SEQ ID NO: 476435 - RNA, 22 nt, Artificial Sequence
  Synthetic
ccuuuuuuugaguaaagaaaga

SEQ ID NO: 476436 - RNA, 23 nt, Artificial Sequence
  Synthetic
gccuuuuuuugaguaaagaaaga

SEQ ID NO: 476437 - RNA, 24 nt, Artificial Sequence
  Synthetic
ggccuuuuuuugaguaaagaaaga

SEQ ID NO: 476438 - RNA, 18 nt, Artificial Sequence
  Synthetic
aaaaaaaaagaagaaaga

SEQ ID NO: 476439 - RNA, 19 nt, Artificial Sequence
  Synthetic
aaaaaaaaaagaagaaaga

SEQ ID NO: 476440 - RNA, 20 nt, Artificial Sequence
  Synthetic
aaaaaaaaaaagaagaaaga

SEQ ID NO: 476441 - RNA, 21 nt, Artificial Sequence
  Synthetic
aaaaaaaaaaaagaagaaaga

SEQ ID NO: 476442 - RNA, 22 nt, Artificial Sequence
  Synthetic
aaaaaaaaaaaaagaagaaaga

SEQ ID NO: 476443 - RNA, 23 nt, Artificial Sequence
  Synthetic
gaaaaaaaaaaaaagaagaaaga

SEQ ID NO: 476444 - RNA, 24 nt, Artificial Sequence
  Synthetic
ugaaaaaaaaaaaaagaagaaaga

SEQ ID NO: 476445 - RNA, 18 nt, Artificial Sequence
  Synthetic
agaaagaaagaagaaaga

SEQ ID NO: 476446 - RNA, 19 nt, Artificial Sequence
  Synthetic
aagaaagaaagaagaaaga

SEQ ID NO: 476447 - RNA, 20 nt, Artificial Sequence
  Synthetic
aaagaaagaaagaagaaaga

SEQ ID NO: 476448 - RNA, 21 nt, Artificial Sequence
  Synthetic
gaaagaaagaaagaagaaaga

SEQ ID NO: 476449 - RNA, 22 nt, Artificial Sequence
  Synthetic
agaaagaaagaaagaagaaaga

SEQ ID NO: 476450 - RNA, 23 nt, Artificial Sequence
  Synthetic
aagaaagaaagaaagaagaaaga

SEQ ID NO: 476451 - RNA, 24 nt, Artificial Sequence
  Synthetic
aaagaaagaaagaaagaagaaaga

SEQ ID NO: 476452 - RNA, 18 nt, Artificial Sequence
  Synthetic
aaaaaagaagaagaaaga

SEQ ID NO: 476453 - RNA, 19 nt, Artificial Sequence
  Synthetic
aaaaaaagaagaagaaaga

SEQ ID NO: 476454 - RNA, 20 nt, Artificial Sequence
  Synthetic
aaaaaaaagaagaagaaaga

SEQ ID NO: 476455 - RNA, 21 nt, Artificial Sequence
  Synthetic
aaaaaaaaagaagaagaaaga

SEQ ID NO: 476456 - RNA, 22 nt, Artificial Sequence
  Synthetic
aaaaaaaaaagaagaagaaaga

SEQ ID NO: 476457 - RNA, 23 nt, Artificial Sequence
  Synthetic
aaaaaaaaaaagaagaagaaaga

SEQ ID NO: 476458 - RNA, 24 nt, Artificial Sequence
  Synthetic
caaaaaaaaaaagaagaagaaaga

SEQ ID NO: 476459 - RNA, 18 nt, Artificial Sequence
  Synthetic
gacagacagacagaaaga

SEQ ID NO: 476460 - RNA, 19 nt, Artificial Sequence
  Synthetic
agacagacagacagaaaga

SEQ ID NO: 476461 - RNA, 20 nt, Artificial Sequence
  Synthetic
cagacagacagacagaaaga

SEQ ID NO: 476462 - RNA, 21 nt, Artificial Sequence
  Synthetic
acagacagacagacagaaaga

SEQ ID NO: 476463 - RNA, 22 nt, Artificial Sequence
  Synthetic
gacagacagacagacagaaaga

SEQ ID NO: 476464 - RNA, 23 nt, Artificial Sequence
  Synthetic
agacagacagacagacagaaaga

SEQ ID NO: 476465 - RNA, 24 nt, Artificial Sequence
  Synthetic
aagacagacagacagacagaaaga

SEQ ID NO: 476466 - RNA, 18 nt, Artificial Sequence
  Synthetic
aggaugcauccagaaaga

SEQ ID NO: 476467 - RNA, 19 nt, Artificial Sequence
  Synthetic
gaggaugcauccagaaaga

SEQ ID NO: 476468 - RNA, 20 nt, Artificial Sequence
  Synthetic
agaggaugcauccagaaaga

SEQ ID NO: 476469 - RNA, 21 nt, Artificial Sequence
  Synthetic
aagaggaugcauccagaaaga

SEQ ID NO: 476470 - RNA, 22 nt, Artificial Sequence
  Synthetic
aaagaggaugcauccagaaaga

SEQ ID NO: 476471 - RNA, 23 nt, Artificial Sequence
  Synthetic
gaaagaggaugcauccagaaaga

SEQ ID NO: 476472 - RNA, 24 nt, Artificial Sequence
  Synthetic
ugaaagaggaugcauccagaaaga

SEQ ID NO: 476473 - RNA, 18 nt, Artificial Sequence
  Synthetic
uuuaguaaagcagaaaga

SEQ ID NO: 476474 - RNA, 19 nt, Artificial Sequence
  Synthetic
cuuuaguaaagcagaaaga

SEQ ID NO: 476475 - RNA, 20 nt, Artificial Sequence
  Synthetic
gcuuuaguaaagcagaaaga

SEQ ID NO: 476476 - RNA, 21 nt, Artificial Sequence
  Synthetic
ugcuuuaguaaagcagaaaga

SEQ ID NO: 476477 - RNA, 22 nt, Artificial Sequence
  Synthetic
cugcuuuaguaaagcagaaaga

SEQ ID NO: 476478 - RNA, 23 nt, Artificial Sequence
  Synthetic
acugcuuuaguaaagcagaaaga

SEQ ID NO: 476479 - RNA, 24 nt, Artificial Sequence
  Synthetic
gacugcuuuaguaaagcagaaaga

SEQ ID NO: 476480 - RNA, 18 nt, Artificial Sequence
  Synthetic
ugucauuuagcagaaaga

SEQ ID NO: 476481 - RNA, 19 nt, Artificial Sequence
  Synthetic
gugucauuuagcagaaaga

SEQ ID NO: 476482 - RNA, 20 nt, Artificial Sequence
  Synthetic
agugucauuuagcagaaaga

SEQ ID NO: 476483 - RNA, 21 nt, Artificial Sequence
  Synthetic
gagugucauuuagcagaaaga

SEQ ID NO: 476484 - RNA, 22 nt, Artificial Sequence
  Synthetic
ugagugucauuuagcagaaaga

SEQ ID NO: 476485 - RNA, 23 nt, Artificial Sequence
  Synthetic
uugagugucauuuagcagaaaga

SEQ ID NO: 476486 - RNA, 24 nt, Artificial Sequence
  Synthetic
auugagugucauuuagcagaaaga

SEQ ID NO: 476487 - RNA, 18 nt, Artificial Sequence
  Synthetic
ugugggcuggcagaaaga

SEQ ID NO: 476488 - RNA, 19 nt, Artificial Sequence
  Synthetic
uugugggcuggcagaaaga

SEQ ID NO: 476489 - RNA, 20 nt, Artificial Sequence
  Synthetic
uuugugggcuggcagaaaga

SEQ ID NO: 476490 - RNA, 21 nt, Artificial Sequence
  Synthetic
uuuugugggcuggcagaaaga

SEQ ID NO: 476491 - RNA, 22 nt, Artificial Sequence
  Synthetic
cuuuugugggcuggcagaaaga

SEQ ID NO: 476492 - RNA, 23 nt, Artificial Sequence
  Synthetic
ccuuuugugggcuggcagaaaga

SEQ ID NO: 476493 - RNA, 24 nt, Artificial Sequence
  Synthetic
uccuuuugugggcuggcagaaaga

SEQ ID NO: 476494 - RNA, 18 nt, Artificial Sequence
  Synthetic
uccauaaaaagagaaaga

SEQ ID NO: 476495 - RNA, 19 nt, Artificial Sequence
  Synthetic
cuccauaaaaagagaaaga

SEQ ID NO: 476496 - RNA, 20 nt, Artificial Sequence
  Synthetic
acuccauaaaaagagaaaga

SEQ ID NO: 476497 - RNA, 21 nt, Artificial Sequence
  Synthetic
aacuccauaaaaagagaaaga

SEQ ID NO: 476498 - RNA, 22 nt, Artificial Sequence
  Synthetic
gaacuccauaaaaagagaaaga

SEQ ID NO: 476499 - RNA, 23 nt, Artificial Sequence
  Synthetic
ugaacuccauaaaaagagaaaga

SEQ ID NO: 476500 - RNA, 24 nt, Artificial Sequence
  Synthetic
gugaacuccauaaaaagagaaaga

SEQ ID NO: 476501 - RNA, 18 nt, Artificial Sequence
  Synthetic
aagaaagaaagagaaaga

SEQ ID NO: 476502 - RNA, 19 nt, Artificial Sequence
  Synthetic
aaagaaagaaagagaaaga

SEQ ID NO: 476503 - RNA, 20 nt, Artificial Sequence
  Synthetic
gaaagaaagaaagagaaaga

SEQ ID NO: 476504 - RNA, 21 nt, Artificial Sequence
  Synthetic
ggaaagaaagaaagagaaaga

SEQ ID NO: 476505 - RNA, 22 nt, Artificial Sequence
  Synthetic
aggaaagaaagaaagagaaaga

SEQ ID NO: 476506 - RNA, 23 nt, Artificial Sequence
  Synthetic
aaggaaagaaagaaagagaaaga

SEQ ID NO: 476507 - RNA, 24 nt, Artificial Sequence
  Synthetic
gaaggaaagaaagaaagagaaaga

SEQ ID NO: 476508 - RNA, 18 nt, Artificial Sequence
  Synthetic
gacagagaaagagaaaga

SEQ ID NO: 476509 - RNA, 19 nt, Artificial Sequence
  Synthetic
ugacagagaaagagaaaga

SEQ ID NO: 476510 - RNA, 20 nt, Artificial Sequence
  Synthetic
augacagagaaagagaaaga

SEQ ID NO: 476511 - RNA, 21 nt, Artificial Sequence
  Synthetic
gaugacagagaaagagaaaga

SEQ ID NO: 476512 - RNA, 22 nt, Artificial Sequence
  Synthetic
agaugacagagaaagagaaaga

SEQ ID NO: 476513 - RNA, 23 nt, Artificial Sequence
  Synthetic
uagaugacagagaaagagaaaga

SEQ ID NO: 476514 - RNA, 24 nt, Artificial Sequence
  Synthetic
auagaugacagagaaagagaaaga

SEQ ID NO: 476515 - RNA, 18 nt, Artificial Sequence
  Synthetic
guucaaacaagagaaaga

SEQ ID NO: 476516 - RNA, 19 nt, Artificial Sequence
  Synthetic
aguucaaacaagagaaaga

SEQ ID NO: 476517 - RNA, 20 nt, Artificial Sequence
  Synthetic
uaguucaaacaagagaaaga

SEQ ID NO: 476518 - RNA, 21 nt, Artificial Sequence
  Synthetic
guaguucaaacaagagaaaga

SEQ ID NO: 476519 - RNA, 22 nt, Artificial Sequence
  Synthetic
gguaguucaaacaagagaaaga

SEQ ID NO: 476520 - RNA, 23 nt, Artificial Sequence
  Synthetic
agguaguucaaacaagagaaaga

SEQ ID NO: 476521 - RNA, 24 nt, Artificial Sequence
  Synthetic
cagguaguucaaacaagagaaaga

SEQ ID NO: 476522 - RNA, 18 nt, Artificial Sequence
  Synthetic
aaucaggcaagagaaaga

SEQ ID NO: 476523 - RNA, 19 nt, Artificial Sequence
  Synthetic
caaucaggcaagagaaaga

SEQ ID NO: 476524 - RNA, 20 nt, Artificial Sequence
  Synthetic
gcaaucaggcaagagaaaga

SEQ ID NO: 476525 - RNA, 21 nt, Artificial Sequence
  Synthetic
ggcaaucaggcaagagaaaga

SEQ ID NO: 476526 - RNA, 22 nt, Artificial Sequence
  Synthetic
gggcaaucaggcaagagaaaga

SEQ ID NO: 476527 - RNA, 23 nt, Artificial Sequence
  Synthetic
agggcaaucaggcaagagaaaga

SEQ ID NO: 476528 - RNA, 24 nt, Artificial Sequence
  Synthetic
cagggcaaucaggcaagagaaaga

SEQ ID NO: 476529 - RNA, 18 nt, Artificial Sequence
  Synthetic
cugucuccuggagaaaga

SEQ ID NO: 476530 - RNA, 19 nt, Artificial Sequence
  Synthetic
ucugucuccuggagaaaga

SEQ ID NO: 476531 - RNA, 20 nt, Artificial Sequence
  Synthetic
cucugucuccuggagaaaga

SEQ ID NO: 476532 - RNA, 21 nt, Artificial Sequence
  Synthetic
ccucugucuccuggagaaaga

SEQ ID NO: 476533 - RNA, 22 nt, Artificial Sequence
  Synthetic
gccucugucuccuggagaaaga

SEQ ID NO: 476534 - RNA, 23 nt, Artificial Sequence
  Synthetic
ggccucugucuccuggagaaaga

SEQ ID NO: 476535 - RNA, 24 nt, Artificial Sequence
  Synthetic
gggccucugucuccuggagaaaga

SEQ ID NO: 476536 - RNA, 18 nt, Artificial Sequence
  Synthetic
cagagugguugagaaaga

SEQ ID NO: 476537 - RNA, 19 nt, Artificial Sequence
  Synthetic
gcagagugguugagaaaga

SEQ ID NO: 476538 - RNA, 20 nt, Artificial Sequence
  Synthetic
agcagagugguugagaaaga

SEQ ID NO: 476539 - RNA, 21 nt, Artificial Sequence
  Synthetic
cagcagagugguugagaaaga

SEQ ID NO: 476540 - RNA, 22 nt, Artificial Sequence
  Synthetic
acagcagagugguugagaaaga

SEQ ID NO: 476541 - RNA, 23 nt, Artificial Sequence
  Synthetic
uacagcagagugguugagaaaga

SEQ ID NO: 476542 - RNA, 24 nt, Artificial Sequence
  Synthetic
auacagcagagugguugagaaaga

SEQ ID NO: 476543 - RNA, 18 nt, Artificial Sequence
  Synthetic
cuuggauggauagaaaga

SEQ ID NO: 476544 - RNA, 19 nt, Artificial Sequence
  Synthetic
gcuuggauggauagaaaga

SEQ ID NO: 476545 - RNA, 20 nt, Artificial Sequence
  Synthetic
agcuuggauggauagaaaga

SEQ ID NO: 476546 - RNA, 21 nt, Artificial Sequence
  Synthetic
cagcuuggauggauagaaaga

SEQ ID NO: 476547 - RNA, 22 nt, Artificial Sequence
  Synthetic
ccagcuuggauggauagaaaga

SEQ ID NO: 476548 - RNA, 23 nt, Artificial Sequence
  Synthetic
gccagcuuggauggauagaaaga

SEQ ID NO: 476549 - RNA, 24 nt, Artificial Sequence
  Synthetic
agccagcuuggauggauagaaaga

SEQ ID NO: 476550 - RNA, 18 nt, Artificial Sequence
  Synthetic
aggagagagguagaaaga

SEQ ID NO: 476551 - RNA, 19 nt, Artificial Sequence
  Synthetic
aaggagagagguagaaaga

SEQ ID NO: 476552 - RNA, 20 nt, Artificial Sequence
  Synthetic
aaaggagagagguagaaaga

SEQ ID NO: 476553 - RNA, 21 nt, Artificial Sequence
  Synthetic
gaaaggagagagguagaaaga

SEQ ID NO: 476554 - RNA, 22 nt, Artificial Sequence
  Synthetic
ggaaaggagagagguagaaaga

SEQ ID NO: 476555 - RNA, 23 nt, Artificial Sequence
  Synthetic
aggaaaggagagagguagaaaga

SEQ ID NO: 476556 - RNA, 24 nt, Artificial Sequence
  Synthetic
gaggaaaggagagagguagaaaga

SEQ ID NO: 476557 - RNA, 18 nt, Artificial Sequence
  Synthetic
auucgaauauuagaaaga

SEQ ID NO: 476558 - RNA, 19 nt, Artificial Sequence
  Synthetic
aauucgaauauuagaaaga

SEQ ID NO: 476559 - RNA, 20 nt, Artificial Sequence
  Synthetic
caauucgaauauuagaaaga

SEQ ID NO: 476560 - RNA, 21 nt, Artificial Sequence
  Synthetic
gcaauucgaauauuagaaaga

SEQ ID NO: 476561 - RNA, 22 nt, Artificial Sequence
  Synthetic
agcaauucgaauauuagaaaga

SEQ ID NO: 476562 - RNA, 23 nt, Artificial Sequence
  Synthetic
gagcaauucgaauauuagaaaga

SEQ ID NO: 476563 - RNA, 24 nt, Artificial Sequence
  Synthetic
ugagcaauucgaauauuagaaaga

SEQ ID NO: 476564 - RNA, 21 nt, Artificial Sequence
  Synthetic
uacaaaaaauaguuagaaaga

SEQ ID NO: 476565 - RNA, 22 nt, Artificial Sequence
  Synthetic
guacaaaaaauaguuagaaaga

SEQ ID NO: 476566 - RNA, 23 nt, Artificial Sequence
  Synthetic
gguacaaaaaauaguuagaaaga

SEQ ID NO: 476567 - RNA, 24 nt, Artificial Sequence
  Synthetic
ugguacaaaaaauaguuagaaaga

SEQ ID NO: 476568 - RNA, 18 nt, Artificial Sequence
  Synthetic
ucuauguuguuagaaaga

SEQ ID NO: 476569 - RNA, 19 nt, Artificial Sequence
  Synthetic
cucuauguuguuagaaaga

SEQ ID NO: 476570 - RNA, 20 nt, Artificial Sequence
  Synthetic
acucuauguuguuagaaaga

SEQ ID NO: 476571 - RNA, 21 nt, Artificial Sequence
  Synthetic
aacucuauguuguuagaaaga

SEQ ID NO: 476572 - RNA, 22 nt, Artificial Sequence
  Synthetic
gaacucuauguuguuagaaaga

SEQ ID NO: 476573 - RNA, 23 nt, Artificial Sequence
  Synthetic
ugaacucuauguuguuagaaaga

SEQ ID NO: 476574 - RNA, 24 nt, Artificial Sequence
  Synthetic
cugaacucuauguuguuagaaaga

SEQ ID NO: 476575 - RNA, 18 nt, Artificial Sequence
  Synthetic
uccagccugggcgaaaga

SEQ ID NO: 476576 - RNA, 19 nt, Artificial Sequence
  Synthetic
cuccagccugggcgaaaga

SEQ ID NO: 476577 - RNA, 20 nt, Artificial Sequence
  Synthetic
acuccagccugggcgaaaga

SEQ ID NO: 476578 - RNA, 21 nt, Artificial Sequence
  Synthetic
cacuccagccugggcgaaaga

SEQ ID NO: 476579 - RNA, 22 nt, Artificial Sequence
  Synthetic
ucacuccagccugggcgaaaga

SEQ ID NO: 476580 - RNA, 23 nt, Artificial Sequence
  Synthetic
cucacuccagccugggcgaaaga

SEQ ID NO: 476581 - RNA, 24 nt, Artificial Sequence
  Synthetic
ccucacuccagccugggcgaaaga

SEQ ID NO: 476582 - RNA, 18 nt, Artificial Sequence
  Synthetic
aaagaaaggaaggaaaga

SEQ ID NO: 476583 - RNA, 19 nt, Artificial Sequence
  Synthetic
gaaagaaaggaaggaaaga

SEQ ID NO: 476584 - RNA, 20 nt, Artificial Sequence
  Synthetic
agaaagaaaggaaggaaaga

SEQ ID NO: 476585 - RNA, 21 nt, Artificial Sequence
  Synthetic
aagaaagaaaggaaggaaaga

SEQ ID NO: 476586 - RNA, 22 nt, Artificial Sequence
  Synthetic
aaagaaagaaaggaaggaaaga

SEQ ID NO: 476587 - RNA, 23 nt, Artificial Sequence
  Synthetic
gaaagaaagaaaggaaggaaaga

SEQ ID NO: 476588 - RNA, 24 nt, Artificial Sequence
  Synthetic
agaaagaaagaaaggaaggaaaga

SEQ ID NO: 476589 - RNA, 18 nt, Artificial Sequence
  Synthetic
aaucaagggaaggaaaga

SEQ ID NO: 476590 - RNA, 19 nt, Artificial Sequence
  Synthetic
uaaucaagggaaggaaaga

SEQ ID NO: 476591 - RNA, 20 nt, Artificial Sequence
  Synthetic
guaaucaagggaaggaaaga

SEQ ID NO: 476592 - RNA, 21 nt, Artificial Sequence
  Synthetic
gguaaucaagggaaggaaaga

SEQ ID NO: 476593 - RNA, 22 nt, Artificial Sequence
  Synthetic
ggguaaucaagggaaggaaaga

SEQ ID NO: 476594 - RNA, 23 nt, Artificial Sequence
  Synthetic
aggguaaucaagggaaggaaaga

SEQ ID NO: 476595 - RNA, 24 nt, Artificial Sequence
  Synthetic
caggguaaucaagggaaggaaaga

SEQ ID NO: 476596 - RNA, 18 nt, Artificial Sequence
  Synthetic
uucuauuuggaggaaaga

SEQ ID NO: 476597 - RNA, 19 nt, Artificial Sequence
  Synthetic
uuucuauuuggaggaaaga

SEQ ID NO: 476598 - RNA, 20 nt, Artificial Sequence
  Synthetic
auuucuauuuggaggaaaga

SEQ ID NO: 476599 - RNA, 21 nt, Artificial Sequence
  Synthetic
cauuucuauuuggaggaaaga

SEQ ID NO: 476600 - RNA, 22 nt, Artificial Sequence
  Synthetic
ucauuucuauuuggaggaaaga

SEQ ID NO: 476601 - RNA, 23 nt, Artificial Sequence
  Synthetic
gucauuucuauuuggaggaaaga

SEQ ID NO: 476602 - RNA, 24 nt, Artificial Sequence
  Synthetic
cgucauuucuauuuggaggaaaga

SEQ ID NO: 476603 - RNA, 18 nt, Artificial Sequence
  Synthetic
auucagccuuaggaaaga

SEQ ID NO: 476604 - RNA, 19 nt, Artificial Sequence
  Synthetic
uauucagccuuaggaaaga

SEQ ID NO: 476605 - RNA, 20 nt, Artificial Sequence
  Synthetic
cuauucagccuuaggaaaga

SEQ ID NO: 476606 - RNA, 21 nt, Artificial Sequence
  Synthetic
ucuauucagccuuaggaaaga

SEQ ID NO: 476607 - RNA, 22 nt, Artificial Sequence
  Synthetic
cucuauucagccuuaggaaaga

SEQ ID NO: 476608 - RNA, 23 nt, Artificial Sequence
  Synthetic
acucuauucagccuuaggaaaga

SEQ ID NO: 476609 - RNA, 24 nt, Artificial Sequence
  Synthetic
aacucuauucagccuuaggaaaga

SEQ ID NO: 476610 - RNA, 18 nt, Artificial Sequence
  Synthetic
gagggagggagggaaaga

SEQ ID NO: 476611 - RNA, 19 nt, Artificial Sequence
  Synthetic
agagggagggagggaaaga

SEQ ID NO: 476612 - RNA, 20 nt, Artificial Sequence
  Synthetic
gagagggagggagggaaaga

SEQ ID NO: 476613 - RNA, 21 nt, Artificial Sequence
  Synthetic
ggagagggagggagggaaaga

SEQ ID NO: 476614 - RNA, 22 nt, Artificial Sequence
  Synthetic
uggagagggagggagggaaaga

SEQ ID NO: 476615 - RNA, 23 nt, Artificial Sequence
  Synthetic
guggagagggagggagggaaaga

SEQ ID NO: 476616 - RNA, 24 nt, Artificial Sequence
  Synthetic
aguggagagggagggagggaaaga

SEQ ID NO: 476617 - RNA, 18 nt, Artificial Sequence
  Synthetic
auuucagggggggaaaga

SEQ ID NO: 476618 - RNA, 19 nt, Artificial Sequence
  Synthetic
gauuucagggggggaaaga

SEQ ID NO: 476619 - RNA, 20 nt, Artificial Sequence
  Synthetic
ggauuucagggggggaaaga

SEQ ID NO: 476620 - RNA, 21 nt, Artificial Sequence
  Synthetic
uggauuucagggggggaaaga

SEQ ID NO: 476621 - RNA, 22 nt, Artificial Sequence
  Synthetic
auggauuucagggggggaaaga

SEQ ID NO: 476622 - RNA, 23 nt, Artificial Sequence
  Synthetic
uauggauuucagggggggaaaga

SEQ ID NO: 476623 - RNA, 24 nt, Artificial Sequence
  Synthetic
auauggauuucagggggggaaaga

SEQ ID NO: 476624 - RNA, 18 nt, Artificial Sequence
  Synthetic
gcucaaaauggggaaaga

SEQ ID NO: 476625 - RNA, 19 nt, Artificial Sequence
  Synthetic
agcucaaaauggggaaaga

SEQ ID NO: 476626 - RNA, 20 nt, Artificial Sequence
  Synthetic
aagcucaaaauggggaaaga

SEQ ID NO: 476627 - RNA, 21 nt, Artificial Sequence
  Synthetic
aaagcucaaaauggggaaaga

SEQ ID NO: 476628 - RNA, 22 nt, Artificial Sequence
  Synthetic
aaaagcucaaaauggggaaaga

SEQ ID NO: 476629 - RNA, 23 nt, Artificial Sequence
  Synthetic
caaaagcucaaaauggggaaaga

SEQ ID NO: 476630 - RNA, 24 nt, Artificial Sequence
  Synthetic
gcaaaagcucaaaauggggaaaga

SEQ ID NO: 476631 - RNA, 18 nt, Artificial Sequence
  Synthetic
gguguaaguggggaaaga

SEQ ID NO: 476632 - RNA, 19 nt, Artificial Sequence
  Synthetic
ugguguaaguggggaaaga

SEQ ID NO: 476633 - RNA, 20 nt, Artificial Sequence
  Synthetic
augguguaaguggggaaaga

SEQ ID NO: 476634 - RNA, 21 nt, Artificial Sequence
  Synthetic
uaugguguaaguggggaaaga

SEQ ID NO: 476635 - RNA, 22 nt, Artificial Sequence
  Synthetic
auaugguguaaguggggaaaga

SEQ ID NO: 476636 - RNA, 23 nt, Artificial Sequence
  Synthetic
aauaugguguaaguggggaaaga

SEQ ID NO: 476637 - RNA, 24 nt, Artificial Sequence
  Synthetic
aaauaugguguaaguggggaaaga

SEQ ID NO: 476638 - RNA, 18 nt, Artificial Sequence
  Synthetic
aaauaugggauggaaaga

SEQ ID NO: 476639 - RNA, 19 nt, Artificial Sequence
  Synthetic
gaaauaugggauggaaaga

SEQ ID NO: 476640 - RNA, 20 nt, Artificial Sequence
  Synthetic
agaaauaugggauggaaaga

SEQ ID NO: 476641 - RNA, 21 nt, Artificial Sequence
  Synthetic
gagaaauaugggauggaaaga

SEQ ID NO: 476642 - RNA, 22 nt, Artificial Sequence
  Synthetic
agagaaauaugggauggaaaga

SEQ ID NO: 476643 - RNA, 23 nt, Artificial Sequence
  Synthetic
aagagaaauaugggauggaaaga

SEQ ID NO: 476644 - RNA, 24 nt, Artificial Sequence
  Synthetic
caagagaaauaugggauggaaaga

SEQ ID NO: 476645 - RNA, 18 nt, Artificial Sequence
  Synthetic
aguaguaguauggaaaga

SEQ ID NO: 476646 - RNA, 19 nt, Artificial Sequence
  Synthetic
uaguaguaguauggaaaga

SEQ ID NO: 476647 - RNA, 20 nt, Artificial Sequence
  Synthetic
guaguaguaguauggaaaga

SEQ ID NO: 476648 - RNA, 21 nt, Artificial Sequence
  Synthetic
aguaguaguaguauggaaaga

SEQ ID NO: 476649 - RNA, 22 nt, Artificial Sequence
  Synthetic
uaguaguaguaguauggaaaga

SEQ ID NO: 476650 - RNA, 23 nt, Artificial Sequence
  Synthetic
guaguaguaguaguauggaaaga

SEQ ID NO: 476651 - RNA, 24 nt, Artificial Sequence
  Synthetic
gguaguaguaguaguauggaaaga

SEQ ID NO: 476652 - RNA, 18 nt, Artificial Sequence
  Synthetic
cuguaaaugguggaaaga

SEQ ID NO: 476653 - RNA, 19 nt, Artificial Sequence
  Synthetic
ccuguaaaugguggaaaga

SEQ ID NO: 476654 - RNA, 20 nt, Artificial Sequence
  Synthetic
cccuguaaaugguggaaaga

SEQ ID NO: 476655 - RNA, 21 nt, Artificial Sequence
  Synthetic
gcccuguaaaugguggaaaga

SEQ ID NO: 476656 - RNA, 22 nt, Artificial Sequence
  Synthetic
ugcccuguaaaugguggaaaga

SEQ ID NO: 476657 - RNA, 23 nt, Artificial Sequence
  Synthetic
uugcccuguaaaugguggaaaga

SEQ ID NO: 476658 - RNA, 24 nt, Artificial Sequence
  Synthetic
uuugcccuguaaaugguggaaaga

SEQ ID NO: 476659 - RNA, 18 nt, Artificial Sequence
  Synthetic
aaaaaggaauuggaaaga

SEQ ID NO: 476660 - RNA, 19 nt, Artificial Sequence
  Synthetic
caaaaaggaauuggaaaga

SEQ ID NO: 476661 - RNA, 20 nt, Artificial Sequence
  Synthetic
acaaaaaggaauuggaaaga

SEQ ID NO: 476662 - RNA, 21 nt, Artificial Sequence
  Synthetic
aacaaaaaggaauuggaaaga

SEQ ID NO: 476663 - RNA, 22 nt, Artificial Sequence
  Synthetic
aaacaaaaaggaauuggaaaga

SEQ ID NO: 476664 - RNA, 23 nt, Artificial Sequence
  Synthetic
aaaacaaaaaggaauuggaaaga

SEQ ID NO: 476665 - RNA, 24 nt, Artificial Sequence
  Synthetic
uaaaacaaaaaggaauuggaaaga

SEQ ID NO: 476666 - RNA, 18 nt, Artificial Sequence
  Synthetic
aauguaaaaaaugaaaga

SEQ ID NO: 476667 - RNA, 19 nt, Artificial Sequence
  Synthetic
gaauguaaaaaaugaaaga

SEQ ID NO: 476668 - RNA, 20 nt, Artificial Sequence
  Synthetic
agaauguaaaaaaugaaaga

SEQ ID NO: 476669 - RNA, 21 nt, Artificial Sequence
  Synthetic
aagaauguaaaaaaugaaaga

SEQ ID NO: 476670 - RNA, 22 nt, Artificial Sequence
  Synthetic
aaagaauguaaaaaaugaaaga

SEQ ID NO: 476671 - RNA, 23 nt, Artificial Sequence
  Synthetic
caaagaauguaaaaaaugaaaga

SEQ ID NO: 476672 - RNA, 24 nt, Artificial Sequence
  Synthetic
acaaagaauguaaaaaaugaaaga

SEQ ID NO: 476673 - RNA, 18 nt, Artificial Sequence
  Synthetic
acuuaugacaaugaaaga

SEQ ID NO: 476674 - RNA, 19 nt, Artificial Sequence
  Synthetic
uacuuaugacaaugaaaga

SEQ ID NO: 476675 - RNA, 20 nt, Artificial Sequence
  Synthetic
auacuuaugacaaugaaaga

SEQ ID NO: 476676 - RNA, 21 nt, Artificial Sequence
  Synthetic
aauacuuaugacaaugaaaga

SEQ ID NO: 476677 - RNA, 22 nt, Artificial Sequence
  Synthetic
gaauacuuaugacaaugaaaga

SEQ ID NO: 476678 - RNA, 23 nt, Artificial Sequence
  Synthetic
ggaauacuuaugacaaugaaaga

SEQ ID NO: 476679 - RNA, 24 nt, Artificial Sequence
  Synthetic
uggaauacuuaugacaaugaaaga

SEQ ID NO: 476680 - RNA, 18 nt, Artificial Sequence
  Synthetic
caucauuaaccugaaaga

SEQ ID NO: 476681 - RNA, 19 nt, Artificial Sequence
  Synthetic
gcaucauuaaccugaaaga

SEQ ID NO: 476682 - RNA, 20 nt, Artificial Sequence
  Synthetic
agcaucauuaaccugaaaga

SEQ ID NO: 476683 - RNA, 21 nt, Artificial Sequence
  Synthetic
aagcaucauuaaccugaaaga

SEQ ID NO: 476684 - RNA, 22 nt, Artificial Sequence
  Synthetic
aaagcaucauuaaccugaaaga

SEQ ID NO: 476685 - RNA, 23 nt, Artificial Sequence
  Synthetic
uaaagcaucauuaaccugaaaga

SEQ ID NO: 476686 - RNA, 24 nt, Artificial Sequence
  Synthetic
auaaagcaucauuaaccugaaaga

SEQ ID NO: 476687 - RNA, 18 nt, Artificial Sequence
  Synthetic
uacauacuggcugaaaga

SEQ ID NO: 476688 - RNA, 19 nt, Artificial Sequence
  Synthetic
uuacauacuggcugaaaga

SEQ ID NO: 476689 - RNA, 20 nt, Artificial Sequence
  Synthetic
uuuacauacuggcugaaaga

SEQ ID NO: 476690 - RNA, 21 nt, Artificial Sequence
  Synthetic
guuuacauacuggcugaaaga

SEQ ID NO: 476691 - RNA, 22 nt, Artificial Sequence
  Synthetic
uguuuacauacuggcugaaaga

SEQ ID NO: 476692 - RNA, 23 nt, Artificial Sequence
  Synthetic
guguuuacauacuggcugaaaga

SEQ ID NO: 476693 - RNA, 24 nt, Artificial Sequence
  Synthetic
aguguuuacauacuggcugaaaga

SEQ ID NO: 476694 - RNA, 18 nt, Artificial Sequence
  Synthetic
aacagaggaucugaaaga

SEQ ID NO: 476695 - RNA, 19 nt, Artificial Sequence
  Synthetic
gaacagaggaucugaaaga

SEQ ID NO: 476696 - RNA, 20 nt, Artificial Sequence
  Synthetic
cgaacagaggaucugaaaga

SEQ ID NO: 476697 - RNA, 21 nt, Artificial Sequence
  Synthetic
ucgaacagaggaucugaaaga

SEQ ID NO: 476698 - RNA, 22 nt, Artificial Sequence
  Synthetic
aucgaacagaggaucugaaaga

SEQ ID NO: 476699 - RNA, 23 nt, Artificial Sequence
  Synthetic
caucgaacagaggaucugaaaga

SEQ ID NO: 476700 - RNA, 24 nt, Artificial Sequence
  Synthetic
gcaucgaacagaggaucugaaaga

SEQ ID NO: 476701 - RNA, 18 nt, Artificial Sequence
  Synthetic
uucaaggccagugaaaga

SEQ ID NO: 476702 - RNA, 19 nt, Artificial Sequence
  Synthetic
guucaaggccagugaaaga

SEQ ID NO: 476703 - RNA, 20 nt, Artificial Sequence
  Synthetic
uguucaaggccagugaaaga

SEQ ID NO: 476704 - RNA, 21 nt, Artificial Sequence
  Synthetic
auguucaaggccagugaaaga

SEQ ID NO: 476705 - RNA, 22 nt, Artificial Sequence
  Synthetic
aauguucaaggccagugaaaga

SEQ ID NO: 476706 - RNA, 23 nt, Artificial Sequence
  Synthetic
aaauguucaaggccagugaaaga

SEQ ID NO: 476707 - RNA, 24 nt, Artificial Sequence
  Synthetic
gaaauguucaaggccagugaaaga

SEQ ID NO: 476708 - RNA, 18 nt, Artificial Sequence
  Synthetic
gcccaaagcagugaaaga

SEQ ID NO: 476709 - RNA, 19 nt, Artificial Sequence
  Synthetic
ugcccaaagcagugaaaga

SEQ ID NO: 476710 - RNA, 20 nt, Artificial Sequence
  Synthetic
uugcccaaagcagugaaaga

SEQ ID NO: 476711 - RNA, 21 nt, Artificial Sequence
  Synthetic
guugcccaaagcagugaaaga

SEQ ID NO: 476712 - RNA, 22 nt, Artificial Sequence
  Synthetic
uguugcccaaagcagugaaaga

SEQ ID NO: 476713 - RNA, 23 nt, Artificial Sequence
  Synthetic
cuguugcccaaagcagugaaaga

SEQ ID NO: 476714 - RNA, 24 nt, Artificial Sequence
  Synthetic
gcuguugcccaaagcagugaaaga

SEQ ID NO: 476715 - RNA, 18 nt, Artificial Sequence
  Synthetic
ugaaccuagagugaaaga

SEQ ID NO: 476716 - RNA, 19 nt, Artificial Sequence
  Synthetic
uugaaccuagagugaaaga

SEQ ID NO: 476717 - RNA, 20 nt, Artificial Sequence
  Synthetic
uuugaaccuagagugaaaga

SEQ ID NO: 476718 - RNA, 21 nt, Artificial Sequence
  Synthetic
auuugaaccuagagugaaaga

SEQ ID NO: 476719 - RNA, 22 nt, Artificial Sequence
  Synthetic
gauuugaaccuagagugaaaga

SEQ ID NO: 476720 - RNA, 23 nt, Artificial Sequence
  Synthetic
ugauuugaaccuagagugaaaga

SEQ ID NO: 476721 - RNA, 24 nt, Artificial Sequence
  Synthetic
augauuugaaccuagagugaaaga

SEQ ID NO: 476722 - RNA, 18 nt, Artificial Sequence
  Synthetic
auuuaaaaaugugaaaga

SEQ ID NO: 476723 - RNA, 19 nt, Artificial Sequence
  Synthetic
cauuuaaaaaugugaaaga

SEQ ID NO: 476724 - RNA, 20 nt, Artificial Sequence
  Synthetic
ucauuuaaaaaugugaaaga

SEQ ID NO: 476725 - RNA, 21 nt, Artificial Sequence
  Synthetic
gucauuuaaaaaugugaaaga

SEQ ID NO: 476726 - RNA, 22 nt, Artificial Sequence
  Synthetic
ggucauuuaaaaaugugaaaga

SEQ ID NO: 476727 - RNA, 23 nt, Artificial Sequence
  Synthetic
aggucauuuaaaaaugugaaaga

SEQ ID NO: 476728 - RNA, 24 nt, Artificial Sequence
  Synthetic
caggucauuuaaaaaugugaaaga

SEQ ID NO: 476729 - RNA, 18 nt, Artificial Sequence
  Synthetic
acaucagaaguugaaaga

SEQ ID NO: 476730 - RNA, 19 nt, Artificial Sequence
  Synthetic
cacaucagaaguugaaaga

SEQ ID NO: 476731 - RNA, 20 nt, Artificial Sequence
  Synthetic
ucacaucagaaguugaaaga

SEQ ID NO: 476732 - RNA, 21 nt, Artificial Sequence
  Synthetic
aucacaucagaaguugaaaga

SEQ ID NO: 476733 - RNA, 22 nt, Artificial Sequence
  Synthetic
aaucacaucagaaguugaaaga

SEQ ID NO: 476734 - RNA, 23 nt, Artificial Sequence
  Synthetic
gaaucacaucagaaguugaaaga

SEQ ID NO: 476735 - RNA, 24 nt, Artificial Sequence
  Synthetic
agaaucacaucagaaguugaaaga

SEQ ID NO: 476736 - RNA, 18 nt, Artificial Sequence
  Synthetic
acccauaauuuugaaaga

SEQ ID NO: 476737 - RNA, 19 nt, Artificial Sequence
  Synthetic
aacccauaauuuugaaaga

SEQ ID NO: 476738 - RNA, 20 nt, Artificial Sequence
  Synthetic
aaacccauaauuuugaaaga

SEQ ID NO: 476739 - RNA, 21 nt, Artificial Sequence
  Synthetic
gaaacccauaauuuugaaaga

SEQ ID NO: 476740 - RNA, 22 nt, Artificial Sequence
  Synthetic
ugaaacccauaauuuugaaaga

SEQ ID NO: 476741 - RNA, 23 nt, Artificial Sequence
  Synthetic
uugaaacccauaauuuugaaaga

SEQ ID NO: 476742 - RNA, 24 nt, Artificial Sequence
  Synthetic
guugaaacccauaauuuugaaaga

SEQ ID NO: 476743 - RNA, 18 nt, Artificial Sequence
  Synthetic
guaauguauuuugaaaga

SEQ ID NO: 476744 - RNA, 19 nt, Artificial Sequence
  Synthetic
gguaauguauuuugaaaga

SEQ ID NO: 476745 - RNA, 20 nt, Artificial Sequence
  Synthetic
agguaauguauuuugaaaga

SEQ ID NO: 476746 - RNA, 21 nt, Artificial Sequence
  Synthetic
uagguaauguauuuugaaaga

SEQ ID NO: 476747 - RNA, 22 nt, Artificial Sequence
  Synthetic
uuagguaauguauuuugaaaga

SEQ ID NO: 476748 - RNA, 23 nt, Artificial Sequence
  Synthetic
uuuagguaauguauuuugaaaga

SEQ ID NO: 476749 - RNA, 24 nt, Artificial Sequence
  Synthetic
cuuuagguaauguauuuugaaaga

SEQ ID NO: 476750 - RNA, 18 nt, Artificial Sequence
  Synthetic
cuagaagaaaaauaaaga

SEQ ID NO: 476751 - RNA, 19 nt, Artificial Sequence
  Synthetic
acuagaagaaaaauaaaga

SEQ ID NO: 476752 - RNA, 20 nt, Artificial Sequence
  Synthetic
uacuagaagaaaaauaaaga

SEQ ID NO: 476753 - RNA, 21 nt, Artificial Sequence
  Synthetic
uuacuagaagaaaaauaaaga

SEQ ID NO: 476754 - RNA, 22 nt, Artificial Sequence
  Synthetic
uuuacuagaagaaaaauaaaga

SEQ ID NO: 476755 - RNA, 23 nt, Artificial Sequence
  Synthetic
uuuuacuagaagaaaaauaaaga

SEQ ID NO: 476756 - RNA, 24 nt, Artificial Sequence
  Synthetic
guuuuacuagaagaaaaauaaaga

SEQ ID NO: 476757 - RNA, 18 nt, Artificial Sequence
  Synthetic
ccuuucuagaaauaaaga

SEQ ID NO: 476758 - RNA, 19 nt, Artificial Sequence
  Synthetic
cccuuucuagaaauaaaga

SEQ ID NO: 476759 - RNA, 20 nt, Artificial Sequence
  Synthetic
ucccuuucuagaaauaaaga

SEQ ID NO: 476760 - RNA, 21 nt, Artificial Sequence
  Synthetic
uucccuuucuagaaauaaaga

SEQ ID NO: 476761 - RNA, 22 nt, Artificial Sequence
  Synthetic
auucccuuucuagaaauaaaga

SEQ ID NO: 476762 - RNA, 23 nt, Artificial Sequence
  Synthetic
gauucccuuucuagaaauaaaga

SEQ ID NO: 476763 - RNA, 24 nt, Artificial Sequence
  Synthetic
ugauucccuuucuagaaauaaaga

SEQ ID NO: 476764 - RNA, 18 nt, Artificial Sequence
  Synthetic
auguaacaugaauaaaga

SEQ ID NO: 476765 - RNA, 19 nt, Artificial Sequence
  Synthetic
aauguaacaugaauaaaga

SEQ ID NO: 476766 - RNA, 20 nt, Artificial Sequence
  Synthetic
uaauguaacaugaauaaaga

SEQ ID NO: 476767 - RNA, 21 nt, Artificial Sequence
  Synthetic
auaauguaacaugaauaaaga

SEQ ID NO: 476768 - RNA, 22 nt, Artificial Sequence
  Synthetic
aauaauguaacaugaauaaaga

SEQ ID NO: 476769 - RNA, 23 nt, Artificial Sequence
  Synthetic
gaauaauguaacaugaauaaaga

SEQ ID NO: 476770 - RNA, 24 nt, Artificial Sequence
  Synthetic
ugaauaauguaacaugaauaaaga

SEQ ID NO: 476771 - RNA, 18 nt, Artificial Sequence
  Synthetic
ccagcaaggacauaaaga

SEQ ID NO: 476772 - RNA, 19 nt, Artificial Sequence
  Synthetic
accagcaaggacauaaaga

SEQ ID NO: 476773 - RNA, 20 nt, Artificial Sequence
  Synthetic
gaccagcaaggacauaaaga

SEQ ID NO: 476774 - RNA, 21 nt, Artificial Sequence
  Synthetic
agaccagcaaggacauaaaga

SEQ ID NO: 476775 - RNA, 22 nt, Artificial Sequence
  Synthetic
cagaccagcaaggacauaaaga

SEQ ID NO: 476776 - RNA, 23 nt, Artificial Sequence
  Synthetic
ucagaccagcaaggacauaaaga

SEQ ID NO: 476777 - RNA, 24 nt, Artificial Sequence
  Synthetic
gucagaccagcaaggacauaaaga

SEQ ID NO: 476778 - RNA, 18 nt, Artificial Sequence
  Synthetic
ugcacauggacauaaaga

SEQ ID NO: 476779 - RNA, 19 nt, Artificial Sequence
  Synthetic
gugcacauggacauaaaga

SEQ ID NO: 476780 - RNA, 20 nt, Artificial Sequence
  Synthetic
agugcacauggacauaaaga

SEQ ID NO: 476781 - RNA, 21 nt, Artificial Sequence
  Synthetic
gagugcacauggacauaaaga

SEQ ID NO: 476782 - RNA, 22 nt, Artificial Sequence
  Synthetic
ugagugcacauggacauaaaga

SEQ ID NO: 476783 - RNA, 23 nt, Artificial Sequence
  Synthetic
uugagugcacauggacauaaaga

SEQ ID NO: 476784 - RNA, 24 nt, Artificial Sequence
  Synthetic
auugagugcacauggacauaaaga

SEQ ID NO: 476785 - RNA, 18 nt, Artificial Sequence
  Synthetic
uacucaagaagauaaaga

SEQ ID NO: 476786 - RNA, 19 nt, Artificial Sequence
  Synthetic
auacucaagaagauaaaga

SEQ ID NO: 476787 - RNA, 20 nt, Artificial Sequence
  Synthetic
aauacucaagaagauaaaga

SEQ ID NO: 476788 - RNA, 21 nt, Artificial Sequence
  Synthetic
aaauacucaagaagauaaaga

SEQ ID NO: 476789 - RNA, 22 nt, Artificial Sequence
  Synthetic
uaaauacucaagaagauaaaga

SEQ ID NO: 476790 - RNA, 23 nt, Artificial Sequence
  Synthetic
auaaauacucaagaagauaaaga

SEQ ID NO: 476791 - RNA, 24 nt, Artificial Sequence
  Synthetic
aauaaauacucaagaagauaaaga

SEQ ID NO: 476792 - RNA, 18 nt, Artificial Sequence
  Synthetic
ugacaauagggauaaaga

SEQ ID NO: 476793 - RNA, 19 nt, Artificial Sequence
  Synthetic
gugacaauagggauaaaga

SEQ ID NO: 476794 - RNA, 20 nt, Artificial Sequence
  Synthetic
ggugacaauagggauaaaga

SEQ ID NO: 476795 - RNA, 21 nt, Artificial Sequence
  Synthetic
aggugacaauagggauaaaga

SEQ ID NO: 476796 - RNA, 22 nt, Artificial Sequence
  Synthetic
gaggugacaauagggauaaaga

SEQ ID NO: 476797 - RNA, 23 nt, Artificial Sequence
  Synthetic
ugaggugacaauagggauaaaga

SEQ ID NO: 476798 - RNA, 24 nt, Artificial Sequence
  Synthetic
augaggugacaauagggauaaaga

SEQ ID NO: 476799 - RNA, 18 nt, Artificial Sequence
  Synthetic
uuuuguaagcuauaaaga

SEQ ID NO: 476800 - RNA, 19 nt, Artificial Sequence
  Synthetic
auuuuguaagcuauaaaga

SEQ ID NO: 476801 - RNA, 20 nt, Artificial Sequence
  Synthetic
aauuuuguaagcuauaaaga

SEQ ID NO: 476802 - RNA, 21 nt, Artificial Sequence
  Synthetic
uaauuuuguaagcuauaaaga

SEQ ID NO: 476803 - RNA, 22 nt, Artificial Sequence
  Synthetic
auaauuuuguaagcuauaaaga

SEQ ID NO: 476804 - RNA, 23 nt, Artificial Sequence
  Synthetic
uauaauuuuguaagcuauaaaga

SEQ ID NO: 476805 - RNA, 24 nt, Artificial Sequence
  Synthetic
auauaauuuuguaagcuauaaaga

SEQ ID NO: 476806 - RNA, 18 nt, Artificial Sequence
  Synthetic
ugcagggagguauaaaga

SEQ ID NO: 476807 - RNA, 19 nt, Artificial Sequence
  Synthetic
gugcagggagguauaaaga

SEQ ID NO: 476808 - RNA, 20 nt, Artificial Sequence
  Synthetic
agugcagggagguauaaaga

SEQ ID NO: 476809 - RNA, 21 nt, Artificial Sequence
  Synthetic
aagugcagggagguauaaaga

SEQ ID NO: 476810 - RNA, 22 nt, Artificial Sequence
  Synthetic
aaagugcagggagguauaaaga

SEQ ID NO: 476811 - RNA, 23 nt, Artificial Sequence
  Synthetic
uaaagugcagggagguauaaaga

SEQ ID NO: 476812 - RNA, 24 nt, Artificial Sequence
  Synthetic
uuaaagugcagggagguauaaaga

SEQ ID NO: 476813 - RNA, 18 nt, Artificial Sequence
  Synthetic
guguuugcugacuaaaga

SEQ ID NO: 476814 - RNA, 19 nt, Artificial Sequence
  Synthetic
aguguuugcugacuaaaga

SEQ ID NO: 476815 - RNA, 20 nt, Artificial Sequence
  Synthetic
aaguguuugcugacuaaaga

SEQ ID NO: 476816 - RNA, 21 nt, Artificial Sequence
  Synthetic
uaaguguuugcugacuaaaga

SEQ ID NO: 476817 - RNA, 22 nt, Artificial Sequence
  Synthetic
guaaguguuugcugacuaaaga

SEQ ID NO: 476818 - RNA, 23 nt, Artificial Sequence
  Synthetic
gguaaguguuugcugacuaaaga

SEQ ID NO: 476819 - RNA, 24 nt, Artificial Sequence
  Synthetic
ugguaaguguuugcugacuaaaga

SEQ ID NO: 476820 - RNA, 18 nt, Artificial Sequence
  Synthetic
uagucaagaaaguaaaga

SEQ ID NO: 476821 - RNA, 19 nt, Artificial Sequence
  Synthetic
auagucaagaaaguaaaga

SEQ ID NO: 476822 - RNA, 20 nt, Artificial Sequence
  Synthetic
uauagucaagaaaguaaaga

SEQ ID NO: 476823 - RNA, 21 nt, Artificial Sequence
  Synthetic
auauagucaagaaaguaaaga

SEQ ID NO: 476824 - RNA, 22 nt, Artificial Sequence
  Synthetic
cauauagucaagaaaguaaaga

SEQ ID NO: 476825 - RNA, 23 nt, Artificial Sequence
  Synthetic
ccauauagucaagaaaguaaaga

SEQ ID NO: 476826 - RNA, 24 nt, Artificial Sequence
  Synthetic
uccauauagucaagaaaguaaaga

SEQ ID NO: 476827 - RNA, 18 nt, Artificial Sequence
  Synthetic
acaaagccauaguaaaga

SEQ ID NO: 476828 - RNA, 19 nt, Artificial Sequence
  Synthetic
uacaaagccauaguaaaga

SEQ ID NO: 476829 - RNA, 20 nt, Artificial Sequence
  Synthetic
cuacaaagccauaguaaaga

SEQ ID NO: 476830 - RNA, 21 nt, Artificial Sequence
  Synthetic
acuacaaagccauaguaaaga

SEQ ID NO: 476831 - RNA, 22 nt, Artificial Sequence
  Synthetic
uacuacaaagccauaguaaaga

SEQ ID NO: 476832 - RNA, 23 nt, Artificial Sequence
  Synthetic
auacuacaaagccauaguaaaga

SEQ ID NO: 476833 - RNA, 24 nt, Artificial Sequence
  Synthetic
aauacuacaaagccauaguaaaga

SEQ ID NO: 476834 - RNA, 18 nt, Artificial Sequence
  Synthetic
uaaacaagguaguaaaga

SEQ ID NO: 476835 - RNA, 19 nt, Artificial Sequence
  Synthetic
cuaaacaagguaguaaaga

SEQ ID NO: 476836 - RNA, 20 nt, Artificial Sequence
  Synthetic
acuaaacaagguaguaaaga

SEQ ID NO: 476837 - RNA, 21 nt, Artificial Sequence
  Synthetic
uacuaaacaagguaguaaaga

SEQ ID NO: 476838 - RNA, 22 nt, Artificial Sequence
  Synthetic
cuacuaaacaagguaguaaaga

SEQ ID NO: 476839 - RNA, 23 nt, Artificial Sequence
  Synthetic
ccuacuaaacaagguaguaaaga

SEQ ID NO: 476840 - RNA, 24 nt, Artificial Sequence
  Synthetic
uccuacuaaacaagguaguaaaga

SEQ ID NO: 476841 - RNA, 18 nt, Artificial Sequence
  Synthetic
ggucucauuagguaaaga

SEQ ID NO: 476842 - RNA, 19 nt, Artificial Sequence
  Synthetic
uggucucauuagguaaaga

SEQ ID NO: 476843 - RNA, 20 nt, Artificial Sequence
  Synthetic
uuggucucauuagguaaaga

SEQ ID NO: 476844 - RNA, 21 nt, Artificial Sequence
  Synthetic
uuuggucucauuagguaaaga

SEQ ID NO: 476845 - RNA, 22 nt, Artificial Sequence
  Synthetic
auuuggucucauuagguaaaga

SEQ ID NO: 476846 - RNA, 23 nt, Artificial Sequence
  Synthetic
gauuuggucucauuagguaaaga

SEQ ID NO: 476847 - RNA, 24 nt, Artificial Sequence
  Synthetic
ggauuuggucucauuagguaaaga

SEQ ID NO: 476848 - RNA, 18 nt, Artificial Sequence
  Synthetic
agaagaaaaugguaaaga

SEQ ID NO: 476849 - RNA, 19 nt, Artificial Sequence
  Synthetic
aagaagaaaaugguaaaga

SEQ ID NO: 476850 - RNA, 20 nt, Artificial Sequence
  Synthetic
uaagaagaaaaugguaaaga

SEQ ID NO: 476851 - RNA, 21 nt, Artificial Sequence
  Synthetic
uuaagaagaaaaugguaaaga

SEQ ID NO: 476852 - RNA, 22 nt, Artificial Sequence
  Synthetic
cuuaagaagaaaaugguaaaga

SEQ ID NO: 476853 - RNA, 23 nt, Artificial Sequence
  Synthetic
acuuaagaagaaaaugguaaaga

SEQ ID NO: 476854 - RNA, 24 nt, Artificial Sequence
  Synthetic
gacuuaagaagaaaaugguaaaga

SEQ ID NO: 476855 - RNA, 18 nt, Artificial Sequence
  Synthetic
aguaaauuuugguaaaga

SEQ ID NO: 476856 - RNA, 19 nt, Artificial Sequence
  Synthetic
aaguaaauuuugguaaaga

SEQ ID NO: 476857 - RNA, 20 nt, Artificial Sequence
  Synthetic
uaaguaaauuuugguaaaga

SEQ ID NO: 476858 - RNA, 21 nt, Artificial Sequence
  Synthetic
auaaguaaauuuugguaaaga

SEQ ID NO: 476859 - RNA, 22 nt, Artificial Sequence
  Synthetic
uauaaguaaauuuugguaaaga

SEQ ID NO: 476860 - RNA, 23 nt, Artificial Sequence
  Synthetic
guauaaguaaauuuugguaaaga

SEQ ID NO: 476861 - RNA, 24 nt, Artificial Sequence
  Synthetic
uguauaaguaaauuuugguaaaga

SEQ ID NO: 476862 - RNA, 18 nt, Artificial Sequence
  Synthetic
ugguuuuggguguaaaga

SEQ ID NO: 476863 - RNA, 19 nt, Artificial Sequence
  Synthetic
uugguuuuggguguaaaga

SEQ ID NO: 476864 - RNA, 20 nt, Artificial Sequence
  Synthetic
uuugguuuuggguguaaaga

SEQ ID NO: 476865 - RNA, 21 nt, Artificial Sequence
  Synthetic
uuuugguuuuggguguaaaga

SEQ ID NO: 476866 - RNA, 22 nt, Artificial Sequence
  Synthetic
cuuuugguuuuggguguaaaga

SEQ ID NO: 476867 - RNA, 23 nt, Artificial Sequence
  Synthetic
acuuuugguuuuggguguaaaga

SEQ ID NO: 476868 - RNA, 24 nt, Artificial Sequence
  Synthetic
gacuuuugguuuuggguguaaaga

SEQ ID NO: 476869 - RNA, 18 nt, Artificial Sequence
  Synthetic
uguguguguguguaaaga

SEQ ID NO: 476870 - RNA, 19 nt, Artificial Sequence
  Synthetic
guguguguguguguaaaga

SEQ ID NO: 476871 - RNA, 20 nt, Artificial Sequence
  Synthetic
uguguguguguguguaaaga

SEQ ID NO: 476872 - RNA, 21 nt, Artificial Sequence
  Synthetic
guguguguguguguguaaaga

SEQ ID NO: 476873 - RNA, 22 nt, Artificial Sequence
  Synthetic
uguguguguguguguguaaaga

SEQ ID NO: 476874 - RNA, 23 nt, Artificial Sequence
  Synthetic
guguguguguguguguguaaaga

SEQ ID NO: 476875 - RNA, 24 nt, Artificial Sequence
  Synthetic
uguguguguguguguguguaaaga

SEQ ID NO: 476876 - RNA, 18 nt, Artificial Sequence
  Synthetic
gagucuauuaauuaaaga

SEQ ID NO: 476877 - RNA, 19 nt, Artificial Sequence
  Synthetic
ggagucuauuaauuaaaga

SEQ ID NO: 476878 - RNA, 20 nt, Artificial Sequence
  Synthetic
uggagucuauuaauuaaaga

SEQ ID NO: 476879 - RNA, 21 nt, Artificial Sequence
  Synthetic
auggagucuauuaauuaaaga

SEQ ID NO: 476880 - RNA, 22 nt, Artificial Sequence
  Synthetic
aauggagucuauuaauuaaaga

SEQ ID NO: 476881 - RNA, 23 nt, Artificial Sequence
  Synthetic
uaauggagucuauuaauuaaaga

SEQ ID NO: 476882 - RNA, 24 nt, Artificial Sequence
  Synthetic
guaauggagucuauuaauuaaaga

SEQ ID NO: 476883 - RNA, 18 nt, Artificial Sequence
  Synthetic
aagaucaaauauuaaaga

SEQ ID NO: 476884 - RNA, 19 nt, Artificial Sequence
  Synthetic
aaagaucaaauauuaaaga

SEQ ID NO: 476885 - RNA, 20 nt, Artificial Sequence
  Synthetic
gaaagaucaaauauuaaaga

SEQ ID NO: 476886 - RNA, 21 nt, Artificial Sequence
  Synthetic
ugaaagaucaaauauuaaaga

SEQ ID NO: 476887 - RNA, 22 nt, Artificial Sequence
  Synthetic
augaaagaucaaauauuaaaga

SEQ ID NO: 476888 - RNA, 23 nt, Artificial Sequence
  Synthetic
aaugaaagaucaaauauuaaaga

SEQ ID NO: 476889 - RNA, 24 nt, Artificial Sequence
  Synthetic
caaugaaagaucaaauauuaaaga

SEQ ID NO: 476890 - RNA, 18 nt, Artificial Sequence
  Synthetic
ugaauucauucuuaaaga

SEQ ID NO: 476891 - RNA, 19 nt, Artificial Sequence
  Synthetic
uugaauucauucuuaaaga

SEQ ID NO: 476892 - RNA, 20 nt, Artificial Sequence
  Synthetic
uuugaauucauucuuaaaga

SEQ ID NO: 476893 - RNA, 21 nt, Artificial Sequence
  Synthetic
cuuugaauucauucuuaaaga

SEQ ID NO: 476894 - RNA, 22 nt, Artificial Sequence
  Synthetic
acuuugaauucauucuuaaaga

SEQ ID NO: 476895 - RNA, 23 nt, Artificial Sequence
  Synthetic
gacuuugaauucauucuuaaaga

SEQ ID NO: 476896 - RNA, 24 nt, Artificial Sequence
  Synthetic
ugacuuugaauucauucuuaaaga

SEQ ID NO: 476897 - RNA, 18 nt, Artificial Sequence
  Synthetic
guaaccuacaguuaaaga

SEQ ID NO: 476898 - RNA, 19 nt, Artificial Sequence
  Synthetic
aguaaccuacaguuaaaga

SEQ ID NO: 476899 - RNA, 20 nt, Artificial Sequence
  Synthetic
gaguaaccuacaguuaaaga

SEQ ID NO: 476900 - RNA, 21 nt, Artificial Sequence
  Synthetic
ugaguaaccuacaguuaaaga

SEQ ID NO: 476901 - RNA, 22 nt, Artificial Sequence
  Synthetic
augaguaaccuacaguuaaaga

SEQ ID NO: 476902 - RNA, 23 nt, Artificial Sequence
  Synthetic
aaugaguaaccuacaguuaaaga

SEQ ID NO: 476903 - RNA, 24 nt, Artificial Sequence
  Synthetic
aaaugaguaaccuacaguuaaaga

SEQ ID NO: 476904 - RNA, 18 nt, Artificial Sequence
  Synthetic
gguagggcccguuaaaga

SEQ ID NO: 476905 - RNA, 19 nt, Artificial Sequence
  Synthetic
ggguagggcccguuaaaga

SEQ ID NO: 476906 - RNA, 20 nt, Artificial Sequence
  Synthetic
uggguagggcccguuaaaga

SEQ ID NO: 476907 - RNA, 21 nt, Artificial Sequence
  Synthetic
uuggguagggcccguuaaaga

SEQ ID NO: 476908 - RNA, 22 nt, Artificial Sequence
  Synthetic
cuuggguagggcccguuaaaga

SEQ ID NO: 476909 - RNA, 23 nt, Artificial Sequence
  Synthetic
ucuuggguagggcccguuaaaga

SEQ ID NO: 476910 - RNA, 24 nt, Artificial Sequence
  Synthetic
gucuuggguagggcccguuaaaga

SEQ ID NO: 476911 - RNA, 18 nt, Artificial Sequence
  Synthetic
aucaaauaauuuuaaaga

SEQ ID NO: 476912 - RNA, 19 nt, Artificial Sequence
  Synthetic
caucaaauaauuuuaaaga

SEQ ID NO: 476913 - RNA, 20 nt, Artificial Sequence
  Synthetic
ucaucaaauaauuuuaaaga

SEQ ID NO: 476914 - RNA, 21 nt, Artificial Sequence
  Synthetic
uucaucaaauaauuuuaaaga

SEQ ID NO: 476915 - RNA, 22 nt, Artificial Sequence
  Synthetic
uuucaucaaauaauuuuaaaga

SEQ ID NO: 476916 - RNA, 23 nt, Artificial Sequence
  Synthetic
auuucaucaaauaauuuuaaaga

SEQ ID NO: 476917 - RNA, 24 nt, Artificial Sequence
  Synthetic
uauuucaucaaauaauuuuaaaga

SEQ ID NO: 476918 - RNA, 18 nt, Artificial Sequence
  Synthetic
uuugcuacauuuuaaaga

SEQ ID NO: 476919 - RNA, 19 nt, Artificial Sequence
  Synthetic
auuugcuacauuuuaaaga

SEQ ID NO: 476920 - RNA, 20 nt, Artificial Sequence
  Synthetic
cauuugcuacauuuuaaaga

SEQ ID NO: 476921 - RNA, 21 nt, Artificial Sequence
  Synthetic
ucauuugcuacauuuuaaaga

SEQ ID NO: 476922 - RNA, 22 nt, Artificial Sequence
  Synthetic
aucauuugcuacauuuuaaaga

SEQ ID NO: 476923 - RNA, 23 nt, Artificial Sequence
  Synthetic
aaucauuugcuacauuuuaaaga

SEQ ID NO: 476924 - RNA, 24 nt, Artificial Sequence
  Synthetic
uaaucauuugcuacauuuuaaaga

SEQ ID NO: 476925 - RNA, 18 nt, Artificial Sequence
  Synthetic
acaaguacauuuuaaaga

SEQ ID NO: 476926 - RNA, 19 nt, Artificial Sequence
  Synthetic
cacaaguacauuuuaaaga

SEQ ID NO: 476927 - RNA, 20 nt, Artificial Sequence
  Synthetic
ucacaaguacauuuuaaaga

SEQ ID NO: 476928 - RNA, 21 nt, Artificial Sequence
  Synthetic
uucacaaguacauuuuaaaga

SEQ ID NO: 476929 - RNA, 22 nt, Artificial Sequence
  Synthetic
auucacaaguacauuuuaaaga

SEQ ID NO: 476930 - RNA, 23 nt, Artificial Sequence
  Synthetic
uauucacaaguacauuuuaaaga

SEQ ID NO: 476931 - RNA, 24 nt, Artificial Sequence
  Synthetic
cuauucacaaguacauuuuaaaga

SEQ ID NO: 476932 - RNA, 18 nt, Artificial Sequence
  Synthetic
caucucgauuuuuaaaga

SEQ ID NO: 476933 - RNA, 19 nt, Artificial Sequence
  Synthetic
ucaucucgauuuuuaaaga

SEQ ID NO: 476934 - RNA, 20 nt, Artificial Sequence
  Synthetic
gucaucucgauuuuuaaaga

SEQ ID NO: 476935 - RNA, 21 nt, Artificial Sequence
  Synthetic
ugucaucucgauuuuuaaaga

SEQ ID NO: 476936 - RNA, 22 nt, Artificial Sequence
  Synthetic
augucaucucgauuuuuaaaga

SEQ ID NO: 476937 - RNA, 23 nt, Artificial Sequence
  Synthetic
aaugucaucucgauuuuuaaaga

SEQ ID NO: 476938 - RNA, 24 nt, Artificial Sequence
  Synthetic
aaaugucaucucgauuuuuaaaga

SEQ ID NO: 476939 - RNA, 18 nt, Artificial Sequence
  Synthetic
gaaucgccuuuuuaaaga

SEQ ID NO: 476940 - RNA, 19 nt, Artificial Sequence
  Synthetic
ugaaucgccuuuuuaaaga

SEQ ID NO: 476941 - RNA, 20 nt, Artificial Sequence
  Synthetic
cugaaucgccuuuuuaaaga

SEQ ID NO: 476942 - RNA, 21 nt, Artificial Sequence
  Synthetic
ucugaaucgccuuuuuaaaga

SEQ ID NO: 476943 - RNA, 22 nt, Artificial Sequence
  Synthetic
uucugaaucgccuuuuuaaaga

SEQ ID NO: 476944 - RNA, 23 nt, Artificial Sequence
  Synthetic
auucugaaucgccuuuuuaaaga

SEQ ID NO: 476945 - RNA, 24 nt, Artificial Sequence
  Synthetic
aauucugaaucgccuuuuuaaaga

SEQ ID NO: 476946 - RNA, 18 nt, Artificial Sequence
  Synthetic
cuguuuaguuuuuaaaga

SEQ ID NO: 476947 - RNA, 19 nt, Artificial Sequence
  Synthetic
ccuguuuaguuuuuaaaga

SEQ ID NO: 476948 - RNA, 20 nt, Artificial Sequence
  Synthetic
gccuguuuaguuuuuaaaga

SEQ ID NO: 476949 - RNA, 21 nt, Artificial Sequence
  Synthetic
ugccuguuuaguuuuuaaaga

SEQ ID NO: 476950 - RNA, 22 nt, Artificial Sequence
  Synthetic
augccuguuuaguuuuuaaaga

SEQ ID NO: 476951 - RNA, 23 nt, Artificial Sequence
  Synthetic
aaugccuguuuaguuuuuaaaga

SEQ ID NO: 476952 - RNA, 24 nt, Artificial Sequence
  Synthetic
aaaugccuguuuaguuuuuaaaga

SEQ ID NO: 476953 - RNA, 18 nt, Artificial Sequence
  Synthetic
aaauugauuuuuuaaaga

SEQ ID NO: 476954 - RNA, 19 nt, Artificial Sequence
  Synthetic
gaaauugauuuuuuaaaga

SEQ ID NO: 476955 - RNA, 20 nt, Artificial Sequence
  Synthetic
ggaaauugauuuuuuaaaga

SEQ ID NO: 476956 - RNA, 21 nt, Artificial Sequence
  Synthetic
cggaaauugauuuuuuaaaga

SEQ ID NO: 476957 - RNA, 22 nt, Artificial Sequence
  Synthetic
ucggaaauugauuuuuuaaaga

SEQ ID NO: 476958 - RNA, 23 nt, Artificial Sequence
  Synthetic
gucggaaauugauuuuuuaaaga

SEQ ID NO: 476959 - RNA, 24 nt, Artificial Sequence
  Synthetic
ugucggaaauugauuuuuuaaaga

SEQ ID NO: 476960 - RNA, 18 nt, Artificial Sequence
  Synthetic
uuuuuuuuuuuuuaaaga

SEQ ID NO: 476961 - RNA, 19 nt, Artificial Sequence
  Synthetic
uuuuuuuuuuuuuuaaaga

SEQ ID NO: 476962 - RNA, 20 nt, Artificial Sequence
  Synthetic
cuuuuuuuuuuuuuuaaaga

SEQ ID NO: 476963 - RNA, 21 nt, Artificial Sequence
  Synthetic
acuuuuuuuuuuuuuuaaaga

SEQ ID NO: 476964 - RNA, 22 nt, Artificial Sequence
  Synthetic
uacuuuuuuuuuuuuuuaaaga

SEQ ID NO: 476965 - RNA, 23 nt, Artificial Sequence
  Synthetic
uuacuuuuuuuuuuuuuuaaaga

SEQ ID NO: 476966 - RNA, 24 nt, Artificial Sequence
  Synthetic
auuacuuuuuuuuuuuuuuaaaga

SEQ ID NO: 476967 - RNA, 18 nt, Artificial Sequence
  Synthetic
aaaagcaacaaaacaaga

SEQ ID NO: 476968 - RNA, 19 nt, Artificial Sequence
  Synthetic
caaaagcaacaaaacaaga

SEQ ID NO: 476969 - RNA, 20 nt, Artificial Sequence
  Synthetic
acaaaagcaacaaaacaaga

SEQ ID NO: 476970 - RNA, 21 nt, Artificial Sequence
  Synthetic
aacaaaagcaacaaaacaaga

SEQ ID NO: 476971 - RNA, 22 nt, Artificial Sequence
  Synthetic
uaacaaaagcaacaaaacaaga

SEQ ID NO: 476972 - RNA, 23 nt, Artificial Sequence
  Synthetic
uuaacaaaagcaacaaaacaaga

SEQ ID NO: 476973 - RNA, 24 nt, Artificial Sequence
  Synthetic
auuaacaaaagcaacaaaacaaga

SEQ ID NO: 476974 - RNA, 18 nt, Artificial Sequence
  Synthetic
gccguguuugaaacaaga

SEQ ID NO: 476975 - RNA, 19 nt, Artificial Sequence
  Synthetic
ggccguguuugaaacaaga

SEQ ID NO: 476976 - RNA, 20 nt, Artificial Sequence
  Synthetic
uggccguguuugaaacaaga

SEQ ID NO: 476977 - RNA, 21 nt, Artificial Sequence
  Synthetic
auggccguguuugaaacaaga

SEQ ID NO: 476978 - RNA, 22 nt, Artificial Sequence
  Synthetic
cauggccguguuugaaacaaga

SEQ ID NO: 476979 - RNA, 23 nt, Artificial Sequence
  Synthetic
ccauggccguguuugaaacaaga

SEQ ID NO: 476980 - RNA, 24 nt, Artificial Sequence
  Synthetic
cccauggccguguuugaaacaaga

SEQ ID NO: 476981 - RNA, 18 nt, Artificial Sequence
  Synthetic
cagguauauccaacaaga

SEQ ID NO: 476982 - RNA, 19 nt, Artificial Sequence
  Synthetic
gcagguauauccaacaaga

SEQ ID NO: 476983 - RNA, 20 nt, Artificial Sequence
  Synthetic
ugcagguauauccaacaaga

SEQ ID NO: 476984 - RNA, 21 nt, Artificial Sequence
  Synthetic
uugcagguauauccaacaaga

SEQ ID NO: 476985 - RNA, 22 nt, Artificial Sequence
  Synthetic
uuugcagguauauccaacaaga

SEQ ID NO: 476986 - RNA, 23 nt, Artificial Sequence
  Synthetic
uuuugcagguauauccaacaaga

SEQ ID NO: 476987 - RNA, 24 nt, Artificial Sequence
  Synthetic
auuuugcagguauauccaacaaga

SEQ ID NO: 476988 - RNA, 18 nt, Artificial Sequence
  Synthetic
ccagccugggcaacaaga

SEQ ID NO: 476989 - RNA, 19 nt, Artificial Sequence
  Synthetic
cccagccugggcaacaaga

SEQ ID NO: 476990 - RNA, 20 nt, Artificial Sequence
  Synthetic
ccccagccugggcaacaaga

SEQ ID NO: 476991 - RNA, 21 nt, Artificial Sequence
  Synthetic
accccagccugggcaacaaga

SEQ ID NO: 476992 - RNA, 22 nt, Artificial Sequence
  Synthetic
caccccagccugggcaacaaga

SEQ ID NO: 476993 - RNA, 23 nt, Artificial Sequence
  Synthetic
gcaccccagccugggcaacaaga

SEQ ID NO: 476994 - RNA, 24 nt, Artificial Sequence
  Synthetic
ugcaccccagccugggcaacaaga

SEQ ID NO: 476995 - RNA, 18 nt, Artificial Sequence
  Synthetic
ucuccaaagggaacaaga

SEQ ID NO: 476996 - RNA, 19 nt, Artificial Sequence
  Synthetic
gucuccaaagggaacaaga

SEQ ID NO: 476997 - RNA, 20 nt, Artificial Sequence
  Synthetic
ggucuccaaagggaacaaga

SEQ ID NO: 476998 - RNA, 21 nt, Artificial Sequence
  Synthetic
uggucuccaaagggaacaaga

SEQ ID NO: 476999 - RNA, 22 nt, Artificial Sequence
  Synthetic
guggucuccaaagggaacaaga

SEQ ID NO: 477000 - RNA, 23 nt, Artificial Sequence
  Synthetic
uguggucuccaaagggaacaaga

SEQ ID NO: 477001 - RNA, 24 nt, Artificial Sequence
  Synthetic
auguggucuccaaagggaacaaga

SEQ ID NO: 477002 - RNA, 18 nt, Artificial Sequence
  Synthetic
augggaauaauaacaaga

SEQ ID NO: 477003 - RNA, 19 nt, Artificial Sequence
  Synthetic
aaugggaauaauaacaaga

SEQ ID NO: 477004 - RNA, 20 nt, Artificial Sequence
  Synthetic
aaaugggaauaauaacaaga

SEQ ID NO: 477005 - RNA, 21 nt, Artificial Sequence
  Synthetic
caaaugggaauaauaacaaga

SEQ ID NO: 477006 - RNA, 22 nt, Artificial Sequence
  Synthetic
ucaaaugggaauaauaacaaga

SEQ ID NO: 477007 - RNA, 23 nt, Artificial Sequence
  Synthetic
uucaaaugggaauaauaacaaga

SEQ ID NO: 477008 - RNA, 24 nt, Artificial Sequence
  Synthetic
auucaaaugggaauaauaacaaga

SEQ ID NO: 477009 - RNA, 18 nt, Artificial Sequence
  Synthetic
uuauuugucuuaacaaga

SEQ ID NO: 477010 - RNA, 19 nt, Artificial Sequence
  Synthetic
cuuauuugucuuaacaaga

SEQ ID NO: 477011 - RNA, 20 nt, Artificial Sequence
  Synthetic
gcuuauuugucuuaacaaga

SEQ ID NO: 477012 - RNA, 21 nt, Artificial Sequence
  Synthetic
agcuuauuugucuuaacaaga

SEQ ID NO: 477013 - RNA, 22 nt, Artificial Sequence
  Synthetic
aagcuuauuugucuuaacaaga

SEQ ID NO: 477014 - RNA, 23 nt, Artificial Sequence
  Synthetic
caagcuuauuugucuuaacaaga

SEQ ID NO: 477015 - RNA, 24 nt, Artificial Sequence
  Synthetic
ucaagcuuauuugucuuaacaaga

SEQ ID NO: 477016 - RNA, 18 nt, Artificial Sequence
  Synthetic
uguuccaggcccacaaga

SEQ ID NO: 477017 - RNA, 19 nt, Artificial Sequence
  Synthetic
uuguuccaggcccacaaga

SEQ ID NO: 477018 - RNA, 20 nt, Artificial Sequence
  Synthetic
auuguuccaggcccacaaga

SEQ ID NO: 477019 - RNA, 21 nt, Artificial Sequence
  Synthetic
cauuguuccaggcccacaaga

SEQ ID NO: 477020 - RNA, 22 nt, Artificial Sequence
  Synthetic
ccauuguuccaggcccacaaga

SEQ ID NO: 477021 - RNA, 23 nt, Artificial Sequence
  Synthetic
accauuguuccaggcccacaaga

SEQ ID NO: 477022 - RNA, 24 nt, Artificial Sequence
  Synthetic
caccauuguuccaggcccacaaga

SEQ ID NO: 477023 - RNA, 18 nt, Artificial Sequence
  Synthetic
uuaaaaacuggcacaaga

SEQ ID NO: 477024 - RNA, 19 nt, Artificial Sequence
  Synthetic
uuuaaaaacuggcacaaga

SEQ ID NO: 477025 - RNA, 20 nt, Artificial Sequence
  Synthetic
cuuuaaaaacuggcacaaga

SEQ ID NO: 477026 - RNA, 21 nt, Artificial Sequence
  Synthetic
ccuuuaaaaacuggcacaaga

SEQ ID NO: 477027 - RNA, 22 nt, Artificial Sequence
  Synthetic
cccuuuaaaaacuggcacaaga

SEQ ID NO: 477028 - RNA, 23 nt, Artificial Sequence
  Synthetic
ucccuuuaaaaacuggcacaaga

SEQ ID NO: 477029 - RNA, 24 nt, Artificial Sequence
  Synthetic
uucccuuuaaaaacuggcacaaga

SEQ ID NO: 477030 - RNA, 21 nt, Artificial Sequence
  Synthetic
ccuuugaaaacuggcacaaga

SEQ ID NO: 477031 - RNA, 22 nt, Artificial Sequence
  Synthetic
cccuuugaaaacuggcacaaga

SEQ ID NO: 477032 - RNA, 23 nt, Artificial Sequence
  Synthetic
ucccuuugaaaacuggcacaaga

SEQ ID NO: 477033 - RNA, 24 nt, Artificial Sequence
  Synthetic
uucccuuugaaaacuggcacaaga

SEQ ID NO: 477034 - RNA, 18 nt, Artificial Sequence
  Synthetic
uagaaagaguagacaaga

SEQ ID NO: 477035 - RNA, 19 nt, Artificial Sequence
  Synthetic
auagaaagaguagacaaga

SEQ ID NO: 477036 - RNA, 20 nt, Artificial Sequence
  Synthetic
uauagaaagaguagacaaga

SEQ ID NO: 477037 - RNA, 21 nt, Artificial Sequence
  Synthetic
uuauagaaagaguagacaaga

SEQ ID NO: 477038 - RNA, 22 nt, Artificial Sequence
  Synthetic
guuauagaaagaguagacaaga

SEQ ID NO: 477039 - RNA, 23 nt, Artificial Sequence
  Synthetic
uguuauagaaagaguagacaaga

SEQ ID NO: 477040 - RNA, 24 nt, Artificial Sequence
  Synthetic
uuguuauagaaagaguagacaaga

SEQ ID NO: 477041 - RNA, 18 nt, Artificial Sequence
  Synthetic
guuauguauuagacaaga

SEQ ID NO: 477042 - RNA, 19 nt, Artificial Sequence
  Synthetic
aguuauguauuagacaaga

SEQ ID NO: 477043 - RNA, 20 nt, Artificial Sequence
  Synthetic
aaguuauguauuagacaaga

SEQ ID NO: 477044 - RNA, 21 nt, Artificial Sequence
  Synthetic
caaguuauguauuagacaaga

SEQ ID NO: 477045 - RNA, 22 nt, Artificial Sequence
  Synthetic
ucaaguuauguauuagacaaga

SEQ ID NO: 477046 - RNA, 23 nt, Artificial Sequence
  Synthetic
gucaaguuauguauuagacaaga

SEQ ID NO: 477047 - RNA, 24 nt, Artificial Sequence
  Synthetic
ggucaaguuauguauuagacaaga

SEQ ID NO: 477048 - RNA, 18 nt, Artificial Sequence
  Synthetic
ccagccugggggacaaga

SEQ ID NO: 477049 - RNA, 19 nt, Artificial Sequence
  Synthetic
uccagccugggggacaaga

SEQ ID NO: 477050 - RNA, 20 nt, Artificial Sequence
  Synthetic
cuccagccugggggacaaga

SEQ ID NO: 477051 - RNA, 21 nt, Artificial Sequence
  Synthetic
acuccagccugggggacaaga

SEQ ID NO: 477052 - RNA, 22 nt, Artificial Sequence
  Synthetic
cacuccagccugggggacaaga

SEQ ID NO: 477053 - RNA, 23 nt, Artificial Sequence
  Synthetic
gcacuccagccugggggacaaga

SEQ ID NO: 477054 - RNA, 24 nt, Artificial Sequence
  Synthetic
ugcacuccagccugggggacaaga

SEQ ID NO: 477055 - RNA, 18 nt, Artificial Sequence
  Synthetic
auacucuaacugacaaga

SEQ ID NO: 477056 - RNA, 19 nt, Artificial Sequence
  Synthetic
aauacucuaacugacaaga

SEQ ID NO: 477057 - RNA, 20 nt, Artificial Sequence
  Synthetic
aaauacucuaacugacaaga

SEQ ID NO: 477058 - RNA, 21 nt, Artificial Sequence
  Synthetic
aaaauacucuaacugacaaga

SEQ ID NO: 477059 - RNA, 22 nt, Artificial Sequence
  Synthetic
aaaaauacucuaacugacaaga

SEQ ID NO: 477060 - RNA, 23 nt, Artificial Sequence
  Synthetic
aaaaaauacucuaacugacaaga

SEQ ID NO: 477061 - RNA, 24 nt, Artificial Sequence
  Synthetic
uaaaaaauacucuaacugacaaga

SEQ ID NO: 477062 - RNA, 18 nt, Artificial Sequence
  Synthetic
aauggcaaucauacaaga

SEQ ID NO: 477063 - RNA, 19 nt, Artificial Sequence
  Synthetic
uaauggcaaucauacaaga

SEQ ID NO: 477064 - RNA, 20 nt, Artificial Sequence
  Synthetic
auaauggcaaucauacaaga

SEQ ID NO: 477065 - RNA, 21 nt, Artificial Sequence
  Synthetic
uauaauggcaaucauacaaga

SEQ ID NO: 477066 - RNA, 22 nt, Artificial Sequence
  Synthetic
uuauaauggcaaucauacaaga

SEQ ID NO: 477067 - RNA, 23 nt, Artificial Sequence
  Synthetic
uuuauaauggcaaucauacaaga

SEQ ID NO: 477068 - RNA, 24 nt, Artificial Sequence
  Synthetic
uuuuauaauggcaaucauacaaga

SEQ ID NO: 477069 - RNA, 18 nt, Artificial Sequence
  Synthetic
uauccaaaggauacaaga

SEQ ID NO: 477070 - RNA, 19 nt, Artificial Sequence
  Synthetic
auauccaaaggauacaaga

SEQ ID NO: 477071 - RNA, 20 nt, Artificial Sequence
  Synthetic
cauauccaaaggauacaaga

SEQ ID NO: 477072 - RNA, 21 nt, Artificial Sequence
  Synthetic
ccauauccaaaggauacaaga

SEQ ID NO: 477073 - RNA, 22 nt, Artificial Sequence
  Synthetic
cccauauccaaaggauacaaga

SEQ ID NO: 477074 - RNA, 23 nt, Artificial Sequence
  Synthetic
gcccauauccaaaggauacaaga

SEQ ID NO: 477075 - RNA, 24 nt, Artificial Sequence
  Synthetic
ugcccauauccaaaggauacaaga

SEQ ID NO: 477076 - RNA, 18 nt, Artificial Sequence
  Synthetic
auauggagaccuacaaga

SEQ ID NO: 477077 - RNA, 19 nt, Artificial Sequence
  Synthetic
gauauggagaccuacaaga

SEQ ID NO: 477078 - RNA, 20 nt, Artificial Sequence
  Synthetic
agauauggagaccuacaaga

SEQ ID NO: 477079 - RNA, 21 nt, Artificial Sequence
  Synthetic
gagauauggagaccuacaaga

SEQ ID NO: 477080 - RNA, 22 nt, Artificial Sequence
  Synthetic
ggagauauggagaccuacaaga

SEQ ID NO: 477081 - RNA, 23 nt, Artificial Sequence
  Synthetic
gggagauauggagaccuacaaga

SEQ ID NO: 477082 - RNA, 24 nt, Artificial Sequence
  Synthetic
agggagauauggagaccuacaaga

SEQ ID NO: 477083 - RNA, 18 nt, Artificial Sequence
  Synthetic
acuuaaauuucuacaaga

SEQ ID NO: 477084 - RNA, 19 nt, Artificial Sequence
  Synthetic
aacuuaaauuucuacaaga

SEQ ID NO: 477085 - RNA, 20 nt, Artificial Sequence
  Synthetic
caacuuaaauuucuacaaga

SEQ ID NO: 477086 - RNA, 21 nt, Artificial Sequence
  Synthetic
ccaacuuaaauuucuacaaga

SEQ ID NO: 477087 - RNA, 22 nt, Artificial Sequence
  Synthetic
accaacuuaaauuucuacaaga

SEQ ID NO: 477088 - RNA, 23 nt, Artificial Sequence
  Synthetic
uaccaacuuaaauuucuacaaga

SEQ ID NO: 477089 - RNA, 24 nt, Artificial Sequence
  Synthetic
guaccaacuuaaauuucuacaaga

SEQ ID NO: 477090 - RNA, 18 nt, Artificial Sequence
  Synthetic
guugcuuuuauuacaaga

SEQ ID NO: 477091 - RNA, 19 nt, Artificial Sequence
  Synthetic
aguugcuuuuauuacaaga

SEQ ID NO: 477092 - RNA, 20 nt, Artificial Sequence
  Synthetic
gaguugcuuuuauuacaaga

SEQ ID NO: 477093 - RNA, 21 nt, Artificial Sequence
  Synthetic
ugaguugcuuuuauuacaaga

SEQ ID NO: 477094 - RNA, 22 nt, Artificial Sequence
  Synthetic
augaguugcuuuuauuacaaga

SEQ ID NO: 477095 - RNA, 23 nt, Artificial Sequence
  Synthetic
aaugaguugcuuuuauuacaaga

SEQ ID NO: 477096 - RNA, 24 nt, Artificial Sequence
  Synthetic
aaaugaguugcuuuuauuacaaga

SEQ ID NO: 477097 - RNA, 18 nt, Artificial Sequence
  Synthetic
ccauuuuugucaccaaga

SEQ ID NO: 477098 - RNA, 19 nt, Artificial Sequence
  Synthetic
gccauuuuugucaccaaga

SEQ ID NO: 477099 - RNA, 20 nt, Artificial Sequence
  Synthetic
ggccauuuuugucaccaaga

SEQ ID NO: 477100 - RNA, 21 nt, Artificial Sequence
  Synthetic
aggccauuuuugucaccaaga

SEQ ID NO: 477101 - RNA, 22 nt, Artificial Sequence
  Synthetic
caggccauuuuugucaccaaga

SEQ ID NO: 477102 - RNA, 23 nt, Artificial Sequence
  Synthetic
ucaggccauuuuugucaccaaga

SEQ ID NO: 477103 - RNA, 24 nt, Artificial Sequence
  Synthetic
uucaggccauuuuugucaccaaga

SEQ ID NO: 477104 - RNA, 18 nt, Artificial Sequence
  Synthetic
ugaaagaauguaccaaga

SEQ ID NO: 477105 - RNA, 19 nt, Artificial Sequence
  Synthetic
augaaagaauguaccaaga

SEQ ID NO: 477106 - RNA, 20 nt, Artificial Sequence
  Synthetic
caugaaagaauguaccaaga

SEQ ID NO: 477107 - RNA, 21 nt, Artificial Sequence
  Synthetic
ucaugaaagaauguaccaaga

SEQ ID NO: 477108 - RNA, 22 nt, Artificial Sequence
  Synthetic
aucaugaaagaauguaccaaga

SEQ ID NO: 477109 - RNA, 23 nt, Artificial Sequence
  Synthetic
gaucaugaaagaauguaccaaga

SEQ ID NO: 477110 - RNA, 24 nt, Artificial Sequence
  Synthetic
ugaucaugaaagaauguaccaaga

SEQ ID NO: 477111 - RNA, 18 nt, Artificial Sequence
  Synthetic
gauugagcuaacccaaga

SEQ ID NO: 477112 - RNA, 19 nt, Artificial Sequence
  Synthetic
ugauugagcuaacccaaga

SEQ ID NO: 477113 - RNA, 20 nt, Artificial Sequence
  Synthetic
augauugagcuaacccaaga

SEQ ID NO: 477114 - RNA, 21 nt, Artificial Sequence
  Synthetic
caugauugagcuaacccaaga

SEQ ID NO: 477115 - RNA, 22 nt, Artificial Sequence
  Synthetic
acaugauugagcuaacccaaga

SEQ ID NO: 477116 - RNA, 23 nt, Artificial Sequence
  Synthetic
gacaugauugagcuaacccaaga

SEQ ID NO: 477117 - RNA, 24 nt, Artificial Sequence
  Synthetic
ugacaugauugagcuaacccaaga

SEQ ID NO: 477118 - RNA, 18 nt, Artificial Sequence
  Synthetic
aaggaucaggacccaaga

SEQ ID NO: 477119 - RNA, 19 nt, Artificial Sequence
  Synthetic
gaaggaucaggacccaaga

SEQ ID NO: 477120 - RNA, 20 nt, Artificial Sequence
  Synthetic
agaaggaucaggacccaaga

SEQ ID NO: 477121 - RNA, 21 nt, Artificial Sequence
  Synthetic
gagaaggaucaggacccaaga

SEQ ID NO: 477122 - RNA, 22 nt, Artificial Sequence
  Synthetic
ugagaaggaucaggacccaaga

SEQ ID NO: 477123 - RNA, 23 nt, Artificial Sequence
  Synthetic
augagaaggaucaggacccaaga

SEQ ID NO: 477124 - RNA, 24 nt, Artificial Sequence
  Synthetic
aaugagaaggaucaggacccaaga

SEQ ID NO: 477125 - RNA, 18 nt, Artificial Sequence
  Synthetic
uucugcucucucccaaga

SEQ ID NO: 477126 - RNA, 19 nt, Artificial Sequence
  Synthetic
uuucugcucucucccaaga

SEQ ID NO: 477127 - RNA, 20 nt, Artificial Sequence
  Synthetic
auuucugcucucucccaaga

SEQ ID NO: 477128 - RNA, 21 nt, Artificial Sequence
  Synthetic
cauuucugcucucucccaaga

SEQ ID NO: 477129 - RNA, 22 nt, Artificial Sequence
  Synthetic
acauuucugcucucucccaaga

SEQ ID NO: 477130 - RNA, 23 nt, Artificial Sequence
  Synthetic
uacauuucugcucucucccaaga

SEQ ID NO: 477131 - RNA, 24 nt, Artificial Sequence
  Synthetic
cuacauuucugcucucucccaaga

SEQ ID NO: 477132 - RNA, 18 nt, Artificial Sequence
  Synthetic
gggaagaacuucccaaga

SEQ ID NO: 477133 - RNA, 19 nt, Artificial Sequence
  Synthetic
ggggaagaacuucccaaga

SEQ ID NO: 477134 - RNA, 20 nt, Artificial Sequence
  Synthetic
gggggaagaacuucccaaga

SEQ ID NO: 477135 - RNA, 21 nt, Artificial Sequence
  Synthetic
agggggaagaacuucccaaga

SEQ ID NO: 477136 - RNA, 22 nt, Artificial Sequence
  Synthetic
gagggggaagaacuucccaaga

SEQ ID NO: 477137 - RNA, 23 nt, Artificial Sequence
  Synthetic
agagggggaagaacuucccaaga

SEQ ID NO: 477138 - RNA, 24 nt, Artificial Sequence
  Synthetic
cagagggggaagaacuucccaaga

SEQ ID NO: 477139 - RNA, 18 nt, Artificial Sequence
  Synthetic
ggcuaaaaggagccaaga

SEQ ID NO: 477140 - RNA, 19 nt, Artificial Sequence
  Synthetic
uggcuaaaaggagccaaga

SEQ ID NO: 477141 - RNA, 20 nt, Artificial Sequence
  Synthetic
auggcuaaaaggagccaaga

SEQ ID NO: 477142 - RNA, 21 nt, Artificial Sequence
  Synthetic
cauggcuaaaaggagccaaga

SEQ ID NO: 477143 - RNA, 22 nt, Artificial Sequence
  Synthetic
ccauggcuaaaaggagccaaga

SEQ ID NO: 477144 - RNA, 23 nt, Artificial Sequence
  Synthetic
gccauggcuaaaaggagccaaga

SEQ ID NO: 477145 - RNA, 24 nt, Artificial Sequence
  Synthetic
agccauggcuaaaaggagccaaga

SEQ ID NO: 477146 - RNA, 18 nt, Artificial Sequence
  Synthetic
cccugugauaugccaaga

SEQ ID NO: 477147 - RNA, 19 nt, Artificial Sequence
  Synthetic
acccugugauaugccaaga

SEQ ID NO: 477148 - RNA, 20 nt, Artificial Sequence
  Synthetic
aacccugugauaugccaaga

SEQ ID NO: 477149 - RNA, 21 nt, Artificial Sequence
  Synthetic
uaacccugugauaugccaaga

SEQ ID NO: 477150 - RNA, 22 nt, Artificial Sequence
  Synthetic
auaacccugugauaugccaaga

SEQ ID NO: 477151 - RNA, 23 nt, Artificial Sequence
  Synthetic
uauaacccugugauaugccaaga

SEQ ID NO: 477152 - RNA, 24 nt, Artificial Sequence
  Synthetic
guauaacccugugauaugccaaga

SEQ ID NO: 477153 - RNA, 18 nt, Artificial Sequence
  Synthetic
cccuaacuagauccaaga

SEQ ID NO: 477154 - RNA, 19 nt, Artificial Sequence
  Synthetic
gcccuaacuagauccaaga

SEQ ID NO: 477155 - RNA, 20 nt, Artificial Sequence
  Synthetic
agcccuaacuagauccaaga

SEQ ID NO: 477156 - RNA, 21 nt, Artificial Sequence
  Synthetic
gagcccuaacuagauccaaga

SEQ ID NO: 477157 - RNA, 22 nt, Artificial Sequence
  Synthetic
ggagcccuaacuagauccaaga

SEQ ID NO: 477158 - RNA, 23 nt, Artificial Sequence
  Synthetic
aggagcccuaacuagauccaaga

SEQ ID NO: 477159 - RNA, 24 nt, Artificial Sequence
  Synthetic
aaggagcccuaacuagauccaaga

SEQ ID NO: 477160 - RNA, 18 nt, Artificial Sequence
  Synthetic
aucauuggaaguccaaga

SEQ ID NO: 477161 - RNA, 19 nt, Artificial Sequence
  Synthetic
uaucauuggaaguccaaga

SEQ ID NO: 477162 - RNA, 20 nt, Artificial Sequence
  Synthetic
guaucauuggaaguccaaga

SEQ ID NO: 477163 - RNA, 21 nt, Artificial Sequence
  Synthetic
gguaucauuggaaguccaaga

SEQ ID NO: 477164 - RNA, 22 nt, Artificial Sequence
  Synthetic
ugguaucauuggaaguccaaga

SEQ ID NO: 477165 - RNA, 23 nt, Artificial Sequence
  Synthetic
cugguaucauuggaaguccaaga

SEQ ID NO: 477166 - RNA, 24 nt, Artificial Sequence
  Synthetic
acugguaucauuggaaguccaaga

SEQ ID NO: 477167 - RNA, 18 nt, Artificial Sequence
  Synthetic
cuaaguagaauuccaaga

SEQ ID NO: 477168 - RNA, 19 nt, Artificial Sequence
  Synthetic
acuaaguagaauuccaaga

SEQ ID NO: 477169 - RNA, 20 nt, Artificial Sequence
  Synthetic
gacuaaguagaauuccaaga

SEQ ID NO: 477170 - RNA, 21 nt, Artificial Sequence
  Synthetic
ugacuaaguagaauuccaaga

SEQ ID NO: 477171 - RNA, 22 nt, Artificial Sequence
  Synthetic
cugacuaaguagaauuccaaga

SEQ ID NO: 477172 - RNA, 23 nt, Artificial Sequence
  Synthetic
ucugacuaaguagaauuccaaga

SEQ ID NO: 477173 - RNA, 24 nt, Artificial Sequence
  Synthetic
aucugacuaaguagaauuccaaga

SEQ ID NO: 477174 - RNA, 18 nt, Artificial Sequence
  Synthetic
agagaauguauuccaaga

SEQ ID NO: 477175 - RNA, 19 nt, Artificial Sequence
  Synthetic
gagagaauguauuccaaga

SEQ ID NO: 477176 - RNA, 20 nt, Artificial Sequence
  Synthetic
agagagaauguauuccaaga

SEQ ID NO: 477177 - RNA, 21 nt, Artificial Sequence
  Synthetic
cagagagaauguauuccaaga

SEQ ID NO: 477178 - RNA, 22 nt, Artificial Sequence
  Synthetic
gcagagagaauguauuccaaga

SEQ ID NO: 477179 - RNA, 23 nt, Artificial Sequence
  Synthetic
ggcagagagaauguauuccaaga

SEQ ID NO: 477180 - RNA, 24 nt, Artificial Sequence
  Synthetic
cggcagagagaauguauuccaaga

SEQ ID NO: 477181 - RNA, 18 nt, Artificial Sequence
  Synthetic
ccaaugucccuuccaaga

SEQ ID NO: 477182 - RNA, 19 nt, Artificial Sequence
  Synthetic
uccaaugucccuuccaaga

SEQ ID NO: 477183 - RNA, 20 nt, Artificial Sequence
  Synthetic
auccaaugucccuuccaaga

SEQ ID NO: 477184 - RNA, 21 nt, Artificial Sequence
  Synthetic
cauccaaugucccuuccaaga

SEQ ID NO: 477185 - RNA, 22 nt, Artificial Sequence
  Synthetic
gcauccaaugucccuuccaaga

SEQ ID NO: 477186 - RNA, 23 nt, Artificial Sequence
  Synthetic
ugcauccaaugucccuuccaaga

SEQ ID NO: 477187 - RNA, 24 nt, Artificial Sequence
  Synthetic
cugcauccaaugucccuuccaaga

SEQ ID NO: 477188 - RNA, 18 nt, Artificial Sequence
  Synthetic
ggaaaagggaaagcaaga

SEQ ID NO: 477189 - RNA, 19 nt, Artificial Sequence
  Synthetic
gggaaaagggaaagcaaga

SEQ ID NO: 477190 - RNA, 20 nt, Artificial Sequence
  Synthetic
ggggaaaagggaaagcaaga

SEQ ID NO: 477191 - RNA, 21 nt, Artificial Sequence
  Synthetic
uggggaaaagggaaagcaaga

SEQ ID NO: 477192 - RNA, 22 nt, Artificial Sequence
  Synthetic
auggggaaaagggaaagcaaga

SEQ ID NO: 477193 - RNA, 23 nt, Artificial Sequence
  Synthetic
gauggggaaaagggaaagcaaga

SEQ ID NO: 477194 - RNA, 24 nt, Artificial Sequence
  Synthetic
ggauggggaaaagggaaagcaaga

SEQ ID NO: 477195 - RNA, 18 nt, Artificial Sequence
  Synthetic
gaucccuaggaagcaaga

SEQ ID NO: 477196 - RNA, 19 nt, Artificial Sequence
  Synthetic
ugaucccuaggaagcaaga

SEQ ID NO: 477197 - RNA, 20 nt, Artificial Sequence
  Synthetic
cugaucccuaggaagcaaga

SEQ ID NO: 477198 - RNA, 21 nt, Artificial Sequence
  Synthetic
gcugaucccuaggaagcaaga

SEQ ID NO: 477199 - RNA, 22 nt, Artificial Sequence
  Synthetic
agcugaucccuaggaagcaaga

SEQ ID NO: 477200 - RNA, 23 nt, Artificial Sequence
  Synthetic
aagcugaucccuaggaagcaaga

SEQ ID NO: 477201 - RNA, 24 nt, Artificial Sequence
  Synthetic
gaagcugaucccuaggaagcaaga

SEQ ID NO: 477202 - RNA, 18 nt, Artificial Sequence
  Synthetic
gacagagacagagcaaga

SEQ ID NO: 477203 - RNA, 19 nt, Artificial Sequence
  Synthetic
agacagagacagagcaaga

SEQ ID NO: 477204 - RNA, 20 nt, Artificial Sequence
  Synthetic
cagacagagacagagcaaga

SEQ ID NO: 477205 - RNA, 21 nt, Artificial Sequence
  Synthetic
acagacagagacagagcaaga

SEQ ID NO: 477206 - RNA, 22 nt, Artificial Sequence
  Synthetic
gacagacagagacagagcaaga

SEQ ID NO: 477207 - RNA, 23 nt, Artificial Sequence
  Synthetic
agacagacagagacagagcaaga

SEQ ID NO: 477208 - RNA, 24 nt, Artificial Sequence
  Synthetic
gagacagacagagacagagcaaga

SEQ ID NO: 477209 - RNA, 18 nt, Artificial Sequence
  Synthetic
gauuggagaggagcaaga

SEQ ID NO: 477210 - RNA, 19 nt, Artificial Sequence
  Synthetic
agauuggagaggagcaaga

SEQ ID NO: 477211 - RNA, 20 nt, Artificial Sequence
  Synthetic
uagauuggagaggagcaaga

SEQ ID NO: 477212 - RNA, 21 nt, Artificial Sequence
  Synthetic
auagauuggagaggagcaaga

SEQ ID NO: 477213 - RNA, 22 nt, Artificial Sequence
  Synthetic
aauagauuggagaggagcaaga

SEQ ID NO: 477214 - RNA, 23 nt, Artificial Sequence
  Synthetic
aaauagauuggagaggagcaaga

SEQ ID NO: 477215 - RNA, 24 nt, Artificial Sequence
  Synthetic
gaaauagauuggagaggagcaaga

SEQ ID NO: 477216 - RNA, 18 nt, Artificial Sequence
  Synthetic
cccuacuucaaggcaaga

SEQ ID NO: 477217 - RNA, 19 nt, Artificial Sequence
  Synthetic
ucccuacuucaaggcaaga

SEQ ID NO: 477218 - RNA, 20 nt, Artificial Sequence
  Synthetic
gucccuacuucaaggcaaga

SEQ ID NO: 477219 - RNA, 21 nt, Artificial Sequence
  Synthetic
ugucccuacuucaaggcaaga

SEQ ID NO: 477220 - RNA, 22 nt, Artificial Sequence
  Synthetic
uugucccuacuucaaggcaaga

SEQ ID NO: 477221 - RNA, 23 nt, Artificial Sequence
  Synthetic
uuugucccuacuucaaggcaaga

SEQ ID NO: 477222 - RNA, 24 nt, Artificial Sequence
  Synthetic
uuuugucccuacuucaaggcaaga

SEQ ID NO: 477223 - RNA, 18 nt, Artificial Sequence
  Synthetic
cuuuacaagguggcaaga

SEQ ID NO: 477224 - RNA, 19 nt, Artificial Sequence
  Synthetic
ccuuuacaagguggcaaga

SEQ ID NO: 477225 - RNA, 20 nt, Artificial Sequence
  Synthetic
uccuuuacaagguggcaaga

SEQ ID NO: 477226 - RNA, 21 nt, Artificial Sequence
  Synthetic
cuccuuuacaagguggcaaga

SEQ ID NO: 477227 - RNA, 22 nt, Artificial Sequence
  Synthetic
ccuccuuuacaagguggcaaga

SEQ ID NO: 477228 - RNA, 23 nt, Artificial Sequence
  Synthetic
accuccuuuacaagguggcaaga

SEQ ID NO: 477229 - RNA, 24 nt, Artificial Sequence
  Synthetic
caccuccuuuacaagguggcaaga

SEQ ID NO: 477230 - RNA, 18 nt, Artificial Sequence
  Synthetic
uaccauuugccugcaaga

SEQ ID NO: 477231 - RNA, 19 nt, Artificial Sequence
  Synthetic
guaccauuugccugcaaga

SEQ ID NO: 477232 - RNA, 20 nt, Artificial Sequence
  Synthetic
aguaccauuugccugcaaga

SEQ ID NO: 477233 - RNA, 21 nt, Artificial Sequence
  Synthetic
aaguaccauuugccugcaaga

SEQ ID NO: 477234 - RNA, 22 nt, Artificial Sequence
  Synthetic
gaaguaccauuugccugcaaga

SEQ ID NO: 477235 - RNA, 23 nt, Artificial Sequence
  Synthetic
agaaguaccauuugccugcaaga

SEQ ID NO: 477236 - RNA, 24 nt, Artificial Sequence
  Synthetic
cagaaguaccauuugccugcaaga

SEQ ID NO: 477237 - RNA, 18 nt, Artificial Sequence
  Synthetic
cuaauccagaaaucaaga

SEQ ID NO: 477238 - RNA, 19 nt, Artificial Sequence
  Synthetic
ucuaauccagaaaucaaga

SEQ ID NO: 477239 - RNA, 20 nt, Artificial Sequence
  Synthetic
cucuaauccagaaaucaaga

SEQ ID NO: 477240 - RNA, 21 nt, Artificial Sequence
  Synthetic
ccucuaauccagaaaucaaga

SEQ ID NO: 477241 - RNA, 22 nt, Artificial Sequence
  Synthetic
uccucuaauccagaaaucaaga

SEQ ID NO: 477242 - RNA, 23 nt, Artificial Sequence
  Synthetic
uuccucuaauccagaaaucaaga

SEQ ID NO: 477243 - RNA, 24 nt, Artificial Sequence
  Synthetic
uuuccucuaauccagaaaucaaga

SEQ ID NO: 477244 - RNA, 18 nt, Artificial Sequence
  Synthetic
agauucccuaaaucaaga

SEQ ID NO: 477245 - RNA, 19 nt, Artificial Sequence
  Synthetic
aagauucccuaaaucaaga

SEQ ID NO: 477246 - RNA, 20 nt, Artificial Sequence
  Synthetic
gaagauucccuaaaucaaga

SEQ ID NO: 477247 - RNA, 21 nt, Artificial Sequence
  Synthetic
agaagauucccuaaaucaaga

SEQ ID NO: 477248 - RNA, 22 nt, Artificial Sequence
  Synthetic
gagaagauucccuaaaucaaga

SEQ ID NO: 477249 - RNA, 23 nt, Artificial Sequence
  Synthetic
agagaagauucccuaaaucaaga

SEQ ID NO: 477250 - RNA, 24 nt, Artificial Sequence
  Synthetic
aagagaagauucccuaaaucaaga

SEQ ID NO: 477251 - RNA, 18 nt, Artificial Sequence
  Synthetic
uggagucagagaucaaga

SEQ ID NO: 477252 - RNA, 19 nt, Artificial Sequence
  Synthetic
uuggagucagagaucaaga

SEQ ID NO: 477253 - RNA, 20 nt, Artificial Sequence
  Synthetic
cuuggagucagagaucaaga

SEQ ID NO: 477254 - RNA, 21 nt, Artificial Sequence
  Synthetic
ccuuggagucagagaucaaga

SEQ ID NO: 477255 - RNA, 22 nt, Artificial Sequence
  Synthetic
uccuuggagucagagaucaaga

SEQ ID NO: 477256 - RNA, 23 nt, Artificial Sequence
  Synthetic
uuccuuggagucagagaucaaga

SEQ ID NO: 477257 - RNA, 24 nt, Artificial Sequence
  Synthetic
guuccuuggagucagagaucaaga

SEQ ID NO: 477258 - RNA, 18 nt, Artificial Sequence
  Synthetic
uguuaggcaugaucaaga

SEQ ID NO: 477259 - RNA, 19 nt, Artificial Sequence
  Synthetic
auguuaggcaugaucaaga

SEQ ID NO: 477260 - RNA, 20 nt, Artificial Sequence
  Synthetic
aauguuaggcaugaucaaga

SEQ ID NO: 477261 - RNA, 21 nt, Artificial Sequence
  Synthetic
aaauguuaggcaugaucaaga

SEQ ID NO: 477262 - RNA, 22 nt, Artificial Sequence
  Synthetic
aaaauguuaggcaugaucaaga

SEQ ID NO: 477263 - RNA, 23 nt, Artificial Sequence
  Synthetic
aaaaauguuaggcaugaucaaga

SEQ ID NO: 477264 - RNA, 24 nt, Artificial Sequence
  Synthetic
aaaaaauguuaggcaugaucaaga

SEQ ID NO: 477265 - RNA, 18 nt, Artificial Sequence
  Synthetic
cuuaaagaaagcucaaga

SEQ ID NO: 477266 - RNA, 19 nt, Artificial Sequence
  Synthetic
acuuaaagaaagcucaaga

SEQ ID NO: 477267 - RNA, 20 nt, Artificial Sequence
  Synthetic
uacuuaaagaaagcucaaga

SEQ ID NO: 477268 - RNA, 21 nt, Artificial Sequence
  Synthetic
guacuuaaagaaagcucaaga

SEQ ID NO: 477269 - RNA, 22 nt, Artificial Sequence
  Synthetic
aguacuuaaagaaagcucaaga

SEQ ID NO: 477270 - RNA, 23 nt, Artificial Sequence
  Synthetic
aaguacuuaaagaaagcucaaga

SEQ ID NO: 477271 - RNA, 24 nt, Artificial Sequence
  Synthetic
caaguacuuaaagaaagcucaaga

SEQ ID NO: 477272 - RNA, 18 nt, Artificial Sequence
  Synthetic
cucuccuaaagcucaaga

SEQ ID NO: 477273 - RNA, 19 nt, Artificial Sequence
  Synthetic
ccucuccuaaagcucaaga

SEQ ID NO: 477274 - RNA, 20 nt, Artificial Sequence
  Synthetic
uccucuccuaaagcucaaga

SEQ ID NO: 477275 - RNA, 21 nt, Artificial Sequence
  Synthetic
uuccucuccuaaagcucaaga

SEQ ID NO: 477276 - RNA, 22 nt, Artificial Sequence
  Synthetic
uuuccucuccuaaagcucaaga

SEQ ID NO: 477277 - RNA, 23 nt, Artificial Sequence
  Synthetic
uuuuccucuccuaaagcucaaga

SEQ ID NO: 477278 - RNA, 24 nt, Artificial Sequence
  Synthetic
uuuuuccucuccuaaagcucaaga

SEQ ID NO: 477279 - RNA, 18 nt, Artificial Sequence
  Synthetic
cuguugugaggcucaaga

SEQ ID NO: 477280 - RNA, 19 nt, Artificial Sequence
  Synthetic
ucuguugugaggcucaaga

SEQ ID NO: 477281 - RNA, 20 nt, Artificial Sequence
  Synthetic
gucuguugugaggcucaaga

SEQ ID NO: 477282 - RNA, 21 nt, Artificial Sequence
  Synthetic
ggucuguugugaggcucaaga

SEQ ID NO: 477283 - RNA, 22 nt, Artificial Sequence
  Synthetic
aggucuguugugaggcucaaga

SEQ ID NO: 477284 - RNA, 23 nt, Artificial Sequence
  Synthetic
uaggucuguugugaggcucaaga

SEQ ID NO: 477285 - RNA, 24 nt, Artificial Sequence
  Synthetic
guaggucuguugugaggcucaaga

SEQ ID NO: 477286 - RNA, 18 nt, Artificial Sequence
  Synthetic
ggaaagccuaucucaaga

SEQ ID NO: 477287 - RNA, 19 nt, Artificial Sequence
  Synthetic
aggaaagccuaucucaaga

SEQ ID NO: 477288 - RNA, 20 nt, Artificial Sequence
  Synthetic
uaggaaagccuaucucaaga

SEQ ID NO: 477289 - RNA, 21 nt, Artificial Sequence
  Synthetic
auaggaaagccuaucucaaga

SEQ ID NO: 477290 - RNA, 22 nt, Artificial Sequence
  Synthetic
gauaggaaagccuaucucaaga

SEQ ID NO: 477291 - RNA, 23 nt, Artificial Sequence
  Synthetic
agauaggaaagccuaucucaaga

SEQ ID NO: 477292 - RNA, 24 nt, Artificial Sequence
  Synthetic
aagauaggaaagccuaucucaaga

SEQ ID NO: 477293 - RNA, 18 nt, Artificial Sequence
  Synthetic
ugagaugcugucucaaga

SEQ ID NO: 477294 - RNA, 19 nt, Artificial Sequence
  Synthetic
gugagaugcugucucaaga

SEQ ID NO: 477295 - RNA, 20 nt, Artificial Sequence
  Synthetic
agugagaugcugucucaaga

SEQ ID NO: 477296 - RNA, 21 nt, Artificial Sequence
  Synthetic
gagugagaugcugucucaaga

SEQ ID NO: 477297 - RNA, 22 nt, Artificial Sequence
  Synthetic
agagugagaugcugucucaaga

SEQ ID NO: 477298 - RNA, 23 nt, Artificial Sequence
  Synthetic
cagagugagaugcugucucaaga

SEQ ID NO: 477299 - RNA, 24 nt, Artificial Sequence
  Synthetic
acagagugagaugcugucucaaga

SEQ ID NO: 477300 - RNA, 18 nt, Artificial Sequence
  Synthetic
uguaaaggaaagucaaga

SEQ ID NO: 477301 - RNA, 19 nt, Artificial Sequence
  Synthetic
cuguaaaggaaagucaaga

SEQ ID NO: 477302 - RNA, 20 nt, Artificial Sequence
  Synthetic
ucuguaaaggaaagucaaga

SEQ ID NO: 477303 - RNA, 21 nt, Artificial Sequence
  Synthetic
aucuguaaaggaaagucaaga

SEQ ID NO: 477304 - RNA, 22 nt, Artificial Sequence
  Synthetic
uaucuguaaaggaaagucaaga

SEQ ID NO: 477305 - RNA, 23 nt, Artificial Sequence
  Synthetic
uuaucuguaaaggaaagucaaga

SEQ ID NO: 477306 - RNA, 24 nt, Artificial Sequence
  Synthetic
guuaucuguaaaggaaagucaaga

SEQ ID NO: 477307 - RNA, 18 nt, Artificial Sequence
  Synthetic
uucaagacacagucaaga

SEQ ID NO: 477308 - RNA, 19 nt, Artificial Sequence
  Synthetic
uuucaagacacagucaaga

SEQ ID NO: 477309 - RNA, 20 nt, Artificial Sequence
  Synthetic
auuucaagacacagucaaga

SEQ ID NO: 477310 - RNA, 21 nt, Artificial Sequence
  Synthetic
gauuucaagacacagucaaga

SEQ ID NO: 477311 - RNA, 22 nt, Artificial Sequence
  Synthetic
ugauuucaagacacagucaaga

SEQ ID NO: 477312 - RNA, 23 nt, Artificial Sequence
  Synthetic
uugauuucaagacacagucaaga

SEQ ID NO: 477313 - RNA, 24 nt, Artificial Sequence
  Synthetic
uuugauuucaagacacagucaaga

SEQ ID NO: 477314 - RNA, 18 nt, Artificial Sequence
  Synthetic
ggauuuuuuuauucaaga

SEQ ID NO: 477315 - RNA, 19 nt, Artificial Sequence
  Synthetic
uggauuuuuuuauucaaga

SEQ ID NO: 477316 - RNA, 20 nt, Artificial Sequence
  Synthetic
cuggauuuuuuuauucaaga

SEQ ID NO: 477317 - RNA, 21 nt, Artificial Sequence
  Synthetic
ucuggauuuuuuuauucaaga

SEQ ID NO: 477318 - RNA, 22 nt, Artificial Sequence
  Synthetic
uucuggauuuuuuuauucaaga

SEQ ID NO: 477319 - RNA, 23 nt, Artificial Sequence
  Synthetic
uuucuggauuuuuuuauucaaga

SEQ ID NO: 477320 - RNA, 24 nt, Artificial Sequence
  Synthetic
uuuucuggauuuuuuuauucaaga

SEQ ID NO: 477321 - RNA, 18 nt, Artificial Sequence
  Synthetic
augaaguauaguucaaga

SEQ ID NO: 477322 - RNA, 19 nt, Artificial Sequence
  Synthetic
aaugaaguauaguucaaga

SEQ ID NO: 477323 - RNA, 20 nt, Artificial Sequence
  Synthetic
aaaugaaguauaguucaaga

SEQ ID NO: 477324 - RNA, 21 nt, Artificial Sequence
  Synthetic
caaaugaaguauaguucaaga

SEQ ID NO: 477325 - RNA, 22 nt, Artificial Sequence
  Synthetic
ucaaaugaaguauaguucaaga

SEQ ID NO: 477326 - RNA, 23 nt, Artificial Sequence
  Synthetic
aucaaaugaaguauaguucaaga

SEQ ID NO: 477327 - RNA, 24 nt, Artificial Sequence
  Synthetic
caucaaaugaaguauaguucaaga

SEQ ID NO: 477328 - RNA, 18 nt, Artificial Sequence
  Synthetic
aaauuccugcuuucaaga

SEQ ID NO: 477329 - RNA, 19 nt, Artificial Sequence
  Synthetic
caaauuccugcuuucaaga

SEQ ID NO: 477330 - RNA, 20 nt, Artificial Sequence
  Synthetic
ccaaauuccugcuuucaaga

SEQ ID NO: 477331 - RNA, 21 nt, Artificial Sequence
  Synthetic
uccaaauuccugcuuucaaga

SEQ ID NO: 477332 - RNA, 22 nt, Artificial Sequence
  Synthetic
auccaaauuccugcuuucaaga

SEQ ID NO: 477333 - RNA, 23 nt, Artificial Sequence
  Synthetic
aauccaaauuccugcuuucaaga

SEQ ID NO: 477334 - RNA, 24 nt, Artificial Sequence
  Synthetic
uaauccaaauuccugcuuucaaga

SEQ ID NO: 477335 - RNA, 18 nt, Artificial Sequence
  Synthetic
uuacuugauuuuucaaga

SEQ ID NO: 477336 - RNA, 19 nt, Artificial Sequence
  Synthetic
auuacuugauuuuucaaga

SEQ ID NO: 477337 - RNA, 20 nt, Artificial Sequence
  Synthetic
uauuacuugauuuuucaaga

SEQ ID NO: 477338 - RNA, 21 nt, Artificial Sequence
  Synthetic
guauuacuugauuuuucaaga

SEQ ID NO: 477339 - RNA, 22 nt, Artificial Sequence
  Synthetic
aguauuacuugauuuuucaaga

SEQ ID NO: 477340 - RNA, 23 nt, Artificial Sequence
  Synthetic
uaguauuacuugauuuuucaaga

SEQ ID NO: 477341 - RNA, 24 nt, Artificial Sequence
  Synthetic
uuaguauuacuugauuuuucaaga

SEQ ID NO: 477342 - RNA, 18 nt, Artificial Sequence
  Synthetic
aaaaaaaaaaaaagaaga

SEQ ID NO: 477343 - RNA, 19 nt, Artificial Sequence
  Synthetic
gaaaaaaaaaaaaagaaga

SEQ ID NO: 477344 - RNA, 20 nt, Artificial Sequence
  Synthetic
ugaaaaaaaaaaaaagaaga

SEQ ID NO: 477345 - RNA, 21 nt, Artificial Sequence
  Synthetic
gugaaaaaaaaaaaaagaaga

SEQ ID NO: 477346 - RNA, 22 nt, Artificial Sequence
  Synthetic
agugaaaaaaaaaaaaagaaga

SEQ ID NO: 477347 - RNA, 23 nt, Artificial Sequence
  Synthetic
aagugaaaaaaaaaaaaagaaga

SEQ ID NO: 477348 - RNA, 24 nt, Artificial Sequence
  Synthetic
aaagugaaaaaaaaaaaaagaaga

SEQ ID NO: 477349 - RNA, 18 nt, Artificial Sequence
  Synthetic
ggaauacaaaaaagaaga

SEQ ID NO: 477350 - RNA, 19 nt, Artificial Sequence
  Synthetic
uggaauacaaaaaagaaga

SEQ ID NO: 477351 - RNA, 20 nt, Artificial Sequence
  Synthetic
uuggaauacaaaaaagaaga

SEQ ID NO: 477352 - RNA, 21 nt, Artificial Sequence
  Synthetic
uuuggaauacaaaaaagaaga

SEQ ID NO: 477353 - RNA, 22 nt, Artificial Sequence
  Synthetic
cuuuggaauacaaaaaagaaga

SEQ ID NO: 477354 - RNA, 23 nt, Artificial Sequence
  Synthetic
acuuuggaauacaaaaaagaaga

SEQ ID NO: 477355 - RNA, 24 nt, Artificial Sequence
  Synthetic
aacuuuggaauacaaaaaagaaga

SEQ ID NO: 477356 - RNA, 18 nt, Artificial Sequence
  Synthetic
uaaauuuucaaaagaaga

SEQ ID NO: 477357 - RNA, 19 nt, Artificial Sequence
  Synthetic
cuaaauuuucaaaagaaga

SEQ ID NO: 477358 - RNA, 20 nt, Artificial Sequence
  Synthetic
ucuaaauuuucaaaagaaga

SEQ ID NO: 477359 - RNA, 21 nt, Artificial Sequence
  Synthetic
aucuaaauuuucaaaagaaga

SEQ ID NO: 477360 - RNA, 22 nt, Artificial Sequence
  Synthetic
gaucuaaauuuucaaaagaaga

SEQ ID NO: 477361 - RNA, 23 nt, Artificial Sequence
  Synthetic
agaucuaaauuuucaaaagaaga

SEQ ID NO: 477362 - RNA, 24 nt, Artificial Sequence
  Synthetic
cagaucuaaauuuucaaaagaaga

SEQ ID NO: 477363 - RNA, 18 nt, Artificial Sequence
  Synthetic
acuacagaucaaagaaga

SEQ ID NO: 477364 - RNA, 19 nt, Artificial Sequence
  Synthetic
aacuacagaucaaagaaga

SEQ ID NO: 477365 - RNA, 20 nt, Artificial Sequence
  Synthetic
aaacuacagaucaaagaaga

SEQ ID NO: 477366 - RNA, 21 nt, Artificial Sequence
  Synthetic
uaaacuacagaucaaagaaga

SEQ ID NO: 477367 - RNA, 22 nt, Artificial Sequence
  Synthetic
cuaaacuacagaucaaagaaga

SEQ ID NO: 477368 - RNA, 23 nt, Artificial Sequence
  Synthetic
acuaaacuacagaucaaagaaga

SEQ ID NO: 477369 - RNA, 24 nt, Artificial Sequence
  Synthetic
cacuaaacuacagaucaaagaaga

SEQ ID NO: 477370 - RNA, 18 nt, Artificial Sequence
  Synthetic
agaaagaaagaaagaaga

SEQ ID NO: 477371 - RNA, 19 nt, Artificial Sequence
  Synthetic
aagaaagaaagaaagaaga

SEQ ID NO: 477372 - RNA, 20 nt, Artificial Sequence
  Synthetic
aaagaaagaaagaaagaaga

SEQ ID NO: 477373 - RNA, 21 nt, Artificial Sequence
  Synthetic
gaaagaaagaaagaaagaaga

SEQ ID NO: 477374 - RNA, 22 nt, Artificial Sequence
  Synthetic
agaaagaaagaaagaaagaaga

SEQ ID NO: 477375 - RNA, 23 nt, Artificial Sequence
  Synthetic
aagaaagaaagaaagaaagaaga

SEQ ID NO: 477376 - RNA, 24 nt, Artificial Sequence
  Synthetic
aaagaaagaaagaaagaaagaaga

SEQ ID NO: 477377 - RNA, 18 nt, Artificial Sequence
  Synthetic
gccuacacagaaagaaga

SEQ ID NO: 477378 - RNA, 19 nt, Artificial Sequence
  Synthetic
ugccuacacagaaagaaga

SEQ ID NO: 477379 - RNA, 20 nt, Artificial Sequence
  Synthetic
augccuacacagaaagaaga

SEQ ID NO: 477380 - RNA, 21 nt, Artificial Sequence
  Synthetic
gaugccuacacagaaagaaga

SEQ ID NO: 477381 - RNA, 22 nt, Artificial Sequence
  Synthetic
ggaugccuacacagaaagaaga

SEQ ID NO: 477382 - RNA, 23 nt, Artificial Sequence
  Synthetic
gggaugccuacacagaaagaaga

SEQ ID NO: 477383 - RNA, 24 nt, Artificial Sequence
  Synthetic
ugggaugccuacacagaaagaaga

SEQ ID NO: 477384 - RNA, 18 nt, Artificial Sequence
  Synthetic
gaaaauagagaaagaaga

SEQ ID NO: 477385 - RNA, 19 nt, Artificial Sequence
  Synthetic
ggaaaauagagaaagaaga

SEQ ID NO: 477386 - RNA, 20 nt, Artificial Sequence
  Synthetic
gggaaaauagagaaagaaga

SEQ ID NO: 477387 - RNA, 21 nt, Artificial Sequence
  Synthetic
agggaaaauagagaaagaaga

SEQ ID NO: 477388 - RNA, 22 nt, Artificial Sequence
  Synthetic
aagggaaaauagagaaagaaga

SEQ ID NO: 477389 - RNA, 23 nt, Artificial Sequence
  Synthetic
uaagggaaaauagagaaagaaga

SEQ ID NO: 477390 - RNA, 24 nt, Artificial Sequence
  Synthetic
guaagggaaaauagagaaagaaga

SEQ ID NO: 477391 - RNA, 18 nt, Artificial Sequence
  Synthetic
uuaaccaaggaaagaaga

SEQ ID NO: 477392 - RNA, 19 nt, Artificial Sequence
  Synthetic
auuaaccaaggaaagaaga

SEQ ID NO: 477393 - RNA, 20 nt, Artificial Sequence
  Synthetic
gauuaaccaaggaaagaaga

SEQ ID NO: 477394 - RNA, 21 nt, Artificial Sequence
  Synthetic
agauuaaccaaggaaagaaga

SEQ ID NO: 477395 - RNA, 22 nt, Artificial Sequence
  Synthetic
aagauuaaccaaggaaagaaga

SEQ ID NO: 477396 - RNA, 23 nt, Artificial Sequence
  Synthetic
caagauuaaccaaggaaagaaga

SEQ ID NO: 477397 - RNA, 24 nt, Artificial Sequence
  Synthetic
gcaagauuaaccaaggaaagaaga

SEQ ID NO: 477398 - RNA, 18 nt, Artificial Sequence
  Synthetic
gaagugaaggaaagaaga

SEQ ID NO: 477399 - RNA, 19 nt, Artificial Sequence
  Synthetic
cgaagugaaggaaagaaga

SEQ ID NO: 477400 - RNA, 20 nt, Artificial Sequence
  Synthetic
acgaagugaaggaaagaaga

SEQ ID NO: 477401 - RNA, 21 nt, Artificial Sequence
  Synthetic
gacgaagugaaggaaagaaga

SEQ ID NO: 477402 - RNA, 22 nt, Artificial Sequence
  Synthetic
ugacgaagugaaggaaagaaga

SEQ ID NO: 477403 - RNA, 23 nt, Artificial Sequence
  Synthetic
uugacgaagugaaggaaagaaga

SEQ ID NO: 477404 - RNA, 24 nt, Artificial Sequence
  Synthetic
guugacgaagugaaggaaagaaga

SEQ ID NO: 477405 - RNA, 18 nt, Artificial Sequence
  Synthetic
agcuugguguaaagaaga

SEQ ID NO: 477406 - RNA, 19 nt, Artificial Sequence
  Synthetic
aagcuugguguaaagaaga

SEQ ID NO: 477407 - RNA, 20 nt, Artificial Sequence
  Synthetic
aaagcuugguguaaagaaga

SEQ ID NO: 477408 - RNA, 21 nt, Artificial Sequence
  Synthetic
aaaagcuugguguaaagaaga

SEQ ID NO: 477409 - RNA, 22 nt, Artificial Sequence
  Synthetic
aaaaagcuugguguaaagaaga

SEQ ID NO: 477410 - RNA, 23 nt, Artificial Sequence
  Synthetic
aaaaaagcuugguguaaagaaga

SEQ ID NO: 477411 - RNA, 24 nt, Artificial Sequence
  Synthetic
aaaaaaagcuugguguaaagaaga

SEQ ID NO: 477412 - RNA, 18 nt, Artificial Sequence
  Synthetic
gaagucauuuaaagaaga

SEQ ID NO: 477413 - RNA, 19 nt, Artificial Sequence
  Synthetic
agaagucauuuaaagaaga

SEQ ID NO: 477414 - RNA, 20 nt, Artificial Sequence
  Synthetic
aagaagucauuuaaagaaga

SEQ ID NO: 477415 - RNA, 21 nt, Artificial Sequence
  Synthetic
aaagaagucauuuaaagaaga

SEQ ID NO: 477416 - RNA, 22 nt, Artificial Sequence
  Synthetic
gaaagaagucauuuaaagaaga

SEQ ID NO: 477417 - RNA, 23 nt, Artificial Sequence
  Synthetic
ugaaagaagucauuuaaagaaga

SEQ ID NO: 477418 - RNA, 24 nt, Artificial Sequence
  Synthetic
cugaaagaagucauuuaaagaaga

SEQ ID NO: 477419 - RNA, 18 nt, Artificial Sequence
  Synthetic
guuauuguuucaagaaga

SEQ ID NO: 477420 - RNA, 19 nt, Artificial Sequence
  Synthetic
aguuauuguuucaagaaga

SEQ ID NO: 477421 - RNA, 20 nt, Artificial Sequence
  Synthetic
aaguuauuguuucaagaaga

SEQ ID NO: 477422 - RNA, 21 nt, Artificial Sequence
  Synthetic
gaaguuauuguuucaagaaga

SEQ ID NO: 477423 - RNA, 22 nt, Artificial Sequence
  Synthetic
agaaguuauuguuucaagaaga

SEQ ID NO: 477424 - RNA, 23 nt, Artificial Sequence
  Synthetic
cagaaguuauuguuucaagaaga

SEQ ID NO: 477425 - RNA, 24 nt, Artificial Sequence
  Synthetic
acagaaguuauuguuucaagaaga

SEQ ID NO: 477426 - RNA, 18 nt, Artificial Sequence
  Synthetic
aaaaaaaaaagaagaaga

SEQ ID NO: 477427 - RNA, 19 nt, Artificial Sequence
  Synthetic
aaaaaaaaaaagaagaaga

SEQ ID NO: 477428 - RNA, 20 nt, Artificial Sequence
  Synthetic
caaaaaaaaaaagaagaaga

SEQ ID NO: 477429 - RNA, 21 nt, Artificial Sequence
  Synthetic
acaaaaaaaaaaagaagaaga

SEQ ID NO: 477430 - RNA, 22 nt, Artificial Sequence
  Synthetic
aacaaaaaaaaaaagaagaaga

SEQ ID NO: 477431 - RNA, 23 nt, Artificial Sequence
  Synthetic
aaacaaaaaaaaaaagaagaaga

SEQ ID NO: 477432 - RNA, 24 nt, Artificial Sequence
  Synthetic
aaaacaaaaaaaaaaagaagaaga

SEQ ID NO: 477433 - RNA, 18 nt, Artificial Sequence
  Synthetic
ggaggacucagaagaaga

SEQ ID NO: 477434 - RNA, 19 nt, Artificial Sequence
  Synthetic
gggaggacucagaagaaga

SEQ ID NO: 477435 - RNA, 20 nt, Artificial Sequence
  Synthetic
ugggaggacucagaagaaga

SEQ ID NO: 477436 - RNA, 21 nt, Artificial Sequence
  Synthetic
uugggaggacucagaagaaga

SEQ ID NO: 477437 - RNA, 22 nt, Artificial Sequence
  Synthetic
guugggaggacucagaagaaga

SEQ ID NO: 477438 - RNA, 23 nt, Artificial Sequence
  Synthetic
aguugggaggacucagaagaaga

SEQ ID NO: 477439 - RNA, 24 nt, Artificial Sequence
  Synthetic
caguugggaggacucagaagaaga

SEQ ID NO: 477440 - RNA, 18 nt, Artificial Sequence
  Synthetic
aggaggcucagaagaaga

SEQ ID NO: 477441 - RNA, 19 nt, Artificial Sequence
  Synthetic
uaggaggcucagaagaaga

SEQ ID NO: 477442 - RNA, 20 nt, Artificial Sequence
  Synthetic
uuaggaggcucagaagaaga

SEQ ID NO: 477443 - RNA, 21 nt, Artificial Sequence
  Synthetic
guuaggaggcucagaagaaga

SEQ ID NO: 477444 - RNA, 22 nt, Artificial Sequence
  Synthetic
aguuaggaggcucagaagaaga

SEQ ID NO: 477445 - RNA, 23 nt, Artificial Sequence
  Synthetic
caguuaggaggcucagaagaaga

SEQ ID NO: 477446 - RNA, 24 nt, Artificial Sequence
  Synthetic
acaguuaggaggcucagaagaaga

SEQ ID NO: 477447 - RNA, 18 nt, Artificial Sequence
  Synthetic
cuggcuuagagaagaaga

SEQ ID NO: 477448 - RNA, 19 nt, Artificial Sequence
  Synthetic
ucuggcuuagagaagaaga

SEQ ID NO: 477449 - RNA, 20 nt, Artificial Sequence
  Synthetic
uucuggcuuagagaagaaga

SEQ ID NO: 477450 - RNA, 21 nt, Artificial Sequence
  Synthetic
uuucuggcuuagagaagaaga

SEQ ID NO: 477451 - RNA, 22 nt, Artificial Sequence
  Synthetic
guuucuggcuuagagaagaaga

SEQ ID NO: 477452 - RNA, 23 nt, Artificial Sequence
  Synthetic
gguuucuggcuuagagaagaaga

SEQ ID NO: 477453 - RNA, 24 nt, Artificial Sequence
  Synthetic
ggguuucuggcuuagagaagaaga

SEQ ID NO: 477454 - RNA, 18 nt, Artificial Sequence
  Synthetic
agugugugaggaagaaga

SEQ ID NO: 477455 - RNA, 19 nt, Artificial Sequence
  Synthetic
cagugugugaggaagaaga

SEQ ID NO: 477456 - RNA, 20 nt, Artificial Sequence
  Synthetic
acagugugugaggaagaaga

SEQ ID NO: 477457 - RNA, 21 nt, Artificial Sequence
  Synthetic
gacagugugugaggaagaaga

SEQ ID NO: 477458 - RNA, 22 nt, Artificial Sequence
  Synthetic
ugacagugugugaggaagaaga

SEQ ID NO: 477459 - RNA, 23 nt, Artificial Sequence
  Synthetic
uugacagugugugaggaagaaga

SEQ ID NO: 477460 - RNA, 24 nt, Artificial Sequence
  Synthetic
cuugacagugugugaggaagaaga

SEQ ID NO: 477461 - RNA, 18 nt, Artificial Sequence
  Synthetic
uaaacagaacuaagaaga

SEQ ID NO: 477462 - RNA, 19 nt, Artificial Sequence
  Synthetic
uuaaacagaacuaagaaga

SEQ ID NO: 477463 - RNA, 20 nt, Artificial Sequence
  Synthetic
uuuaaacagaacuaagaaga

SEQ ID NO: 477464 - RNA, 21 nt, Artificial Sequence
  Synthetic
auuuaaacagaacuaagaaga

SEQ ID NO: 477465 - RNA, 22 nt, Artificial Sequence
  Synthetic
aauuuaaacagaacuaagaaga

SEQ ID NO: 477466 - RNA, 23 nt, Artificial Sequence
  Synthetic
aaauuuaaacagaacuaagaaga

SEQ ID NO: 477467 - RNA, 24 nt, Artificial Sequence
  Synthetic
caaauuuaaacagaacuaagaaga

SEQ ID NO: 477468 - RNA, 18 nt, Artificial Sequence
  Synthetic
aaaugggaaguaagaaga

SEQ ID NO: 477469 - RNA, 19 nt, Artificial Sequence
  Synthetic
caaaugggaaguaagaaga

SEQ ID NO: 477470 - RNA, 20 nt, Artificial Sequence
  Synthetic
gcaaaugggaaguaagaaga

SEQ ID NO: 477471 - RNA, 21 nt, Artificial Sequence
  Synthetic
agcaaaugggaaguaagaaga

SEQ ID NO: 477472 - RNA, 22 nt, Artificial Sequence
  Synthetic
uagcaaaugggaaguaagaaga

SEQ ID NO: 477473 - RNA, 23 nt, Artificial Sequence
  Synthetic
uuagcaaaugggaaguaagaaga

SEQ ID NO: 477474 - RNA, 24 nt, Artificial Sequence
  Synthetic
guuagcaaaugggaaguaagaaga

SEQ ID NO: 477475 - RNA, 18 nt, Artificial Sequence
  Synthetic
aacucauucaacagaaga

SEQ ID NO: 477476 - RNA, 19 nt, Artificial Sequence
  Synthetic
uaacucauucaacagaaga

SEQ ID NO: 477477 - RNA, 20 nt, Artificial Sequence
  Synthetic
uuaacucauucaacagaaga

SEQ ID NO: 477478 - RNA, 21 nt, Artificial Sequence
  Synthetic
uuuaacucauucaacagaaga

SEQ ID NO: 477479 - RNA, 22 nt, Artificial Sequence
  Synthetic
uuuuaacucauucaacagaaga

SEQ ID NO: 477480 - RNA, 23 nt, Artificial Sequence
  Synthetic
auuuuaacucauucaacagaaga

SEQ ID NO: 477481 - RNA, 24 nt, Artificial Sequence
  Synthetic
uauuuuaacucauucaacagaaga

SEQ ID NO: 477482 - RNA, 18 nt, Artificial Sequence
  Synthetic
acauuauguuccagaaga

SEQ ID NO: 477483 - RNA, 19 nt, Artificial Sequence
  Synthetic
aacauuauguuccagaaga

SEQ ID NO: 477484 - RNA, 20 nt, Artificial Sequence
  Synthetic
aaacauuauguuccagaaga

SEQ ID NO: 477485 - RNA, 21 nt, Artificial Sequence
  Synthetic
caaacauuauguuccagaaga

SEQ ID NO: 477486 - RNA, 22 nt, Artificial Sequence
  Synthetic
ucaaacauuauguuccagaaga

SEQ ID NO: 477487 - RNA, 23 nt, Artificial Sequence
  Synthetic
uucaaacauuauguuccagaaga

SEQ ID NO: 477488 - RNA, 24 nt, Artificial Sequence
  Synthetic
guucaaacauuauguuccagaaga

SEQ ID NO: 477489 - RNA, 18 nt, Artificial Sequence
  Synthetic
aguuuggccaucagaaga

SEQ ID NO: 477490 - RNA, 19 nt, Artificial Sequence
  Synthetic
aaguuuggccaucagaaga

SEQ ID NO: 477491 - RNA, 20 nt, Artificial Sequence
  Synthetic
aaaguuuggccaucagaaga

SEQ ID NO: 477492 - RNA, 21 nt, Artificial Sequence
  Synthetic
caaaguuuggccaucagaaga

SEQ ID NO: 477493 - RNA, 22 nt, Artificial Sequence
  Synthetic
acaaaguuuggccaucagaaga

SEQ ID NO: 477494 - RNA, 23 nt, Artificial Sequence
  Synthetic
cacaaaguuuggccaucagaaga

SEQ ID NO: 477495 - RNA, 24 nt, Artificial Sequence
  Synthetic
ucacaaaguuuggccaucagaaga

SEQ ID NO: 477496 - RNA, 18 nt, Artificial Sequence
  Synthetic
uuuggagggcucagaaga

SEQ ID NO: 477497 - RNA, 19 nt, Artificial Sequence
  Synthetic
guuuggagggcucagaaga

SEQ ID NO: 477498 - RNA, 20 nt, Artificial Sequence
  Synthetic
aguuuggagggcucagaaga

SEQ ID NO: 477499 - RNA, 21 nt, Artificial Sequence
  Synthetic
caguuuggagggcucagaaga

SEQ ID NO: 477500 - RNA, 22 nt, Artificial Sequence
  Synthetic
acaguuuggagggcucagaaga

SEQ ID NO: 477501 - RNA, 23 nt, Artificial Sequence
  Synthetic
uacaguuuggagggcucagaaga

SEQ ID NO: 477502 - RNA, 24 nt, Artificial Sequence
  Synthetic
guacaguuuggagggcucagaaga

SEQ ID NO: 477503 - RNA, 18 nt, Artificial Sequence
  Synthetic
uuuuuacaucucagaaga

SEQ ID NO: 477504 - RNA, 19 nt, Artificial Sequence
  Synthetic
auuuuuacaucucagaaga

SEQ ID NO: 477505 - RNA, 20 nt, Artificial Sequence
  Synthetic
uauuuuuacaucucagaaga

SEQ ID NO: 477506 - RNA, 21 nt, Artificial Sequence
  Synthetic
auauuuuuacaucucagaaga

SEQ ID NO: 477507 - RNA, 22 nt, Artificial Sequence
  Synthetic
cauauuuuuacaucucagaaga

SEQ ID NO: 477508 - RNA, 23 nt, Artificial Sequence
  Synthetic
acauauuuuuacaucucagaaga

SEQ ID NO: 477509 - RNA, 24 nt, Artificial Sequence
  Synthetic
aacauauuuuuacaucucagaaga

SEQ ID NO: 477510 - RNA, 18 nt, Artificial Sequence
  Synthetic
auuggaggggucagaaga

SEQ ID NO: 477511 - RNA, 19 nt, Artificial Sequence
  Synthetic
aauuggaggggucagaaga

SEQ ID NO: 477512 - RNA, 20 nt, Artificial Sequence
  Synthetic
gaauuggaggggucagaaga

SEQ ID NO: 477513 - RNA, 21 nt, Artificial Sequence
  Synthetic
agaauuggaggggucagaaga

SEQ ID NO: 477514 - RNA, 22 nt, Artificial Sequence
  Synthetic
gagaauuggaggggucagaaga

SEQ ID NO: 477515 - RNA, 23 nt, Artificial Sequence
  Synthetic
agagaauuggaggggucagaaga

SEQ ID NO: 477516 - RNA, 24 nt, Artificial Sequence
  Synthetic
uagagaauuggaggggucagaaga

SEQ ID NO: 477517 - RNA, 18 nt, Artificial Sequence
  Synthetic
caggggagaaagagaaga

SEQ ID NO: 477518 - RNA, 19 nt, Artificial Sequence
  Synthetic
ccaggggagaaagagaaga

SEQ ID NO: 477519 - RNA, 20 nt, Artificial Sequence
  Synthetic
gccaggggagaaagagaaga

SEQ ID NO: 477520 - RNA, 21 nt, Artificial Sequence
  Synthetic
ggccaggggagaaagagaaga

SEQ ID NO: 477521 - RNA, 22 nt, Artificial Sequence
  Synthetic
uggccaggggagaaagagaaga

SEQ ID NO: 477522 - RNA, 23 nt, Artificial Sequence
  Synthetic
guggccaggggagaaagagaaga

SEQ ID NO: 477523 - RNA, 24 nt, Artificial Sequence
  Synthetic
gguggccaggggagaaagagaaga

SEQ ID NO: 477524 - RNA, 18 nt, Artificial Sequence
  Synthetic
aagagaaagaagagaaga

SEQ ID NO: 477525 - RNA, 19 nt, Artificial Sequence
  Synthetic
aaagagaaagaagagaaga

SEQ ID NO: 477526 - RNA, 20 nt, Artificial Sequence
  Synthetic
gaaagagaaagaagagaaga

SEQ ID NO: 477527 - RNA, 21 nt, Artificial Sequence
  Synthetic
ggaaagagaaagaagagaaga

SEQ ID NO: 477528 - RNA, 22 nt, Artificial Sequence
  Synthetic
aggaaagagaaagaagagaaga

SEQ ID NO: 477529 - RNA, 23 nt, Artificial Sequence
  Synthetic
gaggaaagagaaagaagagaaga

SEQ ID NO: 477530 - RNA, 24 nt, Artificial Sequence
  Synthetic
agaggaaagagaaagaagagaaga

SEQ ID NO: 477531 - RNA, 18 nt, Artificial Sequence
  Synthetic
ccaugguagaagagaaga

SEQ ID NO: 477532 - RNA, 19 nt, Artificial Sequence
  Synthetic
gccaugguagaagagaaga

SEQ ID NO: 477533 - RNA, 20 nt, Artificial Sequence
  Synthetic
agccaugguagaagagaaga

SEQ ID NO: 477534 - RNA, 21 nt, Artificial Sequence
  Synthetic
aagccaugguagaagagaaga

SEQ ID NO: 477535 - RNA, 22 nt, Artificial Sequence
  Synthetic
aaagccaugguagaagagaaga

SEQ ID NO: 477536 - RNA, 23 nt, Artificial Sequence
  Synthetic
gaaagccaugguagaagagaaga

SEQ ID NO: 477537 - RNA, 24 nt, Artificial Sequence
  Synthetic
agaaagccaugguagaagagaaga

SEQ ID NO: 477538 - RNA, 18 nt, Artificial Sequence
  Synthetic
uagaugcuggagagaaga

SEQ ID NO: 477539 - RNA, 19 nt, Artificial Sequence
  Synthetic
auagaugcuggagagaaga

SEQ ID NO: 477540 - RNA, 20 nt, Artificial Sequence
  Synthetic
aauagaugcuggagagaaga

SEQ ID NO: 477541 - RNA, 21 nt, Artificial Sequence
  Synthetic
gaauagaugcuggagagaaga

SEQ ID NO: 477542 - RNA, 22 nt, Artificial Sequence
  Synthetic
ugaauagaugcuggagagaaga

SEQ ID NO: 477543 - RNA, 23 nt, Artificial Sequence
  Synthetic
cugaauagaugcuggagagaaga

SEQ ID NO: 477544 - RNA, 24 nt, Artificial Sequence
  Synthetic
acugaauagaugcuggagagaaga

SEQ ID NO: 477545 - RNA, 18 nt, Artificial Sequence
  Synthetic
agagcuuaguagagaaga

SEQ ID NO: 477546 - RNA, 19 nt, Artificial Sequence
  Synthetic
cagagcuuaguagagaaga

SEQ ID NO: 477547 - RNA, 20 nt, Artificial Sequence
  Synthetic
ucagagcuuaguagagaaga

SEQ ID NO: 477548 - RNA, 21 nt, Artificial Sequence
  Synthetic
cucagagcuuaguagagaaga

SEQ ID NO: 477549 - RNA, 22 nt, Artificial Sequence
  Synthetic
acucagagcuuaguagagaaga

SEQ ID NO: 477550 - RNA, 23 nt, Artificial Sequence
  Synthetic
cacucagagcuuaguagagaaga

SEQ ID NO: 477551 - RNA, 24 nt, Artificial Sequence
  Synthetic
ucacucagagcuuaguagagaaga

SEQ ID NO: 477552 - RNA, 18 nt, Artificial Sequence
  Synthetic
cugacgcuguagagaaga

SEQ ID NO: 477553 - RNA, 19 nt, Artificial Sequence
  Synthetic
gcugacgcuguagagaaga

SEQ ID NO: 477554 - RNA, 20 nt, Artificial Sequence
  Synthetic
ugcugacgcuguagagaaga

SEQ ID NO: 477555 - RNA, 21 nt, Artificial Sequence
  Synthetic
cugcugacgcuguagagaaga

SEQ ID NO: 477556 - RNA, 22 nt, Artificial Sequence
  Synthetic
gcugcugacgcuguagagaaga

SEQ ID NO: 477557 - RNA, 23 nt, Artificial Sequence
  Synthetic
ugcugcugacgcuguagagaaga

SEQ ID NO: 477558 - RNA, 24 nt, Artificial Sequence
  Synthetic
augcugcugacgcuguagagaaga

SEQ ID NO: 477559 - RNA, 18 nt, Artificial Sequence
  Synthetic
gaaagcaaggcgagaaga

SEQ ID NO: 477560 - RNA, 19 nt, Artificial Sequence
  Synthetic
ugaaagcaaggcgagaaga

SEQ ID NO: 477561 - RNA, 20 nt, Artificial Sequence
  Synthetic
cugaaagcaaggcgagaaga

SEQ ID NO: 477562 - RNA, 21 nt, Artificial Sequence
  Synthetic
gcugaaagcaaggcgagaaga

SEQ ID NO: 477563 - RNA, 22 nt, Artificial Sequence
  Synthetic
ugcugaaagcaaggcgagaaga

SEQ ID NO: 477564 - RNA, 23 nt, Artificial Sequence
  Synthetic
gugcugaaagcaaggcgagaaga

SEQ ID NO: 477565 - RNA, 24 nt, Artificial Sequence
  Synthetic
agugcugaaagcaaggcgagaaga

SEQ ID NO: 477566 - RNA, 18 nt, Artificial Sequence
  Synthetic
guuaagagagggagaaga

SEQ ID NO: 477567 - RNA, 19 nt, Artificial Sequence
  Synthetic
gguuaagagagggagaaga

SEQ ID NO: 477568 - RNA, 20 nt, Artificial Sequence
  Synthetic
agguuaagagagggagaaga

SEQ ID NO: 477569 - RNA, 21 nt, Artificial Sequence
  Synthetic
aagguuaagagagggagaaga

SEQ ID NO: 477570 - RNA, 22 nt, Artificial Sequence
  Synthetic
aaagguuaagagagggagaaga

SEQ ID NO: 477571 - RNA, 23 nt, Artificial Sequence
  Synthetic
aaaagguuaagagagggagaaga

SEQ ID NO: 477572 - RNA, 24 nt, Artificial Sequence
  Synthetic
caaaagguuaagagagggagaaga

SEQ ID NO: 477573 - RNA, 18 nt, Artificial Sequence
  Synthetic
gcuauacacuggagaaga

SEQ ID NO: 477574 - RNA, 19 nt, Artificial Sequence
  Synthetic
agcuauacacuggagaaga

SEQ ID NO: 477575 - RNA, 20 nt, Artificial Sequence
  Synthetic
aagcuauacacuggagaaga

SEQ ID NO: 477576 - RNA, 21 nt, Artificial Sequence
  Synthetic
caagcuauacacuggagaaga

SEQ ID NO: 477577 - RNA, 22 nt, Artificial Sequence
  Synthetic
gcaagcuauacacuggagaaga

SEQ ID NO: 477578 - RNA, 23 nt, Artificial Sequence
  Synthetic
ugcaagcuauacacuggagaaga

SEQ ID NO: 477579 - RNA, 24 nt, Artificial Sequence
  Synthetic
uugcaagcuauacacuggagaaga

SEQ ID NO: 477580 - RNA, 18 nt, Artificial Sequence
  Synthetic
uguaacaaaaugagaaga

SEQ ID NO: 477581 - RNA, 19 nt, Artificial Sequence
  Synthetic
uuguaacaaaaugagaaga

SEQ ID NO: 477582 - RNA, 20 nt, Artificial Sequence
  Synthetic
auuguaacaaaaugagaaga

SEQ ID NO: 477583 - RNA, 21 nt, Artificial Sequence
  Synthetic
cauuguaacaaaaugagaaga

SEQ ID NO: 477584 - RNA, 22 nt, Artificial Sequence
  Synthetic
acauuguaacaaaaugagaaga

SEQ ID NO: 477585 - RNA, 23 nt, Artificial Sequence
  Synthetic
gacauuguaacaaaaugagaaga

SEQ ID NO: 477586 - RNA, 24 nt, Artificial Sequence
  Synthetic
ggacauuguaacaaaaugagaaga

SEQ ID NO: 477587 - RNA, 18 nt, Artificial Sequence
  Synthetic
gcuggcagaaugagaaga

SEQ ID NO: 477588 - RNA, 19 nt, Artificial Sequence
  Synthetic
ugcuggcagaaugagaaga

SEQ ID NO: 477589 - RNA, 20 nt, Artificial Sequence
  Synthetic
uugcuggcagaaugagaaga

SEQ ID NO: 477590 - RNA, 21 nt, Artificial Sequence
  Synthetic
auugcuggcagaaugagaaga

SEQ ID NO: 477591 - RNA, 22 nt, Artificial Sequence
  Synthetic
gauugcuggcagaaugagaaga

SEQ ID NO: 477592 - RNA, 23 nt, Artificial Sequence
  Synthetic
agauugcuggcagaaugagaaga

SEQ ID NO: 477593 - RNA, 24 nt, Artificial Sequence
  Synthetic
gagauugcuggcagaaugagaaga

SEQ ID NO: 477594 - RNA, 18 nt, Artificial Sequence
  Synthetic
ccguauagaaugagaaga

SEQ ID NO: 477595 - RNA, 19 nt, Artificial Sequence
  Synthetic
accguauagaaugagaaga

SEQ ID NO: 477596 - RNA, 20 nt, Artificial Sequence
  Synthetic
aaccguauagaaugagaaga

SEQ ID NO: 477597 - RNA, 21 nt, Artificial Sequence
  Synthetic
aaaccguauagaaugagaaga

SEQ ID NO: 477598 - RNA, 22 nt, Artificial Sequence
  Synthetic
gaaaccguauagaaugagaaga

SEQ ID NO: 477599 - RNA, 23 nt, Artificial Sequence
  Synthetic
ggaaaccguauagaaugagaaga

SEQ ID NO: 477600 - RNA, 24 nt, Artificial Sequence
  Synthetic
gggaaaccguauagaaugagaaga

SEQ ID NO: 477601 - RNA, 18 nt, Artificial Sequence
  Synthetic
cuuagcuggaugagaaga

SEQ ID NO: 477602 - RNA, 19 nt, Artificial Sequence
  Synthetic
ccuuagcuggaugagaaga

SEQ ID NO: 477603 - RNA, 20 nt, Artificial Sequence
  Synthetic
gccuuagcuggaugagaaga

SEQ ID NO: 477604 - RNA, 21 nt, Artificial Sequence
  Synthetic
agccuuagcuggaugagaaga

SEQ ID NO: 477605 - RNA, 22 nt, Artificial Sequence
  Synthetic
aagccuuagcuggaugagaaga

SEQ ID NO: 477606 - RNA, 23 nt, Artificial Sequence
  Synthetic
gaagccuuagcuggaugagaaga

SEQ ID NO: 477607 - RNA, 24 nt, Artificial Sequence
  Synthetic
agaagccuuagcuggaugagaaga

SEQ ID NO: 477608 - RNA, 18 nt, Artificial Sequence
  Synthetic
gagguuacagugagaaga

SEQ ID NO: 477609 - RNA, 19 nt, Artificial Sequence
  Synthetic
ugagguuacagugagaaga

SEQ ID NO: 477610 - RNA, 20 nt, Artificial Sequence
  Synthetic
gugagguuacagugagaaga

SEQ ID NO: 477611 - RNA, 21 nt, Artificial Sequence
  Synthetic
ugugagguuacagugagaaga

SEQ ID NO: 477612 - RNA, 22 nt, Artificial Sequence
  Synthetic
uugugagguuacagugagaaga

SEQ ID NO: 477613 - RNA, 23 nt, Artificial Sequence
  Synthetic
cuugugagguuacagugagaaga

SEQ ID NO: 477614 - RNA, 24 nt, Artificial Sequence
  Synthetic
ccuugugagguuacagugagaaga

SEQ ID NO: 477615 - RNA, 18 nt, Artificial Sequence
  Synthetic
cugauggaguauagaaga

SEQ ID NO: 477616 - RNA, 19 nt, Artificial Sequence
  Synthetic
ccugauggaguauagaaga

SEQ ID NO: 477617 - RNA, 20 nt, Artificial Sequence
  Synthetic
cccugauggaguauagaaga

SEQ ID NO: 477618 - RNA, 21 nt, Artificial Sequence
  Synthetic
ucccugauggaguauagaaga

SEQ ID NO: 477619 - RNA, 22 nt, Artificial Sequence
  Synthetic
uucccugauggaguauagaaga

SEQ ID NO: 477620 - RNA, 23 nt, Artificial Sequence
  Synthetic
guucccugauggaguauagaaga

SEQ ID NO: 477621 - RNA, 24 nt, Artificial Sequence
  Synthetic
uguucccugauggaguauagaaga

SEQ ID NO: 477622 - RNA, 18 nt, Artificial Sequence
  Synthetic
uacaaggacacuagaaga

SEQ ID NO: 477623 - RNA, 19 nt, Artificial Sequence
  Synthetic
uuacaaggacacuagaaga

SEQ ID NO: 477624 - RNA, 20 nt, Artificial Sequence
  Synthetic
uuuacaaggacacuagaaga

SEQ ID NO: 477625 - RNA, 21 nt, Artificial Sequence
  Synthetic
auuuacaaggacacuagaaga

SEQ ID NO: 477626 - RNA, 22 nt, Artificial Sequence
  Synthetic
cauuuacaaggacacuagaaga

SEQ ID NO: 477627 - RNA, 23 nt, Artificial Sequence
  Synthetic
gcauuuacaaggacacuagaaga

SEQ ID NO: 477628 - RNA, 24 nt, Artificial Sequence
  Synthetic
agcauuuacaaggacacuagaaga

SEQ ID NO: 477629 - RNA, 18 nt, Artificial Sequence
  Synthetic
cucaaaauaccuagaaga

SEQ ID NO: 477630 - RNA, 19 nt, Artificial Sequence
  Synthetic
ucucaaaauaccuagaaga

SEQ ID NO: 477631 - RNA, 20 nt, Artificial Sequence
  Synthetic
cucucaaaauaccuagaaga

SEQ ID NO: 477632 - RNA, 21 nt, Artificial Sequence
  Synthetic
ucucucaaaauaccuagaaga

SEQ ID NO: 477633 - RNA, 22 nt, Artificial Sequence
  Synthetic
aucucucaaaauaccuagaaga

SEQ ID NO: 477634 - RNA, 23 nt, Artificial Sequence
  Synthetic
uaucucucaaaauaccuagaaga

SEQ ID NO: 477635 - RNA, 24 nt, Artificial Sequence
  Synthetic
guaucucucaaaauaccuagaaga

SEQ ID NO: 477636 - RNA, 18 nt, Artificial Sequence
  Synthetic
guagaguguaguagaaga

SEQ ID NO: 477637 - RNA, 19 nt, Artificial Sequence
  Synthetic
gguagaguguaguagaaga

SEQ ID NO: 477638 - RNA, 20 nt, Artificial Sequence
  Synthetic
ggguagaguguaguagaaga

SEQ ID NO: 477639 - RNA, 21 nt, Artificial Sequence
  Synthetic
aggguagaguguaguagaaga

SEQ ID NO: 477640 - RNA, 22 nt, Artificial Sequence
  Synthetic
aaggguagaguguaguagaaga

SEQ ID NO: 477641 - RNA, 23 nt, Artificial Sequence
  Synthetic
aaaggguagaguguaguagaaga

SEQ ID NO: 477642 - RNA, 24 nt, Artificial Sequence
  Synthetic
gaaaggguagaguguaguagaaga

SEQ ID NO: 477643 - RNA, 18 nt, Artificial Sequence
  Synthetic
uacacacauuuuagaaga

SEQ ID NO: 477644 - RNA, 19 nt, Artificial Sequence
  Synthetic
cuacacacauuuuagaaga

SEQ ID NO: 477645 - RNA, 20 nt, Artificial Sequence
  Synthetic
ccuacacacauuuuagaaga

SEQ ID NO: 477646 - RNA, 21 nt, Artificial Sequence
  Synthetic
uccuacacacauuuuagaaga

SEQ ID NO: 477647 - RNA, 22 nt, Artificial Sequence
  Synthetic
cuccuacacacauuuuagaaga

SEQ ID NO: 477648 - RNA, 23 nt, Artificial Sequence
  Synthetic
ucuccuacacacauuuuagaaga

SEQ ID NO: 477649 - RNA, 24 nt, Artificial Sequence
  Synthetic
uucuccuacacacauuuuagaaga

SEQ ID NO: 477650 - RNA, 18 nt, Artificial Sequence
  Synthetic
cuuguagguuuccgaaga

SEQ ID NO: 477651 - RNA, 19 nt, Artificial Sequence
  Synthetic
gcuuguagguuuccgaaga

SEQ ID NO: 477652 - RNA, 20 nt, Artificial Sequence
  Synthetic
ugcuuguagguuuccgaaga

SEQ ID NO: 477653 - RNA, 21 nt, Artificial Sequence
  Synthetic
augcuuguagguuuccgaaga

SEQ ID NO: 477654 - RNA, 22 nt, Artificial Sequence
  Synthetic
gaugcuuguagguuuccgaaga

SEQ ID NO: 477655 - RNA, 23 nt, Artificial Sequence
  Synthetic
agaugcuuguagguuuccgaaga

SEQ ID NO: 477656 - RNA, 24 nt, Artificial Sequence
  Synthetic
uagaugcuuguagguuuccgaaga

SEQ ID NO: 477657 - RNA, 18 nt, Artificial Sequence
  Synthetic
cuaaccauacaucgaaga

SEQ ID NO: 477658 - RNA, 19 nt, Artificial Sequence
  Synthetic
ucuaaccauacaucgaaga

SEQ ID NO: 477659 - RNA, 20 nt, Artificial Sequence
  Synthetic
gucuaaccauacaucgaaga

SEQ ID NO: 477660 - RNA, 21 nt, Artificial Sequence
  Synthetic
ugucuaaccauacaucgaaga

SEQ ID NO: 477661 - RNA, 22 nt, Artificial Sequence
  Synthetic
uugucuaaccauacaucgaaga

SEQ ID NO: 477662 - RNA, 23 nt, Artificial Sequence
  Synthetic
auugucuaaccauacaucgaaga

SEQ ID NO: 477663 - RNA, 24 nt, Artificial Sequence
  Synthetic
cauugucuaaccauacaucgaaga

SEQ ID NO: 477664 - RNA, 18 nt, Artificial Sequence
  Synthetic
aaaagacagaaaggaaga

SEQ ID NO: 477665 - RNA, 19 nt, Artificial Sequence
  Synthetic
aaaaagacagaaaggaaga

SEQ ID NO: 477666 - RNA, 20 nt, Artificial Sequence
  Synthetic
gaaaaagacagaaaggaaga

SEQ ID NO: 477667 - RNA, 21 nt, Artificial Sequence
  Synthetic
ggaaaaagacagaaaggaaga

SEQ ID NO: 477668 - RNA, 22 nt, Artificial Sequence
  Synthetic
uggaaaaagacagaaaggaaga

SEQ ID NO: 477669 - RNA, 23 nt, Artificial Sequence
  Synthetic
uuggaaaaagacagaaaggaaga

SEQ ID NO: 477670 - RNA, 24 nt, Artificial Sequence
  Synthetic
uuuggaaaaagacagaaaggaaga

SEQ ID NO: 477671 - RNA, 18 nt, Artificial Sequence
  Synthetic
aaggaaaggaaaggaaga

SEQ ID NO: 477672 - RNA, 19 nt, Artificial Sequence
  Synthetic
gaaggaaaggaaaggaaga

SEQ ID NO: 477673 - RNA, 20 nt, Artificial Sequence
  Synthetic
agaaggaaaggaaaggaaga

SEQ ID NO: 477674 - RNA, 21 nt, Artificial Sequence
  Synthetic
cagaaggaaaggaaaggaaga

SEQ ID NO: 477675 - RNA, 22 nt, Artificial Sequence
  Synthetic
acagaaggaaaggaaaggaaga

SEQ ID NO: 477676 - RNA, 23 nt, Artificial Sequence
  Synthetic
aacagaaggaaaggaaaggaaga

SEQ ID NO: 477677 - RNA, 24 nt, Artificial Sequence
  Synthetic
gaacagaaggaaaggaaaggaaga

SEQ ID NO: 477678 - RNA, 18 nt, Artificial Sequence
  Synthetic
uugucauaagaaggaaga

SEQ ID NO: 477679 - RNA, 19 nt, Artificial Sequence
  Synthetic
guugucauaagaaggaaga

SEQ ID NO: 477680 - RNA, 20 nt, Artificial Sequence
  Synthetic
uguugucauaagaaggaaga

SEQ ID NO: 477681 - RNA, 21 nt, Artificial Sequence
  Synthetic
auguugucauaagaaggaaga

SEQ ID NO: 477682 - RNA, 22 nt, Artificial Sequence
  Synthetic
aauguugucauaagaaggaaga

SEQ ID NO: 477683 - RNA, 23 nt, Artificial Sequence
  Synthetic
caauguugucauaagaaggaaga

SEQ ID NO: 477684 - RNA, 24 nt, Artificial Sequence
  Synthetic
acaauguugucauaagaaggaaga

SEQ ID NO: 477685 - RNA, 18 nt, Artificial Sequence
  Synthetic
gugagagaagcaggaaga

SEQ ID NO: 477686 - RNA, 19 nt, Artificial Sequence
  Synthetic
agugagagaagcaggaaga

SEQ ID NO: 477687 - RNA, 20 nt, Artificial Sequence
  Synthetic
gagugagagaagcaggaaga

SEQ ID NO: 477688 - RNA, 21 nt, Artificial Sequence
  Synthetic
ggagugagagaagcaggaaga

SEQ ID NO: 477689 - RNA, 22 nt, Artificial Sequence
  Synthetic
gggagugagagaagcaggaaga

SEQ ID NO: 477690 - RNA, 23 nt, Artificial Sequence
  Synthetic
agggagugagagaagcaggaaga

SEQ ID NO: 477691 - RNA, 24 nt, Artificial Sequence
  Synthetic
aagggagugagagaagcaggaaga

SEQ ID NO: 477692 - RNA, 18 nt, Artificial Sequence
  Synthetic
gacagcaauagaggaaga

SEQ ID NO: 477693 - RNA, 19 nt, Artificial Sequence
  Synthetic
agacagcaauagaggaaga

SEQ ID NO: 477694 - RNA, 20 nt, Artificial Sequence
  Synthetic
aagacagcaauagaggaaga

SEQ ID NO: 477695 - RNA, 21 nt, Artificial Sequence
  Synthetic
gaagacagcaauagaggaaga

SEQ ID NO: 477696 - RNA, 22 nt, Artificial Sequence
  Synthetic
ggaagacagcaauagaggaaga

SEQ ID NO: 477697 - RNA, 23 nt, Artificial Sequence
  Synthetic
aggaagacagcaauagaggaaga

SEQ ID NO: 477698 - RNA, 24 nt, Artificial Sequence
  Synthetic
aaggaagacagcaauagaggaaga

SEQ ID NO: 477699 - RNA, 18 nt, Artificial Sequence
  Synthetic
ugaggaaaaggaggaaga

SEQ ID NO: 477700 - RNA, 19 nt, Artificial Sequence
  Synthetic
augaggaaaaggaggaaga

SEQ ID NO: 477701 - RNA, 20 nt, Artificial Sequence
  Synthetic
uaugaggaaaaggaggaaga

SEQ ID NO: 477702 - RNA, 21 nt, Artificial Sequence
  Synthetic
guaugaggaaaaggaggaaga

SEQ ID NO: 477703 - RNA, 22 nt, Artificial Sequence
  Synthetic
uguaugaggaaaaggaggaaga

SEQ ID NO: 477704 - RNA, 23 nt, Artificial Sequence
  Synthetic
auguaugaggaaaaggaggaaga

SEQ ID NO: 477705 - RNA, 24 nt, Artificial Sequence
  Synthetic
aauguaugaggaaaaggaggaaga

SEQ ID NO: 477706 - RNA, 18 nt, Artificial Sequence
  Synthetic
gaagcggagggaggaaga

SEQ ID NO: 477707 - RNA, 19 nt, Artificial Sequence
  Synthetic
agaagcggagggaggaaga

SEQ ID NO: 477708 - RNA, 20 nt, Artificial Sequence
  Synthetic
aagaagcggagggaggaaga

SEQ ID NO: 477709 - RNA, 21 nt, Artificial Sequence
  Synthetic
gaagaagcggagggaggaaga

SEQ ID NO: 477710 - RNA, 22 nt, Artificial Sequence
  Synthetic
ggaagaagcggagggaggaaga

SEQ ID NO: 477711 - RNA, 23 nt, Artificial Sequence
  Synthetic
gggaagaagcggagggaggaaga

SEQ ID NO: 477712 - RNA, 24 nt, Artificial Sequence
  Synthetic
ggggaagaagcggagggaggaaga

SEQ ID NO: 477713 - RNA, 18 nt, Artificial Sequence
  Synthetic
gacggacagugaggaaga

SEQ ID NO: 477714 - RNA, 19 nt, Artificial Sequence
  Synthetic
ugacggacagugaggaaga

SEQ ID NO: 477715 - RNA, 20 nt, Artificial Sequence
  Synthetic
uugacggacagugaggaaga

SEQ ID NO: 477716 - RNA, 21 nt, Artificial Sequence
  Synthetic
guugacggacagugaggaaga

SEQ ID NO: 477717 - RNA, 22 nt, Artificial Sequence
  Synthetic
aguugacggacagugaggaaga

SEQ ID NO: 477718 - RNA, 23 nt, Artificial Sequence
  Synthetic
uaguugacggacagugaggaaga

SEQ ID NO: 477719 - RNA, 24 nt, Artificial Sequence
  Synthetic
guaguugacggacagugaggaaga

SEQ ID NO: 477720 - RNA, 18 nt, Artificial Sequence
  Synthetic
gauauucaaauaggaaga

SEQ ID NO: 477721 - RNA, 19 nt, Artificial Sequence
  Synthetic
agauauucaaauaggaaga

SEQ ID NO: 477722 - RNA, 20 nt, Artificial Sequence
  Synthetic
aagauauucaaauaggaaga

SEQ ID NO: 477723 - RNA, 21 nt, Artificial Sequence
  Synthetic
aaagauauucaaauaggaaga

SEQ ID NO: 477724 - RNA, 22 nt, Artificial Sequence
  Synthetic
gaaagauauucaaauaggaaga

SEQ ID NO: 477725 - RNA, 23 nt, Artificial Sequence
  Synthetic
agaaagauauucaaauaggaaga

SEQ ID NO: 477726 - RNA, 24 nt, Artificial Sequence
  Synthetic
aagaaagauauucaaauaggaaga

SEQ ID NO: 477727 - RNA, 18 nt, Artificial Sequence
  Synthetic
uuuucagaugacggaaga

SEQ ID NO: 477728 - RNA, 19 nt, Artificial Sequence
  Synthetic
guuuucagaugacggaaga

SEQ ID NO: 477729 - RNA, 20 nt, Artificial Sequence
  Synthetic
aguuuucagaugacggaaga

SEQ ID NO: 477730 - RNA, 21 nt, Artificial Sequence
  Synthetic
aaguuuucagaugacggaaga

SEQ ID NO: 477731 - RNA, 22 nt, Artificial Sequence
  Synthetic
caaguuuucagaugacggaaga

SEQ ID NO: 477732 - RNA, 23 nt, Artificial Sequence
  Synthetic
gcaaguuuucagaugacggaaga

SEQ ID NO: 477733 - RNA, 24 nt, Artificial Sequence
  Synthetic
ggcaaguuuucagaugacggaaga

SEQ ID NO: 477734 - RNA, 18 nt, Artificial Sequence
  Synthetic
cuagggguacagggaaga

SEQ ID NO: 477735 - RNA, 19 nt, Artificial Sequence
  Synthetic
ucuagggguacagggaaga

SEQ ID NO: 477736 - RNA, 20 nt, Artificial Sequence
  Synthetic
gucuagggguacagggaaga

SEQ ID NO: 477737 - RNA, 21 nt, Artificial Sequence
  Synthetic
ugucuagggguacagggaaga

SEQ ID NO: 477738 - RNA, 22 nt, Artificial Sequence
  Synthetic
cugucuagggguacagggaaga

SEQ ID NO: 477739 - RNA, 23 nt, Artificial Sequence
  Synthetic
acugucuagggguacagggaaga

SEQ ID NO: 477740 - RNA, 24 nt, Artificial Sequence
  Synthetic
aacugucuagggguacagggaaga

SEQ ID NO: 477741 - RNA, 18 nt, Artificial Sequence
  Synthetic
auuagcugccagggaaga

SEQ ID NO: 477742 - RNA, 19 nt, Artificial Sequence
  Synthetic
uauuagcugccagggaaga

SEQ ID NO: 477743 - RNA, 20 nt, Artificial Sequence
  Synthetic
auauuagcugccagggaaga

SEQ ID NO: 477744 - RNA, 21 nt, Artificial Sequence
  Synthetic
aauauuagcugccagggaaga

SEQ ID NO: 477745 - RNA, 22 nt, Artificial Sequence
  Synthetic
caauauuagcugccagggaaga

SEQ ID NO: 477746 - RNA, 23 nt, Artificial Sequence
  Synthetic
acaauauuagcugccagggaaga

SEQ ID NO: 477747 - RNA, 24 nt, Artificial Sequence
  Synthetic
uacaauauuagcugccagggaaga

SEQ ID NO: 477748 - RNA, 18 nt, Artificial Sequence
  Synthetic
ugaaagugucagggaaga

SEQ ID NO: 477749 - RNA, 19 nt, Artificial Sequence
  Synthetic
gugaaagugucagggaaga

SEQ ID NO: 477750 - RNA, 20 nt, Artificial Sequence
  Synthetic
ugugaaagugucagggaaga

SEQ ID NO: 477751 - RNA, 21 nt, Artificial Sequence
  Synthetic
cugugaaagugucagggaaga

SEQ ID NO: 477752 - RNA, 22 nt, Artificial Sequence
  Synthetic
ucugugaaagugucagggaaga

SEQ ID NO: 477753 - RNA, 23 nt, Artificial Sequence
  Synthetic
gucugugaaagugucagggaaga

SEQ ID NO: 477754 - RNA, 24 nt, Artificial Sequence
  Synthetic
ugucugugaaagugucagggaaga

SEQ ID NO: 477755 - RNA, 18 nt, Artificial Sequence
  Synthetic
guaacuccggagggaaga

SEQ ID NO: 477756 - RNA, 19 nt, Artificial Sequence
  Synthetic
aguaacuccggagggaaga

SEQ ID NO: 477757 - RNA, 20 nt, Artificial Sequence
  Synthetic
aaguaacuccggagggaaga

SEQ ID NO: 477758 - RNA, 21 nt, Artificial Sequence
  Synthetic
uaaguaacuccggagggaaga

SEQ ID NO: 477759 - RNA, 22 nt, Artificial Sequence
  Synthetic
cuaaguaacuccggagggaaga

SEQ ID NO: 477760 - RNA, 23 nt, Artificial Sequence
  Synthetic
gcuaaguaacuccggagggaaga

SEQ ID NO: 477761 - RNA, 24 nt, Artificial Sequence
  Synthetic
agcuaaguaacuccggagggaaga

SEQ ID NO: 477762 - RNA, 18 nt, Artificial Sequence
  Synthetic
auggguuauacgggaaga

SEQ ID NO: 477763 - RNA, 19 nt, Artificial Sequence
  Synthetic
aauggguuauacgggaaga

SEQ ID NO: 477764 - RNA, 20 nt, Artificial Sequence
  Synthetic
aaauggguuauacgggaaga

SEQ ID NO: 477765 - RNA, 21 nt, Artificial Sequence
  Synthetic
caaauggguuauacgggaaga

SEQ ID NO: 477766 - RNA, 22 nt, Artificial Sequence
  Synthetic
acaaauggguuauacgggaaga

SEQ ID NO: 477767 - RNA, 23 nt, Artificial Sequence
  Synthetic
cacaaauggguuauacgggaaga

SEQ ID NO: 477768 - RNA, 24 nt, Artificial Sequence
  Synthetic
ccacaaauggguuauacgggaaga

SEQ ID NO: 477769 - RNA, 18 nt, Artificial Sequence
  Synthetic
gaaauauugaggggaaga

SEQ ID NO: 477770 - RNA, 19 nt, Artificial Sequence
  Synthetic
ggaaauauugaggggaaga

SEQ ID NO: 477771 - RNA, 20 nt, Artificial Sequence
  Synthetic
uggaaauauugaggggaaga

SEQ ID NO: 477772 - RNA, 21 nt, Artificial Sequence
  Synthetic
auggaaauauugaggggaaga

SEQ ID NO: 477773 - RNA, 22 nt, Artificial Sequence
  Synthetic
gauggaaauauugaggggaaga

SEQ ID NO: 477774 - RNA, 23 nt, Artificial Sequence
  Synthetic
ggauggaaauauugaggggaaga

SEQ ID NO: 477775 - RNA, 24 nt, Artificial Sequence
  Synthetic
gggauggaaauauugaggggaaga

SEQ ID NO: 477776 - RNA, 18 nt, Artificial Sequence
  Synthetic
uagaagcuuaggggaaga

SEQ ID NO: 477777 - RNA, 19 nt, Artificial Sequence
  Synthetic
auagaagcuuaggggaaga

SEQ ID NO: 477778 - RNA, 20 nt, Artificial Sequence
  Synthetic
cauagaagcuuaggggaaga

SEQ ID NO: 477779 - RNA, 21 nt, Artificial Sequence
  Synthetic
acauagaagcuuaggggaaga

SEQ ID NO: 477780 - RNA, 22 nt, Artificial Sequence
  Synthetic
aacauagaagcuuaggggaaga

SEQ ID NO: 477781 - RNA, 23 nt, Artificial Sequence
  Synthetic
uaacauagaagcuuaggggaaga

SEQ ID NO: 477782 - RNA, 24 nt, Artificial Sequence
  Synthetic
guaacauagaagcuuaggggaaga

SEQ ID NO: 477783 - RNA, 18 nt, Artificial Sequence
  Synthetic
guagggguuaggggaaga

SEQ ID NO: 477784 - RNA, 19 nt, Artificial Sequence
  Synthetic
gguagggguuaggggaaga

SEQ ID NO: 477785 - RNA, 20 nt, Artificial Sequence
  Synthetic
ggguagggguuaggggaaga

SEQ ID NO: 477786 - RNA, 21 nt, Artificial Sequence
  Synthetic
cggguagggguuaggggaaga

SEQ ID NO: 477787 - RNA, 22 nt, Artificial Sequence
  Synthetic
gcggguagggguuaggggaaga

SEQ ID NO: 477788 - RNA, 23 nt, Artificial Sequence
  Synthetic
agcggguagggguuaggggaaga

SEQ ID NO: 477789 - RNA, 24 nt, Artificial Sequence
  Synthetic
aagcggguagggguuaggggaaga

SEQ ID NO: 477790 - RNA, 18 nt, Artificial Sequence
  Synthetic
aagggagaaaugggaaga

SEQ ID NO: 477791 - RNA, 19 nt, Artificial Sequence
  Synthetic
caagggagaaaugggaaga

SEQ ID NO: 477792 - RNA, 20 nt, Artificial Sequence
  Synthetic
ccaagggagaaaugggaaga

SEQ ID NO: 477793 - RNA, 21 nt, Artificial Sequence
  Synthetic
uccaagggagaaaugggaaga

SEQ ID NO: 477794 - RNA, 22 nt, Artificial Sequence
  Synthetic
auccaagggagaaaugggaaga

SEQ ID NO: 477795 - RNA, 23 nt, Artificial Sequence
  Synthetic
aauccaagggagaaaugggaaga

SEQ ID NO: 477796 - RNA, 24 nt, Artificial Sequence
  Synthetic
aaauccaagggagaaaugggaaga

SEQ ID NO: 477797 - RNA, 18 nt, Artificial Sequence
  Synthetic
auuucguucaugggaaga

SEQ ID NO: 477798 - RNA, 19 nt, Artificial Sequence
  Synthetic
gauuucguucaugggaaga

SEQ ID NO: 477799 - RNA, 20 nt, Artificial Sequence
  Synthetic
cgauuucguucaugggaaga

SEQ ID NO: 477800 - RNA, 21 nt, Artificial Sequence
  Synthetic
ucgauuucguucaugggaaga

SEQ ID NO: 477801 - RNA, 22 nt, Artificial Sequence
  Synthetic
cucgauuucguucaugggaaga

SEQ ID NO: 477802 - RNA, 23 nt, Artificial Sequence
  Synthetic
ccucgauuucguucaugggaaga

SEQ ID NO: 477803 - RNA, 24 nt, Artificial Sequence
  Synthetic
gccucgauuucguucaugggaaga

SEQ ID NO: 477804 - RNA, 18 nt, Artificial Sequence
  Synthetic
uacuagcggaugggaaga

SEQ ID NO: 477805 - RNA, 19 nt, Artificial Sequence
  Synthetic
cuacuagcggaugggaaga

SEQ ID NO: 477806 - RNA, 20 nt, Artificial Sequence
  Synthetic
gcuacuagcggaugggaaga

SEQ ID NO: 477807 - RNA, 21 nt, Artificial Sequence
  Synthetic
ggcuacuagcggaugggaaga

SEQ ID NO: 477808 - RNA, 22 nt, Artificial Sequence
  Synthetic
aggcuacuagcggaugggaaga

SEQ ID NO: 477809 - RNA, 23 nt, Artificial Sequence
  Synthetic
gaggcuacuagcggaugggaaga

SEQ ID NO: 477810 - RNA, 24 nt, Artificial Sequence
  Synthetic
agaggcuacuagcggaugggaaga

SEQ ID NO: 477811 - RNA, 18 nt, Artificial Sequence
  Synthetic
acccauuagaauggaaga

SEQ ID NO: 477812 - RNA, 19 nt, Artificial Sequence
  Synthetic
cacccauuagaauggaaga

SEQ ID NO: 477813 - RNA, 20 nt, Artificial Sequence
  Synthetic
ccacccauuagaauggaaga

SEQ ID NO: 477814 - RNA, 21 nt, Artificial Sequence
  Synthetic
gccacccauuagaauggaaga

SEQ ID NO: 477815 - RNA, 22 nt, Artificial Sequence
  Synthetic
agccacccauuagaauggaaga

SEQ ID NO: 477816 - RNA, 23 nt, Artificial Sequence
  Synthetic
cagccacccauuagaauggaaga

SEQ ID NO: 477817 - RNA, 24 nt, Artificial Sequence
  Synthetic
acagccacccauuagaauggaaga

SEQ ID NO: 477818 - RNA, 18 nt, Artificial Sequence
  Synthetic
uugacuauggauggaaga

SEQ ID NO: 477819 - RNA, 19 nt, Artificial Sequence
  Synthetic
auugacuauggauggaaga

SEQ ID NO: 477820 - RNA, 20 nt, Artificial Sequence
  Synthetic
aauugacuauggauggaaga

SEQ ID NO: 477821 - RNA, 21 nt, Artificial Sequence
  Synthetic
caauugacuauggauggaaga

SEQ ID NO: 477822 - RNA, 22 nt, Artificial Sequence
  Synthetic
acaauugacuauggauggaaga

SEQ ID NO: 477823 - RNA, 23 nt, Artificial Sequence
  Synthetic
gacaauugacuauggauggaaga

SEQ ID NO: 477824 - RNA, 24 nt, Artificial Sequence
  Synthetic
ugacaauugacuauggauggaaga

SEQ ID NO: 477825 - RNA, 18 nt, Artificial Sequence
  Synthetic
uguucagagacuggaaga

SEQ ID NO: 477826 - RNA, 19 nt, Artificial Sequence
  Synthetic
auguucagagacuggaaga

SEQ ID NO: 477827 - RNA, 20 nt, Artificial Sequence
  Synthetic
uauguucagagacuggaaga

SEQ ID NO: 477828 - RNA, 21 nt, Artificial Sequence
  Synthetic
auauguucagagacuggaaga

SEQ ID NO: 477829 - RNA, 22 nt, Artificial Sequence
  Synthetic
gauauguucagagacuggaaga

SEQ ID NO: 477830 - RNA, 23 nt, Artificial Sequence
  Synthetic
agauauguucagagacuggaaga

SEQ ID NO: 477831 - RNA, 24 nt, Artificial Sequence
  Synthetic
aagauauguucagagacuggaaga

SEQ ID NO: 477832 - RNA, 18 nt, Artificial Sequence
  Synthetic
aaaggucauacuggaaga

SEQ ID NO: 477833 - RNA, 19 nt, Artificial Sequence
  Synthetic
aaaaggucauacuggaaga

SEQ ID NO: 477834 - RNA, 20 nt, Artificial Sequence
  Synthetic
aaaaaggucauacuggaaga

SEQ ID NO: 477835 - RNA, 21 nt, Artificial Sequence
  Synthetic
caaaaaggucauacuggaaga

SEQ ID NO: 477836 - RNA, 22 nt, Artificial Sequence
  Synthetic
ucaaaaaggucauacuggaaga

SEQ ID NO: 477837 - RNA, 23 nt, Artificial Sequence
  Synthetic
gucaaaaaggucauacuggaaga

SEQ ID NO: 477838 - RNA, 24 nt, Artificial Sequence
  Synthetic
ugucaaaaaggucauacuggaaga

SEQ ID NO: 477839 - RNA, 18 nt, Artificial Sequence
  Synthetic
aucccagcuacuggaaga

SEQ ID NO: 477840 - RNA, 19 nt, Artificial Sequence
  Synthetic
aaucccagcuacuggaaga

SEQ ID NO: 477841 - RNA, 20 nt, Artificial Sequence
  Synthetic
uaaucccagcuacuggaaga

SEQ ID NO: 477842 - RNA, 21 nt, Artificial Sequence
  Synthetic
auaaucccagcuacuggaaga

SEQ ID NO: 477843 - RNA, 22 nt, Artificial Sequence
  Synthetic
uauaaucccagcuacuggaaga

SEQ ID NO: 477844 - RNA, 23 nt, Artificial Sequence
  Synthetic
uuauaaucccagcuacuggaaga

SEQ ID NO: 477845 - RNA, 24 nt, Artificial Sequence
  Synthetic
cuuauaaucccagcuacuggaaga

SEQ ID NO: 477846 - RNA, 18 nt, Artificial Sequence
  Synthetic
auauacaagucuggaaga

SEQ ID NO: 477847 - RNA, 19 nt, Artificial Sequence
  Synthetic
cauauacaagucuggaaga

SEQ ID NO: 477848 - RNA, 20 nt, Artificial Sequence
  Synthetic
gcauauacaagucuggaaga

SEQ ID NO: 477849 - RNA, 21 nt, Artificial Sequence
  Synthetic
ugcauauacaagucuggaaga

SEQ ID NO: 477850 - RNA, 22 nt, Artificial Sequence
  Synthetic
uugcauauacaagucuggaaga

SEQ ID NO: 477851 - RNA, 23 nt, Artificial Sequence
  Synthetic
guugcauauacaagucuggaaga

SEQ ID NO: 477852 - RNA, 24 nt, Artificial Sequence
  Synthetic
aguugcauauacaagucuggaaga

SEQ ID NO: 477853 - RNA, 18 nt, Artificial Sequence
  Synthetic
cccaaaauuaguggaaga

SEQ ID NO: 477854 - RNA, 19 nt, Artificial Sequence
  Synthetic
acccaaaauuaguggaaga

SEQ ID NO: 477855 - RNA, 20 nt, Artificial Sequence
  Synthetic
aacccaaaauuaguggaaga

SEQ ID NO: 477856 - RNA, 21 nt, Artificial Sequence
  Synthetic
gaacccaaaauuaguggaaga

SEQ ID NO: 477857 - RNA, 22 nt, Artificial Sequence
  Synthetic
cgaacccaaaauuaguggaaga

SEQ ID NO: 477858 - RNA, 23 nt, Artificial Sequence
  Synthetic
ucgaacccaaaauuaguggaaga

SEQ ID NO: 477859 - RNA, 24 nt, Artificial Sequence
  Synthetic
aucgaacccaaaauuaguggaaga

SEQ ID NO: 477860 - RNA, 18 nt, Artificial Sequence
  Synthetic
acgcaugaagguggaaga

SEQ ID NO: 477861 - RNA, 19 nt, Artificial Sequence
  Synthetic
aacgcaugaagguggaaga

SEQ ID NO: 477862 - RNA, 20 nt, Artificial Sequence
  Synthetic
caacgcaugaagguggaaga

SEQ ID NO: 477863 - RNA, 21 nt, Artificial Sequence
  Synthetic
ucaacgcaugaagguggaaga

SEQ ID NO: 477864 - RNA, 22 nt, Artificial Sequence
  Synthetic
cucaacgcaugaagguggaaga

SEQ ID NO: 477865 - RNA, 23 nt, Artificial Sequence
  Synthetic
acucaacgcaugaagguggaaga

SEQ ID NO: 477866 - RNA, 24 nt, Artificial Sequence
  Synthetic
cacucaacgcaugaagguggaaga

SEQ ID NO: 477867 - RNA, 18 nt, Artificial Sequence
  Synthetic
uuuccacucuguggaaga

SEQ ID NO: 477868 - RNA, 19 nt, Artificial Sequence
  Synthetic
guuuccacucuguggaaga

SEQ ID NO: 477869 - RNA, 20 nt, Artificial Sequence
  Synthetic
aguuuccacucuguggaaga

SEQ ID NO: 477870 - RNA, 21 nt, Artificial Sequence
  Synthetic
caguuuccacucuguggaaga

SEQ ID NO: 477871 - RNA, 22 nt, Artificial Sequence
  Synthetic
gcaguuuccacucuguggaaga

SEQ ID NO: 477872 - RNA, 23 nt, Artificial Sequence
  Synthetic
agcaguuuccacucuguggaaga

SEQ ID NO: 477873 - RNA, 24 nt, Artificial Sequence
  Synthetic
aagcaguuuccacucuguggaaga

SEQ ID NO: 477874 - RNA, 18 nt, Artificial Sequence
  Synthetic
gggaaaugcaaaugaaga

SEQ ID NO: 477875 - RNA, 19 nt, Artificial Sequence
  Synthetic
ggggaaaugcaaaugaaga

SEQ ID NO: 477876 - RNA, 20 nt, Artificial Sequence
  Synthetic
cggggaaaugcaaaugaaga

SEQ ID NO: 477877 - RNA, 21 nt, Artificial Sequence
  Synthetic
ucggggaaaugcaaaugaaga

SEQ ID NO: 477878 - RNA, 22 nt, Artificial Sequence
  Synthetic
aucggggaaaugcaaaugaaga

SEQ ID NO: 477879 - RNA, 23 nt, Artificial Sequence
  Synthetic
caucggggaaaugcaaaugaaga

SEQ ID NO: 477880 - RNA, 24 nt, Artificial Sequence
  Synthetic
ucaucggggaaaugcaaaugaaga

SEQ ID NO: 477881 - RNA, 18 nt, Artificial Sequence
  Synthetic
uacaaagagcaaugaaga

SEQ ID NO: 477882 - RNA, 19 nt, Artificial Sequence
  Synthetic
auacaaagagcaaugaaga

SEQ ID NO: 477883 - RNA, 20 nt, Artificial Sequence
  Synthetic
uauacaaagagcaaugaaga

SEQ ID NO: 477884 - RNA, 21 nt, Artificial Sequence
  Synthetic
auauacaaagagcaaugaaga

SEQ ID NO: 477885 - RNA, 22 nt, Artificial Sequence
  Synthetic
cauauacaaagagcaaugaaga

SEQ ID NO: 477886 - RNA, 23 nt, Artificial Sequence
  Synthetic
acauauacaaagagcaaugaaga

SEQ ID NO: 477887 - RNA, 24 nt, Artificial Sequence
  Synthetic
aacauauacaaagagcaaugaaga

SEQ ID NO: 477888 - RNA, 18 nt, Artificial Sequence
  Synthetic
ggagcaugagaaugaaga

SEQ ID NO: 477889 - RNA, 19 nt, Artificial Sequence
  Synthetic
aggagcaugagaaugaaga

SEQ ID NO: 477890 - RNA, 20 nt, Artificial Sequence
  Synthetic
aaggagcaugagaaugaaga

SEQ ID NO: 477891 - RNA, 21 nt, Artificial Sequence
  Synthetic
caaggagcaugagaaugaaga

SEQ ID NO: 477892 - RNA, 22 nt, Artificial Sequence
  Synthetic
ucaaggagcaugagaaugaaga

SEQ ID NO: 477893 - RNA, 23 nt, Artificial Sequence
  Synthetic
aucaaggagcaugagaaugaaga

SEQ ID NO: 477894 - RNA, 24 nt, Artificial Sequence
  Synthetic
caucaaggagcaugagaaugaaga

SEQ ID NO: 477895 - RNA, 18 nt, Artificial Sequence
  Synthetic
auaccuacugcaugaaga

SEQ ID NO: 477896 - RNA, 19 nt, Artificial Sequence
  Synthetic
aauaccuacugcaugaaga

SEQ ID NO: 477897 - RNA, 20 nt, Artificial Sequence
  Synthetic
gaauaccuacugcaugaaga

SEQ ID NO: 477898 - RNA, 21 nt, Artificial Sequence
  Synthetic
cgaauaccuacugcaugaaga

SEQ ID NO: 477899 - RNA, 22 nt, Artificial Sequence
  Synthetic
acgaauaccuacugcaugaaga

SEQ ID NO: 477900 - RNA, 23 nt, Artificial Sequence
  Synthetic
aacgaauaccuacugcaugaaga

SEQ ID NO: 477901 - RNA, 24 nt, Artificial Sequence
  Synthetic
aaacgaauaccuacugcaugaaga

SEQ ID NO: 477902 - RNA, 18 nt, Artificial Sequence
  Synthetic
ugugguuacucaugaaga

SEQ ID NO: 477903 - RNA, 19 nt, Artificial Sequence
  Synthetic
uugugguuacucaugaaga

SEQ ID NO: 477904 - RNA, 20 nt, Artificial Sequence
  Synthetic
auugugguuacucaugaaga

SEQ ID NO: 477905 - RNA, 21 nt, Artificial Sequence
  Synthetic
cauugugguuacucaugaaga

SEQ ID NO: 477906 - RNA, 22 nt, Artificial Sequence
  Synthetic
ccauugugguuacucaugaaga

SEQ ID NO: 477907 - RNA, 23 nt, Artificial Sequence
  Synthetic
accauugugguuacucaugaaga

SEQ ID NO: 477908 - RNA, 24 nt, Artificial Sequence
  Synthetic
aaccauugugguuacucaugaaga

SEQ ID NO: 477909 - RNA, 18 nt, Artificial Sequence
  Synthetic
gguagcaaaagaugaaga

SEQ ID NO: 477910 - RNA, 19 nt, Artificial Sequence
  Synthetic
ugguagcaaaagaugaaga

SEQ ID NO: 477911 - RNA, 20 nt, Artificial Sequence
  Synthetic
uugguagcaaaagaugaaga

SEQ ID NO: 477912 - RNA, 21 nt, Artificial Sequence
  Synthetic
auugguagcaaaagaugaaga

SEQ ID NO: 477913 - RNA, 22 nt, Artificial Sequence
  Synthetic
aauugguagcaaaagaugaaga

SEQ ID NO: 477914 - RNA, 23 nt, Artificial Sequence
  Synthetic
uaauugguagcaaaagaugaaga

SEQ ID NO: 477915 - RNA, 24 nt, Artificial Sequence
  Synthetic
auaauugguagcaaaagaugaaga

SEQ ID NO: 477916 - RNA, 18 nt, Artificial Sequence
  Synthetic
cugucuuuaggaugaaga

SEQ ID NO: 477917 - RNA, 19 nt, Artificial Sequence
  Synthetic
ucugucuuuaggaugaaga

SEQ ID NO: 477918 - RNA, 20 nt, Artificial Sequence
  Synthetic
uucugucuuuaggaugaaga

SEQ ID NO: 477919 - RNA, 21 nt, Artificial Sequence
  Synthetic
auucugucuuuaggaugaaga

SEQ ID NO: 477920 - RNA, 22 nt, Artificial Sequence
  Synthetic
aauucugucuuuaggaugaaga

SEQ ID NO: 477921 - RNA, 23 nt, Artificial Sequence
  Synthetic
caauucugucuuuaggaugaaga

SEQ ID NO: 477922 - RNA, 24 nt, Artificial Sequence
  Synthetic
acaauucugucuuuaggaugaaga

SEQ ID NO: 477923 - RNA, 18 nt, Artificial Sequence
  Synthetic
cauuuugaauuaugaaga

SEQ ID NO: 477924 - RNA, 19 nt, Artificial Sequence
  Synthetic
acauuuugaauuaugaaga

SEQ ID NO: 477925 - RNA, 20 nt, Artificial Sequence
  Synthetic
cacauuuugaauuaugaaga

SEQ ID NO: 477926 - RNA, 21 nt, Artificial Sequence
  Synthetic
ucacauuuugaauuaugaaga

SEQ ID NO: 477927 - RNA, 22 nt, Artificial Sequence
  Synthetic
uucacauuuugaauuaugaaga

SEQ ID NO: 477928 - RNA, 23 nt, Artificial Sequence
  Synthetic
uuucacauuuugaauuaugaaga

SEQ ID NO: 477929 - RNA, 24 nt, Artificial Sequence
  Synthetic
uuuucacauuuugaauuaugaaga

SEQ ID NO: 477930 - RNA, 18 nt, Artificial Sequence
  Synthetic
ugagauggaaacugaaga

SEQ ID NO: 477931 - RNA, 19 nt, Artificial Sequence
  Synthetic
uugagauggaaacugaaga

SEQ ID NO: 477932 - RNA, 20 nt, Artificial Sequence
  Synthetic
cuugagauggaaacugaaga

SEQ ID NO: 477933 - RNA, 21 nt, Artificial Sequence
  Synthetic
ucuugagauggaaacugaaga

SEQ ID NO: 477934 - RNA, 22 nt, Artificial Sequence
  Synthetic
uucuugagauggaaacugaaga

SEQ ID NO: 477935 - RNA, 23 nt, Artificial Sequence
  Synthetic
guucuugagauggaaacugaaga

SEQ ID NO: 477936 - RNA, 24 nt, Artificial Sequence
  Synthetic
aguucuugagauggaaacugaaga

SEQ ID NO: 477937 - RNA, 18 nt, Artificial Sequence
  Synthetic
aguucuaucaacugaaga

SEQ ID NO: 477938 - RNA, 19 nt, Artificial Sequence
  Synthetic
uaguucuaucaacugaaga

SEQ ID NO: 477939 - RNA, 20 nt, Artificial Sequence
  Synthetic
guaguucuaucaacugaaga

SEQ ID NO: 477940 - RNA, 21 nt, Artificial Sequence
  Synthetic
aguaguucuaucaacugaaga

SEQ ID NO: 477941 - RNA, 22 nt, Artificial Sequence
  Synthetic
uaguaguucuaucaacugaaga

SEQ ID NO: 477942 - RNA, 23 nt, Artificial Sequence
  Synthetic
uuaguaguucuaucaacugaaga

SEQ ID NO: 477943 - RNA, 24 nt, Artificial Sequence
  Synthetic
uuuaguaguucuaucaacugaaga

SEQ ID NO: 477944 - RNA, 18 nt, Artificial Sequence
  Synthetic
ugcuacaaaaccugaaga

SEQ ID NO: 477945 - RNA, 19 nt, Artificial Sequence
  Synthetic
gugcuacaaaaccugaaga

SEQ ID NO: 477946 - RNA, 20 nt, Artificial Sequence
  Synthetic
ggugcuacaaaaccugaaga

SEQ ID NO: 477947 - RNA, 21 nt, Artificial Sequence
  Synthetic
uggugcuacaaaaccugaaga

SEQ ID NO: 477948 - RNA, 22 nt, Artificial Sequence
  Synthetic
guggugcuacaaaaccugaaga

SEQ ID NO: 477949 - RNA, 23 nt, Artificial Sequence
  Synthetic
aguggugcuacaaaaccugaaga

SEQ ID NO: 477950 - RNA, 24 nt, Artificial Sequence
  Synthetic
aaguggugcuacaaaaccugaaga

SEQ ID NO: 477951 - RNA, 18 nt, Artificial Sequence
  Synthetic
uugggaccuuccugaaga

SEQ ID NO: 477952 - RNA, 19 nt, Artificial Sequence
  Synthetic
guugggaccuuccugaaga

SEQ ID NO: 477953 - RNA, 20 nt, Artificial Sequence
  Synthetic
aguugggaccuuccugaaga

SEQ ID NO: 477954 - RNA, 21 nt, Artificial Sequence
  Synthetic
gaguugggaccuuccugaaga

SEQ ID NO: 477955 - RNA, 22 nt, Artificial Sequence
  Synthetic
ugaguugggaccuuccugaaga

SEQ ID NO: 477956 - RNA, 23 nt, Artificial Sequence
  Synthetic
augaguugggaccuuccugaaga

SEQ ID NO: 477957 - RNA, 24 nt, Artificial Sequence
  Synthetic
aaugaguugggaccuuccugaaga

SEQ ID NO: 477958 - RNA, 18 nt, Artificial Sequence
  Synthetic
guggcugugagcugaaga

SEQ ID NO: 477959 - RNA, 19 nt, Artificial Sequence
  Synthetic
uguggcugugagcugaaga

SEQ ID NO: 477960 - RNA, 20 nt, Artificial Sequence
  Synthetic
guguggcugugagcugaaga

SEQ ID NO: 477961 - RNA, 21 nt, Artificial Sequence
  Synthetic
aguguggcugugagcugaaga

SEQ ID NO: 477962 - RNA, 22 nt, Artificial Sequence
  Synthetic
gaguguggcugugagcugaaga

SEQ ID NO: 477963 - RNA, 23 nt, Artificial Sequence
  Synthetic
ggaguguggcugugagcugaaga

SEQ ID NO: 477964 - RNA, 24 nt, Artificial Sequence
  Synthetic
aggaguguggcugugagcugaaga

SEQ ID NO: 477965 - RNA, 18 nt, Artificial Sequence
  Synthetic
cguguggauagcugaaga

SEQ ID NO: 477966 - RNA, 19 nt, Artificial Sequence
  Synthetic
acguguggauagcugaaga

SEQ ID NO: 477967 - RNA, 20 nt, Artificial Sequence
  Synthetic
gacguguggauagcugaaga

SEQ ID NO: 477968 - RNA, 21 nt, Artificial Sequence
  Synthetic
agacguguggauagcugaaga

SEQ ID NO: 477969 - RNA, 22 nt, Artificial Sequence
  Synthetic
aagacguguggauagcugaaga

SEQ ID NO: 477970 - RNA, 23 nt, Artificial Sequence
  Synthetic
uaagacguguggauagcugaaga

SEQ ID NO: 477971 - RNA, 24 nt, Artificial Sequence
  Synthetic
guaagacguguggauagcugaaga

SEQ ID NO: 477972 - RNA, 18 nt, Artificial Sequence
  Synthetic
gacaaguaccucugaaga

SEQ ID NO: 477973 - RNA, 19 nt, Artificial Sequence
  Synthetic
agacaaguaccucugaaga

SEQ ID NO: 477974 - RNA, 20 nt, Artificial Sequence
  Synthetic
aagacaaguaccucugaaga

SEQ ID NO: 477975 - RNA, 21 nt, Artificial Sequence
  Synthetic
gaagacaaguaccucugaaga

SEQ ID NO: 477976 - RNA, 22 nt, Artificial Sequence
  Synthetic
agaagacaaguaccucugaaga

SEQ ID NO: 477977 - RNA, 23 nt, Artificial Sequence
  Synthetic
cagaagacaaguaccucugaaga

SEQ ID NO: 477978 - RNA, 24 nt, Artificial Sequence
  Synthetic
ccagaagacaaguaccucugaaga

SEQ ID NO: 477979 - RNA, 18 nt, Artificial Sequence
  Synthetic
cagauuuaucucugaaga

SEQ ID NO: 477980 - RNA, 19 nt, Artificial Sequence
  Synthetic
acagauuuaucucugaaga

SEQ ID NO: 477981 - RNA, 20 nt, Artificial Sequence
  Synthetic
cacagauuuaucucugaaga

SEQ ID NO: 477982 - RNA, 21 nt, Artificial Sequence
  Synthetic
gcacagauuuaucucugaaga

SEQ ID NO: 477983 - RNA, 22 nt, Artificial Sequence
  Synthetic
agcacagauuuaucucugaaga

SEQ ID NO: 477984 - RNA, 23 nt, Artificial Sequence
  Synthetic
gagcacagauuuaucucugaaga

SEQ ID NO: 477985 - RNA, 24 nt, Artificial Sequence
  Synthetic
agagcacagauuuaucucugaaga

SEQ ID NO: 477986 - RNA, 18 nt, Artificial Sequence
  Synthetic
gugcucuguuucugaaga

SEQ ID NO: 477987 - RNA, 19 nt, Artificial Sequence
  Synthetic
ggugcucuguuucugaaga

SEQ ID NO: 477988 - RNA, 20 nt, Artificial Sequence
  Synthetic
aggugcucuguuucugaaga

SEQ ID NO: 477989 - RNA, 21 nt, Artificial Sequence
  Synthetic
aaggugcucuguuucugaaga

SEQ ID NO: 477990 - RNA, 22 nt, Artificial Sequence
  Synthetic
aaaggugcucuguuucugaaga

SEQ ID NO: 477991 - RNA, 23 nt, Artificial Sequence
  Synthetic
aaaaggugcucuguuucugaaga

SEQ ID NO: 477992 - RNA, 24 nt, Artificial Sequence
  Synthetic
aaaaaggugcucuguuucugaaga

SEQ ID NO: 477993 - RNA, 18 nt, Artificial Sequence
  Synthetic
gugggaggauggugaaga

SEQ ID NO: 477994 - RNA, 19 nt, Artificial Sequence
  Synthetic
ggugggaggauggugaaga

SEQ ID NO: 477995 - RNA, 20 nt, Artificial Sequence
  Synthetic
gggugggaggauggugaaga

SEQ ID NO: 477996 - RNA, 21 nt, Artificial Sequence
  Synthetic
agggugggaggauggugaaga

SEQ ID NO: 477997 - RNA, 22 nt, Artificial Sequence
  Synthetic
gagggugggaggauggugaaga

SEQ ID NO: 477998 - RNA, 23 nt, Artificial Sequence
  Synthetic
ggagggugggaggauggugaaga

SEQ ID NO: 477999 - RNA, 24 nt, Artificial Sequence
  Synthetic
uggagggugggaggauggugaaga

SEQ ID NO: 478000 - RNA, 18 nt, Artificial Sequence
  Synthetic
aggaaaacaaugugaaga

SEQ ID NO: 478001 - RNA, 19 nt, Artificial Sequence
  Synthetic
aaggaaaacaaugugaaga

SEQ ID NO: 478002 - RNA, 20 nt, Artificial Sequence
  Synthetic
gaaggaaaacaaugugaaga

SEQ ID NO: 478003 - RNA, 21 nt, Artificial Sequence
  Synthetic
agaaggaaaacaaugugaaga

SEQ ID NO: 478004 - RNA, 22 nt, Artificial Sequence
  Synthetic
aagaaggaaaacaaugugaaga

SEQ ID NO: 478005 - RNA, 23 nt, Artificial Sequence
  Synthetic
aaagaaggaaaacaaugugaaga

SEQ ID NO: 478006 - RNA, 24 nt, Artificial Sequence
  Synthetic
gaaagaaggaaaacaaugugaaga

SEQ ID NO: 478007 - RNA, 18 nt, Artificial Sequence
  Synthetic
cuggugagguugugaaga

SEQ ID NO: 478008 - RNA, 19 nt, Artificial Sequence
  Synthetic
gcuggugagguugugaaga

SEQ ID NO: 478009 - RNA, 20 nt, Artificial Sequence
  Synthetic
ugcuggugagguugugaaga

SEQ ID NO: 478010 - RNA, 21 nt, Artificial Sequence
  Synthetic
augcuggugagguugugaaga

SEQ ID NO: 478011 - RNA, 22 nt, Artificial Sequence
  Synthetic
gaugcuggugagguugugaaga

SEQ ID NO: 478012 - RNA, 23 nt, Artificial Sequence
  Synthetic
agaugcuggugagguugugaaga

SEQ ID NO: 478013 - RNA, 24 nt, Artificial Sequence
  Synthetic
cagaugcuggugagguugugaaga

SEQ ID NO: 478014 - RNA, 18 nt, Artificial Sequence
  Synthetic
ugaguuuggaauugaaga

SEQ ID NO: 478015 - RNA, 19 nt, Artificial Sequence
  Synthetic
augaguuuggaauugaaga

SEQ ID NO: 478016 - RNA, 20 nt, Artificial Sequence
  Synthetic
uaugaguuuggaauugaaga

SEQ ID NO: 478017 - RNA, 21 nt, Artificial Sequence
  Synthetic
auaugaguuuggaauugaaga

SEQ ID NO: 478018 - RNA, 22 nt, Artificial Sequence
  Synthetic
aauaugaguuuggaauugaaga

SEQ ID NO: 478019 - RNA, 23 nt, Artificial Sequence
  Synthetic
aaauaugaguuuggaauugaaga

SEQ ID NO: 478020 - RNA, 24 nt, Artificial Sequence
  Synthetic
aaaauaugaguuuggaauugaaga

SEQ ID NO: 478021 - RNA, 18 nt, Artificial Sequence
  Synthetic
ugcuuccauaauugaaga

SEQ ID NO: 478022 - RNA, 19 nt, Artificial Sequence
  Synthetic
uugcuuccauaauugaaga

SEQ ID NO: 478023 - RNA, 20 nt, Artificial Sequence
  Synthetic
uuugcuuccauaauugaaga

SEQ ID NO: 478024 - RNA, 21 nt, Artificial Sequence
  Synthetic
uuuugcuuccauaauugaaga

SEQ ID NO: 478025 - RNA, 22 nt, Artificial Sequence
  Synthetic
auuuugcuuccauaauugaaga

SEQ ID NO: 478026 - RNA, 23 nt, Artificial Sequence
  Synthetic
uauuuugcuuccauaauugaaga

SEQ ID NO: 478027 - RNA, 24 nt, Artificial Sequence
  Synthetic
uuauuuugcuuccauaauugaaga

SEQ ID NO: 478028 - RNA, 18 nt, Artificial Sequence
  Synthetic
ggaacaaagcauugaaga

SEQ ID NO: 478029 - RNA, 19 nt, Artificial Sequence
  Synthetic
aggaacaaagcauugaaga

SEQ ID NO: 478030 - RNA, 20 nt, Artificial Sequence
  Synthetic
gaggaacaaagcauugaaga

SEQ ID NO: 478031 - RNA, 21 nt, Artificial Sequence
  Synthetic
agaggaacaaagcauugaaga

SEQ ID NO: 478032 - RNA, 22 nt, Artificial Sequence
  Synthetic
gagaggaacaaagcauugaaga

SEQ ID NO: 478033 - RNA, 23 nt, Artificial Sequence
  Synthetic
ggagaggaacaaagcauugaaga

SEQ ID NO: 478034 - RNA, 24 nt, Artificial Sequence
  Synthetic
uggagaggaacaaagcauugaaga

SEQ ID NO: 478035 - RNA, 18 nt, Artificial Sequence
  Synthetic
uuaaaauugcauugaaga

SEQ ID NO: 478036 - RNA, 19 nt, Artificial Sequence
  Synthetic
uuuaaaauugcauugaaga

SEQ ID NO: 478037 - RNA, 20 nt, Artificial Sequence
  Synthetic
auuuaaaauugcauugaaga

SEQ ID NO: 478038 - RNA, 21 nt, Artificial Sequence
  Synthetic
cauuuaaaauugcauugaaga

SEQ ID NO: 478039 - RNA, 22 nt, Artificial Sequence
  Synthetic
acauuuaaaauugcauugaaga

SEQ ID NO: 478040 - RNA, 23 nt, Artificial Sequence
  Synthetic
aacauuuaaaauugcauugaaga

SEQ ID NO: 478041 - RNA, 24 nt, Artificial Sequence
  Synthetic
caacauuuaaaauugcauugaaga

SEQ ID NO: 478042 - RNA, 18 nt, Artificial Sequence
  Synthetic
gagguucuaccuugaaga

SEQ ID NO: 478043 - RNA, 19 nt, Artificial Sequence
  Synthetic
agagguucuaccuugaaga

SEQ ID NO: 478044 - RNA, 20 nt, Artificial Sequence
  Synthetic
cagagguucuaccuugaaga

SEQ ID NO: 478045 - RNA, 21 nt, Artificial Sequence
  Synthetic
acagagguucuaccuugaaga

SEQ ID NO: 478046 - RNA, 22 nt, Artificial Sequence
  Synthetic
cacagagguucuaccuugaaga

SEQ ID NO: 478047 - RNA, 23 nt, Artificial Sequence
  Synthetic
ucacagagguucuaccuugaaga

SEQ ID NO: 478048 - RNA, 24 nt, Artificial Sequence
  Synthetic
uucacagagguucuaccuugaaga

SEQ ID NO: 478049 - RNA, 18 nt, Artificial Sequence
  Synthetic
cuaaucaguucuugaaga

SEQ ID NO: 478050 - RNA, 19 nt, Artificial Sequence
  Synthetic
ucuaaucaguucuugaaga

SEQ ID NO: 478051 - RNA, 20 nt, Artificial Sequence
  Synthetic
gucuaaucaguucuugaaga

SEQ ID NO: 478052 - RNA, 21 nt, Artificial Sequence
  Synthetic
agucuaaucaguucuugaaga

SEQ ID NO: 478053 - RNA, 22 nt, Artificial Sequence
  Synthetic
aagucuaaucaguucuugaaga

SEQ ID NO: 478054 - RNA, 23 nt, Artificial Sequence
  Synthetic
gaagucuaaucaguucuugaaga

SEQ ID NO: 478055 - RNA, 24 nt, Artificial Sequence
  Synthetic
agaagucuaaucaguucuugaaga

SEQ ID NO: 478056 - RNA, 18 nt, Artificial Sequence
  Synthetic
aagaaaaaaauuugaaga

SEQ ID NO: 478057 - RNA, 19 nt, Artificial Sequence
  Synthetic
gaagaaaaaaauuugaaga

SEQ ID NO: 478058 - RNA, 20 nt, Artificial Sequence
  Synthetic
ggaagaaaaaaauuugaaga

SEQ ID NO: 478059 - RNA, 21 nt, Artificial Sequence
  Synthetic
uggaagaaaaaaauuugaaga

SEQ ID NO: 478060 - RNA, 22 nt, Artificial Sequence
  Synthetic
auggaagaaaaaaauuugaaga

SEQ ID NO: 478061 - RNA, 23 nt, Artificial Sequence
  Synthetic
cauggaagaaaaaaauuugaaga

SEQ ID NO: 478062 - RNA, 24 nt, Artificial Sequence
  Synthetic
ucauggaagaaaaaaauuugaaga

SEQ ID NO: 478063 - RNA, 18 nt, Artificial Sequence
  Synthetic
gcuaaagagguuugaaga

SEQ ID NO: 478064 - RNA, 19 nt, Artificial Sequence
  Synthetic
agcuaaagagguuugaaga

SEQ ID NO: 478065 - RNA, 20 nt, Artificial Sequence
  Synthetic
aagcuaaagagguuugaaga

SEQ ID NO: 478066 - RNA, 21 nt, Artificial Sequence
  Synthetic
aaagcuaaagagguuugaaga

SEQ ID NO: 478067 - RNA, 22 nt, Artificial Sequence
  Synthetic
aaaagcuaaagagguuugaaga

SEQ ID NO: 478068 - RNA, 23 nt, Artificial Sequence
  Synthetic
aaaaagcuaaagagguuugaaga

SEQ ID NO: 478069 - RNA, 24 nt, Artificial Sequence
  Synthetic
uaaaaagcuaaagagguuugaaga

SEQ ID NO: 478070 - RNA, 18 nt, Artificial Sequence
  Synthetic
aaaaaagguguuugaaga

SEQ ID NO: 478071 - RNA, 19 nt, Artificial Sequence
  Synthetic
caaaaaagguguuugaaga

SEQ ID NO: 478072 - RNA, 20 nt, Artificial Sequence
  Synthetic
ucaaaaaagguguuugaaga

SEQ ID NO: 478073 - RNA, 21 nt, Artificial Sequence
  Synthetic
gucaaaaaagguguuugaaga

SEQ ID NO: 478074 - RNA, 22 nt, Artificial Sequence
  Synthetic
agucaaaaaagguguuugaaga

SEQ ID NO: 478075 - RNA, 23 nt, Artificial Sequence
  Synthetic
aagucaaaaaagguguuugaaga

SEQ ID NO: 478076 - RNA, 24 nt, Artificial Sequence
  Synthetic
gaagucaaaaaagguguuugaaga

SEQ ID NO: 478077 - RNA, 18 nt, Artificial Sequence
  Synthetic
gaucaaauguuuugaaga

SEQ ID NO: 478078 - RNA, 19 nt, Artificial Sequence
  Synthetic
ugaucaaauguuuugaaga

SEQ ID NO: 478079 - RNA, 20 nt, Artificial Sequence
  Synthetic
gugaucaaauguuuugaaga

SEQ ID NO: 478080 - RNA, 21 nt, Artificial Sequence
  Synthetic
ugugaucaaauguuuugaaga

SEQ ID NO: 478081 - RNA, 22 nt, Artificial Sequence
  Synthetic
augugaucaaauguuuugaaga

SEQ ID NO: 478082 - RNA, 23 nt, Artificial Sequence
  Synthetic
uaugugaucaaauguuuugaaga

SEQ ID NO: 478083 - RNA, 24 nt, Artificial Sequence
  Synthetic
guaugugaucaaauguuuugaaga

SEQ ID NO: 478084 - RNA, 18 nt, Artificial Sequence
  Synthetic
uuauauguaaaaauaaga

SEQ ID NO: 478085 - RNA, 19 nt, Artificial Sequence
  Synthetic
guuauauguaaaaauaaga

SEQ ID NO: 478086 - RNA, 20 nt, Artificial Sequence
  Synthetic
uguuauauguaaaaauaaga

SEQ ID NO: 478087 - RNA, 21 nt, Artificial Sequence
  Synthetic
cuguuauauguaaaaauaaga

SEQ ID NO: 478088 - RNA, 22 nt, Artificial Sequence
  Synthetic
ccuguuauauguaaaaauaaga

SEQ ID NO: 478089 - RNA, 23 nt, Artificial Sequence
  Synthetic
accuguuauauguaaaaauaaga

SEQ ID NO: 478090 - RNA, 24 nt, Artificial Sequence
  Synthetic
uaccuguuauauguaaaaauaaga

SEQ ID NO: 478091 - RNA, 18 nt, Artificial Sequence
  Synthetic
guaaaauaagaaauaaga

SEQ ID NO: 478092 - RNA, 19 nt, Artificial Sequence
  Synthetic
gguaaaauaagaaauaaga

SEQ ID NO: 478093 - RNA, 20 nt, Artificial Sequence
  Synthetic
agguaaaauaagaaauaaga

SEQ ID NO: 478094 - RNA, 21 nt, Artificial Sequence
  Synthetic
gagguaaaauaagaaauaaga

SEQ ID NO: 478095 - RNA, 22 nt, Artificial Sequence
  Synthetic
agagguaaaauaagaaauaaga

SEQ ID NO: 478096 - RNA, 23 nt, Artificial Sequence
  Synthetic
gagagguaaaauaagaaauaaga

SEQ ID NO: 478097 - RNA, 24 nt, Artificial Sequence
  Synthetic
ugagagguaaaauaagaaauaaga

SEQ ID NO: 478098 - RNA, 18 nt, Artificial Sequence
  Synthetic
cacagaggagaaauaaga

SEQ ID NO: 478099 - RNA, 19 nt, Artificial Sequence
  Synthetic
ucacagaggagaaauaaga

SEQ ID NO: 478100 - RNA, 20 nt, Artificial Sequence
  Synthetic
aucacagaggagaaauaaga

SEQ ID NO: 478101 - RNA, 21 nt, Artificial Sequence
  Synthetic
gaucacagaggagaaauaaga

SEQ ID NO: 478102 - RNA, 22 nt, Artificial Sequence
  Synthetic
ggaucacagaggagaaauaaga

SEQ ID NO: 478103 - RNA, 23 nt, Artificial Sequence
  Synthetic
aggaucacagaggagaaauaaga

SEQ ID NO: 478104 - RNA, 24 nt, Artificial Sequence
  Synthetic
gaggaucacagaggagaaauaaga

SEQ ID NO: 478105 - RNA, 18 nt, Artificial Sequence
  Synthetic
cugcucaaggaaauaaga

SEQ ID NO: 478106 - RNA, 19 nt, Artificial Sequence
  Synthetic
acugcucaaggaaauaaga

SEQ ID NO: 478107 - RNA, 20 nt, Artificial Sequence
  Synthetic
cacugcucaaggaaauaaga

SEQ ID NO: 478108 - RNA, 21 nt, Artificial Sequence
  Synthetic
ccacugcucaaggaaauaaga

SEQ ID NO: 478109 - RNA, 22 nt, Artificial Sequence
  Synthetic
accacugcucaaggaaauaaga

SEQ ID NO: 478110 - RNA, 23 nt, Artificial Sequence
  Synthetic
aaccacugcucaaggaaauaaga

SEQ ID NO: 478111 - RNA, 24 nt, Artificial Sequence
  Synthetic
aaaccacugcucaaggaaauaaga

SEQ ID NO: 478112 - RNA, 18 nt, Artificial Sequence
  Synthetic
aguuacuaggaaauaaga

SEQ ID NO: 478113 - RNA, 19 nt, Artificial Sequence
  Synthetic
uaguuacuaggaaauaaga

SEQ ID NO: 478114 - RNA, 20 nt, Artificial Sequence
  Synthetic
uuaguuacuaggaaauaaga

SEQ ID NO: 478115 - RNA, 21 nt, Artificial Sequence
  Synthetic
uuuaguuacuaggaaauaaga

SEQ ID NO: 478116 - RNA, 22 nt, Artificial Sequence
  Synthetic
uuuuaguuacuaggaaauaaga

SEQ ID NO: 478117 - RNA, 23 nt, Artificial Sequence
  Synthetic
auuuuaguuacuaggaaauaaga

SEQ ID NO: 478118 - RNA, 24 nt, Artificial Sequence
  Synthetic
gauuuuaguuacuaggaaauaaga

SEQ ID NO: 478119 - RNA, 18 nt, Artificial Sequence
  Synthetic
aaacuccuguaaauaaga

SEQ ID NO: 478120 - RNA, 19 nt, Artificial Sequence
  Synthetic
aaaacuccuguaaauaaga

SEQ ID NO: 478121 - RNA, 20 nt, Artificial Sequence
  Synthetic
gaaaacuccuguaaauaaga

SEQ ID NO: 478122 - RNA, 21 nt, Artificial Sequence
  Synthetic
agaaaacuccuguaaauaaga

SEQ ID NO: 478123 - RNA, 22 nt, Artificial Sequence
  Synthetic
cagaaaacuccuguaaauaaga

SEQ ID NO: 478124 - RNA, 23 nt, Artificial Sequence
  Synthetic
acagaaaacuccuguaaauaaga

SEQ ID NO: 478125 - RNA, 24 nt, Artificial Sequence
  Synthetic
aacagaaaacuccuguaaauaaga

SEQ ID NO: 478126 - RNA, 18 nt, Artificial Sequence
  Synthetic
ugcauuucaucaauaaga

SEQ ID NO: 478127 - RNA, 19 nt, Artificial Sequence
  Synthetic
cugcauuucaucaauaaga

SEQ ID NO: 478128 - RNA, 20 nt, Artificial Sequence
  Synthetic
gcugcauuucaucaauaaga

SEQ ID NO: 478129 - RNA, 21 nt, Artificial Sequence
  Synthetic
agcugcauuucaucaauaaga

SEQ ID NO: 478130 - RNA, 22 nt, Artificial Sequence
  Synthetic
uagcugcauuucaucaauaaga

SEQ ID NO: 478131 - RNA, 23 nt, Artificial Sequence
  Synthetic
cuagcugcauuucaucaauaaga

SEQ ID NO: 478132 - RNA, 24 nt, Artificial Sequence
  Synthetic
gcuagcugcauuucaucaauaaga

SEQ ID NO: 478133 - RNA, 18 nt, Artificial Sequence
  Synthetic
caauuaggcuacauaaga

SEQ ID NO: 478134 - RNA, 19 nt, Artificial Sequence
  Synthetic
ccaauuaggcuacauaaga

SEQ ID NO: 478135 - RNA, 20 nt, Artificial Sequence
  Synthetic
uccaauuaggcuacauaaga

SEQ ID NO: 478136 - RNA, 21 nt, Artificial Sequence
  Synthetic
cuccaauuaggcuacauaaga

SEQ ID NO: 478137 - RNA, 22 nt, Artificial Sequence
  Synthetic
ucuccaauuaggcuacauaaga

SEQ ID NO: 478138 - RNA, 23 nt, Artificial Sequence
  Synthetic
uucuccaauuaggcuacauaaga

SEQ ID NO: 478139 - RNA, 24 nt, Artificial Sequence
  Synthetic
cuucuccaauuaggcuacauaaga

SEQ ID NO: 478140 - RNA, 18 nt, Artificial Sequence
  Synthetic
cagugauaaagcauaaga

SEQ ID NO: 478141 - RNA, 19 nt, Artificial Sequence
  Synthetic
ucagugauaaagcauaaga

SEQ ID NO: 478142 - RNA, 20 nt, Artificial Sequence
  Synthetic
uucagugauaaagcauaaga

SEQ ID NO: 478143 - RNA, 21 nt, Artificial Sequence
  Synthetic
uuucagugauaaagcauaaga

SEQ ID NO: 478144 - RNA, 22 nt, Artificial Sequence
  Synthetic
uuuucagugauaaagcauaaga

SEQ ID NO: 478145 - RNA, 23 nt, Artificial Sequence
  Synthetic
guuuucagugauaaagcauaaga

SEQ ID NO: 478146 - RNA, 24 nt, Artificial Sequence
  Synthetic
aguuuucagugauaaagcauaaga

SEQ ID NO: 478147 - RNA, 18 nt, Artificial Sequence
  Synthetic
cuccccucccucauaaga

SEQ ID NO: 478148 - RNA, 19 nt, Artificial Sequence
  Synthetic
ucuccccucccucauaaga

SEQ ID NO: 478149 - RNA, 20 nt, Artificial Sequence
  Synthetic
uucuccccucccucauaaga

SEQ ID NO: 478150 - RNA, 21 nt, Artificial Sequence
  Synthetic
cuucuccccucccucauaaga

SEQ ID NO: 478151 - RNA, 22 nt, Artificial Sequence
  Synthetic
ucuucuccccucccucauaaga

SEQ ID NO: 478152 - RNA, 23 nt, Artificial Sequence
  Synthetic
cucuucuccccucccucauaaga

SEQ ID NO: 478153 - RNA, 24 nt, Artificial Sequence
  Synthetic
acucuucuccccucccucauaaga

SEQ ID NO: 478154 - RNA, 18 nt, Artificial Sequence
  Synthetic
cacaauguugucauaaga

SEQ ID NO: 478155 - RNA, 19 nt, Artificial Sequence
  Synthetic
gcacaauguugucauaaga

SEQ ID NO: 478156 - RNA, 20 nt, Artificial Sequence
  Synthetic
agcacaauguugucauaaga

SEQ ID NO: 478157 - RNA, 21 nt, Artificial Sequence
  Synthetic
aagcacaauguugucauaaga

SEQ ID NO: 478158 - RNA, 22 nt, Artificial Sequence
  Synthetic
uaagcacaauguugucauaaga

SEQ ID NO: 478159 - RNA, 23 nt, Artificial Sequence
  Synthetic
auaagcacaauguugucauaaga

SEQ ID NO: 478160 - RNA, 24 nt, Artificial Sequence
  Synthetic
aauaagcacaauguugucauaaga

SEQ ID NO: 478161 - RNA, 18 nt, Artificial Sequence
  Synthetic
gugacuuggaagauaaga

SEQ ID NO: 478162 - RNA, 19 nt, Artificial Sequence
  Synthetic
agugacuuggaagauaaga

SEQ ID NO: 478163 - RNA, 20 nt, Artificial Sequence
  Synthetic
uagugacuuggaagauaaga

SEQ ID NO: 478164 - RNA, 21 nt, Artificial Sequence
  Synthetic
uuagugacuuggaagauaaga

SEQ ID NO: 478165 - RNA, 22 nt, Artificial Sequence
  Synthetic
auuagugacuuggaagauaaga

SEQ ID NO: 478166 - RNA, 23 nt, Artificial Sequence
  Synthetic
gauuagugacuuggaagauaaga

SEQ ID NO: 478167 - RNA, 24 nt, Artificial Sequence
  Synthetic
agauuagugacuuggaagauaaga

SEQ ID NO: 478168 - RNA, 18 nt, Artificial Sequence
  Synthetic
gaccaagaacagauaaga

SEQ ID NO: 478169 - RNA, 19 nt, Artificial Sequence
  Synthetic
agaccaagaacagauaaga

SEQ ID NO: 478170 - RNA, 20 nt, Artificial Sequence
  Synthetic
aagaccaagaacagauaaga

SEQ ID NO: 478171 - RNA, 21 nt, Artificial Sequence
  Synthetic
uaagaccaagaacagauaaga

SEQ ID NO: 478172 - RNA, 22 nt, Artificial Sequence
  Synthetic
uuaagaccaagaacagauaaga

SEQ ID NO: 478173 - RNA, 23 nt, Artificial Sequence
  Synthetic
cuuaagaccaagaacagauaaga

SEQ ID NO: 478174 - RNA, 24 nt, Artificial Sequence
  Synthetic
ucuuaagaccaagaacagauaaga

SEQ ID NO: 478175 - RNA, 18 nt, Artificial Sequence
  Synthetic
aaaaaaggucagauaaga

SEQ ID NO: 478176 - RNA, 19 nt, Artificial Sequence
  Synthetic
aaaaaaaggucagauaaga

SEQ ID NO: 478177 - RNA, 20 nt, Artificial Sequence
  Synthetic
aaaaaaaaggucagauaaga

SEQ ID NO: 478178 - RNA, 21 nt, Artificial Sequence
  Synthetic
gaaaaaaaaggucagauaaga

SEQ ID NO: 478179 - RNA, 22 nt, Artificial Sequence
  Synthetic
ggaaaaaaaaggucagauaaga

SEQ ID NO: 478180 - RNA, 23 nt, Artificial Sequence
  Synthetic
aggaaaaaaaaggucagauaaga

SEQ ID NO: 478181 - RNA, 24 nt, Artificial Sequence
  Synthetic
caggaaaaaaaaggucagauaaga

SEQ ID NO: 478182 - RNA, 18 nt, Artificial Sequence
  Synthetic
cagaacaauuagauaaga

SEQ ID NO: 478183 - RNA, 19 nt, Artificial Sequence
  Synthetic
ccagaacaauuagauaaga

SEQ ID NO: 478184 - RNA, 20 nt, Artificial Sequence
  Synthetic
gccagaacaauuagauaaga

SEQ ID NO: 478185 - RNA, 21 nt, Artificial Sequence
  Synthetic
agccagaacaauuagauaaga

SEQ ID NO: 478186 - RNA, 22 nt, Artificial Sequence
  Synthetic
uagccagaacaauuagauaaga

SEQ ID NO: 478187 - RNA, 23 nt, Artificial Sequence
  Synthetic
cuagccagaacaauuagauaaga

SEQ ID NO: 478188 - RNA, 24 nt, Artificial Sequence
  Synthetic
acuagccagaacaauuagauaaga

SEQ ID NO: 478189 - RNA, 18 nt, Artificial Sequence
  Synthetic
guucucuugaugauaaga

SEQ ID NO: 478190 - RNA, 19 nt, Artificial Sequence
  Synthetic
uguucucuugaugauaaga

SEQ ID NO: 478191 - RNA, 20 nt, Artificial Sequence
  Synthetic
guguucucuugaugauaaga

SEQ ID NO: 478192 - RNA, 21 nt, Artificial Sequence
  Synthetic
uguguucucuugaugauaaga

SEQ ID NO: 478193 - RNA, 22 nt, Artificial Sequence
  Synthetic
guguguucucuugaugauaaga

SEQ ID NO: 478194 - RNA, 23 nt, Artificial Sequence
  Synthetic
uguguguucucuugaugauaaga

SEQ ID NO: 478195 - RNA, 24 nt, Artificial Sequence
  Synthetic
cuguguguucucuugaugauaaga

SEQ ID NO: 478196 - RNA, 18 nt, Artificial Sequence
  Synthetic
aguauugcaaauauaaga

SEQ ID NO: 478197 - RNA, 19 nt, Artificial Sequence
  Synthetic
gaguauugcaaauauaaga

SEQ ID NO: 478198 - RNA, 20 nt, Artificial Sequence
  Synthetic
ggaguauugcaaauauaaga

SEQ ID NO: 478199 - RNA, 21 nt, Artificial Sequence
  Synthetic
aggaguauugcaaauauaaga

SEQ ID NO: 478200 - RNA, 22 nt, Artificial Sequence
  Synthetic
uaggaguauugcaaauauaaga

SEQ ID NO: 478201 - RNA, 23 nt, Artificial Sequence
  Synthetic
auaggaguauugcaaauauaaga

SEQ ID NO: 478202 - RNA, 24 nt, Artificial Sequence
  Synthetic
uauaggaguauugcaaauauaaga

SEQ ID NO: 478203 - RNA, 18 nt, Artificial Sequence
  Synthetic
gaagaauguucuauaaga

SEQ ID NO: 478204 - RNA, 19 nt, Artificial Sequence
  Synthetic
ugaagaauguucuauaaga

SEQ ID NO: 478205 - RNA, 20 nt, Artificial Sequence
  Synthetic
uugaagaauguucuauaaga

SEQ ID NO: 478206 - RNA, 21 nt, Artificial Sequence
  Synthetic
auugaagaauguucuauaaga

SEQ ID NO: 478207 - RNA, 22 nt, Artificial Sequence
  Synthetic
cauugaagaauguucuauaaga

SEQ ID NO: 478208 - RNA, 23 nt, Artificial Sequence
  Synthetic
acauugaagaauguucuauaaga

SEQ ID NO: 478209 - RNA, 24 nt, Artificial Sequence
  Synthetic
aacauugaagaauguucuauaaga

SEQ ID NO: 478210 - RNA, 18 nt, Artificial Sequence
  Synthetic
uccuaaguagguauaaga

SEQ ID NO: 478211 - RNA, 19 nt, Artificial Sequence
  Synthetic
cuccuaaguagguauaaga

SEQ ID NO: 478212 - RNA, 20 nt, Artificial Sequence
  Synthetic
ccuccuaaguagguauaaga

SEQ ID NO: 478213 - RNA, 21 nt, Artificial Sequence
  Synthetic
uccuccuaaguagguauaaga

SEQ ID NO: 478214 - RNA, 22 nt, Artificial Sequence
  Synthetic
guccuccuaaguagguauaaga

SEQ ID NO: 478215 - RNA, 23 nt, Artificial Sequence
  Synthetic
gguccuccuaaguagguauaaga

SEQ ID NO: 478216 - RNA, 24 nt, Artificial Sequence
  Synthetic
ggguccuccuaaguagguauaaga

SEQ ID NO: 478217 - RNA, 18 nt, Artificial Sequence
  Synthetic
ccauagaucauuauaaga

SEQ ID NO: 478218 - RNA, 19 nt, Artificial Sequence
  Synthetic
accauagaucauuauaaga

SEQ ID NO: 478219 - RNA, 20 nt, Artificial Sequence
  Synthetic
aaccauagaucauuauaaga

SEQ ID NO: 478220 - RNA, 21 nt, Artificial Sequence
  Synthetic
caaccauagaucauuauaaga

SEQ ID NO: 478221 - RNA, 22 nt, Artificial Sequence
  Synthetic
ccaaccauagaucauuauaaga

SEQ ID NO: 478222 - RNA, 23 nt, Artificial Sequence
  Synthetic
uccaaccauagaucauuauaaga

SEQ ID NO: 478223 - RNA, 24 nt, Artificial Sequence
  Synthetic
auccaaccauagaucauuauaaga

SEQ ID NO: 478224 - RNA, 18 nt, Artificial Sequence
  Synthetic
uuuuacucuuuuauaaga

SEQ ID NO: 478225 - RNA, 19 nt, Artificial Sequence
  Synthetic
auuuuacucuuuuauaaga

SEQ ID NO: 478226 - RNA, 20 nt, Artificial Sequence
  Synthetic
gauuuuacucuuuuauaaga

SEQ ID NO: 478227 - RNA, 21 nt, Artificial Sequence
  Synthetic
cgauuuuacucuuuuauaaga

SEQ ID NO: 478228 - RNA, 22 nt, Artificial Sequence
  Synthetic
ccgauuuuacucuuuuauaaga

SEQ ID NO: 478229 - RNA, 23 nt, Artificial Sequence
  Synthetic
gccgauuuuacucuuuuauaaga

SEQ ID NO: 478230 - RNA, 24 nt, Artificial Sequence
  Synthetic
ugccgauuuuacucuuuuauaaga

SEQ ID NO: 478231 - RNA, 18 nt, Artificial Sequence
  Synthetic
uccuuagcuagacuaaga

SEQ ID NO: 478232 - RNA, 19 nt, Artificial Sequence
  Synthetic
auccuuagcuagacuaaga

SEQ ID NO: 478233 - RNA, 20 nt, Artificial Sequence
  Synthetic
aauccuuagcuagacuaaga

SEQ ID NO: 478234 - RNA, 21 nt, Artificial Sequence
  Synthetic
aaauccuuagcuagacuaaga

SEQ ID NO: 478235 - RNA, 22 nt, Artificial Sequence
  Synthetic
caaauccuuagcuagacuaaga

SEQ ID NO: 478236 - RNA, 23 nt, Artificial Sequence
  Synthetic
acaaauccuuagcuagacuaaga

SEQ ID NO: 478237 - RNA, 24 nt, Artificial Sequence
  Synthetic
gacaaauccuuagcuagacuaaga

SEQ ID NO: 478238 - RNA, 18 nt, Artificial Sequence
  Synthetic
gcaaaacuaguacuaaga

SEQ ID NO: 478239 - RNA, 19 nt, Artificial Sequence
  Synthetic
agcaaaacuaguacuaaga

SEQ ID NO: 478240 - RNA, 20 nt, Artificial Sequence
  Synthetic
cagcaaaacuaguacuaaga

SEQ ID NO: 478241 - RNA, 21 nt, Artificial Sequence
  Synthetic
acagcaaaacuaguacuaaga

SEQ ID NO: 478242 - RNA, 22 nt, Artificial Sequence
  Synthetic
uacagcaaaacuaguacuaaga

SEQ ID NO: 478243 - RNA, 23 nt, Artificial Sequence
  Synthetic
auacagcaaaacuaguacuaaga

SEQ ID NO: 478244 - RNA, 24 nt, Artificial Sequence
  Synthetic
gauacagcaaaacuaguacuaaga

SEQ ID NO: 478245 - RNA, 18 nt, Artificial Sequence
  Synthetic
caaguaaugaaccuaaga

SEQ ID NO: 478246 - RNA, 19 nt, Artificial Sequence
  Synthetic
ccaaguaaugaaccuaaga

SEQ ID NO: 478247 - RNA, 20 nt, Artificial Sequence
  Synthetic
cccaaguaaugaaccuaaga

SEQ ID NO: 478248 - RNA, 21 nt, Artificial Sequence
  Synthetic
ccccaaguaaugaaccuaaga

SEQ ID NO: 478249 - RNA, 22 nt, Artificial Sequence
  Synthetic
cccccaaguaaugaaccuaaga

SEQ ID NO: 478250 - RNA, 23 nt, Artificial Sequence
  Synthetic
ccccccaaguaaugaaccuaaga

SEQ ID NO: 478251 - RNA, 24 nt, Artificial Sequence
  Synthetic
gccccccaaguaaugaaccuaaga

SEQ ID NO: 478252 - RNA, 18 nt, Artificial Sequence
  Synthetic
ccuuuagguccccuaaga

SEQ ID NO: 478253 - RNA, 19 nt, Artificial Sequence
  Synthetic
cccuuuagguccccuaaga

SEQ ID NO: 478254 - RNA, 20 nt, Artificial Sequence
  Synthetic
ccccuuuagguccccuaaga

SEQ ID NO: 478255 - RNA, 21 nt, Artificial Sequence
  Synthetic
accccuuuagguccccuaaga

SEQ ID NO: 478256 - RNA, 22 nt, Artificial Sequence
  Synthetic
aaccccuuuagguccccuaaga

SEQ ID NO: 478257 - RNA, 23 nt, Artificial Sequence
  Synthetic
gaaccccuuuagguccccuaaga

SEQ ID NO: 478258 - RNA, 24 nt, Artificial Sequence
  Synthetic
ugaaccccuuuagguccccuaaga

SEQ ID NO: 478259 - RNA, 18 nt, Artificial Sequence
  Synthetic
aggugaccuggccuaaga

SEQ ID NO: 478260 - RNA, 19 nt, Artificial Sequence
  Synthetic
gaggugaccuggccuaaga

SEQ ID NO: 478261 - RNA, 20 nt, Artificial Sequence
  Synthetic
agaggugaccuggccuaaga

SEQ ID NO: 478262 - RNA, 21 nt, Artificial Sequence
  Synthetic
cagaggugaccuggccuaaga

SEQ ID NO: 478263 - RNA, 22 nt, Artificial Sequence
  Synthetic
gcagaggugaccuggccuaaga

SEQ ID NO: 478264 - RNA, 23 nt, Artificial Sequence
  Synthetic
ggcagaggugaccuggccuaaga

SEQ ID NO: 478265 - RNA, 24 nt, Artificial Sequence
  Synthetic
gggcagaggugaccuggccuaaga

SEQ ID NO: 478266 - RNA, 18 nt, Artificial Sequence
  Synthetic
ugguaggcuguccuaaga

SEQ ID NO: 478267 - RNA, 19 nt, Artificial Sequence
  Synthetic
augguaggcuguccuaaga

SEQ ID NO: 478268 - RNA, 20 nt, Artificial Sequence
  Synthetic
aaugguaggcuguccuaaga

SEQ ID NO: 478269 - RNA, 21 nt, Artificial Sequence
  Synthetic
aaaugguaggcuguccuaaga

SEQ ID NO: 478270 - RNA, 22 nt, Artificial Sequence
  Synthetic
uaaaugguaggcuguccuaaga

SEQ ID NO: 478271 - RNA, 23 nt, Artificial Sequence
  Synthetic
cuaaaugguaggcuguccuaaga

SEQ ID NO: 478272 - RNA, 24 nt, Artificial Sequence
  Synthetic
ccuaaaugguaggcuguccuaaga

SEQ ID NO: 478273 - RNA, 18 nt, Artificial Sequence
  Synthetic
auggcacacaagcuaaga

SEQ ID NO: 478274 - RNA, 19 nt, Artificial Sequence
  Synthetic
uauggcacacaagcuaaga

SEQ ID NO: 478275 - RNA, 20 nt, Artificial Sequence
  Synthetic
guauggcacacaagcuaaga

SEQ ID NO: 478276 - RNA, 21 nt, Artificial Sequence
  Synthetic
cguauggcacacaagcuaaga

SEQ ID NO: 478277 - RNA, 22 nt, Artificial Sequence
  Synthetic
gcguauggcacacaagcuaaga

SEQ ID NO: 478278 - RNA, 23 nt, Artificial Sequence
  Synthetic
ugcguauggcacacaagcuaaga

SEQ ID NO: 478279 - RNA, 24 nt, Artificial Sequence
  Synthetic
gugcguauggcacacaagcuaaga

SEQ ID NO: 478280 - RNA, 18 nt, Artificial Sequence
  Synthetic
agaauugaacagcuaaga

SEQ ID NO: 478281 - RNA, 19 nt, Artificial Sequence
  Synthetic
uagaauugaacagcuaaga

SEQ ID NO: 478282 - RNA, 20 nt, Artificial Sequence
  Synthetic
auagaauugaacagcuaaga

SEQ ID NO: 478283 - RNA, 21 nt, Artificial Sequence
  Synthetic
gauagaauugaacagcuaaga

SEQ ID NO: 478284 - RNA, 22 nt, Artificial Sequence
  Synthetic
agauagaauugaacagcuaaga

SEQ ID NO: 478285 - RNA, 23 nt, Artificial Sequence
  Synthetic
gagauagaauugaacagcuaaga

SEQ ID NO: 478286 - RNA, 24 nt, Artificial Sequence
  Synthetic
agagauagaauugaacagcuaaga

SEQ ID NO: 478287 - RNA, 18 nt, Artificial Sequence
  Synthetic
uccaacuuguagcuaaga

SEQ ID NO: 478288 - RNA, 19 nt, Artificial Sequence
  Synthetic
uuccaacuuguagcuaaga

SEQ ID NO: 478289 - RNA, 20 nt, Artificial Sequence
  Synthetic
auuccaacuuguagcuaaga

SEQ ID NO: 478290 - RNA, 21 nt, Artificial Sequence
  Synthetic
aauuccaacuuguagcuaaga

SEQ ID NO: 478291 - RNA, 22 nt, Artificial Sequence
  Synthetic
uaauuccaacuuguagcuaaga

SEQ ID NO: 478292 - RNA, 23 nt, Artificial Sequence
  Synthetic
guaauuccaacuuguagcuaaga

SEQ ID NO: 478293 - RNA, 24 nt, Artificial Sequence
  Synthetic
aguaauuccaacuuguagcuaaga

SEQ ID NO: 478294 - RNA, 18 nt, Artificial Sequence
  Synthetic
cuacgacaagcgcuaaga

SEQ ID NO: 478295 - RNA, 19 nt, Artificial Sequence
  Synthetic
gcuacgacaagcgcuaaga

SEQ ID NO: 478296 - RNA, 20 nt, Artificial Sequence
  Synthetic
ugcuacgacaagcgcuaaga

SEQ ID NO: 478297 - RNA, 21 nt, Artificial Sequence
  Synthetic
cugcuacgacaagcgcuaaga

SEQ ID NO: 478298 - RNA, 22 nt, Artificial Sequence
  Synthetic
ucugcuacgacaagcgcuaaga

SEQ ID NO: 478299 - RNA, 23 nt, Artificial Sequence
  Synthetic
aucugcuacgacaagcgcuaaga

SEQ ID NO: 478300 - RNA, 24 nt, Artificial Sequence
  Synthetic
aaucugcuacgacaagcgcuaaga

SEQ ID NO: 478301 - RNA, 18 nt, Artificial Sequence
  Synthetic
gcaaaagcagugcuaaga

SEQ ID NO: 478302 - RNA, 19 nt, Artificial Sequence
  Synthetic
agcaaaagcagugcuaaga

SEQ ID NO: 478303 - RNA, 20 nt, Artificial Sequence
  Synthetic
uagcaaaagcagugcuaaga

SEQ ID NO: 478304 - RNA, 21 nt, Artificial Sequence
  Synthetic
guagcaaaagcagugcuaaga

SEQ ID NO: 478305 - RNA, 22 nt, Artificial Sequence
  Synthetic
gguagcaaaagcagugcuaaga

SEQ ID NO: 478306 - RNA, 23 nt, Artificial Sequence
  Synthetic
ggguagcaaaagcagugcuaaga

SEQ ID NO: 478307 - RNA, 24 nt, Artificial Sequence
  Synthetic
gggguagcaaaagcagugcuaaga

SEQ ID NO: 478308 - RNA, 18 nt, Artificial Sequence
  Synthetic
uaauuucaugcucuaaga

SEQ ID NO: 478309 - RNA, 19 nt, Artificial Sequence
  Synthetic
auaauuucaugcucuaaga

SEQ ID NO: 478310 - RNA, 20 nt, Artificial Sequence
  Synthetic
gauaauuucaugcucuaaga

SEQ ID NO: 478311 - RNA, 21 nt, Artificial Sequence
  Synthetic
ugauaauuucaugcucuaaga

SEQ ID NO: 478312 - RNA, 22 nt, Artificial Sequence
  Synthetic
uugauaauuucaugcucuaaga

SEQ ID NO: 478313 - RNA, 23 nt, Artificial Sequence
  Synthetic
cuugauaauuucaugcucuaaga

SEQ ID NO: 478314 - RNA, 24 nt, Artificial Sequence
  Synthetic
ucuugauaauuucaugcucuaaga

SEQ ID NO: 478315 - RNA, 18 nt, Artificial Sequence
  Synthetic
gggauuuuuaaaguaaga

SEQ ID NO: 478316 - RNA, 19 nt, Artificial Sequence
  Synthetic
ugggauuuuuaaaguaaga

SEQ ID NO: 478317 - RNA, 20 nt, Artificial Sequence
  Synthetic
uugggauuuuuaaaguaaga

SEQ ID NO: 478318 - RNA, 21 nt, Artificial Sequence
  Synthetic
auugggauuuuuaaaguaaga

SEQ ID NO: 478319 - RNA, 22 nt, Artificial Sequence
  Synthetic
aauugggauuuuuaaaguaaga

SEQ ID NO: 478320 - RNA, 23 nt, Artificial Sequence
  Synthetic
gaauugggauuuuuaaaguaaga

SEQ ID NO: 478321 - RNA, 24 nt, Artificial Sequence
  Synthetic
ugaauugggauuuuuaaaguaaga

SEQ ID NO: 478322 - RNA, 18 nt, Artificial Sequence
  Synthetic
auuggcucugaaguaaga

SEQ ID NO: 478323 - RNA, 19 nt, Artificial Sequence
  Synthetic
uauuggcucugaaguaaga

SEQ ID NO: 478324 - RNA, 20 nt, Artificial Sequence
  Synthetic
auauuggcucugaaguaaga

SEQ ID NO: 478325 - RNA, 21 nt, Artificial Sequence
  Synthetic
aauauuggcucugaaguaaga

SEQ ID NO: 478326 - RNA, 22 nt, Artificial Sequence
  Synthetic
uaauauuggcucugaaguaaga

SEQ ID NO: 478327 - RNA, 23 nt, Artificial Sequence
  Synthetic
uuaauauuggcucugaaguaaga

SEQ ID NO: 478328 - RNA, 24 nt, Artificial Sequence
  Synthetic
guuaauauuggcucugaaguaaga

SEQ ID NO: 478329 - RNA, 18 nt, Artificial Sequence
  Synthetic
ugagauaaauaaguaaga

SEQ ID NO: 478330 - RNA, 19 nt, Artificial Sequence
  Synthetic
uugagauaaauaaguaaga

SEQ ID NO: 478331 - RNA, 20 nt, Artificial Sequence
  Synthetic
uuugagauaaauaaguaaga

SEQ ID NO: 478332 - RNA, 21 nt, Artificial Sequence
  Synthetic
auuugagauaaauaaguaaga

SEQ ID NO: 478333 - RNA, 22 nt, Artificial Sequence
  Synthetic
uauuugagauaaauaaguaaga

SEQ ID NO: 478334 - RNA, 23 nt, Artificial Sequence
  Synthetic
uuauuugagauaaauaaguaaga

SEQ ID NO: 478335 - RNA, 24 nt, Artificial Sequence
  Synthetic
guuauuugagauaaauaaguaaga

SEQ ID NO: 478336 - RNA, 18 nt, Artificial Sequence
  Synthetic
auauuugccuuaguaaga

SEQ ID NO: 478337 - RNA, 19 nt, Artificial Sequence
  Synthetic
uauauuugccuuaguaaga

SEQ ID NO: 478338 - RNA, 20 nt, Artificial Sequence
  Synthetic
cuauauuugccuuaguaaga

SEQ ID NO: 478339 - RNA, 21 nt, Artificial Sequence
  Synthetic
acuauauuugccuuaguaaga

SEQ ID NO: 478340 - RNA, 22 nt, Artificial Sequence
  Synthetic
aacuauauuugccuuaguaaga

SEQ ID NO: 478341 - RNA, 23 nt, Artificial Sequence
  Synthetic
aaacuauauuugccuuaguaaga

SEQ ID NO: 478342 - RNA, 24 nt, Artificial Sequence
  Synthetic
uaaacuauauuugccuuaguaaga

SEQ ID NO: 478343 - RNA, 18 nt, Artificial Sequence
  Synthetic
gaaaucucauucguaaga

SEQ ID NO: 478344 - RNA, 19 nt, Artificial Sequence
  Synthetic
agaaaucucauucguaaga

SEQ ID NO: 478345 - RNA, 20 nt, Artificial Sequence
  Synthetic
gagaaaucucauucguaaga

SEQ ID NO: 478346 - RNA, 21 nt, Artificial Sequence
  Synthetic
ggagaaaucucauucguaaga

SEQ ID NO: 478347 - RNA, 22 nt, Artificial Sequence
  Synthetic
gggagaaaucucauucguaaga

SEQ ID NO: 478348 - RNA, 23 nt, Artificial Sequence
  Synthetic
agggagaaaucucauucguaaga

SEQ ID NO: 478349 - RNA, 24 nt, Artificial Sequence
  Synthetic
gagggagaaaucucauucguaaga

SEQ ID NO: 478350 - RNA, 18 nt, Artificial Sequence
  Synthetic
uacuauucauugguaaga

SEQ ID NO: 478351 - RNA, 19 nt, Artificial Sequence
  Synthetic
auacuauucauugguaaga

SEQ ID NO: 478352 - RNA, 20 nt, Artificial Sequence
  Synthetic
uauacuauucauugguaaga

SEQ ID NO: 478353 - RNA, 21 nt, Artificial Sequence
  Synthetic
auauacuauucauugguaaga

SEQ ID NO: 478354 - RNA, 22 nt, Artificial Sequence
  Synthetic
uauauacuauucauugguaaga

SEQ ID NO: 478355 - RNA, 23 nt, Artificial Sequence
  Synthetic
auauauacuauucauugguaaga

SEQ ID NO: 478356 - RNA, 24 nt, Artificial Sequence
  Synthetic
uauauauacuauucauugguaaga

SEQ ID NO: 478357 - RNA, 18 nt, Artificial Sequence
  Synthetic
auccguagcucuguaaga

SEQ ID NO: 478358 - RNA, 19 nt, Artificial Sequence
  Synthetic
uauccguagcucuguaaga

SEQ ID NO: 478359 - RNA, 20 nt, Artificial Sequence
  Synthetic
guauccguagcucuguaaga

SEQ ID NO: 478360 - RNA, 21 nt, Artificial Sequence
  Synthetic
gguauccguagcucuguaaga

SEQ ID NO: 478361 - RNA, 22 nt, Artificial Sequence
  Synthetic
ugguauccguagcucuguaaga

SEQ ID NO: 478362 - RNA, 23 nt, Artificial Sequence
  Synthetic
augguauccguagcucuguaaga

SEQ ID NO: 478363 - RNA, 24 nt, Artificial Sequence
  Synthetic
caugguauccguagcucuguaaga

SEQ ID NO: 478364 - RNA, 18 nt, Artificial Sequence
  Synthetic
caggagaagaguguaaga

SEQ ID NO: 478365 - RNA, 19 nt, Artificial Sequence
  Synthetic
ucaggagaagaguguaaga

SEQ ID NO: 478366 - RNA, 20 nt, Artificial Sequence
  Synthetic
aucaggagaagaguguaaga

SEQ ID NO: 478367 - RNA, 21 nt, Artificial Sequence
  Synthetic
gaucaggagaagaguguaaga

SEQ ID NO: 478368 - RNA, 22 nt, Artificial Sequence
  Synthetic
agaucaggagaagaguguaaga

SEQ ID NO: 478369 - RNA, 23 nt, Artificial Sequence
  Synthetic
gagaucaggagaagaguguaaga

SEQ ID NO: 478370 - RNA, 24 nt, Artificial Sequence
  Synthetic
ggagaucaggagaagaguguaaga

SEQ ID NO: 478371 - RNA, 18 nt, Artificial Sequence
  Synthetic
ucuaugaagaaauuaaga

SEQ ID NO: 478372 - RNA, 19 nt, Artificial Sequence
  Synthetic
gucuaugaagaaauuaaga

SEQ ID NO: 478373 - RNA, 20 nt, Artificial Sequence
  Synthetic
ggucuaugaagaaauuaaga

SEQ ID NO: 478374 - RNA, 21 nt, Artificial Sequence
  Synthetic
gggucuaugaagaaauuaaga

SEQ ID NO: 478375 - RNA, 22 nt, Artificial Sequence
  Synthetic
ugggucuaugaagaaauuaaga

SEQ ID NO: 478376 - RNA, 23 nt, Artificial Sequence
  Synthetic
cugggucuaugaagaaauuaaga

SEQ ID NO: 478377 - RNA, 24 nt, Artificial Sequence
  Synthetic
acugggucuaugaagaaauuaaga

SEQ ID NO: 478378 - RNA, 18 nt, Artificial Sequence
  Synthetic
gaagagagacaauuaaga

SEQ ID NO: 478379 - RNA, 19 nt, Artificial Sequence
  Synthetic
agaagagagacaauuaaga

SEQ ID NO: 478380 - RNA, 20 nt, Artificial Sequence
  Synthetic
aagaagagagacaauuaaga

SEQ ID NO: 478381 - RNA, 21 nt, Artificial Sequence
  Synthetic
aaagaagagagacaauuaaga

SEQ ID NO: 478382 - RNA, 22 nt, Artificial Sequence
  Synthetic
gaaagaagagagacaauuaaga

SEQ ID NO: 478383 - RNA, 23 nt, Artificial Sequence
  Synthetic
agaaagaagagagacaauuaaga

SEQ ID NO: 478384 - RNA, 24 nt, Artificial Sequence
  Synthetic
gagaaagaagagagacaauuaaga

SEQ ID NO: 478385 - RNA, 18 nt, Artificial Sequence
  Synthetic
aauacuauggcauuaaga

SEQ ID NO: 478386 - RNA, 19 nt, Artificial Sequence
  Synthetic
aaauacuauggcauuaaga

SEQ ID NO: 478387 - RNA, 20 nt, Artificial Sequence
  Synthetic
aaaauacuauggcauuaaga

SEQ ID NO: 478388 - RNA, 21 nt, Artificial Sequence
  Synthetic
aaaaauacuauggcauuaaga

SEQ ID NO: 478389 - RNA, 22 nt, Artificial Sequence
  Synthetic
uaaaaauacuauggcauuaaga

SEQ ID NO: 478390 - RNA, 23 nt, Artificial Sequence
  Synthetic
uuaaaaauacuauggcauuaaga

SEQ ID NO: 478391 - RNA, 24 nt, Artificial Sequence
  Synthetic
uuuaaaaauacuauggcauuaaga

SEQ ID NO: 478392 - RNA, 18 nt, Artificial Sequence
  Synthetic
auguuuauuagauuaaga

SEQ ID NO: 478393 - RNA, 19 nt, Artificial Sequence
  Synthetic
uauguuuauuagauuaaga

SEQ ID NO: 478394 - RNA, 20 nt, Artificial Sequence
  Synthetic
guauguuuauuagauuaaga

SEQ ID NO: 478395 - RNA, 21 nt, Artificial Sequence
  Synthetic
uguauguuuauuagauuaaga

SEQ ID NO: 478396 - RNA, 22 nt, Artificial Sequence
  Synthetic
guguauguuuauuagauuaaga

SEQ ID NO: 478397 - RNA, 23 nt, Artificial Sequence
  Synthetic
gguguauguuuauuagauuaaga

SEQ ID NO: 478398 - RNA, 24 nt, Artificial Sequence
  Synthetic
ggguguauguuuauuagauuaaga

SEQ ID NO: 478399 - RNA, 18 nt, Artificial Sequence
  Synthetic
uaagaggaacuauuaaga

SEQ ID NO: 478400 - RNA, 19 nt, Artificial Sequence
  Synthetic
auaagaggaacuauuaaga

SEQ ID NO: 478401 - RNA, 20 nt, Artificial Sequence
  Synthetic
aauaagaggaacuauuaaga

SEQ ID NO: 478402 - RNA, 21 nt, Artificial Sequence
  Synthetic
aaauaagaggaacuauuaaga

SEQ ID NO: 478403 - RNA, 22 nt, Artificial Sequence
  Synthetic
gaaauaagaggaacuauuaaga

SEQ ID NO: 478404 - RNA, 23 nt, Artificial Sequence
  Synthetic
ggaaauaagaggaacuauuaaga

SEQ ID NO: 478405 - RNA, 24 nt, Artificial Sequence
  Synthetic
gggaaauaagaggaacuauuaaga

SEQ ID NO: 478406 - RNA, 18 nt, Artificial Sequence
  Synthetic
agauuggugguauuaaga

SEQ ID NO: 478407 - RNA, 19 nt, Artificial Sequence
  Synthetic
gagauuggugguauuaaga

SEQ ID NO: 478408 - RNA, 20 nt, Artificial Sequence
  Synthetic
agagauuggugguauuaaga

SEQ ID NO: 478409 - RNA, 21 nt, Artificial Sequence
  Synthetic
uagagauuggugguauuaaga

SEQ ID NO: 478410 - RNA, 22 nt, Artificial Sequence
  Synthetic
uuagagauuggugguauuaaga

SEQ ID NO: 478411 - RNA, 23 nt, Artificial Sequence
  Synthetic
uuuagagauuggugguauuaaga

SEQ ID NO: 478412 - RNA, 24 nt, Artificial Sequence
  Synthetic
auuuagagauuggugguauuaaga

SEQ ID NO: 478413 - RNA, 18 nt, Artificial Sequence
  Synthetic
gaucuguuugacuuaaga

SEQ ID NO: 478414 - RNA, 19 nt, Artificial Sequence
  Synthetic
agaucuguuugacuuaaga

SEQ ID NO: 478415 - RNA, 20 nt, Artificial Sequence
  Synthetic
gagaucuguuugacuuaaga

SEQ ID NO: 478416 - RNA, 21 nt, Artificial Sequence
  Synthetic
ggagaucuguuugacuuaaga

SEQ ID NO: 478417 - RNA, 22 nt, Artificial Sequence
  Synthetic
aggagaucuguuugacuuaaga

SEQ ID NO: 478418 - RNA, 23 nt, Artificial Sequence
  Synthetic
aaggagaucuguuugacuuaaga

SEQ ID NO: 478419 - RNA, 24 nt, Artificial Sequence
  Synthetic
uaaggagaucuguuugacuuaaga

SEQ ID NO: 478420 - RNA, 18 nt, Artificial Sequence
  Synthetic
acucucaaucccuuaaga

SEQ ID NO: 478421 - RNA, 19 nt, Artificial Sequence
  Synthetic
gacucucaaucccuuaaga

SEQ ID NO: 478422 - RNA, 20 nt, Artificial Sequence
  Synthetic
ggacucucaaucccuuaaga

SEQ ID NO: 478423 - RNA, 21 nt, Artificial Sequence
  Synthetic
aggacucucaaucccuuaaga

SEQ ID NO: 478424 - RNA, 22 nt, Artificial Sequence
  Synthetic
aaggacucucaaucccuuaaga

SEQ ID NO: 478425 - RNA, 23 nt, Artificial Sequence
  Synthetic
aaaggacucucaaucccuuaaga

SEQ ID NO: 478426 - RNA, 24 nt, Artificial Sequence
  Synthetic
aaaaggacucucaaucccuuaaga

SEQ ID NO: 478427 - RNA, 18 nt, Artificial Sequence
  Synthetic
agcuaaauucccuuaaga

SEQ ID NO: 478428 - RNA, 19 nt, Artificial Sequence
  Synthetic
aagcuaaauucccuuaaga

SEQ ID NO: 478429 - RNA, 20 nt, Artificial Sequence
  Synthetic
gaagcuaaauucccuuaaga

SEQ ID NO: 478430 - RNA, 21 nt, Artificial Sequence
  Synthetic
agaagcuaaauucccuuaaga

SEQ ID NO: 478431 - RNA, 22 nt, Artificial Sequence
  Synthetic
cagaagcuaaauucccuuaaga

SEQ ID NO: 478432 - RNA, 23 nt, Artificial Sequence
  Synthetic
acagaagcuaaauucccuuaaga

SEQ ID NO: 478433 - RNA, 24 nt, Artificial Sequence
  Synthetic
uacagaagcuaaauucccuuaaga

SEQ ID NO: 478434 - RNA, 18 nt, Artificial Sequence
  Synthetic
agugaacauugcuuaaga

SEQ ID NO: 478435 - RNA, 19 nt, Artificial Sequence
  Synthetic
gagugaacauugcuuaaga

SEQ ID NO: 478436 - RNA, 20 nt, Artificial Sequence
  Synthetic
ggagugaacauugcuuaaga

SEQ ID NO: 478437 - RNA, 21 nt, Artificial Sequence
  Synthetic
aggagugaacauugcuuaaga

SEQ ID NO: 478438 - RNA, 22 nt, Artificial Sequence
  Synthetic
aaggagugaacauugcuuaaga

SEQ ID NO: 478439 - RNA, 23 nt, Artificial Sequence
  Synthetic
gaaggagugaacauugcuuaaga

SEQ ID NO: 478440 - RNA, 24 nt, Artificial Sequence
  Synthetic
ugaaggagugaacauugcuuaaga

SEQ ID NO: 478441 - RNA, 18 nt, Artificial Sequence
  Synthetic
ugugcaaaaacguuaaga

SEQ ID NO: 478442 - RNA, 19 nt, Artificial Sequence
  Synthetic
cugugcaaaaacguuaaga

SEQ ID NO: 478443 - RNA, 20 nt, Artificial Sequence
  Synthetic
ucugugcaaaaacguuaaga

SEQ ID NO: 478444 - RNA, 21 nt, Artificial Sequence
  Synthetic
uucugugcaaaaacguuaaga

SEQ ID NO: 478445 - RNA, 22 nt, Artificial Sequence
  Synthetic
auucugugcaaaaacguuaaga

SEQ ID NO: 478446 - RNA, 23 nt, Artificial Sequence
  Synthetic
uauucugugcaaaaacguuaaga

SEQ ID NO: 478447 - RNA, 24 nt, Artificial Sequence
  Synthetic
uuauucugugcaaaaacguuaaga

SEQ ID NO: 478448 - RNA, 18 nt, Artificial Sequence
  Synthetic
acuaccaaaagguuaaga

SEQ ID NO: 478449 - RNA, 19 nt, Artificial Sequence
  Synthetic
aacuaccaaaagguuaaga

SEQ ID NO: 478450 - RNA, 20 nt, Artificial Sequence
  Synthetic
aaacuaccaaaagguuaaga

SEQ ID NO: 478451 - RNA, 21 nt, Artificial Sequence
  Synthetic
aaaacuaccaaaagguuaaga

SEQ ID NO: 478452 - RNA, 22 nt, Artificial Sequence
  Synthetic
uaaaacuaccaaaagguuaaga

SEQ ID NO: 478453 - RNA, 23 nt, Artificial Sequence
  Synthetic
auaaaacuaccaaaagguuaaga

SEQ ID NO: 478454 - RNA, 24 nt, Artificial Sequence
  Synthetic
aauaaaacuaccaaaagguuaaga

SEQ ID NO: 478455 - RNA, 18 nt, Artificial Sequence
  Synthetic
gacucaucugauuuaaga

SEQ ID NO: 478456 - RNA, 19 nt, Artificial Sequence
  Synthetic
ggacucaucugauuuaaga

SEQ ID NO: 478457 - RNA, 20 nt, Artificial Sequence
  Synthetic
gggacucaucugauuuaaga

SEQ ID NO: 478458 - RNA, 21 nt, Artificial Sequence
  Synthetic
ggggacucaucugauuuaaga

SEQ ID NO: 478459 - RNA, 22 nt, Artificial Sequence
  Synthetic
uggggacucaucugauuuaaga

SEQ ID NO: 478460 - RNA, 23 nt, Artificial Sequence
  Synthetic
auggggacucaucugauuuaaga

SEQ ID NO: 478461 - RNA, 24 nt, Artificial Sequence
  Synthetic
cauggggacucaucugauuuaaga

SEQ ID NO: 478462 - RNA, 18 nt, Artificial Sequence
  Synthetic
ugugugcuuucuuuaaga

SEQ ID NO: 478463 - RNA, 19 nt, Artificial Sequence
  Synthetic
gugugugcuuucuuuaaga

SEQ ID NO: 478464 - RNA, 20 nt, Artificial Sequence
  Synthetic
cgugugugcuuucuuuaaga

SEQ ID NO: 478465 - RNA, 21 nt, Artificial Sequence
  Synthetic
acgugugugcuuucuuuaaga

SEQ ID NO: 478466 - RNA, 22 nt, Artificial Sequence
  Synthetic
uacgugugugcuuucuuuaaga

SEQ ID NO: 478467 - RNA, 23 nt, Artificial Sequence
  Synthetic
guacgugugugcuuucuuuaaga

SEQ ID NO: 478468 - RNA, 24 nt, Artificial Sequence
  Synthetic
cguacgugugugcuuucuuuaaga

SEQ ID NO: 478469 - RNA, 18 nt, Artificial Sequence
  Synthetic
ucuuaagaaaguuuaaga

SEQ ID NO: 478470 - RNA, 19 nt, Artificial Sequence
  Synthetic
gucuuaagaaaguuuaaga

SEQ ID NO: 478471 - RNA, 20 nt, Artificial Sequence
  Synthetic
agucuuaagaaaguuuaaga

SEQ ID NO: 478472 - RNA, 21 nt, Artificial Sequence
  Synthetic
cagucuuaagaaaguuuaaga

SEQ ID NO: 478473 - RNA, 22 nt, Artificial Sequence
  Synthetic
acagucuuaagaaaguuuaaga

SEQ ID NO: 478474 - RNA, 23 nt, Artificial Sequence
  Synthetic
uacagucuuaagaaaguuuaaga

SEQ ID NO: 478475 - RNA, 24 nt, Artificial Sequence
  Synthetic
cuacagucuuaagaaaguuuaaga

SEQ ID NO: 478476 - RNA, 18 nt, Artificial Sequence
  Synthetic
uuugaggagaguuuaaga

SEQ ID NO: 478477 - RNA, 19 nt, Artificial Sequence
  Synthetic
auuugaggagaguuuaaga

SEQ ID NO: 478478 - RNA, 20 nt, Artificial Sequence
  Synthetic
uauuugaggagaguuuaaga

SEQ ID NO: 478479 - RNA, 21 nt, Artificial Sequence
  Synthetic
uuauuugaggagaguuuaaga

SEQ ID NO: 478480 - RNA, 22 nt, Artificial Sequence
  Synthetic
cuuauuugaggagaguuuaaga

SEQ ID NO: 478481 - RNA, 23 nt, Artificial Sequence
  Synthetic
gcuuauuugaggagaguuuaaga

SEQ ID NO: 478482 - RNA, 24 nt, Artificial Sequence
  Synthetic
agcuuauuugaggagaguuuaaga

SEQ ID NO: 478483 - RNA, 18 nt, Artificial Sequence
  Synthetic
agagaccccauuuuaaga

SEQ ID NO: 478484 - RNA, 19 nt, Artificial Sequence
  Synthetic
cagagaccccauuuuaaga

SEQ ID NO: 478485 - RNA, 20 nt, Artificial Sequence
  Synthetic
ccagagaccccauuuuaaga

SEQ ID NO: 478486 - RNA, 21 nt, Artificial Sequence
  Synthetic
uccagagaccccauuuuaaga

SEQ ID NO: 478487 - RNA, 22 nt, Artificial Sequence
  Synthetic
guccagagaccccauuuuaaga

SEQ ID NO: 478488 - RNA, 23 nt, Artificial Sequence
  Synthetic
aguccagagaccccauuuuaaga

SEQ ID NO: 478489 - RNA, 24 nt, Artificial Sequence
  Synthetic
uaguccagagaccccauuuuaaga

SEQ ID NO: 478490 - RNA, 18 nt, Artificial Sequence
  Synthetic
uacugaaggauuuuaaga

SEQ ID NO: 478491 - RNA, 19 nt, Artificial Sequence
  Synthetic
cuacugaaggauuuuaaga

SEQ ID NO: 478492 - RNA, 20 nt, Artificial Sequence
  Synthetic
gcuacugaaggauuuuaaga

SEQ ID NO: 478493 - RNA, 21 nt, Artificial Sequence
  Synthetic
agcuacugaaggauuuuaaga

SEQ ID NO: 478494 - RNA, 22 nt, Artificial Sequence
  Synthetic
aagcuacugaaggauuuuaaga

SEQ ID NO: 478495 - RNA, 23 nt, Artificial Sequence
  Synthetic
gaagcuacugaaggauuuuaaga

SEQ ID NO: 478496 - RNA, 24 nt, Artificial Sequence
  Synthetic
ggaagcuacugaaggauuuuaaga

SEQ ID NO: 478497 - RNA, 18 nt, Artificial Sequence
  Synthetic
ccccuggugguuuuaaga

SEQ ID NO: 478498 - RNA, 19 nt, Artificial Sequence
  Synthetic
accccuggugguuuuaaga

SEQ ID NO: 478499 - RNA, 20 nt, Artificial Sequence
  Synthetic
uaccccuggugguuuuaaga

SEQ ID NO: 478500 - RNA, 21 nt, Artificial Sequence
  Synthetic
guaccccuggugguuuuaaga

SEQ ID NO: 478501 - RNA, 22 nt, Artificial Sequence
  Synthetic
uguaccccuggugguuuuaaga

SEQ ID NO: 478502 - RNA, 23 nt, Artificial Sequence
  Synthetic
uuguaccccuggugguuuuaaga

SEQ ID NO: 478503 - RNA, 24 nt, Artificial Sequence
  Synthetic
uuuguaccccuggugguuuuaaga

SEQ ID NO: 478504 - RNA, 18 nt, Artificial Sequence
  Synthetic
aggcuucuaaaaaacaga

SEQ ID NO: 478505 - RNA, 19 nt, Artificial Sequence
  Synthetic
caggcuucuaaaaaacaga

SEQ ID NO: 478506 - RNA, 20 nt, Artificial Sequence
  Synthetic
acaggcuucuaaaaaacaga

SEQ ID NO: 478507 - RNA, 21 nt, Artificial Sequence
  Synthetic
uacaggcuucuaaaaaacaga

SEQ ID NO: 478508 - RNA, 22 nt, Artificial Sequence
  Synthetic
auacaggcuucuaaaaaacaga

SEQ ID NO: 478509 - RNA, 23 nt, Artificial Sequence
  Synthetic
aauacaggcuucuaaaaaacaga

SEQ ID NO: 478510 - RNA, 24 nt, Artificial Sequence
  Synthetic
aaauacaggcuucuaaaaaacaga

SEQ ID NO: 478511 - RNA, 18 nt, Artificial Sequence
  Synthetic
ugccauccuaaaaacaga

SEQ ID NO: 478512 - RNA, 19 nt, Artificial Sequence
  Synthetic
cugccauccuaaaaacaga

SEQ ID NO: 478513 - RNA, 20 nt, Artificial Sequence
  Synthetic
ucugccauccuaaaaacaga

SEQ ID NO: 478514 - RNA, 21 nt, Artificial Sequence
  Synthetic
cucugccauccuaaaaacaga

SEQ ID NO: 478515 - RNA, 22 nt, Artificial Sequence
  Synthetic
ucucugccauccuaaaaacaga

SEQ ID NO: 478516 - RNA, 23 nt, Artificial Sequence
  Synthetic
cucucugccauccuaaaaacaga

SEQ ID NO: 478517 - RNA, 24 nt, Artificial Sequence
  Synthetic
ucucucugccauccuaaaaacaga

SEQ ID NO: 478518 - RNA, 18 nt, Artificial Sequence
  Synthetic
caaaaagcuaaaaacaga

SEQ ID NO: 478519 - RNA, 19 nt, Artificial Sequence
  Synthetic
ucaaaaagcuaaaaacaga

SEQ ID NO: 478520 - RNA, 20 nt, Artificial Sequence
  Synthetic
aucaaaaagcuaaaaacaga

SEQ ID NO: 478521 - RNA, 21 nt, Artificial Sequence
  Synthetic
gaucaaaaagcuaaaaacaga

SEQ ID NO: 478522 - RNA, 22 nt, Artificial Sequence
  Synthetic
agaucaaaaagcuaaaaacaga

SEQ ID NO: 478523 - RNA, 23 nt, Artificial Sequence
  Synthetic
cagaucaaaaagcuaaaaacaga

SEQ ID NO: 478524 - RNA, 24 nt, Artificial Sequence
  Synthetic
acagaucaaaaagcuaaaaacaga

SEQ ID NO: 478525 - RNA, 18 nt, Artificial Sequence
  Synthetic
caaacuacagaaaacaga

SEQ ID NO: 478526 - RNA, 19 nt, Artificial Sequence
  Synthetic
ucaaacuacagaaaacaga

SEQ ID NO: 478527 - RNA, 20 nt, Artificial Sequence
  Synthetic
aucaaacuacagaaaacaga

SEQ ID NO: 478528 - RNA, 21 nt, Artificial Sequence
  Synthetic
uaucaaacuacagaaaacaga

SEQ ID NO: 478529 - RNA, 22 nt, Artificial Sequence
  Synthetic
uuaucaaacuacagaaaacaga

SEQ ID NO: 478530 - RNA, 23 nt, Artificial Sequence
  Synthetic
uuuaucaaacuacagaaaacaga

SEQ ID NO: 478531 - RNA, 24 nt, Artificial Sequence
  Synthetic
guuuaucaaacuacagaaaacaga

SEQ ID NO: 478532 - RNA, 18 nt, Artificial Sequence
  Synthetic
gggaggugagaaaacaga

SEQ ID NO: 478533 - RNA, 19 nt, Artificial Sequence
  Synthetic
ggggaggugagaaaacaga

SEQ ID NO: 478534 - RNA, 20 nt, Artificial Sequence
  Synthetic
uggggaggugagaaaacaga

SEQ ID NO: 478535 - RNA, 21 nt, Artificial Sequence
  Synthetic
cuggggaggugagaaaacaga

SEQ ID NO: 478536 - RNA, 22 nt, Artificial Sequence
  Synthetic
acuggggaggugagaaaacaga

SEQ ID NO: 478537 - RNA, 23 nt, Artificial Sequence
  Synthetic
aacuggggaggugagaaaacaga

SEQ ID NO: 478538 - RNA, 24 nt, Artificial Sequence
  Synthetic
aaacuggggaggugagaaaacaga

SEQ ID NO: 478539 - RNA, 18 nt, Artificial Sequence
  Synthetic
gagaguaucacaaacaga

SEQ ID NO: 478540 - RNA, 19 nt, Artificial Sequence
  Synthetic
agagaguaucacaaacaga

SEQ ID NO: 478541 - RNA, 20 nt, Artificial Sequence
  Synthetic
aagagaguaucacaaacaga

SEQ ID NO: 478542 - RNA, 21 nt, Artificial Sequence
  Synthetic
aaagagaguaucacaaacaga

SEQ ID NO: 478543 - RNA, 22 nt, Artificial Sequence
  Synthetic
aaaagagaguaucacaaacaga

SEQ ID NO: 478544 - RNA, 23 nt, Artificial Sequence
  Synthetic
gaaaagagaguaucacaaacaga

SEQ ID NO: 478545 - RNA, 24 nt, Artificial Sequence
  Synthetic
agaaaagagaguaucacaaacaga

SEQ ID NO: 478546 - RNA, 18 nt, Artificial Sequence
  Synthetic
agagagaagugaaacaga

SEQ ID NO: 478547 - RNA, 19 nt, Artificial Sequence
  Synthetic
aagagagaagugaaacaga

SEQ ID NO: 478548 - RNA, 20 nt, Artificial Sequence
  Synthetic
aaagagagaagugaaacaga

SEQ ID NO: 478549 - RNA, 21 nt, Artificial Sequence
  Synthetic
uaaagagagaagugaaacaga

SEQ ID NO: 478550 - RNA, 22 nt, Artificial Sequence
  Synthetic
guaaagagagaagugaaacaga

SEQ ID NO: 478551 - RNA, 23 nt, Artificial Sequence
  Synthetic
uguaaagagagaagugaaacaga

SEQ ID NO: 478552 - RNA, 24 nt, Artificial Sequence
  Synthetic
guguaaagagagaagugaaacaga

SEQ ID NO: 478553 - RNA, 18 nt, Artificial Sequence
  Synthetic
uaugcuuuuguaaacaga

SEQ ID NO: 478554 - RNA, 19 nt, Artificial Sequence
  Synthetic
guaugcuuuuguaaacaga

SEQ ID NO: 478555 - RNA, 20 nt, Artificial Sequence
  Synthetic
aguaugcuuuuguaaacaga

SEQ ID NO: 478556 - RNA, 21 nt, Artificial Sequence
  Synthetic
gaguaugcuuuuguaaacaga

SEQ ID NO: 478557 - RNA, 22 nt, Artificial Sequence
  Synthetic
agaguaugcuuuuguaaacaga

SEQ ID NO: 478558 - RNA, 23 nt, Artificial Sequence
  Synthetic
uagaguaugcuuuuguaaacaga

SEQ ID NO: 478559 - RNA, 24 nt, Artificial Sequence
  Synthetic
uuagaguaugcuuuuguaaacaga

SEQ ID NO: 478560 - RNA, 18 nt, Artificial Sequence
  Synthetic
aauggagcaaacaacaga

SEQ ID NO: 478561 - RNA, 19 nt, Artificial Sequence
  Synthetic
caauggagcaaacaacaga

SEQ ID NO: 478562 - RNA, 20 nt, Artificial Sequence
  Synthetic
gcaauggagcaaacaacaga

SEQ ID NO: 478563 - RNA, 21 nt, Artificial Sequence
  Synthetic
ggcaauggagcaaacaacaga

SEQ ID NO: 478564 - RNA, 22 nt, Artificial Sequence
  Synthetic
aggcaauggagcaaacaacaga

SEQ ID NO: 478565 - RNA, 23 nt, Artificial Sequence
  Synthetic
gaggcaauggagcaaacaacaga

SEQ ID NO: 478566 - RNA, 24 nt, Artificial Sequence
  Synthetic
agaggcaauggagcaaacaacaga

SEQ ID NO: 478567 - RNA, 18 nt, Artificial Sequence
  Synthetic
gaagagacaaccaacaga

SEQ ID NO: 478568 - RNA, 19 nt, Artificial Sequence
  Synthetic
ugaagagacaaccaacaga

SEQ ID NO: 478569 - RNA, 20 nt, Artificial Sequence
  Synthetic
gugaagagacaaccaacaga

SEQ ID NO: 478570 - RNA, 21 nt, Artificial Sequence
  Synthetic
agugaagagacaaccaacaga

SEQ ID NO: 478571 - RNA, 22 nt, Artificial Sequence
  Synthetic
aagugaagagacaaccaacaga

SEQ ID NO: 478572 - RNA, 23 nt, Artificial Sequence
  Synthetic
aaagugaagagacaaccaacaga

SEQ ID NO: 478573 - RNA, 24 nt, Artificial Sequence
  Synthetic
uaaagugaagagacaaccaacaga

SEQ ID NO: 478574 - RNA, 18 nt, Artificial Sequence
  Synthetic
uccagccuaggcaacaga

SEQ ID NO: 478575 - RNA, 19 nt, Artificial Sequence
  Synthetic
cuccagccuaggcaacaga

SEQ ID NO: 478576 - RNA, 20 nt, Artificial Sequence
  Synthetic
acuccagccuaggcaacaga

SEQ ID NO: 478577 - RNA, 21 nt, Artificial Sequence
  Synthetic
cacuccagccuaggcaacaga

SEQ ID NO: 478578 - RNA, 22 nt, Artificial Sequence
  Synthetic
gcacuccagccuaggcaacaga

SEQ ID NO: 478579 - RNA, 23 nt, Artificial Sequence
  Synthetic
ugcacuccagccuaggcaacaga

SEQ ID NO: 478580 - RNA, 24 nt, Artificial Sequence
  Synthetic
uugcacuccagccuaggcaacaga

SEQ ID NO: 478581 - RNA, 18 nt, Artificial Sequence
  Synthetic
accagcuuaggcaacaga

SEQ ID NO: 478582 - RNA, 19 nt, Artificial Sequence
  Synthetic
caccagcuuaggcaacaga

SEQ ID NO: 478583 - RNA, 20 nt, Artificial Sequence
  Synthetic
acaccagcuuaggcaacaga

SEQ ID NO: 478584 - RNA, 21 nt, Artificial Sequence
  Synthetic
cacaccagcuuaggcaacaga

SEQ ID NO: 478585 - RNA, 22 nt, Artificial Sequence
  Synthetic
gcacaccagcuuaggcaacaga

SEQ ID NO: 478586 - RNA, 23 nt, Artificial Sequence
  Synthetic
ugcacaccagcuuaggcaacaga

SEQ ID NO: 478587 - RNA, 24 nt, Artificial Sequence
  Synthetic
cugcacaccagcuuaggcaacaga

SEQ ID NO: 478588 - RNA, 18 nt, Artificial Sequence
  Synthetic
uccaacccgggcaacaga

SEQ ID NO: 478589 - RNA, 19 nt, Artificial Sequence
  Synthetic
cuccaacccgggcaacaga

SEQ ID NO: 478590 - RNA, 20 nt, Artificial Sequence
  Synthetic
acuccaacccgggcaacaga

SEQ ID NO: 478591 - RNA, 21 nt, Artificial Sequence
  Synthetic
uacuccaacccgggcaacaga

SEQ ID NO: 478592 - RNA, 22 nt, Artificial Sequence
  Synthetic
guacuccaacccgggcaacaga

SEQ ID NO: 478593 - RNA, 23 nt, Artificial Sequence
  Synthetic
uguacuccaacccgggcaacaga

SEQ ID NO: 478594 - RNA, 24 nt, Artificial Sequence
  Synthetic
uuguacuccaacccgggcaacaga

SEQ ID NO: 478595 - RNA, 21 nt, Artificial Sequence
  Synthetic
cacuccagccugggcaacaga

SEQ ID NO: 478596 - RNA, 22 nt, Artificial Sequence
  Synthetic
gcacuccagccugggcaacaga

SEQ ID NO: 478597 - RNA, 23 nt, Artificial Sequence
  Synthetic
agcacuccagccugggcaacaga

SEQ ID NO: 478598 - RNA, 24 nt, Artificial Sequence
  Synthetic
cagcacuccagccugggcaacaga

SEQ ID NO: 478599 - RNA, 23 nt, Artificial Sequence
  Synthetic
ugcacuccagccugggcaacaga

SEQ ID NO: 478600 - RNA, 24 nt, Artificial Sequence
  Synthetic
cugcacuccagccugggcaacaga

SEQ ID NO: 478601 - RNA, 18 nt, Artificial Sequence
  Synthetic
uggguagucaucaacaga

SEQ ID NO: 478602 - RNA, 19 nt, Artificial Sequence
  Synthetic
auggguagucaucaacaga

SEQ ID NO: 478603 - RNA, 20 nt, Artificial Sequence
  Synthetic
gauggguagucaucaacaga

SEQ ID NO: 478604 - RNA, 21 nt, Artificial Sequence
  Synthetic
agauggguagucaucaacaga

SEQ ID NO: 478605 - RNA, 22 nt, Artificial Sequence
  Synthetic
uagauggguagucaucaacaga

SEQ ID NO: 478606 - RNA, 23 nt, Artificial Sequence
  Synthetic
auagauggguagucaucaacaga

SEQ ID NO: 478607 - RNA, 24 nt, Artificial Sequence
  Synthetic
uauagauggguagucaucaacaga

SEQ ID NO: 478608 - RNA, 18 nt, Artificial Sequence
  Synthetic
ccagcaguggucaacaga

SEQ ID NO: 478609 - RNA, 19 nt, Artificial Sequence
  Synthetic
gccagcaguggucaacaga

SEQ ID NO: 478610 - RNA, 20 nt, Artificial Sequence
  Synthetic
agccagcaguggucaacaga

SEQ ID NO: 478611 - RNA, 21 nt, Artificial Sequence
  Synthetic
cagccagcaguggucaacaga

SEQ ID NO: 478612 - RNA, 22 nt, Artificial Sequence
  Synthetic
gcagccagcaguggucaacaga

SEQ ID NO: 478613 - RNA, 23 nt, Artificial Sequence
  Synthetic
ugcagccagcaguggucaacaga

SEQ ID NO: 478614 - RNA, 24 nt, Artificial Sequence
  Synthetic
cugcagccagcaguggucaacaga

SEQ ID NO: 478615 - RNA, 18 nt, Artificial Sequence
  Synthetic
gagucaucagagaacaga

SEQ ID NO: 478616 - RNA, 19 nt, Artificial Sequence
  Synthetic
agagucaucagagaacaga

SEQ ID NO: 478617 - RNA, 20 nt, Artificial Sequence
  Synthetic
aagagucaucagagaacaga

SEQ ID NO: 478618 - RNA, 21 nt, Artificial Sequence
  Synthetic
caagagucaucagagaacaga

SEQ ID NO: 478619 - RNA, 22 nt, Artificial Sequence
  Synthetic
ucaagagucaucagagaacaga

SEQ ID NO: 478620 - RNA, 23 nt, Artificial Sequence
  Synthetic
uucaagagucaucagagaacaga

SEQ ID NO: 478621 - RNA, 24 nt, Artificial Sequence
  Synthetic
uuucaagagucaucagagaacaga

SEQ ID NO: 478622 - RNA, 18 nt, Artificial Sequence
  Synthetic
gugacagaauagaacaga

SEQ ID NO: 478623 - RNA, 19 nt, Artificial Sequence
  Synthetic
agugacagaauagaacaga

SEQ ID NO: 478624 - RNA, 20 nt, Artificial Sequence
  Synthetic
uagugacagaauagaacaga

SEQ ID NO: 478625 - RNA, 21 nt, Artificial Sequence
  Synthetic
uuagugacagaauagaacaga

SEQ ID NO: 478626 - RNA, 22 nt, Artificial Sequence
  Synthetic
guuagugacagaauagaacaga

SEQ ID NO: 478627 - RNA, 23 nt, Artificial Sequence
  Synthetic
aguuagugacagaauagaacaga

SEQ ID NO: 478628 - RNA, 24 nt, Artificial Sequence
  Synthetic
caguuagugacagaauagaacaga

SEQ ID NO: 478629 - RNA, 18 nt, Artificial Sequence
  Synthetic
aaaaggaaaaggaacaga

SEQ ID NO: 478630 - RNA, 19 nt, Artificial Sequence
  Synthetic
gaaaaggaaaaggaacaga

SEQ ID NO: 478631 - RNA, 20 nt, Artificial Sequence
  Synthetic
ggaaaaggaaaaggaacaga

SEQ ID NO: 478632 - RNA, 21 nt, Artificial Sequence
  Synthetic
aggaaaaggaaaaggaacaga

SEQ ID NO: 478633 - RNA, 22 nt, Artificial Sequence
  Synthetic
aaggaaaaggaaaaggaacaga

SEQ ID NO: 478634 - RNA, 23 nt, Artificial Sequence
  Synthetic
aaaggaaaaggaaaaggaacaga

SEQ ID NO: 478635 - RNA, 24 nt, Artificial Sequence
  Synthetic
aaaaggaaaaggaaaaggaacaga

SEQ ID NO: 478636 - RNA, 18 nt, Artificial Sequence
  Synthetic
auagaccaauggaacaga

SEQ ID NO: 478637 - RNA, 19 nt, Artificial Sequence
  Synthetic
uauagaccaauggaacaga

SEQ ID NO: 478638 - RNA, 20 nt, Artificial Sequence
  Synthetic
auauagaccaauggaacaga

SEQ ID NO: 478639 - RNA, 21 nt, Artificial Sequence
  Synthetic
gauauagaccaauggaacaga

SEQ ID NO: 478640 - RNA, 22 nt, Artificial Sequence
  Synthetic
agauauagaccaauggaacaga

SEQ ID NO: 478641 - RNA, 23 nt, Artificial Sequence
  Synthetic
gagauauagaccaauggaacaga

SEQ ID NO: 478642 - RNA, 24 nt, Artificial Sequence
  Synthetic
agagauauagaccaauggaacaga

SEQ ID NO: 478643 - RNA, 18 nt, Artificial Sequence
  Synthetic
auauauaacuggaacaga

SEQ ID NO: 478644 - RNA, 19 nt, Artificial Sequence
  Synthetic
cauauauaacuggaacaga

SEQ ID NO: 478645 - RNA, 20 nt, Artificial Sequence
  Synthetic
gcauauauaacuggaacaga

SEQ ID NO: 478646 - RNA, 21 nt, Artificial Sequence
  Synthetic
agcauauauaacuggaacaga

SEQ ID NO: 478647 - RNA, 22 nt, Artificial Sequence
  Synthetic
uagcauauauaacuggaacaga

SEQ ID NO: 478648 - RNA, 23 nt, Artificial Sequence
  Synthetic
auagcauauauaacuggaacaga

SEQ ID NO: 478649 - RNA, 24 nt, Artificial Sequence
  Synthetic
cauagcauauauaacuggaacaga

SEQ ID NO: 478650 - RNA, 18 nt, Artificial Sequence
  Synthetic
aaauagccaaugaacaga

SEQ ID NO: 478651 - RNA, 19 nt, Artificial Sequence
  Synthetic
aaaauagccaaugaacaga

SEQ ID NO: 478652 - RNA, 20 nt, Artificial Sequence
  Synthetic
caaaauagccaaugaacaga

SEQ ID NO: 478653 - RNA, 21 nt, Artificial Sequence
  Synthetic
ucaaaauagccaaugaacaga

SEQ ID NO: 478654 - RNA, 22 nt, Artificial Sequence
  Synthetic
gucaaaauagccaaugaacaga

SEQ ID NO: 478655 - RNA, 23 nt, Artificial Sequence
  Synthetic
ugucaaaauagccaaugaacaga

SEQ ID NO: 478656 - RNA, 24 nt, Artificial Sequence
  Synthetic
uugucaaaauagccaaugaacaga

SEQ ID NO: 478657 - RNA, 18 nt, Artificial Sequence
  Synthetic
cuauaaaccaauaacaga

SEQ ID NO: 478658 - RNA, 19 nt, Artificial Sequence
  Synthetic
ccuauaaaccaauaacaga

SEQ ID NO: 478659 - RNA, 20 nt, Artificial Sequence
  Synthetic
uccuauaaaccaauaacaga

SEQ ID NO: 478660 - RNA, 21 nt, Artificial Sequence
  Synthetic
uuccuauaaaccaauaacaga

SEQ ID NO: 478661 - RNA, 22 nt, Artificial Sequence
  Synthetic
auuccuauaaaccaauaacaga

SEQ ID NO: 478662 - RNA, 23 nt, Artificial Sequence
  Synthetic
cauuccuauaaaccaauaacaga

SEQ ID NO: 478663 - RNA, 24 nt, Artificial Sequence
  Synthetic
gcauuccuauaaaccaauaacaga

SEQ ID NO: 478664 - RNA, 18 nt, Artificial Sequence
  Synthetic
gccagcacugauaacaga

SEQ ID NO: 478665 - RNA, 19 nt, Artificial Sequence
  Synthetic
ggccagcacugauaacaga

SEQ ID NO: 478666 - RNA, 20 nt, Artificial Sequence
  Synthetic
aggccagcacugauaacaga

SEQ ID NO: 478667 - RNA, 21 nt, Artificial Sequence
  Synthetic
caggccagcacugauaacaga

SEQ ID NO: 478668 - RNA, 22 nt, Artificial Sequence
  Synthetic
gcaggccagcacugauaacaga

SEQ ID NO: 478669 - RNA, 23 nt, Artificial Sequence
  Synthetic
agcaggccagcacugauaacaga

SEQ ID NO: 478670 - RNA, 24 nt, Artificial Sequence
  Synthetic
aagcaggccagcacugauaacaga

SEQ ID NO: 478671 - RNA, 18 nt, Artificial Sequence
  Synthetic
gauucaacauauaacaga

SEQ ID NO: 478672 - RNA, 19 nt, Artificial Sequence
  Synthetic
ugauucaacauauaacaga

SEQ ID NO: 478673 - RNA, 20 nt, Artificial Sequence
  Synthetic
gugauucaacauauaacaga

SEQ ID NO: 478674 - RNA, 21 nt, Artificial Sequence
  Synthetic
ugugauucaacauauaacaga

SEQ ID NO: 478675 - RNA, 22 nt, Artificial Sequence
  Synthetic
augugauucaacauauaacaga

SEQ ID NO: 478676 - RNA, 23 nt, Artificial Sequence
  Synthetic
aaugugauucaacauauaacaga

SEQ ID NO: 478677 - RNA, 24 nt, Artificial Sequence
  Synthetic
aaaugugauucaacauauaacaga

SEQ ID NO: 478678 - RNA, 18 nt, Artificial Sequence
  Synthetic
ucuagccuggguaacaga

SEQ ID NO: 478679 - RNA, 19 nt, Artificial Sequence
  Synthetic
cucuagccuggguaacaga

SEQ ID NO: 478680 - RNA, 20 nt, Artificial Sequence
  Synthetic
acucuagccuggguaacaga

SEQ ID NO: 478681 - RNA, 21 nt, Artificial Sequence
  Synthetic
cacucuagccuggguaacaga

SEQ ID NO: 478682 - RNA, 22 nt, Artificial Sequence
  Synthetic
gcacucuagccuggguaacaga

SEQ ID NO: 478683 - RNA, 23 nt, Artificial Sequence
  Synthetic
ugcacucuagccuggguaacaga

SEQ ID NO: 478684 - RNA, 24 nt, Artificial Sequence
  Synthetic
cugcacucuagccuggguaacaga

SEQ ID NO: 478685 - RNA, 18 nt, Artificial Sequence
  Synthetic
uucacaaaaguuaacaga

SEQ ID NO: 478686 - RNA, 19 nt, Artificial Sequence
  Synthetic
cuucacaaaaguuaacaga

SEQ ID NO: 478687 - RNA, 20 nt, Artificial Sequence
  Synthetic
acuucacaaaaguuaacaga

SEQ ID NO: 478688 - RNA, 21 nt, Artificial Sequence
  Synthetic
cacuucacaaaaguuaacaga

SEQ ID NO: 478689 - RNA, 22 nt, Artificial Sequence
  Synthetic
ccacuucacaaaaguuaacaga

SEQ ID NO: 478690 - RNA, 23 nt, Artificial Sequence
  Synthetic
accacuucacaaaaguuaacaga

SEQ ID NO: 478691 - RNA, 24 nt, Artificial Sequence
  Synthetic
gaccacuucacaaaaguuaacaga

SEQ ID NO: 478692 - RNA, 23 nt, Artificial Sequence
  Synthetic
gcacacacacacacacacacaga

SEQ ID NO: 478693 - RNA, 24 nt, Artificial Sequence
  Synthetic
ugcacacacacacacacacacaga

SEQ ID NO: 478694 - RNA, 18 nt, Artificial Sequence
  Synthetic
uauaaagcuacacacaga

SEQ ID NO: 478695 - RNA, 19 nt, Artificial Sequence
  Synthetic
cuauaaagcuacacacaga

SEQ ID NO: 478696 - RNA, 20 nt, Artificial Sequence
  Synthetic
ccuauaaagcuacacacaga

SEQ ID NO: 478697 - RNA, 21 nt, Artificial Sequence
  Synthetic
accuauaaagcuacacacaga

SEQ ID NO: 478698 - RNA, 22 nt, Artificial Sequence
  Synthetic
caccuauaaagcuacacacaga

SEQ ID NO: 478699 - RNA, 23 nt, Artificial Sequence
  Synthetic
ucaccuauaaagcuacacacaga

SEQ ID NO: 478700 - RNA, 24 nt, Artificial Sequence
  Synthetic
uucaccuauaaagcuacacacaga

SEQ ID NO: 478701 - RNA, 18 nt, Artificial Sequence
  Synthetic
ucauucauggcacacaga

SEQ ID NO: 478702 - RNA, 19 nt, Artificial Sequence
  Synthetic
aucauucauggcacacaga

SEQ ID NO: 478703 - RNA, 20 nt, Artificial Sequence
  Synthetic
gaucauucauggcacacaga

SEQ ID NO: 478704 - RNA, 21 nt, Artificial Sequence
  Synthetic
ugaucauucauggcacacaga

SEQ ID NO: 478705 - RNA, 22 nt, Artificial Sequence
  Synthetic
uugaucauucauggcacacaga

SEQ ID NO: 478706 - RNA, 23 nt, Artificial Sequence
  Synthetic
uuugaucauucauggcacacaga

SEQ ID NO: 478707 - RNA, 24 nt, Artificial Sequence
  Synthetic
auuugaucauucauggcacacaga

SEQ ID NO: 478708 - RNA, 18 nt, Artificial Sequence
  Synthetic
gagaaagagagacacaga

SEQ ID NO: 478709 - RNA, 19 nt, Artificial Sequence
  Synthetic
agagaaagagagacacaga

SEQ ID NO: 478710 - RNA, 20 nt, Artificial Sequence
  Synthetic
gagagaaagagagacacaga

SEQ ID NO: 478711 - RNA, 21 nt, Artificial Sequence
  Synthetic
agagagaaagagagacacaga

SEQ ID NO: 478712 - RNA, 22 nt, Artificial Sequence
  Synthetic
gagagagaaagagagacacaga

SEQ ID NO: 478713 - RNA, 23 nt, Artificial Sequence
  Synthetic
agagagagaaagagagacacaga

SEQ ID NO: 478714 - RNA, 24 nt, Artificial Sequence
  Synthetic
gagagagagaaagagagacacaga

SEQ ID NO: 478715 - RNA, 18 nt, Artificial Sequence
  Synthetic
gcgugagagagacacaga

SEQ ID NO: 478716 - RNA, 19 nt, Artificial Sequence
  Synthetic
ugcgugagagagacacaga

SEQ ID NO: 478717 - RNA, 20 nt, Artificial Sequence
  Synthetic
gugcgugagagagacacaga

SEQ ID NO: 478718 - RNA, 21 nt, Artificial Sequence
  Synthetic
ugugcgugagagagacacaga

SEQ ID NO: 478719 - RNA, 22 nt, Artificial Sequence
  Synthetic
gugugcgugagagagacacaga

SEQ ID NO: 478720 - RNA, 23 nt, Artificial Sequence
  Synthetic
ugugugcgugagagagacacaga

SEQ ID NO: 478721 - RNA, 24 nt, Artificial Sequence
  Synthetic
uugugugcgugagagagacacaga

SEQ ID NO: 478722 - RNA, 18 nt, Artificial Sequence
  Synthetic
caaaacaaaggacacaga

SEQ ID NO: 478723 - RNA, 19 nt, Artificial Sequence
  Synthetic
ucaaaacaaaggacacaga

SEQ ID NO: 478724 - RNA, 20 nt, Artificial Sequence
  Synthetic
uucaaaacaaaggacacaga

SEQ ID NO: 478725 - RNA, 21 nt, Artificial Sequence
  Synthetic
cuucaaaacaaaggacacaga

SEQ ID NO: 478726 - RNA, 22 nt, Artificial Sequence
  Synthetic
ccuucaaaacaaaggacacaga

SEQ ID NO: 478727 - RNA, 23 nt, Artificial Sequence
  Synthetic
uccuucaaaacaaaggacacaga

SEQ ID NO: 478728 - RNA, 24 nt, Artificial Sequence
  Synthetic
uuccuucaaaacaaaggacacaga

SEQ ID NO: 478729 - RNA, 18 nt, Artificial Sequence
  Synthetic
gcuauguuaggacacaga

SEQ ID NO: 478730 - RNA, 19 nt, Artificial Sequence
  Synthetic
ugcuauguuaggacacaga

SEQ ID NO: 478731 - RNA, 20 nt, Artificial Sequence
  Synthetic
uugcuauguuaggacacaga

SEQ ID NO: 478732 - RNA, 21 nt, Artificial Sequence
  Synthetic
uuugcuauguuaggacacaga

SEQ ID NO: 478733 - RNA, 22 nt, Artificial Sequence
  Synthetic
cuuugcuauguuaggacacaga

SEQ ID NO: 478734 - RNA, 23 nt, Artificial Sequence
  Synthetic
ucuuugcuauguuaggacacaga

SEQ ID NO: 478735 - RNA, 24 nt, Artificial Sequence
  Synthetic
cucuuugcuauguuaggacacaga

SEQ ID NO: 478736 - RNA, 18 nt, Artificial Sequence
  Synthetic
agaacacauggacacaga

SEQ ID NO: 478737 - RNA, 19 nt, Artificial Sequence
  Synthetic
gagaacacauggacacaga

SEQ ID NO: 478738 - RNA, 20 nt, Artificial Sequence
  Synthetic
ugagaacacauggacacaga

SEQ ID NO: 478739 - RNA, 21 nt, Artificial Sequence
  Synthetic
augagaacacauggacacaga

SEQ ID NO: 478740 - RNA, 22 nt, Artificial Sequence
  Synthetic
gaugagaacacauggacacaga

SEQ ID NO: 478741 - RNA, 23 nt, Artificial Sequence
  Synthetic
ugaugagaacacauggacacaga

SEQ ID NO: 478742 - RNA, 24 nt, Artificial Sequence
  Synthetic
augaugagaacacauggacacaga

SEQ ID NO: 478743 - RNA, 18 nt, Artificial Sequence
  Synthetic
ggaugugugauacacaga

SEQ ID NO: 478744 - RNA, 19 nt, Artificial Sequence
  Synthetic
aggaugugugauacacaga

SEQ ID NO: 478745 - RNA, 20 nt, Artificial Sequence
  Synthetic
caggaugugugauacacaga

SEQ ID NO: 478746 - RNA, 21 nt, Artificial Sequence
  Synthetic
acaggaugugugauacacaga

SEQ ID NO: 478747 - RNA, 22 nt, Artificial Sequence
  Synthetic
cacaggaugugugauacacaga

SEQ ID NO: 478748 - RNA, 23 nt, Artificial Sequence
  Synthetic
ccacaggaugugugauacacaga

SEQ ID NO: 478749 - RNA, 24 nt, Artificial Sequence
  Synthetic
gccacaggaugugugauacacaga

SEQ ID NO: 478750 - RNA, 18 nt, Artificial Sequence
  Synthetic
cugggaugccuacacaga

SEQ ID NO: 478751 - RNA, 19 nt, Artificial Sequence
  Synthetic
acugggaugccuacacaga

SEQ ID NO: 478752 - RNA, 20 nt, Artificial Sequence
  Synthetic
aacugggaugccuacacaga

SEQ ID NO: 478753 - RNA, 21 nt, Artificial Sequence
  Synthetic
gaacugggaugccuacacaga

SEQ ID NO: 478754 - RNA, 22 nt, Artificial Sequence
  Synthetic
ggaacugggaugccuacacaga

SEQ ID NO: 478755 - RNA, 23 nt, Artificial Sequence
  Synthetic
gggaacugggaugccuacacaga

SEQ ID NO: 478756 - RNA, 24 nt, Artificial Sequence
  Synthetic
ugggaacugggaugccuacacaga

SEQ ID NO: 478757 - RNA, 18 nt, Artificial Sequence
  Synthetic
uuauuuauaaaccacaga

SEQ ID NO: 478758 - RNA, 19 nt, Artificial Sequence
  Synthetic
uuuauuuauaaaccacaga

SEQ ID NO: 478759 - RNA, 20 nt, Artificial Sequence
  Synthetic
guuuauuuauaaaccacaga

SEQ ID NO: 478760 - RNA, 21 nt, Artificial Sequence
  Synthetic
uguuuauuuauaaaccacaga

SEQ ID NO: 478761 - RNA, 22 nt, Artificial Sequence
  Synthetic
auguuuauuuauaaaccacaga

SEQ ID NO: 478762 - RNA, 23 nt, Artificial Sequence
  Synthetic
cauguuuauuuauaaaccacaga

SEQ ID NO: 478763 - RNA, 24 nt, Artificial Sequence
  Synthetic
ucauguuuauuuauaaaccacaga

SEQ ID NO: 478764 - RNA, 18 nt, Artificial Sequence
  Synthetic
aaagagacaacccacaga

SEQ ID NO: 478765 - RNA, 19 nt, Artificial Sequence
  Synthetic
uaaagagacaacccacaga

SEQ ID NO: 478766 - RNA, 20 nt, Artificial Sequence
  Synthetic
auaaagagacaacccacaga

SEQ ID NO: 478767 - RNA, 21 nt, Artificial Sequence
  Synthetic
aauaaagagacaacccacaga

SEQ ID NO: 478768 - RNA, 22 nt, Artificial Sequence
  Synthetic
gaauaaagagacaacccacaga

SEQ ID NO: 478769 - RNA, 23 nt, Artificial Sequence
  Synthetic
ggaauaaagagacaacccacaga

SEQ ID NO: 478770 - RNA, 24 nt, Artificial Sequence
  Synthetic
uggaauaaagagacaacccacaga

SEQ ID NO: 478771 - RNA, 18 nt, Artificial Sequence
  Synthetic
ggcaaauacacccacaga

SEQ ID NO: 478772 - RNA, 19 nt, Artificial Sequence
  Synthetic
aggcaaauacacccacaga

SEQ ID NO: 478773 - RNA, 20 nt, Artificial Sequence
  Synthetic
uaggcaaauacacccacaga

SEQ ID NO: 478774 - RNA, 21 nt, Artificial Sequence
  Synthetic
cuaggcaaauacacccacaga

SEQ ID NO: 478775 - RNA, 22 nt, Artificial Sequence
  Synthetic
ccuaggcaaauacacccacaga

SEQ ID NO: 478776 - RNA, 23 nt, Artificial Sequence
  Synthetic
cccuaggcaaauacacccacaga

SEQ ID NO: 478777 - RNA, 24 nt, Artificial Sequence
  Synthetic
acccuaggcaaauacacccacaga

SEQ ID NO: 478778 - RNA, 18 nt, Artificial Sequence
  Synthetic
cgcccaaugccccacaga

SEQ ID NO: 478779 - RNA, 19 nt, Artificial Sequence
  Synthetic
acgcccaaugccccacaga

SEQ ID NO: 478780 - RNA, 20 nt, Artificial Sequence
  Synthetic
cacgcccaaugccccacaga

SEQ ID NO: 478781 - RNA, 21 nt, Artificial Sequence
  Synthetic
acacgcccaaugccccacaga

SEQ ID NO: 478782 - RNA, 22 nt, Artificial Sequence
  Synthetic
aacacgcccaaugccccacaga

SEQ ID NO: 478783 - RNA, 23 nt, Artificial Sequence
  Synthetic
uaacacgcccaaugccccacaga

SEQ ID NO: 478784 - RNA, 24 nt, Artificial Sequence
  Synthetic
guaacacgcccaaugccccacaga

SEQ ID NO: 478785 - RNA, 18 nt, Artificial Sequence
  Synthetic
ucccgaagccuccacaga

SEQ ID NO: 478786 - RNA, 19 nt, Artificial Sequence
  Synthetic
uucccgaagccuccacaga

SEQ ID NO: 478787 - RNA, 20 nt, Artificial Sequence
  Synthetic
cuucccgaagccuccacaga

SEQ ID NO: 478788 - RNA, 21 nt, Artificial Sequence
  Synthetic
gcuucccgaagccuccacaga

SEQ ID NO: 478789 - RNA, 22 nt, Artificial Sequence
  Synthetic
agcuucccgaagccuccacaga

SEQ ID NO: 478790 - RNA, 23 nt, Artificial Sequence
  Synthetic
aagcuucccgaagccuccacaga

SEQ ID NO: 478791 - RNA, 24 nt, Artificial Sequence
  Synthetic
gaagcuucccgaagccuccacaga

SEQ ID NO: 478792 - RNA, 18 nt, Artificial Sequence
  Synthetic
guaaaguaaguccacaga

SEQ ID NO: 478793 - RNA, 19 nt, Artificial Sequence
  Synthetic
aguaaaguaaguccacaga

SEQ ID NO: 478794 - RNA, 20 nt, Artificial Sequence
  Synthetic
uaguaaaguaaguccacaga

SEQ ID NO: 478795 - RNA, 21 nt, Artificial Sequence
  Synthetic
guaguaaaguaaguccacaga

SEQ ID NO: 478796 - RNA, 22 nt, Artificial Sequence
  Synthetic
gguaguaaaguaaguccacaga

SEQ ID NO: 478797 - RNA, 23 nt, Artificial Sequence
  Synthetic
agguaguaaaguaaguccacaga

SEQ ID NO: 478798 - RNA, 24 nt, Artificial Sequence
  Synthetic
gagguaguaaaguaaguccacaga

SEQ ID NO: 478799 - RNA, 18 nt, Artificial Sequence
  Synthetic
cauuccggggggcacaga

SEQ ID NO: 478800 - RNA, 19 nt, Artificial Sequence
  Synthetic
ccauuccggggggcacaga

SEQ ID NO: 478801 - RNA, 20 nt, Artificial Sequence
  Synthetic
accauuccggggggcacaga

SEQ ID NO: 478802 - RNA, 21 nt, Artificial Sequence
  Synthetic
aaccauuccggggggcacaga

SEQ ID NO: 478803 - RNA, 22 nt, Artificial Sequence
  Synthetic
aaaccauuccggggggcacaga

SEQ ID NO: 478804 - RNA, 23 nt, Artificial Sequence
  Synthetic
aaaaccauuccggggggcacaga

SEQ ID NO: 478805 - RNA, 24 nt, Artificial Sequence
  Synthetic
gaaaaccauuccggggggcacaga

SEQ ID NO: 478806 - RNA, 18 nt, Artificial Sequence
  Synthetic
uacaauauauugcacaga

SEQ ID NO: 478807 - RNA, 19 nt, Artificial Sequence
  Synthetic
auacaauauauugcacaga

SEQ ID NO: 478808 - RNA, 20 nt, Artificial Sequence
  Synthetic
uauacaauauauugcacaga

SEQ ID NO: 478809 - RNA, 21 nt, Artificial Sequence
  Synthetic
auauacaauauauugcacaga

SEQ ID NO: 478810 - RNA, 22 nt, Artificial Sequence
  Synthetic
aauauacaauauauugcacaga

SEQ ID NO: 478811 - RNA, 23 nt, Artificial Sequence
  Synthetic
caauauacaauauauugcacaga

SEQ ID NO: 478812 - RNA, 24 nt, Artificial Sequence
  Synthetic
gcaauauacaauauauugcacaga

SEQ ID NO: 478813 - RNA, 18 nt, Artificial Sequence
  Synthetic
uuaaaaauugaucacaga

SEQ ID NO: 478814 - RNA, 19 nt, Artificial Sequence
  Synthetic
auuaaaaauugaucacaga

SEQ ID NO: 478815 - RNA, 20 nt, Artificial Sequence
  Synthetic
uauuaaaaauugaucacaga

SEQ ID NO: 478816 - RNA, 21 nt, Artificial Sequence
  Synthetic
auauuaaaaauugaucacaga

SEQ ID NO: 478817 - RNA, 22 nt, Artificial Sequence
  Synthetic
aauauuaaaaauugaucacaga

SEQ ID NO: 478818 - RNA, 23 nt, Artificial Sequence
  Synthetic
gaauauuaaaaauugaucacaga

SEQ ID NO: 478819 - RNA, 24 nt, Artificial Sequence
  Synthetic
agaauauuaaaaauugaucacaga

SEQ ID NO: 478820 - RNA, 18 nt, Artificial Sequence
  Synthetic
gaagagucaacucacaga

SEQ ID NO: 478821 - RNA, 19 nt, Artificial Sequence
  Synthetic
ugaagagucaacucacaga

SEQ ID NO: 478822 - RNA, 20 nt, Artificial Sequence
  Synthetic
augaagagucaacucacaga

SEQ ID NO: 478823 - RNA, 21 nt, Artificial Sequence
  Synthetic
uaugaagagucaacucacaga

SEQ ID NO: 478824 - RNA, 22 nt, Artificial Sequence
  Synthetic
auaugaagagucaacucacaga

SEQ ID NO: 478825 - RNA, 23 nt, Artificial Sequence
  Synthetic
uauaugaagagucaacucacaga

SEQ ID NO: 478826 - RNA, 24 nt, Artificial Sequence
  Synthetic
auauaugaagagucaacucacaga

SEQ ID NO: 478827 - RNA, 18 nt, Artificial Sequence
  Synthetic
aaaacugaggcucacaga

SEQ ID NO: 478828 - RNA, 19 nt, Artificial Sequence
  Synthetic
caaaacugaggcucacaga

SEQ ID NO: 478829 - RNA, 20 nt, Artificial Sequence
  Synthetic
acaaaacugaggcucacaga

SEQ ID NO: 478830 - RNA, 21 nt, Artificial Sequence
  Synthetic
gacaaaacugaggcucacaga

SEQ ID NO: 478831 - RNA, 22 nt, Artificial Sequence
  Synthetic
agacaaaacugaggcucacaga

SEQ ID NO: 478832 - RNA, 23 nt, Artificial Sequence
  Synthetic
cagacaaaacugaggcucacaga

SEQ ID NO: 478833 - RNA, 24 nt, Artificial Sequence
  Synthetic
gcagacaaaacugaggcucacaga

SEQ ID NO: 478834 - RNA, 18 nt, Artificial Sequence
  Synthetic
cucuccugaagucacaga

SEQ ID NO: 478835 - RNA, 19 nt, Artificial Sequence
  Synthetic
gcucuccugaagucacaga

SEQ ID NO: 478836 - RNA, 20 nt, Artificial Sequence
  Synthetic
ugcucuccugaagucacaga

SEQ ID NO: 478837 - RNA, 21 nt, Artificial Sequence
  Synthetic
augcucuccugaagucacaga

SEQ ID NO: 478838 - RNA, 22 nt, Artificial Sequence
  Synthetic
caugcucuccugaagucacaga

SEQ ID NO: 478839 - RNA, 23 nt, Artificial Sequence
  Synthetic
ucaugcucuccugaagucacaga

SEQ ID NO: 478840 - RNA, 24 nt, Artificial Sequence
  Synthetic
cucaugcucuccugaagucacaga

SEQ ID NO: 478841 - RNA, 18 nt, Artificial Sequence
  Synthetic
aaauaagccagucacaga

SEQ ID NO: 478842 - RNA, 19 nt, Artificial Sequence
  Synthetic
gaaauaagccagucacaga

SEQ ID NO: 478843 - RNA, 20 nt, Artificial Sequence
  Synthetic
ugaaauaagccagucacaga

SEQ ID NO: 478844 - RNA, 21 nt, Artificial Sequence
  Synthetic
augaaauaagccagucacaga

SEQ ID NO: 478845 - RNA, 22 nt, Artificial Sequence
  Synthetic
aaugaaauaagccagucacaga

SEQ ID NO: 478846 - RNA, 23 nt, Artificial Sequence
  Synthetic
aaaugaaauaagccagucacaga

SEQ ID NO: 478847 - RNA, 24 nt, Artificial Sequence
  Synthetic
uaaaugaaauaagccagucacaga

SEQ ID NO: 478848 - RNA, 18 nt, Artificial Sequence
  Synthetic
uuuuuagugagucacaga

SEQ ID NO: 478849 - RNA, 19 nt, Artificial Sequence
  Synthetic
uuuuuuagugagucacaga

SEQ ID NO: 478850 - RNA, 20 nt, Artificial Sequence
  Synthetic
uuuuuuuagugagucacaga

SEQ ID NO: 478851 - RNA, 21 nt, Artificial Sequence
  Synthetic
uuuuuuuuagugagucacaga

SEQ ID NO: 478852 - RNA, 22 nt, Artificial Sequence
  Synthetic
uuuuuuuuuagugagucacaga

SEQ ID NO: 478853 - RNA, 23 nt, Artificial Sequence
  Synthetic
uuuuuuuuuuagugagucacaga

SEQ ID NO: 478854 - RNA, 24 nt, Artificial Sequence
  Synthetic
auuuuuuuuuuagugagucacaga

SEQ ID NO: 478855 - RNA, 18 nt, Artificial Sequence
  Synthetic
acugaaaucauucacaga

SEQ ID NO: 478856 - RNA, 19 nt, Artificial Sequence
  Synthetic
gacugaaaucauucacaga

SEQ ID NO: 478857 - RNA, 20 nt, Artificial Sequence
  Synthetic
ugacugaaaucauucacaga

SEQ ID NO: 478858 - RNA, 21 nt, Artificial Sequence
  Synthetic
gugacugaaaucauucacaga

SEQ ID NO: 478859 - RNA, 22 nt, Artificial Sequence
  Synthetic
ggugacugaaaucauucacaga

SEQ ID NO: 478860 - RNA, 23 nt, Artificial Sequence
  Synthetic
aggugacugaaaucauucacaga

SEQ ID NO: 478861 - RNA, 24 nt, Artificial Sequence
  Synthetic
aaggugacugaaaucauucacaga

SEQ ID NO: 478862 - RNA, 18 nt, Artificial Sequence
  Synthetic
cguuuggaaaaagacaga

SEQ ID NO: 478863 - RNA, 19 nt, Artificial Sequence
  Synthetic
acguuuggaaaaagacaga

SEQ ID NO: 478864 - RNA, 20 nt, Artificial Sequence
  Synthetic
cacguuuggaaaaagacaga

SEQ ID NO: 478865 - RNA, 21 nt, Artificial Sequence
  Synthetic
gcacguuuggaaaaagacaga

SEQ ID NO: 478866 - RNA, 22 nt, Artificial Sequence
  Synthetic
agcacguuuggaaaaagacaga

SEQ ID NO: 478867 - RNA, 23 nt, Artificial Sequence
  Synthetic
aagcacguuuggaaaaagacaga

SEQ ID NO: 478868 - RNA, 24 nt, Artificial Sequence
  Synthetic
aaagcacguuuggaaaaagacaga

SEQ ID NO: 478869 - RNA, 18 nt, Artificial Sequence
  Synthetic
acaagacagacagacaga

SEQ ID NO: 478870 - RNA, 19 nt, Artificial Sequence
  Synthetic
aacaagacagacagacaga

SEQ ID NO: 478871 - RNA, 20 nt, Artificial Sequence
  Synthetic
aaacaagacagacagacaga

SEQ ID NO: 478872 - RNA, 21 nt, Artificial Sequence
  Synthetic
aaaacaagacagacagacaga

SEQ ID NO: 478873 - RNA, 22 nt, Artificial Sequence
  Synthetic
aaaaacaagacagacagacaga

SEQ ID NO: 478874 - RNA, 23 nt, Artificial Sequence
  Synthetic
aaaaaacaagacagacagacaga

SEQ ID NO: 478875 - RNA, 24 nt, Artificial Sequence
  Synthetic
aaaaaaacaagacagacagacaga

SEQ ID NO: 478876 - RNA, 18 nt, Artificial Sequence
  Synthetic
gacagacagacagacaga

SEQ ID NO: 478877 - RNA, 19 nt, Artificial Sequence
  Synthetic
agacagacagacagacaga

SEQ ID NO: 478878 - RNA, 20 nt, Artificial Sequence
  Synthetic
aagacagacagacagacaga

SEQ ID NO: 478879 - RNA, 21 nt, Artificial Sequence
  Synthetic
caagacagacagacagacaga

SEQ ID NO: 478880 - RNA, 22 nt, Artificial Sequence
  Synthetic
acaagacagacagacagacaga

SEQ ID NO: 478881 - RNA, 23 nt, Artificial Sequence
  Synthetic
aacaagacagacagacagacaga

SEQ ID NO: 478882 - RNA, 24 nt, Artificial Sequence
  Synthetic
aaacaagacagacagacagacaga

SEQ ID NO: 478883 - RNA, 18 nt, Artificial Sequence
  Synthetic
agaccauggacagacaga

SEQ ID NO: 478884 - RNA, 19 nt, Artificial Sequence
  Synthetic
uagaccauggacagacaga

SEQ ID NO: 478885 - RNA, 20 nt, Artificial Sequence
  Synthetic
auagaccauggacagacaga

SEQ ID NO: 478886 - RNA, 21 nt, Artificial Sequence
  Synthetic
aauagaccauggacagacaga

SEQ ID NO: 478887 - RNA, 22 nt, Artificial Sequence
  Synthetic
caauagaccauggacagacaga

SEQ ID NO: 478888 - RNA, 23 nt, Artificial Sequence
  Synthetic
ccaauagaccauggacagacaga

SEQ ID NO: 478889 - RNA, 24 nt, Artificial Sequence
  Synthetic
accaauagaccauggacagacaga

SEQ ID NO: 478890 - RNA, 18 nt, Artificial Sequence
  Synthetic
uagggggauccagacaga

SEQ ID NO: 478891 - RNA, 19 nt, Artificial Sequence
  Synthetic
guagggggauccagacaga

SEQ ID NO: 478892 - RNA, 20 nt, Artificial Sequence
  Synthetic
cguagggggauccagacaga

SEQ ID NO: 478893 - RNA, 21 nt, Artificial Sequence
  Synthetic
acguagggggauccagacaga

SEQ ID NO: 478894 - RNA, 22 nt, Artificial Sequence
  Synthetic
aacguagggggauccagacaga

SEQ ID NO: 478895 - RNA, 23 nt, Artificial Sequence
  Synthetic
caacguagggggauccagacaga

SEQ ID NO: 478896 - RNA, 24 nt, Artificial Sequence
  Synthetic
acaacguagggggauccagacaga

SEQ ID NO: 478897 - RNA, 18 nt, Artificial Sequence
  Synthetic
aagggcauuucagacaga

SEQ ID NO: 478898 - RNA, 19 nt, Artificial Sequence
  Synthetic
aaagggcauuucagacaga

SEQ ID NO: 478899 - RNA, 20 nt, Artificial Sequence
  Synthetic
aaaagggcauuucagacaga

SEQ ID NO: 478900 - RNA, 21 nt, Artificial Sequence
  Synthetic
aaaaagggcauuucagacaga

SEQ ID NO: 478901 - RNA, 22 nt, Artificial Sequence
  Synthetic
gaaaaagggcauuucagacaga

SEQ ID NO: 478902 - RNA, 23 nt, Artificial Sequence
  Synthetic
ggaaaaagggcauuucagacaga

SEQ ID NO: 478903 - RNA, 24 nt, Artificial Sequence
  Synthetic
uggaaaaagggcauuucagacaga

SEQ ID NO: 478904 - RNA, 18 nt, Artificial Sequence
  Synthetic
uguguaaagagagacaga

SEQ ID NO: 478905 - RNA, 19 nt, Artificial Sequence
  Synthetic
guguguaaagagagacaga

SEQ ID NO: 478906 - RNA, 20 nt, Artificial Sequence
  Synthetic
uguguguaaagagagacaga

SEQ ID NO: 478907 - RNA, 21 nt, Artificial Sequence
  Synthetic
guguguguaaagagagacaga

SEQ ID NO: 478908 - RNA, 22 nt, Artificial Sequence
  Synthetic
uguguguguaaagagagacaga

SEQ ID NO: 478909 - RNA, 23 nt, Artificial Sequence
  Synthetic
guguguguguaaagagagacaga

SEQ ID NO: 478910 - RNA, 24 nt, Artificial Sequence
  Synthetic
uguguguguguaaagagagacaga

SEQ ID NO: 478911 - RNA, 18 nt, Artificial Sequence
  Synthetic
gaauuuauuagagacaga

SEQ ID NO: 478912 - RNA, 19 nt, Artificial Sequence
  Synthetic
ugaauuuauuagagacaga

SEQ ID NO: 478913 - RNA, 20 nt, Artificial Sequence
  Synthetic
augaauuuauuagagacaga

SEQ ID NO: 478914 - RNA, 21 nt, Artificial Sequence
  Synthetic
aaugaauuuauuagagacaga

SEQ ID NO: 478915 - RNA, 22 nt, Artificial Sequence
  Synthetic
caaugaauuuauuagagacaga

SEQ ID NO: 478916 - RNA, 23 nt, Artificial Sequence
  Synthetic
ccaaugaauuuauuagagacaga

SEQ ID NO: 478917 - RNA, 24 nt, Artificial Sequence
  Synthetic
gccaaugaauuuauuagagacaga

SEQ ID NO: 478918 - RNA, 18 nt, Artificial Sequence
  Synthetic
ccaaaagagugagacaga

SEQ ID NO: 478919 - RNA, 19 nt, Artificial Sequence
  Synthetic
accaaaagagugagacaga

SEQ ID NO: 478920 - RNA, 20 nt, Artificial Sequence
  Synthetic
aaccaaaagagugagacaga

SEQ ID NO: 478921 - RNA, 21 nt, Artificial Sequence
  Synthetic
aaaccaaaagagugagacaga

SEQ ID NO: 478922 - RNA, 22 nt, Artificial Sequence
  Synthetic
aaaaccaaaagagugagacaga

SEQ ID NO: 478923 - RNA, 23 nt, Artificial Sequence
  Synthetic
aaaaaccaaaagagugagacaga

SEQ ID NO: 478924 - RNA, 24 nt, Artificial Sequence
  Synthetic
gaaaaaccaaaagagugagacaga

SEQ ID NO: 478925 - RNA, 18 nt, Artificial Sequence
  Synthetic
gcacaaacaagcgacaga

SEQ ID NO: 478926 - RNA, 19 nt, Artificial Sequence
  Synthetic
ugcacaaacaagcgacaga

SEQ ID NO: 478927 - RNA, 20 nt, Artificial Sequence
  Synthetic
cugcacaaacaagcgacaga

SEQ ID NO: 478928 - RNA, 21 nt, Artificial Sequence
  Synthetic
gcugcacaaacaagcgacaga

SEQ ID NO: 478929 - RNA, 22 nt, Artificial Sequence
  Synthetic
agcugcacaaacaagcgacaga

SEQ ID NO: 478930 - RNA, 23 nt, Artificial Sequence
  Synthetic
uagcugcacaaacaagcgacaga

SEQ ID NO: 478931 - RNA, 24 nt, Artificial Sequence
  Synthetic
guagcugcacaaacaagcgacaga

SEQ ID NO: 478932 - RNA, 18 nt, Artificial Sequence
  Synthetic
uccugccugggcgacaga

SEQ ID NO: 478933 - RNA, 19 nt, Artificial Sequence
  Synthetic
cuccugccugggcgacaga

SEQ ID NO: 478934 - RNA, 20 nt, Artificial Sequence
  Synthetic
acuccugccugggcgacaga

SEQ ID NO: 478935 - RNA, 21 nt, Artificial Sequence
  Synthetic
cacuccugccugggcgacaga

SEQ ID NO: 478936 - RNA, 22 nt, Artificial Sequence
  Synthetic
gcacuccugccugggcgacaga

SEQ ID NO: 478937 - RNA, 23 nt, Artificial Sequence
  Synthetic
ugcacuccugccugggcgacaga

SEQ ID NO: 478938 - RNA, 24 nt, Artificial Sequence
  Synthetic
cugcacuccugccugggcgacaga

SEQ ID NO: 478939 - RNA, 21 nt, Artificial Sequence
  Synthetic
gcacuccagccuggcgacaga

SEQ ID NO: 478940 - RNA, 22 nt, Artificial Sequence
  Synthetic
ugcacuccagccuggcgacaga

SEQ ID NO: 478941 - RNA, 23 nt, Artificial Sequence
  Synthetic
cugcacuccagccuggcgacaga

SEQ ID NO: 478942 - RNA, 24 nt, Artificial Sequence
  Synthetic
acugcacuccagccuggcgacaga

SEQ ID NO: 478943 - RNA, 18 nt, Artificial Sequence
  Synthetic
agguggaugaaggacaga

SEQ ID NO: 478944 - RNA, 19 nt, Artificial Sequence
  Synthetic
cagguggaugaaggacaga

SEQ ID NO: 478945 - RNA, 20 nt, Artificial Sequence
  Synthetic
ucagguggaugaaggacaga

SEQ ID NO: 478946 - RNA, 21 nt, Artificial Sequence
  Synthetic
aucagguggaugaaggacaga

SEQ ID NO: 478947 - RNA, 22 nt, Artificial Sequence
  Synthetic
gaucagguggaugaaggacaga

SEQ ID NO: 478948 - RNA, 23 nt, Artificial Sequence
  Synthetic
agaucagguggaugaaggacaga

SEQ ID NO: 478949 - RNA, 24 nt, Artificial Sequence
  Synthetic
aagaucagguggaugaaggacaga

SEQ ID NO: 478950 - RNA, 18 nt, Artificial Sequence
  Synthetic
caauagaccauggacaga

SEQ ID NO: 478951 - RNA, 19 nt, Artificial Sequence
  Synthetic
ccaauagaccauggacaga

SEQ ID NO: 478952 - RNA, 20 nt, Artificial Sequence
  Synthetic
accaauagaccauggacaga

SEQ ID NO: 478953 - RNA, 21 nt, Artificial Sequence
  Synthetic
gaccaauagaccauggacaga

SEQ ID NO: 478954 - RNA, 22 nt, Artificial Sequence
  Synthetic
ugaccaauagaccauggacaga

SEQ ID NO: 478955 - RNA, 23 nt, Artificial Sequence
  Synthetic
uugaccaauagaccauggacaga

SEQ ID NO: 478956 - RNA, 24 nt, Artificial Sequence
  Synthetic
uuugaccaauagaccauggacaga

SEQ ID NO: 478957 - RNA, 18 nt, Artificial Sequence
  Synthetic
uauauuucuaaugacaga

SEQ ID NO: 478958 - RNA, 19 nt, Artificial Sequence
  Synthetic
auauauuucuaaugacaga

SEQ ID NO: 478959 - RNA, 20 nt, Artificial Sequence
  Synthetic
aauauauuucuaaugacaga

SEQ ID NO: 478960 - RNA, 21 nt, Artificial Sequence
  Synthetic
caauauauuucuaaugacaga

SEQ ID NO: 478961 - RNA, 22 nt, Artificial Sequence
  Synthetic
acaauauauuucuaaugacaga

SEQ ID NO: 478962 - RNA, 23 nt, Artificial Sequence
  Synthetic
cacaauauauuucuaaugacaga

SEQ ID NO: 478963 - RNA, 24 nt, Artificial Sequence
  Synthetic
gcacaauauauuucuaaugacaga

SEQ ID NO: 478964 - RNA, 18 nt, Artificial Sequence
  Synthetic
aagacucaggaugacaga

SEQ ID NO: 478965 - RNA, 19 nt, Artificial Sequence
  Synthetic
uaagacucaggaugacaga

SEQ ID NO: 478966 - RNA, 20 nt, Artificial Sequence
  Synthetic
cuaagacucaggaugacaga

SEQ ID NO: 478967 - RNA, 21 nt, Artificial Sequence
  Synthetic
gcuaagacucaggaugacaga

SEQ ID NO: 478968 - RNA, 22 nt, Artificial Sequence
  Synthetic
ugcuaagacucaggaugacaga

SEQ ID NO: 478969 - RNA, 23 nt, Artificial Sequence
  Synthetic
augcuaagacucaggaugacaga

SEQ ID NO: 478970 - RNA, 24 nt, Artificial Sequence
  Synthetic
aaugcuaagacucaggaugacaga

SEQ ID NO: 478971 - RNA, 18 nt, Artificial Sequence
  Synthetic
cuucaccuggaugacaga

SEQ ID NO: 478972 - RNA, 19 nt, Artificial Sequence
  Synthetic
acuucaccuggaugacaga

SEQ ID NO: 478973 - RNA, 20 nt, Artificial Sequence
  Synthetic
cacuucaccuggaugacaga

SEQ ID NO: 478974 - RNA, 21 nt, Artificial Sequence
  Synthetic
gcacuucaccuggaugacaga

SEQ ID NO: 478975 - RNA, 22 nt, Artificial Sequence
  Synthetic
ggcacuucaccuggaugacaga

SEQ ID NO: 478976 - RNA, 23 nt, Artificial Sequence
  Synthetic
gggcacuucaccuggaugacaga

SEQ ID NO: 478977 - RNA, 24 nt, Artificial Sequence
  Synthetic
agggcacuucaccuggaugacaga

SEQ ID NO: 478978 - RNA, 18 nt, Artificial Sequence
  Synthetic
ccagccuggggugacaga

SEQ ID NO: 478979 - RNA, 19 nt, Artificial Sequence
  Synthetic
uccagccuggggugacaga

SEQ ID NO: 478980 - RNA, 20 nt, Artificial Sequence
  Synthetic
cuccagccuggggugacaga

SEQ ID NO: 478981 - RNA, 21 nt, Artificial Sequence
  Synthetic
acuccagccuggggugacaga

SEQ ID NO: 478982 - RNA, 22 nt, Artificial Sequence
  Synthetic
uacuccagccuggggugacaga

SEQ ID NO: 478983 - RNA, 23 nt, Artificial Sequence
  Synthetic
guacuccagccuggggugacaga

SEQ ID NO: 478984 - RNA, 24 nt, Artificial Sequence
  Synthetic
uguacuccagccuggggugacaga

SEQ ID NO: 478985 - RNA, 18 nt, Artificial Sequence
  Synthetic
uucagccugggugacaga

SEQ ID NO: 478986 - RNA, 19 nt, Artificial Sequence
  Synthetic
cuucagccugggugacaga

SEQ ID NO: 478987 - RNA, 20 nt, Artificial Sequence
  Synthetic
acuucagccugggugacaga

SEQ ID NO: 478988 - RNA, 21 nt, Artificial Sequence
  Synthetic
cacuucagccugggugacaga

SEQ ID NO: 478989 - RNA, 22 nt, Artificial Sequence
  Synthetic
gcacuucagccugggugacaga

SEQ ID NO: 478990 - RNA, 23 nt, Artificial Sequence
  Synthetic
ugcacuucagccugggugacaga

SEQ ID NO: 478991 - RNA, 24 nt, Artificial Sequence
  Synthetic
cugcacuucagccugggugacaga

SEQ ID NO: 478992 - RNA, 18 nt, Artificial Sequence
  Synthetic
ucuagccugggugacaga

SEQ ID NO: 478993 - RNA, 19 nt, Artificial Sequence
  Synthetic
cucuagccugggugacaga

SEQ ID NO: 478994 - RNA, 20 nt, Artificial Sequence
  Synthetic
acucuagccugggugacaga

SEQ ID NO: 478995 - RNA, 21 nt, Artificial Sequence
  Synthetic
cacucuagccugggugacaga

SEQ ID NO: 478996 - RNA, 22 nt, Artificial Sequence
  Synthetic
acacucuagccugggugacaga

SEQ ID NO: 478997 - RNA, 23 nt, Artificial Sequence
  Synthetic
uacacucuagccugggugacaga

SEQ ID NO: 478998 - RNA, 24 nt, Artificial Sequence
  Synthetic
cuacacucuagccugggugacaga

SEQ ID NO: 478999 - RNA, 18 nt, Artificial Sequence
  Synthetic
ugcagcuugggugacaga

SEQ ID NO: 479000 - RNA, 19 nt, Artificial Sequence
  Synthetic
cugcagcuugggugacaga

SEQ ID NO: 479001 - RNA, 20 nt, Artificial Sequence
  Synthetic
acugcagcuugggugacaga

SEQ ID NO: 479002 - RNA, 21 nt, Artificial Sequence
  Synthetic
cacugcagcuugggugacaga

SEQ ID NO: 479003 - RNA, 22 nt, Artificial Sequence
  Synthetic
gcacugcagcuugggugacaga

SEQ ID NO: 479004 - RNA, 23 nt, Artificial Sequence
  Synthetic
ugcacugcagcuugggugacaga

SEQ ID NO: 479005 - RNA, 24 nt, Artificial Sequence
  Synthetic
cugcacugcagcuugggugacaga

SEQ ID NO: 479006 - RNA, 18 nt, Artificial Sequence
  Synthetic
cuccagccuggugacaga

SEQ ID NO: 479007 - RNA, 19 nt, Artificial Sequence
  Synthetic
acuccagccuggugacaga

SEQ ID NO: 479008 - RNA, 20 nt, Artificial Sequence
  Synthetic
cacuccagccuggugacaga

SEQ ID NO: 479009 - RNA, 21 nt, Artificial Sequence
  Synthetic
gcacuccagccuggugacaga

SEQ ID NO: 479010 - RNA, 22 nt, Artificial Sequence
  Synthetic
ugcacuccagccuggugacaga

SEQ ID NO: 479011 - RNA, 23 nt, Artificial Sequence
  Synthetic
cugcacuccagccuggugacaga

SEQ ID NO: 479012 - RNA, 24 nt, Artificial Sequence
  Synthetic
acugcacuccagccuggugacaga

SEQ ID NO: 479013 - RNA, 18 nt, Artificial Sequence
  Synthetic
acaaaguaucuugacaga

SEQ ID NO: 479014 - RNA, 19 nt, Artificial Sequence
  Synthetic
uacaaaguaucuugacaga

SEQ ID NO: 479015 - RNA, 20 nt, Artificial Sequence
  Synthetic
auacaaaguaucuugacaga

SEQ ID NO: 479016 - RNA, 21 nt, Artificial Sequence
  Synthetic
uauacaaaguaucuugacaga

SEQ ID NO: 479017 - RNA, 22 nt, Artificial Sequence
  Synthetic
uuauacaaaguaucuugacaga

SEQ ID NO: 479018 - RNA, 23 nt, Artificial Sequence
  Synthetic
auuauacaaaguaucuugacaga

SEQ ID NO: 479019 - RNA, 24 nt, Artificial Sequence
  Synthetic
uauuauacaaaguaucuugacaga

SEQ ID NO: 479020 - RNA, 18 nt, Artificial Sequence
  Synthetic
cucacauacaaauacaga

SEQ ID NO: 479021 - RNA, 19 nt, Artificial Sequence
  Synthetic
acucacauacaaauacaga

SEQ ID NO: 479022 - RNA, 20 nt, Artificial Sequence
  Synthetic
uacucacauacaaauacaga

SEQ ID NO: 479023 - RNA, 21 nt, Artificial Sequence
  Synthetic
auacucacauacaaauacaga

SEQ ID NO: 479024 - RNA, 22 nt, Artificial Sequence
  Synthetic
gauacucacauacaaauacaga

SEQ ID NO: 479025 - RNA, 23 nt, Artificial Sequence
  Synthetic
ugauacucacauacaaauacaga

SEQ ID NO: 479026 - RNA, 24 nt, Artificial Sequence
  Synthetic
gugauacucacauacaaauacaga

SEQ ID NO: 479027 - RNA, 18 nt, Artificial Sequence
  Synthetic
auauaugagagauacaga

SEQ ID NO: 479028 - RNA, 19 nt, Artificial Sequence
  Synthetic
uauauaugagagauacaga

SEQ ID NO: 479029 - RNA, 20 nt, Artificial Sequence
  Synthetic
cuauauaugagagauacaga

SEQ ID NO: 479030 - RNA, 21 nt, Artificial Sequence
  Synthetic
ccuauauaugagagauacaga

SEQ ID NO: 479031 - RNA, 22 nt, Artificial Sequence
  Synthetic
cccuauauaugagagauacaga

SEQ ID NO: 479032 - RNA, 23 nt, Artificial Sequence
  Synthetic
gcccuauauaugagagauacaga

SEQ ID NO: 479033 - RNA, 24 nt, Artificial Sequence
  Synthetic
ugcccuauauaugagagauacaga

SEQ ID NO: 479034 - RNA, 18 nt, Artificial Sequence
  Synthetic
uucugagaaugauacaga

SEQ ID NO: 479035 - RNA, 19 nt, Artificial Sequence
  Synthetic
uuucugagaaugauacaga

SEQ ID NO: 479036 - RNA, 20 nt, Artificial Sequence
  Synthetic
cuuucugagaaugauacaga

SEQ ID NO: 479037 - RNA, 21 nt, Artificial Sequence
  Synthetic
ucuuucugagaaugauacaga

SEQ ID NO: 479038 - RNA, 22 nt, Artificial Sequence
  Synthetic
gucuuucugagaaugauacaga

SEQ ID NO: 479039 - RNA, 23 nt, Artificial Sequence
  Synthetic
agucuuucugagaaugauacaga

SEQ ID NO: 479040 - RNA, 24 nt, Artificial Sequence
  Synthetic
aagucuuucugagaaugauacaga

SEQ ID NO: 479041 - RNA, 18 nt, Artificial Sequence
  Synthetic
uguuaauauauauacaga

SEQ ID NO: 479042 - RNA, 19 nt, Artificial Sequence
  Synthetic
auguuaauauauauacaga

SEQ ID NO: 479043 - RNA, 20 nt, Artificial Sequence
  Synthetic
aauguuaauauauauacaga

SEQ ID NO: 479044 - RNA, 21 nt, Artificial Sequence
  Synthetic
caauguuaauauauauacaga

SEQ ID NO: 479045 - RNA, 22 nt, Artificial Sequence
  Synthetic
ccaauguuaauauauauacaga

SEQ ID NO: 479046 - RNA, 23 nt, Artificial Sequence
  Synthetic
uccaauguuaauauauauacaga

SEQ ID NO: 479047 - RNA, 24 nt, Artificial Sequence
  Synthetic
uuccaauguuaauauauauacaga

SEQ ID NO: 479048 - RNA, 18 nt, Artificial Sequence
  Synthetic
gaacaggcaaacuacaga

SEQ ID NO: 479049 - RNA, 19 nt, Artificial Sequence
  Synthetic
ugaacaggcaaacuacaga

SEQ ID NO: 479050 - RNA, 20 nt, Artificial Sequence
  Synthetic
gugaacaggcaaacuacaga

SEQ ID NO: 479051 - RNA, 21 nt, Artificial Sequence
  Synthetic
agugaacaggcaaacuacaga

SEQ ID NO: 479052 - RNA, 22 nt, Artificial Sequence
  Synthetic
gagugaacaggcaaacuacaga

SEQ ID NO: 479053 - RNA, 23 nt, Artificial Sequence
  Synthetic
agagugaacaggcaaacuacaga

SEQ ID NO: 479054 - RNA, 24 nt, Artificial Sequence
  Synthetic
gagagugaacaggcaaacuacaga

SEQ ID NO: 479055 - RNA, 18 nt, Artificial Sequence
  Synthetic
caacaggcaaccuacaga

SEQ ID NO: 479056 - RNA, 19 nt, Artificial Sequence
  Synthetic
ucaacaggcaaccuacaga

SEQ ID NO: 479057 - RNA, 20 nt, Artificial Sequence
  Synthetic
gucaacaggcaaccuacaga

SEQ ID NO: 479058 - RNA, 21 nt, Artificial Sequence
  Synthetic
agucaacaggcaaccuacaga

SEQ ID NO: 479059 - RNA, 22 nt, Artificial Sequence
  Synthetic
gagucaacaggcaaccuacaga

SEQ ID NO: 479060 - RNA, 23 nt, Artificial Sequence
  Synthetic
agagucaacaggcaaccuacaga

SEQ ID NO: 479061 - RNA, 24 nt, Artificial Sequence
  Synthetic
gagagucaacaggcaaccuacaga

SEQ ID NO: 479062 - RNA, 18 nt, Artificial Sequence
  Synthetic
ggaauagcagccuacaga

SEQ ID NO: 479063 - RNA, 19 nt, Artificial Sequence
  Synthetic
gggaauagcagccuacaga

SEQ ID NO: 479064 - RNA, 20 nt, Artificial Sequence
  Synthetic
agggaauagcagccuacaga

SEQ ID NO: 479065 - RNA, 21 nt, Artificial Sequence
  Synthetic
cagggaauagcagccuacaga

SEQ ID NO: 479066 - RNA, 22 nt, Artificial Sequence
  Synthetic
acagggaauagcagccuacaga

SEQ ID NO: 479067 - RNA, 23 nt, Artificial Sequence
  Synthetic
gacagggaauagcagccuacaga

SEQ ID NO: 479068 - RNA, 24 nt, Artificial Sequence
  Synthetic
ugacagggaauagcagccuacaga

SEQ ID NO: 479069 - RNA, 18 nt, Artificial Sequence
  Synthetic
gaacaggcagccuacaga

SEQ ID NO: 479070 - RNA, 19 nt, Artificial Sequence
  Synthetic
ugaacaggcagccuacaga

SEQ ID NO: 479071 - RNA, 20 nt, Artificial Sequence
  Synthetic
gugaacaggcagccuacaga

SEQ ID NO: 479072 - RNA, 21 nt, Artificial Sequence
  Synthetic
agugaacaggcagccuacaga

SEQ ID NO: 479073 - RNA, 22 nt, Artificial Sequence
  Synthetic
gagugaacaggcagccuacaga

SEQ ID NO: 479074 - RNA, 23 nt, Artificial Sequence
  Synthetic
agagugaacaggcagccuacaga

SEQ ID NO: 479075 - RNA, 24 nt, Artificial Sequence
  Synthetic
cagagugaacaggcagccuacaga

SEQ ID NO: 479076 - RNA, 18 nt, Artificial Sequence
  Synthetic
uaggauucagccuacaga

SEQ ID NO: 479077 - RNA, 19 nt, Artificial Sequence
  Synthetic
uuaggauucagccuacaga

SEQ ID NO: 479078 - RNA, 20 nt, Artificial Sequence
  Synthetic
auuaggauucagccuacaga

SEQ ID NO: 479079 - RNA, 21 nt, Artificial Sequence
  Synthetic
uauuaggauucagccuacaga

SEQ ID NO: 479080 - RNA, 22 nt, Artificial Sequence
  Synthetic
auauuaggauucagccuacaga

SEQ ID NO: 479081 - RNA, 23 nt, Artificial Sequence
  Synthetic
aauauuaggauucagccuacaga

SEQ ID NO: 479082 - RNA, 24 nt, Artificial Sequence
  Synthetic
gaauauuaggauucagccuacaga

SEQ ID NO: 479083 - RNA, 18 nt, Artificial Sequence
  Synthetic
uaaguccuuuuguacaga

SEQ ID NO: 479084 - RNA, 19 nt, Artificial Sequence
  Synthetic
uuaaguccuuuuguacaga

SEQ ID NO: 479085 - RNA, 20 nt, Artificial Sequence
  Synthetic
uuuaaguccuuuuguacaga

SEQ ID NO: 479086 - RNA, 21 nt, Artificial Sequence
  Synthetic
auuuaaguccuuuuguacaga

SEQ ID NO: 479087 - RNA, 22 nt, Artificial Sequence
  Synthetic
gauuuaaguccuuuuguacaga

SEQ ID NO: 479088 - RNA, 23 nt, Artificial Sequence
  Synthetic
ggauuuaaguccuuuuguacaga

SEQ ID NO: 479089 - RNA, 24 nt, Artificial Sequence
  Synthetic
aggauuuaaguccuuuuguacaga

SEQ ID NO: 479090 - RNA, 18 nt, Artificial Sequence
  Synthetic
accuuucccauuuacaga

SEQ ID NO: 479091 - RNA, 19 nt, Artificial Sequence
  Synthetic
aaccuuucccauuuacaga

SEQ ID NO: 479092 - RNA, 20 nt, Artificial Sequence
  Synthetic
aaaccuuucccauuuacaga

SEQ ID NO: 479093 - RNA, 21 nt, Artificial Sequence
  Synthetic
aaaaccuuucccauuuacaga

SEQ ID NO: 479094 - RNA, 22 nt, Artificial Sequence
  Synthetic
uaaaaccuuucccauuuacaga

SEQ ID NO: 479095 - RNA, 23 nt, Artificial Sequence
  Synthetic
guaaaaccuuucccauuuacaga

SEQ ID NO: 479096 - RNA, 24 nt, Artificial Sequence
  Synthetic
aguaaaaccuuucccauuuacaga

SEQ ID NO: 479097 - RNA, 18 nt, Artificial Sequence
  Synthetic
aaaaaaagcaaaaccaga

SEQ ID NO: 479098 - RNA, 19 nt, Artificial Sequence
  Synthetic
aaaaaaaagcaaaaccaga

SEQ ID NO: 479099 - RNA, 20 nt, Artificial Sequence
  Synthetic
aaaaaaaaagcaaaaccaga

SEQ ID NO: 479100 - RNA, 21 nt, Artificial Sequence
  Synthetic
aaaaaaaaaagcaaaaccaga

SEQ ID NO: 479101 - RNA, 22 nt, Artificial Sequence
  Synthetic
aaaaaaaaaaagcaaaaccaga

SEQ ID NO: 479102 - RNA, 23 nt, Artificial Sequence
  Synthetic
aaaaaaaaaaaagcaaaaccaga

SEQ ID NO: 479103 - RNA, 24 nt, Artificial Sequence
  Synthetic
aaaaaaaaaaaaagcaaaaccaga

SEQ ID NO: 479104 - RNA, 18 nt, Artificial Sequence
  Synthetic
auaagaagacaaaccaga

SEQ ID NO: 479105 - RNA, 19 nt, Artificial Sequence
  Synthetic
uauaagaagacaaaccaga

SEQ ID NO: 479106 - RNA, 20 nt, Artificial Sequence
  Synthetic
cuauaagaagacaaaccaga

SEQ ID NO: 479107 - RNA, 21 nt, Artificial Sequence
  Synthetic
acuauaagaagacaaaccaga

SEQ ID NO: 479108 - RNA, 22 nt, Artificial Sequence
  Synthetic
gacuauaagaagacaaaccaga

SEQ ID NO: 479109 - RNA, 23 nt, Artificial Sequence
  Synthetic
ugacuauaagaagacaaaccaga

SEQ ID NO: 479110 - RNA, 24 nt, Artificial Sequence
  Synthetic
cugacuauaagaagacaaaccaga

SEQ ID NO: 479111 - RNA, 18 nt, Artificial Sequence
  Synthetic
cucucucucgaaaccaga

SEQ ID NO: 479112 - RNA, 19 nt, Artificial Sequence
  Synthetic
ucucucucucgaaaccaga

SEQ ID NO: 479113 - RNA, 20 nt, Artificial Sequence
  Synthetic
cucucucucucgaaaccaga

SEQ ID NO: 479114 - RNA, 21 nt, Artificial Sequence
  Synthetic
ucucucucucucgaaaccaga

SEQ ID NO: 479115 - RNA, 22 nt, Artificial Sequence
  Synthetic
cucucucucucucgaaaccaga

SEQ ID NO: 479116 - RNA, 23 nt, Artificial Sequence
  Synthetic
ucucucucucucucgaaaccaga

SEQ ID NO: 479117 - RNA, 24 nt, Artificial Sequence
  Synthetic
cucucucucucucucgaaaccaga

SEQ ID NO: 479118 - RNA, 18 nt, Artificial Sequence
  Synthetic
cccaggaagagaaccaga

SEQ ID NO: 479119 - RNA, 19 nt, Artificial Sequence
  Synthetic
acccaggaagagaaccaga

SEQ ID NO: 479120 - RNA, 20 nt, Artificial Sequence
  Synthetic
gacccaggaagagaaccaga

SEQ ID NO: 479121 - RNA, 21 nt, Artificial Sequence
  Synthetic
agacccaggaagagaaccaga

SEQ ID NO: 479122 - RNA, 22 nt, Artificial Sequence
  Synthetic
cagacccaggaagagaaccaga

SEQ ID NO: 479123 - RNA, 23 nt, Artificial Sequence
  Synthetic
ucagacccaggaagagaaccaga

SEQ ID NO: 479124 - RNA, 24 nt, Artificial Sequence
  Synthetic
aucagacccaggaagagaaccaga

SEQ ID NO: 479125 - RNA, 18 nt, Artificial Sequence
  Synthetic
gcaacucagagcaccaga

SEQ ID NO: 479126 - RNA, 19 nt, Artificial Sequence
  Synthetic
ggcaacucagagcaccaga

SEQ ID NO: 479127 - RNA, 20 nt, Artificial Sequence
  Synthetic
uggcaacucagagcaccaga

SEQ ID NO: 479128 - RNA, 21 nt, Artificial Sequence
  Synthetic
cuggcaacucagagcaccaga

SEQ ID NO: 479129 - RNA, 22 nt, Artificial Sequence
  Synthetic
ccuggcaacucagagcaccaga

SEQ ID NO: 479130 - RNA, 23 nt, Artificial Sequence
  Synthetic
uccuggcaacucagagcaccaga

SEQ ID NO: 479131 - RNA, 24 nt, Artificial Sequence
  Synthetic
auccuggcaacucagagcaccaga

SEQ ID NO: 479132 - RNA, 18 nt, Artificial Sequence
  Synthetic
gcaaugauaaguaccaga

SEQ ID NO: 479133 - RNA, 19 nt, Artificial Sequence
  Synthetic
agcaaugauaaguaccaga

SEQ ID NO: 479134 - RNA, 20 nt, Artificial Sequence
  Synthetic
aagcaaugauaaguaccaga

SEQ ID NO: 479135 - RNA, 21 nt, Artificial Sequence
  Synthetic
uaagcaaugauaaguaccaga

SEQ ID NO: 479136 - RNA, 22 nt, Artificial Sequence
  Synthetic
uuaagcaaugauaaguaccaga

SEQ ID NO: 479137 - RNA, 23 nt, Artificial Sequence
  Synthetic
auuaagcaaugauaaguaccaga

SEQ ID NO: 479138 - RNA, 24 nt, Artificial Sequence
  Synthetic
uauuaagcaaugauaaguaccaga

SEQ ID NO: 479139 - RNA, 18 nt, Artificial Sequence
  Synthetic
gagguaacaagacccaga

SEQ ID NO: 479140 - RNA, 19 nt, Artificial Sequence
  Synthetic
agagguaacaagacccaga

SEQ ID NO: 479141 - RNA, 20 nt, Artificial Sequence
  Synthetic
aagagguaacaagacccaga

SEQ ID NO: 479142 - RNA, 21 nt, Artificial Sequence
  Synthetic
uaagagguaacaagacccaga

SEQ ID NO: 479143 - RNA, 22 nt, Artificial Sequence
  Synthetic
uuaagagguaacaagacccaga

SEQ ID NO: 479144 - RNA, 23 nt, Artificial Sequence
  Synthetic
auuaagagguaacaagacccaga

SEQ ID NO: 479145 - RNA, 24 nt, Artificial Sequence
  Synthetic
uauuaagagguaacaagacccaga

SEQ ID NO: 479146 - RNA, 18 nt, Artificial Sequence
  Synthetic
uccagcuugagccccaga

SEQ ID NO: 479147 - RNA, 19 nt, Artificial Sequence
  Synthetic
uuccagcuugagccccaga

SEQ ID NO: 479148 - RNA, 20 nt, Artificial Sequence
  Synthetic
auuccagcuugagccccaga

SEQ ID NO: 479149 - RNA, 21 nt, Artificial Sequence
  Synthetic
cauuccagcuugagccccaga

SEQ ID NO: 479150 - RNA, 22 nt, Artificial Sequence
  Synthetic
ccauuccagcuugagccccaga

SEQ ID NO: 479151 - RNA, 23 nt, Artificial Sequence
  Synthetic
gccauuccagcuugagccccaga

SEQ ID NO: 479152 - RNA, 24 nt, Artificial Sequence
  Synthetic
ugccauuccagcuugagccccaga

SEQ ID NO: 479153 - RNA, 18 nt, Artificial Sequence
  Synthetic
aaaugugcauuccccaga

SEQ ID NO: 479154 - RNA, 19 nt, Artificial Sequence
  Synthetic
uaaaugugcauuccccaga

SEQ ID NO: 479155 - RNA, 20 nt, Artificial Sequence
  Synthetic
auaaaugugcauuccccaga

SEQ ID NO: 479156 - RNA, 21 nt, Artificial Sequence
  Synthetic
uauaaaugugcauuccccaga

SEQ ID NO: 479157 - RNA, 22 nt, Artificial Sequence
  Synthetic
uuauaaaugugcauuccccaga

SEQ ID NO: 479158 - RNA, 23 nt, Artificial Sequence
  Synthetic
uuuauaaaugugcauuccccaga

SEQ ID NO: 479159 - RNA, 24 nt, Artificial Sequence
  Synthetic
auuuauaaaugugcauuccccaga

SEQ ID NO: 479160 - RNA, 18 nt, Artificial Sequence
  Synthetic
agagaugcccugcccaga

SEQ ID NO: 479161 - RNA, 19 nt, Artificial Sequence
  Synthetic
cagagaugcccugcccaga

SEQ ID NO: 479162 - RNA, 20 nt, Artificial Sequence
  Synthetic
ucagagaugcccugcccaga

SEQ ID NO: 479163 - RNA, 21 nt, Artificial Sequence
  Synthetic
uucagagaugcccugcccaga

SEQ ID NO: 479164 - RNA, 22 nt, Artificial Sequence
  Synthetic
uuucagagaugcccugcccaga

SEQ ID NO: 479165 - RNA, 23 nt, Artificial Sequence
  Synthetic
cuuucagagaugcccugcccaga

SEQ ID NO: 479166 - RNA, 24 nt, Artificial Sequence
  Synthetic
ucuuucagagaugcccugcccaga

SEQ ID NO: 479167 - RNA, 18 nt, Artificial Sequence
  Synthetic
uugggcagaucucccaga

SEQ ID NO: 479168 - RNA, 19 nt, Artificial Sequence
  Synthetic
auugggcagaucucccaga

SEQ ID NO: 479169 - RNA, 20 nt, Artificial Sequence
  Synthetic
cauugggcagaucucccaga

SEQ ID NO: 479170 - RNA, 21 nt, Artificial Sequence
  Synthetic
acauugggcagaucucccaga

SEQ ID NO: 479171 - RNA, 22 nt, Artificial Sequence
  Synthetic
aacauugggcagaucucccaga

SEQ ID NO: 479172 - RNA, 23 nt, Artificial Sequence
  Synthetic
caacauugggcagaucucccaga

SEQ ID NO: 479173 - RNA, 24 nt, Artificial Sequence
  Synthetic
ucaacauugggcagaucucccaga

SEQ ID NO: 479174 - RNA, 18 nt, Artificial Sequence
  Synthetic
gaacuagccccagccaga

SEQ ID NO: 479175 - RNA, 19 nt, Artificial Sequence
  Synthetic
ugaacuagccccagccaga

SEQ ID NO: 479176 - RNA, 20 nt, Artificial Sequence
  Synthetic
uugaacuagccccagccaga

SEQ ID NO: 479177 - RNA, 21 nt, Artificial Sequence
  Synthetic
uuugaacuagccccagccaga

SEQ ID NO: 479178 - RNA, 22 nt, Artificial Sequence
  Synthetic
auuugaacuagccccagccaga

SEQ ID NO: 479179 - RNA, 23 nt, Artificial Sequence
  Synthetic
uauuugaacuagccccagccaga

SEQ ID NO: 479180 - RNA, 24 nt, Artificial Sequence
  Synthetic
auauuugaacuagccccagccaga

SEQ ID NO: 479181 - RNA, 21 nt, Artificial Sequence
  Synthetic
aaaauguuaagggcagccaga

SEQ ID NO: 479182 - RNA, 22 nt, Artificial Sequence
  Synthetic
aaaaauguuaagggcagccaga

SEQ ID NO: 479183 - RNA, 23 nt, Artificial Sequence
  Synthetic
aaaaaauguuaagggcagccaga

SEQ ID NO: 479184 - RNA, 24 nt, Artificial Sequence
  Synthetic
gaaaaaauguuaagggcagccaga

SEQ ID NO: 479185 - RNA, 18 nt, Artificial Sequence
  Synthetic
guagacuugaaggccaga

SEQ ID NO: 479186 - RNA, 19 nt, Artificial Sequence
  Synthetic
aguagacuugaaggccaga

SEQ ID NO: 479187 - RNA, 20 nt, Artificial Sequence
  Synthetic
aaguagacuugaaggccaga

SEQ ID NO: 479188 - RNA, 21 nt, Artificial Sequence
  Synthetic
gaaguagacuugaaggccaga

SEQ ID NO: 479189 - RNA, 22 nt, Artificial Sequence
  Synthetic
ggaaguagacuugaaggccaga

SEQ ID NO: 479190 - RNA, 23 nt, Artificial Sequence
  Synthetic
cggaaguagacuugaaggccaga

SEQ ID NO: 479191 - RNA, 24 nt, Artificial Sequence
  Synthetic
acggaaguagacuugaaggccaga

SEQ ID NO: 479192 - RNA, 18 nt, Artificial Sequence
  Synthetic
guccugccuugggccaga

SEQ ID NO: 479193 - RNA, 19 nt, Artificial Sequence
  Synthetic
gguccugccuugggccaga

SEQ ID NO: 479194 - RNA, 20 nt, Artificial Sequence
  Synthetic
ugguccugccuugggccaga

SEQ ID NO: 479195 - RNA, 21 nt, Artificial Sequence
  Synthetic
uugguccugccuugggccaga

SEQ ID NO: 479196 - RNA, 22 nt, Artificial Sequence
  Synthetic
uuugguccugccuugggccaga

SEQ ID NO: 479197 - RNA, 23 nt, Artificial Sequence
  Synthetic
uuuugguccugccuugggccaga

SEQ ID NO: 479198 - RNA, 24 nt, Artificial Sequence
  Synthetic
uuuuugguccugccuugggccaga

SEQ ID NO: 479199 - RNA, 18 nt, Artificial Sequence
  Synthetic
acguaugacaaugccaga

SEQ ID NO: 479200 - RNA, 19 nt, Artificial Sequence
  Synthetic
cacguaugacaaugccaga

SEQ ID NO: 479201 - RNA, 20 nt, Artificial Sequence
  Synthetic
acacguaugacaaugccaga

SEQ ID NO: 479202 - RNA, 21 nt, Artificial Sequence
  Synthetic
uacacguaugacaaugccaga

SEQ ID NO: 479203 - RNA, 22 nt, Artificial Sequence
  Synthetic
auacacguaugacaaugccaga

SEQ ID NO: 479204 - RNA, 23 nt, Artificial Sequence
  Synthetic
aauacacguaugacaaugccaga

SEQ ID NO: 479205 - RNA, 24 nt, Artificial Sequence
  Synthetic
caauacacguaugacaaugccaga

SEQ ID NO: 479206 - RNA, 18 nt, Artificial Sequence
  Synthetic
gacaaagaugaugccaga

SEQ ID NO: 479207 - RNA, 19 nt, Artificial Sequence
  Synthetic
agacaaagaugaugccaga

SEQ ID NO: 479208 - RNA, 20 nt, Artificial Sequence
  Synthetic
aagacaaagaugaugccaga

SEQ ID NO: 479209 - RNA, 21 nt, Artificial Sequence
  Synthetic
aaagacaaagaugaugccaga

SEQ ID NO: 479210 - RNA, 22 nt, Artificial Sequence
  Synthetic
aaaagacaaagaugaugccaga

SEQ ID NO: 479211 - RNA, 23 nt, Artificial Sequence
  Synthetic
caaaagacaaagaugaugccaga

SEQ ID NO: 479212 - RNA, 24 nt, Artificial Sequence
  Synthetic
ucaaaagacaaagaugaugccaga

SEQ ID NO: 479213 - RNA, 18 nt, Artificial Sequence
  Synthetic
ggagcuugaacauccaga

SEQ ID NO: 479214 - RNA, 19 nt, Artificial Sequence
  Synthetic
uggagcuugaacauccaga

SEQ ID NO: 479215 - RNA, 20 nt, Artificial Sequence
  Synthetic
cuggagcuugaacauccaga

SEQ ID NO: 479216 - RNA, 21 nt, Artificial Sequence
  Synthetic
ucuggagcuugaacauccaga

SEQ ID NO: 479217 - RNA, 22 nt, Artificial Sequence
  Synthetic
cucuggagcuugaacauccaga

SEQ ID NO: 479218 - RNA, 23 nt, Artificial Sequence
  Synthetic
acucuggagcuugaacauccaga

SEQ ID NO: 479219 - RNA, 24 nt, Artificial Sequence
  Synthetic
aacucuggagcuugaacauccaga

SEQ ID NO: 479220 - RNA, 18 nt, Artificial Sequence
  Synthetic
ugugaggccacauccaga

SEQ ID NO: 479221 - RNA, 19 nt, Artificial Sequence
  Synthetic
uugugaggccacauccaga

SEQ ID NO: 479222 - RNA, 20 nt, Artificial Sequence
  Synthetic
uuugugaggccacauccaga

SEQ ID NO: 479223 - RNA, 21 nt, Artificial Sequence
  Synthetic
auuugugaggccacauccaga

SEQ ID NO: 479224 - RNA, 22 nt, Artificial Sequence
  Synthetic
gauuugugaggccacauccaga

SEQ ID NO: 479225 - RNA, 23 nt, Artificial Sequence
  Synthetic
ugauuugugaggccacauccaga

SEQ ID NO: 479226 - RNA, 24 nt, Artificial Sequence
  Synthetic
augauuugugaggccacauccaga

SEQ ID NO: 479227 - RNA, 18 nt, Artificial Sequence
  Synthetic
aggccaaagccauccaga

SEQ ID NO: 479228 - RNA, 19 nt, Artificial Sequence
  Synthetic
aaggccaaagccauccaga

SEQ ID NO: 479229 - RNA, 20 nt, Artificial Sequence
  Synthetic
uaaggccaaagccauccaga

SEQ ID NO: 479230 - RNA, 21 nt, Artificial Sequence
  Synthetic
auaaggccaaagccauccaga

SEQ ID NO: 479231 - RNA, 22 nt, Artificial Sequence
  Synthetic
cauaaggccaaagccauccaga

SEQ ID NO: 479232 - RNA, 23 nt, Artificial Sequence
  Synthetic
ucauaaggccaaagccauccaga

SEQ ID NO: 479233 - RNA, 24 nt, Artificial Sequence
  Synthetic
gucauaaggccaaagccauccaga

SEQ ID NO: 479234 - RNA, 18 nt, Artificial Sequence
  Synthetic
aacguagggggauccaga

SEQ ID NO: 479235 - RNA, 19 nt, Artificial Sequence
  Synthetic
caacguagggggauccaga

SEQ ID NO: 479236 - RNA, 20 nt, Artificial Sequence
  Synthetic
acaacguagggggauccaga

SEQ ID NO: 479237 - RNA, 21 nt, Artificial Sequence
  Synthetic
gacaacguagggggauccaga

SEQ ID NO: 479238 - RNA, 22 nt, Artificial Sequence
  Synthetic
agacaacguagggggauccaga

SEQ ID NO: 479239 - RNA, 23 nt, Artificial Sequence
  Synthetic
uagacaacguagggggauccaga

SEQ ID NO: 479240 - RNA, 24 nt, Artificial Sequence
  Synthetic
guagacaacguagggggauccaga

SEQ ID NO: 479241 - RNA, 18 nt, Artificial Sequence
  Synthetic
auuaacuacuuauccaga

SEQ ID NO: 479242 - RNA, 19 nt, Artificial Sequence
  Synthetic
aauuaacuacuuauccaga

SEQ ID NO: 479243 - RNA, 20 nt, Artificial Sequence
  Synthetic
gaauuaacuacuuauccaga

SEQ ID NO: 479244 - RNA, 21 nt, Artificial Sequence
  Synthetic
agaauuaacuacuuauccaga

SEQ ID NO: 479245 - RNA, 22 nt, Artificial Sequence
  Synthetic
cagaauuaacuacuuauccaga

SEQ ID NO: 479246 - RNA, 23 nt, Artificial Sequence
  Synthetic
acagaauuaacuacuuauccaga

SEQ ID NO: 479247 - RNA, 24 nt, Artificial Sequence
  Synthetic
aacagaauuaacuacuuauccaga

SEQ ID NO: 479248 - RNA, 18 nt, Artificial Sequence
  Synthetic
uauuuuuugaacuccaga

SEQ ID NO: 479249 - RNA, 19 nt, Artificial Sequence
  Synthetic
cuauuuuuugaacuccaga

SEQ ID NO: 479250 - RNA, 20 nt, Artificial Sequence
  Synthetic
ucuauuuuuugaacuccaga

SEQ ID NO: 479251 - RNA, 21 nt, Artificial Sequence
  Synthetic
uucuauuuuuugaacuccaga

SEQ ID NO: 479252 - RNA, 22 nt, Artificial Sequence
  Synthetic
uuucuauuuuuugaacuccaga

SEQ ID NO: 479253 - RNA, 23 nt, Artificial Sequence
  Synthetic
cuuucuauuuuuugaacuccaga

SEQ ID NO: 479254 - RNA, 24 nt, Artificial Sequence
  Synthetic
ucuuucuauuuuuugaacuccaga

SEQ ID NO: 479255 - RNA, 18 nt, Artificial Sequence
  Synthetic
guauuccuugucuccaga

SEQ ID NO: 479256 - RNA, 19 nt, Artificial Sequence
  Synthetic
aguauuccuugucuccaga

SEQ ID NO: 479257 - RNA, 20 nt, Artificial Sequence
  Synthetic
caguauuccuugucuccaga

SEQ ID NO: 479258 - RNA, 21 nt, Artificial Sequence
  Synthetic
ucaguauuccuugucuccaga

SEQ ID NO: 479259 - RNA, 22 nt, Artificial Sequence
  Synthetic
cucaguauuccuugucuccaga

SEQ ID NO: 479260 - RNA, 23 nt, Artificial Sequence
  Synthetic
ccucaguauuccuugucuccaga

SEQ ID NO: 479261 - RNA, 24 nt, Artificial Sequence
  Synthetic
accucaguauuccuugucuccaga

SEQ ID NO: 479262 - RNA, 18 nt, Artificial Sequence
  Synthetic
ucaggaacuuucuccaga

SEQ ID NO: 479263 - RNA, 19 nt, Artificial Sequence
  Synthetic
cucaggaacuuucuccaga

SEQ ID NO: 479264 - RNA, 20 nt, Artificial Sequence
  Synthetic
ccucaggaacuuucuccaga

SEQ ID NO: 479265 - RNA, 21 nt, Artificial Sequence
  Synthetic
gccucaggaacuuucuccaga

SEQ ID NO: 479266 - RNA, 22 nt, Artificial Sequence
  Synthetic
agccucaggaacuuucuccaga

SEQ ID NO: 479267 - RNA, 23 nt, Artificial Sequence
  Synthetic
uagccucaggaacuuucuccaga

SEQ ID NO: 479268 - RNA, 24 nt, Artificial Sequence
  Synthetic
guagccucaggaacuuucuccaga

SEQ ID NO: 479269 - RNA, 18 nt, Artificial Sequence
  Synthetic
uuaauuacaaaguccaga

SEQ ID NO: 479270 - RNA, 19 nt, Artificial Sequence
  Synthetic
guuaauuacaaaguccaga

SEQ ID NO: 479271 - RNA, 20 nt, Artificial Sequence
  Synthetic
aguuaauuacaaaguccaga

SEQ ID NO: 479272 - RNA, 21 nt, Artificial Sequence
  Synthetic
aaguuaauuacaaaguccaga

SEQ ID NO: 479273 - RNA, 22 nt, Artificial Sequence
  Synthetic
aaaguuaauuacaaaguccaga

SEQ ID NO: 479274 - RNA, 23 nt, Artificial Sequence
  Synthetic
uaaaguuaauuacaaaguccaga

SEQ ID NO: 479275 - RNA, 24 nt, Artificial Sequence
  Synthetic
guaaaguuaauuacaaaguccaga

SEQ ID NO: 479276 - RNA, 18 nt, Artificial Sequence
  Synthetic
uggacaauaaaguccaga

SEQ ID NO: 479277 - RNA, 19 nt, Artificial Sequence
  Synthetic
auggacaauaaaguccaga

SEQ ID NO: 479278 - RNA, 20 nt, Artificial Sequence
  Synthetic
uauggacaauaaaguccaga

SEQ ID NO: 479279 - RNA, 21 nt, Artificial Sequence
  Synthetic
auauggacaauaaaguccaga

SEQ ID NO: 479280 - RNA, 22 nt, Artificial Sequence
  Synthetic
gauauggacaauaaaguccaga

SEQ ID NO: 479281 - RNA, 23 nt, Artificial Sequence
  Synthetic
ugauauggacaauaaaguccaga

SEQ ID NO: 479282 - RNA, 24 nt, Artificial Sequence
  Synthetic
gugauauggacaauaaaguccaga

SEQ ID NO: 479283 - RNA, 18 nt, Artificial Sequence
  Synthetic
cacccggauccuuccaga

SEQ ID NO: 479284 - RNA, 19 nt, Artificial Sequence
  Synthetic
ucacccggauccuuccaga

SEQ ID NO: 479285 - RNA, 20 nt, Artificial Sequence
  Synthetic
cucacccggauccuuccaga

SEQ ID NO: 479286 - RNA, 21 nt, Artificial Sequence
  Synthetic
ucucacccggauccuuccaga

SEQ ID NO: 479287 - RNA, 22 nt, Artificial Sequence
  Synthetic
aucucacccggauccuuccaga

SEQ ID NO: 479288 - RNA, 23 nt, Artificial Sequence
  Synthetic
caucucacccggauccuuccaga

SEQ ID NO: 479289 - RNA, 24 nt, Artificial Sequence
  Synthetic
ucaucucacccggauccuuccaga

SEQ ID NO: 479290 - RNA, 18 nt, Artificial Sequence
  Synthetic
uaggcaagggcuuccaga

SEQ ID NO: 479291 - RNA, 19 nt, Artificial Sequence
  Synthetic
auaggcaagggcuuccaga

SEQ ID NO: 479292 - RNA, 20 nt, Artificial Sequence
  Synthetic
aauaggcaagggcuuccaga

SEQ ID NO: 479293 - RNA, 21 nt, Artificial Sequence
  Synthetic
gaauaggcaagggcuuccaga

SEQ ID NO: 479294 - RNA, 22 nt, Artificial Sequence
  Synthetic
ugaauaggcaagggcuuccaga

SEQ ID NO: 479295 - RNA, 23 nt, Artificial Sequence
  Synthetic
uugaauaggcaagggcuuccaga

SEQ ID NO: 479296 - RNA, 24 nt, Artificial Sequence
  Synthetic
guugaauaggcaagggcuuccaga

SEQ ID NO: 479297 - RNA, 18 nt, Artificial Sequence
  Synthetic
gagaaacauaguuccaga

SEQ ID NO: 479298 - RNA, 19 nt, Artificial Sequence
  Synthetic
ugagaaacauaguuccaga

SEQ ID NO: 479299 - RNA, 20 nt, Artificial Sequence
  Synthetic
augagaaacauaguuccaga

SEQ ID NO: 479300 - RNA, 21 nt, Artificial Sequence
  Synthetic
uaugagaaacauaguuccaga

SEQ ID NO: 479301 - RNA, 22 nt, Artificial Sequence
  Synthetic
auaugagaaacauaguuccaga

SEQ ID NO: 479302 - RNA, 23 nt, Artificial Sequence
  Synthetic
aauaugagaaacauaguuccaga

SEQ ID NO: 479303 - RNA, 24 nt, Artificial Sequence
  Synthetic
uaauaugagaaacauaguuccaga

SEQ ID NO: 479304 - RNA, 18 nt, Artificial Sequence
  Synthetic
aauuaacuguguuccaga

SEQ ID NO: 479305 - RNA, 19 nt, Artificial Sequence
  Synthetic
gaauuaacuguguuccaga

SEQ ID NO: 479306 - RNA, 20 nt, Artificial Sequence
  Synthetic
ugaauuaacuguguuccaga

SEQ ID NO: 479307 - RNA, 21 nt, Artificial Sequence
  Synthetic
gugaauuaacuguguuccaga

SEQ ID NO: 479308 - RNA, 22 nt, Artificial Sequence
  Synthetic
agugaauuaacuguguuccaga

SEQ ID NO: 479309 - RNA, 23 nt, Artificial Sequence
  Synthetic
aagugaauuaacuguguuccaga

SEQ ID NO: 479310 - RNA, 24 nt, Artificial Sequence
  Synthetic
caagugaauuaacuguguuccaga

SEQ ID NO: 479311 - RNA, 18 nt, Artificial Sequence
  Synthetic
cacuucacauuuuccaga

SEQ ID NO: 479312 - RNA, 19 nt, Artificial Sequence
  Synthetic
acacuucacauuuuccaga

SEQ ID NO: 479313 - RNA, 20 nt, Artificial Sequence
  Synthetic
uacacuucacauuuuccaga

SEQ ID NO: 479314 - RNA, 21 nt, Artificial Sequence
  Synthetic
auacacuucacauuuuccaga

SEQ ID NO: 479315 - RNA, 22 nt, Artificial Sequence
  Synthetic
cauacacuucacauuuuccaga

SEQ ID NO: 479316 - RNA, 23 nt, Artificial Sequence
  Synthetic
ucauacacuucacauuuuccaga

SEQ ID NO: 479317 - RNA, 24 nt, Artificial Sequence
  Synthetic
cucauacacuucacauuuuccaga

SEQ ID NO: 479318 - RNA, 18 nt, Artificial Sequence
  Synthetic
caagcuggcuuuuccaga

SEQ ID NO: 479319 - RNA, 19 nt, Artificial Sequence
  Synthetic
ccaagcuggcuuuuccaga

SEQ ID NO: 479320 - RNA, 20 nt, Artificial Sequence
  Synthetic
uccaagcuggcuuuuccaga

SEQ ID NO: 479321 - RNA, 21 nt, Artificial Sequence
  Synthetic
cuccaagcuggcuuuuccaga

SEQ ID NO: 479322 - RNA, 22 nt, Artificial Sequence
  Synthetic
ucuccaagcuggcuuuuccaga

SEQ ID NO: 479323 - RNA, 23 nt, Artificial Sequence
  Synthetic
uucuccaagcuggcuuuuccaga

SEQ ID NO: 479324 - RNA, 24 nt, Artificial Sequence
  Synthetic
auucuccaagcuggcuuuuccaga

SEQ ID NO: 479325 - RNA, 18 nt, Artificial Sequence
  Synthetic
augauuuuaaaaagcaga

SEQ ID NO: 479326 - RNA, 19 nt, Artificial Sequence
  Synthetic
caugauuuuaaaaagcaga

SEQ ID NO: 479327 - RNA, 20 nt, Artificial Sequence
  Synthetic
ucaugauuuuaaaaagcaga

SEQ ID NO: 479328 - RNA, 21 nt, Artificial Sequence
  Synthetic
aucaugauuuuaaaaagcaga

SEQ ID NO: 479329 - RNA, 22 nt, Artificial Sequence
  Synthetic
aaucaugauuuuaaaaagcaga

SEQ ID NO: 479330 - RNA, 23 nt, Artificial Sequence
  Synthetic
aaaucaugauuuuaaaaagcaga

SEQ ID NO: 479331 - RNA, 24 nt, Artificial Sequence
  Synthetic
caaaucaugauuuuaaaaagcaga

SEQ ID NO: 479332 - RNA, 18 nt, Artificial Sequence
  Synthetic
cuuuugaagaaaagcaga

SEQ ID NO: 479333 - RNA, 19 nt, Artificial Sequence
  Synthetic
ccuuuugaagaaaagcaga

SEQ ID NO: 479334 - RNA, 20 nt, Artificial Sequence
  Synthetic
uccuuuugaagaaaagcaga

SEQ ID NO: 479335 - RNA, 21 nt, Artificial Sequence
  Synthetic
uuccuuuugaagaaaagcaga

SEQ ID NO: 479336 - RNA, 22 nt, Artificial Sequence
  Synthetic
uuuccuuuugaagaaaagcaga

SEQ ID NO: 479337 - RNA, 23 nt, Artificial Sequence
  Synthetic
uuuuccuuuugaagaaaagcaga

SEQ ID NO: 479338 - RNA, 24 nt, Artificial Sequence
  Synthetic
cuuuuccuuuugaagaaaagcaga

SEQ ID NO: 479339 - RNA, 18 nt, Artificial Sequence
  Synthetic
cugcuuuaguaaagcaga

SEQ ID NO: 479340 - RNA, 19 nt, Artificial Sequence
  Synthetic
acugcuuuaguaaagcaga

SEQ ID NO: 479341 - RNA, 20 nt, Artificial Sequence
  Synthetic
gacugcuuuaguaaagcaga

SEQ ID NO: 479342 - RNA, 21 nt, Artificial Sequence
  Synthetic
ugacugcuuuaguaaagcaga

SEQ ID NO: 479343 - RNA, 22 nt, Artificial Sequence
  Synthetic
augacugcuuuaguaaagcaga

SEQ ID NO: 479344 - RNA, 23 nt, Artificial Sequence
  Synthetic
aaugacugcuuuaguaaagcaga

SEQ ID NO: 479345 - RNA, 24 nt, Artificial Sequence
  Synthetic
uaaugacugcuuuaguaaagcaga

SEQ ID NO: 479346 - RNA, 18 nt, Artificial Sequence
  Synthetic
cuucuauauuaaagcaga

SEQ ID NO: 479347 - RNA, 19 nt, Artificial Sequence
  Synthetic
ucuucuauauuaaagcaga

SEQ ID NO: 479348 - RNA, 20 nt, Artificial Sequence
  Synthetic
aucuucuauauuaaagcaga

SEQ ID NO: 479349 - RNA, 21 nt, Artificial Sequence
  Synthetic
uaucuucuauauuaaagcaga

SEQ ID NO: 479350 - RNA, 22 nt, Artificial Sequence
  Synthetic
guaucuucuauauuaaagcaga

SEQ ID NO: 479351 - RNA, 23 nt, Artificial Sequence
  Synthetic
uguaucuucuauauuaaagcaga

SEQ ID NO: 479352 - RNA, 24 nt, Artificial Sequence
  Synthetic
auguaucuucuauauuaaagcaga

SEQ ID NO: 479353 - RNA, 18 nt, Artificial Sequence
  Synthetic
guuuugaacagaagcaga

SEQ ID NO: 479354 - RNA, 19 nt, Artificial Sequence
  Synthetic
gguuuugaacagaagcaga

SEQ ID NO: 479355 - RNA, 20 nt, Artificial Sequence
  Synthetic
ggguuuugaacagaagcaga

SEQ ID NO: 479356 - RNA, 21 nt, Artificial Sequence
  Synthetic
gggguuuugaacagaagcaga

SEQ ID NO: 479357 - RNA, 22 nt, Artificial Sequence
  Synthetic
ggggguuuugaacagaagcaga

SEQ ID NO: 479358 - RNA, 23 nt, Artificial Sequence
  Synthetic
uggggguuuugaacagaagcaga

SEQ ID NO: 479359 - RNA, 24 nt, Artificial Sequence
  Synthetic
uuggggguuuugaacagaagcaga

SEQ ID NO: 479360 - RNA, 18 nt, Artificial Sequence
  Synthetic
auuaacacuagaagcaga

SEQ ID NO: 479361 - RNA, 19 nt, Artificial Sequence
  Synthetic
aauuaacacuagaagcaga

SEQ ID NO: 479362 - RNA, 20 nt, Artificial Sequence
  Synthetic
aaauuaacacuagaagcaga

SEQ ID NO: 479363 - RNA, 21 nt, Artificial Sequence
  Synthetic
aaaauuaacacuagaagcaga

SEQ ID NO: 479364 - RNA, 22 nt, Artificial Sequence
  Synthetic
gaaaauuaacacuagaagcaga

SEQ ID NO: 479365 - RNA, 23 nt, Artificial Sequence
  Synthetic
agaaaauuaacacuagaagcaga

SEQ ID NO: 479366 - RNA, 24 nt, Artificial Sequence
  Synthetic
gagaaaauuaacacuagaagcaga

SEQ ID NO: 479367 - RNA, 18 nt, Artificial Sequence
  Synthetic
gggugccucauaagcaga

SEQ ID NO: 479368 - RNA, 19 nt, Artificial Sequence
  Synthetic
ugggugccucauaagcaga

SEQ ID NO: 479369 - RNA, 20 nt, Artificial Sequence
  Synthetic
gugggugccucauaagcaga

SEQ ID NO: 479370 - RNA, 21 nt, Artificial Sequence
  Synthetic
agugggugccucauaagcaga

SEQ ID NO: 479371 - RNA, 22 nt, Artificial Sequence
  Synthetic
aagugggugccucauaagcaga

SEQ ID NO: 479372 - RNA, 23 nt, Artificial Sequence
  Synthetic
uaagugggugccucauaagcaga

SEQ ID NO: 479373 - RNA, 24 nt, Artificial Sequence
  Synthetic
auaagugggugccucauaagcaga

SEQ ID NO: 479374 - RNA, 18 nt, Artificial Sequence
  Synthetic
ccuccauaguuaagcaga

SEQ ID NO: 479375 - RNA, 19 nt, Artificial Sequence
  Synthetic
cccuccauaguuaagcaga

SEQ ID NO: 479376 - RNA, 20 nt, Artificial Sequence
  Synthetic
ucccuccauaguuaagcaga

SEQ ID NO: 479377 - RNA, 21 nt, Artificial Sequence
  Synthetic
uucccuccauaguuaagcaga

SEQ ID NO: 479378 - RNA, 22 nt, Artificial Sequence
  Synthetic
uuucccuccauaguuaagcaga

SEQ ID NO: 479379 - RNA, 23 nt, Artificial Sequence
  Synthetic
uuuucccuccauaguuaagcaga

SEQ ID NO: 479380 - RNA, 24 nt, Artificial Sequence
  Synthetic
guuuucccuccauaguuaagcaga

SEQ ID NO: 479381 - RNA, 18 nt, Artificial Sequence
  Synthetic
aagcacugcaacagcaga

SEQ ID NO: 479382 - RNA, 19 nt, Artificial Sequence
  Synthetic
uaagcacugcaacagcaga

SEQ ID NO: 479383 - RNA, 20 nt, Artificial Sequence
  Synthetic
uuaagcacugcaacagcaga

SEQ ID NO: 479384 - RNA, 21 nt, Artificial Sequence
  Synthetic
cuuaagcacugcaacagcaga

SEQ ID NO: 479385 - RNA, 22 nt, Artificial Sequence
  Synthetic
acuuaagcacugcaacagcaga

SEQ ID NO: 479386 - RNA, 23 nt, Artificial Sequence
  Synthetic
cacuuaagcacugcaacagcaga

SEQ ID NO: 479387 - RNA, 24 nt, Artificial Sequence
  Synthetic
acacuuaagcacugcaacagcaga

SEQ ID NO: 479388 - RNA, 18 nt, Artificial Sequence
  Synthetic
gguuucccauacagcaga

SEQ ID NO: 479389 - RNA, 19 nt, Artificial Sequence
  Synthetic
ggguuucccauacagcaga

SEQ ID NO: 479390 - RNA, 20 nt, Artificial Sequence
  Synthetic
uggguuucccauacagcaga

SEQ ID NO: 479391 - RNA, 21 nt, Artificial Sequence
  Synthetic
cuggguuucccauacagcaga

SEQ ID NO: 479392 - RNA, 22 nt, Artificial Sequence
  Synthetic
ucuggguuucccauacagcaga

SEQ ID NO: 479393 - RNA, 23 nt, Artificial Sequence
  Synthetic
gucuggguuucccauacagcaga

SEQ ID NO: 479394 - RNA, 24 nt, Artificial Sequence
  Synthetic
agucuggguuucccauacagcaga

SEQ ID NO: 479395 - RNA, 18 nt, Artificial Sequence
  Synthetic
uuggggaaauccagcaga

SEQ ID NO: 479396 - RNA, 19 nt, Artificial Sequence
  Synthetic
cuuggggaaauccagcaga

SEQ ID NO: 479397 - RNA, 20 nt, Artificial Sequence
  Synthetic
gcuuggggaaauccagcaga

SEQ ID NO: 479398 - RNA, 21 nt, Artificial Sequence
  Synthetic
ggcuuggggaaauccagcaga

SEQ ID NO: 479399 - RNA, 22 nt, Artificial Sequence
  Synthetic
aggcuuggggaaauccagcaga

SEQ ID NO: 479400 - RNA, 23 nt, Artificial Sequence
  Synthetic
aaggcuuggggaaauccagcaga

SEQ ID NO: 479401 - RNA, 24 nt, Artificial Sequence
  Synthetic
aaaggcuuggggaaauccagcaga

SEQ ID NO: 479402 - RNA, 18 nt, Artificial Sequence
  Synthetic
aaaugcuuauccagcaga

SEQ ID NO: 479403 - RNA, 19 nt, Artificial Sequence
  Synthetic
aaaaugcuuauccagcaga

SEQ ID NO: 479404 - RNA, 20 nt, Artificial Sequence
  Synthetic
aaaaaugcuuauccagcaga

SEQ ID NO: 479405 - RNA, 21 nt, Artificial Sequence
  Synthetic
gaaaaaugcuuauccagcaga

SEQ ID NO: 479406 - RNA, 22 nt, Artificial Sequence
  Synthetic
agaaaaaugcuuauccagcaga

SEQ ID NO: 479407 - RNA, 23 nt, Artificial Sequence
  Synthetic
aagaaaaaugcuuauccagcaga

SEQ ID NO: 479408 - RNA, 24 nt, Artificial Sequence
  Synthetic
aaagaaaaaugcuuauccagcaga

SEQ ID NO: 479409 - RNA, 18 nt, Artificial Sequence
  Synthetic
gagggaggaaucagcaga

SEQ ID NO: 479410 - RNA, 19 nt, Artificial Sequence
  Synthetic
ugagggaggaaucagcaga

SEQ ID NO: 479411 - RNA, 20 nt, Artificial Sequence
  Synthetic
gugagggaggaaucagcaga

SEQ ID NO: 479412 - RNA, 21 nt, Artificial Sequence
  Synthetic
agugagggaggaaucagcaga

SEQ ID NO: 479413 - RNA, 22 nt, Artificial Sequence
  Synthetic
cagugagggaggaaucagcaga

SEQ ID NO: 479414 - RNA, 23 nt, Artificial Sequence
  Synthetic
ucagugagggaggaaucagcaga

SEQ ID NO: 479415 - RNA, 24 nt, Artificial Sequence
  Synthetic
uucagugagggaggaaucagcaga

SEQ ID NO: 479416 - RNA, 18 nt, Artificial Sequence
  Synthetic
guaacaacuaugagcaga

SEQ ID NO: 479417 - RNA, 19 nt, Artificial Sequence
  Synthetic
uguaacaacuaugagcaga

SEQ ID NO: 479418 - RNA, 20 nt, Artificial Sequence
  Synthetic
uuguaacaacuaugagcaga

SEQ ID NO: 479419 - RNA, 21 nt, Artificial Sequence
  Synthetic
auuguaacaacuaugagcaga

SEQ ID NO: 479420 - RNA, 22 nt, Artificial Sequence
  Synthetic
aauuguaacaacuaugagcaga

SEQ ID NO: 479421 - RNA, 23 nt, Artificial Sequence
  Synthetic
aaauuguaacaacuaugagcaga

SEQ ID NO: 479422 - RNA, 24 nt, Artificial Sequence
  Synthetic
caaauuguaacaacuaugagcaga

SEQ ID NO: 479423 - RNA, 18 nt, Artificial Sequence
  Synthetic
gucuuuuaguauagcaga

SEQ ID NO: 479424 - RNA, 19 nt, Artificial Sequence
  Synthetic
ggucuuuuaguauagcaga

SEQ ID NO: 479425 - RNA, 20 nt, Artificial Sequence
  Synthetic
uggucuuuuaguauagcaga

SEQ ID NO: 479426 - RNA, 21 nt, Artificial Sequence
  Synthetic
guggucuuuuaguauagcaga

SEQ ID NO: 479427 - RNA, 22 nt, Artificial Sequence
  Synthetic
aguggucuuuuaguauagcaga

SEQ ID NO: 479428 - RNA, 23 nt, Artificial Sequence
  Synthetic
uaguggucuuuuaguauagcaga

SEQ ID NO: 479429 - RNA, 24 nt, Artificial Sequence
  Synthetic
uuaguggucuuuuaguauagcaga

SEQ ID NO: 479430 - RNA, 18 nt, Artificial Sequence
  Synthetic
aguauaauuuguagcaga

SEQ ID NO: 479431 - RNA, 19 nt, Artificial Sequence
  Synthetic
aaguauaauuuguagcaga

SEQ ID NO: 479432 - RNA, 20 nt, Artificial Sequence
  Synthetic
uaaguauaauuuguagcaga

SEQ ID NO: 479433 - RNA, 21 nt, Artificial Sequence
  Synthetic
cuaaguauaauuuguagcaga

SEQ ID NO: 479434 - RNA, 22 nt, Artificial Sequence
  Synthetic
gcuaaguauaauuuguagcaga

SEQ ID NO: 479435 - RNA, 23 nt, Artificial Sequence
  Synthetic
ugcuaaguauaauuuguagcaga

SEQ ID NO: 479436 - RNA, 24 nt, Artificial Sequence
  Synthetic
gugcuaaguauaauuuguagcaga

SEQ ID NO: 479437 - RNA, 18 nt, Artificial Sequence
  Synthetic
aagcccaaaguuagcaga

SEQ ID NO: 479438 - RNA, 19 nt, Artificial Sequence
  Synthetic
uaagcccaaaguuagcaga

SEQ ID NO: 479439 - RNA, 20 nt, Artificial Sequence
  Synthetic
cuaagcccaaaguuagcaga

SEQ ID NO: 479440 - RNA, 21 nt, Artificial Sequence
  Synthetic
acuaagcccaaaguuagcaga

SEQ ID NO: 479441 - RNA, 22 nt, Artificial Sequence
  Synthetic
aacuaagcccaaaguuagcaga

SEQ ID NO: 479442 - RNA, 23 nt, Artificial Sequence
  Synthetic
aaacuaagcccaaaguuagcaga

SEQ ID NO: 479443 - RNA, 24 nt, Artificial Sequence
  Synthetic
caaacuaagcccaaaguuagcaga

SEQ ID NO: 479444 - RNA, 20 nt, Artificial Sequence
  Synthetic
uuaagcccaaaguuagcaga

SEQ ID NO: 479445 - RNA, 21 nt, Artificial Sequence
  Synthetic
auuaagcccaaaguuagcaga

SEQ ID NO: 479446 - RNA, 22 nt, Artificial Sequence
  Synthetic
aauuaagcccaaaguuagcaga

SEQ ID NO: 479447 - RNA, 23 nt, Artificial Sequence
  Synthetic
gaauuaagcccaaaguuagcaga

SEQ ID NO: 479448 - RNA, 24 nt, Artificial Sequence
  Synthetic
ugaauuaagcccaaaguuagcaga

SEQ ID NO: 479449 - RNA, 18 nt, Artificial Sequence
  Synthetic
ugagugucauuuagcaga

SEQ ID NO: 479450 - RNA, 19 nt, Artificial Sequence
  Synthetic
uugagugucauuuagcaga

SEQ ID NO: 479451 - RNA, 20 nt, Artificial Sequence
  Synthetic
auugagugucauuuagcaga

SEQ ID NO: 479452 - RNA, 21 nt, Artificial Sequence
  Synthetic
gauugagugucauuuagcaga

SEQ ID NO: 479453 - RNA, 22 nt, Artificial Sequence
  Synthetic
ggauugagugucauuuagcaga

SEQ ID NO: 479454 - RNA, 23 nt, Artificial Sequence
  Synthetic
aggauugagugucauuuagcaga

SEQ ID NO: 479455 - RNA, 24 nt, Artificial Sequence
  Synthetic
uaggauugagugucauuuagcaga

SEQ ID NO: 479456 - RNA, 18 nt, Artificial Sequence
  Synthetic
uauuuccuuauccgcaga

SEQ ID NO: 479457 - RNA, 19 nt, Artificial Sequence
  Synthetic
cuauuuccuuauccgcaga

SEQ ID NO: 479458 - RNA, 20 nt, Artificial Sequence
  Synthetic
ucuauuuccuuauccgcaga

SEQ ID NO: 479459 - RNA, 21 nt, Artificial Sequence
  Synthetic
aucuauuuccuuauccgcaga

SEQ ID NO: 479460 - RNA, 22 nt, Artificial Sequence
  Synthetic
uaucuauuuccuuauccgcaga

SEQ ID NO: 479461 - RNA, 23 nt, Artificial Sequence
  Synthetic
uuaucuauuuccuuauccgcaga

SEQ ID NO: 479462 - RNA, 24 nt, Artificial Sequence
  Synthetic
cuuaucuauuuccuuauccgcaga

SEQ ID NO: 479463 - RNA, 18 nt, Artificial Sequence
  Synthetic
aagacuccgaaaggcaga

SEQ ID NO: 479464 - RNA, 19 nt, Artificial Sequence
  Synthetic
caagacuccgaaaggcaga

SEQ ID NO: 479465 - RNA, 20 nt, Artificial Sequence
  Synthetic
gcaagacuccgaaaggcaga

SEQ ID NO: 479466 - RNA, 21 nt, Artificial Sequence
  Synthetic
agcaagacuccgaaaggcaga

SEQ ID NO: 479467 - RNA, 22 nt, Artificial Sequence
  Synthetic
gagcaagacuccgaaaggcaga

SEQ ID NO: 479468 - RNA, 23 nt, Artificial Sequence
  Synthetic
agagcaagacuccgaaaggcaga

SEQ ID NO: 479469 - RNA, 24 nt, Artificial Sequence
  Synthetic
cagagcaagacuccgaaaggcaga

SEQ ID NO: 479470 - RNA, 18 nt, Artificial Sequence
  Synthetic
uugcacccauaaggcaga

SEQ ID NO: 479471 - RNA, 19 nt, Artificial Sequence
  Synthetic
guugcacccauaaggcaga

SEQ ID NO: 479472 - RNA, 20 nt, Artificial Sequence
  Synthetic
aguugcacccauaaggcaga

SEQ ID NO: 479473 - RNA, 21 nt, Artificial Sequence
  Synthetic
gaguugcacccauaaggcaga

SEQ ID NO: 479474 - RNA, 22 nt, Artificial Sequence
  Synthetic
ggaguugcacccauaaggcaga

SEQ ID NO: 479475 - RNA, 23 nt, Artificial Sequence
  Synthetic
gggaguugcacccauaaggcaga

SEQ ID NO: 479476 - RNA, 24 nt, Artificial Sequence
  Synthetic
cgggaguugcacccauaaggcaga

SEQ ID NO: 479477 - RNA, 18 nt, Artificial Sequence
  Synthetic
ugcuucuuaccaggcaga

SEQ ID NO: 479478 - RNA, 19 nt, Artificial Sequence
  Synthetic
cugcuucuuaccaggcaga

SEQ ID NO: 479479 - RNA, 20 nt, Artificial Sequence
  Synthetic
gcugcuucuuaccaggcaga

SEQ ID NO: 479480 - RNA, 21 nt, Artificial Sequence
  Synthetic
agcugcuucuuaccaggcaga

SEQ ID NO: 479481 - RNA, 22 nt, Artificial Sequence
  Synthetic
gagcugcuucuuaccaggcaga

SEQ ID NO: 479482 - RNA, 23 nt, Artificial Sequence
  Synthetic
agagcugcuucuuaccaggcaga

SEQ ID NO: 479483 - RNA, 24 nt, Artificial Sequence
  Synthetic
cagagcugcuucuuaccaggcaga

SEQ ID NO: 479484 - RNA, 18 nt, Artificial Sequence
  Synthetic
acaaacaaagcaggcaga

SEQ ID NO: 479485 - RNA, 19 nt, Artificial Sequence
  Synthetic
gacaaacaaagcaggcaga

SEQ ID NO: 479486 - RNA, 20 nt, Artificial Sequence
  Synthetic
agacaaacaaagcaggcaga

SEQ ID NO: 479487 - RNA, 21 nt, Artificial Sequence
  Synthetic
uagacaaacaaagcaggcaga

SEQ ID NO: 479488 - RNA, 22 nt, Artificial Sequence
  Synthetic
guagacaaacaaagcaggcaga

SEQ ID NO: 479489 - RNA, 23 nt, Artificial Sequence
  Synthetic
uguagacaaacaaagcaggcaga

SEQ ID NO: 479490 - RNA, 24 nt, Artificial Sequence
  Synthetic
auguagacaaacaaagcaggcaga

SEQ ID NO: 479491 - RNA, 18 nt, Artificial Sequence
  Synthetic
aagacuauuucaggcaga

SEQ ID NO: 479492 - RNA, 19 nt, Artificial Sequence
  Synthetic
gaagacuauuucaggcaga

SEQ ID NO: 479493 - RNA, 20 nt, Artificial Sequence
  Synthetic
ugaagacuauuucaggcaga

SEQ ID NO: 479494 - RNA, 21 nt, Artificial Sequence
  Synthetic
cugaagacuauuucaggcaga

SEQ ID NO: 479495 - RNA, 22 nt, Artificial Sequence
  Synthetic
acugaagacuauuucaggcaga

SEQ ID NO: 479496 - RNA, 23 nt, Artificial Sequence
  Synthetic
uacugaagacuauuucaggcaga

SEQ ID NO: 479497 - RNA, 24 nt, Artificial Sequence
  Synthetic
auacugaagacuauuucaggcaga

SEQ ID NO: 479498 - RNA, 18 nt, Artificial Sequence
  Synthetic
caauuaccaugaggcaga

SEQ ID NO: 479499 - RNA, 19 nt, Artificial Sequence
  Synthetic
acaauuaccaugaggcaga

SEQ ID NO: 479500 - RNA, 20 nt, Artificial Sequence
  Synthetic
uacaauuaccaugaggcaga

SEQ ID NO: 479501 - RNA, 21 nt, Artificial Sequence
  Synthetic
guacaauuaccaugaggcaga

SEQ ID NO: 479502 - RNA, 22 nt, Artificial Sequence
  Synthetic
gguacaauuaccaugaggcaga

SEQ ID NO: 479503 - RNA, 23 nt, Artificial Sequence
  Synthetic
agguacaauuaccaugaggcaga

SEQ ID NO: 479504 - RNA, 24 nt, Artificial Sequence
  Synthetic
cagguacaauuaccaugaggcaga

SEQ ID NO: 479505 - RNA, 18 nt, Artificial Sequence
  Synthetic
gauaacucuagcggcaga

SEQ ID NO: 479506 - RNA, 19 nt, Artificial Sequence
  Synthetic
ugauaacucuagcggcaga

SEQ ID NO: 479507 - RNA, 20 nt, Artificial Sequence
  Synthetic
augauaacucuagcggcaga

SEQ ID NO: 479508 - RNA, 21 nt, Artificial Sequence
  Synthetic
gaugauaacucuagcggcaga

SEQ ID NO: 479509 - RNA, 22 nt, Artificial Sequence
  Synthetic
agaugauaacucuagcggcaga

SEQ ID NO: 479510 - RNA, 23 nt, Artificial Sequence
  Synthetic
aagaugauaacucuagcggcaga

SEQ ID NO: 479511 - RNA, 24 nt, Artificial Sequence
  Synthetic
uaagaugauaacucuagcggcaga

SEQ ID NO: 479512 - RNA, 18 nt, Artificial Sequence
  Synthetic
gaaggucuuugcggcaga

SEQ ID NO: 479513 - RNA, 19 nt, Artificial Sequence
  Synthetic
agaaggucuuugcggcaga

SEQ ID NO: 479514 - RNA, 20 nt, Artificial Sequence
  Synthetic
uagaaggucuuugcggcaga

SEQ ID NO: 479515 - RNA, 21 nt, Artificial Sequence
  Synthetic
guagaaggucuuugcggcaga

SEQ ID NO: 479516 - RNA, 22 nt, Artificial Sequence
  Synthetic
gguagaaggucuuugcggcaga

SEQ ID NO: 479517 - RNA, 23 nt, Artificial Sequence
  Synthetic
ggguagaaggucuuugcggcaga

SEQ ID NO: 479518 - RNA, 24 nt, Artificial Sequence
  Synthetic
uggguagaaggucuuugcggcaga

SEQ ID NO: 479519 - RNA, 18 nt, Artificial Sequence
  Synthetic
agacugaaaaggggcaga

SEQ ID NO: 479520 - RNA, 19 nt, Artificial Sequence
  Synthetic
gagacugaaaaggggcaga

SEQ ID NO: 479521 - RNA, 20 nt, Artificial Sequence
  Synthetic
agagacugaaaaggggcaga

SEQ ID NO: 479522 - RNA, 21 nt, Artificial Sequence
  Synthetic
gagagacugaaaaggggcaga

SEQ ID NO: 479523 - RNA, 22 nt, Artificial Sequence
  Synthetic
ggagagacugaaaaggggcaga

SEQ ID NO: 479524 - RNA, 23 nt, Artificial Sequence
  Synthetic
cggagagacugaaaaggggcaga

SEQ ID NO: 479525 - RNA, 24 nt, Artificial Sequence
  Synthetic
acggagagacugaaaaggggcaga

SEQ ID NO: 479526 - RNA, 18 nt, Artificial Sequence
  Synthetic
uagguggcaaggggcaga

SEQ ID NO: 479527 - RNA, 19 nt, Artificial Sequence
  Synthetic
auagguggcaaggggcaga

SEQ ID NO: 479528 - RNA, 20 nt, Artificial Sequence
  Synthetic
aauagguggcaaggggcaga

SEQ ID NO: 479529 - RNA, 21 nt, Artificial Sequence
  Synthetic
aaauagguggcaaggggcaga

SEQ ID NO: 479530 - RNA, 22 nt, Artificial Sequence
  Synthetic
aaaauagguggcaaggggcaga

SEQ ID NO: 479531 - RNA, 23 nt, Artificial Sequence
  Synthetic
aaaaauagguggcaaggggcaga

SEQ ID NO: 479532 - RNA, 24 nt, Artificial Sequence
  Synthetic
gaaaaauagguggcaaggggcaga

SEQ ID NO: 479533 - RNA, 18 nt, Artificial Sequence
  Synthetic
uucacugauuggggcaga

SEQ ID NO: 479534 - RNA, 19 nt, Artificial Sequence
  Synthetic
guucacugauuggggcaga

SEQ ID NO: 479535 - RNA, 20 nt, Artificial Sequence
  Synthetic
gguucacugauuggggcaga

SEQ ID NO: 479536 - RNA, 21 nt, Artificial Sequence
  Synthetic
agguucacugauuggggcaga

SEQ ID NO: 479537 - RNA, 22 nt, Artificial Sequence
  Synthetic
aagguucacugauuggggcaga

SEQ ID NO: 479538 - RNA, 23 nt, Artificial Sequence
  Synthetic
gaagguucacugauuggggcaga

SEQ ID NO: 479539 - RNA, 24 nt, Artificial Sequence
  Synthetic
cgaagguucacugauuggggcaga

SEQ ID NO: 479540 - RNA, 18 nt, Artificial Sequence
  Synthetic
aaauucucccauggcaga

SEQ ID NO: 479541 - RNA, 19 nt, Artificial Sequence
  Synthetic
gaaauucucccauggcaga

SEQ ID NO: 479542 - RNA, 20 nt, Artificial Sequence
  Synthetic
ugaaauucucccauggcaga

SEQ ID NO: 479543 - RNA, 21 nt, Artificial Sequence
  Synthetic
augaaauucucccauggcaga

SEQ ID NO: 479544 - RNA, 22 nt, Artificial Sequence
  Synthetic
uaugaaauucucccauggcaga

SEQ ID NO: 479545 - RNA, 23 nt, Artificial Sequence
  Synthetic
auaugaaauucucccauggcaga

SEQ ID NO: 479546 - RNA, 24 nt, Artificial Sequence
  Synthetic
aauaugaaauucucccauggcaga

SEQ ID NO: 479547 - RNA, 18 nt, Artificial Sequence
  Synthetic
ggggagauugcuggcaga

SEQ ID NO: 479548 - RNA, 19 nt, Artificial Sequence
  Synthetic
cggggagauugcuggcaga

SEQ ID NO: 479549 - RNA, 20 nt, Artificial Sequence
  Synthetic
acggggagauugcuggcaga

SEQ ID NO: 479550 - RNA, 21 nt, Artificial Sequence
  Synthetic
uacggggagauugcuggcaga

SEQ ID NO: 479551 - RNA, 22 nt, Artificial Sequence
  Synthetic
auacggggagauugcuggcaga

SEQ ID NO: 479552 - RNA, 23 nt, Artificial Sequence
  Synthetic
uauacggggagauugcuggcaga

SEQ ID NO: 479553 - RNA, 24 nt, Artificial Sequence
  Synthetic
cuauacggggagauugcuggcaga

SEQ ID NO: 479554 - RNA, 18 nt, Artificial Sequence
  Synthetic
gugcccaucaguggcaga

SEQ ID NO: 479555 - RNA, 19 nt, Artificial Sequence
  Synthetic
ggugcccaucaguggcaga

SEQ ID NO: 479556 - RNA, 20 nt, Artificial Sequence
  Synthetic
aggugcccaucaguggcaga

SEQ ID NO: 479557 - RNA, 21 nt, Artificial Sequence
  Synthetic
uaggugcccaucaguggcaga

SEQ ID NO: 479558 - RNA, 22 nt, Artificial Sequence
  Synthetic
cuaggugcccaucaguggcaga

SEQ ID NO: 479559 - RNA, 23 nt, Artificial Sequence
  Synthetic
ccuaggugcccaucaguggcaga

SEQ ID NO: 479560 - RNA, 24 nt, Artificial Sequence
  Synthetic
gccuaggugcccaucaguggcaga

SEQ ID NO: 479561 - RNA, 18 nt, Artificial Sequence
  Synthetic
uuaggcacaguuggcaga

SEQ ID NO: 479562 - RNA, 19 nt, Artificial Sequence
  Synthetic
auuaggcacaguuggcaga

SEQ ID NO: 479563 - RNA, 20 nt, Artificial Sequence
  Synthetic
uauuaggcacaguuggcaga

SEQ ID NO: 479564 - RNA, 21 nt, Artificial Sequence
  Synthetic
uuauuaggcacaguuggcaga

SEQ ID NO: 479565 - RNA, 22 nt, Artificial Sequence
  Synthetic
cuuauuaggcacaguuggcaga

SEQ ID NO: 479566 - RNA, 23 nt, Artificial Sequence
  Synthetic
acuuauuaggcacaguuggcaga

SEQ ID NO: 479567 - RNA, 24 nt, Artificial Sequence
  Synthetic
gacuuauuaggcacaguuggcaga

SEQ ID NO: 479568 - RNA, 18 nt, Artificial Sequence
  Synthetic
caauauaagaaaugcaga

SEQ ID NO: 479569 - RNA, 19 nt, Artificial Sequence
  Synthetic
ucaauauaagaaaugcaga

SEQ ID NO: 479570 - RNA, 20 nt, Artificial Sequence
  Synthetic
gucaauauaagaaaugcaga

SEQ ID NO: 479571 - RNA, 21 nt, Artificial Sequence
  Synthetic
agucaauauaagaaaugcaga

SEQ ID NO: 479572 - RNA, 22 nt, Artificial Sequence
  Synthetic
cagucaauauaagaaaugcaga

SEQ ID NO: 479573 - RNA, 23 nt, Artificial Sequence
  Synthetic
ucagucaauauaagaaaugcaga

SEQ ID NO: 479574 - RNA, 24 nt, Artificial Sequence
  Synthetic
aucagucaauauaagaaaugcaga

SEQ ID NO: 479575 - RNA, 18 nt, Artificial Sequence
  Synthetic
aauuuugaucaaugcaga

SEQ ID NO: 479576 - RNA, 19 nt, Artificial Sequence
  Synthetic
uaauuuugaucaaugcaga

SEQ ID NO: 479577 - RNA, 20 nt, Artificial Sequence
  Synthetic
cuaauuuugaucaaugcaga

SEQ ID NO: 479578 - RNA, 21 nt, Artificial Sequence
  Synthetic
acuaauuuugaucaaugcaga

SEQ ID NO: 479579 - RNA, 22 nt, Artificial Sequence
  Synthetic
aacuaauuuugaucaaugcaga

SEQ ID NO: 479580 - RNA, 23 nt, Artificial Sequence
  Synthetic
gaacuaauuuugaucaaugcaga

SEQ ID NO: 479581 - RNA, 24 nt, Artificial Sequence
  Synthetic
ggaacuaauuuugaucaaugcaga

SEQ ID NO: 479582 - RNA, 18 nt, Artificial Sequence
  Synthetic
cuauccaaagaaugcaga

SEQ ID NO: 479583 - RNA, 19 nt, Artificial Sequence
  Synthetic
ccuauccaaagaaugcaga

SEQ ID NO: 479584 - RNA, 20 nt, Artificial Sequence
  Synthetic
gccuauccaaagaaugcaga

SEQ ID NO: 479585 - RNA, 21 nt, Artificial Sequence
  Synthetic
ugccuauccaaagaaugcaga

SEQ ID NO: 479586 - RNA, 22 nt, Artificial Sequence
  Synthetic
cugccuauccaaagaaugcaga

SEQ ID NO: 479587 - RNA, 23 nt, Artificial Sequence
  Synthetic
acugccuauccaaagaaugcaga

SEQ ID NO: 479588 - RNA, 24 nt, Artificial Sequence
  Synthetic
cacugccuauccaaagaaugcaga

SEQ ID NO: 479589 - RNA, 18 nt, Artificial Sequence
  Synthetic
ucguuuugauaaugcaga

SEQ ID NO: 479590 - RNA, 19 nt, Artificial Sequence
  Synthetic
gucguuuugauaaugcaga

SEQ ID NO: 479591 - RNA, 20 nt, Artificial Sequence
  Synthetic
ugucguuuugauaaugcaga

SEQ ID NO: 479592 - RNA, 21 nt, Artificial Sequence
  Synthetic
cugucguuuugauaaugcaga

SEQ ID NO: 479593 - RNA, 22 nt, Artificial Sequence
  Synthetic
gcugucguuuugauaaugcaga

SEQ ID NO: 479594 - RNA, 23 nt, Artificial Sequence
  Synthetic
ggcugucguuuugauaaugcaga

SEQ ID NO: 479595 - RNA, 24 nt, Artificial Sequence
  Synthetic
uggcugucguuuugauaaugcaga

SEQ ID NO: 479596 - RNA, 18 nt, Artificial Sequence
  Synthetic
agcacuuaaacaugcaga

SEQ ID NO: 479597 - RNA, 19 nt, Artificial Sequence
  Synthetic
uagcacuuaaacaugcaga

SEQ ID NO: 479598 - RNA, 20 nt, Artificial Sequence
  Synthetic
auagcacuuaaacaugcaga

SEQ ID NO: 479599 - RNA, 21 nt, Artificial Sequence
  Synthetic
aauagcacuuaaacaugcaga

SEQ ID NO: 479600 - RNA, 22 nt, Artificial Sequence
  Synthetic
aaauagcacuuaaacaugcaga

SEQ ID NO: 479601 - RNA, 23 nt, Artificial Sequence
  Synthetic
aaaauagcacuuaaacaugcaga

SEQ ID NO: 479602 - RNA, 24 nt, Artificial Sequence
  Synthetic
uaaaauagcacuuaaacaugcaga

SEQ ID NO: 479603 - RNA, 18 nt, Artificial Sequence
  Synthetic
augcaaaauugaugcaga

SEQ ID NO: 479604 - RNA, 19 nt, Artificial Sequence
  Synthetic
gaugcaaaauugaugcaga

SEQ ID NO: 479605 - RNA, 20 nt, Artificial Sequence
  Synthetic
ugaugcaaaauugaugcaga

SEQ ID NO: 479606 - RNA, 21 nt, Artificial Sequence
  Synthetic
uugaugcaaaauugaugcaga

SEQ ID NO: 479607 - RNA, 22 nt, Artificial Sequence
  Synthetic
auugaugcaaaauugaugcaga

SEQ ID NO: 479608 - RNA, 23 nt, Artificial Sequence
  Synthetic
uauugaugcaaaauugaugcaga

SEQ ID NO: 479609 - RNA, 24 nt, Artificial Sequence
  Synthetic
auauugaugcaaaauugaugcaga

SEQ ID NO: 479610 - RNA, 18 nt, Artificial Sequence
  Synthetic
ggaagagaaauaugcaga

SEQ ID NO: 479611 - RNA, 19 nt, Artificial Sequence
  Synthetic
uggaagagaaauaugcaga

SEQ ID NO: 479612 - RNA, 20 nt, Artificial Sequence
  Synthetic
auggaagagaaauaugcaga

SEQ ID NO: 479613 - RNA, 21 nt, Artificial Sequence
  Synthetic
cauggaagagaaauaugcaga

SEQ ID NO: 479614 - RNA, 22 nt, Artificial Sequence
  Synthetic
acauggaagagaaauaugcaga

SEQ ID NO: 479615 - RNA, 23 nt, Artificial Sequence
  Synthetic
gacauggaagagaaauaugcaga

SEQ ID NO: 479616 - RNA, 24 nt, Artificial Sequence
  Synthetic
agacauggaagagaaauaugcaga

SEQ ID NO: 479617 - RNA, 18 nt, Artificial Sequence
  Synthetic
gucauugaaaacugcaga

SEQ ID NO: 479618 - RNA, 19 nt, Artificial Sequence
  Synthetic
cgucauugaaaacugcaga

SEQ ID NO: 479619 - RNA, 20 nt, Artificial Sequence
  Synthetic
acgucauugaaaacugcaga

SEQ ID NO: 479620 - RNA, 21 nt, Artificial Sequence
  Synthetic
cacgucauugaaaacugcaga

SEQ ID NO: 479621 - RNA, 22 nt, Artificial Sequence
  Synthetic
ucacgucauugaaaacugcaga

SEQ ID NO: 479622 - RNA, 23 nt, Artificial Sequence
  Synthetic
uucacgucauugaaaacugcaga

SEQ ID NO: 479623 - RNA, 24 nt, Artificial Sequence
  Synthetic
guucacgucauugaaaacugcaga

SEQ ID NO: 479624 - RNA, 18 nt, Artificial Sequence
  Synthetic
uauaggccaagcugcaga

SEQ ID NO: 479625 - RNA, 19 nt, Artificial Sequence
  Synthetic
cuauaggccaagcugcaga

SEQ ID NO: 479626 - RNA, 20 nt, Artificial Sequence
  Synthetic
ucuauaggccaagcugcaga

SEQ ID NO: 479627 - RNA, 21 nt, Artificial Sequence
  Synthetic
aucuauaggccaagcugcaga

SEQ ID NO: 479628 - RNA, 22 nt, Artificial Sequence
  Synthetic
aaucuauaggccaagcugcaga

SEQ ID NO: 479629 - RNA, 23 nt, Artificial Sequence
  Synthetic
gaaucuauaggccaagcugcaga

SEQ ID NO: 479630 - RNA, 24 nt, Artificial Sequence
  Synthetic
cgaaucuauaggccaagcugcaga

SEQ ID NO: 479631 - RNA, 18 nt, Artificial Sequence
  Synthetic
aacaggaaccucugcaga

SEQ ID NO: 479632 - RNA, 19 nt, Artificial Sequence
  Synthetic
aaacaggaaccucugcaga

SEQ ID NO: 479633 - RNA, 20 nt, Artificial Sequence
  Synthetic
uaaacaggaaccucugcaga

SEQ ID NO: 479634 - RNA, 21 nt, Artificial Sequence
  Synthetic
guaaacaggaaccucugcaga

SEQ ID NO: 479635 - RNA, 22 nt, Artificial Sequence
  Synthetic
uguaaacaggaaccucugcaga

SEQ ID NO: 479636 - RNA, 23 nt, Artificial Sequence
  Synthetic
cuguaaacaggaaccucugcaga

SEQ ID NO: 479637 - RNA, 24 nt, Artificial Sequence
  Synthetic
acuguaaacaggaaccucugcaga

SEQ ID NO: 479638 - RNA, 18 nt, Artificial Sequence
  Synthetic
cauuucugcaagugcaga

SEQ ID NO: 479639 - RNA, 19 nt, Artificial Sequence
  Synthetic
acauuucugcaagugcaga

SEQ ID NO: 479640 - RNA, 20 nt, Artificial Sequence
  Synthetic
aacauuucugcaagugcaga

SEQ ID NO: 479641 - RNA, 21 nt, Artificial Sequence
  Synthetic
aaacauuucugcaagugcaga

SEQ ID NO: 479642 - RNA, 22 nt, Artificial Sequence
  Synthetic
uaaacauuucugcaagugcaga

SEQ ID NO: 479643 - RNA, 23 nt, Artificial Sequence
  Synthetic
uuaaacauuucugcaagugcaga

SEQ ID NO: 479644 - RNA, 24 nt, Artificial Sequence
  Synthetic
auuaaacauuucugcaagugcaga

SEQ ID NO: 479645 - RNA, 18 nt, Artificial Sequence
  Synthetic
cuggacgugcagugcaga

SEQ ID NO: 479646 - RNA, 19 nt, Artificial Sequence
  Synthetic
acuggacgugcagugcaga

SEQ ID NO: 479647 - RNA, 20 nt, Artificial Sequence
  Synthetic
cacuggacgugcagugcaga

SEQ ID NO: 479648 - RNA, 21 nt, Artificial Sequence
  Synthetic
gcacuggacgugcagugcaga

SEQ ID NO: 479649 - RNA, 22 nt, Artificial Sequence
  Synthetic
agcacuggacgugcagugcaga

SEQ ID NO: 479650 - RNA, 23 nt, Artificial Sequence
  Synthetic
cagcacuggacgugcagugcaga

SEQ ID NO: 479651 - RNA, 24 nt, Artificial Sequence
  Synthetic
ccagcacuggacgugcagugcaga

SEQ ID NO: 479652 - RNA, 18 nt, Artificial Sequence
  Synthetic
cuccagccagggugcaga

SEQ ID NO: 479653 - RNA, 19 nt, Artificial Sequence
  Synthetic
acuccagccagggugcaga

SEQ ID NO: 479654 - RNA, 20 nt, Artificial Sequence
  Synthetic
cacuccagccagggugcaga

SEQ ID NO: 479655 - RNA, 21 nt, Artificial Sequence
  Synthetic
gcacuccagccagggugcaga

SEQ ID NO: 479656 - RNA, 22 nt, Artificial Sequence
  Synthetic
ugcacuccagccagggugcaga

SEQ ID NO: 479657 - RNA, 23 nt, Artificial Sequence
  Synthetic
cugcacuccagccagggugcaga

SEQ ID NO: 479658 - RNA, 24 nt, Artificial Sequence
  Synthetic
acugcacuccagccagggugcaga

SEQ ID NO: 479659 - RNA, 18 nt, Artificial Sequence
  Synthetic
uaaaggagguggugcaga

SEQ ID NO: 479660 - RNA, 19 nt, Artificial Sequence
  Synthetic
guaaaggagguggugcaga

SEQ ID NO: 479661 - RNA, 20 nt, Artificial Sequence
  Synthetic
aguaaaggagguggugcaga

SEQ ID NO: 479662 - RNA, 21 nt, Artificial Sequence
  Synthetic
aaguaaaggagguggugcaga

SEQ ID NO: 479663 - RNA, 22 nt, Artificial Sequence
  Synthetic
caaguaaaggagguggugcaga

SEQ ID NO: 479664 - RNA, 23 nt, Artificial Sequence
  Synthetic
acaaguaaaggagguggugcaga

SEQ ID NO: 479665 - RNA, 24 nt, Artificial Sequence
  Synthetic
aacaaguaaaggagguggugcaga

SEQ ID NO: 479666 - RNA, 18 nt, Artificial Sequence
  Synthetic
cuacucaaaaugugcaga

SEQ ID NO: 479667 - RNA, 19 nt, Artificial Sequence
  Synthetic
gcuacucaaaaugugcaga

SEQ ID NO: 479668 - RNA, 20 nt, Artificial Sequence
  Synthetic
agcuacucaaaaugugcaga

SEQ ID NO: 479669 - RNA, 21 nt, Artificial Sequence
  Synthetic
aagcuacucaaaaugugcaga

SEQ ID NO: 479670 - RNA, 22 nt, Artificial Sequence
  Synthetic
aaagcuacucaaaaugugcaga

SEQ ID NO: 479671 - RNA, 23 nt, Artificial Sequence
  Synthetic
caaagcuacucaaaaugugcaga

SEQ ID NO: 479672 - RNA, 24 nt, Artificial Sequence
  Synthetic
acaaagcuacucaaaaugugcaga

SEQ ID NO: 479673 - RNA, 18 nt, Artificial Sequence
  Synthetic
cucaaucagcugugcaga

SEQ ID NO: 479674 - RNA, 19 nt, Artificial Sequence
  Synthetic
ucucaaucagcugugcaga

SEQ ID NO: 479675 - RNA, 20 nt, Artificial Sequence
  Synthetic
uucucaaucagcugugcaga

SEQ ID NO: 479676 - RNA, 21 nt, Artificial Sequence
  Synthetic
uuucucaaucagcugugcaga

SEQ ID NO: 479677 - RNA, 22 nt, Artificial Sequence
  Synthetic
auuucucaaucagcugugcaga

SEQ ID NO: 479678 - RNA, 23 nt, Artificial Sequence
  Synthetic
cauuucucaaucagcugugcaga

SEQ ID NO: 479679 - RNA, 24 nt, Artificial Sequence
  Synthetic
acauuucucaaucagcugugcaga

SEQ ID NO: 479680 - RNA, 18 nt, Artificial Sequence
  Synthetic
acugguugaaauugcaga

SEQ ID NO: 479681 - RNA, 19 nt, Artificial Sequence
  Synthetic
gacugguugaaauugcaga

SEQ ID NO: 479682 - RNA, 20 nt, Artificial Sequence
  Synthetic
agacugguugaaauugcaga

SEQ ID NO: 479683 - RNA, 21 nt, Artificial Sequence
  Synthetic
cagacugguugaaauugcaga

SEQ ID NO: 479684 - RNA, 22 nt, Artificial Sequence
  Synthetic
acagacugguugaaauugcaga

SEQ ID NO: 479685 - RNA, 23 nt, Artificial Sequence
  Synthetic
aacagacugguugaaauugcaga

SEQ ID NO: 479686 - RNA, 24 nt, Artificial Sequence
  Synthetic
caacagacugguugaaauugcaga

SEQ ID NO: 479687 - RNA, 18 nt, Artificial Sequence
  Synthetic
gcaauuggcuauugcaga

SEQ ID NO: 479688 - RNA, 19 nt, Artificial Sequence
  Synthetic
ggcaauuggcuauugcaga

SEQ ID NO: 479689 - RNA, 20 nt, Artificial Sequence
  Synthetic
cggcaauuggcuauugcaga

SEQ ID NO: 479690 - RNA, 21 nt, Artificial Sequence
  Synthetic
ucggcaauuggcuauugcaga

SEQ ID NO: 479691 - RNA, 22 nt, Artificial Sequence
  Synthetic
cucggcaauuggcuauugcaga

SEQ ID NO: 479692 - RNA, 23 nt, Artificial Sequence
  Synthetic
ccucggcaauuggcuauugcaga

SEQ ID NO: 479693 - RNA, 24 nt, Artificial Sequence
  Synthetic
accucggcaauuggcuauugcaga

SEQ ID NO: 479694 - RNA, 18 nt, Artificial Sequence
  Synthetic
uauugggauucuugcaga

SEQ ID NO: 479695 - RNA, 19 nt, Artificial Sequence
  Synthetic
guauugggauucuugcaga

SEQ ID NO: 479696 - RNA, 20 nt, Artificial Sequence
  Synthetic
aguauugggauucuugcaga

SEQ ID NO: 479697 - RNA, 21 nt, Artificial Sequence
  Synthetic
uaguauugggauucuugcaga

SEQ ID NO: 479698 - RNA, 22 nt, Artificial Sequence
  Synthetic
uuaguauugggauucuugcaga

SEQ ID NO: 479699 - RNA, 23 nt, Artificial Sequence
  Synthetic
guuaguauugggauucuugcaga

SEQ ID NO: 479700 - RNA, 24 nt, Artificial Sequence
  Synthetic
gguuaguauugggauucuugcaga

SEQ ID NO: 479701 - RNA, 18 nt, Artificial Sequence
  Synthetic
uauuuugguauuugcaga

SEQ ID NO: 479702 - RNA, 19 nt, Artificial Sequence
  Synthetic
cuauuuugguauuugcaga

SEQ ID NO: 479703 - RNA, 20 nt, Artificial Sequence
  Synthetic
acuauuuugguauuugcaga

SEQ ID NO: 479704 - RNA, 21 nt, Artificial Sequence
  Synthetic
gacuauuuugguauuugcaga

SEQ ID NO: 479705 - RNA, 22 nt, Artificial Sequence
  Synthetic
ugacuauuuugguauuugcaga

SEQ ID NO: 479706 - RNA, 23 nt, Artificial Sequence
  Synthetic
uugacuauuuugguauuugcaga

SEQ ID NO: 479707 - RNA, 24 nt, Artificial Sequence
  Synthetic
uuugacuauuuugguauuugcaga

SEQ ID NO: 479708 - RNA, 18 nt, Artificial Sequence
  Synthetic
aaggggauacuuugcaga

SEQ ID NO: 479709 - RNA, 19 nt, Artificial Sequence
  Synthetic
aaaggggauacuuugcaga

SEQ ID NO: 479710 - RNA, 20 nt, Artificial Sequence
  Synthetic
caaaggggauacuuugcaga

SEQ ID NO: 479711 - RNA, 21 nt, Artificial Sequence
  Synthetic
acaaaggggauacuuugcaga

SEQ ID NO: 479712 - RNA, 22 nt, Artificial Sequence
  Synthetic
gacaaaggggauacuuugcaga

SEQ ID NO: 479713 - RNA, 23 nt, Artificial Sequence
  Synthetic
agacaaaggggauacuuugcaga

SEQ ID NO: 479714 - RNA, 24 nt, Artificial Sequence
  Synthetic
aagacaaaggggauacuuugcaga

SEQ ID NO: 479715 - RNA, 18 nt, Artificial Sequence
  Synthetic
guacucucccaaaucaga

SEQ ID NO: 479716 - RNA, 19 nt, Artificial Sequence
  Synthetic
uguacucucccaaaucaga

SEQ ID NO: 479717 - RNA, 20 nt, Artificial Sequence
  Synthetic
uuguacucucccaaaucaga

SEQ ID NO: 479718 - RNA, 21 nt, Artificial Sequence
  Synthetic
uuuguacucucccaaaucaga

SEQ ID NO: 479719 - RNA, 22 nt, Artificial Sequence
  Synthetic
auuuguacucucccaaaucaga

SEQ ID NO: 479720 - RNA, 23 nt, Artificial Sequence
  Synthetic
aauuuguacucucccaaaucaga

SEQ ID NO: 479721 - RNA, 24 nt, Artificial Sequence
  Synthetic
caauuuguacucucccaaaucaga

SEQ ID NO: 479722 - RNA, 18 nt, Artificial Sequence
  Synthetic
gaaaacuucacaaucaga

SEQ ID NO: 479723 - RNA, 19 nt, Artificial Sequence
  Synthetic
agaaaacuucacaaucaga

SEQ ID NO: 479724 - RNA, 20 nt, Artificial Sequence
  Synthetic
aagaaaacuucacaaucaga

SEQ ID NO: 479725 - RNA, 21 nt, Artificial Sequence
  Synthetic
gaagaaaacuucacaaucaga

SEQ ID NO: 479726 - RNA, 22 nt, Artificial Sequence
  Synthetic
ugaagaaaacuucacaaucaga

SEQ ID NO: 479727 - RNA, 23 nt, Artificial Sequence
  Synthetic
cugaagaaaacuucacaaucaga

SEQ ID NO: 479728 - RNA, 24 nt, Artificial Sequence
  Synthetic
ucugaagaaaacuucacaaucaga

SEQ ID NO: 479729 - RNA, 18 nt, Artificial Sequence
  Synthetic
ccuccacacagaaucaga

SEQ ID NO: 479730 - RNA, 19 nt, Artificial Sequence
  Synthetic
uccuccacacagaaucaga

SEQ ID NO: 479731 - RNA, 20 nt, Artificial Sequence
  Synthetic
cuccuccacacagaaucaga

SEQ ID NO: 479732 - RNA, 21 nt, Artificial Sequence
  Synthetic
ucuccuccacacagaaucaga

SEQ ID NO: 479733 - RNA, 22 nt, Artificial Sequence
  Synthetic
uucuccuccacacagaaucaga

SEQ ID NO: 479734 - RNA, 23 nt, Artificial Sequence
  Synthetic
uuucuccuccacacagaaucaga

SEQ ID NO: 479735 - RNA, 24 nt, Artificial Sequence
  Synthetic
uuuucuccuccacacagaaucaga

SEQ ID NO: 479736 - RNA, 18 nt, Artificial Sequence
  Synthetic
aguggcuucagaaucaga

SEQ ID NO: 479737 - RNA, 19 nt, Artificial Sequence
  Synthetic
caguggcuucagaaucaga

SEQ ID NO: 479738 - RNA, 20 nt, Artificial Sequence
  Synthetic
gcaguggcuucagaaucaga

SEQ ID NO: 479739 - RNA, 21 nt, Artificial Sequence
  Synthetic
agcaguggcuucagaaucaga

SEQ ID NO: 479740 - RNA, 22 nt, Artificial Sequence
  Synthetic
cagcaguggcuucagaaucaga

SEQ ID NO: 479741 - RNA, 23 nt, Artificial Sequence
  Synthetic
acagcaguggcuucagaaucaga

SEQ ID NO: 479742 - RNA, 24 nt, Artificial Sequence
  Synthetic
aacagcaguggcuucagaaucaga

SEQ ID NO: 479743 - RNA, 18 nt, Artificial Sequence
  Synthetic
gagauuugcauaaucaga

SEQ ID NO: 479744 - RNA, 19 nt, Artificial Sequence
  Synthetic
agagauuugcauaaucaga

SEQ ID NO: 479745 - RNA, 20 nt, Artificial Sequence
  Synthetic
gagagauuugcauaaucaga

SEQ ID NO: 479746 - RNA, 21 nt, Artificial Sequence
  Synthetic
ugagagauuugcauaaucaga

SEQ ID NO: 479747 - RNA, 22 nt, Artificial Sequence
  Synthetic
gugagagauuugcauaaucaga

SEQ ID NO: 479748 - RNA, 23 nt, Artificial Sequence
  Synthetic
ggugagagauuugcauaaucaga

SEQ ID NO: 479749 - RNA, 24 nt, Artificial Sequence
  Synthetic
uggugagagauuugcauaaucaga

SEQ ID NO: 479750 - RNA, 18 nt, Artificial Sequence
  Synthetic
aaagaaaguaccaucaga

SEQ ID NO: 479751 - RNA, 19 nt, Artificial Sequence
  Synthetic
aaaagaaaguaccaucaga

SEQ ID NO: 479752 - RNA, 20 nt, Artificial Sequence
  Synthetic
caaaagaaaguaccaucaga

SEQ ID NO: 479753 - RNA, 21 nt, Artificial Sequence
  Synthetic
gcaaaagaaaguaccaucaga

SEQ ID NO: 479754 - RNA, 22 nt, Artificial Sequence
  Synthetic
agcaaaagaaaguaccaucaga

SEQ ID NO: 479755 - RNA, 23 nt, Artificial Sequence
  Synthetic
cagcaaaagaaaguaccaucaga

SEQ ID NO: 479756 - RNA, 24 nt, Artificial Sequence
  Synthetic
acagcaaaagaaaguaccaucaga

SEQ ID NO: 479757 - RNA, 18 nt, Artificial Sequence
  Synthetic
cacuuaaaucccaucaga

SEQ ID NO: 479758 - RNA, 19 nt, Artificial Sequence
  Synthetic
acacuuaaaucccaucaga

SEQ ID NO: 479759 - RNA, 20 nt, Artificial Sequence
  Synthetic
aacacuuaaaucccaucaga

SEQ ID NO: 479760 - RNA, 21 nt, Artificial Sequence
  Synthetic
uaacacuuaaaucccaucaga

SEQ ID NO: 479761 - RNA, 22 nt, Artificial Sequence
  Synthetic
cuaacacuuaaaucccaucaga

SEQ ID NO: 479762 - RNA, 23 nt, Artificial Sequence
  Synthetic
gcuaacacuuaaaucccaucaga

SEQ ID NO: 479763 - RNA, 24 nt, Artificial Sequence
  Synthetic
ugcuaacacuuaaaucccaucaga

SEQ ID NO: 479764 - RNA, 18 nt, Artificial Sequence
  Synthetic
guaaauuuaaucaucaga

SEQ ID NO: 479765 - RNA, 19 nt, Artificial Sequence
  Synthetic
cguaaauuuaaucaucaga

SEQ ID NO: 479766 - RNA, 20 nt, Artificial Sequence
  Synthetic
ucguaaauuuaaucaucaga

SEQ ID NO: 479767 - RNA, 21 nt, Artificial Sequence
  Synthetic
cucguaaauuuaaucaucaga

SEQ ID NO: 479768 - RNA, 22 nt, Artificial Sequence
  Synthetic
ucucguaaauuuaaucaucaga

SEQ ID NO: 479769 - RNA, 23 nt, Artificial Sequence
  Synthetic
gucucguaaauuuaaucaucaga

SEQ ID NO: 479770 - RNA, 24 nt, Artificial Sequence
  Synthetic
ugucucguaaauuuaaucaucaga

SEQ ID NO: 479771 - RNA, 18 nt, Artificial Sequence
  Synthetic
aaucugaagaucaucaga

SEQ ID NO: 479772 - RNA, 19 nt, Artificial Sequence
  Synthetic
aaaucugaagaucaucaga

SEQ ID NO: 479773 - RNA, 20 nt, Artificial Sequence
  Synthetic
aaaaucugaagaucaucaga

SEQ ID NO: 479774 - RNA, 21 nt, Artificial Sequence
  Synthetic
uaaaaucugaagaucaucaga

SEQ ID NO: 479775 - RNA, 22 nt, Artificial Sequence
  Synthetic
cuaaaaucugaagaucaucaga

SEQ ID NO: 479776 - RNA, 23 nt, Artificial Sequence
  Synthetic
ucuaaaaucugaagaucaucaga

SEQ ID NO: 479777 - RNA, 24 nt, Artificial Sequence
  Synthetic
aucuaaaaucugaagaucaucaga

SEQ ID NO: 479778 - RNA, 18 nt, Artificial Sequence
  Synthetic
uaguugggagucaucaga

SEQ ID NO: 479779 - RNA, 19 nt, Artificial Sequence
  Synthetic
cuaguugggagucaucaga

SEQ ID NO: 479780 - RNA, 20 nt, Artificial Sequence
  Synthetic
ccuaguugggagucaucaga

SEQ ID NO: 479781 - RNA, 21 nt, Artificial Sequence
  Synthetic
uccuaguugggagucaucaga

SEQ ID NO: 479782 - RNA, 22 nt, Artificial Sequence
  Synthetic
cuccuaguugggagucaucaga

SEQ ID NO: 479783 - RNA, 23 nt, Artificial Sequence
  Synthetic
acuccuaguugggagucaucaga

SEQ ID NO: 479784 - RNA, 24 nt, Artificial Sequence
  Synthetic
cacuccuaguugggagucaucaga

SEQ ID NO: 479785 - RNA, 18 nt, Artificial Sequence
  Synthetic
aggagaauguucaucaga

SEQ ID NO: 479786 - RNA, 19 nt, Artificial Sequence
  Synthetic
aaggagaauguucaucaga

SEQ ID NO: 479787 - RNA, 20 nt, Artificial Sequence
  Synthetic
caaggagaauguucaucaga

SEQ ID NO: 479788 - RNA, 21 nt, Artificial Sequence
  Synthetic
ucaaggagaauguucaucaga

SEQ ID NO: 479789 - RNA, 22 nt, Artificial Sequence
  Synthetic
gucaaggagaauguucaucaga

SEQ ID NO: 479790 - RNA, 23 nt, Artificial Sequence
  Synthetic
ugucaaggagaauguucaucaga

SEQ ID NO: 479791 - RNA, 24 nt, Artificial Sequence
  Synthetic
cugucaaggagaauguucaucaga

SEQ ID NO: 479792 - RNA, 18 nt, Artificial Sequence
  Synthetic
uuaacacauaagaucaga

SEQ ID NO: 479793 - RNA, 19 nt, Artificial Sequence
  Synthetic
uuuaacacauaagaucaga

SEQ ID NO: 479794 - RNA, 20 nt, Artificial Sequence
  Synthetic
auuuaacacauaagaucaga

SEQ ID NO: 479795 - RNA, 21 nt, Artificial Sequence
  Synthetic
uauuuaacacauaagaucaga

SEQ ID NO: 479796 - RNA, 22 nt, Artificial Sequence
  Synthetic
uuauuuaacacauaagaucaga

SEQ ID NO: 479797 - RNA, 23 nt, Artificial Sequence
  Synthetic
guuauuuaacacauaagaucaga

SEQ ID NO: 479798 - RNA, 24 nt, Artificial Sequence
  Synthetic
aguuauuuaacacauaagaucaga

SEQ ID NO: 479799 - RNA, 18 nt, Artificial Sequence
  Synthetic
gcuaucauugggaucaga

SEQ ID NO: 479800 - RNA, 19 nt, Artificial Sequence
  Synthetic
ugcuaucauugggaucaga

SEQ ID NO: 479801 - RNA, 20 nt, Artificial Sequence
  Synthetic
uugcuaucauugggaucaga

SEQ ID NO: 479802 - RNA, 21 nt, Artificial Sequence
  Synthetic
uuugcuaucauugggaucaga

SEQ ID NO: 479803 - RNA, 22 nt, Artificial Sequence
  Synthetic
uuuugcuaucauugggaucaga

SEQ ID NO: 479804 - RNA, 23 nt, Artificial Sequence
  Synthetic
guuuugcuaucauugggaucaga

SEQ ID NO: 479805 - RNA, 24 nt, Artificial Sequence
  Synthetic
uguuuugcuaucauugggaucaga

SEQ ID NO: 479806 - RNA, 18 nt, Artificial Sequence
  Synthetic
auggugcuuuggaucaga

SEQ ID NO: 479807 - RNA, 19 nt, Artificial Sequence
  Synthetic
gauggugcuuuggaucaga

SEQ ID NO: 479808 - RNA, 20 nt, Artificial Sequence
  Synthetic
ugauggugcuuuggaucaga

SEQ ID NO: 479809 - RNA, 21 nt, Artificial Sequence
  Synthetic
augauggugcuuuggaucaga

SEQ ID NO: 479810 - RNA, 22 nt, Artificial Sequence
  Synthetic
gaugauggugcuuuggaucaga

SEQ ID NO: 479811 - RNA, 23 nt, Artificial Sequence
  Synthetic
agaugauggugcuuuggaucaga

SEQ ID NO: 479812 - RNA, 24 nt, Artificial Sequence
  Synthetic
gagaugauggugcuuuggaucaga

SEQ ID NO: 479813 - RNA, 18 nt, Artificial Sequence
  Synthetic
uagaaugagaugaucaga

SEQ ID NO: 479814 - RNA, 19 nt, Artificial Sequence
  Synthetic
auagaaugagaugaucaga

SEQ ID NO: 479815 - RNA, 20 nt, Artificial Sequence
  Synthetic
cauagaaugagaugaucaga

SEQ ID NO: 479816 - RNA, 21 nt, Artificial Sequence
  Synthetic
ucauagaaugagaugaucaga

SEQ ID NO: 479817 - RNA, 22 nt, Artificial Sequence
  Synthetic
aucauagaaugagaugaucaga

SEQ ID NO: 479818 - RNA, 23 nt, Artificial Sequence
  Synthetic
gaucauagaaugagaugaucaga

SEQ ID NO: 479819 - RNA, 24 nt, Artificial Sequence
  Synthetic
agaucauagaaugagaugaucaga

SEQ ID NO: 479820 - RNA, 18 nt, Artificial Sequence
  Synthetic
guggaaaguuauaucaga

SEQ ID NO: 479821 - RNA, 19 nt, Artificial Sequence
  Synthetic
uguggaaaguuauaucaga

SEQ ID NO: 479822 - RNA, 20 nt, Artificial Sequence
  Synthetic
guguggaaaguuauaucaga

SEQ ID NO: 479823 - RNA, 21 nt, Artificial Sequence
  Synthetic
uguguggaaaguuauaucaga

SEQ ID NO: 479824 - RNA, 22 nt, Artificial Sequence
  Synthetic
cuguguggaaaguuauaucaga

SEQ ID NO: 479825 - RNA, 23 nt, Artificial Sequence
  Synthetic
ucuguguggaaaguuauaucaga

SEQ ID NO: 479826 - RNA, 24 nt, Artificial Sequence
  Synthetic
uucuguguggaaaguuauaucaga

SEQ ID NO: 479827 - RNA, 18 nt, Artificial Sequence
  Synthetic
caaauuuacacuaucaga

SEQ ID NO: 479828 - RNA, 19 nt, Artificial Sequence
  Synthetic
ucaaauuuacacuaucaga

SEQ ID NO: 479829 - RNA, 20 nt, Artificial Sequence
  Synthetic
gucaaauuuacacuaucaga

SEQ ID NO: 479830 - RNA, 21 nt, Artificial Sequence
  Synthetic
ugucaaauuuacacuaucaga

SEQ ID NO: 479831 - RNA, 22 nt, Artificial Sequence
  Synthetic
uugucaaauuuacacuaucaga

SEQ ID NO: 479832 - RNA, 23 nt, Artificial Sequence
  Synthetic
guugucaaauuuacacuaucaga

SEQ ID NO: 479833 - RNA, 24 nt, Artificial Sequence
  Synthetic
aguugucaaauuuacacuaucaga

SEQ ID NO: 479834 - RNA, 18 nt, Artificial Sequence
  Synthetic
aguaaagaugguaucaga

SEQ ID NO: 479835 - RNA, 19 nt, Artificial Sequence
  Synthetic
uaguaaagaugguaucaga

SEQ ID NO: 479836 - RNA, 20 nt, Artificial Sequence
  Synthetic
auaguaaagaugguaucaga

SEQ ID NO: 479837 - RNA, 21 nt, Artificial Sequence
  Synthetic
gauaguaaagaugguaucaga

SEQ ID NO: 479838 - RNA, 22 nt, Artificial Sequence
  Synthetic
ggauaguaaagaugguaucaga

SEQ ID NO: 479839 - RNA, 23 nt, Artificial Sequence
  Synthetic
aggauaguaaagaugguaucaga

SEQ ID NO: 479840 - RNA, 24 nt, Artificial Sequence
  Synthetic
caggauaguaaagaugguaucaga

SEQ ID NO: 479841 - RNA, 18 nt, Artificial Sequence
  Synthetic
uacauuugaaaacucaga

SEQ ID NO: 479842 - RNA, 19 nt, Artificial Sequence
  Synthetic
uuacauuugaaaacucaga

SEQ ID NO: 479843 - RNA, 20 nt, Artificial Sequence
  Synthetic
cuuacauuugaaaacucaga

SEQ ID NO: 479844 - RNA, 21 nt, Artificial Sequence
  Synthetic
gcuuacauuugaaaacucaga

SEQ ID NO: 479845 - RNA, 22 nt, Artificial Sequence
  Synthetic
agcuuacauuugaaaacucaga

SEQ ID NO: 479846 - RNA, 23 nt, Artificial Sequence
  Synthetic
uagcuuacauuugaaaacucaga

SEQ ID NO: 479847 - RNA, 24 nt, Artificial Sequence
  Synthetic
uuagcuuacauuugaaaacucaga

SEQ ID NO: 479848 - RNA, 18 nt, Artificial Sequence
  Synthetic
cauuuuaauaaacucaga

SEQ ID NO: 479849 - RNA, 19 nt, Artificial Sequence
  Synthetic
ucauuuuaauaaacucaga

SEQ ID NO: 479850 - RNA, 20 nt, Artificial Sequence
  Synthetic
aucauuuuaauaaacucaga

SEQ ID NO: 479851 - RNA, 21 nt, Artificial Sequence
  Synthetic
gaucauuuuaauaaacucaga

SEQ ID NO: 479852 - RNA, 22 nt, Artificial Sequence
  Synthetic
ugaucauuuuaauaaacucaga

SEQ ID NO: 479853 - RNA, 23 nt, Artificial Sequence
  Synthetic
augaucauuuuaauaaacucaga

SEQ ID NO: 479854 - RNA, 24 nt, Artificial Sequence
  Synthetic
uaugaucauuuuaauaaacucaga

SEQ ID NO: 479855 - RNA, 18 nt, Artificial Sequence
  Synthetic
uaggcacacagacucaga

SEQ ID NO: 479856 - RNA, 19 nt, Artificial Sequence
  Synthetic
uuaggcacacagacucaga

SEQ ID NO: 479857 - RNA, 20 nt, Artificial Sequence
  Synthetic
cuuaggcacacagacucaga

SEQ ID NO: 479858 - RNA, 21 nt, Artificial Sequence
  Synthetic
ucuuaggcacacagacucaga

SEQ ID NO: 479859 - RNA, 22 nt, Artificial Sequence
  Synthetic
aucuuaggcacacagacucaga

SEQ ID NO: 479860 - RNA, 23 nt, Artificial Sequence
  Synthetic
aaucuuaggcacacagacucaga

SEQ ID NO: 479861 - RNA, 24 nt, Artificial Sequence
  Synthetic
uaaucuuaggcacacagacucaga

SEQ ID NO: 479862 - RNA, 18 nt, Artificial Sequence
  Synthetic
uuacgauaauuacucaga

SEQ ID NO: 479863 - RNA, 19 nt, Artificial Sequence
  Synthetic
uuuacgauaauuacucaga

SEQ ID NO: 479864 - RNA, 20 nt, Artificial Sequence
  Synthetic
uuuuacgauaauuacucaga

SEQ ID NO: 479865 - RNA, 21 nt, Artificial Sequence
  Synthetic
auuuuacgauaauuacucaga

SEQ ID NO: 479866 - RNA, 22 nt, Artificial Sequence
  Synthetic
cauuuuacgauaauuacucaga

SEQ ID NO: 479867 - RNA, 23 nt, Artificial Sequence
  Synthetic
ccauuuuacgauaauuacucaga

SEQ ID NO: 479868 - RNA, 24 nt, Artificial Sequence
  Synthetic
cccauuuuacgauaauuacucaga

SEQ ID NO: 479869 - RNA, 18 nt, Artificial Sequence
  Synthetic
agcauauugccccucaga

SEQ ID NO: 479870 - RNA, 19 nt, Artificial Sequence
  Synthetic
aagcauauugccccucaga

SEQ ID NO: 479871 - RNA, 20 nt, Artificial Sequence
  Synthetic
uaagcauauugccccucaga

SEQ ID NO: 479872 - RNA, 21 nt, Artificial Sequence
  Synthetic
guaagcauauugccccucaga

SEQ ID NO: 479873 - RNA, 22 nt, Artificial Sequence
  Synthetic
aguaagcauauugccccucaga

SEQ ID NO: 479874 - RNA, 23 nt, Artificial Sequence
  Synthetic
caguaagcauauugccccucaga

SEQ ID NO: 479875 - RNA, 24 nt, Artificial Sequence
  Synthetic
ucaguaagcauauugccccucaga

SEQ ID NO: 479876 - RNA, 18 nt, Artificial Sequence
  Synthetic
uccuuccgagcccucaga

SEQ ID NO: 479877 - RNA, 19 nt, Artificial Sequence
  Synthetic
cuccuuccgagcccucaga

SEQ ID NO: 479878 - RNA, 20 nt, Artificial Sequence
  Synthetic
ucuccuuccgagcccucaga

SEQ ID NO: 479879 - RNA, 21 nt, Artificial Sequence
  Synthetic
uucuccuuccgagcccucaga

SEQ ID NO: 479880 - RNA, 22 nt, Artificial Sequence
  Synthetic
auucuccuuccgagcccucaga

SEQ ID NO: 479881 - RNA, 23 nt, Artificial Sequence
  Synthetic
gauucuccuuccgagcccucaga

SEQ ID NO: 479882 - RNA, 24 nt, Artificial Sequence
  Synthetic
agauucuccuuccgagcccucaga

SEQ ID NO: 479883 - RNA, 18 nt, Artificial Sequence
  Synthetic
agagauggggcccucaga

SEQ ID NO: 479884 - RNA, 19 nt, Artificial Sequence
  Synthetic
cagagauggggcccucaga

SEQ ID NO: 479885 - RNA, 20 nt, Artificial Sequence
  Synthetic
gcagagauggggcccucaga

SEQ ID NO: 479886 - RNA, 21 nt, Artificial Sequence
  Synthetic
ugcagagauggggcccucaga

SEQ ID NO: 479887 - RNA, 22 nt, Artificial Sequence
  Synthetic
cugcagagauggggcccucaga

SEQ ID NO: 479888 - RNA, 23 nt, Artificial Sequence
  Synthetic
gcugcagagauggggcccucaga

SEQ ID NO: 479889 - RNA, 24 nt, Artificial Sequence
  Synthetic
ugcugcagagauggggcccucaga

SEQ ID NO: 479890 - RNA, 18 nt, Artificial Sequence
  Synthetic
ggucaaggagagcucaga

SEQ ID NO: 479891 - RNA, 19 nt, Artificial Sequence
  Synthetic
aggucaaggagagcucaga

SEQ ID NO: 479892 - RNA, 20 nt, Artificial Sequence
  Synthetic
aaggucaaggagagcucaga

SEQ ID NO: 479893 - RNA, 21 nt, Artificial Sequence
  Synthetic
caaggucaaggagagcucaga

SEQ ID NO: 479894 - RNA, 22 nt, Artificial Sequence
  Synthetic
ucaaggucaaggagagcucaga

SEQ ID NO: 479895 - RNA, 23 nt, Artificial Sequence
  Synthetic
aucaaggucaaggagagcucaga

SEQ ID NO: 479896 - RNA, 24 nt, Artificial Sequence
  Synthetic
aaucaaggucaaggagagcucaga

SEQ ID NO: 479897 - RNA, 18 nt, Artificial Sequence
  Synthetic
ugaauccuacggcucaga

SEQ ID NO: 479898 - RNA, 19 nt, Artificial Sequence
  Synthetic
augaauccuacggcucaga

SEQ ID NO: 479899 - RNA, 20 nt, Artificial Sequence
  Synthetic
gaugaauccuacggcucaga

SEQ ID NO: 479900 - RNA, 21 nt, Artificial Sequence
  Synthetic
ugaugaauccuacggcucaga

SEQ ID NO: 479901 - RNA, 22 nt, Artificial Sequence
  Synthetic
uugaugaauccuacggcucaga

SEQ ID NO: 479902 - RNA, 23 nt, Artificial Sequence
  Synthetic
uuugaugaauccuacggcucaga

SEQ ID NO: 479903 - RNA, 24 nt, Artificial Sequence
  Synthetic
auuugaugaauccuacggcucaga

SEQ ID NO: 479904 - RNA, 18 nt, Artificial Sequence
  Synthetic
aaacuguuucugcucaga

SEQ ID NO: 479905 - RNA, 19 nt, Artificial Sequence
  Synthetic
aaaacuguuucugcucaga

SEQ ID NO: 479906 - RNA, 20 nt, Artificial Sequence
  Synthetic
caaaacuguuucugcucaga

SEQ ID NO: 479907 - RNA, 21 nt, Artificial Sequence
  Synthetic
ccaaaacuguuucugcucaga

SEQ ID NO: 479908 - RNA, 22 nt, Artificial Sequence
  Synthetic
uccaaaacuguuucugcucaga

SEQ ID NO: 479909 - RNA, 23 nt, Artificial Sequence
  Synthetic
uuccaaaacuguuucugcucaga

SEQ ID NO: 479910 - RNA, 24 nt, Artificial Sequence
  Synthetic
uuuccaaaacuguuucugcucaga

SEQ ID NO: 479911 - RNA, 18 nt, Artificial Sequence
  Synthetic
uguuugggaaaucucaga

SEQ ID NO: 479912 - RNA, 19 nt, Artificial Sequence
  Synthetic
auguuugggaaaucucaga

SEQ ID NO: 479913 - RNA, 20 nt, Artificial Sequence
  Synthetic
uauguuugggaaaucucaga

SEQ ID NO: 479914 - RNA, 21 nt, Artificial Sequence
  Synthetic
auauguuugggaaaucucaga

SEQ ID NO: 479915 - RNA, 22 nt, Artificial Sequence
  Synthetic
aauauguuugggaaaucucaga

SEQ ID NO: 479916 - RNA, 23 nt, Artificial Sequence
  Synthetic
caauauguuugggaaaucucaga

SEQ ID NO: 479917 - RNA, 24 nt, Artificial Sequence
  Synthetic
gcaauauguuugggaaaucucaga

SEQ ID NO: 479918 - RNA, 18 nt, Artificial Sequence
  Synthetic
ggcagagguggucucaga

SEQ ID NO: 479919 - RNA, 19 nt, Artificial Sequence
  Synthetic
aggcagagguggucucaga

SEQ ID NO: 479920 - RNA, 20 nt, Artificial Sequence
  Synthetic
caggcagagguggucucaga

SEQ ID NO: 479921 - RNA, 21 nt, Artificial Sequence
  Synthetic
ccaggcagagguggucucaga

SEQ ID NO: 479922 - RNA, 22 nt, Artificial Sequence
  Synthetic
uccaggcagagguggucucaga

SEQ ID NO: 479923 - RNA, 23 nt, Artificial Sequence
  Synthetic
guccaggcagagguggucucaga

SEQ ID NO: 479924 - RNA, 24 nt, Artificial Sequence
  Synthetic
aguccaggcagagguggucucaga

SEQ ID NO: 479925 - RNA, 18 nt, Artificial Sequence
  Synthetic
gacugagguggucucaga

SEQ ID NO: 479926 - RNA, 19 nt, Artificial Sequence
  Synthetic
agacugagguggucucaga

SEQ ID NO: 479927 - RNA, 20 nt, Artificial Sequence
  Synthetic
cagacugagguggucucaga

SEQ ID NO: 479928 - RNA, 21 nt, Artificial Sequence
  Synthetic
ccagacugagguggucucaga

SEQ ID NO: 479929 - RNA, 22 nt, Artificial Sequence
  Synthetic
uccagacugagguggucucaga

SEQ ID NO: 479930 - RNA, 23 nt, Artificial Sequence
  Synthetic
guccagacugagguggucucaga

SEQ ID NO: 479931 - RNA, 24 nt, Artificial Sequence
  Synthetic
aguccagacugagguggucucaga

SEQ ID NO: 479932 - RNA, 18 nt, Artificial Sequence
  Synthetic
uauguagaauuucucaga

SEQ ID NO: 479933 - RNA, 19 nt, Artificial Sequence
  Synthetic
uuauguagaauuucucaga

SEQ ID NO: 479934 - RNA, 20 nt, Artificial Sequence
  Synthetic
uuuauguagaauuucucaga

SEQ ID NO: 479935 - RNA, 21 nt, Artificial Sequence
  Synthetic
uuuuauguagaauuucucaga

SEQ ID NO: 479936 - RNA, 22 nt, Artificial Sequence
  Synthetic
uuuuuauguagaauuucucaga

SEQ ID NO: 479937 - RNA, 23 nt, Artificial Sequence
  Synthetic
auuuuuauguagaauuucucaga

SEQ ID NO: 479938 - RNA, 24 nt, Artificial Sequence
  Synthetic
aauuuuuauguagaauuucucaga

SEQ ID NO: 479939 - RNA, 18 nt, Artificial Sequence
  Synthetic
gcagauuuucaagucaga

SEQ ID NO: 479940 - RNA, 19 nt, Artificial Sequence
  Synthetic
cgcagauuuucaagucaga

SEQ ID NO: 479941 - RNA, 20 nt, Artificial Sequence
  Synthetic
gcgcagauuuucaagucaga

SEQ ID NO: 479942 - RNA, 21 nt, Artificial Sequence
  Synthetic
agcgcagauuuucaagucaga

SEQ ID NO: 479943 - RNA, 22 nt, Artificial Sequence
  Synthetic
gagcgcagauuuucaagucaga

SEQ ID NO: 479944 - RNA, 23 nt, Artificial Sequence
  Synthetic
agagcgcagauuuucaagucaga

SEQ ID NO: 479945 - RNA, 24 nt, Artificial Sequence
  Synthetic
aagagcgcagauuuucaagucaga

SEQ ID NO: 479946 - RNA, 18 nt, Artificial Sequence
  Synthetic
uauaagaaggaagucaga

SEQ ID NO: 479947 - RNA, 19 nt, Artificial Sequence
  Synthetic
uuauaagaaggaagucaga

SEQ ID NO: 479948 - RNA, 20 nt, Artificial Sequence
  Synthetic
auuauaagaaggaagucaga

SEQ ID NO: 479949 - RNA, 21 nt, Artificial Sequence
  Synthetic
cauuauaagaaggaagucaga

SEQ ID NO: 479950 - RNA, 22 nt, Artificial Sequence
  Synthetic
ucauuauaagaaggaagucaga

SEQ ID NO: 479951 - RNA, 23 nt, Artificial Sequence
  Synthetic
aucauuauaagaaggaagucaga

SEQ ID NO: 479952 - RNA, 24 nt, Artificial Sequence
  Synthetic
gaucauuauaagaaggaagucaga

SEQ ID NO: 479953 - RNA, 18 nt, Artificial Sequence
  Synthetic
ugcagcuuuuaagucaga

SEQ ID NO: 479954 - RNA, 19 nt, Artificial Sequence
  Synthetic
uugcagcuuuuaagucaga

SEQ ID NO: 479955 - RNA, 20 nt, Artificial Sequence
  Synthetic
uuugcagcuuuuaagucaga

SEQ ID NO: 479956 - RNA, 21 nt, Artificial Sequence
  Synthetic
uuuugcagcuuuuaagucaga

SEQ ID NO: 479957 - RNA, 22 nt, Artificial Sequence
  Synthetic
auuuugcagcuuuuaagucaga

SEQ ID NO: 479958 - RNA, 23 nt, Artificial Sequence
  Synthetic
cauuuugcagcuuuuaagucaga

SEQ ID NO: 479959 - RNA, 24 nt, Artificial Sequence
  Synthetic
gcauuuugcagcuuuuaagucaga

SEQ ID NO: 479960 - RNA, 18 nt, Artificial Sequence
  Synthetic
aauuuuggaauagucaga

SEQ ID NO: 479961 - RNA, 19 nt, Artificial Sequence
  Synthetic
caauuuuggaauagucaga

SEQ ID NO: 479962 - RNA, 20 nt, Artificial Sequence
  Synthetic
gcaauuuuggaauagucaga

SEQ ID NO: 479963 - RNA, 21 nt, Artificial Sequence
  Synthetic
ugcaauuuuggaauagucaga

SEQ ID NO: 479964 - RNA, 22 nt, Artificial Sequence
  Synthetic
augcaauuuuggaauagucaga

SEQ ID NO: 479965 - RNA, 23 nt, Artificial Sequence
  Synthetic
aaugcaauuuuggaauagucaga

SEQ ID NO: 479966 - RNA, 24 nt, Artificial Sequence
  Synthetic
gaaugcaauuuuggaauagucaga

SEQ ID NO: 479967 - RNA, 18 nt, Artificial Sequence
  Synthetic
aacaaaggugaggucaga

SEQ ID NO: 479968 - RNA, 19 nt, Artificial Sequence
  Synthetic
aaacaaaggugaggucaga

SEQ ID NO: 479969 - RNA, 20 nt, Artificial Sequence
  Synthetic
uaaacaaaggugaggucaga

SEQ ID NO: 479970 - RNA, 21 nt, Artificial Sequence
  Synthetic
guaaacaaaggugaggucaga

SEQ ID NO: 479971 - RNA, 22 nt, Artificial Sequence
  Synthetic
uguaaacaaaggugaggucaga

SEQ ID NO: 479972 - RNA, 23 nt, Artificial Sequence
  Synthetic
auguaaacaaaggugaggucaga

SEQ ID NO: 479973 - RNA, 24 nt, Artificial Sequence
  Synthetic
gauguaaacaaaggugaggucaga

SEQ ID NO: 479974 - RNA, 18 nt, Artificial Sequence
  Synthetic
aaauguagcagggucaga

SEQ ID NO: 479975 - RNA, 19 nt, Artificial Sequence
  Synthetic
uaaauguagcagggucaga

SEQ ID NO: 479976 - RNA, 20 nt, Artificial Sequence
  Synthetic
guaaauguagcagggucaga

SEQ ID NO: 479977 - RNA, 21 nt, Artificial Sequence
  Synthetic
gguaaauguagcagggucaga

SEQ ID NO: 479978 - RNA, 22 nt, Artificial Sequence
  Synthetic
ggguaaauguagcagggucaga

SEQ ID NO: 479979 - RNA, 23 nt, Artificial Sequence
  Synthetic
aggguaaauguagcagggucaga

SEQ ID NO: 479980 - RNA, 24 nt, Artificial Sequence
  Synthetic
caggguaaauguagcagggucaga

SEQ ID NO: 479981 - RNA, 18 nt, Artificial Sequence
  Synthetic
gaaucacuaugggucaga

SEQ ID NO: 479982 - RNA, 19 nt, Artificial Sequence
  Synthetic
agaaucacuaugggucaga

SEQ ID NO: 479983 - RNA, 20 nt, Artificial Sequence
  Synthetic
gagaaucacuaugggucaga

SEQ ID NO: 479984 - RNA, 21 nt, Artificial Sequence
  Synthetic
agagaaucacuaugggucaga

SEQ ID NO: 479985 - RNA, 22 nt, Artificial Sequence
  Synthetic
uagagaaucacuaugggucaga

SEQ ID NO: 479986 - RNA, 23 nt, Artificial Sequence
  Synthetic
auagagaaucacuaugggucaga

SEQ ID NO: 479987 - RNA, 24 nt, Artificial Sequence
  Synthetic
aauagagaaucacuaugggucaga

SEQ ID NO: 479988 - RNA, 18 nt, Artificial Sequence
  Synthetic
uaaaguuucaaugucaga

SEQ ID NO: 479989 - RNA, 19 nt, Artificial Sequence
  Synthetic
uuaaaguuucaaugucaga

SEQ ID NO: 479990 - RNA, 20 nt, Artificial Sequence
  Synthetic
uuuaaaguuucaaugucaga

SEQ ID NO: 479991 - RNA, 21 nt, Artificial Sequence
  Synthetic
uuuuaaaguuucaaugucaga

SEQ ID NO: 479992 - RNA, 22 nt, Artificial Sequence
  Synthetic
auuuuaaaguuucaaugucaga

SEQ ID NO: 479993 - RNA, 23 nt, Artificial Sequence
  Synthetic
aauuuuaaaguuucaaugucaga

SEQ ID NO: 479994 - RNA, 24 nt, Artificial Sequence
  Synthetic
gaauuuuaaaguuucaaugucaga

SEQ ID NO: 479995 - RNA, 18 nt, Artificial Sequence
  Synthetic
uaauacgcuaaugucaga

SEQ ID NO: 479996 - RNA, 19 nt, Artificial Sequence
  Synthetic
uuaauacgcuaaugucaga

SEQ ID NO: 479997 - RNA, 20 nt, Artificial Sequence
  Synthetic
uuuaauacgcuaaugucaga

SEQ ID NO: 479998 - RNA, 21 nt, Artificial Sequence
  Synthetic
uuuuaauacgcuaaugucaga

SEQ ID NO: 479999 - RNA, 22 nt, Artificial Sequence
  Synthetic
uuuuuaauacgcuaaugucaga

SEQ ID NO: 480000 - RNA, 23 nt, Artificial Sequence
  Synthetic
cuuuuuaauacgcuaaugucaga

SEQ ID NO: 480001 - RNA, 24 nt, Artificial Sequence
  Synthetic
ucuuuuuaauacgcuaaugucaga

SEQ ID NO: 480002 - RNA, 18 nt, Artificial Sequence
  Synthetic
uguguguggugugucaga

SEQ ID NO: 480003 - RNA, 19 nt, Artificial Sequence
  Synthetic
guguguguggugugucaga

SEQ ID NO: 480004 - RNA, 20 nt, Artificial Sequence
  Synthetic
uguguguguggugugucaga

SEQ ID NO: 480005 - RNA, 21 nt, Artificial Sequence
  Synthetic
guguguguguggugugucaga

SEQ ID NO: 480006 - RNA, 22 nt, Artificial Sequence
  Synthetic
uguguguguguggugugucaga

SEQ ID NO: 480007 - RNA, 23 nt, Artificial Sequence
  Synthetic
guguguguguguggugugucaga

SEQ ID NO: 480008 - RNA, 24 nt, Artificial Sequence
  Synthetic
uguguguguguguggugugucaga

SEQ ID NO: 480009 - RNA, 18 nt, Artificial Sequence
  Synthetic
acuaagacaaaauucaga

SEQ ID NO: 480010 - RNA, 19 nt, Artificial Sequence
  Synthetic
gacuaagacaaaauucaga

SEQ ID NO: 480011 - RNA, 20 nt, Artificial Sequence
  Synthetic
agacuaagacaaaauucaga

SEQ ID NO: 480012 - RNA, 21 nt, Artificial Sequence
  Synthetic
uagacuaagacaaaauucaga

SEQ ID NO: 480013 - RNA, 22 nt, Artificial Sequence
  Synthetic
auagacuaagacaaaauucaga

SEQ ID NO: 480014 - RNA, 23 nt, Artificial Sequence
  Synthetic
cauagacuaagacaaaauucaga

SEQ ID NO: 480015 - RNA, 24 nt, Artificial Sequence
  Synthetic
gcauagacuaagacaaaauucaga

SEQ ID NO: 480016 - RNA, 18 nt, Artificial Sequence
  Synthetic
guaauuugguaauucaga

SEQ ID NO: 480017 - RNA, 19 nt, Artificial Sequence
  Synthetic
aguaauuugguaauucaga

SEQ ID NO: 480018 - RNA, 20 nt, Artificial Sequence
  Synthetic
uaguaauuugguaauucaga

SEQ ID NO: 480019 - RNA, 21 nt, Artificial Sequence
  Synthetic
cuaguaauuugguaauucaga

SEQ ID NO: 480020 - RNA, 22 nt, Artificial Sequence
  Synthetic
gcuaguaauuugguaauucaga

SEQ ID NO: 480021 - RNA, 23 nt, Artificial Sequence
  Synthetic
ugcuaguaauuugguaauucaga

SEQ ID NO: 480022 - RNA, 24 nt, Artificial Sequence
  Synthetic
uugcuaguaauuugguaauucaga

SEQ ID NO: 480023 - RNA, 18 nt, Artificial Sequence
  Synthetic
ugagagaaagcauucaga

SEQ ID NO: 480024 - RNA, 19 nt, Artificial Sequence
  Synthetic
augagagaaagcauucaga

SEQ ID NO: 480025 - RNA, 20 nt, Artificial Sequence
  Synthetic
aaugagagaaagcauucaga

SEQ ID NO: 480026 - RNA, 21 nt, Artificial Sequence
  Synthetic
aaaugagagaaagcauucaga

SEQ ID NO: 480027 - RNA, 22 nt, Artificial Sequence
  Synthetic
uaaaugagagaaagcauucaga

SEQ ID NO: 480028 - RNA, 23 nt, Artificial Sequence
  Synthetic
cuaaaugagagaaagcauucaga

SEQ ID NO: 480029 - RNA, 24 nt, Artificial Sequence
  Synthetic
gcuaaaugagagaaagcauucaga

SEQ ID NO: 480030 - RNA, 18 nt, Artificial Sequence
  Synthetic
ucggaccauugcuucaga

SEQ ID NO: 480031 - RNA, 19 nt, Artificial Sequence
  Synthetic
uucggaccauugcuucaga

SEQ ID NO: 480032 - RNA, 20 nt, Artificial Sequence
  Synthetic
guucggaccauugcuucaga

SEQ ID NO: 480033 - RNA, 21 nt, Artificial Sequence
  Synthetic
aguucggaccauugcuucaga

SEQ ID NO: 480034 - RNA, 22 nt, Artificial Sequence
  Synthetic
caguucggaccauugcuucaga

SEQ ID NO: 480035 - RNA, 23 nt, Artificial Sequence
  Synthetic
acaguucggaccauugcuucaga

SEQ ID NO: 480036 - RNA, 24 nt, Artificial Sequence
  Synthetic
uacaguucggaccauugcuucaga

SEQ ID NO: 480037 - RNA, 18 nt, Artificial Sequence
  Synthetic
aaaauauuguaguucaga

SEQ ID NO: 480038 - RNA, 19 nt, Artificial Sequence
  Synthetic
caaaauauuguaguucaga

SEQ ID NO: 480039 - RNA, 20 nt, Artificial Sequence
  Synthetic
acaaaauauuguaguucaga

SEQ ID NO: 480040 - RNA, 21 nt, Artificial Sequence
  Synthetic
gacaaaauauuguaguucaga

SEQ ID NO: 480041 - RNA, 22 nt, Artificial Sequence
  Synthetic
agacaaaauauuguaguucaga

SEQ ID NO: 480042 - RNA, 23 nt, Artificial Sequence
  Synthetic
cagacaaaauauuguaguucaga

SEQ ID NO: 480043 - RNA, 24 nt, Artificial Sequence
  Synthetic
acagacaaaauauuguaguucaga

SEQ ID NO: 480044 - RNA, 18 nt, Artificial Sequence
  Synthetic
auuacuuuacauuucaga

SEQ ID NO: 480045 - RNA, 19 nt, Artificial Sequence
  Synthetic
aauuacuuuacauuucaga

SEQ ID NO: 480046 - RNA, 20 nt, Artificial Sequence
  Synthetic
aaauuacuuuacauuucaga

SEQ ID NO: 480047 - RNA, 21 nt, Artificial Sequence
  Synthetic
aaaauuacuuuacauuucaga

SEQ ID NO: 480048 - RNA, 22 nt, Artificial Sequence
  Synthetic
aaaaauuacuuuacauuucaga

SEQ ID NO: 480049 - RNA, 23 nt, Artificial Sequence
  Synthetic
gaaaaauuacuuuacauuucaga

SEQ ID NO: 480050 - RNA, 24 nt, Artificial Sequence
  Synthetic
ggaaaaauuacuuuacauuucaga

SEQ ID NO: 480051 - RNA, 18 nt, Artificial Sequence
  Synthetic
gaaaaagggcauuucaga

SEQ ID NO: 480052 - RNA, 19 nt, Artificial Sequence
  Synthetic
ggaaaaagggcauuucaga

SEQ ID NO: 480053 - RNA, 20 nt, Artificial Sequence
  Synthetic
uggaaaaagggcauuucaga

SEQ ID NO: 480054 - RNA, 21 nt, Artificial Sequence
  Synthetic
guggaaaaagggcauuucaga

SEQ ID NO: 480055 - RNA, 22 nt, Artificial Sequence
  Synthetic
gguggaaaaagggcauuucaga

SEQ ID NO: 480056 - RNA, 23 nt, Artificial Sequence
  Synthetic
agguggaaaaagggcauuucaga

SEQ ID NO: 480057 - RNA, 24 nt, Artificial Sequence
  Synthetic
cagguggaaaaagggcauuucaga

SEQ ID NO: 480058 - RNA, 18 nt, Artificial Sequence
  Synthetic
ugaaaucacuauuucaga

SEQ ID NO: 480059 - RNA, 19 nt, Artificial Sequence
  Synthetic
gugaaaucacuauuucaga

SEQ ID NO: 480060 - RNA, 20 nt, Artificial Sequence
  Synthetic
ggugaaaucacuauuucaga

SEQ ID NO: 480061 - RNA, 21 nt, Artificial Sequence
  Synthetic
uggugaaaucacuauuucaga

SEQ ID NO: 480062 - RNA, 22 nt, Artificial Sequence
  Synthetic
cuggugaaaucacuauuucaga

SEQ ID NO: 480063 - RNA, 23 nt, Artificial Sequence
  Synthetic
acuggugaaaucacuauuucaga

SEQ ID NO: 480064 - RNA, 24 nt, Artificial Sequence
  Synthetic
gacuggugaaaucacuauuucaga

SEQ ID NO: 480065 - RNA, 18 nt, Artificial Sequence
  Synthetic
cacagagaaccuuucaga

SEQ ID NO: 480066 - RNA, 19 nt, Artificial Sequence
  Synthetic
ccacagagaaccuuucaga

SEQ ID NO: 480067 - RNA, 20 nt, Artificial Sequence
  Synthetic
uccacagagaaccuuucaga

SEQ ID NO: 480068 - RNA, 21 nt, Artificial Sequence
  Synthetic
uuccacagagaaccuuucaga

SEQ ID NO: 480069 - RNA, 22 nt, Artificial Sequence
  Synthetic
uuuccacagagaaccuuucaga

SEQ ID NO: 480070 - RNA, 23 nt, Artificial Sequence
  Synthetic
guuuccacagagaaccuuucaga

SEQ ID NO: 480071 - RNA, 24 nt, Artificial Sequence
  Synthetic
uguuuccacagagaaccuuucaga

SEQ ID NO: 480072 - RNA, 18 nt, Artificial Sequence
  Synthetic
guauggaaagcuuucaga

SEQ ID NO: 480073 - RNA, 19 nt, Artificial Sequence
  Synthetic
aguauggaaagcuuucaga

SEQ ID NO: 480074 - RNA, 20 nt, Artificial Sequence
  Synthetic
gaguauggaaagcuuucaga

SEQ ID NO: 480075 - RNA, 21 nt, Artificial Sequence
  Synthetic
ugaguauggaaagcuuucaga

SEQ ID NO: 480076 - RNA, 22 nt, Artificial Sequence
  Synthetic
augaguauggaaagcuuucaga

SEQ ID NO: 480077 - RNA, 23 nt, Artificial Sequence
  Synthetic
aaugaguauggaaagcuuucaga

SEQ ID NO: 480078 - RNA, 24 nt, Artificial Sequence
  Synthetic
aaaugaguauggaaagcuuucaga

SEQ ID NO: 480079 - RNA, 18 nt, Artificial Sequence
  Synthetic
ucuacauacucuuucaga

SEQ ID NO: 480080 - RNA, 19 nt, Artificial Sequence
  Synthetic
cucuacauacucuuucaga

SEQ ID NO: 480081 - RNA, 20 nt, Artificial Sequence
  Synthetic
ccucuacauacucuuucaga

SEQ ID NO: 480082 - RNA, 21 nt, Artificial Sequence
  Synthetic
accucuacauacucuuucaga

SEQ ID NO: 480083 - RNA, 22 nt, Artificial Sequence
  Synthetic
caccucuacauacucuuucaga

SEQ ID NO: 480084 - RNA, 23 nt, Artificial Sequence
  Synthetic
ccaccucuacauacucuuucaga

SEQ ID NO: 480085 - RNA, 24 nt, Artificial Sequence
  Synthetic
uccaccucuacauacucuuucaga

SEQ ID NO: 480086 - RNA, 18 nt, Artificial Sequence
  Synthetic
agacauuaaauuuucaga

SEQ ID NO: 480087 - RNA, 19 nt, Artificial Sequence
  Synthetic
cagacauuaaauuuucaga

SEQ ID NO: 480088 - RNA, 20 nt, Artificial Sequence
  Synthetic
ucagacauuaaauuuucaga

SEQ ID NO: 480089 - RNA, 21 nt, Artificial Sequence
  Synthetic
aucagacauuaaauuuucaga

SEQ ID NO: 480090 - RNA, 22 nt, Artificial Sequence
  Synthetic
aaucagacauuaaauuuucaga

SEQ ID NO: 480091 - RNA, 23 nt, Artificial Sequence
  Synthetic
gaaucagacauuaaauuuucaga

SEQ ID NO: 480092 - RNA, 24 nt, Artificial Sequence
  Synthetic
agaaucagacauuaaauuuucaga

SEQ ID NO: 480093 - RNA, 18 nt, Artificial Sequence
  Synthetic
gacuaggaaguuuucaga

SEQ ID NO: 480094 - RNA, 19 nt, Artificial Sequence
  Synthetic
cgacuaggaaguuuucaga

SEQ ID NO: 480095 - RNA, 20 nt, Artificial Sequence
  Synthetic
acgacuaggaaguuuucaga

SEQ ID NO: 480096 - RNA, 21 nt, Artificial Sequence
  Synthetic
gacgacuaggaaguuuucaga

SEQ ID NO: 480097 - RNA, 22 nt, Artificial Sequence
  Synthetic
agacgacuaggaaguuuucaga

SEQ ID NO: 480098 - RNA, 23 nt, Artificial Sequence
  Synthetic
aagacgacuaggaaguuuucaga

SEQ ID NO: 480099 - RNA, 24 nt, Artificial Sequence
  Synthetic
aaagacgacuaggaaguuuucaga

SEQ ID NO: 480100 - RNA, 18 nt, Artificial Sequence
  Synthetic
uuuauuuuauuuuucaga

SEQ ID NO: 480101 - RNA, 19 nt, Artificial Sequence
  Synthetic
uuuuauuuuauuuuucaga

SEQ ID NO: 480102 - RNA, 20 nt, Artificial Sequence
  Synthetic
uuuuuauuuuauuuuucaga

SEQ ID NO: 480103 - RNA, 21 nt, Artificial Sequence
  Synthetic
auuuuuauuuuauuuuucaga

SEQ ID NO: 480104 - RNA, 22 nt, Artificial Sequence
  Synthetic
uauuuuuauuuuauuuuucaga

SEQ ID NO: 480105 - RNA, 23 nt, Artificial Sequence
  Synthetic
uuauuuuuauuuuauuuuucaga

SEQ ID NO: 480106 - RNA, 24 nt, Artificial Sequence
  Synthetic
uuuauuuuuauuuuauuuuucaga

SEQ ID NO: 480107 - RNA, 18 nt, Artificial Sequence
  Synthetic
aaaaaaaaaaaaaagaga

SEQ ID NO: 480108 - RNA, 19 nt, Artificial Sequence
  Synthetic
aaaaaaaaaaaaaaagaga

SEQ ID NO: 480109 - RNA, 20 nt, Artificial Sequence
  Synthetic
aaaaaaaaaaaaaaaagaga

SEQ ID NO: 480110 - RNA, 21 nt, Artificial Sequence
  Synthetic
aaaaaaaaaaaaaaaaagaga

SEQ ID NO: 480111 - RNA, 22 nt, Artificial Sequence
  Synthetic
aaaaaaaaaaaaaaaaaagaga

SEQ ID NO: 480112 - RNA, 23 nt, Artificial Sequence
  Synthetic
aaaaaaaaaaaaaaaaaaagaga

SEQ ID NO: 480113 - RNA, 24 nt, Artificial Sequence
  Synthetic
aaaaaaaaaaaaaaaaaaaagaga

SEQ ID NO: 480114 - RNA, 18 nt, Artificial Sequence
  Synthetic
gucucaaaaaaaaagaga

SEQ ID NO: 480115 - RNA, 19 nt, Artificial Sequence
  Synthetic
agucucaaaaaaaaagaga

SEQ ID NO: 480116 - RNA, 20 nt, Artificial Sequence
  Synthetic
cagucucaaaaaaaaagaga

SEQ ID NO: 480117 - RNA, 21 nt, Artificial Sequence
  Synthetic
ucagucucaaaaaaaaagaga

SEQ ID NO: 480118 - RNA, 22 nt, Artificial Sequence
  Synthetic
cucagucucaaaaaaaaagaga

SEQ ID NO: 480119 - RNA, 23 nt, Artificial Sequence
  Synthetic
acucagucucaaaaaaaaagaga

SEQ ID NO: 480120 - RNA, 24 nt, Artificial Sequence
  Synthetic
gacucagucucaaaaaaaaagaga

SEQ ID NO: 480121 - RNA, 18 nt, Artificial Sequence
  Synthetic
agauagaaaaaaaagaga

SEQ ID NO: 480122 - RNA, 19 nt, Artificial Sequence
  Synthetic
aagauagaaaaaaaagaga

SEQ ID NO: 480123 - RNA, 20 nt, Artificial Sequence
  Synthetic
aaagauagaaaaaaaagaga

SEQ ID NO: 480124 - RNA, 21 nt, Artificial Sequence
  Synthetic
gaaagauagaaaaaaaagaga

SEQ ID NO: 480125 - RNA, 22 nt, Artificial Sequence
  Synthetic
agaaagauagaaaaaaaagaga

SEQ ID NO: 480126 - RNA, 23 nt, Artificial Sequence
  Synthetic
aagaaagauagaaaaaaaagaga

SEQ ID NO: 480127 - RNA, 24 nt, Artificial Sequence
  Synthetic
aaagaaagauagaaaaaaaagaga

SEQ ID NO: 480128 - RNA, 18 nt, Artificial Sequence
  Synthetic
caggcagggaaaaagaga

SEQ ID NO: 480129 - RNA, 19 nt, Artificial Sequence
  Synthetic
ccaggcagggaaaaagaga

SEQ ID NO: 480130 - RNA, 20 nt, Artificial Sequence
  Synthetic
gccaggcagggaaaaagaga

SEQ ID NO: 480131 - RNA, 21 nt, Artificial Sequence
  Synthetic
agccaggcagggaaaaagaga

SEQ ID NO: 480132 - RNA, 22 nt, Artificial Sequence
  Synthetic
uagccaggcagggaaaaagaga

SEQ ID NO: 480133 - RNA, 23 nt, Artificial Sequence
  Synthetic
auagccaggcagggaaaaagaga

SEQ ID NO: 480134 - RNA, 24 nt, Artificial Sequence
  Synthetic
gauagccaggcagggaaaaagaga

SEQ ID NO: 480135 - RNA, 18 nt, Artificial Sequence
  Synthetic
gcagaaaaagaaaagaga

SEQ ID NO: 480136 - RNA, 19 nt, Artificial Sequence
  Synthetic
ggcagaaaaagaaaagaga

SEQ ID NO: 480137 - RNA, 20 nt, Artificial Sequence
  Synthetic
aggcagaaaaagaaaagaga

SEQ ID NO: 480138 - RNA, 21 nt, Artificial Sequence
  Synthetic
gaggcagaaaaagaaaagaga

SEQ ID NO: 480139 - RNA, 22 nt, Artificial Sequence
  Synthetic
ggaggcagaaaaagaaaagaga

SEQ ID NO: 480140 - RNA, 23 nt, Artificial Sequence
  Synthetic
uggaggcagaaaaagaaaagaga

SEQ ID NO: 480141 - RNA, 24 nt, Artificial Sequence
  Synthetic
cuggaggcagaaaaagaaaagaga

SEQ ID NO: 480142 - RNA, 18 nt, Artificial Sequence
  Synthetic
ugugauauagaaaagaga

SEQ ID NO: 480143 - RNA, 19 nt, Artificial Sequence
  Synthetic
uugugauauagaaaagaga

SEQ ID NO: 480144 - RNA, 20 nt, Artificial Sequence
  Synthetic
auugugauauagaaaagaga

SEQ ID NO: 480145 - RNA, 21 nt, Artificial Sequence
  Synthetic
uauugugauauagaaaagaga

SEQ ID NO: 480146 - RNA, 22 nt, Artificial Sequence
  Synthetic
auauugugauauagaaaagaga

SEQ ID NO: 480147 - RNA, 23 nt, Artificial Sequence
  Synthetic
uauauugugauauagaaaagaga

SEQ ID NO: 480148 - RNA, 24 nt, Artificial Sequence
  Synthetic
uuauauugugauauagaaaagaga

SEQ ID NO: 480149 - RNA, 18 nt, Artificial Sequence
  Synthetic
ugaauaaaggaaaagaga

SEQ ID NO: 480150 - RNA, 19 nt, Artificial Sequence
  Synthetic
uugaauaaaggaaaagaga

SEQ ID NO: 480151 - RNA, 20 nt, Artificial Sequence
  Synthetic
cuugaauaaaggaaaagaga

SEQ ID NO: 480152 - RNA, 21 nt, Artificial Sequence
  Synthetic
acuugaauaaaggaaaagaga

SEQ ID NO: 480153 - RNA, 22 nt, Artificial Sequence
  Synthetic
uacuugaauaaaggaaaagaga

SEQ ID NO: 480154 - RNA, 23 nt, Artificial Sequence
  Synthetic
cuacuugaauaaaggaaaagaga

SEQ ID NO: 480155 - RNA, 24 nt, Artificial Sequence
  Synthetic
gcuacuugaauaaaggaaaagaga

SEQ ID NO: 480156 - RNA, 18 nt, Artificial Sequence
  Synthetic
uuccagucauaaaagaga

SEQ ID NO: 480157 - RNA, 19 nt, Artificial Sequence
  Synthetic
cuuccagucauaaaagaga

SEQ ID NO: 480158 - RNA, 20 nt, Artificial Sequence
  Synthetic
ccuuccagucauaaaagaga

SEQ ID NO: 480159 - RNA, 21 nt, Artificial Sequence
  Synthetic
accuuccagucauaaaagaga

SEQ ID NO: 480160 - RNA, 22 nt, Artificial Sequence
  Synthetic
caccuuccagucauaaaagaga

SEQ ID NO: 480161 - RNA, 23 nt, Artificial Sequence
  Synthetic
ucaccuuccagucauaaaagaga

SEQ ID NO: 480162 - RNA, 24 nt, Artificial Sequence
  Synthetic
gucaccuuccagucauaaaagaga

SEQ ID NO: 480163 - RNA, 18 nt, Artificial Sequence
  Synthetic
uuaacauucuaaaagaga

SEQ ID NO: 480164 - RNA, 19 nt, Artificial Sequence
  Synthetic
auuaacauucuaaaagaga

SEQ ID NO: 480165 - RNA, 20 nt, Artificial Sequence
  Synthetic
aauuaacauucuaaaagaga

SEQ ID NO: 480166 - RNA, 21 nt, Artificial Sequence
  Synthetic
uaauuaacauucuaaaagaga

SEQ ID NO: 480167 - RNA, 22 nt, Artificial Sequence
  Synthetic
auaauuaacauucuaaaagaga

SEQ ID NO: 480168 - RNA, 23 nt, Artificial Sequence
  Synthetic
cauaauuaacauucuaaaagaga

SEQ ID NO: 480169 - RNA, 24 nt, Artificial Sequence
  Synthetic
acauaauuaacauucuaaaagaga

SEQ ID NO: 480170 - RNA, 18 nt, Artificial Sequence
  Synthetic
cugacucauuaaaagaga

SEQ ID NO: 480171 - RNA, 19 nt, Artificial Sequence
  Synthetic
acugacucauuaaaagaga

SEQ ID NO: 480172 - RNA, 20 nt, Artificial Sequence
  Synthetic
gacugacucauuaaaagaga

SEQ ID NO: 480173 - RNA, 21 nt, Artificial Sequence
  Synthetic
agacugacucauuaaaagaga

SEQ ID NO: 480174 - RNA, 22 nt, Artificial Sequence
  Synthetic
cagacugacucauuaaaagaga

SEQ ID NO: 480175 - RNA, 23 nt, Artificial Sequence
  Synthetic
acagacugacucauuaaaagaga

SEQ ID NO: 480176 - RNA, 24 nt, Artificial Sequence
  Synthetic
gacagacugacucauuaaaagaga

SEQ ID NO: 480177 - RNA, 18 nt, Artificial Sequence
  Synthetic
uagcuagagccaaagaga

SEQ ID NO: 480178 - RNA, 19 nt, Artificial Sequence
  Synthetic
auagcuagagccaaagaga

SEQ ID NO: 480179 - RNA, 20 nt, Artificial Sequence
  Synthetic
aauagcuagagccaaagaga

SEQ ID NO: 480180 - RNA, 21 nt, Artificial Sequence
  Synthetic
aaauagcuagagccaaagaga

SEQ ID NO: 480181 - RNA, 22 nt, Artificial Sequence
  Synthetic
caaauagcuagagccaaagaga

SEQ ID NO: 480182 - RNA, 23 nt, Artificial Sequence
  Synthetic
acaaauagcuagagccaaagaga

SEQ ID NO: 480183 - RNA, 24 nt, Artificial Sequence
  Synthetic
aacaaauagcuagagccaaagaga

SEQ ID NO: 480184 - RNA, 18 nt, Artificial Sequence
  Synthetic
aggaaagaaagaaagaga

SEQ ID NO: 480185 - RNA, 19 nt, Artificial Sequence
  Synthetic
aaggaaagaaagaaagaga

SEQ ID NO: 480186 - RNA, 20 nt, Artificial Sequence
  Synthetic
gaaggaaagaaagaaagaga

SEQ ID NO: 480187 - RNA, 21 nt, Artificial Sequence
  Synthetic
ggaaggaaagaaagaaagaga

SEQ ID NO: 480188 - RNA, 22 nt, Artificial Sequence
  Synthetic
aggaaggaaagaaagaaagaga

SEQ ID NO: 480189 - RNA, 23 nt, Artificial Sequence
  Synthetic
aaggaaggaaagaaagaaagaga

SEQ ID NO: 480190 - RNA, 24 nt, Artificial Sequence
  Synthetic
aaaggaaggaaagaaagaaagaga

SEQ ID NO: 480191 - RNA, 18 nt, Artificial Sequence
  Synthetic
ugcauuuggagaaagaga

SEQ ID NO: 480192 - RNA, 19 nt, Artificial Sequence
  Synthetic
uugcauuuggagaaagaga

SEQ ID NO: 480193 - RNA, 20 nt, Artificial Sequence
  Synthetic
guugcauuuggagaaagaga

SEQ ID NO: 480194 - RNA, 21 nt, Artificial Sequence
  Synthetic
gguugcauuuggagaaagaga

SEQ ID NO: 480195 - RNA, 22 nt, Artificial Sequence
  Synthetic
agguugcauuuggagaaagaga

SEQ ID NO: 480196 - RNA, 23 nt, Artificial Sequence
  Synthetic
uagguugcauuuggagaaagaga

SEQ ID NO: 480197 - RNA, 24 nt, Artificial Sequence
  Synthetic
guagguugcauuuggagaaagaga

SEQ ID NO: 480198 - RNA, 18 nt, Artificial Sequence
  Synthetic
ucaagggaaggaaagaga

SEQ ID NO: 480199 - RNA, 19 nt, Artificial Sequence
  Synthetic
aucaagggaaggaaagaga

SEQ ID NO: 480200 - RNA, 20 nt, Artificial Sequence
  Synthetic
aaucaagggaaggaaagaga

SEQ ID NO: 480201 - RNA, 21 nt, Artificial Sequence
  Synthetic
uaaucaagggaaggaaagaga

SEQ ID NO: 480202 - RNA, 22 nt, Artificial Sequence
  Synthetic
guaaucaagggaaggaaagaga

SEQ ID NO: 480203 - RNA, 23 nt, Artificial Sequence
  Synthetic
gguaaucaagggaaggaaagaga

SEQ ID NO: 480204 - RNA, 24 nt, Artificial Sequence
  Synthetic
ggguaaucaagggaaggaaagaga

SEQ ID NO: 480205 - RNA, 18 nt, Artificial Sequence
  Synthetic
aauuucagaggaaagaga

SEQ ID NO: 480206 - RNA, 19 nt, Artificial Sequence
  Synthetic
aaauuucagaggaaagaga

SEQ ID NO: 480207 - RNA, 20 nt, Artificial Sequence
  Synthetic
gaaauuucagaggaaagaga

SEQ ID NO: 480208 - RNA, 21 nt, Artificial Sequence
  Synthetic
ggaaauuucagaggaaagaga

SEQ ID NO: 480209 - RNA, 22 nt, Artificial Sequence
  Synthetic
aggaaauuucagaggaaagaga

SEQ ID NO: 480210 - RNA, 23 nt, Artificial Sequence
  Synthetic
gaggaaauuucagaggaaagaga

SEQ ID NO: 480211 - RNA, 24 nt, Artificial Sequence
  Synthetic
ugaggaaauuucagaggaaagaga

SEQ ID NO: 480212 - RNA, 18 nt, Artificial Sequence
  Synthetic
gggagggagggaaagaga

SEQ ID NO: 480213 - RNA, 19 nt, Artificial Sequence
  Synthetic
agggagggagggaaagaga

SEQ ID NO: 480214 - RNA, 20 nt, Artificial Sequence
  Synthetic
gagggagggagggaaagaga

SEQ ID NO: 480215 - RNA, 21 nt, Artificial Sequence
  Synthetic
agagggagggagggaaagaga

SEQ ID NO: 480216 - RNA, 22 nt, Artificial Sequence
  Synthetic
gagagggagggagggaaagaga

SEQ ID NO: 480217 - RNA, 23 nt, Artificial Sequence
  Synthetic
ggagagggagggagggaaagaga

SEQ ID NO: 480218 - RNA, 24 nt, Artificial Sequence
  Synthetic
uggagagggagggagggaaagaga

SEQ ID NO: 480219 - RNA, 18 nt, Artificial Sequence
  Synthetic
ucagagagaugaaagaga

SEQ ID NO: 480220 - RNA, 19 nt, Artificial Sequence
  Synthetic
cucagagagaugaaagaga

SEQ ID NO: 480221 - RNA, 20 nt, Artificial Sequence
  Synthetic
acucagagagaugaaagaga

SEQ ID NO: 480222 - RNA, 21 nt, Artificial Sequence
  Synthetic
gacucagagagaugaaagaga

SEQ ID NO: 480223 - RNA, 22 nt, Artificial Sequence
  Synthetic
ugacucagagagaugaaagaga

SEQ ID NO: 480224 - RNA, 23 nt, Artificial Sequence
  Synthetic
cugacucagagagaugaaagaga

SEQ ID NO: 480225 - RNA, 24 nt, Artificial Sequence
  Synthetic
ucugacucagagagaugaaagaga

SEQ ID NO: 480226 - RNA, 18 nt, Artificial Sequence
  Synthetic
uaaggguugugaaagaga

SEQ ID NO: 480227 - RNA, 19 nt, Artificial Sequence
  Synthetic
uuaaggguugugaaagaga

SEQ ID NO: 480228 - RNA, 20 nt, Artificial Sequence
  Synthetic
uuuaaggguugugaaagaga

SEQ ID NO: 480229 - RNA, 21 nt, Artificial Sequence
  Synthetic
uuuuaaggguugugaaagaga

SEQ ID NO: 480230 - RNA, 22 nt, Artificial Sequence
  Synthetic
guuuuaaggguugugaaagaga

SEQ ID NO: 480231 - RNA, 23 nt, Artificial Sequence
  Synthetic
gguuuuaaggguugugaaagaga

SEQ ID NO: 480232 - RNA, 24 nt, Artificial Sequence
  Synthetic
ugguuuuaaggguugugaaagaga

SEQ ID NO: 480233 - RNA, 18 nt, Artificial Sequence
  Synthetic
uauucagcaagcaagaga

SEQ ID NO: 480234 - RNA, 19 nt, Artificial Sequence
  Synthetic
cuauucagcaagcaagaga

SEQ ID NO: 480235 - RNA, 20 nt, Artificial Sequence
  Synthetic
ccuauucagcaagcaagaga

SEQ ID NO: 480236 - RNA, 21 nt, Artificial Sequence
  Synthetic
cccuauucagcaagcaagaga

SEQ ID NO: 480237 - RNA, 22 nt, Artificial Sequence
  Synthetic
ccccuauucagcaagcaagaga

SEQ ID NO: 480238 - RNA, 23 nt, Artificial Sequence
  Synthetic
cccccuauucagcaagcaagaga

SEQ ID NO: 480239 - RNA, 24 nt, Artificial Sequence
  Synthetic
ucccccuauucagcaagcaagaga

SEQ ID NO: 480240 - RNA, 18 nt, Artificial Sequence
  Synthetic
cagagacagagcaagaga

SEQ ID NO: 480241 - RNA, 19 nt, Artificial Sequence
  Synthetic
acagagacagagcaagaga

SEQ ID NO: 480242 - RNA, 20 nt, Artificial Sequence
  Synthetic
gacagagacagagcaagaga

SEQ ID NO: 480243 - RNA, 21 nt, Artificial Sequence
  Synthetic
agacagagacagagcaagaga

SEQ ID NO: 480244 - RNA, 22 nt, Artificial Sequence
  Synthetic
cagacagagacagagcaagaga

SEQ ID NO: 480245 - RNA, 23 nt, Artificial Sequence
  Synthetic
acagacagagacagagcaagaga

SEQ ID NO: 480246 - RNA, 24 nt, Artificial Sequence
  Synthetic
gacagacagagacagagcaagaga

SEQ ID NO: 480247 - RNA, 18 nt, Artificial Sequence
  Synthetic
gggcaaucaggcaagaga

SEQ ID NO: 480248 - RNA, 19 nt, Artificial Sequence
  Synthetic
agggcaaucaggcaagaga

SEQ ID NO: 480249 - RNA, 20 nt, Artificial Sequence
  Synthetic
cagggcaaucaggcaagaga

SEQ ID NO: 480250 - RNA, 21 nt, Artificial Sequence
  Synthetic
ccagggcaaucaggcaagaga

SEQ ID NO: 480251 - RNA, 22 nt, Artificial Sequence
  Synthetic
gccagggcaaucaggcaagaga

SEQ ID NO: 480252 - RNA, 23 nt, Artificial Sequence
  Synthetic
ggccagggcaaucaggcaagaga

SEQ ID NO: 480253 - RNA, 24 nt, Artificial Sequence
  Synthetic
uggccagggcaaucaggcaagaga

SEQ ID NO: 480254 - RNA, 18 nt, Artificial Sequence
  Synthetic
uacagccugggcaagaga

SEQ ID NO: 480255 - RNA, 19 nt, Artificial Sequence
  Synthetic
cuacagccugggcaagaga

SEQ ID NO: 480256 - RNA, 20 nt, Artificial Sequence
  Synthetic
acuacagccugggcaagaga

SEQ ID NO: 480257 - RNA, 21 nt, Artificial Sequence
  Synthetic
cacuacagccugggcaagaga

SEQ ID NO: 480258 - RNA, 22 nt, Artificial Sequence
  Synthetic
gcacuacagccugggcaagaga

SEQ ID NO: 480259 - RNA, 23 nt, Artificial Sequence
  Synthetic
ugcacuacagccugggcaagaga

SEQ ID NO: 480260 - RNA, 24 nt, Artificial Sequence
  Synthetic
cugcacuacagccugggcaagaga

SEQ ID NO: 480261 - RNA, 18 nt, Artificial Sequence
  Synthetic
gauuaucuucucaagaga

SEQ ID NO: 480262 - RNA, 19 nt, Artificial Sequence
  Synthetic
ugauuaucuucucaagaga

SEQ ID NO: 480263 - RNA, 20 nt, Artificial Sequence
  Synthetic
uugauuaucuucucaagaga

SEQ ID NO: 480264 - RNA, 21 nt, Artificial Sequence
  Synthetic
uuugauuaucuucucaagaga

SEQ ID NO: 480265 - RNA, 22 nt, Artificial Sequence
  Synthetic
auuugauuaucuucucaagaga

SEQ ID NO: 480266 - RNA, 23 nt, Artificial Sequence
  Synthetic
cauuugauuaucuucucaagaga

SEQ ID NO: 480267 - RNA, 24 nt, Artificial Sequence
  Synthetic
gcauuugauuaucuucucaagaga

SEQ ID NO: 480268 - RNA, 18 nt, Artificial Sequence
  Synthetic
gaucacaaggucaagaga

SEQ ID NO: 480269 - RNA, 19 nt, Artificial Sequence
  Synthetic
ggaucacaaggucaagaga

SEQ ID NO: 480270 - RNA, 20 nt, Artificial Sequence
  Synthetic
uggaucacaaggucaagaga

SEQ ID NO: 480271 - RNA, 21 nt, Artificial Sequence
  Synthetic
auggaucacaaggucaagaga

SEQ ID NO: 480272 - RNA, 22 nt, Artificial Sequence
  Synthetic
gauggaucacaaggucaagaga

SEQ ID NO: 480273 - RNA, 23 nt, Artificial Sequence
  Synthetic
agauggaucacaaggucaagaga

SEQ ID NO: 480274 - RNA, 24 nt, Artificial Sequence
  Synthetic
cagauggaucacaaggucaagaga

SEQ ID NO: 480275 - RNA, 19 nt, Artificial Sequence
  Synthetic
agaucacgaggucaagaga

SEQ ID NO: 480276 - RNA, 20 nt, Artificial Sequence
  Synthetic
cagaucacgaggucaagaga

SEQ ID NO: 480277 - RNA, 21 nt, Artificial Sequence
  Synthetic
gcagaucacgaggucaagaga

SEQ ID NO: 480278 - RNA, 22 nt, Artificial Sequence
  Synthetic
ggcagaucacgaggucaagaga

SEQ ID NO: 480279 - RNA, 23 nt, Artificial Sequence
  Synthetic
aggcagaucacgaggucaagaga

SEQ ID NO: 480280 - RNA, 24 nt, Artificial Sequence
  Synthetic
caggcagaucacgaggucaagaga

SEQ ID NO: 480281 - RNA, 18 nt, Artificial Sequence
  Synthetic
acuugauuuuucaagaga

SEQ ID NO: 480282 - RNA, 19 nt, Artificial Sequence
  Synthetic
uacuugauuuuucaagaga

SEQ ID NO: 480283 - RNA, 20 nt, Artificial Sequence
  Synthetic
uuacuugauuuuucaagaga

SEQ ID NO: 480284 - RNA, 21 nt, Artificial Sequence
  Synthetic
auuacuugauuuuucaagaga

SEQ ID NO: 480285 - RNA, 22 nt, Artificial Sequence
  Synthetic
uauuacuugauuuuucaagaga

SEQ ID NO: 480286 - RNA, 23 nt, Artificial Sequence
  Synthetic
guauuacuugauuuuucaagaga

SEQ ID NO: 480287 - RNA, 24 nt, Artificial Sequence
  Synthetic
aguauuacuugauuuuucaagaga

SEQ ID NO: 480288 - RNA, 18 nt, Artificial Sequence
  Synthetic
augagaaaaaagaagaga

SEQ ID NO: 480289 - RNA, 19 nt, Artificial Sequence
  Synthetic
aaugagaaaaaagaagaga

SEQ ID NO: 480290 - RNA, 20 nt, Artificial Sequence
  Synthetic
gaaugagaaaaaagaagaga

SEQ ID NO: 480291 - RNA, 21 nt, Artificial Sequence
  Synthetic
agaaugagaaaaaagaagaga

SEQ ID NO: 480292 - RNA, 22 nt, Artificial Sequence
  Synthetic
cagaaugagaaaaaagaagaga

SEQ ID NO: 480293 - RNA, 23 nt, Artificial Sequence
  Synthetic
ccagaaugagaaaaaagaagaga

SEQ ID NO: 480294 - RNA, 24 nt, Artificial Sequence
  Synthetic
accagaaugagaaaaaagaagaga

SEQ ID NO: 480295 - RNA, 18 nt, Artificial Sequence
  Synthetic
uagaaagagcagaagaga

SEQ ID NO: 480296 - RNA, 19 nt, Artificial Sequence
  Synthetic
auagaaagagcagaagaga

SEQ ID NO: 480297 - RNA, 20 nt, Artificial Sequence
  Synthetic
gauagaaagagcagaagaga

SEQ ID NO: 480298 - RNA, 21 nt, Artificial Sequence
  Synthetic
agauagaaagagcagaagaga

SEQ ID NO: 480299 - RNA, 22 nt, Artificial Sequence
  Synthetic
aagauagaaagagcagaagaga

SEQ ID NO: 480300 - RNA, 23 nt, Artificial Sequence
  Synthetic
aaagauagaaagagcagaagaga

SEQ ID NO: 480301 - RNA, 24 nt, Artificial Sequence
  Synthetic
aaaagauagaaagagcagaagaga

SEQ ID NO: 480302 - RNA, 18 nt, Artificial Sequence
  Synthetic
ggccugugagagaagaga

SEQ ID NO: 480303 - RNA, 19 nt, Artificial Sequence
  Synthetic
uggccugugagagaagaga

SEQ ID NO: 480304 - RNA, 20 nt, Artificial Sequence
  Synthetic
auggccugugagagaagaga

SEQ ID NO: 480305 - RNA, 21 nt, Artificial Sequence
  Synthetic
uauggccugugagagaagaga

SEQ ID NO: 480306 - RNA, 22 nt, Artificial Sequence
  Synthetic
guauggccugugagagaagaga

SEQ ID NO: 480307 - RNA, 23 nt, Artificial Sequence
  Synthetic
aguauggccugugagagaagaga

SEQ ID NO: 480308 - RNA, 24 nt, Artificial Sequence
  Synthetic
aaguauggccugugagagaagaga

SEQ ID NO: 480309 - RNA, 18 nt, Artificial Sequence
  Synthetic
cucguuaaggagaagaga

SEQ ID NO: 480310 - RNA, 19 nt, Artificial Sequence
  Synthetic
ucucguuaaggagaagaga

SEQ ID NO: 480311 - RNA, 20 nt, Artificial Sequence
  Synthetic
uucucguuaaggagaagaga

SEQ ID NO: 480312 - RNA, 21 nt, Artificial Sequence
  Synthetic
cuucucguuaaggagaagaga

SEQ ID NO: 480313 - RNA, 22 nt, Artificial Sequence
  Synthetic
acuucucguuaaggagaagaga

SEQ ID NO: 480314 - RNA, 23 nt, Artificial Sequence
  Synthetic
uacuucucguuaaggagaagaga

SEQ ID NO: 480315 - RNA, 24 nt, Artificial Sequence
  Synthetic
uuacuucucguuaaggagaagaga

SEQ ID NO: 480316 - RNA, 18 nt, Artificial Sequence
  Synthetic
cuuuuauccuagaagaga

SEQ ID NO: 480317 - RNA, 19 nt, Artificial Sequence
  Synthetic
gcuuuuauccuagaagaga

SEQ ID NO: 480318 - RNA, 20 nt, Artificial Sequence
  Synthetic
agcuuuuauccuagaagaga

SEQ ID NO: 480319 - RNA, 21 nt, Artificial Sequence
  Synthetic
uagcuuuuauccuagaagaga

SEQ ID NO: 480320 - RNA, 22 nt, Artificial Sequence
  Synthetic
uuagcuuuuauccuagaagaga

SEQ ID NO: 480321 - RNA, 23 nt, Artificial Sequence
  Synthetic
uuuagcuuuuauccuagaagaga

SEQ ID NO: 480322 - RNA, 24 nt, Artificial Sequence
  Synthetic
auuuagcuuuuauccuagaagaga

SEQ ID NO: 480323 - RNA, 18 nt, Artificial Sequence
  Synthetic
gcuggagguaggaagaga

SEQ ID NO: 480324 - RNA, 19 nt, Artificial Sequence
  Synthetic
agcuggagguaggaagaga

SEQ ID NO: 480325 - RNA, 20 nt, Artificial Sequence
  Synthetic
gagcuggagguaggaagaga

SEQ ID NO: 480326 - RNA, 21 nt, Artificial Sequence
  Synthetic
agagcuggagguaggaagaga

SEQ ID NO: 480327 - RNA, 22 nt, Artificial Sequence
  Synthetic
cagagcuggagguaggaagaga

SEQ ID NO: 480328 - RNA, 23 nt, Artificial Sequence
  Synthetic
acagagcuggagguaggaagaga

SEQ ID NO: 480329 - RNA, 24 nt, Artificial Sequence
  Synthetic
gacagagcuggagguaggaagaga

SEQ ID NO: 480330 - RNA, 18 nt, Artificial Sequence
  Synthetic
cuagcggaugggaagaga

SEQ ID NO: 480331 - RNA, 19 nt, Artificial Sequence
  Synthetic
acuagcggaugggaagaga

SEQ ID NO: 480332 - RNA, 20 nt, Artificial Sequence
  Synthetic
uacuagcggaugggaagaga

SEQ ID NO: 480333 - RNA, 21 nt, Artificial Sequence
  Synthetic
cuacuagcggaugggaagaga

SEQ ID NO: 480334 - RNA, 22 nt, Artificial Sequence
  Synthetic
gcuacuagcggaugggaagaga

SEQ ID NO: 480335 - RNA, 23 nt, Artificial Sequence
  Synthetic
ggcuacuagcggaugggaagaga

SEQ ID NO: 480336 - RNA, 24 nt, Artificial Sequence
  Synthetic
aggcuacuagcggaugggaagaga

SEQ ID NO: 480337 - RNA, 18 nt, Artificial Sequence
  Synthetic
gaagguuuuaugaagaga

SEQ ID NO: 480338 - RNA, 19 nt, Artificial Sequence
  Synthetic
ugaagguuuuaugaagaga

SEQ ID NO: 480339 - RNA, 20 nt, Artificial Sequence
  Synthetic
uugaagguuuuaugaagaga

SEQ ID NO: 480340 - RNA, 21 nt, Artificial Sequence
  Synthetic
uuugaagguuuuaugaagaga

SEQ ID NO: 480341 - RNA, 22 nt, Artificial Sequence
  Synthetic
auuugaagguuuuaugaagaga

SEQ ID NO: 480342 - RNA, 23 nt, Artificial Sequence
  Synthetic
gauuugaagguuuuaugaagaga

SEQ ID NO: 480343 - RNA, 24 nt, Artificial Sequence
  Synthetic
ugauuugaagguuuuaugaagaga

SEQ ID NO: 480344 - RNA, 18 nt, Artificial Sequence
  Synthetic
uucuaucaacugaagaga

SEQ ID NO: 480345 - RNA, 19 nt, Artificial Sequence
  Synthetic
guucuaucaacugaagaga

SEQ ID NO: 480346 - RNA, 20 nt, Artificial Sequence
  Synthetic
aguucuaucaacugaagaga

SEQ ID NO: 480347 - RNA, 21 nt, Artificial Sequence
  Synthetic
uaguucuaucaacugaagaga

SEQ ID NO: 480348 - RNA, 22 nt, Artificial Sequence
  Synthetic
guaguucuaucaacugaagaga

SEQ ID NO: 480349 - RNA, 23 nt, Artificial Sequence
  Synthetic
aguaguucuaucaacugaagaga

SEQ ID NO: 480350 - RNA, 24 nt, Artificial Sequence
  Synthetic
uaguaguucuaucaacugaagaga

SEQ ID NO: 480351 - RNA, 18 nt, Artificial Sequence
  Synthetic
acuagcucugugaagaga

SEQ ID NO: 480352 - RNA, 19 nt, Artificial Sequence
  Synthetic
gacuagcucugugaagaga

SEQ ID NO: 480353 - RNA, 20 nt, Artificial Sequence
  Synthetic
agacuagcucugugaagaga

SEQ ID NO: 480354 - RNA, 21 nt, Artificial Sequence
  Synthetic
gagacuagcucugugaagaga

SEQ ID NO: 480355 - RNA, 22 nt, Artificial Sequence
  Synthetic
agagacuagcucugugaagaga

SEQ ID NO: 480356 - RNA, 23 nt, Artificial Sequence
  Synthetic
aagagacuagcucugugaagaga

SEQ ID NO: 480357 - RNA, 24 nt, Artificial Sequence
  Synthetic
uaagagacuagcucugugaagaga

SEQ ID NO: 480358 - RNA, 18 nt, Artificial Sequence
  Synthetic
auugcuagugugaagaga

SEQ ID NO: 480359 - RNA, 19 nt, Artificial Sequence
  Synthetic
cauugcuagugugaagaga

SEQ ID NO: 480360 - RNA, 20 nt, Artificial Sequence
  Synthetic
ccauugcuagugugaagaga

SEQ ID NO: 480361 - RNA, 21 nt, Artificial Sequence
  Synthetic
gccauugcuagugugaagaga

SEQ ID NO: 480362 - RNA, 22 nt, Artificial Sequence
  Synthetic
ugccauugcuagugugaagaga

SEQ ID NO: 480363 - RNA, 23 nt, Artificial Sequence
  Synthetic
uugccauugcuagugugaagaga

SEQ ID NO: 480364 - RNA, 24 nt, Artificial Sequence
  Synthetic
uuugccauugcuagugugaagaga

SEQ ID NO: 480365 - RNA, 18 nt, Artificial Sequence
  Synthetic
aacaaagcauugaagaga

SEQ ID NO: 480366 - RNA, 19 nt, Artificial Sequence
  Synthetic
gaacaaagcauugaagaga

SEQ ID NO: 480367 - RNA, 20 nt, Artificial Sequence
  Synthetic
ggaacaaagcauugaagaga

SEQ ID NO: 480368 - RNA, 21 nt, Artificial Sequence
  Synthetic
aggaacaaagcauugaagaga

SEQ ID NO: 480369 - RNA, 22 nt, Artificial Sequence
  Synthetic
gaggaacaaagcauugaagaga

SEQ ID NO: 480370 - RNA, 23 nt, Artificial Sequence
  Synthetic
agaggaacaaagcauugaagaga

SEQ ID NO: 480371 - RNA, 24 nt, Artificial Sequence
  Synthetic
gagaggaacaaagcauugaagaga

SEQ ID NO: 480372 - RNA, 18 nt, Artificial Sequence
  Synthetic
uguggagcuuugaagaga

SEQ ID NO: 480373 - RNA, 19 nt, Artificial Sequence
  Synthetic
uuguggagcuuugaagaga

SEQ ID NO: 480374 - RNA, 20 nt, Artificial Sequence
  Synthetic
auuguggagcuuugaagaga

SEQ ID NO: 480375 - RNA, 21 nt, Artificial Sequence
  Synthetic
aauuguggagcuuugaagaga

SEQ ID NO: 480376 - RNA, 22 nt, Artificial Sequence
  Synthetic
gaauuguggagcuuugaagaga

SEQ ID NO: 480377 - RNA, 23 nt, Artificial Sequence
  Synthetic
agaauuguggagcuuugaagaga

SEQ ID NO: 480378 - RNA, 24 nt, Artificial Sequence
  Synthetic
cagaauuguggagcuuugaagaga

SEQ ID NO: 480379 - RNA, 18 nt, Artificial Sequence
  Synthetic
accaccagaaauaagaga

SEQ ID NO: 480380 - RNA, 19 nt, Artificial Sequence
  Synthetic
caccaccagaaauaagaga

SEQ ID NO: 480381 - RNA, 20 nt, Artificial Sequence
  Synthetic
gcaccaccagaaauaagaga

SEQ ID NO: 480382 - RNA, 21 nt, Artificial Sequence
  Synthetic
ugcaccaccagaaauaagaga

SEQ ID NO: 480383 - RNA, 22 nt, Artificial Sequence
  Synthetic
augcaccaccagaaauaagaga

SEQ ID NO: 480384 - RNA, 23 nt, Artificial Sequence
  Synthetic
aaugcaccaccagaaauaagaga

SEQ ID NO: 480385 - RNA, 24 nt, Artificial Sequence
  Synthetic
uaaugcaccaccagaaauaagaga

SEQ ID NO: 480386 - RNA, 18 nt, Artificial Sequence
  Synthetic
caggaaaaaaguaagaga

SEQ ID NO: 480387 - RNA, 19 nt, Artificial Sequence
  Synthetic
ccaggaaaaaaguaagaga

SEQ ID NO: 480388 - RNA, 20 nt, Artificial Sequence
  Synthetic
gccaggaaaaaaguaagaga

SEQ ID NO: 480389 - RNA, 21 nt, Artificial Sequence
  Synthetic
agccaggaaaaaaguaagaga

SEQ ID NO: 480390 - RNA, 22 nt, Artificial Sequence
  Synthetic
gagccaggaaaaaaguaagaga

SEQ ID NO: 480391 - RNA, 23 nt, Artificial Sequence
  Synthetic
agagccaggaaaaaaguaagaga

SEQ ID NO: 480392 - RNA, 24 nt, Artificial Sequence
  Synthetic
cagagccaggaaaaaaguaagaga

SEQ ID NO: 480393 - RNA, 18 nt, Artificial Sequence
  Synthetic
ugggcuggagguaagaga

SEQ ID NO: 480394 - RNA, 19 nt, Artificial Sequence
  Synthetic
cugggcuggagguaagaga

SEQ ID NO: 480395 - RNA, 20 nt, Artificial Sequence
  Synthetic
gcugggcuggagguaagaga

SEQ ID NO: 480396 - RNA, 21 nt, Artificial Sequence
  Synthetic
agcugggcuggagguaagaga

SEQ ID NO: 480397 - RNA, 22 nt, Artificial Sequence
  Synthetic
gagcugggcuggagguaagaga

SEQ ID NO: 480398 - RNA, 23 nt, Artificial Sequence
  Synthetic
ugagcugggcuggagguaagaga

SEQ ID NO: 480399 - RNA, 24 nt, Artificial Sequence
  Synthetic
augagcugggcuggagguaagaga

SEQ ID NO: 480400 - RNA, 18 nt, Artificial Sequence
  Synthetic
gaaaagagauguaagaga

SEQ ID NO: 480401 - RNA, 19 nt, Artificial Sequence
  Synthetic
ggaaaagagauguaagaga

SEQ ID NO: 480402 - RNA, 20 nt, Artificial Sequence
  Synthetic
aggaaaagagauguaagaga

SEQ ID NO: 480403 - RNA, 21 nt, Artificial Sequence
  Synthetic
aaggaaaagagauguaagaga

SEQ ID NO: 480404 - RNA, 22 nt, Artificial Sequence
  Synthetic
caaggaaaagagauguaagaga

SEQ ID NO: 480405 - RNA, 23 nt, Artificial Sequence
  Synthetic
acaaggaaaagagauguaagaga

SEQ ID NO: 480406 - RNA, 24 nt, Artificial Sequence
  Synthetic
uacaaggaaaagagauguaagaga

SEQ ID NO: 480407 - RNA, 18 nt, Artificial Sequence
  Synthetic
augggaauucuuaagaga

SEQ ID NO: 480408 - RNA, 19 nt, Artificial Sequence
  Synthetic
aaugggaauucuuaagaga

SEQ ID NO: 480409 - RNA, 20 nt, Artificial Sequence
  Synthetic
aaaugggaauucuuaagaga

SEQ ID NO: 480410 - RNA, 21 nt, Artificial Sequence
  Synthetic
caaaugggaauucuuaagaga

SEQ ID NO: 480411 - RNA, 22 nt, Artificial Sequence
  Synthetic
acaaaugggaauucuuaagaga

SEQ ID NO: 480412 - RNA, 23 nt, Artificial Sequence
  Synthetic
gacaaaugggaauucuuaagaga

SEQ ID NO: 480413 - RNA, 24 nt, Artificial Sequence
  Synthetic
cgacaaaugggaauucuuaagaga

SEQ ID NO: 480414 - RNA, 18 nt, Artificial Sequence
  Synthetic
uaccaaaagguuaagaga

SEQ ID NO: 480415 - RNA, 19 nt, Artificial Sequence
  Synthetic
cuaccaaaagguuaagaga

SEQ ID NO: 480416 - RNA, 20 nt, Artificial Sequence
  Synthetic
acuaccaaaagguuaagaga

SEQ ID NO: 480417 - RNA, 21 nt, Artificial Sequence
  Synthetic
aacuaccaaaagguuaagaga

SEQ ID NO: 480418 - RNA, 22 nt, Artificial Sequence
  Synthetic
aaacuaccaaaagguuaagaga

SEQ ID NO: 480419 - RNA, 23 nt, Artificial Sequence
  Synthetic
aaaacuaccaaaagguuaagaga

SEQ ID NO: 480420 - RNA, 24 nt, Artificial Sequence
  Synthetic
uaaaacuaccaaaagguuaagaga

SEQ ID NO: 480421 - RNA, 18 nt, Artificial Sequence
  Synthetic
ugaggaacucaacagaga

SEQ ID NO: 480422 - RNA, 19 nt, Artificial Sequence
  Synthetic
uugaggaacucaacagaga

SEQ ID NO: 480423 - RNA, 20 nt, Artificial Sequence
  Synthetic
uuugaggaacucaacagaga

SEQ ID NO: 480424 - RNA, 21 nt, Artificial Sequence
  Synthetic
guuugaggaacucaacagaga

SEQ ID NO: 480425 - RNA, 22 nt, Artificial Sequence
  Synthetic
gguuugaggaacucaacagaga

SEQ ID NO: 480426 - RNA, 23 nt, Artificial Sequence
  Synthetic
agguuugaggaacucaacagaga

SEQ ID NO: 480427 - RNA, 24 nt, Artificial Sequence
  Synthetic
aagguuugaggaacucaacagaga

SEQ ID NO: 480428 - RNA, 18 nt, Artificial Sequence
  Synthetic
cacacacacacacagaga

SEQ ID NO: 480429 - RNA, 19 nt, Artificial Sequence
  Synthetic
acacacacacacacagaga

SEQ ID NO: 480430 - RNA, 20 nt, Artificial Sequence
  Synthetic
cacacacacacacacagaga

SEQ ID NO: 480431 - RNA, 21 nt, Artificial Sequence
  Synthetic
acacacacacacacacagaga

SEQ ID NO: 480432 - RNA, 22 nt, Artificial Sequence
  Synthetic
cacacacacacacacacagaga

SEQ ID NO: 480433 - RNA, 23 nt, Artificial Sequence
  Synthetic
acacacacacacacacacagaga

SEQ ID NO: 480434 - RNA, 24 nt, Artificial Sequence
  Synthetic
cacacacacacacacacacagaga

SEQ ID NO: 480435 - RNA, 18 nt, Artificial Sequence
  Synthetic
gugagagagacacagaga

SEQ ID NO: 480436 - RNA, 19 nt, Artificial Sequence
  Synthetic
cgugagagagacacagaga

SEQ ID NO: 480437 - RNA, 20 nt, Artificial Sequence
  Synthetic
gcgugagagagacacagaga

SEQ ID NO: 480438 - RNA, 21 nt, Artificial Sequence
  Synthetic
ugcgugagagagacacagaga

SEQ ID NO: 480439 - RNA, 22 nt, Artificial Sequence
  Synthetic
gugcgugagagagacacagaga

SEQ ID NO: 480440 - RNA, 23 nt, Artificial Sequence
  Synthetic
ugugcgugagagagacacagaga

SEQ ID NO: 480441 - RNA, 24 nt, Artificial Sequence
  Synthetic
gugugcgugagagagacacagaga

SEQ ID NO: 480442 - RNA, 18 nt, Artificial Sequence
  Synthetic
aaauugguaccacagaga

SEQ ID NO: 480443 - RNA, 19 nt, Artificial Sequence
  Synthetic
uaaauugguaccacagaga

SEQ ID NO: 480444 - RNA, 20 nt, Artificial Sequence
  Synthetic
guaaauugguaccacagaga

SEQ ID NO: 480445 - RNA, 21 nt, Artificial Sequence
  Synthetic
aguaaauugguaccacagaga

SEQ ID NO: 480446 - RNA, 22 nt, Artificial Sequence
  Synthetic
caguaaauugguaccacagaga

SEQ ID NO: 480447 - RNA, 23 nt, Artificial Sequence
  Synthetic
acaguaaauugguaccacagaga

SEQ ID NO: 480448 - RNA, 24 nt, Artificial Sequence
  Synthetic
uacaguaaauugguaccacagaga

SEQ ID NO: 480449 - RNA, 18 nt, Artificial Sequence
  Synthetic
aauggaauuccacagaga

SEQ ID NO: 480450 - RNA, 19 nt, Artificial Sequence
  Synthetic
gaauggaauuccacagaga

SEQ ID NO: 480451 - RNA, 20 nt, Artificial Sequence
  Synthetic
ggaauggaauuccacagaga

SEQ ID NO: 480452 - RNA, 21 nt, Artificial Sequence
  Synthetic
uggaauggaauuccacagaga

SEQ ID NO: 480453 - RNA, 22 nt, Artificial Sequence
  Synthetic
guggaauggaauuccacagaga

SEQ ID NO: 480454 - RNA, 23 nt, Artificial Sequence
  Synthetic
uguggaauggaauuccacagaga

SEQ ID NO: 480455 - RNA, 24 nt, Artificial Sequence
  Synthetic
auguggaauggaauuccacagaga

SEQ ID NO: 480456 - RNA, 18 nt, Artificial Sequence
  Synthetic
uauuggacagcacagaga

SEQ ID NO: 480457 - RNA, 19 nt, Artificial Sequence
  Synthetic
guauuggacagcacagaga

SEQ ID NO: 480458 - RNA, 20 nt, Artificial Sequence
  Synthetic
uguauuggacagcacagaga

SEQ ID NO: 480459 - RNA, 21 nt, Artificial Sequence
  Synthetic
uuguauuggacagcacagaga

SEQ ID NO: 480460 - RNA, 22 nt, Artificial Sequence
  Synthetic
guuguauuggacagcacagaga

SEQ ID NO: 480461 - RNA, 23 nt, Artificial Sequence
  Synthetic
uguuguauuggacagcacagaga

SEQ ID NO: 480462 - RNA, 24 nt, Artificial Sequence
  Synthetic
cuguuguauuggacagcacagaga

SEQ ID NO: 480463 - RNA, 18 nt, Artificial Sequence
  Synthetic
cauaucuauucacagaga

SEQ ID NO: 480464 - RNA, 19 nt, Artificial Sequence
  Synthetic
ucauaucuauucacagaga

SEQ ID NO: 480465 - RNA, 20 nt, Artificial Sequence
  Synthetic
cucauaucuauucacagaga

SEQ ID NO: 480466 - RNA, 21 nt, Artificial Sequence
  Synthetic
acucauaucuauucacagaga

SEQ ID NO: 480467 - RNA, 22 nt, Artificial Sequence
  Synthetic
aacucauaucuauucacagaga

SEQ ID NO: 480468 - RNA, 23 nt, Artificial Sequence
  Synthetic
aaacucauaucuauucacagaga

SEQ ID NO: 480469 - RNA, 24 nt, Artificial Sequence
  Synthetic
caaacucauaucuauucacagaga

SEQ ID NO: 480470 - RNA, 18 nt, Artificial Sequence
  Synthetic
aagagagacagacagaga

SEQ ID NO: 480471 - RNA, 19 nt, Artificial Sequence
  Synthetic
aaagagagacagacagaga

SEQ ID NO: 480472 - RNA, 20 nt, Artificial Sequence
  Synthetic
uaaagagagacagacagaga

SEQ ID NO: 480473 - RNA, 21 nt, Artificial Sequence
  Synthetic
guaaagagagacagacagaga

SEQ ID NO: 480474 - RNA, 22 nt, Artificial Sequence
  Synthetic
uguaaagagagacagacagaga

SEQ ID NO: 480475 - RNA, 23 nt, Artificial Sequence
  Synthetic
guguaaagagagacagacagaga

SEQ ID NO: 480476 - RNA, 24 nt, Artificial Sequence
  Synthetic
uguguaaagagagacagacagaga

SEQ ID NO: 480477 - RNA, 21 nt, Artificial Sequence
  Synthetic
agagagagagagagacagaga

SEQ ID NO: 480478 - RNA, 22 nt, Artificial Sequence
  Synthetic
gagagagagagagagacagaga

SEQ ID NO: 480479 - RNA, 23 nt, Artificial Sequence
  Synthetic
agagagagagagagagacagaga

SEQ ID NO: 480480 - RNA, 24 nt, Artificial Sequence
  Synthetic
gagagagagagagagagacagaga

SEQ ID NO: 480481 - RNA, 18 nt, Artificial Sequence
  Synthetic
acaaacaagcgacagaga

SEQ ID NO: 480482 - RNA, 19 nt, Artificial Sequence
  Synthetic
cacaaacaagcgacagaga

SEQ ID NO: 480483 - RNA, 20 nt, Artificial Sequence
  Synthetic
gcacaaacaagcgacagaga

SEQ ID NO: 480484 - RNA, 21 nt, Artificial Sequence
  Synthetic
ugcacaaacaagcgacagaga

SEQ ID NO: 480485 - RNA, 22 nt, Artificial Sequence
  Synthetic
cugcacaaacaagcgacagaga

SEQ ID NO: 480486 - RNA, 23 nt, Artificial Sequence
  Synthetic
gcugcacaaacaagcgacagaga

SEQ ID NO: 480487 - RNA, 24 nt, Artificial Sequence
  Synthetic
agcugcacaaacaagcgacagaga

SEQ ID NO: 480488 - RNA, 18 nt, Artificial Sequence
  Synthetic
auaaauagaugacagaga

SEQ ID NO: 480489 - RNA, 19 nt, Artificial Sequence
  Synthetic
gauaaauagaugacagaga

SEQ ID NO: 480490 - RNA, 20 nt, Artificial Sequence
  Synthetic
ugauaaauagaugacagaga

SEQ ID NO: 480491 - RNA, 21 nt, Artificial Sequence
  Synthetic
augauaaauagaugacagaga

SEQ ID NO: 480492 - RNA, 22 nt, Artificial Sequence
  Synthetic
gaugauaaauagaugacagaga

SEQ ID NO: 480493 - RNA, 23 nt, Artificial Sequence
  Synthetic
agaugauaaauagaugacagaga

SEQ ID NO: 480494 - RNA, 24 nt, Artificial Sequence
  Synthetic
uagaugauaaauagaugacagaga

SEQ ID NO: 480495 - RNA, 18 nt, Artificial Sequence
  Synthetic
aaaggagagugacagaga

SEQ ID NO: 480496 - RNA, 19 nt, Artificial Sequence
  Synthetic
uaaaggagagugacagaga

SEQ ID NO: 480497 - RNA, 20 nt, Artificial Sequence
  Synthetic
guaaaggagagugacagaga

SEQ ID NO: 480498 - RNA, 21 nt, Artificial Sequence
  Synthetic
aguaaaggagagugacagaga

SEQ ID NO: 480499 - RNA, 22 nt, Artificial Sequence
  Synthetic
aaguaaaggagagugacagaga

SEQ ID NO: 480500 - RNA, 23 nt, Artificial Sequence
  Synthetic
uaaguaaaggagagugacagaga

SEQ ID NO: 480501 - RNA, 24 nt, Artificial Sequence
  Synthetic
auaaguaaaggagagugacagaga

SEQ ID NO: 480502 - RNA, 18 nt, Artificial Sequence
  Synthetic
agaggagaacuacagaga

SEQ ID NO: 480503 - RNA, 19 nt, Artificial Sequence
  Synthetic
cagaggagaacuacagaga

SEQ ID NO: 480504 - RNA, 20 nt, Artificial Sequence
  Synthetic
ccagaggagaacuacagaga

SEQ ID NO: 480505 - RNA, 21 nt, Artificial Sequence
  Synthetic
accagaggagaacuacagaga

SEQ ID NO: 480506 - RNA, 22 nt, Artificial Sequence
  Synthetic
caccagaggagaacuacagaga

SEQ ID NO: 480507 - RNA, 23 nt, Artificial Sequence
  Synthetic
acaccagaggagaacuacagaga

SEQ ID NO: 480508 - RNA, 24 nt, Artificial Sequence
  Synthetic
gacaccagaggagaacuacagaga

SEQ ID NO: 480509 - RNA, 18 nt, Artificial Sequence
  Synthetic
guaguuggaguacagaga

SEQ ID NO: 480510 - RNA, 19 nt, Artificial Sequence
  Synthetic
uguaguuggaguacagaga

SEQ ID NO: 480511 - RNA, 20 nt, Artificial Sequence
  Synthetic
guguaguuggaguacagaga

SEQ ID NO: 480512 - RNA, 21 nt, Artificial Sequence
  Synthetic
aguguaguuggaguacagaga

SEQ ID NO: 480513 - RNA, 22 nt, Artificial Sequence
  Synthetic
uaguguaguuggaguacagaga

SEQ ID NO: 480514 - RNA, 23 nt, Artificial Sequence
  Synthetic
uuaguguaguuggaguacagaga

SEQ ID NO: 480515 - RNA, 24 nt, Artificial Sequence
  Synthetic
guuaguguaguuggaguacagaga

SEQ ID NO: 480516 - RNA, 18 nt, Artificial Sequence
  Synthetic
gagccuauuuuacagaga

SEQ ID NO: 480517 - RNA, 19 nt, Artificial Sequence
  Synthetic
ugagccuauuuuacagaga

SEQ ID NO: 480518 - RNA, 20 nt, Artificial Sequence
  Synthetic
gugagccuauuuuacagaga

SEQ ID NO: 480519 - RNA, 21 nt, Artificial Sequence
  Synthetic
agugagccuauuuuacagaga

SEQ ID NO: 480520 - RNA, 22 nt, Artificial Sequence
  Synthetic
aagugagccuauuuuacagaga

SEQ ID NO: 480521 - RNA, 23 nt, Artificial Sequence
  Synthetic
uaagugagccuauuuuacagaga

SEQ ID NO: 480522 - RNA, 24 nt, Artificial Sequence
  Synthetic
auaagugagccuauuuuacagaga

SEQ ID NO: 480523 - RNA, 18 nt, Artificial Sequence
  Synthetic
cucucucgaaaccagaga

SEQ ID NO: 480524 - RNA, 19 nt, Artificial Sequence
  Synthetic
ucucucucgaaaccagaga

SEQ ID NO: 480525 - RNA, 20 nt, Artificial Sequence
  Synthetic
cucucucucgaaaccagaga

SEQ ID NO: 480526 - RNA, 21 nt, Artificial Sequence
  Synthetic
ucucucucucgaaaccagaga

SEQ ID NO: 480527 - RNA, 22 nt, Artificial Sequence
  Synthetic
cucucucucucgaaaccagaga

SEQ ID NO: 480528 - RNA, 23 nt, Artificial Sequence
  Synthetic
ucucucucucucgaaaccagaga

SEQ ID NO: 480529 - RNA, 24 nt, Artificial Sequence
  Synthetic
cucucucucucucgaaaccagaga

SEQ ID NO: 480530 - RNA, 18 nt, Artificial Sequence
  Synthetic
acacuguacaaccagaga

SEQ ID NO: 480531 - RNA, 19 nt, Artificial Sequence
  Synthetic
cacacuguacaaccagaga

SEQ ID NO: 480532 - RNA, 20 nt, Artificial Sequence
  Synthetic
acacacuguacaaccagaga

SEQ ID NO: 480533 - RNA, 21 nt, Artificial Sequence
  Synthetic
aacacacuguacaaccagaga

SEQ ID NO: 480534 - RNA, 22 nt, Artificial Sequence
  Synthetic
gaacacacuguacaaccagaga

SEQ ID NO: 480535 - RNA, 23 nt, Artificial Sequence
  Synthetic
ugaacacacuguacaaccagaga

SEQ ID NO: 480536 - RNA, 24 nt, Artificial Sequence
  Synthetic
uugaacacacuguacaaccagaga

SEQ ID NO: 480537 - RNA, 18 nt, Artificial Sequence
  Synthetic
aaugggauuuaccagaga

SEQ ID NO: 480538 - RNA, 19 nt, Artificial Sequence
  Synthetic
aaaugggauuuaccagaga

SEQ ID NO: 480539 - RNA, 20 nt, Artificial Sequence
  Synthetic
gaaaugggauuuaccagaga

SEQ ID NO: 480540 - RNA, 21 nt, Artificial Sequence
  Synthetic
ugaaaugggauuuaccagaga

SEQ ID NO: 480541 - RNA, 22 nt, Artificial Sequence
  Synthetic
augaaaugggauuuaccagaga

SEQ ID NO: 480542 - RNA, 23 nt, Artificial Sequence
  Synthetic
uaugaaaugggauuuaccagaga

SEQ ID NO: 480543 - RNA, 24 nt, Artificial Sequence
  Synthetic
uuaugaaaugggauuuaccagaga

SEQ ID NO: 480544 - RNA, 18 nt, Artificial Sequence
  Synthetic
cccgaaguuccccagaga

SEQ ID NO: 480545 - RNA, 19 nt, Artificial Sequence
  Synthetic
acccgaaguuccccagaga

SEQ ID NO: 480546 - RNA, 20 nt, Artificial Sequence
  Synthetic
aacccgaaguuccccagaga

SEQ ID NO: 480547 - RNA, 21 nt, Artificial Sequence
  Synthetic
aaacccgaaguuccccagaga

SEQ ID NO: 480548 - RNA, 22 nt, Artificial Sequence
  Synthetic
gaaacccgaaguuccccagaga

SEQ ID NO: 480549 - RNA, 23 nt, Artificial Sequence
  Synthetic
ggaaacccgaaguuccccagaga

SEQ ID NO: 480550 - RNA, 24 nt, Artificial Sequence
  Synthetic
cggaaacccgaaguuccccagaga

SEQ ID NO: 480551 - RNA, 18 nt, Artificial Sequence
  Synthetic
ugguauagucuccagaga

SEQ ID NO: 480552 - RNA, 19 nt, Artificial Sequence
  Synthetic
augguauagucuccagaga

SEQ ID NO: 480553 - RNA, 20 nt, Artificial Sequence
  Synthetic
gaugguauagucuccagaga

SEQ ID NO: 480554 - RNA, 21 nt, Artificial Sequence
  Synthetic
ggaugguauagucuccagaga

SEQ ID NO: 480555 - RNA, 22 nt, Artificial Sequence
  Synthetic
uggaugguauagucuccagaga

SEQ ID NO: 480556 - RNA, 23 nt, Artificial Sequence
  Synthetic
guggaugguauagucuccagaga

SEQ ID NO: 480557 - RNA, 24 nt, Artificial Sequence
  Synthetic
uguggaugguauagucuccagaga

SEQ ID NO: 480558 - RNA, 18 nt, Artificial Sequence
  Synthetic
uacuccuacaggcagaga

SEQ ID NO: 480559 - RNA, 19 nt, Artificial Sequence
  Synthetic
cuacuccuacaggcagaga

SEQ ID NO: 480560 - RNA, 20 nt, Artificial Sequence
  Synthetic
gcuacuccuacaggcagaga

SEQ ID NO: 480561 - RNA, 21 nt, Artificial Sequence
  Synthetic
agcuacuccuacaggcagaga

SEQ ID NO: 480562 - RNA, 22 nt, Artificial Sequence
  Synthetic
gagcuacuccuacaggcagaga

SEQ ID NO: 480563 - RNA, 23 nt, Artificial Sequence
  Synthetic
agagcuacuccuacaggcagaga

SEQ ID NO: 480564 - RNA, 24 nt, Artificial Sequence
  Synthetic
gagagcuacuccuacaggcagaga

SEQ ID NO: 480565 - RNA, 18 nt, Artificial Sequence
  Synthetic
caacugaggaggcagaga

SEQ ID NO: 480566 - RNA, 19 nt, Artificial Sequence
  Synthetic
acaacugaggaggcagaga

SEQ ID NO: 480567 - RNA, 20 nt, Artificial Sequence
  Synthetic
aacaacugaggaggcagaga

SEQ ID NO: 480568 - RNA, 21 nt, Artificial Sequence
  Synthetic
caacaacugaggaggcagaga

SEQ ID NO: 480569 - RNA, 22 nt, Artificial Sequence
  Synthetic
acaacaacugaggaggcagaga

SEQ ID NO: 480570 - RNA, 23 nt, Artificial Sequence
  Synthetic
gacaacaacugaggaggcagaga

SEQ ID NO: 480571 - RNA, 24 nt, Artificial Sequence
  Synthetic
ggacaacaacugaggaggcagaga

SEQ ID NO: 480572 - RNA, 18 nt, Artificial Sequence
  Synthetic
ugauguccugggcagaga

SEQ ID NO: 480573 - RNA, 19 nt, Artificial Sequence
  Synthetic
cugauguccugggcagaga

SEQ ID NO: 480574 - RNA, 20 nt, Artificial Sequence
  Synthetic
acugauguccugggcagaga

SEQ ID NO: 480575 - RNA, 21 nt, Artificial Sequence
  Synthetic
uacugauguccugggcagaga

SEQ ID NO: 480576 - RNA, 22 nt, Artificial Sequence
  Synthetic
cuacugauguccugggcagaga

SEQ ID NO: 480577 - RNA, 23 nt, Artificial Sequence
  Synthetic
ccuacugauguccugggcagaga

SEQ ID NO: 480578 - RNA, 24 nt, Artificial Sequence
  Synthetic
gccuacugauguccugggcagaga

SEQ ID NO: 480579 - RNA, 18 nt, Artificial Sequence
  Synthetic
aggcacaguuggcagaga

SEQ ID NO: 480580 - RNA, 19 nt, Artificial Sequence
  Synthetic
uaggcacaguuggcagaga

SEQ ID NO: 480581 - RNA, 20 nt, Artificial Sequence
  Synthetic
uuaggcacaguuggcagaga

SEQ ID NO: 480582 - RNA, 21 nt, Artificial Sequence
  Synthetic
auuaggcacaguuggcagaga

SEQ ID NO: 480583 - RNA, 22 nt, Artificial Sequence
  Synthetic
uauuaggcacaguuggcagaga

SEQ ID NO: 480584 - RNA, 23 nt, Artificial Sequence
  Synthetic
uuauuaggcacaguuggcagaga

SEQ ID NO: 480585 - RNA, 24 nt, Artificial Sequence
  Synthetic
cuuauuaggcacaguuggcagaga

SEQ ID NO: 480586 - RNA, 18 nt, Artificial Sequence
  Synthetic
agcaaaccacugcagaga

SEQ ID NO: 480587 - RNA, 19 nt, Artificial Sequence
  Synthetic
uagcaaaccacugcagaga

SEQ ID NO: 480588 - RNA, 20 nt, Artificial Sequence
  Synthetic
cuagcaaaccacugcagaga

SEQ ID NO: 480589 - RNA, 21 nt, Artificial Sequence
  Synthetic
acuagcaaaccacugcagaga

SEQ ID NO: 480590 - RNA, 22 nt, Artificial Sequence
  Synthetic
gacuagcaaaccacugcagaga

SEQ ID NO: 480591 - RNA, 23 nt, Artificial Sequence
  Synthetic
ggacuagcaaaccacugcagaga

SEQ ID NO: 480592 - RNA, 24 nt, Artificial Sequence
  Synthetic
aggacuagcaaaccacugcagaga

SEQ ID NO: 480593 - RNA, 18 nt, Artificial Sequence
  Synthetic
agaaguuugcugcagaga

SEQ ID NO: 480594 - RNA, 19 nt, Artificial Sequence
  Synthetic
cagaaguuugcugcagaga

SEQ ID NO: 480595 - RNA, 20 nt, Artificial Sequence
  Synthetic
gcagaaguuugcugcagaga

SEQ ID NO: 480596 - RNA, 21 nt, Artificial Sequence
  Synthetic
ggcagaaguuugcugcagaga

SEQ ID NO: 480597 - RNA, 22 nt, Artificial Sequence
  Synthetic
aggcagaaguuugcugcagaga

SEQ ID NO: 480598 - RNA, 23 nt, Artificial Sequence
  Synthetic
caggcagaaguuugcugcagaga

SEQ ID NO: 480599 - RNA, 24 nt, Artificial Sequence
  Synthetic
ccaggcagaaguuugcugcagaga

SEQ ID NO: 480600 - RNA, 18 nt, Artificial Sequence
  Synthetic
accacaauauugcagaga

SEQ ID NO: 480601 - RNA, 19 nt, Artificial Sequence
  Synthetic
aaccacaauauugcagaga

SEQ ID NO: 480602 - RNA, 20 nt, Artificial Sequence
  Synthetic
gaaccacaauauugcagaga

SEQ ID NO: 480603 - RNA, 21 nt, Artificial Sequence
  Synthetic
agaaccacaauauugcagaga

SEQ ID NO: 480604 - RNA, 22 nt, Artificial Sequence
  Synthetic
aagaaccacaauauugcagaga

SEQ ID NO: 480605 - RNA, 23 nt, Artificial Sequence
  Synthetic
caagaaccacaauauugcagaga

SEQ ID NO: 480606 - RNA, 24 nt, Artificial Sequence
  Synthetic
ucaagaaccacaauauugcagaga

SEQ ID NO: 480607 - RNA, 18 nt, Artificial Sequence
  Synthetic
aaacuucacaaucagaga

SEQ ID NO: 480608 - RNA, 19 nt, Artificial Sequence
  Synthetic
aaaacuucacaaucagaga

SEQ ID NO: 480609 - RNA, 20 nt, Artificial Sequence
  Synthetic
gaaaacuucacaaucagaga

SEQ ID NO: 480610 - RNA, 21 nt, Artificial Sequence
  Synthetic
agaaaacuucacaaucagaga

SEQ ID NO: 480611 - RNA, 22 nt, Artificial Sequence
  Synthetic
aagaaaacuucacaaucagaga

SEQ ID NO: 480612 - RNA, 23 nt, Artificial Sequence
  Synthetic
gaagaaaacuucacaaucagaga

SEQ ID NO: 480613 - RNA, 24 nt, Artificial Sequence
  Synthetic
ugaagaaaacuucacaaucagaga

SEQ ID NO: 480614 - RNA, 18 nt, Artificial Sequence
  Synthetic
gaaugagaugaucagaga

SEQ ID NO: 480615 - RNA, 19 nt, Artificial Sequence
  Synthetic
agaaugagaugaucagaga

SEQ ID NO: 480616 - RNA, 20 nt, Artificial Sequence
  Synthetic
uagaaugagaugaucagaga

SEQ ID NO: 480617 - RNA, 21 nt, Artificial Sequence
  Synthetic
auagaaugagaugaucagaga

SEQ ID NO: 480618 - RNA, 22 nt, Artificial Sequence
  Synthetic
cauagaaugagaugaucagaga

SEQ ID NO: 480619 - RNA, 23 nt, Artificial Sequence
  Synthetic
ucauagaaugagaugaucagaga

SEQ ID NO: 480620 - RNA, 24 nt, Artificial Sequence
  Synthetic
aucauagaaugagaugaucagaga

SEQ ID NO: 480621 - RNA, 18 nt, Artificial Sequence
  Synthetic
ccagagaaauaucagaga

SEQ ID NO: 480622 - RNA, 19 nt, Artificial Sequence
  Synthetic
accagagaaauaucagaga

SEQ ID NO: 480623 - RNA, 20 nt, Artificial Sequence
  Synthetic
uaccagagaaauaucagaga

SEQ ID NO: 480624 - RNA, 21 nt, Artificial Sequence
  Synthetic
cuaccagagaaauaucagaga

SEQ ID NO: 480625 - RNA, 22 nt, Artificial Sequence
  Synthetic
acuaccagagaaauaucagaga

SEQ ID NO: 480626 - RNA, 23 nt, Artificial Sequence
  Synthetic
gacuaccagagaaauaucagaga

SEQ ID NO: 480627 - RNA, 24 nt, Artificial Sequence
  Synthetic
cgacuaccagagaaauaucagaga

SEQ ID NO: 480628 - RNA, 18 nt, Artificial Sequence
  Synthetic
auuuugcaggcucagaga

SEQ ID NO: 480629 - RNA, 19 nt, Artificial Sequence
  Synthetic
gauuuugcaggcucagaga

SEQ ID NO: 480630 - RNA, 20 nt, Artificial Sequence
  Synthetic
cgauuuugcaggcucagaga

SEQ ID NO: 480631 - RNA, 21 nt, Artificial Sequence
  Synthetic
ucgauuuugcaggcucagaga

SEQ ID NO: 480632 - RNA, 22 nt, Artificial Sequence
  Synthetic
uucgauuuugcaggcucagaga

SEQ ID NO: 480633 - RNA, 23 nt, Artificial Sequence
  Synthetic
auucgauuuugcaggcucagaga

SEQ ID NO: 480634 - RNA, 24 nt, Artificial Sequence
  Synthetic
gauucgauuuugcaggcucagaga

SEQ ID NO: 480635 - RNA, 18 nt, Artificial Sequence
  Synthetic
ggcucaaaacgucagaga

SEQ ID NO: 480636 - RNA, 19 nt, Artificial Sequence
  Synthetic
uggcucaaaacgucagaga

SEQ ID NO: 480637 - RNA, 20 nt, Artificial Sequence
  Synthetic
uuggcucaaaacgucagaga

SEQ ID NO: 480638 - RNA, 21 nt, Artificial Sequence
  Synthetic
uuuggcucaaaacgucagaga

SEQ ID NO: 480639 - RNA, 22 nt, Artificial Sequence
  Synthetic
auuuggcucaaaacgucagaga

SEQ ID NO: 480640 - RNA, 23 nt, Artificial Sequence
  Synthetic
uauuuggcucaaaacgucagaga

SEQ ID NO: 480641 - RNA, 24 nt, Artificial Sequence
  Synthetic
guauuuggcucaaaacgucagaga

SEQ ID NO: 480642 - RNA, 18 nt, Artificial Sequence
  Synthetic
uuaagauauguucagaga

SEQ ID NO: 480643 - RNA, 19 nt, Artificial Sequence
  Synthetic
uuuaagauauguucagaga

SEQ ID NO: 480644 - RNA, 20 nt, Artificial Sequence
  Synthetic
cuuuaagauauguucagaga

SEQ ID NO: 480645 - RNA, 21 nt, Artificial Sequence
  Synthetic
gcuuuaagauauguucagaga

SEQ ID NO: 480646 - RNA, 22 nt, Artificial Sequence
  Synthetic
ggcuuuaagauauguucagaga

SEQ ID NO: 480647 - RNA, 23 nt, Artificial Sequence
  Synthetic
uggcuuuaagauauguucagaga

SEQ ID NO: 480648 - RNA, 24 nt, Artificial Sequence
  Synthetic
guggcuuuaagauauguucagaga

SEQ ID NO: 480649 - RNA, 18 nt, Artificial Sequence
  Synthetic
gugagugaauuucagaga

SEQ ID NO: 480650 - RNA, 19 nt, Artificial Sequence
  Synthetic
ugugagugaauuucagaga

SEQ ID NO: 480651 - RNA, 20 nt, Artificial Sequence
  Synthetic
augugagugaauuucagaga

SEQ ID NO: 480652 - RNA, 21 nt, Artificial Sequence
  Synthetic
gaugugagugaauuucagaga

SEQ ID NO: 480653 - RNA, 22 nt, Artificial Sequence
  Synthetic
ugaugugagugaauuucagaga

SEQ ID NO: 480654 - RNA, 23 nt, Artificial Sequence
  Synthetic
gugaugugagugaauuucagaga

SEQ ID NO: 480655 - RNA, 24 nt, Artificial Sequence
  Synthetic
ggugaugugagugaauuucagaga

SEQ ID NO: 480656 - RNA, 18 nt, Artificial Sequence
  Synthetic
aaaaaaaaaaaagagaga

SEQ ID NO: 480657 - RNA, 19 nt, Artificial Sequence
  Synthetic
aaaaaaaaaaaaagagaga

SEQ ID NO: 480658 - RNA, 20 nt, Artificial Sequence
  Synthetic
aaaaaaaaaaaaaagagaga

SEQ ID NO: 480659 - RNA, 21 nt, Artificial Sequence
  Synthetic
aaaaaaaaaaaaaaagagaga

SEQ ID NO: 480660 - RNA, 22 nt, Artificial Sequence
  Synthetic
aaaaaaaaaaaaaaaagagaga

SEQ ID NO: 480661 - RNA, 23 nt, Artificial Sequence
  Synthetic
aaaaaaaaaaaaaaaaagagaga

SEQ ID NO: 480662 - RNA, 24 nt, Artificial Sequence
  Synthetic
aaaaaaaaaaaaaaaaaagagaga

SEQ ID NO: 480663 - RNA, 18 nt, Artificial Sequence
  Synthetic
cucaaaaaaaaagagaga

SEQ ID NO: 480664 - RNA, 19 nt, Artificial Sequence
  Synthetic
ucucaaaaaaaaagagaga

SEQ ID NO: 480665 - RNA, 20 nt, Artificial Sequence
  Synthetic
gucucaaaaaaaaagagaga

SEQ ID NO: 480666 - RNA, 21 nt, Artificial Sequence
  Synthetic
agucucaaaaaaaaagagaga

SEQ ID NO: 480667 - RNA, 22 nt, Artificial Sequence
  Synthetic
cagucucaaaaaaaaagagaga

SEQ ID NO: 480668 - RNA, 23 nt, Artificial Sequence
  Synthetic
ucagucucaaaaaaaaagagaga

SEQ ID NO: 480669 - RNA, 24 nt, Artificial Sequence
  Synthetic
cucagucucaaaaaaaaagagaga

SEQ ID NO: 480670 - RNA, 18 nt, Artificial Sequence
  Synthetic
gacucauuaaaagagaga

SEQ ID NO: 480671 - RNA, 19 nt, Artificial Sequence
  Synthetic
ugacucauuaaaagagaga

SEQ ID NO: 480672 - RNA, 20 nt, Artificial Sequence
  Synthetic
cugacucauuaaaagagaga

SEQ ID NO: 480673 - RNA, 21 nt, Artificial Sequence
  Synthetic
acugacucauuaaaagagaga

SEQ ID NO: 480674 - RNA, 22 nt, Artificial Sequence
  Synthetic
gacugacucauuaaaagagaga

SEQ ID NO: 480675 - RNA, 23 nt, Artificial Sequence
  Synthetic
agacugacucauuaaaagagaga

SEQ ID NO: 480676 - RNA, 24 nt, Artificial Sequence
  Synthetic
cagacugacucauuaaaagagaga

SEQ ID NO: 480677 - RNA, 18 nt, Artificial Sequence
  Synthetic
gagggagggaaagagaga

SEQ ID NO: 480678 - RNA, 19 nt, Artificial Sequence
  Synthetic
ggagggagggaaagagaga

SEQ ID NO: 480679 - RNA, 20 nt, Artificial Sequence
  Synthetic
gggagggagggaaagagaga

SEQ ID NO: 480680 - RNA, 21 nt, Artificial Sequence
  Synthetic
agggagggagggaaagagaga

SEQ ID NO: 480681 - RNA, 22 nt, Artificial Sequence
  Synthetic
gagggagggagggaaagagaga

SEQ ID NO: 480682 - RNA, 23 nt, Artificial Sequence
  Synthetic
agagggagggagggaaagagaga

SEQ ID NO: 480683 - RNA, 24 nt, Artificial Sequence
  Synthetic
gagagggagggagggaaagagaga

SEQ ID NO: 480684 - RNA, 18 nt, Artificial Sequence
  Synthetic
aaggcaggacaagagaga

SEQ ID NO: 480685 - RNA, 19 nt, Artificial Sequence
  Synthetic
caaggcaggacaagagaga

SEQ ID NO: 480686 - RNA, 20 nt, Artificial Sequence
  Synthetic
acaaggcaggacaagagaga

SEQ ID NO: 480687 - RNA, 21 nt, Artificial Sequence
  Synthetic
aacaaggcaggacaagagaga

SEQ ID NO: 480688 - RNA, 22 nt, Artificial Sequence
  Synthetic
uaacaaggcaggacaagagaga

SEQ ID NO: 480689 - RNA, 23 nt, Artificial Sequence
  Synthetic
auaacaaggcaggacaagagaga

SEQ ID NO: 480690 - RNA, 24 nt, Artificial Sequence
  Synthetic
gauaacaaggcaggacaagagaga

SEQ ID NO: 480691 - RNA, 18 nt, Artificial Sequence
  Synthetic
gagacagagcaagagaga

SEQ ID NO: 480692 - RNA, 19 nt, Artificial Sequence
  Synthetic
agagacagagcaagagaga

SEQ ID NO: 480693 - RNA, 20 nt, Artificial Sequence
  Synthetic
cagagacagagcaagagaga

SEQ ID NO: 480694 - RNA, 21 nt, Artificial Sequence
  Synthetic
acagagacagagcaagagaga

SEQ ID NO: 480695 - RNA, 22 nt, Artificial Sequence
  Synthetic
gacagagacagagcaagagaga

SEQ ID NO: 480696 - RNA, 23 nt, Artificial Sequence
  Synthetic
agacagagacagagcaagagaga

SEQ ID NO: 480697 - RNA, 24 nt, Artificial Sequence
  Synthetic
cagacagagacagagcaagagaga

SEQ ID NO: 480698 - RNA, 18 nt, Artificial Sequence
  Synthetic
aauaggaaauaagagaga

SEQ ID NO: 480699 - RNA, 19 nt, Artificial Sequence
  Synthetic
aaauaggaaauaagagaga

SEQ ID NO: 480700 - RNA, 20 nt, Artificial Sequence
  Synthetic
gaaauaggaaauaagagaga

SEQ ID NO: 480701 - RNA, 21 nt, Artificial Sequence
  Synthetic
agaaauaggaaauaagagaga

SEQ ID NO: 480702 - RNA, 22 nt, Artificial Sequence
  Synthetic
aagaaauaggaaauaagagaga

SEQ ID NO: 480703 - RNA, 23 nt, Artificial Sequence
  Synthetic
aaagaaauaggaaauaagagaga

SEQ ID NO: 480704 - RNA, 24 nt, Artificial Sequence
  Synthetic
aaaagaaauaggaaauaagagaga

SEQ ID NO: 480705 - RNA, 18 nt, Artificial Sequence
  Synthetic
uggugguauuaagagaga

SEQ ID NO: 480706 - RNA, 19 nt, Artificial Sequence
  Synthetic
uuggugguauuaagagaga

SEQ ID NO: 480707 - RNA, 20 nt, Artificial Sequence
  Synthetic
auuggugguauuaagagaga

SEQ ID NO: 480708 - RNA, 21 nt, Artificial Sequence
  Synthetic
gauuggugguauuaagagaga

SEQ ID NO: 480709 - RNA, 22 nt, Artificial Sequence
  Synthetic
agauuggugguauuaagagaga

SEQ ID NO: 480710 - RNA, 23 nt, Artificial Sequence
  Synthetic
gagauuggugguauuaagagaga

SEQ ID NO: 480711 - RNA, 24 nt, Artificial Sequence
  Synthetic
agagauuggugguauuaagagaga

SEQ ID NO: 480712 - RNA, 18 nt, Artificial Sequence
  Synthetic
cacacacacacagagaga

SEQ ID NO: 480713 - RNA, 19 nt, Artificial Sequence
  Synthetic
acacacacacacagagaga

SEQ ID NO: 480714 - RNA, 20 nt, Artificial Sequence
  Synthetic
cacacacacacacagagaga

SEQ ID NO: 480715 - RNA, 21 nt, Artificial Sequence
  Synthetic
acacacacacacacagagaga

SEQ ID NO: 480716 - RNA, 22 nt, Artificial Sequence
  Synthetic
cacacacacacacacagagaga

SEQ ID NO: 480717 - RNA, 23 nt, Artificial Sequence
  Synthetic
acacacacacacacacagagaga

SEQ ID NO: 480718 - RNA, 24 nt, Artificial Sequence
  Synthetic
cacacacacacacacacagagaga

SEQ ID NO: 480719 - RNA, 18 nt, Artificial Sequence
  Synthetic
uguuaggacacagagaga

SEQ ID NO: 480720 - RNA, 19 nt, Artificial Sequence
  Synthetic
auguuaggacacagagaga

SEQ ID NO: 480721 - RNA, 20 nt, Artificial Sequence
  Synthetic
uauguuaggacacagagaga

SEQ ID NO: 480722 - RNA, 21 nt, Artificial Sequence
  Synthetic
cuauguuaggacacagagaga

SEQ ID NO: 480723 - RNA, 22 nt, Artificial Sequence
  Synthetic
gcuauguuaggacacagagaga

SEQ ID NO: 480724 - RNA, 23 nt, Artificial Sequence
  Synthetic
ugcuauguuaggacacagagaga

SEQ ID NO: 480725 - RNA, 24 nt, Artificial Sequence
  Synthetic
uugcuauguuaggacacagagaga

SEQ ID NO: 480726 - RNA, 21 nt, Artificial Sequence
  Synthetic
agagagagagagacagagaga

SEQ ID NO: 480727 - RNA, 22 nt, Artificial Sequence
  Synthetic
gagagagagagagacagagaga

SEQ ID NO: 480728 - RNA, 23 nt, Artificial Sequence
  Synthetic
agagagagagagagacagagaga

SEQ ID NO: 480729 - RNA, 24 nt, Artificial Sequence
  Synthetic
gagagagagagagagacagagaga

SEQ ID NO: 480730 - RNA, 18 nt, Artificial Sequence
  Synthetic
ucaaaaugugcagagaga

SEQ ID NO: 480731 - RNA, 19 nt, Artificial Sequence
  Synthetic
cucaaaaugugcagagaga

SEQ ID NO: 480732 - RNA, 20 nt, Artificial Sequence
  Synthetic
acucaaaaugugcagagaga

SEQ ID NO: 480733 - RNA, 21 nt, Artificial Sequence
  Synthetic
uacucaaaaugugcagagaga

SEQ ID NO: 480734 - RNA, 22 nt, Artificial Sequence
  Synthetic
cuacucaaaaugugcagagaga

SEQ ID NO: 480735 - RNA, 23 nt, Artificial Sequence
  Synthetic
gcuacucaaaaugugcagagaga

SEQ ID NO: 480736 - RNA, 24 nt, Artificial Sequence
  Synthetic
agcuacucaaaaugugcagagaga

SEQ ID NO: 480737 - RNA, 18 nt, Artificial Sequence
  Synthetic
aaaaaaaaaagagagaga

SEQ ID NO: 480738 - RNA, 19 nt, Artificial Sequence
  Synthetic
aaaaaaaaaaagagagaga

SEQ ID NO: 480739 - RNA, 20 nt, Artificial Sequence
  Synthetic
aaaaaaaaaaaagagagaga

SEQ ID NO: 480740 - RNA, 21 nt, Artificial Sequence
  Synthetic
aaaaaaaaaaaaagagagaga

SEQ ID NO: 480741 - RNA, 22 nt, Artificial Sequence
  Synthetic
aaaaaaaaaaaaaagagagaga

SEQ ID NO: 480742 - RNA, 23 nt, Artificial Sequence
  Synthetic
aaaaaaaaaaaaaaagagagaga

SEQ ID NO: 480743 - RNA, 24 nt, Artificial Sequence
  Synthetic
aaaaaaaaaaaaaaaagagagaga

SEQ ID NO: 480744 - RNA, 18 nt, Artificial Sequence
  Synthetic
caaaaaaaaagagagaga

SEQ ID NO: 480745 - RNA, 19 nt, Artificial Sequence
  Synthetic
ucaaaaaaaaagagagaga

SEQ ID NO: 480746 - RNA, 20 nt, Artificial Sequence
  Synthetic
cucaaaaaaaaagagagaga

SEQ ID NO: 480747 - RNA, 21 nt, Artificial Sequence
  Synthetic
ucucaaaaaaaaagagagaga

SEQ ID NO: 480748 - RNA, 22 nt, Artificial Sequence
  Synthetic
gucucaaaaaaaaagagagaga

SEQ ID NO: 480749 - RNA, 23 nt, Artificial Sequence
  Synthetic
agucucaaaaaaaaagagagaga

SEQ ID NO: 480750 - RNA, 24 nt, Artificial Sequence
  Synthetic
cagucucaaaaaaaaagagagaga

SEQ ID NO: 480751 - RNA, 18 nt, Artificial Sequence
  Synthetic
cauucuaaaagagagaga

SEQ ID NO: 480752 - RNA, 19 nt, Artificial Sequence
  Synthetic
acauucuaaaagagagaga

SEQ ID NO: 480753 - RNA, 20 nt, Artificial Sequence
  Synthetic
aacauucuaaaagagagaga

SEQ ID NO: 480754 - RNA, 21 nt, Artificial Sequence
  Synthetic
uaacauucuaaaagagagaga

SEQ ID NO: 480755 - RNA, 22 nt, Artificial Sequence
  Synthetic
uuaacauucuaaaagagagaga

SEQ ID NO: 480756 - RNA, 23 nt, Artificial Sequence
  Synthetic
auuaacauucuaaaagagagaga

SEQ ID NO: 480757 - RNA, 24 nt, Artificial Sequence
  Synthetic
aauuaacauucuaaaagagagaga

SEQ ID NO: 480758 - RNA, 18 nt, Artificial Sequence
  Synthetic
cucauuaaaagagagaga

SEQ ID NO: 480759 - RNA, 19 nt, Artificial Sequence
  Synthetic
acucauuaaaagagagaga

SEQ ID NO: 480760 - RNA, 20 nt, Artificial Sequence
  Synthetic
gacucauuaaaagagagaga

SEQ ID NO: 480761 - RNA, 21 nt, Artificial Sequence
  Synthetic
ugacucauuaaaagagagaga

SEQ ID NO: 480762 - RNA, 22 nt, Artificial Sequence
  Synthetic
cugacucauuaaaagagagaga

SEQ ID NO: 480763 - RNA, 23 nt, Artificial Sequence
  Synthetic
acugacucauuaaaagagagaga

SEQ ID NO: 480764 - RNA, 24 nt, Artificial Sequence
  Synthetic
gacugacucauuaaaagagagaga

SEQ ID NO: 480765 - RNA, 18 nt, Artificial Sequence
  Synthetic
gggagggaaagagagaga

SEQ ID NO: 480766 - RNA, 19 nt, Artificial Sequence
  Synthetic
agggagggaaagagagaga

SEQ ID NO: 480767 - RNA, 20 nt, Artificial Sequence
  Synthetic
gagggagggaaagagagaga

SEQ ID NO: 480768 - RNA, 21 nt, Artificial Sequence
  Synthetic
ggagggagggaaagagagaga

SEQ ID NO: 480769 - RNA, 22 nt, Artificial Sequence
  Synthetic
gggagggagggaaagagagaga

SEQ ID NO: 480770 - RNA, 23 nt, Artificial Sequence
  Synthetic
agggagggagggaaagagagaga

SEQ ID NO: 480771 - RNA, 24 nt, Artificial Sequence
  Synthetic
gagggagggagggaaagagagaga

SEQ ID NO: 480772 - RNA, 18 nt, Artificial Sequence
  Synthetic
gacagagcaagagagaga

SEQ ID NO: 480773 - RNA, 19 nt, Artificial Sequence
  Synthetic
agacagagcaagagagaga

SEQ ID NO: 480774 - RNA, 20 nt, Artificial Sequence
  Synthetic
gagacagagcaagagagaga

SEQ ID NO: 480775 - RNA, 21 nt, Artificial Sequence
  Synthetic
agagacagagcaagagagaga

SEQ ID NO: 480776 - RNA, 22 nt, Artificial Sequence
  Synthetic
cagagacagagcaagagagaga

SEQ ID NO: 480777 - RNA, 23 nt, Artificial Sequence
  Synthetic
acagagacagagcaagagagaga

SEQ ID NO: 480778 - RNA, 24 nt, Artificial Sequence
  Synthetic
gacagagacagagcaagagagaga

SEQ ID NO: 480779 - RNA, 18 nt, Artificial Sequence
  Synthetic
cggaugggaagagagaga

SEQ ID NO: 480780 - RNA, 19 nt, Artificial Sequence
  Synthetic
gcggaugggaagagagaga

SEQ ID NO: 480781 - RNA, 20 nt, Artificial Sequence
  Synthetic
agcggaugggaagagagaga

SEQ ID NO: 480782 - RNA, 21 nt, Artificial Sequence
  Synthetic
uagcggaugggaagagagaga

SEQ ID NO: 480783 - RNA, 22 nt, Artificial Sequence
  Synthetic
cuagcggaugggaagagagaga

SEQ ID NO: 480784 - RNA, 23 nt, Artificial Sequence
  Synthetic
acuagcggaugggaagagagaga

SEQ ID NO: 480785 - RNA, 24 nt, Artificial Sequence
  Synthetic
uacuagcggaugggaagagagaga

SEQ ID NO: 480786 - RNA, 18 nt, Artificial Sequence
  Synthetic
cacacacacagagagaga

SEQ ID NO: 480787 - RNA, 19 nt, Artificial Sequence
  Synthetic
acacacacacagagagaga

SEQ ID NO: 480788 - RNA, 20 nt, Artificial Sequence
  Synthetic
cacacacacacagagagaga

SEQ ID NO: 480789 - RNA, 21 nt, Artificial Sequence
  Synthetic
acacacacacacagagagaga

SEQ ID NO: 480790 - RNA, 22 nt, Artificial Sequence
  Synthetic
cacacacacacacagagagaga

SEQ ID NO: 480791 - RNA, 23 nt, Artificial Sequence
  Synthetic
acacacacacacacagagagaga

SEQ ID NO: 480792 - RNA, 24 nt, Artificial Sequence
  Synthetic
cacacacacacacacagagagaga

SEQ ID NO: 480793 - RNA, 18 nt, Artificial Sequence
  Synthetic
gagagacacagagagaga

SEQ ID NO: 480794 - RNA, 19 nt, Artificial Sequence
  Synthetic
agagagacacagagagaga

SEQ ID NO: 480795 - RNA, 20 nt, Artificial Sequence
  Synthetic
gagagagacacagagagaga

SEQ ID NO: 480796 - RNA, 21 nt, Artificial Sequence
  Synthetic
ugagagagacacagagagaga

SEQ ID NO: 480797 - RNA, 22 nt, Artificial Sequence
  Synthetic
gugagagagacacagagagaga

SEQ ID NO: 480798 - RNA, 23 nt, Artificial Sequence
  Synthetic
cgugagagagacacagagagaga

SEQ ID NO: 480799 - RNA, 24 nt, Artificial Sequence
  Synthetic
gcgugagagagacacagagagaga

SEQ ID NO: 480800 - RNA, 18 nt, Artificial Sequence
  Synthetic
aaaaaaaagagagagaga

SEQ ID NO: 480801 - RNA, 19 nt, Artificial Sequence
  Synthetic
aaaaaaaaagagagagaga

SEQ ID NO: 480802 - RNA, 20 nt, Artificial Sequence
  Synthetic
aaaaaaaaaagagagagaga

SEQ ID NO: 480803 - RNA, 21 nt, Artificial Sequence
  Synthetic
aaaaaaaaaaagagagagaga

SEQ ID NO: 480804 - RNA, 22 nt, Artificial Sequence
  Synthetic
aaaaaaaaaaaagagagagaga

SEQ ID NO: 480805 - RNA, 23 nt, Artificial Sequence
  Synthetic
aaaaaaaaaaaaagagagagaga

SEQ ID NO: 480806 - RNA, 24 nt, Artificial Sequence
  Synthetic
aaaaaaaaaaaaaagagagagaga

SEQ ID NO: 480807 - RNA, 18 nt, Artificial Sequence
  Synthetic
gagggaaagagagagaga

SEQ ID NO: 480808 - RNA, 19 nt, Artificial Sequence
  Synthetic
ggagggaaagagagagaga

SEQ ID NO: 480809 - RNA, 20 nt, Artificial Sequence
  Synthetic
gggagggaaagagagagaga

SEQ ID NO: 480810 - RNA, 21 nt, Artificial Sequence
  Synthetic
agggagggaaagagagagaga

SEQ ID NO: 480811 - RNA, 22 nt, Artificial Sequence
  Synthetic
gagggagggaaagagagagaga

SEQ ID NO: 480812 - RNA, 23 nt, Artificial Sequence
  Synthetic
ggagggagggaaagagagagaga

SEQ ID NO: 480813 - RNA, 24 nt, Artificial Sequence
  Synthetic
gggagggagggaaagagagagaga

SEQ ID NO: 480814 - RNA, 18 nt, Artificial Sequence
  Synthetic
cacacacagagagagaga

SEQ ID NO: 480815 - RNA, 19 nt, Artificial Sequence
  Synthetic
acacacacagagagagaga

SEQ ID NO: 480816 - RNA, 20 nt, Artificial Sequence
  Synthetic
cacacacacagagagagaga

SEQ ID NO: 480817 - RNA, 21 nt, Artificial Sequence
  Synthetic
acacacacacagagagagaga

SEQ ID NO: 480818 - RNA, 22 nt, Artificial Sequence
  Synthetic
cacacacacacagagagagaga

SEQ ID NO: 480819 - RNA, 23 nt, Artificial Sequence
  Synthetic
acacacacacacagagagagaga

SEQ ID NO: 480820 - RNA, 24 nt, Artificial Sequence
  Synthetic
cacacacacacacagagagagaga

SEQ ID NO: 480821 - RNA, 18 nt, Artificial Sequence
  Synthetic
gagagacagagagagaga

SEQ ID NO: 480822 - RNA, 19 nt, Artificial Sequence
  Synthetic
agagagacagagagagaga

SEQ ID NO: 480823 - RNA, 20 nt, Artificial Sequence
  Synthetic
gagagagacagagagagaga

SEQ ID NO: 480824 - RNA, 21 nt, Artificial Sequence
  Synthetic
agagagagacagagagagaga

SEQ ID NO: 480825 - RNA, 22 nt, Artificial Sequence
  Synthetic
gagagagagacagagagagaga

SEQ ID NO: 480826 - RNA, 23 nt, Artificial Sequence
  Synthetic
agagagagagacagagagagaga

SEQ ID NO: 480827 - RNA, 24 nt, Artificial Sequence
  Synthetic
gagagagagagacagagagagaga

SEQ ID NO: 480828 - RNA, 18 nt, Artificial Sequence
  Synthetic
aaaaaagagagagagaga

SEQ ID NO: 480829 - RNA, 19 nt, Artificial Sequence
  Synthetic
aaaaaaagagagagagaga

SEQ ID NO: 480830 - RNA, 20 nt, Artificial Sequence
  Synthetic
aaaaaaaagagagagagaga

SEQ ID NO: 480831 - RNA, 21 nt, Artificial Sequence
  Synthetic
aaaaaaaaagagagagagaga

SEQ ID NO: 480832 - RNA, 22 nt, Artificial Sequence
  Synthetic
aaaaaaaaaagagagagagaga

SEQ ID NO: 480833 - RNA, 23 nt, Artificial Sequence
  Synthetic
aaaaaaaaaaagagagagagaga

SEQ ID NO: 480834 - RNA, 24 nt, Artificial Sequence
  Synthetic
aaaaaaaaaaaagagagagagaga

SEQ ID NO: 480835 - RNA, 18 nt, Artificial Sequence
  Synthetic
gggaaagagagagagaga

SEQ ID NO: 480836 - RNA, 19 nt, Artificial Sequence
  Synthetic
agggaaagagagagagaga

SEQ ID NO: 480837 - RNA, 20 nt, Artificial Sequence
  Synthetic
gagggaaagagagagagaga

SEQ ID NO: 480838 - RNA, 21 nt, Artificial Sequence
  Synthetic
ggagggaaagagagagagaga

SEQ ID NO: 480839 - RNA, 22 nt, Artificial Sequence
  Synthetic
gggagggaaagagagagagaga

SEQ ID NO: 480840 - RNA, 23 nt, Artificial Sequence
  Synthetic
agggagggaaagagagagagaga

SEQ ID NO: 480841 - RNA, 24 nt, Artificial Sequence
  Synthetic
gagggagggaaagagagagagaga

SEQ ID NO: 480842 - RNA, 18 nt, Artificial Sequence
  Synthetic
cacacagagagagagaga

SEQ ID NO: 480843 - RNA, 19 nt, Artificial Sequence
  Synthetic
acacacagagagagagaga

SEQ ID NO: 480844 - RNA, 20 nt, Artificial Sequence
  Synthetic
cacacacagagagagagaga

SEQ ID NO: 480845 - RNA, 21 nt, Artificial Sequence
  Synthetic
acacacacagagagagagaga

SEQ ID NO: 480846 - RNA, 22 nt, Artificial Sequence
  Synthetic
cacacacacagagagagagaga

SEQ ID NO: 480847 - RNA, 23 nt, Artificial Sequence
  Synthetic
acacacacacagagagagagaga

SEQ ID NO: 480848 - RNA, 24 nt, Artificial Sequence
  Synthetic
cacacacacacagagagagagaga

SEQ ID NO: 480849 - RNA, 18 nt, Artificial Sequence
  Synthetic
aaaagagagagagagaga

SEQ ID NO: 480850 - RNA, 19 nt, Artificial Sequence
  Synthetic
aaaaagagagagagagaga

SEQ ID NO: 480851 - RNA, 20 nt, Artificial Sequence
  Synthetic
aaaaaagagagagagagaga

SEQ ID NO: 480852 - RNA, 21 nt, Artificial Sequence
  Synthetic
aaaaaaagagagagagagaga

SEQ ID NO: 480853 - RNA, 22 nt, Artificial Sequence
  Synthetic
aaaaaaaagagagagagagaga

SEQ ID NO: 480854 - RNA, 23 nt, Artificial Sequence
  Synthetic
aaaaaaaaagagagagagagaga

SEQ ID NO: 480855 - RNA, 24 nt, Artificial Sequence
  Synthetic
aaaaaaaaaagagagagagagaga

SEQ ID NO: 480856 - RNA, 19 nt, Artificial Sequence
  Synthetic
ggaaagagagagagagaga

SEQ ID NO: 480857 - RNA, 20 nt, Artificial Sequence
  Synthetic
gggaaagagagagagagaga

SEQ ID NO: 480858 - RNA, 21 nt, Artificial Sequence
  Synthetic
agggaaagagagagagagaga

SEQ ID NO: 480859 - RNA, 22 nt, Artificial Sequence
  Synthetic
gagggaaagagagagagagaga

SEQ ID NO: 480860 - RNA, 23 nt, Artificial Sequence
  Synthetic
ggagggaaagagagagagagaga

SEQ ID NO: 480861 - RNA, 24 nt, Artificial Sequence
  Synthetic
gggagggaaagagagagagagaga

SEQ ID NO: 480862 - RNA, 18 nt, Artificial Sequence
  Synthetic
cacagagagagagagaga

SEQ ID NO: 480863 - RNA, 19 nt, Artificial Sequence
  Synthetic
acacagagagagagagaga

SEQ ID NO: 480864 - RNA, 20 nt, Artificial Sequence
  Synthetic
cacacagagagagagagaga

SEQ ID NO: 480865 - RNA, 21 nt, Artificial Sequence
  Synthetic
acacacagagagagagagaga

SEQ ID NO: 480866 - RNA, 22 nt, Artificial Sequence
  Synthetic
cacacacagagagagagagaga

SEQ ID NO: 480867 - RNA, 23 nt, Artificial Sequence
  Synthetic
acacacacagagagagagagaga

SEQ ID NO: 480868 - RNA, 24 nt, Artificial Sequence
  Synthetic
cacacacacagagagagagagaga

SEQ ID NO: 480869 - RNA, 18 nt, Artificial Sequence
  Synthetic
aagagagagagagagaga

SEQ ID NO: 480870 - RNA, 19 nt, Artificial Sequence
  Synthetic
aaagagagagagagagaga

SEQ ID NO: 480871 - RNA, 20 nt, Artificial Sequence
  Synthetic
aaaagagagagagagagaga

SEQ ID NO: 480872 - RNA, 21 nt, Artificial Sequence
  Synthetic
aaaaagagagagagagagaga

SEQ ID NO: 480873 - RNA, 22 nt, Artificial Sequence
  Synthetic
aaaaaagagagagagagagaga

SEQ ID NO: 480874 - RNA, 23 nt, Artificial Sequence
  Synthetic
aaaaaaagagagagagagagaga

SEQ ID NO: 480875 - RNA, 24 nt, Artificial Sequence
  Synthetic
aaaaaaaagagagagagagagaga

SEQ ID NO: 480876 - RNA, 21 nt, Artificial Sequence
  Synthetic
ggaaagagagagagagagaga

SEQ ID NO: 480877 - RNA, 22 nt, Artificial Sequence
  Synthetic
gggaaagagagagagagagaga

SEQ ID NO: 480878 - RNA, 23 nt, Artificial Sequence
  Synthetic
agggaaagagagagagagagaga

SEQ ID NO: 480879 - RNA, 24 nt, Artificial Sequence
  Synthetic
gagggaaagagagagagagagaga

SEQ ID NO: 480880 - RNA, 20 nt, Artificial Sequence
  Synthetic
cacagagagagagagagaga

SEQ ID NO: 480881 - RNA, 21 nt, Artificial Sequence
  Synthetic
acacagagagagagagagaga

SEQ ID NO: 480882 - RNA, 22 nt, Artificial Sequence
  Synthetic
cacacagagagagagagagaga

SEQ ID NO: 480883 - RNA, 23 nt, Artificial Sequence
  Synthetic
acacacagagagagagagagaga

SEQ ID NO: 480884 - RNA, 24 nt, Artificial Sequence
  Synthetic
cacacacagagagagagagagaga

SEQ ID NO: 480885 - RNA, 21 nt, Artificial Sequence
  Synthetic
acagagagagagagagagaga

SEQ ID NO: 480886 - RNA, 22 nt, Artificial Sequence
  Synthetic
cacagagagagagagagagaga

SEQ ID NO: 480887 - RNA, 23 nt, Artificial Sequence
  Synthetic
acacagagagagagagagagaga

SEQ ID NO: 480888 - RNA, 24 nt, Artificial Sequence
  Synthetic
cacacagagagagagagagagaga

SEQ ID NO: 480889 - RNA, 24 nt, Artificial Sequence
  Synthetic
aagagagagagagagagagagaga

SEQ ID NO: 480890 - RNA, 23 nt, Artificial Sequence
  Synthetic
ggagagagagagagagagagaga

SEQ ID NO: 480891 - RNA, 24 nt, Artificial Sequence
  Synthetic
gggagagagagagagagagagaga

SEQ ID NO: 480892 - RNA, 24 nt, Artificial Sequence
  Synthetic
augagagagagagagagagagaga

SEQ ID NO: 480893 - RNA, 21 nt, Artificial Sequence
  Synthetic
ggagagagagagagagagaga

SEQ ID NO: 480894 - RNA, 22 nt, Artificial Sequence
  Synthetic
gggagagagagagagagagaga

SEQ ID NO: 480895 - RNA, 23 nt, Artificial Sequence
  Synthetic
agggagagagagagagagagaga

SEQ ID NO: 480896 - RNA, 24 nt, Artificial Sequence
  Synthetic
gagggagagagagagagagagaga

SEQ ID NO: 480897 - RNA, 21 nt, Artificial Sequence
  Synthetic
ugagagagagagagagagaga

SEQ ID NO: 480898 - RNA, 22 nt, Artificial Sequence
  Synthetic
augagagagagagagagagaga

SEQ ID NO: 480899 - RNA, 23 nt, Artificial Sequence
  Synthetic
caugagagagagagagagagaga

SEQ ID NO: 480900 - RNA, 24 nt, Artificial Sequence
  Synthetic
gcaugagagagagagagagagaga

SEQ ID NO: 480901 - RNA, 22 nt, Artificial Sequence
  Synthetic
gugagagagagagagagagaga

SEQ ID NO: 480902 - RNA, 23 nt, Artificial Sequence
  Synthetic
agugagagagagagagagagaga

SEQ ID NO: 480903 - RNA, 24 nt, Artificial Sequence
  Synthetic
gagugagagagagagagagagaga

SEQ ID NO: 480904 - RNA, 23 nt, Artificial Sequence
  Synthetic
ugugagagagagagagagagaga

SEQ ID NO: 480905 - RNA, 24 nt, Artificial Sequence
  Synthetic
gugugagagagagagagagagaga

SEQ ID NO: 480906 - RNA, 23 nt, Artificial Sequence
  Synthetic
ggagggagagagagagagagaga

SEQ ID NO: 480907 - RNA, 24 nt, Artificial Sequence
  Synthetic
gggagggagagagagagagagaga

SEQ ID NO: 480908 - RNA, 21 nt, Artificial Sequence
  Synthetic
ggggagagagagagagagaga

SEQ ID NO: 480909 - RNA, 22 nt, Artificial Sequence
  Synthetic
gggggagagagagagagagaga

SEQ ID NO: 480910 - RNA, 23 nt, Artificial Sequence
  Synthetic
agggggagagagagagagagaga

SEQ ID NO: 480911 - RNA, 24 nt, Artificial Sequence
  Synthetic
aagggggagagagagagagagaga

SEQ ID NO: 480912 - RNA, 20 nt, Artificial Sequence
  Synthetic
augagagagagagagagaga

SEQ ID NO: 480913 - RNA, 21 nt, Artificial Sequence
  Synthetic
caugagagagagagagagaga

SEQ ID NO: 480914 - RNA, 22 nt, Artificial Sequence
  Synthetic
gcaugagagagagagagagaga

SEQ ID NO: 480915 - RNA, 23 nt, Artificial Sequence
  Synthetic
ugcaugagagagagagagagaga

SEQ ID NO: 480916 - RNA, 24 nt, Artificial Sequence
  Synthetic
augcaugagagagagagagagaga

SEQ ID NO: 480917 - RNA, 21 nt, Artificial Sequence
  Synthetic
agugagagagagagagagaga

SEQ ID NO: 480918 - RNA, 22 nt, Artificial Sequence
  Synthetic
gagugagagagagagagagaga

SEQ ID NO: 480919 - RNA, 23 nt, Artificial Sequence
  Synthetic
agagugagagagagagagagaga

SEQ ID NO: 480920 - RNA, 24 nt, Artificial Sequence
  Synthetic
gagagugagagagagagagagaga

SEQ ID NO: 480921 - RNA, 21 nt, Artificial Sequence
  Synthetic
ggagggagagagagagagaga

SEQ ID NO: 480922 - RNA, 22 nt, Artificial Sequence
  Synthetic
gggagggagagagagagagaga

SEQ ID NO: 480923 - RNA, 23 nt, Artificial Sequence
  Synthetic
agggagggagagagagagagaga

SEQ ID NO: 480924 - RNA, 24 nt, Artificial Sequence
  Synthetic
gagggagggagagagagagagaga

SEQ ID NO: 480925 - RNA, 19 nt, Artificial Sequence
  Synthetic
ggggagagagagagagaga

SEQ ID NO: 480926 - RNA, 20 nt, Artificial Sequence
  Synthetic
gggggagagagagagagaga

SEQ ID NO: 480927 - RNA, 21 nt, Artificial Sequence
  Synthetic
agggggagagagagagagaga

SEQ ID NO: 480928 - RNA, 22 nt, Artificial Sequence
  Synthetic
aagggggagagagagagagaga

SEQ ID NO: 480929 - RNA, 23 nt, Artificial Sequence
  Synthetic
gaagggggagagagagagagaga

SEQ ID NO: 480930 - RNA, 24 nt, Artificial Sequence
  Synthetic
ggaagggggagagagagagagaga

SEQ ID NO: 480931 - RNA, 18 nt, Artificial Sequence
  Synthetic
uggagagagagagagaga

SEQ ID NO: 480932 - RNA, 19 nt, Artificial Sequence
  Synthetic
auggagagagagagagaga

SEQ ID NO: 480933 - RNA, 20 nt, Artificial Sequence
  Synthetic
uauggagagagagagagaga

SEQ ID NO: 480934 - RNA, 21 nt, Artificial Sequence
  Synthetic
auauggagagagagagagaga

SEQ ID NO: 480935 - RNA, 22 nt, Artificial Sequence
  Synthetic
gauauggagagagagagagaga

SEQ ID NO: 480936 - RNA, 23 nt, Artificial Sequence
  Synthetic
agauauggagagagagagagaga

SEQ ID NO: 480937 - RNA, 24 nt, Artificial Sequence
  Synthetic
uagauauggagagagagagagaga

SEQ ID NO: 480938 - RNA, 18 nt, Artificial Sequence
  Synthetic
augagagagagagagaga

SEQ ID NO: 480939 - RNA, 19 nt, Artificial Sequence
  Synthetic
caugagagagagagagaga

SEQ ID NO: 480940 - RNA, 20 nt, Artificial Sequence
  Synthetic
gcaugagagagagagagaga

SEQ ID NO: 480941 - RNA, 21 nt, Artificial Sequence
  Synthetic
ugcaugagagagagagagaga

SEQ ID NO: 480942 - RNA, 22 nt, Artificial Sequence
  Synthetic
augcaugagagagagagagaga

SEQ ID NO: 480943 - RNA, 23 nt, Artificial Sequence
  Synthetic
aaugcaugagagagagagagaga

SEQ ID NO: 480944 - RNA, 24 nt, Artificial Sequence
  Synthetic
caaugcaugagagagagagagaga

SEQ ID NO: 480945 - RNA, 18 nt, Artificial Sequence
  Synthetic
gugagagagagagagaga

SEQ ID NO: 480946 - RNA, 19 nt, Artificial Sequence
  Synthetic
agugagagagagagagaga

SEQ ID NO: 480947 - RNA, 20 nt, Artificial Sequence
  Synthetic
gagugagagagagagagaga

SEQ ID NO: 480948 - RNA, 21 nt, Artificial Sequence
  Synthetic
agagugagagagagagagaga

SEQ ID NO: 480949 - RNA, 22 nt, Artificial Sequence
  Synthetic
gagagugagagagagagagaga

SEQ ID NO: 480950 - RNA, 23 nt, Artificial Sequence
  Synthetic
agagagugagagagagagagaga

SEQ ID NO: 480951 - RNA, 24 nt, Artificial Sequence
  Synthetic
cagagagugagagagagagagaga

SEQ ID NO: 480952 - RNA, 18 nt, Artificial Sequence
  Synthetic
gagggagagagagagaga

SEQ ID NO: 480953 - RNA, 19 nt, Artificial Sequence
  Synthetic
ggagggagagagagagaga

SEQ ID NO: 480954 - RNA, 20 nt, Artificial Sequence
  Synthetic
gggagggagagagagagaga

SEQ ID NO: 480955 - RNA, 21 nt, Artificial Sequence
  Synthetic
agggagggagagagagagaga

SEQ ID NO: 480956 - RNA, 22 nt, Artificial Sequence
  Synthetic
gagggagggagagagagagaga

SEQ ID NO: 480957 - RNA, 23 nt, Artificial Sequence
  Synthetic
agagggagggagagagagagaga

SEQ ID NO: 480958 - RNA, 24 nt, Artificial Sequence
  Synthetic
gagagggagggagagagagagaga

SEQ ID NO: 480959 - RNA, 18 nt, Artificial Sequence
  Synthetic
gggggagagagagagaga

SEQ ID NO: 480960 - RNA, 19 nt, Artificial Sequence
  Synthetic
agggggagagagagagaga

SEQ ID NO: 480961 - RNA, 20 nt, Artificial Sequence
  Synthetic
aagggggagagagagagaga

SEQ ID NO: 480962 - RNA, 21 nt, Artificial Sequence
  Synthetic
gaagggggagagagagagaga

SEQ ID NO: 480963 - RNA, 22 nt, Artificial Sequence
  Synthetic
ggaagggggagagagagagaga

SEQ ID NO: 480964 - RNA, 23 nt, Artificial Sequence
  Synthetic
aggaagggggagagagagagaga

SEQ ID NO: 480965 - RNA, 24 nt, Artificial Sequence
  Synthetic
gaggaagggggagagagagagaga

SEQ ID NO: 480966 - RNA, 18 nt, Artificial Sequence
  Synthetic
uauggagagagagagaga

SEQ ID NO: 480967 - RNA, 19 nt, Artificial Sequence
  Synthetic
auauggagagagagagaga

SEQ ID NO: 480968 - RNA, 20 nt, Artificial Sequence
  Synthetic
gauauggagagagagagaga

SEQ ID NO: 480969 - RNA, 21 nt, Artificial Sequence
  Synthetic
agauauggagagagagagaga

SEQ ID NO: 480970 - RNA, 22 nt, Artificial Sequence
  Synthetic
uagauauggagagagagagaga

SEQ ID NO: 480971 - RNA, 23 nt, Artificial Sequence
  Synthetic
auagauauggagagagagagaga

SEQ ID NO: 480972 - RNA, 24 nt, Artificial Sequence
  Synthetic
uauagauauggagagagagagaga

SEQ ID NO: 480973 - RNA, 18 nt, Artificial Sequence
  Synthetic
gcaugagagagagagaga

SEQ ID NO: 480974 - RNA, 19 nt, Artificial Sequence
  Synthetic
ugcaugagagagagagaga

SEQ ID NO: 480975 - RNA, 20 nt, Artificial Sequence
  Synthetic
augcaugagagagagagaga

SEQ ID NO: 480976 - RNA, 21 nt, Artificial Sequence
  Synthetic
aaugcaugagagagagagaga

SEQ ID NO: 480977 - RNA, 22 nt, Artificial Sequence
  Synthetic
caaugcaugagagagagagaga

SEQ ID NO: 480978 - RNA, 23 nt, Artificial Sequence
  Synthetic
gcaaugcaugagagagagagaga

SEQ ID NO: 480979 - RNA, 24 nt, Artificial Sequence
  Synthetic
agcaaugcaugagagagagagaga

SEQ ID NO: 480980 - RNA, 18 nt, Artificial Sequence
  Synthetic
gagugagagagagagaga

SEQ ID NO: 480981 - RNA, 19 nt, Artificial Sequence
  Synthetic
agagugagagagagagaga

SEQ ID NO: 480982 - RNA, 20 nt, Artificial Sequence
  Synthetic
gagagugagagagagagaga

SEQ ID NO: 480983 - RNA, 21 nt, Artificial Sequence
  Synthetic
agagagugagagagagagaga

SEQ ID NO: 480984 - RNA, 22 nt, Artificial Sequence
  Synthetic
cagagagugagagagagagaga

SEQ ID NO: 480985 - RNA, 23 nt, Artificial Sequence
  Synthetic
ccagagagugagagagagagaga

SEQ ID NO: 480986 - RNA, 24 nt, Artificial Sequence
  Synthetic
cccagagagugagagagagagaga

SEQ ID NO: 480987 - RNA, 21 nt, Artificial Sequence
  Synthetic
ugugugugagagagagagaga

SEQ ID NO: 480988 - RNA, 22 nt, Artificial Sequence
  Synthetic
gugugugugagagagagagaga

SEQ ID NO: 480989 - RNA, 23 nt, Artificial Sequence
  Synthetic
ugugugugugagagagagagaga

SEQ ID NO: 480990 - RNA, 24 nt, Artificial Sequence
  Synthetic
gugugugugugagagagagagaga

SEQ ID NO: 480991 - RNA, 18 nt, Artificial Sequence
  Synthetic
gggagggagagagagaga

SEQ ID NO: 480992 - RNA, 19 nt, Artificial Sequence
  Synthetic
agggagggagagagagaga

SEQ ID NO: 480993 - RNA, 20 nt, Artificial Sequence
  Synthetic
gagggagggagagagagaga

SEQ ID NO: 480994 - RNA, 21 nt, Artificial Sequence
  Synthetic
agagggagggagagagagaga

SEQ ID NO: 480995 - RNA, 22 nt, Artificial Sequence
  Synthetic
gagagggagggagagagagaga

SEQ ID NO: 480996 - RNA, 23 nt, Artificial Sequence
  Synthetic
agagagggagggagagagagaga

SEQ ID NO: 480997 - RNA, 24 nt, Artificial Sequence
  Synthetic
gagagagggagggagagagagaga

SEQ ID NO: 480998 - RNA, 18 nt, Artificial Sequence
  Synthetic
aagggggagagagagaga

SEQ ID NO: 480999 - RNA, 19 nt, Artificial Sequence
  Synthetic
gaagggggagagagagaga

SEQ ID NO: 481000 - RNA, 20 nt, Artificial Sequence
  Synthetic
ggaagggggagagagagaga

SEQ ID NO: 481001 - RNA, 21 nt, Artificial Sequence
  Synthetic
aggaagggggagagagagaga

SEQ ID NO: 481002 - RNA, 22 nt, Artificial Sequence
  Synthetic
gaggaagggggagagagagaga

SEQ ID NO: 481003 - RNA, 23 nt, Artificial Sequence
  Synthetic
ggaggaagggggagagagagaga

SEQ ID NO: 481004 - RNA, 24 nt, Artificial Sequence
  Synthetic
gggaggaagggggagagagagaga

SEQ ID NO: 481005 - RNA, 18 nt, Artificial Sequence
  Synthetic
gcuggggagagagagaga

SEQ ID NO: 481006 - RNA, 19 nt, Artificial Sequence
  Synthetic
ggcuggggagagagagaga

SEQ ID NO: 481007 - RNA, 20 nt, Artificial Sequence
  Synthetic
aggcuggggagagagagaga

SEQ ID NO: 481008 - RNA, 21 nt, Artificial Sequence
  Synthetic
aaggcuggggagagagagaga

SEQ ID NO: 481009 - RNA, 22 nt, Artificial Sequence
  Synthetic
gaaggcuggggagagagagaga

SEQ ID NO: 481010 - RNA, 23 nt, Artificial Sequence
  Synthetic
ggaaggcuggggagagagagaga

SEQ ID NO: 481011 - RNA, 24 nt, Artificial Sequence
  Synthetic
gggaaggcuggggagagagagaga

SEQ ID NO: 481012 - RNA, 18 nt, Artificial Sequence
  Synthetic
gauauggagagagagaga

SEQ ID NO: 481013 - RNA, 19 nt, Artificial Sequence
  Synthetic
agauauggagagagagaga

SEQ ID NO: 481014 - RNA, 20 nt, Artificial Sequence
  Synthetic
uagauauggagagagagaga

SEQ ID NO: 481015 - RNA, 21 nt, Artificial Sequence
  Synthetic
auagauauggagagagagaga

SEQ ID NO: 481016 - RNA, 22 nt, Artificial Sequence
  Synthetic
uauagauauggagagagagaga

SEQ ID NO: 481017 - RNA, 23 nt, Artificial Sequence
  Synthetic
auauagauauggagagagagaga

SEQ ID NO: 481018 - RNA, 24 nt, Artificial Sequence
  Synthetic
uauauagauauggagagagagaga

SEQ ID NO: 481019 - RNA, 18 nt, Artificial Sequence
  Synthetic
augcaugagagagagaga

SEQ ID NO: 481020 - RNA, 19 nt, Artificial Sequence
  Synthetic
aaugcaugagagagagaga

SEQ ID NO: 481021 - RNA, 20 nt, Artificial Sequence
  Synthetic
caaugcaugagagagagaga

SEQ ID NO: 481022 - RNA, 21 nt, Artificial Sequence
  Synthetic
gcaaugcaugagagagagaga

SEQ ID NO: 481023 - RNA, 22 nt, Artificial Sequence
  Synthetic
agcaaugcaugagagagagaga

SEQ ID NO: 481024 - RNA, 23 nt, Artificial Sequence
  Synthetic
aagcaaugcaugagagagagaga

SEQ ID NO: 481025 - RNA, 24 nt, Artificial Sequence
  Synthetic
gaagcaaugcaugagagagagaga

SEQ ID NO: 481026 - RNA, 18 nt, Artificial Sequence
  Synthetic
gagagugagagagagaga

SEQ ID NO: 481027 - RNA, 19 nt, Artificial Sequence
  Synthetic
agagagugagagagagaga

SEQ ID NO: 481028 - RNA, 20 nt, Artificial Sequence
  Synthetic
cagagagugagagagagaga

SEQ ID NO: 481029 - RNA, 21 nt, Artificial Sequence
  Synthetic
ccagagagugagagagagaga

SEQ ID NO: 481030 - RNA, 22 nt, Artificial Sequence
  Synthetic
cccagagagugagagagagaga

SEQ ID NO: 481031 - RNA, 23 nt, Artificial Sequence
  Synthetic
ccccagagagugagagagagaga

SEQ ID NO: 481032 - RNA, 24 nt, Artificial Sequence
  Synthetic
uccccagagagugagagagagaga

SEQ ID NO: 481033 - RNA, 21 nt, Artificial Sequence
  Synthetic
ugugugugugagagagagaga

SEQ ID NO: 481034 - RNA, 22 nt, Artificial Sequence
  Synthetic
gugugugugugagagagagaga

SEQ ID NO: 481035 - RNA, 23 nt, Artificial Sequence
  Synthetic
ugugugugugugagagagagaga

SEQ ID NO: 481036 - RNA, 24 nt, Artificial Sequence
  Synthetic
gugugugugugugagagagagaga

SEQ ID NO: 481037 - RNA, 18 nt, Artificial Sequence
  Synthetic
gagggagggagagagaga

SEQ ID NO: 481038 - RNA, 19 nt, Artificial Sequence
  Synthetic
agagggagggagagagaga

SEQ ID NO: 481039 - RNA, 20 nt, Artificial Sequence
  Synthetic
gagagggagggagagagaga

SEQ ID NO: 481040 - RNA, 21 nt, Artificial Sequence
  Synthetic
agagagggagggagagagaga

SEQ ID NO: 481041 - RNA, 22 nt, Artificial Sequence
  Synthetic
gagagagggagggagagagaga

SEQ ID NO: 481042 - RNA, 23 nt, Artificial Sequence
  Synthetic
agagagagggagggagagagaga

SEQ ID NO: 481043 - RNA, 24 nt, Artificial Sequence
  Synthetic
gagagagagggagggagagagaga

SEQ ID NO: 481044 - RNA, 18 nt, Artificial Sequence
  Synthetic
ggaagggggagagagaga

SEQ ID NO: 481045 - RNA, 19 nt, Artificial Sequence
  Synthetic
aggaagggggagagagaga

SEQ ID NO: 481046 - RNA, 20 nt, Artificial Sequence
  Synthetic
gaggaagggggagagagaga

SEQ ID NO: 481047 - RNA, 21 nt, Artificial Sequence
  Synthetic
ggaggaagggggagagagaga

SEQ ID NO: 481048 - RNA, 22 nt, Artificial Sequence
  Synthetic
gggaggaagggggagagagaga

SEQ ID NO: 481049 - RNA, 23 nt, Artificial Sequence
  Synthetic
ggggaggaagggggagagagaga

SEQ ID NO: 481050 - RNA, 24 nt, Artificial Sequence
  Synthetic
gggggaggaagggggagagagaga

SEQ ID NO: 481051 - RNA, 18 nt, Artificial Sequence
  Synthetic
aggcuggggagagagaga

SEQ ID NO: 481052 - RNA, 19 nt, Artificial Sequence
  Synthetic
aaggcuggggagagagaga

SEQ ID NO: 481053 - RNA, 20 nt, Artificial Sequence
  Synthetic
gaaggcuggggagagagaga

SEQ ID NO: 481054 - RNA, 21 nt, Artificial Sequence
  Synthetic
ggaaggcuggggagagagaga

SEQ ID NO: 481055 - RNA, 22 nt, Artificial Sequence
  Synthetic
gggaaggcuggggagagagaga

SEQ ID NO: 481056 - RNA, 23 nt, Artificial Sequence
  Synthetic
ggggaaggcuggggagagagaga

SEQ ID NO: 481057 - RNA, 24 nt, Artificial Sequence
  Synthetic
gggggaaggcuggggagagagaga

SEQ ID NO: 481058 - RNA, 18 nt, Artificial Sequence
  Synthetic
uagauauggagagagaga

SEQ ID NO: 481059 - RNA, 19 nt, Artificial Sequence
  Synthetic
auagauauggagagagaga

SEQ ID NO: 481060 - RNA, 20 nt, Artificial Sequence
  Synthetic
uauagauauggagagagaga

SEQ ID NO: 481061 - RNA, 21 nt, Artificial Sequence
  Synthetic
auauagauauggagagagaga

SEQ ID NO: 481062 - RNA, 22 nt, Artificial Sequence
  Synthetic
uauauagauauggagagagaga

SEQ ID NO: 481063 - RNA, 23 nt, Artificial Sequence
  Synthetic
auauauagauauggagagagaga

SEQ ID NO: 481064 - RNA, 24 nt, Artificial Sequence
  Synthetic
uauauauagauauggagagagaga

SEQ ID NO: 481065 - RNA, 18 nt, Artificial Sequence
  Synthetic
caaugcaugagagagaga

SEQ ID NO: 481066 - RNA, 19 nt, Artificial Sequence
  Synthetic
gcaaugcaugagagagaga

SEQ ID NO: 481067 - RNA, 20 nt, Artificial Sequence
  Synthetic
agcaaugcaugagagagaga

SEQ ID NO: 481068 - RNA, 21 nt, Artificial Sequence
  Synthetic
aagcaaugcaugagagagaga

SEQ ID NO: 481069 - RNA, 22 nt, Artificial Sequence
  Synthetic
gaagcaaugcaugagagagaga

SEQ ID NO: 481070 - RNA, 23 nt, Artificial Sequence
  Synthetic
agaagcaaugcaugagagagaga

SEQ ID NO: 481071 - RNA, 24 nt, Artificial Sequence
  Synthetic
aagaagcaaugcaugagagagaga

SEQ ID NO: 481072 - RNA, 18 nt, Artificial Sequence
  Synthetic
cagagagugagagagaga

SEQ ID NO: 481073 - RNA, 19 nt, Artificial Sequence
  Synthetic
ccagagagugagagagaga

SEQ ID NO: 481074 - RNA, 20 nt, Artificial Sequence
  Synthetic
cccagagagugagagagaga

SEQ ID NO: 481075 - RNA, 21 nt, Artificial Sequence
  Synthetic
ccccagagagugagagagaga

SEQ ID NO: 481076 - RNA, 22 nt, Artificial Sequence
  Synthetic
uccccagagagugagagagaga

SEQ ID NO: 481077 - RNA, 23 nt, Artificial Sequence
  Synthetic
uuccccagagagugagagagaga

SEQ ID NO: 481078 - RNA, 24 nt, Artificial Sequence
  Synthetic
guuccccagagagugagagagaga

SEQ ID NO: 481079 - RNA, 21 nt, Artificial Sequence
  Synthetic
auauauauauuuagagagaga

SEQ ID NO: 481080 - RNA, 22 nt, Artificial Sequence
  Synthetic
aauauauauauuuagagagaga

SEQ ID NO: 481081 - RNA, 23 nt, Artificial Sequence
  Synthetic
aaauauauauauuuagagagaga

SEQ ID NO: 481082 - RNA, 24 nt, Artificial Sequence
  Synthetic
uaaauauauauauuuagagagaga

SEQ ID NO: 481083 - RNA, 18 nt, Artificial Sequence
  Synthetic
gagagggagggagagaga

SEQ ID NO: 481084 - RNA, 19 nt, Artificial Sequence
  Synthetic
agagagggagggagagaga

SEQ ID NO: 481085 - RNA, 20 nt, Artificial Sequence
  Synthetic
gagagagggagggagagaga

SEQ ID NO: 481086 - RNA, 21 nt, Artificial Sequence
  Synthetic
agagagagggagggagagaga

SEQ ID NO: 481087 - RNA, 22 nt, Artificial Sequence
  Synthetic
gagagagagggagggagagaga

SEQ ID NO: 481088 - RNA, 23 nt, Artificial Sequence
  Synthetic
agagagagagggagggagagaga

SEQ ID NO: 481089 - RNA, 24 nt, Artificial Sequence
  Synthetic
gagagagagagggagggagagaga

SEQ ID NO: 481090 - RNA, 18 nt, Artificial Sequence
  Synthetic
gaggaagggggagagaga

SEQ ID NO: 481091 - RNA, 19 nt, Artificial Sequence
  Synthetic
ggaggaagggggagagaga

SEQ ID NO: 481092 - RNA, 20 nt, Artificial Sequence
  Synthetic
gggaggaagggggagagaga

SEQ ID NO: 481093 - RNA, 21 nt, Artificial Sequence
  Synthetic
ggggaggaagggggagagaga

SEQ ID NO: 481094 - RNA, 22 nt, Artificial Sequence
  Synthetic
gggggaggaagggggagagaga

SEQ ID NO: 481095 - RNA, 23 nt, Artificial Sequence
  Synthetic
ugggggaggaagggggagagaga

SEQ ID NO: 481096 - RNA, 24 nt, Artificial Sequence
  Synthetic
augggggaggaagggggagagaga

SEQ ID NO: 481097 - RNA, 18 nt, Artificial Sequence
  Synthetic
gaaggcuggggagagaga

SEQ ID NO: 481098 - RNA, 19 nt, Artificial Sequence
  Synthetic
ggaaggcuggggagagaga

SEQ ID NO: 481099 - RNA, 20 nt, Artificial Sequence
  Synthetic
gggaaggcuggggagagaga

SEQ ID NO: 481100 - RNA, 21 nt, Artificial Sequence
  Synthetic
ggggaaggcuggggagagaga

SEQ ID NO: 481101 - RNA, 22 nt, Artificial Sequence
  Synthetic
gggggaaggcuggggagagaga

SEQ ID NO: 481102 - RNA, 23 nt, Artificial Sequence
  Synthetic
cgggggaaggcuggggagagaga

SEQ ID NO: 481103 - RNA, 24 nt, Artificial Sequence
  Synthetic
gcgggggaaggcuggggagagaga

SEQ ID NO: 481104 - RNA, 18 nt, Artificial Sequence
  Synthetic
uauagauauggagagaga

SEQ ID NO: 481105 - RNA, 19 nt, Artificial Sequence
  Synthetic
auauagauauggagagaga

SEQ ID NO: 481106 - RNA, 20 nt, Artificial Sequence
  Synthetic
uauauagauauggagagaga

SEQ ID NO: 481107 - RNA, 21 nt, Artificial Sequence
  Synthetic
auauauagauauggagagaga

SEQ ID NO: 481108 - RNA, 22 nt, Artificial Sequence
  Synthetic
uauauauagauauggagagaga

SEQ ID NO: 481109 - RNA, 23 nt, Artificial Sequence
  Synthetic
auauauauagauauggagagaga

SEQ ID NO: 481110 - RNA, 24 nt, Artificial Sequence
  Synthetic
uauauauauagauauggagagaga

SEQ ID NO: 481111 - RNA, 18 nt, Artificial Sequence
  Synthetic
agcaaugcaugagagaga

SEQ ID NO: 481112 - RNA, 19 nt, Artificial Sequence
  Synthetic
aagcaaugcaugagagaga

SEQ ID NO: 481113 - RNA, 20 nt, Artificial Sequence
  Synthetic
gaagcaaugcaugagagaga

SEQ ID NO: 481114 - RNA, 21 nt, Artificial Sequence
  Synthetic
agaagcaaugcaugagagaga

SEQ ID NO: 481115 - RNA, 22 nt, Artificial Sequence
  Synthetic
aagaagcaaugcaugagagaga

SEQ ID NO: 481116 - RNA, 23 nt, Artificial Sequence
  Synthetic
gaagaagcaaugcaugagagaga

SEQ ID NO: 481117 - RNA, 24 nt, Artificial Sequence
  Synthetic
agaagaagcaaugcaugagagaga

SEQ ID NO: 481118 - RNA, 18 nt, Artificial Sequence
  Synthetic
cccagagagugagagaga

SEQ ID NO: 481119 - RNA, 19 nt, Artificial Sequence
  Synthetic
ccccagagagugagagaga

SEQ ID NO: 481120 - RNA, 20 nt, Artificial Sequence
  Synthetic
uccccagagagugagagaga

SEQ ID NO: 481121 - RNA, 21 nt, Artificial Sequence
  Synthetic
uuccccagagagugagagaga

SEQ ID NO: 481122 - RNA, 22 nt, Artificial Sequence
  Synthetic
guuccccagagagugagagaga

SEQ ID NO: 481123 - RNA, 23 nt, Artificial Sequence
  Synthetic
aguuccccagagagugagagaga

SEQ ID NO: 481124 - RNA, 24 nt, Artificial Sequence
  Synthetic
aaguuccccagagagugagagaga

SEQ ID NO: 481125 - RNA, 18 nt, Artificial Sequence
  Synthetic
ucauagaggugagagaga

SEQ ID NO: 481126 - RNA, 19 nt, Artificial Sequence
  Synthetic
gucauagaggugagagaga

SEQ ID NO: 481127 - RNA, 20 nt, Artificial Sequence
  Synthetic
agucauagaggugagagaga

SEQ ID NO: 481128 - RNA, 21 nt, Artificial Sequence
  Synthetic
gagucauagaggugagagaga

SEQ ID NO: 481129 - RNA, 22 nt, Artificial Sequence
  Synthetic
agagucauagaggugagagaga

SEQ ID NO: 481130 - RNA, 23 nt, Artificial Sequence
  Synthetic
cagagucauagaggugagagaga

SEQ ID NO: 481131 - RNA, 24 nt, Artificial Sequence
  Synthetic
acagagucauagaggugagagaga

SEQ ID NO: 481132 - RNA, 18 nt, Artificial Sequence
  Synthetic
cagagagagagcgagaga

SEQ ID NO: 481133 - RNA, 19 nt, Artificial Sequence
  Synthetic
acagagagagagcgagaga

SEQ ID NO: 481134 - RNA, 20 nt, Artificial Sequence
  Synthetic
cacagagagagagcgagaga

SEQ ID NO: 481135 - RNA, 21 nt, Artificial Sequence
  Synthetic
acacagagagagagcgagaga

SEQ ID NO: 481136 - RNA, 22 nt, Artificial Sequence
  Synthetic
gacacagagagagagcgagaga

SEQ ID NO: 481137 - RNA, 23 nt, Artificial Sequence
  Synthetic
agacacagagagagagcgagaga

SEQ ID NO: 481138 - RNA, 24 nt, Artificial Sequence
  Synthetic
gagacacagagagagagcgagaga

SEQ ID NO: 481139 - RNA, 18 nt, Artificial Sequence
  Synthetic
agaaauuucaaggagaga

SEQ ID NO: 481140 - RNA, 19 nt, Artificial Sequence
  Synthetic
uagaaauuucaaggagaga

SEQ ID NO: 481141 - RNA, 20 nt, Artificial Sequence
  Synthetic
guagaaauuucaaggagaga

SEQ ID NO: 481142 - RNA, 21 nt, Artificial Sequence
  Synthetic
uguagaaauuucaaggagaga

SEQ ID NO: 481143 - RNA, 22 nt, Artificial Sequence
  Synthetic
guguagaaauuucaaggagaga

SEQ ID NO: 481144 - RNA, 23 nt, Artificial Sequence
  Synthetic
aguguagaaauuucaaggagaga

SEQ ID NO: 481145 - RNA, 24 nt, Artificial Sequence
  Synthetic
gaguguagaaauuucaaggagaga

SEQ ID NO: 481146 - RNA, 18 nt, Artificial Sequence
  Synthetic
agaauuuuucaggagaga

SEQ ID NO: 481147 - RNA, 19 nt, Artificial Sequence
  Synthetic
uagaauuuuucaggagaga

SEQ ID NO: 481148 - RNA, 20 nt, Artificial Sequence
  Synthetic
auagaauuuuucaggagaga

SEQ ID NO: 481149 - RNA, 21 nt, Artificial Sequence
  Synthetic
aauagaauuuuucaggagaga

SEQ ID NO: 481150 - RNA, 22 nt, Artificial Sequence
  Synthetic
uaauagaauuuuucaggagaga

SEQ ID NO: 481151 - RNA, 23 nt, Artificial Sequence
  Synthetic
uuaauagaauuuuucaggagaga

SEQ ID NO: 481152 - RNA, 24 nt, Artificial Sequence
  Synthetic
auuaauagaauuuuucaggagaga

SEQ ID NO: 481153 - RNA, 18 nt, Artificial Sequence
  Synthetic
agaugccgggaggagaga

SEQ ID NO: 481154 - RNA, 19 nt, Artificial Sequence
  Synthetic
gagaugccgggaggagaga

SEQ ID NO: 481155 - RNA, 20 nt, Artificial Sequence
  Synthetic
agagaugccgggaggagaga

SEQ ID NO: 481156 - RNA, 21 nt, Artificial Sequence
  Synthetic
aagagaugccgggaggagaga

SEQ ID NO: 481157 - RNA, 22 nt, Artificial Sequence
  Synthetic
aaagagaugccgggaggagaga

SEQ ID NO: 481158 - RNA, 23 nt, Artificial Sequence
  Synthetic
aaaagagaugccgggaggagaga

SEQ ID NO: 481159 - RNA, 24 nt, Artificial Sequence
  Synthetic
uaaaagagaugccgggaggagaga

SEQ ID NO: 481160 - RNA, 18 nt, Artificial Sequence
  Synthetic
ggggguagcacggagaga

SEQ ID NO: 481161 - RNA, 19 nt, Artificial Sequence
  Synthetic
uggggguagcacggagaga

SEQ ID NO: 481162 - RNA, 20 nt, Artificial Sequence
  Synthetic
auggggguagcacggagaga

SEQ ID NO: 481163 - RNA, 21 nt, Artificial Sequence
  Synthetic
cauggggguagcacggagaga

SEQ ID NO: 481164 - RNA, 22 nt, Artificial Sequence
  Synthetic
ccauggggguagcacggagaga

SEQ ID NO: 481165 - RNA, 23 nt, Artificial Sequence
  Synthetic
uccauggggguagcacggagaga

SEQ ID NO: 481166 - RNA, 24 nt, Artificial Sequence
  Synthetic
auccauggggguagcacggagaga

SEQ ID NO: 481167 - RNA, 18 nt, Artificial Sequence
  Synthetic
gcuagugagacggagaga

SEQ ID NO: 481168 - RNA, 19 nt, Artificial Sequence
  Synthetic
ggcuagugagacggagaga

SEQ ID NO: 481169 - RNA, 20 nt, Artificial Sequence
  Synthetic
aggcuagugagacggagaga

SEQ ID NO: 481170 - RNA, 21 nt, Artificial Sequence
  Synthetic
caggcuagugagacggagaga

SEQ ID NO: 481171 - RNA, 22 nt, Artificial Sequence
  Synthetic
ucaggcuagugagacggagaga

SEQ ID NO: 481172 - RNA, 23 nt, Artificial Sequence
  Synthetic
aucaggcuagugagacggagaga

SEQ ID NO: 481173 - RNA, 24 nt, Artificial Sequence
  Synthetic
aaucaggcuagugagacggagaga

SEQ ID NO: 481174 - RNA, 18 nt, Artificial Sequence
  Synthetic
gagagagagagggagaga

SEQ ID NO: 481175 - RNA, 19 nt, Artificial Sequence
  Synthetic
agagagagagagggagaga

SEQ ID NO: 481176 - RNA, 20 nt, Artificial Sequence
  Synthetic
gagagagagagagggagaga

SEQ ID NO: 481177 - RNA, 21 nt, Artificial Sequence
  Synthetic
agagagagagagagggagaga

SEQ ID NO: 481178 - RNA, 22 nt, Artificial Sequence
  Synthetic
gagagagagagagagggagaga

SEQ ID NO: 481179 - RNA, 23 nt, Artificial Sequence
  Synthetic
agagagagagagagagggagaga

SEQ ID NO: 481180 - RNA, 24 nt, Artificial Sequence
  Synthetic
gagagagagagagagagggagaga

SEQ ID NO: 481181 - RNA, 21 nt, Artificial Sequence
  Synthetic
agagagggagagagggagaga

SEQ ID NO: 481182 - RNA, 22 nt, Artificial Sequence
  Synthetic
gagagagggagagagggagaga

SEQ ID NO: 481183 - RNA, 23 nt, Artificial Sequence
  Synthetic
agagagagggagagagggagaga

SEQ ID NO: 481184 - RNA, 24 nt, Artificial Sequence
  Synthetic
gagagagagggagagagggagaga

SEQ ID NO: 481185 - RNA, 18 nt, Artificial Sequence
  Synthetic
gagagagggagggagaga

SEQ ID NO: 481186 - RNA, 19 nt, Artificial Sequence
  Synthetic
agagagagggagggagaga

SEQ ID NO: 481187 - RNA, 20 nt, Artificial Sequence
  Synthetic
gagagagagggagggagaga

SEQ ID NO: 481188 - RNA, 21 nt, Artificial Sequence
  Synthetic
agagagagagggagggagaga

SEQ ID NO: 481189 - RNA, 22 nt, Artificial Sequence
  Synthetic
gagagagagagggagggagaga

SEQ ID NO: 481190 - RNA, 23 nt, Artificial Sequence
  Synthetic
agagagagagagggagggagaga

SEQ ID NO: 481191 - RNA, 24 nt, Artificial Sequence
  Synthetic
gagagagagagagggagggagaga

SEQ ID NO: 481192 - RNA, 18 nt, Artificial Sequence
  Synthetic
gggaggaagggggagaga

SEQ ID NO: 481193 - RNA, 19 nt, Artificial Sequence
  Synthetic
ggggaggaagggggagaga

SEQ ID NO: 481194 - RNA, 20 nt, Artificial Sequence
  Synthetic
gggggaggaagggggagaga

SEQ ID NO: 481195 - RNA, 21 nt, Artificial Sequence
  Synthetic
ugggggaggaagggggagaga

SEQ ID NO: 481196 - RNA, 22 nt, Artificial Sequence
  Synthetic
augggggaggaagggggagaga

SEQ ID NO: 481197 - RNA, 23 nt, Artificial Sequence
  Synthetic
gaugggggaggaagggggagaga

SEQ ID NO: 481198 - RNA, 24 nt, Artificial Sequence
  Synthetic
agaugggggaggaagggggagaga

SEQ ID NO: 481199 - RNA, 18 nt, Artificial Sequence
  Synthetic
gggaaggcuggggagaga

SEQ ID NO: 481200 - RNA, 19 nt, Artificial Sequence
  Synthetic
ggggaaggcuggggagaga

SEQ ID NO: 481201 - RNA, 20 nt, Artificial Sequence
  Synthetic
gggggaaggcuggggagaga

SEQ ID NO: 481202 - RNA, 21 nt, Artificial Sequence
  Synthetic
cgggggaaggcuggggagaga

SEQ ID NO: 481203 - RNA, 22 nt, Artificial Sequence
  Synthetic
gcgggggaaggcuggggagaga

SEQ ID NO: 481204 - RNA, 23 nt, Artificial Sequence
  Synthetic
agcgggggaaggcuggggagaga

SEQ ID NO: 481205 - RNA, 24 nt, Artificial Sequence
  Synthetic
aagcgggggaaggcuggggagaga

SEQ ID NO: 481206 - RNA, 18 nt, Artificial Sequence
  Synthetic
aagggauggugggagaga

SEQ ID NO: 481207 - RNA, 19 nt, Artificial Sequence
  Synthetic
aaagggauggugggagaga

SEQ ID NO: 481208 - RNA, 20 nt, Artificial Sequence
  Synthetic
gaaagggauggugggagaga

SEQ ID NO: 481209 - RNA, 21 nt, Artificial Sequence
  Synthetic
ggaaagggauggugggagaga

SEQ ID NO: 481210 - RNA, 22 nt, Artificial Sequence
  Synthetic
gggaaagggauggugggagaga

SEQ ID NO: 481211 - RNA, 23 nt, Artificial Sequence
  Synthetic
agggaaagggauggugggagaga

SEQ ID NO: 481212 - RNA, 24 nt, Artificial Sequence
  Synthetic
aagggaaagggauggugggagaga

SEQ ID NO: 481213 - RNA, 18 nt, Artificial Sequence
  Synthetic
ugaacaauuugggagaga

SEQ ID NO: 481214 - RNA, 19 nt, Artificial Sequence
  Synthetic
uugaacaauuugggagaga

SEQ ID NO: 481215 - RNA, 20 nt, Artificial Sequence
  Synthetic
uuugaacaauuugggagaga

SEQ ID NO: 481216 - RNA, 21 nt, Artificial Sequence
  Synthetic
cuuugaacaauuugggagaga

SEQ ID NO: 481217 - RNA, 22 nt, Artificial Sequence
  Synthetic
ucuuugaacaauuugggagaga

SEQ ID NO: 481218 - RNA, 23 nt, Artificial Sequence
  Synthetic
aucuuugaacaauuugggagaga

SEQ ID NO: 481219 - RNA, 24 nt, Artificial Sequence
  Synthetic
aaucuuugaacaauuugggagaga

SEQ ID NO: 481220 - RNA, 18 nt, Artificial Sequence
  Synthetic
uguguauuuugggagaga

SEQ ID NO: 481221 - RNA, 19 nt, Artificial Sequence
  Synthetic
cuguguauuuugggagaga

SEQ ID NO: 481222 - RNA, 20 nt, Artificial Sequence
  Synthetic
gcuguguauuuugggagaga

SEQ ID NO: 481223 - RNA, 21 nt, Artificial Sequence
  Synthetic
agcuguguauuuugggagaga

SEQ ID NO: 481224 - RNA, 22 nt, Artificial Sequence
  Synthetic
uagcuguguauuuugggagaga

SEQ ID NO: 481225 - RNA, 23 nt, Artificial Sequence
  Synthetic
auagcuguguauuuugggagaga

SEQ ID NO: 481226 - RNA, 24 nt, Artificial Sequence
  Synthetic
cauagcuguguauuuugggagaga

SEQ ID NO: 481227 - RNA, 18 nt, Artificial Sequence
  Synthetic
ggagaaagaauggagaga

SEQ ID NO: 481228 - RNA, 19 nt, Artificial Sequence
  Synthetic
uggagaaagaauggagaga

SEQ ID NO: 481229 - RNA, 20 nt, Artificial Sequence
  Synthetic
cuggagaaagaauggagaga

SEQ ID NO: 481230 - RNA, 21 nt, Artificial Sequence
  Synthetic
ccuggagaaagaauggagaga

SEQ ID NO: 481231 - RNA, 22 nt, Artificial Sequence
  Synthetic
uccuggagaaagaauggagaga

SEQ ID NO: 481232 - RNA, 23 nt, Artificial Sequence
  Synthetic
cuccuggagaaagaauggagaga

SEQ ID NO: 481233 - RNA, 24 nt, Artificial Sequence
  Synthetic
ucuccuggagaaagaauggagaga

SEQ ID NO: 481234 - RNA, 18 nt, Artificial Sequence
  Synthetic
uauauagauauggagaga

SEQ ID NO: 481235 - RNA, 19 nt, Artificial Sequence
  Synthetic
auauauagauauggagaga

SEQ ID NO: 481236 - RNA, 20 nt, Artificial Sequence
  Synthetic
uauauauagauauggagaga

SEQ ID NO: 481237 - RNA, 21 nt, Artificial Sequence
  Synthetic
auauauauagauauggagaga

SEQ ID NO: 481238 - RNA, 22 nt, Artificial Sequence
  Synthetic
uauauauauagauauggagaga

SEQ ID NO: 481239 - RNA, 23 nt, Artificial Sequence
  Synthetic
auauauauauagauauggagaga

SEQ ID NO: 481240 - RNA, 24 nt, Artificial Sequence
  Synthetic
uauauauauauagauauggagaga

SEQ ID NO: 481241 - RNA, 18 nt, Artificial Sequence
  Synthetic
gaaaaagaaaaugagaga

SEQ ID NO: 481242 - RNA, 19 nt, Artificial Sequence
  Synthetic
agaaaaagaaaaugagaga

SEQ ID NO: 481243 - RNA, 20 nt, Artificial Sequence
  Synthetic
aagaaaaagaaaaugagaga

SEQ ID NO: 481244 - RNA, 21 nt, Artificial Sequence
  Synthetic
gaagaaaaagaaaaugagaga

SEQ ID NO: 481245 - RNA, 22 nt, Artificial Sequence
  Synthetic
agaagaaaaagaaaaugagaga

SEQ ID NO: 481246 - RNA, 23 nt, Artificial Sequence
  Synthetic
aagaagaaaaagaaaaugagaga

SEQ ID NO: 481247 - RNA, 24 nt, Artificial Sequence
  Synthetic
aaagaagaaaaagaaaaugagaga

SEQ ID NO: 481248 - RNA, 18 nt, Artificial Sequence
  Synthetic
gaagcaaugcaugagaga

SEQ ID NO: 481249 - RNA, 19 nt, Artificial Sequence
  Synthetic
agaagcaaugcaugagaga

SEQ ID NO: 481250 - RNA, 20 nt, Artificial Sequence
  Synthetic
aagaagcaaugcaugagaga

SEQ ID NO: 481251 - RNA, 21 nt, Artificial Sequence
  Synthetic
gaagaagcaaugcaugagaga

SEQ ID NO: 481252 - RNA, 22 nt, Artificial Sequence
  Synthetic
agaagaagcaaugcaugagaga

SEQ ID NO: 481253 - RNA, 23 nt, Artificial Sequence
  Synthetic
cagaagaagcaaugcaugagaga

SEQ ID NO: 481254 - RNA, 24 nt, Artificial Sequence
  Synthetic
acagaagaagcaaugcaugagaga

SEQ ID NO: 481255 - RNA, 18 nt, Artificial Sequence
  Synthetic
cugagaugucaugagaga

SEQ ID NO: 481256 - RNA, 19 nt, Artificial Sequence
  Synthetic
ccugagaugucaugagaga

SEQ ID NO: 481257 - RNA, 20 nt, Artificial Sequence
  Synthetic
accugagaugucaugagaga

SEQ ID NO: 481258 - RNA, 21 nt, Artificial Sequence
  Synthetic
caccugagaugucaugagaga

SEQ ID NO: 481259 - RNA, 22 nt, Artificial Sequence
  Synthetic
gcaccugagaugucaugagaga

SEQ ID NO: 481260 - RNA, 23 nt, Artificial Sequence
  Synthetic
ugcaccugagaugucaugagaga

SEQ ID NO: 481261 - RNA, 24 nt, Artificial Sequence
  Synthetic
gugcaccugagaugucaugagaga

SEQ ID NO: 481262 - RNA, 18 nt, Artificial Sequence
  Synthetic
uugaauugggaugagaga

SEQ ID NO: 481263 - RNA, 19 nt, Artificial Sequence
  Synthetic
uuugaauugggaugagaga

SEQ ID NO: 481264 - RNA, 20 nt, Artificial Sequence
  Synthetic
uuuugaauugggaugagaga

SEQ ID NO: 481265 - RNA, 21 nt, Artificial Sequence
  Synthetic
cuuuugaauugggaugagaga

SEQ ID NO: 481266 - RNA, 22 nt, Artificial Sequence
  Synthetic
acuuuugaauugggaugagaga

SEQ ID NO: 481267 - RNA, 23 nt, Artificial Sequence
  Synthetic
cacuuuugaauugggaugagaga

SEQ ID NO: 481268 - RNA, 24 nt, Artificial Sequence
  Synthetic
gcacuuuugaauugggaugagaga

SEQ ID NO: 481269 - RNA, 18 nt, Artificial Sequence
  Synthetic
auaaaaauggaugagaga

SEQ ID NO: 481270 - RNA, 19 nt, Artificial Sequence
  Synthetic
uauaaaaauggaugagaga

SEQ ID NO: 481271 - RNA, 20 nt, Artificial Sequence
  Synthetic
auauaaaaauggaugagaga

SEQ ID NO: 481272 - RNA, 21 nt, Artificial Sequence
  Synthetic
aauauaaaaauggaugagaga

SEQ ID NO: 481273 - RNA, 22 nt, Artificial Sequence
  Synthetic
uaauauaaaaauggaugagaga

SEQ ID NO: 481274 - RNA, 23 nt, Artificial Sequence
  Synthetic
uuaauauaaaaauggaugagaga

SEQ ID NO: 481275 - RNA, 24 nt, Artificial Sequence
  Synthetic
uuuaauauaaaaauggaugagaga

SEQ ID NO: 481276 - RNA, 18 nt, Artificial Sequence
  Synthetic
uccuacauuacugagaga

SEQ ID NO: 481277 - RNA, 19 nt, Artificial Sequence
  Synthetic
cuccuacauuacugagaga

SEQ ID NO: 481278 - RNA, 20 nt, Artificial Sequence
  Synthetic
acuccuacauuacugagaga

SEQ ID NO: 481279 - RNA, 21 nt, Artificial Sequence
  Synthetic
cacuccuacauuacugagaga

SEQ ID NO: 481280 - RNA, 22 nt, Artificial Sequence
  Synthetic
ucacuccuacauuacugagaga

SEQ ID NO: 481281 - RNA, 23 nt, Artificial Sequence
  Synthetic
gucacuccuacauuacugagaga

SEQ ID NO: 481282 - RNA, 24 nt, Artificial Sequence
  Synthetic
ggucacuccuacauuacugagaga

SEQ ID NO: 481283 - RNA, 18 nt, Artificial Sequence
  Synthetic
acaagaugagcugagaga

SEQ ID NO: 481284 - RNA, 19 nt, Artificial Sequence
  Synthetic
uacaagaugagcugagaga

SEQ ID NO: 481285 - RNA, 20 nt, Artificial Sequence
  Synthetic
guacaagaugagcugagaga

SEQ ID NO: 481286 - RNA, 21 nt, Artificial Sequence
  Synthetic
uguacaagaugagcugagaga

SEQ ID NO: 481287 - RNA, 22 nt, Artificial Sequence
  Synthetic
guguacaagaugagcugagaga

SEQ ID NO: 481288 - RNA, 23 nt, Artificial Sequence
  Synthetic
aguguacaagaugagcugagaga

SEQ ID NO: 481289 - RNA, 24 nt, Artificial Sequence
  Synthetic
caguguacaagaugagcugagaga

SEQ ID NO: 481290 - RNA, 18 nt, Artificial Sequence
  Synthetic
uccccagagagugagaga

SEQ ID NO: 481291 - RNA, 19 nt, Artificial Sequence
  Synthetic
uuccccagagagugagaga

SEQ ID NO: 481292 - RNA, 20 nt, Artificial Sequence
  Synthetic
guuccccagagagugagaga

SEQ ID NO: 481293 - RNA, 21 nt, Artificial Sequence
  Synthetic
aguuccccagagagugagaga

SEQ ID NO: 481294 - RNA, 22 nt, Artificial Sequence
  Synthetic
aaguuccccagagagugagaga

SEQ ID NO: 481295 - RNA, 23 nt, Artificial Sequence
  Synthetic
gaaguuccccagagagugagaga

SEQ ID NO: 481296 - RNA, 24 nt, Artificial Sequence
  Synthetic
cgaaguuccccagagagugagaga

SEQ ID NO: 481297 - RNA, 18 nt, Artificial Sequence
  Synthetic
gauaaaccaugugagaga

SEQ ID NO: 481298 - RNA, 19 nt, Artificial Sequence
  Synthetic
agauaaaccaugugagaga

SEQ ID NO: 481299 - RNA, 20 nt, Artificial Sequence
  Synthetic
aagauaaaccaugugagaga

SEQ ID NO: 481300 - RNA, 21 nt, Artificial Sequence
  Synthetic
aaagauaaaccaugugagaga

SEQ ID NO: 481301 - RNA, 22 nt, Artificial Sequence
  Synthetic
uaaagauaaaccaugugagaga

SEQ ID NO: 481302 - RNA, 23 nt, Artificial Sequence
  Synthetic
uuaaagauaaaccaugugagaga

SEQ ID NO: 481303 - RNA, 24 nt, Artificial Sequence
  Synthetic
auuaaagauaaaccaugugagaga

SEQ ID NO: 481304 - RNA, 18 nt, Artificial Sequence
  Synthetic
ucucuaaugugugagaga

SEQ ID NO: 481305 - RNA, 19 nt, Artificial Sequence
  Synthetic
uucucuaaugugugagaga

SEQ ID NO: 481306 - RNA, 20 nt, Artificial Sequence
  Synthetic
uuucucuaaugugugagaga

SEQ ID NO: 481307 - RNA, 21 nt, Artificial Sequence
  Synthetic
cuuucucuaaugugugagaga

SEQ ID NO: 481308 - RNA, 22 nt, Artificial Sequence
  Synthetic
ucuuucucuaaugugugagaga

SEQ ID NO: 481309 - RNA, 23 nt, Artificial Sequence
  Synthetic
cucuuucucuaaugugugagaga

SEQ ID NO: 481310 - RNA, 24 nt, Artificial Sequence
  Synthetic
acucuuucucuaaugugugagaga

SEQ ID NO: 481311 - RNA, 21 nt, Artificial Sequence
  Synthetic
ugugugugugugugugagaga

SEQ ID NO: 481312 - RNA, 22 nt, Artificial Sequence
  Synthetic
gugugugugugugugugagaga

SEQ ID NO: 481313 - RNA, 23 nt, Artificial Sequence
  Synthetic
ugugugugugugugugugagaga

SEQ ID NO: 481314 - RNA, 24 nt, Artificial Sequence
  Synthetic
augugugugugugugugugagaga

SEQ ID NO: 481315 - RNA, 18 nt, Artificial Sequence
  Synthetic
uuuuuuuuaauugagaga

SEQ ID NO: 481316 - RNA, 19 nt, Artificial Sequence
  Synthetic
uuuuuuuuuaauugagaga

SEQ ID NO: 481317 - RNA, 20 nt, Artificial Sequence
  Synthetic
uuuuuuuuuuaauugagaga

SEQ ID NO: 481318 - RNA, 21 nt, Artificial Sequence
  Synthetic
uuuuuuuuuuuaauugagaga

SEQ ID NO: 481319 - RNA, 22 nt, Artificial Sequence
  Synthetic
uuuuuuuuuuuuaauugagaga

SEQ ID NO: 481320 - RNA, 23 nt, Artificial Sequence
  Synthetic
uuuuuuuuuuuuuaauugagaga

SEQ ID NO: 481321 - RNA, 24 nt, Artificial Sequence
  Synthetic
guuuuuuuuuuuuuaauugagaga

SEQ ID NO: 481322 - RNA, 18 nt, Artificial Sequence
  Synthetic
acaggaucucuugagaga

SEQ ID NO: 481323 - RNA, 19 nt, Artificial Sequence
  Synthetic
aacaggaucucuugagaga

SEQ ID NO: 481324 - RNA, 20 nt, Artificial Sequence
  Synthetic
gaacaggaucucuugagaga

SEQ ID NO: 481325 - RNA, 21 nt, Artificial Sequence
  Synthetic
ggaacaggaucucuugagaga

SEQ ID NO: 481326 - RNA, 22 nt, Artificial Sequence
  Synthetic
aggaacaggaucucuugagaga

SEQ ID NO: 481327 - RNA, 23 nt, Artificial Sequence
  Synthetic
gaggaacaggaucucuugagaga

SEQ ID NO: 481328 - RNA, 24 nt, Artificial Sequence
  Synthetic
agaggaacaggaucucuugagaga

SEQ ID NO: 481329 - RNA, 18 nt, Artificial Sequence
  Synthetic
acuuuagaguuugagaga

SEQ ID NO: 481330 - RNA, 19 nt, Artificial Sequence
  Synthetic
aacuuuagaguuugagaga

SEQ ID NO: 481331 - RNA, 20 nt, Artificial Sequence
  Synthetic
caacuuuagaguuugagaga

SEQ ID NO: 481332 - RNA, 21 nt, Artificial Sequence
  Synthetic
gcaacuuuagaguuugagaga

SEQ ID NO: 481333 - RNA, 22 nt, Artificial Sequence
  Synthetic
agcaacuuuagaguuugagaga

SEQ ID NO: 481334 - RNA, 23 nt, Artificial Sequence
  Synthetic
cagcaacuuuagaguuugagaga

SEQ ID NO: 481335 - RNA, 24 nt, Artificial Sequence
  Synthetic
acagcaacuuuagaguuugagaga

SEQ ID NO: 481336 - RNA, 18 nt, Artificial Sequence
  Synthetic
uguaagggaaaauagaga

SEQ ID NO: 481337 - RNA, 19 nt, Artificial Sequence
  Synthetic
cuguaagggaaaauagaga

SEQ ID NO: 481338 - RNA, 20 nt, Artificial Sequence
  Synthetic
acuguaagggaaaauagaga

SEQ ID NO: 481339 - RNA, 21 nt, Artificial Sequence
  Synthetic
gacuguaagggaaaauagaga

SEQ ID NO: 481340 - RNA, 22 nt, Artificial Sequence
  Synthetic
agacuguaagggaaaauagaga

SEQ ID NO: 481341 - RNA, 23 nt, Artificial Sequence
  Synthetic
gagacuguaagggaaaauagaga

SEQ ID NO: 481342 - RNA, 24 nt, Artificial Sequence
  Synthetic
agagacuguaagggaaaauagaga

SEQ ID NO: 481343 - RNA, 18 nt, Artificial Sequence
  Synthetic
uuuacaauucaauagaga

SEQ ID NO: 481344 - RNA, 19 nt, Artificial Sequence
  Synthetic
auuuacaauucaauagaga

SEQ ID NO: 481345 - RNA, 20 nt, Artificial Sequence
  Synthetic
uauuuacaauucaauagaga

SEQ ID NO: 481346 - RNA, 21 nt, Artificial Sequence
  Synthetic
cuauuuacaauucaauagaga

SEQ ID NO: 481347 - RNA, 22 nt, Artificial Sequence
  Synthetic
gcuauuuacaauucaauagaga

SEQ ID NO: 481348 - RNA, 23 nt, Artificial Sequence
  Synthetic
agcuauuuacaauucaauagaga

SEQ ID NO: 481349 - RNA, 24 nt, Artificial Sequence
  Synthetic
cagcuauuuacaauucaauagaga

SEQ ID NO: 481350 - RNA, 18 nt, Artificial Sequence
  Synthetic
uuaggagaggaauagaga

SEQ ID NO: 481351 - RNA, 19 nt, Artificial Sequence
  Synthetic
auuaggagaggaauagaga

SEQ ID NO: 481352 - RNA, 20 nt, Artificial Sequence
  Synthetic
aauuaggagaggaauagaga

SEQ ID NO: 481353 - RNA, 21 nt, Artificial Sequence
  Synthetic
aaauuaggagaggaauagaga

SEQ ID NO: 481354 - RNA, 22 nt, Artificial Sequence
  Synthetic
aaaauuaggagaggaauagaga

SEQ ID NO: 481355 - RNA, 23 nt, Artificial Sequence
  Synthetic
aaaaauuaggagaggaauagaga

SEQ ID NO: 481356 - RNA, 24 nt, Artificial Sequence
  Synthetic
aaaaaauuaggagaggaauagaga

SEQ ID NO: 481357 - RNA, 18 nt, Artificial Sequence
  Synthetic
ccuagagcuccauagaga

SEQ ID NO: 481358 - RNA, 19 nt, Artificial Sequence
  Synthetic
cccuagagcuccauagaga

SEQ ID NO: 481359 - RNA, 20 nt, Artificial Sequence
  Synthetic
ucccuagagcuccauagaga

SEQ ID NO: 481360 - RNA, 21 nt, Artificial Sequence
  Synthetic
aucccuagagcuccauagaga

SEQ ID NO: 481361 - RNA, 22 nt, Artificial Sequence
  Synthetic
gaucccuagagcuccauagaga

SEQ ID NO: 481362 - RNA, 23 nt, Artificial Sequence
  Synthetic
ugaucccuagagcuccauagaga

SEQ ID NO: 481363 - RNA, 24 nt, Artificial Sequence
  Synthetic
cugaucccuagagcuccauagaga

SEQ ID NO: 481364 - RNA, 18 nt, Artificial Sequence
  Synthetic
aagacaaaaucauagaga

SEQ ID NO: 481365 - RNA, 19 nt, Artificial Sequence
  Synthetic
aaagacaaaaucauagaga

SEQ ID NO: 481366 - RNA, 20 nt, Artificial Sequence
  Synthetic
aaaagacaaaaucauagaga

SEQ ID NO: 481367 - RNA, 21 nt, Artificial Sequence
  Synthetic
gaaaagacaaaaucauagaga

SEQ ID NO: 481368 - RNA, 22 nt, Artificial Sequence
  Synthetic
ugaaaagacaaaaucauagaga

SEQ ID NO: 481369 - RNA, 23 nt, Artificial Sequence
  Synthetic
uugaaaagacaaaaucauagaga

SEQ ID NO: 481370 - RNA, 24 nt, Artificial Sequence
  Synthetic
cuugaaaagacaaaaucauagaga

SEQ ID NO: 481371 - RNA, 18 nt, Artificial Sequence
  Synthetic
gaauacauuauauagaga

SEQ ID NO: 481372 - RNA, 19 nt, Artificial Sequence
  Synthetic
ugaauacauuauauagaga

SEQ ID NO: 481373 - RNA, 20 nt, Artificial Sequence
  Synthetic
augaauacauuauauagaga

SEQ ID NO: 481374 - RNA, 21 nt, Artificial Sequence
  Synthetic
uaugaauacauuauauagaga

SEQ ID NO: 481375 - RNA, 22 nt, Artificial Sequence
  Synthetic
auaugaauacauuauauagaga

SEQ ID NO: 481376 - RNA, 23 nt, Artificial Sequence
  Synthetic
aauaugaauacauuauauagaga

SEQ ID NO: 481377 - RNA, 24 nt, Artificial Sequence
  Synthetic
gaauaugaauacauuauauagaga

SEQ ID NO: 481378 - RNA, 18 nt, Artificial Sequence
  Synthetic
caaauaaaucuauagaga

SEQ ID NO: 481379 - RNA, 19 nt, Artificial Sequence
  Synthetic
gcaaauaaaucuauagaga

SEQ ID NO: 481380 - RNA, 20 nt, Artificial Sequence
  Synthetic
ugcaaauaaaucuauagaga

SEQ ID NO: 481381 - RNA, 21 nt, Artificial Sequence
  Synthetic
augcaaauaaaucuauagaga

SEQ ID NO: 481382 - RNA, 22 nt, Artificial Sequence
  Synthetic
uaugcaaauaaaucuauagaga

SEQ ID NO: 481383 - RNA, 23 nt, Artificial Sequence
  Synthetic
auaugcaaauaaaucuauagaga

SEQ ID NO: 481384 - RNA, 24 nt, Artificial Sequence
  Synthetic
aauaugcaaauaaaucuauagaga

SEQ ID NO: 481385 - RNA, 18 nt, Artificial Sequence
  Synthetic
ugaaugaaagacuagaga

SEQ ID NO: 481386 - RNA, 19 nt, Artificial Sequence
  Synthetic
augaaugaaagacuagaga

SEQ ID NO: 481387 - RNA, 20 nt, Artificial Sequence
  Synthetic
gaugaaugaaagacuagaga

SEQ ID NO: 481388 - RNA, 21 nt, Artificial Sequence
  Synthetic
agaugaaugaaagacuagaga

SEQ ID NO: 481389 - RNA, 22 nt, Artificial Sequence
  Synthetic
aagaugaaugaaagacuagaga

SEQ ID NO: 481390 - RNA, 23 nt, Artificial Sequence
  Synthetic
uaagaugaaugaaagacuagaga

SEQ ID NO: 481391 - RNA, 24 nt, Artificial Sequence
  Synthetic
auaagaugaaugaaagacuagaga

SEQ ID NO: 481392 - RNA, 18 nt, Artificial Sequence
  Synthetic
auauuuauaagcuagaga

SEQ ID NO: 481393 - RNA, 19 nt, Artificial Sequence
  Synthetic
uauauuuauaagcuagaga

SEQ ID NO: 481394 - RNA, 20 nt, Artificial Sequence
  Synthetic
auauauuuauaagcuagaga

SEQ ID NO: 481395 - RNA, 21 nt, Artificial Sequence
  Synthetic
aauauauuuauaagcuagaga

SEQ ID NO: 481396 - RNA, 22 nt, Artificial Sequence
  Synthetic
caauauauuuauaagcuagaga

SEQ ID NO: 481397 - RNA, 23 nt, Artificial Sequence
  Synthetic
ucaauauauuuauaagcuagaga

SEQ ID NO: 481398 - RNA, 24 nt, Artificial Sequence
  Synthetic
uucaauauauuuauaagcuagaga

SEQ ID NO: 481399 - RNA, 18 nt, Artificial Sequence
  Synthetic
ggcagauuuggcuagaga

SEQ ID NO: 481400 - RNA, 19 nt, Artificial Sequence
  Synthetic
uggcagauuuggcuagaga

SEQ ID NO: 481401 - RNA, 20 nt, Artificial Sequence
  Synthetic
uuggcagauuuggcuagaga

SEQ ID NO: 481402 - RNA, 21 nt, Artificial Sequence
  Synthetic
uuuggcagauuuggcuagaga

SEQ ID NO: 481403 - RNA, 22 nt, Artificial Sequence
  Synthetic
cuuuggcagauuuggcuagaga

SEQ ID NO: 481404 - RNA, 23 nt, Artificial Sequence
  Synthetic
acuuuggcagauuuggcuagaga

SEQ ID NO: 481405 - RNA, 24 nt, Artificial Sequence
  Synthetic
aacuuuggcagauuuggcuagaga

SEQ ID NO: 481406 - RNA, 18 nt, Artificial Sequence
  Synthetic
aucaaauaaugcuagaga

SEQ ID NO: 481407 - RNA, 19 nt, Artificial Sequence
  Synthetic
caucaaauaaugcuagaga

SEQ ID NO: 481408 - RNA, 20 nt, Artificial Sequence
  Synthetic
ucaucaaauaaugcuagaga

SEQ ID NO: 481409 - RNA, 21 nt, Artificial Sequence
  Synthetic
aucaucaaauaaugcuagaga

SEQ ID NO: 481410 - RNA, 22 nt, Artificial Sequence
  Synthetic
uaucaucaaauaaugcuagaga

SEQ ID NO: 481411 - RNA, 23 nt, Artificial Sequence
  Synthetic
uuaucaucaaauaaugcuagaga

SEQ ID NO: 481412 - RNA, 24 nt, Artificial Sequence
  Synthetic
uuuaucaucaaauaaugcuagaga

SEQ ID NO: 481413 - RNA, 18 nt, Artificial Sequence
  Synthetic
gggguuggcggguagaga

SEQ ID NO: 481414 - RNA, 19 nt, Artificial Sequence
  Synthetic
agggguuggcggguagaga

SEQ ID NO: 481415 - RNA, 20 nt, Artificial Sequence
  Synthetic
uagggguuggcggguagaga

SEQ ID NO: 481416 - RNA, 21 nt, Artificial Sequence
  Synthetic
auagggguuggcggguagaga

SEQ ID NO: 481417 - RNA, 22 nt, Artificial Sequence
  Synthetic
aauagggguuggcggguagaga

SEQ ID NO: 481418 - RNA, 23 nt, Artificial Sequence
  Synthetic
uaauagggguuggcggguagaga

SEQ ID NO: 481419 - RNA, 24 nt, Artificial Sequence
  Synthetic
auaauagggguuggcggguagaga

SEQ ID NO: 481420 - RNA, 18 nt, Artificial Sequence
  Synthetic
uugaauucuuuguagaga

SEQ ID NO: 481421 - RNA, 19 nt, Artificial Sequence
  Synthetic
uuugaauucuuuguagaga

SEQ ID NO: 481422 - RNA, 20 nt, Artificial Sequence
  Synthetic
uuuugaauucuuuguagaga

SEQ ID NO: 481423 - RNA, 21 nt, Artificial Sequence
  Synthetic
uuuuugaauucuuuguagaga

SEQ ID NO: 481424 - RNA, 22 nt, Artificial Sequence
  Synthetic
auuuuugaauucuuuguagaga

SEQ ID NO: 481425 - RNA, 23 nt, Artificial Sequence
  Synthetic
aauuuuugaauucuuuguagaga

SEQ ID NO: 481426 - RNA, 24 nt, Artificial Sequence
  Synthetic
uaauuuuugaauucuuuguagaga

SEQ ID NO: 481427 - RNA, 18 nt, Artificial Sequence
  Synthetic
aaaucaaacaauuagaga

SEQ ID NO: 481428 - RNA, 19 nt, Artificial Sequence
  Synthetic
aaaaucaaacaauuagaga

SEQ ID NO: 481429 - RNA, 20 nt, Artificial Sequence
  Synthetic
aaaaaucaaacaauuagaga

SEQ ID NO: 481430 - RNA, 21 nt, Artificial Sequence
  Synthetic
uaaaaaucaaacaauuagaga

SEQ ID NO: 481431 - RNA, 22 nt, Artificial Sequence
  Synthetic
guaaaaaucaaacaauuagaga

SEQ ID NO: 481432 - RNA, 23 nt, Artificial Sequence
  Synthetic
aguaaaaaucaaacaauuagaga

SEQ ID NO: 481433 - RNA, 24 nt, Artificial Sequence
  Synthetic
aaguaaaaaucaaacaauuagaga

SEQ ID NO: 481434 - RNA, 18 nt, Artificial Sequence
  Synthetic
caaugaauuuauuagaga

SEQ ID NO: 481435 - RNA, 19 nt, Artificial Sequence
  Synthetic
ccaaugaauuuauuagaga

SEQ ID NO: 481436 - RNA, 20 nt, Artificial Sequence
  Synthetic
gccaaugaauuuauuagaga

SEQ ID NO: 481437 - RNA, 21 nt, Artificial Sequence
  Synthetic
ugccaaugaauuuauuagaga

SEQ ID NO: 481438 - RNA, 22 nt, Artificial Sequence
  Synthetic
uugccaaugaauuuauuagaga

SEQ ID NO: 481439 - RNA, 23 nt, Artificial Sequence
  Synthetic
uuugccaaugaauuuauuagaga

SEQ ID NO: 481440 - RNA, 24 nt, Artificial Sequence
  Synthetic
auuugccaaugaauuuauuagaga

SEQ ID NO: 481441 - RNA, 18 nt, Artificial Sequence
  Synthetic
aaauugccauguuagaga

SEQ ID NO: 481442 - RNA, 19 nt, Artificial Sequence
  Synthetic
caaauugccauguuagaga

SEQ ID NO: 481443 - RNA, 20 nt, Artificial Sequence
  Synthetic
gcaaauugccauguuagaga

SEQ ID NO: 481444 - RNA, 21 nt, Artificial Sequence
  Synthetic
ggcaaauugccauguuagaga

SEQ ID NO: 481445 - RNA, 22 nt, Artificial Sequence
  Synthetic
aggcaaauugccauguuagaga

SEQ ID NO: 481446 - RNA, 23 nt, Artificial Sequence
  Synthetic
gaggcaaauugccauguuagaga

SEQ ID NO: 481447 - RNA, 24 nt, Artificial Sequence
  Synthetic
ugaggcaaauugccauguuagaga

SEQ ID NO: 481448 - RNA, 18 nt, Artificial Sequence
  Synthetic
gaauuaaugauuuagaga

SEQ ID NO: 481449 - RNA, 19 nt, Artificial Sequence
  Synthetic
ugaauuaaugauuuagaga

SEQ ID NO: 481450 - RNA, 20 nt, Artificial Sequence
  Synthetic
uugaauuaaugauuuagaga

SEQ ID NO: 481451 - RNA, 21 nt, Artificial Sequence
  Synthetic
uuugaauuaaugauuuagaga

SEQ ID NO: 481452 - RNA, 22 nt, Artificial Sequence
  Synthetic
auuugaauuaaugauuuagaga

SEQ ID NO: 481453 - RNA, 23 nt, Artificial Sequence
  Synthetic
cauuugaauuaaugauuuagaga

SEQ ID NO: 481454 - RNA, 24 nt, Artificial Sequence
  Synthetic
ucauuugaauuaaugauuuagaga

SEQ ID NO: 481455 - RNA, 18 nt, Artificial Sequence
  Synthetic
gaaagagugauuuagaga

SEQ ID NO: 481456 - RNA, 19 nt, Artificial Sequence
  Synthetic
cgaaagagugauuuagaga

SEQ ID NO: 481457 - RNA, 20 nt, Artificial Sequence
  Synthetic
gcgaaagagugauuuagaga

SEQ ID NO: 481458 - RNA, 21 nt, Artificial Sequence
  Synthetic
agcgaaagagugauuuagaga

SEQ ID NO: 481459 - RNA, 22 nt, Artificial Sequence
  Synthetic
cagcgaaagagugauuuagaga

SEQ ID NO: 481460 - RNA, 23 nt, Artificial Sequence
  Synthetic
ccagcgaaagagugauuuagaga

SEQ ID NO: 481461 - RNA, 24 nt, Artificial Sequence
  Synthetic
uccagcgaaagagugauuuagaga

SEQ ID NO: 481462 - RNA, 18 nt, Artificial Sequence
  Synthetic
aaaaugcauauuuagaga

SEQ ID NO: 481463 - RNA, 19 nt, Artificial Sequence
  Synthetic
aaaaaugcauauuuagaga

SEQ ID NO: 481464 - RNA, 20 nt, Artificial Sequence
  Synthetic
aaaaaaugcauauuuagaga

SEQ ID NO: 481465 - RNA, 21 nt, Artificial Sequence
  Synthetic
gaaaaaaugcauauuuagaga

SEQ ID NO: 481466 - RNA, 22 nt, Artificial Sequence
  Synthetic
agaaaaaaugcauauuuagaga

SEQ ID NO: 481467 - RNA, 23 nt, Artificial Sequence
  Synthetic
gagaaaaaaugcauauuuagaga

SEQ ID NO: 481468 - RNA, 24 nt, Artificial Sequence
  Synthetic
agagaaaaaaugcauauuuagaga

SEQ ID NO: 481469 - RNA, 18 nt, Artificial Sequence
  Synthetic
aguuaaacucuuuagaga

SEQ ID NO: 481470 - RNA, 19 nt, Artificial Sequence
  Synthetic
uaguuaaacucuuuagaga

SEQ ID NO: 481471 - RNA, 20 nt, Artificial Sequence
  Synthetic
guaguuaaacucuuuagaga

SEQ ID NO: 481472 - RNA, 21 nt, Artificial Sequence
  Synthetic
aguaguuaaacucuuuagaga

SEQ ID NO: 481473 - RNA, 22 nt, Artificial Sequence
  Synthetic
aaguaguuaaacucuuuagaga

SEQ ID NO: 481474 - RNA, 23 nt, Artificial Sequence
  Synthetic
aaaguaguuaaacucuuuagaga

SEQ ID NO: 481475 - RNA, 24 nt, Artificial Sequence
  Synthetic
uaaaguaguuaaacucuuuagaga

SEQ ID NO: 481476 - RNA, 18 nt, Artificial Sequence
  Synthetic
uuucagggguaaacgaga

SEQ ID NO: 481477 - RNA, 19 nt, Artificial Sequence
  Synthetic
cuuucagggguaaacgaga

SEQ ID NO: 481478 - RNA, 20 nt, Artificial Sequence
  Synthetic
ucuuucagggguaaacgaga

SEQ ID NO: 481479 - RNA, 21 nt, Artificial Sequence
  Synthetic
gucuuucagggguaaacgaga

SEQ ID NO: 481480 - RNA, 22 nt, Artificial Sequence
  Synthetic
ugucuuucagggguaaacgaga

SEQ ID NO: 481481 - RNA, 23 nt, Artificial Sequence
  Synthetic
augucuuucagggguaaacgaga

SEQ ID NO: 481482 - RNA, 24 nt, Artificial Sequence
  Synthetic
caugucuuucagggguaaacgaga

SEQ ID NO: 481483 - RNA, 18 nt, Artificial Sequence
  Synthetic
uuagacagaucaacgaga

SEQ ID NO: 481484 - RNA, 19 nt, Artificial Sequence
  Synthetic
auuagacagaucaacgaga

SEQ ID NO: 481485 - RNA, 20 nt, Artificial Sequence
  Synthetic
cauuagacagaucaacgaga

SEQ ID NO: 481486 - RNA, 21 nt, Artificial Sequence
  Synthetic
acauuagacagaucaacgaga

SEQ ID NO: 481487 - RNA, 22 nt, Artificial Sequence
  Synthetic
aacauuagacagaucaacgaga

SEQ ID NO: 481488 - RNA, 23 nt, Artificial Sequence
  Synthetic
caacauuagacagaucaacgaga

SEQ ID NO: 481489 - RNA, 24 nt, Artificial Sequence
  Synthetic
ucaacauuagacagaucaacgaga

SEQ ID NO: 481490 - RNA, 18 nt, Artificial Sequence
  Synthetic
uucucagcugacacgaga

SEQ ID NO: 481491 - RNA, 19 nt, Artificial Sequence
  Synthetic
cuucucagcugacacgaga

SEQ ID NO: 481492 - RNA, 20 nt, Artificial Sequence
  Synthetic
ccuucucagcugacacgaga

SEQ ID NO: 481493 - RNA, 21 nt, Artificial Sequence
  Synthetic
uccuucucagcugacacgaga

SEQ ID NO: 481494 - RNA, 22 nt, Artificial Sequence
  Synthetic
auccuucucagcugacacgaga

SEQ ID NO: 481495 - RNA, 23 nt, Artificial Sequence
  Synthetic
cauccuucucagcugacacgaga

SEQ ID NO: 481496 - RNA, 24 nt, Artificial Sequence
  Synthetic
ucauccuucucagcugacacgaga

SEQ ID NO: 481497 - RNA, 18 nt, Artificial Sequence
  Synthetic
uucauuuaaagcacgaga

SEQ ID NO: 481498 - RNA, 19 nt, Artificial Sequence
  Synthetic
cuucauuuaaagcacgaga

SEQ ID NO: 481499 - RNA, 20 nt, Artificial Sequence
  Synthetic
ucuucauuuaaagcacgaga

SEQ ID NO: 481500 - RNA, 21 nt, Artificial Sequence
  Synthetic
aucuucauuuaaagcacgaga

SEQ ID NO: 481501 - RNA, 22 nt, Artificial Sequence
  Synthetic
uaucuucauuuaaagcacgaga

SEQ ID NO: 481502 - RNA, 23 nt, Artificial Sequence
  Synthetic
uuaucuucauuuaaagcacgaga

SEQ ID NO: 481503 - RNA, 24 nt, Artificial Sequence
  Synthetic
uuuaucuucauuuaaagcacgaga

SEQ ID NO: 481504 - RNA, 18 nt, Artificial Sequence
  Synthetic
aaggcaacagagacgaga

SEQ ID NO: 481505 - RNA, 19 nt, Artificial Sequence
  Synthetic
aaaggcaacagagacgaga

SEQ ID NO: 481506 - RNA, 20 nt, Artificial Sequence
  Synthetic
gaaaggcaacagagacgaga

SEQ ID NO: 481507 - RNA, 21 nt, Artificial Sequence
  Synthetic
agaaaggcaacagagacgaga

SEQ ID NO: 481508 - RNA, 22 nt, Artificial Sequence
  Synthetic
gagaaaggcaacagagacgaga

SEQ ID NO: 481509 - RNA, 23 nt, Artificial Sequence
  Synthetic
ggagaaaggcaacagagacgaga

SEQ ID NO: 481510 - RNA, 24 nt, Artificial Sequence
  Synthetic
gggagaaaggcaacagagacgaga

SEQ ID NO: 481511 - RNA, 18 nt, Artificial Sequence
  Synthetic
gguugcagugagccgaga

SEQ ID NO: 481512 - RNA, 19 nt, Artificial Sequence
  Synthetic
agguugcagugagccgaga

SEQ ID NO: 481513 - RNA, 20 nt, Artificial Sequence
  Synthetic
gagguugcagugagccgaga

SEQ ID NO: 481514 - RNA, 21 nt, Artificial Sequence
  Synthetic
ggagguugcagugagccgaga

SEQ ID NO: 481515 - RNA, 22 nt, Artificial Sequence
  Synthetic
uggagguugcagugagccgaga

SEQ ID NO: 481516 - RNA, 23 nt, Artificial Sequence
  Synthetic
guggagguugcagugagccgaga

SEQ ID NO: 481517 - RNA, 24 nt, Artificial Sequence
  Synthetic
gguggagguugcagugagccgaga

SEQ ID NO: 481518 - RNA, 18 nt, Artificial Sequence
  Synthetic
accuucacacuuccgaga

SEQ ID NO: 481519 - RNA, 19 nt, Artificial Sequence
  Synthetic
aaccuucacacuuccgaga

SEQ ID NO: 481520 - RNA, 20 nt, Artificial Sequence
  Synthetic
caaccuucacacuuccgaga

SEQ ID NO: 481521 - RNA, 21 nt, Artificial Sequence
  Synthetic
ucaaccuucacacuuccgaga

SEQ ID NO: 481522 - RNA, 22 nt, Artificial Sequence
  Synthetic
uucaaccuucacacuuccgaga

SEQ ID NO: 481523 - RNA, 23 nt, Artificial Sequence
  Synthetic
uuucaaccuucacacuuccgaga

SEQ ID NO: 481524 - RNA, 24 nt, Artificial Sequence
  Synthetic
uuuucaaccuucacacuuccgaga

SEQ ID NO: 481525 - RNA, 18 nt, Artificial Sequence
  Synthetic
gaaugaaaugaagcgaga

SEQ ID NO: 481526 - RNA, 19 nt, Artificial Sequence
  Synthetic
ugaaugaaaugaagcgaga

SEQ ID NO: 481527 - RNA, 20 nt, Artificial Sequence
  Synthetic
augaaugaaaugaagcgaga

SEQ ID NO: 481528 - RNA, 21 nt, Artificial Sequence
  Synthetic
aaugaaugaaaugaagcgaga

SEQ ID NO: 481529 - RNA, 22 nt, Artificial Sequence
  Synthetic
aaaugaaugaaaugaagcgaga

SEQ ID NO: 481530 - RNA, 23 nt, Artificial Sequence
  Synthetic
gaaaugaaugaaaugaagcgaga

SEQ ID NO: 481531 - RNA, 24 nt, Artificial Sequence
  Synthetic
ugaaaugaaugaaaugaagcgaga

SEQ ID NO: 481532 - RNA, 18 nt, Artificial Sequence
  Synthetic
aauggggaaagagcgaga

SEQ ID NO: 481533 - RNA, 19 nt, Artificial Sequence
  Synthetic
aaauggggaaagagcgaga

SEQ ID NO: 481534 - RNA, 20 nt, Artificial Sequence
  Synthetic
aaaauggggaaagagcgaga

SEQ ID NO: 481535 - RNA, 21 nt, Artificial Sequence
  Synthetic
caaaauggggaaagagcgaga

SEQ ID NO: 481536 - RNA, 22 nt, Artificial Sequence
  Synthetic
ucaaaauggggaaagagcgaga

SEQ ID NO: 481537 - RNA, 23 nt, Artificial Sequence
  Synthetic
cucaaaauggggaaagagcgaga

SEQ ID NO: 481538 - RNA, 24 nt, Artificial Sequence
  Synthetic
gcucaaaauggggaaagagcgaga

SEQ ID NO: 481539 - RNA, 18 nt, Artificial Sequence
  Synthetic
uaccucugaagaucgaga

SEQ ID NO: 481540 - RNA, 19 nt, Artificial Sequence
  Synthetic
guaccucugaagaucgaga

SEQ ID NO: 481541 - RNA, 20 nt, Artificial Sequence
  Synthetic
aguaccucugaagaucgaga

SEQ ID NO: 481542 - RNA, 21 nt, Artificial Sequence
  Synthetic
aaguaccucugaagaucgaga

SEQ ID NO: 481543 - RNA, 22 nt, Artificial Sequence
  Synthetic
caaguaccucugaagaucgaga

SEQ ID NO: 481544 - RNA, 23 nt, Artificial Sequence
  Synthetic
acaaguaccucugaagaucgaga

SEQ ID NO: 481545 - RNA, 24 nt, Artificial Sequence
  Synthetic
gacaaguaccucugaagaucgaga

SEQ ID NO: 481546 - RNA, 18 nt, Artificial Sequence
  Synthetic
caucauacguuuucgaga

SEQ ID NO: 481547 - RNA, 19 nt, Artificial Sequence
  Synthetic
gcaucauacguuuucgaga

SEQ ID NO: 481548 - RNA, 20 nt, Artificial Sequence
  Synthetic
ugcaucauacguuuucgaga

SEQ ID NO: 481549 - RNA, 21 nt, Artificial Sequence
  Synthetic
cugcaucauacguuuucgaga

SEQ ID NO: 481550 - RNA, 22 nt, Artificial Sequence
  Synthetic
ccugcaucauacguuuucgaga

SEQ ID NO: 481551 - RNA, 23 nt, Artificial Sequence
  Synthetic
accugcaucauacguuuucgaga

SEQ ID NO: 481552 - RNA, 24 nt, Artificial Sequence
  Synthetic
caccugcaucauacguuuucgaga

SEQ ID NO: 481553 - RNA, 18 nt, Artificial Sequence
  Synthetic
ucauuggauuaaaggaga

SEQ ID NO: 481554 - RNA, 19 nt, Artificial Sequence
  Synthetic
aucauuggauuaaaggaga

SEQ ID NO: 481555 - RNA, 20 nt, Artificial Sequence
  Synthetic
aaucauuggauuaaaggaga

SEQ ID NO: 481556 - RNA, 21 nt, Artificial Sequence
  Synthetic
aaaucauuggauuaaaggaga

SEQ ID NO: 481557 - RNA, 22 nt, Artificial Sequence
  Synthetic
caaaucauuggauuaaaggaga

SEQ ID NO: 481558 - RNA, 23 nt, Artificial Sequence
  Synthetic
ucaaaucauuggauuaaaggaga

SEQ ID NO: 481559 - RNA, 24 nt, Artificial Sequence
  Synthetic
uucaaaucauuggauuaaaggaga

SEQ ID NO: 481560 - RNA, 18 nt, Artificial Sequence
  Synthetic
auauaucacucaaggaga

SEQ ID NO: 481561 - RNA, 19 nt, Artificial Sequence
  Synthetic
cauauaucacucaaggaga

SEQ ID NO: 481562 - RNA, 20 nt, Artificial Sequence
  Synthetic
acauauaucacucaaggaga

SEQ ID NO: 481563 - RNA, 21 nt, Artificial Sequence
  Synthetic
cacauauaucacucaaggaga

SEQ ID NO: 481564 - RNA, 22 nt, Artificial Sequence
  Synthetic
ccacauauaucacucaaggaga

SEQ ID NO: 481565 - RNA, 23 nt, Artificial Sequence
  Synthetic
gccacauauaucacucaaggaga

SEQ ID NO: 481566 - RNA, 24 nt, Artificial Sequence
  Synthetic
ugccacauauaucacucaaggaga

SEQ ID NO: 481567 - RNA, 18 nt, Artificial Sequence
  Synthetic
gaagggaagggaaggaga

SEQ ID NO: 481568 - RNA, 19 nt, Artificial Sequence
  Synthetic
ggaagggaagggaaggaga

SEQ ID NO: 481569 - RNA, 20 nt, Artificial Sequence
  Synthetic
gggaagggaagggaaggaga

SEQ ID NO: 481570 - RNA, 21 nt, Artificial Sequence
  Synthetic
agggaagggaagggaaggaga

SEQ ID NO: 481571 - RNA, 22 nt, Artificial Sequence
  Synthetic
aagggaagggaagggaaggaga

SEQ ID NO: 481572 - RNA, 23 nt, Artificial Sequence
  Synthetic
gaagggaagggaagggaaggaga

SEQ ID NO: 481573 - RNA, 24 nt, Artificial Sequence
  Synthetic
ggaagggaagggaagggaaggaga

SEQ ID NO: 481574 - RNA, 18 nt, Artificial Sequence
  Synthetic
aaugaggguuuaaggaga

SEQ ID NO: 481575 - RNA, 19 nt, Artificial Sequence
  Synthetic
gaaugaggguuuaaggaga

SEQ ID NO: 481576 - RNA, 20 nt, Artificial Sequence
  Synthetic
agaaugaggguuuaaggaga

SEQ ID NO: 481577 - RNA, 21 nt, Artificial Sequence
  Synthetic
aagaaugaggguuuaaggaga

SEQ ID NO: 481578 - RNA, 22 nt, Artificial Sequence
  Synthetic
caagaaugaggguuuaaggaga

SEQ ID NO: 481579 - RNA, 23 nt, Artificial Sequence
  Synthetic
ucaagaaugaggguuuaaggaga

SEQ ID NO: 481580 - RNA, 24 nt, Artificial Sequence
  Synthetic
gucaagaaugaggguuuaaggaga

SEQ ID NO: 481581 - RNA, 18 nt, Artificial Sequence
  Synthetic
aaaaagaaaaacaggaga

SEQ ID NO: 481582 - RNA, 19 nt, Artificial Sequence
  Synthetic
aaaaaagaaaaacaggaga

SEQ ID NO: 481583 - RNA, 20 nt, Artificial Sequence
  Synthetic
caaaaaagaaaaacaggaga

SEQ ID NO: 481584 - RNA, 21 nt, Artificial Sequence
  Synthetic
ucaaaaaagaaaaacaggaga

SEQ ID NO: 481585 - RNA, 22 nt, Artificial Sequence
  Synthetic
aucaaaaaagaaaaacaggaga

SEQ ID NO: 481586 - RNA, 23 nt, Artificial Sequence
  Synthetic
uaucaaaaaagaaaaacaggaga

SEQ ID NO: 481587 - RNA, 24 nt, Artificial Sequence
  Synthetic
auaucaaaaaagaaaaacaggaga

SEQ ID NO: 481588 - RNA, 18 nt, Artificial Sequence
  Synthetic
auauucaccaacaggaga

SEQ ID NO: 481589 - RNA, 19 nt, Artificial Sequence
  Synthetic
aauauucaccaacaggaga

SEQ ID NO: 481590 - RNA, 20 nt, Artificial Sequence
  Synthetic
aaauauucaccaacaggaga

SEQ ID NO: 481591 - RNA, 21 nt, Artificial Sequence
  Synthetic
aaaauauucaccaacaggaga

SEQ ID NO: 481592 - RNA, 22 nt, Artificial Sequence
  Synthetic
aaaaauauucaccaacaggaga

SEQ ID NO: 481593 - RNA, 23 nt, Artificial Sequence
  Synthetic
gaaaaauauucaccaacaggaga

SEQ ID NO: 481594 - RNA, 24 nt, Artificial Sequence
  Synthetic
agaaaaauauucaccaacaggaga

SEQ ID NO: 481595 - RNA, 18 nt, Artificial Sequence
  Synthetic
gaaacaaaacacaggaga

SEQ ID NO: 481596 - RNA, 19 nt, Artificial Sequence
  Synthetic
ggaaacaaaacacaggaga

SEQ ID NO: 481597 - RNA, 20 nt, Artificial Sequence
  Synthetic
aggaaacaaaacacaggaga

SEQ ID NO: 481598 - RNA, 21 nt, Artificial Sequence
  Synthetic
gaggaaacaaaacacaggaga

SEQ ID NO: 481599 - RNA, 22 nt, Artificial Sequence
  Synthetic
agaggaaacaaaacacaggaga

SEQ ID NO: 481600 - RNA, 23 nt, Artificial Sequence
  Synthetic
uagaggaaacaaaacacaggaga

SEQ ID NO: 481601 - RNA, 24 nt, Artificial Sequence
  Synthetic
cuagaggaaacaaaacacaggaga

SEQ ID NO: 481602 - RNA, 18 nt, Artificial Sequence
  Synthetic
ucgcuugaacccaggaga

SEQ ID NO: 481603 - RNA, 19 nt, Artificial Sequence
  Synthetic
aucgcuugaacccaggaga

SEQ ID NO: 481604 - RNA, 20 nt, Artificial Sequence
  Synthetic
aaucgcuugaacccaggaga

SEQ ID NO: 481605 - RNA, 21 nt, Artificial Sequence
  Synthetic
gaaucgcuugaacccaggaga

SEQ ID NO: 481606 - RNA, 22 nt, Artificial Sequence
  Synthetic
agaaucgcuugaacccaggaga

SEQ ID NO: 481607 - RNA, 23 nt, Artificial Sequence
  Synthetic
gagaaucgcuugaacccaggaga

SEQ ID NO: 481608 - RNA, 24 nt, Artificial Sequence
  Synthetic
ggagaaucgcuugaacccaggaga

SEQ ID NO: 481609 - RNA, 18 nt, Artificial Sequence
  Synthetic
uugcuugaacccaggaga

SEQ ID NO: 481610 - RNA, 19 nt, Artificial Sequence
  Synthetic
auugcuugaacccaggaga

SEQ ID NO: 481611 - RNA, 20 nt, Artificial Sequence
  Synthetic
aauugcuugaacccaggaga

SEQ ID NO: 481612 - RNA, 21 nt, Artificial Sequence
  Synthetic
gaauugcuugaacccaggaga

SEQ ID NO: 481613 - RNA, 22 nt, Artificial Sequence
  Synthetic
agaauugcuugaacccaggaga

SEQ ID NO: 481614 - RNA, 23 nt, Artificial Sequence
  Synthetic
gagaauugcuugaacccaggaga

SEQ ID NO: 481615 - RNA, 24 nt, Artificial Sequence
  Synthetic
agagaauugcuugaacccaggaga

SEQ ID NO: 481616 - RNA, 18 nt, Artificial Sequence
  Synthetic
aagaaaugcuccaggaga

SEQ ID NO: 481617 - RNA, 19 nt, Artificial Sequence
  Synthetic
aaagaaaugcuccaggaga

SEQ ID NO: 481618 - RNA, 20 nt, Artificial Sequence
  Synthetic
gaaagaaaugcuccaggaga

SEQ ID NO: 481619 - RNA, 21 nt, Artificial Sequence
  Synthetic
agaaagaaaugcuccaggaga

SEQ ID NO: 481620 - RNA, 22 nt, Artificial Sequence
  Synthetic
aagaaagaaaugcuccaggaga

SEQ ID NO: 481621 - RNA, 23 nt, Artificial Sequence
  Synthetic
gaagaaagaaaugcuccaggaga

SEQ ID NO: 481622 - RNA, 24 nt, Artificial Sequence
  Synthetic
agaagaaagaaaugcuccaggaga

SEQ ID NO: 481623 - RNA, 18 nt, Artificial Sequence
  Synthetic
cgauugauguccaggaga

SEQ ID NO: 481624 - RNA, 19 nt, Artificial Sequence
  Synthetic
gcgauugauguccaggaga

SEQ ID NO: 481625 - RNA, 20 nt, Artificial Sequence
  Synthetic
ugcgauugauguccaggaga

SEQ ID NO: 481626 - RNA, 21 nt, Artificial Sequence
  Synthetic
uugcgauugauguccaggaga

SEQ ID NO: 481627 - RNA, 22 nt, Artificial Sequence
  Synthetic
cuugcgauugauguccaggaga

SEQ ID NO: 481628 - RNA, 23 nt, Artificial Sequence
  Synthetic
acuugcgauugauguccaggaga

SEQ ID NO: 481629 - RNA, 24 nt, Artificial Sequence
  Synthetic
gacuugcgauugauguccaggaga

SEQ ID NO: 481630 - RNA, 18 nt, Artificial Sequence
  Synthetic
uuuaauauuuccaggaga

SEQ ID NO: 481631 - RNA, 19 nt, Artificial Sequence
  Synthetic
guuuaauauuuccaggaga

SEQ ID NO: 481632 - RNA, 20 nt, Artificial Sequence
  Synthetic
uguuuaauauuuccaggaga

SEQ ID NO: 481633 - RNA, 21 nt, Artificial Sequence
  Synthetic
auguuuaauauuuccaggaga

SEQ ID NO: 481634 - RNA, 22 nt, Artificial Sequence
  Synthetic
cauguuuaauauuuccaggaga

SEQ ID NO: 481635 - RNA, 23 nt, Artificial Sequence
  Synthetic
ucauguuuaauauuuccaggaga

SEQ ID NO: 481636 - RNA, 24 nt, Artificial Sequence
  Synthetic
uucauguuuaauauuuccaggaga

SEQ ID NO: 481637 - RNA, 21 nt, Artificial Sequence
  Synthetic
ccagggcaaucaggcaggaga

SEQ ID NO: 481638 - RNA, 22 nt, Artificial Sequence
  Synthetic
gccagggcaaucaggcaggaga

SEQ ID NO: 481639 - RNA, 23 nt, Artificial Sequence
  Synthetic
ggccagggcaaucaggcaggaga

SEQ ID NO: 481640 - RNA, 24 nt, Artificial Sequence
  Synthetic
uggccagggcaaucaggcaggaga

SEQ ID NO: 481641 - RNA, 18 nt, Artificial Sequence
  Synthetic
aagaagagaggcaggaga

SEQ ID NO: 481642 - RNA, 19 nt, Artificial Sequence
  Synthetic
caagaagagaggcaggaga

SEQ ID NO: 481643 - RNA, 20 nt, Artificial Sequence
  Synthetic
gcaagaagagaggcaggaga

SEQ ID NO: 481644 - RNA, 21 nt, Artificial Sequence
  Synthetic
agcaagaagagaggcaggaga

SEQ ID NO: 481645 - RNA, 22 nt, Artificial Sequence
  Synthetic
gagcaagaagagaggcaggaga

SEQ ID NO: 481646 - RNA, 23 nt, Artificial Sequence
  Synthetic
ggagcaagaagagaggcaggaga

SEQ ID NO: 481647 - RNA, 24 nt, Artificial Sequence
  Synthetic
aggagcaagaagagaggcaggaga

SEQ ID NO: 481648 - RNA, 18 nt, Artificial Sequence
  Synthetic
cccagcugaggcaggaga

SEQ ID NO: 481649 - RNA, 19 nt, Artificial Sequence
  Synthetic
ucccagcugaggcaggaga

SEQ ID NO: 481650 - RNA, 20 nt, Artificial Sequence
  Synthetic
gucccagcugaggcaggaga

SEQ ID NO: 481651 - RNA, 21 nt, Artificial Sequence
  Synthetic
agucccagcugaggcaggaga

SEQ ID NO: 481652 - RNA, 22 nt, Artificial Sequence
  Synthetic
uagucccagcugaggcaggaga

SEQ ID NO: 481653 - RNA, 23 nt, Artificial Sequence
  Synthetic
guagucccagcugaggcaggaga

SEQ ID NO: 481654 - RNA, 24 nt, Artificial Sequence
  Synthetic
uguagucccagcugaggcaggaga

SEQ ID NO: 481655 - RNA, 18 nt, Artificial Sequence
  Synthetic
gagcaauuaggcaggaga

SEQ ID NO: 481656 - RNA, 19 nt, Artificial Sequence
  Synthetic
agagcaauuaggcaggaga

SEQ ID NO: 481657 - RNA, 20 nt, Artificial Sequence
  Synthetic
cagagcaauuaggcaggaga

SEQ ID NO: 481658 - RNA, 21 nt, Artificial Sequence
  Synthetic
ccagagcaauuaggcaggaga

SEQ ID NO: 481659 - RNA, 22 nt, Artificial Sequence
  Synthetic
gccagagcaauuaggcaggaga

SEQ ID NO: 481660 - RNA, 23 nt, Artificial Sequence
  Synthetic
agccagagcaauuaggcaggaga

SEQ ID NO: 481661 - RNA, 24 nt, Artificial Sequence
  Synthetic
uagccagagcaauuaggcaggaga

SEQ ID NO: 481662 - RNA, 18 nt, Artificial Sequence
  Synthetic
uuauucgagcucaggaga

SEQ ID NO: 481663 - RNA, 19 nt, Artificial Sequence
  Synthetic
auuauucgagcucaggaga

SEQ ID NO: 481664 - RNA, 20 nt, Artificial Sequence
  Synthetic
uauuauucgagcucaggaga

SEQ ID NO: 481665 - RNA, 21 nt, Artificial Sequence
  Synthetic
auauuauucgagcucaggaga

SEQ ID NO: 481666 - RNA, 22 nt, Artificial Sequence
  Synthetic
aauauuauucgagcucaggaga

SEQ ID NO: 481667 - RNA, 23 nt, Artificial Sequence
  Synthetic
aaauauuauucgagcucaggaga

SEQ ID NO: 481668 - RNA, 24 nt, Artificial Sequence
  Synthetic
caaauauuauucgagcucaggaga

SEQ ID NO: 481669 - RNA, 18 nt, Artificial Sequence
  Synthetic
gaucacaaggucaggaga

SEQ ID NO: 481670 - RNA, 19 nt, Artificial Sequence
  Synthetic
ggaucacaaggucaggaga

SEQ ID NO: 481671 - RNA, 20 nt, Artificial Sequence
  Synthetic
uggaucacaaggucaggaga

SEQ ID NO: 481672 - RNA, 21 nt, Artificial Sequence
  Synthetic
guggaucacaaggucaggaga

SEQ ID NO: 481673 - RNA, 22 nt, Artificial Sequence
  Synthetic
gguggaucacaaggucaggaga

SEQ ID NO: 481674 - RNA, 23 nt, Artificial Sequence
  Synthetic
ggguggaucacaaggucaggaga

SEQ ID NO: 481675 - RNA, 24 nt, Artificial Sequence
  Synthetic
cggguggaucacaaggucaggaga

SEQ ID NO: 481676 - RNA, 18 nt, Artificial Sequence
  Synthetic
gaucauaaggucaggaga

SEQ ID NO: 481677 - RNA, 19 nt, Artificial Sequence
  Synthetic
ggaucauaaggucaggaga

SEQ ID NO: 481678 - RNA, 20 nt, Artificial Sequence
  Synthetic
cggaucauaaggucaggaga

SEQ ID NO: 481679 - RNA, 21 nt, Artificial Sequence
  Synthetic
gcggaucauaaggucaggaga

SEQ ID NO: 481680 - RNA, 22 nt, Artificial Sequence
  Synthetic
ggcggaucauaaggucaggaga

SEQ ID NO: 481681 - RNA, 23 nt, Artificial Sequence
  Synthetic
gggcggaucauaaggucaggaga

SEQ ID NO: 481682 - RNA, 24 nt, Artificial Sequence
  Synthetic
cgggcggaucauaaggucaggaga

SEQ ID NO: 481683 - RNA, 23 nt, Artificial Sequence
  Synthetic
gggcggaucacgaggucaggaga

SEQ ID NO: 481684 - RNA, 24 nt, Artificial Sequence
  Synthetic
cgggcggaucacgaggucaggaga

SEQ ID NO: 481685 - RNA, 21 nt, Artificial Sequence
  Synthetic
guggaucacgaggucaggaga

SEQ ID NO: 481686 - RNA, 22 nt, Artificial Sequence
  Synthetic
gguggaucacgaggucaggaga

SEQ ID NO: 481687 - RNA, 23 nt, Artificial Sequence
  Synthetic
ggguggaucacgaggucaggaga

SEQ ID NO: 481688 - RNA, 24 nt, Artificial Sequence
  Synthetic
uggguggaucacgaggucaggaga

SEQ ID NO: 481689 - RNA, 18 nt, Artificial Sequence
  Synthetic
gaucaugaggucaggaga

SEQ ID NO: 481690 - RNA, 19 nt, Artificial Sequence
  Synthetic
agaucaugaggucaggaga

SEQ ID NO: 481691 - RNA, 20 nt, Artificial Sequence
  Synthetic
cagaucaugaggucaggaga

SEQ ID NO: 481692 - RNA, 21 nt, Artificial Sequence
  Synthetic
gcagaucaugaggucaggaga

SEQ ID NO: 481693 - RNA, 22 nt, Artificial Sequence
  Synthetic
ggcagaucaugaggucaggaga

SEQ ID NO: 481694 - RNA, 23 nt, Artificial Sequence
  Synthetic
aggcagaucaugaggucaggaga

SEQ ID NO: 481695 - RNA, 24 nt, Artificial Sequence
  Synthetic
caggcagaucaugaggucaggaga

SEQ ID NO: 481696 - RNA, 23 nt, Artificial Sequence
  Synthetic
gggcagaucaugaggucaggaga

SEQ ID NO: 481697 - RNA, 24 nt, Artificial Sequence
  Synthetic
cgggcagaucaugaggucaggaga

SEQ ID NO: 481698 - RNA, 19 nt, Artificial Sequence
  Synthetic
ggaucaugaggucaggaga

SEQ ID NO: 481699 - RNA, 20 nt, Artificial Sequence
  Synthetic
uggaucaugaggucaggaga

SEQ ID NO: 481700 - RNA, 21 nt, Artificial Sequence
  Synthetic
guggaucaugaggucaggaga

SEQ ID NO: 481701 - RNA, 22 nt, Artificial Sequence
  Synthetic
gguggaucaugaggucaggaga

SEQ ID NO: 481702 - RNA, 23 nt, Artificial Sequence
  Synthetic
ggguggaucaugaggucaggaga

SEQ ID NO: 481703 - RNA, 24 nt, Artificial Sequence
  Synthetic
uggguggaucaugaggucaggaga

SEQ ID NO: 481704 - RNA, 18 nt, Artificial Sequence
  Synthetic
ccaggguuuuucaggaga

SEQ ID NO: 481705 - RNA, 19 nt, Artificial Sequence
  Synthetic
uccaggguuuuucaggaga

SEQ ID NO: 481706 - RNA, 20 nt, Artificial Sequence
  Synthetic
uuccaggguuuuucaggaga

SEQ ID NO: 481707 - RNA, 21 nt, Artificial Sequence
  Synthetic
cuuccaggguuuuucaggaga

SEQ ID NO: 481708 - RNA, 22 nt, Artificial Sequence
  Synthetic
acuuccaggguuuuucaggaga

SEQ ID NO: 481709 - RNA, 23 nt, Artificial Sequence
  Synthetic
aacuuccaggguuuuucaggaga

SEQ ID NO: 481710 - RNA, 24 nt, Artificial Sequence
  Synthetic
aaacuuccaggguuuuucaggaga

SEQ ID NO: 481711 - RNA, 18 nt, Artificial Sequence
  Synthetic
cacggaguacagaggaga

SEQ ID NO: 481712 - RNA, 19 nt, Artificial Sequence
  Synthetic
acacggaguacagaggaga

SEQ ID NO: 481713 - RNA, 20 nt, Artificial Sequence
  Synthetic
gacacggaguacagaggaga

SEQ ID NO: 481714 - RNA, 21 nt, Artificial Sequence
  Synthetic
ggacacggaguacagaggaga

SEQ ID NO: 481715 - RNA, 22 nt, Artificial Sequence
  Synthetic
gggacacggaguacagaggaga

SEQ ID NO: 481716 - RNA, 23 nt, Artificial Sequence
  Synthetic
ugggacacggaguacagaggaga

SEQ ID NO: 481717 - RNA, 24 nt, Artificial Sequence
  Synthetic
cugggacacggaguacagaggaga

SEQ ID NO: 481718 - RNA, 18 nt, Artificial Sequence
  Synthetic
acagcaaaagagaggaga

SEQ ID NO: 481719 - RNA, 19 nt, Artificial Sequence
  Synthetic
aacagcaaaagagaggaga

SEQ ID NO: 481720 - RNA, 20 nt, Artificial Sequence
  Synthetic
aaacagcaaaagagaggaga

SEQ ID NO: 481721 - RNA, 21 nt, Artificial Sequence
  Synthetic
caaacagcaaaagagaggaga

SEQ ID NO: 481722 - RNA, 22 nt, Artificial Sequence
  Synthetic
gcaaacagcaaaagagaggaga

SEQ ID NO: 481723 - RNA, 23 nt, Artificial Sequence
  Synthetic
agcaaacagcaaaagagaggaga

SEQ ID NO: 481724 - RNA, 24 nt, Artificial Sequence
  Synthetic
aagcaaacagcaaaagagaggaga

SEQ ID NO: 481725 - RNA, 18 nt, Artificial Sequence
  Synthetic
uugcuuaaggagaggaga

SEQ ID NO: 481726 - RNA, 19 nt, Artificial Sequence
  Synthetic
uuugcuuaaggagaggaga

SEQ ID NO: 481727 - RNA, 20 nt, Artificial Sequence
  Synthetic
uuuugcuuaaggagaggaga

SEQ ID NO: 481728 - RNA, 21 nt, Artificial Sequence
  Synthetic
cuuuugcuuaaggagaggaga

SEQ ID NO: 481729 - RNA, 22 nt, Artificial Sequence
  Synthetic
acuuuugcuuaaggagaggaga

SEQ ID NO: 481730 - RNA, 23 nt, Artificial Sequence
  Synthetic
uacuuuugcuuaaggagaggaga

SEQ ID NO: 481731 - RNA, 24 nt, Artificial Sequence
  Synthetic
uuacuuuugcuuaaggagaggaga

SEQ ID NO: 481732 - RNA, 18 nt, Artificial Sequence
  Synthetic
cuaucaccuaggaggaga

SEQ ID NO: 481733 - RNA, 19 nt, Artificial Sequence
  Synthetic
gcuaucaccuaggaggaga

SEQ ID NO: 481734 - RNA, 20 nt, Artificial Sequence
  Synthetic
ugcuaucaccuaggaggaga

SEQ ID NO: 481735 - RNA, 21 nt, Artificial Sequence
  Synthetic
augcuaucaccuaggaggaga

SEQ ID NO: 481736 - RNA, 22 nt, Artificial Sequence
  Synthetic
gaugcuaucaccuaggaggaga

SEQ ID NO: 481737 - RNA, 23 nt, Artificial Sequence
  Synthetic
ggaugcuaucaccuaggaggaga

SEQ ID NO: 481738 - RNA, 24 nt, Artificial Sequence
  Synthetic
uggaugcuaucaccuaggaggaga

SEQ ID NO: 481739 - RNA, 18 nt, Artificial Sequence
  Synthetic
agagaugccgggaggaga

SEQ ID NO: 481740 - RNA, 19 nt, Artificial Sequence
  Synthetic
aagagaugccgggaggaga

SEQ ID NO: 481741 - RNA, 20 nt, Artificial Sequence
  Synthetic
aaagagaugccgggaggaga

SEQ ID NO: 481742 - RNA, 21 nt, Artificial Sequence
  Synthetic
aaaagagaugccgggaggaga

SEQ ID NO: 481743 - RNA, 22 nt, Artificial Sequence
  Synthetic
uaaaagagaugccgggaggaga

SEQ ID NO: 481744 - RNA, 23 nt, Artificial Sequence
  Synthetic
uuaaaagagaugccgggaggaga

SEQ ID NO: 481745 - RNA, 24 nt, Artificial Sequence
  Synthetic
uuuaaaagagaugccgggaggaga

SEQ ID NO: 481746 - RNA, 18 nt, Artificial Sequence
  Synthetic
ggaggggaggggaggaga

SEQ ID NO: 481747 - RNA, 19 nt, Artificial Sequence
  Synthetic
gggaggggaggggaggaga

SEQ ID NO: 481748 - RNA, 20 nt, Artificial Sequence
  Synthetic
ggggaggggaggggaggaga

SEQ ID NO: 481749 - RNA, 21 nt, Artificial Sequence
  Synthetic
aggggaggggaggggaggaga

SEQ ID NO: 481750 - RNA, 22 nt, Artificial Sequence
  Synthetic
gaggggaggggaggggaggaga

SEQ ID NO: 481751 - RNA, 23 nt, Artificial Sequence
  Synthetic
ggaggggaggggaggggaggaga

SEQ ID NO: 481752 - RNA, 24 nt, Artificial Sequence
  Synthetic
gggaggggaggggaggggaggaga

SEQ ID NO: 481753 - RNA, 18 nt, Artificial Sequence
  Synthetic
gugaaaagcaauaggaga

SEQ ID NO: 481754 - RNA, 19 nt, Artificial Sequence
  Synthetic
agugaaaagcaauaggaga

SEQ ID NO: 481755 - RNA, 20 nt, Artificial Sequence
  Synthetic
cagugaaaagcaauaggaga

SEQ ID NO: 481756 - RNA, 21 nt, Artificial Sequence
  Synthetic
acagugaaaagcaauaggaga

SEQ ID NO: 481757 - RNA, 22 nt, Artificial Sequence
  Synthetic
aacagugaaaagcaauaggaga

SEQ ID NO: 481758 - RNA, 23 nt, Artificial Sequence
  Synthetic
aaacagugaaaagcaauaggaga

SEQ ID NO: 481759 - RNA, 24 nt, Artificial Sequence
  Synthetic
gaaacagugaaaagcaauaggaga

SEQ ID NO: 481760 - RNA, 18 nt, Artificial Sequence
  Synthetic
gugacagauaauaggaga

SEQ ID NO: 481761 - RNA, 19 nt, Artificial Sequence
  Synthetic
ugugacagauaauaggaga

SEQ ID NO: 481762 - RNA, 20 nt, Artificial Sequence
  Synthetic
cugugacagauaauaggaga

SEQ ID NO: 481763 - RNA, 21 nt, Artificial Sequence
  Synthetic
ucugugacagauaauaggaga

SEQ ID NO: 481764 - RNA, 22 nt, Artificial Sequence
  Synthetic
uucugugacagauaauaggaga

SEQ ID NO: 481765 - RNA, 23 nt, Artificial Sequence
  Synthetic
guucugugacagauaauaggaga

SEQ ID NO: 481766 - RNA, 24 nt, Artificial Sequence
  Synthetic
uguucugugacagauaauaggaga

SEQ ID NO: 481767 - RNA, 18 nt, Artificial Sequence
  Synthetic
ucacuugagccuaggaga

SEQ ID NO: 481768 - RNA, 19 nt, Artificial Sequence
  Synthetic
aucacuugagccuaggaga

SEQ ID NO: 481769 - RNA, 20 nt, Artificial Sequence
  Synthetic
gaucacuugagccuaggaga

SEQ ID NO: 481770 - RNA, 21 nt, Artificial Sequence
  Synthetic
agaucacuugagccuaggaga

SEQ ID NO: 481771 - RNA, 22 nt, Artificial Sequence
  Synthetic
cagaucacuugagccuaggaga

SEQ ID NO: 481772 - RNA, 23 nt, Artificial Sequence
  Synthetic
gcagaucacuugagccuaggaga

SEQ ID NO: 481773 - RNA, 24 nt, Artificial Sequence
  Synthetic
ggcagaucacuugagccuaggaga

SEQ ID NO: 481774 - RNA, 18 nt, Artificial Sequence
  Synthetic
cagauuguuccuaggaga

SEQ ID NO: 481775 - RNA, 19 nt, Artificial Sequence
  Synthetic
acagauuguuccuaggaga

SEQ ID NO: 481776 - RNA, 20 nt, Artificial Sequence
  Synthetic
gacagauuguuccuaggaga

SEQ ID NO: 481777 - RNA, 21 nt, Artificial Sequence
  Synthetic
agacagauuguuccuaggaga

SEQ ID NO: 481778 - RNA, 22 nt, Artificial Sequence
  Synthetic
gagacagauuguuccuaggaga

SEQ ID NO: 481779 - RNA, 23 nt, Artificial Sequence
  Synthetic
agagacagauuguuccuaggaga

SEQ ID NO: 481780 - RNA, 24 nt, Artificial Sequence
  Synthetic
gagagacagauuguuccuaggaga

SEQ ID NO: 481781 - RNA, 18 nt, Artificial Sequence
  Synthetic
ggcaaugguauuaggaga

SEQ ID NO: 481782 - RNA, 19 nt, Artificial Sequence
  Synthetic
aggcaaugguauuaggaga

SEQ ID NO: 481783 - RNA, 20 nt, Artificial Sequence
  Synthetic
aaggcaaugguauuaggaga

SEQ ID NO: 481784 - RNA, 21 nt, Artificial Sequence
  Synthetic
uaaggcaaugguauuaggaga

SEQ ID NO: 481785 - RNA, 22 nt, Artificial Sequence
  Synthetic
cuaaggcaaugguauuaggaga

SEQ ID NO: 481786 - RNA, 23 nt, Artificial Sequence
  Synthetic
ccuaaggcaaugguauuaggaga

SEQ ID NO: 481787 - RNA, 24 nt, Artificial Sequence
  Synthetic
accuaaggcaaugguauuaggaga

SEQ ID NO: 481788 - RNA, 18 nt, Artificial Sequence
  Synthetic
caaaauucagaagggaga

SEQ ID NO: 481789 - RNA, 19 nt, Artificial Sequence
  Synthetic
acaaaauucagaagggaga

SEQ ID NO: 481790 - RNA, 20 nt, Artificial Sequence
  Synthetic
gacaaaauucagaagggaga

SEQ ID NO: 481791 - RNA, 21 nt, Artificial Sequence
  Synthetic
agacaaaauucagaagggaga

SEQ ID NO: 481792 - RNA, 22 nt, Artificial Sequence
  Synthetic
aagacaaaauucagaagggaga

SEQ ID NO: 481793 - RNA, 23 nt, Artificial Sequence
  Synthetic
uaagacaaaauucagaagggaga

SEQ ID NO: 481794 - RNA, 24 nt, Artificial Sequence
  Synthetic
cuaagacaaaauucagaagggaga

SEQ ID NO: 481795 - RNA, 18 nt, Artificial Sequence
  Synthetic
aaccaagauuaagggaga

SEQ ID NO: 481796 - RNA, 19 nt, Artificial Sequence
  Synthetic
uaaccaagauuaagggaga

SEQ ID NO: 481797 - RNA, 20 nt, Artificial Sequence
  Synthetic
uuaaccaagauuaagggaga

SEQ ID NO: 481798 - RNA, 21 nt, Artificial Sequence
  Synthetic
auuaaccaagauuaagggaga

SEQ ID NO: 481799 - RNA, 22 nt, Artificial Sequence
  Synthetic
cauuaaccaagauuaagggaga

SEQ ID NO: 481800 - RNA, 23 nt, Artificial Sequence
  Synthetic
acauuaaccaagauuaagggaga

SEQ ID NO: 481801 - RNA, 24 nt, Artificial Sequence
  Synthetic
gacauuaaccaagauuaagggaga

SEQ ID NO: 481802 - RNA, 18 nt, Artificial Sequence
  Synthetic
gugacagagacagggaga

SEQ ID NO: 481803 - RNA, 19 nt, Artificial Sequence
  Synthetic
agugacagagacagggaga

SEQ ID NO: 481804 - RNA, 20 nt, Artificial Sequence
  Synthetic
gagugacagagacagggaga

SEQ ID NO: 481805 - RNA, 21 nt, Artificial Sequence
  Synthetic
agagugacagagacagggaga

SEQ ID NO: 481806 - RNA, 22 nt, Artificial Sequence
  Synthetic
gagagugacagagacagggaga

SEQ ID NO: 481807 - RNA, 23 nt, Artificial Sequence
  Synthetic
ggagagugacagagacagggaga

SEQ ID NO: 481808 - RNA, 24 nt, Artificial Sequence
  Synthetic
aggagagugacagagacagggaga

SEQ ID NO: 481809 - RNA, 18 nt, Artificial Sequence
  Synthetic
ugcucugucccagggaga

SEQ ID NO: 481810 - RNA, 19 nt, Artificial Sequence
  Synthetic
gugcucugucccagggaga

SEQ ID NO: 481811 - RNA, 20 nt, Artificial Sequence
  Synthetic
ggugcucugucccagggaga

SEQ ID NO: 481812 - RNA, 21 nt, Artificial Sequence
  Synthetic
uggugcucugucccagggaga

SEQ ID NO: 481813 - RNA, 22 nt, Artificial Sequence
  Synthetic
guggugcucugucccagggaga

SEQ ID NO: 481814 - RNA, 23 nt, Artificial Sequence
  Synthetic
cguggugcucugucccagggaga

SEQ ID NO: 481815 - RNA, 24 nt, Artificial Sequence
  Synthetic
ccguggugcucugucccagggaga

SEQ ID NO: 481816 - RNA, 18 nt, Artificial Sequence
  Synthetic
agguggugcagagggaga

SEQ ID NO: 481817 - RNA, 19 nt, Artificial Sequence
  Synthetic
gagguggugcagagggaga

SEQ ID NO: 481818 - RNA, 20 nt, Artificial Sequence
  Synthetic
ggagguggugcagagggaga

SEQ ID NO: 481819 - RNA, 21 nt, Artificial Sequence
  Synthetic
aggagguggugcagagggaga

SEQ ID NO: 481820 - RNA, 22 nt, Artificial Sequence
  Synthetic
aaggagguggugcagagggaga

SEQ ID NO: 481821 - RNA, 23 nt, Artificial Sequence
  Synthetic
aaaggagguggugcagagggaga

SEQ ID NO: 481822 - RNA, 24 nt, Artificial Sequence
  Synthetic
uaaaggagguggugcagagggaga

SEQ ID NO: 481823 - RNA, 18 nt, Artificial Sequence
  Synthetic
gagagagagagagggaga

SEQ ID NO: 481824 - RNA, 19 nt, Artificial Sequence
  Synthetic
agagagagagagagggaga

SEQ ID NO: 481825 - RNA, 20 nt, Artificial Sequence
  Synthetic
gagagagagagagagggaga

SEQ ID NO: 481826 - RNA, 21 nt, Artificial Sequence
  Synthetic
agagagagagagagagggaga

SEQ ID NO: 481827 - RNA, 22 nt, Artificial Sequence
  Synthetic
gagagagagagagagagggaga

SEQ ID NO: 481828 - RNA, 23 nt, Artificial Sequence
  Synthetic
agagagagagagagagagggaga

SEQ ID NO: 481829 - RNA, 24 nt, Artificial Sequence
  Synthetic
gagagagagagagagagagggaga

SEQ ID NO: 481830 - RNA, 18 nt, Artificial Sequence
  Synthetic
gagagggagagagggaga

SEQ ID NO: 481831 - RNA, 19 nt, Artificial Sequence
  Synthetic
agagagggagagagggaga

SEQ ID NO: 481832 - RNA, 20 nt, Artificial Sequence
  Synthetic
gagagagggagagagggaga

SEQ ID NO: 481833 - RNA, 21 nt, Artificial Sequence
  Synthetic
agagagagggagagagggaga

SEQ ID NO: 481834 - RNA, 22 nt, Artificial Sequence
  Synthetic
gagagagagggagagagggaga

SEQ ID NO: 481835 - RNA, 23 nt, Artificial Sequence
  Synthetic
agagagagagggagagagggaga

SEQ ID NO: 481836 - RNA, 24 nt, Artificial Sequence
  Synthetic
gagagagagagggagagagggaga

SEQ ID NO: 481837 - RNA, 21 nt, Artificial Sequence
  Synthetic
ggagagagggagagagggaga

SEQ ID NO: 481838 - RNA, 22 nt, Artificial Sequence
  Synthetic
gggagagagggagagagggaga

SEQ ID NO: 481839 - RNA, 23 nt, Artificial Sequence
  Synthetic
agggagagagggagagagggaga

SEQ ID NO: 481840 - RNA, 24 nt, Artificial Sequence
  Synthetic
gagggagagagggagagagggaga

SEQ ID NO: 481841 - RNA, 18 nt, Artificial Sequence
  Synthetic
gagacagggagagggaga

SEQ ID NO: 481842 - RNA, 19 nt, Artificial Sequence
  Synthetic
agagacagggagagggaga

SEQ ID NO: 481843 - RNA, 20 nt, Artificial Sequence
  Synthetic
cagagacagggagagggaga

SEQ ID NO: 481844 - RNA, 21 nt, Artificial Sequence
  Synthetic
acagagacagggagagggaga

SEQ ID NO: 481845 - RNA, 22 nt, Artificial Sequence
  Synthetic
gacagagacagggagagggaga

SEQ ID NO: 481846 - RNA, 23 nt, Artificial Sequence
  Synthetic
ugacagagacagggagagggaga

SEQ ID NO: 481847 - RNA, 24 nt, Artificial Sequence
  Synthetic
gugacagagacagggagagggaga

SEQ ID NO: 481848 - RNA, 18 nt, Artificial Sequence
  Synthetic
gagagagagggagggaga

SEQ ID NO: 481849 - RNA, 19 nt, Artificial Sequence
  Synthetic
agagagagagggagggaga

SEQ ID NO: 481850 - RNA, 20 nt, Artificial Sequence
  Synthetic
gagagagagagggagggaga

SEQ ID NO: 481851 - RNA, 21 nt, Artificial Sequence
  Synthetic
agagagagagagggagggaga

SEQ ID NO: 481852 - RNA, 22 nt, Artificial Sequence
  Synthetic
gagagagagagagggagggaga

SEQ ID NO: 481853 - RNA, 23 nt, Artificial Sequence
  Synthetic
agagagagagagagggagggaga

SEQ ID NO: 481854 - RNA, 24 nt, Artificial Sequence
  Synthetic
gagagagagagagagggagggaga

SEQ ID NO: 481855 - RNA, 18 nt, Artificial Sequence
  Synthetic
agggaggagggagggaga

SEQ ID NO: 481856 - RNA, 19 nt, Artificial Sequence
  Synthetic
aagggaggagggagggaga

SEQ ID NO: 481857 - RNA, 20 nt, Artificial Sequence
  Synthetic
aaagggaggagggagggaga

SEQ ID NO: 481858 - RNA, 21 nt, Artificial Sequence
  Synthetic
gaaagggaggagggagggaga

SEQ ID NO: 481859 - RNA, 22 nt, Artificial Sequence
  Synthetic
ggaaagggaggagggagggaga

SEQ ID NO: 481860 - RNA, 23 nt, Artificial Sequence
  Synthetic
uggaaagggaggagggagggaga

SEQ ID NO: 481861 - RNA, 24 nt, Artificial Sequence
  Synthetic
auggaaagggaggagggagggaga

SEQ ID NO: 481862 - RNA, 18 nt, Artificial Sequence
  Synthetic
gaaaaagaaauagggaga

SEQ ID NO: 481863 - RNA, 19 nt, Artificial Sequence
  Synthetic
agaaaaagaaauagggaga

SEQ ID NO: 481864 - RNA, 20 nt, Artificial Sequence
  Synthetic
gagaaaaagaaauagggaga

SEQ ID NO: 481865 - RNA, 21 nt, Artificial Sequence
  Synthetic
agagaaaaagaaauagggaga

SEQ ID NO: 481866 - RNA, 22 nt, Artificial Sequence
  Synthetic
aagagaaaaagaaauagggaga

SEQ ID NO: 481867 - RNA, 23 nt, Artificial Sequence
  Synthetic
gaagagaaaaagaaauagggaga

SEQ ID NO: 481868 - RNA, 24 nt, Artificial Sequence
  Synthetic
ggaagagaaaaagaaauagggaga

SEQ ID NO: 481869 - RNA, 18 nt, Artificial Sequence
  Synthetic
gaaauaggaguagggaga

SEQ ID NO: 481870 - RNA, 19 nt, Artificial Sequence
  Synthetic
agaaauaggaguagggaga

SEQ ID NO: 481871 - RNA, 20 nt, Artificial Sequence
  Synthetic
cagaaauaggaguagggaga

SEQ ID NO: 481872 - RNA, 21 nt, Artificial Sequence
  Synthetic
ucagaaauaggaguagggaga

SEQ ID NO: 481873 - RNA, 22 nt, Artificial Sequence
  Synthetic
aucagaaauaggaguagggaga

SEQ ID NO: 481874 - RNA, 23 nt, Artificial Sequence
  Synthetic
gaucagaaauaggaguagggaga

SEQ ID NO: 481875 - RNA, 24 nt, Artificial Sequence
  Synthetic
agaucagaaauaggaguagggaga

SEQ ID NO: 481876 - RNA, 18 nt, Artificial Sequence
  Synthetic
cauuggggaguagggaga

SEQ ID NO: 481877 - RNA, 19 nt, Artificial Sequence
  Synthetic
acauuggggaguagggaga

SEQ ID NO: 481878 - RNA, 20 nt, Artificial Sequence
  Synthetic
uacauuggggaguagggaga

SEQ ID NO: 481879 - RNA, 21 nt, Artificial Sequence
  Synthetic
auacauuggggaguagggaga

SEQ ID NO: 481880 - RNA, 22 nt, Artificial Sequence
  Synthetic
gauacauuggggaguagggaga

SEQ ID NO: 481881 - RNA, 23 nt, Artificial Sequence
  Synthetic
ggauacauuggggaguagggaga

SEQ ID NO: 481882 - RNA, 24 nt, Artificial Sequence
  Synthetic
aggauacauuggggaguagggaga

SEQ ID NO: 481883 - RNA, 18 nt, Artificial Sequence
  Synthetic
uguaaguucuuagggaga

SEQ ID NO: 481884 - RNA, 19 nt, Artificial Sequence
  Synthetic
guguaaguucuuagggaga

SEQ ID NO: 481885 - RNA, 20 nt, Artificial Sequence
  Synthetic
gguguaaguucuuagggaga

SEQ ID NO: 481886 - RNA, 21 nt, Artificial Sequence
  Synthetic
agguguaaguucuuagggaga

SEQ ID NO: 481887 - RNA, 22 nt, Artificial Sequence
  Synthetic
uagguguaaguucuuagggaga

SEQ ID NO: 481888 - RNA, 23 nt, Artificial Sequence
  Synthetic
auagguguaaguucuuagggaga

SEQ ID NO: 481889 - RNA, 24 nt, Artificial Sequence
  Synthetic
aauagguguaaguucuuagggaga

SEQ ID NO: 481890 - RNA, 18 nt, Artificial Sequence
  Synthetic
uaggguggccaggggaga

SEQ ID NO: 481891 - RNA, 19 nt, Artificial Sequence
  Synthetic
uuaggguggccaggggaga

SEQ ID NO: 481892 - RNA, 20 nt, Artificial Sequence
  Synthetic
auuaggguggccaggggaga

SEQ ID NO: 481893 - RNA, 21 nt, Artificial Sequence
  Synthetic
uauuaggguggccaggggaga

SEQ ID NO: 481894 - RNA, 22 nt, Artificial Sequence
  Synthetic
cuauuaggguggccaggggaga

SEQ ID NO: 481895 - RNA, 23 nt, Artificial Sequence
  Synthetic
acuauuaggguggccaggggaga

SEQ ID NO: 481896 - RNA, 24 nt, Artificial Sequence
  Synthetic
gacuauuaggguggccaggggaga

SEQ ID NO: 481897 - RNA, 18 nt, Artificial Sequence
  Synthetic
aucuggagcucggggaga

SEQ ID NO: 481898 - RNA, 19 nt, Artificial Sequence
  Synthetic
gaucuggagcucggggaga

SEQ ID NO: 481899 - RNA, 20 nt, Artificial Sequence
  Synthetic
agaucuggagcucggggaga

SEQ ID NO: 481900 - RNA, 21 nt, Artificial Sequence
  Synthetic
gagaucuggagcucggggaga

SEQ ID NO: 481901 - RNA, 22 nt, Artificial Sequence
  Synthetic
agagaucuggagcucggggaga

SEQ ID NO: 481902 - RNA, 23 nt, Artificial Sequence
  Synthetic
aagagaucuggagcucggggaga

SEQ ID NO: 481903 - RNA, 24 nt, Artificial Sequence
  Synthetic
caagagaucuggagcucggggaga

SEQ ID NO: 481904 - RNA, 18 nt, Artificial Sequence
  Synthetic
gggggaggaagggggaga

SEQ ID NO: 481905 - RNA, 19 nt, Artificial Sequence
  Synthetic
ugggggaggaagggggaga

SEQ ID NO: 481906 - RNA, 20 nt, Artificial Sequence
  Synthetic
augggggaggaagggggaga

SEQ ID NO: 481907 - RNA, 21 nt, Artificial Sequence
  Synthetic
gaugggggaggaagggggaga

SEQ ID NO: 481908 - RNA, 22 nt, Artificial Sequence
  Synthetic
agaugggggaggaagggggaga

SEQ ID NO: 481909 - RNA, 23 nt, Artificial Sequence
  Synthetic
uagaugggggaggaagggggaga

SEQ ID NO: 481910 - RNA, 24 nt, Artificial Sequence
  Synthetic
guagaugggggaggaagggggaga

SEQ ID NO: 481911 - RNA, 18 nt, Artificial Sequence
  Synthetic
agauugguaauggggaga

SEQ ID NO: 481912 - RNA, 19 nt, Artificial Sequence
  Synthetic
gagauugguaauggggaga

SEQ ID NO: 481913 - RNA, 20 nt, Artificial Sequence
  Synthetic
agagauugguaauggggaga

SEQ ID NO: 481914 - RNA, 21 nt, Artificial Sequence
  Synthetic
gagagauugguaauggggaga

SEQ ID NO: 481915 - RNA, 22 nt, Artificial Sequence
  Synthetic
ugagagauugguaauggggaga

SEQ ID NO: 481916 - RNA, 23 nt, Artificial Sequence
  Synthetic
gugagagauugguaauggggaga

SEQ ID NO: 481917 - RNA, 24 nt, Artificial Sequence
  Synthetic
agugagagauugguaauggggaga

SEQ ID NO: 481918 - RNA, 18 nt, Artificial Sequence
  Synthetic
gggggaaggcuggggaga

SEQ ID NO: 481919 - RNA, 19 nt, Artificial Sequence
  Synthetic
cgggggaaggcuggggaga

SEQ ID NO: 481920 - RNA, 20 nt, Artificial Sequence
  Synthetic
gcgggggaaggcuggggaga

SEQ ID NO: 481921 - RNA, 21 nt, Artificial Sequence
  Synthetic
agcgggggaaggcuggggaga

SEQ ID NO: 481922 - RNA, 22 nt, Artificial Sequence
  Synthetic
aagcgggggaaggcuggggaga

SEQ ID NO: 481923 - RNA, 23 nt, Artificial Sequence
  Synthetic
gaagcgggggaaggcuggggaga

SEQ ID NO: 481924 - RNA, 24 nt, Artificial Sequence
  Synthetic
agaagcgggggaaggcuggggaga

SEQ ID NO: 481925 - RNA, 18 nt, Artificial Sequence
  Synthetic
aaagcuauucuggggaga

SEQ ID NO: 481926 - RNA, 19 nt, Artificial Sequence
  Synthetic
uaaagcuauucuggggaga

SEQ ID NO: 481927 - RNA, 20 nt, Artificial Sequence
  Synthetic
guaaagcuauucuggggaga

SEQ ID NO: 481928 - RNA, 21 nt, Artificial Sequence
  Synthetic
uguaaagcuauucuggggaga

SEQ ID NO: 481929 - RNA, 22 nt, Artificial Sequence
  Synthetic
uuguaaagcuauucuggggaga

SEQ ID NO: 481930 - RNA, 23 nt, Artificial Sequence
  Synthetic
uuuguaaagcuauucuggggaga

SEQ ID NO: 481931 - RNA, 24 nt, Artificial Sequence
  Synthetic
guuuguaaagcuauucuggggaga

SEQ ID NO: 481932 - RNA, 18 nt, Artificial Sequence
  Synthetic
auccucgggguggggaga

SEQ ID NO: 481933 - RNA, 19 nt, Artificial Sequence
  Synthetic
cauccucgggguggggaga

SEQ ID NO: 481934 - RNA, 20 nt, Artificial Sequence
  Synthetic
acauccucgggguggggaga

SEQ ID NO: 481935 - RNA, 21 nt, Artificial Sequence
  Synthetic
aacauccucgggguggggaga

SEQ ID NO: 481936 - RNA, 22 nt, Artificial Sequence
  Synthetic
uaacauccucgggguggggaga

SEQ ID NO: 481937 - RNA, 23 nt, Artificial Sequence
  Synthetic
auaacauccucgggguggggaga

SEQ ID NO: 481938 - RNA, 24 nt, Artificial Sequence
  Synthetic
uauaacauccucgggguggggaga

SEQ ID NO: 481939 - RNA, 18 nt, Artificial Sequence
  Synthetic
acccucauguuggggaga

SEQ ID NO: 481940 - RNA, 19 nt, Artificial Sequence
  Synthetic
gacccucauguuggggaga

SEQ ID NO: 481941 - RNA, 20 nt, Artificial Sequence
  Synthetic
agacccucauguuggggaga

SEQ ID NO: 481942 - RNA, 21 nt, Artificial Sequence
  Synthetic
gagacccucauguuggggaga

SEQ ID NO: 481943 - RNA, 22 nt, Artificial Sequence
  Synthetic
ugagacccucauguuggggaga

SEQ ID NO: 481944 - RNA, 23 nt, Artificial Sequence
  Synthetic
augagacccucauguuggggaga

SEQ ID NO: 481945 - RNA, 24 nt, Artificial Sequence
  Synthetic
gaugagacccucauguuggggaga

SEQ ID NO: 481946 - RNA, 18 nt, Artificial Sequence
  Synthetic
uuuaguaaaaaugggaga

SEQ ID NO: 481947 - RNA, 19 nt, Artificial Sequence
  Synthetic
cuuuaguaaaaaugggaga

SEQ ID NO: 481948 - RNA, 20 nt, Artificial Sequence
  Synthetic
ucuuuaguaaaaaugggaga

SEQ ID NO: 481949 - RNA, 21 nt, Artificial Sequence
  Synthetic
aucuuuaguaaaaaugggaga

SEQ ID NO: 481950 - RNA, 22 nt, Artificial Sequence
  Synthetic
caucuuuaguaaaaaugggaga

SEQ ID NO: 481951 - RNA, 23 nt, Artificial Sequence
  Synthetic
ccaucuuuaguaaaaaugggaga

SEQ ID NO: 481952 - RNA, 24 nt, Artificial Sequence
  Synthetic
uccaucuuuaguaaaaaugggaga

SEQ ID NO: 481953 - RNA, 18 nt, Artificial Sequence
  Synthetic
acauacucauaugggaga

SEQ ID NO: 481954 - RNA, 19 nt, Artificial Sequence
  Synthetic
uacauacucauaugggaga

SEQ ID NO: 481955 - RNA, 20 nt, Artificial Sequence
  Synthetic
guacauacucauaugggaga

SEQ ID NO: 481956 - RNA, 21 nt, Artificial Sequence
  Synthetic
gguacauacucauaugggaga

SEQ ID NO: 481957 - RNA, 22 nt, Artificial Sequence
  Synthetic
ggguacauacucauaugggaga

SEQ ID NO: 481958 - RNA, 23 nt, Artificial Sequence
  Synthetic
aggguacauacucauaugggaga

SEQ ID NO: 481959 - RNA, 24 nt, Artificial Sequence
  Synthetic
aaggguacauacucauaugggaga

SEQ ID NO: 481960 - RNA, 18 nt, Artificial Sequence
  Synthetic
ucacuugaaccugggaga

SEQ ID NO: 481961 - RNA, 19 nt, Artificial Sequence
  Synthetic
aucacuugaaccugggaga

SEQ ID NO: 481962 - RNA, 20 nt, Artificial Sequence
  Synthetic
aaucacuugaaccugggaga

SEQ ID NO: 481963 - RNA, 21 nt, Artificial Sequence
  Synthetic
gaaucacuugaaccugggaga

SEQ ID NO: 481964 - RNA, 22 nt, Artificial Sequence
  Synthetic
agaaucacuugaaccugggaga

SEQ ID NO: 481965 - RNA, 23 nt, Artificial Sequence
  Synthetic
gagaaucacuugaaccugggaga

SEQ ID NO: 481966 - RNA, 24 nt, Artificial Sequence
  Synthetic
ggagaaucacuugaaccugggaga

SEQ ID NO: 481967 - RNA, 18 nt, Artificial Sequence
  Synthetic
aacagugcugcugggaga

SEQ ID NO: 481968 - RNA, 19 nt, Artificial Sequence
  Synthetic
aaacagugcugcugggaga

SEQ ID NO: 481969 - RNA, 20 nt, Artificial Sequence
  Synthetic
aaaacagugcugcugggaga

SEQ ID NO: 481970 - RNA, 21 nt, Artificial Sequence
  Synthetic
gaaaacagugcugcugggaga

SEQ ID NO: 481971 - RNA, 22 nt, Artificial Sequence
  Synthetic
ugaaaacagugcugcugggaga

SEQ ID NO: 481972 - RNA, 23 nt, Artificial Sequence
  Synthetic
augaaaacagugcugcugggaga

SEQ ID NO: 481973 - RNA, 24 nt, Artificial Sequence
  Synthetic
uaugaaaacagugcugcugggaga

SEQ ID NO: 481974 - RNA, 18 nt, Artificial Sequence
  Synthetic
caggggagaagugggaga

SEQ ID NO: 481975 - RNA, 19 nt, Artificial Sequence
  Synthetic
ccaggggagaagugggaga

SEQ ID NO: 481976 - RNA, 20 nt, Artificial Sequence
  Synthetic
gccaggggagaagugggaga

SEQ ID NO: 481977 - RNA, 21 nt, Artificial Sequence
  Synthetic
ggccaggggagaagugggaga

SEQ ID NO: 481978 - RNA, 22 nt, Artificial Sequence
  Synthetic
uggccaggggagaagugggaga

SEQ ID NO: 481979 - RNA, 23 nt, Artificial Sequence
  Synthetic
cuggccaggggagaagugggaga

SEQ ID NO: 481980 - RNA, 24 nt, Artificial Sequence
  Synthetic
gcuggccaggggagaagugggaga

SEQ ID NO: 481981 - RNA, 18 nt, Artificial Sequence
  Synthetic
agacacacuagugggaga

SEQ ID NO: 481982 - RNA, 19 nt, Artificial Sequence
  Synthetic
gagacacacuagugggaga

SEQ ID NO: 481983 - RNA, 20 nt, Artificial Sequence
  Synthetic
ugagacacacuagugggaga

SEQ ID NO: 481984 - RNA, 21 nt, Artificial Sequence
  Synthetic
augagacacacuagugggaga

SEQ ID NO: 481985 - RNA, 22 nt, Artificial Sequence
  Synthetic
caugagacacacuagugggaga

SEQ ID NO: 481986 - RNA, 23 nt, Artificial Sequence
  Synthetic
ucaugagacacacuagugggaga

SEQ ID NO: 481987 - RNA, 24 nt, Artificial Sequence
  Synthetic
gucaugagacacacuagugggaga

SEQ ID NO: 481988 - RNA, 18 nt, Artificial Sequence
  Synthetic
gaaagggauggugggaga

SEQ ID NO: 481989 - RNA, 19 nt, Artificial Sequence
  Synthetic
ggaaagggauggugggaga

SEQ ID NO: 481990 - RNA, 20 nt, Artificial Sequence
  Synthetic
gggaaagggauggugggaga

SEQ ID NO: 481991 - RNA, 21 nt, Artificial Sequence
  Synthetic
agggaaagggauggugggaga

SEQ ID NO: 481992 - RNA, 22 nt, Artificial Sequence
  Synthetic
aagggaaagggauggugggaga

SEQ ID NO: 481993 - RNA, 23 nt, Artificial Sequence
  Synthetic
aaagggaaagggauggugggaga

SEQ ID NO: 481994 - RNA, 24 nt, Artificial Sequence
  Synthetic
gaaagggaaagggauggugggaga

SEQ ID NO: 481995 - RNA, 18 nt, Artificial Sequence
  Synthetic
uggagauuuguugggaga

SEQ ID NO: 481996 - RNA, 19 nt, Artificial Sequence
  Synthetic
cuggagauuuguugggaga

SEQ ID NO: 481997 - RNA, 20 nt, Artificial Sequence
  Synthetic
gcuggagauuuguugggaga

SEQ ID NO: 481998 - RNA, 21 nt, Artificial Sequence
  Synthetic
ugcuggagauuuguugggaga

SEQ ID NO: 481999 - RNA, 22 nt, Artificial Sequence
  Synthetic
cugcuggagauuuguugggaga

SEQ ID NO: 482000 - RNA, 23 nt, Artificial Sequence
  Synthetic
ccugcuggagauuuguugggaga

SEQ ID NO: 482001 - RNA, 24 nt, Artificial Sequence
  Synthetic
accugcuggagauuuguugggaga

SEQ ID NO: 482002 - RNA, 18 nt, Artificial Sequence
  Synthetic
uuugaacaauuugggaga

SEQ ID NO: 482003 - RNA, 19 nt, Artificial Sequence
  Synthetic
cuuugaacaauuugggaga

SEQ ID NO: 482004 - RNA, 20 nt, Artificial Sequence
  Synthetic
ucuuugaacaauuugggaga

SEQ ID NO: 482005 - RNA, 21 nt, Artificial Sequence
  Synthetic
aucuuugaacaauuugggaga

SEQ ID NO: 482006 - RNA, 22 nt, Artificial Sequence
  Synthetic
aaucuuugaacaauuugggaga

SEQ ID NO: 482007 - RNA, 23 nt, Artificial Sequence
  Synthetic
uaaucuuugaacaauuugggaga

SEQ ID NO: 482008 - RNA, 24 nt, Artificial Sequence
  Synthetic
guaaucuuugaacaauuugggaga

SEQ ID NO: 482009 - RNA, 18 nt, Artificial Sequence
  Synthetic
agagccaugcaauggaga

SEQ ID NO: 482010 - RNA, 19 nt, Artificial Sequence
  Synthetic
cagagccaugcaauggaga

SEQ ID NO: 482011 - RNA, 20 nt, Artificial Sequence
  Synthetic
gcagagccaugcaauggaga

SEQ ID NO: 482012 - RNA, 21 nt, Artificial Sequence
  Synthetic
agcagagccaugcaauggaga

SEQ ID NO: 482013 - RNA, 22 nt, Artificial Sequence
  Synthetic
gagcagagccaugcaauggaga

SEQ ID NO: 482014 - RNA, 23 nt, Artificial Sequence
  Synthetic
ggagcagagccaugcaauggaga

SEQ ID NO: 482015 - RNA, 24 nt, Artificial Sequence
  Synthetic
gggagcagagccaugcaauggaga

SEQ ID NO: 482016 - RNA, 18 nt, Artificial Sequence
  Synthetic
uagaagguuccauggaga

SEQ ID NO: 482017 - RNA, 19 nt, Artificial Sequence
  Synthetic
auagaagguuccauggaga

SEQ ID NO: 482018 - RNA, 20 nt, Artificial Sequence
  Synthetic
cauagaagguuccauggaga

SEQ ID NO: 482019 - RNA, 21 nt, Artificial Sequence
  Synthetic
ucauagaagguuccauggaga

SEQ ID NO: 482020 - RNA, 22 nt, Artificial Sequence
  Synthetic
aucauagaagguuccauggaga

SEQ ID NO: 482021 - RNA, 23 nt, Artificial Sequence
  Synthetic
gaucauagaagguuccauggaga

SEQ ID NO: 482022 - RNA, 24 nt, Artificial Sequence
  Synthetic
ugaucauagaagguuccauggaga

SEQ ID NO: 482023 - RNA, 21 nt, Artificial Sequence
  Synthetic
guaauaaucacaucauggaga

SEQ ID NO: 482024 - RNA, 22 nt, Artificial Sequence
  Synthetic
gguaauaaucacaucauggaga

SEQ ID NO: 482025 - RNA, 23 nt, Artificial Sequence
  Synthetic
ggguaauaaucacaucauggaga

SEQ ID NO: 482026 - RNA, 24 nt, Artificial Sequence
  Synthetic
uggguaauaaucacaucauggaga

SEQ ID NO: 482027 - RNA, 18 nt, Artificial Sequence
  Synthetic
aaaaugauaauauggaga

SEQ ID NO: 482028 - RNA, 19 nt, Artificial Sequence
  Synthetic
uaaaaugauaauauggaga

SEQ ID NO: 482029 - RNA, 20 nt, Artificial Sequence
  Synthetic
uuaaaaugauaauauggaga

SEQ ID NO: 482030 - RNA, 21 nt, Artificial Sequence
  Synthetic
uuuaaaaugauaauauggaga

SEQ ID NO: 482031 - RNA, 22 nt, Artificial Sequence
  Synthetic
uuuuaaaaugauaauauggaga

SEQ ID NO: 482032 - RNA, 23 nt, Artificial Sequence
  Synthetic
auuuuaaaaugauaauauggaga

SEQ ID NO: 482033 - RNA, 24 nt, Artificial Sequence
  Synthetic
aauuuuaaaaugauaauauggaga

SEQ ID NO: 482034 - RNA, 18 nt, Artificial Sequence
  Synthetic
uauauauagauauggaga

SEQ ID NO: 482035 - RNA, 19 nt, Artificial Sequence
  Synthetic
auauauauagauauggaga

SEQ ID NO: 482036 - RNA, 20 nt, Artificial Sequence
  Synthetic
uauauauauagauauggaga

SEQ ID NO: 482037 - RNA, 21 nt, Artificial Sequence
  Synthetic
auauauauauagauauggaga

SEQ ID NO: 482038 - RNA, 22 nt, Artificial Sequence
  Synthetic
uauauauauauagauauggaga

SEQ ID NO: 482039 - RNA, 23 nt, Artificial Sequence
  Synthetic
cuauauauauauagauauggaga

SEQ ID NO: 482040 - RNA, 24 nt, Artificial Sequence
  Synthetic
ucuauauauauauagauauggaga

SEQ ID NO: 482041 - RNA, 18 nt, Artificial Sequence
  Synthetic
uuggcuagccacuggaga

SEQ ID NO: 482042 - RNA, 19 nt, Artificial Sequence
  Synthetic
auuggcuagccacuggaga

SEQ ID NO: 482043 - RNA, 20 nt, Artificial Sequence
  Synthetic
gauuggcuagccacuggaga

SEQ ID NO: 482044 - RNA, 21 nt, Artificial Sequence
  Synthetic
ugauuggcuagccacuggaga

SEQ ID NO: 482045 - RNA, 22 nt, Artificial Sequence
  Synthetic
uugauuggcuagccacuggaga

SEQ ID NO: 482046 - RNA, 23 nt, Artificial Sequence
  Synthetic
cuugauuggcuagccacuggaga

SEQ ID NO: 482047 - RNA, 24 nt, Artificial Sequence
  Synthetic
ucuugauuggcuagccacuggaga

SEQ ID NO: 482048 - RNA, 18 nt, Artificial Sequence
  Synthetic
ucaguggcagacuggaga

SEQ ID NO: 482049 - RNA, 19 nt, Artificial Sequence
  Synthetic
aucaguggcagacuggaga

SEQ ID NO: 482050 - RNA, 20 nt, Artificial Sequence
  Synthetic
caucaguggcagacuggaga

SEQ ID NO: 482051 - RNA, 21 nt, Artificial Sequence
  Synthetic
ccaucaguggcagacuggaga

SEQ ID NO: 482052 - RNA, 22 nt, Artificial Sequence
  Synthetic
cccaucaguggcagacuggaga

SEQ ID NO: 482053 - RNA, 23 nt, Artificial Sequence
  Synthetic
gcccaucaguggcagacuggaga

SEQ ID NO: 482054 - RNA, 24 nt, Artificial Sequence
  Synthetic
ugcccaucaguggcagacuggaga

SEQ ID NO: 482055 - RNA, 18 nt, Artificial Sequence
  Synthetic
aaaaugggagacuggaga

SEQ ID NO: 482056 - RNA, 19 nt, Artificial Sequence
  Synthetic
aaaaaugggagacuggaga

SEQ ID NO: 482057 - RNA, 20 nt, Artificial Sequence
  Synthetic
uaaaaaugggagacuggaga

SEQ ID NO: 482058 - RNA, 21 nt, Artificial Sequence
  Synthetic
guaaaaaugggagacuggaga

SEQ ID NO: 482059 - RNA, 22 nt, Artificial Sequence
  Synthetic
aguaaaaaugggagacuggaga

SEQ ID NO: 482060 - RNA, 23 nt, Artificial Sequence
  Synthetic
uaguaaaaaugggagacuggaga

SEQ ID NO: 482061 - RNA, 24 nt, Artificial Sequence
  Synthetic
uuaguaaaaaugggagacuggaga

SEQ ID NO: 482062 - RNA, 18 nt, Artificial Sequence
  Synthetic
cagguucauaccuggaga

SEQ ID NO: 482063 - RNA, 19 nt, Artificial Sequence
  Synthetic
gcagguucauaccuggaga

SEQ ID NO: 482064 - RNA, 20 nt, Artificial Sequence
  Synthetic
ugcagguucauaccuggaga

SEQ ID NO: 482065 - RNA, 21 nt, Artificial Sequence
  Synthetic
cugcagguucauaccuggaga

SEQ ID NO: 482066 - RNA, 22 nt, Artificial Sequence
  Synthetic
ccugcagguucauaccuggaga

SEQ ID NO: 482067 - RNA, 23 nt, Artificial Sequence
  Synthetic
uccugcagguucauaccuggaga

SEQ ID NO: 482068 - RNA, 24 nt, Artificial Sequence
  Synthetic
auccugcagguucauaccuggaga

SEQ ID NO: 482069 - RNA, 18 nt, Artificial Sequence
  Synthetic
guucuucuagccuggaga

SEQ ID NO: 482070 - RNA, 19 nt, Artificial Sequence
  Synthetic
uguucuucuagccuggaga

SEQ ID NO: 482071 - RNA, 20 nt, Artificial Sequence
  Synthetic
uuguucuucuagccuggaga

SEQ ID NO: 482072 - RNA, 21 nt, Artificial Sequence
  Synthetic
uuuguucuucuagccuggaga

SEQ ID NO: 482073 - RNA, 22 nt, Artificial Sequence
  Synthetic
uuuuguucuucuagccuggaga

SEQ ID NO: 482074 - RNA, 23 nt, Artificial Sequence
  Synthetic
cuuuuguucuucuagccuggaga

SEQ ID NO: 482075 - RNA, 24 nt, Artificial Sequence
  Synthetic
ucuuuuguucuucuagccuggaga

SEQ ID NO: 482076 - RNA, 18 nt, Artificial Sequence
  Synthetic
gugugggggagcuggaga

SEQ ID NO: 482077 - RNA, 19 nt, Artificial Sequence
  Synthetic
ugugugggggagcuggaga

SEQ ID NO: 482078 - RNA, 20 nt, Artificial Sequence
  Synthetic
uugugugggggagcuggaga

SEQ ID NO: 482079 - RNA, 21 nt, Artificial Sequence
  Synthetic
uuugugugggggagcuggaga

SEQ ID NO: 482080 - RNA, 22 nt, Artificial Sequence
  Synthetic
uuuugugugggggagcuggaga

SEQ ID NO: 482081 - RNA, 23 nt, Artificial Sequence
  Synthetic
uuuuugugugggggagcuggaga

SEQ ID NO: 482082 - RNA, 24 nt, Artificial Sequence
  Synthetic
cuuuuugugugggggagcuggaga

SEQ ID NO: 482083 - RNA, 18 nt, Artificial Sequence
  Synthetic
ggauucuggggcuggaga

SEQ ID NO: 482084 - RNA, 19 nt, Artificial Sequence
  Synthetic
uggauucuggggcuggaga

SEQ ID NO: 482085 - RNA, 20 nt, Artificial Sequence
  Synthetic
auggauucuggggcuggaga

SEQ ID NO: 482086 - RNA, 21 nt, Artificial Sequence
  Synthetic
cauggauucuggggcuggaga

SEQ ID NO: 482087 - RNA, 22 nt, Artificial Sequence
  Synthetic
ucauggauucuggggcuggaga

SEQ ID NO: 482088 - RNA, 23 nt, Artificial Sequence
  Synthetic
gucauggauucuggggcuggaga

SEQ ID NO: 482089 - RNA, 24 nt, Artificial Sequence
  Synthetic
ugucauggauucuggggcuggaga

SEQ ID NO: 482090 - RNA, 18 nt, Artificial Sequence
  Synthetic
aguguaaggaaguggaga

SEQ ID NO: 482091 - RNA, 19 nt, Artificial Sequence
  Synthetic
caguguaaggaaguggaga

SEQ ID NO: 482092 - RNA, 20 nt, Artificial Sequence
  Synthetic
gcaguguaaggaaguggaga

SEQ ID NO: 482093 - RNA, 21 nt, Artificial Sequence
  Synthetic
cgcaguguaaggaaguggaga

SEQ ID NO: 482094 - RNA, 22 nt, Artificial Sequence
  Synthetic
acgcaguguaaggaaguggaga

SEQ ID NO: 482095 - RNA, 23 nt, Artificial Sequence
  Synthetic
aacgcaguguaaggaaguggaga

SEQ ID NO: 482096 - RNA, 24 nt, Artificial Sequence
  Synthetic
aaacgcaguguaaggaaguggaga

SEQ ID NO: 482097 - RNA, 18 nt, Artificial Sequence
  Synthetic
agagggagagaguggaga

SEQ ID NO: 482098 - RNA, 19 nt, Artificial Sequence
  Synthetic
gagagggagagaguggaga

SEQ ID NO: 482099 - RNA, 20 nt, Artificial Sequence
  Synthetic
agagagggagagaguggaga

SEQ ID NO: 482100 - RNA, 21 nt, Artificial Sequence
  Synthetic
gagagagggagagaguggaga

SEQ ID NO: 482101 - RNA, 22 nt, Artificial Sequence
  Synthetic
ggagagagggagagaguggaga

SEQ ID NO: 482102 - RNA, 23 nt, Artificial Sequence
  Synthetic
gggagagagggagagaguggaga

SEQ ID NO: 482103 - RNA, 24 nt, Artificial Sequence
  Synthetic
agggagagagggagagaguggaga

SEQ ID NO: 482104 - RNA, 18 nt, Artificial Sequence
  Synthetic
cugaaagugauguggaga

SEQ ID NO: 482105 - RNA, 19 nt, Artificial Sequence
  Synthetic
ccugaaagugauguggaga

SEQ ID NO: 482106 - RNA, 20 nt, Artificial Sequence
  Synthetic
accugaaagugauguggaga

SEQ ID NO: 482107 - RNA, 21 nt, Artificial Sequence
  Synthetic
uaccugaaagugauguggaga

SEQ ID NO: 482108 - RNA, 22 nt, Artificial Sequence
  Synthetic
guaccugaaagugauguggaga

SEQ ID NO: 482109 - RNA, 23 nt, Artificial Sequence
  Synthetic
uguaccugaaagugauguggaga

SEQ ID NO: 482110 - RNA, 24 nt, Artificial Sequence
  Synthetic
guguaccugaaagugauguggaga

SEQ ID NO: 482111 - RNA, 18 nt, Artificial Sequence
  Synthetic
gguauggggguguggaga

SEQ ID NO: 482112 - RNA, 19 nt, Artificial Sequence
  Synthetic
ggguauggggguguggaga

SEQ ID NO: 482113 - RNA, 20 nt, Artificial Sequence
  Synthetic
uggguauggggguguggaga

SEQ ID NO: 482114 - RNA, 21 nt, Artificial Sequence
  Synthetic
guggguauggggguguggaga

SEQ ID NO: 482115 - RNA, 22 nt, Artificial Sequence
  Synthetic
gguggguauggggguguggaga

SEQ ID NO: 482116 - RNA, 23 nt, Artificial Sequence
  Synthetic
ugguggguauggggguguggaga

SEQ ID NO: 482117 - RNA, 24 nt, Artificial Sequence
  Synthetic
gugguggguauggggguguggaga

SEQ ID NO: 482118 - RNA, 18 nt, Artificial Sequence
  Synthetic
gacuuaaugcauuggaga

SEQ ID NO: 482119 - RNA, 19 nt, Artificial Sequence
  Synthetic
ggacuuaaugcauuggaga

SEQ ID NO: 482120 - RNA, 20 nt, Artificial Sequence
  Synthetic
aggacuuaaugcauuggaga

SEQ ID NO: 482121 - RNA, 21 nt, Artificial Sequence
  Synthetic
caggacuuaaugcauuggaga

SEQ ID NO: 482122 - RNA, 22 nt, Artificial Sequence
  Synthetic
acaggacuuaaugcauuggaga

SEQ ID NO: 482123 - RNA, 23 nt, Artificial Sequence
  Synthetic
cacaggacuuaaugcauuggaga

SEQ ID NO: 482124 - RNA, 24 nt, Artificial Sequence
  Synthetic
acacaggacuuaaugcauuggaga

SEQ ID NO: 482125 - RNA, 18 nt, Artificial Sequence
  Synthetic
caacugaacacuuggaga

SEQ ID NO: 482126 - RNA, 19 nt, Artificial Sequence
  Synthetic
acaacugaacacuuggaga

SEQ ID NO: 482127 - RNA, 20 nt, Artificial Sequence
  Synthetic
aacaacugaacacuuggaga

SEQ ID NO: 482128 - RNA, 21 nt, Artificial Sequence
  Synthetic
aaacaacugaacacuuggaga

SEQ ID NO: 482129 - RNA, 22 nt, Artificial Sequence
  Synthetic
aaaacaacugaacacuuggaga

SEQ ID NO: 482130 - RNA, 23 nt, Artificial Sequence
  Synthetic
caaaacaacugaacacuuggaga

SEQ ID NO: 482131 - RNA, 24 nt, Artificial Sequence
  Synthetic
ucaaaacaacugaacacuuggaga

SEQ ID NO: 482132 - RNA, 18 nt, Artificial Sequence
  Synthetic
gcagcacgaccuuggaga

SEQ ID NO: 482133 - RNA, 19 nt, Artificial Sequence
  Synthetic
ggcagcacgaccuuggaga

SEQ ID NO: 482134 - RNA, 20 nt, Artificial Sequence
  Synthetic
aggcagcacgaccuuggaga

SEQ ID NO: 482135 - RNA, 21 nt, Artificial Sequence
  Synthetic
gaggcagcacgaccuuggaga

SEQ ID NO: 482136 - RNA, 22 nt, Artificial Sequence
  Synthetic
ggaggcagcacgaccuuggaga

SEQ ID NO: 482137 - RNA, 23 nt, Artificial Sequence
  Synthetic
gggaggcagcacgaccuuggaga

SEQ ID NO: 482138 - RNA, 24 nt, Artificial Sequence
  Synthetic
ugggaggcagcacgaccuuggaga

SEQ ID NO: 482139 - RNA, 18 nt, Artificial Sequence
  Synthetic
uaccuaauaucuuggaga

SEQ ID NO: 482140 - RNA, 19 nt, Artificial Sequence
  Synthetic
auaccuaauaucuuggaga

SEQ ID NO: 482141 - RNA, 20 nt, Artificial Sequence
  Synthetic
uauaccuaauaucuuggaga

SEQ ID NO: 482142 - RNA, 21 nt, Artificial Sequence
  Synthetic
auauaccuaauaucuuggaga

SEQ ID NO: 482143 - RNA, 22 nt, Artificial Sequence
  Synthetic
cauauaccuaauaucuuggaga

SEQ ID NO: 482144 - RNA, 23 nt, Artificial Sequence
  Synthetic
gcauauaccuaauaucuuggaga

SEQ ID NO: 482145 - RNA, 24 nt, Artificial Sequence
  Synthetic
ugcauauaccuaauaucuuggaga

SEQ ID NO: 482146 - RNA, 18 nt, Artificial Sequence
  Synthetic
guagguugcauuuggaga

SEQ ID NO: 482147 - RNA, 19 nt, Artificial Sequence
  Synthetic
aguagguugcauuuggaga

SEQ ID NO: 482148 - RNA, 20 nt, Artificial Sequence
  Synthetic
aaguagguugcauuuggaga

SEQ ID NO: 482149 - RNA, 21 nt, Artificial Sequence
  Synthetic
gaaguagguugcauuuggaga

SEQ ID NO: 482150 - RNA, 22 nt, Artificial Sequence
  Synthetic
agaaguagguugcauuuggaga

SEQ ID NO: 482151 - RNA, 23 nt, Artificial Sequence
  Synthetic
cagaaguagguugcauuuggaga

SEQ ID NO: 482152 - RNA, 24 nt, Artificial Sequence
  Synthetic
acagaaguagguugcauuuggaga

SEQ ID NO: 482153 - RNA, 18 nt, Artificial Sequence
  Synthetic
acuauuuuuauuuggaga

SEQ ID NO: 482154 - RNA, 19 nt, Artificial Sequence
  Synthetic
uacuauuuuuauuuggaga

SEQ ID NO: 482155 - RNA, 20 nt, Artificial Sequence
  Synthetic
uuacuauuuuuauuuggaga

SEQ ID NO: 482156 - RNA, 21 nt, Artificial Sequence
  Synthetic
auuacuauuuuuauuuggaga

SEQ ID NO: 482157 - RNA, 22 nt, Artificial Sequence
  Synthetic
gauuacuauuuuuauuuggaga

SEQ ID NO: 482158 - RNA, 23 nt, Artificial Sequence
  Synthetic
agauuacuauuuuuauuuggaga

SEQ ID NO: 482159 - RNA, 24 nt, Artificial Sequence
  Synthetic
gagauuacuauuuuuauuuggaga

SEQ ID NO: 482160 - RNA, 18 nt, Artificial Sequence
  Synthetic
auuaaggugcuuuggaga

SEQ ID NO: 482161 - RNA, 19 nt, Artificial Sequence
  Synthetic
aauuaaggugcuuuggaga

SEQ ID NO: 482162 - RNA, 20 nt, Artificial Sequence
  Synthetic
aaauuaaggugcuuuggaga

SEQ ID NO: 482163 - RNA, 21 nt, Artificial Sequence
  Synthetic
gaaauuaaggugcuuuggaga

SEQ ID NO: 482164 - RNA, 22 nt, Artificial Sequence
  Synthetic
agaaauuaaggugcuuuggaga

SEQ ID NO: 482165 - RNA, 23 nt, Artificial Sequence
  Synthetic
gagaaauuaaggugcuuuggaga

SEQ ID NO: 482166 - RNA, 24 nt, Artificial Sequence
  Synthetic
agagaaauuaaggugcuuuggaga

SEQ ID NO: 482167 - RNA, 18 nt, Artificial Sequence
  Synthetic
aaaauaaauuuuuggaga

SEQ ID NO: 482168 - RNA, 19 nt, Artificial Sequence
  Synthetic
caaaauaaauuuuuggaga

SEQ ID NO: 482169 - RNA, 20 nt, Artificial Sequence
  Synthetic
ucaaaauaaauuuuuggaga

SEQ ID NO: 482170 - RNA, 21 nt, Artificial Sequence
  Synthetic
uucaaaauaaauuuuuggaga

SEQ ID NO: 482171 - RNA, 22 nt, Artificial Sequence
  Synthetic
auucaaaauaaauuuuuggaga

SEQ ID NO: 482172 - RNA, 23 nt, Artificial Sequence
  Synthetic
aauucaaaauaaauuuuuggaga

SEQ ID NO: 482173 - RNA, 24 nt, Artificial Sequence
  Synthetic
aaauucaaaauaaauuuuuggaga

SEQ ID NO: 482174 - RNA, 18 nt, Artificial Sequence
  Synthetic
agauguuuaaaaaugaga

SEQ ID NO: 482175 - RNA, 19 nt, Artificial Sequence
  Synthetic
aagauguuuaaaaaugaga

SEQ ID NO: 482176 - RNA, 20 nt, Artificial Sequence
  Synthetic
caagauguuuaaaaaugaga

SEQ ID NO: 482177 - RNA, 21 nt, Artificial Sequence
  Synthetic
ccaagauguuuaaaaaugaga

SEQ ID NO: 482178 - RNA, 22 nt, Artificial Sequence
  Synthetic
accaagauguuuaaaaaugaga

SEQ ID NO: 482179 - RNA, 23 nt, Artificial Sequence
  Synthetic
aaccaagauguuuaaaaaugaga

SEQ ID NO: 482180 - RNA, 24 nt, Artificial Sequence
  Synthetic
uaaccaagauguuuaaaaaugaga

SEQ ID NO: 482181 - RNA, 18 nt, Artificial Sequence
  Synthetic
aagaaaaagaaaaugaga

SEQ ID NO: 482182 - RNA, 19 nt, Artificial Sequence
  Synthetic
gaagaaaaagaaaaugaga

SEQ ID NO: 482183 - RNA, 20 nt, Artificial Sequence
  Synthetic
agaagaaaaagaaaaugaga

SEQ ID NO: 482184 - RNA, 21 nt, Artificial Sequence
  Synthetic
aagaagaaaaagaaaaugaga

SEQ ID NO: 482185 - RNA, 22 nt, Artificial Sequence
  Synthetic
aaagaagaaaaagaaaaugaga

SEQ ID NO: 482186 - RNA, 23 nt, Artificial Sequence
  Synthetic
gaaagaagaaaaagaaaaugaga

SEQ ID NO: 482187 - RNA, 24 nt, Artificial Sequence
  Synthetic
agaaagaagaaaaagaaaaugaga

SEQ ID NO: 482188 - RNA, 18 nt, Artificial Sequence
  Synthetic
guaaaaucagaaaugaga

SEQ ID NO: 482189 - RNA, 19 nt, Artificial Sequence
  Synthetic
aguaaaaucagaaaugaga

SEQ ID NO: 482190 - RNA, 20 nt, Artificial Sequence
  Synthetic
aaguaaaaucagaaaugaga

SEQ ID NO: 482191 - RNA, 21 nt, Artificial Sequence
  Synthetic
uaaguaaaaucagaaaugaga

SEQ ID NO: 482192 - RNA, 22 nt, Artificial Sequence
  Synthetic
auaaguaaaaucagaaaugaga

SEQ ID NO: 482193 - RNA, 23 nt, Artificial Sequence
  Synthetic
aauaaguaaaaucagaaaugaga

SEQ ID NO: 482194 - RNA, 24 nt, Artificial Sequence
  Synthetic
aaauaaguaaaaucagaaaugaga

SEQ ID NO: 482195 - RNA, 18 nt, Artificial Sequence
  Synthetic
aguaaaaaaagaaugaga

SEQ ID NO: 482196 - RNA, 19 nt, Artificial Sequence
  Synthetic
caguaaaaaaagaaugaga

SEQ ID NO: 482197 - RNA, 20 nt, Artificial Sequence
  Synthetic
acaguaaaaaaagaaugaga

SEQ ID NO: 482198 - RNA, 21 nt, Artificial Sequence
  Synthetic
cacaguaaaaaaagaaugaga

SEQ ID NO: 482199 - RNA, 22 nt, Artificial Sequence
  Synthetic
ccacaguaaaaaaagaaugaga

SEQ ID NO: 482200 - RNA, 23 nt, Artificial Sequence
  Synthetic
uccacaguaaaaaaagaaugaga

SEQ ID NO: 482201 - RNA, 24 nt, Artificial Sequence
  Synthetic
uuccacaguaaaaaaagaaugaga

SEQ ID NO: 482202 - RNA, 18 nt, Artificial Sequence
  Synthetic
aauaauaauagaaugaga

SEQ ID NO: 482203 - RNA, 19 nt, Artificial Sequence
  Synthetic
aaauaauaauagaaugaga

SEQ ID NO: 482204 - RNA, 20 nt, Artificial Sequence
  Synthetic
aaaauaauaauagaaugaga

SEQ ID NO: 482205 - RNA, 21 nt, Artificial Sequence
  Synthetic
aaaaauaauaauagaaugaga

SEQ ID NO: 482206 - RNA, 22 nt, Artificial Sequence
  Synthetic
aaaaaauaauaauagaaugaga

SEQ ID NO: 482207 - RNA, 23 nt, Artificial Sequence
  Synthetic
gaaaaaauaauaauagaaugaga

SEQ ID NO: 482208 - RNA, 24 nt, Artificial Sequence
  Synthetic
agaaaaaauaauaauagaaugaga

SEQ ID NO: 482209 - RNA, 18 nt, Artificial Sequence
  Synthetic
guaucugcuggaaugaga

SEQ ID NO: 482210 - RNA, 19 nt, Artificial Sequence
  Synthetic
uguaucugcuggaaugaga

SEQ ID NO: 482211 - RNA, 20 nt, Artificial Sequence
  Synthetic
auguaucugcuggaaugaga

SEQ ID NO: 482212 - RNA, 21 nt, Artificial Sequence
  Synthetic
cauguaucugcuggaaugaga

SEQ ID NO: 482213 - RNA, 22 nt, Artificial Sequence
  Synthetic
ucauguaucugcuggaaugaga

SEQ ID NO: 482214 - RNA, 23 nt, Artificial Sequence
  Synthetic
aucauguaucugcuggaaugaga

SEQ ID NO: 482215 - RNA, 24 nt, Artificial Sequence
  Synthetic
aaucauguaucugcuggaaugaga

SEQ ID NO: 482216 - RNA, 18 nt, Artificial Sequence
  Synthetic
guaagagugugaaugaga

SEQ ID NO: 482217 - RNA, 19 nt, Artificial Sequence
  Synthetic
aguaagagugugaaugaga

SEQ ID NO: 482218 - RNA, 20 nt, Artificial Sequence
  Synthetic
uaguaagagugugaaugaga

SEQ ID NO: 482219 - RNA, 21 nt, Artificial Sequence
  Synthetic
auaguaagagugugaaugaga

SEQ ID NO: 482220 - RNA, 22 nt, Artificial Sequence
  Synthetic
aauaguaagagugugaaugaga

SEQ ID NO: 482221 - RNA, 23 nt, Artificial Sequence
  Synthetic
aaauaguaagagugugaaugaga

SEQ ID NO: 482222 - RNA, 24 nt, Artificial Sequence
  Synthetic
aaaauaguaagagugugaaugaga

SEQ ID NO: 482223 - RNA, 18 nt, Artificial Sequence
  Synthetic
agcugaugaauaaugaga

SEQ ID NO: 482224 - RNA, 19 nt, Artificial Sequence
  Synthetic
aagcugaugaauaaugaga

SEQ ID NO: 482225 - RNA, 20 nt, Artificial Sequence
  Synthetic
aaagcugaugaauaaugaga

SEQ ID NO: 482226 - RNA, 21 nt, Artificial Sequence
  Synthetic
aaaagcugaugaauaaugaga

SEQ ID NO: 482227 - RNA, 22 nt, Artificial Sequence
  Synthetic
gaaaagcugaugaauaaugaga

SEQ ID NO: 482228 - RNA, 23 nt, Artificial Sequence
  Synthetic
agaaaagcugaugaauaaugaga

SEQ ID NO: 482229 - RNA, 24 nt, Artificial Sequence
  Synthetic
gagaaaagcugaugaauaaugaga

SEQ ID NO: 482230 - RNA, 18 nt, Artificial Sequence
  Synthetic
aacgugaagauaaugaga

SEQ ID NO: 482231 - RNA, 19 nt, Artificial Sequence
  Synthetic
uaacgugaagauaaugaga

SEQ ID NO: 482232 - RNA, 20 nt, Artificial Sequence
  Synthetic
uuaacgugaagauaaugaga

SEQ ID NO: 482233 - RNA, 21 nt, Artificial Sequence
  Synthetic
cuuaacgugaagauaaugaga

SEQ ID NO: 482234 - RNA, 22 nt, Artificial Sequence
  Synthetic
acuuaacgugaagauaaugaga

SEQ ID NO: 482235 - RNA, 23 nt, Artificial Sequence
  Synthetic
uacuuaacgugaagauaaugaga

SEQ ID NO: 482236 - RNA, 24 nt, Artificial Sequence
  Synthetic
cuacuuaacgugaagauaaugaga

SEQ ID NO: 482237 - RNA, 18 nt, Artificial Sequence
  Synthetic
caaagaaaccacaugaga

SEQ ID NO: 482238 - RNA, 19 nt, Artificial Sequence
  Synthetic
ccaaagaaaccacaugaga

SEQ ID NO: 482239 - RNA, 20 nt, Artificial Sequence
  Synthetic
uccaaagaaaccacaugaga

SEQ ID NO: 482240 - RNA, 21 nt, Artificial Sequence
  Synthetic
cuccaaagaaaccacaugaga

SEQ ID NO: 482241 - RNA, 22 nt, Artificial Sequence
  Synthetic
acuccaaagaaaccacaugaga

SEQ ID NO: 482242 - RNA, 23 nt, Artificial Sequence
  Synthetic
aacuccaaagaaaccacaugaga

SEQ ID NO: 482243 - RNA, 24 nt, Artificial Sequence
  Synthetic
caacuccaaagaaaccacaugaga

SEQ ID NO: 482244 - RNA, 18 nt, Artificial Sequence
  Synthetic
uagacuguuuacaugaga

SEQ ID NO: 482245 - RNA, 19 nt, Artificial Sequence
  Synthetic
uuagacuguuuacaugaga

SEQ ID NO: 482246 - RNA, 20 nt, Artificial Sequence
  Synthetic
cuuagacuguuuacaugaga

SEQ ID NO: 482247 - RNA, 21 nt, Artificial Sequence
  Synthetic
ccuuagacuguuuacaugaga

SEQ ID NO: 482248 - RNA, 22 nt, Artificial Sequence
  Synthetic
accuuagacuguuuacaugaga

SEQ ID NO: 482249 - RNA, 23 nt, Artificial Sequence
  Synthetic
caccuuagacuguuuacaugaga

SEQ ID NO: 482250 - RNA, 24 nt, Artificial Sequence
  Synthetic
ucaccuuagacuguuuacaugaga

SEQ ID NO: 482251 - RNA, 18 nt, Artificial Sequence
  Synthetic
ccaucaaggagcaugaga

SEQ ID NO: 482252 - RNA, 19 nt, Artificial Sequence
  Synthetic
gccaucaaggagcaugaga

SEQ ID NO: 482253 - RNA, 20 nt, Artificial Sequence
  Synthetic
ggccaucaaggagcaugaga

SEQ ID NO: 482254 - RNA, 21 nt, Artificial Sequence
  Synthetic
gggccaucaaggagcaugaga

SEQ ID NO: 482255 - RNA, 22 nt, Artificial Sequence
  Synthetic
ugggccaucaaggagcaugaga

SEQ ID NO: 482256 - RNA, 23 nt, Artificial Sequence
  Synthetic
uugggccaucaaggagcaugaga

SEQ ID NO: 482257 - RNA, 24 nt, Artificial Sequence
  Synthetic
cuugggccaucaaggagcaugaga

SEQ ID NO: 482258 - RNA, 18 nt, Artificial Sequence
  Synthetic
aagaagcaaugcaugaga

SEQ ID NO: 482259 - RNA, 19 nt, Artificial Sequence
  Synthetic
gaagaagcaaugcaugaga

SEQ ID NO: 482260 - RNA, 20 nt, Artificial Sequence
  Synthetic
agaagaagcaaugcaugaga

SEQ ID NO: 482261 - RNA, 21 nt, Artificial Sequence
  Synthetic
cagaagaagcaaugcaugaga

SEQ ID NO: 482262 - RNA, 22 nt, Artificial Sequence
  Synthetic
acagaagaagcaaugcaugaga

SEQ ID NO: 482263 - RNA, 23 nt, Artificial Sequence
  Synthetic
cacagaagaagcaaugcaugaga

SEQ ID NO: 482264 - RNA, 24 nt, Artificial Sequence
  Synthetic
ccacagaagaagcaaugcaugaga

SEQ ID NO: 482265 - RNA, 18 nt, Artificial Sequence
  Synthetic
aaagaaacuaucaugaga

SEQ ID NO: 482266 - RNA, 19 nt, Artificial Sequence
  Synthetic
aaaagaaacuaucaugaga

SEQ ID NO: 482267 - RNA, 20 nt, Artificial Sequence
  Synthetic
caaaagaaacuaucaugaga

SEQ ID NO: 482268 - RNA, 21 nt, Artificial Sequence
  Synthetic
gcaaaagaaacuaucaugaga

SEQ ID NO: 482269 - RNA, 22 nt, Artificial Sequence
  Synthetic
ugcaaaagaaacuaucaugaga

SEQ ID NO: 482270 - RNA, 23 nt, Artificial Sequence
  Synthetic
cugcaaaagaaacuaucaugaga

SEQ ID NO: 482271 - RNA, 24 nt, Artificial Sequence
  Synthetic
acugcaaaagaaacuaucaugaga

SEQ ID NO: 482272 - RNA, 18 nt, Artificial Sequence
  Synthetic
guugcaaugaagaugaga

SEQ ID NO: 482273 - RNA, 19 nt, Artificial Sequence
  Synthetic
uguugcaaugaagaugaga

SEQ ID NO: 482274 - RNA, 20 nt, Artificial Sequence
  Synthetic
uuguugcaaugaagaugaga

SEQ ID NO: 482275 - RNA, 21 nt, Artificial Sequence
  Synthetic
cuuguugcaaugaagaugaga

SEQ ID NO: 482276 - RNA, 22 nt, Artificial Sequence
  Synthetic
ucuuguugcaaugaagaugaga

SEQ ID NO: 482277 - RNA, 23 nt, Artificial Sequence
  Synthetic
uucuuguugcaaugaagaugaga

SEQ ID NO: 482278 - RNA, 24 nt, Artificial Sequence
  Synthetic
uuucuuguugcaaugaagaugaga

SEQ ID NO: 482279 - RNA, 18 nt, Artificial Sequence
  Synthetic
cucaugagaaggaugaga

SEQ ID NO: 482280 - RNA, 19 nt, Artificial Sequence
  Synthetic
ccucaugagaaggaugaga

SEQ ID NO: 482281 - RNA, 20 nt, Artificial Sequence
  Synthetic
gccucaugagaaggaugaga

SEQ ID NO: 482282 - RNA, 21 nt, Artificial Sequence
  Synthetic
ggccucaugagaaggaugaga

SEQ ID NO: 482283 - RNA, 22 nt, Artificial Sequence
  Synthetic
uggccucaugagaaggaugaga

SEQ ID NO: 482284 - RNA, 23 nt, Artificial Sequence
  Synthetic
auggccucaugagaaggaugaga

SEQ ID NO: 482285 - RNA, 24 nt, Artificial Sequence
  Synthetic
aauggccucaugagaaggaugaga

SEQ ID NO: 482286 - RNA, 18 nt, Artificial Sequence
  Synthetic
acgucugcugggaugaga

SEQ ID NO: 482287 - RNA, 19 nt, Artificial Sequence
  Synthetic
cacgucugcugggaugaga

SEQ ID NO: 482288 - RNA, 20 nt, Artificial Sequence
  Synthetic
ucacgucugcugggaugaga

SEQ ID NO: 482289 - RNA, 21 nt, Artificial Sequence
  Synthetic
cucacgucugcugggaugaga

SEQ ID NO: 482290 - RNA, 22 nt, Artificial Sequence
  Synthetic
acucacgucugcugggaugaga

SEQ ID NO: 482291 - RNA, 23 nt, Artificial Sequence
  Synthetic
cacucacgucugcugggaugaga

SEQ ID NO: 482292 - RNA, 24 nt, Artificial Sequence
  Synthetic
ucacucacgucugcugggaugaga

SEQ ID NO: 482293 - RNA, 18 nt, Artificial Sequence
  Synthetic
gugugcgccaugaugaga

SEQ ID NO: 482294 - RNA, 19 nt, Artificial Sequence
  Synthetic
agugugcgccaugaugaga

SEQ ID NO: 482295 - RNA, 20 nt, Artificial Sequence
  Synthetic
cagugugcgccaugaugaga

SEQ ID NO: 482296 - RNA, 21 nt, Artificial Sequence
  Synthetic
gcagugugcgccaugaugaga

SEQ ID NO: 482297 - RNA, 22 nt, Artificial Sequence
  Synthetic
ggcagugugcgccaugaugaga

SEQ ID NO: 482298 - RNA, 23 nt, Artificial Sequence
  Synthetic
aggcagugugcgccaugaugaga

SEQ ID NO: 482299 - RNA, 24 nt, Artificial Sequence
  Synthetic
aaggcagugugcgccaugaugaga

SEQ ID NO: 482300 - RNA, 18 nt, Artificial Sequence
  Synthetic
ccucaucaagugaugaga

SEQ ID NO: 482301 - RNA, 19 nt, Artificial Sequence
  Synthetic
accucaucaagugaugaga

SEQ ID NO: 482302 - RNA, 20 nt, Artificial Sequence
  Synthetic
uaccucaucaagugaugaga

SEQ ID NO: 482303 - RNA, 21 nt, Artificial Sequence
  Synthetic
auaccucaucaagugaugaga

SEQ ID NO: 482304 - RNA, 22 nt, Artificial Sequence
  Synthetic
aauaccucaucaagugaugaga

SEQ ID NO: 482305 - RNA, 23 nt, Artificial Sequence
  Synthetic
uaauaccucaucaagugaugaga

SEQ ID NO: 482306 - RNA, 24 nt, Artificial Sequence
  Synthetic
auaauaccucaucaagugaugaga

SEQ ID NO: 482307 - RNA, 18 nt, Artificial Sequence
  Synthetic
ccuauuuugacuaugaga

SEQ ID NO: 482308 - RNA, 19 nt, Artificial Sequence
  Synthetic
accuauuuugacuaugaga

SEQ ID NO: 482309 - RNA, 20 nt, Artificial Sequence
  Synthetic
aaccuauuuugacuaugaga

SEQ ID NO: 482310 - RNA, 21 nt, Artificial Sequence
  Synthetic
uaaccuauuuugacuaugaga

SEQ ID NO: 482311 - RNA, 22 nt, Artificial Sequence
  Synthetic
uuaaccuauuuugacuaugaga

SEQ ID NO: 482312 - RNA, 23 nt, Artificial Sequence
  Synthetic
uuuaaccuauuuugacuaugaga

SEQ ID NO: 482313 - RNA, 24 nt, Artificial Sequence
  Synthetic
cuuuaaccuauuuugacuaugaga

SEQ ID NO: 482314 - RNA, 18 nt, Artificial Sequence
  Synthetic
aaaauaaauacuaugaga

SEQ ID NO: 482315 - RNA, 19 nt, Artificial Sequence
  Synthetic
uaaaauaaauacuaugaga

SEQ ID NO: 482316 - RNA, 20 nt, Artificial Sequence
  Synthetic
cuaaaauaaauacuaugaga

SEQ ID NO: 482317 - RNA, 21 nt, Artificial Sequence
  Synthetic
ccuaaaauaaauacuaugaga

SEQ ID NO: 482318 - RNA, 22 nt, Artificial Sequence
  Synthetic
uccuaaaauaaauacuaugaga

SEQ ID NO: 482319 - RNA, 23 nt, Artificial Sequence
  Synthetic
cuccuaaaauaaauacuaugaga

SEQ ID NO: 482320 - RNA, 24 nt, Artificial Sequence
  Synthetic
acuccuaaaauaaauacuaugaga

SEQ ID NO: 482321 - RNA, 18 nt, Artificial Sequence
  Synthetic
aauuagaauuuuaugaga

SEQ ID NO: 482322 - RNA, 19 nt, Artificial Sequence
  Synthetic
uaauuagaauuuuaugaga

SEQ ID NO: 482323 - RNA, 20 nt, Artificial Sequence
  Synthetic
auaauuagaauuuuaugaga

SEQ ID NO: 482324 - RNA, 21 nt, Artificial Sequence
  Synthetic
cauaauuagaauuuuaugaga

SEQ ID NO: 482325 - RNA, 22 nt, Artificial Sequence
  Synthetic
acauaauuagaauuuuaugaga

SEQ ID NO: 482326 - RNA, 23 nt, Artificial Sequence
  Synthetic
cacauaauuagaauuuuaugaga

SEQ ID NO: 482327 - RNA, 24 nt, Artificial Sequence
  Synthetic
ucacauaauuagaauuuuaugaga

SEQ ID NO: 482328 - RNA, 18 nt, Artificial Sequence
  Synthetic
cuauagauuuuuaugaga

SEQ ID NO: 482329 - RNA, 19 nt, Artificial Sequence
  Synthetic
gcuauagauuuuuaugaga

SEQ ID NO: 482330 - RNA, 20 nt, Artificial Sequence
  Synthetic
ugcuauagauuuuuaugaga

SEQ ID NO: 482331 - RNA, 21 nt, Artificial Sequence
  Synthetic
cugcuauagauuuuuaugaga

SEQ ID NO: 482332 - RNA, 22 nt, Artificial Sequence
  Synthetic
acugcuauagauuuuuaugaga

SEQ ID NO: 482333 - RNA, 23 nt, Artificial Sequence
  Synthetic
aacugcuauagauuuuuaugaga

SEQ ID NO: 482334 - RNA, 24 nt, Artificial Sequence
  Synthetic
caacugcuauagauuuuuaugaga

SEQ ID NO: 482335 - RNA, 18 nt, Artificial Sequence
  Synthetic
gugcuauaagaacugaga

SEQ ID NO: 482336 - RNA, 19 nt, Artificial Sequence
  Synthetic
agugcuauaagaacugaga

SEQ ID NO: 482337 - RNA, 20 nt, Artificial Sequence
  Synthetic
aagugcuauaagaacugaga

SEQ ID NO: 482338 - RNA, 21 nt, Artificial Sequence
  Synthetic
gaagugcuauaagaacugaga

SEQ ID NO: 482339 - RNA, 22 nt, Artificial Sequence
  Synthetic
ugaagugcuauaagaacugaga

SEQ ID NO: 482340 - RNA, 23 nt, Artificial Sequence
  Synthetic
augaagugcuauaagaacugaga

SEQ ID NO: 482341 - RNA, 24 nt, Artificial Sequence
  Synthetic
aaugaagugcuauaagaacugaga

SEQ ID NO: 482342 - RNA, 18 nt, Artificial Sequence
  Synthetic
auugaauuaucacugaga

SEQ ID NO: 482343 - RNA, 19 nt, Artificial Sequence
  Synthetic
uauugaauuaucacugaga

SEQ ID NO: 482344 - RNA, 20 nt, Artificial Sequence
  Synthetic
auauugaauuaucacugaga

SEQ ID NO: 482345 - RNA, 21 nt, Artificial Sequence
  Synthetic
uauauugaauuaucacugaga

SEQ ID NO: 482346 - RNA, 22 nt, Artificial Sequence
  Synthetic
auauauugaauuaucacugaga

SEQ ID NO: 482347 - RNA, 23 nt, Artificial Sequence
  Synthetic
gauauauugaauuaucacugaga

SEQ ID NO: 482348 - RNA, 24 nt, Artificial Sequence
  Synthetic
ugauauauugaauuaucacugaga

SEQ ID NO: 482349 - RNA, 18 nt, Artificial Sequence
  Synthetic
aaaaaagagguacugaga

SEQ ID NO: 482350 - RNA, 19 nt, Artificial Sequence
  Synthetic
aaaaaaagagguacugaga

SEQ ID NO: 482351 - RNA, 20 nt, Artificial Sequence
  Synthetic
aaaaaaaagagguacugaga

SEQ ID NO: 482352 - RNA, 21 nt, Artificial Sequence
  Synthetic
gaaaaaaaagagguacugaga

SEQ ID NO: 482353 - RNA, 22 nt, Artificial Sequence
  Synthetic
ggaaaaaaaagagguacugaga

SEQ ID NO: 482354 - RNA, 23 nt, Artificial Sequence
  Synthetic
uggaaaaaaaagagguacugaga

SEQ ID NO: 482355 - RNA, 24 nt, Artificial Sequence
  Synthetic
uuggaaaaaaaagagguacugaga

SEQ ID NO: 482356 - RNA, 18 nt, Artificial Sequence
  Synthetic
guaugacaacaccugaga

SEQ ID NO: 482357 - RNA, 19 nt, Artificial Sequence
  Synthetic
aguaugacaacaccugaga

SEQ ID NO: 482358 - RNA, 20 nt, Artificial Sequence
  Synthetic
gaguaugacaacaccugaga

SEQ ID NO: 482359 - RNA, 21 nt, Artificial Sequence
  Synthetic
ggaguaugacaacaccugaga

SEQ ID NO: 482360 - RNA, 22 nt, Artificial Sequence
  Synthetic
cggaguaugacaacaccugaga

SEQ ID NO: 482361 - RNA, 23 nt, Artificial Sequence
  Synthetic
acggaguaugacaacaccugaga

SEQ ID NO: 482362 - RNA, 24 nt, Artificial Sequence
  Synthetic
uacggaguaugacaacaccugaga

SEQ ID NO: 482363 - RNA, 18 nt, Artificial Sequence
  Synthetic
ccacucgggaggcugaga

SEQ ID NO: 482364 - RNA, 19 nt, Artificial Sequence
  Synthetic
gccacucgggaggcugaga

SEQ ID NO: 482365 - RNA, 20 nt, Artificial Sequence
  Synthetic
agccacucgggaggcugaga

SEQ ID NO: 482366 - RNA, 21 nt, Artificial Sequence
  Synthetic
cagccacucgggaggcugaga

SEQ ID NO: 482367 - RNA, 22 nt, Artificial Sequence
  Synthetic
ccagccacucgggaggcugaga

SEQ ID NO: 482368 - RNA, 23 nt, Artificial Sequence
  Synthetic
cccagccacucgggaggcugaga

SEQ ID NO: 482369 - RNA, 24 nt, Artificial Sequence
  Synthetic
ucccagccacucgggaggcugaga

SEQ ID NO: 482370 - RNA, 18 nt, Artificial Sequence
  Synthetic
uucuagagugggcugaga

SEQ ID NO: 482371 - RNA, 19 nt, Artificial Sequence
  Synthetic
auucuagagugggcugaga

SEQ ID NO: 482372 - RNA, 20 nt, Artificial Sequence
  Synthetic
aauucuagagugggcugaga

SEQ ID NO: 482373 - RNA, 21 nt, Artificial Sequence
  Synthetic
caauucuagagugggcugaga

SEQ ID NO: 482374 - RNA, 22 nt, Artificial Sequence
  Synthetic
acaauucuagagugggcugaga

SEQ ID NO: 482375 - RNA, 23 nt, Artificial Sequence
  Synthetic
gacaauucuagagugggcugaga

SEQ ID NO: 482376 - RNA, 24 nt, Artificial Sequence
  Synthetic
agacaauucuagagugggcugaga

SEQ ID NO: 482377 - RNA, 18 nt, Artificial Sequence
  Synthetic
uauuuuuugaugcugaga

SEQ ID NO: 482378 - RNA, 19 nt, Artificial Sequence
  Synthetic
guauuuuuugaugcugaga

SEQ ID NO: 482379 - RNA, 20 nt, Artificial Sequence
  Synthetic
uguauuuuuugaugcugaga

SEQ ID NO: 482380 - RNA, 21 nt, Artificial Sequence
  Synthetic
uuguauuuuuugaugcugaga

SEQ ID NO: 482381 - RNA, 22 nt, Artificial Sequence
  Synthetic
uuuguauuuuuugaugcugaga

SEQ ID NO: 482382 - RNA, 23 nt, Artificial Sequence
  Synthetic
cuuuguauuuuuugaugcugaga

SEQ ID NO: 482383 - RNA, 24 nt, Artificial Sequence
  Synthetic
ucuuuguauuuuuugaugcugaga

SEQ ID NO: 482384 - RNA, 18 nt, Artificial Sequence
  Synthetic
caugggaaacugcugaga

SEQ ID NO: 482385 - RNA, 19 nt, Artificial Sequence
  Synthetic
acaugggaaacugcugaga

SEQ ID NO: 482386 - RNA, 20 nt, Artificial Sequence
  Synthetic
gacaugggaaacugcugaga

SEQ ID NO: 482387 - RNA, 21 nt, Artificial Sequence
  Synthetic
ugacaugggaaacugcugaga

SEQ ID NO: 482388 - RNA, 22 nt, Artificial Sequence
  Synthetic
cugacaugggaaacugcugaga

SEQ ID NO: 482389 - RNA, 23 nt, Artificial Sequence
  Synthetic
gcugacaugggaaacugcugaga

SEQ ID NO: 482390 - RNA, 24 nt, Artificial Sequence
  Synthetic
agcugacaugggaaacugcugaga

SEQ ID NO: 482391 - RNA, 18 nt, Artificial Sequence
  Synthetic
caccuauaugugcugaga

SEQ ID NO: 482392 - RNA, 19 nt, Artificial Sequence
  Synthetic
ucaccuauaugugcugaga

SEQ ID NO: 482393 - RNA, 20 nt, Artificial Sequence
  Synthetic
aucaccuauaugugcugaga

SEQ ID NO: 482394 - RNA, 21 nt, Artificial Sequence
  Synthetic
aaucaccuauaugugcugaga

SEQ ID NO: 482395 - RNA, 22 nt, Artificial Sequence
  Synthetic
aaaucaccuauaugugcugaga

SEQ ID NO: 482396 - RNA, 23 nt, Artificial Sequence
  Synthetic
gaaaucaccuauaugugcugaga

SEQ ID NO: 482397 - RNA, 24 nt, Artificial Sequence
  Synthetic
ggaaaucaccuauaugugcugaga

SEQ ID NO: 482398 - RNA, 18 nt, Artificial Sequence
  Synthetic
guaauguguuugcugaga

SEQ ID NO: 482399 - RNA, 19 nt, Artificial Sequence
  Synthetic
aguaauguguuugcugaga

SEQ ID NO: 482400 - RNA, 20 nt, Artificial Sequence
  Synthetic
gaguaauguguuugcugaga

SEQ ID NO: 482401 - RNA, 21 nt, Artificial Sequence
  Synthetic
agaguaauguguuugcugaga

SEQ ID NO: 482402 - RNA, 22 nt, Artificial Sequence
  Synthetic
gagaguaauguguuugcugaga

SEQ ID NO: 482403 - RNA, 23 nt, Artificial Sequence
  Synthetic
ugagaguaauguguuugcugaga

SEQ ID NO: 482404 - RNA, 24 nt, Artificial Sequence
  Synthetic
gugagaguaauguguuugcugaga

SEQ ID NO: 482405 - RNA, 18 nt, Artificial Sequence
  Synthetic
ucuuggcacgaucugaga

SEQ ID NO: 482406 - RNA, 19 nt, Artificial Sequence
  Synthetic
aucuuggcacgaucugaga

SEQ ID NO: 482407 - RNA, 20 nt, Artificial Sequence
  Synthetic
uaucuuggcacgaucugaga

SEQ ID NO: 482408 - RNA, 21 nt, Artificial Sequence
  Synthetic
guaucuuggcacgaucugaga

SEQ ID NO: 482409 - RNA, 22 nt, Artificial Sequence
  Synthetic
uguaucuuggcacgaucugaga

SEQ ID NO: 482410 - RNA, 23 nt, Artificial Sequence
  Synthetic
guguaucuuggcacgaucugaga

SEQ ID NO: 482411 - RNA, 24 nt, Artificial Sequence
  Synthetic
uguguaucuuggcacgaucugaga

SEQ ID NO: 482412 - RNA, 18 nt, Artificial Sequence
  Synthetic
aaugcauguuuucugaga

SEQ ID NO: 482413 - RNA, 19 nt, Artificial Sequence
  Synthetic
gaaugcauguuuucugaga

SEQ ID NO: 482414 - RNA, 20 nt, Artificial Sequence
  Synthetic
ggaaugcauguuuucugaga

SEQ ID NO: 482415 - RNA, 21 nt, Artificial Sequence
  Synthetic
aggaaugcauguuuucugaga

SEQ ID NO: 482416 - RNA, 22 nt, Artificial Sequence
  Synthetic
aaggaaugcauguuuucugaga

SEQ ID NO: 482417 - RNA, 23 nt, Artificial Sequence
  Synthetic
gaaggaaugcauguuuucugaga

SEQ ID NO: 482418 - RNA, 24 nt, Artificial Sequence
  Synthetic
ggaaggaaugcauguuuucugaga

SEQ ID NO: 482419 - RNA, 18 nt, Artificial Sequence
  Synthetic
aauuuucuuuuucugaga

SEQ ID NO: 482420 - RNA, 19 nt, Artificial Sequence
  Synthetic
caauuuucuuuuucugaga

SEQ ID NO: 482421 - RNA, 20 nt, Artificial Sequence
  Synthetic
ucaauuuucuuuuucugaga

SEQ ID NO: 482422 - RNA, 21 nt, Artificial Sequence
  Synthetic
uucaauuuucuuuuucugaga

SEQ ID NO: 482423 - RNA, 22 nt, Artificial Sequence
  Synthetic
guucaauuuucuuuuucugaga

SEQ ID NO: 482424 - RNA, 23 nt, Artificial Sequence
  Synthetic
uguucaauuuucuuuuucugaga

SEQ ID NO: 482425 - RNA, 24 nt, Artificial Sequence
  Synthetic
auguucaauuuucuuuuucugaga

SEQ ID NO: 482426 - RNA, 18 nt, Artificial Sequence
  Synthetic
auaauucaaaaagugaga

SEQ ID NO: 482427 - RNA, 19 nt, Artificial Sequence
  Synthetic
cauaauucaaaaagugaga

SEQ ID NO: 482428 - RNA, 20 nt, Artificial Sequence
  Synthetic
ucauaauucaaaaagugaga

SEQ ID NO: 482429 - RNA, 21 nt, Artificial Sequence
  Synthetic
cucauaauucaaaaagugaga

SEQ ID NO: 482430 - RNA, 22 nt, Artificial Sequence
  Synthetic
ucucauaauucaaaaagugaga

SEQ ID NO: 482431 - RNA, 23 nt, Artificial Sequence
  Synthetic
uucucauaauucaaaaagugaga

SEQ ID NO: 482432 - RNA, 24 nt, Artificial Sequence
  Synthetic
cuucucauaauucaaaaagugaga

SEQ ID NO: 482433 - RNA, 18 nt, Artificial Sequence
  Synthetic
uauuuugacaaagugaga

SEQ ID NO: 482434 - RNA, 19 nt, Artificial Sequence
  Synthetic
auauuuugacaaagugaga

SEQ ID NO: 482435 - RNA, 20 nt, Artificial Sequence
  Synthetic
aauauuuugacaaagugaga

SEQ ID NO: 482436 - RNA, 21 nt, Artificial Sequence
  Synthetic
aaauauuuugacaaagugaga

SEQ ID NO: 482437 - RNA, 22 nt, Artificial Sequence
  Synthetic
aaaauauuuugacaaagugaga

SEQ ID NO: 482438 - RNA, 23 nt, Artificial Sequence
  Synthetic
caaaauauuuugacaaagugaga

SEQ ID NO: 482439 - RNA, 24 nt, Artificial Sequence
  Synthetic
ucaaaauauuuugacaaagugaga

SEQ ID NO: 482440 - RNA, 18 nt, Artificial Sequence
  Synthetic
ggugcuggggaagugaga

SEQ ID NO: 482441 - RNA, 19 nt, Artificial Sequence
  Synthetic
uggugcuggggaagugaga

SEQ ID NO: 482442 - RNA, 20 nt, Artificial Sequence
  Synthetic
guggugcuggggaagugaga

SEQ ID NO: 482443 - RNA, 21 nt, Artificial Sequence
  Synthetic
gguggugcuggggaagugaga

SEQ ID NO: 482444 - RNA, 22 nt, Artificial Sequence
  Synthetic
ugguggugcuggggaagugaga

SEQ ID NO: 482445 - RNA, 23 nt, Artificial Sequence
  Synthetic
gugguggugcuggggaagugaga

SEQ ID NO: 482446 - RNA, 24 nt, Artificial Sequence
  Synthetic
agugguggugcuggggaagugaga

SEQ ID NO: 482447 - RNA, 18 nt, Artificial Sequence
  Synthetic
agggaaaaugaagugaga

SEQ ID NO: 482448 - RNA, 19 nt, Artificial Sequence
  Synthetic
aagggaaaaugaagugaga

SEQ ID NO: 482449 - RNA, 20 nt, Artificial Sequence
  Synthetic
uaagggaaaaugaagugaga

SEQ ID NO: 482450 - RNA, 21 nt, Artificial Sequence
  Synthetic
guaagggaaaaugaagugaga

SEQ ID NO: 482451 - RNA, 22 nt, Artificial Sequence
  Synthetic
gguaagggaaaaugaagugaga

SEQ ID NO: 482452 - RNA, 23 nt, Artificial Sequence
  Synthetic
ugguaagggaaaaugaagugaga

SEQ ID NO: 482453 - RNA, 24 nt, Artificial Sequence
  Synthetic
cugguaagggaaaaugaagugaga

SEQ ID NO: 482454 - RNA, 18 nt, Artificial Sequence
  Synthetic
ccauaugacccagugaga

SEQ ID NO: 482455 - RNA, 19 nt, Artificial Sequence
  Synthetic
uccauaugacccagugaga

SEQ ID NO: 482456 - RNA, 20 nt, Artificial Sequence
  Synthetic
guccauaugacccagugaga

SEQ ID NO: 482457 - RNA, 21 nt, Artificial Sequence
  Synthetic
uguccauaugacccagugaga

SEQ ID NO: 482458 - RNA, 22 nt, Artificial Sequence
  Synthetic
auguccauaugacccagugaga

SEQ ID NO: 482459 - RNA, 23 nt, Artificial Sequence
  Synthetic
aauguccauaugacccagugaga

SEQ ID NO: 482460 - RNA, 24 nt, Artificial Sequence
  Synthetic
aaauguccauaugacccagugaga

SEQ ID NO: 482461 - RNA, 18 nt, Artificial Sequence
  Synthetic
aaacaaauagcagugaga

SEQ ID NO: 482462 - RNA, 19 nt, Artificial Sequence
  Synthetic
aaaacaaauagcagugaga

SEQ ID NO: 482463 - RNA, 20 nt, Artificial Sequence
  Synthetic
uaaaacaaauagcagugaga

SEQ ID NO: 482464 - RNA, 21 nt, Artificial Sequence
  Synthetic
auaaaacaaauagcagugaga

SEQ ID NO: 482465 - RNA, 22 nt, Artificial Sequence
  Synthetic
aauaaaacaaauagcagugaga

SEQ ID NO: 482466 - RNA, 23 nt, Artificial Sequence
  Synthetic
gaauaaaacaaauagcagugaga

SEQ ID NO: 482467 - RNA, 24 nt, Artificial Sequence
  Synthetic
agaauaaaacaaauagcagugaga

SEQ ID NO: 482468 - RNA, 18 nt, Artificial Sequence
  Synthetic
aaaaccaaaagagugaga

SEQ ID NO: 482469 - RNA, 19 nt, Artificial Sequence
  Synthetic
aaaaaccaaaagagugaga

SEQ ID NO: 482470 - RNA, 20 nt, Artificial Sequence
  Synthetic
gaaaaaccaaaagagugaga

SEQ ID NO: 482471 - RNA, 21 nt, Artificial Sequence
  Synthetic
ugaaaaaccaaaagagugaga

SEQ ID NO: 482472 - RNA, 22 nt, Artificial Sequence
  Synthetic
augaaaaaccaaaagagugaga

SEQ ID NO: 482473 - RNA, 23 nt, Artificial Sequence
  Synthetic
aaugaaaaaccaaaagagugaga

SEQ ID NO: 482474 - RNA, 24 nt, Artificial Sequence
  Synthetic
gaaugaaaaaccaaaagagugaga

SEQ ID NO: 482475 - RNA, 18 nt, Artificial Sequence
  Synthetic
ggugaggucagagugaga

SEQ ID NO: 482476 - RNA, 19 nt, Artificial Sequence
  Synthetic
aggugaggucagagugaga

SEQ ID NO: 482477 - RNA, 20 nt, Artificial Sequence
  Synthetic
aaggugaggucagagugaga

SEQ ID NO: 482478 - RNA, 21 nt, Artificial Sequence
  Synthetic
aaaggugaggucagagugaga

SEQ ID NO: 482479 - RNA, 22 nt, Artificial Sequence
  Synthetic
caaaggugaggucagagugaga

SEQ ID NO: 482480 - RNA, 23 nt, Artificial Sequence
  Synthetic
acaaaggugaggucagagugaga

SEQ ID NO: 482481 - RNA, 24 nt, Artificial Sequence
  Synthetic
aacaaaggugaggucagagugaga

SEQ ID NO: 482482 - RNA, 18 nt, Artificial Sequence
  Synthetic
guuccccagagagugaga

SEQ ID NO: 482483 - RNA, 19 nt, Artificial Sequence
  Synthetic
aguuccccagagagugaga

SEQ ID NO: 482484 - RNA, 20 nt, Artificial Sequence
  Synthetic
aaguuccccagagagugaga

SEQ ID NO: 482485 - RNA, 21 nt, Artificial Sequence
  Synthetic
gaaguuccccagagagugaga

SEQ ID NO: 482486 - RNA, 22 nt, Artificial Sequence
  Synthetic
cgaaguuccccagagagugaga

SEQ ID NO: 482487 - RNA, 23 nt, Artificial Sequence
  Synthetic
ccgaaguuccccagagagugaga

SEQ ID NO: 482488 - RNA, 24 nt, Artificial Sequence
  Synthetic
cccgaaguuccccagagagugaga

SEQ ID NO: 482489 - RNA, 18 nt, Artificial Sequence
  Synthetic
gaaaucaggcuagugaga

SEQ ID NO: 482490 - RNA, 19 nt, Artificial Sequence
  Synthetic
ugaaaucaggcuagugaga

SEQ ID NO: 482491 - RNA, 20 nt, Artificial Sequence
  Synthetic
uugaaaucaggcuagugaga

SEQ ID NO: 482492 - RNA, 21 nt, Artificial Sequence
  Synthetic
auugaaaucaggcuagugaga

SEQ ID NO: 482493 - RNA, 22 nt, Artificial Sequence
  Synthetic
aauugaaaucaggcuagugaga

SEQ ID NO: 482494 - RNA, 23 nt, Artificial Sequence
  Synthetic
caauugaaaucaggcuagugaga

SEQ ID NO: 482495 - RNA, 24 nt, Artificial Sequence
  Synthetic
gcaauugaaaucaggcuagugaga

SEQ ID NO: 482496 - RNA, 18 nt, Artificial Sequence
  Synthetic
gguaaggggcuagugaga

SEQ ID NO: 482497 - RNA, 19 nt, Artificial Sequence
  Synthetic
agguaaggggcuagugaga

SEQ ID NO: 482498 - RNA, 20 nt, Artificial Sequence
  Synthetic
gagguaaggggcuagugaga

SEQ ID NO: 482499 - RNA, 21 nt, Artificial Sequence
  Synthetic
ggagguaaggggcuagugaga

SEQ ID NO: 482500 - RNA, 22 nt, Artificial Sequence
  Synthetic
uggagguaaggggcuagugaga

SEQ ID NO: 482501 - RNA, 23 nt, Artificial Sequence
  Synthetic
guggagguaaggggcuagugaga

SEQ ID NO: 482502 - RNA, 24 nt, Artificial Sequence
  Synthetic
aguggagguaaggggcuagugaga

SEQ ID NO: 482503 - RNA, 18 nt, Artificial Sequence
  Synthetic
ucaugagugaucgugaga

SEQ ID NO: 482504 - RNA, 19 nt, Artificial Sequence
  Synthetic
aucaugagugaucgugaga

SEQ ID NO: 482505 - RNA, 20 nt, Artificial Sequence
  Synthetic
caucaugagugaucgugaga

SEQ ID NO: 482506 - RNA, 21 nt, Artificial Sequence
  Synthetic
acaucaugagugaucgugaga

SEQ ID NO: 482507 - RNA, 22 nt, Artificial Sequence
  Synthetic
aacaucaugagugaucgugaga

SEQ ID NO: 482508 - RNA, 23 nt, Artificial Sequence
  Synthetic
caacaucaugagugaucgugaga

SEQ ID NO: 482509 - RNA, 24 nt, Artificial Sequence
  Synthetic
gcaacaucaugagugaucgugaga

SEQ ID NO: 482510 - RNA, 18 nt, Artificial Sequence
  Synthetic
aacucaaggaaggugaga

SEQ ID NO: 482511 - RNA, 19 nt, Artificial Sequence
  Synthetic
uaacucaaggaaggugaga

SEQ ID NO: 482512 - RNA, 20 nt, Artificial Sequence
  Synthetic
auaacucaaggaaggugaga

SEQ ID NO: 482513 - RNA, 21 nt, Artificial Sequence
  Synthetic
aauaacucaaggaaggugaga

SEQ ID NO: 482514 - RNA, 22 nt, Artificial Sequence
  Synthetic
caauaacucaaggaaggugaga

SEQ ID NO: 482515 - RNA, 23 nt, Artificial Sequence
  Synthetic
gcaauaacucaaggaaggugaga

SEQ ID NO: 482516 - RNA, 24 nt, Artificial Sequence
  Synthetic
agcaauaacucaaggaaggugaga

SEQ ID NO: 482517 - RNA, 18 nt, Artificial Sequence
  Synthetic
ucguggcauaaggugaga

SEQ ID NO: 482518 - RNA, 19 nt, Artificial Sequence
  Synthetic
aucguggcauaaggugaga

SEQ ID NO: 482519 - RNA, 20 nt, Artificial Sequence
  Synthetic
caucguggcauaaggugaga

SEQ ID NO: 482520 - RNA, 21 nt, Artificial Sequence
  Synthetic
ccaucguggcauaaggugaga

SEQ ID NO: 482521 - RNA, 22 nt, Artificial Sequence
  Synthetic
accaucguggcauaaggugaga

SEQ ID NO: 482522 - RNA, 23 nt, Artificial Sequence
  Synthetic
uaccaucguggcauaaggugaga

SEQ ID NO: 482523 - RNA, 24 nt, Artificial Sequence
  Synthetic
uuaccaucguggcauaaggugaga

SEQ ID NO: 482524 - RNA, 18 nt, Artificial Sequence
  Synthetic
ugaauaggagcggugaga

SEQ ID NO: 482525 - RNA, 19 nt, Artificial Sequence
  Synthetic
uugaauaggagcggugaga

SEQ ID NO: 482526 - RNA, 20 nt, Artificial Sequence
  Synthetic
guugaauaggagcggugaga

SEQ ID NO: 482527 - RNA, 21 nt, Artificial Sequence
  Synthetic
uguugaauaggagcggugaga

SEQ ID NO: 482528 - RNA, 22 nt, Artificial Sequence
  Synthetic
auguugaauaggagcggugaga

SEQ ID NO: 482529 - RNA, 23 nt, Artificial Sequence
  Synthetic
uauguugaauaggagcggugaga

SEQ ID NO: 482530 - RNA, 24 nt, Artificial Sequence
  Synthetic
cuauguugaauaggagcggugaga

SEQ ID NO: 482531 - RNA, 18 nt, Artificial Sequence
  Synthetic
aaggaacugggggugaga

SEQ ID NO: 482532 - RNA, 19 nt, Artificial Sequence
  Synthetic
gaaggaacugggggugaga

SEQ ID NO: 482533 - RNA, 20 nt, Artificial Sequence
  Synthetic
agaaggaacugggggugaga

SEQ ID NO: 482534 - RNA, 21 nt, Artificial Sequence
  Synthetic
aagaaggaacugggggugaga

SEQ ID NO: 482535 - RNA, 22 nt, Artificial Sequence
  Synthetic
gaagaaggaacugggggugaga

SEQ ID NO: 482536 - RNA, 23 nt, Artificial Sequence
  Synthetic
ggaagaaggaacugggggugaga

SEQ ID NO: 482537 - RNA, 24 nt, Artificial Sequence
  Synthetic
gggaagaaggaacugggggugaga

SEQ ID NO: 482538 - RNA, 18 nt, Artificial Sequence
  Synthetic
uguaaagaauuggugaga

SEQ ID NO: 482539 - RNA, 19 nt, Artificial Sequence
  Synthetic
guguaaagaauuggugaga

SEQ ID NO: 482540 - RNA, 20 nt, Artificial Sequence
  Synthetic
aguguaaagaauuggugaga

SEQ ID NO: 482541 - RNA, 21 nt, Artificial Sequence
  Synthetic
aaguguaaagaauuggugaga

SEQ ID NO: 482542 - RNA, 22 nt, Artificial Sequence
  Synthetic
aaaguguaaagaauuggugaga

SEQ ID NO: 482543 - RNA, 23 nt, Artificial Sequence
  Synthetic
uaaaguguaaagaauuggugaga

SEQ ID NO: 482544 - RNA, 24 nt, Artificial Sequence
  Synthetic
guaaaguguaaagaauuggugaga

SEQ ID NO: 482545 - RNA, 18 nt, Artificial Sequence
  Synthetic
gaaugaugcuuggugaga

SEQ ID NO: 482546 - RNA, 19 nt, Artificial Sequence
  Synthetic
agaaugaugcuuggugaga

SEQ ID NO: 482547 - RNA, 20 nt, Artificial Sequence
  Synthetic
cagaaugaugcuuggugaga

SEQ ID NO: 482548 - RNA, 21 nt, Artificial Sequence
  Synthetic
acagaaugaugcuuggugaga

SEQ ID NO: 482549 - RNA, 22 nt, Artificial Sequence
  Synthetic
aacagaaugaugcuuggugaga

SEQ ID NO: 482550 - RNA, 23 nt, Artificial Sequence
  Synthetic
uaacagaaugaugcuuggugaga

SEQ ID NO: 482551 - RNA, 24 nt, Artificial Sequence
  Synthetic
guaacagaaugaugcuuggugaga

SEQ ID NO: 482552 - RNA, 18 nt, Artificial Sequence
  Synthetic
cuuucaaucuaugugaga

SEQ ID NO: 482553 - RNA, 19 nt, Artificial Sequence
  Synthetic
gcuuucaaucuaugugaga

SEQ ID NO: 482554 - RNA, 20 nt, Artificial Sequence
  Synthetic
agcuuucaaucuaugugaga

SEQ ID NO: 482555 - RNA, 21 nt, Artificial Sequence
  Synthetic
aagcuuucaaucuaugugaga

SEQ ID NO: 482556 - RNA, 22 nt, Artificial Sequence
  Synthetic
gaagcuuucaaucuaugugaga

SEQ ID NO: 482557 - RNA, 23 nt, Artificial Sequence
  Synthetic
ggaagcuuucaaucuaugugaga

SEQ ID NO: 482558 - RNA, 24 nt, Artificial Sequence
  Synthetic
aggaagcuuucaaucuaugugaga

SEQ ID NO: 482559 - RNA, 18 nt, Artificial Sequence
  Synthetic
gauggcagaucugugaga

SEQ ID NO: 482560 - RNA, 19 nt, Artificial Sequence
  Synthetic
ggauggcagaucugugaga

SEQ ID NO: 482561 - RNA, 20 nt, Artificial Sequence
  Synthetic
aggauggcagaucugugaga

SEQ ID NO: 482562 - RNA, 21 nt, Artificial Sequence
  Synthetic
aaggauggcagaucugugaga

SEQ ID NO: 482563 - RNA, 22 nt, Artificial Sequence
  Synthetic
aaaggauggcagaucugugaga

SEQ ID NO: 482564 - RNA, 23 nt, Artificial Sequence
  Synthetic
caaaggauggcagaucugugaga

SEQ ID NO: 482565 - RNA, 24 nt, Artificial Sequence
  Synthetic
ccaaaggauggcagaucugugaga

SEQ ID NO: 482566 - RNA, 18 nt, Artificial Sequence
  Synthetic
uuuauguacagugugaga

SEQ ID NO: 482567 - RNA, 19 nt, Artificial Sequence
  Synthetic
guuuauguacagugugaga

SEQ ID NO: 482568 - RNA, 20 nt, Artificial Sequence
  Synthetic
uguuuauguacagugugaga

SEQ ID NO: 482569 - RNA, 21 nt, Artificial Sequence
  Synthetic
auguuuauguacagugugaga

SEQ ID NO: 482570 - RNA, 22 nt, Artificial Sequence
  Synthetic
uauguuuauguacagugugaga

SEQ ID NO: 482571 - RNA, 23 nt, Artificial Sequence
  Synthetic
uuauguuuauguacagugugaga

SEQ ID NO: 482572 - RNA, 24 nt, Artificial Sequence
  Synthetic
uuuauguuuauguacagugugaga

SEQ ID NO: 482573 - RNA, 18 nt, Artificial Sequence
  Synthetic
uuucucuaaugugugaga

SEQ ID NO: 482574 - RNA, 19 nt, Artificial Sequence
  Synthetic
cuuucucuaaugugugaga

SEQ ID NO: 482575 - RNA, 20 nt, Artificial Sequence
  Synthetic
ucuuucucuaaugugugaga

SEQ ID NO: 482576 - RNA, 21 nt, Artificial Sequence
  Synthetic
cucuuucucuaaugugugaga

SEQ ID NO: 482577 - RNA, 22 nt, Artificial Sequence
  Synthetic
acucuuucucuaaugugugaga

SEQ ID NO: 482578 - RNA, 23 nt, Artificial Sequence
  Synthetic
aacucuuucucuaaugugugaga

SEQ ID NO: 482579 - RNA, 24 nt, Artificial Sequence
  Synthetic
uaacucuuucucuaaugugugaga

SEQ ID NO: 482580 - RNA, 22 nt, Artificial Sequence
  Synthetic
augugugugugugugugugaga

SEQ ID NO: 482581 - RNA, 23 nt, Artificial Sequence
  Synthetic
uaugugugugugugugugugaga

SEQ ID NO: 482582 - RNA, 24 nt, Artificial Sequence
  Synthetic
guaugugugugugugugugugaga

SEQ ID NO: 482583 - RNA, 18 nt, Artificial Sequence
  Synthetic
accacagaaguugugaga

SEQ ID NO: 482584 - RNA, 19 nt, Artificial Sequence
  Synthetic
caccacagaaguugugaga

SEQ ID NO: 482585 - RNA, 20 nt, Artificial Sequence
  Synthetic
acaccacagaaguugugaga

SEQ ID NO: 482586 - RNA, 21 nt, Artificial Sequence
  Synthetic
aacaccacagaaguugugaga

SEQ ID NO: 482587 - RNA, 22 nt, Artificial Sequence
  Synthetic
aaacaccacagaaguugugaga

SEQ ID NO: 482588 - RNA, 23 nt, Artificial Sequence
  Synthetic
aaaacaccacagaaguugugaga

SEQ ID NO: 482589 - RNA, 24 nt, Artificial Sequence
  Synthetic
gaaaacaccacagaaguugugaga

SEQ ID NO: 482590 - RNA, 18 nt, Artificial Sequence
  Synthetic
uuaacaaugaaauugaga

SEQ ID NO: 482591 - RNA, 19 nt, Artificial Sequence
  Synthetic
guuaacaaugaaauugaga

SEQ ID NO: 482592 - RNA, 20 nt, Artificial Sequence
  Synthetic
gguuaacaaugaaauugaga

SEQ ID NO: 482593 - RNA, 21 nt, Artificial Sequence
  Synthetic
ggguuaacaaugaaauugaga

SEQ ID NO: 482594 - RNA, 22 nt, Artificial Sequence
  Synthetic
gggguuaacaaugaaauugaga

SEQ ID NO: 482595 - RNA, 23 nt, Artificial Sequence
  Synthetic
ugggguuaacaaugaaauugaga

SEQ ID NO: 482596 - RNA, 24 nt, Artificial Sequence
  Synthetic
uugggguuaacaaugaaauugaga

SEQ ID NO: 482597 - RNA, 18 nt, Artificial Sequence
  Synthetic
ugccuauaggaauugaga

SEQ ID NO: 482598 - RNA, 19 nt, Artificial Sequence
  Synthetic
augccuauaggaauugaga

SEQ ID NO: 482599 - RNA, 20 nt, Artificial Sequence
  Synthetic
aaugccuauaggaauugaga

SEQ ID NO: 482600 - RNA, 21 nt, Artificial Sequence
  Synthetic
aaaugccuauaggaauugaga

SEQ ID NO: 482601 - RNA, 22 nt, Artificial Sequence
  Synthetic
gaaaugccuauaggaauugaga

SEQ ID NO: 482602 - RNA, 23 nt, Artificial Sequence
  Synthetic
agaaaugccuauaggaauugaga

SEQ ID NO: 482603 - RNA, 24 nt, Artificial Sequence
  Synthetic
gagaaaugccuauaggaauugaga

SEQ ID NO: 482604 - RNA, 18 nt, Artificial Sequence
  Synthetic
aaaccaccauaauugaga

SEQ ID NO: 482605 - RNA, 19 nt, Artificial Sequence
  Synthetic
aaaaccaccauaauugaga

SEQ ID NO: 482606 - RNA, 20 nt, Artificial Sequence
  Synthetic
uaaaaccaccauaauugaga

SEQ ID NO: 482607 - RNA, 21 nt, Artificial Sequence
  Synthetic
cuaaaaccaccauaauugaga

SEQ ID NO: 482608 - RNA, 22 nt, Artificial Sequence
  Synthetic
gcuaaaaccaccauaauugaga

SEQ ID NO: 482609 - RNA, 23 nt, Artificial Sequence
  Synthetic
agcuaaaaccaccauaauugaga

SEQ ID NO: 482610 - RNA, 24 nt, Artificial Sequence
  Synthetic
uagcuaaaaccaccauaauugaga

SEQ ID NO: 482611 - RNA, 18 nt, Artificial Sequence
  Synthetic
uuuuuuuuuuaauugaga

SEQ ID NO: 482612 - RNA, 19 nt, Artificial Sequence
  Synthetic
uuuuuuuuuuuaauugaga

SEQ ID NO: 482613 - RNA, 20 nt, Artificial Sequence
  Synthetic
uuuuuuuuuuuuaauugaga

SEQ ID NO: 482614 - RNA, 21 nt, Artificial Sequence
  Synthetic
uuuuuuuuuuuuuaauugaga

SEQ ID NO: 482615 - RNA, 22 nt, Artificial Sequence
  Synthetic
guuuuuuuuuuuuuaauugaga

SEQ ID NO: 482616 - RNA, 23 nt, Artificial Sequence
  Synthetic
uguuuuuuuuuuuuuaauugaga

SEQ ID NO: 482617 - RNA, 24 nt, Artificial Sequence
  Synthetic
uuguuuuuuuuuuuuuaauugaga

SEQ ID NO: 482618 - RNA, 18 nt, Artificial Sequence
  Synthetic
gcacacauuccauugaga

SEQ ID NO: 482619 - RNA, 19 nt, Artificial Sequence
  Synthetic
ugcacacauuccauugaga

SEQ ID NO: 482620 - RNA, 20 nt, Artificial Sequence
  Synthetic
gugcacacauuccauugaga

SEQ ID NO: 482621 - RNA, 21 nt, Artificial Sequence
  Synthetic
ggugcacacauuccauugaga

SEQ ID NO: 482622 - RNA, 22 nt, Artificial Sequence
  Synthetic
aggugcacacauuccauugaga

SEQ ID NO: 482623 - RNA, 23 nt, Artificial Sequence
  Synthetic
aaggugcacacauuccauugaga

SEQ ID NO: 482624 - RNA, 24 nt, Artificial Sequence
  Synthetic
aaaggugcacacauuccauugaga

SEQ ID NO: 482625 - RNA, 18 nt, Artificial Sequence
  Synthetic
uuuauuuauuuauugaga

SEQ ID NO: 482626 - RNA, 19 nt, Artificial Sequence
  Synthetic
auuuauuuauuuauugaga

SEQ ID NO: 482627 - RNA, 20 nt, Artificial Sequence
  Synthetic
uauuuauuuauuuauugaga

SEQ ID NO: 482628 - RNA, 21 nt, Artificial Sequence
  Synthetic
uuauuuauuuauuuauugaga

SEQ ID NO: 482629 - RNA, 22 nt, Artificial Sequence
  Synthetic
uuuauuuauuuauuuauugaga

SEQ ID NO: 482630 - RNA, 23 nt, Artificial Sequence
  Synthetic
auuuauuuauuuauuuauugaga

SEQ ID NO: 482631 - RNA, 24 nt, Artificial Sequence
  Synthetic
uauuuauuuauuuauuuauugaga

SEQ ID NO: 482632 - RNA, 18 nt, Artificial Sequence
  Synthetic
gaaaauaauaacuugaga

SEQ ID NO: 482633 - RNA, 19 nt, Artificial Sequence
  Synthetic
ugaaaauaauaacuugaga

SEQ ID NO: 482634 - RNA, 20 nt, Artificial Sequence
  Synthetic
uugaaaauaauaacuugaga

SEQ ID NO: 482635 - RNA, 21 nt, Artificial Sequence
  Synthetic
uuugaaaauaauaacuugaga

SEQ ID NO: 482636 - RNA, 22 nt, Artificial Sequence
  Synthetic
auuugaaaauaauaacuugaga

SEQ ID NO: 482637 - RNA, 23 nt, Artificial Sequence
  Synthetic
cauuugaaaauaauaacuugaga

SEQ ID NO: 482638 - RNA, 24 nt, Artificial Sequence
  Synthetic
gcauuugaaaauaauaacuugaga

SEQ ID NO: 482639 - RNA, 18 nt, Artificial Sequence
  Synthetic
auaaagacauacuugaga

SEQ ID NO: 482640 - RNA, 19 nt, Artificial Sequence
  Synthetic
gauaaagacauacuugaga

SEQ ID NO: 482641 - RNA, 20 nt, Artificial Sequence
  Synthetic
ugauaaagacauacuugaga

SEQ ID NO: 482642 - RNA, 21 nt, Artificial Sequence
  Synthetic
gugauaaagacauacuugaga

SEQ ID NO: 482643 - RNA, 22 nt, Artificial Sequence
  Synthetic
ugugauaaagacauacuugaga

SEQ ID NO: 482644 - RNA, 23 nt, Artificial Sequence
  Synthetic
cugugauaaagacauacuugaga

SEQ ID NO: 482645 - RNA, 24 nt, Artificial Sequence
  Synthetic
gcugugauaaagacauacuugaga

SEQ ID NO: 482646 - RNA, 18 nt, Artificial Sequence
  Synthetic
acugcgggauacuugaga

SEQ ID NO: 482647 - RNA, 19 nt, Artificial Sequence
  Synthetic
gacugcgggauacuugaga

SEQ ID NO: 482648 - RNA, 20 nt, Artificial Sequence
  Synthetic
agacugcgggauacuugaga

SEQ ID NO: 482649 - RNA, 21 nt, Artificial Sequence
  Synthetic
uagacugcgggauacuugaga

SEQ ID NO: 482650 - RNA, 22 nt, Artificial Sequence
  Synthetic
guagacugcgggauacuugaga

SEQ ID NO: 482651 - RNA, 23 nt, Artificial Sequence
  Synthetic
aguagacugcgggauacuugaga

SEQ ID NO: 482652 - RNA, 24 nt, Artificial Sequence
  Synthetic
caguagacugcgggauacuugaga

SEQ ID NO: 482653 - RNA, 18 nt, Artificial Sequence
  Synthetic
auguguguucccuugaga

SEQ ID NO: 482654 - RNA, 19 nt, Artificial Sequence
  Synthetic
aauguguguucccuugaga

SEQ ID NO: 482655 - RNA, 20 nt, Artificial Sequence
  Synthetic
caauguguguucccuugaga

SEQ ID NO: 482656 - RNA, 21 nt, Artificial Sequence
  Synthetic
ccaauguguguucccuugaga

SEQ ID NO: 482657 - RNA, 22 nt, Artificial Sequence
  Synthetic
gccaauguguguucccuugaga

SEQ ID NO: 482658 - RNA, 23 nt, Artificial Sequence
  Synthetic
agccaauguguguucccuugaga

SEQ ID NO: 482659 - RNA, 24 nt, Artificial Sequence
  Synthetic
gagccaauguguguucccuugaga

SEQ ID NO: 482660 - RNA, 18 nt, Artificial Sequence
  Synthetic
gaaauugaggccuugaga

SEQ ID NO: 482661 - RNA, 19 nt, Artificial Sequence
  Synthetic
agaaauugaggccuugaga

SEQ ID NO: 482662 - RNA, 20 nt, Artificial Sequence
  Synthetic
aagaaauugaggccuugaga

SEQ ID NO: 482663 - RNA, 21 nt, Artificial Sequence
  Synthetic
caagaaauugaggccuugaga

SEQ ID NO: 482664 - RNA, 22 nt, Artificial Sequence
  Synthetic
ucaagaaauugaggccuugaga

SEQ ID NO: 482665 - RNA, 23 nt, Artificial Sequence
  Synthetic
cucaagaaauugaggccuugaga

SEQ ID NO: 482666 - RNA, 24 nt, Artificial Sequence
  Synthetic
acucaagaaauugaggccuugaga

SEQ ID NO: 482667 - RNA, 18 nt, Artificial Sequence
  Synthetic
uuucucaggcucuugaga

SEQ ID NO: 482668 - RNA, 19 nt, Artificial Sequence
  Synthetic
guuucucaggcucuugaga

SEQ ID NO: 482669 - RNA, 20 nt, Artificial Sequence
  Synthetic
cguuucucaggcucuugaga

SEQ ID NO: 482670 - RNA, 21 nt, Artificial Sequence
  Synthetic
ucguuucucaggcucuugaga

SEQ ID NO: 482671 - RNA, 22 nt, Artificial Sequence
  Synthetic
gucguuucucaggcucuugaga

SEQ ID NO: 482672 - RNA, 23 nt, Artificial Sequence
  Synthetic
ugucguuucucaggcucuugaga

SEQ ID NO: 482673 - RNA, 24 nt, Artificial Sequence
  Synthetic
cugucguuucucaggcucuugaga

SEQ ID NO: 482674 - RNA, 18 nt, Artificial Sequence
  Synthetic
auuaagguucucuugaga

SEQ ID NO: 482675 - RNA, 19 nt, Artificial Sequence
  Synthetic
aauuaagguucucuugaga

SEQ ID NO: 482676 - RNA, 20 nt, Artificial Sequence
  Synthetic
aaauuaagguucucuugaga

SEQ ID NO: 482677 - RNA, 21 nt, Artificial Sequence
  Synthetic
aaaauuaagguucucuugaga

SEQ ID NO: 482678 - RNA, 22 nt, Artificial Sequence
  Synthetic
uaaaauuaagguucucuugaga

SEQ ID NO: 482679 - RNA, 23 nt, Artificial Sequence
  Synthetic
cuaaaauuaagguucucuugaga

SEQ ID NO: 482680 - RNA, 24 nt, Artificial Sequence
  Synthetic
ucuaaaauuaagguucucuugaga

SEQ ID NO: 482681 - RNA, 18 nt, Artificial Sequence
  Synthetic
ugugcagacuucuugaga

SEQ ID NO: 482682 - RNA, 19 nt, Artificial Sequence
  Synthetic
augugcagacuucuugaga

SEQ ID NO: 482683 - RNA, 20 nt, Artificial Sequence
  Synthetic
uaugugcagacuucuugaga

SEQ ID NO: 482684 - RNA, 21 nt, Artificial Sequence
  Synthetic
uuaugugcagacuucuugaga

SEQ ID NO: 482685 - RNA, 22 nt, Artificial Sequence
  Synthetic
cuuaugugcagacuucuugaga

SEQ ID NO: 482686 - RNA, 23 nt, Artificial Sequence
  Synthetic
ucuuaugugcagacuucuugaga

SEQ ID NO: 482687 - RNA, 24 nt, Artificial Sequence
  Synthetic
cucuuaugugcagacuucuugaga

SEQ ID NO: 482688 - RNA, 18 nt, Artificial Sequence
  Synthetic
ugguaugaguucuugaga

SEQ ID NO: 482689 - RNA, 19 nt, Artificial Sequence
  Synthetic
uugguaugaguucuugaga

SEQ ID NO: 482690 - RNA, 20 nt, Artificial Sequence
  Synthetic
auugguaugaguucuugaga

SEQ ID NO: 482691 - RNA, 21 nt, Artificial Sequence
  Synthetic
aauugguaugaguucuugaga

SEQ ID NO: 482692 - RNA, 22 nt, Artificial Sequence
  Synthetic
aaauugguaugaguucuugaga

SEQ ID NO: 482693 - RNA, 23 nt, Artificial Sequence
  Synthetic
uaaauugguaugaguucuugaga

SEQ ID NO: 482694 - RNA, 24 nt, Artificial Sequence
  Synthetic
uuaaauugguaugaguucuugaga

SEQ ID NO: 482695 - RNA, 18 nt, Artificial Sequence
  Synthetic
gcugugaucaaguugaga

SEQ ID NO: 482696 - RNA, 19 nt, Artificial Sequence
  Synthetic
ggcugugaucaaguugaga

SEQ ID NO: 482697 - RNA, 20 nt, Artificial Sequence
  Synthetic
uggcugugaucaaguugaga

SEQ ID NO: 482698 - RNA, 21 nt, Artificial Sequence
  Synthetic
auggcugugaucaaguugaga

SEQ ID NO: 482699 - RNA, 22 nt, Artificial Sequence
  Synthetic
gauggcugugaucaaguugaga

SEQ ID NO: 482700 - RNA, 23 nt, Artificial Sequence
  Synthetic
cgauggcugugaucaaguugaga

SEQ ID NO: 482701 - RNA, 24 nt, Artificial Sequence
  Synthetic
acgauggcugugaucaaguugaga

SEQ ID NO: 482702 - RNA, 18 nt, Artificial Sequence
  Synthetic
caaguaaaucaguugaga

SEQ ID NO: 482703 - RNA, 19 nt, Artificial Sequence
  Synthetic
acaaguaaaucaguugaga

SEQ ID NO: 482704 - RNA, 20 nt, Artificial Sequence
  Synthetic
gacaaguaaaucaguugaga

SEQ ID NO: 482705 - RNA, 21 nt, Artificial Sequence
  Synthetic
cgacaaguaaaucaguugaga

SEQ ID NO: 482706 - RNA, 22 nt, Artificial Sequence
  Synthetic
ccgacaaguaaaucaguugaga

SEQ ID NO: 482707 - RNA, 23 nt, Artificial Sequence
  Synthetic
accgacaaguaaaucaguugaga

SEQ ID NO: 482708 - RNA, 24 nt, Artificial Sequence
  Synthetic
caccgacaaguaaaucaguugaga

SEQ ID NO: 482709 - RNA, 18 nt, Artificial Sequence
  Synthetic
caagaaacauuguugaga

SEQ ID NO: 482710 - RNA, 19 nt, Artificial Sequence
  Synthetic
ccaagaaacauuguugaga

SEQ ID NO: 482711 - RNA, 20 nt, Artificial Sequence
  Synthetic
uccaagaaacauuguugaga

SEQ ID NO: 482712 - RNA, 21 nt, Artificial Sequence
  Synthetic
guccaagaaacauuguugaga

SEQ ID NO: 482713 - RNA, 22 nt, Artificial Sequence
  Synthetic
uguccaagaaacauuguugaga

SEQ ID NO: 482714 - RNA, 23 nt, Artificial Sequence
  Synthetic
auguccaagaaacauuguugaga

SEQ ID NO: 482715 - RNA, 24 nt, Artificial Sequence
  Synthetic
aauguccaagaaacauuguugaga

SEQ ID NO: 482716 - RNA, 18 nt, Artificial Sequence
  Synthetic
auggaaacauauuugaga

SEQ ID NO: 482717 - RNA, 19 nt, Artificial Sequence
  Synthetic
uauggaaacauauuugaga

SEQ ID NO: 482718 - RNA, 20 nt, Artificial Sequence
  Synthetic
cuauggaaacauauuugaga

SEQ ID NO: 482719 - RNA, 21 nt, Artificial Sequence
  Synthetic
acuauggaaacauauuugaga

SEQ ID NO: 482720 - RNA, 22 nt, Artificial Sequence
  Synthetic
uacuauggaaacauauuugaga

SEQ ID NO: 482721 - RNA, 23 nt, Artificial Sequence
  Synthetic
uuacuauggaaacauauuugaga

SEQ ID NO: 482722 - RNA, 24 nt, Artificial Sequence
  Synthetic
uuuacuauggaaacauauuugaga

SEQ ID NO: 482723 - RNA, 18 nt, Artificial Sequence
  Synthetic
agcuuggucccuuugaga

SEQ ID NO: 482724 - RNA, 19 nt, Artificial Sequence
  Synthetic
cagcuuggucccuuugaga

SEQ ID NO: 482725 - RNA, 20 nt, Artificial Sequence
  Synthetic
acagcuuggucccuuugaga

SEQ ID NO: 482726 - RNA, 21 nt, Artificial Sequence
  Synthetic
cacagcuuggucccuuugaga

SEQ ID NO: 482727 - RNA, 22 nt, Artificial Sequence
  Synthetic
ucacagcuuggucccuuugaga

SEQ ID NO: 482728 - RNA, 23 nt, Artificial Sequence
  Synthetic
uucacagcuuggucccuuugaga

SEQ ID NO: 482729 - RNA, 24 nt, Artificial Sequence
  Synthetic
auucacagcuuggucccuuugaga

SEQ ID NO: 482730 - RNA, 18 nt, Artificial Sequence
  Synthetic
agguaaaaggguuugaga

SEQ ID NO: 482731 - RNA, 19 nt, Artificial Sequence
  Synthetic
uagguaaaaggguuugaga

SEQ ID NO: 482732 - RNA, 20 nt, Artificial Sequence
  Synthetic
auagguaaaaggguuugaga

SEQ ID NO: 482733 - RNA, 21 nt, Artificial Sequence
  Synthetic
uauagguaaaaggguuugaga

SEQ ID NO: 482734 - RNA, 22 nt, Artificial Sequence
  Synthetic
guauagguaaaaggguuugaga

SEQ ID NO: 482735 - RNA, 23 nt, Artificial Sequence
  Synthetic
gguauagguaaaaggguuugaga

SEQ ID NO: 482736 - RNA, 24 nt, Artificial Sequence
  Synthetic
ggguauagguaaaaggguuugaga

SEQ ID NO: 482737 - RNA, 18 nt, Artificial Sequence
  Synthetic
guuuuguuuuguuugaga

SEQ ID NO: 482738 - RNA, 19 nt, Artificial Sequence
  Synthetic
uguuuuguuuuguuugaga

SEQ ID NO: 482739 - RNA, 20 nt, Artificial Sequence
  Synthetic
uuguuuuguuuuguuugaga

SEQ ID NO: 482740 - RNA, 21 nt, Artificial Sequence
  Synthetic
uuuguuuuguuuuguuugaga

SEQ ID NO: 482741 - RNA, 22 nt, Artificial Sequence
  Synthetic
uuuuguuuuguuuuguuugaga

SEQ ID NO: 482742 - RNA, 23 nt, Artificial Sequence
  Synthetic
guuuuguuuuguuuuguuugaga

SEQ ID NO: 482743 - RNA, 24 nt, Artificial Sequence
  Synthetic
uguuuuguuuuguuuuguuugaga

SEQ ID NO: 482744 - RNA, 18 nt, Artificial Sequence
  Synthetic
auuucacuuaaaaauaga

SEQ ID NO: 482745 - RNA, 19 nt, Artificial Sequence
  Synthetic
gauuucacuuaaaaauaga

SEQ ID NO: 482746 - RNA, 20 nt, Artificial Sequence
  Synthetic
ggauuucacuuaaaaauaga

SEQ ID NO: 482747 - RNA, 21 nt, Artificial Sequence
  Synthetic
uggauuucacuuaaaaauaga

SEQ ID NO: 482748 - RNA, 22 nt, Artificial Sequence
  Synthetic
uuggauuucacuuaaaaauaga

SEQ ID NO: 482749 - RNA, 23 nt, Artificial Sequence
  Synthetic
uuuggauuucacuuaaaaauaga

SEQ ID NO: 482750 - RNA, 24 nt, Artificial Sequence
  Synthetic
uuuuggauuucacuuaaaaauaga

SEQ ID NO: 482751 - RNA, 18 nt, Artificial Sequence
  Synthetic
gaaagaaaauaaaauaga

SEQ ID NO: 482752 - RNA, 19 nt, Artificial Sequence
  Synthetic
ggaaagaaaauaaaauaga

SEQ ID NO: 482753 - RNA, 20 nt, Artificial Sequence
  Synthetic
aggaaagaaaauaaaauaga

SEQ ID NO: 482754 - RNA, 21 nt, Artificial Sequence
  Synthetic
gaggaaagaaaauaaaauaga

SEQ ID NO: 482755 - RNA, 22 nt, Artificial Sequence
  Synthetic
agaggaaagaaaauaaaauaga

SEQ ID NO: 482756 - RNA, 23 nt, Artificial Sequence
  Synthetic
aagaggaaagaaaauaaaauaga

SEQ ID NO: 482757 - RNA, 24 nt, Artificial Sequence
  Synthetic
gaagaggaaagaaaauaaaauaga

SEQ ID NO: 482758 - RNA, 18 nt, Artificial Sequence
  Synthetic
auaaauaauuaaaauaga

SEQ ID NO: 482759 - RNA, 19 nt, Artificial Sequence
  Synthetic
cauaaauaauuaaaauaga

SEQ ID NO: 482760 - RNA, 20 nt, Artificial Sequence
  Synthetic
gcauaaauaauuaaaauaga

SEQ ID NO: 482761 - RNA, 21 nt, Artificial Sequence
  Synthetic
ugcauaaauaauuaaaauaga

SEQ ID NO: 482762 - RNA, 22 nt, Artificial Sequence
  Synthetic
uugcauaaauaauuaaaauaga

SEQ ID NO: 482763 - RNA, 23 nt, Artificial Sequence
  Synthetic
cuugcauaaauaauuaaaauaga

SEQ ID NO: 482764 - RNA, 24 nt, Artificial Sequence
  Synthetic
ucuugcauaaauaauuaaaauaga

SEQ ID NO: 482765 - RNA, 18 nt, Artificial Sequence
  Synthetic
uaggauuagacaaauaga

SEQ ID NO: 482766 - RNA, 19 nt, Artificial Sequence
  Synthetic
auaggauuagacaaauaga

SEQ ID NO: 482767 - RNA, 20 nt, Artificial Sequence
  Synthetic
gauaggauuagacaaauaga

SEQ ID NO: 482768 - RNA, 21 nt, Artificial Sequence
  Synthetic
agauaggauuagacaaauaga

SEQ ID NO: 482769 - RNA, 22 nt, Artificial Sequence
  Synthetic
uagauaggauuagacaaauaga

SEQ ID NO: 482770 - RNA, 23 nt, Artificial Sequence
  Synthetic
auagauaggauuagacaaauaga

SEQ ID NO: 482771 - RNA, 24 nt, Artificial Sequence
  Synthetic
uauagauaggauuagacaaauaga

SEQ ID NO: 482772 - RNA, 18 nt, Artificial Sequence
  Synthetic
cuaagaaauucaaauaga

SEQ ID NO: 482773 - RNA, 19 nt, Artificial Sequence
  Synthetic
ucuaagaaauucaaauaga

SEQ ID NO: 482774 - RNA, 20 nt, Artificial Sequence
  Synthetic
uucuaagaaauucaaauaga

SEQ ID NO: 482775 - RNA, 21 nt, Artificial Sequence
  Synthetic
guucuaagaaauucaaauaga

SEQ ID NO: 482776 - RNA, 22 nt, Artificial Sequence
  Synthetic
gguucuaagaaauucaaauaga

SEQ ID NO: 482777 - RNA, 23 nt, Artificial Sequence
  Synthetic
ugguucuaagaaauucaaauaga

SEQ ID NO: 482778 - RNA, 24 nt, Artificial Sequence
  Synthetic
augguucuaagaaauucaaauaga

SEQ ID NO: 482779 - RNA, 18 nt, Artificial Sequence
  Synthetic
cuaggguguagaaauaga

SEQ ID NO: 482780 - RNA, 19 nt, Artificial Sequence
  Synthetic
ucuaggguguagaaauaga

SEQ ID NO: 482781 - RNA, 20 nt, Artificial Sequence
  Synthetic
gucuaggguguagaaauaga

SEQ ID NO: 482782 - RNA, 21 nt, Artificial Sequence
  Synthetic
agucuaggguguagaaauaga

SEQ ID NO: 482783 - RNA, 22 nt, Artificial Sequence
  Synthetic
gagucuaggguguagaaauaga

SEQ ID NO: 482784 - RNA, 23 nt, Artificial Sequence
  Synthetic
agagucuaggguguagaaauaga

SEQ ID NO: 482785 - RNA, 24 nt, Artificial Sequence
  Synthetic
cagagucuaggguguagaaauaga

SEQ ID NO: 482786 - RNA, 18 nt, Artificial Sequence
  Synthetic
cuuuuguguagaaauaga

SEQ ID NO: 482787 - RNA, 19 nt, Artificial Sequence
  Synthetic
gcuuuuguguagaaauaga

SEQ ID NO: 482788 - RNA, 20 nt, Artificial Sequence
  Synthetic
agcuuuuguguagaaauaga

SEQ ID NO: 482789 - RNA, 21 nt, Artificial Sequence
  Synthetic
uagcuuuuguguagaaauaga

SEQ ID NO: 482790 - RNA, 22 nt, Artificial Sequence
  Synthetic
cuagcuuuuguguagaaauaga

SEQ ID NO: 482791 - RNA, 23 nt, Artificial Sequence
  Synthetic
ucuagcuuuuguguagaaauaga

SEQ ID NO: 482792 - RNA, 24 nt, Artificial Sequence
  Synthetic
cucuagcuuuuguguagaaauaga

SEQ ID NO: 482793 - RNA, 18 nt, Artificial Sequence
  Synthetic
uaaauacagggaaauaga

SEQ ID NO: 482794 - RNA, 19 nt, Artificial Sequence
  Synthetic
auaaauacagggaaauaga

SEQ ID NO: 482795 - RNA, 20 nt, Artificial Sequence
  Synthetic
gauaaauacagggaaauaga

SEQ ID NO: 482796 - RNA, 21 nt, Artificial Sequence
  Synthetic
agauaaauacagggaaauaga

SEQ ID NO: 482797 - RNA, 22 nt, Artificial Sequence
  Synthetic
aagauaaauacagggaaauaga

SEQ ID NO: 482798 - RNA, 23 nt, Artificial Sequence
  Synthetic
aaagauaaauacagggaaauaga

SEQ ID NO: 482799 - RNA, 24 nt, Artificial Sequence
  Synthetic
aaaagauaaauacagggaaauaga

SEQ ID NO: 482800 - RNA, 18 nt, Artificial Sequence
  Synthetic
cugggugaaugaaauaga

SEQ ID NO: 482801 - RNA, 19 nt, Artificial Sequence
  Synthetic
ccugggugaaugaaauaga

SEQ ID NO: 482802 - RNA, 20 nt, Artificial Sequence
  Synthetic
uccugggugaaugaaauaga

SEQ ID NO: 482803 - RNA, 21 nt, Artificial Sequence
  Synthetic
uuccugggugaaugaaauaga

SEQ ID NO: 482804 - RNA, 22 nt, Artificial Sequence
  Synthetic
auuccugggugaaugaaauaga

SEQ ID NO: 482805 - RNA, 23 nt, Artificial Sequence
  Synthetic
cauuccugggugaaugaaauaga

SEQ ID NO: 482806 - RNA, 24 nt, Artificial Sequence
  Synthetic
gcauuccugggugaaugaaauaga

SEQ ID NO: 482807 - RNA, 18 nt, Artificial Sequence
  Synthetic
uccacuuuaagcaauaga

SEQ ID NO: 482808 - RNA, 19 nt, Artificial Sequence
  Synthetic
uuccacuuuaagcaauaga

SEQ ID NO: 482809 - RNA, 20 nt, Artificial Sequence
  Synthetic
auuccacuuuaagcaauaga

SEQ ID NO: 482810 - RNA, 21 nt, Artificial Sequence
  Synthetic
uauuccacuuuaagcaauaga

SEQ ID NO: 482811 - RNA, 22 nt, Artificial Sequence
  Synthetic
auauuccacuuuaagcaauaga

SEQ ID NO: 482812 - RNA, 23 nt, Artificial Sequence
  Synthetic
aauauuccacuuuaagcaauaga

SEQ ID NO: 482813 - RNA, 24 nt, Artificial Sequence
  Synthetic
caauauuccacuuuaagcaauaga

SEQ ID NO: 482814 - RNA, 18 nt, Artificial Sequence
  Synthetic
uuucuguacuucaauaga

SEQ ID NO: 482815 - RNA, 19 nt, Artificial Sequence
  Synthetic
auuucuguacuucaauaga

SEQ ID NO: 482816 - RNA, 20 nt, Artificial Sequence
  Synthetic
aauuucuguacuucaauaga

SEQ ID NO: 482817 - RNA, 21 nt, Artificial Sequence
  Synthetic
aaauuucuguacuucaauaga

SEQ ID NO: 482818 - RNA, 22 nt, Artificial Sequence
  Synthetic
gaaauuucuguacuucaauaga

SEQ ID NO: 482819 - RNA, 23 nt, Artificial Sequence
  Synthetic
ugaaauuucuguacuucaauaga

SEQ ID NO: 482820 - RNA, 24 nt, Artificial Sequence
  Synthetic
augaaauuucuguacuucaauaga

SEQ ID NO: 482821 - RNA, 18 nt, Artificial Sequence
  Synthetic
uauaauuuuuucaauaga

SEQ ID NO: 482822 - RNA, 19 nt, Artificial Sequence
  Synthetic
uuauaauuuuuucaauaga

SEQ ID NO: 482823 - RNA, 20 nt, Artificial Sequence
  Synthetic
uuuauaauuuuuucaauaga

SEQ ID NO: 482824 - RNA, 21 nt, Artificial Sequence
  Synthetic
uuuuauaauuuuuucaauaga

SEQ ID NO: 482825 - RNA, 22 nt, Artificial Sequence
  Synthetic
auuuuauaauuuuuucaauaga

SEQ ID NO: 482826 - RNA, 23 nt, Artificial Sequence
  Synthetic
aauuuuauaauuuuuucaauaga

SEQ ID NO: 482827 - RNA, 24 nt, Artificial Sequence
  Synthetic
gaauuuuauaauuuuuucaauaga

SEQ ID NO: 482828 - RNA, 18 nt, Artificial Sequence
  Synthetic
aacugcaaacagaauaga

SEQ ID NO: 482829 - RNA, 19 nt, Artificial Sequence
  Synthetic
aaacugcaaacagaauaga

SEQ ID NO: 482830 - RNA, 20 nt, Artificial Sequence
  Synthetic
gaaacugcaaacagaauaga

SEQ ID NO: 482831 - RNA, 21 nt, Artificial Sequence
  Synthetic
ugaaacugcaaacagaauaga

SEQ ID NO: 482832 - RNA, 22 nt, Artificial Sequence
  Synthetic
uugaaacugcaaacagaauaga

SEQ ID NO: 482833 - RNA, 23 nt, Artificial Sequence
  Synthetic
cuugaaacugcaaacagaauaga

SEQ ID NO: 482834 - RNA, 24 nt, Artificial Sequence
  Synthetic
acuugaaacugcaaacagaauaga

SEQ ID NO: 482835 - RNA, 18 nt, Artificial Sequence
  Synthetic
caacaaacuaggaauaga

SEQ ID NO: 482836 - RNA, 19 nt, Artificial Sequence
  Synthetic
acaacaaacuaggaauaga

SEQ ID NO: 482837 - RNA, 20 nt, Artificial Sequence
  Synthetic
cacaacaaacuaggaauaga

SEQ ID NO: 482838 - RNA, 21 nt, Artificial Sequence
  Synthetic
acacaacaaacuaggaauaga

SEQ ID NO: 482839 - RNA, 22 nt, Artificial Sequence
  Synthetic
cacacaacaaacuaggaauaga

SEQ ID NO: 482840 - RNA, 23 nt, Artificial Sequence
  Synthetic
acacacaacaaacuaggaauaga

SEQ ID NO: 482841 - RNA, 24 nt, Artificial Sequence
  Synthetic
aacacacaacaaacuaggaauaga

SEQ ID NO: 482842 - RNA, 18 nt, Artificial Sequence
  Synthetic
agaaaaaauaauaauaga

SEQ ID NO: 482843 - RNA, 19 nt, Artificial Sequence
  Synthetic
uagaaaaaauaauaauaga

SEQ ID NO: 482844 - RNA, 20 nt, Artificial Sequence
  Synthetic
cuagaaaaaauaauaauaga

SEQ ID NO: 482845 - RNA, 21 nt, Artificial Sequence
  Synthetic
ucuagaaaaaauaauaauaga

SEQ ID NO: 482846 - RNA, 22 nt, Artificial Sequence
  Synthetic
aucuagaaaaaauaauaauaga

SEQ ID NO: 482847 - RNA, 23 nt, Artificial Sequence
  Synthetic
aaucuagaaaaaauaauaauaga

SEQ ID NO: 482848 - RNA, 24 nt, Artificial Sequence
  Synthetic
uaaucuagaaaaaauaauaauaga

SEQ ID NO: 482849 - RNA, 18 nt, Artificial Sequence
  Synthetic
uaauuugcaacuaauaga

SEQ ID NO: 482850 - RNA, 19 nt, Artificial Sequence
  Synthetic
auaauuugcaacuaauaga

SEQ ID NO: 482851 - RNA, 20 nt, Artificial Sequence
  Synthetic
aauaauuugcaacuaauaga

SEQ ID NO: 482852 - RNA, 21 nt, Artificial Sequence
  Synthetic
aaauaauuugcaacuaauaga

SEQ ID NO: 482853 - RNA, 22 nt, Artificial Sequence
  Synthetic
aaaauaauuugcaacuaauaga

SEQ ID NO: 482854 - RNA, 23 nt, Artificial Sequence
  Synthetic
uaaaauaauuugcaacuaauaga

SEQ ID NO: 482855 - RNA, 24 nt, Artificial Sequence
  Synthetic
uuaaaauaauuugcaacuaauaga

SEQ ID NO: 482856 - RNA, 18 nt, Artificial Sequence
  Synthetic
aagauugcuucuaauaga

SEQ ID NO: 482857 - RNA, 19 nt, Artificial Sequence
  Synthetic
uaagauugcuucuaauaga

SEQ ID NO: 482858 - RNA, 20 nt, Artificial Sequence
  Synthetic
cuaagauugcuucuaauaga

SEQ ID NO: 482859 - RNA, 21 nt, Artificial Sequence
  Synthetic
ucuaagauugcuucuaauaga

SEQ ID NO: 482860 - RNA, 22 nt, Artificial Sequence
  Synthetic
uucuaagauugcuucuaauaga

SEQ ID NO: 482861 - RNA, 23 nt, Artificial Sequence
  Synthetic
cuucuaagauugcuucuaauaga

SEQ ID NO: 482862 - RNA, 24 nt, Artificial Sequence
  Synthetic
gcuucuaagauugcuucuaauaga

SEQ ID NO: 482863 - RNA, 18 nt, Artificial Sequence
  Synthetic
auuuauauggcacauaga

SEQ ID NO: 482864 - RNA, 19 nt, Artificial Sequence
  Synthetic
cauuuauauggcacauaga

SEQ ID NO: 482865 - RNA, 20 nt, Artificial Sequence
  Synthetic
ucauuuauauggcacauaga

SEQ ID NO: 482866 - RNA, 21 nt, Artificial Sequence
  Synthetic
cucauuuauauggcacauaga

SEQ ID NO: 482867 - RNA, 22 nt, Artificial Sequence
  Synthetic
ucucauuuauauggcacauaga

SEQ ID NO: 482868 - RNA, 23 nt, Artificial Sequence
  Synthetic
uucucauuuauauggcacauaga

SEQ ID NO: 482869 - RNA, 24 nt, Artificial Sequence
  Synthetic
auucucauuuauauggcacauaga

SEQ ID NO: 482870 - RNA, 18 nt, Artificial Sequence
  Synthetic
agaaagcuggcacauaga

SEQ ID NO: 482871 - RNA, 19 nt, Artificial Sequence
  Synthetic
aagaaagcuggcacauaga

SEQ ID NO: 482872 - RNA, 20 nt, Artificial Sequence
  Synthetic
aaagaaagcuggcacauaga

SEQ ID NO: 482873 - RNA, 21 nt, Artificial Sequence
  Synthetic
caaagaaagcuggcacauaga

SEQ ID NO: 482874 - RNA, 22 nt, Artificial Sequence
  Synthetic
ccaaagaaagcuggcacauaga

SEQ ID NO: 482875 - RNA, 23 nt, Artificial Sequence
  Synthetic
uccaaagaaagcuggcacauaga

SEQ ID NO: 482876 - RNA, 24 nt, Artificial Sequence
  Synthetic
cuccaaagaaagcuggcacauaga

SEQ ID NO: 482877 - RNA, 18 nt, Artificial Sequence
  Synthetic
caaaaauaaauacauaga

SEQ ID NO: 482878 - RNA, 19 nt, Artificial Sequence
  Synthetic
ucaaaaauaaauacauaga

SEQ ID NO: 482879 - RNA, 20 nt, Artificial Sequence
  Synthetic
cucaaaaauaaauacauaga

SEQ ID NO: 482880 - RNA, 21 nt, Artificial Sequence
  Synthetic
ucucaaaaauaaauacauaga

SEQ ID NO: 482881 - RNA, 22 nt, Artificial Sequence
  Synthetic
aucucaaaaauaaauacauaga

SEQ ID NO: 482882 - RNA, 23 nt, Artificial Sequence
  Synthetic
caucucaaaaauaaauacauaga

SEQ ID NO: 482883 - RNA, 24 nt, Artificial Sequence
  Synthetic
ccaucucaaaaauaaauacauaga

SEQ ID NO: 482884 - RNA, 18 nt, Artificial Sequence
  Synthetic
caucaaaaauuacauaga

SEQ ID NO: 482885 - RNA, 19 nt, Artificial Sequence
  Synthetic
acaucaaaaauuacauaga

SEQ ID NO: 482886 - RNA, 20 nt, Artificial Sequence
  Synthetic
gacaucaaaaauuacauaga

SEQ ID NO: 482887 - RNA, 21 nt, Artificial Sequence
  Synthetic
ggacaucaaaaauuacauaga

SEQ ID NO: 482888 - RNA, 22 nt, Artificial Sequence
  Synthetic
gggacaucaaaaauuacauaga

SEQ ID NO: 482889 - RNA, 23 nt, Artificial Sequence
  Synthetic
ugggacaucaaaaauuacauaga

SEQ ID NO: 482890 - RNA, 24 nt, Artificial Sequence
  Synthetic
uugggacaucaaaaauuacauaga

SEQ ID NO: 482891 - RNA, 18 nt, Artificial Sequence
  Synthetic
uauuagaacaaccauaga

SEQ ID NO: 482892 - RNA, 19 nt, Artificial Sequence
  Synthetic
uuauuagaacaaccauaga

SEQ ID NO: 482893 - RNA, 20 nt, Artificial Sequence
  Synthetic
cuuauuagaacaaccauaga

SEQ ID NO: 482894 - RNA, 21 nt, Artificial Sequence
  Synthetic
ucuuauuagaacaaccauaga

SEQ ID NO: 482895 - RNA, 22 nt, Artificial Sequence
  Synthetic
uucuuauuagaacaaccauaga

SEQ ID NO: 482896 - RNA, 23 nt, Artificial Sequence
  Synthetic
auucuuauuagaacaaccauaga

SEQ ID NO: 482897 - RNA, 24 nt, Artificial Sequence
  Synthetic
uauucuuauuagaacaaccauaga

SEQ ID NO: 482898 - RNA, 18 nt, Artificial Sequence
  Synthetic
agagauuauaaccauaga

SEQ ID NO: 482899 - RNA, 19 nt, Artificial Sequence
  Synthetic
gagagauuauaaccauaga

SEQ ID NO: 482900 - RNA, 20 nt, Artificial Sequence
  Synthetic
agagagauuauaaccauaga

SEQ ID NO: 482901 - RNA, 21 nt, Artificial Sequence
  Synthetic
uagagagauuauaaccauaga

SEQ ID NO: 482902 - RNA, 22 nt, Artificial Sequence
  Synthetic
cuagagagauuauaaccauaga

SEQ ID NO: 482903 - RNA, 23 nt, Artificial Sequence
  Synthetic
acuagagagauuauaaccauaga

SEQ ID NO: 482904 - RNA, 24 nt, Artificial Sequence
  Synthetic
cacuagagagauuauaaccauaga

SEQ ID NO: 482905 - RNA, 18 nt, Artificial Sequence
  Synthetic
acuuagccuguccauaga

SEQ ID NO: 482906 - RNA, 19 nt, Artificial Sequence
  Synthetic
aacuuagccuguccauaga

SEQ ID NO: 482907 - RNA, 20 nt, Artificial Sequence
  Synthetic
caacuuagccuguccauaga

SEQ ID NO: 482908 - RNA, 21 nt, Artificial Sequence
  Synthetic
ucaacuuagccuguccauaga

SEQ ID NO: 482909 - RNA, 22 nt, Artificial Sequence
  Synthetic
uucaacuuagccuguccauaga

SEQ ID NO: 482910 - RNA, 23 nt, Artificial Sequence
  Synthetic
auucaacuuagccuguccauaga

SEQ ID NO: 482911 - RNA, 24 nt, Artificial Sequence
  Synthetic
cauucaacuuagccuguccauaga

SEQ ID NO: 482912 - RNA, 18 nt, Artificial Sequence
  Synthetic
uuaaaggacaugcauaga

SEQ ID NO: 482913 - RNA, 19 nt, Artificial Sequence
  Synthetic
cuuaaaggacaugcauaga

SEQ ID NO: 482914 - RNA, 20 nt, Artificial Sequence
  Synthetic
ccuuaaaggacaugcauaga

SEQ ID NO: 482915 - RNA, 21 nt, Artificial Sequence
  Synthetic
accuuaaaggacaugcauaga

SEQ ID NO: 482916 - RNA, 22 nt, Artificial Sequence
  Synthetic
caccuuaaaggacaugcauaga

SEQ ID NO: 482917 - RNA, 23 nt, Artificial Sequence
  Synthetic
ucaccuuaaaggacaugcauaga

SEQ ID NO: 482918 - RNA, 24 nt, Artificial Sequence
  Synthetic
uucaccuuaaaggacaugcauaga

SEQ ID NO: 482919 - RNA, 18 nt, Artificial Sequence
  Synthetic
gugggugaagaucauaga

SEQ ID NO: 482920 - RNA, 19 nt, Artificial Sequence
  Synthetic
ugugggugaagaucauaga

SEQ ID NO: 482921 - RNA, 20 nt, Artificial Sequence
  Synthetic
gugugggugaagaucauaga

SEQ ID NO: 482922 - RNA, 21 nt, Artificial Sequence
  Synthetic
agugugggugaagaucauaga

SEQ ID NO: 482923 - RNA, 22 nt, Artificial Sequence
  Synthetic
aagugugggugaagaucauaga

SEQ ID NO: 482924 - RNA, 23 nt, Artificial Sequence
  Synthetic
gaagugugggugaagaucauaga

SEQ ID NO: 482925 - RNA, 24 nt, Artificial Sequence
  Synthetic
agaagugugggugaagaucauaga

SEQ ID NO: 482926 - RNA, 18 nt, Artificial Sequence
  Synthetic
ggcagcaugagucauaga

SEQ ID NO: 482927 - RNA, 19 nt, Artificial Sequence
  Synthetic
aggcagcaugagucauaga

SEQ ID NO: 482928 - RNA, 20 nt, Artificial Sequence
  Synthetic
aaggcagcaugagucauaga

SEQ ID NO: 482929 - RNA, 21 nt, Artificial Sequence
  Synthetic
uaaggcagcaugagucauaga

SEQ ID NO: 482930 - RNA, 22 nt, Artificial Sequence
  Synthetic
auaaggcagcaugagucauaga

SEQ ID NO: 482931 - RNA, 23 nt, Artificial Sequence
  Synthetic
aauaaggcagcaugagucauaga

SEQ ID NO: 482932 - RNA, 24 nt, Artificial Sequence
  Synthetic
caauaaggcagcaugagucauaga

SEQ ID NO: 482933 - RNA, 18 nt, Artificial Sequence
  Synthetic
aaauuugugauucauaga

SEQ ID NO: 482934 - RNA, 19 nt, Artificial Sequence
  Synthetic
aaaauuugugauucauaga

SEQ ID NO: 482935 - RNA, 20 nt, Artificial Sequence
  Synthetic
gaaaauuugugauucauaga

SEQ ID NO: 482936 - RNA, 21 nt, Artificial Sequence
  Synthetic
agaaaauuugugauucauaga

SEQ ID NO: 482937 - RNA, 22 nt, Artificial Sequence
  Synthetic
aagaaaauuugugauucauaga

SEQ ID NO: 482938 - RNA, 23 nt, Artificial Sequence
  Synthetic
uaagaaaauuugugauucauaga

SEQ ID NO: 482939 - RNA, 24 nt, Artificial Sequence
  Synthetic
uuaagaaaauuugugauucauaga

SEQ ID NO: 482940 - RNA, 18 nt, Artificial Sequence
  Synthetic
uuaacuacuuuucauaga

SEQ ID NO: 482941 - RNA, 19 nt, Artificial Sequence
  Synthetic
guuaacuacuuuucauaga

SEQ ID NO: 482942 - RNA, 20 nt, Artificial Sequence
  Synthetic
uguuaacuacuuuucauaga

SEQ ID NO: 482943 - RNA, 21 nt, Artificial Sequence
  Synthetic
auguuaacuacuuuucauaga

SEQ ID NO: 482944 - RNA, 22 nt, Artificial Sequence
  Synthetic
gauguuaacuacuuuucauaga

SEQ ID NO: 482945 - RNA, 23 nt, Artificial Sequence
  Synthetic
ggauguuaacuacuuuucauaga

SEQ ID NO: 482946 - RNA, 24 nt, Artificial Sequence
  Synthetic
uggauguuaacuacuuuucauaga

SEQ ID NO: 482947 - RNA, 18 nt, Artificial Sequence
  Synthetic
ggcacacaaaaagauaga

SEQ ID NO: 482948 - RNA, 19 nt, Artificial Sequence
  Synthetic
aggcacacaaaaagauaga

SEQ ID NO: 482949 - RNA, 20 nt, Artificial Sequence
  Synthetic
aaggcacacaaaaagauaga

SEQ ID NO: 482950 - RNA, 21 nt, Artificial Sequence
  Synthetic
aaaggcacacaaaaagauaga

SEQ ID NO: 482951 - RNA, 22 nt, Artificial Sequence
  Synthetic
caaaggcacacaaaaagauaga

SEQ ID NO: 482952 - RNA, 23 nt, Artificial Sequence
  Synthetic
ucaaaggcacacaaaaagauaga

SEQ ID NO: 482953 - RNA, 24 nt, Artificial Sequence
  Synthetic
cucaaaggcacacaaaaagauaga

SEQ ID NO: 482954 - RNA, 18 nt, Artificial Sequence
  Synthetic
gaaccaagaaaagauaga

SEQ ID NO: 482955 - RNA, 19 nt, Artificial Sequence
  Synthetic
ugaaccaagaaaagauaga

SEQ ID NO: 482956 - RNA, 20 nt, Artificial Sequence
  Synthetic
uugaaccaagaaaagauaga

SEQ ID NO: 482957 - RNA, 21 nt, Artificial Sequence
  Synthetic
guugaaccaagaaaagauaga

SEQ ID NO: 482958 - RNA, 22 nt, Artificial Sequence
  Synthetic
aguugaaccaagaaaagauaga

SEQ ID NO: 482959 - RNA, 23 nt, Artificial Sequence
  Synthetic
aaguugaaccaagaaaagauaga

SEQ ID NO: 482960 - RNA, 24 nt, Artificial Sequence
  Synthetic
aaaguugaaccaagaaaagauaga

SEQ ID NO: 482961 - RNA, 18 nt, Artificial Sequence
  Synthetic
gauacaacagaagauaga

SEQ ID NO: 482962 - RNA, 19 nt, Artificial Sequence
  Synthetic
agauacaacagaagauaga

SEQ ID NO: 482963 - RNA, 20 nt, Artificial Sequence
  Synthetic
uagauacaacagaagauaga

SEQ ID NO: 482964 - RNA, 21 nt, Artificial Sequence
  Synthetic
uuagauacaacagaagauaga

SEQ ID NO: 482965 - RNA, 22 nt, Artificial Sequence
  Synthetic
auuagauacaacagaagauaga

SEQ ID NO: 482966 - RNA, 23 nt, Artificial Sequence
  Synthetic
uauuagauacaacagaagauaga

SEQ ID NO: 482967 - RNA, 24 nt, Artificial Sequence
  Synthetic
uuauuagauacaacagaagauaga

SEQ ID NO: 482968 - RNA, 18 nt, Artificial Sequence
  Synthetic
uauaugugcugagauaga

SEQ ID NO: 482969 - RNA, 19 nt, Artificial Sequence
  Synthetic
cuauaugugcugagauaga

SEQ ID NO: 482970 - RNA, 20 nt, Artificial Sequence
  Synthetic
ccuauaugugcugagauaga

SEQ ID NO: 482971 - RNA, 21 nt, Artificial Sequence
  Synthetic
accuauaugugcugagauaga

SEQ ID NO: 482972 - RNA, 22 nt, Artificial Sequence
  Synthetic
caccuauaugugcugagauaga

SEQ ID NO: 482973 - RNA, 23 nt, Artificial Sequence
  Synthetic
ucaccuauaugugcugagauaga

SEQ ID NO: 482974 - RNA, 24 nt, Artificial Sequence
  Synthetic
aucaccuauaugugcugagauaga

SEQ ID NO: 482975 - RNA, 18 nt, Artificial Sequence
  Synthetic
uauagauagauagauaga

SEQ ID NO: 482976 - RNA, 19 nt, Artificial Sequence
  Synthetic
auauagauagauagauaga

SEQ ID NO: 482977 - RNA, 20 nt, Artificial Sequence
  Synthetic
uauauagauagauagauaga

SEQ ID NO: 482978 - RNA, 21 nt, Artificial Sequence
  Synthetic
auauauagauagauagauaga

SEQ ID NO: 482979 - RNA, 22 nt, Artificial Sequence
  Synthetic
uauauauagauagauagauaga

SEQ ID NO: 482980 - RNA, 23 nt, Artificial Sequence
  Synthetic
auauauauagauagauagauaga

SEQ ID NO: 482981 - RNA, 24 nt, Artificial Sequence
  Synthetic
uauauauauagauagauagauaga

SEQ ID NO: 482982 - RNA, 18 nt, Artificial Sequence
  Synthetic
aaaagcaguugugauaga

SEQ ID NO: 482983 - RNA, 19 nt, Artificial Sequence
  Synthetic
gaaaagcaguugugauaga

SEQ ID NO: 482984 - RNA, 20 nt, Artificial Sequence
  Synthetic
ugaaaagcaguugugauaga

SEQ ID NO: 482985 - RNA, 21 nt, Artificial Sequence
  Synthetic
uugaaaagcaguugugauaga

SEQ ID NO: 482986 - RNA, 22 nt, Artificial Sequence
  Synthetic
uuugaaaagcaguugugauaga

SEQ ID NO: 482987 - RNA, 23 nt, Artificial Sequence
  Synthetic
cuuugaaaagcaguugugauaga

SEQ ID NO: 482988 - RNA, 24 nt, Artificial Sequence
  Synthetic
ccuuugaaaagcaguugugauaga

SEQ ID NO: 482989 - RNA, 18 nt, Artificial Sequence
  Synthetic
auuuuaaaugaauauaga

SEQ ID NO: 482990 - RNA, 19 nt, Artificial Sequence
  Synthetic
uauuuuaaaugaauauaga

SEQ ID NO: 482991 - RNA, 20 nt, Artificial Sequence
  Synthetic
uuauuuuaaaugaauauaga

SEQ ID NO: 482992 - RNA, 21 nt, Artificial Sequence
  Synthetic
uuuauuuuaaaugaauauaga

SEQ ID NO: 482993 - RNA, 22 nt, Artificial Sequence
  Synthetic
guuuauuuuaaaugaauauaga

SEQ ID NO: 482994 - RNA, 23 nt, Artificial Sequence
  Synthetic
aguuuauuuuaaaugaauauaga

SEQ ID NO: 482995 - RNA, 24 nt, Artificial Sequence
  Synthetic
uaguuuauuuuaaaugaauauaga

SEQ ID NO: 482996 - RNA, 18 nt, Artificial Sequence
  Synthetic
gcaaaugugugauauaga

SEQ ID NO: 482997 - RNA, 19 nt, Artificial Sequence
  Synthetic
ggcaaaugugugauauaga

SEQ ID NO: 482998 - RNA, 20 nt, Artificial Sequence
  Synthetic
aggcaaaugugugauauaga

SEQ ID NO: 482999 - RNA, 21 nt, Artificial Sequence
  Synthetic
caggcaaaugugugauauaga

SEQ ID NO: 483000 - RNA, 22 nt, Artificial Sequence
  Synthetic
acaggcaaaugugugauauaga

SEQ ID NO: 483001 - RNA, 23 nt, Artificial Sequence
  Synthetic
uacaggcaaaugugugauauaga

SEQ ID NO: 483002 - RNA, 24 nt, Artificial Sequence
  Synthetic
auacaggcaaaugugugauauaga

SEQ ID NO: 483003 - RNA, 18 nt, Artificial Sequence
  Synthetic
uuaaaagcaaccuauaga

SEQ ID NO: 483004 - RNA, 19 nt, Artificial Sequence
  Synthetic
auuaaaagcaaccuauaga

SEQ ID NO: 483005 - RNA, 20 nt, Artificial Sequence
  Synthetic
aauuaaaagcaaccuauaga

SEQ ID NO: 483006 - RNA, 21 nt, Artificial Sequence
  Synthetic
gaauuaaaagcaaccuauaga

SEQ ID NO: 483007 - RNA, 22 nt, Artificial Sequence
  Synthetic
agaauuaaaagcaaccuauaga

SEQ ID NO: 483008 - RNA, 23 nt, Artificial Sequence
  Synthetic
cagaauuaaaagcaaccuauaga

SEQ ID NO: 483009 - RNA, 24 nt, Artificial Sequence
  Synthetic
acagaauuaaaagcaaccuauaga

SEQ ID NO: 483010 - RNA, 18 nt, Artificial Sequence
  Synthetic
ucaaucagucccuauaga

SEQ ID NO: 483011 - RNA, 19 nt, Artificial Sequence
  Synthetic
cucaaucagucccuauaga

SEQ ID NO: 483012 - RNA, 20 nt, Artificial Sequence
  Synthetic
ucucaaucagucccuauaga

SEQ ID NO: 483013 - RNA, 21 nt, Artificial Sequence
  Synthetic
uucucaaucagucccuauaga

SEQ ID NO: 483014 - RNA, 22 nt, Artificial Sequence
  Synthetic
cuucucaaucagucccuauaga

SEQ ID NO: 483015 - RNA, 23 nt, Artificial Sequence
  Synthetic
acuucucaaucagucccuauaga

SEQ ID NO: 483016 - RNA, 24 nt, Artificial Sequence
  Synthetic
gacuucucaaucagucccuauaga

SEQ ID NO: 483017 - RNA, 18 nt, Artificial Sequence
  Synthetic
caaaaccaaaucuauaga

SEQ ID NO: 483018 - RNA, 19 nt, Artificial Sequence
  Synthetic
ucaaaaccaaaucuauaga

SEQ ID NO: 483019 - RNA, 20 nt, Artificial Sequence
  Synthetic
aucaaaaccaaaucuauaga

SEQ ID NO: 483020 - RNA, 21 nt, Artificial Sequence
  Synthetic
aaucaaaaccaaaucuauaga

SEQ ID NO: 483021 - RNA, 22 nt, Artificial Sequence
  Synthetic
gaaucaaaaccaaaucuauaga

SEQ ID NO: 483022 - RNA, 23 nt, Artificial Sequence
  Synthetic
ggaaucaaaaccaaaucuauaga

SEQ ID NO: 483023 - RNA, 24 nt, Artificial Sequence
  Synthetic
aggaaucaaaaccaaaucuauaga

SEQ ID NO: 483024 - RNA, 18 nt, Artificial Sequence
  Synthetic
ucuuaucucaucuauaga

SEQ ID NO: 483025 - RNA, 19 nt, Artificial Sequence
  Synthetic
uucuuaucucaucuauaga

SEQ ID NO: 483026 - RNA, 20 nt, Artificial Sequence
  Synthetic
uuucuuaucucaucuauaga

SEQ ID NO: 483027 - RNA, 21 nt, Artificial Sequence
  Synthetic
uuuucuuaucucaucuauaga

SEQ ID NO: 483028 - RNA, 22 nt, Artificial Sequence
  Synthetic
uuuuucuuaucucaucuauaga

SEQ ID NO: 483029 - RNA, 23 nt, Artificial Sequence
  Synthetic
auuuuucuuaucucaucuauaga

SEQ ID NO: 483030 - RNA, 24 nt, Artificial Sequence
  Synthetic
gauuuuucuuaucucaucuauaga

SEQ ID NO: 483031 - RNA, 18 nt, Artificial Sequence
  Synthetic
gaauuagcugucuauaga

SEQ ID NO: 483032 - RNA, 19 nt, Artificial Sequence
  Synthetic
ugaauuagcugucuauaga

SEQ ID NO: 483033 - RNA, 20 nt, Artificial Sequence
  Synthetic
augaauuagcugucuauaga

SEQ ID NO: 483034 - RNA, 21 nt, Artificial Sequence
  Synthetic
aaugaauuagcugucuauaga

SEQ ID NO: 483035 - RNA, 22 nt, Artificial Sequence
  Synthetic
aaaugaauuagcugucuauaga

SEQ ID NO: 483036 - RNA, 23 nt, Artificial Sequence
  Synthetic
aaaaugaauuagcugucuauaga

SEQ ID NO: 483037 - RNA, 24 nt, Artificial Sequence
  Synthetic
aaaaaugaauuagcugucuauaga

SEQ ID NO: 483038 - RNA, 18 nt, Artificial Sequence
  Synthetic
cauguauacuucuauaga

SEQ ID NO: 483039 - RNA, 19 nt, Artificial Sequence
  Synthetic
acauguauacuucuauaga

SEQ ID NO: 483040 - RNA, 20 nt, Artificial Sequence
  Synthetic
cacauguauacuucuauaga

SEQ ID NO: 483041 - RNA, 21 nt, Artificial Sequence
  Synthetic
acacauguauacuucuauaga

SEQ ID NO: 483042 - RNA, 22 nt, Artificial Sequence
  Synthetic
uacacauguauacuucuauaga

SEQ ID NO: 483043 - RNA, 23 nt, Artificial Sequence
  Synthetic
guacacauguauacuucuauaga

SEQ ID NO: 483044 - RNA, 24 nt, Artificial Sequence
  Synthetic
gguacacauguauacuucuauaga

SEQ ID NO: 483045 - RNA, 18 nt, Artificial Sequence
  Synthetic
ugacuuaaaaaguauaga

SEQ ID NO: 483046 - RNA, 19 nt, Artificial Sequence
  Synthetic
gugacuuaaaaaguauaga

SEQ ID NO: 483047 - RNA, 20 nt, Artificial Sequence
  Synthetic
ggugacuuaaaaaguauaga

SEQ ID NO: 483048 - RNA, 21 nt, Artificial Sequence
  Synthetic
aggugacuuaaaaaguauaga

SEQ ID NO: 483049 - RNA, 22 nt, Artificial Sequence
  Synthetic
aaggugacuuaaaaaguauaga

SEQ ID NO: 483050 - RNA, 23 nt, Artificial Sequence
  Synthetic
gaaggugacuuaaaaaguauaga

SEQ ID NO: 483051 - RNA, 24 nt, Artificial Sequence
  Synthetic
ggaaggugacuuaaaaaguauaga

SEQ ID NO: 483052 - RNA, 18 nt, Artificial Sequence
  Synthetic
auuuuagcugaguauaga

SEQ ID NO: 483053 - RNA, 19 nt, Artificial Sequence
  Synthetic
cauuuuagcugaguauaga

SEQ ID NO: 483054 - RNA, 20 nt, Artificial Sequence
  Synthetic
acauuuuagcugaguauaga

SEQ ID NO: 483055 - RNA, 21 nt, Artificial Sequence
  Synthetic
gacauuuuagcugaguauaga

SEQ ID NO: 483056 - RNA, 22 nt, Artificial Sequence
  Synthetic
ugacauuuuagcugaguauaga

SEQ ID NO: 483057 - RNA, 23 nt, Artificial Sequence
  Synthetic
gugacauuuuagcugaguauaga

SEQ ID NO: 483058 - RNA, 24 nt, Artificial Sequence
  Synthetic
ggugacauuuuagcugaguauaga

SEQ ID NO: 483059 - RNA, 18 nt, Artificial Sequence
  Synthetic
ucagggaaaccguauaga

SEQ ID NO: 483060 - RNA, 19 nt, Artificial Sequence
  Synthetic
aucagggaaaccguauaga

SEQ ID NO: 483061 - RNA, 20 nt, Artificial Sequence
  Synthetic
aaucagggaaaccguauaga

SEQ ID NO: 483062 - RNA, 21 nt, Artificial Sequence
  Synthetic
caaucagggaaaccguauaga

SEQ ID NO: 483063 - RNA, 22 nt, Artificial Sequence
  Synthetic
acaaucagggaaaccguauaga

SEQ ID NO: 483064 - RNA, 23 nt, Artificial Sequence
  Synthetic
aacaaucagggaaaccguauaga

SEQ ID NO: 483065 - RNA, 24 nt, Artificial Sequence
  Synthetic
uaacaaucagggaaaccguauaga

SEQ ID NO: 483066 - RNA, 18 nt, Artificial Sequence
  Synthetic
caaguucuaacuuauaga

SEQ ID NO: 483067 - RNA, 19 nt, Artificial Sequence
  Synthetic
acaaguucuaacuuauaga

SEQ ID NO: 483068 - RNA, 20 nt, Artificial Sequence
  Synthetic
uacaaguucuaacuuauaga

SEQ ID NO: 483069 - RNA, 21 nt, Artificial Sequence
  Synthetic
guacaaguucuaacuuauaga

SEQ ID NO: 483070 - RNA, 22 nt, Artificial Sequence
  Synthetic
uguacaaguucuaacuuauaga

SEQ ID NO: 483071 - RNA, 23 nt, Artificial Sequence
  Synthetic
auguacaaguucuaacuuauaga

SEQ ID NO: 483072 - RNA, 24 nt, Artificial Sequence
  Synthetic
aauguacaaguucuaacuuauaga

SEQ ID NO: 483073 - RNA, 18 nt, Artificial Sequence
  Synthetic
gcacuuuuauguuauaga

SEQ ID NO: 483074 - RNA, 19 nt, Artificial Sequence
  Synthetic
ugcacuuuuauguuauaga

SEQ ID NO: 483075 - RNA, 20 nt, Artificial Sequence
  Synthetic
uugcacuuuuauguuauaga

SEQ ID NO: 483076 - RNA, 21 nt, Artificial Sequence
  Synthetic
cuugcacuuuuauguuauaga

SEQ ID NO: 483077 - RNA, 22 nt, Artificial Sequence
  Synthetic
ccuugcacuuuuauguuauaga

SEQ ID NO: 483078 - RNA, 23 nt, Artificial Sequence
  Synthetic
gccuugcacuuuuauguuauaga

SEQ ID NO: 483079 - RNA, 24 nt, Artificial Sequence
  Synthetic
ugccuugcacuuuuauguuauaga

SEQ ID NO: 483080 - RNA, 18 nt, Artificial Sequence
  Synthetic
uuacuaucaauuuauaga

SEQ ID NO: 483081 - RNA, 19 nt, Artificial Sequence
  Synthetic
auuacuaucaauuuauaga

SEQ ID NO: 483082 - RNA, 20 nt, Artificial Sequence
  Synthetic
gauuacuaucaauuuauaga

SEQ ID NO: 483083 - RNA, 21 nt, Artificial Sequence
  Synthetic
ugauuacuaucaauuuauaga

SEQ ID NO: 483084 - RNA, 22 nt, Artificial Sequence
  Synthetic
augauuacuaucaauuuauaga

SEQ ID NO: 483085 - RNA, 23 nt, Artificial Sequence
  Synthetic
caugauuacuaucaauuuauaga

SEQ ID NO: 483086 - RNA, 24 nt, Artificial Sequence
  Synthetic
acaugauuacuaucaauuuauaga

SEQ ID NO: 483087 - RNA, 18 nt, Artificial Sequence
  Synthetic
aguauucagauuuauaga

SEQ ID NO: 483088 - RNA, 19 nt, Artificial Sequence
  Synthetic
gaguauucagauuuauaga

SEQ ID NO: 483089 - RNA, 20 nt, Artificial Sequence
  Synthetic
ugaguauucagauuuauaga

SEQ ID NO: 483090 - RNA, 21 nt, Artificial Sequence
  Synthetic
augaguauucagauuuauaga

SEQ ID NO: 483091 - RNA, 22 nt, Artificial Sequence
  Synthetic
aaugaguauucagauuuauaga

SEQ ID NO: 483092 - RNA, 23 nt, Artificial Sequence
  Synthetic
aaaugaguauucagauuuauaga

SEQ ID NO: 483093 - RNA, 24 nt, Artificial Sequence
  Synthetic
gaaaugaguauucagauuuauaga

SEQ ID NO: 483094 - RNA, 18 nt, Artificial Sequence
  Synthetic
aauuucaaagaaacuaga

SEQ ID NO: 483095 - RNA, 19 nt, Artificial Sequence
  Synthetic
aaauuucaaagaaacuaga

SEQ ID NO: 483096 - RNA, 20 nt, Artificial Sequence
  Synthetic
gaaauuucaaagaaacuaga

SEQ ID NO: 483097 - RNA, 21 nt, Artificial Sequence
  Synthetic
agaaauuucaaagaaacuaga

SEQ ID NO: 483098 - RNA, 22 nt, Artificial Sequence
  Synthetic
cagaaauuucaaagaaacuaga

SEQ ID NO: 483099 - RNA, 23 nt, Artificial Sequence
  Synthetic
ccagaaauuucaaagaaacuaga

SEQ ID NO: 483100 - RNA, 24 nt, Artificial Sequence
  Synthetic
uccagaaauuucaaagaaacuaga

SEQ ID NO: 483101 - RNA, 18 nt, Artificial Sequence
  Synthetic
aguauuuauuuaacuaga

SEQ ID NO: 483102 - RNA, 19 nt, Artificial Sequence
  Synthetic
gaguauuuauuuaacuaga

SEQ ID NO: 483103 - RNA, 20 nt, Artificial Sequence
  Synthetic
agaguauuuauuuaacuaga

SEQ ID NO: 483104 - RNA, 21 nt, Artificial Sequence
  Synthetic
cagaguauuuauuuaacuaga

SEQ ID NO: 483105 - RNA, 22 nt, Artificial Sequence
  Synthetic
ucagaguauuuauuuaacuaga

SEQ ID NO: 483106 - RNA, 23 nt, Artificial Sequence
  Synthetic
aucagaguauuuauuuaacuaga

SEQ ID NO: 483107 - RNA, 24 nt, Artificial Sequence
  Synthetic
aaucagaguauuuauuuaacuaga

SEQ ID NO: 483108 - RNA, 18 nt, Artificial Sequence
  Synthetic
acugcuuucaccacuaga

SEQ ID NO: 483109 - RNA, 19 nt, Artificial Sequence
  Synthetic
cacugcuuucaccacuaga

SEQ ID NO: 483110 - RNA, 20 nt, Artificial Sequence
  Synthetic
ucacugcuuucaccacuaga

SEQ ID NO: 483111 - RNA, 21 nt, Artificial Sequence
  Synthetic
uucacugcuuucaccacuaga

SEQ ID NO: 483112 - RNA, 22 nt, Artificial Sequence
  Synthetic
auucacugcuuucaccacuaga

SEQ ID NO: 483113 - RNA, 23 nt, Artificial Sequence
  Synthetic
cauucacugcuuucaccacuaga

SEQ ID NO: 483114 - RNA, 24 nt, Artificial Sequence
  Synthetic
ccauucacugcuuucaccacuaga

SEQ ID NO: 483115 - RNA, 18 nt, Artificial Sequence
  Synthetic
aauaauggaagcacuaga

SEQ ID NO: 483116 - RNA, 19 nt, Artificial Sequence
  Synthetic
caauaauggaagcacuaga

SEQ ID NO: 483117 - RNA, 20 nt, Artificial Sequence
  Synthetic
ucaauaauggaagcacuaga

SEQ ID NO: 483118 - RNA, 21 nt, Artificial Sequence
  Synthetic
uucaauaauggaagcacuaga

SEQ ID NO: 483119 - RNA, 22 nt, Artificial Sequence
  Synthetic
uuucaauaauggaagcacuaga

SEQ ID NO: 483120 - RNA, 23 nt, Artificial Sequence
  Synthetic
uuuucaauaauggaagcacuaga

SEQ ID NO: 483121 - RNA, 24 nt, Artificial Sequence
  Synthetic
uuuuucaauaauggaagcacuaga

SEQ ID NO: 483122 - RNA, 18 nt, Artificial Sequence
  Synthetic
acuagaguuuggacuaga

SEQ ID NO: 483123 - RNA, 19 nt, Artificial Sequence
  Synthetic
aacuagaguuuggacuaga

SEQ ID NO: 483124 - RNA, 20 nt, Artificial Sequence
  Synthetic
uaacuagaguuuggacuaga

SEQ ID NO: 483125 - RNA, 21 nt, Artificial Sequence
  Synthetic
auaacuagaguuuggacuaga

SEQ ID NO: 483126 - RNA, 22 nt, Artificial Sequence
  Synthetic
gauaacuagaguuuggacuaga

SEQ ID NO: 483127 - RNA, 23 nt, Artificial Sequence
  Synthetic
agauaacuagaguuuggacuaga

SEQ ID NO: 483128 - RNA, 24 nt, Artificial Sequence
  Synthetic
aagauaacuagaguuuggacuaga

SEQ ID NO: 483129 - RNA, 18 nt, Artificial Sequence
  Synthetic
aaugguaaacauacuaga

SEQ ID NO: 483130 - RNA, 19 nt, Artificial Sequence
  Synthetic
aaaugguaaacauacuaga

SEQ ID NO: 483131 - RNA, 20 nt, Artificial Sequence
  Synthetic
gaaaugguaaacauacuaga

SEQ ID NO: 483132 - RNA, 21 nt, Artificial Sequence
  Synthetic
ggaaaugguaaacauacuaga

SEQ ID NO: 483133 - RNA, 22 nt, Artificial Sequence
  Synthetic
gggaaaugguaaacauacuaga

SEQ ID NO: 483134 - RNA, 23 nt, Artificial Sequence
  Synthetic
ugggaaaugguaaacauacuaga

SEQ ID NO: 483135 - RNA, 24 nt, Artificial Sequence
  Synthetic
augggaaaugguaaacauacuaga

SEQ ID NO: 483136 - RNA, 18 nt, Artificial Sequence
  Synthetic
gacuuuggggauacuaga

SEQ ID NO: 483137 - RNA, 19 nt, Artificial Sequence
  Synthetic
ggacuuuggggauacuaga

SEQ ID NO: 483138 - RNA, 20 nt, Artificial Sequence
  Synthetic
uggacuuuggggauacuaga

SEQ ID NO: 483139 - RNA, 21 nt, Artificial Sequence
  Synthetic
uuggacuuuggggauacuaga

SEQ ID NO: 483140 - RNA, 22 nt, Artificial Sequence
  Synthetic
auuggacuuuggggauacuaga

SEQ ID NO: 483141 - RNA, 23 nt, Artificial Sequence
  Synthetic
cauuggacuuuggggauacuaga

SEQ ID NO: 483142 - RNA, 24 nt, Artificial Sequence
  Synthetic
acauuggacuuuggggauacuaga

SEQ ID NO: 483143 - RNA, 18 nt, Artificial Sequence
  Synthetic
aaacggaggacuacuaga

SEQ ID NO: 483144 - RNA, 19 nt, Artificial Sequence
  Synthetic
gaaacggaggacuacuaga

SEQ ID NO: 483145 - RNA, 20 nt, Artificial Sequence
  Synthetic
agaaacggaggacuacuaga

SEQ ID NO: 483146 - RNA, 21 nt, Artificial Sequence
  Synthetic
uagaaacggaggacuacuaga

SEQ ID NO: 483147 - RNA, 22 nt, Artificial Sequence
  Synthetic
auagaaacggaggacuacuaga

SEQ ID NO: 483148 - RNA, 23 nt, Artificial Sequence
  Synthetic
aauagaaacggaggacuacuaga

SEQ ID NO: 483149 - RNA, 24 nt, Artificial Sequence
  Synthetic
caauagaaacggaggacuacuaga

SEQ ID NO: 483150 - RNA, 18 nt, Artificial Sequence
  Synthetic
acccuggggacuacuaga

SEQ ID NO: 483151 - RNA, 19 nt, Artificial Sequence
  Synthetic
gacccuggggacuacuaga

SEQ ID NO: 483152 - RNA, 20 nt, Artificial Sequence
  Synthetic
agacccuggggacuacuaga

SEQ ID NO: 483153 - RNA, 21 nt, Artificial Sequence
  Synthetic
uagacccuggggacuacuaga

SEQ ID NO: 483154 - RNA, 22 nt, Artificial Sequence
  Synthetic
auagacccuggggacuacuaga

SEQ ID NO: 483155 - RNA, 23 nt, Artificial Sequence
  Synthetic
aauagacccuggggacuacuaga

SEQ ID NO: 483156 - RNA, 24 nt, Artificial Sequence
  Synthetic
caauagacccuggggacuacuaga

SEQ ID NO: 483157 - RNA, 18 nt, Artificial Sequence
  Synthetic
cuucaucagauuacuaga

SEQ ID NO: 483158 - RNA, 19 nt, Artificial Sequence
  Synthetic
gcuucaucagauuacuaga

SEQ ID NO: 483159 - RNA, 20 nt, Artificial Sequence
  Synthetic
ugcuucaucagauuacuaga

SEQ ID NO: 483160 - RNA, 21 nt, Artificial Sequence
  Synthetic
uugcuucaucagauuacuaga

SEQ ID NO: 483161 - RNA, 22 nt, Artificial Sequence
  Synthetic
uuugcuucaucagauuacuaga

SEQ ID NO: 483162 - RNA, 23 nt, Artificial Sequence
  Synthetic
cuuugcuucaucagauuacuaga

SEQ ID NO: 483163 - RNA, 24 nt, Artificial Sequence
  Synthetic
gcuuugcuucaucagauuacuaga

SEQ ID NO: 483164 - RNA, 18 nt, Artificial Sequence
  Synthetic
ugagcuuugauuacuaga

SEQ ID NO: 483165 - RNA, 19 nt, Artificial Sequence
  Synthetic
augagcuuugauuacuaga

SEQ ID NO: 483166 - RNA, 20 nt, Artificial Sequence
  Synthetic
caugagcuuugauuacuaga

SEQ ID NO: 483167 - RNA, 21 nt, Artificial Sequence
  Synthetic
ucaugagcuuugauuacuaga

SEQ ID NO: 483168 - RNA, 22 nt, Artificial Sequence
  Synthetic
cucaugagcuuugauuacuaga

SEQ ID NO: 483169 - RNA, 23 nt, Artificial Sequence
  Synthetic
acucaugagcuuugauuacuaga

SEQ ID NO: 483170 - RNA, 24 nt, Artificial Sequence
  Synthetic
cacucaugagcuuugauuacuaga

SEQ ID NO: 483171 - RNA, 18 nt, Artificial Sequence
  Synthetic
gaaugauuugaaccuaga

SEQ ID NO: 483172 - RNA, 19 nt, Artificial Sequence
  Synthetic
ggaaugauuugaaccuaga

SEQ ID NO: 483173 - RNA, 20 nt, Artificial Sequence
  Synthetic
aggaaugauuugaaccuaga

SEQ ID NO: 483174 - RNA, 21 nt, Artificial Sequence
  Synthetic
uaggaaugauuugaaccuaga

SEQ ID NO: 483175 - RNA, 22 nt, Artificial Sequence
  Synthetic
auaggaaugauuugaaccuaga

SEQ ID NO: 483176 - RNA, 23 nt, Artificial Sequence
  Synthetic
cauaggaaugauuugaaccuaga

SEQ ID NO: 483177 - RNA, 24 nt, Artificial Sequence
  Synthetic
gcauaggaaugauuugaaccuaga

SEQ ID NO: 483178 - RNA, 18 nt, Artificial Sequence
  Synthetic
cucauucugucaccuaga

SEQ ID NO: 483179 - RNA, 19 nt, Artificial Sequence
  Synthetic
ucucauucugucaccuaga

SEQ ID NO: 483180 - RNA, 20 nt, Artificial Sequence
  Synthetic
gucucauucugucaccuaga

SEQ ID NO: 483181 - RNA, 21 nt, Artificial Sequence
  Synthetic
ggucucauucugucaccuaga

SEQ ID NO: 483182 - RNA, 22 nt, Artificial Sequence
  Synthetic
gggucucauucugucaccuaga

SEQ ID NO: 483183 - RNA, 23 nt, Artificial Sequence
  Synthetic
agggucucauucugucaccuaga

SEQ ID NO: 483184 - RNA, 24 nt, Artificial Sequence
  Synthetic
gagggucucauucugucaccuaga

SEQ ID NO: 483185 - RNA, 18 nt, Artificial Sequence
  Synthetic
uacauacaacagccuaga

SEQ ID NO: 483186 - RNA, 19 nt, Artificial Sequence
  Synthetic
auacauacaacagccuaga

SEQ ID NO: 483187 - RNA, 20 nt, Artificial Sequence
  Synthetic
aauacauacaacagccuaga

SEQ ID NO: 483188 - RNA, 21 nt, Artificial Sequence
  Synthetic
aaauacauacaacagccuaga

SEQ ID NO: 483189 - RNA, 22 nt, Artificial Sequence
  Synthetic
gaaauacauacaacagccuaga

SEQ ID NO: 483190 - RNA, 23 nt, Artificial Sequence
  Synthetic
ugaaauacauacaacagccuaga

SEQ ID NO: 483191 - RNA, 24 nt, Artificial Sequence
  Synthetic
uugaaauacauacaacagccuaga

SEQ ID NO: 483192 - RNA, 18 nt, Artificial Sequence
  Synthetic
cuaggcucccaagcuaga

SEQ ID NO: 483193 - RNA, 19 nt, Artificial Sequence
  Synthetic
ccuaggcucccaagcuaga

SEQ ID NO: 483194 - RNA, 20 nt, Artificial Sequence
  Synthetic
uccuaggcucccaagcuaga

SEQ ID NO: 483195 - RNA, 21 nt, Artificial Sequence
  Synthetic
uuccuaggcucccaagcuaga

SEQ ID NO: 483196 - RNA, 22 nt, Artificial Sequence
  Synthetic
auuccuaggcucccaagcuaga

SEQ ID NO: 483197 - RNA, 23 nt, Artificial Sequence
  Synthetic
gauuccuaggcucccaagcuaga

SEQ ID NO: 483198 - RNA, 24 nt, Artificial Sequence
  Synthetic
ugauuccuaggcucccaagcuaga

SEQ ID NO: 483199 - RNA, 18 nt, Artificial Sequence
  Synthetic
uuauuuaccacagcuaga

SEQ ID NO: 483200 - RNA, 19 nt, Artificial Sequence
  Synthetic
cuuauuuaccacagcuaga

SEQ ID NO: 483201 - RNA, 20 nt, Artificial Sequence
  Synthetic
acuuauuuaccacagcuaga

SEQ ID NO: 483202 - RNA, 21 nt, Artificial Sequence
  Synthetic
uacuuauuuaccacagcuaga

SEQ ID NO: 483203 - RNA, 22 nt, Artificial Sequence
  Synthetic
cuacuuauuuaccacagcuaga

SEQ ID NO: 483204 - RNA, 23 nt, Artificial Sequence
  Synthetic
gcuacuuauuuaccacagcuaga

SEQ ID NO: 483205 - RNA, 24 nt, Artificial Sequence
  Synthetic
agcuacuuauuuaccacagcuaga

SEQ ID NO: 483206 - RNA, 18 nt, Artificial Sequence
  Synthetic
ugcuuuaaaagagcuaga

SEQ ID NO: 483207 - RNA, 19 nt, Artificial Sequence
  Synthetic
augcuuuaaaagagcuaga

SEQ ID NO: 483208 - RNA, 20 nt, Artificial Sequence
  Synthetic
aaugcuuuaaaagagcuaga

SEQ ID NO: 483209 - RNA, 21 nt, Artificial Sequence
  Synthetic
uaaugcuuuaaaagagcuaga

SEQ ID NO: 483210 - RNA, 22 nt, Artificial Sequence
  Synthetic
guaaugcuuuaaaagagcuaga

SEQ ID NO: 483211 - RNA, 23 nt, Artificial Sequence
  Synthetic
gguaaugcuuuaaaagagcuaga

SEQ ID NO: 483212 - RNA, 24 nt, Artificial Sequence
  Synthetic
agguaaugcuuuaaaagagcuaga

SEQ ID NO: 483213 - RNA, 18 nt, Artificial Sequence
  Synthetic
cuaaaaugaugagcuaga

SEQ ID NO: 483214 - RNA, 19 nt, Artificial Sequence
  Synthetic
acuaaaaugaugagcuaga

SEQ ID NO: 483215 - RNA, 20 nt, Artificial Sequence
  Synthetic
cacuaaaaugaugagcuaga

SEQ ID NO: 483216 - RNA, 21 nt, Artificial Sequence
  Synthetic
ucacuaaaaugaugagcuaga

SEQ ID NO: 483217 - RNA, 22 nt, Artificial Sequence
  Synthetic
gucacuaaaaugaugagcuaga

SEQ ID NO: 483218 - RNA, 23 nt, Artificial Sequence
  Synthetic
ugucacuaaaaugaugagcuaga

SEQ ID NO: 483219 - RNA, 24 nt, Artificial Sequence
  Synthetic
uugucacuaaaaugaugagcuaga

SEQ ID NO: 483220 - RNA, 18 nt, Artificial Sequence
  Synthetic
aaauaaauuauagcuaga

SEQ ID NO: 483221 - RNA, 19 nt, Artificial Sequence
  Synthetic
aaaauaaauuauagcuaga

SEQ ID NO: 483222 - RNA, 20 nt, Artificial Sequence
  Synthetic
aaaaauaaauuauagcuaga

SEQ ID NO: 483223 - RNA, 21 nt, Artificial Sequence
  Synthetic
uaaaaauaaauuauagcuaga

SEQ ID NO: 483224 - RNA, 22 nt, Artificial Sequence
  Synthetic
uuaaaaauaaauuauagcuaga

SEQ ID NO: 483225 - RNA, 23 nt, Artificial Sequence
  Synthetic
uuuaaaaauaaauuauagcuaga

SEQ ID NO: 483226 - RNA, 24 nt, Artificial Sequence
  Synthetic
auuuaaaaauaaauuauagcuaga

SEQ ID NO: 483227 - RNA, 18 nt, Artificial Sequence
  Synthetic
aaguuucaaauggcuaga

SEQ ID NO: 483228 - RNA, 19 nt, Artificial Sequence
  Synthetic
gaaguuucaaauggcuaga

SEQ ID NO: 483229 - RNA, 20 nt, Artificial Sequence
  Synthetic
agaaguuucaaauggcuaga

SEQ ID NO: 483230 - RNA, 21 nt, Artificial Sequence
  Synthetic
uagaaguuucaaauggcuaga

SEQ ID NO: 483231 - RNA, 22 nt, Artificial Sequence
  Synthetic
auagaaguuucaaauggcuaga

SEQ ID NO: 483232 - RNA, 23 nt, Artificial Sequence
  Synthetic
uauagaaguuucaaauggcuaga

SEQ ID NO: 483233 - RNA, 24 nt, Artificial Sequence
  Synthetic
auauagaaguuucaaauggcuaga

SEQ ID NO: 483234 - RNA, 18 nt, Artificial Sequence
  Synthetic
cugaauccauaaucuaga

SEQ ID NO: 483235 - RNA, 19 nt, Artificial Sequence
  Synthetic
ccugaauccauaaucuaga

SEQ ID NO: 483236 - RNA, 20 nt, Artificial Sequence
  Synthetic
gccugaauccauaaucuaga

SEQ ID NO: 483237 - RNA, 21 nt, Artificial Sequence
  Synthetic
ugccugaauccauaaucuaga

SEQ ID NO: 483238 - RNA, 22 nt, Artificial Sequence
  Synthetic
gugccugaauccauaaucuaga

SEQ ID NO: 483239 - RNA, 23 nt, Artificial Sequence
  Synthetic
agugccugaauccauaaucuaga

SEQ ID NO: 483240 - RNA, 24 nt, Artificial Sequence
  Synthetic
gagugccugaauccauaaucuaga

SEQ ID NO: 483241 - RNA, 18 nt, Artificial Sequence
  Synthetic
aaguaagacaauucuaga

SEQ ID NO: 483242 - RNA, 19 nt, Artificial Sequence
  Synthetic
aaaguaagacaauucuaga

SEQ ID NO: 483243 - RNA, 20 nt, Artificial Sequence
  Synthetic
aaaaguaagacaauucuaga

SEQ ID NO: 483244 - RNA, 21 nt, Artificial Sequence
  Synthetic
gaaaaguaagacaauucuaga

SEQ ID NO: 483245 - RNA, 22 nt, Artificial Sequence
  Synthetic
ggaaaaguaagacaauucuaga

SEQ ID NO: 483246 - RNA, 23 nt, Artificial Sequence
  Synthetic
uggaaaaguaagacaauucuaga

SEQ ID NO: 483247 - RNA, 24 nt, Artificial Sequence
  Synthetic
cuggaaaaguaagacaauucuaga

SEQ ID NO: 483248 - RNA, 18 nt, Artificial Sequence
  Synthetic
aaaauaagacauucuaga

SEQ ID NO: 483249 - RNA, 19 nt, Artificial Sequence
  Synthetic
gaaaauaagacauucuaga

SEQ ID NO: 483250 - RNA, 20 nt, Artificial Sequence
  Synthetic
ggaaaauaagacauucuaga

SEQ ID NO: 483251 - RNA, 21 nt, Artificial Sequence
  Synthetic
gggaaaauaagacauucuaga

SEQ ID NO: 483252 - RNA, 22 nt, Artificial Sequence
  Synthetic
ggggaaaauaagacauucuaga

SEQ ID NO: 483253 - RNA, 23 nt, Artificial Sequence
  Synthetic
uggggaaaauaagacauucuaga

SEQ ID NO: 483254 - RNA, 24 nt, Artificial Sequence
  Synthetic
auggggaaaauaagacauucuaga

SEQ ID NO: 483255 - RNA, 18 nt, Artificial Sequence
  Synthetic
uccuuuagacauucuaga

SEQ ID NO: 483256 - RNA, 19 nt, Artificial Sequence
  Synthetic
cuccuuuagacauucuaga

SEQ ID NO: 483257 - RNA, 20 nt, Artificial Sequence
  Synthetic
gcuccuuuagacauucuaga

SEQ ID NO: 483258 - RNA, 21 nt, Artificial Sequence
  Synthetic
ggcuccuuuagacauucuaga

SEQ ID NO: 483259 - RNA, 22 nt, Artificial Sequence
  Synthetic
aggcuccuuuagacauucuaga

SEQ ID NO: 483260 - RNA, 23 nt, Artificial Sequence
  Synthetic
aaggcuccuuuagacauucuaga

SEQ ID NO: 483261 - RNA, 24 nt, Artificial Sequence
  Synthetic
caaggcuccuuuagacauucuaga

SEQ ID NO: 483262 - RNA, 18 nt, Artificial Sequence
  Synthetic
gcagauccauauucuaga

SEQ ID NO: 483263 - RNA, 19 nt, Artificial Sequence
  Synthetic
agcagauccauauucuaga

SEQ ID NO: 483264 - RNA, 20 nt, Artificial Sequence
  Synthetic
gagcagauccauauucuaga

SEQ ID NO: 483265 - RNA, 21 nt, Artificial Sequence
  Synthetic
agagcagauccauauucuaga

SEQ ID NO: 483266 - RNA, 22 nt, Artificial Sequence
  Synthetic
uagagcagauccauauucuaga

SEQ ID NO: 483267 - RNA, 23 nt, Artificial Sequence
  Synthetic
uuagagcagauccauauucuaga

SEQ ID NO: 483268 - RNA, 24 nt, Artificial Sequence
  Synthetic
uuuagagcagauccauauucuaga

SEQ ID NO: 483269 - RNA, 18 nt, Artificial Sequence
  Synthetic
aagaggacaacuucuaga

SEQ ID NO: 483270 - RNA, 19 nt, Artificial Sequence
  Synthetic
gaagaggacaacuucuaga

SEQ ID NO: 483271 - RNA, 20 nt, Artificial Sequence
  Synthetic
ggaagaggacaacuucuaga

SEQ ID NO: 483272 - RNA, 21 nt, Artificial Sequence
  Synthetic
aggaagaggacaacuucuaga

SEQ ID NO: 483273 - RNA, 22 nt, Artificial Sequence
  Synthetic
aaggaagaggacaacuucuaga

SEQ ID NO: 483274 - RNA, 23 nt, Artificial Sequence
  Synthetic
caaggaagaggacaacuucuaga

SEQ ID NO: 483275 - RNA, 24 nt, Artificial Sequence
  Synthetic
ccaaggaagaggacaacuucuaga

SEQ ID NO: 483276 - RNA, 18 nt, Artificial Sequence
  Synthetic
cuguuugagaaaaguaga

SEQ ID NO: 483277 - RNA, 19 nt, Artificial Sequence
  Synthetic
ucuguuugagaaaaguaga

SEQ ID NO: 483278 - RNA, 20 nt, Artificial Sequence
  Synthetic
uucuguuugagaaaaguaga

SEQ ID NO: 483279 - RNA, 21 nt, Artificial Sequence
  Synthetic
cuucuguuugagaaaaguaga

SEQ ID NO: 483280 - RNA, 22 nt, Artificial Sequence
  Synthetic
ccuucuguuugagaaaaguaga

SEQ ID NO: 483281 - RNA, 23 nt, Artificial Sequence
  Synthetic
cccuucuguuugagaaaaguaga

SEQ ID NO: 483282 - RNA, 24 nt, Artificial Sequence
  Synthetic
ccccuucuguuugagaaaaguaga

SEQ ID NO: 483283 - RNA, 18 nt, Artificial Sequence
  Synthetic
uccauucugaaaaguaga

SEQ ID NO: 483284 - RNA, 19 nt, Artificial Sequence
  Synthetic
uuccauucugaaaaguaga

SEQ ID NO: 483285 - RNA, 20 nt, Artificial Sequence
  Synthetic
uuuccauucugaaaaguaga

SEQ ID NO: 483286 - RNA, 21 nt, Artificial Sequence
  Synthetic
uuuuccauucugaaaaguaga

SEQ ID NO: 483287 - RNA, 22 nt, Artificial Sequence
  Synthetic
auuuuccauucugaaaaguaga

SEQ ID NO: 483288 - RNA, 23 nt, Artificial Sequence
  Synthetic
gauuuuccauucugaaaaguaga

SEQ ID NO: 483289 - RNA, 24 nt, Artificial Sequence
  Synthetic
ggauuuuccauucugaaaaguaga

SEQ ID NO: 483290 - RNA, 18 nt, Artificial Sequence
  Synthetic
aaaacgaugcaaaguaga

SEQ ID NO: 483291 - RNA, 19 nt, Artificial Sequence
  Synthetic
aaaaacgaugcaaaguaga

SEQ ID NO: 483292 - RNA, 20 nt, Artificial Sequence
  Synthetic
caaaaacgaugcaaaguaga

SEQ ID NO: 483293 - RNA, 21 nt, Artificial Sequence
  Synthetic
ucaaaaacgaugcaaaguaga

SEQ ID NO: 483294 - RNA, 22 nt, Artificial Sequence
  Synthetic
uucaaaaacgaugcaaaguaga

SEQ ID NO: 483295 - RNA, 23 nt, Artificial Sequence
  Synthetic
guucaaaaacgaugcaaaguaga

SEQ ID NO: 483296 - RNA, 24 nt, Artificial Sequence
  Synthetic
uguucaaaaacgaugcaaaguaga

SEQ ID NO: 483297 - RNA, 18 nt, Artificial Sequence
  Synthetic
auguggauauaaaguaga

SEQ ID NO: 483298 - RNA, 19 nt, Artificial Sequence
  Synthetic
aauguggauauaaaguaga

SEQ ID NO: 483299 - RNA, 20 nt, Artificial Sequence
  Synthetic
aaauguggauauaaaguaga

SEQ ID NO: 483300 - RNA, 21 nt, Artificial Sequence
  Synthetic
uaaauguggauauaaaguaga

SEQ ID NO: 483301 - RNA, 22 nt, Artificial Sequence
  Synthetic
auaaauguggauauaaaguaga

SEQ ID NO: 483302 - RNA, 23 nt, Artificial Sequence
  Synthetic
aauaaauguggauauaaaguaga

SEQ ID NO: 483303 - RNA, 24 nt, Artificial Sequence
  Synthetic
gaauaaauguggauauaaaguaga

SEQ ID NO: 483304 - RNA, 18 nt, Artificial Sequence
  Synthetic
uuucugucuucaaguaga

SEQ ID NO: 483305 - RNA, 19 nt, Artificial Sequence
  Synthetic
uuuucugucuucaaguaga

SEQ ID NO: 483306 - RNA, 20 nt, Artificial Sequence
  Synthetic
guuuucugucuucaaguaga

SEQ ID NO: 483307 - RNA, 21 nt, Artificial Sequence
  Synthetic
uguuuucugucuucaaguaga

SEQ ID NO: 483308 - RNA, 22 nt, Artificial Sequence
  Synthetic
auguuuucugucuucaaguaga

SEQ ID NO: 483309 - RNA, 23 nt, Artificial Sequence
  Synthetic
uauguuuucugucuucaaguaga

SEQ ID NO: 483310 - RNA, 24 nt, Artificial Sequence
  Synthetic
uuauguuuucugucuucaaguaga

SEQ ID NO: 483311 - RNA, 18 nt, Artificial Sequence
  Synthetic
uaauaagguagaaguaga

SEQ ID NO: 483312 - RNA, 19 nt, Artificial Sequence
  Synthetic
guaauaagguagaaguaga

SEQ ID NO: 483313 - RNA, 20 nt, Artificial Sequence
  Synthetic
uguaauaagguagaaguaga

SEQ ID NO: 483314 - RNA, 21 nt, Artificial Sequence
  Synthetic
guguaauaagguagaaguaga

SEQ ID NO: 483315 - RNA, 22 nt, Artificial Sequence
  Synthetic
uguguaauaagguagaaguaga

SEQ ID NO: 483316 - RNA, 23 nt, Artificial Sequence
  Synthetic
uuguguaauaagguagaaguaga

SEQ ID NO: 483317 - RNA, 24 nt, Artificial Sequence
  Synthetic
auuguguaauaagguagaaguaga

SEQ ID NO: 483318 - RNA, 18 nt, Artificial Sequence
  Synthetic
agugauucaggaaguaga

SEQ ID NO: 483319 - RNA, 19 nt, Artificial Sequence
  Synthetic
uagugauucaggaaguaga

SEQ ID NO: 483320 - RNA, 20 nt, Artificial Sequence
  Synthetic
cuagugauucaggaaguaga

SEQ ID NO: 483321 - RNA, 21 nt, Artificial Sequence
  Synthetic
gcuagugauucaggaaguaga

SEQ ID NO: 483322 - RNA, 22 nt, Artificial Sequence
  Synthetic
ugcuagugauucaggaaguaga

SEQ ID NO: 483323 - RNA, 23 nt, Artificial Sequence
  Synthetic
uugcuagugauucaggaaguaga

SEQ ID NO: 483324 - RNA, 24 nt, Artificial Sequence
  Synthetic
guugcuagugauucaggaaguaga

SEQ ID NO: 483325 - RNA, 18 nt, Artificial Sequence
  Synthetic
uaauuugguaccaguaga

SEQ ID NO: 483326 - RNA, 19 nt, Artificial Sequence
  Synthetic
guaauuugguaccaguaga

SEQ ID NO: 483327 - RNA, 20 nt, Artificial Sequence
  Synthetic
aguaauuugguaccaguaga

SEQ ID NO: 483328 - RNA, 21 nt, Artificial Sequence
  Synthetic
caguaauuugguaccaguaga

SEQ ID NO: 483329 - RNA, 22 nt, Artificial Sequence
  Synthetic
acaguaauuugguaccaguaga

SEQ ID NO: 483330 - RNA, 23 nt, Artificial Sequence
  Synthetic
uacaguaauuugguaccaguaga

SEQ ID NO: 483331 - RNA, 24 nt, Artificial Sequence
  Synthetic
auacaguaauuugguaccaguaga

SEQ ID NO: 483332 - RNA, 18 nt, Artificial Sequence
  Synthetic
aauacaugugucaguaga

SEQ ID NO: 483333 - RNA, 19 nt, Artificial Sequence
  Synthetic
uaauacaugugucaguaga

SEQ ID NO: 483334 - RNA, 20 nt, Artificial Sequence
  Synthetic
uuaauacaugugucaguaga

SEQ ID NO: 483335 - RNA, 21 nt, Artificial Sequence
  Synthetic
uuuaauacaugugucaguaga

SEQ ID NO: 483336 - RNA, 22 nt, Artificial Sequence
  Synthetic
guuuaauacaugugucaguaga

SEQ ID NO: 483337 - RNA, 23 nt, Artificial Sequence
  Synthetic
aguuuaauacaugugucaguaga

SEQ ID NO: 483338 - RNA, 24 nt, Artificial Sequence
  Synthetic
caguuuaauacaugugucaguaga

SEQ ID NO: 483339 - RNA, 18 nt, Artificial Sequence
  Synthetic
ggaucaacaaagaguaga

SEQ ID NO: 483340 - RNA, 19 nt, Artificial Sequence
  Synthetic
aggaucaacaaagaguaga

SEQ ID NO: 483341 - RNA, 20 nt, Artificial Sequence
  Synthetic
gaggaucaacaaagaguaga

SEQ ID NO: 483342 - RNA, 21 nt, Artificial Sequence
  Synthetic
ugaggaucaacaaagaguaga

SEQ ID NO: 483343 - RNA, 22 nt, Artificial Sequence
  Synthetic
uugaggaucaacaaagaguaga

SEQ ID NO: 483344 - RNA, 23 nt, Artificial Sequence
  Synthetic
uuugaggaucaacaaagaguaga

SEQ ID NO: 483345 - RNA, 24 nt, Artificial Sequence
  Synthetic
cuuugaggaucaacaaagaguaga

SEQ ID NO: 483346 - RNA, 18 nt, Artificial Sequence
  Synthetic
uauccuccaaagaguaga

SEQ ID NO: 483347 - RNA, 19 nt, Artificial Sequence
  Synthetic
cuauccuccaaagaguaga

SEQ ID NO: 483348 - RNA, 20 nt, Artificial Sequence
  Synthetic
acuauccuccaaagaguaga

SEQ ID NO: 483349 - RNA, 21 nt, Artificial Sequence
  Synthetic
aacuauccuccaaagaguaga

SEQ ID NO: 483350 - RNA, 22 nt, Artificial Sequence
  Synthetic
caacuauccuccaaagaguaga

SEQ ID NO: 483351 - RNA, 23 nt, Artificial Sequence
  Synthetic
acaacuauccuccaaagaguaga

SEQ ID NO: 483352 - RNA, 24 nt, Artificial Sequence
  Synthetic
aacaacuauccuccaaagaguaga

SEQ ID NO: 483353 - RNA, 18 nt, Artificial Sequence
  Synthetic
cuaaaaccacagaguaga

SEQ ID NO: 483354 - RNA, 19 nt, Artificial Sequence
  Synthetic
ucuaaaaccacagaguaga

SEQ ID NO: 483355 - RNA, 20 nt, Artificial Sequence
  Synthetic
uucuaaaaccacagaguaga

SEQ ID NO: 483356 - RNA, 21 nt, Artificial Sequence
  Synthetic
cuucuaaaaccacagaguaga

SEQ ID NO: 483357 - RNA, 22 nt, Artificial Sequence
  Synthetic
ucuucuaaaaccacagaguaga

SEQ ID NO: 483358 - RNA, 23 nt, Artificial Sequence
  Synthetic
cucuucuaaaaccacagaguaga

SEQ ID NO: 483359 - RNA, 24 nt, Artificial Sequence
  Synthetic
ucucuucuaaaaccacagaguaga

SEQ ID NO: 483360 - RNA, 18 nt, Artificial Sequence
  Synthetic
ugcuaauuggagaguaga

SEQ ID NO: 483361 - RNA, 19 nt, Artificial Sequence
  Synthetic
uugcuaauuggagaguaga

SEQ ID NO: 483362 - RNA, 20 nt, Artificial Sequence
  Synthetic
guugcuaauuggagaguaga

SEQ ID NO: 483363 - RNA, 21 nt, Artificial Sequence
  Synthetic
uguugcuaauuggagaguaga

SEQ ID NO: 483364 - RNA, 22 nt, Artificial Sequence
  Synthetic
auguugcuaauuggagaguaga

SEQ ID NO: 483365 - RNA, 23 nt, Artificial Sequence
  Synthetic
cauguugcuaauuggagaguaga

SEQ ID NO: 483366 - RNA, 24 nt, Artificial Sequence
  Synthetic
ucauguugcuaauuggagaguaga

SEQ ID NO: 483367 - RNA, 18 nt, Artificial Sequence
  Synthetic
auucugagagggaguaga

SEQ ID NO: 483368 - RNA, 19 nt, Artificial Sequence
  Synthetic
aauucugagagggaguaga

SEQ ID NO: 483369 - RNA, 20 nt, Artificial Sequence
  Synthetic
aaauucugagagggaguaga

SEQ ID NO: 483370 - RNA, 21 nt, Artificial Sequence
  Synthetic
aaaauucugagagggaguaga

SEQ ID NO: 483371 - RNA, 22 nt, Artificial Sequence
  Synthetic
aaaaauucugagagggaguaga

SEQ ID NO: 483372 - RNA, 23 nt, Artificial Sequence
  Synthetic
caaaaauucugagagggaguaga

SEQ ID NO: 483373 - RNA, 24 nt, Artificial Sequence
  Synthetic
acaaaaauucugagagggaguaga

SEQ ID NO: 483374 - RNA, 18 nt, Artificial Sequence
  Synthetic
gagaagaagaugaguaga

SEQ ID NO: 483375 - RNA, 19 nt, Artificial Sequence
  Synthetic
agagaagaagaugaguaga

SEQ ID NO: 483376 - RNA, 20 nt, Artificial Sequence
  Synthetic
uagagaagaagaugaguaga

SEQ ID NO: 483377 - RNA, 21 nt, Artificial Sequence
  Synthetic
uuagagaagaagaugaguaga

SEQ ID NO: 483378 - RNA, 22 nt, Artificial Sequence
  Synthetic
auuagagaagaagaugaguaga

SEQ ID NO: 483379 - RNA, 23 nt, Artificial Sequence
  Synthetic
cauuagagaagaagaugaguaga

SEQ ID NO: 483380 - RNA, 24 nt, Artificial Sequence
  Synthetic
ucauuagagaagaagaugaguaga

SEQ ID NO: 483381 - RNA, 18 nt, Artificial Sequence
  Synthetic
cucagccuccugaguaga

SEQ ID NO: 483382 - RNA, 19 nt, Artificial Sequence
  Synthetic
ccucagccuccugaguaga

SEQ ID NO: 483383 - RNA, 20 nt, Artificial Sequence
  Synthetic
gccucagccuccugaguaga

SEQ ID NO: 483384 - RNA, 21 nt, Artificial Sequence
  Synthetic
ugccucagccuccugaguaga

SEQ ID NO: 483385 - RNA, 22 nt, Artificial Sequence
  Synthetic
cugccucagccuccugaguaga

SEQ ID NO: 483386 - RNA, 23 nt, Artificial Sequence
  Synthetic
ccugccucagccuccugaguaga

SEQ ID NO: 483387 - RNA, 24 nt, Artificial Sequence
  Synthetic
uccugccucagccuccugaguaga

SEQ ID NO: 483388 - RNA, 18 nt, Artificial Sequence
  Synthetic
uucaaauaggugaguaga

SEQ ID NO: 483389 - RNA, 19 nt, Artificial Sequence
  Synthetic
auucaaauaggugaguaga

SEQ ID NO: 483390 - RNA, 20 nt, Artificial Sequence
  Synthetic
uauucaaauaggugaguaga

SEQ ID NO: 483391 - RNA, 21 nt, Artificial Sequence
  Synthetic
uuauucaaauaggugaguaga

SEQ ID NO: 483392 - RNA, 22 nt, Artificial Sequence
  Synthetic
cuuauucaaauaggugaguaga

SEQ ID NO: 483393 - RNA, 23 nt, Artificial Sequence
  Synthetic
ucuuauucaaauaggugaguaga

SEQ ID NO: 483394 - RNA, 24 nt, Artificial Sequence
  Synthetic
aucuuauucaaauaggugaguaga

SEQ ID NO: 483395 - RNA, 18 nt, Artificial Sequence
  Synthetic
augguauuaaauaguaga

SEQ ID NO: 483396 - RNA, 19 nt, Artificial Sequence
  Synthetic
aaugguauuaaauaguaga

SEQ ID NO: 483397 - RNA, 20 nt, Artificial Sequence
  Synthetic
aaaugguauuaaauaguaga

SEQ ID NO: 483398 - RNA, 21 nt, Artificial Sequence
  Synthetic
aaaaugguauuaaauaguaga

SEQ ID NO: 483399 - RNA, 22 nt, Artificial Sequence
  Synthetic
gaaaaugguauuaaauaguaga

SEQ ID NO: 483400 - RNA, 23 nt, Artificial Sequence
  Synthetic
ugaaaaugguauuaaauaguaga

SEQ ID NO: 483401 - RNA, 24 nt, Artificial Sequence
  Synthetic
gugaaaaugguauuaaauaguaga

SEQ ID NO: 483402 - RNA, 18 nt, Artificial Sequence
  Synthetic
ggugaagggcauaguaga

SEQ ID NO: 483403 - RNA, 19 nt, Artificial Sequence
  Synthetic
aggugaagggcauaguaga

SEQ ID NO: 483404 - RNA, 20 nt, Artificial Sequence
  Synthetic
aaggugaagggcauaguaga

SEQ ID NO: 483405 - RNA, 21 nt, Artificial Sequence
  Synthetic
gaaggugaagggcauaguaga

SEQ ID NO: 483406 - RNA, 22 nt, Artificial Sequence
  Synthetic
agaaggugaagggcauaguaga

SEQ ID NO: 483407 - RNA, 23 nt, Artificial Sequence
  Synthetic
uagaaggugaagggcauaguaga

SEQ ID NO: 483408 - RNA, 24 nt, Artificial Sequence
  Synthetic
guagaaggugaagggcauaguaga

SEQ ID NO: 483409 - RNA, 18 nt, Artificial Sequence
  Synthetic
aacauuuaucauaguaga

SEQ ID NO: 483410 - RNA, 19 nt, Artificial Sequence
  Synthetic
aaacauuuaucauaguaga

SEQ ID NO: 483411 - RNA, 20 nt, Artificial Sequence
  Synthetic
aaaacauuuaucauaguaga

SEQ ID NO: 483412 - RNA, 21 nt, Artificial Sequence
  Synthetic
aaaaacauuuaucauaguaga

SEQ ID NO: 483413 - RNA, 22 nt, Artificial Sequence
  Synthetic
uaaaaacauuuaucauaguaga

SEQ ID NO: 483414 - RNA, 23 nt, Artificial Sequence
  Synthetic
uuaaaaacauuuaucauaguaga

SEQ ID NO: 483415 - RNA, 24 nt, Artificial Sequence
  Synthetic
uuuaaaaacauuuaucauaguaga

SEQ ID NO: 483416 - RNA, 18 nt, Artificial Sequence
  Synthetic
acagguaaagcuaguaga

SEQ ID NO: 483417 - RNA, 19 nt, Artificial Sequence
  Synthetic
aacagguaaagcuaguaga

SEQ ID NO: 483418 - RNA, 20 nt, Artificial Sequence
  Synthetic
gaacagguaaagcuaguaga

SEQ ID NO: 483419 - RNA, 21 nt, Artificial Sequence
  Synthetic
ugaacagguaaagcuaguaga

SEQ ID NO: 483420 - RNA, 22 nt, Artificial Sequence
  Synthetic
gugaacagguaaagcuaguaga

SEQ ID NO: 483421 - RNA, 23 nt, Artificial Sequence
  Synthetic
agugaacagguaaagcuaguaga

SEQ ID NO: 483422 - RNA, 24 nt, Artificial Sequence
  Synthetic
gagugaacagguaaagcuaguaga

SEQ ID NO: 483423 - RNA, 18 nt, Artificial Sequence
  Synthetic
gaugccaauuaacguaga

SEQ ID NO: 483424 - RNA, 19 nt, Artificial Sequence
  Synthetic
agaugccaauuaacguaga

SEQ ID NO: 483425 - RNA, 20 nt, Artificial Sequence
  Synthetic
uagaugccaauuaacguaga

SEQ ID NO: 483426 - RNA, 21 nt, Artificial Sequence
  Synthetic
guagaugccaauuaacguaga

SEQ ID NO: 483427 - RNA, 22 nt, Artificial Sequence
  Synthetic
gguagaugccaauuaacguaga

SEQ ID NO: 483428 - RNA, 23 nt, Artificial Sequence
  Synthetic
ugguagaugccaauuaacguaga

SEQ ID NO: 483429 - RNA, 24 nt, Artificial Sequence
  Synthetic
uugguagaugccaauuaacguaga

SEQ ID NO: 483430 - RNA, 18 nt, Artificial Sequence
  Synthetic
aacacauggacacguaga

SEQ ID NO: 483431 - RNA, 19 nt, Artificial Sequence
  Synthetic
gaacacauggacacguaga

SEQ ID NO: 483432 - RNA, 20 nt, Artificial Sequence
  Synthetic
agaacacauggacacguaga

SEQ ID NO: 483433 - RNA, 21 nt, Artificial Sequence
  Synthetic
gagaacacauggacacguaga

SEQ ID NO: 483434 - RNA, 22 nt, Artificial Sequence
  Synthetic
ugagaacacauggacacguaga

SEQ ID NO: 483435 - RNA, 23 nt, Artificial Sequence
  Synthetic
augagaacacauggacacguaga

SEQ ID NO: 483436 - RNA, 24 nt, Artificial Sequence
  Synthetic
gaugagaacacauggacacguaga

SEQ ID NO: 483437 - RNA, 18 nt, Artificial Sequence
  Synthetic
aaauauagcugccguaga

SEQ ID NO: 483438 - RNA, 19 nt, Artificial Sequence
  Synthetic
uaaauauagcugccguaga

SEQ ID NO: 483439 - RNA, 20 nt, Artificial Sequence
  Synthetic
guaaauauagcugccguaga

SEQ ID NO: 483440 - RNA, 21 nt, Artificial Sequence
  Synthetic
aguaaauauagcugccguaga

SEQ ID NO: 483441 - RNA, 22 nt, Artificial Sequence
  Synthetic
aaguaaauauagcugccguaga

SEQ ID NO: 483442 - RNA, 23 nt, Artificial Sequence
  Synthetic
caaguaaauauagcugccguaga

SEQ ID NO: 483443 - RNA, 24 nt, Artificial Sequence
  Synthetic
gcaaguaaauauagcugccguaga

SEQ ID NO: 483444 - RNA, 18 nt, Artificial Sequence
  Synthetic
auaucuagcaugcguaga

SEQ ID NO: 483445 - RNA, 19 nt, Artificial Sequence
  Synthetic
uauaucuagcaugcguaga

SEQ ID NO: 483446 - RNA, 20 nt, Artificial Sequence
  Synthetic
uuauaucuagcaugcguaga

SEQ ID NO: 483447 - RNA, 21 nt, Artificial Sequence
  Synthetic
uuuauaucuagcaugcguaga

SEQ ID NO: 483448 - RNA, 22 nt, Artificial Sequence
  Synthetic
cuuuauaucuagcaugcguaga

SEQ ID NO: 483449 - RNA, 23 nt, Artificial Sequence
  Synthetic
acuuuauaucuagcaugcguaga

SEQ ID NO: 483450 - RNA, 24 nt, Artificial Sequence
  Synthetic
aacuuuauaucuagcaugcguaga

SEQ ID NO: 483451 - RNA, 18 nt, Artificial Sequence
  Synthetic
ggagggaaggaagguaga

SEQ ID NO: 483452 - RNA, 19 nt, Artificial Sequence
  Synthetic
uggagggaaggaagguaga

SEQ ID NO: 483453 - RNA, 20 nt, Artificial Sequence
  Synthetic
cuggagggaaggaagguaga

SEQ ID NO: 483454 - RNA, 21 nt, Artificial Sequence
  Synthetic
ccuggagggaaggaagguaga

SEQ ID NO: 483455 - RNA, 22 nt, Artificial Sequence
  Synthetic
cccuggagggaaggaagguaga

SEQ ID NO: 483456 - RNA, 23 nt, Artificial Sequence
  Synthetic
ucccuggagggaaggaagguaga

SEQ ID NO: 483457 - RNA, 24 nt, Artificial Sequence
  Synthetic
gucccuggagggaaggaagguaga

SEQ ID NO: 483458 - RNA, 18 nt, Artificial Sequence
  Synthetic
ggaaaggagagagguaga

SEQ ID NO: 483459 - RNA, 19 nt, Artificial Sequence
  Synthetic
aggaaaggagagagguaga

SEQ ID NO: 483460 - RNA, 20 nt, Artificial Sequence
  Synthetic
gaggaaaggagagagguaga

SEQ ID NO: 483461 - RNA, 21 nt, Artificial Sequence
  Synthetic
ggaggaaaggagagagguaga

SEQ ID NO: 483462 - RNA, 22 nt, Artificial Sequence
  Synthetic
gggaggaaaggagagagguaga

SEQ ID NO: 483463 - RNA, 23 nt, Artificial Sequence
  Synthetic
agggaggaaaggagagagguaga

SEQ ID NO: 483464 - RNA, 24 nt, Artificial Sequence
  Synthetic
aagggaggaaaggagagagguaga

SEQ ID NO: 483465 - RNA, 18 nt, Artificial Sequence
  Synthetic
augugucguagagguaga

SEQ ID NO: 483466 - RNA, 19 nt, Artificial Sequence
  Synthetic
aaugugucguagagguaga

SEQ ID NO: 483467 - RNA, 20 nt, Artificial Sequence
  Synthetic
aaaugugucguagagguaga

SEQ ID NO: 483468 - RNA, 21 nt, Artificial Sequence
  Synthetic
uaaaugugucguagagguaga

SEQ ID NO: 483469 - RNA, 22 nt, Artificial Sequence
  Synthetic
uuaaaugugucguagagguaga

SEQ ID NO: 483470 - RNA, 23 nt, Artificial Sequence
  Synthetic
auuaaaugugucguagagguaga

SEQ ID NO: 483471 - RNA, 24 nt, Artificial Sequence
  Synthetic
aauuaaaugugucguagagguaga

SEQ ID NO: 483472 - RNA, 18 nt, Artificial Sequence
  Synthetic
gcagccuagaaggguaga

SEQ ID NO: 483473 - RNA, 19 nt, Artificial Sequence
  Synthetic
ggcagccuagaaggguaga

SEQ ID NO: 483474 - RNA, 20 nt, Artificial Sequence
  Synthetic
gggcagccuagaaggguaga

SEQ ID NO: 483475 - RNA, 21 nt, Artificial Sequence
  Synthetic
ugggcagccuagaaggguaga

SEQ ID NO: 483476 - RNA, 22 nt, Artificial Sequence
  Synthetic
cugggcagccuagaaggguaga

SEQ ID NO: 483477 - RNA, 23 nt, Artificial Sequence
  Synthetic
gcugggcagccuagaaggguaga

SEQ ID NO: 483478 - RNA, 24 nt, Artificial Sequence
  Synthetic
agcugggcagccuagaaggguaga

SEQ ID NO: 483479 - RNA, 18 nt, Artificial Sequence
  Synthetic
acggggugggaggguaga

SEQ ID NO: 483480 - RNA, 19 nt, Artificial Sequence
  Synthetic
aacggggugggaggguaga

SEQ ID NO: 483481 - RNA, 20 nt, Artificial Sequence
  Synthetic
aaacggggugggaggguaga

SEQ ID NO: 483482 - RNA, 21 nt, Artificial Sequence
  Synthetic
aaaacggggugggaggguaga

SEQ ID NO: 483483 - RNA, 22 nt, Artificial Sequence
  Synthetic
aaaaacggggugggaggguaga

SEQ ID NO: 483484 - RNA, 23 nt, Artificial Sequence
  Synthetic
aaaaaacggggugggaggguaga

SEQ ID NO: 483485 - RNA, 24 nt, Artificial Sequence
  Synthetic
caaaaaacggggugggaggguaga

SEQ ID NO: 483486 - RNA, 18 nt, Artificial Sequence
  Synthetic
guagagcccucugguaga

SEQ ID NO: 483487 - RNA, 19 nt, Artificial Sequence
  Synthetic
gguagagcccucugguaga

SEQ ID NO: 483488 - RNA, 20 nt, Artificial Sequence
  Synthetic
ggguagagcccucugguaga

SEQ ID NO: 483489 - RNA, 21 nt, Artificial Sequence
  Synthetic
aggguagagcccucugguaga

SEQ ID NO: 483490 - RNA, 22 nt, Artificial Sequence
  Synthetic
uaggguagagcccucugguaga

SEQ ID NO: 483491 - RNA, 23 nt, Artificial Sequence
  Synthetic
auaggguagagcccucugguaga

SEQ ID NO: 483492 - RNA, 24 nt, Artificial Sequence
  Synthetic
gauaggguagagcccucugguaga

SEQ ID NO: 483493 - RNA, 18 nt, Artificial Sequence
  Synthetic
cugauggugggugguaga

SEQ ID NO: 483494 - RNA, 19 nt, Artificial Sequence
  Synthetic
ccugauggugggugguaga

SEQ ID NO: 483495 - RNA, 20 nt, Artificial Sequence
  Synthetic
gccugauggugggugguaga

SEQ ID NO: 483496 - RNA, 21 nt, Artificial Sequence
  Synthetic
agccugauggugggugguaga

SEQ ID NO: 483497 - RNA, 22 nt, Artificial Sequence
  Synthetic
cagccugauggugggugguaga

SEQ ID NO: 483498 - RNA, 23 nt, Artificial Sequence
  Synthetic
acagccugauggugggugguaga

SEQ ID NO: 483499 - RNA, 24 nt, Artificial Sequence
  Synthetic
cacagccugauggugggugguaga

SEQ ID NO: 483500 - RNA, 18 nt, Artificial Sequence
  Synthetic
uggccuuuacaauguaga

SEQ ID NO: 483501 - RNA, 19 nt, Artificial Sequence
  Synthetic
guggccuuuacaauguaga

SEQ ID NO: 483502 - RNA, 20 nt, Artificial Sequence
  Synthetic
gguggccuuuacaauguaga

SEQ ID NO: 483503 - RNA, 21 nt, Artificial Sequence
  Synthetic
agguggccuuuacaauguaga

SEQ ID NO: 483504 - RNA, 22 nt, Artificial Sequence
  Synthetic
gagguggccuuuacaauguaga

SEQ ID NO: 483505 - RNA, 23 nt, Artificial Sequence
  Synthetic
ugagguggccuuuacaauguaga

SEQ ID NO: 483506 - RNA, 24 nt, Artificial Sequence
  Synthetic
augagguggccuuuacaauguaga

SEQ ID NO: 483507 - RNA, 18 nt, Artificial Sequence
  Synthetic
uucucauucucauguaga

SEQ ID NO: 483508 - RNA, 19 nt, Artificial Sequence
  Synthetic
auucucauucucauguaga

SEQ ID NO: 483509 - RNA, 20 nt, Artificial Sequence
  Synthetic
aauucucauucucauguaga

SEQ ID NO: 483510 - RNA, 21 nt, Artificial Sequence
  Synthetic
gaauucucauucucauguaga

SEQ ID NO: 483511 - RNA, 22 nt, Artificial Sequence
  Synthetic
agaauucucauucucauguaga

SEQ ID NO: 483512 - RNA, 23 nt, Artificial Sequence
  Synthetic
aagaauucucauucucauguaga

SEQ ID NO: 483513 - RNA, 24 nt, Artificial Sequence
  Synthetic
aaagaauucucauucucauguaga

SEQ ID NO: 483514 - RNA, 18 nt, Artificial Sequence
  Synthetic
gaaguggguucauguaga

SEQ ID NO: 483515 - RNA, 19 nt, Artificial Sequence
  Synthetic
ggaaguggguucauguaga

SEQ ID NO: 483516 - RNA, 20 nt, Artificial Sequence
  Synthetic
uggaaguggguucauguaga

SEQ ID NO: 483517 - RNA, 21 nt, Artificial Sequence
  Synthetic
auggaaguggguucauguaga

SEQ ID NO: 483518 - RNA, 22 nt, Artificial Sequence
  Synthetic
aauggaaguggguucauguaga

SEQ ID NO: 483519 - RNA, 23 nt, Artificial Sequence
  Synthetic
uaauggaaguggguucauguaga

SEQ ID NO: 483520 - RNA, 24 nt, Artificial Sequence
  Synthetic
auaauggaaguggguucauguaga

SEQ ID NO: 483521 - RNA, 18 nt, Artificial Sequence
  Synthetic
gcugauacuaccuguaga

SEQ ID NO: 483522 - RNA, 19 nt, Artificial Sequence
  Synthetic
cgcugauacuaccuguaga

SEQ ID NO: 483523 - RNA, 20 nt, Artificial Sequence
  Synthetic
ucgcugauacuaccuguaga

SEQ ID NO: 483524 - RNA, 21 nt, Artificial Sequence
  Synthetic
uucgcugauacuaccuguaga

SEQ ID NO: 483525 - RNA, 22 nt, Artificial Sequence
  Synthetic
auucgcugauacuaccuguaga

SEQ ID NO: 483526 - RNA, 23 nt, Artificial Sequence
  Synthetic
cauucgcugauacuaccuguaga

SEQ ID NO: 483527 - RNA, 24 nt, Artificial Sequence
  Synthetic
ccauucgcugauacuaccuguaga

SEQ ID NO: 483528 - RNA, 18 nt, Artificial Sequence
  Synthetic
caaugccuccucuguaga

SEQ ID NO: 483529 - RNA, 19 nt, Artificial Sequence
  Synthetic
ucaaugccuccucuguaga

SEQ ID NO: 483530 - RNA, 20 nt, Artificial Sequence
  Synthetic
cucaaugccuccucuguaga

SEQ ID NO: 483531 - RNA, 21 nt, Artificial Sequence
  Synthetic
ucucaaugccuccucuguaga

SEQ ID NO: 483532 - RNA, 22 nt, Artificial Sequence
  Synthetic
cucucaaugccuccucuguaga

SEQ ID NO: 483533 - RNA, 23 nt, Artificial Sequence
  Synthetic
acucucaaugccuccucuguaga

SEQ ID NO: 483534 - RNA, 24 nt, Artificial Sequence
  Synthetic
aacucucaaugccuccucuguaga

SEQ ID NO: 483535 - RNA, 18 nt, Artificial Sequence
  Synthetic
uucaaagcaguguguaga

SEQ ID NO: 483536 - RNA, 19 nt, Artificial Sequence
  Synthetic
auucaaagcaguguguaga

SEQ ID NO: 483537 - RNA, 20 nt, Artificial Sequence
  Synthetic
cauucaaagcaguguguaga

SEQ ID NO: 483538 - RNA, 21 nt, Artificial Sequence
  Synthetic
gcauucaaagcaguguguaga

SEQ ID NO: 483539 - RNA, 22 nt, Artificial Sequence
  Synthetic
cgcauucaaagcaguguguaga

SEQ ID NO: 483540 - RNA, 23 nt, Artificial Sequence
  Synthetic
acgcauucaaagcaguguguaga

SEQ ID NO: 483541 - RNA, 24 nt, Artificial Sequence
  Synthetic
gacgcauucaaagcaguguguaga

SEQ ID NO: 483542 - RNA, 18 nt, Artificial Sequence
  Synthetic
uaaaaguauguguguaga

SEQ ID NO: 483543 - RNA, 19 nt, Artificial Sequence
  Synthetic
auaaaaguauguguguaga

SEQ ID NO: 483544 - RNA, 20 nt, Artificial Sequence
  Synthetic
aauaaaaguauguguguaga

SEQ ID NO: 483545 - RNA, 21 nt, Artificial Sequence
  Synthetic
aaauaaaaguauguguguaga

SEQ ID NO: 483546 - RNA, 22 nt, Artificial Sequence
  Synthetic
uaaauaaaaguauguguguaga

SEQ ID NO: 483547 - RNA, 23 nt, Artificial Sequence
  Synthetic
auaaauaaaaguauguguguaga

SEQ ID NO: 483548 - RNA, 24 nt, Artificial Sequence
  Synthetic
aauaaauaaaaguauguguguaga

SEQ ID NO: 483549 - RNA, 18 nt, Artificial Sequence
  Synthetic
caaaaugaagcuuguaga

SEQ ID NO: 483550 - RNA, 19 nt, Artificial Sequence
  Synthetic
gcaaaaugaagcuuguaga

SEQ ID NO: 483551 - RNA, 20 nt, Artificial Sequence
  Synthetic
agcaaaaugaagcuuguaga

SEQ ID NO: 483552 - RNA, 21 nt, Artificial Sequence
  Synthetic
aagcaaaaugaagcuuguaga

SEQ ID NO: 483553 - RNA, 22 nt, Artificial Sequence
  Synthetic
aaagcaaaaugaagcuuguaga

SEQ ID NO: 483554 - RNA, 23 nt, Artificial Sequence
  Synthetic
caaagcaaaaugaagcuuguaga

SEQ ID NO: 483555 - RNA, 24 nt, Artificial Sequence
  Synthetic
gcaaagcaaaaugaagcuuguaga

SEQ ID NO: 483556 - RNA, 18 nt, Artificial Sequence
  Synthetic
agagacccuaguuguaga

SEQ ID NO: 483557 - RNA, 19 nt, Artificial Sequence
  Synthetic
cagagacccuaguuguaga

SEQ ID NO: 483558 - RNA, 20 nt, Artificial Sequence
  Synthetic
ccagagacccuaguuguaga

SEQ ID NO: 483559 - RNA, 21 nt, Artificial Sequence
  Synthetic
gccagagacccuaguuguaga

SEQ ID NO: 483560 - RNA, 22 nt, Artificial Sequence
  Synthetic
ugccagagacccuaguuguaga

SEQ ID NO: 483561 - RNA, 23 nt, Artificial Sequence
  Synthetic
cugccagagacccuaguuguaga

SEQ ID NO: 483562 - RNA, 24 nt, Artificial Sequence
  Synthetic
ucugccagagacccuaguuguaga

SEQ ID NO: 483563 - RNA, 18 nt, Artificial Sequence
  Synthetic
auguuaaacacaauuaga

SEQ ID NO: 483564 - RNA, 19 nt, Artificial Sequence
  Synthetic
aauguuaaacacaauuaga

SEQ ID NO: 483565 - RNA, 20 nt, Artificial Sequence
  Synthetic
aaauguuaaacacaauuaga

SEQ ID NO: 483566 - RNA, 21 nt, Artificial Sequence
  Synthetic
gaaauguuaaacacaauuaga

SEQ ID NO: 483567 - RNA, 22 nt, Artificial Sequence
  Synthetic
agaaauguuaaacacaauuaga

SEQ ID NO: 483568 - RNA, 23 nt, Artificial Sequence
  Synthetic
aagaaauguuaaacacaauuaga

SEQ ID NO: 483569 - RNA, 24 nt, Artificial Sequence
  Synthetic
gaagaaauguuaaacacaauuaga

SEQ ID NO: 483570 - RNA, 18 nt, Artificial Sequence
  Synthetic
guuguuuucacaauuaga

SEQ ID NO: 483571 - RNA, 19 nt, Artificial Sequence
  Synthetic
uguuguuuucacaauuaga

SEQ ID NO: 483572 - RNA, 20 nt, Artificial Sequence
  Synthetic
uuguuguuuucacaauuaga

SEQ ID NO: 483573 - RNA, 21 nt, Artificial Sequence
  Synthetic
guuguuguuuucacaauuaga

SEQ ID NO: 483574 - RNA, 22 nt, Artificial Sequence
  Synthetic
uguuguuguuuucacaauuaga

SEQ ID NO: 483575 - RNA, 23 nt, Artificial Sequence
  Synthetic
uuguuguuguuuucacaauuaga

SEQ ID NO: 483576 - RNA, 24 nt, Artificial Sequence
  Synthetic
uuuguuguuguuuucacaauuaga

SEQ ID NO: 483577 - RNA, 18 nt, Artificial Sequence
  Synthetic
cucaaauuuccaauuaga

SEQ ID NO: 483578 - RNA, 19 nt, Artificial Sequence
  Synthetic
acucaaauuuccaauuaga

SEQ ID NO: 483579 - RNA, 20 nt, Artificial Sequence
  Synthetic
aacucaaauuuccaauuaga

SEQ ID NO: 483580 - RNA, 21 nt, Artificial Sequence
  Synthetic
uaacucaaauuuccaauuaga

SEQ ID NO: 483581 - RNA, 22 nt, Artificial Sequence
  Synthetic
auaacucaaauuuccaauuaga

SEQ ID NO: 483582 - RNA, 23 nt, Artificial Sequence
  Synthetic
gauaacucaaauuuccaauuaga

SEQ ID NO: 483583 - RNA, 24 nt, Artificial Sequence
  Synthetic
cgauaacucaaauuuccaauuaga

SEQ ID NO: 483584 - RNA, 18 nt, Artificial Sequence
  Synthetic
aacacaauuucaauuaga

SEQ ID NO: 483585 - RNA, 19 nt, Artificial Sequence
  Synthetic
aaacacaauuucaauuaga

SEQ ID NO: 483586 - RNA, 20 nt, Artificial Sequence
  Synthetic
gaaacacaauuucaauuaga

SEQ ID NO: 483587 - RNA, 21 nt, Artificial Sequence
  Synthetic
ggaaacacaauuucaauuaga

SEQ ID NO: 483588 - RNA, 22 nt, Artificial Sequence
  Synthetic
aggaaacacaauuucaauuaga

SEQ ID NO: 483589 - RNA, 23 nt, Artificial Sequence
  Synthetic
aaggaaacacaauuucaauuaga

SEQ ID NO: 483590 - RNA, 24 nt, Artificial Sequence
  Synthetic
gaaggaaacacaauuucaauuaga

SEQ ID NO: 483591 - RNA, 18 nt, Artificial Sequence
  Synthetic
ccaacacauugaauuaga

SEQ ID NO: 483592 - RNA, 19 nt, Artificial Sequence
  Synthetic
cccaacacauugaauuaga

SEQ ID NO: 483593 - RNA, 20 nt, Artificial Sequence
  Synthetic
ccccaacacauugaauuaga

SEQ ID NO: 483594 - RNA, 21 nt, Artificial Sequence
  Synthetic
accccaacacauugaauuaga

SEQ ID NO: 483595 - RNA, 22 nt, Artificial Sequence
  Synthetic
uaccccaacacauugaauuaga

SEQ ID NO: 483596 - RNA, 23 nt, Artificial Sequence
  Synthetic
guaccccaacacauugaauuaga

SEQ ID NO: 483597 - RNA, 24 nt, Artificial Sequence
  Synthetic
aguaccccaacacauugaauuaga

SEQ ID NO: 483598 - RNA, 18 nt, Artificial Sequence
  Synthetic
gcuucgcugcacauuaga

SEQ ID NO: 483599 - RNA, 19 nt, Artificial Sequence
  Synthetic
agcuucgcugcacauuaga

SEQ ID NO: 483600 - RNA, 20 nt, Artificial Sequence
  Synthetic
gagcuucgcugcacauuaga

SEQ ID NO: 483601 - RNA, 21 nt, Artificial Sequence
  Synthetic
agagcuucgcugcacauuaga

SEQ ID NO: 483602 - RNA, 22 nt, Artificial Sequence
  Synthetic
cagagcuucgcugcacauuaga

SEQ ID NO: 483603 - RNA, 23 nt, Artificial Sequence
  Synthetic
ccagagcuucgcugcacauuaga

SEQ ID NO: 483604 - RNA, 24 nt, Artificial Sequence
  Synthetic
cccagagcuucgcugcacauuaga

SEQ ID NO: 483605 - RNA, 18 nt, Artificial Sequence
  Synthetic
uaacagccacccauuaga

SEQ ID NO: 483606 - RNA, 19 nt, Artificial Sequence
  Synthetic
uuaacagccacccauuaga

SEQ ID NO: 483607 - RNA, 20 nt, Artificial Sequence
  Synthetic
uuuaacagccacccauuaga

SEQ ID NO: 483608 - RNA, 21 nt, Artificial Sequence
  Synthetic
auuuaacagccacccauuaga

SEQ ID NO: 483609 - RNA, 22 nt, Artificial Sequence
  Synthetic
aauuuaacagccacccauuaga

SEQ ID NO: 483610 - RNA, 23 nt, Artificial Sequence
  Synthetic
aaauuuaacagccacccauuaga

SEQ ID NO: 483611 - RNA, 24 nt, Artificial Sequence
  Synthetic
aaaauuuaacagccacccauuaga

SEQ ID NO: 483612 - RNA, 18 nt, Artificial Sequence
  Synthetic
aggcucuaugggauuaga

SEQ ID NO: 483613 - RNA, 19 nt, Artificial Sequence
  Synthetic
caggcucuaugggauuaga

SEQ ID NO: 483614 - RNA, 20 nt, Artificial Sequence
  Synthetic
gcaggcucuaugggauuaga

SEQ ID NO: 483615 - RNA, 21 nt, Artificial Sequence
  Synthetic
ggcaggcucuaugggauuaga

SEQ ID NO: 483616 - RNA, 22 nt, Artificial Sequence
  Synthetic
aggcaggcucuaugggauuaga

SEQ ID NO: 483617 - RNA, 23 nt, Artificial Sequence
  Synthetic
aaggcaggcucuaugggauuaga

SEQ ID NO: 483618 - RNA, 24 nt, Artificial Sequence
  Synthetic
caaggcaggcucuaugggauuaga

SEQ ID NO: 483619 - RNA, 18 nt, Artificial Sequence
  Synthetic
aucuuaauuuggauuaga

SEQ ID NO: 483620 - RNA, 19 nt, Artificial Sequence
  Synthetic
caucuuaauuuggauuaga

SEQ ID NO: 483621 - RNA, 20 nt, Artificial Sequence
  Synthetic
ccaucuuaauuuggauuaga

SEQ ID NO: 483622 - RNA, 21 nt, Artificial Sequence
  Synthetic
accaucuuaauuuggauuaga

SEQ ID NO: 483623 - RNA, 22 nt, Artificial Sequence
  Synthetic
uaccaucuuaauuuggauuaga

SEQ ID NO: 483624 - RNA, 23 nt, Artificial Sequence
  Synthetic
uuaccaucuuaauuuggauuaga

SEQ ID NO: 483625 - RNA, 24 nt, Artificial Sequence
  Synthetic
cuuaccaucuuaauuuggauuaga

SEQ ID NO: 483626 - RNA, 18 nt, Artificial Sequence
  Synthetic
gcaaagauuuugauuaga

SEQ ID NO: 483627 - RNA, 19 nt, Artificial Sequence
  Synthetic
ggcaaagauuuugauuaga

SEQ ID NO: 483628 - RNA, 20 nt, Artificial Sequence
  Synthetic
uggcaaagauuuugauuaga

SEQ ID NO: 483629 - RNA, 21 nt, Artificial Sequence
  Synthetic
uuggcaaagauuuugauuaga

SEQ ID NO: 483630 - RNA, 22 nt, Artificial Sequence
  Synthetic
auuggcaaagauuuugauuaga

SEQ ID NO: 483631 - RNA, 23 nt, Artificial Sequence
  Synthetic
uauuggcaaagauuuugauuaga

SEQ ID NO: 483632 - RNA, 24 nt, Artificial Sequence
  Synthetic
cuauuggcaaagauuuugauuaga

SEQ ID NO: 483633 - RNA, 18 nt, Artificial Sequence
  Synthetic
auugcaguaaauauuaga

SEQ ID NO: 483634 - RNA, 19 nt, Artificial Sequence
  Synthetic
gauugcaguaaauauuaga

SEQ ID NO: 483635 - RNA, 20 nt, Artificial Sequence
  Synthetic
agauugcaguaaauauuaga

SEQ ID NO: 483636 - RNA, 21 nt, Artificial Sequence
  Synthetic
cagauugcaguaaauauuaga

SEQ ID NO: 483637 - RNA, 22 nt, Artificial Sequence
  Synthetic
gcagauugcaguaaauauuaga

SEQ ID NO: 483638 - RNA, 23 nt, Artificial Sequence
  Synthetic
ugcagauugcaguaaauauuaga

SEQ ID NO: 483639 - RNA, 24 nt, Artificial Sequence
  Synthetic
uugcagauugcaguaaauauuaga

SEQ ID NO: 483640 - RNA, 18 nt, Artificial Sequence
  Synthetic
agcaauucgaauauuaga

SEQ ID NO: 483641 - RNA, 19 nt, Artificial Sequence
  Synthetic
gagcaauucgaauauuaga

SEQ ID NO: 483642 - RNA, 20 nt, Artificial Sequence
  Synthetic
ugagcaauucgaauauuaga

SEQ ID NO: 483643 - RNA, 21 nt, Artificial Sequence
  Synthetic
augagcaauucgaauauuaga

SEQ ID NO: 483644 - RNA, 22 nt, Artificial Sequence
  Synthetic
aaugagcaauucgaauauuaga

SEQ ID NO: 483645 - RNA, 23 nt, Artificial Sequence
  Synthetic
aaaugagcaauucgaauauuaga

SEQ ID NO: 483646 - RNA, 24 nt, Artificial Sequence
  Synthetic
aaaaugagcaauucgaauauuaga

SEQ ID NO: 483647 - RNA, 18 nt, Artificial Sequence
  Synthetic
aggugaauagauauuaga

SEQ ID NO: 483648 - RNA, 19 nt, Artificial Sequence
  Synthetic
gaggugaauagauauuaga

SEQ ID NO: 483649 - RNA, 20 nt, Artificial Sequence
  Synthetic
ggaggugaauagauauuaga

SEQ ID NO: 483650 - RNA, 21 nt, Artificial Sequence
  Synthetic
uggaggugaauagauauuaga

SEQ ID NO: 483651 - RNA, 22 nt, Artificial Sequence
  Synthetic
uuggaggugaauagauauuaga

SEQ ID NO: 483652 - RNA, 23 nt, Artificial Sequence
  Synthetic
guuggaggugaauagauauuaga

SEQ ID NO: 483653 - RNA, 24 nt, Artificial Sequence
  Synthetic
uguuggaggugaauagauauuaga

SEQ ID NO: 483654 - RNA, 18 nt, Artificial Sequence
  Synthetic
ugcguuaaaaguauuaga

SEQ ID NO: 483655 - RNA, 19 nt, Artificial Sequence
  Synthetic
uugcguuaaaaguauuaga

SEQ ID NO: 483656 - RNA, 20 nt, Artificial Sequence
  Synthetic
guugcguuaaaaguauuaga

SEQ ID NO: 483657 - RNA, 21 nt, Artificial Sequence
  Synthetic
uguugcguuaaaaguauuaga

SEQ ID NO: 483658 - RNA, 22 nt, Artificial Sequence
  Synthetic
uuguugcguuaaaaguauuaga

SEQ ID NO: 483659 - RNA, 23 nt, Artificial Sequence
  Synthetic
uuuguugcguuaaaaguauuaga

SEQ ID NO: 483660 - RNA, 24 nt, Artificial Sequence
  Synthetic
auuuguugcguuaaaaguauuaga

SEQ ID NO: 483661 - RNA, 18 nt, Artificial Sequence
  Synthetic
aacccacauuguauuaga

SEQ ID NO: 483662 - RNA, 19 nt, Artificial Sequence
  Synthetic
aaacccacauuguauuaga

SEQ ID NO: 483663 - RNA, 20 nt, Artificial Sequence
  Synthetic
aaaacccacauuguauuaga

SEQ ID NO: 483664 - RNA, 21 nt, Artificial Sequence
  Synthetic
caaaacccacauuguauuaga

SEQ ID NO: 483665 - RNA, 22 nt, Artificial Sequence
  Synthetic
ucaaaacccacauuguauuaga

SEQ ID NO: 483666 - RNA, 23 nt, Artificial Sequence
  Synthetic
cucaaaacccacauuguauuaga

SEQ ID NO: 483667 - RNA, 24 nt, Artificial Sequence
  Synthetic
gcucaaaacccacauuguauuaga

SEQ ID NO: 483668 - RNA, 18 nt, Artificial Sequence
  Synthetic
gauuauuaaauuauuaga

SEQ ID NO: 483669 - RNA, 19 nt, Artificial Sequence
  Synthetic
cgauuauuaaauuauuaga

SEQ ID NO: 483670 - RNA, 20 nt, Artificial Sequence
  Synthetic
acgauuauuaaauuauuaga

SEQ ID NO: 483671 - RNA, 21 nt, Artificial Sequence
  Synthetic
cacgauuauuaaauuauuaga

SEQ ID NO: 483672 - RNA, 22 nt, Artificial Sequence
  Synthetic
ucacgauuauuaaauuauuaga

SEQ ID NO: 483673 - RNA, 23 nt, Artificial Sequence
  Synthetic
uucacgauuauuaaauuauuaga

SEQ ID NO: 483674 - RNA, 24 nt, Artificial Sequence
  Synthetic
uuucacgauuauuaaauuauuaga

SEQ ID NO: 483675 - RNA, 18 nt, Artificial Sequence
  Synthetic
caucuucucacacuuaga

SEQ ID NO: 483676 - RNA, 19 nt, Artificial Sequence
  Synthetic
ucaucuucucacacuuaga

SEQ ID NO: 483677 - RNA, 20 nt, Artificial Sequence
  Synthetic
aucaucuucucacacuuaga

SEQ ID NO: 483678 - RNA, 21 nt, Artificial Sequence
  Synthetic
caucaucuucucacacuuaga

SEQ ID NO: 483679 - RNA, 22 nt, Artificial Sequence
  Synthetic
gcaucaucuucucacacuuaga

SEQ ID NO: 483680 - RNA, 23 nt, Artificial Sequence
  Synthetic
agcaucaucuucucacacuuaga

SEQ ID NO: 483681 - RNA, 24 nt, Artificial Sequence
  Synthetic
cagcaucaucuucucacacuuaga

SEQ ID NO: 483682 - RNA, 18 nt, Artificial Sequence
  Synthetic
agauuucaaagacuuaga

SEQ ID NO: 483683 - RNA, 19 nt, Artificial Sequence
  Synthetic
cagauuucaaagacuuaga

SEQ ID NO: 483684 - RNA, 20 nt, Artificial Sequence
  Synthetic
ccagauuucaaagacuuaga

SEQ ID NO: 483685 - RNA, 21 nt, Artificial Sequence
  Synthetic
gccagauuucaaagacuuaga

SEQ ID NO: 483686 - RNA, 22 nt, Artificial Sequence
  Synthetic
ugccagauuucaaagacuuaga

SEQ ID NO: 483687 - RNA, 23 nt, Artificial Sequence
  Synthetic
augccagauuucaaagacuuaga

SEQ ID NO: 483688 - RNA, 24 nt, Artificial Sequence
  Synthetic
caugccagauuucaaagacuuaga

SEQ ID NO: 483689 - RNA, 18 nt, Artificial Sequence
  Synthetic
gauuuccuauuacuuaga

SEQ ID NO: 483690 - RNA, 19 nt, Artificial Sequence
  Synthetic
ugauuuccuauuacuuaga

SEQ ID NO: 483691 - RNA, 20 nt, Artificial Sequence
  Synthetic
augauuuccuauuacuuaga

SEQ ID NO: 483692 - RNA, 21 nt, Artificial Sequence
  Synthetic
aaugauuuccuauuacuuaga

SEQ ID NO: 483693 - RNA, 22 nt, Artificial Sequence
  Synthetic
uaaugauuuccuauuacuuaga

SEQ ID NO: 483694 - RNA, 23 nt, Artificial Sequence
  Synthetic
guaaugauuuccuauuacuuaga

SEQ ID NO: 483695 - RNA, 24 nt, Artificial Sequence
  Synthetic
aguaaugauuuccuauuacuuaga

SEQ ID NO: 483696 - RNA, 18 nt, Artificial Sequence
  Synthetic
agguaguuauuacuuaga

SEQ ID NO: 483697 - RNA, 19 nt, Artificial Sequence
  Synthetic
aagguaguuauuacuuaga

SEQ ID NO: 483698 - RNA, 20 nt, Artificial Sequence
  Synthetic
caagguaguuauuacuuaga

SEQ ID NO: 483699 - RNA, 21 nt, Artificial Sequence
  Synthetic
gcaagguaguuauuacuuaga

SEQ ID NO: 483700 - RNA, 22 nt, Artificial Sequence
  Synthetic
ugcaagguaguuauuacuuaga

SEQ ID NO: 483701 - RNA, 23 nt, Artificial Sequence
  Synthetic
cugcaagguaguuauuacuuaga

SEQ ID NO: 483702 - RNA, 24 nt, Artificial Sequence
  Synthetic
ucugcaagguaguuauuacuuaga

SEQ ID NO: 483703 - RNA, 18 nt, Artificial Sequence
  Synthetic
caguggaucuuacuuaga

SEQ ID NO: 483704 - RNA, 19 nt, Artificial Sequence
  Synthetic
gcaguggaucuuacuuaga

SEQ ID NO: 483705 - RNA, 20 nt, Artificial Sequence
  Synthetic
agcaguggaucuuacuuaga

SEQ ID NO: 483706 - RNA, 21 nt, Artificial Sequence
  Synthetic
gagcaguggaucuuacuuaga

SEQ ID NO: 483707 - RNA, 22 nt, Artificial Sequence
  Synthetic
agagcaguggaucuuacuuaga

SEQ ID NO: 483708 - RNA, 23 nt, Artificial Sequence
  Synthetic
aagagcaguggaucuuacuuaga

SEQ ID NO: 483709 - RNA, 24 nt, Artificial Sequence
  Synthetic
gaagagcaguggaucuuacuuaga

SEQ ID NO: 483710 - RNA, 18 nt, Artificial Sequence
  Synthetic
ucagagaagucccuuaga

SEQ ID NO: 483711 - RNA, 19 nt, Artificial Sequence
  Synthetic
gucagagaagucccuuaga

SEQ ID NO: 483712 - RNA, 20 nt, Artificial Sequence
  Synthetic
ugucagagaagucccuuaga

SEQ ID NO: 483713 - RNA, 21 nt, Artificial Sequence
  Synthetic
augucagagaagucccuuaga

SEQ ID NO: 483714 - RNA, 22 nt, Artificial Sequence
  Synthetic
gaugucagagaagucccuuaga

SEQ ID NO: 483715 - RNA, 23 nt, Artificial Sequence
  Synthetic
ggaugucagagaagucccuuaga

SEQ ID NO: 483716 - RNA, 24 nt, Artificial Sequence
  Synthetic
gggaugucagagaagucccuuaga

SEQ ID NO: 483717 - RNA, 18 nt, Artificial Sequence
  Synthetic
ucucauuaacuccuuaga

SEQ ID NO: 483718 - RNA, 19 nt, Artificial Sequence
  Synthetic
aucucauuaacuccuuaga

SEQ ID NO: 483719 - RNA, 20 nt, Artificial Sequence
  Synthetic
gaucucauuaacuccuuaga

SEQ ID NO: 483720 - RNA, 21 nt, Artificial Sequence
  Synthetic
ugaucucauuaacuccuuaga

SEQ ID NO: 483721 - RNA, 22 nt, Artificial Sequence
  Synthetic
augaucucauuaacuccuuaga

SEQ ID NO: 483722 - RNA, 23 nt, Artificial Sequence
  Synthetic
uaugaucucauuaacuccuuaga

SEQ ID NO: 483723 - RNA, 24 nt, Artificial Sequence
  Synthetic
auaugaucucauuaacuccuuaga

SEQ ID NO: 483724 - RNA, 18 nt, Artificial Sequence
  Synthetic
auauaauaauagcuuaga

SEQ ID NO: 483725 - RNA, 19 nt, Artificial Sequence
  Synthetic
uauauaauaauagcuuaga

SEQ ID NO: 483726 - RNA, 20 nt, Artificial Sequence
  Synthetic
cuauauaauaauagcuuaga

SEQ ID NO: 483727 - RNA, 21 nt, Artificial Sequence
  Synthetic
ucuauauaauaauagcuuaga

SEQ ID NO: 483728 - RNA, 22 nt, Artificial Sequence
  Synthetic
aucuauauaauaauagcuuaga

SEQ ID NO: 483729 - RNA, 23 nt, Artificial Sequence
  Synthetic
uaucuauauaauaauagcuuaga

SEQ ID NO: 483730 - RNA, 24 nt, Artificial Sequence
  Synthetic
auaucuauauaauaauagcuuaga

SEQ ID NO: 483731 - RNA, 18 nt, Artificial Sequence
  Synthetic
agcauuguaaaucuuaga

SEQ ID NO: 483732 - RNA, 19 nt, Artificial Sequence
  Synthetic
gagcauuguaaaucuuaga

SEQ ID NO: 483733 - RNA, 20 nt, Artificial Sequence
  Synthetic
ugagcauuguaaaucuuaga

SEQ ID NO: 483734 - RNA, 21 nt, Artificial Sequence
  Synthetic
uugagcauuguaaaucuuaga

SEQ ID NO: 483735 - RNA, 22 nt, Artificial Sequence
  Synthetic
uuugagcauuguaaaucuuaga

SEQ ID NO: 483736 - RNA, 23 nt, Artificial Sequence
  Synthetic
cuuugagcauuguaaaucuuaga

SEQ ID NO: 483737 - RNA, 24 nt, Artificial Sequence
  Synthetic
ccuuugagcauuguaaaucuuaga

SEQ ID NO: 483738 - RNA, 18 nt, Artificial Sequence
  Synthetic
gcauucauggaucuuaga

SEQ ID NO: 483739 - RNA, 19 nt, Artificial Sequence
  Synthetic
cgcauucauggaucuuaga

SEQ ID NO: 483740 - RNA, 20 nt, Artificial Sequence
  Synthetic
acgcauucauggaucuuaga

SEQ ID NO: 483741 - RNA, 21 nt, Artificial Sequence
  Synthetic
cacgcauucauggaucuuaga

SEQ ID NO: 483742 - RNA, 22 nt, Artificial Sequence
  Synthetic
ucacgcauucauggaucuuaga

SEQ ID NO: 483743 - RNA, 23 nt, Artificial Sequence
  Synthetic
gucacgcauucauggaucuuaga

SEQ ID NO: 483744 - RNA, 24 nt, Artificial Sequence
  Synthetic
ggucacgcauucauggaucuuaga

SEQ ID NO: 483745 - RNA, 18 nt, Artificial Sequence
  Synthetic
augugguuuacucuuaga

SEQ ID NO: 483746 - RNA, 19 nt, Artificial Sequence
  Synthetic
gaugugguuuacucuuaga

SEQ ID NO: 483747 - RNA, 20 nt, Artificial Sequence
  Synthetic
agaugugguuuacucuuaga

SEQ ID NO: 483748 - RNA, 21 nt, Artificial Sequence
  Synthetic
uagaugugguuuacucuuaga

SEQ ID NO: 483749 - RNA, 22 nt, Artificial Sequence
  Synthetic
cuagaugugguuuacucuuaga

SEQ ID NO: 483750 - RNA, 23 nt, Artificial Sequence
  Synthetic
ccuagaugugguuuacucuuaga

SEQ ID NO: 483751 - RNA, 24 nt, Artificial Sequence
  Synthetic
accuagaugugguuuacucuuaga

SEQ ID NO: 483752 - RNA, 18 nt, Artificial Sequence
  Synthetic
acucaauguuuucuuaga

SEQ ID NO: 483753 - RNA, 19 nt, Artificial Sequence
  Synthetic
uacucaauguuuucuuaga

SEQ ID NO: 483754 - RNA, 20 nt, Artificial Sequence
  Synthetic
uuacucaauguuuucuuaga

SEQ ID NO: 483755 - RNA, 21 nt, Artificial Sequence
  Synthetic
cuuacucaauguuuucuuaga

SEQ ID NO: 483756 - RNA, 22 nt, Artificial Sequence
  Synthetic
gcuuacucaauguuuucuuaga

SEQ ID NO: 483757 - RNA, 23 nt, Artificial Sequence
  Synthetic
agcuuacucaauguuuucuuaga

SEQ ID NO: 483758 - RNA, 24 nt, Artificial Sequence
  Synthetic
aagcuuacucaauguuuucuuaga

SEQ ID NO: 483759 - RNA, 18 nt, Artificial Sequence
  Synthetic
uacaaaguuccaguuaga

SEQ ID NO: 483760 - RNA, 19 nt, Artificial Sequence
  Synthetic
guacaaaguuccaguuaga

SEQ ID NO: 483761 - RNA, 20 nt, Artificial Sequence
  Synthetic
gguacaaaguuccaguuaga

SEQ ID NO: 483762 - RNA, 21 nt, Artificial Sequence
  Synthetic
ggguacaaaguuccaguuaga

SEQ ID NO: 483763 - RNA, 22 nt, Artificial Sequence
  Synthetic
uggguacaaaguuccaguuaga

SEQ ID NO: 483764 - RNA, 23 nt, Artificial Sequence
  Synthetic
auggguacaaaguuccaguuaga

SEQ ID NO: 483765 - RNA, 24 nt, Artificial Sequence
  Synthetic
aauggguacaaaguuccaguuaga

SEQ ID NO: 483766 - RNA, 18 nt, Artificial Sequence
  Synthetic
cuguaggacuggguuaga

SEQ ID NO: 483767 - RNA, 19 nt, Artificial Sequence
  Synthetic
acuguaggacuggguuaga

SEQ ID NO: 483768 - RNA, 20 nt, Artificial Sequence
  Synthetic
gacuguaggacuggguuaga

SEQ ID NO: 483769 - RNA, 21 nt, Artificial Sequence
  Synthetic
ggacuguaggacuggguuaga

SEQ ID NO: 483770 - RNA, 22 nt, Artificial Sequence
  Synthetic
aggacuguaggacuggguuaga

SEQ ID NO: 483771 - RNA, 23 nt, Artificial Sequence
  Synthetic
caggacuguaggacuggguuaga

SEQ ID NO: 483772 - RNA, 24 nt, Artificial Sequence
  Synthetic
ucaggacuguaggacuggguuaga

SEQ ID NO: 483773 - RNA, 18 nt, Artificial Sequence
  Synthetic
aaaaggcaagugguuaga

SEQ ID NO: 483774 - RNA, 19 nt, Artificial Sequence
  Synthetic
gaaaaggcaagugguuaga

SEQ ID NO: 483775 - RNA, 20 nt, Artificial Sequence
  Synthetic
agaaaaggcaagugguuaga

SEQ ID NO: 483776 - RNA, 21 nt, Artificial Sequence
  Synthetic
uagaaaaggcaagugguuaga

SEQ ID NO: 483777 - RNA, 22 nt, Artificial Sequence
  Synthetic
uuagaaaaggcaagugguuaga

SEQ ID NO: 483778 - RNA, 23 nt, Artificial Sequence
  Synthetic
guuagaaaaggcaagugguuaga

SEQ ID NO: 483779 - RNA, 24 nt, Artificial Sequence
  Synthetic
gguuagaaaaggcaagugguuaga

SEQ ID NO: 483780 - RNA, 18 nt, Artificial Sequence
  Synthetic
guuggagacuguguuaga

SEQ ID NO: 483781 - RNA, 19 nt, Artificial Sequence
  Synthetic
aguuggagacuguguuaga

SEQ ID NO: 483782 - RNA, 20 nt, Artificial Sequence
  Synthetic
aaguuggagacuguguuaga

SEQ ID NO: 483783 - RNA, 21 nt, Artificial Sequence
  Synthetic
uaaguuggagacuguguuaga

SEQ ID NO: 483784 - RNA, 22 nt, Artificial Sequence
  Synthetic
guaaguuggagacuguguuaga

SEQ ID NO: 483785 - RNA, 23 nt, Artificial Sequence
  Synthetic
uguaaguuggagacuguguuaga

SEQ ID NO: 483786 - RNA, 24 nt, Artificial Sequence
  Synthetic
uuguaaguuggagacuguguuaga

SEQ ID NO: 483787 - RNA, 18 nt, Artificial Sequence
  Synthetic
uuucaaagcaaauuuaga

SEQ ID NO: 483788 - RNA, 19 nt, Artificial Sequence
  Synthetic
uuuucaaagcaaauuuaga

SEQ ID NO: 483789 - RNA, 20 nt, Artificial Sequence
  Synthetic
auuuucaaagcaaauuuaga

SEQ ID NO: 483790 - RNA, 21 nt, Artificial Sequence
  Synthetic
uauuuucaaagcaaauuuaga

SEQ ID NO: 483791 - RNA, 22 nt, Artificial Sequence
  Synthetic
auauuuucaaagcaaauuuaga

SEQ ID NO: 483792 - RNA, 23 nt, Artificial Sequence
  Synthetic
cauauuuucaaagcaaauuuaga

SEQ ID NO: 483793 - RNA, 24 nt, Artificial Sequence
  Synthetic
ccauauuuucaaagcaaauuuaga

SEQ ID NO: 483794 - RNA, 18 nt, Artificial Sequence
  Synthetic
uugaggauuugauuuaga

SEQ ID NO: 483795 - RNA, 19 nt, Artificial Sequence
  Synthetic
cuugaggauuugauuuaga

SEQ ID NO: 483796 - RNA, 20 nt, Artificial Sequence
  Synthetic
gcuugaggauuugauuuaga

SEQ ID NO: 483797 - RNA, 21 nt, Artificial Sequence
  Synthetic
agcuugaggauuugauuuaga

SEQ ID NO: 483798 - RNA, 22 nt, Artificial Sequence
  Synthetic
aagcuugaggauuugauuuaga

SEQ ID NO: 483799 - RNA, 23 nt, Artificial Sequence
  Synthetic
uaagcuugaggauuugauuuaga

SEQ ID NO: 483800 - RNA, 24 nt, Artificial Sequence
  Synthetic
guaagcuugaggauuugauuuaga

SEQ ID NO: 483801 - RNA, 18 nt, Artificial Sequence
  Synthetic
uaaauauauauauuuaga

SEQ ID NO: 483802 - RNA, 19 nt, Artificial Sequence
  Synthetic
cuaaauauauauauuuaga

SEQ ID NO: 483803 - RNA, 20 nt, Artificial Sequence
  Synthetic
ucuaaauauauauauuuaga

SEQ ID NO: 483804 - RNA, 21 nt, Artificial Sequence
  Synthetic
gucuaaauauauauauuuaga

SEQ ID NO: 483805 - RNA, 22 nt, Artificial Sequence
  Synthetic
agucuaaauauauauauuuaga

SEQ ID NO: 483806 - RNA, 23 nt, Artificial Sequence
  Synthetic
uagucuaaauauauauauuuaga

SEQ ID NO: 483807 - RNA, 24 nt, Artificial Sequence
  Synthetic
auagucuaaauauauauauuuaga

SEQ ID NO: 483808 - RNA, 18 nt, Artificial Sequence
  Synthetic
uuucaugcauacuuuaga

SEQ ID NO: 483809 - RNA, 19 nt, Artificial Sequence
  Synthetic
guuucaugcauacuuuaga

SEQ ID NO: 483810 - RNA, 20 nt, Artificial Sequence
  Synthetic
aguuucaugcauacuuuaga

SEQ ID NO: 483811 - RNA, 21 nt, Artificial Sequence
  Synthetic
gaguuucaugcauacuuuaga

SEQ ID NO: 483812 - RNA, 22 nt, Artificial Sequence
  Synthetic
agaguuucaugcauacuuuaga

SEQ ID NO: 483813 - RNA, 23 nt, Artificial Sequence
  Synthetic
aagaguuucaugcauacuuuaga

SEQ ID NO: 483814 - RNA, 24 nt, Artificial Sequence
  Synthetic
uaagaguuucaugcauacuuuaga

SEQ ID NO: 483815 - RNA, 18 nt, Artificial Sequence
  Synthetic
cgagaauaaaaguuuaga

SEQ ID NO: 483816 - RNA, 19 nt, Artificial Sequence
  Synthetic
ccgagaauaaaaguuuaga

SEQ ID NO: 483817 - RNA, 20 nt, Artificial Sequence
  Synthetic
accgagaauaaaaguuuaga

SEQ ID NO: 483818 - RNA, 21 nt, Artificial Sequence
  Synthetic
caccgagaauaaaaguuuaga

SEQ ID NO: 483819 - RNA, 22 nt, Artificial Sequence
  Synthetic
ccaccgagaauaaaaguuuaga

SEQ ID NO: 483820 - RNA, 23 nt, Artificial Sequence
  Synthetic
gccaccgagaauaaaaguuuaga

SEQ ID NO: 483821 - RNA, 24 nt, Artificial Sequence
  Synthetic
agccaccgagaauaaaaguuuaga

SEQ ID NO: 483822 - RNA, 18 nt, Artificial Sequence
  Synthetic
guguggcuaaaguuuaga

SEQ ID NO: 483823 - RNA, 19 nt, Artificial Sequence
  Synthetic
aguguggcuaaaguuuaga

SEQ ID NO: 483824 - RNA, 20 nt, Artificial Sequence
  Synthetic
caguguggcuaaaguuuaga

SEQ ID NO: 483825 - RNA, 21 nt, Artificial Sequence
  Synthetic
ucaguguggcuaaaguuuaga

SEQ ID NO: 483826 - RNA, 22 nt, Artificial Sequence
  Synthetic
uucaguguggcuaaaguuuaga

SEQ ID NO: 483827 - RNA, 23 nt, Artificial Sequence
  Synthetic
auucaguguggcuaaaguuuaga

SEQ ID NO: 483828 - RNA, 24 nt, Artificial Sequence
  Synthetic
aauucaguguggcuaaaguuuaga

SEQ ID NO: 483829 - RNA, 18 nt, Artificial Sequence
  Synthetic
cacaauacacaguuuaga

SEQ ID NO: 483830 - RNA, 19 nt, Artificial Sequence
  Synthetic
ucacaauacacaguuuaga

SEQ ID NO: 483831 - RNA, 20 nt, Artificial Sequence
  Synthetic
aucacaauacacaguuuaga

SEQ ID NO: 483832 - RNA, 21 nt, Artificial Sequence
  Synthetic
uaucacaauacacaguuuaga

SEQ ID NO: 483833 - RNA, 22 nt, Artificial Sequence
  Synthetic
auaucacaauacacaguuuaga

SEQ ID NO: 483834 - RNA, 23 nt, Artificial Sequence
  Synthetic
uauaucacaauacacaguuuaga

SEQ ID NO: 483835 - RNA, 24 nt, Artificial Sequence
  Synthetic
uuauaucacaauacacaguuuaga

SEQ ID NO: 483836 - RNA, 18 nt, Artificial Sequence
  Synthetic
uggaggaacucguuuaga

SEQ ID NO: 483837 - RNA, 19 nt, Artificial Sequence
  Synthetic
auggaggaacucguuuaga

SEQ ID NO: 483838 - RNA, 20 nt, Artificial Sequence
  Synthetic
cauggaggaacucguuuaga

SEQ ID NO: 483839 - RNA, 21 nt, Artificial Sequence
  Synthetic
ccauggaggaacucguuuaga

SEQ ID NO: 483840 - RNA, 22 nt, Artificial Sequence
  Synthetic
cccauggaggaacucguuuaga

SEQ ID NO: 483841 - RNA, 23 nt, Artificial Sequence
  Synthetic
ucccauggaggaacucguuuaga

SEQ ID NO: 483842 - RNA, 24 nt, Artificial Sequence
  Synthetic
gucccauggaggaacucguuuaga

SEQ ID NO: 483843 - RNA, 18 nt, Artificial Sequence
  Synthetic
agucacuaaaauuuuaga

SEQ ID NO: 483844 - RNA, 19 nt, Artificial Sequence
  Synthetic
uagucacuaaaauuuuaga

SEQ ID NO: 483845 - RNA, 20 nt, Artificial Sequence
  Synthetic
guagucacuaaaauuuuaga

SEQ ID NO: 483846 - RNA, 21 nt, Artificial Sequence
  Synthetic
uguagucacuaaaauuuuaga

SEQ ID NO: 483847 - RNA, 22 nt, Artificial Sequence
  Synthetic
uuguagucacuaaaauuuuaga

SEQ ID NO: 483848 - RNA, 23 nt, Artificial Sequence
  Synthetic
auuguagucacuaaaauuuuaga

SEQ ID NO: 483849 - RNA, 24 nt, Artificial Sequence
  Synthetic
uauuguagucacuaaaauuuuaga

SEQ ID NO: 483850 - RNA, 18 nt, Artificial Sequence
  Synthetic
uggauauggaauuuuaga

SEQ ID NO: 483851 - RNA, 19 nt, Artificial Sequence
  Synthetic
guggauauggaauuuuaga

SEQ ID NO: 483852 - RNA, 20 nt, Artificial Sequence
  Synthetic
uguggauauggaauuuuaga

SEQ ID NO: 483853 - RNA, 21 nt, Artificial Sequence
  Synthetic
uuguggauauggaauuuuaga

SEQ ID NO: 483854 - RNA, 22 nt, Artificial Sequence
  Synthetic
auuguggauauggaauuuuaga

SEQ ID NO: 483855 - RNA, 23 nt, Artificial Sequence
  Synthetic
gauuguggauauggaauuuuaga

SEQ ID NO: 483856 - RNA, 24 nt, Artificial Sequence
  Synthetic
ggauuguggauauggaauuuuaga

SEQ ID NO: 483857 - RNA, 18 nt, Artificial Sequence
  Synthetic
ugggcuuuagcuuuuaga

SEQ ID NO: 483858 - RNA, 19 nt, Artificial Sequence
  Synthetic
cugggcuuuagcuuuuaga

SEQ ID NO: 483859 - RNA, 20 nt, Artificial Sequence
  Synthetic
ccugggcuuuagcuuuuaga

SEQ ID NO: 483860 - RNA, 21 nt, Artificial Sequence
  Synthetic
accugggcuuuagcuuuuaga

SEQ ID NO: 483861 - RNA, 22 nt, Artificial Sequence
  Synthetic
caccugggcuuuagcuuuuaga

SEQ ID NO: 483862 - RNA, 23 nt, Artificial Sequence
  Synthetic
acaccugggcuuuagcuuuuaga

SEQ ID NO: 483863 - RNA, 24 nt, Artificial Sequence
  Synthetic
cacaccugggcuuuagcuuuuaga

SEQ ID NO: 483864 - RNA, 18 nt, Artificial Sequence
  Synthetic
cuucuacuggcuuuuaga

SEQ ID NO: 483865 - RNA, 19 nt, Artificial Sequence
  Synthetic
gcuucuacuggcuuuuaga

SEQ ID NO: 483866 - RNA, 20 nt, Artificial Sequence
  Synthetic
ggcuucuacuggcuuuuaga

SEQ ID NO: 483867 - RNA, 21 nt, Artificial Sequence
  Synthetic
aggcuucuacuggcuuuuaga

SEQ ID NO: 483868 - RNA, 22 nt, Artificial Sequence
  Synthetic
gaggcuucuacuggcuuuuaga

SEQ ID NO: 483869 - RNA, 23 nt, Artificial Sequence
  Synthetic
agaggcuucuacuggcuuuuaga

SEQ ID NO: 483870 - RNA, 24 nt, Artificial Sequence
  Synthetic
cagaggcuucuacuggcuuuuaga

SEQ ID NO: 483871 - RNA, 18 nt, Artificial Sequence
  Synthetic
cagauaggcaguuuuaga

SEQ ID NO: 483872 - RNA, 19 nt, Artificial Sequence
  Synthetic
ucagauaggcaguuuuaga

SEQ ID NO: 483873 - RNA, 20 nt, Artificial Sequence
  Synthetic
gucagauaggcaguuuuaga

SEQ ID NO: 483874 - RNA, 21 nt, Artificial Sequence
  Synthetic
agucagauaggcaguuuuaga

SEQ ID NO: 483875 - RNA, 22 nt, Artificial Sequence
  Synthetic
cagucagauaggcaguuuuaga

SEQ ID NO: 483876 - RNA, 23 nt, Artificial Sequence
  Synthetic
acagucagauaggcaguuuuaga

SEQ ID NO: 483877 - RNA, 24 nt, Artificial Sequence
  Synthetic
cacagucagauaggcaguuuuaga

SEQ ID NO: 483878 - RNA, 18 nt, Artificial Sequence
  Synthetic
aaucaaaacauuuuuaga

SEQ ID NO: 483879 - RNA, 19 nt, Artificial Sequence
  Synthetic
aaaucaaaacauuuuuaga

SEQ ID NO: 483880 - RNA, 20 nt, Artificial Sequence
  Synthetic
uaaaucaaaacauuuuuaga

SEQ ID NO: 483881 - RNA, 21 nt, Artificial Sequence
  Synthetic
guaaaucaaaacauuuuuaga

SEQ ID NO: 483882 - RNA, 22 nt, Artificial Sequence
  Synthetic
uguaaaucaaaacauuuuuaga

SEQ ID NO: 483883 - RNA, 23 nt, Artificial Sequence
  Synthetic
uuguaaaucaaaacauuuuuaga

SEQ ID NO: 483884 - RNA, 24 nt, Artificial Sequence
  Synthetic
auuguaaaucaaaacauuuuuaga

SEQ ID NO: 483885 - RNA, 18 nt, Artificial Sequence
  Synthetic
uagaauuuuggaaaacga

SEQ ID NO: 483886 - RNA, 19 nt, Artificial Sequence
  Synthetic
uuagaauuuuggaaaacga

SEQ ID NO: 483887 - RNA, 20 nt, Artificial Sequence
  Synthetic
guuagaauuuuggaaaacga

SEQ ID NO: 483888 - RNA, 21 nt, Artificial Sequence
  Synthetic
aguuagaauuuuggaaaacga

SEQ ID NO: 483889 - RNA, 22 nt, Artificial Sequence
  Synthetic
aaguuagaauuuuggaaaacga

SEQ ID NO: 483890 - RNA, 23 nt, Artificial Sequence
  Synthetic
aaaguuagaauuuuggaaaacga

SEQ ID NO: 483891 - RNA, 24 nt, Artificial Sequence
  Synthetic
aaaaguuagaauuuuggaaaacga

SEQ ID NO: 483892 - RNA, 18 nt, Artificial Sequence
  Synthetic
cucugaaaggacaaacga

SEQ ID NO: 483893 - RNA, 19 nt, Artificial Sequence
  Synthetic
acucugaaaggacaaacga

SEQ ID NO: 483894 - RNA, 20 nt, Artificial Sequence
  Synthetic
aacucugaaaggacaaacga

SEQ ID NO: 483895 - RNA, 21 nt, Artificial Sequence
  Synthetic
aaacucugaaaggacaaacga

SEQ ID NO: 483896 - RNA, 22 nt, Artificial Sequence
  Synthetic
gaaacucugaaaggacaaacga

SEQ ID NO: 483897 - RNA, 23 nt, Artificial Sequence
  Synthetic
ugaaacucugaaaggacaaacga

SEQ ID NO: 483898 - RNA, 24 nt, Artificial Sequence
  Synthetic
uugaaacucugaaaggacaaacga

SEQ ID NO: 483899 - RNA, 18 nt, Artificial Sequence
  Synthetic
cuacuuaaagucaaacga

SEQ ID NO: 483900 - RNA, 19 nt, Artificial Sequence
  Synthetic
acuacuuaaagucaaacga

SEQ ID NO: 483901 - RNA, 20 nt, Artificial Sequence
  Synthetic
aacuacuuaaagucaaacga

SEQ ID NO: 483902 - RNA, 21 nt, Artificial Sequence
  Synthetic
caacuacuuaaagucaaacga

SEQ ID NO: 483903 - RNA, 22 nt, Artificial Sequence
  Synthetic
ucaacuacuuaaagucaaacga

SEQ ID NO: 483904 - RNA, 23 nt, Artificial Sequence
  Synthetic
uucaacuacuuaaagucaaacga

SEQ ID NO: 483905 - RNA, 24 nt, Artificial Sequence
  Synthetic
guucaacuacuuaaagucaaacga

SEQ ID NO: 483906 - RNA, 18 nt, Artificial Sequence
  Synthetic
ugggaucuaauuaaacga

SEQ ID NO: 483907 - RNA, 19 nt, Artificial Sequence
  Synthetic
augggaucuaauuaaacga

SEQ ID NO: 483908 - RNA, 20 nt, Artificial Sequence
  Synthetic
aaugggaucuaauuaaacga

SEQ ID NO: 483909 - RNA, 21 nt, Artificial Sequence
  Synthetic
aaaugggaucuaauuaaacga

SEQ ID NO: 483910 - RNA, 22 nt, Artificial Sequence
  Synthetic
caaaugggaucuaauuaaacga

SEQ ID NO: 483911 - RNA, 23 nt, Artificial Sequence
  Synthetic
acaaaugggaucuaauuaaacga

SEQ ID NO: 483912 - RNA, 24 nt, Artificial Sequence
  Synthetic
gacaaaugggaucuaauuaaacga

SEQ ID NO: 483913 - RNA, 18 nt, Artificial Sequence
  Synthetic
ccccuguuggggcaacga

SEQ ID NO: 483914 - RNA, 19 nt, Artificial Sequence
  Synthetic
uccccuguuggggcaacga

SEQ ID NO: 483915 - RNA, 20 nt, Artificial Sequence
  Synthetic
guccccuguuggggcaacga

SEQ ID NO: 483916 - RNA, 21 nt, Artificial Sequence
  Synthetic
uguccccuguuggggcaacga

SEQ ID NO: 483917 - RNA, 22 nt, Artificial Sequence
  Synthetic
auguccccuguuggggcaacga

SEQ ID NO: 483918 - RNA, 23 nt, Artificial Sequence
  Synthetic
gauguccccuguuggggcaacga

SEQ ID NO: 483919 - RNA, 24 nt, Artificial Sequence
  Synthetic
agauguccccuguuggggcaacga

SEQ ID NO: 483920 - RNA, 18 nt, Artificial Sequence
  Synthetic
uuguuucguucucaacga

SEQ ID NO: 483921 - RNA, 19 nt, Artificial Sequence
  Synthetic
uuuguuucguucucaacga

SEQ ID NO: 483922 - RNA, 20 nt, Artificial Sequence
  Synthetic
cuuuguuucguucucaacga

SEQ ID NO: 483923 - RNA, 21 nt, Artificial Sequence
  Synthetic
ucuuuguuucguucucaacga

SEQ ID NO: 483924 - RNA, 22 nt, Artificial Sequence
  Synthetic
gucuuuguuucguucucaacga

SEQ ID NO: 483925 - RNA, 23 nt, Artificial Sequence
  Synthetic
ugucuuuguuucguucucaacga

SEQ ID NO: 483926 - RNA, 24 nt, Artificial Sequence
  Synthetic
augucuuuguuucguucucaacga

SEQ ID NO: 483927 - RNA, 18 nt, Artificial Sequence
  Synthetic
ccacacugcuuucaacga

SEQ ID NO: 483928 - RNA, 19 nt, Artificial Sequence
  Synthetic
accacacugcuuucaacga

SEQ ID NO: 483929 - RNA, 20 nt, Artificial Sequence
  Synthetic
caccacacugcuuucaacga

SEQ ID NO: 483930 - RNA, 21 nt, Artificial Sequence
  Synthetic
ucaccacacugcuuucaacga

SEQ ID NO: 483931 - RNA, 22 nt, Artificial Sequence
  Synthetic
aucaccacacugcuuucaacga

SEQ ID NO: 483932 - RNA, 23 nt, Artificial Sequence
  Synthetic
aaucaccacacugcuuucaacga

SEQ ID NO: 483933 - RNA, 24 nt, Artificial Sequence
  Synthetic
aaaucaccacacugcuuucaacga

SEQ ID NO: 483934 - RNA, 18 nt, Artificial Sequence
  Synthetic
acaggagaaggagaacga

SEQ ID NO: 483935 - RNA, 19 nt, Artificial Sequence
  Synthetic
aacaggagaaggagaacga

SEQ ID NO: 483936 - RNA, 20 nt, Artificial Sequence
  Synthetic
aaacaggagaaggagaacga

SEQ ID NO: 483937 - RNA, 21 nt, Artificial Sequence
  Synthetic
aaaacaggagaaggagaacga

SEQ ID NO: 483938 - RNA, 22 nt, Artificial Sequence
  Synthetic
aaaaacaggagaaggagaacga

SEQ ID NO: 483939 - RNA, 23 nt, Artificial Sequence
  Synthetic
gaaaaacaggagaaggagaacga

SEQ ID NO: 483940 - RNA, 24 nt, Artificial Sequence
  Synthetic
agaaaaacaggagaaggagaacga

SEQ ID NO: 483941 - RNA, 18 nt, Artificial Sequence
  Synthetic
uaggaaaagcaauaacga

SEQ ID NO: 483942 - RNA, 19 nt, Artificial Sequence
  Synthetic
uuaggaaaagcaauaacga

SEQ ID NO: 483943 - RNA, 20 nt, Artificial Sequence
  Synthetic
uuuaggaaaagcaauaacga

SEQ ID NO: 483944 - RNA, 21 nt, Artificial Sequence
  Synthetic
cuuuaggaaaagcaauaacga

SEQ ID NO: 483945 - RNA, 22 nt, Artificial Sequence
  Synthetic
ucuuuaggaaaagcaauaacga

SEQ ID NO: 483946 - RNA, 23 nt, Artificial Sequence
  Synthetic
gucuuuaggaaaagcaauaacga

SEQ ID NO: 483947 - RNA, 24 nt, Artificial Sequence
  Synthetic
agucuuuaggaaaagcaauaacga

SEQ ID NO: 483948 - RNA, 18 nt, Artificial Sequence
  Synthetic
ggcagugcagaguaacga

SEQ ID NO: 483949 - RNA, 19 nt, Artificial Sequence
  Synthetic
aggcagugcagaguaacga

SEQ ID NO: 483950 - RNA, 20 nt, Artificial Sequence
  Synthetic
aaggcagugcagaguaacga

SEQ ID NO: 483951 - RNA, 21 nt, Artificial Sequence
  Synthetic
aaaggcagugcagaguaacga

SEQ ID NO: 483952 - RNA, 22 nt, Artificial Sequence
  Synthetic
gaaaggcagugcagaguaacga

SEQ ID NO: 483953 - RNA, 23 nt, Artificial Sequence
  Synthetic
agaaaggcagugcagaguaacga

SEQ ID NO: 483954 - RNA, 24 nt, Artificial Sequence
  Synthetic
aagaaaggcagugcagaguaacga

SEQ ID NO: 483955 - RNA, 18 nt, Artificial Sequence
  Synthetic
auucuauuuugaacacga

SEQ ID NO: 483956 - RNA, 19 nt, Artificial Sequence
  Synthetic
aauucuauuuugaacacga

SEQ ID NO: 483957 - RNA, 20 nt, Artificial Sequence
  Synthetic
aaauucuauuuugaacacga

SEQ ID NO: 483958 - RNA, 21 nt, Artificial Sequence
  Synthetic
aaaauucuauuuugaacacga

SEQ ID NO: 483959 - RNA, 22 nt, Artificial Sequence
  Synthetic
aaaaauucuauuuugaacacga

SEQ ID NO: 483960 - RNA, 23 nt, Artificial Sequence
  Synthetic
gaaaaauucuauuuugaacacga

SEQ ID NO: 483961 - RNA, 24 nt, Artificial Sequence
  Synthetic
agaaaaauucuauuuugaacacga

SEQ ID NO: 483962 - RNA, 18 nt, Artificial Sequence
  Synthetic
gaaaagaggaagacacga

SEQ ID NO: 483963 - RNA, 19 nt, Artificial Sequence
  Synthetic
ggaaaagaggaagacacga

SEQ ID NO: 483964 - RNA, 20 nt, Artificial Sequence
  Synthetic
aggaaaagaggaagacacga

SEQ ID NO: 483965 - RNA, 21 nt, Artificial Sequence
  Synthetic
aaggaaaagaggaagacacga

SEQ ID NO: 483966 - RNA, 22 nt, Artificial Sequence
  Synthetic
gaaggaaaagaggaagacacga

SEQ ID NO: 483967 - RNA, 23 nt, Artificial Sequence
  Synthetic
agaaggaaaagaggaagacacga

SEQ ID NO: 483968 - RNA, 24 nt, Artificial Sequence
  Synthetic
gagaaggaaaagaggaagacacga

SEQ ID NO: 483969 - RNA, 18 nt, Artificial Sequence
  Synthetic
uuucuacacuuuacacga

SEQ ID NO: 483970 - RNA, 19 nt, Artificial Sequence
  Synthetic
cuuucuacacuuuacacga

SEQ ID NO: 483971 - RNA, 20 nt, Artificial Sequence
  Synthetic
gcuuucuacacuuuacacga

SEQ ID NO: 483972 - RNA, 21 nt, Artificial Sequence
  Synthetic
ugcuuucuacacuuuacacga

SEQ ID NO: 483973 - RNA, 22 nt, Artificial Sequence
  Synthetic
cugcuuucuacacuuuacacga

SEQ ID NO: 483974 - RNA, 23 nt, Artificial Sequence
  Synthetic
ucugcuuucuacacuuuacacga

SEQ ID NO: 483975 - RNA, 24 nt, Artificial Sequence
  Synthetic
uucugcuuucuacacuuuacacga

SEQ ID NO: 483976 - RNA, 18 nt, Artificial Sequence
  Synthetic
gaggacauuauaccacga

SEQ ID NO: 483977 - RNA, 19 nt, Artificial Sequence
  Synthetic
ggaggacauuauaccacga

SEQ ID NO: 483978 - RNA, 20 nt, Artificial Sequence
  Synthetic
aggaggacauuauaccacga

SEQ ID NO: 483979 - RNA, 21 nt, Artificial Sequence
  Synthetic
aaggaggacauuauaccacga

SEQ ID NO: 483980 - RNA, 22 nt, Artificial Sequence
  Synthetic
caaggaggacauuauaccacga

SEQ ID NO: 483981 - RNA, 23 nt, Artificial Sequence
  Synthetic
acaaggaggacauuauaccacga

SEQ ID NO: 483982 - RNA, 24 nt, Artificial Sequence
  Synthetic
gacaaggaggacauuauaccacga

SEQ ID NO: 483983 - RNA, 18 nt, Artificial Sequence
  Synthetic
aaucauuugagcccacga

SEQ ID NO: 483984 - RNA, 19 nt, Artificial Sequence
  Synthetic
gaaucauuugagcccacga

SEQ ID NO: 483985 - RNA, 20 nt, Artificial Sequence
  Synthetic
agaaucauuugagcccacga

SEQ ID NO: 483986 - RNA, 21 nt, Artificial Sequence
  Synthetic
gagaaucauuugagcccacga

SEQ ID NO: 483987 - RNA, 22 nt, Artificial Sequence
  Synthetic
ggagaaucauuugagcccacga

SEQ ID NO: 483988 - RNA, 23 nt, Artificial Sequence
  Synthetic
aggagaaucauuugagcccacga

SEQ ID NO: 483989 - RNA, 24 nt, Artificial Sequence
  Synthetic
caggagaaucauuugagcccacga

SEQ ID NO: 483990 - RNA, 18 nt, Artificial Sequence
  Synthetic
uucugccuucugccacga

SEQ ID NO: 483991 - RNA, 19 nt, Artificial Sequence
  Synthetic
guucugccuucugccacga

SEQ ID NO: 483992 - RNA, 20 nt, Artificial Sequence
  Synthetic
cguucugccuucugccacga

SEQ ID NO: 483993 - RNA, 21 nt, Artificial Sequence
  Synthetic
ccguucugccuucugccacga

SEQ ID NO: 483994 - RNA, 22 nt, Artificial Sequence
  Synthetic
cccguucugccuucugccacga

SEQ ID NO: 483995 - RNA, 23 nt, Artificial Sequence
  Synthetic
ucccguucugccuucugccacga

SEQ ID NO: 483996 - RNA, 24 nt, Artificial Sequence
  Synthetic
cucccguucugccuucugccacga

SEQ ID NO: 483997 - RNA, 18 nt, Artificial Sequence
  Synthetic
uaguuucaucuuccacga

SEQ ID NO: 483998 - RNA, 19 nt, Artificial Sequence
  Synthetic
guaguuucaucuuccacga

SEQ ID NO: 483999 - RNA, 20 nt, Artificial Sequence
  Synthetic
aguaguuucaucuuccacga

SEQ ID NO: 484000 - RNA, 21 nt, Artificial Sequence
  Synthetic
aaguaguuucaucuuccacga

SEQ ID NO: 484001 - RNA, 22 nt, Artificial Sequence
  Synthetic
caaguaguuucaucuuccacga

SEQ ID NO: 484002 - RNA, 23 nt, Artificial Sequence
  Synthetic
gcaaguaguuucaucuuccacga

SEQ ID NO: 484003 - RNA, 24 nt, Artificial Sequence
  Synthetic
ugcaaguaguuucaucuuccacga

SEQ ID NO: 484004 - RNA, 18 nt, Artificial Sequence
  Synthetic
uaaaacacaggugcacga

SEQ ID NO: 484005 - RNA, 19 nt, Artificial Sequence
  Synthetic
uuaaaacacaggugcacga

SEQ ID NO: 484006 - RNA, 20 nt, Artificial Sequence
  Synthetic
auuaaaacacaggugcacga

SEQ ID NO: 484007 - RNA, 21 nt, Artificial Sequence
  Synthetic
uauuaaaacacaggugcacga

SEQ ID NO: 484008 - RNA, 22 nt, Artificial Sequence
  Synthetic
uuauuaaaacacaggugcacga

SEQ ID NO: 484009 - RNA, 23 nt, Artificial Sequence
  Synthetic
cuuauuaaaacacaggugcacga

SEQ ID NO: 484010 - RNA, 24 nt, Artificial Sequence
  Synthetic
ucuuauuaaaacacaggugcacga

SEQ ID NO: 484011 - RNA, 18 nt, Artificial Sequence
  Synthetic
uauaggccaauaucacga

SEQ ID NO: 484012 - RNA, 19 nt, Artificial Sequence
  Synthetic
cuauaggccaauaucacga

SEQ ID NO: 484013 - RNA, 20 nt, Artificial Sequence
  Synthetic
acuauaggccaauaucacga

SEQ ID NO: 484014 - RNA, 21 nt, Artificial Sequence
  Synthetic
aacuauaggccaauaucacga

SEQ ID NO: 484015 - RNA, 22 nt, Artificial Sequence
  Synthetic
aaacuauaggccaauaucacga

SEQ ID NO: 484016 - RNA, 23 nt, Artificial Sequence
  Synthetic
aaaacuauaggccaauaucacga

SEQ ID NO: 484017 - RNA, 24 nt, Artificial Sequence
  Synthetic
gaaaacuauaggccaauaucacga

SEQ ID NO: 484018 - RNA, 18 nt, Artificial Sequence
  Synthetic
aucagacuuaauucacga

SEQ ID NO: 484019 - RNA, 19 nt, Artificial Sequence
  Synthetic
uaucagacuuaauucacga

SEQ ID NO: 484020 - RNA, 20 nt, Artificial Sequence
  Synthetic
guaucagacuuaauucacga

SEQ ID NO: 484021 - RNA, 21 nt, Artificial Sequence
  Synthetic
uguaucagacuuaauucacga

SEQ ID NO: 484022 - RNA, 22 nt, Artificial Sequence
  Synthetic
uuguaucagacuuaauucacga

SEQ ID NO: 484023 - RNA, 23 nt, Artificial Sequence
  Synthetic
uuuguaucagacuuaauucacga

SEQ ID NO: 484024 - RNA, 24 nt, Artificial Sequence
  Synthetic
auuuguaucagacuuaauucacga

SEQ ID NO: 484025 - RNA, 18 nt, Artificial Sequence
  Synthetic
acuauaagacacugacga

SEQ ID NO: 484026 - RNA, 19 nt, Artificial Sequence
  Synthetic
aacuauaagacacugacga

SEQ ID NO: 484027 - RNA, 20 nt, Artificial Sequence
  Synthetic
aaacuauaagacacugacga

SEQ ID NO: 484028 - RNA, 21 nt, Artificial Sequence
  Synthetic
gaaacuauaagacacugacga

SEQ ID NO: 484029 - RNA, 22 nt, Artificial Sequence
  Synthetic
ugaaacuauaagacacugacga

SEQ ID NO: 484030 - RNA, 23 nt, Artificial Sequence
  Synthetic
uugaaacuauaagacacugacga

SEQ ID NO: 484031 - RNA, 24 nt, Artificial Sequence
  Synthetic
guugaaacuauaagacacugacga

SEQ ID NO: 484032 - RNA, 18 nt, Artificial Sequence
  Synthetic
auuagcuacacuugacga

SEQ ID NO: 484033 - RNA, 19 nt, Artificial Sequence
  Synthetic
cauuagcuacacuugacga

SEQ ID NO: 484034 - RNA, 20 nt, Artificial Sequence
  Synthetic
ucauuagcuacacuugacga

SEQ ID NO: 484035 - RNA, 21 nt, Artificial Sequence
  Synthetic
gucauuagcuacacuugacga

SEQ ID NO: 484036 - RNA, 22 nt, Artificial Sequence
  Synthetic
agucauuagcuacacuugacga

SEQ ID NO: 484037 - RNA, 23 nt, Artificial Sequence
  Synthetic
uagucauuagcuacacuugacga

SEQ ID NO: 484038 - RNA, 24 nt, Artificial Sequence
  Synthetic
guagucauuagcuacacuugacga

SEQ ID NO: 484039 - RNA, 18 nt, Artificial Sequence
  Synthetic
cuguucaagaaaauacga

SEQ ID NO: 484040 - RNA, 19 nt, Artificial Sequence
  Synthetic
acuguucaagaaaauacga
